United States Patent Application Publication US 2015/0141320 A1 - sequence listing, part 33

SEQ ID NO: 1231270 - DNA, 15 bp, Homo sapiens
cgaggtagaaggagt

SEQ ID NO: 1231271 - DNA, 15 bp, Homo sapiens
gcgaggtagaaggag

SEQ ID NO: 1231272 - DNA, 15 bp, Homo sapiens
ggcgaggtagaagga

SEQ ID NO: 1231273 - DNA, 15 bp, Homo sapiens
cggcgaggtagaagg

SEQ ID NO: 1231274 - DNA, 15 bp, Homo sapiens
ccggcgaggtagaag

SEQ ID NO: 1231275 - DNA, 15 bp, Homo sapiens
cccggcgaggtagaa

SEQ ID NO: 1231276 - DNA, 15 bp, Homo sapiens
ccccggcgaggtaga

SEQ ID NO: 1231277 - DNA, 15 bp, Homo sapiens
cccccggcgaggtag

SEQ ID NO: 1231278 - DNA, 15 bp, Homo sapiens
gcccccggcgaggta

SEQ ID NO: 1231279 - DNA, 15 bp, Homo sapiens
agcccccggcgaggt

SEQ ID NO: 1231280 - DNA, 15 bp, Homo sapiens
aagcccccggcgagg

SEQ ID NO: 1231281 - DNA, 15 bp, Homo sapiens
gaagcccccggcgag

SEQ ID NO: 1231282 - DNA, 15 bp, Homo sapiens
tgaagcccccggcga

SEQ ID NO: 1231283 - DNA, 15 bp, Homo sapiens
atgaagcccccggcg

SEQ ID NO: 1231284 - DNA, 15 bp, Homo sapiens
catgaagcccccggc

SEQ ID NO: 1231285 - DNA, 15 bp, Homo sapiens
tcatgaagcccccgg

SEQ ID NO: 1231286 - DNA, 15 bp, Homo sapiens
atcatgaagcccccg

SEQ ID NO: 1231287 - DNA, 15 bp, Homo sapiens
tatcatgaagccccc

SEQ ID NO: 1231288 - DNA, 15 bp, Homo sapiens
ttatcatgaagcccc

SEQ ID NO: 1231289 - DNA, 15 bp, Homo sapiens
tttatcatgaagccc

SEQ ID NO: 1231290 - DNA, 15 bp, Homo sapiens
gtttatcatgaagcc

SEQ ID NO: 1231291 - DNA, 15 bp, Homo sapiens
agtttatcatgaagc

SEQ ID NO: 1231292 - DNA, 15 bp, Homo sapiens
aagtttatcatgaag

SEQ ID NO: 1231293 - DNA, 15 bp, Homo sapiens
caagtttatcatgaa

SEQ ID NO: 1231294 - DNA, 15 bp, Homo sapiens
tcaagtttatcatga

SEQ ID NO: 1231295 - DNA, 15 bp, Homo sapiens
ctcaagtttatcatg

SEQ ID NO: 1231296 - DNA, 15 bp, Homo sapiens
gctcaagtttatcat

SEQ ID NO: 1231297 - DNA, 15 bp, Homo sapiens
tgctcaagtttatca

SEQ ID NO: 1231298 - DNA, 15 bp, Homo sapiens
ctgctcaagtttatc

SEQ ID NO: 1231299 - DNA, 15 bp, Homo sapiens
gctgctcaagtttat

SEQ ID NO: 1231300 - DNA, 15 bp, Homo sapiens
ggctgctcaagttta

SEQ ID NO: 1231301 - DNA, 15 bp, Homo sapiens
aggctgctcaagttt

SEQ ID NO: 1231302 - DNA, 15 bp, Homo sapiens
caggctgctcaagtt

SEQ ID NO: 1231303 - DNA, 15 bp, Homo sapiens
acaggctgctcaagt

SEQ ID NO: 1231304 - DNA, 15 bp, Homo sapiens
cacaggctgctcaag

SEQ ID NO: 1231305 - DNA, 15 bp, Homo sapiens
ccacaggctgctcaa

SEQ ID NO: 1231306 - DNA, 15 bp, Homo sapiens
tccacaggctgctca

SEQ ID NO: 1231307 - DNA, 15 bp, Homo sapiens
gtccacaggctgctc

SEQ ID NO: 1231308 - DNA, 15 bp, Homo sapiens
tgtccacaggctgct

SEQ ID NO: 1231309 - DNA, 15 bp, Homo sapiens
ctgtccacaggctgc

SEQ ID NO: 1231310 - DNA, 15 bp, Homo sapiens
cctgtccacaggctg

SEQ ID NO: 1231311 - DNA, 15 bp, Homo sapiens
acctgtccacaggct

SEQ ID NO: 1231312 - DNA, 15 bp, Homo sapiens
tacctgtccacaggc

SEQ ID NO: 1231313 - DNA, 15 bp, Homo sapiens
ttacctgtccacagg

SEQ ID NO: 1231314 - DNA, 15 bp, Homo sapiens
cttacctgtccacag

SEQ ID NO: 1231315 - DNA, 15 bp, Homo sapiens
ccttacctgtccaca

SEQ ID NO: 1231316 - DNA, 15 bp, Homo sapiens
gccttacctgtccac

SEQ ID NO: 1231317 - DNA, 15 bp, Homo sapiens
ggccttacctgtcca

SEQ ID NO: 1231318 - DNA, 15 bp, Homo sapiens
ggcaggccttacctg

SEQ ID NO: 1231319 - DNA, 15 bp, Homo sapiens
gggcaggccttacct

SEQ ID NO: 1231320 - DNA, 15 bp, Homo sapiens
ggggcaggccttacc

SEQ ID NO: 1231321 - DNA, 15 bp, Homo sapiens
gggggcaggccttac

SEQ ID NO: 1231322 - DNA, 15 bp, Homo sapiens
cgggggcaggcctta

SEQ ID NO: 1231323 - DNA, 15 bp, Homo sapiens
ccgggggcaggcctt

SEQ ID NO: 1231324 - DNA, 15 bp, Homo sapiens
cccgggggcaggcct

SEQ ID NO: 1231325 - DNA, 15 bp, Homo sapiens
ccccgggggcaggcc

SEQ ID NO: 1231326 - DNA, 15 bp, Homo sapiens
gccccgggggcaggc

SEQ ID NO: 1231327 - DNA, 15 bp, Homo sapiens
ggccccgggggcagg

SEQ ID NO: 1231328 - DNA, 15 bp, Homo sapiens
aggccccgggggcag

SEQ ID NO: 1231329 - DNA, 15 bp, Homo sapiens
caggccccgggggca

SEQ ID NO: 1231330 - DNA, 15 bp, Homo sapiens
ccaggccccgggggc

SEQ ID NO: 1231331 - DNA, 15 bp, Homo sapiens
cccaggccccggggg

SEQ ID NO: 1231332 - DNA, 15 bp, Homo sapiens
gcccaggccccgggg

SEQ ID NO: 1231333 - DNA, 15 bp, Homo sapiens
ggcccaggccccggg

SEQ ID NO: 1231334 - DNA, 15 bp, Homo sapiens
tggcccaggccccgg

SEQ ID NO: 1231335 - DNA, 15 bp, Homo sapiens
ctggcccaggccccg

SEQ ID NO: 1231336 - DNA, 15 bp, Homo sapiens
gctggcccaggcccc

SEQ ID NO: 1231337 - DNA, 15 bp, Homo sapiens
agctggcccaggccc

SEQ ID NO: 1231338 - DNA, 15 bp, Homo sapiens
aagctggcccaggcc

SEQ ID NO: 1231339 - DNA, 15 bp, Homo sapiens
aaagctggcccaggc

SEQ ID NO: 1231340 - DNA, 15 bp, Homo sapiens
caaagctggcccagg

SEQ ID NO: 1231341 - DNA, 15 bp, Homo sapiens
acaaagctggcccag

SEQ ID NO: 1231342 - DNA, 15 bp, Homo sapiens
aacaaagctggccca

SEQ ID NO: 1231343 - DNA, 15 bp, Homo sapiens
taacaaagctggccc

SEQ ID NO: 1231344 - DNA, 15 bp, Homo sapiens
ctaacaaagctggcc

SEQ ID NO: 1231345 - DNA, 15 bp, Homo sapiens
cctaacaaagctggc

SEQ ID NO: 1231346 - DNA, 15 bp, Homo sapiens
tcctaacaaagctgg

SEQ ID NO: 1231347 - DNA, 15 bp, Homo sapiens
gtcctaacaaagctg

SEQ ID NO: 1231348 - DNA, 15 bp, Homo sapiens
agtcctaacaaagct

SEQ ID NO: 1231349 - DNA, 15 bp, Homo sapiens
gagtcctaacaaagc

SEQ ID NO: 1231350 - DNA, 15 bp, Homo sapiens
tgagtcctaacaaag

SEQ ID NO: 1231351 - DNA, 15 bp, Homo sapiens
atgagtcctaacaaa

SEQ ID NO: 1231352 - DNA, 15 bp, Homo sapiens
catgagtcctaacaa

SEQ ID NO: 1231353 - DNA, 15 bp, Homo sapiens
acatgagtcctaaca

SEQ ID NO: 1231354 - DNA, 15 bp, Homo sapiens
cacatgagtcctaac

SEQ ID NO: 1231355 - DNA, 15 bp, Homo sapiens
tcacatgagtcctaa

SEQ ID NO: 1231356 - DNA, 15 bp, Homo sapiens
gtcacatgagtccta

SEQ ID NO: 1231357 - DNA, 15 bp, Homo sapiens
agtcacatgagtcct

SEQ ID NO: 1231358 - DNA, 15 bp, Homo sapiens
cagtcacatgagtcc

SEQ ID NO: 1231359 - DNA, 15 bp, Homo sapiens
ccagtcacatgagtc

SEQ ID NO: 1231360 - DNA, 15 bp, Homo sapiens
tccagtcacatgagt

SEQ ID NO: 1231361 - DNA, 15 bp, Homo sapiens
atccagtcacatgag

SEQ ID NO: 1231362 - DNA, 15 bp, Homo sapiens
catccagtcacatga

SEQ ID NO: 1231363 - DNA, 15 bp, Homo sapiens
tcatccagtcacatg

SEQ ID NO: 1231364 - DNA, 15 bp, Homo sapiens
ttcatccagtcacat

SEQ ID NO: 1231365 - DNA, 15 bp, Homo sapiens
cttcatccagtcaca

SEQ ID NO: 1231366 - DNA, 15 bp, Homo sapiens
gcttcatccagtcac

SEQ ID NO: 1231367 - DNA, 15 bp, Homo sapiens
ggcttcatccagtca

SEQ ID NO: 1231368 - DNA, 15 bp, Homo sapiens
aggcttcatccagtc

SEQ ID NO: 1231369 - DNA, 15 bp, Homo sapiens
caggcttcatccagt

SEQ ID NO: 1231370 - DNA, 15 bp, Homo sapiens
gcaggcttcatccag

SEQ ID NO: 1231371 - DNA, 15 bp, Homo sapiens
agcaggcttcatcca

SEQ ID NO: 1231372 - DNA, 15 bp, Homo sapiens
aagcaggcttcatcc

SEQ ID NO: 1231373 - DNA, 15 bp, Homo sapiens
aaagcaggcttcatc

SEQ ID NO: 1231374 - DNA, 15 bp, Homo sapiens
gaaagcaggcttcat

SEQ ID NO: 1231375 - DNA, 15 bp, Homo sapiens
tgaaagcaggcttca

SEQ ID NO: 1231376 - DNA, 15 bp, Homo sapiens
atgaaagcaggcttc

SEQ ID NO: 1231377 - DNA, 15 bp, Homo sapiens
gatgaaagcaggctt

SEQ ID NO: 1231378 - DNA, 15 bp, Homo sapiens
agatgaaagcaggct

SEQ ID NO: 1231379 - DNA, 15 bp, Homo sapiens
cagatgaaagcaggc

SEQ ID NO: 1231380 - DNA, 15 bp, Homo sapiens
ccagatgaaagcagg

SEQ ID NO: 1231381 - DNA, 15 bp, Homo sapiens
tccagatgaaagcag

SEQ ID NO: 1231382 - DNA, 15 bp, Homo sapiens
ctccagatgaaagca

SEQ ID NO: 1231383 - DNA, 15 bp, Homo sapiens
tctccagatgaaagc

SEQ ID NO: 1231384 - DNA, 15 bp, Homo sapiens
atctccagatgaaag

SEQ ID NO: 1231385 - DNA, 15 bp, Homo sapiens
catctccagatgaaa

SEQ ID NO: 1231386 - DNA, 15 bp, Homo sapiens
ccatctccagatgaa

SEQ ID NO: 1231387 - DNA, 15 bp, Homo sapiens
tccatctccagatga

SEQ ID NO: 1231388 - DNA, 15 bp, Homo sapiens
gtccatctccagatg

SEQ ID NO: 1231389 - DNA, 15 bp, Homo sapiens
tgtccatctccagat

SEQ ID NO: 1231390 - DNA, 15 bp, Homo sapiens
gtgtccatctccaga

SEQ ID NO: 1231391 - DNA, 15 bp, Homo sapiens
agtgtccatctccag

SEQ ID NO: 1231392 - DNA, 15 bp, Homo sapiens
aagtgtccatctcca

SEQ ID NO: 1231393 - DNA, 15 bp, Homo sapiens
taagtgtccatctcc

SEQ ID NO: 1231394 - DNA, 15 bp, Homo sapiens
ataagtgtccatctc

SEQ ID NO: 1231395 - DNA, 15 bp, Homo sapiens
gataagtgtccatct

SEQ ID NO: 1231396 - DNA, 15 bp, Homo sapiens
tgataagtgtccatc

SEQ ID NO: 1231397 - DNA, 15 bp, Homo sapiens
gtgataagtgtccat

SEQ ID NO: 1231398 - DNA, 15 bp, Homo sapiens
agtgataagtgtcca

SEQ ID NO: 1231399 - DNA, 15 bp, Homo sapiens
aagtgataagtgtcc

SEQ ID NO: 1231400 - DNA, 15 bp, Homo sapiens
taagtgataagtgtc

SEQ ID NO: 1231401 - DNA, 15 bp, Homo sapiens
ctaagtgataagtgt

SEQ ID NO: 1231402 - DNA, 15 bp, Homo sapiens
tctaagtgataagtg

SEQ ID NO: 1231403 - DNA, 15 bp, Homo sapiens
atctaagtgataagt

SEQ ID NO: 1231404 - DNA, 15 bp, Homo sapiens
gatctaagtgataag

SEQ ID NO: 1231405 - DNA, 15 bp, Homo sapiens
ggatctaagtgataa

SEQ ID NO: 1231406 - DNA, 15 bp, Homo sapiens
tggatctaagtgata

SEQ ID NO: 1231407 - DNA, 15 bp, Homo sapiens
ttggatctaagtgat

SEQ ID NO: 1231408 - DNA, 15 bp, Homo sapiens
gttggatctaagtga

SEQ ID NO: 1231409 - DNA, 15 bp, Homo sapiens
agttggatctaagtg

SEQ ID NO: 1231410 - DNA, 15 bp, Homo sapiens
gagttggatctaagt

SEQ ID NO: 1231411 - DNA, 15 bp, Homo sapiens
cgagttggatctaag

SEQ ID NO: 1231412 - DNA, 15 bp, Homo sapiens
tcgagttggatctaa

SEQ ID NO: 1231413 - DNA, 15 bp, Homo sapiens
ctcgagttggatcta

SEQ ID NO: 1231414 - DNA, 15 bp, Homo sapiens
cctcgagttggatct

SEQ ID NO: 1231415 - DNA, 15 bp, Homo sapiens
gcctcgagttggatc

SEQ ID NO: 1231416 - DNA, 15 bp, Homo sapiens
agcctcgagttggat

SEQ ID NO: 1231417 - DNA, 15 bp, Homo sapiens
cagcctcgagttgga

SEQ ID NO: 1231418 - DNA, 15 bp, Homo sapiens
ccagcctcgagttgg

SEQ ID NO: 1231419 - DNA, 15 bp, Homo sapiens
gccagcctcgagttg

SEQ ID NO: 1231420 - DNA, 15 bp, Homo sapiens
ggccagcctcgagtt

SEQ ID NO: 1231421 - DNA, 15 bp, Homo sapiens
gggccagcctcgagt

SEQ ID NO: 1231422 - DNA, 15 bp, Homo sapiens
agggccagcctcgag

SEQ ID NO: 1231423 - DNA, 15 bp, Homo sapiens
aagggccagcctcga

SEQ ID NO: 1231424 - DNA, 15 bp, Homo sapiens
gaagggccagcctcg

SEQ ID NO: 1231425 - DNA, 15 bp, Homo sapiens
agaagggccagcctc

SEQ ID NO: 1231426 - DNA, 15 bp, Homo sapiens
cagaagggccagcct

SEQ ID NO: 1231427 - DNA, 15 bp, Homo sapiens
ccagaagggccagcc

SEQ ID NO: 1231428 - DNA, 15 bp, Homo sapiens
tccagaagggccagc

SEQ ID NO: 1231429 - DNA, 15 bp, Homo sapiens
ttccagaagggccag

SEQ ID NO: 1231430 - DNA, 15 bp, Homo sapiens
cttccagaagggcca

SEQ ID NO: 1231431 - DNA, 15 bp, Homo sapiens
gcttccagaagggcc

SEQ ID NO: 1231432 - DNA, 15 bp, Homo sapiens
tgcttccagaagggc

SEQ ID NO: 1231433 - DNA, 15 bp, Homo sapiens
ctgcttccagaaggg

SEQ ID NO: 1231434 - DNA, 15 bp, Homo sapiens
tctgcttccagaagg

SEQ ID NO: 1231435 - DNA, 15 bp, Homo sapiens
ctctgcttccagaag

SEQ ID NO: 1231436 - DNA, 15 bp, Homo sapiens
cctctgcttccagaa

SEQ ID NO: 1231437 - DNA, 15 bp, Homo sapiens
gcctctgcttccaga

SEQ ID NO: 1231438 - DNA, 15 bp, Homo sapiens
ggcctctgcttccag

SEQ ID NO: 1231439 - DNA, 15 bp, Homo sapiens
aggcctctgcttcca

SEQ ID NO: 1231440 - DNA, 15 bp, Homo sapiens
aaggcctctgcttcc

SEQ ID NO: 1231441 - DNA, 15 bp, Homo sapiens
aaaggcctctgcttc

SEQ ID NO: 1231442 - DNA, 15 bp, Homo sapiens
caaaggcctctgctt

SEQ ID NO: 1231443 - DNA, 15 bp, Homo sapiens
gcaaaggcctctgct

SEQ ID NO: 1231444 - DNA, 15 bp, Homo sapiens
ggcaaaggcctctgc

SEQ ID NO: 1231445 - DNA, 15 bp, Homo sapiens
gggcaaaggcctctg

SEQ ID NO: 1231446 - DNA, 15 bp, Homo sapiens
tgggcaaaggcctct

SEQ ID NO: 1231447 - DNA, 15 bp, Homo sapiens
gtgggcaaaggcctc

SEQ ID NO: 1231448 - DNA, 15 bp, Homo sapiens
agtgggcaaaggcct

SEQ ID NO: 1231449 - DNA, 15 bp, Homo sapiens
cagtgggcaaaggcc

SEQ ID NO: 1231450 - DNA, 15 bp, Homo sapiens
gcagtgggcaaaggc

SEQ ID NO: 1231451 - DNA, 15 bp, Homo sapiens
ggcagtgggcaaagg

SEQ ID NO: 1231452 - DNA, 15 bp, Homo sapiens
gggcagtgggcaaag

SEQ ID NO: 1231453 - DNA, 15 bp, Homo sapiens
cagggcagtgggcaa

SEQ ID NO: 1231454 - DNA, 15 bp, Homo sapiens
ccagggcagtgggca

SEQ ID NO: 1231455 - DNA, 15 bp, Homo sapiens
tccagggcagtgggc

SEQ ID NO: 1231456 - DNA, 15 bp, Homo sapiens
ctccagggcagtggg

SEQ ID NO: 1231457 - DNA, 15 bp, Homo sapiens
cctccagggcagtgg

SEQ ID NO: 1231458 - DNA, 15 bp, Homo sapiens
gcctccagggcagtg

SEQ ID NO: 1231459 - DNA, 15 bp, Homo sapiens
ggcctccagggcagt

SEQ ID NO: 1231460 - DNA, 15 bp, Homo sapiens
tggcctccagggcag

SEQ ID NO: 1231461 - DNA, 15 bp, Homo sapiens
ttggcctccagggca

SEQ ID NO: 1231462 - DNA, 15 bp, Homo sapiens
tttggcctccagggc

SEQ ID NO: 1231463 - DNA, 15 bp, Homo sapiens
ctttggcctccaggg

SEQ ID NO: 1231464 - DNA, 15 bp, Homo sapiens
cctttggcctccagg

SEQ ID NO: 1231465 - DNA, 15 bp, Homo sapiens
tcctttggcctccag

SEQ ID NO: 1231466 - DNA, 15 bp, Homo sapiens
ttcctttggcctcca

SEQ ID NO: 1231467 - DNA, 15 bp, Homo sapiens
attcctttggcctcc

SEQ ID NO: 1231468 - DNA, 15 bp, Homo sapiens
cattcctttggcctc

SEQ ID NO: 1231469 - DNA, 15 bp, Homo sapiens
tcattcctttggcct

SEQ ID NO: 1231470 - DNA, 15 bp, Homo sapiens
atcattcctttggcc

SEQ ID NO: 1231471 - DNA, 15 bp, Homo sapiens
aatcattcctttggc

SEQ ID NO: 1231472 - DNA, 15 bp, Homo sapiens
gaatcattcctttgg

SEQ ID NO: 1231473 - DNA, 15 bp, Homo sapiens
ggaatcattcctttg

SEQ ID NO: 1231474 - DNA, 15 bp, Homo sapiens
tggaatcattccttt

SEQ ID NO: 1231475 - DNA, 15 bp, Homo sapiens
atggaatcattcctt

SEQ ID NO: 1231476 - DNA, 15 bp, Homo sapiens
aatggaatcattcct

SEQ ID NO: 1231477 - DNA, 15 bp, Homo sapiens
taatggaatcattcc

SEQ ID NO: 1231478 - DNA, 15 bp, Homo sapiens
ctaatggaatcattc

SEQ ID NO: 1231479 - DNA, 15 bp, Homo sapiens
tctaatggaatcatt

SEQ ID NO: 1231480 - DNA, 15 bp, Homo sapiens
ctctaatggaatcat

SEQ ID NO: 1231481 - DNA, 15 bp, Homo sapiens
tctctaatggaatca

SEQ ID NO: 1231482 - DNA, 15 bp, Homo sapiens
atctctaatggaatc

SEQ ID NO: 1231483 - DNA, 15 bp, Homo sapiens
aatctctaatggaat

SEQ ID NO: 1231484 - DNA, 15 bp, Homo sapiens
gaatctctaatggaa

SEQ ID NO: 1231485 - DNA, 15 bp, Homo sapiens
ggaatctctaatgga

SEQ ID NO: 1231486 - DNA, 15 bp, Homo sapiens
tggaatctctaatgg

SEQ ID NO: 1231487 - DNA, 15 bp, Homo sapiens
ctggaatctctaatg

SEQ ID NO: 1231488 - DNA, 15 bp, Homo sapiens
tctggaatctctaat

SEQ ID NO: 1231489 - DNA, 15 bp, Homo sapiens
atctggaatctctaa

SEQ ID NO: 1231490 - DNA, 15 bp, Homo sapiens
catctggaatctcta

SEQ ID NO: 1231491 - DNA, 15 bp, Homo sapiens
gcatctggaatctct

SEQ ID NO: 1231492 - DNA, 15 bp, Homo sapiens
tgcatctggaatctc

SEQ ID NO: 1231493 - DNA, 15 bp, Homo sapiens
gtgcatctggaatct

SEQ ID NO: 1231494 - DNA, 15 bp, Homo sapiens
ggtgcatctggaatc

SEQ ID NO: 1231495 - DNA, 15 bp, Homo sapiens
aggtgcatctggaat

SEQ ID NO: 1231496 - DNA, 15 bp, Homo sapiens
gaggtgcatctggaa

SEQ ID NO: 1231497 - DNA, 15 bp, Homo sapiens
ggaggtgcatctgga

SEQ ID NO: 1231498 - DNA, 15 bp, Homo sapiens
aggaggtgcatctgg

SEQ ID NO: 1231499 - DNA, 15 bp, Homo sapiens
gaggaggtgcatctg

SEQ ID NO: 1231500 - DNA, 15 bp, Homo sapiens
ggaggaggtgcatct

SEQ ID NO: 1231501 - DNA, 15 bp, Homo sapiens
aggaggaggtgcatc

SEQ ID NO: 1231502 - DNA, 15 bp, Homo sapiens
taggaggaggtgcat

SEQ ID NO: 1231503 - DNA, 15 bp, Homo sapiens
ataggaggaggtgca

SEQ ID NO: 1231504 - DNA, 15 bp, Homo sapiens
gataggaggaggtgc

SEQ ID NO: 1231505 - DNA, 15 bp, Homo sapiens
ggataggaggaggtg

SEQ ID NO: 1231506 - DNA, 15 bp, Homo sapiens
gggataggaggaggt

SEQ ID NO: 1231507 - DNA, 15 bp, Homo sapiens
tgggataggaggagg

SEQ ID NO: 1231508 - DNA, 15 bp, Homo sapiens
gtgggataggaggag

SEQ ID NO: 1231509 - DNA, 15 bp, Homo sapiens
tgtgggataggagga

SEQ ID NO: 1231510 - DNA, 15 bp, Homo sapiens
ctgtgggataggagg

SEQ ID NO: 1231511 - DNA, 15 bp, Homo sapiens
gctgtgggataggag

SEQ ID NO: 1231512 - DNA, 15 bp, Homo sapiens
agctgtgggatagga

SEQ ID NO: 1231513 - DNA, 15 bp, Homo sapiens
cagctgtgggatagg

SEQ ID NO: 1231514 - DNA, 15 bp, Homo sapiens
tcagctgtgggatag

SEQ ID NO: 1231515 - DNA, 15 bp, Homo sapiens
atcagctgtgggata

SEQ ID NO: 1231516 - DNA, 15 bp, Homo sapiens
tatcagctgtgggat

SEQ ID NO: 1231517 - DNA, 15 bp, Homo sapiens
atatcagctgtggga

SEQ ID NO: 1231518 - DNA, 15 bp, Homo sapiens
gatatcagctgtggg

SEQ ID NO: 1231519 - DNA, 15 bp, Homo sapiens
ggatatcagctgtgg

SEQ ID NO: 1231520 - DNA, 15 bp, Homo sapiens
tggatatcagctgtg

SEQ ID NO: 1231521 - DNA, 15 bp, Homo sapiens
ctggatatcagctgt

SEQ ID NO: 1231522 - DNA, 15 bp, Homo sapiens
tctggatatcagctg

SEQ ID NO: 1231523 - DNA, 15 bp, Homo sapiens
ttctggatatcagct

SEQ ID NO: 1231524 - DNA, 15 bp, Homo sapiens
cttctggatatcagc

SEQ ID NO: 1231525 - DNA, 15 bp, Homo sapiens
acttctggatatcag

SEQ ID NO: 1231526 - DNA, 15 bp, Homo sapiens
gacttctggatatca

SEQ ID NO: 1231527 - DNA, 15 bp, Homo sapiens
cgacttctggatatc

SEQ ID NO: 1231528 - DNA, 15 bp, Homo sapiens
gcgacttctggatat

SEQ ID NO: 1231529 - DNA, 15 bp, Homo sapiens
ggcgacttctggata

SEQ ID NO: 1231530 - DNA, 15 bp, Homo sapiens
gggcgacttctggat

SEQ ID NO: 1231531 - DNA, 15 bp, Homo sapiens
agggcgacttctgga

SEQ ID NO: 1231532 - DNA, 15 bp, Homo sapiens
aagggcgacttctgg

SEQ ID NO: 1231533 - DNA, 15 bp, Homo sapiens
caagggcgacttctg

SEQ ID NO: 1231534 - DNA, 15 bp, Homo sapiens
tcaagggcgacttct

SEQ ID NO: 1231535 - DNA, 15 bp, Homo sapiens
gtcaagggcgacttc

SEQ ID NO: 1231536 - DNA, 15 bp, Homo sapiens
agtcaagggcgactt

SEQ ID NO: 1231537 - DNA, 15 bp, Homo sapiens
cagtcaagggcgact

SEQ ID NO: 1231538 - DNA, 15 bp, Homo sapiens
acagtcaagggcgac

SEQ ID NO: 1231539 - DNA, 15 bp, Homo sapiens
gacagtcaagggcga

SEQ ID NO: 1231540 - DNA, 15 bp, Homo sapiens
agacagtcaagggcg

SEQ ID NO: 1231541 - DNA, 15 bp, Homo sapiens
gagacagtcaagggc

SEQ ID NO: 1231542 - DNA, 15 bp, Homo sapiens
ggagacagtcaaggg

SEQ ID NO: 1231543 - DNA, 15 bp, Homo sapiens
gggagacagtcaagg

SEQ ID NO: 1231544 - DNA, 15 bp, Homo sapiens
agggagacagtcaag

SEQ ID NO: 1231545 - DNA, 15 bp, Homo sapiens
gagggagacagtcaa

SEQ ID NO: 1231546 - DNA, 15 bp, Homo sapiens
ggagggagacagtca

SEQ ID NO: 1231547 - DNA, 15 bp, Homo sapiens
gggagggagacagtc

SEQ ID NO: 1231548 - DNA, 15 bp, Homo sapiens
agagggagggagaca

SEQ ID NO: 1231549 - DNA, 15 bp, Homo sapiens
gagagggagggagac

SEQ ID NO: 1231550 - DNA, 15 bp, Homo sapiens
ggagagggagggaga

SEQ ID NO: 1231551 - DNA, 15 bp, Homo sapiens
tggagagggagggag

SEQ ID NO: 1231552 - DNA, 15 bp, Homo sapiens
gtggagagggaggga

SEQ ID NO: 1231553 - DNA, 15 bp, Homo sapiens
tgtggagagggaggg

SEQ ID NO: 1231554 - DNA, 15 bp, Homo sapiens
atgtggagagggagg

SEQ ID NO: 1231555 - DNA, 15 bp, Homo sapiens
gatgtggagagggag

SEQ ID NO: 1231556 - DNA, 15 bp, Homo sapiens
ggatgtggagaggga

SEQ ID NO: 1231557 - DNA, 15 bp, Homo sapiens
tggatgtggagaggg

SEQ ID NO: 1231558 - DNA, 15 bp, Homo sapiens
gtggatgtggagagg

SEQ ID NO: 1231559 - DNA, 15 bp, Homo sapiens
ggtggatgtggagag

SEQ ID NO: 1231560 - DNA, 15 bp, Homo sapiens
aggtggatgtggaga

SEQ ID NO: 1231561 - DNA, 15 bp, Homo sapiens
caggtggatgtggag

SEQ ID NO: 1231562 - DNA, 15 bp, Homo sapiens
acaggtggatgtgga

SEQ ID NO: 1231563 - DNA, 15 bp, Homo sapiens
cacaggtggatgtgg

SEQ ID NO: 1231564 - DNA, 15 bp, Homo sapiens
tcacaggtggatgtg

SEQ ID NO: 1231565 - DNA, 15 bp, Homo sapiens
ctcacaggtggatgt

SEQ ID NO: 1231566 - DNA, 15 bp, Homo sapiens
gctcacaggtggatg

SEQ ID NO: 1231567 - DNA, 15 bp, Homo sapiens
ggctcacaggtggat

SEQ ID NO: 1231568 - DNA, 15 bp, Homo sapiens
tggctcacaggtgga

SEQ ID NO: 1231569 - DNA, 15 bp, Homo sapiens
ctggctcacaggtgg

SEQ ID NO: 1231570 - DNA, 15 bp, Homo sapiens
cctggctcacaggtg

SEQ ID NO: 1231571 - DNA, 15 bp, Homo sapiens
acctggctcacaggt

SEQ ID NO: 1231572 - DNA, 15 bp, Homo sapiens
gacctggctcacagg

SEQ ID NO: 1231573 - DNA, 15 bp, Homo sapiens
cgacctggctcacag

SEQ ID NO: 1231574 - DNA, 15 bp, Homo sapiens
tcgacctggctcaca

SEQ ID NO: 1231575 - DNA, 15 bp, Homo sapiens
atcgacctggctcac

SEQ ID NO: 1231576 - DNA, 15 bp, Homo sapiens
aatcgacctggctca

SEQ ID NO: 1231577 - DNA, 15 bp, Homo sapiens
gaatcgacctggctc

SEQ ID NO: 1231578 - DNA, 15 bp, Homo sapiens
agaatcgacctggct

SEQ ID NO: 1231579 - DNA, 15 bp, Homo sapiens
cagaatcgacctggc

SEQ ID NO: 1231580 - DNA, 15 bp, Homo sapiens
gcagaatcgacctgg

SEQ ID NO: 1231581 - DNA, 15 bp, Homo sapiens
ggcagaatcgacctg

SEQ ID NO: 1231582 - DNA, 15 bp, Homo sapiens
aggcagaatcgacct

SEQ ID NO: 1231583 - DNA, 15 bp, Homo sapiens
gaggcagaatcgacc

SEQ ID NO: 1231584 - DNA, 15 bp, Homo sapiens
ggaggcagaatcgac

SEQ ID NO: 1231585 - DNA, 15 bp, Homo sapiens
aggaggcagaatcga

SEQ ID NO: 1231586 - DNA, 15 bp, Homo sapiens
caggaggcagaatcg

SEQ ID NO: 1231587 - DNA, 15 bp, Homo sapiens
acaggaggcagaatc

SEQ ID NO: 1231588 - DNA, 15 bp, Homo sapiens
aacaggaggcagaat

SEQ ID NO: 1231589 - DNA, 15 bp, Homo sapiens
aaacaggaggcagaa

SEQ ID NO: 1231590 - DNA, 15 bp, Homo sapiens
gaaacaggaggcaga

SEQ ID NO: 1231591 - DNA, 15 bp, Homo sapiens
agaaacaggaggcag

SEQ ID NO: 1231592 - DNA, 15 bp, Homo sapiens
gagaaacaggaggca

SEQ ID NO: 1231593 - DNA, 15 bp, Homo sapiens
agagaaacaggaggc

SEQ ID NO: 1231594 - DNA, 15 bp, Homo sapiens
cagagaaacaggagg

SEQ ID NO: 1231595 - DNA, 15 bp, Homo sapiens
tcagagaaacaggag

SEQ ID NO: 1231596 - DNA, 15 bp, Homo sapiens
ttcagagaaacagga

SEQ ID NO: 1231597 - DNA, 15 bp, Homo sapiens
tttcagagaaacagg

SEQ ID NO: 1231598 - DNA, 15 bp, Homo sapiens
atttcagagaaacag

SEQ ID NO: 1231599 - DNA, 15 bp, Homo sapiens
catttcagagaaaca

SEQ ID NO: 1231600 - DNA, 15 bp, Homo sapiens
acatttcagagaaac

SEQ ID NO: 1231601 - DNA, 15 bp, Homo sapiens
gacatttcagagaaa

SEQ ID NO: 1231602 - DNA, 15 bp, Homo sapiens
agacatttcagagaa

SEQ ID NO: 1231603 - DNA, 15 bp, Homo sapiens
cagacatttcagaga

SEQ ID NO: 1231604 - DNA, 15 bp, Homo sapiens
gcagacatttcagag

SEQ ID NO: 1231605 - DNA, 15 bp, Homo sapiens
agcagacatttcaga

SEQ ID NO: 1231606 - DNA, 15 bp, Homo sapiens
aagcagacatttcag

SEQ ID NO: 1231607 - DNA, 15 bp, Homo sapiens
caagcagacatttca

SEQ ID NO: 1231608 - DNA, 15 bp, Homo sapiens
ccaagcagacatttc

SEQ ID NO: 1231609 - DNA, 15 bp, Homo sapiens
gccaagcagacattt

SEQ ID NO: 1231610 - DNA, 15 bp, Homo sapiens
agccaagcagacatt

SEQ ID NO: 1231611 - DNA, 15 bp, Homo sapiens
cagccaagcagacat

SEQ ID NO: 1231612 - DNA, 15 bp, Homo sapiens
acagccaagcagaca

SEQ ID NO: 1231613 - DNA, 15 bp, Homo sapiens
cacagccaagcagac

SEQ ID NO: 1231614 - DNA, 15 bp, Homo sapiens
acacagccaagcaga

SEQ ID NO: 1231615 - DNA, 15 bp, Homo sapiens
gacacagccaagcag

SEQ ID NO: 1231616 - DNA, 15 bp, Homo sapiens
agacacagccaagca

SEQ ID NO: 1231617 - DNA, 15 bp, Homo sapiens
gagacacagccaagc

SEQ ID NO: 1231618 - DNA, 15 bp, Homo sapiens
ggagacacagccaag

SEQ ID NO: 1231619 - DNA, 15 bp, Homo sapiens
atggagacacagcca

SEQ ID NO: 1231620 - DNA, 15 bp, Homo sapiens
gatggagacacagcc

SEQ ID NO: 1231621 - DNA, 15 bp, Homo sapiens
ggatggagacacagc

SEQ ID NO: 1231622 - DNA, 15 bp, Homo sapiens
gggatggagacacag

SEQ ID NO: 1231623 - DNA, 15 bp, Homo sapiens
agggatggagacaca

SEQ ID NO: 1231624 - DNA, 15 bp, Homo sapiens
cagggatggagacac

SEQ ID NO: 1231625 - DNA, 15 bp, Homo sapiens
ccagggatggagaca

SEQ ID NO: 1231626 - DNA, 15 bp, Homo sapiens
gccagggatggagac

SEQ ID NO: 1231627 - DNA, 15 bp, Homo sapiens
ggccagggatggaga

SEQ ID NO: 1231628 - DNA, 15 bp, Homo sapiens
tggccagggatggag

SEQ ID NO: 1231629 - DNA, 15 bp, Homo sapiens
gtggccagggatgga

SEQ ID NO: 1231630 - DNA, 15 bp, Homo sapiens
ggtggccagggatgg

SEQ ID NO: 1231631 - DNA, 15 bp, Homo sapiens
tggtggccagggatg

SEQ ID NO: 1231632 - DNA, 15 bp, Homo sapiens
atggtggccagggat

SEQ ID NO: 1231633 - DNA, 15 bp, Homo sapiens
aatggtggccaggga

SEQ ID NO: 1231634 - DNA, 15 bp, Homo sapiens
caatggtggccaggg

SEQ ID NO: 1231635 - DNA, 15 bp, Homo sapiens
acaatggtggccagg

SEQ ID NO: 1231636 - DNA, 15 bp, Homo sapiens
aacaatggtggccag

SEQ ID NO: 1231637 - DNA, 15 bp, Homo sapiens
aaacaatggtggcca

SEQ ID NO: 1231638 - DNA, 15 bp, Homo sapiens
caaacaatggtggcc

SEQ ID NO: 1231639 - DNA, 15 bp, Homo sapiens
tcaaacaatggtggc

SEQ ID NO: 1231640 - DNA, 15 bp, Homo sapiens
ctcaaacaatggtgg

SEQ ID NO: 1231641 - DNA, 15 bp, Homo sapiens
gctcaaacaatggtg

SEQ ID NO: 1231642 - DNA, 15 bp, Homo sapiens
ggctcaaacaatggt

SEQ ID NO: 1231643 - DNA, 15 bp, Homo sapiens
aggctcaaacaatgg

SEQ ID NO: 1231644 - DNA, 15 bp, Homo sapiens
caggctcaaacaatg

SEQ ID NO: 1231645 - DNA, 15 bp, Homo sapiens
ccaggctcaaacaat

SEQ ID NO: 1231646 - DNA, 15 bp, Homo sapiens
cccaggctcaaacaa

SEQ ID NO: 1231647 - DNA, 15 bp, Homo sapiens
gcccaggctcaaaca

SEQ ID NO: 1231648 - DNA, 15 bp, Homo sapiens
ggcccaggctcaaac

SEQ ID NO: 1231649 - DNA, 15 bp, Homo sapiens
tggcccaggctcaaa

SEQ ID NO: 1231650 - DNA, 15 bp, Homo sapiens
gtggcccaggctcaa

SEQ ID NO: 1231651 - DNA, 15 bp, Homo sapiens
agtggcccaggctca

SEQ ID NO: 1231652 - DNA, 15 bp, Homo sapiens
cagtggcccaggctc

SEQ ID NO: 1231653 - DNA, 15 bp, Homo sapiens
gcagtggcccaggct

SEQ ID NO: 1231654 - DNA, 15 bp, Homo sapiens
ggcagtggcccaggc

SEQ ID NO: 1231655 - DNA, 15 bp, Homo sapiens
tggcagtggcccagg

SEQ ID NO: 1231656 - DNA, 15 bp, Homo sapiens
atggcagtggcccag

SEQ ID NO: 1231657 - DNA, 15 bp, Homo sapiens
tatggcagtggccca

SEQ ID NO: 1231658 - DNA, 15 bp, Homo sapiens
ctatggcagtggccc

SEQ ID NO: 1231659 - DNA, 15 bp, Homo sapiens
gctatggcagtggcc

SEQ ID NO: 1231660 - DNA, 15 bp, Homo sapiens
ggctatggcagtggc

SEQ ID NO: 1231661 - DNA, 15 bp, Homo sapiens
aggctatggcagtgg

SEQ ID NO: 1231662 - DNA, 15 bp, Homo sapiens
caggctatggcagtg

SEQ ID NO: 1231663 - DNA, 15 bp, Homo sapiens
ccaggctatggcagt

SEQ ID NO: 1231664 - DNA, 15 bp, Homo sapiens
accaggctatggcag

SEQ ID NO: 1231665 - DNA, 15 bp, Homo sapiens
gaccaggctatggca

SEQ ID NO: 1231666 - DNA, 15 bp, Homo sapiens
agagaccaggctatg

SEQ ID NO: 1231667 - DNA, 15 bp, Homo sapiens
cagagaccaggctat

SEQ ID NO: 1231668 - DNA, 15 bp, Homo sapiens
acagagaccaggcta

SEQ ID NO: 1231669 - DNA, 15 bp, Homo sapiens
tacagagaccaggct

SEQ ID NO: 1231670 - DNA, 15 bp, Homo sapiens
ttacagagaccaggc

SEQ ID NO: 1231671 - DNA, 15 bp, Homo sapiens
gttacagagaccagg

SEQ ID NO: 1231672 - DNA, 15 bp, Homo sapiens
ggttacagagaccag

SEQ ID NO: 1231673 - DNA, 15 bp, Homo sapiens
aggttacagagacca

SEQ ID NO: 1231674 - DNA, 15 bp, Homo sapiens
caggttacagagacc

SEQ ID NO: 1231675 - DNA, 15 bp, Homo sapiens
ccaggttacagagac

SEQ ID NO: 1231676 - DNA, 15 bp, Homo sapiens
cccaggttacagaga

SEQ ID NO: 1231677 - DNA, 15 bp, Homo sapiens
gcccaggttacagag

SEQ ID NO: 1231678 - DNA, 15 bp, Homo sapiens
ggcccaggttacaga

SEQ ID NO: 1231679 - DNA, 15 bp, Homo sapiens
gggcccaggttacag

SEQ ID NO: 1231680 - DNA, 15 bp, Homo sapiens
ggggcccaggttaca

SEQ ID NO: 1231681 - DNA, 15 bp, Homo sapiens
aggggcccaggttac

SEQ ID NO: 1231682 - DNA, 15 bp, Homo sapiens
gaggggcccaggtta

SEQ ID NO: 1231683 - DNA, 15 bp, Homo sapiens
ggaggggcccaggtt

SEQ ID NO: 1231684 - DNA, 15 bp, Homo sapiens
tggaggggcccaggt

SEQ ID NO: 1231685 - DNA, 15 bp, Homo sapiens
gtggaggggcccagg

SEQ ID NO: 1231686 - DNA, 15 bp, Homo sapiens
tgtggaggggcccag

SEQ ID NO: 1231687 - DNA, 15 bp, Homo sapiens
atgtggaggggccca

SEQ ID NO: 1231688 - DNA, 15 bp, Homo sapiens
gatgtggaggggccc

SEQ ID NO: 1231689 - DNA, 15 bp, Homo sapiens
ggatgtggaggggcc

SEQ ID NO: 1231690 - DNA, 15 bp, Homo sapiens
gggatgtggaggggc

SEQ ID NO: 1231691 - DNA, 15 bp, Homo sapiens
agggatgtggagggg

SEQ ID NO: 1231692 - DNA, 15 bp, Homo sapiens
gagggatgtggaggg

SEQ ID NO: 1231693 - DNA, 15 bp, Homo sapiens
agagggatgtggagg

SEQ ID NO: 1231694 - DNA, 15 bp, Homo sapiens
gagagggatgtggag

SEQ ID NO: 1231695 - DNA, 15 bp, Homo sapiens
cgagagggatgtgga

SEQ ID NO: 1231696 - DNA, 15 bp, Homo sapiens
tcgagagggatgtgg

SEQ ID NO: 1231697 - DNA, 15 bp, Homo sapiens
gtcgagagggatgtg

SEQ ID NO: 1231698 - DNA, 15 bp, Homo sapiens
agtcgagagggatgt

SEQ ID NO: 1231699 - DNA, 15 bp, Homo sapiens
gagtcgagagggatg

SEQ ID NO: 1231700 - DNA, 15 bp, Homo sapiens
tgagtcgagagggat

SEQ ID NO: 1231701 - DNA, 15 bp, Homo sapiens
ctgagtcgagaggga

SEQ ID NO: 1231702 - DNA, 15 bp, Homo sapiens
gctgagtcgagaggg

SEQ ID NO: 1231703 - DNA, 15 bp, Homo sapiens
ggctgagtcgagagg

SEQ ID NO: 1231704 - DNA, 15 bp, Homo sapiens
tggctgagtcgagag

SEQ ID NO: 1231705 - DNA, 15 bp, Homo sapiens
gtggctgagtcgaga

SEQ ID NO: 1231706 - DNA, 15 bp, Homo sapiens
cgtggctgagtcgag

SEQ ID NO: 1231707 - DNA, 15 bp, Homo sapiens
gcgtggctgagtcga

SEQ ID NO: 1231708 - DNA, 15 bp, Homo sapiens
tgcgtggctgagtcg

SEQ ID NO: 1231709 - DNA, 15 bp, Homo sapiens
ctgcgtggctgagtc

SEQ ID NO: 1231710 - DNA, 15 bp, Homo sapiens
tctgcgtggctgagt

SEQ ID NO: 1231711 - DNA, 15 bp, Homo sapiens
ctctgcgtggctgag

SEQ ID NO: 1231712 - DNA, 15 bp, Homo sapiens
actctgcgtggctga

SEQ ID NO: 1231713 - DNA, 15 bp, Homo sapiens
cactctgcgtggctg

SEQ ID NO: 1231714 - DNA, 15 bp, Homo sapiens
tcactctgcgtggct

SEQ ID NO: 1231715 - DNA, 15 bp, Homo sapiens
ctcactctgcgtggc

SEQ ID NO: 1231716 - DNA, 15 bp, Homo sapiens
gctcactctgcgtgg

SEQ ID NO: 1231717 - DNA, 15 bp, Homo sapiens
agctcactctgcgtg

SEQ ID NO: 1231718 - DNA, 15 bp, Homo sapiens
aagctcactctgcgt

SEQ ID NO: 1231719 - DNA, 15 bp, Homo sapiens
aaagctcactctgcg

SEQ ID NO: 1231720 - DNA, 15 bp, Homo sapiens
gaaagctcactctgc

SEQ ID NO: 1231721 - DNA, 15 bp, Homo sapiens
ggaaagctcactctg

SEQ ID NO: 1231722 - DNA, 15 bp, Homo sapiens
tggaaagctcactct

SEQ ID NO: 1231723 - DNA, 15 bp, Homo sapiens
ttggaaagctcactc

SEQ ID NO: 1231724 - DNA, 15 bp, Homo sapiens
cttggaaagctcact

SEQ ID NO: 1231725 - DNA, 15 bp, Homo sapiens
ccttggaaagctcac

SEQ ID NO: 1231726 - DNA, 15 bp, Homo sapiens
accttggaaagctca

SEQ ID NO: 1231727 - DNA, 15 bp, Homo sapiens
caccttggaaagctc

SEQ ID NO: 1231728 - DNA, 15 bp, Homo sapiens
gcaccttggaaagct

SEQ ID NO: 1231729 - DNA, 15 bp, Homo sapiens
tgcaccttggaaagc

SEQ ID NO: 1231730 - DNA, 15 bp, Homo sapiens
ttgcaccttggaaag

SEQ ID NO: 1231731 - DNA, 15 bp, Homo sapiens
tttgcaccttggaaa

SEQ ID NO: 1231732 - DNA, 15 bp, Homo sapiens
gtttgcaccttggaa

SEQ ID NO: 1231733 - DNA, 15 bp, Homo sapiens
ggtttgcaccttgga

SEQ ID NO: 1231734 - DNA, 15 bp, Homo sapiens
gggtttgcaccttgg

SEQ ID NO: 1231735 - DNA, 15 bp, Homo sapiens
tgggtttgcaccttg

SEQ ID NO: 1231736 - DNA, 15 bp, Homo sapiens
atgggtttgcacctt

SEQ ID NO: 1231737 - DNA, 15 bp, Homo sapiens
catgggtttgcacct

SEQ ID NO: 1231738 - DNA, 15 bp, Homo sapiens
gcatgggtttgcacc

SEQ ID NO: 1231739 - DNA, 15 bp, Homo sapiens
ggcatgggtttgcac

SEQ ID NO: 1231740 - DNA, 15 bp, Homo sapiens
gggcatgggtttgca

SEQ ID NO: 1231741 - DNA, 15 bp, Homo sapiens
ggggcatgggtttgc

SEQ ID NO: 1231742 - DNA, 15 bp, Homo sapiens
gggggcatgggtttg

SEQ ID NO: 1231743 - DNA, 15 bp, Homo sapiens
ggggggcatgggttt

SEQ ID NO: 1231744 - DNA, 15 bp, Homo sapiens
aggggggcatgggtt

SEQ ID NO: 1231745 - DNA, 15 bp, Homo sapiens
aaggggggcatgggt

SEQ ID NO: 1231746 - DNA, 15 bp, Homo sapiens
aaaggggggcatggg

SEQ ID NO: 1231747 - DNA, 15 bp, Homo sapiens
caaaggggggcatgg

SEQ ID NO: 1231748 - DNA, 15 bp, Homo sapiens
acaaaggggggcatg

SEQ ID NO: 1231749 - DNA, 15 bp, Homo sapiens
aacaaaggggggcat

SEQ ID NO: 1231750 - DNA, 15 bp, Homo sapiens
gaacaaaggggggca

SEQ ID NO: 1231751 - DNA, 15 bp, Homo sapiens
tgaacaaaggggggc

SEQ ID NO: 1231752 - DNA, 15 bp, Homo sapiens
ttgaacaaagggggg

SEQ ID NO: 1231753 - DNA, 15 bp, Homo sapiens
tttgaacaaaggggg

SEQ ID NO: 1231754 - DNA, 15 bp, Homo sapiens
atttgaacaaagggg

SEQ ID NO: 1231755 - DNA, 15 bp, Homo sapiens
gatttgaacaaaggg

SEQ ID NO: 1231756 - DNA, 15 bp, Homo sapiens
agatttgaacaaagg

SEQ ID NO: 1231757 - DNA, 15 bp, Homo sapiens
aagatttgaacaaag

SEQ ID NO: 1231758 - DNA, 15 bp, Homo sapiens
gaagatttgaacaaa

SEQ ID NO: 1231759 - DNA, 15 bp, Homo sapiens
ggaagatttgaacaa

SEQ ID NO: 1231760 - DNA, 15 bp, Homo sapiens
gggaagatttgaaca

SEQ ID NO: 1231761 - DNA, 15 bp, Homo sapiens
tgggaagatttgaac

SEQ ID NO: 1231762 - DNA, 15 bp, Homo sapiens
ctgggaagatttgaa

SEQ ID NO: 1231763 - DNA, 15 bp, Homo sapiens
cctgggaagatttga

SEQ ID NO: 1231764 - DNA, 15 bp, Homo sapiens
ccctgggaagatttg

SEQ ID NO: 1231765 - DNA, 15 bp, Homo sapiens
accctgggaagattt

SEQ ID NO: 1231766 - DNA, 15 bp, Homo sapiens
aaccctgggaagatt

SEQ ID NO: 1231767 - DNA, 15 bp, Homo sapiens
caaccctgggaagat

SEQ ID NO: 1231768 - DNA, 15 bp, Homo sapiens
gcaaccctgggaaga

SEQ ID NO: 1231769 - DNA, 15 bp, Homo sapiens
agcaaccctgggaag

SEQ ID NO: 1231770 - DNA, 15 bp, Homo sapiens
gagcaaccctgggaa

SEQ ID NO: 1231771 - DNA, 15 bp, Homo sapiens
tgagcaaccctggga

SEQ ID NO: 1231772 - DNA, 15 bp, Homo sapiens
ttgagcaaccctggg

SEQ ID NO: 1231773 - DNA, 15 bp, Homo sapiens
attgagcaaccctgg

SEQ ID NO: 1231774 - DNA, 15 bp, Homo sapiens
gattgagcaaccctg

SEQ ID NO: 1231775 - DNA, 15 bp, Homo sapiens
ggattgagcaaccct

SEQ ID NO: 1231776 - DNA, 15 bp, Homo sapiens
gggattgagcaaccc

SEQ ID NO: 1231777 - DNA, 15 bp, Homo sapiens
agggattgagcaacc

SEQ ID NO: 1231778 - DNA, 15 bp, Homo sapiens
cagggattgagcaac

SEQ ID NO: 1231779 - DNA, 15 bp, Homo sapiens
gcagggattgagcaa

SEQ ID NO: 1231780 - DNA, 15 bp, Homo sapiens
cgcagggattgagca

SEQ ID NO: 1231781 - DNA, 15 bp, Homo sapiens
ccgcagggattgagc

SEQ ID NO: 1231782 - DNA, 15 bp, Homo sapiens
gccgcagggattgag

SEQ ID NO: 1231783 - DNA, 15 bp, Homo sapiens
ggccgcagggattga

SEQ ID NO: 1231784 - DNA, 15 bp, Homo sapiens
aggccgcagggattg

SEQ ID NO: 1231785 - DNA, 15 bp, Homo sapiens
gaggccgcagggatt

SEQ ID NO: 1231786 - DNA, 15 bp, Homo sapiens
ggaggccgcagggat

SEQ ID NO: 1231787 - DNA, 15 bp, Homo sapiens
gggaggccgcaggga

SEQ ID NO: 1231788 - DNA, 15 bp, Homo sapiens
ggggaggccgcaggg

SEQ ID NO: 1231789 - DNA, 15 bp, Homo sapiens
tggggaggccgcagg

SEQ ID NO: 1231790 - DNA, 15 bp, Homo sapiens
ctggggaggccgcag

SEQ ID NO: 1231791 - DNA, 15 bp, Homo sapiens
gctggggaggccgca

SEQ ID NO: 1231792 - DNA, 15 bp, Homo sapiens
agctggggaggccgc

SEQ ID NO: 1231793 - DNA, 15 bp, Homo sapiens
aagctggggaggccg

SEQ ID NO: 1231794 - DNA, 15 bp, Homo sapiens
aaagctggggaggcc

SEQ ID NO: 1231795 - DNA, 15 bp, Homo sapiens
gaaagctggggaggc

SEQ ID NO: 1231796 - DNA, 15 bp, Homo sapiens
agaaagctggggagg

SEQ ID NO: 1231797 - DNA, 15 bp, Homo sapiens
cagaaagctggggag

SEQ ID NO: 1231798 - DNA, 15 bp, Homo sapiens
tcagaaagctgggga

SEQ ID NO: 1231799 - DNA, 15 bp, Homo sapiens
ttcagaaagctgggg

SEQ ID NO: 1231800 - DNA, 15 bp, Homo sapiens
cttcagaaagctggg

SEQ ID NO: 1231801 - DNA, 15 bp, Homo sapiens
gcttcagaaagctgg

SEQ ID NO: 1231802 - DNA, 15 bp, Homo sapiens
ggcttcagaaagctg

SEQ ID NO: 1231803 - DNA, 15 bp, Homo sapiens
gggcttcagaaagct

SEQ ID NO: 1231804 - DNA, 15 bp, Homo sapiens
ggggcttcagaaagc

SEQ ID NO: 1231805 - DNA, 15 bp, Homo sapiens
gggggcttcagaaag

SEQ ID NO: 1231806 - DNA, 15 bp, Homo sapiens
tgggggcttcagaaa

SEQ ID NO: 1231807 - DNA, 15 bp, Homo sapiens
ctgggggcttcagaa

SEQ ID NO: 1231808 - DNA, 15 bp, Homo sapiens
gctgggggcttcaga

SEQ ID NO: 1231809 - DNA, 15 bp, Homo sapiens
tgctgggggcttcag

SEQ ID NO: 1231810 - DNA, 15 bp, Homo sapiens
gtgctgggggcttca

SEQ ID NO: 1231811 - DNA, 15 bp, Homo sapiens
gggtgtgctgggggc

SEQ ID NO: 1231812 - DNA, 15 bp, Homo sapiens
ggggtgtgctggggg

SEQ ID NO: 1231813 - DNA, 15 bp, Homo sapiens
tggggtgtgctgggg

SEQ ID NO: 1231814 - DNA, 15 bp, Homo sapiens
gtggggtgtgctggg

SEQ ID NO: 1231815 - DNA, 15 bp, Homo sapiens
ggtggggtgtgctgg

SEQ ID NO: 1231816 - DNA, 15 bp, Homo sapiens
gggtggggtgtgctg

SEQ ID NO: 1231817 - DNA, 15 bp, Homo sapiens
agggtggggtgtgct

SEQ ID NO: 1231818 - DNA, 15 bp, Homo sapiens
gagggtggggtgtgc

SEQ ID NO: 1231819 - DNA, 15 bp, Homo sapiens
agagggtggggtgtg

SEQ ID NO: 1231820 - DNA, 15 bp, Homo sapiens
gagagggtggggtgt

SEQ ID NO: 1231821 - DNA, 15 bp, Homo sapiens
tgagagggtggggtg

SEQ ID NO: 1231822 - DNA, 15 bp, Homo sapiens
gtgagagggtggggt

SEQ ID NO: 1231823 - DNA, 15 bp, Homo sapiens
ggtgagagggtgggg

SEQ ID NO: 1231824 - DNA, 15 bp, Homo sapiens
aggtgagagggtggg

SEQ ID NO: 1231825 - DNA, 15 bp, Homo sapiens
gaggtgagagggtgg

SEQ ID NO: 1231826 - DNA, 15 bp, Homo sapiens
agaggtgagagggtg

SEQ ID NO: 1231827 - DNA, 15 bp, Homo sapiens
cagaggtgagagggt

SEQ ID NO: 1231828 - DNA, 15 bp, Homo sapiens
tcagaggtgagaggg

SEQ ID NO: 1231829 - DNA, 15 bp, Homo sapiens
ctcagaggtgagagg

SEQ ID NO: 1231830 - DNA, 15 bp, Homo sapiens
gctcagaggtgagag

SEQ ID NO: 1231831 - DNA, 15 bp, Homo sapiens
ggctcagaggtgaga

SEQ ID NO: 1231832 - DNA, 15 bp, Homo sapiens
aggctcagaggtgag

SEQ ID NO: 1231833 - DNA, 15 bp, Homo sapiens
caggctcagaggtga

SEQ ID NO: 1231834 - DNA, 15 bp, Homo sapiens
gcaggctcagaggtg

SEQ ID NO: 1231835 - DNA, 15 bp, Homo sapiens
ggcaggctcagaggt

SEQ ID NO: 1231836 - DNA, 15 bp, Homo sapiens
gggcaggctcagagg

SEQ ID NO: 1231837 - DNA, 15 bp, Homo sapiens
tgggcaggctcagag

SEQ ID NO: 1231838 - DNA, 15 bp, Homo sapiens
ctgggcaggctcaga

SEQ ID NO: 1231839 - DNA, 15 bp, Homo sapiens
gctgggcaggctcag

SEQ ID NO: 1231840 - DNA, 15 bp, Homo sapiens
agctgggcaggctca

SEQ ID NO: 1231841 - DNA, 15 bp, Homo sapiens
tagctgggcaggctc

SEQ ID NO: 1231842 - DNA, 15 bp, Homo sapiens
atagctgggcaggct

SEQ ID NO: 1231843 - DNA, 15 bp, Homo sapiens
aatagctgggcaggc

SEQ ID NO: 1231844 - DNA, 15 bp, Homo sapiens
caatagctgggcagg

SEQ ID NO: 1231845 - DNA, 15 bp, Homo sapiens
acaatagctgggcag

SEQ ID NO: 1231846 - DNA, 15 bp, Homo sapiens
gacaatagctgggca

SEQ ID NO: 1231847 - DNA, 15 bp, Homo sapiens
agacaatagctgggc

SEQ ID NO: 1231848 - DNA, 15 bp, Homo sapiens
gagacaatagctggg

SEQ ID NO: 1231849 - DNA, 15 bp, Homo sapiens
agagacaatagctgg

SEQ ID NO: 1231850 - DNA, 15 bp, Homo sapiens
cagagacaatagctg

SEQ ID NO: 1231851 - DNA, 15 bp, Homo sapiens
ccagagacaatagct

SEQ ID NO: 1231852 - DNA, 15 bp, Homo sapiens
cccagagacaatagc

SEQ ID NO: 1231853 - DNA, 15 bp, Homo sapiens
tcccagagacaatag

SEQ ID NO: 1231854 - DNA, 15 bp, Homo sapiens
ttcccagagacaata

SEQ ID NO: 1231855 - DNA, 15 bp, Homo sapiens
attcccagagacaat

SEQ ID NO: 1231856 - DNA, 15 bp, Homo sapiens
cattcccagagacaa

SEQ ID NO: 1231857 - DNA, 15 bp, Homo sapiens
acattcccagagaca

SEQ ID NO: 1231858 - DNA, 15 bp, Homo sapiens
gacattcccagagac

SEQ ID NO: 1231859 - DNA, 15 bp, Homo sapiens
tgacattcccagaga

SEQ ID NO: 1231860 - DNA, 15 bp, Homo sapiens
atgacattcccagag

SEQ ID NO: 1231861 - DNA, 15 bp, Homo sapiens
catgacattcccaga

SEQ ID NO: 1231862 - DNA, 15 bp, Homo sapiens
gcatgacattcccag

SEQ ID NO: 1231863 - DNA, 15 bp, Homo sapiens
ggcatgacattccca

SEQ ID NO: 1231864 - DNA, 15 bp, Homo sapiens
gggcatgacattccc

SEQ ID NO: 1231865 - DNA, 15 bp, Homo sapiens
cgggcatgacattcc

SEQ ID NO: 1231866 - DNA, 15 bp, Homo sapiens
gcgggcatgacattc

SEQ ID NO: 1231867 - DNA, 15 bp, Homo sapiens
ggcgggcatgacatt

SEQ ID NO: 1231868 - DNA, 15 bp, Homo sapiens
aggcgggcatgacat

SEQ ID NO: 1231869 - DNA, 15 bp, Homo sapiens
aaggcgggcatgaca

SEQ ID NO: 1231870 - DNA, 15 bp, Homo sapiens
gaaggcgggcatgac

SEQ ID NO: 1231871 - DNA, 15 bp, Homo sapiens
ggaaggcgggcatga

SEQ ID NO: 1231872 - DNA, 15 bp, Homo sapiens
tggaaggcgggcatg

SEQ ID NO: 1231873 - DNA, 15 bp, Homo sapiens
atggaaggcgggcat

SEQ ID NO: 1231874 - DNA, 15 bp, Homo sapiens
catggaaggcgggca

SEQ ID NO: 1231875 - DNA, 15 bp, Homo sapiens
ccatggaaggcgggc

SEQ ID NO: 1231876 - DNA, 15 bp, Homo sapiens
cccatggaaggcggg

SEQ ID NO: 1231877 - DNA, 15 bp, Homo sapiens
ccccatggaaggcgg

SEQ ID NO: 1231878 - DNA, 15 bp, Homo sapiens
gccccatggaaggcg

SEQ ID NO: 1231879 - DNA, 15 bp, Homo sapiens
tgccccatggaaggc

SEQ ID NO: 1231880 - DNA, 15 bp, Homo sapiens
atgccccatggaagg

SEQ ID NO: 1231881 - DNA, 15 bp, Homo sapiens
gatgccccatggaag

SEQ ID NO: 1231882 - DNA, 15 bp, Homo sapiens
agatgccccatggaa

SEQ ID NO: 1231883 - DNA, 15 bp, Homo sapiens
gagatgccccatgga

SEQ ID NO: 1231884 - DNA, 15 bp, Homo sapiens
agagatgccccatgg

SEQ ID NO: 1231885 - DNA, 15 bp, Homo sapiens
aagagatgccccatg

SEQ ID NO: 1231886 - DNA, 15 bp, Homo sapiens
gaagagatgccccat

SEQ ID NO: 1231887 - DNA, 15 bp, Homo sapiens
agaagagatgcccca

SEQ ID NO: 1231888 - DNA, 15 bp, Homo sapiens
cagaagagatgcccc

SEQ ID NO: 1231889 - DNA, 15 bp, Homo sapiens
gcagaagagatgccc

SEQ ID NO: 1231890 - DNA, 15 bp, Homo sapiens
ggcagaagagatgcc

SEQ ID NO: 1231891 - DNA, 15 bp, Homo sapiens
tggcagaagagatgc

SEQ ID NO: 1231892 - DNA, 15 bp, Homo sapiens
ctggcagaagagatg

SEQ ID NO: 1231893 - DNA, 15 bp, Homo sapiens
cctggcagaagagat

SEQ ID NO: 1231894 - DNA, 15 bp, Homo sapiens
ccctggcagaagaga

SEQ ID NO: 1231895 - DNA, 15 bp, Homo sapiens
gccctggcagaagag

SEQ ID NO: 1231896 - DNA, 15 bp, Homo sapiens
agccctggcagaaga

SEQ ID NO: 1231897 - DNA, 15 bp, Homo sapiens
aagccctggcagaag

SEQ ID NO: 1231898 - DNA, 15 bp, Homo sapiens
aaagccctggcagaa

SEQ ID NO: 1231899 - DNA, 15 bp, Homo sapiens
gaaagccctggcaga

SEQ ID NO: 1231900 - DNA, 15 bp, Homo sapiens
ggaaagccctggcag

SEQ ID NO: 1231901 - DNA, 15 bp, Homo sapiens
aggaaagccctggca

SEQ ID NO: 1231902 - DNA, 15 bp, Homo sapiens
caggaaagccctggc

SEQ ID NO: 1231903 - DNA, 15 bp, Homo sapiens
tcaggaaagccctgg

SEQ ID NO: 1231904 - DNA, 15 bp, Homo sapiens
atcaggaaagccctg

SEQ ID NO: 1231905 - DNA, 15 bp, Homo sapiens
catcaggaaagccct

SEQ ID NO: 1231906 - DNA, 15 bp, Homo sapiens
gcatcaggaaagccc

SEQ ID NO: 1231907 - DNA, 15 bp, Homo sapiens
tgcatcaggaaagcc

SEQ ID NO: 1231908 - DNA, 15 bp, Homo sapiens
gtgcatcaggaaagc

SEQ ID NO: 1231909 - DNA, 15 bp, Homo sapiens
ggtgcatcaggaaag

SEQ ID NO: 1231910 - DNA, 15 bp, Homo sapiens
gggtgcatcaggaaa

SEQ ID NO: 1231911 - DNA, 15 bp, Homo sapiens
tgggtgcatcaggaa

SEQ ID NO: 1231912 - DNA, 15 bp, Homo sapiens
ctgggtgcatcagga

SEQ ID NO: 1231913 - DNA, 15 bp, Homo sapiens
cctgggtgcatcagg

SEQ ID NO: 1231914 - DNA, 15 bp, Homo sapiens
gcctgggtgcatcag

SEQ ID NO: 1231915 - DNA, 15 bp, Homo sapiens
tgcctgggtgcatca

SEQ ID NO: 1231916 - DNA, 15 bp, Homo sapiens
ctgcctgggtgcatc

SEQ ID NO: 1231917 - DNA, 15 bp, Homo sapiens
cctgcctgggtgcat

SEQ ID NO: 1231918 - DNA, 15 bp, Homo sapiens
ccctgcctgggtgca

SEQ ID NO: 1231919 - DNA, 15 bp, Homo sapiens
gccctgcctgggtgc

SEQ ID NO: 1231920 - DNA, 15 bp, Homo sapiens
agccctgcctgggtg

SEQ ID NO: 1231921 - DNA, 15 bp, Homo sapiens
gagccctgcctgggt

SEQ ID NO: 1231922 - DNA, 15 bp, Homo sapiens
tgagccctgcctggg

SEQ ID NO: 1231923 - DNA, 15 bp, Homo sapiens
atgagccctgcctgg

SEQ ID NO: 1231924 - DNA, 15 bp, Homo sapiens
aatgagccctgcctg

SEQ ID NO: 1231925 - DNA, 15 bp, Homo sapiens
caatgagccctgcct

SEQ ID NO: 1231926 - DNA, 15 bp, Homo sapiens
gcaatgagccctgcc

SEQ ID NO: 1231927 - DNA, 15 bp, Homo sapiens
ggcaatgagccctgc

SEQ ID NO: 1231928 - DNA, 15 bp, Homo sapiens
aggcaatgagccctg

SEQ ID NO: 1231929 - DNA, 15 bp, Homo sapiens
gaggcaatgagccct

SEQ ID NO: 1231930 - DNA, 15 bp, Homo sapiens
ggaggcaatgagccc

SEQ ID NO: 1231931 - DNA, 15 bp, Homo sapiens
aggaggcaatgagcc

SEQ ID NO: 1231932 - DNA, 15 bp, Homo sapiens
aaggaggcaatgagc

SEQ ID NO: 1231933 - DNA, 15 bp, Homo sapiens
gaaggaggcaatgag

SEQ ID NO: 1231934 - DNA, 15 bp, Homo sapiens
ggaaggaggcaatga

SEQ ID NO: 1231935 - DNA, 15 bp, Homo sapiens
gggaaggaggcaatg

SEQ ID NO: 1231936 - DNA, 15 bp, Homo sapiens
ggggaaggaggcaat

SEQ ID NO: 1231937 - DNA, 15 bp, Homo sapiens
aggggaaggaggcaa

SEQ ID NO: 1231938 - DNA, 15 bp, Homo sapiens
gaggggaaggaggca

SEQ ID NO: 1231939 - DNA, 15 bp, Homo sapiens
ggaggggaaggaggc

SEQ ID NO: 1231940 - DNA, 15 bp, Homo sapiens
gggaggggaaggagg

SEQ ID NO: 1231941 - DNA, 15 bp, Homo sapiens
ggggaggggaaggag

SEQ ID NO: 1231942 - DNA, 15 bp, Homo sapiens
tggggaggggaagga

SEQ ID NO: 1231943 - DNA, 15 bp, Homo sapiens
atggggaggggaagg

SEQ ID NO: 1231944 - DNA, 15 bp, Homo sapiens
tatggggaggggaag

SEQ ID NO: 1231945 - DNA, 15 bp, Homo sapiens
gtatggggaggggaa

SEQ ID NO: 1231946 - DNA, 15 bp, Homo sapiens
ggtatggggagggga

SEQ ID NO: 1231947 - DNA, 15 bp, Homo sapiens
tggtatggggagggg

SEQ ID NO: 1231948 - DNA, 15 bp, Homo sapiens
atggtatggggaggg

SEQ ID NO: 1231949 - DNA, 15 bp, Homo sapiens
catggtatggggagg

SEQ ID NO: 1231950 - DNA, 15 bp, Homo sapiens
gcatggtatggggag

SEQ ID NO: 1231951 - DNA, 15 bp, Homo sapiens
ggcatggtatgggga

SEQ ID NO: 1231952 - DNA, 15 bp, Homo sapiens
tggcatggtatgggg

SEQ ID NO: 1231953 - DNA, 15 bp, Homo sapiens
gtggcatggtatggg

SEQ ID NO: 1231954 - DNA, 15 bp, Homo sapiens
ggtggcatggtatgg

SEQ ID NO: 1231955 - DNA, 15 bp, Homo sapiens
aggtggcatggtatg

SEQ ID NO: 1231956 - DNA, 15 bp, Homo sapiens
gaggtggcatggtat

SEQ ID NO: 1231957 - DNA, 15 bp, Homo sapiens
ggaggtggcatggta

SEQ ID NO: 1231958 - DNA, 15 bp, Homo sapiens
tggaggtggcatggt

SEQ ID NO: 1231959 - DNA, 15 bp, Homo sapiens
atggaggtggcatgg

SEQ ID NO: 1231960 - DNA, 15 bp, Homo sapiens
tatggaggtggcatg

SEQ ID NO: 1231961 - DNA, 15 bp, Homo sapiens
ctatggaggtggcat

SEQ ID NO: 1231962 - DNA, 15 bp, Homo sapiens
cctatggaggtggca

SEQ ID NO: 1231963 - DNA, 15 bp, Homo sapiens
tcctatggaggtggc

SEQ ID NO: 1231964 - DNA, 15 bp, Homo sapiens
atcctatggaggtgg

SEQ ID NO: 1231965 - DNA, 15 bp, Homo sapiens
gatcctatggaggtg

SEQ ID NO: 1231966 - DNA, 15 bp, Homo sapiens
tgatcctatggaggt

SEQ ID NO: 1231967 - DNA, 15 bp, Homo sapiens
ctgatcctatggagg

SEQ ID NO: 1231968 - DNA, 15 bp, Homo sapiens
cctgatcctatggag

SEQ ID NO: 1231969 - DNA, 15 bp, Homo sapiens
ccctgatcctatgga

SEQ ID NO: 1231970 - DNA, 15 bp, Homo sapiens
gccctgatcctatgg

SEQ ID NO: 1231971 - DNA, 15 bp, Homo sapiens
tgccctgatcctatg

SEQ ID NO: 1231972 - DNA, 15 bp, Homo sapiens
gtgccctgatcctat

SEQ ID NO: 1231973 - DNA, 15 bp, Homo sapiens
tgtgccctgatccta

SEQ ID NO: 1231974 - DNA, 15 bp, Homo sapiens
ctgtgccctgatcct

SEQ ID NO: 1231975 - DNA, 15 bp, Homo sapiens
cctgtgccctgatcc

SEQ ID NO: 1231976 - DNA, 15 bp, Homo sapiens
gcctgtgccctgatc

SEQ ID NO: 1231977 - DNA, 15 bp, Homo sapiens
agcctgtgccctgat

SEQ ID NO: 1231978 - DNA, 15 bp, Homo sapiens
gagcctgtgccctga

SEQ ID NO: 1231979 - DNA, 15 bp, Homo sapiens
ggagcctgtgccctg

SEQ ID NO: 1231980 - DNA, 15 bp, Homo sapiens
tggagcctgtgccct

SEQ ID NO: 1231981 - DNA, 15 bp, Homo sapiens
atggagcctgtgccc

SEQ ID NO: 1231982 - DNA, 15 bp, Homo sapiens
aatggagcctgtgcc

SEQ ID NO: 1231983 - DNA, 15 bp, Homo sapiens
caatggagcctgtgc

SEQ ID NO: 1231984 - DNA, 15 bp, Homo sapiens
acaatggagcctgtg

SEQ ID NO: 1231985 - DNA, 15 bp, Homo sapiens
gacaatggagcctgt

SEQ ID NO: 1231986 - DNA, 15 bp, Homo sapiens
agacaatggagcctg

SEQ ID NO: 1231987 - DNA, 15 bp, Homo sapiens
gagacaatggagcct

SEQ ID NO: 1231988 - DNA, 15 bp, Homo sapiens
agagacaatggagcc

SEQ ID NO: 1231989 - DNA, 15 bp, Homo sapiens
cagagacaatggagc

SEQ ID NO: 1231990 - DNA, 15 bp, Homo sapiens
ccagagacaatggag

SEQ ID NO: 1231991 - DNA, 15 bp, Homo sapiens
accagagacaatgga

SEQ ID NO: 1231992 - DNA, 15 bp, Homo sapiens
caccagagacaatgg

SEQ ID NO: 1231993 - DNA, 15 bp, Homo sapiens
acaccagagacaatg

SEQ ID NO: 1231994 - DNA, 15 bp, Homo sapiens
cacaccagagacaat

SEQ ID NO: 1231995 - DNA, 15 bp, Homo sapiens
ccacaccagagacaa

SEQ ID NO: 1231996 - DNA, 15 bp, Homo sapiens
cccacaccagagaca

SEQ ID NO: 1231997 - DNA, 15 bp, Homo sapiens
ccccacaccagagac

SEQ ID NO: 1231998 - DNA, 15 bp, Homo sapiens
gccccacaccagaga

SEQ ID NO: 1231999 - DNA, 15 bp, Homo sapiens
ggccccacaccagag

SEQ ID NO: 1232000 - DNA, 15 bp, Homo sapiens
cggccccacaccaga

SEQ ID NO: 1232001 - DNA, 15 bp, Homo sapiens
gcggccccacaccag

SEQ ID NO: 1232002 - DNA, 15 bp, Homo sapiens
agcggccccacacca

SEQ ID NO: 1232003 - DNA, 15 bp, Homo sapiens
cagcggccccacacc

SEQ ID NO: 1232004 - DNA, 15 bp, Homo sapiens
tcagcggccccacac

SEQ ID NO: 1232005 - DNA, 15 bp, Homo sapiens
ctcagcggccccaca

SEQ ID NO: 1232006 - DNA, 15 bp, Homo sapiens
actcagcggccccac

SEQ ID NO: 1232007 - DNA, 15 bp, Homo sapiens
gactcagcggcccca

SEQ ID NO: 1232008 - DNA, 15 bp, Homo sapiens
agactcagcggcccc

SEQ ID NO: 1232009 - DNA, 15 bp, Homo sapiens
gagactcagcggccc

SEQ ID NO: 1232010 - DNA, 15 bp, Homo sapiens
ggagactcagcggcc

SEQ ID NO: 1232011 - DNA, 15 bp, Homo sapiens
aggagactcagcggc

SEQ ID NO: 1232012 - DNA, 15 bp, Homo sapiens
gaggagactcagcgg

SEQ ID NO: 1232013 - DNA, 15 bp, Homo sapiens
tgaggagactcagcg

SEQ ID NO: 1232014 - DNA, 15 bp, Homo sapiens
ctgaggagactcagc

SEQ ID NO: 1232015 - DNA, 15 bp, Homo sapiens
gctgaggagactcag

SEQ ID NO: 1232016 - DNA, 15 bp, Homo sapiens
ggctgaggagactca

SEQ ID NO: 1232017 - DNA, 15 bp, Homo sapiens
gggctgaggagactc

SEQ ID NO: 1232018 - DNA, 15 bp, Homo sapiens
tgggctgaggagact

SEQ ID NO: 1232019 - DNA, 15 bp, Homo sapiens
gtgggctgaggagac

SEQ ID NO: 1232020 - DNA, 15 bp, Homo sapiens
tgtgggctgaggaga

SEQ ID NO: 1232021 - DNA, 15 bp, Homo sapiens
gtgtgggctgaggag

SEQ ID NO: 1232022 - DNA, 15 bp, Homo sapiens
tgtgtgggctgagga

SEQ ID NO: 1232023 - DNA, 15 bp, Homo sapiens
ctgtgtgggctgagg

SEQ ID NO: 1232024 - DNA, 15 bp, Homo sapiens
actgtgtgggctgag

SEQ ID NO: 1232025 - DNA, 15 bp, Homo sapiens
gactgtgtgggctga

SEQ ID NO: 1232026 - DNA, 15 bp, Homo sapiens
ggactgtgtgggctg

SEQ ID NO: 1232027 - DNA, 15 bp, Homo sapiens
tggactgtgtgggct

SEQ ID NO: 1232028 - DNA, 15 bp, Homo sapiens
atggactgtgtgggc

SEQ ID NO: 1232029 - DNA, 15 bp, Homo sapiens
catggactgtgtggg

SEQ ID NO: 1232030 - DNA, 15 bp, Homo sapiens
tcatggactgtgtgg

SEQ ID NO: 1232031 - DNA, 15 bp, Homo sapiens
ttcatggactgtgtg

SEQ ID NO: 1232032 - DNA, 15 bp, Homo sapiens
cttcatggactgtgt

SEQ ID NO: 1232033 - DNA, 15 bp, Homo sapiens
gcttcatggactgtg

SEQ ID NO: 1232034 - DNA, 15 bp, Homo sapiens
agcttcatggactgt

SEQ ID NO: 1232035 - DNA, 15 bp, Homo sapiens
cagcttcatggactg

SEQ ID NO: 1232036 - DNA, 15 bp, Homo sapiens
tcagcttcatggact

SEQ ID NO: 1232037 - DNA, 15 bp, Homo sapiens
ctcagcttcatggac

SEQ ID NO: 1232038 - DNA, 15 bp, Homo sapiens
gctcagcttcatgga

SEQ ID NO: 1232039 - DNA, 15 bp, Homo sapiens
tgctcagcttcatgg

SEQ ID NO: 1232040 - DNA, 15 bp, Homo sapiens
gtgctcagcttcatg

SEQ ID NO: 1232041 - DNA, 15 bp, Homo sapiens
cgtgctcagcttcat

SEQ ID NO: 1232042 - DNA, 15 bp, Homo sapiens
acgtgctcagcttca

SEQ ID NO: 1232043 - DNA, 15 bp, Homo sapiens
cacgtgctcagcttc

SEQ ID NO: 1232044 - DNA, 15 bp, Homo sapiens
gcacgtgctcagctt

SEQ ID NO: 1232045 - DNA, 15 bp, Homo sapiens
tgcacgtgctcagct

SEQ ID NO: 1232046 - DNA, 15 bp, Homo sapiens
ctgcacgtgctcagc

SEQ ID NO: 1232047 - DNA, 15 bp, Homo sapiens
cctgcacgtgctcag

SEQ ID NO: 1232048 - DNA, 15 bp, Homo sapiens
ccctgcacgtgctca

SEQ ID NO: 1232049 - DNA, 15 bp, Homo sapiens
tccctgcacgtgctc

SEQ ID NO: 1232050 - DNA, 15 bp, Homo sapiens
atccctgcacgtgct

SEQ ID NO: 1232051 - DNA, 15 bp, Homo sapiens
catccctgcacgtgc

SEQ ID NO: 1232052 - DNA, 15 bp, Homo sapiens
gcatccctgcacgtg

SEQ ID NO: 1232053 - DNA, 15 bp, Homo sapiens
ggcatccctgcacgt

SEQ ID NO: 1232054 - DNA, 15 bp, Homo sapiens
aggcatccctgcacg

SEQ ID NO: 1232055 - DNA, 15 bp, Homo sapiens
gaggcatccctgcac

SEQ ID NO: 1232056 - DNA, 15 bp, Homo sapiens
tgaggcatccctgca

SEQ ID NO: 1232057 - DNA, 15 bp, Homo sapiens
atgaggcatccctgc

SEQ ID NO: 1232058 - DNA, 15 bp, Homo sapiens
gatgaggcatccctg

SEQ ID NO: 1232059 - DNA, 15 bp, Homo sapiens
tgatgaggcatccct

SEQ ID NO: 1232060 - DNA, 15 bp, Homo sapiens
gtgatgaggcatccc

SEQ ID NO: 1232061 - DNA, 15 bp, Homo sapiens
tgtgatgaggcatcc

SEQ ID NO: 1232062 - DNA, 15 bp, Homo sapiens
atgtgatgaggcatc

SEQ ID NO: 1232063 - DNA, 15 bp, Homo sapiens
gatgtgatgaggcat

SEQ ID NO: 1232064 - DNA, 15 bp, Homo sapiens
ggatgtgatgaggca

SEQ ID NO: 1232065 - DNA, 15 bp, Homo sapiens
gggatgtgatgaggc

SEQ ID NO: 1232066 - DNA, 15 bp, Homo sapiens
agggatgtgatgagg

SEQ ID NO: 1232067 - DNA, 15 bp, Homo sapiens
gagggatgtgatgag

SEQ ID NO: 1232068 - DNA, 15 bp, Homo sapiens
agagggatgtgatga

SEQ ID NO: 1232069 - DNA, 15 bp, Homo sapiens
gagagggatgtgatg

SEQ ID NO: 1232070 - DNA, 15 bp, Homo sapiens
cgagagggatgtgat

SEQ ID NO: 1232071 - DNA, 15 bp, Homo sapiens
tcgagagggatgtga

SEQ ID NO: 1232072 - DNA, 15 bp, Homo sapiens
ctcgagagggatgtg

SEQ ID NO: 1232073 - DNA, 15 bp, Homo sapiens
tctcgagagggatgt

SEQ ID NO: 1232074 - DNA, 15 bp, Homo sapiens
ttctcgagagggatg

SEQ ID NO: 1232075 - DNA, 15 bp, Homo sapiens
attctcgagagggat

SEQ ID NO: 1232076 - DNA, 15 bp, Homo sapiens
aattctcgagaggga

SEQ ID NO: 1232077 - DNA, 15 bp, Homo sapiens
caattctcgagaggg

SEQ ID NO: 1232078 - DNA, 15 bp, Homo sapiens
gcaattctcgagagg

SEQ ID NO: 1232079 - DNA, 15 bp, Homo sapiens
agcaattctcgagag

SEQ ID NO: 1232080 - DNA, 15 bp, Homo sapiens
tagcaattctcgaga

SEQ ID NO: 1232081 - DNA, 15 bp, Homo sapiens
atagcaattctcgag

SEQ ID NO: 1232082 - DNA, 15 bp, Homo sapiens
catagcaattctcga

SEQ ID NO: 1232083 - DNA, 15 bp, Homo sapiens
ccatagcaattctcg

SEQ ID NO: 1232084 - DNA, 15 bp, Homo sapiens
tccatagcaattctc

SEQ ID NO: 1232085 - DNA, 15 bp, Homo sapiens
atccatagcaattct

SEQ ID NO: 1232086 - DNA, 15 bp, Homo sapiens
gatccatagcaattc

SEQ ID NO: 1232087 - DNA, 15 bp, Homo sapiens
tgatccatagcaatt

SEQ ID NO: 1232088 - DNA, 15 bp, Homo sapiens
ttgatccatagcaat

SEQ ID NO: 1232089 - DNA, 15 bp, Homo sapiens
tttgatccatagcaa

SEQ ID NO: 1232090 - DNA, 15 bp, Homo sapiens
atttgatccatagca

SEQ ID NO: 1232091 - DNA, 15 bp, Homo sapiens
catttgatccatagc

SEQ ID NO: 1232092 - DNA, 15 bp, Homo sapiens
acatttgatccatag

SEQ ID NO: 1232093 - DNA, 15 bp, Homo sapiens
cacatttgatccata

SEQ ID NO: 1232094 - DNA, 15 bp, Homo sapiens
acacatttgatccat

SEQ ID NO: 1232095 - DNA, 15 bp, Homo sapiens
cacacatttgatcca

SEQ ID NO: 1232096 - DNA, 15 bp, Homo sapiens
ccacacatttgatcc

SEQ ID NO: 1232097 - DNA, 15 bp, Homo sapiens
cccacacatttgatc

SEQ ID NO: 1232098 - DNA, 15 bp, Homo sapiens
acccacacatttgat

SEQ ID NO: 1232099 - DNA, 15 bp, Homo sapiens
cacccacacatttga

SEQ ID NO: 1232100 - DNA, 15 bp, Homo sapiens
tcacccacacatttg

SEQ ID NO: 1232101 - DNA, 15 bp, Homo sapiens
gtcacccacacattt

SEQ ID NO: 1232102 - DNA, 15 bp, Homo sapiens
ggtcacccacacatt

SEQ ID NO: 1232103 - DNA, 15 bp, Homo sapiens
gggtcacccacacat

SEQ ID NO: 1232104 - DNA, 15 bp, Homo sapiens
ggggtcacccacaca

SEQ ID NO: 1232105 - DNA, 15 bp, Homo sapiens
cggggtcacccacac

SEQ ID NO: 1232106 - DNA, 15 bp, Homo sapiens
acggggtcacccaca

SEQ ID NO: 1232107 - DNA, 15 bp, Homo sapiens
cacggggtcacccac

SEQ ID NO: 1232108 - DNA, 15 bp, Homo sapiens
ccacggggtcaccca

SEQ ID NO: 1232109 - DNA, 15 bp, Homo sapiens
gccacggggtcaccc

SEQ ID NO: 1232110 - DNA, 15 bp, Homo sapiens
ggccacggggtcacc

SEQ ID NO: 1232111 - DNA, 15 bp, Homo sapiens
aggccacggggtcac

SEQ ID NO: 1232112 - DNA, 15 bp, Homo sapiens
gaggccacggggtca

SEQ ID NO: 1232113 - DNA, 15 bp, Homo sapiens
agaggccacggggtc

SEQ ID NO: 1232114 - DNA, 15 bp, Homo sapiens
gagaggccacggggt

SEQ ID NO: 1232115 - DNA, 15 bp, Homo sapiens
tgagaggccacgggg

SEQ ID NO: 1232116 - DNA, 15 bp, Homo sapiens
ctgagaggccacggg

SEQ ID NO: 1232117 - DNA, 15 bp, Homo sapiens
gctgagaggccacgg

SEQ ID NO: 1232118 - DNA, 15 bp, Homo sapiens
agctgagaggccacg

SEQ ID NO: 1232119 - DNA, 15 bp, Homo sapiens
gagctgagaggccac

SEQ ID NO: 1232120 - DNA, 15 bp, Homo sapiens
ggagctgagaggcca

SEQ ID NO: 1232121 - DNA, 15 bp, Homo sapiens
gggagctgagaggcc

SEQ ID NO: 1232122 - DNA, 15 bp, Homo sapiens
agggagctgagaggc

SEQ ID NO: 1232123 - DNA, 15 bp, Homo sapiens
gagggagctgagagg

SEQ ID NO: 1232124 - DNA, 15 bp, Homo sapiens
cgagggagctgagag

SEQ ID NO: 1232125 - DNA, 15 bp, Homo sapiens
ccgagggagctgaga

SEQ ID NO: 1232126 - DNA, 15 bp, Homo sapiens
gccgagggagctgag

SEQ ID NO: 1232127 - DNA, 15 bp, Homo sapiens
ggccgagggagctga

SEQ ID NO: 1232128 - DNA, 15 bp, Homo sapiens
gggccgagggagctg

SEQ ID NO: 1232129 - DNA, 15 bp, Homo sapiens
ggggccgagggagct

SEQ ID NO: 1232130 - DNA, 15 bp, Homo sapiens
tggggccgagggagc

SEQ ID NO: 1232131 - DNA, 15 bp, Homo sapiens
ctggggccgagggag

SEQ ID NO: 1232132 - DNA, 15 bp, Homo sapiens
actggggccgaggga

SEQ ID NO: 1232133 - DNA, 15 bp, Homo sapiens
gactggggccgaggg

SEQ ID NO: 1232134 - DNA, 15 bp, Homo sapiens
ggactggggccgagg

SEQ ID NO: 1232135 - DNA, 15 bp, Homo sapiens
tggactggggccgag

SEQ ID NO: 1232136 - DNA, 15 bp, Homo sapiens
atggactggggccga

SEQ ID NO: 1232137 - DNA, 15 bp, Homo sapiens
catggactggggccg

SEQ ID NO: 1232138 - DNA, 15 bp, Homo sapiens
acatggactggggcc

SEQ ID NO: 1232139 - DNA, 15 bp, Homo sapiens
gacatggactggggc

SEQ ID NO: 1232140 - DNA, 15 bp, Homo sapiens
ggacatggactgggg

SEQ ID NO: 1232141 - DNA, 15 bp, Homo sapiens
gggacatggactggg

SEQ ID NO: 1232142 - DNA, 15 bp, Homo sapiens
ggggacatggactgg

SEQ ID NO: 1232143 - DNA, 15 bp, Homo sapiens
tggggacatggactg

SEQ ID NO: 1232144 - DNA, 15 bp, Homo sapiens
ctggggacatggact

SEQ ID NO: 1232145 - DNA, 15 bp, Homo sapiens
gctggggacatggac

SEQ ID NO: 1232146 - DNA, 15 bp, Homo sapiens
tgctggggacatgga

SEQ ID NO: 1232147 - DNA, 15 bp, Homo sapiens
ttgctggggacatgg

SEQ ID NO: 1232148 - DNA, 15 bp, Homo sapiens
gttgctggggacatg

SEQ ID NO: 1232149 - DNA, 15 bp, Homo sapiens
ggttgctggggacat

SEQ ID NO: 1232150 - DNA, 15 bp, Homo sapiens
gggttgctggggaca

SEQ ID NO: 1232151 - DNA, 15 bp, Homo sapiens
ggggttgctggggac

SEQ ID NO: 1232152 - DNA, 15 bp, Homo sapiens
aggggttgctgggga

SEQ ID NO: 1232153 - DNA, 15 bp, Homo sapiens
gaggggttgctgggg

SEQ ID NO: 1232154 - DNA, 15 bp, Homo sapiens
agaggggttgctggg

SEQ ID NO: 1232155 - DNA, 15 bp, Homo sapiens
cagaggggttgctgg

SEQ ID NO: 1232156 - DNA, 15 bp, Homo sapiens
gcagaggggttgctg

SEQ ID NO: 1232157 - DNA, 15 bp, Homo sapiens
ggcagaggggttgct

SEQ ID NO: 1232158 - DNA, 15 bp, Homo sapiens
gggcagaggggttgc

SEQ ID NO: 1232159 - DNA, 15 bp, Homo sapiens
agggcagaggggttg

SEQ ID NO: 1232160 - DNA, 15 bp, Homo sapiens
aagggcagaggggtt

SEQ ID NO: 1232161 - DNA, 15 bp, Homo sapiens
aaagggcagaggggt

SEQ ID NO: 1232162 - DNA, 15 bp, Homo sapiens
aaaagggcagagggg

SEQ ID NO: 1232163 - DNA, 15 bp, Homo sapiens
caaaagggcagaggg

SEQ ID NO: 1232164 - DNA, 15 bp, Homo sapiens
gcaaaagggcagagg

SEQ ID NO: 1232165 - DNA, 15 bp, Homo sapiens
ggcaaaagggcagag

SEQ ID NO: 1232166 - DNA, 15 bp, Homo sapiens
aggcaaaagggcaga

SEQ ID NO: 1232167 - DNA, 15 bp, Homo sapiens
gaggcaaaagggcag

SEQ ID NO: 1232168 - DNA, 15 bp, Homo sapiens
agaggcaaaagggca

SEQ ID NO: 1232169 - DNA, 15 bp, Homo sapiens
aagaggcaaaagggc

SEQ ID NO: 1232170 - DNA, 15 bp, Homo sapiens
caagaggcaaaaggg

SEQ ID NO: 1232171 - DNA, 15 bp, Homo sapiens
ccaagaggcaaaagg

SEQ ID NO: 1232172 - DNA, 15 bp, Homo sapiens
accaagaggcaaaag

SEQ ID NO: 1232173 - DNA, 15 bp, Homo sapiens
gaccaagaggcaaaa

SEQ ID NO: 1232174 - DNA, 15 bp, Homo sapiens
agaccaagaggcaaa

SEQ ID NO: 1232175 - DNA, 15 bp, Homo sapiens
gagaccaagaggcaa

SEQ ID NO: 1232176 - DNA, 15 bp, Homo sapiens
agagaccaagaggca

SEQ ID NO: 1232177 - DNA, 15 bp, Homo sapiens
cagagaccaagaggc

SEQ ID NO: 1232178 - DNA, 15 bp, Homo sapiens
ccagagaccaagagg

SEQ ID NO: 1232179 - DNA, 15 bp, Homo sapiens
accagagaccaagag

SEQ ID NO: 1232180 - DNA, 15 bp, Homo sapiens
gaccagagaccaaga

SEQ ID NO: 1232181 - DNA, 15 bp, Homo sapiens
agaccagagaccaag

SEQ ID NO: 1232182 - DNA, 15 bp, Homo sapiens
gagaccagagaccaa

SEQ ID NO: 1232183 - DNA, 15 bp, Homo sapiens
agagaccagagacca

SEQ ID NO: 1232184 - DNA, 15 bp, Homo sapiens
gagagaccagagacc

SEQ ID NO: 1232185 - DNA, 15 bp, Homo sapiens
agagagaccagagac

SEQ ID NO: 1232186 - DNA, 15 bp, Homo sapiens
gagagagaccagaga

SEQ ID NO: 1232187 - DNA, 15 bp, Homo sapiens
ggagagagaccagag

SEQ ID NO: 1232188 - DNA, 15 bp, Homo sapiens
gggagagagaccaga

SEQ ID NO: 1232189 - DNA, 15 bp, Homo sapiens
ggggagagagaccag

SEQ ID NO: 1232190 - DNA, 15 bp, Homo sapiens
aggggagagagacca

SEQ ID NO: 1232191 - DNA, 15 bp, Homo sapiens
gaggggagagagacc

SEQ ID NO: 1232192 - DNA, 15 bp, Homo sapiens
ggaggggagagagac

SEQ ID NO: 1232193 - DNA, 15 bp, Homo sapiens
aggaggggagagaga

SEQ ID NO: 1232194 - DNA, 15 bp, Homo sapiens
aaggaggggagagag

SEQ ID NO: 1232195 - DNA, 15 bp, Homo sapiens
caaggaggggagaga

SEQ ID NO: 1232196 - DNA, 15 bp, Homo sapiens
gcaaggaggggagag

SEQ ID NO: 1232197 - DNA, 15 bp, Homo sapiens
agcaaggaggggaga

SEQ ID NO: 1232198 - DNA, 15 bp, Homo sapiens
gagcaaggaggggag

SEQ ID NO: 1232199 - DNA, 15 bp, Homo sapiens
tgagcaaggagggga

SEQ ID NO: 1232200 - DNA, 15 bp, Homo sapiens
atgagcaaggagggg

SEQ ID NO: 1232201 - DNA, 15 bp, Homo sapiens
gatgagcaaggaggg

SEQ ID NO: 1232202 - DNA, 15 bp, Homo sapiens
tgatgagcaaggagg

SEQ ID NO: 1232203 - DNA, 15 bp, Homo sapiens
ctgatgagcaaggag

SEQ ID NO: 1232204 - DNA, 15 bp, Homo sapiens
tctgatgagcaagga

SEQ ID NO: 1232205 - DNA, 15 bp, Homo sapiens
ctctgatgagcaagg

SEQ ID NO: 1232206 - DNA, 15 bp, Homo sapiens
tctctgatgagcaag

SEQ ID NO: 1232207 - DNA, 15 bp, Homo sapiens
ttctctgatgagcaa

SEQ ID NO: 1232208 - DNA, 15 bp, Homo sapiens
gttctctgatgagca

SEQ ID NO: 1232209 - DNA, 15 bp, Homo sapiens
agttctctgatgagc

SEQ ID NO: 1232210 - DNA, 15 bp, Homo sapiens
aagttctctgatgag

SEQ ID NO: 1232211 - DNA, 15 bp, Homo sapiens
caagttctctgatga

SEQ ID NO: 1232212 - DNA, 15 bp, Homo sapiens
ccaagttctctgatg

SEQ ID NO: 1232213 - DNA, 15 bp, Homo sapiens
cccaagttctctgat

SEQ ID NO: 1232214 - DNA, 15 bp, Homo sapiens
gcccaagttctctga

SEQ ID NO: 1232215 - DNA, 15 bp, Homo sapiens
ggcccaagttctctg

SEQ ID NO: 1232216 - DNA, 15 bp, Homo sapiens
tggcccaagttctct

SEQ ID NO: 1232217 - DNA, 15 bp, Homo sapiens
ctggcccaagttctc

SEQ ID NO: 1232218 - DNA, 15 bp, Homo sapiens
tctggcccaagttct

SEQ ID NO: 1232219 - DNA, 15 bp, Homo sapiens
ctctggcccaagttc

SEQ ID NO: 1232220 - DNA, 15 bp, Homo sapiens
gctctggcccaagtt

SEQ ID NO: 1232221 - DNA, 15 bp, Homo sapiens
ggctctggcccaagt

SEQ ID NO: 1232222 - DNA, 15 bp, Homo sapiens
tggctctggcccaag

SEQ ID NO: 1232223 - DNA, 15 bp, Homo sapiens
gtggctctggcccaa

SEQ ID NO: 1232224 - DNA, 15 bp, Homo sapiens
ggtggctctggccca

SEQ ID NO: 1232225 - DNA, 15 bp, Homo sapiens
tggtggctctggccc

SEQ ID NO: 1232226 - DNA, 15 bp, Homo sapiens
atggtggctctggcc

SEQ ID NO: 1232227 - DNA, 15 bp, Homo sapiens
catggtggctctggc

SEQ ID NO: 1232228 - DNA, 15 bp, Homo sapiens
ccatggtggctctgg

SEQ ID NO: 1232229 - DNA, 15 bp, Homo sapiens
gccatggtggctctg

SEQ ID NO: 1232230 - DNA, 15 bp, Homo sapiens
ggccatggtggctct

SEQ ID NO: 1232231 - DNA, 15 bp, Homo sapiens
gggccatggtggctc

SEQ ID NO: 1232232 - DNA, 15 bp, Homo sapiens
agggccatggtggct

SEQ ID NO: 1232233 - DNA, 15 bp, Homo sapiens
cagggccatggtggc

SEQ ID NO: 1232234 - DNA, 15 bp, Homo sapiens
acagggccatggtgg

SEQ ID NO: 1232235 - DNA, 15 bp, Homo sapiens
gacagggccatggtg

SEQ ID NO: 1232236 - DNA, 15 bp, Homo sapiens
agacagggccatggt

SEQ ID NO: 1232237 - DNA, 15 bp, Homo sapiens
gagacagggccatgg

SEQ ID NO: 1232238 - DNA, 15 bp, Homo sapiens
tgagacagggccatg

SEQ ID NO: 1232239 - DNA, 15 bp, Homo sapiens
ctgagacagggccat

SEQ ID NO: 1232240 - DNA, 15 bp, Homo sapiens
tctgagacagggcca

SEQ ID NO: 1232241 - DNA, 15 bp, Homo sapiens
ctctgagacagggcc

SEQ ID NO: 1232242 - DNA, 15 bp, Homo sapiens
tctctgagacagggc

SEQ ID NO: 1232243 - DNA, 15 bp, Homo sapiens
ctctctgagacaggg

SEQ ID NO: 1232244 - DNA, 15 bp, Homo sapiens
actctctgagacagg

SEQ ID NO: 1232245 - DNA, 15 bp, Homo sapiens
cactctctgagacag

SEQ ID NO: 1232246 - DNA, 15 bp, Homo sapiens
ccactctctgagaca

SEQ ID NO: 1232247 - DNA, 15 bp, Homo sapiens
cccactctctgagac

SEQ ID NO: 1232248 - DNA, 15 bp, Homo sapiens
tcccactctctgaga

SEQ ID NO: 1232249 - DNA, 15 bp, Homo sapiens
atcccactctctgag

SEQ ID NO: 1232250 - DNA, 15 bp, Homo sapiens
catcccactctctga

SEQ ID NO: 1232251 - DNA, 15 bp, Homo sapiens
acatcccactctctg

SEQ ID NO: 1232252 - DNA, 15 bp, Homo sapiens
cacatcccactctct

SEQ ID NO: 1232253 - DNA, 15 bp, Homo sapiens
gcacatcccactctc

SEQ ID NO: 1232254 - DNA, 15 bp, Homo sapiens
ggcacatcccactct

SEQ ID NO: 1232255 - DNA, 15 bp, Homo sapiens
gggcacatcccactc

SEQ ID NO: 1232256 - DNA, 15 bp, Homo sapiens
agggcacatcccact

SEQ ID NO: 1232257 - DNA, 15 bp, Homo sapiens
aagggcacatcccac

SEQ ID NO: 1232258 - DNA, 15 bp, Homo sapiens
caagggcacatccca

SEQ ID NO: 1232259 - DNA, 15 bp, Homo sapiens
acaagggcacatccc

SEQ ID NO: 1232260 - DNA, 15 bp, Homo sapiens
cacaagggcacatcc

SEQ ID NO: 1232261 - DNA, 15 bp, Homo sapiens
gcacaagggcacatc

SEQ ID NO: 1232262 - DNA, 15 bp, Homo sapiens
tgcacaagggcacat

SEQ ID NO: 1232263 - DNA, 15 bp, Homo sapiens
ctgcacaagggcaca

SEQ ID NO: 1232264 - DNA, 15 bp, Homo sapiens
cctgcacaagggcac

SEQ ID NO: 1232265 - DNA, 15 bp, Homo sapiens
acctgcacaagggca

SEQ ID NO: 1232266 - DNA, 15 bp, Homo sapiens
tacctgcacaagggc

SEQ ID NO: 1232267 - DNA, 15 bp, Homo sapiens
ttacctgcacaaggg

SEQ ID NO: 1232268 - DNA, 15 bp, Homo sapiens
cttacctgcacaagg

SEQ ID NO: 1232269 - DNA, 15 bp, Homo sapiens
tcttacctgcacaag

SEQ ID NO: 1232270 - DNA, 15 bp, Homo sapiens
ctcttacctgcacaa

SEQ ID NO: 1232271 - DNA, 15 bp, Homo sapiens
tctcttacctgcaca

SEQ ID NO: 1232272 - DNA, 15 bp, Homo sapiens
ctctcttacctgcac

SEQ ID NO: 1232273 - DNA, 15 bp, Homo sapiens
tctctcttacctgca

SEQ ID NO: 1232274 - DNA, 15 bp, Homo sapiens
gtctctcttacctgc

SEQ ID NO: 1232275 - DNA, 15 bp, Homo sapiens
agtctctcttacctg

SEQ ID NO: 1232276 - DNA, 15 bp, Homo sapiens
cagtctctcttacct

SEQ ID NO: 1232277 - DNA, 15 bp, Homo sapiens
acagtctctcttacc

SEQ ID NO: 1232278 - DNA, 15 bp, Homo sapiens
cacagtctctcttac

SEQ ID NO: 1232279 - DNA, 15 bp, Homo sapiens
acacagtctctctta

SEQ ID NO: 1232280 - DNA, 15 bp, Homo sapiens
cacacagtctctctt

SEQ ID NO: 1232281 - DNA, 15 bp, Homo sapiens
tcacacagtctctct

SEQ ID NO: 1232282 - DNA, 15 bp, Homo sapiens
gtcacacagtctctc

SEQ ID NO: 1232283 - DNA, 15 bp, Homo sapiens
agtcacacagtctct

SEQ ID NO: 1232284 - DNA, 15 bp, Homo sapiens
cagtcacacagtctc

SEQ ID NO: 1232285 - DNA, 15 bp, Homo sapiens
acagtcacacagtct

SEQ ID NO: 1232286 - DNA, 15 bp, Homo sapiens
cacagtcacacagtc

SEQ ID NO: 1232287 - DNA, 15 bp, Homo sapiens
ccacagtcacacagt

SEQ ID NO: 1232288 - DNA, 15 bp, Homo sapiens
cccacagtcacacag

SEQ ID NO: 1232289 - DNA, 15 bp, Homo sapiens
ccccacagtcacaca

SEQ ID NO: 1232290 - DNA, 15 bp, Homo sapiens
tccccacagtcacac

SEQ ID NO: 1232291 - DNA, 15 bp, Homo sapiens
ctccccacagtcaca

SEQ ID NO: 1232292 - DNA, 15 bp, Homo sapiens
tctccccacagtcac

SEQ ID NO: 1232293 - DNA, 15 bp, Homo sapiens
gtctccccacagtca

SEQ ID NO: 1232294 - DNA, 15 bp, Homo sapiens
ggtctccccacagtc

SEQ ID NO: 1232295 - DNA, 15 bp, Homo sapiens
tggtctccccacagt

SEQ ID NO: 1232296 - DNA, 15 bp, Homo sapiens
atggtctccccacag

SEQ ID NO: 1232297 - DNA, 15 bp, Homo sapiens
catggtctccccaca

SEQ ID NO: 1232298 - DNA, 15 bp, Homo sapiens
ccatggtctccccac

SEQ ID NO: 1232299 - DNA, 15 bp, Homo sapiens
cccatggtctcccca

SEQ ID NO: 1232300 - DNA, 15 bp, Homo sapiens
tcccatggtctcccc

SEQ ID NO: 1232301 - DNA, 15 bp, Homo sapiens
ttcccatggtctccc

SEQ ID NO: 1232302 - DNA, 15 bp, Homo sapiens
attcccatggtctcc

SEQ ID NO: 1232303 - DNA, 15 bp, Homo sapiens
tattcccatggtctc

SEQ ID NO: 1232304 - DNA, 15 bp, Homo sapiens
atattcccatggtct

SEQ ID NO: 1232305 - DNA, 15 bp, Homo sapiens
catattcccatggtc

SEQ ID NO: 1232306 - DNA, 15 bp, Homo sapiens
ccatattcccatggt

SEQ ID NO: 1232307 - DNA, 15 bp, Homo sapiens
cccatattcccatgg

SEQ ID NO: 1232308 - DNA, 15 bp, Homo sapiens
ccccatattcccatg

SEQ ID NO: 1232309 - DNA, 15 bp, Homo sapiens
tccccatattcccat

SEQ ID NO: 1232310 - DNA, 15 bp, Homo sapiens
ctccccatattccca

SEQ ID NO: 1232311 - DNA, 15 bp, Homo sapiens
tctccccatattccc

SEQ ID NO: 1232312 - DNA, 15 bp, Homo sapiens
gtctccccatattcc

SEQ ID NO: 1232313 - DNA, 15 bp, Homo sapiens
agtctccccatattc

SEQ ID NO: 1232314 - DNA, 15 bp, Homo sapiens
cagtctccccatatt

SEQ ID NO: 1232315 - DNA, 15 bp, Homo sapiens
tcagtctccccatat

SEQ ID NO: 1232316 - DNA, 15 bp, Homo sapiens
ttcagtctccccata

SEQ ID NO: 1232317 - DNA, 15 bp, Homo sapiens
attcagtctccccat

SEQ ID NO: 1232318 - DNA, 15 bp, Homo sapiens
tattcagtctcccca

SEQ ID NO: 1232319 - DNA, 15 bp, Homo sapiens
gtattcagtctcccc

SEQ ID NO: 1232320 - DNA, 15 bp, Homo sapiens
cgtattcagtctccc

SEQ ID NO: 1232321 - DNA, 15 bp, Homo sapiens
ccgtattcagtctcc

SEQ ID NO: 1232322 - DNA, 15 bp, Homo sapiens
cccgtattcagtctc

SEQ ID NO: 1232323 - DNA, 15 bp, Homo sapiens
ccccgtattcagtct

SEQ ID NO: 1232324 - DNA, 15 bp, Homo sapiens
cccccgtattcagtc

SEQ ID NO: 1232325 - DNA, 15 bp, Homo sapiens
tcccccgtattcagt

SEQ ID NO: 1232326 - DNA, 15 bp, Homo sapiens
ctcccccgtattcag

SEQ ID NO: 1232327 - DNA, 15 bp, Homo sapiens
tctcccccgtattca

SEQ ID NO: 1232328 - DNA, 15 bp, Homo sapiens
gtctcccccgtattc

SEQ ID NO: 1232329 - DNA, 15 bp, Homo sapiens
agtctcccccgtatt

SEQ ID NO: 1232330 - DNA, 15 bp, Homo sapiens
cagtctcccccgtat

SEQ ID NO: 1232331 - DNA, 15 bp, Homo sapiens
acagtctcccccgta

SEQ ID NO: 1232332 - DNA, 15 bp, Homo sapiens
cacagtctcccccgt

SEQ ID NO: 1232333 - DNA, 15 bp, Homo sapiens
acacagtctcccccg

SEQ ID NO: 1232334 - DNA, 15 bp, Homo sapiens
gacacagtctccccc

SEQ ID NO: 1232335 - DNA, 15 bp, Homo sapiens
cgacacagtctcccc

SEQ ID NO: 1232336 - DNA, 15 bp, Homo sapiens
tcgacacagtctccc

SEQ ID NO: 1232337 - DNA, 15 bp, Homo sapiens
atcgacacagtctcc

SEQ ID NO: 1232338 - DNA, 15 bp, Homo sapiens
tatcgacacagtctc

SEQ ID NO: 1232339 - DNA, 15 bp, Homo sapiens
atatcgacacagtct

SEQ ID NO: 1232340 - DNA, 15 bp, Homo sapiens
tatatcgacacagtc

SEQ ID NO: 1232341 - DNA, 15 bp, Homo sapiens
ttatatcgacacagt

SEQ ID NO: 1232342 - DNA, 15 bp, Homo sapiens
tttatatcgacacag

SEQ ID NO: 1232343 - DNA, 15 bp, Homo sapiens
ctttatatcgacaca

SEQ ID NO: 1232344 - DNA, 15 bp, Homo sapiens
cctttatatcgacac

SEQ ID NO: 1232345 - DNA, 15 bp, Homo sapiens
tcctttatatcgaca

SEQ ID NO: 1232346 - DNA, 15 bp, Homo sapiens
ctcctttatatcgac

SEQ ID NO: 1232347 - DNA, 15 bp, Homo sapiens
tctcctttatatcga

SEQ ID NO: 1232348 - DNA, 15 bp, Homo sapiens
atctcctttatatcg

SEQ ID NO: 1232349 - DNA, 15 bp, Homo sapiens
gatctcctttatatc

SEQ ID NO: 1232350 - DNA, 15 bp, Homo sapiens
tgatctcctttatat

SEQ ID NO: 1232351 - DNA, 15 bp, Homo sapiens
atgatctcctttata

SEQ ID NO: 1232352 - DNA, 15 bp, Homo sapiens
catgatctcctttat

SEQ ID NO: 1232353 - DNA, 15 bp, Homo sapiens
ccatgatctccttta

SEQ ID NO: 1232354 - DNA, 15 bp, Homo sapiens
cccatgatctccttt

SEQ ID NO: 1232355 - DNA, 15 bp, Homo sapiens
tcccatgatctcctt

SEQ ID NO: 1232356 - DNA, 15 bp, Homo sapiens
ttcccatgatctcct

SEQ ID NO: 1232357 - DNA, 15 bp, Homo sapiens
attcccatgatctcc

SEQ ID NO: 1232358 - DNA, 15 bp, Homo sapiens
tattcccatgatctc

SEQ ID NO: 1232359 - DNA, 15 bp, Homo sapiens
gtattcccatgatct

SEQ ID NO: 1232360 - DNA, 15 bp, Homo sapiens
cgtattcccatgatc

SEQ ID NO: 1232361 - DNA, 15 bp, Homo sapiens
ccgtattcccatgat

SEQ ID NO: 1232362 - DNA, 15 bp, Homo sapiens
cccgtattcccatga

SEQ ID NO: 1232363 - DNA, 15 bp, Homo sapiens
ccccgtattcccatg

SEQ ID NO: 1232364 - DNA, 15 bp, Homo sapiens
tccccgtattcccat

SEQ ID NO: 1232365 - DNA, 15 bp, Homo sapiens
ctccccgtattccca

SEQ ID NO: 1232366 - DNA, 15 bp, Homo sapiens
tctccccgtattccc

SEQ ID NO: 1232367 - DNA, 15 bp, Homo sapiens
gtctccccgtattcc

SEQ ID NO: 1232368 - DNA, 15 bp, Homo sapiens
ggtctccccgtattc

SEQ ID NO: 1232369 - DNA, 15 bp, Homo sapiens
tggtctccccgtatt

SEQ ID NO: 1232370 - DNA, 15 bp, Homo sapiens
atggtctccccgtat

SEQ ID NO: 1232371 - DNA, 15 bp, Homo sapiens
catggtctccccgta

SEQ ID NO: 1232372 - DNA, 15 bp, Homo sapiens
tcatggtctccccgt

SEQ ID NO: 1232373 - DNA, 15 bp, Homo sapiens
ctcatggtctccccg

SEQ ID NO: 1232374 - DNA, 15 bp, Homo sapiens
tctcatggtctcccc

SEQ ID NO: 1232375 - DNA, 15 bp, Homo sapiens
ttctcatggtctccc

SEQ ID NO: 1232376 - DNA, 15 bp, Homo sapiens
attctcatggtctcc

SEQ ID NO: 1232377 - DNA, 15 bp, Homo sapiens
tattctcatggtctc

SEQ ID NO: 1232378 - DNA, 15 bp, Homo sapiens
ctattctcatggtct

SEQ ID NO: 1232379 - DNA, 15 bp, Homo sapiens
cctattctcatggtc

SEQ ID NO: 1232380 - DNA, 15 bp, Homo sapiens
tcctattctcatggt

SEQ ID NO: 1232381 - DNA, 15 bp, Homo sapiens
ctcctattctcatgg

SEQ ID NO: 1232382 - DNA, 15 bp, Homo sapiens
cctcctattctcatg

SEQ ID NO: 1232383 - DNA, 15 bp, Homo sapiens
tcctcctattctcat

SEQ ID NO: 1232384 - DNA, 15 bp, Homo sapiens
ctcctcctattctca

SEQ ID NO: 1232385 - DNA, 15 bp, Homo sapiens
tctcctcctattctc

SEQ ID NO: 1232386 - DNA, 15 bp, Homo sapiens
gtctcctcctattct

SEQ ID NO: 1232387 - DNA, 15 bp, Homo sapiens
ggtctcctcctattc

SEQ ID NO: 1232388 - DNA, 15 bp, Homo sapiens
cggtctcctcctatt

SEQ ID NO: 1232389 - DNA, 15 bp, Homo sapiens
acggtctcctcctat

SEQ ID NO: 1232390 - DNA, 15 bp, Homo sapiens
cacggtctcctccta

SEQ ID NO: 1232391 - DNA, 15 bp, Homo sapiens
ccacggtctcctcct

SEQ ID NO: 1232392 - DNA, 15 bp, Homo sapiens
cccacggtctcctcc

SEQ ID NO: 1232393 - DNA, 15 bp, Homo sapiens
tcccacggtctcctc

SEQ ID NO: 1232394 - DNA, 15 bp, Homo sapiens
ttcccacggtctcct

SEQ ID NO: 1232395 - DNA, 15 bp, Homo sapiens
attcccacggtctcc

SEQ ID NO: 1232396 - DNA, 15 bp, Homo sapiens
tattcccacggtctc

SEQ ID NO: 1232397 - DNA, 15 bp, Homo sapiens
atattcccacggtct

SEQ ID NO: 1232398 - DNA, 15 bp, Homo sapiens
catattcccacggtc

SEQ ID NO: 1232399 - DNA, 15 bp, Homo sapiens
ccatattcccacggt

SEQ ID NO: 1232400 - DNA, 15 bp, Homo sapiens
cccatattcccacgg

SEQ ID NO: 1232401 - DNA, 15 bp, Homo sapiens
ccccatattcccacg

SEQ ID NO: 1232402 - DNA, 15 bp, Homo sapiens
tccccatattcccac

SEQ ID NO: 1232403 - DNA, 15 bp, Homo sapiens
cgtctccccatattc

SEQ ID NO: 1232404 - DNA, 15 bp, Homo sapiens
ccgtctccccatatt

SEQ ID NO: 1232405 - DNA, 15 bp, Homo sapiens
accgtctccccatat

SEQ ID NO: 1232406 - DNA, 15 bp, Homo sapiens
caccgtctccccata

SEQ ID NO: 1232407 - DNA, 15 bp, Homo sapiens
tcaccgtctccccat

SEQ ID NO: 1232408 - DNA, 15 bp, Homo sapiens
ctcaccgtctcccca

SEQ ID NO: 1232409 - DNA, 15 bp, Homo sapiens
tctcaccgtctcccc

SEQ ID NO: 1232410 - DNA, 15 bp, Homo sapiens
ttctcaccgtctccc

SEQ ID NO: 1232411 - DNA, 15 bp, Homo sapiens
attctcaccgtctcc

SEQ ID NO: 1232412 - DNA, 15 bp, Homo sapiens
tattctcaccgtctc

SEQ ID NO: 1232413 - DNA, 15 bp, Homo sapiens
atattctcaccgtct

SEQ ID NO: 1232414 - DNA, 15 bp, Homo sapiens
catattctcaccgtc

SEQ ID NO: 1232415 - DNA, 15 bp, Homo sapiens
ccatattctcaccgt

SEQ ID NO: 1232416 - DNA, 15 bp, Homo sapiens
cccatattctcaccg

SEQ ID NO: 1232417 - DNA, 15 bp, Homo sapiens
tcccatattctcacc

SEQ ID NO: 1232418 - DNA, 15 bp, Homo sapiens
ttcccatattctcac

SEQ ID NO: 1232419 - DNA, 15 bp, Homo sapiens
cttcccatattctca

SEQ ID NO: 1232420 - DNA, 15 bp, Homo sapiens
tcttcccatattctc

SEQ ID NO: 1232421 - DNA, 15 bp, Homo sapiens
gtcttcccatattct

SEQ ID NO: 1232422 - DNA, 15 bp, Homo sapiens
agtcttcccatattc

SEQ ID NO: 1232423 - DNA, 15 bp, Homo sapiens
cagtcttcccatatt

SEQ ID NO: 1232424 - DNA, 15 bp, Homo sapiens
gcagtcttcccatat

SEQ ID NO: 1232425 - DNA, 15 bp, Homo sapiens
tgcagtcttcccata

SEQ ID NO: 1232426 - DNA, 15 bp, Homo sapiens
ttgcagtcttcccat

SEQ ID NO: 1232427 - DNA, 15 bp, Homo sapiens
cttgcagtcttccca

SEQ ID NO: 1232428 - DNA, 15 bp, Homo sapiens
tcttgcagtcttccc

SEQ ID NO: 1232429 - DNA, 15 bp, Homo sapiens
ttcttgcagtcttcc

SEQ ID NO: 1232430 - DNA, 15 bp, Homo sapiens
attcttgcagtcttc

SEQ ID NO: 1232431 - DNA, 15 bp, Homo sapiens
tattcttgcagtctt

SEQ ID NO: 1232432 - DNA, 15 bp, Homo sapiens
atattcttgcagtct

SEQ ID NO: 1232433 - DNA, 15 bp, Homo sapiens
tatattcttgcagtc

SEQ ID NO: 1232434 - DNA, 15 bp, Homo sapiens
ctatattcttgcagt

SEQ ID NO: 1232435 - DNA, 15 bp, Homo sapiens
cctatattcttgcag

SEQ ID NO: 1232436 - DNA, 15 bp, Homo sapiens
ccctatattcttgca

SEQ ID NO: 1232437 - DNA, 15 bp, Homo sapiens
tccctatattcttgc

SEQ ID NO: 1232438 - DNA, 15 bp, Homo sapiens
ctccctatattcttg

SEQ ID NO: 1232439 - DNA, 15 bp, Homo sapiens
tctccctatattctt

SEQ ID NO: 1232440 - DNA, 15 bp, Homo sapiens
gtctccctatattct

SEQ ID NO: 1232441 - DNA, 15 bp, Homo sapiens
ggtctccctatattc

SEQ ID NO: 1232442 - DNA, 15 bp, Homo sapiens
tggtctccctatatt

SEQ ID NO: 1232443 - DNA, 15 bp, Homo sapiens
atggtctccctatat

SEQ ID NO: 1232444 - DNA, 15 bp, Homo sapiens
catggtctccctata

SEQ ID NO: 1232445 - DNA, 15 bp, Homo sapiens
ccatggtctccctat

SEQ ID NO: 1232446 - DNA, 15 bp, Homo sapiens
cccatggtctcccta

SEQ ID NO: 1232447 - DNA, 15 bp, Homo sapiens
tcccatggtctccct

SEQ ID NO: 1232448 - DNA, 15 bp, Homo sapiens
tagtctccccatatt

SEQ ID NO: 1232449 - DNA, 15 bp, Homo sapiens
atagtctccccatat

SEQ ID NO: 1232450 - DNA, 15 bp, Homo sapiens
catagtctccccata

SEQ ID NO: 1232451 - DNA, 15 bp, Homo sapiens
ccatagtctccccat

SEQ ID NO: 1232452 - DNA, 15 bp, Homo sapiens
cccatagtctcccca

SEQ ID NO: 1232453 - DNA, 15 bp, Homo sapiens
tcccatagtctcccc

SEQ ID NO: 1232454 - DNA, 15 bp, Homo sapiens
ttcccatagtctccc

SEQ ID NO: 1232455 - DNA, 15 bp, Homo sapiens
attcccatagtctcc

SEQ ID NO: 1232456 - DNA, 15 bp, Homo sapiens
tattcccatagtctc

SEQ ID NO: 1232457 - DNA, 15 bp, Homo sapiens
atattcccatagtct

SEQ ID NO: 1232458 - DNA, 15 bp, Homo sapiens
catattcccatagtc

SEQ ID NO: 1232459 - DNA, 15 bp, Homo sapiens
ccatattcccatagt

SEQ ID NO: 1232460 - DNA, 15 bp, Homo sapiens
cccatattcccatag

SEQ ID NO: 1232461 - DNA, 15 bp, Homo sapiens
ccccatattcccata

SEQ ID NO: 1232462 - DNA, 15 bp, Homo sapiens
atctccccatattcc

SEQ ID NO: 1232463 - DNA, 15 bp, Homo sapiens
gatctccccatattc

SEQ ID NO: 1232464 - DNA, 15 bp, Homo sapiens
tgatctccccatatt

SEQ ID NO: 1232465 - DNA, 15 bp, Homo sapiens
gtgatctccccatat

SEQ ID NO: 1232466 - DNA, 15 bp, Homo sapiens
tgtgatctccccata

SEQ ID NO: 1232467 - DNA, 15 bp, Homo sapiens
atgtgatctccccat

SEQ ID NO: 1232468 - DNA, 15 bp, Homo sapiens
catgtgatctcccca

SEQ ID NO: 1232469 - DNA, 15 bp, Homo sapiens
tcatgtgatctcccc

SEQ ID NO: 1232470 - DNA, 15 bp, Homo sapiens
ttcatgtgatctccc

SEQ ID NO: 1232471 - DNA, 15 bp, Homo sapiens
attcatgtgatctcc

SEQ ID NO: 1232472 - DNA, 15 bp, Homo sapiens
tattcatgtgatctc

SEQ ID NO: 1232473 - DNA, 15 bp, Homo sapiens
atattcatgtgatct

SEQ ID NO: 1232474 - DNA, 15 bp, Homo sapiens
catattcatgtgatc

SEQ ID NO: 1232475 - DNA, 15 bp, Homo sapiens
gcatattcatgtgat

SEQ ID NO: 1232476 - DNA, 15 bp, Homo sapiens
tgcatattcatgtga

SEQ ID NO: 1232477 - DNA, 15 bp, Homo sapiens
ctgcatattcatgtg

SEQ ID NO: 1232478 - DNA, 15 bp, Homo sapiens
cctgcatattcatgt

SEQ ID NO: 1232479 - DNA, 15 bp, Homo sapiens
tcctgcatattcatg

SEQ ID NO: 1232480 - DNA, 15 bp, Homo sapiens
ctcctgcatattcat

SEQ ID NO: 1232481 - DNA, 15 bp, Homo sapiens
tctcctgcatattca

SEQ ID NO: 1232482 - DNA, 15 bp, Homo sapiens
gtctcctgcatattc

SEQ ID NO: 1232483 - DNA, 15 bp, Homo sapiens
agtctcctgcatatt

SEQ ID NO: 1232484 - DNA, 15 bp, Homo sapiens
cagtctcctgcatat

SEQ ID NO: 1232485 - DNA, 15 bp, Homo sapiens
acagtctcctgcata

SEQ ID NO: 1232486 - DNA, 15 bp, Homo sapiens
cacagtctcctgcat

SEQ ID NO: 1232487 - DNA, 15 bp, Homo sapiens
tcacagtctcctgca

SEQ ID NO: 1232488 - DNA, 15 bp, Homo sapiens
ctcacagtctcctgc

SEQ ID NO: 1232489 - DNA, 15 bp, Homo sapiens
tctcacagtctcctg

SEQ ID NO: 1232490 - DNA, 15 bp, Homo sapiens
ttctcacagtctcct

SEQ ID NO: 1232491 - DNA, 15 bp, Homo sapiens
attctcacagtctcc

SEQ ID NO: 1232492 - DNA, 15 bp, Homo sapiens
tattctcacagtctc

SEQ ID NO: 1232493 - DNA, 15 bp, Homo sapiens
atattctcacagtct

SEQ ID NO: 1232494 - DNA, 15 bp, Homo sapiens
catattctcacagtc

SEQ ID NO: 1232495 - DNA, 15 bp, Homo sapiens
ccatattctcacagt

SEQ ID NO: 1232496 - DNA, 15 bp, Homo sapiens
cccatattctcacag

SEQ ID NO: 1232497 - DNA, 15 bp, Homo sapiens
ccccatattctcaca

SEQ ID NO: 1232498 - DNA, 15 bp, Homo sapiens
tccccatattctcac

SEQ ID NO: 1232499 - DNA, 15 bp, Homo sapiens
ctccccatattctca

SEQ ID NO: 1232500 - DNA, 15 bp, Homo sapiens
tctccccatattctc

SEQ ID NO: 1232501 - DNA, 15 bp, Homo sapiens
gtctccccatattct

SEQ ID NO: 1232502 - DNA, 15 bp, Homo sapiens
ggtctccccatattc

SEQ ID NO: 1232503 - DNA, 15 bp, Homo sapiens
cggtctccccatatt

SEQ ID NO: 1232504 - DNA, 15 bp, Homo sapiens
acggtctccccatat

SEQ ID NO: 1232505 - DNA, 15 bp, Homo sapiens
cacggtctccccata

SEQ ID NO: 1232506 - DNA, 15 bp, Homo sapiens
tcacggtctccccat

SEQ ID NO: 1232507 - DNA, 15 bp, Homo sapiens
ctcacggtctcccca

SEQ ID NO: 1232508 - DNA, 15 bp, Homo sapiens
tctcacggtctcccc

SEQ ID NO: 1232509 - DNA, 15 bp, Homo sapiens
ttctcacggtctccc

SEQ ID NO: 1232510 - DNA, 15 bp, Homo sapiens
attctcacggtctcc

SEQ ID NO: 1232511 - DNA, 15 bp, Homo sapiens
tattctcacggtctc

SEQ ID NO: 1232512 - DNA, 15 bp, Homo sapiens
atattctcacggtct

SEQ ID NO: 1232513 - DNA, 15 bp, Homo sapiens
catattctcacggtc

SEQ ID NO: 1232514 - DNA, 15 bp, Homo sapiens
ccatattctcacggt

SEQ ID NO: 1232515 - DNA, 15 bp, Homo sapiens
cccatattctcacgg

SEQ ID NO: 1232516 - DNA, 15 bp, Homo sapiens
ccccatattctcacg

SEQ ID NO: 1232517 - DNA, 15 bp, Homo sapiens
acagtctccccatat

SEQ ID NO: 1232518 - DNA, 15 bp, Homo sapiens
cacagtctccccata

SEQ ID NO: 1232519 - DNA, 15 bp, Homo sapiens
ccacagtctccccat

SEQ ID NO: 1232520 - DNA, 15 bp, Homo sapiens
cccacagtctcccca

SEQ ID NO: 1232521 - DNA, 15 bp, Homo sapiens
tcccacagtctcccc

SEQ ID NO: 1232522 - DNA, 15 bp, Homo sapiens
ttcccacagtctccc

SEQ ID NO: 1232523 - DNA, 15 bp, Homo sapiens
attcccacagtctcc

SEQ ID NO: 1232524 - DNA, 15 bp, Homo sapiens
tattcccacagtctc

SEQ ID NO: 1232525 - DNA, 15 bp, Homo sapiens
atattcccacagtct

SEQ ID NO: 1232526 - DNA, 15 bp, Homo sapiens
catattcccacagtc

SEQ ID NO: 1232527 - DNA, 15 bp, Homo sapiens
tcatattcccacagt

SEQ ID NO: 1232528 - DNA, 15 bp, Homo sapiens
ctcatattcccacag

SEQ ID NO: 1232529 - DNA, 15 bp, Homo sapiens
cctcatattcccaca

SEQ ID NO: 1232530 - DNA, 15 bp, Homo sapiens
tcctcatattcccac

SEQ ID NO: 1232531 - DNA, 15 bp, Homo sapiens
ttcctcatattccca

SEQ ID NO: 1232532 - DNA, 15 bp, Homo sapiens
tttcctcatattccc

SEQ ID NO: 1232533 - DNA, 15 bp, Homo sapiens
ctttcctcatattcc

SEQ ID NO: 1232534 - DNA, 15 bp, Homo sapiens
actttcctcatattc

SEQ ID NO: 1232535 - DNA, 15 bp, Homo sapiens
cactttcctcatatt

SEQ ID NO: 1232536 - DNA, 15 bp, Homo sapiens
acactttcctcatat

SEQ ID NO: 1232537 - DNA, 15 bp, Homo sapiens
cacactttcctcata

SEQ ID NO: 1232538 - DNA, 15 bp, Homo sapiens
tcacactttcctcat

SEQ ID NO: 1232539 - DNA, 15 bp, Homo sapiens
ttcacactttcctca

SEQ ID NO: 1232540 - DNA, 15 bp, Homo sapiens
attcacactttcctc

SEQ ID NO: 1232541 - DNA, 15 bp, Homo sapiens
tattcacactttcct

SEQ ID NO: 1232542 - DNA, 15 bp, Homo sapiens
atattcacactttcc

SEQ ID NO: 1232543 - DNA, 15 bp, Homo sapiens
catattcacactttc

SEQ ID NO: 1232544 - DNA, 15 bp, Homo sapiens
ccatattcacacttt

SEQ ID NO: 1232545 - DNA, 15 bp, Homo sapiens
cccatattcacactt

SEQ ID NO: 1232546 - DNA, 15 bp, Homo sapiens
ccccatattcacact

SEQ ID NO: 1232547 - DNA, 15 bp, Homo sapiens
cccccatattcacac

SEQ ID NO: 1232548 - DNA, 15 bp, Homo sapiens
tcccccatattcaca

SEQ ID NO: 1232549 - DNA, 15 bp, Homo sapiens
ctcccccatattcac

SEQ ID NO: 1232550 - DNA, 15 bp, Homo sapiens
tctcccccatattca

SEQ ID NO: 1232551 - DNA, 15 bp, Homo sapiens
gtctcccccatattc

SEQ ID NO: 1232552 - DNA, 15 bp, Homo sapiens
ggtctcccccatatt

SEQ ID NO: 1232553 - DNA, 15 bp, Homo sapiens
tggtctcccccatat

SEQ ID NO: 1232554 - DNA, 15 bp, Homo sapiens
atggtctcccccata

SEQ ID NO: 1232555 - DNA, 15 bp, Homo sapiens
catggtctcccccat

SEQ ID NO: 1232556 - DNA, 15 bp, Homo sapiens
acatggtctccccca

SEQ ID NO: 1232557 - DNA, 15 bp, Homo sapiens
gacatggtctccccc

SEQ ID NO: 1232558 - DNA, 15 bp, Homo sapiens
tgacatggtctcccc

SEQ ID NO: 1232559 - DNA, 15 bp, Homo sapiens
ttgacatggtctccc

SEQ ID NO: 1232560 - DNA, 15 bp, Homo sapiens
attgacatggtctcc

SEQ ID NO: 1232561 - DNA, 15 bp, Homo sapiens
tattgacatggtctc

SEQ ID NO: 1232562 - DNA, 15 bp, Homo sapiens
atattgacatggtct

SEQ ID NO: 1232563 - DNA, 15 bp, Homo sapiens
tatattgacatggtc

SEQ ID NO: 1232564 - DNA, 15 bp, Homo sapiens
ttatattgacatggt

SEQ ID NO: 1232565 - DNA, 15 bp, Homo sapiens
tttatattgacatgg

SEQ ID NO: 1232566 - DNA, 15 bp, Homo sapiens
ctttatattgacatg

SEQ ID NO: 1232567 - DNA, 15 bp, Homo sapiens
cctttatattgacat

SEQ ID NO: 1232568 - DNA, 15 bp, Homo sapiens
tcctttatattgaca

SEQ ID NO: 1232569 - DNA, 15 bp, Homo sapiens
ctcctttatattgac

SEQ ID NO: 1232570 - DNA, 15 bp, Homo sapiens
gctcctttatattga

SEQ ID NO: 1232571 - DNA, 15 bp, Homo sapiens
ggctcctttatattg

SEQ ID NO: 1232572 - DNA, 15 bp, Homo sapiens
cggctcctttatatt

SEQ ID NO: 1232573 - DNA, 15 bp, Homo sapiens
acggctcctttatat

SEQ ID NO: 1232574 - DNA, 15 bp, Homo sapiens
cacggctcctttata

SEQ ID NO: 1232575 - DNA, 15 bp, Homo sapiens
ccacggctcctttat

SEQ ID NO: 1232576 - DNA, 15 bp, Homo sapiens
cccacggctccttta

SEQ ID NO: 1232577 - DNA, 15 bp, Homo sapiens
tcccacggctccttt

SEQ ID NO: 1232578 - DNA, 15 bp, Homo sapiens
ttcccacggctcctt

SEQ ID NO: 1232579 - DNA, 15 bp, Homo sapiens
attcccacggctcct

SEQ ID NO: 1232580 - DNA, 15 bp, Homo sapiens
tattcccacggctcc

SEQ ID NO: 1232581 - DNA, 15 bp, Homo sapiens
atattcccacggctc

SEQ ID NO: 1232582 - DNA, 15 bp, Homo sapiens
catattcccacggct

SEQ ID NO: 1232583 - DNA, 15 bp, Homo sapiens
ccatattcccacggc

SEQ ID NO: 1232584 - DNA, 15 bp, Homo sapiens
ccatattcccacagt

SEQ ID NO: 1232585 - DNA, 15 bp, Homo sapiens
cccatattcccacag

SEQ ID NO: 1232586 - DNA, 15 bp, Homo sapiens
tcccatattcccaca

SEQ ID NO: 1232587 - DNA, 15 bp, Homo sapiens
ctcccatattcccac

SEQ ID NO: 1232588 - DNA, 15 bp, Homo sapiens
tctcccatattccca

SEQ ID NO: 1232589 - DNA, 15 bp, Homo sapiens
ctctcccatattccc

SEQ ID NO: 1232590 - DNA, 15 bp, Homo sapiens
tctctcccatattcc

SEQ ID NO: 1232591 - DNA, 15 bp, Homo sapiens
ctctctcccatattc

SEQ ID NO: 1232592 - DNA, 15 bp, Homo sapiens
tctctctcccatatt

SEQ ID NO: 1232593 - DNA, 15 bp, Homo sapiens
ctctctctcccatat

SEQ ID NO: 1232594 - DNA, 15 bp, Homo sapiens
actctctctcccata

SEQ ID NO: 1232595 - DNA, 15 bp, Homo sapiens
cactctctctcccat

SEQ ID NO: 1232596 - DNA, 15 bp, Homo sapiens
acactctctctccca

SEQ ID NO: 1232597 - DNA, 15 bp, Homo sapiens
gacactctctctccc

SEQ ID NO: 1232598 - DNA, 15 bp, Homo sapiens
tgacactctctctcc

SEQ ID NO: 1232599 - DNA, 15 bp, Homo sapiens
ttgacactctctctc

SEQ ID NO: 1232600 - DNA, 15 bp, Homo sapiens
attgacactctctct

SEQ ID NO: 1232601 - DNA, 15 bp, Homo sapiens
tattgacactctctc

SEQ ID NO: 1232602 - DNA, 15 bp, Homo sapiens
atattgacactctct

SEQ ID NO: 1232603 - DNA, 15 bp, Homo sapiens
tatattgacactctc

SEQ ID NO: 1232604 - DNA, 15 bp, Homo sapiens
ttatattgacactct

SEQ ID NO: 1232605 - DNA, 15 bp, Homo sapiens
tttatattgacactc

SEQ ID NO: 1232606 - DNA, 15 bp, Homo sapiens
ctttatattgacact

SEQ ID NO: 1232607 - DNA, 15 bp, Homo sapiens
cctttatattgacac

SEQ ID NO: 1232608 - DNA, 15 bp, Homo sapiens
tctcctttatattga

SEQ ID NO: 1232609 - DNA, 15 bp, Homo sapiens
gtctcctttatattg

SEQ ID NO: 1232610 - DNA, 15 bp, Homo sapiens
agtctcctttatatt

SEQ ID NO: 1232611 - DNA, 15 bp, Homo sapiens
cagtctcctttatat

SEQ ID NO: 1232612 - DNA, 15 bp, Homo sapiens
acagtctcctttata

SEQ ID NO: 1232613 - DNA, 15 bp, Homo sapiens
cacagtctcctttat

SEQ ID NO: 1232614 - DNA, 15 bp, Homo sapiens
ccacagtctccttta

SEQ ID NO: 1232615 - DNA, 15 bp, Homo sapiens
cccacagtctccttt

SEQ ID NO: 1232616 - DNA, 15 bp, Homo sapiens
tcccacagtctcctt

SEQ ID NO: 1232617 - DNA, 15 bp, Homo sapiens
ttcccacagtctcct

SEQ ID NO: 1232618 - DNA, 15 bp, Homo sapiens
ctattcccacagtct

SEQ ID NO: 1232619 - DNA, 15 bp, Homo sapiens
cctattcccacagtc

SEQ ID NO: 1232620 - DNA, 15 bp, Homo sapiens
ccctattcccacagt

SEQ ID NO: 1232621 - DNA, 15 bp, Homo sapiens
cccctattcccacag

SEQ ID NO: 1232622 - DNA, 15 bp, Homo sapiens
ccccctattcccaca

SEQ ID NO: 1232623 - DNA, 15 bp, Homo sapiens
tccccctattcccac

SEQ ID NO: 1232624 - DNA, 15 bp, Homo sapiens
ctccccctattccca

SEQ ID NO: 1232625 - DNA, 15 bp, Homo sapiens
tctccccctattccc

SEQ ID NO: 1232626 - DNA, 15 bp, Homo sapiens
gtctccccctattcc

SEQ ID NO: 1232627 - DNA, 15 bp, Homo sapiens
ggtctccccctattc

SEQ ID NO: 1232628 - DNA, 15 bp, Homo sapiens
cggtctccccctatt

SEQ ID NO: 1232629 - DNA, 15 bp, Homo sapiens
acggtctccccctat

SEQ ID NO: 1232630 - DNA, 15 bp, Homo sapiens
cacggtctcccccta

SEQ ID NO: 1232631 - DNA, 15 bp, Homo sapiens
ccacggtctccccct

SEQ ID NO: 1232632 - DNA, 15 bp, Homo sapiens
cccacggtctccccc

SEQ ID NO: 1232633 - DNA, 15 bp, Homo sapiens
tcccacggtctcccc

SEQ ID NO: 1232634 - DNA, 15 bp, Homo sapiens
ttcccacggtctccc

SEQ ID NO: 1232635 - DNA, 15 bp, Homo sapiens
tcatattcccacggt

SEQ ID NO: 1232636 - DNA, 15 bp, Homo sapiens
ttcatattcccacgg

SEQ ID NO: 1232637 - DNA, 15 bp, Homo sapiens
cttcatattcccacg

SEQ ID NO: 1232638 - DNA, 15 bp, Homo sapiens
tcttcatattcccac

SEQ ID NO: 1232639 - DNA, 15 bp, Homo sapiens
ctcttcatattccca

SEQ ID NO: 1232640 - DNA, 15 bp, Homo sapiens
tctcttcatattccc

SEQ ID NO: 1232641 - DNA, 15 bp, Homo sapiens
gtctcttcatattcc

SEQ ID NO: 1232642 - DNA, 15 bp, Homo sapiens
agtctcttcatattc

SEQ ID NO: 1232643 - DNA, 15 bp, Homo sapiens
cagtctcttcatatt

SEQ ID NO: 1232644 - DNA, 15 bp, Homo sapiens
acagtctcttcatat

SEQ ID NO: 1232645 - DNA, 15 bp, Homo sapiens
cacagtctcttcata

SEQ ID NO: 1232646 - DNA, 15 bp, Homo sapiens
acacagtctcttcat

SEQ ID NO: 1232647 - DNA, 15 bp, Homo sapiens
cacacagtctcttca

SEQ ID NO: 1232648 - DNA, 15 bp, Homo sapiens
tcacacagtctcttc

SEQ ID NO: 1232649 - DNA, 15 bp, Homo sapiens
ttcacacagtctctt

SEQ ID NO: 1232650 - DNA, 15 bp, Homo sapiens
attcacacagtctct

SEQ ID NO: 1232651 - DNA, 15 bp, Homo sapiens
tattcacacagtctc

SEQ ID NO: 1232652 - DNA, 15 bp, Homo sapiens
atattcacacagtct

SEQ ID NO: 1232653 - DNA, 15 bp, Homo sapiens
catattcacacagtc

SEQ ID NO: 1232654 - DNA, 15 bp, Homo sapiens
ccatattcacacagt

SEQ ID NO: 1232655 - DNA, 15 bp, Homo sapiens
cccatattcacacag

SEQ ID NO: 1232656 - DNA, 15 bp, Homo sapiens
ccccatattcacaca

SEQ ID NO: 1232657 - DNA, 15 bp, Homo sapiens
atctcctttatattg

SEQ ID NO: 1232658 - DNA, 15 bp, Homo sapiens
gatctcctttatatt

SEQ ID NO: 1232659 - DNA, 15 bp, Homo sapiens
cgatctcctttatat

SEQ ID NO: 1232660 - DNA, 15 bp, Homo sapiens
acgatctcctttata

SEQ ID NO: 1232661 - DNA, 15 bp, Homo sapiens
gacgatctcctttat

SEQ ID NO: 1232662 - DNA, 15 bp, Homo sapiens
cgacgatctccttta

SEQ ID NO: 1232663 - DNA, 15 bp, Homo sapiens
ccgacgatctccttt

SEQ ID NO: 1232664 - DNA, 15 bp, Homo sapiens
tccgacgatctcctt

SEQ ID NO: 1232665 - DNA, 15 bp, Homo sapiens
ttccgacgatctcct

SEQ ID NO: 1232666 - DNA, 15 bp, Homo sapiens
attccgacgatctcc

SEQ ID NO: 1232667 - DNA, 15 bp, Homo sapiens
tattccgacgatctc

SEQ ID NO: 1232668 - DNA, 15 bp, Homo sapiens
atattccgacgatct

SEQ ID NO: 1232669 - DNA, 15 bp, Homo sapiens
catattccgacgatc

SEQ ID NO: 1232670 - DNA, 15 bp, Homo sapiens
ccatattccgacgat

SEQ ID NO: 1232671 - DNA, 15 bp, Homo sapiens
cccatattccgacga

SEQ ID NO: 1232672 - DNA, 15 bp, Homo sapiens
ccccatattccgacg

SEQ ID NO: 1232673 - DNA, 15 bp, Homo sapiens
tccccatattccgac

SEQ ID NO: 1232674 - DNA, 15 bp, Homo sapiens
ctccccatattccga

SEQ ID NO: 1232675 - DNA, 15 bp, Homo sapiens
tctccccatattccg

SEQ ID NO: 1232676 - DNA, 15 bp, Homo sapiens
aatctccccatattc

SEQ ID NO: 1232677 - DNA, 15 bp, Homo sapiens
caatctccccatatt

SEQ ID NO: 1232678 - DNA, 15 bp, Homo sapiens
acaatctccccatat

SEQ ID NO: 1232679 - DNA, 15 bp, Homo sapiens
cacaatctccccata

SEQ ID NO: 1232680 - DNA, 15 bp, Homo sapiens
gcacaatctccccat

SEQ ID NO: 1232681 - DNA, 15 bp, Homo sapiens
cgcacaatctcccca

SEQ ID NO: 1232682 - DNA, 15 bp, Homo sapiens
tcgcacaatctcccc

SEQ ID NO: 1232683 - DNA, 15 bp, Homo sapiens
ttcgcacaatctccc

SEQ ID NO: 1232684 - DNA, 15 bp, Homo sapiens
attcgcacaatctcc

SEQ ID NO: 1232685 - DNA, 15 bp, Homo sapiens
tattcgcacaatctc

SEQ ID NO: 1232686 - DNA, 15 bp, Homo sapiens
atattcgcacaatct

SEQ ID NO: 1232687 - DNA, 15 bp, Homo sapiens
catattcgcacaatc

SEQ ID NO: 1232688 - DNA, 15 bp, Homo sapiens
ccatattcgcacaat

SEQ ID NO: 1232689 - DNA, 15 bp, Homo sapiens
cccatattcgcacaa

SEQ ID NO: 1232690 - DNA, 15 bp, Homo sapiens
ccccatattcgcaca

SEQ ID NO: 1232691 - DNA, 15 bp, Homo sapiens
tccccatattcgcac

SEQ ID NO: 1232692 - DNA, 15 bp, Homo sapiens
ctccccatattcgca

SEQ ID NO: 1232693 - DNA, 15 bp, Homo sapiens
tctccccatattcgc

SEQ ID NO: 1232694 - DNA, 15 bp, Homo sapiens
gtctccccatattcg

SEQ ID NO: 1232695 - DNA, 15 bp, Homo sapiens
tggtctccccatatt

SEQ ID NO: 1232696 - DNA, 15 bp, Homo sapiens
atggtctccccatat

SEQ ID NO: 1232697 - DNA, 15 bp, Homo sapiens
catggtctccccata

SEQ ID NO: 1232698 - DNA, 15 bp, Homo sapiens
ccatggtctccccat

SEQ ID NO: 1232699 - DNA, 15 bp, Homo sapiens
ccccatattcccaca

SEQ ID NO: 1232700 - DNA, 15 bp, Homo sapiens
atgatctccccatat

SEQ ID NO: 1232701 - DNA, 15 bp, Homo sapiens
catgatctccccata

SEQ ID NO: 1232702 - DNA, 15 bp, Homo sapiens
acatgatctccccat

SEQ ID NO: 1232703 - DNA, 15 bp, Homo sapiens
cacatgatctcccca

SEQ ID NO: 1232704 - DNA, 15 bp, Homo sapiens
tcacatgatctcccc

SEQ ID NO: 1232705 - DNA, 15 bp, Homo sapiens
ttcacatgatctccc

SEQ ID NO: 1232706 - DNA, 15 bp, Homo sapiens
attcacatgatctcc

SEQ ID NO: 1232707 - DNA, 15 bp, Homo sapiens
tattcacatgatctc

SEQ ID NO: 1232708 - DNA, 15 bp, Homo sapiens
atattcacatgatct

SEQ ID NO: 1232709 - DNA, 15 bp, Homo sapiens
catattcacatgatc

SEQ ID NO: 1232710 - DNA, 15 bp, Homo sapiens
gcatattcacatgat

SEQ ID NO: 1232711 - DNA, 15 bp, Homo sapiens
tgcatattcacatga

SEQ ID NO: 1232712 - DNA, 15 bp, Homo sapiens
ctgcatattcacatg

SEQ ID NO: 1232713 - DNA, 15 bp, Homo sapiens
cctgcatattcacat

SEQ ID NO: 1232714 - DNA, 15 bp, Homo sapiens
tcctgcatattcaca

SEQ ID NO: 1232715 - DNA, 15 bp, Homo sapiens
ctcctgcatattcac

SEQ ID NO: 1232716 - DNA, 15 bp, Homo sapiens
ggtctcctgcatatt

SEQ ID NO: 1232717 - DNA, 15 bp, Homo sapiens
cggtctcctgcatat

SEQ ID NO: 1232718 - DNA, 15 bp, Homo sapiens
acggtctcctgcata

SEQ ID NO: 1232719 - DNA, 15 bp, Homo sapiens
cacggtctcctgcat

SEQ ID NO: 1232720 - DNA, 15 bp, Homo sapiens
acacggtctcctgca

SEQ ID NO: 1232721 - DNA, 15 bp, Homo sapiens
gacacggtctcctgc

SEQ ID NO: 1232722 - DNA, 15 bp, Homo sapiens
tgacacggtctcctg

SEQ ID NO: 1232723 - DNA, 15 bp, Homo sapiens
ttgacacggtctcct

SEQ ID NO: 1232724 - DNA, 15 bp, Homo sapiens
attgacacggtctcc

SEQ ID NO: 1232725 - DNA, 15 bp, Homo sapiens
tattgacacggtctc

SEQ ID NO: 1232726 - DNA, 15 bp, Homo sapiens
atattgacacggtct

SEQ ID NO: 1232727 - DNA, 15 bp, Homo sapiens
tatattgacacggtc

SEQ ID NO: 1232728 - DNA, 15 bp, Homo sapiens
ttatattgacacggt

SEQ ID NO: 1232729 - DNA, 15 bp, Homo sapiens
tttatattgacacgg

SEQ ID NO: 1232730 - DNA, 15 bp, Homo sapiens
ctttatattgacacg

SEQ ID NO: 1232731 - DNA, 15 bp, Homo sapiens
tgtctcctttatatt

SEQ ID NO: 1232732 - DNA, 15 bp, Homo sapiens
ctgtctcctttatat

SEQ ID NO: 1232733 - DNA, 15 bp, Homo sapiens
actgtctcctttata

SEQ ID NO: 1232734 - DNA, 15 bp, Homo sapiens
cactgtctcctttat

SEQ ID NO: 1232735 - DNA, 15 bp, Homo sapiens
ccactgtctccttta

SEQ ID NO: 1232736 - DNA, 15 bp, Homo sapiens
cccactgtctccttt

SEQ ID NO: 1232737 - DNA, 15 bp, Homo sapiens
ccccactgtctcctt

SEQ ID NO: 1232738 - DNA, 15 bp, Homo sapiens
tccccactgtctcct

SEQ ID NO: 1232739 - DNA, 15 bp, Homo sapiens
atccccactgtctcc

SEQ ID NO: 1232740 - DNA, 15 bp, Homo sapiens
tatccccactgtctc

SEQ ID NO: 1232741 - DNA, 15 bp, Homo sapiens
atatccccactgtct

SEQ ID NO: 1232742 - DNA, 15 bp, Homo sapiens
catatccccactgtc

SEQ ID NO: 1232743 - DNA, 15 bp, Homo sapiens
ccatatccccactgt

SEQ ID NO: 1232744 - DNA, 15 bp, Homo sapiens
cccatatccccactg

SEQ ID NO: 1232745 - DNA, 15 bp, Homo sapiens
ccccatatccccact

SEQ ID NO: 1232746 - DNA, 15 bp, Homo sapiens
tccccatatccccac

SEQ ID NO: 1232747 - DNA, 15 bp, Homo sapiens
ctccccatatcccca

SEQ ID NO: 1232748 - DNA, 15 bp, Homo sapiens
tctccccatatcccc

SEQ ID NO: 1232749 - DNA, 15 bp, Homo sapiens
gtctccccatatccc

SEQ ID NO: 1232750 - DNA, 15 bp, Homo sapiens
ggtctccccatatcc

SEQ ID NO: 1232751 - DNA, 15 bp, Homo sapiens
tggtctccccatatc

SEQ ID NO: 1232752 - DNA, 15 bp, Homo sapiens
tcatggtctccccat

SEQ ID NO: 1232753 - DNA, 15 bp, Homo sapiens
ctcatggtctcccca

SEQ ID NO: 1232754 - DNA, 15 bp, Homo sapiens
atattctcatggtct

SEQ ID NO: 1232755 - DNA, 15 bp, Homo sapiens
tatattctcatggtc

SEQ ID NO: 1232756 - DNA, 15 bp, Homo sapiens
ctatattctcatggt

SEQ ID NO: 1232757 - DNA, 15 bp, Homo sapiens
cctatattctcatgg

SEQ ID NO: 1232758 - DNA, 15 bp, Homo sapiens
ccctatattctcatg

SEQ ID NO: 1232759 - DNA, 15 bp, Homo sapiens
tccctatattctcat

SEQ ID NO: 1232760 - DNA, 15 bp, Homo sapiens
ctccctatattctca

SEQ ID NO: 1232761 - DNA, 15 bp, Homo sapiens
tctccctatattctc

SEQ ID NO: 1232762 - DNA, 15 bp, Homo sapiens
tcatattcccatggt

SEQ ID NO: 1232763 - DNA, 15 bp, Homo sapiens
ttcatattcccatgg

SEQ ID NO: 1232764 - DNA, 15 bp, Homo sapiens
cttcatattcccatg

SEQ ID NO: 1232765 - DNA, 15 bp, Homo sapiens
tcttcatattcccat

SEQ ID NO: 1232766 - DNA, 15 bp, Homo sapiens
ttcttcatattccca

SEQ ID NO: 1232767 - DNA, 15 bp, Homo sapiens
tttcttcatattccc

SEQ ID NO: 1232768 - DNA, 15 bp, Homo sapiens
gtttcttcatattcc

SEQ ID NO: 1232769 - DNA, 15 bp, Homo sapiens
agtttcttcatattc

SEQ ID NO: 1232770 - DNA, 15 bp, Homo sapiens
cagtttcttcatatt

SEQ ID NO: 1232771 - DNA, 15 bp, Homo sapiens
acagtttcttcatat

SEQ ID NO: 1232772 - DNA, 15 bp, Homo sapiens
cacagtttcttcata

SEQ ID NO: 1232773 - DNA, 15 bp, Homo sapiens
acacagtttcttcat

SEQ ID NO: 1232774 - DNA, 15 bp, Homo sapiens
cacacagtttcttca

SEQ ID NO: 1232775 - DNA, 15 bp, Homo sapiens
tcacacagtttcttc

SEQ ID NO: 1232776 - DNA, 15 bp, Homo sapiens
ttcacacagtttctt

SEQ ID NO: 1232777 - DNA, 15 bp, Homo sapiens
attcacacagtttct

SEQ ID NO: 1232778 - DNA, 15 bp, Homo sapiens
tattcacacagtttc

SEQ ID NO: 1232779 - DNA, 15 bp, Homo sapiens
atattcacacagttt

SEQ ID NO: 1232780 - DNA, 15 bp, Homo sapiens
catattcacacagtt

SEQ ID NO: 1232781 - DNA, 15 bp, Homo sapiens
agtctcccccatatt

SEQ ID NO: 1232782 - DNA, 15 bp, Homo sapiens
cagtctcccccatat

SEQ ID NO: 1232783 - DNA, 15 bp, Homo sapiens
ccagtctcccccata

SEQ ID NO: 1232784 - DNA, 15 bp, Homo sapiens
cccagtctcccccat

SEQ ID NO: 1232785 - DNA, 15 bp, Homo sapiens
tcccagtctccccca

SEQ ID NO: 1232786 - DNA, 15 bp, Homo sapiens
ctcccagtctccccc

SEQ ID NO: 1232787 - DNA, 15 bp, Homo sapiens
actcccagtctcccc

SEQ ID NO: 1232788 - DNA, 15 bp, Homo sapiens
tactcccagtctccc

SEQ ID NO: 1232789 - DNA, 15 bp, Homo sapiens
atactcccagtctcc

SEQ ID NO: 1232790 - DNA, 15 bp, Homo sapiens
catactcccagtctc

SEQ ID NO: 1232791 - DNA, 15 bp, Homo sapiens
ccatactcccagtct

SEQ ID NO: 1232792 - DNA, 15 bp, Homo sapiens
cccatactcccagtc

SEQ ID NO: 1232793 - DNA, 15 bp, Homo sapiens
ccccatactcccagt

SEQ ID NO: 1232794 - DNA, 15 bp, Homo sapiens
tccccatactcccag

SEQ ID NO: 1232795 - DNA, 15 bp, Homo sapiens
ctccccatactccca

SEQ ID NO: 1232796 - DNA, 15 bp, Homo sapiens
tctccccatactccc

SEQ ID NO: 1232797 - DNA, 15 bp, Homo sapiens
gtctccccatactcc

SEQ ID NO: 1232798 - DNA, 15 bp, Homo sapiens
agtctccccatactc

SEQ ID NO: 1232799 - DNA, 15 bp, Homo sapiens
gagtctccccatact

SEQ ID NO: 1232800 - DNA, 15 bp, Homo sapiens
agagtctccccatac

SEQ ID NO: 1232801 - DNA, 15 bp, Homo sapiens
tagagtctccccata

SEQ ID NO: 1232802 - DNA, 15 bp, Homo sapiens
ctagagtctccccat

SEQ ID NO: 1232803 - DNA, 15 bp, Homo sapiens
actagagtctcccca

SEQ ID NO: 1232804 - DNA, 15 bp, Homo sapiens
tactagagtctcccc

SEQ ID NO: 1232805 - DNA, 15 bp, Homo sapiens
ttactagagtctccc

SEQ ID NO: 1232806 - DNA, 15 bp, Homo sapiens
attactagagtctcc

SEQ ID NO: 1232807 - DNA, 15 bp, Homo sapiens
tattactagagtctc

SEQ ID NO: 1232808 - DNA, 15 bp, Homo sapiens
atattactagagtct

SEQ ID NO: 1232809 - DNA, 15 bp, Homo sapiens
catattactagagtc

SEQ ID NO: 1232810 - DNA, 15 bp, Homo sapiens
ccatattactagagt

SEQ ID NO: 1232811 - DNA, 15 bp, Homo sapiens
cccatattactagag

SEQ ID NO: 1232812 - DNA, 15 bp, Homo sapiens
ccccatattactaga

SEQ ID NO: 1232813 - DNA, 15 bp, Homo sapiens
tccccatattactag

SEQ ID NO: 1232814 - DNA, 15 bp, Homo sapiens
ctccccatattacta

SEQ ID NO: 1232815 - DNA, 15 bp, Homo sapiens
tctccccatattact

SEQ ID NO: 1232816 - DNA, 15 bp, Homo sapiens
gtctccccatattac

SEQ ID NO: 1232817 - DNA, 15 bp, Homo sapiens
agtctccccatatta

SEQ ID NO: 1232818 - DNA, 15 bp, Homo sapiens
ccagtctccccatat

SEQ ID NO: 1232819 - DNA, 15 bp, Homo sapiens
cccagtctccccata

SEQ ID NO: 1232820 - DNA, 15 bp, Homo sapiens
tcccagtctccccat

SEQ ID NO: 1232821 - DNA, 15 bp, Homo sapiens
ttcccagtctcccca

SEQ ID NO: 1232822 - DNA, 15 bp, Homo sapiens
attcccagtctcccc

SEQ ID NO: 1232823 - DNA, 15 bp, Homo sapiens
tattcccagtctccc

SEQ ID NO: 1232824 - DNA, 15 bp, Homo sapiens
atattcccagtctcc

SEQ ID NO: 1232825 - DNA, 15 bp, Homo sapiens
catattcccagtctc

SEQ ID NO: 1232826 - DNA, 15 bp, Homo sapiens
tcatattcccagtct

SEQ ID NO: 1232827 - DNA, 15 bp, Homo sapiens
ctcatattcccagtc

SEQ ID NO: 1232828 - DNA, 15 bp, Homo sapiens
cctcatattcccagt

SEQ ID NO: 1232829 - DNA, 15 bp, Homo sapiens
tcctcatattcccag

SEQ ID NO: 1232830 - DNA, 15 bp, Homo sapiens
gtttcctcatattcc

SEQ ID NO: 1232831 - DNA, 15 bp, Homo sapiens
agtttcctcatattc

SEQ ID NO: 1232832 - DNA, 15 bp, Homo sapiens
cagtttcctcatatt

SEQ ID NO: 1232833 - DNA, 15 bp, Homo sapiens
acagtttcctcatat

SEQ ID NO: 1232834 - DNA, 15 bp, Homo sapiens
cacagtttcctcata

SEQ ID NO: 1232835 - DNA, 15 bp, Homo sapiens
tcacagtttcctcat

SEQ ID NO: 1232836 - DNA, 15 bp, Homo sapiens
ttcacagtttcctca

SEQ ID NO: 1232837 - DNA, 15 bp, Homo sapiens
attcacagtttcctc

SEQ ID NO: 1232838 - DNA, 15 bp, Homo sapiens
tattcacagtttcct

SEQ ID NO: 1232839 - DNA, 15 bp, Homo sapiens
atattcacagtttcc

SEQ ID NO: 1232840 - DNA, 15 bp, Homo sapiens
catattcacagtttc

SEQ ID NO: 1232841 - DNA, 15 bp, Homo sapiens
ccatattcacagttt

SEQ ID NO: 1232842 - DNA, 15 bp, Homo sapiens
cccatattcacagtt

SEQ ID NO: 1232843 - DNA, 15 bp, Homo sapiens
ccccatattcacagt

SEQ ID NO: 1232844 - DNA, 15 bp, Homo sapiens
cccccatattcacag

SEQ ID NO: 1232845 - DNA, 15 bp, Homo sapiens
acagtctcccccata

SEQ ID NO: 1232846 - DNA, 15 bp, Homo sapiens
cacagtctcccccat

SEQ ID NO: 1232847 - DNA, 15 bp, Homo sapiens
ccacagtctccccca

SEQ ID NO: 1232848 - DNA, 15 bp, Homo sapiens
cccacagtctccccc

SEQ ID NO: 1232849 - DNA, 15 bp, Homo sapiens
ccacggtctccccat

SEQ ID NO: 1232850 - DNA, 15 bp, Homo sapiens
cccacggtctcccca

SEQ ID NO: 1232851 - DNA, 15 bp, Homo sapiens
ctcatattcccacgg

SEQ ID NO: 1232852 - DNA, 15 bp, Homo sapiens
cctcatattcccacg

SEQ ID NO: 1232853 - DNA, 15 bp, Homo sapiens
ctcctcatattccca

SEQ ID NO: 1232854 - DNA, 15 bp, Homo sapiens
tctcctcatattccc

SEQ ID NO: 1232855 - DNA, 15 bp, Homo sapiens
gtctcctcatattcc

SEQ ID NO: 1232856 - DNA, 15 bp, Homo sapiens
agtctcctcatattc

SEQ ID NO: 1232857 - DNA, 15 bp, Homo sapiens
cagtctcctcatatt

SEQ ID NO: 1232858 - DNA, 15 bp, Homo sapiens
acagtctcctcatat

SEQ ID NO: 1232859 - DNA, 15 bp, Homo sapiens
cacagtctcctcata

SEQ ID NO: 1232860 - DNA, 15 bp, Homo sapiens
acacagtctcctcat

SEQ ID NO: 1232861 - DNA, 15 bp, Homo sapiens
cacacagtctcctca

SEQ ID NO: 1232862 - DNA, 15 bp, Homo sapiens
tcacacagtctcctc

SEQ ID NO: 1232863 - DNA, 15 bp, Homo sapiens
ttcacacagtctcct

SEQ ID NO: 1232864 - DNA, 15 bp, Homo sapiens
attcacacagtctcc

SEQ ID NO: 1232865 - DNA, 15 bp, Homo sapiens
tccccatattcacac

SEQ ID NO: 1232866 - DNA, 15 bp, Homo sapiens
ttccccatattcaca

SEQ ID NO: 1232867 - DNA, 15 bp, Homo sapiens
cttccccatattcac

SEQ ID NO: 1232868 - DNA, 15 bp, Homo sapiens
tcttccccatattca

SEQ ID NO: 1232869 - DNA, 15 bp, Homo sapiens
gtcttccccatattc

SEQ ID NO: 1232870 - DNA, 15 bp, Homo sapiens
ggtcttccccatatt

SEQ ID NO: 1232871 - DNA, 15 bp, Homo sapiens
tggtcttccccatat

SEQ ID NO: 1232872 - DNA, 15 bp, Homo sapiens
atggtcttccccata

SEQ ID NO: 1232873 - DNA, 15 bp, Homo sapiens
catggtcttccccat

SEQ ID NO: 1232874 - DNA, 15 bp, Homo sapiens
acatggtcttcccca

SEQ ID NO: 1232875 - DNA, 15 bp, Homo sapiens
gacatggtcttcccc

SEQ ID NO: 1232876 - DNA, 15 bp, Homo sapiens
tgacatggtcttccc

SEQ ID NO: 1232877 - DNA, 15 bp, Homo sapiens
ttgacatggtcttcc

SEQ ID NO: 1232878 - DNA, 15 bp, Homo sapiens
attgacatggtcttc

SEQ ID NO: 1232879 - DNA, 15 bp, Homo sapiens
tattgacatggtctt

SEQ ID NO: 1232880 - DNA, 15 bp, Homo sapiens
tctttatattgacat

SEQ ID NO: 1232881 - DNA, 15 bp, Homo sapiens
ttctttatattgaca

SEQ ID NO: 1232882 - DNA, 15 bp, Homo sapiens
cttctttatattgac

SEQ ID NO: 1232883 - DNA, 15 bp, Homo sapiens
tcttctttatattga

SEQ ID NO: 1232884 - DNA, 15 bp, Homo sapiens
gtcttctttatattg

SEQ ID NO: 1232885 - DNA, 15 bp, Homo sapiens
ggtcttctttatatt

SEQ ID NO: 1232886 - DNA, 15 bp, Homo sapiens
tggtcttctttatat

SEQ ID NO: 1232887 - DNA, 15 bp, Homo sapiens
atggtcttctttata

SEQ ID NO: 1232888 - DNA, 15 bp, Homo sapiens
catggtcttctttat

SEQ ID NO: 1232889 - DNA, 15 bp, Homo sapiens
ccatggtcttcttta

SEQ ID NO: 1232890 - DNA, 15 bp, Homo sapiens
cccatggtcttcttt

SEQ ID NO: 1232891 - DNA, 15 bp, Homo sapiens
tcccatggtcttctt

SEQ ID NO: 1232892 - DNA, 15 bp, Homo sapiens
ttcccatggtcttct

SEQ ID NO: 1232893 - DNA, 15 bp, Homo sapiens
attcccatggtcttc

SEQ ID NO: 1232894 - DNA, 15 bp, Homo sapiens
tattcccatggtctt

SEQ ID NO: 1232895 - DNA, 15 bp, Homo sapiens
ctcatattcccatgg

SEQ ID NO: 1232896 - DNA, 15 bp, Homo sapiens
cctcatattcccatg

SEQ ID NO: 1232897 - DNA, 15 bp, Homo sapiens
tcctcatattcccat

SEQ ID NO: 1232898 - DNA, 15 bp, Homo sapiens
ccagtttcctcatat

SEQ ID NO: 1232899 - DNA, 15 bp, Homo sapiens
tccagtttcctcata

SEQ ID NO: 1232900 - DNA, 15 bp, Homo sapiens
atccagtttcctcat

SEQ ID NO: 1232901 - DNA, 15 bp, Homo sapiens
tatccagtttcctca

SEQ ID NO: 1232902 - DNA, 15 bp, Homo sapiens
atatccagtttcctc

SEQ ID NO: 1232903 - DNA, 15 bp, Homo sapiens
catatccagtttcct

SEQ ID NO: 1232904 - DNA, 15 bp, Homo sapiens
ccatatccagtttcc

SEQ ID NO: 1232905 - DNA, 15 bp, Homo sapiens
cccatatccagtttc

SEQ ID NO: 1232906 - DNA, 15 bp, Homo sapiens
ccccatatccagttt

SEQ ID NO: 1232907 - DNA, 15 bp, Homo sapiens
cccccatatccagtt

SEQ ID NO: 1232908 - DNA, 15 bp, Homo sapiens
tcccccatatccagt

SEQ ID NO: 1232909 - DNA, 15 bp, Homo sapiens
ctcccccatatccag

SEQ ID NO: 1232910 - DNA, 15 bp, Homo sapiens
cctcccccatatcca

SEQ ID NO: 1232911 - DNA, 15 bp, Homo sapiens
gcctcccccatatcc

SEQ ID NO: 1232912 - DNA, 15 bp, Homo sapiens
ggcctcccccatatc

SEQ ID NO: 1232913 - DNA, 15 bp, Homo sapiens
cggcctcccccatat

SEQ ID NO: 1232914 - DNA, 15 bp, Homo sapiens
acggcctcccccata

SEQ ID NO: 1232915 - DNA, 15 bp, Homo sapiens
cacggcctcccccat

SEQ ID NO: 1232916 - DNA, 15 bp, Homo sapiens
acacggcctccccca

SEQ ID NO: 1232917 - DNA, 15 bp, Homo sapiens
gacacggcctccccc

SEQ ID NO: 1232918 - DNA, 15 bp, Homo sapiens
tgacacggcctcccc

SEQ ID NO: 1232919 - DNA, 15 bp, Homo sapiens
ttgacacggcctccc

SEQ ID NO: 1232920 - DNA, 15 bp, Homo sapiens
attgacacggcctcc

SEQ ID NO: 1232921 - DNA, 15 bp, Homo sapiens
tattgacacggcctc

SEQ ID NO: 1232922 - DNA, 15 bp, Homo sapiens
atattgacacggcct

SEQ ID NO: 1232923 - DNA, 15 bp, Homo sapiens
tatattgacacggcc

SEQ ID NO: 1232924 - DNA, 15 bp, Homo sapiens
ttatattgacacggc

SEQ ID NO: 1232925 - DNA, 15 bp, Homo sapiens
ggtctcctttatatt

SEQ ID NO: 1232926 - DNA, 15 bp, Homo sapiens
cggtctcctttatat

SEQ ID NO: 1232927 - DNA, 15 bp, Homo sapiens
acggtctcctttata

SEQ ID NO: 1232928 - DNA, 15 bp, Homo sapiens
cacggtctcctttat

SEQ ID NO: 1232929 - DNA, 15 bp, Homo sapiens
ccacggtctccttta

SEQ ID NO: 1232930 - DNA, 15 bp, Homo sapiens
cccacggtctccttt

SEQ ID NO: 1232931 - DNA, 15 bp, Homo sapiens
tcccacggtctcctt

SEQ ID NO: 1232932 - DNA, 15 bp, Homo sapiens
gctcatattcccaca

SEQ ID NO: 1232933 - DNA, 15 bp, Homo sapiens
tgctcatattcccac

SEQ ID NO: 1232934 - DNA, 15 bp, Homo sapiens
ctgctcatattccca

SEQ ID NO: 1232935 - DNA, 15 bp, Homo sapiens
tctgctcatattccc

SEQ ID NO: 1232936 - DNA, 15 bp, Homo sapiens
gtctgctcatattcc

SEQ ID NO: 1232937 - DNA, 15 bp, Homo sapiens
agtctgctcatattc

SEQ ID NO: 1232938 - DNA, 15 bp, Homo sapiens
cagtctgctcatatt

SEQ ID NO: 1232939 - DNA, 15 bp, Homo sapiens
acagtctgctcatat

SEQ ID NO: 1232940 - DNA, 15 bp, Homo sapiens
cacagtctgctcata

SEQ ID NO: 1232941 - DNA, 15 bp, Homo sapiens
acacagtctgctcat

SEQ ID NO: 1232942 - DNA, 15 bp, Homo sapiens
cacacagtctgctca

SEQ ID NO: 1232943 - DNA, 15 bp, Homo sapiens
tcacacagtctgctc

SEQ ID NO: 1232944 - DNA, 15 bp, Homo sapiens
ttcacacagtctgct

SEQ ID NO: 1232945 - DNA, 15 bp, Homo sapiens
attcacacagtctgc

SEQ ID NO: 1232946 - DNA, 15 bp, Homo sapiens
tattcacacagtctg

SEQ ID NO: 1232947 - DNA, 15 bp, Homo sapiens
gtggtctcccccata

SEQ ID NO: 1232948 - DNA, 15 bp, Homo sapiens
tgtggtctcccccat

SEQ ID NO: 1232949 - DNA, 15 bp, Homo sapiens
atgtggtctccccca

SEQ ID NO: 1232950 - DNA, 15 bp, Homo sapiens
gatgtggtctccccc

SEQ ID NO: 1232951 - DNA, 15 bp, Homo sapiens
tgatgtggtctcccc

SEQ ID NO: 1232952 - DNA, 15 bp, Homo sapiens
ttgatgtggtctccc

SEQ ID NO: 1232953 - DNA, 15 bp, Homo sapiens
attgatgtggtctcc

SEQ ID NO: 1232954 - DNA, 15 bp, Homo sapiens
tattgatgtggtctc

SEQ ID NO: 1232955 - DNA, 15 bp, Homo sapiens
atattgatgtggtct

SEQ ID NO: 1232956 - DNA, 15 bp, Homo sapiens
tatattgatgtggtc

SEQ ID NO: 1232957 - DNA, 15 bp, Homo sapiens
ttatattgatgtggt

SEQ ID NO: 1232958 - DNA, 15 bp, Homo sapiens
tttatattgatgtgg

SEQ ID NO: 1232959 - DNA, 15 bp, Homo sapiens
ctttatattgatgtg

SEQ ID NO: 1232960 - DNA, 15 bp, Homo sapiens
cctttatattgatgt

SEQ ID NO: 1232961 - DNA, 15 bp, Homo sapiens
tcctttatattgatg

SEQ ID NO: 1232962 - DNA, 15 bp, Homo sapiens
ctcctttatattgat

SEQ ID NO: 1232963 - DNA, 15 bp, Homo sapiens
cacgatctcctttat

SEQ ID NO: 1232964 - DNA, 15 bp, Homo sapiens
ccacgatctccttta

SEQ ID NO: 1232965 - DNA, 15 bp, Homo sapiens
cccacgatctccttt

SEQ ID NO: 1232966 - DNA, 15 bp, Homo sapiens
tcccacgatctcctt

SEQ ID NO: 1232967 - DNA, 15 bp, Homo sapiens
ttcccacgatctcct

SEQ ID NO: 1232968 - DNA, 15 bp, Homo sapiens
attcccacgatctcc

SEQ ID NO: 1232969 - DNA, 15 bp, Homo sapiens
tattcccacgatctc

SEQ ID NO: 1232970 - DNA, 15 bp, Homo sapiens
atattcccacgatct

SEQ ID NO: 1232971 - DNA, 15 bp, Homo sapiens
catattcccacgatc

SEQ ID NO: 1232972 - DNA, 15 bp, Homo sapiens
ccatattcccacgat

SEQ ID NO: 1232973 - DNA, 15 bp, Homo sapiens
cccatattcccacga

SEQ ID NO: 1232974 - DNA, 15 bp, Homo sapiens
cgatctccccatatt

SEQ ID NO: 1232975 - DNA, 15 bp, Homo sapiens
acgatctccccatat

SEQ ID NO: 1232976 - DNA, 15 bp, Homo sapiens
cacgatctccccata

SEQ ID NO: 1232977 - DNA, 15 bp, Homo sapiens
gcacgatctccccat

SEQ ID NO: 1232978 - DNA, 15 bp, Homo sapiens
cgcacgatctcccca

SEQ ID NO: 1232979 - DNA, 15 bp, Homo sapiens
tcgcacgatctcccc

SEQ ID NO: 1232980 - DNA, 15 bp, Homo sapiens
ttcgcacgatctccc

SEQ ID NO: 1232981 - DNA, 15 bp, Homo sapiens
attcgcacgatctcc

SEQ ID NO: 1232982 - DNA, 15 bp, Homo sapiens
tattcgcacgatctc

SEQ ID NO: 1232983 - DNA, 15 bp, Homo sapiens
atattcgcacgatct

SEQ ID NO: 1232984 - DNA, 15 bp, Homo sapiens
catattcgcacgatc

SEQ ID NO: 1232985 - DNA, 15 bp, Homo sapiens
ccatattcgcacgat

SEQ ID NO: 1232986 - DNA, 15 bp, Homo sapiens
cccatattcgcacga

SEQ ID NO: 1232987 - DNA, 15 bp, Homo sapiens
ccccatattcgcacg

SEQ ID NO: 1232988 - DNA, 15 bp, Homo sapiens
gctccccatattcgc

SEQ ID NO: 1232989 - DNA, 15 bp, Homo sapiens
ggctccccatattcg

SEQ ID NO: 1232990 - DNA, 15 bp, Homo sapiens
gggctccccatattc

SEQ ID NO: 1232991 - DNA, 15 bp, Homo sapiens
tgggctccccatatt

SEQ ID NO: 1232992 - DNA, 15 bp, Homo sapiens
atgggctccccatat

SEQ ID NO: 1232993 - DNA, 15 bp, Homo sapiens
catgggctccccata

SEQ ID NO: 1232994 - DNA, 15 bp, Homo sapiens
ccatgggctccccat

SEQ ID NO: 1232995 - DNA, 15 bp, Homo sapiens
cccatgggctcccca

SEQ ID NO: 1232996 - DNA, 15 bp, Homo sapiens
tcccatgggctcccc

SEQ ID NO: 1232997 - DNA, 15 bp, Homo sapiens
ttcccatgggctccc

SEQ ID NO: 1232998 - DNA, 15 bp, Homo sapiens
attcccatgggctcc

SEQ ID NO: 1232999 - DNA, 15 bp, Homo sapiens
tattcccatgggctc

SEQ ID NO: 1233000 - DNA, 15 bp, Homo sapiens
atattcccatgggct

SEQ ID NO: 1233001 - DNA, 15 bp, Homo sapiens
catattcccatgggc

SEQ ID NO: 1233002 - DNA, 15 bp, Homo sapiens
ccatattcccatggg

SEQ ID NO: 1233003 - DNA, 15 bp, Homo sapiens
atattcagtctcccc

SEQ ID NO: 1233004 - DNA, 15 bp, Homo sapiens
tatattcagtctccc

SEQ ID NO: 1233005 - DNA, 15 bp, Homo sapiens
atatattcagtctcc

SEQ ID NO: 1233006 - DNA, 15 bp, Homo sapiens
catatattcagtctc

SEQ ID NO: 1233007 - DNA, 15 bp, Homo sapiens
ccatatattcagtct

SEQ ID NO: 1233008 - DNA, 15 bp, Homo sapiens
cccatatattcagtc

SEQ ID NO: 1233009 - DNA, 15 bp, Homo sapiens
tcccatatattcagt

SEQ ID NO: 1233010 - DNA, 15 bp, Homo sapiens
ctcccatatattcag

SEQ ID NO: 1233011 - DNA, 15 bp, Homo sapiens
tctcccatatattca

SEQ ID NO: 1233012 - DNA, 15 bp, Homo sapiens
gtctcccatatattc

SEQ ID NO: 1233013 - DNA, 15 bp, Homo sapiens
agtctcccatatatt

SEQ ID NO: 1233014 - DNA, 15 bp, Homo sapiens
cagtctcccatatat

SEQ ID NO: 1233015 - DNA, 15 bp, Homo sapiens
acagtctcccatata

SEQ ID NO: 1233016 - DNA, 15 bp, Homo sapiens
cacagtctcccatat

SEQ ID NO: 1233017 - DNA, 15 bp, Homo sapiens
ccacagtctcccata

SEQ ID NO: 1233018 - DNA, 15 bp, Homo sapiens
cccacagtctcccat

SEQ ID NO: 1233019 - DNA, 15 bp, Homo sapiens
tcccacagtctccca

SEQ ID NO: 1233020 - DNA, 15 bp, Homo sapiens
gcatgatctccccat

SEQ ID NO: 1233021 - DNA, 15 bp, Homo sapiens
tgcatgatctcccca

SEQ ID NO: 1233022 - DNA, 15 bp, Homo sapiens
ttgcatgatctcccc

SEQ ID NO: 1233023 - DNA, 15 bp, Homo sapiens
tttgcatgatctccc

SEQ ID NO: 1233024 - DNA, 15 bp, Homo sapiens
atttgcatgatctcc

SEQ ID NO: 1233025 - DNA, 15 bp, Homo sapiens
tatttgcatgatctc

SEQ ID NO: 1233026 - DNA, 15 bp, Homo sapiens
atatttgcatgatct

SEQ ID NO: 1233027 - DNA, 15 bp, Homo sapiens
catatttgcatgatc

SEQ ID NO: 1233028 - DNA, 15 bp, Homo sapiens
ccatatttgcatgat

SEQ ID NO: 1233029 - DNA, 15 bp, Homo sapiens
cccatatttgcatga

SEQ ID NO: 1233030 - DNA, 15 bp, Homo sapiens
gcccatatttgcatg

SEQ ID NO: 1233031 - DNA, 15 bp, Homo sapiens
tgcccatatttgcat

SEQ ID NO: 1233032 - DNA, 15 bp, Homo sapiens
ctgcccatatttgca

SEQ ID NO: 1233033 - DNA, 15 bp, Homo sapiens
tctgcccatatttgc

SEQ ID NO: 1233034 - DNA, 15 bp, Homo sapiens
gtctgcccatatttg

SEQ ID NO: 1233035 - DNA, 15 bp, Homo sapiens
ggtctgcccatattt

SEQ ID NO: 1233036 - DNA, 15 bp, Homo sapiens
tggtctgcccatatt

SEQ ID NO: 1233037 - DNA, 15 bp, Homo sapiens
atggtctgcccatat

SEQ ID NO: 1233038 - DNA, 15 bp, Homo sapiens
catggtctgcccata

SEQ ID NO: 1233039 - DNA, 15 bp, Homo sapiens
ccatggtctgcccat

SEQ ID NO: 1233040 - DNA, 15 bp, Homo sapiens
cccatggtctgccca

SEQ ID NO: 1233041 - DNA, 15 bp, Homo sapiens
tcccatggtctgccc

SEQ ID NO: 1233042 - DNA, 15 bp, Homo sapiens
ttcccatggtctgcc

SEQ ID NO: 1233043 - DNA, 15 bp, Homo sapiens
attcccatggtctgc

SEQ ID NO: 1233044 - DNA, 15 bp, Homo sapiens
tattcccatggtctg

SEQ ID NO: 1233045 - DNA, 15 bp, Homo sapiens
gagtctccccatatt

SEQ ID NO: 1233046 - DNA, 15 bp, Homo sapiens
agagtctccccatat

SEQ ID NO: 1233047 - DNA, 15 bp, Homo sapiens
cagagtctccccata

SEQ ID NO: 1233048 - DNA, 15 bp, Homo sapiens
acagagtctccccat

SEQ ID NO: 1233049 - DNA, 15 bp, Homo sapiens
cacagagtctcccca

SEQ ID NO: 1233050 - DNA, 15 bp, Homo sapiens
tcacagagtctcccc

SEQ ID NO: 1233051 - DNA, 15 bp, Homo sapiens
ttcacagagtctccc

SEQ ID NO: 1233052 - DNA, 15 bp, Homo sapiens
attcacagagtctcc

SEQ ID NO: 1233053 - DNA, 15 bp, Homo sapiens
tattcacagagtctc

SEQ ID NO: 1233054 - DNA, 15 bp, Homo sapiens
atattcacagagtct

SEQ ID NO: 1233055 - DNA, 15 bp, Homo sapiens
catattcacagagtc

SEQ ID NO: 1233056 - DNA, 15 bp, Homo sapiens
ccatattcacagagt

SEQ ID NO: 1233057 - DNA, 15 bp, Homo sapiens
cccatattcacagag

SEQ ID NO: 1233058 - DNA, 15 bp, Homo sapiens
ccccatattcacaga

SEQ ID NO: 1233059 - DNA, 15 bp, Homo sapiens
gcatggtctccccca

SEQ ID NO: 1233060 - DNA, 15 bp, Homo sapiens
cgcatggtctccccc

SEQ ID NO: 1233061 - DNA, 15 bp, Homo sapiens
tcgcatggtctcccc

SEQ ID NO: 1233062 - DNA, 15 bp, Homo sapiens
ttcgcatggtctccc

SEQ ID NO: 1233063 - DNA, 15 bp, Homo sapiens
attcgcatggtctcc

SEQ ID NO: 1233064 - DNA, 15 bp, Homo sapiens
tattcgcatggtctc

SEQ ID NO: 1233065 - DNA, 15 bp, Homo sapiens
atattcgcatggtct

SEQ ID NO: 1233066 - DNA, 15 bp, Homo sapiens
catattcgcatggtc

SEQ ID NO: 1233067 - DNA, 15 bp, Homo sapiens
ccatattcgcatggt

SEQ ID NO: 1233068 - DNA, 15 bp, Homo sapiens
cccatattcgcatgg

SEQ ID NO: 1233069 - DNA, 15 bp, Homo sapiens
ccccatattcgcatg

SEQ ID NO: 1233070 - DNA, 15 bp, Homo sapiens
tccccatattcgcat

SEQ ID NO: 1233071 - DNA, 15 bp, Homo sapiens
ttccccatattcgca

SEQ ID NO: 1233072 - DNA, 15 bp, Homo sapiens
tttccccatattcgc

SEQ ID NO: 1233073 - DNA, 15 bp, Homo sapiens
gtttccccatattcg

SEQ ID NO: 1233074 - DNA, 15 bp, Homo sapiens
ggtttccccatattc

SEQ ID NO: 1233075 - DNA, 15 bp, Homo sapiens
tggtttccccatatt

SEQ ID NO: 1233076 - DNA, 15 bp, Homo sapiens
atggtttccccatat

SEQ ID NO: 1233077 - DNA, 15 bp, Homo sapiens
catggtttccccata

SEQ ID NO: 1233078 - DNA, 15 bp, Homo sapiens
tcatggtttccccat

SEQ ID NO: 1233079 - DNA, 15 bp, Homo sapiens
ctcatggtttcccca

SEQ ID NO: 1233080 - DNA, 15 bp, Homo sapiens
tctcatggtttcccc

SEQ ID NO: 1233081 - DNA, 15 bp, Homo sapiens
ttctcatggtttccc

SEQ ID NO: 1233082 - DNA, 15 bp, Homo sapiens
attctcatggtttcc

SEQ ID NO: 1233083 - DNA, 15 bp, Homo sapiens
tattctcatggtttc

SEQ ID NO: 1233084 - DNA, 15 bp, Homo sapiens
atattctcatggttt

SEQ ID NO: 1233085 - DNA, 15 bp, Homo sapiens
catattctcatggtt

SEQ ID NO: 1233086 - DNA, 15 bp, Homo sapiens
tcatattctcatggt

SEQ ID NO: 1233087 - DNA, 15 bp, Homo sapiens
ctcatattctcatgg

SEQ ID NO: 1233088 - DNA, 15 bp, Homo sapiens
cctcatattctcatg

SEQ ID NO: 1233089 - DNA, 15 bp, Homo sapiens
ccctcatattctcat

SEQ ID NO: 1233090 - DNA, 15 bp, Homo sapiens
tccctcatattctca

SEQ ID NO: 1233091 - DNA, 15 bp, Homo sapiens
gtccctcatattctc

SEQ ID NO: 1233092 - DNA, 15 bp, Homo sapiens
tgtccctcatattct

SEQ ID NO: 1233093 - DNA, 15 bp, Homo sapiens
gtgtccctcatattc

SEQ ID NO: 1233094 - DNA, 15 bp, Homo sapiens
ggtgtccctcatatt

SEQ ID NO: 1233095 - DNA, 15 bp, Homo sapiens
aggtgtccctcatat

SEQ ID NO: 1233096 - DNA, 15 bp, Homo sapiens
caggtgtccctcata

SEQ ID NO: 1233097 - DNA, 15 bp, Homo sapiens
acaggtgtccctcat

SEQ ID NO: 1233098 - DNA, 15 bp, Homo sapiens
cacaggtgtccctca

SEQ ID NO: 1233099 - DNA, 15 bp, Homo sapiens
tcacaggtgtccctc

SEQ ID NO: 1233100 - DNA, 15 bp, Homo sapiens
ctcacaggtgtccct

SEQ ID NO: 1233101 - DNA, 15 bp, Homo sapiens
actcacaggtgtccc

SEQ ID NO: 1233102 - DNA, 15 bp, Homo sapiens
tactcacaggtgtcc

SEQ ID NO: 1233103 - DNA, 15 bp, Homo sapiens
ttactcacaggtgtc

SEQ ID NO: 1233104 - DNA, 15 bp, Homo sapiens
gttactcacaggtgt

SEQ ID NO: 1233105 - DNA, 15 bp, Homo sapiens
cgttactcacaggtg

SEQ ID NO: 1233106 - DNA, 15 bp, Homo sapiens
gcgttactcacaggt

SEQ ID NO: 1233107 - DNA, 15 bp, Homo sapiens
cgcgttactcacagg

SEQ ID NO: 1233108 - DNA, 15 bp, Homo sapiens
ccgcgttactcacag

SEQ ID NO: 1233109 - DNA, 15 bp, Homo sapiens
gccgcgttactcaca

SEQ ID NO: 1233110 - DNA, 15 bp, Homo sapiens
agccgcgttactcac

SEQ ID NO: 1233111 - DNA, 15 bp, Homo sapiens
cagccgcgttactca

SEQ ID NO: 1233112 - DNA, 15 bp, Homo sapiens
acagccgcgttactc

SEQ ID NO: 1233113 - DNA, 15 bp, Homo sapiens
gacagccgcgttact

SEQ ID NO: 1233114 - DNA, 15 bp, Homo sapiens
agacagccgcgttac

SEQ ID NO: 1233115 - DNA, 15 bp, Homo sapiens
cagacagccgcgtta

SEQ ID NO: 1233116 - DNA, 15 bp, Homo sapiens
acagacagccgcgtt

SEQ ID NO: 1233117 - DNA, 15 bp, Homo sapiens
gacagacagccgcgt

SEQ ID NO: 1233118 - DNA, 15 bp, Homo sapiens
agacagacagccgcg

SEQ ID NO: 1233119 - DNA, 15 bp, Homo sapiens
gagacagacagccgc

SEQ ID NO: 1233120 - DNA, 15 bp, Homo sapiens
ggagacagacagccg

SEQ ID NO: 1233121 - DNA, 15 bp, Homo sapiens
tggagacagacagcc

SEQ ID NO: 1233122 - DNA, 15 bp, Homo sapiens
ctggagacagacagc

SEQ ID NO: 1233123 - DNA, 15 bp, Homo sapiens
actggagacagacag

SEQ ID NO: 1233124 - DNA, 15 bp, Homo sapiens
cactggagacagaca

SEQ ID NO: 1233125 - DNA, 15 bp, Homo sapiens
gcactggagacagac

SEQ ID NO: 1233126 - DNA, 15 bp, Homo sapiens
ggcactggagacaga

SEQ ID NO: 1233127 - DNA, 15 bp, Homo sapiens
gggcactggagacag

SEQ ID NO: 1233128 - DNA, 15 bp, Homo sapiens
cgggcactggagaca

SEQ ID NO: 1233129 - DNA, 15 bp, Homo sapiens
gcgggcactggagac

SEQ ID NO: 1233130 - DNA, 15 bp, Homo sapiens
cgcgggcactggaga

SEQ ID NO: 1233131 - DNA, 15 bp, Homo sapiens
acgcgggcactggag

SEQ ID NO: 1233132 - DNA, 15 bp, Homo sapiens
cacgcgggcactgga

SEQ ID NO: 1233133 - DNA, 15 bp, Homo sapiens
ccacgcgggcactgg

SEQ ID NO: 1233134 - DNA, 15 bp, Homo sapiens
tccacgcgggcactg

SEQ ID NO: 1233135 - DNA, 15 bp, Homo sapiens
atccacgcgggcact

SEQ ID NO: 1233136 - DNA, 15 bp, Homo sapiens
aatccacgcgggcac

SEQ ID NO: 1233137 - DNA, 15 bp, Homo sapiens
aaatccacgcgggca

SEQ ID NO: 1233138 - DNA, 15 bp, Homo sapiens
gaaatccacgcgggc

SEQ ID NO: 1233139 - DNA, 15 bp, Homo sapiens
ggaaatccacgcggg

SEQ ID NO: 1233140 - DNA, 15 bp, Homo sapiens
tggaaatccacgcgg

SEQ ID NO: 1233141 - DNA, 15 bp, Homo sapiens
ttggaaatccacgcg

SEQ ID NO: 1233142 - DNA, 15 bp, Homo sapiens
tttggaaatccacgc

SEQ ID NO: 1233143 - DNA, 15 bp, Homo sapiens
ctttggaaatccacg

SEQ ID NO: 1233144 - DNA, 15 bp, Homo sapiens
actttggaaatccac

SEQ ID NO: 1233145 - DNA, 15 bp, Homo sapiens
cactttggaaatcca

SEQ ID NO: 1233146 - DNA, 15 bp, Homo sapiens
acactttggaaatcc

SEQ ID NO: 1233147 - DNA, 15 bp, Homo sapiens
gacactttggaaatc

SEQ ID NO: 1233148 - DNA, 15 bp, Homo sapiens
ggacactttggaaat

SEQ ID NO: 1233149 - DNA, 15 bp, Homo sapiens
aggacactttggaaa

SEQ ID NO: 1233150 - DNA, 15 bp, Homo sapiens
aaggacactttggaa

SEQ ID NO: 1233151 - DNA, 15 bp, Homo sapiens
gaaggacactttgga

SEQ ID NO: 1233152 - DNA, 15 bp, Homo sapiens
ggaaggacactttgg

SEQ ID NO: 1233153 - DNA, 15 bp, Homo sapiens
aggaaggacactttg

SEQ ID NO: 1233154 - DNA, 15 bp, Homo sapiens
caggaaggacacttt

SEQ ID NO: 1233155 - DNA, 15 bp, Homo sapiens
gcaggaaggacactt

SEQ ID NO: 1233156 - DNA, 15 bp, Homo sapiens
cgcaggaaggacact

SEQ ID NO: 1233157 - DNA, 15 bp, Homo sapiens
ccgcaggaaggacac

SEQ ID NO: 1233158 - DNA, 15 bp, Homo sapiens
accgcaggaaggaca

SEQ ID NO: 1233159 - DNA, 15 bp, Homo sapiens
caccgcaggaaggac

SEQ ID NO: 1233160 - DNA, 15 bp, Homo sapiens
ccaccgcaggaagga

SEQ ID NO: 1233161 - DNA, 15 bp, Homo sapiens
accaccgcaggaagg

SEQ ID NO: 1233162 - DNA, 15 bp, Homo sapiens
caccaccgcaggaag

SEQ ID NO: 1233163 - DNA, 15 bp, Homo sapiens
acaccaccgcaggaa

SEQ ID NO: 1233164 - DNA, 15 bp, Homo sapiens
aacaccaccgcagga

SEQ ID NO: 1233165 - DNA, 15 bp, Homo sapiens
aaacaccaccgcagg

SEQ ID NO: 1233166 - DNA, 15 bp, Homo sapiens
aaaacaccaccgcag

SEQ ID NO: 1233167 - DNA, 15 bp, Homo sapiens
caaaacaccaccgca

SEQ ID NO: 1233168 - DNA, 15 bp, Homo sapiens
tcaaaacaccaccgc

SEQ ID NO: 1233169 - DNA, 15 bp, Homo sapiens
ttcaaaacaccaccg

SEQ ID NO: 1233170 - DNA, 15 bp, Homo sapiens
cttcaaaacaccacc

SEQ ID NO: 1233171 - DNA, 15 bp, Homo sapiens
ccttcaaaacaccac

SEQ ID NO: 1233172 - DNA, 15 bp, Homo sapiens
cccttcaaaacacca

SEQ ID NO: 1233173 - DNA, 15 bp, Homo sapiens
gcccttcaaaacacc

SEQ ID NO: 1233174 - DNA, 15 bp, Homo sapiens
agcccttcaaaacac

SEQ ID NO: 1233175 - DNA, 15 bp, Homo sapiens
cagcccttcaaaaca

SEQ ID NO: 1233176 - DNA, 15 bp, Homo sapiens
tcagcccttcaaaac

SEQ ID NO: 1233177 - DNA, 15 bp, Homo sapiens
atcagcccttcaaaa

SEQ ID NO: 1233178 - DNA, 15 bp, Homo sapiens
catcagcccttcaaa

SEQ ID NO: 1233179 - DNA, 15 bp, Homo sapiens
tcatcagcccttcaa

SEQ ID NO: 1233180 - DNA, 15 bp, Homo sapiens
ttcatcagcccttca

SEQ ID NO: 1233181 - DNA, 15 bp, Homo sapiens
cttcatcagcccttc

SEQ ID NO: 1233182 - DNA, 15 bp, Homo sapiens
tcttcatcagccctt

SEQ ID NO: 1233183 - DNA, 15 bp, Homo sapiens
atcttcatcagccct

SEQ ID NO: 1233184 - DNA, 15 bp, Homo sapiens
aatcttcatcagccc

SEQ ID NO: 1233185 - DNA, 15 bp, Homo sapiens
gaatcttcatcagcc

SEQ ID NO: 1233186 - DNA, 15 bp, Homo sapiens
tgaatcttcatcagc

SEQ ID NO: 1233187 - DNA, 15 bp, Homo sapiens
ctgaatcttcatcag

SEQ ID NO: 1233188 - DNA, 15 bp, Homo sapiens
actgaatcttcatca

SEQ ID NO: 1233189 - DNA, 15 bp, Homo sapiens
aactgaatcttcatc

SEQ ID NO: 1233190 - DNA, 15 bp, Homo sapiens
gaactgaatcttcat

SEQ ID NO: 1233191 - DNA, 15 bp, Homo sapiens
tgaactgaatcttca

SEQ ID NO: 1233192 - DNA, 15 bp, Homo sapiens
ctgaactgaatcttc

SEQ ID NO: 1233193 - DNA, 15 bp, Homo sapiens
gctgaactgaatctt

SEQ ID NO: 1233194 - DNA, 15 bp, Homo sapiens
tgctgaactgaatct

SEQ ID NO: 1233195 - DNA, 15 bp, Homo sapiens
ctgctgaactgaatc

SEQ ID NO: 1233196 - DNA, 15 bp, Homo sapiens
tctgctgaactgaat

SEQ ID NO: 1233197 - DNA, 15 bp, Homo sapiens
ttctgctgaactgaa

SEQ ID NO: 1233198 - DNA, 15 bp, Homo sapiens
cttctgctgaactga

SEQ ID NO: 1233199 - DNA, 15 bp, Homo sapiens
tcttctgctgaactg

SEQ ID NO: 1233200 - DNA, 15 bp, Homo sapiens
ttcttctgctgaact

SEQ ID NO: 1233201 - DNA, 15 bp, Homo sapiens
gttcttctgctgaac

SEQ ID NO: 1233202 - DNA, 15 bp, Homo sapiens
agttcttctgctgaa

SEQ ID NO: 1233203 - DNA, 15 bp, Homo sapiens
aagttcttctgctga

SEQ ID NO: 1233204 - DNA, 15 bp, Homo sapiens
taagttcttctgctg

SEQ ID NO: 1233205 - DNA, 15 bp, Homo sapiens
ataagttcttctgct

SEQ ID NO: 1233206 - DNA, 15 bp, Homo sapiens
tataagttcttctgc

SEQ ID NO: 1233207 - DNA, 15 bp, Homo sapiens
ttataagttcttctg

SEQ ID NO: 1233208 - DNA, 15 bp, Homo sapiens
tttataagttcttct

SEQ ID NO: 1233209 - DNA, 15 bp, Homo sapiens
ttttataagttcttc

SEQ ID NO: 1233210 - DNA, 15 bp, Homo sapiens
attttataagttctt

SEQ ID NO: 1233211 - DNA, 15 bp, Homo sapiens
cattttataagttct

SEQ ID NO: 1233212 - DNA, 15 bp, Homo sapiens
gcattttataagttc

SEQ ID NO: 1233213 - DNA, 15 bp, Homo sapiens
ggcattttataagtt

SEQ ID NO: 1233214 - DNA, 15 bp, Homo sapiens
aggcattttataagt

SEQ ID NO: 1233215 - DNA, 15 bp, Homo sapiens
gaggcattttataag

SEQ ID NO: 1233216 - DNA, 15 bp, Homo sapiens
agaggcattttataa

SEQ ID NO: 1233217 - DNA, 15 bp, Homo sapiens
gagaggcattttata

SEQ ID NO: 1233218 - DNA, 15 bp, Homo sapiens
cgagaggcattttat

SEQ ID NO: 1233219 - DNA, 15 bp, Homo sapiens
ccgagaggcatttta

SEQ ID NO: 1233220 - DNA, 15 bp, Homo sapiens
cccgagaggcatttt

SEQ ID NO: 1233221 - DNA, 15 bp, Homo sapiens
tcccgagaggcattt

SEQ ID NO: 1233222 - DNA, 15 bp, Homo sapiens
ttcccgagaggcatt

SEQ ID NO: 1233223 - DNA, 15 bp, Homo sapiens
gttcccgagaggcat

SEQ ID NO: 1233224 - DNA, 15 bp, Homo sapiens
ggttcccgagaggca

SEQ ID NO: 1233225 - DNA, 15 bp, Homo sapiens
aggttcccgagaggc

SEQ ID NO: 1233226 - DNA, 15 bp, Homo sapiens
gaggttcccgagagg

SEQ ID NO: 1233227 - DNA, 15 bp, Homo sapiens
tgaggttcccgagag

SEQ ID NO: 1233228 - DNA, 15 bp, Homo sapiens
gtgaggttcccgaga

SEQ ID NO: 1233229 - DNA, 15 bp, Homo sapiens
ggtgaggttcccgag

SEQ ID NO: 1233230 - DNA, 15 bp, Homo sapiens
tggtgaggttcccga

SEQ ID NO: 1233231 - DNA, 15 bp, Homo sapiens
atggtgaggttcccg

SEQ ID NO: 1233232 - DNA, 15 bp, Homo sapiens
gatggtgaggttccc

SEQ ID NO: 1233233 - DNA, 15 bp, Homo sapiens
cgatggtgaggttcc

SEQ ID NO: 1233234 - DNA, 15 bp, Homo sapiens
gcgatggtgaggttc

SEQ ID NO: 1233235 - DNA, 15 bp, Homo sapiens
cgcgatggtgaggtt

SEQ ID NO: 1233236 - DNA, 15 bp, Homo sapiens
ccgcgatggtgaggt

SEQ ID NO: 1233237 - DNA, 15 bp, Homo sapiens
accgcgatggtgagg

SEQ ID NO: 1233238 - DNA, 15 bp, Homo sapiens
gaccgcgatggtgag

SEQ ID NO: 1233239 - DNA, 15 bp, Homo sapiens
agaccgcgatggtga

SEQ ID NO: 1233240 - DNA, 15 bp, Homo sapiens
gagaccgcgatggtg

SEQ ID NO: 1233241 - DNA, 15 bp, Homo sapiens
tgagaccgcgatggt

SEQ ID NO: 1233242 - DNA, 15 bp, Homo sapiens
ctgagaccgcgatgg

SEQ ID NO: 1233243 - DNA, 15 bp, Homo sapiens
cctgagaccgcgatg

SEQ ID NO: 1233244 - DNA, 15 bp, Homo sapiens
tcctgagaccgcgat

SEQ ID NO: 1233245 - DNA, 15 bp, Homo sapiens
ctcctgagaccgcga

SEQ ID NO: 1233246 - DNA, 15 bp, Homo sapiens
tctcctgagaccgcg

SEQ ID NO: 1233247 - DNA, 15 bp, Homo sapiens
atctcctgagaccgc

SEQ ID NO: 1233248 - DNA, 15 bp, Homo sapiens
tatctcctgagaccg

SEQ ID NO: 1233249 - DNA, 15 bp, Homo sapiens
ttatctcctgagacc

SEQ ID NO: 1233250 - DNA, 15 bp, Homo sapiens
tttatctcctgagac

SEQ ID NO: 1233251 - DNA, 15 bp, Homo sapiens
ctttatctcctgaga

SEQ ID NO: 1233252 - DNA, 15 bp, Homo sapiens
actttatctcctgag

SEQ ID NO: 1233253 - DNA, 15 bp, Homo sapiens
tactttatctcctga

SEQ ID NO: 1233254 - DNA, 15 bp, Homo sapiens
ttactttatctcctg

SEQ ID NO: 1233255 - DNA, 15 bp, Homo sapiens
cttactttatctcct

SEQ ID NO: 1233256 - DNA, 15 bp, Homo sapiens
gcttactttatctcc

SEQ ID NO: 1233257 - DNA, 15 bp, Homo sapiens
cgcttactttatctc

SEQ ID NO: 1233258 - DNA, 15 bp, Homo sapiens
ccgcttactttatct

SEQ ID NO: 1233259 - DNA, 15 bp, Homo sapiens
cccgcttactttatc

SEQ ID NO: 1233260 - DNA, 15 bp, Homo sapiens
ccccgcttactttat

SEQ ID NO: 1233261 - DNA, 15 bp, Homo sapiens
tccccgcttacttta

SEQ ID NO: 1233262 - DNA, 15 bp, Homo sapiens
ttccccgcttacttt

SEQ ID NO: 1233263 - DNA, 15 bp, Homo sapiens
cttccccgcttactt

SEQ ID NO: 1233264 - DNA, 15 bp, Homo sapiens
ccttccccgcttact

SEQ ID NO: 1233265 - DNA, 15 bp, Homo sapiens
gccttccccgcttac

SEQ ID NO: 1233266 - DNA, 15 bp, Homo sapiens
ggccttccccgctta

SEQ ID NO: 1233267 - DNA, 15 bp, Homo sapiens
aggccttccccgctt

SEQ ID NO: 1233268 - DNA, 15 bp, Homo sapiens
gaggccttccccgct

SEQ ID NO: 1233269 - DNA, 15 bp, Homo sapiens
cgaggccttccccgc

SEQ ID NO: 1233270 - DNA, 15 bp, Homo sapiens
ccgaggccttccccg

SEQ ID NO: 1233271 - DNA, 15 bp, Homo sapiens
cccgaggccttcccc

SEQ ID NO: 1233272 - DNA, 15 bp, Homo sapiens
acccgaggccttccc

SEQ ID NO: 1233273 - DNA, 15 bp, Homo sapiens
aacccgaggccttcc

SEQ ID NO: 1233274 - DNA, 15 bp, Homo sapiens
gaacccgaggccttc

SEQ ID NO: 1233275 - DNA, 15 bp, Homo sapiens
agaacccgaggcctt

SEQ ID NO: 1233276 - DNA, 15 bp, Homo sapiens
tagaacccgaggcct

SEQ ID NO: 1233277 - DNA, 15 bp, Homo sapiens
ttagaacccgaggcc

SEQ ID NO: 1233278 - DNA, 15 bp, Homo sapiens
tttagaacccgaggc

SEQ ID NO: 1233279 - DNA, 15 bp, Homo sapiens
atttagaacccgagg

SEQ ID NO: 1233280 - DNA, 15 bp, Homo sapiens
aatttagaacccgag

SEQ ID NO: 1233281 - DNA, 15 bp, Homo sapiens
taatttagaacccga

SEQ ID NO: 1233282 - DNA, 15 bp, Homo sapiens
ataatttagaacccg

SEQ ID NO: 1233283 - DNA, 15 bp, Homo sapiens
aataatttagaaccc

SEQ ID NO: 1233284 - DNA, 15 bp, Homo sapiens
caataatttagaacc

SEQ ID NO: 1233285 - DNA, 15 bp, Homo sapiens
ccaataatttagaac

SEQ ID NO: 1233286 - DNA, 15 bp, Homo sapiens
tccaataatttagaa

SEQ ID NO: 1233287 - DNA, 15 bp, Homo sapiens
gtccaataatttaga

SEQ ID NO: 1233288 - DNA, 15 bp, Homo sapiens
cgtccaataatttag

SEQ ID NO: 1233289 - DNA, 15 bp, Homo sapiens
acgtccaataattta

SEQ ID NO: 1233290 - DNA, 15 bp, Homo sapiens
gacgtccaataattt

SEQ ID NO: 1233291 - DNA, 15 bp, Homo sapiens
ggacgtccaataatt

SEQ ID NO: 1233292 - DNA, 15 bp, Homo sapiens
cggacgtccaataat

SEQ ID NO: 1233293 - DNA, 15 bp, Homo sapiens
ccggacgtccaataa

SEQ ID NO: 1233294 - DNA, 15 bp, Homo sapiens
gccggacgtccaata

SEQ ID NO: 1233295 - DNA, 15 bp, Homo sapiens
agccggacgtccaat

SEQ ID NO: 1233296 - DNA, 15 bp, Homo sapiens
aagccggacgtccaa

SEQ ID NO: 1233297 - DNA, 15 bp, Homo sapiens
aaagccggacgtcca

SEQ ID NO: 1233298 - DNA, 15 bp, Homo sapiens
gaaagccggacgtcc

SEQ ID NO: 1233299 - DNA, 15 bp, Homo sapiens
ggaaagccggacgtc

SEQ ID NO: 1233300 - DNA, 15 bp, Homo sapiens
tggaaagccggacgt

SEQ ID NO: 1233301 - DNA, 15 bp, Homo sapiens
atggaaagccggacg

SEQ ID NO: 1233302 - DNA, 15 bp, Homo sapiens
gatggaaagccggac

SEQ ID NO: 1233303 - DNA, 15 bp, Homo sapiens
ggatggaaagccgga

SEQ ID NO: 1233304 - DNA, 15 bp, Homo sapiens
aggatggaaagccgg

SEQ ID NO: 1233305 - DNA, 15 bp, Homo sapiens
gaggatggaaagccg

SEQ ID NO: 1233306 - DNA, 15 bp, Homo sapiens
ggaggatggaaagcc

SEQ ID NO: 1233307 - DNA, 15 bp, Homo sapiens
aggaggatggaaagc

SEQ ID NO: 1233308 - DNA, 15 bp, Homo sapiens
gaggaggatggaaag

SEQ ID NO: 1233309 - DNA, 15 bp, Homo sapiens
tgaggaggatggaaa

SEQ ID NO: 1233310 - DNA, 15 bp, Homo sapiens
atgaggaggatggaa

SEQ ID NO: 1233311 - DNA, 15 bp, Homo sapiens
catgaggaggatgga

SEQ ID NO: 1233312 - DNA, 15 bp, Homo sapiens
tcatgaggaggatgg

SEQ ID NO: 1233313 - DNA, 15 bp, Homo sapiens
ctcatgaggaggatg

SEQ ID NO: 1233314 - DNA, 15 bp, Homo sapiens
gctcatgaggaggat

SEQ ID NO: 1233315 - DNA, 15 bp, Homo sapiens
ggctcatgaggagga

SEQ ID NO: 1233316 - DNA, 15 bp, Homo sapiens
gggctcatgaggagg

SEQ ID NO: 1233317 - DNA, 15 bp, Homo sapiens
tgggctcatgaggag

SEQ ID NO: 1233318 - DNA, 15 bp, Homo sapiens
gtgggctcatgagga

SEQ ID NO: 1233319 - DNA, 15 bp, Homo sapiens
agtgggctcatgagg

SEQ ID NO: 1233320 - DNA, 15 bp, Homo sapiens
cagtgggctcatgag

SEQ ID NO: 1233321 - DNA, 15 bp, Homo sapiens
gcagtgggctcatga

SEQ ID NO: 1233322 - DNA, 15 bp, Homo sapiens
tgcagtgggctcatg

SEQ ID NO: 1233323 - DNA, 15 bp, Homo sapiens
atgcagtgggctcat

SEQ ID NO: 1233324 - DNA, 15 bp, Homo sapiens
catgcagtgggctca

SEQ ID NO: 1233325 - DNA, 15 bp, Homo sapiens
acatgcagtgggctc

SEQ ID NO: 1233326 - DNA, 15 bp, Homo sapiens
gacatgcagtgggct

SEQ ID NO: 1233327 - DNA, 15 bp, Homo sapiens
agacatgcagtgggc

SEQ ID NO: 1233328 - DNA, 15 bp, Homo sapiens
cagacatgcagtggg

SEQ ID NO: 1233329 - DNA, 15 bp, Homo sapiens
acagacatgcagtgg

SEQ ID NO: 1233330 - DNA, 15 bp, Homo sapiens
cacagacatgcagtg

SEQ ID NO: 1233331 - DNA, 15 bp, Homo sapiens
acacagacatgcagt

SEQ ID NO: 1233332 - DNA, 15 bp, Homo sapiens
gacacagacatgcag

SEQ ID NO: 1233333 - DNA, 15 bp, Homo sapiens
agacacagacatgca

SEQ ID NO: 1233334 - DNA, 15 bp, Homo sapiens
gagacacagacatgc

SEQ ID NO: 1233335 - DNA, 15 bp, Homo sapiens
ggagacacagacatg

SEQ ID NO: 1233336 - DNA, 15 bp, Homo sapiens
tggagacacagacat

SEQ ID NO: 1233337 - DNA, 15 bp, Homo sapiens
ctggagacacagaca

SEQ ID NO: 1233338 - DNA, 15 bp, Homo sapiens
tctggagacacagac

SEQ ID NO: 1233339 - DNA, 15 bp, Homo sapiens
atctggagacacaga

SEQ ID NO: 1233340 - DNA, 15 bp, Homo sapiens
gatctggagacacag

SEQ ID NO: 1233341 - DNA, 15 bp, Homo sapiens
ggatctggagacaca

SEQ ID NO: 1233342 - DNA, 15 bp, Homo sapiens
aggatctggagacac

SEQ ID NO: 1233343 - DNA, 15 bp, Homo sapiens
gaggatctggagaca

SEQ ID NO: 1233344 - DNA, 15 bp, Homo sapiens
tgaggatctggagac

SEQ ID NO: 1233345 - DNA, 15 bp, Homo sapiens
ctgaggatctggaga

SEQ ID NO: 1233346 - DNA, 15 bp, Homo sapiens
actgaggatctggag

SEQ ID NO: 1233347 - DNA, 15 bp, Homo sapiens
cactgaggatctgga

SEQ ID NO: 1233348 - DNA, 15 bp, Homo sapiens
acactgaggatctgg

SEQ ID NO: 1233349 - DNA, 15 bp, Homo sapiens
gacactgaggatctg

SEQ ID NO: 1233350 - DNA, 15 bp, Homo sapiens
tgacactgaggatct

SEQ ID NO: 1233351 - DNA, 15 bp, Homo sapiens
atgacactgaggatc

SEQ ID NO: 1233352 - DNA, 15 bp, Homo sapiens
catgacactgaggat

SEQ ID NO: 1233353 - DNA, 15 bp, Homo sapiens
ccatgacactgagga

SEQ ID NO: 1233354 - DNA, 15 bp, Homo sapiens
tccatgacactgagg

SEQ ID NO: 1233355 - DNA, 15 bp, Homo sapiens
ctccatgacactgag

SEQ ID NO: 1233356 - DNA, 15 bp, Homo sapiens
gctccatgacactga

SEQ ID NO: 1233357 - DNA, 15 bp, Homo sapiens
agctccatgacactg

SEQ ID NO: 1233358 - DNA, 15 bp, Homo sapiens
cagctccatgacact

SEQ ID NO: 1233359 - DNA, 15 bp, Homo sapiens
ccagctccatgacac

SEQ ID NO: 1233360 - DNA, 15 bp, Homo sapiens
tccagctccatgaca

SEQ ID NO: 1233361 - DNA, 15 bp, Homo sapiens
gtccagctccatgac

SEQ ID NO: 1233362 - DNA, 15 bp, Homo sapiens
agtccagctccatga

SEQ ID NO: 1233363 - DNA, 15 bp, Homo sapiens
gagtccagctccatg

SEQ ID NO: 1233364 - DNA, 15 bp, Homo sapiens
cgagtccagctccat

SEQ ID NO: 1233365 - DNA, 15 bp, Homo sapiens
acgagtccagctcca

SEQ ID NO: 1233366 - DNA, 15 bp, Homo sapiens
tacgagtccagctcc

SEQ ID NO: 1233367 - DNA, 15 bp, Homo sapiens
gtacgagtccagctc

SEQ ID NO: 1233368 - DNA, 15 bp, Homo sapiens
ggtacgagtccagct

SEQ ID NO: 1233369 - DNA, 15 bp, Homo sapiens
gggtacgagtccagc

SEQ ID NO: 1233370 - DNA, 15 bp, Homo sapiens
agggtacgagtccag

SEQ ID NO: 1233371 - DNA, 15 bp, Homo sapiens
gagggtacgagtcca

SEQ ID NO: 1233372 - DNA, 15 bp, Homo sapiens
agagggtacgagtcc

SEQ ID NO: 1233373 - DNA, 15 bp, Homo sapiens
gagagggtacgagtc

SEQ ID NO: 1233374 - DNA, 15 bp, Homo sapiens
agagagggtacgagt

SEQ ID NO: 1233375 - DNA, 15 bp, Homo sapiens
tagagagggtacgag

SEQ ID NO: 1233376 - DNA, 15 bp, Homo sapiens
gtagagagggtacga

SEQ ID NO: 1233377 - DNA, 15 bp, Homo sapiens
cgtagagagggtacg

SEQ ID NO: 1233378 - DNA, 15 bp, Homo sapiens
gcgtagagagggtac

SEQ ID NO: 1233379 - DNA, 15 bp, Homo sapiens
ggcgtagagagggta

SEQ ID NO: 1233380 - DNA, 15 bp, Homo sapiens
tggcgtagagagggt

SEQ ID NO: 1233381 - DNA, 15 bp, Homo sapiens
atggcgtagagaggg

SEQ ID NO: 1233382 - DNA, 15 bp, Homo sapiens
gatggcgtagagagg

SEQ ID NO: 1233383 - DNA, 15 bp, Homo sapiens
agatggcgtagagag

SEQ ID NO: 1233384 - DNA, 15 bp, Homo sapiens
tagatggcgtagaga

SEQ ID NO: 1233385 - DNA, 15 bp, Homo sapiens
gtagatggcgtagag

SEQ ID NO: 1233386 - DNA, 15 bp, Homo sapiens
ggtagatggcgtaga

SEQ ID NO: 1233387 - DNA, 15 bp, Homo sapiens
aggtagatggcgtag

SEQ ID NO: 1233388 - DNA, 15 bp, Homo sapiens
gaggtagatggcgta

SEQ ID NO: 1233389 - DNA, 15 bp, Homo sapiens
tgaggtagatggcgt

SEQ ID NO: 1233390 - DNA, 15 bp, Homo sapiens
atgaggtagatggcg

SEQ ID NO: 1233391 - DNA, 15 bp, Homo sapiens
gatgaggtagatggc

SEQ ID NO: 1233392 - DNA, 15 bp, Homo sapiens
cgatgaggtagatgg

SEQ ID NO: 1233393 - DNA, 15 bp, Homo sapiens
acgatgaggtagatg

SEQ ID NO: 1233394 - DNA, 15 bp, Homo sapiens
gacgatgaggtagat

SEQ ID NO: 1233395 - DNA, 15 bp, Homo sapiens
tgacgatgaggtaga

SEQ ID NO: 1233396 - DNA, 15 bp, Homo sapiens
atgacgatgaggtag

SEQ ID NO: 1233397 - DNA, 15 bp, Homo sapiens
aatgacgatgaggta

SEQ ID NO: 1233398 - DNA, 15 bp, Homo sapiens
caatgacgatgaggt

SEQ ID NO: 1233399 - DNA, 15 bp, Homo sapiens
ccaatgacgatgagg

SEQ ID NO: 1233400 - DNA, 15 bp, Homo sapiens
gccaatgacgatgag

SEQ ID NO: 1233401 - DNA, 15 bp, Homo sapiens
ggccaatgacgatga

SEQ ID NO: 1233402 - DNA, 15 bp, Homo sapiens
aggccaatgacgatg

SEQ ID NO: 1233403 - DNA, 15 bp, Homo sapiens
gaggccaatgacgat

SEQ ID NO: 1233404 - DNA, 15 bp, Homo sapiens
tgaggccaatgacga

SEQ ID NO: 1233405 - DNA, 15 bp, Homo sapiens
ctgaggccaatgacg

SEQ ID NO: 1233406 - DNA, 15 bp, Homo sapiens
gctgaggccaatgac

SEQ ID NO: 1233407 - DNA, 15 bp, Homo sapiens
cgctgaggccaatga

SEQ ID NO: 1233408 - DNA, 15 bp, Homo sapiens
ccgctgaggccaatg

SEQ ID NO: 1233409 - DNA, 15 bp, Homo sapiens
accgctgaggccaat

SEQ ID NO: 1233410 - DNA, 15 bp, Homo sapiens
caccgctgaggccaa

SEQ ID NO: 1233411 - DNA, 15 bp, Homo sapiens
ccaccgctgaggcca

SEQ ID NO: 1233412 - DNA, 15 bp, Homo sapiens
gccaccgctgaggcc

SEQ ID NO: 1233413 - DNA, 15 bp, Homo sapiens
agccaccgctgaggc

SEQ ID NO: 1233414 - DNA, 15 bp, Homo sapiens
aagccaccgctgagg

SEQ ID NO: 1233415 - DNA, 15 bp, Homo sapiens
gaagccaccgctgag

SEQ ID NO: 1233416 - DNA, 15 bp, Homo sapiens
tgaagccaccgctga

SEQ ID NO: 1233417 - DNA, 15 bp, Homo sapiens
atgaagccaccgctg

SEQ ID NO: 1233418 - DNA, 15 bp, Homo sapiens
catgaagccaccgct

SEQ ID NO: 1233419 - DNA, 15 bp, Homo sapiens
ccatgaagccaccgc

SEQ ID NO: 1233420 - DNA, 15 bp, Homo sapiens
accatgaagccaccg

SEQ ID NO: 1233421 - DNA, 15 bp, Homo sapiens
gaccatgaagccacc

SEQ ID NO: 1233422 - DNA, 15 bp, Homo sapiens
ggaccatgaagccac

SEQ ID NO: 1233423 - DNA, 15 bp, Homo sapiens
aggaccatgaagcca

SEQ ID NO: 1233424 - DNA, 15 bp, Homo sapiens
caggaccatgaagcc

SEQ ID NO: 1233425 - DNA, 15 bp, Homo sapiens
acaggaccatgaagc

SEQ ID NO: 1233426 - DNA, 15 bp, Homo sapiens
tacaggaccatgaag

SEQ ID NO: 1233427 - DNA, 15 bp, Homo sapiens
gtacaggaccatgaa

SEQ ID NO: 1233428 - DNA, 15 bp, Homo sapiens
agtacaggaccatga

SEQ ID NO: 1233429 - DNA, 15 bp, Homo sapiens
tagtacaggaccatg

SEQ ID NO: 1233430 - DNA, 15 bp, Homo sapiens
gtagtacaggaccat

SEQ ID NO: 1233431 - DNA, 15 bp, Homo sapiens
cgtagtacaggacca

SEQ ID NO: 1233432 - DNA, 15 bp, Homo sapiens
acgtagtacaggacc

SEQ ID NO: 1233433 - DNA, 15 bp, Homo sapiens
cacgtagtacaggac

SEQ ID NO: 1233434 - DNA, 15 bp, Homo sapiens
acacgtagtacagga

SEQ ID NO: 1233435 - DNA, 15 bp, Homo sapiens
gacacgtagtacagg

SEQ ID NO: 1233436 - DNA, 15 bp, Homo sapiens
ggacacgtagtacag

SEQ ID NO: 1233437 - DNA, 15 bp, Homo sapiens
aggacacgtagtaca

SEQ ID NO: 1233438 - DNA, 15 bp, Homo sapiens
aaggacacgtagtac

SEQ ID NO: 1233439 - DNA, 15 bp, Homo sapiens
taaggacacgtagta

SEQ ID NO: 1233440 - DNA, 15 bp, Homo sapiens
ttaaggacacgtagt

SEQ ID NO: 1233441 - DNA, 15 bp, Homo sapiens
cttaaggacacgtag

SEQ ID NO: 1233442 - DNA, 15 bp, Homo sapiens
ccttaaggacacgta

SEQ ID NO: 1233443 - DNA, 15 bp, Homo sapiens
accttaaggacacgt

SEQ ID NO: 1233444 - DNA, 15 bp, Homo sapiens
aaccttaaggacacg

SEQ ID NO: 1233445 - DNA, 15 bp, Homo sapiens
gaaccttaaggacac

SEQ ID NO: 1233446 - DNA, 15 bp, Homo sapiens
tgaaccttaaggaca

SEQ ID NO: 1233447 - DNA, 15 bp, Homo sapiens
atgaaccttaaggac

SEQ ID NO: 1233448 - DNA, 15 bp, Homo sapiens
gatgaaccttaagga

SEQ ID NO: 1233449 - DNA, 15 bp, Homo sapiens
tgatgaaccttaagg

SEQ ID NO: 1233450 - DNA, 15 bp, Homo sapiens
ttgatgaaccttaag

SEQ ID NO: 1233451 - DNA, 15 bp, Homo sapiens
tttgatgaaccttaa

SEQ ID NO: 1233452 - DNA, 15 bp, Homo sapiens
gtttgatgaacctta

SEQ ID NO: 1233453 - DNA, 15 bp, Homo sapiens
tgtttgatgaacctt

SEQ ID NO: 1233454 - DNA, 15 bp, Homo sapiens
ctgtttgatgaacct

SEQ ID NO: 1233455 - DNA, 15 bp, Homo sapiens
tctgtttgatgaacc

SEQ ID NO: 1233456 - DNA, 15 bp, Homo sapiens
ttctgtttgatgaac

SEQ ID NO: 1233457 - DNA, 15 bp, Homo sapiens
tttctgtttgatgaa

SEQ ID NO: 1233458 - DNA, 15 bp, Homo sapiens
gtttctgtttgatga

SEQ ID NO: 1233459 - DNA, 15 bp, Homo sapiens
ggtttctgtttgatg

SEQ ID NO: 1233460 - DNA, 15 bp, Homo sapiens
tggtttctgtttgat

SEQ ID NO: 1233461 - DNA, 15 bp, Homo sapiens
ttggtttctgtttga

SEQ ID NO: 1233462 - DNA, 15 bp, Homo sapiens
cttggtttctgtttg

SEQ ID NO: 1233463 - DNA, 15 bp, Homo sapiens
acttggtttctgttt

SEQ ID NO: 1233464 - DNA, 15 bp, Homo sapiens
gacttggtttctgtt

SEQ ID NO: 1233465 - DNA, 15 bp, Homo sapiens
tgacttggtttctgt

SEQ ID NO: 1233466 - DNA, 15 bp, Homo sapiens
ttgacttggtttctg

SEQ ID NO: 1233467 - DNA, 15 bp, Homo sapiens
cttgacttggtttct

SEQ ID NO: 1233468 - DNA, 15 bp, Homo sapiens
tcttgacttggtttc

SEQ ID NO: 1233469 - DNA, 15 bp, Homo sapiens
gtcttgacttggttt

SEQ ID NO: 1233470 - DNA, 15 bp, Homo sapiens
agtcttgacttggtt

SEQ ID NO: 1233471 - DNA, 15 bp, Homo sapiens
cagtcttgacttggt

SEQ ID NO: 1233472 - DNA, 15 bp, Homo sapiens
ccagtcttgacttgg

SEQ ID NO: 1233473 - DNA, 15 bp, Homo sapiens
accagtcttgacttg

SEQ ID NO: 1233474 - DNA, 15 bp, Homo sapiens
caccagtcttgactt

SEQ ID NO: 1233475 - DNA, 15 bp, Homo sapiens
tcaccagtcttgact

SEQ ID NO: 1233476 - DNA, 15 bp, Homo sapiens
atcaccagtcttgac

SEQ ID NO: 1233477 - DNA, 15 bp, Homo sapiens
aatcaccagtcttga

SEQ ID NO: 1233478 - DNA, 15 bp, Homo sapiens
gaatcaccagtcttg

SEQ ID NO: 1233479 - DNA, 15 bp, Homo sapiens
tgaatcaccagtctt

SEQ ID NO: 1233480 - DNA, 15 bp, Homo sapiens
gtgaatcaccagtct

SEQ ID NO: 1233481 - DNA, 15 bp, Homo sapiens
cgtgaatcaccagtc

SEQ ID NO: 1233482 - DNA, 15 bp, Homo sapiens
gcgtgaatcaccagt

SEQ ID NO: 1233483 - DNA, 15 bp, Homo sapiens
ggcgtgaatcaccag

SEQ ID NO: 1233484 - DNA, 15 bp, Homo sapiens
tggcgtgaatcacca

SEQ ID NO: 1233485 - DNA, 15 bp, Homo sapiens
ctggcgtgaatcacc

SEQ ID NO: 1233486 - DNA, 15 bp, Homo sapiens
tctggcgtgaatcac

SEQ ID NO: 1233487 - DNA, 15 bp, Homo sapiens
gtctggcgtgaatca

SEQ ID NO: 1233488 - DNA, 15 bp, Homo sapiens
cgtctggcgtgaatc

SEQ ID NO: 1233489 - DNA, 15 bp, Homo sapiens
acgtctggcgtgaat

SEQ ID NO: 1233490 - DNA, 15 bp, Homo sapiens
gacgtctggcgtgaa

SEQ ID NO: 1233491 - DNA, 15 bp, Homo sapiens
agacgtctggcgtga

SEQ ID NO: 1233492 - DNA, 15 bp, Homo sapiens
cagacgtctggcgtg

SEQ ID NO: 1233493 - DNA, 15 bp, Homo sapiens
gcagacgtctggcgt

SEQ ID NO: 1233494 - DNA, 15 bp, Homo sapiens
ggcagacgtctggcg

SEQ ID NO: 1233495 - DNA, 15 bp, Homo sapiens
gggcagacgtctggc

SEQ ID NO: 1233496 - DNA, 15 bp, Homo sapiens
cgggcagacgtctgg

SEQ ID NO: 1233497 - DNA, 15 bp, Homo sapiens
gcgggcagacgtctg

SEQ ID NO: 1233498 - DNA, 15 bp, Homo sapiens
agcgggcagacgtct

SEQ ID NO: 1233499 - DNA, 15 bp, Homo sapiens
cagcgggcagacgtc

SEQ ID NO: 1233500 - DNA, 15 bp, Homo sapiens
ccagcgggcagacgt

SEQ ID NO: 1233501 - DNA, 15 bp, Homo sapiens
accagcgggcagacg

SEQ ID NO: 1233502 - DNA, 15 bp, Homo sapiens
caccagcgggcagac

SEQ ID NO: 1233503 - DNA, 15 bp, Homo sapiens
ccaccagcgggcaga

SEQ ID NO: 1233504 - DNA, 15 bp, Homo sapiens
cccaccagcgggcag

SEQ ID NO: 1233505 - DNA, 15 bp, Homo sapiens
ccccaccagcgggca

SEQ ID NO: 1233506 - DNA, 15 bp, Homo sapiens
cccccaccagcgggc

SEQ ID NO: 1233507 - DNA, 15 bp, Homo sapiens
tcccccaccagcggg

SEQ ID NO: 1233508 - DNA, 15 bp, Homo sapiens
gtcccccaccagcgg

SEQ ID NO: 1233509 - DNA, 15 bp, Homo sapiens
ggtcccccaccagcg

SEQ ID NO: 1233510 - DNA, 15 bp, Homo sapiens
aggtcccccaccagc

SEQ ID NO: 1233511 - DNA, 15 bp, Homo sapiens
caggtcccccaccag

SEQ ID NO: 1233512 - DNA, 15 bp, Homo sapiens
tcaggtcccccacca

SEQ ID NO: 1233513 - DNA, 15 bp, Homo sapiens
ctcaggtcccccacc

SEQ ID NO: 1233514 - DNA, 15 bp, Homo sapiens
gctcaggtcccccac

SEQ ID NO: 1233515 - DNA, 15 bp, Homo sapiens
tgctcaggtccccca

SEQ ID NO: 1233516 - DNA, 15 bp, Homo sapiens
ctgctcaggtccccc

SEQ ID NO: 1233517 - DNA, 15 bp, Homo sapiens
tctgctcaggtcccc

SEQ ID NO: 1233518 - DNA, 15 bp, Homo sapiens
gtctgctcaggtccc

SEQ ID NO: 1233519 - DNA, 15 bp, Homo sapiens
ggtctgctcaggtcc

SEQ ID NO: 1233520 - DNA, 15 bp, Homo sapiens
gggtctgctcaggtc

SEQ ID NO: 1233521 - DNA, 15 bp, Homo sapiens
agggtctgctcaggt

SEQ ID NO: 1233522 - DNA, 15 bp, Homo sapiens
aagggtctgctcagg

SEQ ID NO: 1233523 - DNA, 15 bp, Homo sapiens
gaagggtctgctcag

SEQ ID NO: 1233524 - DNA, 15 bp, Homo sapiens
tgaagggtctgctca

SEQ ID NO: 1233525 - DNA, 15 bp, Homo sapiens
ttgaagggtctgctc

SEQ ID NO: 1233526 - DNA, 15 bp, Homo sapiens
gttgaagggtctgct

SEQ ID NO: 1233527 - DNA, 15 bp, Homo sapiens
agttgaagggtctgc

SEQ ID NO: 1233528 - DNA, 15 bp, Homo sapiens
cagttgaagggtctg

SEQ ID NO: 1233529 - DNA, 15 bp, Homo sapiens
gcagttgaagggtct

SEQ ID NO: 1233530 - DNA, 15 bp, Homo sapiens
tgcagttgaagggtc

SEQ ID NO: 1233531 - DNA, 15 bp, Homo sapiens
gtgcagttgaagggt

SEQ ID NO: 1233532 - DNA, 15 bp, Homo sapiens
agtgcagttgaaggg

SEQ ID NO: 1233533 - DNA, 15 bp, Homo sapiens
gagtgcagttgaagg

SEQ ID NO: 1233534 - DNA, 15 bp, Homo sapiens
ggagtgcagttgaag

SEQ ID NO: 1233535 - DNA, 15 bp, Homo sapiens
gggagtgcagttgaa

SEQ ID NO: 1233536 - DNA, 15 bp, Homo sapiens
agggagtgcagttga

SEQ ID NO: 1233537 - DNA, 15 bp, Homo sapiens
gagggagtgcagttg

SEQ ID NO: 1233538 - DNA, 15 bp, Homo sapiens
ggagggagtgcagtt

SEQ ID NO: 1233539 - DNA, 15 bp, Homo sapiens
aggagggagtgcagt

SEQ ID NO: 1233540 - DNA, 15 bp, Homo sapiens
gaggagggagtgcag

SEQ ID NO: 1233541 - DNA, 15 bp, Homo sapiens
tgaggagggagtgca

SEQ ID NO: 1233542 - DNA, 15 bp, Homo sapiens
ctgaggagggagtgc

SEQ ID NO: 1233543 - DNA, 15 bp, Homo sapiens
cctgaggagggagtg

SEQ ID NO: 1233544 - DNA, 15 bp, Homo sapiens
tcctgaggagggagt

SEQ ID NO: 1233545 - DNA, 15 bp, Homo sapiens
ctcctgaggagggag

SEQ ID NO: 1233546 - DNA, 15 bp, Homo sapiens
gctcctgaggaggga

SEQ ID NO: 1233547 - DNA, 15 bp, Homo sapiens
ggctcctgaggaggg

SEQ ID NO: 1233548 - DNA, 15 bp, Homo sapiens
gggctcctgaggagg

SEQ ID NO: 1233549 - DNA, 15 bp, Homo sapiens
ggggctcctgaggag

SEQ ID NO: 1233550 - DNA, 15 bp, Homo sapiens
aggggctcctgagga

SEQ ID NO: 1233551 - DNA, 15 bp, Homo sapiens
aaggggctcctgagg

SEQ ID NO: 1233552 - DNA, 15 bp, Homo sapiens
gaaggggctcctgag

SEQ ID NO: 1233553 - DNA, 15 bp, Homo sapiens
ggaaggggctcctga

SEQ ID NO: 1233554 - DNA, 15 bp, Homo sapiens
aggaaggggctcctg

SEQ ID NO: 1233555 - DNA, 15 bp, Homo sapiens
caggaaggggctcct

SEQ ID NO: 1233556 - DNA, 15 bp, Homo sapiens
ccaggaaggggctcc

SEQ ID NO: 1233557 - DNA, 15 bp, Homo sapiens
cccaggaaggggctc

SEQ ID NO: 1233558 - DNA, 15 bp, Homo sapiens
ccccaggaaggggct

SEQ ID NO: 1233559 - DNA, 15 bp, Homo sapiens
tccccaggaaggggc

SEQ ID NO: 1233560 - DNA, 15 bp, Homo sapiens
gtccccaggaagggg

SEQ ID NO: 1233561 - DNA, 15 bp, Homo sapiens
tgtccccaggaaggg

SEQ ID NO: 1233562 - DNA, 15 bp, Homo sapiens
ctgtccccaggaagg

SEQ ID NO: 1233563 - DNA, 15 bp, Homo sapiens
actgtccccaggaag

SEQ ID NO: 1233564 - DNA, 15 bp, Homo sapiens
cactgtccccaggaa

SEQ ID NO: 1233565 - DNA, 15 bp, Homo sapiens
tcactgtccccagga

SEQ ID NO: 1233566 - DNA, 15 bp, Homo sapiens
ctcactgtccccagg

SEQ ID NO: 1233567 - DNA, 15 bp, Homo sapiens
cctcactgtccccag

SEQ ID NO: 1233568 - DNA, 15 bp, Homo sapiens
tcctcactgtcccca

SEQ ID NO: 1233569 - DNA, 15 bp, Homo sapiens
gtcctcactgtcccc

SEQ ID NO: 1233570 - DNA, 15 bp, Homo sapiens
tgtcctcactgtccc

SEQ ID NO: 1233571 - DNA, 15 bp, Homo sapiens
ttgtcctcactgtcc

SEQ ID NO: 1233572 - DNA, 15 bp, Homo sapiens
attgtcctcactgtc

SEQ ID NO: 1233573 - DNA, 15 bp, Homo sapiens
cattgtcctcactgt

SEQ ID NO: 1233574 - DNA, 15 bp, Homo sapiens
tcattgtcctcactg

SEQ ID NO: 1233575 - DNA, 15 bp, Homo sapiens
gtcattgtcctcact

SEQ ID NO: 1233576 - DNA, 15 bp, Homo sapiens
ggtcattgtcctcac

SEQ ID NO: 1233577 - DNA, 15 bp, Homo sapiens
gggtcattgtcctca

SEQ ID NO: 1233578 - DNA, 15 bp, Homo sapiens
agggtcattgtcctc

SEQ ID NO: 1233579 - DNA, 15 bp, Homo sapiens
tagggtcattgtcct

SEQ ID NO: 1233580 - DNA, 15 bp, Homo sapiens
gtagggtcattgtcc

SEQ ID NO: 1233581 - DNA, 15 bp, Homo sapiens
tgtagggtcattgtc

SEQ ID NO: 1233582 - DNA, 15 bp, Homo sapiens
ctgtagggtcattgt

SEQ ID NO: 1233583 - DNA, 15 bp, Homo sapiens
tctgtagggtcattg

SEQ ID NO: 1233584 - DNA, 15 bp, Homo sapiens
atctgtagggtcatt

SEQ ID NO: 1233585 - DNA, 15 bp, Homo sapiens
catctgtagggtcat

SEQ ID NO: 1233586 - DNA, 15 bp, Homo sapiens
gcatctgtagggtca

SEQ ID NO: 1233587 - DNA, 15 bp, Homo sapiens
agcatctgtagggtc

SEQ ID NO: 1233588 - DNA, 15 bp, Homo sapiens
gagcatctgtagggt

SEQ ID NO: 1233589 - DNA, 15 bp, Homo sapiens
tgagcatctgtaggg

SEQ ID NO: 1233590 - DNA, 15 bp, Homo sapiens
ctgagcatctgtagg

SEQ ID NO: 1233591 - DNA, 15 bp, Homo sapiens
gctgagcatctgtag

SEQ ID NO: 1233592 - DNA, 15 bp, Homo sapiens
agctgagcatctgta

SEQ ID NO: 1233593 - DNA, 15 bp, Homo sapiens
tagctgagcatctgt

SEQ ID NO: 1233594 - DNA, 15 bp, Homo sapiens
gtagctgagcatctg

SEQ ID NO: 1233595 - DNA, 15 bp, Homo sapiens
tgtagctgagcatct

SEQ ID NO: 1233596 - DNA, 15 bp, Homo sapiens
atgtagctgagcatc

SEQ ID NO: 1233597 - DNA, 15 bp, Homo sapiens
gatgtagctgagcat

SEQ ID NO: 1233598 - DNA, 15 bp, Homo sapiens
ggatgtagctgagca

SEQ ID NO: 1233599 - DNA, 15 bp, Homo sapiens
cggatgtagctgagc

SEQ ID NO: 1233600 - DNA, 15 bp, Homo sapiens
ccggatgtagctgag

SEQ ID NO: 1233601 - DNA, 15 bp, Homo sapiens
gccggatgtagctga

SEQ ID NO: 1233602 - DNA, 15 bp, Homo sapiens
ggccggatgtagctg

SEQ ID NO: 1233603 - DNA, 15 bp, Homo sapiens
gggccggatgtagct

SEQ ID NO: 1233604 - DNA, 15 bp, Homo sapiens
tgggccggatgtagc

SEQ ID NO: 1233605 - DNA, 15 bp, Homo sapiens
ctgggccggatgtag

SEQ ID NO: 1233606 - DNA, 15 bp, Homo sapiens
cctgggccggatgta

SEQ ID NO: 1233607 - DNA, 15 bp, Homo sapiens
ccctgggccggatgt

SEQ ID NO: 1233608 - DNA, 15 bp, Homo sapiens
accctgggccggatg

SEQ ID NO: 1233609 - DNA, 15 bp, Homo sapiens
caccctgggccggat

SEQ ID NO: 1233610 - DNA, 15 bp, Homo sapiens
gcaccctgggccgga

SEQ ID NO: 1233611 - DNA, 15 bp, Homo sapiens
agcaccctgggccgg

SEQ ID NO: 1233612 - DNA, 15 bp, Homo sapiens
cagcaccctgggccg

SEQ ID NO: 1233613 - DNA, 15 bp, Homo sapiens
gcagcaccctgggcc

SEQ ID NO: 1233614 - DNA, 15 bp, Homo sapiens
tgcagcaccctgggc

SEQ ID NO: 1233615 - DNA, 15 bp, Homo sapiens
ctgcagcaccctggg

SEQ ID NO: 1233616 - DNA, 15 bp, Homo sapiens
actgcagcaccctgg

SEQ ID NO: 1233617 - DNA, 15 bp, Homo sapiens
cactgcagcaccctg

SEQ ID NO: 1233618 - DNA, 15 bp, Homo sapiens
ccactgcagcaccct

SEQ ID NO: 1233619 - DNA, 15 bp, Homo sapiens
gccactgcagcaccc

SEQ ID NO: 1233620 - DNA, 15 bp, Homo sapiens
tgccactgcagcacc

SEQ ID NO: 1233621 - DNA, 15 bp, Homo sapiens
gtgccactgcagcac

SEQ ID NO: 1233622 - DNA, 15 bp, Homo sapiens
tgtgccactgcagca

SEQ ID NO: 1233623 - DNA, 15 bp, Homo sapiens
ctgtgccactgcagc

SEQ ID NO: 1233624 - DNA, 15 bp, Homo sapiens
tctgtgccactgcag

SEQ ID NO: 1233625 - DNA, 15 bp, Homo sapiens
gtctgtgccactgca

SEQ ID NO: 1233626 - DNA, 15 bp, Homo sapiens
ggtctgtgccactgc

SEQ ID NO: 1233627 - DNA, 15 bp, Homo sapiens
tggtctgtgccactg

SEQ ID NO: 1233628 - DNA, 15 bp, Homo sapiens
ctggtctgtgccact

SEQ ID NO: 1233629 - DNA, 15 bp, Homo sapiens
gctggtctgtgccac

SEQ ID NO: 1233630 - DNA, 15 bp, Homo sapiens
ggctggtctgtgcca

SEQ ID NO: 1233631 - DNA, 15 bp, Homo sapiens
tggctggtctgtgcc

SEQ ID NO: 1233632 - DNA, 15 bp, Homo sapiens
gtggctggtctgtgc

SEQ ID NO: 1233633 - DNA, 15 bp, Homo sapiens
tgtggctggtctgtg

SEQ ID NO: 1233634 - DNA, 15 bp, Homo sapiens
ctgtggctggtctgt

SEQ ID NO: 1233635 - DNA, 15 bp, Homo sapiens
cctgtggctggtctg

SEQ ID NO: 1233636 - DNA, 15 bp, Homo sapiens
tcctgtggctggtct

SEQ ID NO: 1233637 - DNA, 15 bp, Homo sapiens
atcctgtggctggtc

SEQ ID NO: 1233638 - DNA, 15 bp, Homo sapiens
catcctgtggctggt

SEQ ID NO: 1233639 - DNA, 15 bp, Homo sapiens
ccatcctgtggctgg

SEQ ID NO: 1233640 - DNA, 15 bp, Homo sapiens
gccatcctgtggctg

SEQ ID NO: 1233641 - DNA, 15 bp, Homo sapiens
tgccatcctgtggct

SEQ ID NO: 1233642 - DNA, 15 bp, Homo sapiens
ctgccatcctgtggc

SEQ ID NO: 1233643 - DNA, 15 bp, Homo sapiens
actgccatcctgtgg

SEQ ID NO: 1233644 - DNA, 15 bp, Homo sapiens
tactgccatcctgtg

SEQ ID NO: 1233645 - DNA, 15 bp, Homo sapiens
ctactgccatcctgt

SEQ ID NO: 1233646 - DNA, 15 bp, Homo sapiens
tctactgccatcctg

SEQ ID NO: 1233647 - DNA, 15 bp, Homo sapiens
ttctactgccatcct

SEQ ID NO: 1233648 - DNA, 15 bp, Homo sapiens
attctactgccatcc

SEQ ID NO: 1233649 - DNA, 15 bp, Homo sapiens
tattctactgccatc

SEQ ID NO: 1233650 - DNA, 15 bp, Homo sapiens
ttattctactgccat

SEQ ID NO: 1233651 - DNA, 15 bp, Homo sapiens
tttattctactgcca

SEQ ID NO: 1233652 - DNA, 15 bp, Homo sapiens
ctttattctactgcc

SEQ ID NO: 1233653 - DNA, 15 bp, Homo sapiens
tctttattctactgc

SEQ ID NO: 1233654 - DNA, 15 bp, Homo sapiens
gtctttattctactg

SEQ ID NO: 1233655 - DNA, 15 bp, Homo sapiens
tgtctttattctact

SEQ ID NO: 1233656 - DNA, 15 bp, Homo sapiens
ctgtctttattctac

SEQ ID NO: 1233657 - DNA, 15 bp, Homo sapiens
actgtctttattcta

SEQ ID NO: 1233658 - DNA, 15 bp, Homo sapiens
gactgtctttattct

SEQ ID NO: 1233659 - DNA, 15 bp, Homo sapiens
cgactgtctttattc

SEQ ID NO: 1233660 - DNA, 15 bp, Homo sapiens
tcgactgtctttatt

SEQ ID NO: 1233661 - DNA, 15 bp, Homo sapiens
ttcgactgtctttat

SEQ ID NO: 1233662 - DNA, 15 bp, Homo sapiens
tttcgactgtcttta

SEQ ID NO: 1233663 - DNA, 15 bp, Homo sapiens
ctttcgactgtcttt

SEQ ID NO: 1233664 - DNA, 15 bp, Homo sapiens
cctttcgactgtctt

SEQ ID NO: 1233665 - DNA, 15 bp, Homo sapiens
ccctttcgactgtct

SEQ ID NO: 1233666 - DNA, 15 bp, Homo sapiens
tccctttcgactgtc

SEQ ID NO: 1233667 - DNA, 15 bp, Homo sapiens
atccctttcgactgt

SEQ ID NO: 1233668 - DNA, 15 bp, Homo sapiens
aatccctttcgactg

SEQ ID NO: 1233669 - DNA, 15 bp, Homo sapiens
aaatccctttcgact

SEQ ID NO: 1233670 - DNA, 15 bp, Homo sapiens
gaaatccctttcgac

SEQ ID NO: 1233671 - DNA, 15 bp, Homo sapiens
agaaatccctttcga

SEQ ID NO: 1233672 - DNA, 15 bp, Homo sapiens
cagaaatccctttcg

SEQ ID NO: 1233673 - DNA, 15 bp, Homo sapiens
gcagaaatccctttc

SEQ ID NO: 1233674 - DNA, 15 bp, Homo sapiens
agcagaaatcccttt

SEQ ID NO: 1233675 - DNA, 15 bp, Homo sapiens
gagcagaaatccctt

SEQ ID NO: 1233676 - DNA, 15 bp, Homo sapiens
tgagcagaaatccct

SEQ ID NO: 1233677 - DNA, 15 bp, Homo sapiens
gtgagcagaaatccc

SEQ ID NO: 1233678 - DNA, 15 bp, Homo sapiens
agtgagcagaaatcc

SEQ ID NO: 1233679 - DNA, 15 bp, Homo sapiens
cagtgagcagaaatc

SEQ ID NO: 1233680 - DNA, 15 bp, Homo sapiens
ccagtgagcagaaat

SEQ ID NO: 1233681 - DNA, 15 bp, Homo sapiens
gccagtgagcagaaa

SEQ ID NO: 1233682 - DNA, 15 bp, Homo sapiens
tgccagtgagcagaa

SEQ ID NO: 1233683 - DNA, 15 bp, Homo sapiens
ctgccagtgagcaga

SEQ ID NO: 1233684 - DNA, 15 bp, Homo sapiens
cctgccagtgagcag

SEQ ID NO: 1233685 - DNA, 15 bp, Homo sapiens
tcctgccagtgagca

SEQ ID NO: 1233686 - DNA, 15 bp, Homo sapiens
ctcctgccagtgagc

SEQ ID NO: 1233687 - DNA, 15 bp, Homo sapiens
tctcctgccagtgag

SEQ ID NO: 1233688 - DNA, 15 bp, Homo sapiens
gtctcctgccagtga

SEQ ID NO: 1233689 - DNA, 15 bp, Homo sapiens
agtctcctgccagtg

SEQ ID NO: 1233690 - DNA, 15 bp, Homo sapiens
cagtctcctgccagt

SEQ ID NO: 1233691 - DNA, 15 bp, Homo sapiens
gcagtctcctgccag

SEQ ID NO: 1233692 - DNA, 15 bp, Homo sapiens
cgcagtctcctgcca

SEQ ID NO: 1233693 - DNA, 15 bp, Homo sapiens
tcgcagtctcctgcc

SEQ ID NO: 1233694 - DNA, 15 bp, Homo sapiens
atcgcagtctcctgc

SEQ ID NO: 1233695 - DNA, 15 bp, Homo sapiens
catcgcagtctcctg

SEQ ID NO: 1233696 - DNA, 15 bp, Homo sapiens
tcatcgcagtctcct

SEQ ID NO: 1233697 - DNA, 15 bp, Homo sapiens
gtcatcgcagtctcc

SEQ ID NO: 1233698 - DNA, 15 bp, Homo sapiens
agtcatcgcagtctc

SEQ ID NO: 1233699 - DNA, 15 bp, Homo sapiens
cagtcatcgcagtct

SEQ ID NO: 1233700 - DNA, 15 bp, Homo sapiens
ccagtcatcgcagtc

SEQ ID NO: 1233701 - DNA, 15 bp, Homo sapiens
cccagtcatcgcagt

SEQ ID NO: 1233702 - DNA, 15 bp, Homo sapiens
tcccagtcatcgcag

SEQ ID NO: 1233703 - DNA, 15 bp, Homo sapiens
ctcccagtcatcgca

SEQ ID NO: 1233704 - DNA, 15 bp, Homo sapiens
tctcccagtcatcgc

SEQ ID NO: 1233705 - DNA, 15 bp, Homo sapiens
ttctcccagtcatcg

SEQ ID NO: 1233706 - DNA, 15 bp, Homo sapiens
tttctcccagtcatc

SEQ ID NO: 1233707 - DNA, 15 bp, Homo sapiens
ttttctcccagtcat

SEQ ID NO: 1233708 - DNA, 15 bp, Homo sapiens
gttttctcccagtca

SEQ ID NO: 1233709 - DNA, 15 bp, Homo sapiens
ggttttctcccagtc

SEQ ID NO: 1233710 - DNA, 15 bp, Homo sapiens
aggttttctcccagt

SEQ ID NO: 1233711 - DNA, 15 bp, Homo sapiens
caggttttctcccag

SEQ ID NO: 1233712 - DNA, 15 bp, Homo sapiens
gcaggttttctccca

SEQ ID NO: 1233713 - DNA, 15 bp, Homo sapiens
tgcaggttttctccc

SEQ ID NO: 1233714 - DNA, 15 bp, Homo sapiens
gtgcaggttttctcc

SEQ ID NO: 1233715 - DNA, 15 bp, Homo sapiens
agtgcaggttttctc

SEQ ID NO: 1233716 - DNA, 15 bp, Homo sapiens
gagtgcaggttttct

SEQ ID NO: 1233717 - DNA, 15 bp, Homo sapiens
cgagtgcaggttttc

SEQ ID NO: 1233718 - DNA, 15 bp, Homo sapiens
ccgagtgcaggtttt

SEQ ID NO: 1233719 - DNA, 15 bp, Homo sapiens
accgagtgcaggttt

SEQ ID NO: 1233720 - DNA, 15 bp, Homo sapiens
caccgagtgcaggtt

SEQ ID NO: 1233721 - DNA, 15 bp, Homo sapiens
ccaccgagtgcaggt

SEQ ID NO: 1233722 - DNA, 15 bp, Homo sapiens
gccaccgagtgcagg

SEQ ID NO: 1233723 - DNA, 15 bp, Homo sapiens
tgccaccgagtgcag

SEQ ID NO: 1233724 - DNA, 15 bp, Homo sapiens
gtgccaccgagtgca

SEQ ID NO: 1233725 - DNA, 15 bp, Homo sapiens
ggtgccaccgagtgc

SEQ ID NO: 1233726 - DNA, 15 bp, Homo sapiens
aggtgccaccgagtg

SEQ ID NO: 1233727 - DNA, 15 bp, Homo sapiens
taggtgccaccgagt

SEQ ID NO: 1233728 - DNA, 15 bp, Homo sapiens
gtaggtgccaccgag

SEQ ID NO: 1233729 - DNA, 15 bp, Homo sapiens
tgtaggtgccaccga

SEQ ID NO: 1233730 - DNA, 15 bp, Homo sapiens
ttgtaggtgccaccg

SEQ ID NO: 1233731 - DNA, 15 bp, Homo sapiens
gttgtaggtgccacc

SEQ ID NO: 1233732 - DNA, 15 bp, Homo sapiens
cgttgtaggtgccac

SEQ ID NO: 1233733 - DNA, 15 bp, Homo sapiens
acgttgtaggtgcca

SEQ ID NO: 1233734 - DNA, 15 bp, Homo sapiens
aacgttgtaggtgcc

SEQ ID NO: 1233735 - DNA, 15 bp, Homo sapiens
caacgttgtaggtgc

SEQ ID NO: 1233736 - DNA, 15 bp, Homo sapiens
gcaacgttgtaggtg

SEQ ID NO: 1233737 - DNA, 15 bp, Homo sapiens
agcaacgttgtaggt

SEQ ID NO: 1233738 - DNA, 15 bp, Homo sapiens
tagcaacgttgtagg

SEQ ID NO: 1233739 - DNA, 15 bp, Homo sapiens
ttagcaacgttgtag

SEQ ID NO: 1233740 - DNA, 15 bp, Homo sapiens
attagcaacgttgta

SEQ ID NO: 1233741 - DNA, 15 bp, Homo sapiens
aattagcaacgttgt

SEQ ID NO: 1233742 - DNA, 15 bp, Homo sapiens
aaattagcaacgttg

SEQ ID NO: 1233743 - DNA, 15 bp, Homo sapiens
taaattagcaacgtt

SEQ ID NO: 1233744 - DNA, 15 bp, Homo sapiens
ataaattagcaacgt

SEQ ID NO: 1233745 - DNA, 15 bp, Homo sapiens
aataaattagcaacg

SEQ ID NO: 1233746 - DNA, 15 bp, Homo sapiens
aaataaattagcaac

SEQ ID NO: 1233747 - DNA, 15 bp, Homo sapiens
gaaataaattagcaa

SEQ ID NO: 1233748 - DNA, 15 bp, Homo sapiens
ggaaataaattagca

SEQ ID NO: 1233749 - DNA, 15 bp, Homo sapiens
aggaaataaattagc

SEQ ID NO: 1233750 - DNA, 15 bp, Homo sapiens
aaggaaataaattag

SEQ ID NO: 1233751 - DNA, 15 bp, Homo sapiens
aaaggaaataaatta

SEQ ID NO: 1233752 - DNA, 15 bp, Homo sapiens
aaaaggaaataaatt

SEQ ID NO: 1233753 - DNA, 15 bp, Homo sapiens
caaaaggaaataaat

SEQ ID NO: 1233754 - DNA, 15 bp, Homo sapiens
tcaaaaggaaataaa

SEQ ID NO: 1233755 - DNA, 15 bp, Homo sapiens
atcaaaaggaaataa

SEQ ID NO: 1233756 - DNA, 15 bp, Homo sapiens
tatcaaaaggaaata

SEQ ID NO: 1233757 - DNA, 15 bp, Homo sapiens
atatcaaaaggaaat

SEQ ID NO: 1233758 - DNA, 15 bp, Homo sapiens
catatcaaaaggaaa

SEQ ID NO: 1233759 - DNA, 15 bp, Homo sapiens
gcatatcaaaaggaa

SEQ ID NO: 1233760 - DNA, 15 bp, Homo sapiens
tgcatatcaaaagga

SEQ ID NO: 1233761 - DNA, 15 bp, Homo sapiens
atgcatatcaaaagg

SEQ ID NO: 1233762 - DNA, 15 bp, Homo sapiens
aatgcatatcaaaag

SEQ ID NO: 1233763 - DNA, 15 bp, Homo sapiens
aaatgcatatcaaaa

SEQ ID NO: 1233764 - DNA, 15 bp, Homo sapiens
taaatgcatatcaaa

SEQ ID NO: 1233765 - DNA, 15 bp, Homo sapiens
ataaatgcatatcaa

SEQ ID NO: 1233766 - DNA, 15 bp, Homo sapiens
tataaatgcatatca

SEQ ID NO: 1233767 - DNA, 15 bp, Homo sapiens
atataaatgcatatc

SEQ ID NO: 1233768 - DNA, 15 bp, Homo sapiens
tatataaatgcatat

SEQ ID NO: 1233769 - DNA, 15 bp, Homo sapiens
ctatataaatgcata

SEQ ID NO: 1233770 - DNA, 15 bp, Homo sapiens
cctatataaatgcat

SEQ ID NO: 1233771 - DNA, 15 bp, Homo sapiens
gcctatataaatgca

SEQ ID NO: 1233772 - DNA, 15 bp, Homo sapiens
tgcctatataaatgc

SEQ ID NO: 1233773 - DNA, 15 bp, Homo sapiens
ttgcctatataaatg

SEQ ID NO: 1233774 - DNA, 15 bp, Homo sapiens
gttgcctatataaat

SEQ ID NO: 1233775 - DNA, 15 bp, Homo sapiens
agttgcctatataaa

SEQ ID NO: 1233776 - DNA, 15 bp, Homo sapiens
gagttgcctatataa

SEQ ID NO: 1233777 - DNA, 15 bp, Homo sapiens
cgagttgcctatata

SEQ ID NO: 1233778 - DNA, 15 bp, Homo sapiens
tcgagttgcctatat

SEQ ID NO: 1233779 - DNA, 15 bp, Homo sapiens
atcgagttgcctata

SEQ ID NO: 1233780 - DNA, 15 bp, Homo sapiens
tatcgagttgcctat

SEQ ID NO: 1233781 - DNA, 15 bp, Homo sapiens
atatcgagttgccta

SEQ ID NO: 1233782 - DNA, 15 bp, Homo sapiens
tatatcgagttgcct

SEQ ID NO: 1233783 - DNA, 15 bp, Homo sapiens
ctatatcgagttgcc

SEQ ID NO: 1233784 - DNA, 15 bp, Homo sapiens
cctatatcgagttgc

SEQ ID NO: 1233785 - DNA, 15 bp, Homo sapiens
tcctatatcgagttg

SEQ ID NO: 1233786 - DNA, 15 bp, Homo sapiens
atcctatatcgagtt

SEQ ID NO: 1233787 - DNA, 15 bp, Homo sapiens
catcctatatcgagt

SEQ ID NO: 1233788 - DNA, 15 bp, Homo sapiens
ccatcctatatcgag

SEQ ID NO: 1233789 - DNA, 15 bp, Homo sapiens
cccatcctatatcga

SEQ ID NO: 1233790 - DNA, 15 bp, Homo sapiens
tcccatcctatatcg

SEQ ID NO: 1233791 - DNA, 15 bp, Homo sapiens
ctcccatcctatatc

SEQ ID NO: 1233792 - DNA, 15 bp, Homo sapiens
gctcccatcctatat

SEQ ID NO: 1233793 - DNA, 15 bp, Homo sapiens
tgctcccatcctata

SEQ ID NO: 1233794 - DNA, 15 bp, Homo sapiens
ttgctcccatcctat

SEQ ID NO: 1233795 - DNA, 15 bp, Homo sapiens
tttgctcccatccta

SEQ ID NO: 1233796 - DNA, 15 bp, Homo sapiens
gtttgctcccatcct

SEQ ID NO: 1233797 - DNA, 15 bp, Homo sapiens
agtttgctcccatcc

SEQ ID NO: 1233798 - DNA, 15 bp, Homo sapiens
tagtttgctcccatc

SEQ ID NO: 1233799 - DNA, 15 bp, Homo sapiens
ctagtttgctcccat

SEQ ID NO: 1233800 - DNA, 15 bp, Homo sapiens
cattcctagtttgct

SEQ ID NO: 1233801 - DNA, 15 bp, Homo sapiens
tcattcctagtttgc

SEQ ID NO: 1233802 - DNA, 15 bp, Homo sapiens
ttcattcctagtttg

SEQ ID NO: 1233803 - DNA, 15 bp, Homo sapiens
attcattcctagttt

SEQ ID NO: 1233804 - DNA, 15 bp, Homo sapiens
aattcattcctagtt

SEQ ID NO: 1233805 - DNA, 15 bp, Homo sapiens
caattcattcctagt

SEQ ID NO: 1233806 - DNA, 15 bp, Homo sapiens
ccaattcattcctag

SEQ ID NO: 1233807 - DNA, 15 bp, Homo sapiens
cccaattcattccta

SEQ ID NO: 1233808 - DNA, 15 bp, Homo sapiens
acccaattcattcct

SEQ ID NO: 1233809 - DNA, 15 bp, Homo sapiens
tacccaattcattcc

SEQ ID NO: 1233810 - DNA, 15 bp, Homo sapiens
ctacccaattcattc

SEQ ID NO: 1233811 - DNA, 15 bp, Homo sapiens
gctacccaattcatt

SEQ ID NO: 1233812 - DNA, 15 bp, Homo sapiens
agctacccaattcat

SEQ ID NO: 1233813 - DNA, 15 bp, Homo sapiens
tagctacccaattca

SEQ ID NO: 1233814 - DNA, 15 bp, Homo sapiens
ctagctacccaattc

SEQ ID NO: 1233815 - DNA, 15 bp, Homo sapiens
tctagctacccaatt

SEQ ID NO: 1233816 - DNA, 15 bp, Homo sapiens
gtctagctacccaat

SEQ ID NO: 1233817 - DNA, 15 bp, Homo sapiens
agtctagctacccaa

SEQ ID NO: 1233818 - DNA, 15 bp, Homo sapiens
cagtctagctaccca

SEQ ID NO: 1233819 - DNA, 15 bp, Homo sapiens
acagtctagctaccc

SEQ ID NO: 1233820 - DNA, 15 bp, Homo sapiens
cacagtctagctacc

SEQ ID NO: 1233821 - DNA, 15 bp, Homo sapiens
gcacagtctagctac

SEQ ID NO: 1233822 - DNA, 15 bp, Homo sapiens
tgcacagtctagcta

SEQ ID NO: 1233823 - DNA, 15 bp, Homo sapiens
ctgcacagtctagct

SEQ ID NO: 1233824 - DNA, 15 bp, Homo sapiens
cctgcacagtctagc

SEQ ID NO: 1233825 - DNA, 15 bp, Homo sapiens
tcctgcacagtctag

SEQ ID NO: 1233826 - DNA, 15 bp, Homo sapiens
ttcctgcacagtcta

SEQ ID NO: 1233827 - DNA, 15 bp, Homo sapiens
attcctgcacagtct

SEQ ID NO: 1233828 - DNA, 15 bp, Homo sapiens
aattcctgcacagtc

SEQ ID NO: 1233829 - DNA, 15 bp, Homo sapiens
caattcctgcacagt

SEQ ID NO: 1233830 - DNA, 15 bp, Homo sapiens
acaattcctgcacag

SEQ ID NO: 1233831 - DNA, 15 bp, Homo sapiens
aacaattcctgcaca

SEQ ID NO: 1233832 - DNA, 15 bp, Homo sapiens
caacaattcctgcac

SEQ ID NO: 1233833 - DNA, 15 bp, Homo sapiens
ccaacaattcctgca

SEQ ID NO: 1233834 - DNA, 15 bp, Homo sapiens
tccaacaattcctgc

SEQ ID NO: 1233835 - DNA, 15 bp, Homo sapiens
ttccaacaattcctg

SEQ ID NO: 1233836 - DNA, 15 bp, Homo sapiens
gttccaacaattcct

SEQ ID NO: 1233837 - DNA, 15 bp, Homo sapiens
ggttccaacaattcc

SEQ ID NO: 1233838 - DNA, 15 bp, Homo sapiens
aggttccaacaattc

SEQ ID NO: 1233839 - DNA, 15 bp, Homo sapiens
caggttccaacaatt

SEQ ID NO: 1233840 - DNA, 15 bp, Homo sapiens
ccaggttccaacaat

SEQ ID NO: 1233841 - DNA, 15 bp, Homo sapiens
tccaggttccaacaa

SEQ ID NO: 1233842 - DNA, 15 bp, Homo sapiens
ctccaggttccaaca

SEQ ID NO: 1233843 - DNA, 15 bp, Homo sapiens
cctccaggttccaac

SEQ ID NO: 1233844 - DNA, 15 bp, Homo sapiens
ccctccaggttccaa

SEQ ID NO: 1233845 - DNA, 15 bp, Homo sapiens
tccctccaggttcca

SEQ ID NO: 1233846 - DNA, 15 bp, Homo sapiens
ttccctccaggttcc

SEQ ID NO: 1233847 - DNA, 15 bp, Homo sapiens
gttccctccaggttc

SEQ ID NO: 1233848 - DNA, 15 bp, Homo sapiens
tgttccctccaggtt

SEQ ID NO: 1233849 - DNA, 15 bp, Homo sapiens
ttgttccctccaggt

SEQ ID NO: 1233850 - DNA, 15 bp, Homo sapiens
attgttccctccagg

SEQ ID NO: 1233851 - DNA, 15 bp, Homo sapiens
tattgttccctccag

SEQ ID NO: 1233852 - DNA, 15 bp, Homo sapiens
ttattgttccctcca

SEQ ID NO: 1233853 - DNA, 15 bp, Homo sapiens
gttattgttccctcc

SEQ ID NO: 1233854 - DNA, 15 bp, Homo sapiens
tgttattgttccctc

SEQ ID NO: 1233855 - DNA, 15 bp, Homo sapiens
ctgttattgttccct

SEQ ID NO: 1233856 - DNA, 15 bp, Homo sapiens
actgttattgttccc

SEQ ID NO: 1233857 - DNA, 15 bp, Homo sapiens
tactgttattgttcc

SEQ ID NO: 1233858 - DNA, 15 bp, Homo sapiens
ctactgttattgttc

SEQ ID NO: 1233859 - DNA, 15 bp, Homo sapiens
gctactgttattgtt

SEQ ID NO: 1233860 - DNA, 15 bp, Homo sapiens
agctactgttattgt

SEQ ID NO: 1233861 - DNA, 15 bp, Homo sapiens
tagctactgttattg

SEQ ID NO: 1233862 - DNA, 15 bp, Homo sapiens
ctagctactgttatt

SEQ ID NO: 1233863 - DNA, 15 bp, Homo sapiens
gctagctactgttat

SEQ ID NO: 1233864 - DNA, 15 bp, Homo sapiens
tgctagctactgtta

SEQ ID NO: 1233865 - DNA, 15 bp, Homo sapiens
ctgctagctactgtt

SEQ ID NO: 1233866 - DNA, 15 bp, Homo sapiens
tctgctagctactgt

SEQ ID NO: 1233867 - DNA, 15 bp, Homo sapiens
atctgctagctactg

SEQ ID NO: 1233868 - DNA, 15 bp, Homo sapiens
aatctgctagctact

SEQ ID NO: 1233869 - DNA, 15 bp, Homo sapiens
aaatctgctagctac

SEQ ID NO: 1233870 - DNA, 15 bp, Homo sapiens
caaatctgctagcta

SEQ ID NO: 1233871 - DNA, 15 bp, Homo sapiens
ccaaatctgctagct

SEQ ID NO: 1233872 - DNA, 15 bp, Homo sapiens
gccaaatctgctagc

SEQ ID NO: 1233873 - DNA, 15 bp, Homo sapiens
agccaaatctgctag

SEQ ID NO: 1233874 - DNA, 15 bp, Homo sapiens
aagccaaatctgcta

SEQ ID NO: 1233875 - DNA, 15 bp, Homo sapiens
gaagccaaatctgct

SEQ ID NO: 1233876 - DNA, 15 bp, Homo sapiens
tgaagccaaatctgc

SEQ ID NO: 1233877 - DNA, 15 bp, Homo sapiens
atgaagccaaatctg

SEQ ID NO: 1233878 - DNA, 15 bp, Homo sapiens
gatgaagccaaatct

SEQ ID NO: 1233879 - DNA, 15 bp, Homo sapiens
agatgaagccaaatc

SEQ ID NO: 1233880 - DNA, 15 bp, Homo sapiens
aagatgaagccaaat

SEQ ID NO: 1233881 - DNA, 15 bp, Homo sapiens
gaagatgaagccaaa

SEQ ID NO: 1233882 - DNA, 15 bp, Homo sapiens
ggaagatgaagccaa

SEQ ID NO: 1233883 - DNA, 15 bp, Homo sapiens
tggaagatgaagcca

SEQ ID NO: 1233884 - DNA, 15 bp, Homo sapiens
ctggaagatgaagcc

SEQ ID NO: 1233885 - DNA, 15 bp, Homo sapiens
cctggaagatgaagc

SEQ ID NO: 1233886 - DNA, 15 bp, Homo sapiens
ccctggaagatgaag

SEQ ID NO: 1233887 - DNA, 15 bp, Homo sapiens
cccctggaagatgaa

SEQ ID NO: 1233888 - DNA, 15 bp, Homo sapiens
gcccctggaagatga

SEQ ID NO: 1233889 - DNA, 15 bp, Homo sapiens
ggcccctggaagatg

SEQ ID NO: 1233890 - DNA, 15 bp, Homo sapiens
gggcccctggaagat

SEQ ID NO: 1233891 - DNA, 15 bp, Homo sapiens
ggggcccctggaaga

SEQ ID NO: 1233892 - DNA, 15 bp, Homo sapiens
tggggcccctggaag

SEQ ID NO: 1233893 - DNA, 15 bp, Homo sapiens
gtggggcccctggaa

SEQ ID NO: 1233894 - DNA, 15 bp, Homo sapiens
tgtggggcccctgga

SEQ ID NO: 1233895 - DNA, 15 bp, Homo sapiens
gtgtggggcccctgg

SEQ ID NO: 1233896 - DNA, 15 bp, Homo sapiens
agtgtggggcccctg

SEQ ID NO: 1233897 - DNA, 15 bp, Homo sapiens
gagtgtggggcccct

SEQ ID NO: 1233898 - DNA, 15 bp, Homo sapiens
ggagtgtggggcccc

SEQ ID NO: 1233899 - DNA, 15 bp, Homo sapiens
cggagtgtggggccc

SEQ ID NO: 1233900 - DNA, 15 bp, Homo sapiens
acggagtgtggggcc

SEQ ID NO: 1233901 - DNA, 15 bp, Homo sapiens
cacggagtgtggggc

SEQ ID NO: 1233902 - DNA, 15 bp, Homo sapiens
ccacggagtgtgggg

SEQ ID NO: 1233903 - DNA, 15 bp, Homo sapiens
accacggagtgtggg

SEQ ID NO: 1233904 - DNA, 15 bp, Homo sapiens
caccacggagtgtgg

SEQ ID NO: 1233905 - DNA, 15 bp, Homo sapiens
tcaccacggagtgtg

SEQ ID NO: 1233906 - DNA, 15 bp, Homo sapiens
ctcaccacggagtgt

SEQ ID NO: 1233907 - DNA, 15 bp, Homo sapiens
gctcaccacggagtg

SEQ ID NO: 1233908 - DNA, 15 bp, Homo sapiens
ggctcaccacggagt

SEQ ID NO: 1233909 - DNA, 15 bp, Homo sapiens
tggctcaccacggag

SEQ ID NO: 1233910 - DNA, 15 bp, Homo sapiens
gtggctcaccacgga

SEQ ID NO: 1233911 - DNA, 15 bp, Homo sapiens
ggtggctcaccacgg

SEQ ID NO: 1233912 - DNA, 15 bp, Homo sapiens
tggtggctcaccacg

SEQ ID NO: 1233913 - DNA, 15 bp, Homo sapiens
atggtggctcaccac

SEQ ID NO: 1233914 - DNA, 15 bp, Homo sapiens
gatggtggctcacca

SEQ ID NO: 1233915 - DNA, 15 bp, Homo sapiens
tgatggtggctcacc

SEQ ID NO: 1233916 - DNA, 15 bp, Homo sapiens
ttgatggtggctcac

SEQ ID NO: 1233917 - DNA, 15 bp, Homo sapiens
attgatggtggctca

SEQ ID NO: 1233918 - DNA, 15 bp, Homo sapiens
tattgatggtggctc

SEQ ID NO: 1233919 - DNA, 15 bp, Homo sapiens
gtattgatggtggct

SEQ ID NO: 1233920 - DNA, 15 bp, Homo sapiens
tgtattgatggtggc

SEQ ID NO: 1233921 - DNA, 15 bp, Homo sapiens
ctgtattgatggtgg

SEQ ID NO: 1233922 - DNA, 15 bp, Homo sapiens
tctgtattgatggtg

SEQ ID NO: 1233923 - DNA, 15 bp, Homo sapiens
ttctgtattgatggt

SEQ ID NO: 1233924 - DNA, 15 bp, Homo sapiens
tttctgtattgatgg

SEQ ID NO: 1233925 - DNA, 15 bp, Homo sapiens
ctttctgtattgatg

SEQ ID NO: 1233926 - DNA, 15 bp, Homo sapiens
actttctgtattgat

SEQ ID NO: 1233927 - DNA, 15 bp, Homo sapiens
cactttctgtattga

SEQ ID NO: 1233928 - DNA, 15 bp, Homo sapiens
tcactttctgtattg

SEQ ID NO: 1233929 - DNA, 15 bp, Homo sapiens
gtcactttctgtatt

SEQ ID NO: 1233930 - DNA, 15 bp, Homo sapiens
ggtcactttctgtat

SEQ ID NO: 1233931 - DNA, 15 bp, Homo sapiens
aggtcactttctgta

SEQ ID NO: 1233932 - DNA, 15 bp, Homo sapiens
taggtcactttctgt

SEQ ID NO: 1233933 - DNA, 15 bp, Homo sapiens
ttaggtcactttctg

SEQ ID NO: 1233934 - DNA, 15 bp, Homo sapiens
cttaggtcactttct

SEQ ID NO: 1233935 - DNA, 15 bp, Homo sapiens
tcttaggtcactttc

SEQ ID NO: 1233936 - DNA, 15 bp, Homo sapiens
atcttaggtcacttt

SEQ ID NO: 1233937 - DNA, 15 bp, Homo sapiens
catcttaggtcactt

SEQ ID NO: 1233938 - DNA, 15 bp, Homo sapiens
acatcttaggtcact

SEQ ID NO: 1233939 - DNA, 15 bp, Homo sapiens
tacatcttaggtcac

SEQ ID NO: 1233940 - DNA, 15 bp, Homo sapiens
gtacatcttaggtca

SEQ ID NO: 1233941 - DNA, 15 bp, Homo sapiens
ggtacatcttaggtc

SEQ ID NO: 1233942 - DNA, 15 bp, Homo sapiens
tggtacatcttaggt

SEQ ID NO: 1233943 - DNA, 15 bp, Homo sapiens
ctggtacatcttagg

SEQ ID NO: 1233944 - DNA, 15 bp, Homo sapiens
gctggtacatcttag

SEQ ID NO: 1233945 - DNA, 15 bp, Homo sapiens
tgctggtacatctta

SEQ ID NO: 1233946 - DNA, 15 bp, Homo sapiens
ttgctggtacatctt

SEQ ID NO: 1233947 - DNA, 15 bp, Homo sapiens
cttgctggtacatct

SEQ ID NO: 1233948 - DNA, 15 bp, Homo sapiens
tcttgctggtacatc

SEQ ID NO: 1233949 - DNA, 15 bp, Homo sapiens
atcttgctggtacat

SEQ ID NO: 1233950 - DNA, 15 bp, Homo sapiens
catcttgctggtaca

SEQ ID NO: 1233951 - DNA, 15 bp, Homo sapiens
gcatcttgctggtac

SEQ ID NO: 1233952 - DNA, 15 bp, Homo sapiens
ggcatcttgctggta

SEQ ID NO: 1233953 - DNA, 15 bp, Homo sapiens
tggcatcttgctggt

SEQ ID NO: 1233954 - DNA, 15 bp, Homo sapiens
atggcatcttgctgg

SEQ ID NO: 1233955 - DNA, 15 bp, Homo sapiens
gatggcatcttgctg

SEQ ID NO: 1233956 - DNA, 15 bp, Homo sapiens
ggatggcatcttgct

SEQ ID NO: 1233957 - DNA, 15 bp, Homo sapiens
gggatggcatcttgc

SEQ ID NO: 1233958 - DNA, 15 bp, Homo sapiens
agggatggcatcttg

SEQ ID NO: 1233959 - DNA, 15 bp, Homo sapiens
aagggatggcatctt

SEQ ID NO: 1233960 - DNA, 15 bp, Homo sapiens
gaagggatggcatct

SEQ ID NO: 1233961 - DNA, 15 bp, Homo sapiens
agaagggatggcatc

SEQ ID NO: 1233962 - DNA, 15 bp, Homo sapiens
aagaagggatggcat

SEQ ID NO: 1233963 - DNA, 15 bp, Homo sapiens
aaagaagggatggca

SEQ ID NO: 1233964 - DNA, 15 bp, Homo sapiens
aaaagaagggatggc

SEQ ID NO: 1233965 - DNA, 15 bp, Homo sapiens
aaaaagaagggatgg

SEQ ID NO: 1233966 - DNA, 15 bp, Homo sapiens
caaaaagaagggatg

SEQ ID NO: 1233967 - DNA, 15 bp, Homo sapiens
acaaaaagaagggat

SEQ ID NO: 1233968 - DNA, 15 bp, Homo sapiens
cacaaaaagaaggga

SEQ ID NO: 1233969 - DNA, 15 bp, Homo sapiens
acacaaaaagaaggg

SEQ ID NO: 1233970 - DNA, 15 bp, Homo sapiens
cacacaaaaagaagg

SEQ ID NO: 1233971 - DNA, 15 bp, Homo sapiens
ccacacaaaaagaag

SEQ ID NO: 1233972 - DNA, 15 bp, Homo sapiens
cccacacaaaaagaa

SEQ ID NO: 1233973 - DNA, 15 bp, Homo sapiens
ccccacacaaaaaga

SEQ ID NO: 1233974 - DNA, 15 bp, Homo sapiens
accccacacaaaaag

SEQ ID NO: 1233975 - DNA, 15 bp, Homo sapiens
gaccccacacaaaaa

SEQ ID NO: 1233976 - DNA, 15 bp, Homo sapiens
tgaccccacacaaaa

SEQ ID NO: 1233977 - DNA, 15 bp, Homo sapiens
atgaccccacacaaa

SEQ ID NO: 1233978 - DNA, 15 bp, Homo sapiens
catgaccccacacaa

SEQ ID NO: 1233979 - DNA, 15 bp, Homo sapiens
ccatgaccccacaca

SEQ ID NO: 1233980 - DNA, 15 bp, Homo sapiens
cccatgaccccacac

SEQ ID NO: 1233981 - DNA, 15 bp, Homo sapiens
gcccatgaccccaca

SEQ ID NO: 1233982 - DNA, 15 bp, Homo sapiens
agcccatgaccccac

SEQ ID NO: 1233983 - DNA, 15 bp, Homo sapiens
gagcccatgacccca

SEQ ID NO: 1233984 - DNA, 15 bp, Homo sapiens
ggagcccatgacccc

SEQ ID NO: 1233985 - DNA, 15 bp, Homo sapiens
tggagcccatgaccc

SEQ ID NO: 1233986 - DNA, 15 bp, Homo sapiens
ttggagcccatgacc

SEQ ID NO: 1233987 - DNA, 15 bp, Homo sapiens
tttggagcccatgac

SEQ ID NO: 1233988 - DNA, 15 bp, Homo sapiens
ttttggagcccatga

SEQ ID NO: 1233989 - DNA, 15 bp, Homo sapiens
cttttggagcccatg

SEQ ID NO: 1233990 - DNA, 15 bp, Homo sapiens
gcttttggagcccat

SEQ ID NO: 1233991 - DNA, 15 bp, Homo sapiens
ggcttttggagccca

SEQ ID NO: 1233992 - DNA, 15 bp, Homo sapiens
tggcttttggagccc

SEQ ID NO: 1233993 - DNA, 15 bp, Homo sapiens
ttggcttttggagcc

SEQ ID NO: 1233994 - DNA, 15 bp, Homo sapiens
gttggcttttggagc

SEQ ID NO: 1233995 - DNA, 15 bp, Homo sapiens
cgttggcttttggag

SEQ ID NO: 1233996 - DNA, 15 bp, Homo sapiens
acgttggcttttgga

SEQ ID NO: 1233997 - DNA, 15 bp, Homo sapiens
cacgttggcttttgg

SEQ ID NO: 1233998 - DNA, 15 bp, Homo sapiens
tcacgttggcttttg

SEQ ID NO: 1233999 - DNA, 15 bp, Homo sapiens
ttcacgttggctttt

SEQ ID NO: 1234000 - DNA, 15 bp, Homo sapiens
gttcacgttggcttt

SEQ ID NO: 1234001 - DNA, 15 bp, Homo sapiens
tgttcacgttggctt

SEQ ID NO: 1234002 - DNA, 15 bp, Homo sapiens
ttgttcacgttggct

SEQ ID NO: 1234003 - DNA, 15 bp, Homo sapiens
attgttcacgttggc

SEQ ID NO: 1234004 - DNA, 15 bp, Homo sapiens
aattgttcacgttgg

SEQ ID NO: 1234005 - DNA, 15 bp, Homo sapiens
taattgttcacgttg

SEQ ID NO: 1234006 - DNA, 15 bp, Homo sapiens
ttaattgttcacgtt

SEQ ID NO: 1234007 - DNA, 15 bp, Homo sapiens
tttaattgttcacgt

SEQ ID NO: 1234008 - DNA, 15 bp, Homo sapiens
ttttaattgttcacg

SEQ ID NO: 1234009 - DNA, 15 bp, Homo sapiens
tttttaattgttcac

SEQ ID NO: 1234010 - DNA, 15 bp, Homo sapiens
atttttaattgttca

SEQ ID NO: 1234011 - DNA, 15 bp, Homo sapiens
catttttaattgttc

SEQ ID NO: 1234012 - DNA, 15 bp, Homo sapiens
acatttttaattgtt

SEQ ID NO: 1234013 - DNA, 15 bp, Homo sapiens
tacatttttaattgt

SEQ ID NO: 1234014 - DNA, 15 bp, Homo sapiens
atacatttttaattg

SEQ ID NO: 1234015 - DNA, 15 bp, Homo sapiens
aatacatttttaatt

SEQ ID NO: 1234016 - DNA, 15 bp, Homo sapiens
caatacatttttaat

SEQ ID NO: 1234017 - DNA, 15 bp, Homo sapiens
tcaatacatttttaa

SEQ ID NO: 1234018 - DNA, 15 bp, Homo sapiens
ctcaatacattttta

SEQ ID NO: 1234019 - DNA, 15 bp, Homo sapiens
gctcaatacattttt

SEQ ID NO: 1234020 - DNA, 15 bp, Homo sapiens
tgctcaatacatttt

SEQ ID NO: 1234021 - DNA, 15 bp, Homo sapiens
atgctcaatacattt

SEQ ID NO: 1234022 - DNA, 15 bp, Homo sapiens
gatgctcaatacatt

SEQ ID NO: 1234023 - DNA, 15 bp, Homo sapiens
agatgctcaatacat

SEQ ID NO: 1234024 - DNA, 15 bp, Homo sapiens
tagatgctcaataca

SEQ ID NO: 1234025 - DNA, 15 bp, Homo sapiens
gtagatgctcaatac

SEQ ID NO: 1234026 - DNA, 15 bp, Homo sapiens
gagtagatgctcaat

SEQ ID NO: 1234027 - DNA, 15 bp, Homo sapiens
agagtagatgctcaa

SEQ ID NO: 1234028 - DNA, 15 bp, Homo sapiens
cagagtagatgctca

SEQ ID NO: 1234029 - DNA, 15 bp, Homo sapiens
acagagtagatgctc

SEQ ID NO: 1234030 - DNA, 15 bp, Homo sapiens
gctacagagtagatg

SEQ ID NO: 1234031 - DNA, 15 bp, Homo sapiens
tgctacagagtagat

SEQ ID NO: 1234032 - DNA, 15 bp, Homo sapiens
ctgctacagagtaga

SEQ ID NO: 1234033 - DNA, 15 bp, Homo sapiens
cctgctacagagtag

SEQ ID NO: 1234034 - DNA, 15 bp, Homo sapiens
acctgctacagagta

SEQ ID NO: 1234035 - DNA, 15 bp, Homo sapiens
gacctgctacagagt

SEQ ID NO: 1234036 - DNA, 15 bp, Homo sapiens
ggacctgctacagag

SEQ ID NO: 1234037 - DNA, 15 bp, Homo sapiens
aggacctgctacaga

SEQ ID NO: 1234038 - DNA, 15 bp, Homo sapiens
caggacctgctacag

SEQ ID NO: 1234039 - DNA, 15 bp, Homo sapiens
acaggacctgctaca

SEQ ID NO: 1234040 - DNA, 15 bp, Homo sapiens
cacaggacctgctac

SEQ ID NO: 1234041 - DNA, 15 bp, Homo sapiens
tcacaggacctgcta

SEQ ID NO: 1234042 - DNA, 15 bp, Homo sapiens
ttcacaggacctgct

SEQ ID NO: 1234043 - DNA, 15 bp, Homo sapiens
tttcacaggacctgc

SEQ ID NO: 1234044 - DNA, 15 bp, Homo sapiens
ttttcacaggacctg

SEQ ID NO: 1234045 - DNA, 15 bp, Homo sapiens
gttttcacaggacct

SEQ ID NO: 1234046 - DNA, 15 bp, Homo sapiens
tgttttcacaggacc

SEQ ID NO: 1234047 - DNA, 15 bp, Homo sapiens
gtgttttcacaggac

SEQ ID NO: 1234048 - DNA, 15 bp, Homo sapiens
agtgttttcacagga

SEQ ID NO: 1234049 - DNA, 15 bp, Homo sapiens
aagtgttttcacagg

SEQ ID NO: 1234050 - DNA, 15 bp, Homo sapiens
aaagtgttttcacag

SEQ ID NO: 1234051 - DNA, 15 bp, Homo sapiens
taaagtgttttcaca

SEQ ID NO: 1234052 - DNA, 15 bp, Homo sapiens
ctaaagtgttttcac

SEQ ID NO: 1234053 - DNA, 15 bp, Homo sapiens
cctaaagtgttttca

SEQ ID NO: 1234054 - DNA, 15 bp, Homo sapiens
acctaaagtgttttc

SEQ ID NO: 1234055 - DNA, 15 bp, Homo sapiens
cacctaaagtgtttt

SEQ ID NO: 1234056 - DNA, 15 bp, Homo sapiens
ccacctaaagtgttt

SEQ ID NO: 1234057 - DNA, 15 bp, Homo sapiens
tccacctaaagtgtt

SEQ ID NO: 1234058 - DNA, 15 bp, Homo sapiens
gtccacctaaagtgt

SEQ ID NO: 1234059 - DNA, 15 bp, Homo sapiens
tgtccacctaaagtg

SEQ ID NO: 1234060 - DNA, 15 bp, Homo sapiens
ttgtccacctaaagt

SEQ ID NO: 1234061 - DNA, 15 bp, Homo sapiens
attgtccacctaaag

SEQ ID NO: 1234062 - DNA, 15 bp, Homo sapiens
gattgtccacctaaa

SEQ ID NO: 1234063 - DNA, 15 bp, Homo sapiens
ggattgtccacctaa

SEQ ID NO: 1234064 - DNA, 15 bp, Homo sapiens
gggattgtccaccta

SEQ ID NO: 1234065 - DNA, 15 bp, Homo sapiens
agggattgtccacct

SEQ ID NO: 1234066 - DNA, 15 bp, Homo sapiens
aagggattgtccacc

SEQ ID NO: 1234067 - DNA, 15 bp, Homo sapiens
caagggattgtccac

SEQ ID NO: 1234068 - DNA, 15 bp, Homo sapiens
tcaagggattgtcca

SEQ ID NO: 1234069 - DNA, 15 bp, Homo sapiens
ctcaagggattgtcc

SEQ ID NO: 1234070 - DNA, 15 bp, Homo sapiens
cctcaagggattgtc

SEQ ID NO: 1234071 - DNA, 15 bp, Homo sapiens
acctcaagggattgt

SEQ ID NO: 1234072 - DNA, 15 bp, Homo sapiens
tacctcaagggattg

SEQ ID NO: 1234073 - DNA, 15 bp, Homo sapiens
ttacctcaagggatt

SEQ ID NO: 1234074 - DNA, 15 bp, Homo sapiens
cttacctcaagggat

SEQ ID NO: 1234075 - DNA, 15 bp, Homo sapiens
acttacctcaaggga

SEQ ID NO: 1234076 - DNA, 15 bp, Homo sapiens
cacttacctcaaggg

SEQ ID NO: 1234077 - DNA, 15 bp, Homo sapiens
ccacttacctcaagg

SEQ ID NO: 1234078 - DNA, 15 bp, Homo sapiens
accacttacctcaag

SEQ ID NO: 1234079 - DNA, 15 bp, Homo sapiens
taccacttacctcaa

SEQ ID NO: 1234080 - DNA, 15 bp, Homo sapiens
ataccacttacctca

SEQ ID NO: 1234081 - DNA, 15 bp, Homo sapiens
gataccacttacctc

SEQ ID NO: 1234082 - DNA, 15 bp, Homo sapiens
ggataccacttacct

SEQ ID NO: 1234083 - DNA, 15 bp, Homo sapiens
gggataccacttacc

SEQ ID NO: 1234084 - DNA, 15 bp, Homo sapiens
tgggataccacttac

SEQ ID NO: 1234085 - DNA, 15 bp, Homo sapiens
atgggataccactta

SEQ ID NO: 1234086 - DNA, 15 bp, Homo sapiens
aatgggataccactt

SEQ ID NO: 1234087 - DNA, 15 bp, Homo sapiens
aaatgggataccact

SEQ ID NO: 1234088 - DNA, 15 bp, Homo sapiens
aaaatgggataccac

SEQ ID NO: 1234089 - DNA, 15 bp, Homo sapiens
taaaatgggatacca

SEQ ID NO: 1234090 - DNA, 15 bp, Homo sapiens
ataaaatgggatacc

SEQ ID NO: 1234091 - DNA, 15 bp, Homo sapiens
tataaaatgggatac

SEQ ID NO: 1234092 - DNA, 15 bp, Homo sapiens
ctataaaatgggata

SEQ ID NO: 1234093 - DNA, 15 bp, Homo sapiens
cctataaaatgggat

SEQ ID NO: 1234094 - DNA, 15 bp, Homo sapiens
acctataaaatggga

SEQ ID NO: 1234095 - DNA, 15 bp, Homo sapiens
cacctataaaatggg

SEQ ID NO: 1234096 - DNA, 15 bp, Homo sapiens
acacctataaaatgg

SEQ ID NO: 1234097 - DNA, 15 bp, Homo sapiens
cacacctataaaatg

SEQ ID NO: 1234098 - DNA, 15 bp, Homo sapiens
tcacacctataaaat

SEQ ID NO: 1234099 - DNA, 15 bp, Homo sapiens
ttcacacctataaaa

SEQ ID NO: 1234100 - DNA, 15 bp, Homo sapiens
tttcacacctataaa

SEQ ID NO: 1234101 - DNA, 15 bp, Homo sapiens
ttttcacacctataa

SEQ ID NO: 1234102 - DNA, 15 bp, Homo sapiens
gttttcacacctata

SEQ ID NO: 1234103 - DNA, 15 bp, Homo sapiens
agttttcacacctat

SEQ ID NO: 1234104 - DNA, 15 bp, Homo sapiens
cagttttcacaccta

SEQ ID NO: 1234105 - DNA, 15 bp, Homo sapiens
tcagttttcacacct

SEQ ID NO: 1234106 - DNA, 15 bp, Homo sapiens
ttcagttttcacacc

SEQ ID NO: 1234107 - DNA, 15 bp, Homo sapiens
cttcagttttcacac

SEQ ID NO: 1234108 - DNA, 15 bp, Homo sapiens
gcttcagttttcaca

SEQ ID NO: 1234109 - DNA, 15 bp, Homo sapiens
tgcttcagttttcac

SEQ ID NO: 1234110 - DNA, 15 bp, Homo sapiens
ttgcttcagttttca

SEQ ID NO: 1234111 - DNA, 15 bp, Homo sapiens
ttttgcttcagtttt

SEQ ID NO: 1234112 - DNA, 15 bp, Homo sapiens
tttttgcttcagttt

SEQ ID NO: 1234113 - DNA, 15 bp, Homo sapiens
atttttgcttcagtt

SEQ ID NO: 1234114 - DNA, 15 bp, Homo sapiens
aatttttgcttcagt

SEQ ID NO: 1234115 - DNA, 15 bp, Homo sapiens
gaatttttgcttcag

SEQ ID NO: 1234116 - DNA, 15 bp, Homo sapiens
tgaatttttgcttca

SEQ ID NO: 1234117 - DNA, 15 bp, Homo sapiens
atgaatttttgcttc

SEQ ID NO: 1234118 - DNA, 15 bp, Homo sapiens
aatgaatttttgctt

SEQ ID NO: 1234119 - DNA, 15 bp, Homo sapiens
aaatgaatttttgct

SEQ ID NO: 1234120 - DNA, 15 bp, Homo sapiens
aaaatgaatttttgc

SEQ ID NO: 1234121 - DNA, 15 bp, Homo sapiens
gaaaatgaatttttg

SEQ ID NO: 1234122 - DNA, 15 bp, Homo sapiens
ggaaaatgaattttt

SEQ ID NO: 1234123 - DNA, 15 bp, Homo sapiens
aggaaaatgaatttt

SEQ ID NO: 1234124 - DNA, 15 bp, Homo sapiens
taggaaaatgaattt

SEQ ID NO: 1234125 - DNA, 15 bp, Homo sapiens
ttaggaaaatgaatt

SEQ ID NO: 1234126 - DNA, 15 bp, Homo sapiens
cttaggaaaatgaat

SEQ ID NO: 1234127 - DNA, 15 bp, Homo sapiens
ccttaggaaaatgaa

SEQ ID NO: 1234128 - DNA, 15 bp, Homo sapiens
cccttaggaaaatga

SEQ ID NO: 1234129 - DNA, 15 bp, Homo sapiens
gcccttaggaaaatg

SEQ ID NO: 1234130 - DNA, 15 bp, Homo sapiens
tgcccttaggaaaat

SEQ ID NO: 1234131 - DNA, 15 bp, Homo sapiens
gtgcccttaggaaaa

SEQ ID NO: 1234132 - DNA, 15 bp, Homo sapiens
tgtgcccttaggaaa

SEQ ID NO: 1234133 - DNA, 15 bp, Homo sapiens
atgtgcccttaggaa

SEQ ID NO: 1234134 - DNA, 15 bp, Homo sapiens
catgtgcccttagga

SEQ ID NO: 1234135 - DNA, 15 bp, Homo sapiens
ccatgtgcccttagg

SEQ ID NO: 1234136 - DNA, 15 bp, Homo sapiens
tccatgtgcccttag

SEQ ID NO: 1234137 - DNA, 15 bp, Homo sapiens
atccatgtgccctta

SEQ ID NO: 1234138 - DNA, 15 bp, Homo sapiens
tatccatgtgccctt

SEQ ID NO: 1234139 - DNA, 15 bp, Homo sapiens
gtatccatgtgccct

SEQ ID NO: 1234140 - DNA, 15 bp, Homo sapiens
agtatccatgtgccc

SEQ ID NO: 1234141 - DNA, 15 bp, Homo sapiens
aagtatccatgtgcc

SEQ ID NO: 1234142 - DNA, 15 bp, Homo sapiens
aaagtatccatgtgc

SEQ ID NO: 1234143 - DNA, 15 bp, Homo sapiens
caaagtatccatgtg

SEQ ID NO: 1234144 - DNA, 15 bp, Homo sapiens
acaaagtatccatgt

SEQ ID NO: 1234145 - DNA, 15 bp, Homo sapiens
cacaaagtatccatg

SEQ ID NO: 1234146 - DNA, 15 bp, Homo sapiens
ccacaaagtatccat

SEQ ID NO: 1234147 - DNA, 15 bp, Homo sapiens
accacaaagtatcca

SEQ ID NO: 1234148 - DNA, 15 bp, Homo sapiens
caccacaaagtatcc

SEQ ID NO: 1234149 - DNA, 15 bp, Homo sapiens
ccaccacaaagtatc

SEQ ID NO: 1234150 - DNA, 15 bp, Homo sapiens
tccaccacaaagtat

SEQ ID NO: 1234151 - DNA, 15 bp, Homo sapiens
ctccaccacaaagta

SEQ ID NO: 1234152 - DNA, 15 bp, Homo sapiens
actccaccacaaagt

SEQ ID NO: 1234153 - DNA, 15 bp, Homo sapiens
gactccaccacaaag

SEQ ID NO: 1234154 - DNA, 15 bp, Homo sapiens
tgactccaccacaaa

SEQ ID NO: 1234155 - DNA, 15 bp, Homo sapiens
atgactccaccacaa

SEQ ID NO: 1234156 - DNA, 15 bp, Homo sapiens
tatgactccaccaca

SEQ ID NO: 1234157 - DNA, 15 bp, Homo sapiens
atatgactccaccac

SEQ ID NO: 1234158 - DNA, 15 bp, Homo sapiens
catatgactccacca

SEQ ID NO: 1234159 - DNA, 15 bp, Homo sapiens
ccatatgactccacc

SEQ ID NO: 1234160 - DNA, 15 bp, Homo sapiens
cccatatgactccac

SEQ ID NO: 1234161 - DNA, 15 bp, Homo sapiens
ccccatatgactcca

SEQ ID NO: 1234162 - DNA, 15 bp, Homo sapiens
tccccatatgactcc

SEQ ID NO: 1234163 - DNA, 15 bp, Homo sapiens
atccccatatgactc

SEQ ID NO: 1234164 - DNA, 15 bp, Homo sapiens
gatccccatatgact

SEQ ID NO: 1234165 - DNA, 15 bp, Homo sapiens
tgatccccatatgac

SEQ ID NO: 1234166 - DNA, 15 bp, Homo sapiens
ctgatccccatatga

SEQ ID NO: 1234167 - DNA, 15 bp, Homo sapiens
tctgatccccatatg

SEQ ID NO: 1234168 - DNA, 15 bp, Homo sapiens
ttctgatccccatat

SEQ ID NO: 1234169 - DNA, 15 bp, Homo sapiens
tttctgatccccata

SEQ ID NO: 1234170 - DNA, 15 bp, Homo sapiens
ttttctgatccccat

SEQ ID NO: 1234171 - DNA, 15 bp, Homo sapiens
cttttctgatcccca

SEQ ID NO: 1234172 - DNA, 15 bp, Homo sapiens
gcttttctgatcccc

SEQ ID NO: 1234173 - DNA, 15 bp, Homo sapiens
ggcttttctgatccc

SEQ ID NO: 1234174 - DNA, 15 bp, Homo sapiens
aggcttttctgatcc

SEQ ID NO: 1234175 - DNA, 15 bp, Homo sapiens
aaggcttttctgatc

SEQ ID NO: 1234176 - DNA, 15 bp, Homo sapiens
aaaggcttttctgat

SEQ ID NO: 1234177 - DNA, 15 bp, Homo sapiens
caaaggcttttctga

SEQ ID NO: 1234178 - DNA, 15 bp, Homo sapiens
tcaaaggcttttctg

SEQ ID NO: 1234179 - DNA, 15 bp, Homo sapiens
ctcaaaggcttttct

SEQ ID NO: 1234180 - DNA, 15 bp, Homo sapiens
cctcaaaggcttttc

SEQ ID NO: 1234181 - DNA, 15 bp, Homo sapiens
gcctcaaaggctttt

SEQ ID NO: 1234182 - DNA, 15 bp, Homo sapiens
ggcctcaaaggcttt

SEQ ID NO: 1234183 - DNA, 15 bp, Homo sapiens
aggcctcaaaggctt

SEQ ID NO: 1234184 - DNA, 15 bp, Homo sapiens
aaggcctcaaaggct

SEQ ID NO: 1234185 - DNA, 15 bp, Homo sapiens
aaaggcctcaaaggc

SEQ ID NO: 1234186 - DNA, 15 bp, Homo sapiens
caaaggcctcaaagg

SEQ ID NO: 1234187 - DNA, 15 bp, Homo sapiens
ccaaaggcctcaaag

SEQ ID NO: 1234188 - DNA, 15 bp, Homo sapiens
tccaaaggcctcaaa

SEQ ID NO: 1234189 - DNA, 15 bp, Homo sapiens
ctccaaaggcctcaa

SEQ ID NO: 1234190 - DNA, 15 bp, Homo sapiens
actccaaaggcctca

SEQ ID NO: 1234191 - DNA, 15 bp, Homo sapiens
aactccaaaggcctc

SEQ ID NO: 1234192 - DNA, 15 bp, Homo sapiens
taactccaaaggcct

SEQ ID NO: 1234193 - DNA, 15 bp, Homo sapiens
ctaactccaaaggcc

SEQ ID NO: 1234194 - DNA, 15 bp, Homo sapiens
tctaactccaaaggc

SEQ ID NO: 1234195 - DNA, 15 bp, Homo sapiens
ctctaactccaaagg

SEQ ID NO: 1234196 - DNA, 15 bp, Homo sapiens
cctctaactccaaag

SEQ ID NO: 1234197 - DNA, 15 bp, Homo sapiens
ccctctaactccaaa

SEQ ID NO: 1234198 - DNA, 15 bp, Homo sapiens
gccctctaactccaa

SEQ ID NO: 1234199 - DNA, 15 bp, Homo sapiens
tgccctctaactcca

SEQ ID NO: 1234200 - DNA, 15 bp, Homo sapiens
ctgccctctaactcc

SEQ ID NO: 1234201 - DNA, 15 bp, Homo sapiens
tctgccctctaactc

SEQ ID NO: 1234202 - DNA, 15 bp, Homo sapiens
ttctgccctctaact

SEQ ID NO: 1234203 - DNA, 15 bp, Homo sapiens
cttctgccctctaac

SEQ ID NO: 1234204 - DNA, 15 bp, Homo sapiens
tgccttctgccctct

SEQ ID NO: 1234205 - DNA, 15 bp, Homo sapiens
ttgccttctgccctc

SEQ ID NO: 1234206 - DNA, 15 bp, Homo sapiens
cttgccttctgccct

SEQ ID NO: 1234207 - DNA, 15 bp, Homo sapiens
ccttgccttctgccc

SEQ ID NO: 1234208 - DNA, 15 bp, Homo sapiens
gccttgccttctgcc

SEQ ID NO: 1234209 - DNA, 15 bp, Homo sapiens
ggccttgccttctgc

SEQ ID NO: 1234210 - DNA, 15 bp, Homo sapiens
aggccttgccttctg

SEQ ID NO: 1234211 - DNA, 15 bp, Homo sapiens
caggccttgccttct

SEQ ID NO: 1234212 - DNA, 15 bp, Homo sapiens
tcaggccttgccttc

SEQ ID NO: 1234213 - DNA, 15 bp, Homo sapiens
ctcaggccttgcctt

SEQ ID NO: 1234214 - DNA, 15 bp, Homo sapiens
gctcaggccttgcct

SEQ ID NO: 1234215 - DNA, 15 bp, Homo sapiens
ggctcaggccttgcc

SEQ ID NO: 1234216 - DNA, 15 bp, Homo sapiens
cggctcaggccttgc

SEQ ID NO: 1234217 - DNA, 15 bp, Homo sapiens
gcggctcaggccttg

SEQ ID NO: 1234218 - DNA, 15 bp, Homo sapiens
agcggctcaggcctt

SEQ ID NO: 1234219 - DNA, 15 bp, Homo sapiens
cagcggctcaggcct

SEQ ID NO: 1234220 - DNA, 15 bp, Homo sapiens
acagcggctcaggcc

SEQ ID NO: 1234221 - DNA, 15 bp, Homo sapiens
tacagcggctcaggc

SEQ ID NO: 1234222 - DNA, 15 bp, Homo sapiens
ttacagcggctcagg

SEQ ID NO: 1234223 - DNA, 15 bp, Homo sapiens
cttacagcggctcag

SEQ ID NO: 1234224 - DNA, 15 bp, Homo sapiens
gcttacagcggctca

SEQ ID NO: 1234225 - DNA, 15 bp, Homo sapiens
ggcttacagcggctc

SEQ ID NO: 1234226 - DNA, 15 bp, Homo sapiens
aggcttacagcggct

SEQ ID NO: 1234227 - DNA, 15 bp, Homo sapiens
aaggcttacagcggc

SEQ ID NO: 1234228 - DNA, 15 bp, Homo sapiens
taaggcttacagcgg

SEQ ID NO: 1234229 - DNA, 15 bp, Homo sapiens
ctaaggcttacagcg

SEQ ID NO: 1234230 - DNA, 15 bp, Homo sapiens
cctaaggcttacagc

SEQ ID NO: 1234231 - DNA, 15 bp, Homo sapiens
tcctaaggcttacag

SEQ ID NO: 1234232 - DNA, 15 bp, Homo sapiens
ctcctaaggcttaca

SEQ ID NO: 1234233 - DNA, 15 bp, Homo sapiens
actcctaaggcttac

SEQ ID NO: 1234234 - DNA, 15 bp, Homo sapiens
aactcctaaggctta

SEQ ID NO: 1234235 - DNA, 15 bp, Homo sapiens
aaactcctaaggctt

SEQ ID NO: 1234236 - DNA, 15 bp, Homo sapiens
taaactcctaaggct

SEQ ID NO: 1234237 - DNA, 15 bp, Homo sapiens
ctaaactcctaaggc

SEQ ID NO: 1234238 - DNA, 15 bp, Homo sapiens
cctaaactcctaagg

SEQ ID NO: 1234239 - DNA, 15 bp, Homo sapiens
tcctaaactcctaag

SEQ ID NO: 1234240 - DNA, 15 bp, Homo sapiens
ttcctaaactcctaa

SEQ ID NO: 1234241 - DNA, 15 bp, Homo sapiens
cttcctaaactccta

SEQ ID NO: 1234242 - DNA, 15 bp, Homo sapiens
ccttcctaaactcct

SEQ ID NO: 1234243 - DNA, 15 bp, Homo sapiens
gccttcctaaactcc

SEQ ID NO: 1234244 - DNA, 15 bp, Homo sapiens
agccttcctaaactc

SEQ ID NO: 1234245 - DNA, 15 bp, Homo sapiens
gagccttcctaaact

SEQ ID NO: 1234246 - DNA, 15 bp, Homo sapiens
ggagccttcctaaac

SEQ ID NO: 1234247 - DNA, 15 bp, Homo sapiens
tggagccttcctaaa

SEQ ID NO: 1234248 - DNA, 15 bp, Homo sapiens
ctggagccttcctaa

SEQ ID NO: 1234249 - DNA, 15 bp, Homo sapiens
tctggagccttccta

SEQ ID NO: 1234250 - DNA, 15 bp, Homo sapiens
ttctggagccttcct

SEQ ID NO: 1234251 - DNA, 15 bp, Homo sapiens
cttctggagccttcc

SEQ ID NO: 1234252 - DNA, 15 bp, Homo sapiens
tcttctggagccttc

SEQ ID NO: 1234253 - DNA, 15 bp, Homo sapiens
gtcttctggagcctt

SEQ ID NO: 1234254 - DNA, 15 bp, Homo sapiens
tgtcttctggagcct

SEQ ID NO: 1234255 - DNA, 15 bp, Homo sapiens
ttgtcttctggagcc

SEQ ID NO: 1234256 - DNA, 15 bp, Homo sapiens
tttgtcttctggagc

SEQ ID NO: 1234257 - DNA, 15 bp, Homo sapiens
atttgtcttctggag

SEQ ID NO: 1234258 - DNA, 15 bp, Homo sapiens
catttgtcttctgga

SEQ ID NO: 1234259 - DNA, 15 bp, Homo sapiens
ccatttgtcttctgg

SEQ ID NO: 1234260 - DNA, 15 bp, Homo sapiens
cccatttgtcttctg

SEQ ID NO: 1234261 - DNA, 15 bp, Homo sapiens
ccccatttgtcttct

SEQ ID NO: 1234262 - DNA, 15 bp, Homo sapiens
accccatttgtcttc

SEQ ID NO: 1234263 - DNA, 15 bp, Homo sapiens
gaccccatttgtctt

SEQ ID NO: 1234264 - DNA, 15 bp, Homo sapiens
agaccccatttgtct

SEQ ID NO: 1234265 - DNA, 15 bp, Homo sapiens
cagaccccatttgtc

SEQ ID NO: 1234266 - DNA, 15 bp, Homo sapiens
acagaccccatttgt

SEQ ID NO: 1234267 - DNA, 15 bp, Homo sapiens
tacagaccccatttg

SEQ ID NO: 1234268 - DNA, 15 bp, Homo sapiens
ctacagaccccattt

SEQ ID NO: 1234269 - DNA, 15 bp, Homo sapiens
tctacagaccccatt

SEQ ID NO: 1234270 - DNA, 15 bp, Homo sapiens
ctctacagaccccat

SEQ ID NO: 1234271 - DNA, 15 bp, Homo sapiens
cctctacagacccca

SEQ ID NO: 1234272 - DNA, 15 bp, Homo sapiens
gcctctacagacccc

SEQ ID NO: 1234273 - DNA, 15 bp, Homo sapiens
agcctctacagaccc

SEQ ID NO: 1234274 - DNA, 15 bp, Homo sapiens
cagcctctacagacc

SEQ ID NO: 1234275 - DNA, 15 bp, Homo sapiens
acagcctctacagac

SEQ ID NO: 1234276 - DNA, 15 bp, Homo sapiens
aacagcctctacaga

SEQ ID NO: 1234277 - DNA, 15 bp, Homo sapiens
taacagcctctacag

SEQ ID NO: 1234278 - DNA, 15 bp, Homo sapiens
ttaacagcctctaca

SEQ ID NO: 1234279 - DNA, 15 bp, Homo sapiens
gttaacagcctctac

SEQ ID NO: 1234280 - DNA, 15 bp, Homo sapiens
agttaacagcctcta

SEQ ID NO: 1234281 - DNA, 15 bp, Homo sapiens
gagttaacagcctct

SEQ ID NO: 1234282 - DNA, 15 bp, Homo sapiens
tgagttaacagcctc

SEQ ID NO: 1234283 - DNA, 15 bp, Homo sapiens
ctgagttaacagcct

SEQ ID NO: 1234284 - DNA, 15 bp, Homo sapiens
gctgagttaacagcc

SEQ ID NO: 1234285 - DNA, 15 bp, Homo sapiens
ggctgagttaacagc

SEQ ID NO: 1234286 - DNA, 15 bp, Homo sapiens
tggctgagttaacag

SEQ ID NO: 1234287 - DNA, 15 bp, Homo sapiens
ctggctgagttaaca

SEQ ID NO: 1234288 - DNA, 15 bp, Homo sapiens
cctggctgagttaac

SEQ ID NO: 1234289 - DNA, 15 bp, Homo sapiens
gcctggctgagttaa

SEQ ID NO: 1234290 - DNA, 15 bp, Homo sapiens
agcctggctgagtta

SEQ ID NO: 1234291 - DNA, 15 bp, Homo sapiens
aagcctggctgagtt

SEQ ID NO: 1234292 - DNA, 15 bp, Homo sapiens
gaagcctggctgagt

SEQ ID NO: 1234293 - DNA, 15 bp, Homo sapiens
agaagcctggctgag

SEQ ID NO: 1234294 - DNA, 15 bp, Homo sapiens
aagaagcctggctga

SEQ ID NO: 1234295 - DNA, 15 bp, Homo sapiens
taagaagcctggctg

SEQ ID NO: 1234296 - DNA, 15 bp, Homo sapiens
ctaagaagcctggct

SEQ ID NO: 1234297 - DNA, 15 bp, Homo sapiens
tctaagaagcctggc

SEQ ID NO: 1234298 - DNA, 15 bp, Homo sapiens
ctctaagaagcctgg

SEQ ID NO: 1234299 - DNA, 15 bp, Homo sapiens
actctaagaagcctg

SEQ ID NO: 1234300 - DNA, 15 bp, Homo sapiens
aactctaagaagcct

SEQ ID NO: 1234301 - DNA, 15 bp, Homo sapiens
caactctaagaagcc

SEQ ID NO: 1234302 - DNA, 15 bp, Homo sapiens
gcaactctaagaagc

SEQ ID NO: 1234303 - DNA, 15 bp, Homo sapiens
tgcaactctaagaag

SEQ ID NO: 1234304 - DNA, 15 bp, Homo sapiens
atgcaactctaagaa

SEQ ID NO: 1234305 - DNA, 15 bp, Homo sapiens
aatgcaactctaaga

SEQ ID NO: 1234306 - DNA, 15 bp, Homo sapiens
aaatgcaactctaag

SEQ ID NO: 1234307 - DNA, 15 bp, Homo sapiens
gaaatgcaactctaa

SEQ ID NO: 1234308 - DNA, 15 bp, Homo sapiens
tgaaatgcaactcta

SEQ ID NO: 1234309 - DNA, 15 bp, Homo sapiens
gtgaaatgcaactct

SEQ ID NO: 1234310 - DNA, 15 bp, Homo sapiens
agtgaaatgcaactc

SEQ ID NO: 1234311 - DNA, 15 bp, Homo sapiens
tagtgaaatgcaact

SEQ ID NO: 1234312 - DNA, 15 bp, Homo sapiens
ttagtgaaatgcaac

SEQ ID NO: 1234313 - DNA, 15 bp, Homo sapiens
gttagtgaaatgcaa

SEQ ID NO: 1234314 - DNA, 15 bp, Homo sapiens
agttagtgaaatgca

SEQ ID NO: 1234315 - DNA, 15 bp, Homo sapiens
cagttagtgaaatgc

SEQ ID NO: 1234316 - DNA, 15 bp, Homo sapiens
tcagttagtgaaatg

SEQ ID NO: 1234317 - DNA, 15 bp, Homo sapiens
atcagttagtgaaat

SEQ ID NO: 1234318 - DNA, 15 bp, Homo sapiens
tatcagttagtgaaa

SEQ ID NO: 1234319 - DNA, 15 bp, Homo sapiens
atatcagttagtgaa

SEQ ID NO: 1234320 - DNA, 15 bp, Homo sapiens
catatcagttagtga

SEQ ID NO: 1234321 - DNA, 15 bp, Homo sapiens
ccatatcagttagtg

SEQ ID NO: 1234322 - DNA, 15 bp, Homo sapiens
accatatcagttagt

SEQ ID NO: 1234323 - DNA, 15 bp, Homo sapiens
aaccatatcagttag

SEQ ID NO: 1234324 - DNA, 15 bp, Homo sapiens
aaaccatatcagtta

SEQ ID NO: 1234325 - DNA, 15 bp, Homo sapiens
caaaccatatcagtt

SEQ ID NO: 1234326 - DNA, 15 bp, Homo sapiens
ccaaaccatatcagt

SEQ ID NO: 1234327 - DNA, 15 bp, Homo sapiens
gagccaaaccatatc

SEQ ID NO: 1234328 - DNA, 15 bp, Homo sapiens
agagccaaaccatat

SEQ ID NO: 1234329 - DNA, 15 bp, Homo sapiens
cagagccaaaccata

SEQ ID NO: 1234330 - DNA, 15 bp, Homo sapiens
gcagagccaaaccat

SEQ ID NO: 1234331 - DNA, 15 bp, Homo sapiens
cgcagagccaaacca

SEQ ID NO: 1234332 - DNA, 15 bp, Homo sapiens
acgcagagccaaacc

SEQ ID NO: 1234333 - DNA, 15 bp, Homo sapiens
gacgcagagccaaac

SEQ ID NO: 1234334 - DNA, 15 bp, Homo sapiens
ggacgcagagccaaa

SEQ ID NO: 1234335 - DNA, 15 bp, Homo sapiens
aggacgcagagccaa

SEQ ID NO: 1234336 - DNA, 15 bp, Homo sapiens
gaggacgcagagcca

SEQ ID NO: 1234337 - DNA, 15 bp, Homo sapiens
tgaggacgcagagcc

SEQ ID NO: 1234338 - DNA, 15 bp, Homo sapiens
gtgaggacgcagagc

SEQ ID NO: 1234339 - DNA, 15 bp, Homo sapiens
ggtgaggacgcagag

SEQ ID NO: 1234340 - DNA, 15 bp, Homo sapiens
gggtgaggacgcaga

SEQ ID NO: 1234341 - DNA, 15 bp, Homo sapiens
tgggtgaggacgcag

SEQ ID NO: 1234342 - DNA, 15 bp, Homo sapiens
ttgggtgaggacgca

SEQ ID NO: 1234343 - DNA, 15 bp, Homo sapiens
tttgggtgaggacgc

SEQ ID NO: 1234344 - DNA, 15 bp, Homo sapiens
atttgggtgaggacg

SEQ ID NO: 1234345 - DNA, 15 bp, Homo sapiens
gtgagatttgggtga

SEQ ID NO: 1234346 - DNA, 15 bp, Homo sapiens
ggtgagatttgggtg

SEQ ID NO: 1234347 - DNA, 15 bp, Homo sapiens
aggtgagatttgggt

SEQ ID NO: 1234348 - DNA, 15 bp, Homo sapiens
aaggtgagatttggg

SEQ ID NO: 1234349 - DNA, 15 bp, Homo sapiens
caaggtgagatttgg

SEQ ID NO: 1234350 - DNA, 15 bp, Homo sapiens
tcaaggtgagatttg

SEQ ID NO: 1234351 - DNA, 15 bp, Homo sapiens
ttcaaggtgagattt

SEQ ID NO: 1234352 - DNA, 15 bp, Homo sapiens
attcaaggtgagatt

SEQ ID NO: 1234353 - DNA, 15 bp, Homo sapiens
aattcaaggtgagat

SEQ ID NO: 1234354 - DNA, 15 bp, Homo sapiens
caattcaaggtgaga

SEQ ID NO: 1234355 - DNA, 15 bp, Homo sapiens
acaattcaaggtgag

SEQ ID NO: 1234356 - DNA, 15 bp, Homo sapiens
tacaattcaaggtga

SEQ ID NO: 1234357 - DNA, 15 bp, Homo sapiens
ttacaattcaaggtg

SEQ ID NO: 1234358 - DNA, 15 bp, Homo sapiens
attacaattcaaggt

SEQ ID NO: 1234359 - DNA, 15 bp, Homo sapiens
tattacaattcaagg

SEQ ID NO: 1234360 - DNA, 15 bp, Homo sapiens
ttattacaattcaag

SEQ ID NO: 1234361 - DNA, 15 bp, Homo sapiens
attattacaattcaa

SEQ ID NO: 1234362 - DNA, 15 bp, Homo sapiens
gattattacaattca

SEQ ID NO: 1234363 - DNA, 15 bp, Homo sapiens
ggattattacaattc

SEQ ID NO: 1234364 - DNA, 15 bp, Homo sapiens
gggattattacaatt

SEQ ID NO: 1234365 - DNA, 15 bp, Homo sapiens
ggggattattacaat

SEQ ID NO: 1234366 - DNA, 15 bp, Homo sapiens
tggggattattacaa

SEQ ID NO: 1234367 - DNA, 15 bp, Homo sapiens
ttggggattattaca

SEQ ID NO: 1234368 - DNA, 15 bp, Homo sapiens
cttggggattattac

SEQ ID NO: 1234369 - DNA, 15 bp, Homo sapiens
acttggggattatta

SEQ ID NO: 1234370 - DNA, 15 bp, Homo sapiens
cacttggggattatt

SEQ ID NO: 1234371 - DNA, 15 bp, Homo sapiens
acacttggggattat

SEQ ID NO: 1234372 - DNA, 15 bp, Homo sapiens
gacacttggggatta

SEQ ID NO: 1234373 - DNA, 15 bp, Homo sapiens
tgacacttggggatt

SEQ ID NO: 1234374 - DNA, 15 bp, Homo sapiens
ttgacacttggggat

SEQ ID NO: 1234375 - DNA, 15 bp, Homo sapiens
cttgacacttgggga

SEQ ID NO: 1234376 - DNA, 15 bp, Homo sapiens
ccttgacacttgggg

SEQ ID NO: 1234377 - DNA, 15 bp, Homo sapiens
cccttgacacttggg

SEQ ID NO: 1234378 - DNA, 15 bp, Homo sapiens
gcccttgacacttgg

SEQ ID NO: 1234379 - DNA, 15 bp, Homo sapiens
cgcccttgacacttg

SEQ ID NO: 1234380 - DNA, 15 bp, Homo sapiens
ccgcccttgacactt

SEQ ID NO: 1234381 - DNA, 15 bp, Homo sapiens
cccgcccttgacact

SEQ ID NO: 1234382 - DNA, 15 bp, Homo sapiens
tcccgcccttgacac

SEQ ID NO: 1234383 - DNA, 15 bp, Homo sapiens
gtcccgcccttgaca

SEQ ID NO: 1234384 - DNA, 15 bp, Homo sapiens
ggtcccgcccttgac

SEQ ID NO: 1234385 - DNA, 15 bp, Homo sapiens
tggtcccgcccttga

SEQ ID NO: 1234386 - DNA, 15 bp, Homo sapiens
ctggtcccgcccttg

SEQ ID NO: 1234387 - DNA, 15 bp, Homo sapiens
tctggtcccgccctt

SEQ ID NO: 1234388 - DNA, 15 bp, Homo sapiens
atctggtcccgccct

SEQ ID NO: 1234389 - DNA, 15 bp, Homo sapiens
catctggtcccgccc

SEQ ID NO: 1234390 - DNA, 15 bp, Homo sapiens
ccatctggtcccgcc

SEQ ID NO: 1234391 - DNA, 15 bp, Homo sapiens
tccatctggtcccgc

SEQ ID NO: 1234392 - DNA, 15 bp, Homo sapiens
ctccatctggtcccg

SEQ ID NO: 1234393 - DNA, 15 bp, Homo sapiens
atctccatctggtcc

SEQ ID NO: 1234394 - DNA, 15 bp, Homo sapiens
tatctccatctggtc

SEQ ID NO: 1234395 - DNA, 15 bp, Homo sapiens
ttatctccatctggt

SEQ ID NO: 1234396 - DNA, 15 bp, Homo sapiens
attatctccatctgg

SEQ ID NO: 1234397 - DNA, 15 bp, Homo sapiens
aattatctccatctg

SEQ ID NO: 1234398 - DNA, 15 bp, Homo sapiens
caattatctccatct

SEQ ID NO: 1234399 - DNA, 15 bp, Homo sapiens
tcaattatctccatc

SEQ ID NO: 1234400 - DNA, 15 bp, Homo sapiens
ttcaattatctccat

SEQ ID NO: 1234401 - DNA, 15 bp, Homo sapiens
attcaattatctcca

SEQ ID NO: 1234402 - DNA, 15 bp, Homo sapiens
gattcaattatctcc

SEQ ID NO: 1234403 - DNA, 15 bp, Homo sapiens
tgattcaattatctc

SEQ ID NO: 1234404 - DNA, 15 bp, Homo sapiens
atgattcaattatct

SEQ ID NO: 1234405 - DNA, 15 bp, Homo sapiens
tatgattcaattatc

SEQ ID NO: 1234406 - DNA, 15 bp, Homo sapiens
ctatgattcaattat

SEQ ID NO: 1234407 - DNA, 15 bp, Homo sapiens
acccctatgattcaa

SEQ ID NO: 1234408 - DNA, 15 bp, Homo sapiens
cacccctatgattca

SEQ ID NO: 1234409 - DNA, 15 bp, Homo sapiens
ccacccctatgattc

SEQ ID NO: 1234410 - DNA, 15 bp, Homo sapiens
accacccctatgatt

SEQ ID NO: 1234411 - DNA, 15 bp, Homo sapiens
aaccacccctatgat

SEQ ID NO: 1234412 - DNA, 15 bp, Homo sapiens
aaaccacccctatga

SEQ ID NO: 1234413 - DNA, 15 bp, Homo sapiens
gaaaccacccctatg

SEQ ID NO: 1234414 - DNA, 15 bp, Homo sapiens
agaaaccacccctat

SEQ ID NO: 1234415 - DNA, 15 bp, Homo sapiens
gagaaaccaccccta

SEQ ID NO: 1234416 - DNA, 15 bp, Homo sapiens
agagaaaccacccct

SEQ ID NO: 1234417 - DNA, 15 bp, Homo sapiens
cagagaaaccacccc

SEQ ID NO: 1234418 - DNA, 15 bp, Homo sapiens
tcagagaaaccaccc

SEQ ID NO: 1234419 - DNA, 15 bp, Homo sapiens
atcagagaaaccacc

SEQ ID NO: 1234420 - DNA, 15 bp, Homo sapiens
catcagagaaaccac

SEQ ID NO: 1234421 - DNA, 15 bp, Homo sapiens
gcatcagagaaacca

SEQ ID NO: 1234422 - DNA, 15 bp, Homo sapiens
agcatcagagaaacc

SEQ ID NO: 1234423 - DNA, 15 bp, Homo sapiens
cagcatcagagaaac

SEQ ID NO: 1234424 - DNA, 15 bp, Homo sapiens
acagcatcagagaaa

SEQ ID NO: 1234425 - DNA, 15 bp, Homo sapiens
aacagcatcagagaa

SEQ ID NO: 1234426 - DNA, 15 bp, Homo sapiens
gaacagcatcagaga

SEQ ID NO: 1234427 - DNA, 15 bp, Homo sapiens
agaacagcatcagag

SEQ ID NO: 1234428 - DNA, 15 bp, Homo sapiens
gagaacagcatcaga

SEQ ID NO: 1234429 - DNA, 15 bp, Homo sapiens
ggagaacagcatcag

SEQ ID NO: 1234430 - DNA, 15 bp, Homo sapiens
aggagaacagcatca

SEQ ID NO: 1234431 - DNA, 15 bp, Homo sapiens
caggagaacagcatc

SEQ ID NO: 1234432 - DNA, 15 bp, Homo sapiens
tcaggagaacagcat

SEQ ID NO: 1234433 - DNA, 15 bp, Homo sapiens
ctcaggagaacagca

SEQ ID NO: 1234434 - DNA, 15 bp, Homo sapiens
tctcaggagaacagc

SEQ ID NO: 1234435 - DNA, 15 bp, Homo sapiens
ctctcaggagaacag

SEQ ID NO: 1234436 - DNA, 15 bp, Homo sapiens
actctcaggagaaca

SEQ ID NO: 1234437 - DNA, 15 bp, Homo sapiens
cactctcaggagaac

SEQ ID NO: 1234438 - DNA, 15 bp, Homo sapiens
tcactctcaggagaa

SEQ ID NO: 1234439 - DNA, 15 bp, Homo sapiens
ctcactctcaggaga

SEQ ID NO: 1234440 - DNA, 15 bp, Homo sapiens
actcactctcaggag

SEQ ID NO: 1234441 - DNA, 15 bp, Homo sapiens
cactcactctcagga

SEQ ID NO: 1234442 - DNA, 15 bp, Homo sapiens
tcactcactctcagg

SEQ ID NO: 1234443 - DNA, 15 bp, Homo sapiens
ctcactcactctcag

SEQ ID NO: 1234444 - DNA, 15 bp, Homo sapiens
actcactcactctca

SEQ ID NO: 1234445 - DNA, 15 bp, Homo sapiens
aactcactcactctc

SEQ ID NO: 1234446 - DNA, 15 bp, Homo sapiens
gaactcactcactct

SEQ ID NO: 1234447 - DNA, 15 bp, Homo sapiens
agaactcactcactc

SEQ ID NO: 1234448 - DNA, 15 bp, Homo sapiens
cagaactcactcact

SEQ ID NO: 1234449 - DNA, 15 bp, Homo sapiens
tcagaactcactcac

SEQ ID NO: 1234450 - DNA, 15 bp, Homo sapiens
atcagaactcactca

SEQ ID NO: 1234451 - DNA, 15 bp, Homo sapiens
catcagaactcactc

SEQ ID NO: 1234452 - DNA, 15 bp, Homo sapiens
tcatcagaactcact

SEQ ID NO: 1234453 - DNA, 15 bp, Homo sapiens
ctcatcagaactcac

SEQ ID NO: 1234454 - DNA, 15 bp, Homo sapiens
tctcatcagaactca

SEQ ID NO: 1234455 - DNA, 15 bp, Homo sapiens
atctcatcagaactc

SEQ ID NO: 1234456 - DNA, 15 bp, Homo sapiens
gatctcatcagaact

SEQ ID NO: 1234457 - DNA, 15 bp, Homo sapiens
ggatctcatcagaac

SEQ ID NO: 1234458 - DNA, 15 bp, Homo sapiens
cggatctcatcagaa

SEQ ID NO: 1234459 - DNA, 15 bp, Homo sapiens
tcggatctcatcaga

SEQ ID NO: 1234460 - DNA, 15 bp, Homo sapiens
gtcggatctcatcag

SEQ ID NO: 1234461 - DNA, 15 bp, Homo sapiens
cgtcggatctcatca

SEQ ID NO: 1234462 - DNA, 15 bp, Homo sapiens
ccgtcggatctcatc

SEQ ID NO: 1234463 - DNA, 15 bp, Homo sapiens
accgtcggatctcat

SEQ ID NO: 1234464 - DNA, 15 bp, Homo sapiens
aaccgtcggatctca

SEQ ID NO: 1234465 - DNA, 15 bp, Homo sapiens
aaaccgtcggatctc

SEQ ID NO: 1234466 - DNA, 15 bp, Homo sapiens
aaaaccgtcggatct

SEQ ID NO: 1234467 - DNA, 15 bp, Homo sapiens
gatcctccccctgcg

SEQ ID NO: 1234468 - DNA, 15 bp, Homo sapiens
tgatcctccccctgc

SEQ ID NO: 1234469 - DNA, 15 bp, Homo sapiens
gtgatcctccccctg

SEQ ID NO: 1234470 - DNA, 15 bp, Homo sapiens
agtgatcctccccct

SEQ ID NO: 1234471 - DNA, 15 bp, Homo sapiens
aagtgatcctccccc

SEQ ID NO: 1234472 - DNA, 15 bp, Homo sapiens
caagtgatcctcccc

SEQ ID NO: 1234473 - DNA, 15 bp, Homo sapiens
ccaagtgatcctccc

SEQ ID NO: 1234474 - DNA, 15 bp, Homo sapiens
cccaagtgatcctcc

SEQ ID NO: 1234475 - DNA, 15 bp, Homo sapiens
ccccaagtgatcctc

SEQ ID NO: 1234476 - DNA, 15 bp, Homo sapiens
gccccaagtgatcct

SEQ ID NO: 1234477 - DNA, 15 bp, Homo sapiens
ggccccaagtgatcc

SEQ ID NO: 1234478 - DNA, 15 bp, Homo sapiens
tggccccaagtgatc

SEQ ID NO: 1234479 - DNA, 15 bp, Homo sapiens
ctggccccaagtgat

SEQ ID NO: 1234480 - DNA, 15 bp, Homo sapiens
cctggccccaagtga

SEQ ID NO: 1234481 - DNA, 15 bp, Homo sapiens
tcctggccccaagtg

SEQ ID NO: 1234482 - DNA, 15 bp, Homo sapiens
ctcctggccccaagt

SEQ ID NO: 1234483 - DNA, 15 bp, Homo sapiens
aactcctggccccaa

SEQ ID NO: 1234484 - DNA, 15 bp, Homo sapiens
gaactcctggcccca

SEQ ID NO: 1234485 - DNA, 15 bp, Homo sapiens
cgaactcctggcccc

SEQ ID NO: 1234486 - DNA, 15 bp, Homo sapiens
tcgaactcctggccc

SEQ ID NO: 1234487 - DNA, 15 bp, Homo sapiens
ctcgaactcctggcc

SEQ ID NO: 1234488 - DNA, 15 bp, Homo sapiens
tctcgaactcctggc

SEQ ID NO: 1234489 - DNA, 15 bp, Homo sapiens
aagacggagtttcac

SEQ ID NO: 1234490 - DNA, 15 bp, Homo sapiens
aaagacggagtttca

SEQ ID NO: 1234491 - DNA, 15 bp, Homo sapiens
taaagacggagtttc

SEQ ID NO: 1234492 - DNA, 15 bp, Homo sapiens
gtaaagacggagttt

SEQ ID NO: 1234493 - DNA, 15 bp, Homo sapiens
ggtaaagacggagtt

SEQ ID NO: 1234494 - DNA, 15 bp, Homo sapiens
tggtaaagacggagt

SEQ ID NO: 1234495 - DNA, 15 bp, Homo sapiens
atggtaaagacggag

SEQ ID NO: 1234496 - DNA, 15 bp, Homo sapiens
tatggtaaagacgga

SEQ ID NO: 1234497 - DNA, 15 bp, Homo sapiens
gtatggtaaagacgg

SEQ ID NO: 1234498 - DNA, 15 bp, Homo sapiens
tgtatggtaaagacg

SEQ ID NO: 1234499 - DNA, 15 bp, Homo sapiens
ttgtatggtaaagac

SEQ ID NO: 1234500 - DNA, 15 bp, Homo sapiens
tttgtatggtaaaga

SEQ ID NO: 1234501 - DNA, 15 bp, Homo sapiens
ttttgtatggtaaag

SEQ ID NO: 1234502 - DNA, 15 bp, Homo sapiens
tttttgtatggtaaa

SEQ ID NO: 1234503 - DNA, 15 bp, Homo sapiens
atttttgtatggtaa

SEQ ID NO: 1234504 - DNA, 15 bp, Homo sapiens
aatttttgtatggta

SEQ ID NO: 1234505 - DNA, 15 bp, Homo sapiens
taatttttgtatggt

SEQ ID NO: 1234506 - DNA, 15 bp, Homo sapiens
ctaatttttgtatgg

SEQ ID NO: 1234507 - DNA, 15 bp, Homo sapiens
gctaatttttgtatg

SEQ ID NO: 1234508 - DNA, 15 bp, Homo sapiens
ttcagctaatttttg

SEQ ID NO: 1234509 - DNA, 15 bp, Homo sapiens
gttcagctaattttt

SEQ ID NO: 1234510 - DNA, 15 bp, Homo sapiens
tgttcagctaatttt

SEQ ID NO: 1234511 - DNA, 15 bp, Homo sapiens
atgttcagctaattt

SEQ ID NO: 1234512 - DNA, 15 bp, Homo sapiens
catgttcagctaatt

SEQ ID NO: 1234513 - DNA, 15 bp, Homo sapiens
ccatgttcagctaat

SEQ ID NO: 1234514 - DNA, 15 bp, Homo sapiens
accatgttcagctaa

SEQ ID NO: 1234515 - DNA, 15 bp, Homo sapiens
caccatgttcagcta

SEQ ID NO: 1234516 - DNA, 15 bp, Homo sapiens
ccaccatgttcagct

SEQ ID NO: 1234517 - DNA, 15 bp, Homo sapiens
accaccatgttcagc

SEQ ID NO: 1234518 - DNA, 15 bp, Homo sapiens
caccaccatgttcag

SEQ ID NO: 1234519 - DNA, 15 bp, Homo sapiens
gcaccaccatgttca

SEQ ID NO: 1234520 - DNA, 15 bp, Homo sapiens
tgcaccaccatgttc

SEQ ID NO: 1234521 - DNA, 15 bp, Homo sapiens
ttgcaccaccatgtt

SEQ ID NO: 1234522 - DNA, 15 bp, Homo sapiens
cttgcaccaccatgt

SEQ ID NO: 1234523 - DNA, 15 bp, Homo sapiens
gcttgcaccaccatg

SEQ ID NO: 1234524 - DNA, 15 bp, Homo sapiens
ggcttgcaccaccat

SEQ ID NO: 1234525 - DNA, 15 bp, Homo sapiens
aggcttgcaccacca

SEQ ID NO: 1234526 - DNA, 15 bp, Homo sapiens
caggcttgcaccacc

SEQ ID NO: 1234527 - DNA, 15 bp, Homo sapiens
acaggcttgcaccac

SEQ ID NO: 1234528 - DNA, 15 bp, Homo sapiens
tacaggcttgcacca

SEQ ID NO: 1234529 - DNA, 15 bp, Homo sapiens
ttacaggcttgcacc

SEQ ID NO: 1234530 - DNA, 15 bp, Homo sapiens
attacaggcttgcac

SEQ ID NO: 1234531 - DNA, 15 bp, Homo sapiens
gattacaggcttgca

SEQ ID NO: 1234532 - DNA, 15 bp, Homo sapiens
agattacaggcttgc

SEQ ID NO: 1234533 - DNA, 15 bp, Homo sapiens
gagattacaggcttg

SEQ ID NO: 1234534 - DNA, 15 bp, Homo sapiens
tgagattacaggctt

SEQ ID NO: 1234535 - DNA, 15 bp, Homo sapiens
ctgagattacaggct

SEQ ID NO: 1234536 - DNA, 15 bp, Homo sapiens
cgtagctgagattac

SEQ ID NO: 1234537 - DNA, 15 bp, Homo sapiens
acgtagctgagatta

SEQ ID NO: 1234538 - DNA, 15 bp, Homo sapiens
cacgtagctgagatt

SEQ ID NO: 1234539 - DNA, 15 bp, Homo sapiens
ccacgtagctgagat

SEQ ID NO: 1234540 - DNA, 15 bp, Homo sapiens
cccacgtagctgaga

SEQ ID NO: 1234541 - DNA, 15 bp, Homo sapiens
tcccacgtagctgag

SEQ ID NO: 1234542 - DNA, 15 bp, Homo sapiens
ctcccacgtagctga

SEQ ID NO: 1234543 - DNA, 15 bp, Homo sapiens
cctcccacgtagctg

SEQ ID NO: 1234544 - DNA, 15 bp, Homo sapiens
gcctcccacgtagct

SEQ ID NO: 1234545 - DNA, 15 bp, Homo sapiens
agcctcccacgtagc

SEQ ID NO: 1234546 - DNA, 15 bp, Homo sapiens
cagcctcccacgtag

SEQ ID NO: 1234547 - DNA, 15 bp, Homo sapiens
tcagcctcccacgta

SEQ ID NO: 1234548 - DNA, 15 bp, Homo sapiens
ctcagcctcccacgt

SEQ ID NO: 1234549 - DNA, 15 bp, Homo sapiens
cctcagcctcccacg

SEQ ID NO: 1234550 - DNA, 15 bp, Homo sapiens
gcctcagcctcccac

SEQ ID NO: 1234551 - DNA, 15 bp, Homo sapiens
aagtgattcttgtgc

SEQ ID NO: 1234552 - DNA, 15 bp, Homo sapiens
caagtgattcttgtg

SEQ ID NO: 1234553 - DNA, 15 bp, Homo sapiens
tcaagtgattcttgt

SEQ ID NO: 1234554 - DNA, 15 bp, Homo sapiens
ttcaagtgattcttg

SEQ ID NO: 1234555 - DNA, 15 bp, Homo sapiens
gttcaagtgattctt

SEQ ID NO: 1234556 - DNA, 15 bp, Homo sapiens
cctccgcctcctggg

SEQ ID NO: 1234557 - DNA, 15 bp, Homo sapiens
agagtgcagtggcgc

SEQ ID NO: 1234558 - DNA, 15 bp, Homo sapiens
cagagtgcagtggcg

SEQ ID NO: 1234559 - DNA, 15 bp, Homo sapiens
ccagagtgcagtggc

SEQ ID NO: 1234560 - DNA, 15 bp, Homo sapiens
gccagagtgcagtgg

SEQ ID NO: 1234561 - DNA, 15 bp, Homo sapiens
agccagagtgcagtg

SEQ ID NO: 1234562 - DNA, 15 bp, Homo sapiens
aagccagagtgcagt

SEQ ID NO: 1234563 - DNA, 15 bp, Homo sapiens
taagccagagtgcag

SEQ ID NO: 1234564 - DNA, 15 bp, Homo sapiens
ttaagccagagtgca

SEQ ID NO: 1234565 - DNA, 15 bp, Homo sapiens
cttaagccagagtgc

SEQ ID NO: 1234566 - DNA, 15 bp, Homo sapiens
gcttaagccagagtg

SEQ ID NO: 1234567 - DNA, 15 bp, Homo sapiens
tgcttaagccagagt

SEQ ID NO: 1234568 - DNA, 15 bp, Homo sapiens
ttgcttaagccagag

SEQ ID NO: 1234569 - DNA, 15 bp, Homo sapiens
gttgcttaagccaga

SEQ ID NO: 1234570 - DNA, 15 bp, Homo sapiens
tgttgcttaagccag

SEQ ID NO: 1234571 - DNA, 15 bp, Homo sapiens
ctgttgcttaagcca

SEQ ID NO: 1234572 - DNA, 15 bp, Homo sapiens
tctgttgcttaagcc

SEQ ID NO: 1234573 - DNA, 15 bp, Homo sapiens
ctctgttgcttaagc

SEQ ID NO: 1234574 - DNA, 15 bp, Homo sapiens
gctctgttgcttaag

SEQ ID NO: 1234575 - DNA, 15 bp, Homo sapiens
tgctctgttgcttaa

SEQ ID NO: 1234576 - DNA, 15 bp, Homo sapiens
ttgctctgttgctta

SEQ ID NO: 1234577 - DNA, 15 bp, Homo sapiens
cttgctctgttgctt

SEQ ID NO: 1234578 - DNA, 15 bp, Homo sapiens
tcttgctctgttgct

SEQ ID NO: 1234579 - DNA, 15 bp, Homo sapiens
tagtcttgctctgtt

SEQ ID NO: 1234580 - DNA, 15 bp, Homo sapiens
atagtcttgctctgt

SEQ ID NO: 1234581 - DNA, 15 bp, Homo sapiens
gatagtcttgctctg

SEQ ID NO: 1234582 - DNA, 15 bp, Homo sapiens
agatagtcttgctct

SEQ ID NO: 1234583 - DNA, 15 bp, Homo sapiens
gagatagtcttgctc

SEQ ID NO: 1234584 - DNA, 15 bp, Homo sapiens
tgagatagtcttgct

SEQ ID NO: 1234585 - DNA, 15 bp, Homo sapiens
ttgagatagtcttgc

SEQ ID NO: 1234586 - DNA, 15 bp, Homo sapiens
tttgagatagtcttg

SEQ ID NO: 1234587 - DNA, 15 bp, Homo sapiens
ttttgagatagtctt

SEQ ID NO: 1234588 - DNA, 15 bp, Homo sapiens
tttttgagatagtct

SEQ ID NO: 1234589 - DNA, 15 bp, Homo sapiens
ttttttgagatagtc

SEQ ID NO: 1234590 - DNA, 15 bp, Homo sapiens
tttttttgagatagt

SEQ ID NO: 1234591 - DNA, 15 bp, Homo sapiens
ttttttttgagatag

SEQ ID NO: 1234592 - DNA, 15 bp, Homo sapiens
tttttttttgagata

SEQ ID NO: 1234593 - DNA, 15 bp, Homo sapiens
catcttttttttttt

SEQ ID NO: 1234594 - DNA, 15 bp, Homo sapiens
gcatctttttttttt

SEQ ID NO: 1234595 - DNA, 15 bp, Homo sapiens
agcatcttttttttt

SEQ ID NO: 1234596 - DNA, 15 bp, Homo sapiens
aagcatctttttttt

SEQ ID NO: 1234597 - DNA, 15 bp, Homo sapiens
aaagcatcttttttt

SEQ ID NO: 1234598 - DNA, 15 bp, Homo sapiens
aaaagcatctttttt

SEQ ID NO: 1234599 - DNA, 15 bp, Homo sapiens
caaaagcatcttttt

SEQ ID NO: 1234600 - DNA, 15 bp, Homo sapiens
ccaaaagcatctttt

SEQ ID NO: 1234601 - DNA, 15 bp, Homo sapiens
gccaaaagcatcttt

SEQ ID NO: 1234602 - DNA, 15 bp, Homo sapiens
tgccaaaagcatctt

SEQ ID NO: 1234603 - DNA, 15 bp, Homo sapiens
ttgccaaaagcatct

SEQ ID NO: 1234604 - DNA, 15 bp, Homo sapiens
tttgccaaaagcatc

SEQ ID NO: 1234605 - DNA, 15 bp, Homo sapiens
gtttgccaaaagcat

SEQ ID NO: 1234606 - DNA, 15 bp, Homo sapiens
ggtttgccaaaagca

SEQ ID NO: 1234607 - DNA, 15 bp, Homo sapiens
aggtttgccaaaagc

SEQ ID NO: 1234608 - DNA, 15 bp, Homo sapiens
caggtttgccaaaag

SEQ ID NO: 1234609 - DNA, 15 bp, Homo sapiens
acaggtttgccaaaa

SEQ ID NO: 1234610 - DNA, 15 bp, Homo sapiens
tacaggtttgccaaa

SEQ ID NO: 1234611 - DNA, 15 bp, Homo sapiens
ttacaggtttgccaa

SEQ ID NO: 1234612 - DNA, 15 bp, Homo sapiens
gttacaggtttgcca

SEQ ID NO: 1234613 - DNA, 15 bp, Homo sapiens
tgttacaggtttgcc

SEQ ID NO: 1234614 - DNA, 15 bp, Homo sapiens
atgttacaggtttgc

SEQ ID NO: 1234615 - DNA, 15 bp, Homo sapiens
catgttacaggtttg

SEQ ID NO: 1234616 - DNA, 15 bp, Homo sapiens
acatgttacaggttt

SEQ ID NO: 1234617 - DNA, 15 bp, Homo sapiens
cacatgttacaggtt

SEQ ID NO: 1234618 - DNA, 15 bp, Homo sapiens
gcacatgttacaggt

SEQ ID NO: 1234619 - DNA, 15 bp, Homo sapiens
tgcacatgttacagg

SEQ ID NO: 1234620 - DNA, 15 bp, Homo sapiens
ctgcacatgttacag

SEQ ID NO: 1234621 - DNA, 15 bp, Homo sapiens
cctgcacatgttaca

SEQ ID NO: 1234622 - DNA, 15 bp, Homo sapiens
acctgcacatgttac

SEQ ID NO: 1234623 - DNA, 15 bp, Homo sapiens
gacctgcacatgtta

SEQ ID NO: 1234624 - DNA, 15 bp, Homo sapiens
ggacctgcacatgtt

SEQ ID NO: 1234625 - DNA, 15 bp, Homo sapiens
aggacctgcacatgt

SEQ ID NO: 1234626 - DNA, 15 bp, Homo sapiens
caggacctgcacatg

SEQ ID NO: 1234627 - DNA, 15 bp, Homo sapiens
gcaggacctgcacat

SEQ ID NO: 1234628 - DNA, 15 bp, Homo sapiens
tgcaggacctgcaca

SEQ ID NO: 1234629 - DNA, 15 bp, Homo sapiens
atgcaggacctgcac

SEQ ID NO: 1234630 - DNA, 15 bp, Homo sapiens
gatgcaggacctgca

SEQ ID NO: 1234631 - DNA, 15 bp, Homo sapiens
agatgcaggacctgc

SEQ ID NO: 1234632 - DNA, 15 bp, Homo sapiens
cagatgcaggacctg

SEQ ID NO: 1234633 - DNA, 15 bp, Homo sapiens
ccagatgcaggacct

SEQ ID NO: 1234634 - DNA, 15 bp, Homo sapiens
cccagatgcaggacc

SEQ ID NO: 1234635 - DNA, 15 bp, Homo sapiens
gcccagatgcaggac

SEQ ID NO: 1234636 - DNA, 15 bp, Homo sapiens
tgcccagatgcagga

SEQ ID NO: 1234637 - DNA, 15 bp, Homo sapiens
ctgcccagatgcagg

SEQ ID NO: 1234638 - DNA, 15 bp, Homo sapiens
actgcccagatgcag

SEQ ID NO: 1234639 - DNA, 15 bp, Homo sapiens
cactgcccagatgca

SEQ ID NO: 1234640 - DNA, 15 bp, Homo sapiens
gcactgcccagatgc

SEQ ID NO: 1234641 - DNA, 15 bp, Homo sapiens
agcactgcccagatg

SEQ ID NO: 1234642 - DNA, 15 bp, Homo sapiens
gagcactgcccagat

SEQ ID NO: 1234643 - DNA, 15 bp, Homo sapiens
tgagcactgcccaga

SEQ ID NO: 1234644 - DNA, 15 bp, Homo sapiens
ttgagcactgcccag

SEQ ID NO: 1234645 - DNA, 15 bp, Homo sapiens
cttgagcactgccca

SEQ ID NO: 1234646 - DNA, 15 bp, Homo sapiens
ccttgagcactgccc

SEQ ID NO: 1234647 - DNA, 15 bp, Homo sapiens
cccttgagcactgcc

SEQ ID NO: 1234648 - DNA, 15 bp, Homo sapiens
tcccttgagcactgc

SEQ ID NO: 1234649 - DNA, 15 bp, Homo sapiens
ttcccttgagcactg

SEQ ID NO: 1234650 - DNA, 15 bp, Homo sapiens
tttcccttgagcact

SEQ ID NO: 1234651 - DNA, 15 bp, Homo sapiens
ctttcccttgagcac

SEQ ID NO: 1234652 - DNA, 15 bp, Homo sapiens
gctttcccttgagca

SEQ ID NO: 1234653 - DNA, 15 bp, Homo sapiens
ggctttcccttgagc

SEQ ID NO: 1234654 - DNA, 15 bp, Homo sapiens
cggctttcccttgag

SEQ ID NO: 1234655 - DNA, 15 bp, Homo sapiens
gcggctttcccttga

SEQ ID NO: 1234656 - DNA, 15 bp, Homo sapiens
tgcggctttcccttg

SEQ ID NO: 1234657 - DNA, 15 bp, Homo sapiens
gtgcggctttccctt

SEQ ID NO: 1234658 - DNA, 15 bp, Homo sapiens
agtgcggctttccct

SEQ ID NO: 1234659 - DNA, 15 bp, Homo sapiens
tagtgcggctttccc

SEQ ID NO: 1234660 - DNA, 15 bp, Homo sapiens
atagtgcggctttcc

SEQ ID NO: 1234661 - DNA, 15 bp, Homo sapiens
catagtgcggctttc

SEQ ID NO: 1234662 - DNA, 15 bp, Homo sapiens
acatagtgcggcttt

SEQ ID NO: 1234663 - DNA, 15 bp, Homo sapiens
gacatagtgcggctt

SEQ ID NO: 1234664 - DNA, 15 bp, Homo sapiens
ggacatagtgcggct

SEQ ID NO: 1234665 - DNA, 15 bp, Homo sapiens
tggacatagtgcggc

SEQ ID NO: 1234666 - DNA, 15 bp, Homo sapiens
gtggacatagtgcgg

SEQ ID NO: 1234667 - DNA, 15 bp, Homo sapiens
agtggacatagtgcg

SEQ ID NO: 1234668 - DNA, 15 bp, Homo sapiens
cagtggacatagtgc

SEQ ID NO: 1234669 - DNA, 15 bp, Homo sapiens
ccagtggacatagtg

SEQ ID NO: 1234670 - DNA, 15 bp, Homo sapiens
cccagtggacatagt

SEQ ID NO: 1234671 - DNA, 15 bp, Homo sapiens
gcccagtggacatag

SEQ ID NO: 1234672 - DNA, 15 bp, Homo sapiens
ggcccagtggacata

SEQ ID NO: 1234673 - DNA, 15 bp, Homo sapiens
tggcccagtggacat

SEQ ID NO: 1234674 - DNA, 15 bp, Homo sapiens
ttggcccagtggaca

SEQ ID NO: 1234675 - DNA, 15 bp, Homo sapiens
cttggcccagtggac

SEQ ID NO: 1234676 - DNA, 15 bp, Homo sapiens
tcttggcccagtgga

SEQ ID NO: 1234677 - DNA, 15 bp, Homo sapiens
gtcttggcccagtgg

SEQ ID NO: 1234678 - DNA, 15 bp, Homo sapiens
agtcttggcccagtg

SEQ ID NO: 1234679 - DNA, 15 bp, Homo sapiens
gagtcttggcccagt

SEQ ID NO: 1234680 - DNA, 15 bp, Homo sapiens
tgagtcttggcccag

SEQ ID NO: 1234681 - DNA, 15 bp, Homo sapiens
ttgagtcttggccca

SEQ ID NO: 1234682 - DNA, 15 bp, Homo sapiens
gttgagtcttggccc

SEQ ID NO: 1234683 - DNA, 15 bp, Homo sapiens
cgttgagtcttggcc

SEQ ID NO: 1234684 - DNA, 15 bp, Homo sapiens
acgttgagtcttggc

SEQ ID NO: 1234685 - DNA, 15 bp, Homo sapiens
aacgttgagtcttgg

SEQ ID NO: 1234686 - DNA, 15 bp, Homo sapiens
caacgttgagtcttg

SEQ ID NO: 1234687 - DNA, 15 bp, Homo sapiens
ccaacgttgagtctt

SEQ ID NO: 1234688 - DNA, 15 bp, Homo sapiens
gccaacgttgagtct

SEQ ID NO: 1234689 - DNA, 15 bp, Homo sapiens
ggccaacgttgagtc

SEQ ID NO: 1234690 - DNA, 15 bp, Homo sapiens
tggccaacgttgagt

SEQ ID NO: 1234691 - DNA, 15 bp, Homo sapiens
atggccaacgttgag

SEQ ID NO: 1234692 - DNA, 15 bp, Homo sapiens
catggccaacgttga

SEQ ID NO: 1234693 - DNA, 15 bp, Homo sapiens
gcatggccaacgttg

SEQ ID NO: 1234694 - DNA, 15 bp, Homo sapiens
ggcatggccaacgtt

SEQ ID NO: 1234695 - DNA, 15 bp, Homo sapiens
gggcatggccaacgt

SEQ ID NO: 1234696 - DNA, 15 bp, Homo sapiens
ggggcatggccaacg

SEQ ID NO: 1234697 - DNA, 15 bp, Homo sapiens
gggggcatggccaac

SEQ ID NO: 1234698 - DNA, 15 bp, Homo sapiens
agggggcatggccaa

SEQ ID NO: 1234699 - DNA, 15 bp, Homo sapiens
cagggggcatggcca

SEQ ID NO: 1234700 - DNA, 15 bp, Homo sapiens
gcagggggcatggcc

SEQ ID NO: 1234701 - DNA, 15 bp, Homo sapiens
agcagggggcatggc

SEQ ID NO: 1234702 - DNA, 15 bp, Homo sapiens
aagcagggggcatgg

SEQ ID NO: 1234703 - DNA, 15 bp, Homo sapiens
gaagcagggggcatg

SEQ ID NO: 1234704 - DNA, 15 bp, Homo sapiens
ggaagcagggggcat

SEQ ID NO: 1234705 - DNA, 15 bp, Homo sapiens
aggaagcagggggca

SEQ ID NO: 1234706 - DNA, 15 bp, Homo sapiens
aaggaagcagggggc

SEQ ID NO: 1234707 - DNA, 15 bp, Homo sapiens
taaggaagcaggggg

SEQ ID NO: 1234708 - DNA, 15 bp, Homo sapiens
ttaaggaagcagggg

SEQ ID NO: 1234709 - DNA, 15 bp, Homo sapiens
tttaaggaagcaggg

SEQ ID NO: 1234710 - DNA, 15 bp, Homo sapiens
atttaaggaagcagg

SEQ ID NO: 1234711 - DNA, 15 bp, Homo sapiens
gatttaaggaagcag

SEQ ID NO: 1234712 - DNA, 15 bp, Homo sapiens
agatttaaggaagca

SEQ ID NO: 1234713 - DNA, 15 bp, Homo sapiens
tagatttaaggaagc

SEQ ID NO: 1234714 - DNA, 15 bp, Homo sapiens
ttagatttaaggaag

SEQ ID NO: 1234715 - DNA, 15 bp, Homo sapiens
gttagatttaaggaa

SEQ ID NO: 1234716 - DNA, 15 bp, Homo sapiens
cgttagatttaagga

SEQ ID NO: 1234717 - DNA, 15 bp, Homo sapiens
gcgttagatttaagg

SEQ ID NO: 1234718 - DNA, 15 bp, Homo sapiens
ggcgttagatttaag

SEQ ID NO: 1234719 - DNA, 15 bp, Homo sapiens
tggcgttagatttaa

SEQ ID NO: 1234720 - DNA, 15 bp, Homo sapiens
gtggcgttagattta

SEQ ID NO: 1234721 - DNA, 15 bp, Homo sapiens
tgtggcgttagattt

SEQ ID NO: 1234722 - DNA, 15 bp, Homo sapiens
ttgtggcgttagatt

SEQ ID NO: 1234723 - DNA, 15 bp, Homo sapiens
tttgtggcgttagat

SEQ ID NO: 1234724 - DNA, 15 bp, Homo sapiens
ttttgtggcgttaga

SEQ ID NO: 1234725 - DNA, 15 bp, Homo sapiens
tttttgtggcgttag

SEQ ID NO: 1234726 - DNA, 15 bp, Homo sapiens
ctttttgtggcgtta

SEQ ID NO: 1234727 - DNA, 15 bp, Homo sapiens
tctttttgtggcgtt

SEQ ID NO: 1234728 - DNA, 15 bp, Homo sapiens
ctctttttgtggcgt

SEQ ID NO: 1234729 - DNA, 15 bp, Homo sapiens
actctttttgtggcg

SEQ ID NO: 1234730 - DNA, 15 bp, Homo sapiens
aactctttttgtggc

SEQ ID NO: 1234731 - DNA, 15 bp, Homo sapiens
caactctttttgtgg

SEQ ID NO: 1234732 - DNA, 15 bp, Homo sapiens
tcaactctttttgtg

SEQ ID NO: 1234733 - DNA, 15 bp, Homo sapiens
ttcaactctttttgt

SEQ ID NO: 1234734 - DNA, 15 bp, Homo sapiens
cttcaactctttttg

SEQ ID NO: 1234735 - DNA, 15 bp, Homo sapiens
acttcaactcttttt

SEQ ID NO: 1234736 - DNA, 15 bp, Homo sapiens
tacttcaactctttt

SEQ ID NO: 1234737 - DNA, 15 bp, Homo sapiens
ttacttcaactcttt

SEQ ID NO: 1234738 - DNA, 15 bp, Homo sapiens
tttacttcaactctt

SEQ ID NO: 1234739 - DNA, 15 bp, Homo sapiens
ttttacttcaactct

SEQ ID NO: 1234740 - DNA, 15 bp, Homo sapiens
cttttacttcaactc

SEQ ID NO: 1234741 - DNA, 15 bp, Homo sapiens
gcttttacttcaact

SEQ ID NO: 1234742 - DNA, 15 bp, Homo sapiens
ggcttttacttcaac

SEQ ID NO: 1234743 - DNA, 15 bp, Homo sapiens
aggcttttacttcaa

SEQ ID NO: 1234744 - DNA, 15 bp, Homo sapiens
caggcttttacttca

SEQ ID NO: 1234745 - DNA, 15 bp, Homo sapiens
ccaggcttttacttc

SEQ ID NO: 1234746 - DNA, 15 bp, Homo sapiens
gccaggcttttactt

SEQ ID NO: 1234747 - DNA, 15 bp, Homo sapiens
ggccaggcttttact

SEQ ID NO: 1234748 - DNA, 15 bp, Homo sapiens
tggccaggcttttac

SEQ ID NO: 1234749 - DNA, 15 bp, Homo sapiens
ttggccaggctttta

SEQ ID NO: 1234750 - DNA, 15 bp, Homo sapiens
attggccaggctttt

SEQ ID NO: 1234751 - DNA, 15 bp, Homo sapiens
tattggccaggcttt

SEQ ID NO: 1234752 - DNA, 15 bp, Homo sapiens
gtattggccaggctt

SEQ ID NO: 1234753 - DNA, 15 bp, Homo sapiens
ggtattggccaggct

SEQ ID NO: 1234754 - DNA, 15 bp, Homo sapiens
tggtattggccaggc

SEQ ID NO: 1234755 - DNA, 15 bp, Homo sapiens
atggtattggccagg

SEQ ID NO: 1234756 - DNA, 15 bp, Homo sapiens
catggtattggccag

SEQ ID NO: 1234757 - DNA, 15 bp, Homo sapiens
tcatggtattggcca

SEQ ID NO: 1234758 - DNA, 15 bp, Homo sapiens
atcatggtattggcc

SEQ ID NO: 1234759 - DNA, 15 bp, Homo sapiens
catcatggtattggc

SEQ ID NO: 1234760 - DNA, 15 bp, Homo sapiens
tcatcatggtattgg

SEQ ID NO: 1234761 - DNA, 15 bp, Homo sapiens
gtcatcatggtattg

SEQ ID NO: 1234762 - DNA, 15 bp, Homo sapiens
tgtcatcatggtatt

SEQ ID NO: 1234763 - DNA, 15 bp, Homo sapiens
atgtcatcatggtat

SEQ ID NO: 1234764 - DNA, 15 bp, Homo sapiens
gatgtcatcatggta

SEQ ID NO: 1234765 - DNA, 15 bp, Homo sapiens
agatgtcatcatggt

SEQ ID NO: 1234766 - DNA, 15 bp, Homo sapiens
tagatgtcatcatgg

SEQ ID NO: 1234767 - DNA, 15 bp, Homo sapiens
gtagatgtcatcatg

SEQ ID NO: 1234768 - DNA, 15 bp, Homo sapiens
agtagatgtcatcat

SEQ ID NO: 1234769 - DNA, 15 bp, Homo sapiens
aagtagatgtcatca

SEQ ID NO: 1234770 - DNA, 15 bp, Homo sapiens
gaagtagatgtcatc

SEQ ID NO: 1234771 - DNA, 15 bp, Homo sapiens
ggaagtagatgtcat

SEQ ID NO: 1234772 - DNA, 15 bp, Homo sapiens
aggaagtagatgtca

SEQ ID NO: 1234773 - DNA, 15 bp, Homo sapiens
caggaagtagatgtc

SEQ ID NO: 1234774 - DNA, 15 bp, Homo sapiens
ccaggaagtagatgt

SEQ ID NO: 1234775 - DNA, 15 bp, Homo sapiens
gccaggaagtagatg

SEQ ID NO: 1234776 - DNA, 15 bp, Homo sapiens
agccaggaagtagat

SEQ ID NO: 1234777 - DNA, 15 bp, Homo sapiens
aagccaggaagtaga

SEQ ID NO: 1234778 - DNA, 15 bp, Homo sapiens
gaagccaggaagtag

SEQ ID NO: 1234779 - DNA, 15 bp, Homo sapiens
ggaagccaggaagta

SEQ ID NO: 1234780 - DNA, 15 bp, Homo sapiens
gggaagccaggaagt

SEQ ID NO: 1234781 - DNA, 15 bp, Homo sapiens
cgggaagccaggaag

SEQ ID NO: 1234782 - DNA, 15 bp, Homo sapiens
gcgggaagccaggaa

SEQ ID NO: 1234783 - DNA, 15 bp, Homo sapiens
ggcgggaagccagga

SEQ ID NO: 1234784 - DNA, 15 bp, Homo sapiens
tggcgggaagccagg

SEQ ID NO: 1234785 - DNA, 15 bp, Homo sapiens
atggcgggaagccag

SEQ ID NO: 1234786 - DNA, 15 bp, Homo sapiens
gatggcgggaagcca

SEQ ID NO: 1234787 - DNA, 15 bp, Homo sapiens
tgatggcgggaagcc

SEQ ID NO: 1234788 - DNA, 15 bp, Homo sapiens
ttgatggcgggaagc

SEQ ID NO: 1234789 - DNA, 15 bp, Homo sapiens
gttgatggcgggaag

SEQ ID NO: 1234790 - DNA, 15 bp, Homo sapiens
ggttgatggcgggaa

SEQ ID NO: 1234791 - DNA, 15 bp, Homo sapiens
gggttgatggcggga

SEQ ID NO: 1234792 - DNA, 15 bp, Homo sapiens
agggttgatggcggg

SEQ ID NO: 1234793 - DNA, 15 bp, Homo sapiens
gagggttgatggcgg

SEQ ID NO: 1234794 - DNA, 15 bp, Homo sapiens
ggagggttgatggcg

SEQ ID NO: 1234795 - DNA, 15 bp, Homo sapiens
gggagggttgatggc

SEQ ID NO: 1234796 - DNA, 15 bp, Homo sapiens
agggagggttgatgg

SEQ ID NO: 1234797 - DNA, 15 bp, Homo sapiens
gagggagggttgatg

SEQ ID NO: 1234798 - DNA, 15 bp, Homo sapiens
tgagggagggttgat

SEQ ID NO: 1234799 - DNA, 15 bp, Homo sapiens
gtgagggagggttga

SEQ ID NO: 1234800 - DNA, 15 bp, Homo sapiens
tgtgagggagggttg

SEQ ID NO: 1234801 - DNA, 15 bp, Homo sapiens
gtgtgagggagggtt

SEQ ID NO: 1234802 - DNA, 15 bp, Homo sapiens
ggtgtgagggagggt

SEQ ID NO: 1234803 - DNA, 15 bp, Homo sapiens
tggtgtgagggaggg

SEQ ID NO: 1234804 - DNA, 15 bp, Homo sapiens
atggtgtgagggagg

SEQ ID NO: 1234805 - DNA, 15 bp, Homo sapiens
gatggtgtgagggag

SEQ ID NO: 1234806 - DNA, 15 bp, Homo sapiens
agatggtgtgaggga

SEQ ID NO: 1234807 - DNA, 15 bp, Homo sapiens
cagatggtgtgaggg

SEQ ID NO: 1234808 - DNA, 15 bp, Homo sapiens
gcagatggtgtgagg

SEQ ID NO: 1234809 - DNA, 15 bp, Homo sapiens
cgcagatggtgtgag

SEQ ID NO: 1234810 - DNA, 15 bp, Homo sapiens
ccgcagatggtgtga

SEQ ID NO: 1234811 - DNA, 15 bp, Homo sapiens
cccgcagatggtgtg

SEQ ID NO: 1234812 - DNA, 15 bp, Homo sapiens
gcccgcagatggtgt

SEQ ID NO: 1234813 - DNA, 15 bp, Homo sapiens
tgcccgcagatggtg

SEQ ID NO: 1234814 - DNA, 15 bp, Homo sapiens
ctgcccgcagatggt

SEQ ID NO: 1234815 - DNA, 15 bp, Homo sapiens
cctgcccgcagatgg

SEQ ID NO: 1234816 - DNA, 15 bp, Homo sapiens
acctgcccgcagatg

SEQ ID NO: 1234817 - DNA, 15 bp, Homo sapiens
tacctgcccgcagat

SEQ ID NO: 1234818 - DNA, 15 bp, Homo sapiens
ctacctgcccgcaga

SEQ ID NO: 1234819 - DNA, 15 bp, Homo sapiens
gctacctgcccgcag

SEQ ID NO: 1234820 - DNA, 15 bp, Homo sapiens
tgctacctgcccgca

SEQ ID NO: 1234821 - DNA, 15 bp, Homo sapiens
ctgctacctgcccgc

SEQ ID NO: 1234822 - DNA, 15 bp, Homo sapiens
tctgctacctgcccg

SEQ ID NO: 1234823 - DNA, 15 bp, Homo sapiens
atctgctacctgccc

SEQ ID NO: 1234824 - DNA, 15 bp, Homo sapiens
catctgctacctgcc

SEQ ID NO: 1234825 - DNA, 15 bp, Homo sapiens
gcatctgctacctgc

SEQ ID NO: 1234826 - DNA, 15 bp, Homo sapiens
tgcatctgctacctg

SEQ ID NO: 1234827 - DNA, 15 bp, Homo sapiens
ctgcatctgctacct

SEQ ID NO: 1234828 - DNA, 15 bp, Homo sapiens
cctgcatctgctacc

SEQ ID NO: 1234829 - DNA, 15 bp, Homo sapiens
tcctgcatctgctac

SEQ ID NO: 1234830 - DNA, 15 bp, Homo sapiens
ctcctgcatctgcta

SEQ ID NO: 1234831 - DNA, 15 bp, Homo sapiens
tctcctgcatctgct

SEQ ID NO: 1234832 - DNA, 15 bp, Homo sapiens
ctctcctgcatctgc

SEQ ID NO: 1234833 - DNA, 15 bp, Homo sapiens
tctctcctgcatctg

SEQ ID NO: 1234834 - DNA, 15 bp, Homo sapiens
ctctctcctgcatct

SEQ ID NO: 1234835 - DNA, 15 bp, Homo sapiens
tctctctcctgcatc

SEQ ID NO: 1234836 - DNA, 15 bp, Homo sapiens
ctctctctcctgcat

SEQ ID NO: 1234837 - DNA, 15 bp, Homo sapiens
actctctctcctgca

SEQ ID NO: 1234838 - DNA, 15 bp, Homo sapiens
aactctctctcctgc

SEQ ID NO: 1234839 - DNA, 15 bp, Homo sapiens
gaactctctctcctg

SEQ ID NO: 1234840 - DNA, 15 bp, Homo sapiens
ggaactctctctcct

SEQ ID NO: 1234841 - DNA, 15 bp, Homo sapiens
tggaactctctctcc

SEQ ID NO: 1234842 - DNA, 15 bp, Homo sapiens
gtggaactctctctc

SEQ ID NO: 1234843 - DNA, 15 bp, Homo sapiens
tgtggaactctctct

SEQ ID NO: 1234844 - DNA, 15 bp, Homo sapiens
ttgtggaactctctc

SEQ ID NO: 1234845 - DNA, 15 bp, Homo sapiens
cttgtggaactctct

SEQ ID NO: 1234846 - DNA, 15 bp, Homo sapiens
tcttgtggaactctc

SEQ ID NO: 1234847 - DNA, 15 bp, Homo sapiens
gtcttgtggaactct

SEQ ID NO: 1234848 - DNA, 15 bp, Homo sapiens
tgtcttgtggaactc

SEQ ID NO: 1234849 - DNA, 15 bp, Homo sapiens
ctgtcttgtggaact

SEQ ID NO: 1234850 - DNA, 15 bp, Homo sapiens
tctgtcttgtggaac

SEQ ID NO: 1234851 - DNA, 15 bp, Homo sapiens
ttctgtcttgtggaa

SEQ ID NO: 1234852 - DNA, 15 bp, Homo sapiens
cttctgtcttgtgga

SEQ ID NO: 1234853 - DNA, 15 bp, Homo sapiens
ccttctgtcttgtgg

SEQ ID NO: 1234854 - DNA, 15 bp, Homo sapiens
accttctgtcttgtg

SEQ ID NO: 1234855 - DNA, 15 bp, Homo sapiens
gaccttctgtcttgt

SEQ ID NO: 1234856 - DNA, 15 bp, Homo sapiens
tgaccttctgtcttg

SEQ ID NO: 1234857 - DNA, 15 bp, Homo sapiens
ttgaccttctgtctt

SEQ ID NO: 1234858 - DNA, 15 bp, Homo sapiens
gttgaccttctgtct

SEQ ID NO: 1234859 - DNA, 15 bp, Homo sapiens
tgttgaccttctgtc

SEQ ID NO: 1234860 - DNA, 15 bp, Homo sapiens
ctgttgaccttctgt

SEQ ID NO: 1234861 - DNA, 15 bp, Homo sapiens
gctgttgaccttctg

SEQ ID NO: 1234862 - DNA, 15 bp, Homo sapiens
tgctgttgaccttct

SEQ ID NO: 1234863 - DNA, 15 bp, Homo sapiens
gtgctgttgaccttc

SEQ ID NO: 1234864 - DNA, 15 bp, Homo sapiens
tgtgctgttgacctt

SEQ ID NO: 1234865 - DNA, 15 bp, Homo sapiens
ttgtgctgttgacct

SEQ ID NO: 1234866 - DNA, 15 bp, Homo sapiens
cttgtgctgttgacc

SEQ ID NO: 1234867 - DNA, 15 bp, Homo sapiens
aacttgtgctgttga

SEQ ID NO: 1234868 - DNA, 15 bp, Homo sapiens
caacttgtgctgttg

SEQ ID NO: 1234869 - DNA, 15 bp, Homo sapiens
gcaacttgtgctgtt

SEQ ID NO: 1234870 - DNA, 15 bp, Homo sapiens
tgcaacttgtgctgt

SEQ ID NO: 1234871 - DNA, 15 bp, Homo sapiens
ttgcaacttgtgctg

SEQ ID NO: 1234872 - DNA, 15 bp, Homo sapiens
cttgcaacttgtgct

SEQ ID NO: 1234873 - DNA, 15 bp, Homo sapiens
tcttgcaacttgtgc

SEQ ID NO: 1234874 - DNA, 15 bp, Homo sapiens
ctcttgcaacttgtg

SEQ ID NO: 1234875 - DNA, 15 bp, Homo sapiens
cctcttgcaacttgt

SEQ ID NO: 1234876 - DNA, 15 bp, Homo sapiens
gcctcttgcaacttg

SEQ ID NO: 1234877 - DNA, 15 bp, Homo sapiens
ggcctcttgcaactt

SEQ ID NO: 1234878 - DNA, 15 bp, Homo sapiens
gggcctcttgcaact

SEQ ID NO: 1234879 - DNA, 15 bp, Homo sapiens
cgggcctcttgcaac

SEQ ID NO: 1234880 - DNA, 15 bp, Homo sapiens
gcgggcctcttgcaa

SEQ ID NO: 1234881 - DNA, 15 bp, Homo sapiens
ggcgggcctcttgca

SEQ ID NO: 1234882 - DNA, 15 bp, Homo sapiens
aggcgggcctcttgc

SEQ ID NO: 1234883 - DNA, 15 bp, Homo sapiens
taggcgggcctcttg

SEQ ID NO: 1234884 - DNA, 15 bp, Homo sapiens
gtaggcgggcctctt

SEQ ID NO: 1234885 - DNA, 15 bp, Homo sapiens
cgtaggcgggcctct

SEQ ID NO: 1234886 - DNA, 15 bp, Homo sapiens
acgtaggcgggcctc

SEQ ID NO: 1234887 - DNA, 15 bp, Homo sapiens
gacgtaggcgggcct

SEQ ID NO: 1234888 - DNA, 15 bp, Homo sapiens
ggacgtaggcgggcc

SEQ ID NO: 1234889 - DNA, 15 bp, Homo sapiens
gggacgtaggcgggc

SEQ ID NO: 1234890 - DNA, 15 bp, Homo sapiens
ggggacgtaggcggg

SEQ ID NO: 1234891 - DNA, 15 bp, Homo sapiens
tggggacgtaggcgg

SEQ ID NO: 1234892 - DNA, 15 bp, Homo sapiens
ttggggacgtaggcg

SEQ ID NO: 1234893 - DNA, 15 bp, Homo sapiens
cttggggacgtaggc

SEQ ID NO: 1234894 - DNA, 15 bp, Homo sapiens
ccttggggacgtagg

SEQ ID NO: 1234895 - DNA, 15 bp, Homo sapiens
gccttggggacgtag

SEQ ID NO: 1234896 - DNA, 15 bp, Homo sapiens
tgccttggggacgta

SEQ ID NO: 1234897 - DNA, 15 bp, Homo sapiens
ttgccttggggacgt

SEQ ID NO: 1234898 - DNA, 15 bp, Homo sapiens
cttgccttggggacg

SEQ ID NO: 1234899 - DNA, 15 bp, Homo sapiens
ccttgccttggggac

SEQ ID NO: 1234900 - DNA, 15 bp, Homo sapiens
accttgccttgggga

SEQ ID NO: 1234901 - DNA, 15 bp, Homo sapiens
gaccttgccttgggg

SEQ ID NO: 1234902 - DNA, 15 bp, Homo sapiens
agaccttgccttggg

SEQ ID NO: 1234903 - DNA, 15 bp, Homo sapiens
gagaccttgccttgg

SEQ ID NO: 1234904 - DNA, 15 bp, Homo sapiens
ggagaccttgccttg

SEQ ID NO: 1234905 - DNA, 15 bp, Homo sapiens
gggagaccttgcctt

SEQ ID NO: 1234906 - DNA, 15 bp, Homo sapiens
ggggagaccttgcct

SEQ ID NO: 1234907 - DNA, 15 bp, Homo sapiens
aggggagaccttgcc

SEQ ID NO: 1234908 - DNA, 15 bp, Homo sapiens
caggggagaccttgc

SEQ ID NO: 1234909 - DNA, 15 bp, Homo sapiens
tcaggggagaccttg

SEQ ID NO: 1234910 - DNA, 15 bp, Homo sapiens
atcaggggagacctt

SEQ ID NO: 1234911 - DNA, 15 bp, Homo sapiens
catcaggggagacct

SEQ ID NO: 1234912 - DNA, 15 bp, Homo sapiens
acatcaggggagacc

SEQ ID NO: 1234913 - DNA, 15 bp, Homo sapiens
cacatcaggggagac

SEQ ID NO: 1234914 - DNA, 15 bp, Homo sapiens
tcacatcaggggaga

SEQ ID NO: 1234915 - DNA, 15 bp, Homo sapiens
ttcacatcaggggag

SEQ ID NO: 1234916 - DNA, 15 bp, Homo sapiens
gttcacatcagggga

SEQ ID NO: 1234917 - DNA, 15 bp, Homo sapiens
tgttcacatcagggg

SEQ ID NO: 1234918 - DNA, 15 bp, Homo sapiens
ctgttcacatcaggg

SEQ ID NO: 1234919 - DNA, 15 bp, Homo sapiens
actgttcacatcagg

SEQ ID NO: 1234920 - DNA, 15 bp, Homo sapiens
cactgttcacatcag

SEQ ID NO: 1234921 - DNA, 15 bp, Homo sapiens
acactgttcacatca

SEQ ID NO: 1234922 - DNA, 15 bp, Homo sapiens
cacactgttcacatc

SEQ ID NO: 1234923 - DNA, 15 bp, Homo sapiens
tcacactgttcacat

SEQ ID NO: 1234924 - DNA, 15 bp, Homo sapiens
gtcacactgttcaca

SEQ ID NO: 1234925 - DNA, 15 bp, Homo sapiens
ggtcacactgttcac

SEQ ID NO: 1234926 - DNA, 15 bp, Homo sapiens
gggtcacactgttca

SEQ ID NO: 1234927 - DNA, 15 bp, Homo sapiens
tgggtcacactgttc

SEQ ID NO: 1234928 - DNA, 15 bp, Homo sapiens
ttgggtcacactgtt

SEQ ID NO: 1234929 - DNA, 15 bp, Homo sapiens
cttgggtcacactgt

SEQ ID NO: 1234930 - DNA, 15 bp, Homo sapiens
acttgggtcacactg

SEQ ID NO: 1234931 - DNA, 15 bp, Homo sapiens
aacttgggtcacact

SEQ ID NO: 1234932 - DNA, 15 bp, Homo sapiens
caacttgggtcacac

SEQ ID NO: 1234933 - DNA, 15 bp, Homo sapiens
ccaacttgggtcaca

SEQ ID NO: 1234934 - DNA, 15 bp, Homo sapiens
gccaacttgggtcac

SEQ ID NO: 1234935 - DNA, 15 bp, Homo sapiens
tgccaacttgggtca

SEQ ID NO: 1234936 - DNA, 15 bp, Homo sapiens
gtgccaacttgggtc

SEQ ID NO: 1234937 - DNA, 15 bp, Homo sapiens
agtgccaacttgggt

SEQ ID NO: 1234938 - DNA, 15 bp, Homo sapiens
cagtgccaacttggg

SEQ ID NO: 1234939 - DNA, 15 bp, Homo sapiens
tcagtgccaacttgg

SEQ ID NO: 1234940 - DNA, 15 bp, Homo sapiens
ttcagtgccaacttg

SEQ ID NO: 1234941 - DNA, 15 bp, Homo sapiens
tttcagtgccaactt

SEQ ID NO: 1234942 - DNA, 15 bp, Homo sapiens
gtttcagtgccaact

SEQ ID NO: 1234943 - DNA, 15 bp, Homo sapiens
agtttcagtgccaac

SEQ ID NO: 1234944 - DNA, 15 bp, Homo sapiens
cagtttcagtgccaa

SEQ ID NO: 1234945 - DNA, 15 bp, Homo sapiens
ccagtttcagtgcca

SEQ ID NO: 1234946 - DNA, 15 bp, Homo sapiens
tccagtttcagtgcc

SEQ ID NO: 1234947 - DNA, 15 bp, Homo sapiens
ttccagtttcagtgc

SEQ ID NO: 1234948 - DNA, 15 bp, Homo sapiens
gttccagtttcagtg

SEQ ID NO: 1234949 - DNA, 15 bp, Homo sapiens
tgttccagtttcagt

SEQ ID NO: 1234950 - DNA, 15 bp, Homo sapiens
ctgttccagtttcag

SEQ ID NO: 1234951 - DNA, 15 bp, Homo sapiens
actgttccagtttca

SEQ ID NO: 1234952 - DNA, 15 bp, Homo sapiens
tactgttccagtttc

SEQ ID NO: 1234953 - DNA, 15 bp, Homo sapiens
ctactgttccagttt

SEQ ID NO: 1234954 - DNA, 15 bp, Homo sapiens
cctactgttccagtt

SEQ ID NO: 1234955 - DNA, 15 bp, Homo sapiens
ccctactgttccagt

SEQ ID NO: 1234956 - DNA, 15 bp, Homo sapiens
tccctactgttccag

SEQ ID NO: 1234957 - DNA, 15 bp, Homo sapiens
ctccctactgttcca

SEQ ID NO: 1234958 - DNA, 15 bp, Homo sapiens
actccctactgttcc

SEQ ID NO: 1234959 - DNA, 15 bp, Homo sapiens
gactccctactgttc

SEQ ID NO: 1234960 - DNA, 15 bp, Homo sapiens
tgactccctactgtt

SEQ ID NO: 1234961 - DNA, 15 bp, Homo sapiens
gtgactccctactgt

SEQ ID NO: 1234962 - DNA, 15 bp, Homo sapiens
ggtgactccctactg

SEQ ID NO: 1234963 - DNA, 15 bp, Homo sapiens
tggtgactccctact

SEQ ID NO: 1234964 - DNA, 15 bp, Homo sapiens
ttggtgactccctac

SEQ ID NO: 1234965 - DNA, 15 bp, Homo sapiens
tttggtgactcccta

SEQ ID NO: 1234966 - DNA, 15 bp, Homo sapiens
atttggtgactccct

SEQ ID NO: 1234967 - DNA, 15 bp, Homo sapiens
aatttggtgactccc

SEQ ID NO: 1234968 - DNA, 15 bp, Homo sapiens
gaatttggtgactcc

SEQ ID NO: 1234969 - DNA, 15 bp, Homo sapiens
tgaatttggtgactc

SEQ ID NO: 1234970 - DNA, 15 bp, Homo sapiens
ttgaatttggtgact

SEQ ID NO: 1234971 - DNA, 15 bp, Homo sapiens
tttgaatttggtgac

SEQ ID NO: 1234972 - DNA, 15 bp, Homo sapiens
atttgaatttggtga

SEQ ID NO: 1234973 - DNA, 15 bp, Homo sapiens
catttgaatttggtg

SEQ ID NO: 1234974 - DNA, 15 bp, Homo sapiens
tcatttgaatttggt

SEQ ID NO: 1234975 - DNA, 15 bp, Homo sapiens
ttcatttgaatttgg

SEQ ID NO: 1234976 - DNA, 15 bp, Homo sapiens
gttcatttgaatttg

SEQ ID NO: 1234977 - DNA, 15 bp, Homo sapiens
tgttcatttgaattt

SEQ ID NO: 1234978 - DNA, 15 bp, Homo sapiens
ttgttcatttgaatt

SEQ ID NO: 1234979 - DNA, 15 bp, Homo sapiens
cttgttcatttgaat

SEQ ID NO: 1234980 - DNA, 15 bp, Homo sapiens
ccttgttcatttgaa

SEQ ID NO: 1234981 - DNA, 15 bp, Homo sapiens
tccttgttcatttga

SEQ ID NO: 1234982 - DNA, 15 bp, Homo sapiens
ttccttgttcatttg

SEQ ID NO: 1234983 - DNA, 15 bp, Homo sapiens
attccttgttcattt

SEQ ID NO: 1234984 - DNA, 15 bp, Homo sapiens
tattccttgttcatt

SEQ ID NO: 1234985 - DNA, 15 bp, Homo sapiens
gtattccttgttcat

SEQ ID NO: 1234986 - DNA, 15 bp, Homo sapiens
ggtattccttgttca

SEQ ID NO: 1234987 - DNA, 15 bp, Homo sapiens
gggtattccttgttc

SEQ ID NO: 1234988 - DNA, 15 bp, Homo sapiens
ggggtattccttgtt

SEQ ID NO: 1234989 - DNA, 15 bp, Homo sapiens
tggggtattccttgt

SEQ ID NO: 1234990 - DNA, 15 bp, Homo sapiens
ttggggtattccttg

SEQ ID NO: 1234991 - DNA, 15 bp, Homo sapiens
tttggggtattcctt

SEQ ID NO: 1234992 - DNA, 15 bp, Homo sapiens
ttttggggtattcct

SEQ ID NO: 1234993 - DNA, 15 bp, Homo sapiens
attttggggtattcc

SEQ ID NO: 1234994 - DNA, 15 bp, Homo sapiens
cattttggggtattc

SEQ ID NO: 1234995 - DNA, 15 bp, Homo sapiens
ccattttggggtatt

SEQ ID NO: 1234996 - DNA, 15 bp, Homo sapiens
cccattttggggtat

SEQ ID NO: 1234997 - DNA, 15 bp, Homo sapiens
ccccattttggggta

SEQ ID NO: 1234998 - DNA, 15 bp, Homo sapiens
tccccattttggggt

SEQ ID NO: 1234999 - DNA, 15 bp, Homo sapiens
ctccccattttgggg

SEQ ID NO: 1235000 - DNA, 15 bp, Homo sapiens
tctccccattttggg

SEQ ID NO: 1235001 - DNA, 15 bp, Homo sapiens
ctctccccattttgg

SEQ ID NO: 1235002 - DNA, 15 bp, Homo sapiens
actctccccattttg

SEQ ID NO: 1235003 - DNA, 15 bp, Homo sapiens
aactctccccatttt

SEQ ID NO: 1235004 - DNA, 15 bp, Homo sapiens
gaactctccccattt

SEQ ID NO: 1235005 - DNA, 15 bp, Homo sapiens
agaactctccccatt

SEQ ID NO: 1235006 - DNA, 15 bp, Homo sapiens
gagaactctccccat

SEQ ID NO: 1235007 - DNA, 15 bp, Homo sapiens
tgagaactctcccca

SEQ ID NO: 1235008 - DNA, 15 bp, Homo sapiens
ttgagaactctcccc

SEQ ID NO: 1235009 - DNA, 15 bp, Homo sapiens
tttgagaactctccc

SEQ ID NO: 1235010 - DNA, 15 bp, Homo sapiens
ttttgagaactctcc

SEQ ID NO: 1235011 - DNA, 15 bp, Homo sapiens
gttttgagaactctc

SEQ ID NO: 1235012 - DNA, 15 bp, Homo sapiens
tgttttgagaactct

SEQ ID NO: 1235013 - DNA, 15 bp, Homo sapiens
atgttttgagaactc

SEQ ID NO: 1235014 - DNA, 15 bp, Homo sapiens
aatgttttgagaact

SEQ ID NO: 1235015 - DNA, 15 bp, Homo sapiens
aaatgttttgagaac

SEQ ID NO: 1235016 - DNA, 15 bp, Homo sapiens
aaaatgttttgagaa

SEQ ID NO: 1235017 - DNA, 15 bp, Homo sapiens
gaaaatgttttgaga

SEQ ID NO: 1235018 - DNA, 15 bp, Homo sapiens
tgaaaatgttttgag

SEQ ID NO: 1235019 - DNA, 15 bp, Homo sapiens
ttgaaaatgttttga

SEQ ID NO: 1235020 - DNA, 15 bp, Homo sapiens
gttgaaaatgttttg

SEQ ID NO: 1235021 - DNA, 15 bp, Homo sapiens
tgttgaaaatgtttt

SEQ ID NO: 1235022 - DNA, 15 bp, Homo sapiens
atgttgaaaatgttt

SEQ ID NO: 1235023 - DNA, 15 bp, Homo sapiens
aatgttgaaaatgtt

SEQ ID NO: 1235024 - DNA, 15 bp, Homo sapiens
aaatgttgaaaatgt

SEQ ID NO: 1235025 - DNA, 15 bp, Homo sapiens
gaaatgttgaaaatg

SEQ ID NO: 1235026 - DNA, 15 bp, Homo sapiens
cgaaatgttgaaaat

SEQ ID NO: 1235027 - DNA, 15 bp, Homo sapiens
ccgaaatgttgaaaa

SEQ ID NO: 1235028 - DNA, 15 bp, Homo sapiens
accgaaatgttgaaa

SEQ ID NO: 1235029 - DNA, 15 bp, Homo sapiens
taccgaaatgttgaa

SEQ ID NO: 1235030 - DNA, 15 bp, Homo sapiens
ttaccgaaatgttga

SEQ ID NO: 1235031 - DNA, 15 bp, Homo sapiens
attaccgaaatgttg

SEQ ID NO: 1235032 - DNA, 15 bp, Homo sapiens
aattaccgaaatgtt

SEQ ID NO: 1235033 - DNA, 15 bp, Homo sapiens
taattaccgaaatgt

SEQ ID NO: 1235034 - DNA, 15 bp, Homo sapiens
ttaattaccgaaatg

SEQ ID NO: 1235035 - DNA, 15 bp, Homo sapiens
attaattaccgaaat

SEQ ID NO: 1235036 - DNA, 15 bp, Homo sapiens
aattaattaccgaaa

SEQ ID NO: 1235037 - DNA, 15 bp, Homo sapiens
taattaattaccgaa

SEQ ID NO: 1235038 - DNA, 15 bp, Homo sapiens
gtaattaattaccga

SEQ ID NO: 1235039 - DNA, 15 bp, Homo sapiens
ggtaattaattaccg

SEQ ID NO: 1235040 - DNA, 15 bp, Homo sapiens
aggtaattaattacc

SEQ ID NO: 1235041 - DNA, 15 bp, Homo sapiens
gaggtaattaattac

SEQ ID NO: 1235042 - DNA, 15 bp, Homo sapiens
tgaggtaattaatta

SEQ ID NO: 1235043 - DNA, 15 bp, Homo sapiens
atgaggtaattaatt

SEQ ID NO: 1235044 - DNA, 15 bp, Homo sapiens
gatgaggtaattaat

SEQ ID NO: 1235045 - DNA, 15 bp, Homo sapiens
agatgaggtaattaa

SEQ ID NO: 1235046 - DNA, 15 bp, Homo sapiens
gagatgaggtaatta

SEQ ID NO: 1235047 - DNA, 15 bp, Homo sapiens
ggagatgaggtaatt

SEQ ID NO: 1235048 - DNA, 15 bp, Homo sapiens
tggagatgaggtaat

SEQ ID NO: 1235049 - DNA, 15 bp, Homo sapiens
ctggagatgaggtaa

SEQ ID NO: 1235050 - DNA, 15 bp, Homo sapiens
actggagatgaggta

SEQ ID NO: 1235051 - DNA, 15 bp, Homo sapiens
aactggagatgaggt

SEQ ID NO: 1235052 - DNA, 15 bp, Homo sapiens
taactggagatgagg

SEQ ID NO: 1235053 - DNA, 15 bp, Homo sapiens
ctaactggagatgag

SEQ ID NO: 1235054 - DNA, 15 bp, Homo sapiens
cctaactggagatga

SEQ ID NO: 1235055 - DNA, 15 bp, Homo sapiens
acctaactggagatg

SEQ ID NO: 1235056 - DNA, 15 bp, Homo sapiens
gacctaactggagat

SEQ ID NO: 1235057 - DNA, 15 bp, Homo sapiens
tgacctaactggaga

SEQ ID NO: 1235058 - DNA, 15 bp, Homo sapiens
ttgacctaactggag

SEQ ID NO: 1235059 - DNA, 15 bp, Homo sapiens
attgacctaactgga

SEQ ID NO: 1235060 - DNA, 15 bp, Homo sapiens
tattgacctaactgg

SEQ ID NO: 1235061 - DNA, 15 bp, Homo sapiens
atattgacctaactg

SEQ ID NO: 1235062 - DNA, 15 bp, Homo sapiens
aatattgacctaact

SEQ ID NO: 1235063 - DNA, 15 bp, Homo sapiens
gaatattgacctaac

SEQ ID NO: 1235064 - DNA, 15 bp, Homo sapiens
ggaatattgacctaa

SEQ ID NO: 1235065 - DNA, 15 bp, Homo sapiens
tggaatattgaccta

SEQ ID NO: 1235066 - DNA, 15 bp, Homo sapiens
atggaatattgacct

SEQ ID NO: 1235067 - DNA, 15 bp, Homo sapiens
tatggaatattgacc

SEQ ID NO: 1235068 - DNA, 15 bp, Homo sapiens
atatggaatattgac

SEQ ID NO: 1235069 - DNA, 15 bp, Homo sapiens
aatatggaatattga

SEQ ID NO: 1235070 - DNA, 15 bp, Homo sapiens
taatatggaatattg

SEQ ID NO: 1235071 - DNA, 15 bp, Homo sapiens
ataatatggaatatt

SEQ ID NO: 1235072 - DNA, 15 bp, Homo sapiens
aataatatggaatat

SEQ ID NO: 1235073 - DNA, 15 bp, Homo sapiens
taataatatggaata

SEQ ID NO: 1235074 - DNA, 15 bp, Homo sapiens
ttaataatatggaat

SEQ ID NO: 1235075 - DNA, 15 bp, Homo sapiens
cttaataatatggaa

SEQ ID NO: 1235076 - DNA, 15 bp, Homo sapiens
tcttaataatatgga

SEQ ID NO: 1235077 - DNA, 15 bp, Homo sapiens
gtcttaataatatgg

SEQ ID NO: 1235078 - DNA, 15 bp, Homo sapiens
tgtcttaataatatg

SEQ ID NO: 1235079 - DNA, 15 bp, Homo sapiens
gtgtcttaataatat

SEQ ID NO: 1235080 - DNA, 15 bp, Homo sapiens
ggtgtcttaataata

SEQ ID NO: 1235081 - DNA, 15 bp, Homo sapiens
aggtgtcttaataat

SEQ ID NO: 1235082 - DNA, 15 bp, Homo sapiens
aaggtgtcttaataa

SEQ ID NO: 1235083 - DNA, 15 bp, Homo sapiens
aaaggtgtcttaata

SEQ ID NO: 1235084 - DNA, 15 bp, Homo sapiens
aaaaggtgtcttaat

SEQ ID NO: 1235085 - DNA, 15 bp, Homo sapiens
taaaaggtgtcttaa

SEQ ID NO: 1235086 - DNA, 15 bp, Homo sapiens
ataaaaggtgtctta

SEQ ID NO: 1235087 - DNA, 15 bp, Homo sapiens
tataaaaggtgtctt

SEQ ID NO: 1235088 - DNA, 15 bp, Homo sapiens
ttataaaaggtgtct

SEQ ID NO: 1235089 - DNA, 15 bp, Homo sapiens
attataaaaggtgtc

SEQ ID NO: 1235090 - DNA, 15 bp, Homo sapiens
cattataaaaggtgt

SEQ ID NO: 1235091 - DNA, 15 bp, Homo sapiens
ccattataaaaggtg

SEQ ID NO: 1235092 - DNA, 15 bp, Homo sapiens
gccattataaaaggt

SEQ ID NO: 1235093 - DNA, 15 bp, Homo sapiens
tgccattataaaagg

SEQ ID NO: 1235094 - DNA, 15 bp, Homo sapiens
ttgccattataaaag

SEQ ID NO: 1235095 - DNA, 15 bp, Homo sapiens
tttgccattataaaa

SEQ ID NO: 1235096 - DNA, 15 bp, Homo sapiens
gtttgccattataaa

SEQ ID NO: 1235097 - DNA, 15 bp, Homo sapiens
agtttgccattataa

SEQ ID NO: 1235098 - DNA, 15 bp, Homo sapiens
gagtttgccattata

SEQ ID NO: 1235099 - DNA, 15 bp, Homo sapiens
agagtttgccattat

SEQ ID NO: 1235100 - DNA, 15 bp, Homo sapiens
gagagtttgccatta

SEQ ID NO: 1235101 - DNA, 15 bp, Homo sapiens
ggagagtttgccatt

SEQ ID NO: 1235102 - DNA, 15 bp, Homo sapiens
aggagagtttgccat

SEQ ID NO: 1235103 - DNA, 15 bp, Homo sapiens
caggagagtttgcca

SEQ ID NO: 1235104 - DNA, 15 bp, Homo sapiens
tcaggagagtttgcc

SEQ ID NO: 1235105 - DNA, 15 bp, Homo sapiens
gtcaggagagtttgc

SEQ ID NO: 1235106 - DNA, 15 bp, Homo sapiens
agtcaggagagtttg

SEQ ID NO: 1235107 - DNA, 15 bp, Homo sapiens
tagtcaggagagttt

SEQ ID NO: 1235108 - DNA, 15 bp, Homo sapiens
gtagtcaggagagtt

SEQ ID NO: 1235109 - DNA, 15 bp, Homo sapiens
ggtagtcaggagagt

SEQ ID NO: 1235110 - DNA, 15 bp, Homo sapiens
aggtagtcaggagag

SEQ ID NO: 1235111 - DNA, 15 bp, Homo sapiens
taggtagtcaggaga

SEQ ID NO: 1235112 - DNA, 15 bp, Homo sapiens
ataggtagtcaggag

SEQ ID NO: 1235113 - DNA, 15 bp, Homo sapiens
gataggtagtcagga

SEQ ID NO: 1235114 - DNA, 15 bp, Homo sapiens
agataggtagtcagg

SEQ ID NO: 1235115 - DNA, 15 bp, Homo sapiens
aagataggtagtcag

SEQ ID NO: 1235116 - DNA, 15 bp, Homo sapiens
taagataggtagtca

SEQ ID NO: 1235117 - DNA, 15 bp, Homo sapiens
ctaagataggtagtc

SEQ ID NO: 1235118 - DNA, 15 bp, Homo sapiens
tctaagataggtagt

SEQ ID NO: 1235119 - DNA, 15 bp, Homo sapiens
ttctaagataggtag

SEQ ID NO: 1235120 - DNA, 15 bp, Homo sapiens
attctaagataggta

SEQ ID NO: 1235121 - DNA, 15 bp, Homo sapiens
aattctaagataggt

SEQ ID NO: 1235122 - DNA, 15 bp, Homo sapiens
aaattctaagatagg

SEQ ID NO: 1235123 - DNA, 15 bp, Homo sapiens
aaaattctaagatag

SEQ ID NO: 1235124 - DNA, 15 bp, Homo sapiens
aaaaattctaagata

SEQ ID NO: 1235125 - DNA, 15 bp, Homo sapiens
aaaaaattctaagat

SEQ ID NO: 1235126 - DNA, 15 bp, Homo sapiens
aaaaaaattctaaga

SEQ ID NO: 1235127 - DNA, 15 bp, Homo sapiens
caaaaaaattctaag

SEQ ID NO: 1235128 - DNA, 15 bp, Homo sapiens
tcaaaaaaattctaa

SEQ ID NO: 1235129 - DNA, 15 bp, Homo sapiens
ttcaaaaaaattcta

SEQ ID NO: 1235130 - DNA, 15 bp, Homo sapiens
cttcaaaaaaattct

SEQ ID NO: 1235131 - DNA, 15 bp, Homo sapiens
acttcaaaaaaattc

SEQ ID NO: 1235132 - DNA, 15 bp, Homo sapiens
gacttcaaaaaaatt

SEQ ID NO: 1235133 - DNA, 15 bp, Homo sapiens
tgacttcaaaaaaat

SEQ ID NO: 1235134 - DNA, 15 bp, Homo sapiens
gtgacttcaaaaaaa

SEQ ID NO: 1235135 - DNA, 15 bp, Homo sapiens
agtgacttcaaaaaa

SEQ ID NO: 1235136 - DNA, 15 bp, Homo sapiens
tagtgacttcaaaaa

SEQ ID NO: 1235137 - DNA, 15 bp, Homo sapiens
gtagtgacttcaaaa

SEQ ID NO: 1235138 - DNA, 15 bp, Homo sapiens
agtagtgacttcaaa

SEQ ID NO: 1235139 - DNA, 15 bp, Homo sapiens
aagtagtgacttcaa

SEQ ID NO: 1235140 - DNA, 15 bp, Homo sapiens
taagtagtgacttca

SEQ ID NO: 1235141 - DNA, 15 bp, Homo sapiens
gtaagtagtgacttc

SEQ ID NO: 1235142 - DNA, 15 bp, Homo sapiens
tgtaagtagtgactt

SEQ ID NO: 1235143 - DNA, 15 bp, Homo sapiens
ctgtaagtagtgact

SEQ ID NO: 1235144 - DNA, 15 bp, Homo sapiens
actgtaagtagtgac

SEQ ID NO: 1235145 - DNA, 15 bp, Homo sapiens
cactgtaagtagtga

SEQ ID NO: 1235146 - DNA, 15 bp, Homo sapiens
acactgtaagtagtg

SEQ ID NO: 1235147 - DNA, 15 bp, Homo sapiens
tacactgtaagtagt

SEQ ID NO: 1235148 - DNA, 15 bp, Homo sapiens
ctacactgtaagtag

SEQ ID NO: 1235149 - DNA, 15 bp, Homo sapiens
tctacactgtaagta

SEQ ID NO: 1235150 - DNA, 15 bp, Homo sapiens
atctacactgtaagt

SEQ ID NO: 1235151 - DNA, 15 bp, Homo sapiens
tatctacactgtaag

SEQ ID NO: 1235152 - DNA, 15 bp, Homo sapiens
atatctacactgtaa

SEQ ID NO: 1235153 - DNA, 15 bp, Homo sapiens
aatatctacactgta

SEQ ID NO: 1235154 - DNA, 15 bp, Homo sapiens
taatatctacactgt

SEQ ID NO: 1235155 - DNA, 15 bp, Homo sapiens
ttaatatctacactg

SEQ ID NO: 1235156 - DNA, 15 bp, Homo sapiens
gttaatatctacact

SEQ ID NO: 1235157 - DNA, 15 bp, Homo sapiens
tgttaatatctacac

SEQ ID NO: 1235158 - DNA, 15 bp, Homo sapiens
ctgttaatatctaca

SEQ ID NO: 1235159 - DNA, 15 bp, Homo sapiens
cctgttaatatctac

SEQ ID NO: 1235160 - DNA, 15 bp, Homo sapiens
gcctgttaatatcta

SEQ ID NO: 1235161 - DNA, 15 bp, Homo sapiens
tgcctgttaatatct

SEQ ID NO: 1235162 - DNA, 15 bp, Homo sapiens
atgcctgttaatatc

SEQ ID NO: 1235163 - DNA, 15 bp, Homo sapiens
catgcctgttaatat

SEQ ID NO: 1235164 - DNA, 15 bp, Homo sapiens
tcatgcctgttaata

SEQ ID NO: 1235165 - DNA, 15 bp, Homo sapiens
ctcatgcctgttaat

SEQ ID NO: 1235166 - DNA, 15 bp, Homo sapiens
tctcatgcctgttaa

SEQ ID NO: 1235167 - DNA, 15 bp, Homo sapiens
atctcatgcctgtta

SEQ ID NO: 1235168 - DNA, 15 bp, Homo sapiens
aatctcatgcctgtt

SEQ ID NO: 1235169 - DNA, 15 bp, Homo sapiens
gaatctcatgcctgt

SEQ ID NO: 1235170 - DNA, 15 bp, Homo sapiens
tgaatctcatgcctg

SEQ ID NO: 1235171 - DNA, 15 bp, Homo sapiens
ttgaatctcatgcct

SEQ ID NO: 1235172 - DNA, 15 bp, Homo sapiens
attgaatctcatgcc

SEQ ID NO: 1235173 - DNA, 15 bp, Homo sapiens
tattgaatctcatgc

SEQ ID NO: 1235174 - DNA, 15 bp, Homo sapiens
atattgaatctcatg

SEQ ID NO: 1235175 - DNA, 15 bp, Homo sapiens
tatattgaatctcat

SEQ ID NO: 1235176 - DNA, 15 bp, Homo sapiens
ctatattgaatctca

SEQ ID NO: 1235177 - DNA, 15 bp, Homo sapiens
cctatattgaatctc

SEQ ID NO: 1235178 - DNA, 15 bp, Homo sapiens
ccctatattgaatct

SEQ ID NO: 1235179 - DNA, 15 bp, Homo sapiens
tccctatattgaatc

SEQ ID NO: 1235180 - DNA, 15 bp, Homo sapiens
atccctatattgaat

SEQ ID NO: 1235181 - DNA, 15 bp, Homo sapiens
gatccctatattgaa

SEQ ID NO: 1235182 - DNA, 15 bp, Homo sapiens
tgatccctatattga

SEQ ID NO: 1235183 - DNA, 15 bp, Homo sapiens
gtgatccctatattg

SEQ ID NO: 1235184 - DNA, 15 bp, Homo sapiens
agtgatccctatatt

SEQ ID NO: 1235185 - DNA, 15 bp, Homo sapiens
aagtgatccctatat

SEQ ID NO: 1235186 - DNA, 15 bp, Homo sapiens
aaagtgatccctata

SEQ ID NO: 1235187 - DNA, 15 bp, Homo sapiens
aaaagtgatccctat

SEQ ID NO: 1235188 - DNA, 15 bp, Homo sapiens
taaaagtgatcccta

SEQ ID NO: 1235189 - DNA, 15 bp, Homo sapiens
ataaaagtgatccct

SEQ ID NO: 1235190 - DNA, 15 bp, Homo sapiens
aataaaagtgatccc

SEQ ID NO: 1235191 - DNA, 15 bp, Homo sapiens
aaataaaagtgatcc

SEQ ID NO: 1235192 - DNA, 15 bp, Homo sapiens
gaaataaaagtgatc

SEQ ID NO: 1235193 - DNA, 15 bp, Homo sapiens
tgaaataaaagtgat

SEQ ID NO: 1235194 - DNA, 15 bp, Homo sapiens
ttgaaataaaagtga

SEQ ID NO: 1235195 - DNA, 15 bp, Homo sapiens
tttgaaataaaagtg

SEQ ID NO: 1235196 - DNA, 15 bp, Homo sapiens
gtttgaaataaaagt

SEQ ID NO: 1235197 - DNA, 15 bp, Homo sapiens
tgtttgaaataaaag

SEQ ID NO: 1235198 - DNA, 15 bp, Homo sapiens
ttgtttgaaataaaa

SEQ ID NO: 1235199 - DNA, 15 bp, Homo sapiens
attgtttgaaataaa

SEQ ID NO: 1235200 - DNA, 15 bp, Homo sapiens
aattgtttgaaataa

SEQ ID NO: 1235201 - DNA, 15 bp, Homo sapiens
taattgtttgaaata

SEQ ID NO: 1235202 - DNA, 15 bp, Homo sapiens
ttaattgtttgaaat

SEQ ID NO: 1235203 - DNA, 15 bp, Homo sapiens
tttaattgtttgaaa

SEQ ID NO: 1235204 - DNA, 15 bp, Homo sapiens
atttaattgtttgaa

SEQ ID NO: 1235205 - DNA, 15 bp, Homo sapiens
tatttaattgtttga

SEQ ID NO: 1235206 - DNA, 15 bp, Homo sapiens
gtatttaattgtttg

SEQ ID NO: 1235207 - DNA, 15 bp, Homo sapiens
tgtatttaattgttt

SEQ ID NO: 1235208 - DNA, 15 bp, Homo sapiens
ttgtatttaattgtt

SEQ ID NO: 1235209 - DNA, 15 bp, Homo sapiens
tttgtatttaattgt

SEQ ID NO: 1235210 - DNA, 15 bp, Homo sapiens
gtttgtatttaattg

SEQ ID NO: 1235211 - DNA, 15 bp, Homo sapiens
ggtttgtatttaatt

SEQ ID NO: 1235212 - DNA, 15 bp, Homo sapiens
tggtttgtatttaat

SEQ ID NO: 1235213 - DNA, 15 bp, Homo sapiens
ttggtttgtatttaa

SEQ ID NO: 1235214 - DNA, 15 bp, Homo sapiens
attggtttgtattta

SEQ ID NO: 1235215 - DNA, 15 bp, Homo sapiens
tattggtttgtattt

SEQ ID NO: 1235216 - DNA, 15 bp, Homo sapiens
atattggtttgtatt

SEQ ID NO: 1235217 - DNA, 15 bp, Homo sapiens
aatattggtttgtat

SEQ ID NO: 1235218 - DNA, 15 bp, Homo sapiens
aaatattggtttgta

SEQ ID NO: 1235219 - DNA, 15 bp, Homo sapiens
aaaatattggtttgt

SEQ ID NO: 1235220 - DNA, 15 bp, Homo sapiens
taaaatattggtttg

SEQ ID NO: 1235221 - DNA, 15 bp, Homo sapiens
gtaaaatattggttt

SEQ ID NO: 1235222 - DNA, 15 bp, Homo sapiens
ggtaaaatattggtt

SEQ ID NO: 1235223 - DNA, 15 bp, Homo sapiens
gggtaaaatattggt

SEQ ID NO: 1235224 - DNA, 15 bp, Homo sapiens
ggggtaaaatattgg

SEQ ID NO: 1235225 - DNA, 15 bp, Homo sapiens
aggggtaaaatattg

SEQ ID NO: 1235226 - DNA, 15 bp, Homo sapiens
aaggggtaaaatatt

SEQ ID NO: 1235227 - DNA, 15 bp, Homo sapiens
gaaggggtaaaatat

SEQ ID NO: 1235228 - DNA, 15 bp, Homo sapiens
tgaaggggtaaaata

SEQ ID NO: 1235229 - DNA, 15 bp, Homo sapiens
atgaaggggtaaaat

SEQ ID NO: 1235230 - DNA, 15 bp, Homo sapiens
tatgaaggggtaaaa

SEQ ID NO: 1235231 - DNA, 15 bp, Homo sapiens
ctatgaaggggtaaa

SEQ ID NO: 1235232 - DNA, 15 bp, Homo sapiens
tctatgaaggggtaa

SEQ ID NO: 1235233 - DNA, 15 bp, Homo sapiens
atctatgaaggggta

SEQ ID NO: 1235234 - DNA, 15 bp, Homo sapiens
catctatgaaggggt

SEQ ID NO: 1235235 - DNA, 15 bp, Homo sapiens
tcatctatgaagggg

SEQ ID NO: 1235236 - DNA, 15 bp, Homo sapiens
ttcatctatgaaggg

SEQ ID NO: 1235237 - DNA, 15 bp, Homo sapiens
tttcatctatgaagg

SEQ ID NO: 1235238 - DNA, 15 bp, Homo sapiens
atttcatctatgaag

SEQ ID NO: 1235239 - DNA, 15 bp, Homo sapiens
gatttcatctatgaa

SEQ ID NO: 1235240 - DNA, 15 bp, Homo sapiens
tgatttcatctatga

SEQ ID NO: 1235241 - DNA, 15 bp, Homo sapiens
gtgatttcatctatg

SEQ ID NO: 1235242 - DNA, 15 bp, Homo sapiens
tgtgatttcatctat

SEQ ID NO: 1235243 - DNA, 15 bp, Homo sapiens
atgtgatttcatcta

SEQ ID NO: 1235244 - DNA, 15 bp, Homo sapiens
gatgtgatttcatct

SEQ ID NO: 1235245 - DNA, 15 bp, Homo sapiens
agatgtgatttcatc

SEQ ID NO: 1235246 - DNA, 15 bp, Homo sapiens
aagatgtgatttcat

SEQ ID NO: 1235247 - DNA, 15 bp, Homo sapiens
aaagatgtgatttca

SEQ ID NO: 1235248 - DNA, 15 bp, Homo sapiens
aaaagatgtgatttc

SEQ ID NO: 1235249 - DNA, 15 bp, Homo sapiens
gaaaagatgtgattt

SEQ ID NO: 1235250 - DNA, 15 bp, Homo sapiens
tgaaaagatgtgatt

SEQ ID NO: 1235251 - DNA, 15 bp, Homo sapiens
ctgaaaagatgtgat

SEQ ID NO: 1235252 - DNA, 15 bp, Homo sapiens
cctgaaaagatgtga

SEQ ID NO: 1235253 - DNA, 15 bp, Homo sapiens
tcctgaaaagatgtg

SEQ ID NO: 1235254 - DNA, 15 bp, Homo sapiens
atcctgaaaagatgt

SEQ ID NO: 1235255 - DNA, 15 bp, Homo sapiens
tatcctgaaaagatg

SEQ ID NO: 1235256 - DNA, 15 bp, Homo sapiens
atatcctgaaaagat

SEQ ID NO: 1235257 - DNA, 15 bp, Homo sapiens
catatcctgaaaaga

SEQ ID NO: 1235258 - DNA, 15 bp, Homo sapiens
tcatatcctgaaaag

SEQ ID NO: 1235259 - DNA, 15 bp, Homo sapiens
ctcatatcctgaaaa

SEQ ID NO: 1235260 - DNA, 15 bp, Homo sapiens
actcatatcctgaaa

SEQ ID NO: 1235261 - DNA, 15 bp, Homo sapiens
tactcatatcctgaa

SEQ ID NO: 1235262 - DNA, 15 bp, Homo sapiens
atactcatatcctga

SEQ ID NO: 1235263 - DNA, 15 bp, Homo sapiens
tatactcatatcctg

SEQ ID NO: 1235264 - DNA, 15 bp, Homo sapiens
ttatactcatatcct

SEQ ID NO: 1235265 - DNA, 15 bp, Homo sapiens
tttatactcatatcc

SEQ ID NO: 1235266 - DNA, 15 bp, Homo sapiens
ctttatactcatatc

SEQ ID NO: 1235267 - DNA, 15 bp, Homo sapiens
actttatactcatat

SEQ ID NO: 1235268 - DNA, 15 bp, Homo sapiens
tactttatactcata

SEQ ID NO: 1235269 - DNA, 15 bp, Homo sapiens
ttactttatactcat

SEQ ID NO: 1235270 - DNA, 15 bp, Homo sapiens
gttactttatactca

SEQ ID NO: 1235271 - DNA, 15 bp, Homo sapiens
tgttactttatactc

SEQ ID NO: 1235272 - DNA, 15 bp, Homo sapiens
ttgttactttatact

SEQ ID NO: 1235273 - DNA, 15 bp, Homo sapiens
cttgttactttatac

SEQ ID NO: 1235274 - DNA, 15 bp, Homo sapiens
gcttgttactttata

SEQ ID NO: 1235275 - DNA, 15 bp, Homo sapiens
ggcttgttactttat

SEQ ID NO: 1235276 - DNA, 15 bp, Homo sapiens
aggcttgttacttta

SEQ ID NO: 1235277 - DNA, 15 bp, Homo sapiens
taggcttgttacttt

SEQ ID NO: 1235278 - DNA, 15 bp, Homo sapiens
ctaggcttgttactt

SEQ ID NO: 1235279 - DNA, 15 bp, Homo sapiens
cctaggcttgttact

SEQ ID NO: 1235280 - DNA, 15 bp, Homo sapiens
ccctaggcttgttac

SEQ ID NO: 1235281 - DNA, 15 bp, Homo sapiens
gccctaggcttgtta

SEQ ID NO: 1235282 - DNA, 15 bp, Homo sapiens
tgccctaggcttgtt

SEQ ID NO: 1235283 - DNA, 15 bp, Homo sapiens
ctgccctaggcttgt

SEQ ID NO: 1235284 - DNA, 15 bp, Homo sapiens
tctgccctaggcttg

SEQ ID NO: 1235285 - DNA, 15 bp, Homo sapiens
ctctgccctaggctt

SEQ ID NO: 1235286 - DNA, 15 bp, Homo sapiens
gctctgccctaggct

SEQ ID NO: 1235287 - DNA, 15 bp, Homo sapiens
agctctgccctaggc

SEQ ID NO: 1235288 - DNA, 15 bp, Homo sapiens
aagctctgccctagg

SEQ ID NO: 1235289 - DNA, 15 bp, Homo sapiens
caagctctgccctag

SEQ ID NO: 1235290 - DNA, 15 bp, Homo sapiens
acaagctctgcccta

SEQ ID NO: 1235291 - DNA, 15 bp, Homo sapiens
tacaagctctgccct

SEQ ID NO: 1235292 - DNA, 15 bp, Homo sapiens
gtacaagctctgccc

SEQ ID NO: 1235293 - DNA, 15 bp, Homo sapiens
agtacaagctctgcc

SEQ ID NO: 1235294 - DNA, 15 bp, Homo sapiens
cagtacaagctctgc

SEQ ID NO: 1235295 - DNA, 15 bp, Homo sapiens
tcagtacaagctctg

SEQ ID NO: 1235296 - DNA, 15 bp, Homo sapiens
gtcagtacaagctct

SEQ ID NO: 1235297 - DNA, 15 bp, Homo sapiens
tgtcagtacaagctc

SEQ ID NO: 1235298 - DNA, 15 bp, Homo sapiens
ttgtcagtacaagct

SEQ ID NO: 1235299 - DNA, 15 bp, Homo sapiens
tttgtcagtacaagc

SEQ ID NO: 1235300 - DNA, 15 bp, Homo sapiens
ctttgtcagtacaag

SEQ ID NO: 1235301 - DNA, 15 bp, Homo sapiens
actttgtcagtacaa

SEQ ID NO: 1235302 - DNA, 15 bp, Homo sapiens
gactttgtcagtaca

SEQ ID NO: 1235303 - DNA, 15 bp, Homo sapiens
ggactttgtcagtac

SEQ ID NO: 1235304 - DNA, 15 bp, Homo sapiens
aggactttgtcagta

SEQ ID NO: 1235305 - DNA, 15 bp, Homo sapiens
caggactttgtcagt

SEQ ID NO: 1235306 - DNA, 15 bp, Homo sapiens
tcaggactttgtcag

SEQ ID NO: 1235307 - DNA, 15 bp, Homo sapiens
ttcaggactttgtca

SEQ ID NO: 1235308 - DNA, 15 bp, Homo sapiens
tttcaggactttgtc

SEQ ID NO: 1235309 - DNA, 15 bp, Homo sapiens
gtttcaggactttgt

SEQ ID NO: 1235310 - DNA, 15 bp, Homo sapiens
agtttcaggactttg

SEQ ID NO: 1235311 - DNA, 15 bp, Homo sapiens
tagtttcaggacttt

SEQ ID NO: 1235312 - DNA, 15 bp, Homo sapiens
gtagtttcaggactt

SEQ ID NO: 1235313 - DNA, 15 bp, Homo sapiens
tgtagtttcaggact

SEQ ID NO: 1235314 - DNA, 15 bp, Homo sapiens
ttgtagtttcaggac

SEQ ID NO: 1235315 - DNA, 15 bp, Homo sapiens
attgtagtttcagga

SEQ ID NO: 1235316 - DNA, 15 bp, Homo sapiens
cattgtagtttcagg

SEQ ID NO: 1235317 - DNA, 15 bp, Homo sapiens
tcattgtagtttcag

SEQ ID NO: 1235318 - DNA, 15 bp, Homo sapiens
ctcattgtagtttca

SEQ ID NO: 1235319 - DNA, 15 bp, Homo sapiens
tctcattgtagtttc

SEQ ID NO: 1235320 - DNA, 15 bp, Homo sapiens
ctctcattgtagttt

SEQ ID NO: 1235321 - DNA, 15 bp, Homo sapiens
cctctcattgtagtt

SEQ ID NO: 1235322 - DNA, 15 bp, Homo sapiens
tcctctcattgtagt

SEQ ID NO: 1235323 - DNA, 15 bp, Homo sapiens
ttcctctcattgtag

SEQ ID NO: 1235324 - DNA, 15 bp, Homo sapiens
tttcctctcattgta

SEQ ID NO: 1235325 - DNA, 15 bp, Homo sapiens
gtttcctctcattgt

SEQ ID NO: 1235326 - DNA, 15 bp, Homo sapiens
tgtttcctctcattg

SEQ ID NO: 1235327 - DNA, 15 bp, Homo sapiens
gtgtttcctctcatt

SEQ ID NO: 1235328 - DNA, 15 bp, Homo sapiens
tgtgtttcctctcat

SEQ ID NO: 1235329 - DNA, 15 bp, Homo sapiens
atgtgtttcctctca

SEQ ID NO: 1235330 - DNA, 15 bp, Homo sapiens
aatgtgtttcctctc

SEQ ID NO: 1235331 - DNA, 15 bp, Homo sapiens
caatgtgtttcctct

SEQ ID NO: 1235332 - DNA, 15 bp, Homo sapiens
gcaatgtgtttcctc

SEQ ID NO: 1235333 - DNA, 15 bp, Homo sapiens
agcaatgtgtttcct

SEQ ID NO: 1235334 - DNA, 15 bp, Homo sapiens
gagcaatgtgtttcc

SEQ ID NO: 1235335 - DNA, 15 bp, Homo sapiens
agagcaatgtgtttc

SEQ ID NO: 1235336 - DNA, 15 bp, Homo sapiens
tagagcaatgtgttt

SEQ ID NO: 1235337 - DNA, 15 bp, Homo sapiens
gtagagcaatgtgtt

SEQ ID NO: 1235338 - DNA, 15 bp, Homo sapiens
agtagagcaatgtgt

SEQ ID NO: 1235339 - DNA, 15 bp, Homo sapiens
aagtagagcaatgtg

SEQ ID NO: 1235340 - DNA, 15 bp, Homo sapiens
gaagtagagcaatgt

SEQ ID NO: 1235341 - DNA, 15 bp, Homo sapiens
cgaagtagagcaatg

SEQ ID NO: 1235342 - DNA, 15 bp, Homo sapiens
ccgaagtagagcaat

SEQ ID NO: 1235343 - DNA, 15 bp, Homo sapiens
cccgaagtagagcaa

SEQ ID NO: 1235344 - DNA, 15 bp, Homo sapiens
tcccgaagtagagca

SEQ ID NO: 1235345 - DNA, 15 bp, Homo sapiens
atcccgaagtagagc

SEQ ID NO: 1235346 - DNA, 15 bp, Homo sapiens
tatcccgaagtagag

SEQ ID NO: 1235347 - DNA, 15 bp, Homo sapiens
ttatcccgaagtaga

SEQ ID NO: 1235348 - DNA, 15 bp, Homo sapiens
cttatcccgaagtag

SEQ ID NO: 1235349 - DNA, 15 bp, Homo sapiens
acttatcccgaagta

SEQ ID NO: 1235350 - DNA, 15 bp, Homo sapiens
gacttatcccgaagt

SEQ ID NO: 1235351 - DNA, 15 bp, Homo sapiens
tgacttatcccgaag

SEQ ID NO: 1235352 - DNA, 15 bp, Homo sapiens
atgacttatcccgaa

SEQ ID NO: 1235353 - DNA, 15 bp, Homo sapiens
catgacttatcccga

SEQ ID NO: 1235354 - DNA, 15 bp, Homo sapiens
tcatgacttatcccg

SEQ ID NO: 1235355 - DNA, 15 bp, Homo sapiens
gtcatgacttatccc

SEQ ID NO: 1235356 - DNA, 15 bp, Homo sapiens
ggtcatgacttatcc

SEQ ID NO: 1235357 - DNA, 15 bp, Homo sapiens
cggtcatgacttatc

SEQ ID NO: 1235358 - DNA, 15 bp, Homo sapiens
tcggtcatgacttat

SEQ ID NO: 1235359 - DNA, 15 bp, Homo sapiens
ctcggtcatgactta

SEQ ID NO: 1235360 - DNA, 15 bp, Homo sapiens
tctcggtcatgactt

SEQ ID NO: 1235361 - DNA, 15 bp, Homo sapiens
gtctcggtcatgact

SEQ ID NO: 1235362 - DNA, 15 bp, Homo sapiens
agtctcggtcatgac

SEQ ID NO: 1235363 - DNA, 15 bp, Homo sapiens
gagtctcggtcatga

SEQ ID NO: 1235364 - DNA, 15 bp, Homo sapiens
tgagtctcggtcatg

SEQ ID NO: 1235365 - DNA, 15 bp, Homo sapiens
ttgagtctcggtcat

SEQ ID NO: 1235366 - DNA, 15 bp, Homo sapiens
attgagtctcggtca

SEQ ID NO: 1235367 - DNA, 15 bp, Homo sapiens
aattgagtctcggtc

SEQ ID NO: 1235368 - DNA, 15 bp, Homo sapiens
aaattgagtctcggt

SEQ ID NO: 1235369 - DNA, 15 bp, Homo sapiens
gaaattgagtctcgg

SEQ ID NO: 1235370 - DNA, 15 bp, Homo sapiens
tgaaattgagtctcg

SEQ ID NO: 1235371 - DNA, 15 bp, Homo sapiens
ctgaaattgagtctc

SEQ ID NO: 1235372 - DNA, 15 bp, Homo sapiens
tctgaaattgagtct

SEQ ID NO: 1235373 - DNA, 15 bp, Homo sapiens
ctctgaaattgagtc

SEQ ID NO: 1235374 - DNA, 15 bp, Homo sapiens
tctctgaaattgagt

SEQ ID NO: 1235375 - DNA, 15 bp, Homo sapiens
gtctctgaaattgag

SEQ ID NO: 1235376 - DNA, 15 bp, Homo sapiens
cgtctctgaaattga

SEQ ID NO: 1235377 - DNA, 15 bp, Homo sapiens
gcgtctctgaaattg

SEQ ID NO: 1235378 - DNA, 15 bp, Homo sapiens
agcgtctctgaaatt

SEQ ID NO: 1235379 - DNA, 15 bp, Homo sapiens
gagcgtctctgaaat

SEQ ID NO: 1235380 - DNA, 15 bp, Homo sapiens
agagcgtctctgaaa

SEQ ID NO: 1235381 - DNA, 15 bp, Homo sapiens
tagagcgtctctgaa

SEQ ID NO: 1235382 - DNA, 15 bp, Homo sapiens
atagagcgtctctga

SEQ ID NO: 1235383 - DNA, 15 bp, Homo sapiens
catagagcgtctctg

SEQ ID NO: 1235384 - DNA, 15 bp, Homo sapiens
tcatagagcgtctct

SEQ ID NO: 1235385 - DNA, 15 bp, Homo sapiens
ttcatagagcgtctc

SEQ ID NO: 1235386 - DNA, 15 bp, Homo sapiens
gttcatagagcgtct

SEQ ID NO: 1235387 - DNA, 15 bp, Homo sapiens
tgttcatagagcgtc

SEQ ID NO: 1235388 - DNA, 15 bp, Homo sapiens
ctgttcatagagcgt

SEQ ID NO: 1235389 - DNA, 15 bp, Homo sapiens
tctgttcatagagcg

SEQ ID NO: 1235390 - DNA, 15 bp, Homo sapiens
ctctgttcatagagc

SEQ ID NO: 1235391 - DNA, 15 bp, Homo sapiens
cctctgttcatagag

SEQ ID NO: 1235392 - DNA, 15 bp, Homo sapiens
acctctgttcataga

SEQ ID NO: 1235393 - DNA, 15 bp, Homo sapiens
cacctctgttcatag

SEQ ID NO: 1235394 - DNA, 15 bp, Homo sapiens
gcacctctgttcata

SEQ ID NO: 1235395 - DNA, 15 bp, Homo sapiens
agcacctctgttcat

SEQ ID NO: 1235396 - DNA, 15 bp, Homo sapiens
aagcacctctgttca

SEQ ID NO: 1235397 - DNA, 15 bp, Homo sapiens
caagcacctctgttc

SEQ ID NO: 1235398 - DNA, 15 bp, Homo sapiens
tcaagcacctctgtt

SEQ ID NO: 1235399 - DNA, 15 bp, Homo sapiens
ttcaagcacctctgt

SEQ ID NO: 1235400 - DNA, 15 bp, Homo sapiens
cttcaagcacctctg

SEQ ID NO: 1235401 - DNA, 15 bp, Homo sapiens
gcttcaagcacctct

SEQ ID NO: 1235402 - DNA, 15 bp, Homo sapiens
ggcttcaagcacctc

SEQ ID NO: 1235403 - DNA, 15 bp, Homo sapiens
tggcttcaagcacct

SEQ ID NO: 1235404 - DNA, 15 bp, Homo sapiens
gtggcttcaagcacc

SEQ ID NO: 1235405 - DNA, 15 bp, Homo sapiens
tgtggcttcaagcac

SEQ ID NO: 1235406 - DNA, 15 bp, Homo sapiens
ctgtggcttcaagca

SEQ ID NO: 1235407 - DNA, 15 bp, Homo sapiens
actgtggcttcaagc

SEQ ID NO: 1235408 - DNA, 15 bp, Homo sapiens
cactgtggcttcaag

SEQ ID NO: 1235409 - DNA, 15 bp, Homo sapiens
ccactgtggcttcaa

SEQ ID NO: 1235410 - DNA, 15 bp, Homo sapiens
gccactgtggcttca

SEQ ID NO: 1235411 - DNA, 15 bp, Homo sapiens
tgccactgtggcttc

SEQ ID NO: 1235412 - DNA, 15 bp, Homo sapiens
ctgccactgtggctt

SEQ ID NO: 1235413 - DNA, 15 bp, Homo sapiens
tctgccactgtggct

SEQ ID NO: 1235414 - DNA, 15 bp, Homo sapiens
ttctgccactgtggc

SEQ ID NO: 1235415 - DNA, 15 bp, Homo sapiens
cttctgccactgtgg

SEQ ID NO: 1235416 - DNA, 15 bp, Homo sapiens
ccttctgccactgtg

SEQ ID NO: 1235417 - DNA, 15 bp, Homo sapiens
cccttctgccactgt

SEQ ID NO: 1235418 - DNA, 15 bp, Homo sapiens
tcccttctgccactg

SEQ ID NO: 1235419 - DNA, 15 bp, Homo sapiens
ttcccttctgccact

SEQ ID NO: 1235420 - DNA, 15 bp, Homo sapiens
tttcccttctgccac

SEQ ID NO: 1235421 - DNA, 15 bp, Homo sapiens
ctttcccttctgcca

SEQ ID NO: 1235422 - DNA, 15 bp, Homo sapiens
tctttcccttctgcc

SEQ ID NO: 1235423 - DNA, 15 bp, Homo sapiens
atctttcccttctgc

SEQ ID NO: 1235424 - DNA, 15 bp, Homo sapiens
catctttcccttctg

SEQ ID NO: 1235425 - DNA, 15 bp, Homo sapiens
ccatctttcccttct

SEQ ID NO: 1235426 - DNA, 15 bp, Homo sapiens
cccatctttcccttc

SEQ ID NO: 1235427 - DNA, 15 bp, Homo sapiens
ccccatctttccctt

SEQ ID NO: 1235428 - DNA, 15 bp, Homo sapiens
tccccatctttccct

SEQ ID NO: 1235429 - DNA, 15 bp, Homo sapiens
ttccccatctttccc

SEQ ID NO: 1235430 - DNA, 15 bp, Homo sapiens
cttccccatctttcc

SEQ ID NO: 1235431 - DNA, 15 bp, Homo sapiens
acttccccatctttc

SEQ ID NO: 1235432 - DNA, 15 bp, Homo sapiens
cacttccccatcttt

SEQ ID NO: 1235433 - DNA, 15 bp, Homo sapiens
acacttccccatctt

SEQ ID NO: 1235434 - DNA, 15 bp, Homo sapiens
cacacttccccatct

SEQ ID NO: 1235435 - DNA, 15 bp, Homo sapiens
gcacacttccccatc

SEQ ID NO: 1235436 - DNA, 15 bp, Homo sapiens
ggcacacttccccat

SEQ ID NO: 1235437 - DNA, 15 bp, Homo sapiens
cggcacacttcccca

SEQ ID NO: 1235438 - DNA, 15 bp, Homo sapiens
tcggcacacttcccc

SEQ ID NO: 1235439 - DNA, 15 bp, Homo sapiens
ttcggcacacttccc

SEQ ID NO: 1235440 - DNA, 15 bp, Homo sapiens
cttcggcacacttcc

SEQ ID NO: 1235441 - DNA, 15 bp, Homo sapiens
tcttcggcacacttc

SEQ ID NO: 1235442 - DNA, 15 bp, Homo sapiens
ctcttcggcacactt

SEQ ID NO: 1235443 - DNA, 15 bp, Homo sapiens
gctcttcggcacact

SEQ ID NO: 1235444 - DNA, 15 bp, Homo sapiens
ggctcttcggcacac

SEQ ID NO: 1235445 - DNA, 15 bp, Homo sapiens
aggctcttcggcaca

SEQ ID NO: 1235446 - DNA, 15 bp, Homo sapiens
gaggctcttcggcac

SEQ ID NO: 1235447 - DNA, 15 bp, Homo sapiens
ggaggctcttcggca

SEQ ID NO: 1235448 - DNA, 15 bp, Homo sapiens
tggaggctcttcggc

SEQ ID NO: 1235449 - DNA, 15 bp, Homo sapiens
ctggaggctcttcgg

SEQ ID NO: 1235450 - DNA, 15 bp, Homo sapiens
cctggaggctcttcg

SEQ ID NO: 1235451 - DNA, 15 bp, Homo sapiens
gcctggaggctcttc

SEQ ID NO: 1235452 - DNA, 15 bp, Homo sapiens
tgcctggaggctctt

SEQ ID NO: 1235453 - DNA, 15 bp, Homo sapiens
atgcctggaggctct

SEQ ID NO: 1235454 - DNA, 15 bp, Homo sapiens
catgcctggaggctc

SEQ ID NO: 1235455 - DNA, 15 bp, Homo sapiens
tcatgcctggaggct

SEQ ID NO: 1235456 - DNA, 15 bp, Homo sapiens
gtcatgcctggaggc

SEQ ID NO: 1235457 - DNA, 15 bp, Homo sapiens
tgtcatgcctggagg

SEQ ID NO: 1235458 - DNA, 15 bp, Homo sapiens
ctgtcatgcctggag

SEQ ID NO: 1235459 - DNA, 15 bp, Homo sapiens
tctgtcatgcctgga

SEQ ID NO: 1235460 - DNA, 15 bp, Homo sapiens
gtctgtcatgcctgg

SEQ ID NO: 1235461 - DNA, 15 bp, Homo sapiens
tgtctgtcatgcctg

SEQ ID NO: 1235462 - DNA, 15 bp, Homo sapiens
ctgtctgtcatgcct

SEQ ID NO: 1235463 - DNA, 15 bp, Homo sapiens
actgtctgtcatgcc

SEQ ID NO: 1235464 - DNA, 15 bp, Homo sapiens
gactgtctgtcatgc

SEQ ID NO: 1235465 - DNA, 15 bp, Homo sapiens
ggactgtctgtcatg

SEQ ID NO: 1235466 - DNA, 15 bp, Homo sapiens
gggactgtctgtcat

SEQ ID NO: 1235467 - DNA, 15 bp, Homo sapiens
ggggactgtctgtca

SEQ ID NO: 1235468 - DNA, 15 bp, Homo sapiens
aggggactgtctgtc

SEQ ID NO: 1235469 - DNA, 15 bp, Homo sapiens
caggggactgtctgt

SEQ ID NO: 1235470 - DNA, 15 bp, Homo sapiens
tcaggggactgtctg

SEQ ID NO: 1235471 - DNA, 15 bp, Homo sapiens
gtcaggggactgtct

SEQ ID NO: 1235472 - DNA, 15 bp, Homo sapiens
ggtcaggggactgtc

SEQ ID NO: 1235473 - DNA, 15 bp, Homo sapiens
tggtcaggggactgt

SEQ ID NO: 1235474 - DNA, 15 bp, Homo sapiens
ttggtcaggggactg

SEQ ID NO: 1235475 - DNA, 15 bp, Homo sapiens
cttggtcaggggact

SEQ ID NO: 1235476 - DNA, 15 bp, Homo sapiens
gcttggtcaggggac

SEQ ID NO: 1235477 - DNA, 15 bp, Homo sapiens
tgcttggtcagggga

SEQ ID NO: 1235478 - DNA, 15 bp, Homo sapiens
gtgcttggtcagggg

SEQ ID NO: 1235479 - DNA, 15 bp, Homo sapiens
tgtgcttggtcaggg

SEQ ID NO: 1235480 - DNA, 15 bp, Homo sapiens
ttgtgcttggtcagg

SEQ ID NO: 1235481 - DNA, 15 bp, Homo sapiens
cttgtgcttggtcag

SEQ ID NO: 1235482 - DNA, 15 bp, Homo sapiens
acttgtgcttggtca

SEQ ID NO: 1235483 - DNA, 15 bp, Homo sapiens
tacttgtgcttggtc

SEQ ID NO: 1235484 - DNA, 15 bp, Homo sapiens
ttacttgtgcttggt

SEQ ID NO: 1235485 - DNA, 15 bp, Homo sapiens
gttacttgtgcttgg

SEQ ID NO: 1235486 - DNA, 15 bp, Homo sapiens
tgttacttgtgcttg

SEQ ID NO: 1235487 - DNA, 15 bp, Homo sapiens
ctgttacttgtgctt

SEQ ID NO: 1235488 - DNA, 15 bp, Homo sapiens
cctgttacttgtgct

SEQ ID NO: 1235489 - DNA, 15 bp, Homo sapiens
gcctgttacttgtgc

SEQ ID NO: 1235490 - DNA, 15 bp, Homo sapiens
ggcctgttacttgtg

SEQ ID NO: 1235491 - DNA, 15 bp, Homo sapiens
gggcctgttacttgt

SEQ ID NO: 1235492 - DNA, 15 bp, Homo sapiens
agggcctgttacttg

SEQ ID NO: 1235493 - DNA, 15 bp, Homo sapiens
aagggcctgttactt

SEQ ID NO: 1235494 - DNA, 15 bp, Homo sapiens
aaagggcctgttact

SEQ ID NO: 1235495 - DNA, 15 bp, Homo sapiens
caaagggcctgttac

SEQ ID NO: 1235496 - DNA, 15 bp, Homo sapiens
ccaaagggcctgtta

SEQ ID NO: 1235497 - DNA, 15 bp, Homo sapiens
cccaaagggcctgtt

SEQ ID NO: 1235498 - DNA, 15 bp, Homo sapiens
acccaaagggcctgt

SEQ ID NO: 1235499 - DNA, 15 bp, Homo sapiens
gacccaaagggcctg

SEQ ID NO: 1235500 - DNA, 15 bp, Homo sapiens
agacccaaagggcct

SEQ ID NO: 1235501 - DNA, 15 bp, Homo sapiens
gagacccaaagggcc

SEQ ID NO: 1235502 - DNA, 15 bp, Homo sapiens
agagacccaaagggc

SEQ ID NO: 1235503 - DNA, 15 bp, Homo sapiens
cagagacccaaaggg

SEQ ID NO: 1235504 - DNA, 15 bp, Homo sapiens
gcagagacccaaagg

SEQ ID NO: 1235505 - DNA, 15 bp, Homo sapiens
agcagagacccaaag

SEQ ID NO: 1235506 - DNA, 15 bp, Homo sapiens
aagcagagacccaaa

SEQ ID NO: 1235507 - DNA, 15 bp, Homo sapiens
gaagcagagacccaa

SEQ ID NO: 1235508 - DNA, 15 bp, Homo sapiens
agaagcagagaccca

SEQ ID NO: 1235509 - DNA, 15 bp, Homo sapiens
gagaagcagagaccc

SEQ ID NO: 1235510 - DNA, 15 bp, Homo sapiens
tgagaagcagagacc

SEQ ID NO: 1235511 - DNA, 15 bp, Homo sapiens
gtgagaagcagagac

SEQ ID NO: 1235512 - DNA, 15 bp, Homo sapiens
agtgagaagcagaga

SEQ ID NO: 1235513 - DNA, 15 bp, Homo sapiens
cagtgagaagcagag

SEQ ID NO: 1235514 - DNA, 15 bp, Homo sapiens
ccagtgagaagcaga

SEQ ID NO: 1235515 - DNA, 15 bp, Homo sapiens
tccagtgagaagcag

SEQ ID NO: 1235516 - DNA, 15 bp, Homo sapiens
ttccagtgagaagca

SEQ ID NO: 1235517 - DNA, 15 bp, Homo sapiens
tttccagtgagaagc

SEQ ID NO: 1235518 - DNA, 15 bp, Homo sapiens
ttttccagtgagaag

SEQ ID NO: 1235519 - DNA, 15 bp, Homo sapiens
attttccagtgagaa

SEQ ID NO: 1235520 - DNA, 15 bp, Homo sapiens
cattttccagtgaga

SEQ ID NO: 1235521 - DNA, 15 bp, Homo sapiens
tcattttccagtgag

SEQ ID NO: 1235522 - DNA, 15 bp, Homo sapiens
atcattttccagtga

SEQ ID NO: 1235523 - DNA, 15 bp, Homo sapiens
catcattttccagtg

SEQ ID NO: 1235524 - DNA, 15 bp, Homo sapiens
tcatcattttccagt

SEQ ID NO: 1235525 - DNA, 15 bp, Homo sapiens
ttcatcattttccag

SEQ ID NO: 1235526 - DNA, 15 bp, Homo sapiens
cttcatcattttcca

SEQ ID NO: 1235527 - DNA, 15 bp, Homo sapiens
gcttcatcattttcc

SEQ ID NO: 1235528 - DNA, 15 bp, Homo sapiens
ggcttcatcattttc

SEQ ID NO: 1235529 - DNA, 15 bp, Homo sapiens
aggcttcatcatttt

SEQ ID NO: 1235530 - DNA, 15 bp, Homo sapiens
taggcttcatcattt

SEQ ID NO: 1235531 - DNA, 15 bp, Homo sapiens
ctaggcttcatcatt

SEQ ID NO: 1235532 - DNA, 15 bp, Homo sapiens
tctaggcttcatcat

SEQ ID NO: 1235533 - DNA, 15 bp, Homo sapiens
atctaggcttcatca

SEQ ID NO: 1235534 - DNA, 15 bp, Homo sapiens
gatctaggcttcatc

SEQ ID NO: 1235535 - DNA, 15 bp, Homo sapiens
agatctaggcttcat

SEQ ID NO: 1235536 - DNA, 15 bp, Homo sapiens
cagatctaggcttca

SEQ ID NO: 1235537 - DNA, 15 bp, Homo sapiens
tcagatctaggcttc

SEQ ID NO: 1235538 - DNA, 15 bp, Homo sapiens
atcagatctaggctt

SEQ ID NO: 1235539 - DNA, 15 bp, Homo sapiens
catcagatctaggct

SEQ ID NO: 1235540 - DNA, 15 bp, Homo sapiens
tcatcagatctaggc

SEQ ID NO: 1235541 - DNA, 15 bp, Homo sapiens
gtcatcagatctagg

SEQ ID NO: 1235542 - DNA, 15 bp, Homo sapiens
agtcatcagatctag

SEQ ID NO: 1235543 - DNA, 15 bp, Homo sapiens
gagtcatcagatcta

SEQ ID NO: 1235544 - DNA, 15 bp, Homo sapiens
ggagtcatcagatct

SEQ ID NO: 1235545 - DNA, 15 bp, Homo sapiens
aggagtcatcagatc

SEQ ID NO: 1235546 - DNA, 15 bp, Homo sapiens
taggagtcatcagat

SEQ ID NO: 1235547 - DNA, 15 bp, Homo sapiens
ctaggagtcatcaga

SEQ ID NO: 1235548 - DNA, 15 bp, Homo sapiens
actaggagtcatcag

SEQ ID NO: 1235549 - DNA, 15 bp, Homo sapiens
cactaggagtcatca

SEQ ID NO: 1235550 - DNA, 15 bp, Homo sapiens
gcactaggagtcatc

SEQ ID NO: 1235551 - DNA, 15 bp, Homo sapiens
ggcactaggagtcat

SEQ ID NO: 1235552 - DNA, 15 bp, Homo sapiens
tggcactaggagtca

SEQ ID NO: 1235553 - DNA, 15 bp, Homo sapiens
ttggcactaggagtc

SEQ ID NO: 1235554 - DNA, 15 bp, Homo sapiens
gttggcactaggagt

SEQ ID NO: 1235555 - DNA, 15 bp, Homo sapiens
tgttggcactaggag

SEQ ID NO: 1235556 - DNA, 15 bp, Homo sapiens
atgttggcactagga

SEQ ID NO: 1235557 - DNA, 15 bp, Homo sapiens
aatgttggcactagg

SEQ ID NO: 1235558 - DNA, 15 bp, Homo sapiens
aaatgttggcactag

SEQ ID NO: 1235559 - DNA, 15 bp, Homo sapiens
taaatgttggcacta

SEQ ID NO: 1235560 - DNA, 15 bp, Homo sapiens
ttaaatgttggcact

SEQ ID NO: 1235561 - DNA, 15 bp, Homo sapiens
gttaaatgttggcac

SEQ ID NO: 1235562 - DNA, 15 bp, Homo sapiens
tgttaaatgttggca

SEQ ID NO: 1235563 - DNA, 15 bp, Homo sapiens
ttgttaaatgttggc

SEQ ID NO: 1235564 - DNA, 15 bp, Homo sapiens
tttgttaaatgttgg

SEQ ID NO: 1235565 - DNA, 15 bp, Homo sapiens
ctttgttaaatgttg

SEQ ID NO: 1235566 - DNA, 15 bp, Homo sapiens
actttgttaaatgtt

SEQ ID NO: 1235567 - DNA, 15 bp, Homo sapiens
aactttgttaaatgt

SEQ ID NO: 1235568 - DNA, 15 bp, Homo sapiens
gaactttgttaaatg

SEQ ID NO: 1235569 - DNA, 15 bp, Homo sapiens
cgaactttgttaaat

SEQ ID NO: 1235570 - DNA, 15 bp, Homo sapiens
tcgaactttgttaaa

SEQ ID NO: 1235571 - DNA, 15 bp, Homo sapiens
ttcgaactttgttaa

SEQ ID NO: 1235572 - DNA, 15 bp, Homo sapiens
tttcgaactttgtta

SEQ ID NO: 1235573 - DNA, 15 bp, Homo sapiens
ctttcgaactttgtt

SEQ ID NO: 1235574 - DNA, 15 bp, Homo sapiens
actttcgaactttgt

SEQ ID NO: 1235575 - DNA, 15 bp, Homo sapiens
aactttcgaactttg

SEQ ID NO: 1235576 - DNA, 15 bp, Homo sapiens
taactttcgaacttt

SEQ ID NO: 1235577 - DNA, 15 bp, Homo sapiens
ataactttcgaactt

SEQ ID NO: 1235578 - DNA, 15 bp, Homo sapiens
cataactttcgaact

SEQ ID NO: 1235579 - DNA, 15 bp, Homo sapiens
gcataactttcgaac

SEQ ID NO: 1235580 - DNA, 15 bp, Homo sapiens
tgcataactttcgaa

SEQ ID NO: 1235581 - DNA, 15 bp, Homo sapiens
ctgcataactttcga

SEQ ID NO: 1235582 - DNA, 15 bp, Homo sapiens
cctgcataactttcg

SEQ ID NO: 1235583 - DNA, 15 bp, Homo sapiens
tcctgcataactttc

SEQ ID NO: 1235584 - DNA, 15 bp, Homo sapiens
gtcctgcataacttt

SEQ ID NO: 1235585 - DNA, 15 bp, Homo sapiens
agtcctgcataactt

SEQ ID NO: 1235586 - DNA, 15 bp, Homo sapiens
aagtcctgcataact

SEQ ID NO: 1235587 - DNA, 15 bp, Homo sapiens
gaagtcctgcataac

SEQ ID NO: 1235588 - DNA, 15 bp, Homo sapiens
tgaagtcctgcataa

SEQ ID NO: 1235589 - DNA, 15 bp, Homo sapiens
gtgaagtcctgcata

SEQ ID NO: 1235590 - DNA, 15 bp, Homo sapiens
tgtgaagtcctgcat

SEQ ID NO: 1235591 - DNA, 15 bp, Homo sapiens
gtgtgaagtcctgca

SEQ ID NO: 1235592 - DNA, 15 bp, Homo sapiens
tgtgtgaagtcctgc

SEQ ID NO: 1235593 - DNA, 15 bp, Homo sapiens
atgtgtgaagtcctg

SEQ ID NO: 1235594 - DNA, 15 bp, Homo sapiens
catgtgtgaagtcct

SEQ ID NO: 1235595 - DNA, 15 bp, Homo sapiens
acatgtgtgaagtcc

SEQ ID NO: 1235596 - DNA, 15 bp, Homo sapiens
tacatgtgtgaagtc

SEQ ID NO: 1235597 - DNA, 15 bp, Homo sapiens
gtacatgtgtgaagt

SEQ ID NO: 1235598 - DNA, 15 bp, Homo sapiens
cgtacatgtgtgaag

SEQ ID NO: 1235599 - DNA, 15 bp, Homo sapiens
ccgtacatgtgtgaa

SEQ ID NO: 1235600 - DNA, 15 bp, Homo sapiens
tccgtacatgtgtga

SEQ ID NO: 1235601 - DNA, 15 bp, Homo sapiens
ttccgtacatgtgtg

SEQ ID NO: 1235602 - DNA, 15 bp, Homo sapiens
attccgtacatgtgt

SEQ ID NO: 1235603 - DNA, 15 bp, Homo sapiens
cattccgtacatgtg

SEQ ID NO: 1235604 - DNA, 15 bp, Homo sapiens
ccattccgtacatgt

SEQ ID NO: 1235605 - DNA, 15 bp, Homo sapiens
gccattccgtacatg

SEQ ID NO: 1235606 - DNA, 15 bp, Homo sapiens
agccattccgtacat

SEQ ID NO: 1235607 - DNA, 15 bp, Homo sapiens
cagccattccgtaca

SEQ ID NO: 1235608 - DNA, 15 bp, Homo sapiens
acagccattccgtac

SEQ ID NO: 1235609 - DNA, 15 bp, Homo sapiens
tacagccattccgta

SEQ ID NO: 1235610 - DNA, 15 bp, Homo sapiens
atacagccattccgt

SEQ ID NO: 1235611 - DNA, 15 bp, Homo sapiens
gatacagccattccg

SEQ ID NO: 1235612 - DNA, 15 bp, Homo sapiens
tgatacagccattcc

SEQ ID NO: 1235613 - DNA, 15 bp, Homo sapiens
gtgatacagccattc

SEQ ID NO: 1235614 - DNA, 15 bp, Homo sapiens
tgtgatacagccatt

SEQ ID NO: 1235615 - DNA, 15 bp, Homo sapiens
ctgtgatacagccat

SEQ ID NO: 1235616 - DNA, 15 bp, Homo sapiens
tctgtgatacagcca

SEQ ID NO: 1235617 - DNA, 15 bp, Homo sapiens
ttctgtgatacagcc

SEQ ID NO: 1235618 - DNA, 15 bp, Homo sapiens
attctgtgatacagc

SEQ ID NO: 1235619 - DNA, 15 bp, Homo sapiens
tattctgtgatacag

SEQ ID NO: 1235620 - DNA, 15 bp, Homo sapiens
atattctgtgataca

SEQ ID NO: 1235621 - DNA, 15 bp, Homo sapiens
aatattctgtgatac

SEQ ID NO: 1235622 - DNA, 15 bp, Homo sapiens
taatattctgtgata

SEQ ID NO: 1235623 - DNA, 15 bp, Homo sapiens
ataatattctgtgat

SEQ ID NO: 1235624 - DNA, 15 bp, Homo sapiens
cataatattctgtga

SEQ ID NO: 1235625 - DNA, 15 bp, Homo sapiens
gcataatattctgtg

SEQ ID NO: 1235626 - DNA, 15 bp, Homo sapiens
cgcataatattctgt

SEQ ID NO: 1235627 - DNA, 15 bp, Homo sapiens
acgcataatattctg

SEQ ID NO: 1235628 - DNA, 15 bp, Homo sapiens
aacgcataatattct

SEQ ID NO: 1235629 - DNA, 15 bp, Homo sapiens
taacgcataatattc

SEQ ID NO: 1235630 - DNA, 15 bp, Homo sapiens
ctaacgcataatatt

SEQ ID NO: 1235631 - DNA, 15 bp, Homo sapiens
tctaacgcataatat

SEQ ID NO: 1235632 - DNA, 15 bp, Homo sapiens
ttctaacgcataata

SEQ ID NO: 1235633 - DNA, 15 bp, Homo sapiens
tttctaacgcataat

SEQ ID NO: 1235634 - DNA, 15 bp, Homo sapiens
ctttctaacgcataa

SEQ ID NO: 1235635 - DNA, 15 bp, Homo sapiens
actttctaacgcata

SEQ ID NO: 1235636 - DNA, 15 bp, Homo sapiens
aactttctaacgcat

SEQ ID NO: 1235637 - DNA, 15 bp, Homo sapiens
gaactttctaacgca

SEQ ID NO: 1235638 - DNA, 15 bp, Homo sapiens
tgaactttctaacgc

SEQ ID NO: 1235639 - DNA, 15 bp, Homo sapiens
gtgaactttctaacg

SEQ ID NO: 1235640 - DNA, 15 bp, Homo sapiens
cgtgaactttctaac

SEQ ID NO: 1235641 - DNA, 15 bp, Homo sapiens
ccgtgaactttctaa

SEQ ID NO: 1235642 - DNA, 15 bp, Homo sapiens
accgtgaactttcta

SEQ ID NO: 1235643 - DNA, 15 bp, Homo sapiens
gaccgtgaactttct

SEQ ID NO: 1235644 - DNA, 15 bp, Homo sapiens
tgaccgtgaactttc

SEQ ID NO: 1235645 - DNA, 15 bp, Homo sapiens
gtgaccgtgaacttt

SEQ ID NO: 1235646 - DNA, 15 bp, Homo sapiens
agtgaccgtgaactt

SEQ ID NO: 1235647 - DNA, 15 bp, Homo sapiens
tagtgaccgtgaact

SEQ ID NO: 1235648 - DNA, 15 bp, Homo sapiens
atagtgaccgtgaac

SEQ ID NO: 1235649 - DNA, 15 bp, Homo sapiens
tatagtgaccgtgaa

SEQ ID NO: 1235650 - DNA, 15 bp, Homo sapiens
gtatagtgaccgtga

SEQ ID NO: 1235651 - DNA, 15 bp, Homo sapiens
ggtatagtgaccgtg

SEQ ID NO: 1235652 - DNA, 15 bp, Homo sapiens
aggtatagtgaccgt

SEQ ID NO: 1235653 - DNA, 15 bp, Homo sapiens
taggtatagtgaccg

SEQ ID NO: 1235654 - DNA, 15 bp, Homo sapiens
ctaggtatagtgacc

SEQ ID NO: 1235655 - DNA, 15 bp, Homo sapiens
gctaggtatagtgac

SEQ ID NO: 1235656 - DNA, 15 bp, Homo sapiens
agctaggtatagtga

SEQ ID NO: 1235657 - DNA, 15 bp, Homo sapiens
gagctaggtatagtg

SEQ ID NO: 1235658 - DNA, 15 bp, Homo sapiens
agagctaggtatagt

SEQ ID NO: 1235659 - DNA, 15 bp, Homo sapiens
tagagctaggtatag

SEQ ID NO: 1235660 - DNA, 15 bp, Homo sapiens
ttagagctaggtata

SEQ ID NO: 1235661 - DNA, 15 bp, Homo sapiens
tttagagctaggtat

SEQ ID NO: 1235662 - DNA, 15 bp, Homo sapiens
ttttagagctaggta

SEQ ID NO: 1235663 - DNA, 15 bp, Homo sapiens
attttagagctaggt

SEQ ID NO: 1235664 - DNA, 15 bp, Homo sapiens
aattttagagctagg

SEQ ID NO: 1235665 - DNA, 15 bp, Homo sapiens
aaattttagagctag

SEQ ID NO: 1235666 - DNA, 15 bp, Homo sapiens
aaaattttagagcta

SEQ ID NO: 1235667 - DNA, 15 bp, Homo sapiens
aaaaattttagagct

SEQ ID NO: 1235668 - DNA, 15 bp, Homo sapiens
gaaaaattttagagc

SEQ ID NO: 1235669 - DNA, 15 bp, Homo sapiens
tgaaaaattttagag

SEQ ID NO: 1235670 - DNA, 15 bp, Homo sapiens
ctgaaaaattttaga

SEQ ID NO: 1235671 - DNA, 15 bp, Homo sapiens
tctgaaaaattttag

SEQ ID NO: 1235672 - DNA, 15 bp, Homo sapiens
ctctgaaaaatttta

SEQ ID NO: 1235673 - DNA, 15 bp, Homo sapiens
tctctgaaaaatttt

SEQ ID NO: 1235674 - DNA, 15 bp, Homo sapiens
ttctctgaaaaattt

SEQ ID NO: 1235675 - DNA, 15 bp, Homo sapiens
tttctctgaaaaatt

SEQ ID NO: 1235676 - DNA, 15 bp, Homo sapiens
gtttctctgaaaaat

SEQ ID NO: 1235677 - DNA, 15 bp, Homo sapiens
tgtttctctgaaaaa

SEQ ID NO: 1235678 - DNA, 15 bp, Homo sapiens
ctgtttctctgaaaa

SEQ ID NO: 1235679 - DNA, 15 bp, Homo sapiens
gctgtttctctgaaa

SEQ ID NO: 1235680 - DNA, 15 bp, Homo sapiens
tgctgtttctctgaa

SEQ ID NO: 1235681 - DNA, 15 bp, Homo sapiens
ctgctgtttctctga

SEQ ID NO: 1235682 - DNA, 15 bp, Homo sapiens
tctgctgtttctctg

SEQ ID NO: 1235683 - DNA, 15 bp, Homo sapiens
gtctgctgtttctct

SEQ ID NO: 1235684 - DNA, 15 bp, Homo sapiens
agtctgctgtttctc

SEQ ID NO: 1235685 - DNA, 15 bp, Homo sapiens
tagtctgctgtttct

SEQ ID NO: 1235686 - DNA, 15 bp, Homo sapiens
ttagtctgctgtttc

SEQ ID NO: 1235687 - DNA, 15 bp, Homo sapiens
attagtctgctgttt

SEQ ID NO: 1235688 - DNA, 15 bp, Homo sapiens
tattagtctgctgtt

SEQ ID NO: 1235689 - DNA, 15 bp, Homo sapiens
ttattagtctgctgt

SEQ ID NO: 1235690 - DNA, 15 bp, Homo sapiens
cttattagtctgctg

SEQ ID NO: 1235691 - DNA, 15 bp, Homo sapiens
acttattagtctgct

SEQ ID NO: 1235692 - DNA, 15 bp, Homo sapiens
cacttattagtctgc

SEQ ID NO: 1235693 - DNA, 15 bp, Homo sapiens
tcacttattagtctg

SEQ ID NO: 1235694 - DNA, 15 bp, Homo sapiens
ttcacttattagtct

SEQ ID NO: 1235695 - DNA, 15 bp, Homo sapiens
attcacttattagtc

SEQ ID NO: 1235696 - DNA, 15 bp, Homo sapiens
gattcacttattagt

SEQ ID NO: 1235697 - DNA, 15 bp, Homo sapiens
agattcacttattag

SEQ ID NO: 1235698 - DNA, 15 bp, Homo sapiens
aagattcacttatta

SEQ ID NO: 1235699 - DNA, 15 bp, Homo sapiens
taagattcacttatt

SEQ ID NO: 1235700 - DNA, 15 bp, Homo sapiens
ttaagattcacttat

SEQ ID NO: 1235701 - DNA, 15 bp, Homo sapiens
tttaagattcactta

SEQ ID NO: 1235702 - DNA, 15 bp, Homo sapiens
atttaagattcactt

SEQ ID NO: 1235703 - DNA, 15 bp, Homo sapiens
tatttaagattcact

SEQ ID NO: 1235704 - DNA, 15 bp, Homo sapiens
ttatttaagattcac

SEQ ID NO: 1235705 - DNA, 15 bp, Homo sapiens
tttatttaagattca

SEQ ID NO: 1235706 - DNA, 15 bp, Homo sapiens
ctttatttaagattc

SEQ ID NO: 1235707 - DNA, 15 bp, Homo sapiens
cctttatttaagatt

SEQ ID NO: 1235708 - DNA, 15 bp, Homo sapiens
tcctttatttaagat

SEQ ID NO: 1235709 - DNA, 15 bp, Homo sapiens
ttcctttatttaaga

SEQ ID NO: 1235710 - DNA, 15 bp, Homo sapiens
attcctttatttaag

SEQ ID NO: 1235711 - DNA, 15 bp, Homo sapiens
tattcctttatttaa

SEQ ID NO: 1235712 - DNA, 15 bp, Homo sapiens
ttattcctttattta

SEQ ID NO: 1235713 - DNA, 15 bp, Homo sapiens
gttattcctttattt

SEQ ID NO: 1235714 - DNA, 15 bp, Homo sapiens
tgttattcctttatt

SEQ ID NO: 1235715 - DNA, 15 bp, Homo sapiens
atgttattcctttat

SEQ ID NO: 1235716 - DNA, 15 bp, Homo sapiens
aatgttattccttta

SEQ ID NO: 1235717 - DNA, 15 bp, Homo sapiens
aaatgttattccttt

SEQ ID NO: 1235718 - DNA, 15 bp, Homo sapiens
aaaatgttattcctt

SEQ ID NO: 1235719 - DNA, 15 bp, Homo sapiens
taaaatgttattcct

SEQ ID NO: 1235720 - DNA, 15 bp, Homo sapiens
ttaaaatgttattcc

SEQ ID NO: 1235721 - DNA, 15 bp, Homo sapiens
attaaaatgttattc

SEQ ID NO: 1235722 - DNA, 15 bp, Homo sapiens
cattaaaatgttatt

SEQ ID NO: 1235723 - DNA, 15 bp, Homo sapiens
tcattaaaatgttat

SEQ ID NO: 1235724 - DNA, 15 bp, Homo sapiens
ttcattaaaatgtta

SEQ ID NO: 1235725 - DNA, 15 bp, Homo sapiens
tttcattaaaatgtt

SEQ ID NO: 1235726 - DNA, 15 bp, Homo sapiens
atttcattaaaatgt

SEQ ID NO: 1235727 - DNA, 15 bp, Homo sapiens
tatttcattaaaatg

SEQ ID NO: 1235728 - DNA, 15 bp, Homo sapiens
ttatttcattaaaat

SEQ ID NO: 1235729 - DNA, 15 bp, Homo sapiens
tttatttcattaaaa

SEQ ID NO: 1235730 - DNA, 15 bp, Homo sapiens
atttatttcattaaa

SEQ ID NO: 1235731 - DNA, 15 bp, Homo sapiens
catttatttcattaa

SEQ ID NO: 1235732 - DNA, 15 bp, Homo sapiens
tcatttatttcatta

SEQ ID NO: 1235733 - DNA, 15 bp, Homo sapiens
ttcatttatttcatt

SEQ ID NO: 1235734 - DNA, 15 bp, Homo sapiens
tttcatttatttcat

SEQ ID NO: 1235735 - DNA, 15 bp, Homo sapiens
gtttcatttatttca

SEQ ID NO: 1235736 - DNA, 15 bp, Homo sapiens
tgtttcatttatttc

SEQ ID NO: 1235737 - DNA, 15 bp, Homo sapiens
ctgtttcatttattt

SEQ ID NO: 1235738 - DNA, 15 bp, Homo sapiens
tctgtttcatttatt

SEQ ID NO: 1235739 - DNA, 15 bp, Homo sapiens
ctctgtttcatttat

SEQ ID NO: 1235740 - DNA, 15 bp, Homo sapiens
gctctgtttcattta

SEQ ID NO: 1235741 - DNA, 15 bp, Homo sapiens
tgctctgtttcattt

SEQ ID NO: 1235742 - DNA, 15 bp, Homo sapiens
ctgctctgtttcatt

SEQ ID NO: 1235743 - DNA, 15 bp, Homo sapiens
cctgctctgtttcat

SEQ ID NO: 1235744 - DNA, 15 bp, Homo sapiens
ccctgctctgtttca

SEQ ID NO: 1235745 - DNA, 15 bp, Homo sapiens
tccctgctctgtttc

SEQ ID NO: 1235746 - DNA, 15 bp, Homo sapiens
ttccctgctctgttt

SEQ ID NO: 1235747 - DNA, 15 bp, Homo sapiens
tttccctgctctgtt

SEQ ID NO: 1235748 - DNA, 15 bp, Homo sapiens
gtttccctgctctgt

SEQ ID NO: 1235749 - DNA, 15 bp, Homo sapiens
ggtttccctgctctg

SEQ ID NO: 1235750 - DNA, 15 bp, Homo sapiens
tggtttccctgctct

SEQ ID NO: 1235751 - DNA, 15 bp, Homo sapiens
ttggtttccctgctc

SEQ ID NO: 1235752 - DNA, 15 bp, Homo sapiens
tttggtttccctgct

SEQ ID NO: 1235753 - DNA, 15 bp, Homo sapiens
ctttggtttccctgc

SEQ ID NO: 1235754 - DNA, 15 bp, Homo sapiens
tctttggtttccctg

SEQ ID NO: 1235755 - DNA, 15 bp, Homo sapiens
ctctttggtttccct

SEQ ID NO: 1235756 - DNA, 15 bp, Homo sapiens
gctctttggtttccc

SEQ ID NO: 1235757 - DNA, 15 bp, Homo sapiens
ggctctttggtttcc

SEQ ID NO: 1235758 - DNA, 15 bp, Homo sapiens
tggctctttggtttc

SEQ ID NO: 1235759 - DNA, 15 bp, Homo sapiens
ttggctctttggttt

SEQ ID NO: 1235760 - DNA, 15 bp, Homo sapiens
attggctctttggtt

SEQ ID NO: 1235761 - DNA, 15 bp, Homo sapiens
aattggctctttggt

SEQ ID NO: 1235762 - DNA, 15 bp, Homo sapiens
taattggctctttgg

SEQ ID NO: 1235763 - DNA, 15 bp, Homo sapiens
ctaattggctctttg

SEQ ID NO: 1235764 - DNA, 15 bp, Homo sapiens
cctaattggctcttt

SEQ ID NO: 1235765 - DNA, 15 bp, Homo sapiens
ccctaattggctctt

SEQ ID NO: 1235766 - DNA, 15 bp, Homo sapiens
cccctaattggctct

SEQ ID NO: 1235767 - DNA, 15 bp, Homo sapiens
tcccctaattggctc

SEQ ID NO: 1235768 - DNA, 15 bp, Homo sapiens
ttcccctaattggct

SEQ ID NO: 1235769 - DNA, 15 bp, Homo sapiens
cttcccctaattggc

SEQ ID NO: 1235770 - DNA, 15 bp, Homo sapiens
tcttcccctaattgg

SEQ ID NO: 1235771 - DNA, 15 bp, Homo sapiens
ttcttcccctaattg

SEQ ID NO: 1235772 - DNA, 15 bp, Homo sapiens
attcttcccctaatt

SEQ ID NO: 1235773 - DNA, 15 bp, Homo sapiens
gattcttcccctaat

SEQ ID NO: 1235774 - DNA, 15 bp, Homo sapiens
ggattcttcccctaa

SEQ ID NO: 1235775 - DNA, 15 bp, Homo sapiens
aggattcttccccta

SEQ ID NO: 1235776 - DNA, 15 bp, Homo sapiens
caggattcttcccct

SEQ ID NO: 1235777 - DNA, 15 bp, Homo sapiens
tcaggattcttcccc

SEQ ID NO: 1235778 - DNA, 15 bp, Homo sapiens
ttcaggattcttccc

SEQ ID NO: 1235779 - DNA, 15 bp, Homo sapiens
tttcaggattcttcc

SEQ ID NO: 1235780 - DNA, 15 bp, Homo sapiens
ttttcaggattcttc

SEQ ID NO: 1235781 - DNA, 15 bp, Homo sapiens
tttttcaggattctt

SEQ ID NO: 1235782 - DNA, 15 bp, Homo sapiens
ctttttcaggattct

SEQ ID NO: 1235783 - DNA, 15 bp, Homo sapiens
actttttcaggattc

SEQ ID NO: 1235784 - DNA, 15 bp, Homo sapiens
tactttttcaggatt

SEQ ID NO: 1235785 - DNA, 15 bp, Homo sapiens
atactttttcaggat

SEQ ID NO: 1235786 - DNA, 15 bp, Homo sapiens
catactttttcagga

SEQ ID NO: 1235787 - DNA, 15 bp, Homo sapiens
ccatactttttcagg

SEQ ID NO: 1235788 - DNA, 15 bp, Homo sapiens
gccatactttttcag

SEQ ID NO: 1235789 - DNA, 15 bp, Homo sapiens
agccatactttttca

SEQ ID NO: 1235790 - DNA, 15 bp, Homo sapiens
aagccatactttttc

SEQ ID NO: 1235791 - DNA, 15 bp, Homo sapiens
gaagccatacttttt

SEQ ID NO: 1235792 - DNA, 15 bp, Homo sapiens
tgaagccatactttt

SEQ ID NO: 1235793 - DNA, 15 bp, Homo sapiens
gtgaagccatacttt

SEQ ID NO: 1235794 - DNA, 15 bp, Homo sapiens
tgtgaagccatactt

SEQ ID NO: 1235795 - DNA, 15 bp, Homo sapiens
gtgtgaagccatact

SEQ ID NO: 1235796 - DNA, 15 bp, Homo sapiens
tgtgtgaagccatac

SEQ ID NO: 1235797 - DNA, 15 bp, Homo sapiens
ctgtgtgaagccata

SEQ ID NO: 1235798 - DNA, 15 bp, Homo sapiens
gctgtgtgaagccat

SEQ ID NO: 1235799 - DNA, 15 bp, Homo sapiens
tgctgtgtgaagcca

SEQ ID NO: 1235800 - DNA, 15 bp, Homo sapiens
ctgctgtgtgaagcc

SEQ ID NO: 1235801 - DNA, 15 bp, Homo sapiens
gctgctgtgtgaagc

SEQ ID NO: 1235802 - DNA, 15 bp, Homo sapiens
tgctgctgtgtgaag

SEQ ID NO: 1235803 - DNA, 15 bp, Homo sapiens
ctgctgctgtgtgaa

SEQ ID NO: 1235804 - DNA, 15 bp, Homo sapiens
gctgctgctgtgtga

SEQ ID NO: 1235805 - DNA, 15 bp, Homo sapiens
tgctgctgctgtgtg

SEQ ID NO: 1235806 - DNA, 15 bp, Homo sapiens
atgctgctgctgtgt

SEQ ID NO: 1235807 - DNA, 15 bp, Homo sapiens
aatgctgctgctgtg

SEQ ID NO: 1235808 - DNA, 15 bp, Homo sapiens
caatgctgctgctgt

SEQ ID NO: 1235809 - DNA, 15 bp, Homo sapiens
tcaatgctgctgctg

SEQ ID NO: 1235810 - DNA, 15 bp, Homo sapiens
ttcaatgctgctgct

SEQ ID NO: 1235811 - DNA, 15 bp, Homo sapiens
cttcaatgctgctgc

SEQ ID NO: 1235812 - DNA, 15 bp, Homo sapiens
tcttcaatgctgctg

SEQ ID NO: 1235813 - DNA, 15 bp, Homo sapiens
ttcttcaatgctgct

SEQ ID NO: 1235814 - DNA, 15 bp, Homo sapiens
tttcttcaatgctgc

SEQ ID NO: 1235815 - DNA, 15 bp, Homo sapiens
ttttcttcaatgctg

SEQ ID NO: 1235816 - DNA, 15 bp, Homo sapiens
gttttcttcaatgct

SEQ ID NO: 1235817 - DNA, 15 bp, Homo sapiens
tgttttcttcaatgc

SEQ ID NO: 1235818 - DNA, 15 bp, Homo sapiens
gtgttttcttcaatg

SEQ ID NO: 1235819 - DNA, 15 bp, Homo sapiens
agtgttttcttcaat

SEQ ID NO: 1235820 - DNA, 15 bp, Homo sapiens
tagtgttttcttcaa

SEQ ID NO: 1235821 - DNA, 15 bp, Homo sapiens
atagtgttttcttca

SEQ ID NO: 1235822 - DNA, 15 bp, Homo sapiens
gatagtgttttcttc

SEQ ID NO: 1235823 - DNA, 15 bp, Homo sapiens
cgatagtgttttctt

SEQ ID NO: 1235824 - DNA, 15 bp, Homo sapiens
tcgatagtgttttct

SEQ ID NO: 1235825 - DNA, 15 bp, Homo sapiens
atcgatagtgttttc

SEQ ID NO: 1235826 - DNA, 15 bp, Homo sapiens
aatcgatagtgtttt

SEQ ID NO: 1235827 - DNA, 15 bp, Homo sapiens
aaatcgatagtgttt

SEQ ID NO: 1235828 - DNA, 15 bp, Homo sapiens
aaaatcgatagtgtt

SEQ ID NO: 1235829 - DNA, 15 bp, Homo sapiens
aaaaatcgatagtgt

SEQ ID NO: 1235830 - DNA, 15 bp, Homo sapiens
gaaaaatcgatagtg

SEQ ID NO: 1235831 - DNA, 15 bp, Homo sapiens
ggaaaaatcgatagt

SEQ ID NO: 1235832 - DNA, 15 bp, Homo sapiens
gggaaaaatcgatag

SEQ ID NO: 1235833 - DNA, 15 bp, Homo sapiens
tgggaaaaatcgata

SEQ ID NO: 1235834 - DNA, 15 bp, Homo sapiens
ctgggaaaaatcgat

SEQ ID NO: 1235835 - DNA, 15 bp, Homo sapiens
tctgggaaaaatcga

SEQ ID NO: 1235836 - DNA, 15 bp, Homo sapiens
ctctgggaaaaatcg

SEQ ID NO: 1235837 - DNA, 15 bp, Homo sapiens
tctctgggaaaaatc

SEQ ID NO: 1235838 - DNA, 15 bp, Homo sapiens
ttctctgggaaaaat

SEQ ID NO: 1235839 - DNA, 15 bp, Homo sapiens
tttctctgggaaaaa

SEQ ID NO: 1235840 - DNA, 15 bp, Homo sapiens
ttttctctgggaaaa

SEQ ID NO: 1235841 - DNA, 15 bp, Homo sapiens
tttttctctgggaaa

SEQ ID NO: 1235842 - DNA, 15 bp, Homo sapiens
ttttttctctgggaa

SEQ ID NO: 1235843 - DNA, 15 bp, Homo sapiens
tttttttctctggga

SEQ ID NO: 1235844 - DNA, 15 bp, Homo sapiens
gtttttttctctggg

SEQ ID NO: 1235845 - DNA, 15 bp, Homo sapiens
agtttttttctctgg

SEQ ID NO: 1235846 - DNA, 15 bp, Homo sapiens
gagtttttttctctg

SEQ ID NO: 1235847 - DNA, 15 bp, Homo sapiens
ggagtttttttctct

SEQ ID NO: 1235848 - DNA, 15 bp, Homo sapiens
tggagtttttttctc

SEQ ID NO: 1235849 - DNA, 15 bp, Homo sapiens
ttggagtttttttct

SEQ ID NO: 1235850 - DNA, 15 bp, Homo sapiens
tttggagtttttttc

SEQ ID NO: 1235851 - DNA, 15 bp, Homo sapiens
ttttggagttttttt

SEQ ID NO: 1235852 - DNA, 15 bp, Homo sapiens
tttttggagtttttt

SEQ ID NO: 1235853 - DNA, 15 bp, Homo sapiens
atttttggagttttt

SEQ ID NO: 1235854 - DNA, 15 bp, Homo sapiens
catttttggagtttt

SEQ ID NO: 1235855 - DNA, 15 bp, Homo sapiens
acatttttggagttt

SEQ ID NO: 1235856 - DNA, 15 bp, Homo sapiens
gacatttttggagtt

SEQ ID NO: 1235857 - DNA, 15 bp, Homo sapiens
ggacatttttggagt

SEQ ID NO: 1235858 - DNA, 15 bp, Homo sapiens
tggacatttttggag

SEQ ID NO: 1235859 - DNA, 15 bp, Homo sapiens
ttggacatttttgga

SEQ ID NO: 1235860 - DNA, 15 bp, Homo sapiens
attggacatttttgg

SEQ ID NO: 1235861 - DNA, 15 bp, Homo sapiens
tattggacatttttg

SEQ ID NO: 1235862 - DNA, 15 bp, Homo sapiens
ttattggacattttt

SEQ ID NO: 1235863 - DNA, 15 bp, Homo sapiens
gttattggacatttt

SEQ ID NO: 1235864 - DNA, 15 bp, Homo sapiens
ggttattggacattt

SEQ ID NO: 1235865 - DNA, 15 bp, Homo sapiens
tggttattggacatt

SEQ ID NO: 1235866 - DNA, 15 bp, Homo sapiens
ttggttattggacat

SEQ ID NO: 1235867 - DNA, 15 bp, Homo sapiens
cttggttattggaca

SEQ ID NO: 1235868 - DNA, 15 bp, Homo sapiens
acttggttattggac

SEQ ID NO: 1235869 - DNA, 15 bp, Homo sapiens
cacttggttattgga

SEQ ID NO: 1235870 - DNA, 15 bp, Homo sapiens
gcacttggttattgg

SEQ ID NO: 1235871 - DNA, 15 bp, Homo sapiens
tgcacttggttattg

SEQ ID NO: 1235872 - DNA, 15 bp, Homo sapiens
gtgcacttggttatt

SEQ ID NO: 1235873 - DNA, 15 bp, Homo sapiens
tgtgcacttggttat

SEQ ID NO: 1235874 - DNA, 15 bp, Homo sapiens
ctgtgcacttggtta

SEQ ID NO: 1235875 - DNA, 15 bp, Homo sapiens
tctgtgcacttggtt

SEQ ID NO: 1235876 - DNA, 15 bp, Homo sapiens
ctctgtgcacttggt

SEQ ID NO: 1235877 - DNA, 15 bp, Homo sapiens
actctgtgcacttgg

SEQ ID NO: 1235878 - DNA, 15 bp, Homo sapiens
aactctgtgcacttg

SEQ ID NO: 1235879 - DNA, 15 bp, Homo sapiens
taactctgtgcactt

SEQ ID NO: 1235880 - DNA, 15 bp, Homo sapiens
ataactctgtgcact

SEQ ID NO: 1235881 - DNA, 15 bp, Homo sapiens
cataactctgtgcac

SEQ ID NO: 1235882 - DNA, 15 bp, Homo sapiens
ccataactctgtgca

SEQ ID NO: 1235883 - DNA, 15 bp, Homo sapiens
accataactctgtgc

SEQ ID NO: 1235884 - DNA, 15 bp, Homo sapiens
gaccataactctgtg

SEQ ID NO: 1235885 - DNA, 15 bp, Homo sapiens
tgaccataactctgt

SEQ ID NO: 1235886 - DNA, 15 bp, Homo sapiens
ttgaccataactctg

SEQ ID NO: 1235887 - DNA, 15 bp, Homo sapiens
attgaccataactct

SEQ ID NO: 1235888 - DNA, 15 bp, Homo sapiens
tattgaccataactc

SEQ ID NO: 1235889 - DNA, 15 bp, Homo sapiens
ttattgaccataact

SEQ ID NO: 1235890 - DNA, 15 bp, Homo sapiens
cttattgaccataac

SEQ ID NO: 1235891 - DNA, 15 bp, Homo sapiens
tcttattgaccataa

SEQ ID NO: 1235892 - DNA, 15 bp, Homo sapiens
gtcttattgaccata

SEQ ID NO: 1235893 - DNA, 15 bp, Homo sapiens
agtcttattgaccat

SEQ ID NO: 1235894 - DNA, 15 bp, Homo sapiens
aagtcttattgacca

SEQ ID NO: 1235895 - DNA, 15 bp, Homo sapiens
aaagtcttattgacc

SEQ ID NO: 1235896 - DNA, 15 bp, Homo sapiens
caaagtcttattgac

SEQ ID NO: 1235897 - DNA, 15 bp, Homo sapiens
tcaaagtcttattga

SEQ ID NO: 1235898 - DNA, 15 bp, Homo sapiens
ttcaaagtcttattg

SEQ ID NO: 1235899 - DNA, 15 bp, Homo sapiens
gttcaaagtcttatt

SEQ ID NO: 1235900 - DNA, 15 bp, Homo sapiens
tgttcaaagtcttat

SEQ ID NO: 1235901 - DNA, 15 bp, Homo sapiens
atgttcaaagtctta

SEQ ID NO: 1235902 - DNA, 15 bp, Homo sapiens
catgttcaaagtctt

SEQ ID NO: 1235903 - DNA, 15 bp, Homo sapiens
gcatgttcaaagtct

SEQ ID NO: 1235904 - DNA, 15 bp, Homo sapiens
tgcatgttcaaagtc

SEQ ID NO: 1235905 - DNA, 15 bp, Homo sapiens
atgcatgttcaaagt

SEQ ID NO: 1235906 - DNA, 15 bp, Homo sapiens
gatgcatgttcaaag

SEQ ID NO: 1235907 - DNA, 15 bp, Homo sapiens
tgatgcatgttcaaa

SEQ ID NO: 1235908 - DNA, 15 bp, Homo sapiens
gtgatgcatgttcaa

SEQ ID NO: 1235909 - DNA, 15 bp, Homo sapiens
tgtgatgcatgttca

SEQ ID NO: 1235910 - DNA, 15 bp, Homo sapiens
gtgtgatgcatgttc

SEQ ID NO: 1235911 - DNA, 15 bp, Homo sapiens
tgtgtgatgcatgtt

SEQ ID NO: 1235912 - DNA, 15 bp, Homo sapiens
atgtgtgatgcatgt

SEQ ID NO: 1235913 - DNA, 15 bp, Homo sapiens
tatgtgtgatgcatg

SEQ ID NO: 1235914 - DNA, 15 bp, Homo sapiens
gtatgtgtgatgcat

SEQ ID NO: 1235915 - DNA, 15 bp, Homo sapiens
tgtatgtgtgatgca

SEQ ID NO: 1235916 - DNA, 15 bp, Homo sapiens
atgtatgtgtgatgc

SEQ ID NO: 1235917 - DNA, 15 bp, Homo sapiens
tatgtatgtgtgatg

SEQ ID NO: 1235918 - DNA, 15 bp, Homo sapiens
ttatgtatgtgtgat

SEQ ID NO: 1235919 - DNA, 15 bp, Homo sapiens
cttatgtatgtgtga

SEQ ID NO: 1235920 - DNA, 15 bp, Homo sapiens
acttatgtatgtgtg

SEQ ID NO: 1235921 - DNA, 15 bp, Homo sapiens
tacttatgtatgtgt

SEQ ID NO: 1235922 - DNA, 15 bp, Homo sapiens
gtacttatgtatgtg

SEQ ID NO: 1235923 - DNA, 15 bp, Homo sapiens
tgtacttatgtatgt

SEQ ID NO: 1235924 - DNA, 15 bp, Homo sapiens
atgtacttatgtatg

SEQ ID NO: 1235925 - DNA, 15 bp, Homo sapiens
tatgtacttatgtat

SEQ ID NO: 1235926 - DNA, 15 bp, Homo sapiens
ttatgtacttatgta

SEQ ID NO: 1235927 - DNA, 15 bp, Homo sapiens
tttatgtacttatgt

SEQ ID NO: 1235928 - DNA, 15 bp, Homo sapiens
ctttatgtacttatg

SEQ ID NO: 1235929 - DNA, 15 bp, Homo sapiens
tctttatgtacttat

SEQ ID NO: 1235930 - DNA, 15 bp, Homo sapiens
ttctttatgtactta

SEQ ID NO: 1235931 - DNA, 15 bp, Homo sapiens
tttctttatgtactt

SEQ ID NO: 1235932 - DNA, 15 bp, Homo sapiens
ttttctttatgtact

SEQ ID NO: 1235933 - DNA, 15 bp, Homo sapiens
attttctttatgtac

SEQ ID NO: 1235934 - DNA, 15 bp, Homo sapiens
aattttctttatgta

SEQ ID NO: 1235935 - DNA, 15 bp, Homo sapiens
aaattttctttatgt

SEQ ID NO: 1235936 - DNA, 15 bp, Homo sapiens
aaaattttctttatg

SEQ ID NO: 1235937 - DNA, 15 bp, Homo sapiens
gaaaattttctttat

SEQ ID NO: 1235938 - DNA, 15 bp, Homo sapiens
tgaaaattttcttta

SEQ ID NO: 1235939 - DNA, 15 bp, Homo sapiens
atgaaaattttcttt

SEQ ID NO: 1235940 - DNA, 15 bp, Homo sapiens
aatgaaaattttctt

SEQ ID NO: 1235941 - DNA, 15 bp, Homo sapiens
aaatgaaaattttct

SEQ ID NO: 1235942 - DNA, 15 bp, Homo sapiens
taaatgaaaattttc

SEQ ID NO: 1235943 - DNA, 15 bp, Homo sapiens
ataaatgaaaatttt

SEQ ID NO: 1235944 - DNA, 15 bp, Homo sapiens
aataaatgaaaattt

SEQ ID NO: 1235945 - DNA, 15 bp, Homo sapiens
aaataaatgaaaatt

SEQ ID NO: 1235946 - DNA, 15 bp, Homo sapiens
aaaataaatgaaaat

SEQ ID NO: 1235947 - DNA, 15 bp, Homo sapiens
aaaaataaatgaaaa

SEQ ID NO: 1235948 - DNA, 15 bp, Homo sapiens
gaaaaataaatgaaa

SEQ ID NO: 1235949 - DNA, 15 bp, Homo sapiens
ggaaaaataaatgaa

SEQ ID NO: 1235950 - DNA, 15 bp, Homo sapiens
gggaaaaataaatga

SEQ ID NO: 1235951 - DNA, 15 bp, Homo sapiens
agggaaaaataaatg

SEQ ID NO: 1235952 - DNA, 15 bp, Homo sapiens
gagggaaaaataaat

SEQ ID NO: 1235953 - DNA, 15 bp, Homo sapiens
tgagggaaaaataaa

SEQ ID NO: 1235954 - DNA, 15 bp, Homo sapiens
ctgagggaaaaataa

SEQ ID NO: 1235955 - DNA, 15 bp, Homo sapiens
tctgagggaaaaata

SEQ ID NO: 1235956 - DNA, 15 bp, Homo sapiens
atctgagggaaaaat

SEQ ID NO: 1235957 - DNA, 15 bp, Homo sapiens
tatctgagggaaaaa

SEQ ID NO: 1235958 - DNA, 15 bp, Homo sapiens
atatctgagggaaaa

SEQ ID NO: 1235959 - DNA, 15 bp, Homo sapiens
tatatctgagggaaa

SEQ ID NO: 1235960 - DNA, 15 bp, Homo sapiens
gtatatctgagggaa

SEQ ID NO: 1235961 - DNA, 15 bp, Homo sapiens
agtatatctgaggga

SEQ ID NO: 1235962 - DNA, 15 bp, Homo sapiens
aagtatatctgaggg

SEQ ID NO: 1235963 - DNA, 15 bp, Homo sapiens
gaagtatatctgagg

SEQ ID NO: 1235964 - DNA, 15 bp, Homo sapiens
tgaagtatatctgag

SEQ ID NO: 1235965 - DNA, 15 bp, Homo sapiens
ttgaagtatatctga

SEQ ID NO: 1235966 - DNA, 15 bp, Homo sapiens
tttgaagtatatctg

SEQ ID NO: 1235967 - DNA, 15 bp, Homo sapiens
ttttgaagtatatct

SEQ ID NO: 1235968 - DNA, 15 bp, Homo sapiens
attttgaagtatatc

SEQ ID NO: 1235969 - DNA, 15 bp, Homo sapiens
tattttgaagtatat

SEQ ID NO: 1235970 - DNA, 15 bp, Homo sapiens
ttattttgaagtata

SEQ ID NO: 1235971 - DNA, 15 bp, Homo sapiens
gttattttgaagtat

SEQ ID NO: 1235972 - DNA, 15 bp, Homo sapiens
tgttattttgaagta

SEQ ID NO: 1235973 - DNA, 15 bp, Homo sapiens
atgttattttgaagt

SEQ ID NO: 1235974 - DNA, 15 bp, Homo sapiens
catgttattttgaag

SEQ ID NO: 1235975 - DNA, 15 bp, Homo sapiens
acatgttattttgaa

SEQ ID NO: 1235976 - DNA, 15 bp, Homo sapiens
tacatgttattttga

SEQ ID NO: 1235977 - DNA, 15 bp, Homo sapiens
ctacatgttattttg

SEQ ID NO: 1235978 - DNA, 15 bp, Homo sapiens
tctacatgttatttt

SEQ ID NO: 1235979 - DNA, 15 bp, Homo sapiens
gtctacatgttattt

SEQ ID NO: 1235980 - DNA, 15 bp, Homo sapiens
tgtctacatgttatt

SEQ ID NO: 1235981 - DNA, 15 bp, Homo sapiens
gtgtctacatgttat

SEQ ID NO: 1235982 - DNA, 15 bp, Homo sapiens
tgtgtctacatgtta

SEQ ID NO: 1235983 - DNA, 15 bp, Homo sapiens
ctgtgtctacatgtt

SEQ ID NO: 1235984 - DNA, 15 bp, Homo sapiens
tctgtgtctacatgt

SEQ ID NO: 1235985 - DNA, 15 bp, Homo sapiens
ttctgtgtctacatg

SEQ ID NO: 1235986 - DNA, 15 bp, Homo sapiens
attctgtgtctacat

SEQ ID NO: 1235987 - DNA, 15 bp, Homo sapiens
gattctgtgtctaca

SEQ ID NO: 1235988 - DNA, 15 bp, Homo sapiens
tgattctgtgtctac

SEQ ID NO: 1235989 - DNA, 15 bp, Homo sapiens
gtgattctgtgtcta

SEQ ID NO: 1235990 - DNA, 15 bp, Homo sapiens
tgtgattctgtgtct

SEQ ID NO: 1235991 - DNA, 15 bp, Homo sapiens
ttgtgattctgtgtc

SEQ ID NO: 1235992 - DNA, 15 bp, Homo sapiens
tttgtgattctgtgt

SEQ ID NO: 1235993 - DNA, 15 bp, Homo sapiens
atttgtgattctgtg

SEQ ID NO: 1235994 - DNA, 15 bp, Homo sapiens
tatttgtgattctgt

SEQ ID NO: 1235995 - DNA, 15 bp, Homo sapiens
atatttgtgattctg

SEQ ID NO: 1235996 - DNA, 15 bp, Homo sapiens
tatatttgtgattct

SEQ ID NO: 1235997 - DNA, 15 bp, Homo sapiens
atatatttgtgattc

SEQ ID NO: 1235998 - DNA, 15 bp, Homo sapiens
gtatatatttgtgat

SEQ ID NO: 1235999 - DNA, 15 bp, Homo sapiens
tgtatatatttgtga

SEQ ID NO: 1236000 - DNA, 15 bp, Homo sapiens
ttgtatatatttgtg

SEQ ID NO: 1236001 - DNA, 15 bp, Homo sapiens
tttgtatatatttgt

SEQ ID NO: 1236002 - DNA, 15 bp, Homo sapiens
ttttgtatatatttg

SEQ ID NO: 1236003 - DNA, 15 bp, Homo sapiens
gttttgtatatattt

SEQ ID NO: 1236004 - DNA, 15 bp, Homo sapiens
tgttttgtatatatt

SEQ ID NO: 1236005 - DNA, 15 bp, Homo sapiens
ttgttttgtatatat

SEQ ID NO: 1236006 - DNA, 15 bp, Homo sapiens
tttgttttgtatata

SEQ ID NO: 1236007 - DNA, 15 bp, Homo sapiens
ctttgttttgtatat

SEQ ID NO: 1236008 - DNA, 15 bp, Homo sapiens
actttgttttgtata

SEQ ID NO: 1236009 - DNA, 15 bp, Homo sapiens
tactttgttttgtat

SEQ ID NO: 1236010 - DNA, 15 bp, Homo sapiens
atactttgttttgta

SEQ ID NO: 1236011 - DNA, 15 bp, Homo sapiens
gatactttgttttgt

SEQ ID NO: 1236012 - DNA, 15 bp, Homo sapiens
cgatactttgttttg

SEQ ID NO: 1236013 - DNA, 15 bp, Homo sapiens
gcgatactttgtttt

SEQ ID NO: 1236014 - DNA, 15 bp, Homo sapiens
ggcgatactttgttt

SEQ ID NO: 1236015 - DNA, 15 bp, Homo sapiens
aggcgatactttgtt

SEQ ID NO: 1236016 - DNA, 15 bp, Homo sapiens
caggcgatactttgt

SEQ ID NO: 1236017 - DNA, 15 bp, Homo sapiens
ccaggcgatactttg

SEQ ID NO: 1236018 - DNA, 15 bp, Homo sapiens
accaggcgatacttt

SEQ ID NO: 1236019 - DNA, 15 bp, Homo sapiens
aaccaggcgatactt

SEQ ID NO: 1236020 - DNA, 15 bp, Homo sapiens
taaccaggcgatact

SEQ ID NO: 1236021 - DNA, 15 bp, Homo sapiens
ataaccaggcgatac

SEQ ID NO: 1236022 - DNA, 15 bp, Homo sapiens
aataaccaggcgata

SEQ ID NO: 1236023 - DNA, 15 bp, Homo sapiens
aaataaccaggcgat

SEQ ID NO: 1236024 - DNA, 15 bp, Homo sapiens
gaaataaccaggcga

SEQ ID NO: 1236025 - DNA, 15 bp, Homo sapiens
tgaaataaccaggcg

SEQ ID NO: 1236026 - DNA, 15 bp, Homo sapiens
ttgaaataaccaggc

SEQ ID NO: 1236027 - DNA, 15 bp, Homo sapiens
cttgaaataaccagg

SEQ ID NO: 1236028 - DNA, 15 bp, Homo sapiens
tcttgaaataaccag

SEQ ID NO: 1236029 - DNA, 15 bp, Homo sapiens
ttcttgaaataacca

SEQ ID NO: 1236030 - DNA, 15 bp, Homo sapiens
cttcttgaaataacc

SEQ ID NO: 1236031 - DNA, 15 bp, Homo sapiens
tcttcttgaaataac

SEQ ID NO: 1236032 - DNA, 15 bp, Homo sapiens
ctcttcttgaaataa

SEQ ID NO: 1236033 - DNA, 15 bp, Homo sapiens
actcttcttgaaata

SEQ ID NO: 1236034 - DNA, 15 bp, Homo sapiens
aactcttcttgaaat

SEQ ID NO: 1236035 - DNA, 15 bp, Homo sapiens
aaactcttcttgaaa

SEQ ID NO: 1236036 - DNA, 15 bp, Homo sapiens
aaaactcttcttgaa

SEQ ID NO: 1236037 - DNA, 15 bp, Homo sapiens
gaaaactcttcttga

SEQ ID NO: 1236038 - DNA, 15 bp, Homo sapiens
ggaaaactcttcttg

SEQ ID NO: 1236039 - DNA, 15 bp, Homo sapiens
gggaaaactcttctt

SEQ ID NO: 1236040 - DNA, 15 bp, Homo sapiens
agggaaaactcttct

SEQ ID NO: 1236041 - DNA, 15 bp, Homo sapiens
gagggaaaactcttc

SEQ ID NO: 1236042 - DNA, 15 bp, Homo sapiens
tgagggaaaactctt

SEQ ID NO: 1236043 - DNA, 15 bp, Homo sapiens
ttgagggaaaactct

SEQ ID NO: 1236044 - DNA, 15 bp, Homo sapiens
attgagggaaaactc

SEQ ID NO: 1236045 - DNA, 15 bp, Homo sapiens
aattgagggaaaact

SEQ ID NO: 1236046 - DNA, 15 bp, Homo sapiens
aaattgagggaaaac

SEQ ID NO: 1236047 - DNA, 15 bp, Homo sapiens
aaaattgagggaaaa

SEQ ID NO: 1236048 - DNA, 15 bp, Homo sapiens
gaaaattgagggaaa

SEQ ID NO: 1236049 - DNA, 15 bp, Homo sapiens
agaaaattgagggaa

SEQ ID NO: 1236050 - DNA, 15 bp, Homo sapiens
aagaaaattgaggga

SEQ ID NO: 1236051 - DNA, 15 bp, Homo sapiens
taagaaaattgaggg

SEQ ID NO: 1236052 - DNA, 15 bp, Homo sapiens
ctaagaaaattgagg

SEQ ID NO: 1236053 - DNA, 15 bp, Homo sapiens
gctaagaaaattgag

SEQ ID NO: 1236054 - DNA, 15 bp, Homo sapiens
agctaagaaaattga

SEQ ID NO: 1236055 - DNA, 15 bp, Homo sapiens
cagctaagaaaattg

SEQ ID NO: 1236056 - DNA, 15 bp, Homo sapiens
gcagctaagaaaatt

SEQ ID NO: 1236057 - DNA, 15 bp, Homo sapiens
agcagctaagaaaat

SEQ ID NO: 1236058 - DNA, 15 bp, Homo sapiens
cagcagctaagaaaa

SEQ ID NO: 1236059 - DNA, 15 bp, Homo sapiens
acagcagctaagaaa

SEQ ID NO: 1236060 - DNA, 15 bp, Homo sapiens
cacagcagctaagaa

SEQ ID NO: 1236061 - DNA, 15 bp, Homo sapiens
gcacagcagctaaga

SEQ ID NO: 1236062 - DNA, 15 bp, Homo sapiens
tgcacagcagctaag

SEQ ID NO: 1236063 - DNA, 15 bp, Homo sapiens
atgcacagcagctaa

SEQ ID NO: 1236064 - DNA, 15 bp, Homo sapiens
tatgcacagcagcta

SEQ ID NO: 1236065 - DNA, 15 bp, Homo sapiens
ttatgcacagcagct

SEQ ID NO: 1236066 - DNA, 15 bp, Homo sapiens
tttatgcacagcagc

SEQ ID NO: 1236067 - DNA, 15 bp, Homo sapiens
ttttatgcacagcag

SEQ ID NO: 1236068 - DNA, 15 bp, Homo sapiens
attttatgcacagca

SEQ ID NO: 1236069 - DNA, 15 bp, Homo sapiens
aattttatgcacagc

SEQ ID NO: 1236070 - DNA, 15 bp, Homo sapiens
gaattttatgcacag

SEQ ID NO: 1236071 - DNA, 15 bp, Homo sapiens
tgaattttatgcaca

SEQ ID NO: 1236072 - DNA, 15 bp, Homo sapiens
ttgaattttatgcac

SEQ ID NO: 1236073 - DNA, 15 bp, Homo sapiens
tttgaattttatgca

SEQ ID NO: 1236074 - DNA, 15 bp, Homo sapiens
ctttgaattttatgc

SEQ ID NO: 1236075 - DNA, 15 bp, Homo sapiens
gctttgaattttatg

SEQ ID NO: 1236076 - DNA, 15 bp, Homo sapiens
agctttgaattttat

SEQ ID NO: 1236077 - DNA, 15 bp, Homo sapiens
aagctttgaatttta

SEQ ID NO: 1236078 - DNA, 15 bp, Homo sapiens
aaagctttgaatttt

SEQ ID NO: 1236079 - DNA, 15 bp, Homo sapiens
gaaagctttgaattt

SEQ ID NO: 1236080 - DNA, 15 bp, Homo sapiens
ggaaagctttgaatt

SEQ ID NO: 1236081 - DNA, 15 bp, Homo sapiens
aggaaagctttgaat

SEQ ID NO: 1236082 - DNA, 15 bp, Homo sapiens
caggaaagctttgaa

SEQ ID NO: 1236083 - DNA, 15 bp, Homo sapiens
acaggaaagctttga

SEQ ID NO: 1236084 - DNA, 15 bp, Homo sapiens
aacaggaaagctttg

SEQ ID NO: 1236085 - DNA, 15 bp, Homo sapiens
taacaggaaagcttt

SEQ ID NO: 1236086 - DNA, 15 bp, Homo sapiens
ttaacaggaaagctt

SEQ ID NO: 1236087 - DNA, 15 bp, Homo sapiens
cttaacaggaaagct

SEQ ID NO: 1236088 - DNA, 15 bp, Homo sapiens
ccttaacaggaaagc

SEQ ID NO: 1236089 - DNA, 15 bp, Homo sapiens
tccttaacaggaaag

SEQ ID NO: 1236090 - DNA, 15 bp, Homo sapiens
ctccttaacaggaaa

SEQ ID NO: 1236091 - DNA, 15 bp, Homo sapiens
tctccttaacaggaa

SEQ ID NO: 1236092 - DNA, 15 bp, Homo sapiens
ttctccttaacagga

SEQ ID NO: 1236093 - DNA, 15 bp, Homo sapiens
tttctccttaacagg

SEQ ID NO: 1236094 - DNA, 15 bp, Homo sapiens
ttttctccttaacag

SEQ ID NO: 1236095 - DNA, 15 bp, Homo sapiens
tttttctccttaaca

SEQ ID NO: 1236096 - DNA, 15 bp, Homo sapiens
ttttttctccttaac

SEQ ID NO: 1236097 - DNA, 15 bp, Homo sapiens
ctttttttctcctta

SEQ ID NO: 1236098 - DNA, 15 bp, Homo sapiens
tctttttttctcctt

SEQ ID NO: 1236099 - DNA, 15 bp, Homo sapiens
ctctttttttctcct

SEQ ID NO: 1236100 - DNA, 15 bp, Homo sapiens
cctctttttttctcc

SEQ ID NO: 1236101 - DNA, 15 bp, Homo sapiens
ccctctttttttctc

SEQ ID NO: 1236102 - DNA, 15 bp, Homo sapiens
tccctctttttttct

SEQ ID NO: 1236103 - DNA, 15 bp, Homo sapiens
ttccctctttttttc

SEQ ID NO: 1236104 - DNA, 15 bp, Homo sapiens
cttccctcttttttt

SEQ ID NO: 1236105 - DNA, 15 bp, Homo sapiens
acttccctctttttt

SEQ ID NO: 1236106 - DNA, 15 bp, Homo sapiens
aacttccctcttttt

SEQ ID NO: 1236107 - DNA, 15 bp, Homo sapiens
taacttccctctttt

SEQ ID NO: 1236108 - DNA, 15 bp, Homo sapiens
ctaacttccctcttt

SEQ ID NO: 1236109 - DNA, 15 bp, Homo sapiens
tctaacttccctctt

SEQ ID NO: 1236110 - DNA, 15 bp, Homo sapiens
ctctaacttccctct

SEQ ID NO: 1236111 - DNA, 15 bp, Homo sapiens
tctctaacttccctc

SEQ ID NO: 1236112 - DNA, 15 bp, Homo sapiens
atctctaacttccct

SEQ ID NO: 1236113 - DNA, 15 bp, Homo sapiens
tatctctaacttccc

SEQ ID NO: 1236114 - DNA, 15 bp, Homo sapiens
gtatctctaacttcc

SEQ ID NO: 1236115 - DNA, 15 bp, Homo sapiens
ggtatctctaacttc

SEQ ID NO: 1236116 - DNA, 15 bp, Homo sapiens
tggtatctctaactt

SEQ ID NO: 1236117 - DNA, 15 bp, Homo sapiens
ctggtatctctaact

SEQ ID NO: 1236118 - DNA, 15 bp, Homo sapiens
gctggtatctctaac

SEQ ID NO: 1236119 - DNA, 15 bp, Homo sapiens
tgctggtatctctaa

SEQ ID NO: 1236120 - DNA, 15 bp, Homo sapiens
ttgctggtatctcta

SEQ ID NO: 1236121 - DNA, 15 bp, Homo sapiens
cttgctggtatctct

SEQ ID NO: 1236122 - DNA, 15 bp, Homo sapiens
tcttgctggtatctc

SEQ ID NO: 1236123 - DNA, 15 bp, Homo sapiens
ctcttgctggtatct

SEQ ID NO: 1236124 - DNA, 15 bp, Homo sapiens
cctcttgctggtatc

SEQ ID NO: 1236125 - DNA, 15 bp, Homo sapiens
acctcttgctggtat

SEQ ID NO: 1236126 - DNA, 15 bp, Homo sapiens
cacctcttgctggta

SEQ ID NO: 1236127 - DNA, 15 bp, Homo sapiens
tcacctcttgctggt

SEQ ID NO: 1236128 - DNA, 15 bp, Homo sapiens
atcacctcttgctgg

SEQ ID NO: 1236129 - DNA, 15 bp, Homo sapiens
catcacctcttgctg

SEQ ID NO: 1236130 - DNA, 15 bp, Homo sapiens
ccatcacctcttgct

SEQ ID NO: 1236131 - DNA, 15 bp, Homo sapiens
accatcacctcttgc

SEQ ID NO: 1236132 - DNA, 15 bp, Homo sapiens
taccatcacctcttg

SEQ ID NO: 1236133 - DNA, 15 bp, Homo sapiens
gtaccatcacctctt

SEQ ID NO: 1236134 - DNA, 15 bp, Homo sapiens
tgtaccatcacctct

SEQ ID NO: 1236135 - DNA, 15 bp, Homo sapiens
atgtaccatcacctc

SEQ ID NO: 1236136 - DNA, 15 bp, Homo sapiens
tatgtaccatcacct

SEQ ID NO: 1236137 - DNA, 15 bp, Homo sapiens
ttatgtaccatcacc

SEQ ID NO: 1236138 - DNA, 15 bp, Homo sapiens
gttatgtaccatcac

SEQ ID NO: 1236139 - DNA, 15 bp, Homo sapiens
agttatgtaccatca

SEQ ID NO: 1236140 - DNA, 15 bp, Homo sapiens
aagttatgtaccatc

SEQ ID NO: 1236141 - DNA, 15 bp, Homo sapiens
taagttatgtaccat

SEQ ID NO: 1236142 - DNA, 15 bp, Homo sapiens
ttaagttatgtacca

SEQ ID NO: 1236143 - DNA, 15 bp, Homo sapiens
tttaagttatgtacc

SEQ ID NO: 1236144 - DNA, 15 bp, Homo sapiens
ttttaagttatgtac

SEQ ID NO: 1236145 - DNA, 15 bp, Homo sapiens
tttttaagttatgta

SEQ ID NO: 1236146 - DNA, 15 bp, Homo sapiens
ttttttaagttatgt

SEQ ID NO: 1236147 - DNA, 15 bp, Homo sapiens
attttttaagttatg

SEQ ID NO: 1236148 - DNA, 15 bp, Homo sapiens
gattttttaagttat

SEQ ID NO: 1236149 - DNA, 15 bp, Homo sapiens
tgattttttaagtta

SEQ ID NO: 1236150 - DNA, 15 bp, Homo sapiens
atgattttttaagtt

SEQ ID NO: 1236151 - DNA, 15 bp, Homo sapiens
tatgattttttaagt

SEQ ID NO: 1236152 - DNA, 15 bp, Homo sapiens
ttatgattttttaag

SEQ ID NO: 1236153 - DNA, 15 bp, Homo sapiens
tttatgattttttaa

SEQ ID NO: 1236154 - DNA, 15 bp, Homo sapiens
ttttatgatttttta

SEQ ID NO: 1236155 - DNA, 15 bp, Homo sapiens
gttttatgatttttt

SEQ ID NO: 1236156 - DNA, 15 bp, Homo sapiens
tgttttatgattttt

SEQ ID NO: 1236157 - DNA, 15 bp, Homo sapiens
gtgttttatgatttt

SEQ ID NO: 1236158 - DNA, 15 bp, Homo sapiens
agtgttttatgattt

SEQ ID NO: 1236159 - DNA, 15 bp, Homo sapiens
tagtgttttatgatt

SEQ ID NO: 1236160 - DNA, 15 bp, Homo sapiens
gtagtgttttatgat

SEQ ID NO: 1236161 - DNA, 15 bp, Homo sapiens
ggtagtgttttatga

SEQ ID NO: 1236162 - DNA, 15 bp, Homo sapiens
tggtagtgttttatg

SEQ ID NO: 1236163 - DNA, 15 bp, Homo sapiens
ttggtagtgttttat

SEQ ID NO: 1236164 - DNA, 15 bp, Homo sapiens
gttggtagtgtttta

SEQ ID NO: 1236165 - DNA, 15 bp, Homo sapiens
agttggtagtgtttt

SEQ ID NO: 1236166 - DNA, 15 bp, Homo sapiens
cagttggtagtgttt

SEQ ID NO: 1236167 - DNA, 15 bp, Homo sapiens
ccagttggtagtgtt

SEQ ID NO: 1236168 - DNA, 15 bp, Homo sapiens
accagttggtagtgt

SEQ ID NO: 1236169 - DNA, 15 bp, Homo sapiens
taccagttggtagtg

SEQ ID NO: 1236170 - DNA, 15 bp, Homo sapiens
ctaccagttggtagt

SEQ ID NO: 1236171 - DNA, 15 bp, Homo sapiens
gctaccagttggtag

SEQ ID NO: 1236172 - DNA, 15 bp, Homo sapiens
agctaccagttggta

SEQ ID NO: 1236173 - DNA, 15 bp, Homo sapiens
tagctaccagttggt

SEQ ID NO: 1236174 - DNA, 15 bp, Homo sapiens
ttagctaccagttgg

SEQ ID NO: 1236175 - DNA, 15 bp, Homo sapiens
cttagctaccagttg

SEQ ID NO: 1236176 - DNA, 15 bp, Homo sapiens
tcttagctaccagtt

SEQ ID NO: 1236177 - DNA, 15 bp, Homo sapiens
gtcttagctaccagt

SEQ ID NO: 1236178 - DNA, 15 bp, Homo sapiens
agtcttagctaccag

SEQ ID NO: 1236179 - DNA, 15 bp, Homo sapiens
cagtcttagctacca

SEQ ID NO: 1236180 - DNA, 15 bp, Homo sapiens
gcagtcttagctacc

SEQ ID NO: 1236181 - DNA, 15 bp, Homo sapiens
ggcagtcttagctac

SEQ ID NO: 1236182 - DNA, 15 bp, Homo sapiens
tggcagtcttagcta

SEQ ID NO: 1236183 - DNA, 15 bp, Homo sapiens
ctggcagtcttagct

SEQ ID NO: 1236184 - DNA, 15 bp, Homo sapiens
cctggcagtcttagc

SEQ ID NO: 1236185 - DNA, 15 bp, Homo sapiens
gcctggcagtcttag

SEQ ID NO: 1236186 - DNA, 15 bp, Homo sapiens
ggcctggcagtctta

SEQ ID NO: 1236187 - DNA, 15 bp, Homo sapiens
gggcctggcagtctt

SEQ ID NO: 1236188 - DNA, 15 bp, Homo sapiens
tgggcctggcagtct

SEQ ID NO: 1236189 - DNA, 15 bp, Homo sapiens
atgggcctggcagtc

SEQ ID NO: 1236190 - DNA, 15 bp, Homo sapiens
catgggcctggcagt

SEQ ID NO: 1236191 - DNA, 15 bp, Homo sapiens
ccatgggcctggcag

SEQ ID NO: 1236192 - DNA, 15 bp, Homo sapiens
tccatgggcctggca

SEQ ID NO: 1236193 - DNA, 15 bp, Homo sapiens
ttccatgggcctggc

SEQ ID NO: 1236194 - DNA, 15 bp, Homo sapiens
cttccatgggcctgg

SEQ ID NO: 1236195 - DNA, 15 bp, Homo sapiens
tcttccatgggcctg

SEQ ID NO: 1236196 - DNA, 15 bp, Homo sapiens
atcttccatgggcct

SEQ ID NO: 1236197 - DNA, 15 bp, Homo sapiens
catcttccatgggcc

SEQ ID NO: 1236198 - DNA, 15 bp, Homo sapiens
gcatcttccatgggc

SEQ ID NO: 1236199 - DNA, 15 bp, Homo sapiens
agcatcttccatggg

SEQ ID NO: 1236200 - DNA, 15 bp, Homo sapiens
cagcatcttccatgg

SEQ ID NO: 1236201 - DNA, 15 bp, Homo sapiens
gcagcatcttccatg

SEQ ID NO: 1236202 - DNA, 15 bp, Homo sapiens
ggcagcatcttccat

SEQ ID NO: 1236203 - DNA, 15 bp, Homo sapiens
gggcagcatcttcca

SEQ ID NO: 1236204 - DNA, 15 bp, Homo sapiens
ggggcagcatcttcc

SEQ ID NO: 1236205 - DNA, 15 bp, Homo sapiens
aggggcagcatcttc

SEQ ID NO: 1236206 - DNA, 15 bp, Homo sapiens
gaggggcagcatctt

SEQ ID NO: 1236207 - DNA, 15 bp, Homo sapiens
tgaggggcagcatct

SEQ ID NO: 1236208 - DNA, 15 bp, Homo sapiens
ttgaggggcagcatc

SEQ ID NO: 1236209 - DNA, 15 bp, Homo sapiens
cttgaggggcagcat

SEQ ID NO: 1236210 - DNA, 15 bp, Homo sapiens
gcttgaggggcagca

SEQ ID NO: 1236211 - DNA, 15 bp, Homo sapiens
agcttgaggggcagc

SEQ ID NO: 1236212 - DNA, 15 bp, Homo sapiens
tgaagcttgaggggc

SEQ ID NO: 1236213 - DNA, 15 bp, Homo sapiens
ctgaagcttgagggg

SEQ ID NO: 1236214 - DNA, 15 bp, Homo sapiens
actgaagcttgaggg

SEQ ID NO: 1236215 - DNA, 15 bp, Homo sapiens
tactgaagcttgagg

SEQ ID NO: 1236216 - DNA, 15 bp, Homo sapiens
gtactgaagcttgag

SEQ ID NO: 1236217 - DNA, 15 bp, Homo sapiens
agtactgaagcttga

SEQ ID NO: 1236218 - DNA, 15 bp, Homo sapiens
gagtactgaagcttg

SEQ ID NO: 1236219 - DNA, 15 bp, Homo sapiens
ggagtactgaagctt

SEQ ID NO: 1236220 - DNA, 15 bp, Homo sapiens
aggagtactgaagct

SEQ ID NO: 1236221 - DNA, 15 bp, Homo sapiens
aaggagtactgaagc

SEQ ID NO: 1236222 - DNA, 15 bp, Homo sapiens
gaaggagtactgaag

SEQ ID NO: 1236223 - DNA, 15 bp, Homo sapiens
ggaaggagtactgaa

SEQ ID NO: 1236224 - DNA, 15 bp, Homo sapiens
aggaaggagtactga

SEQ ID NO: 1236225 - DNA, 15 bp, Homo sapiens
aaggaaggagtactg

SEQ ID NO: 1236226 - DNA, 15 bp, Homo sapiens
caaggaaggagtact

SEQ ID NO: 1236227 - DNA, 15 bp, Homo sapiens
acaaggaaggagtac

SEQ ID NO: 1236228 - DNA, 15 bp, Homo sapiens
aacaaggaaggagta

SEQ ID NO: 1236229 - DNA, 15 bp, Homo sapiens
aaacaaggaaggagt

SEQ ID NO: 1236230 - DNA, 15 bp, Homo sapiens
gaaacaaggaaggag

SEQ ID NO: 1236231 - DNA, 15 bp, Homo sapiens
tgaaacaaggaagga

SEQ ID NO: 1236232 - DNA, 15 bp, Homo sapiens
atgaaacaaggaagg

SEQ ID NO: 1236233 - DNA, 15 bp, Homo sapiens
catgaaacaaggaag

SEQ ID NO: 1236234 - DNA, 15 bp, Homo sapiens
tcatgaaacaaggaa

SEQ ID NO: 1236235 - DNA, 15 bp, Homo sapiens
ttcatgaaacaagga

SEQ ID NO: 1236236 - DNA, 15 bp, Homo sapiens
tttcatgaaacaagg

SEQ ID NO: 1236237 - DNA, 15 bp, Homo sapiens
atttcatgaaacaag

SEQ ID NO: 1236238 - DNA, 15 bp, Homo sapiens
gatttcatgaaacaa

SEQ ID NO: 1236239 - DNA, 15 bp, Homo sapiens
tgatttcatgaaaca

SEQ ID NO: 1236240 - DNA, 15 bp, Homo sapiens
gtgatttcatgaaac

SEQ ID NO: 1236241 - DNA, 15 bp, Homo sapiens
tgtgatttcatgaaa

SEQ ID NO: 1236242 - DNA, 15 bp, Homo sapiens
ttgtgatttcatgaa

SEQ ID NO: 1236243 - DNA, 15 bp, Homo sapiens
cttgtgatttcatga

SEQ ID NO: 1236244 - DNA, 15 bp, Homo sapiens
acttgtgatttcatg

SEQ ID NO: 1236245 - DNA, 15 bp, Homo sapiens
aacttgtgatttcat

SEQ ID NO: 1236246 - DNA, 15 bp, Homo sapiens
gaacttgtgatttca

SEQ ID NO: 1236247 - DNA, 15 bp, Homo sapiens
tgaacttgtgatttc

SEQ ID NO: 1236248 - DNA, 15 bp, Homo sapiens
ttgaacttgtgattt

SEQ ID NO: 1236249 - DNA, 15 bp, Homo sapiens
cttgaacttgtgatt

SEQ ID NO: 1236250 - DNA, 15 bp, Homo sapiens
ccttgaacttgtgat

SEQ ID NO: 1236251 - DNA, 15 bp, Homo sapiens
cccttgaacttgtga

SEQ ID NO: 1236252 - DNA, 15 bp, Homo sapiens
gcccttgaacttgtg

SEQ ID NO: 1236253 - DNA, 15 bp, Homo sapiens
ggcccttgaacttgt

SEQ ID NO: 1236254 - DNA, 15 bp, Homo sapiens
aggcccttgaacttg

SEQ ID NO: 1236255 - DNA, 15 bp, Homo sapiens
gaggcccttgaactt

SEQ ID NO: 1236256 - DNA, 15 bp, Homo sapiens
cgaggcccttgaact

SEQ ID NO: 1236257 - DNA, 15 bp, Homo sapiens
ccgaggcccttgaac

SEQ ID NO: 1236258 - DNA, 15 bp, Homo sapiens
cccgaggcccttgaa

SEQ ID NO: 1236259 - DNA, 15 bp, Homo sapiens
acccgaggcccttga

SEQ ID NO: 1236260 - DNA, 15 bp, Homo sapiens
aacccgaggcccttg

SEQ ID NO: 1236261 - DNA, 15 bp, Homo sapiens
gaacccgaggccctt

SEQ ID NO: 1236262 - DNA, 15 bp, Homo sapiens
tgaacccgaggccct

SEQ ID NO: 1236263 - DNA, 15 bp, Homo sapiens
ctgaacccgaggccc

SEQ ID NO: 1236264 - DNA, 15 bp, Homo sapiens
tctgaacccgaggcc

SEQ ID NO: 1236265 - DNA, 15 bp, Homo sapiens
ctctgaacccgaggc

SEQ ID NO: 1236266 - DNA, 15 bp, Homo sapiens
actctgaacccgagg

SEQ ID NO: 1236267 - DNA, 15 bp, Homo sapiens
aactctgaacccgag

SEQ ID NO: 1236268 - DNA, 15 bp, Homo sapiens
taactctgaacccga

SEQ ID NO: 1236269 - DNA, 15 bp, Homo sapiens
ttaactctgaacccg

SEQ ID NO: 1236270 - DNA, 15 bp, Homo sapiens
tttaactctgaaccc

SEQ ID NO: 1236271 - DNA, 15 bp, Homo sapiens
ctttaactctgaacc

SEQ ID NO: 1236272 - DNA, 15 bp, Homo sapiens
gctttaactctgaac

SEQ ID NO: 1236273 - DNA, 15 bp, Homo sapiens
agctttaactctgaa

SEQ ID NO: 1236274 - DNA, 15 bp, Homo sapiens
tagctttaactctga

SEQ ID NO: 1236275 - DNA, 15 bp, Homo sapiens
ctagctttaactctg

SEQ ID NO: 1236276 - DNA, 15 bp, Homo sapiens
gctagctttaactct

SEQ ID NO: 1236277 - DNA, 15 bp, Homo sapiens
tgctagctttaactc

SEQ ID NO: 1236278 - DNA, 15 bp, Homo sapiens
ctgctagctttaact

SEQ ID NO: 1236279 - DNA, 15 bp, Homo sapiens
gctgctagctttaac

SEQ ID NO: 1236280 - DNA, 15 bp, Homo sapiens
tgctgctagctttaa

SEQ ID NO: 1236281 - DNA, 15 bp, Homo sapiens
ctgctgctagcttta

SEQ ID NO: 1236282 - DNA, 15 bp, Homo sapiens
cctgctgctagcttt

SEQ ID NO: 1236283 - DNA, 15 bp, Homo sapiens
tcctgctgctagctt

SEQ ID NO: 1236284 - DNA, 15 bp, Homo sapiens
ctcctgctgctagct

SEQ ID NO: 1236285 - DNA, 15 bp, Homo sapiens
cctcctgctgctagc

SEQ ID NO: 1236286 - DNA, 15 bp, Homo sapiens
acctcctgctgctag

SEQ ID NO: 1236287 - DNA, 15 bp, Homo sapiens
tacctcctgctgcta

SEQ ID NO: 1236288 - DNA, 15 bp, Homo sapiens
ctacctcctgctgct

SEQ ID NO: 1236289 - DNA, 15 bp, Homo sapiens
cctacctcctgctgc

SEQ ID NO: 1236290 - DNA, 15 bp, Homo sapiens
ccctacctcctgctg

SEQ ID NO: 1236291 - DNA, 15 bp, Homo sapiens
accctacctcctgct

SEQ ID NO: 1236292 - DNA, 15 bp, Homo sapiens
caccctacctcctgc

SEQ ID NO: 1236293 - DNA, 15 bp, Homo sapiens
gcaccctacctcctg

SEQ ID NO: 1236294 - DNA, 15 bp, Homo sapiens
cgcaccctacctcct

SEQ ID NO: 1236295 - DNA, 15 bp, Homo sapiens
acgcaccctacctcc

SEQ ID NO: 1236296 - DNA, 15 bp, Homo sapiens
cacgcaccctacctc

SEQ ID NO: 1236297 - DNA, 15 bp, Homo sapiens
acacgcaccctacct

SEQ ID NO: 1236298 - DNA, 15 bp, Homo sapiens
cacacgcaccctacc

SEQ ID NO: 1236299 - DNA, 15 bp, Homo sapiens
acacacgcaccctac

SEQ ID NO: 1236300 - DNA, 15 bp, Homo sapiens
cacacacgcacccta

SEQ ID NO: 1236301 - DNA, 15 bp, Homo sapiens
acacacacgcaccct

SEQ ID NO: 1236302 - DNA, 15 bp, Homo sapiens
tacacacacgcaccc

SEQ ID NO: 1236303 - DNA, 15 bp, Homo sapiens
atacacacacgcacc

SEQ ID NO: 1236304 - DNA, 15 bp, Homo sapiens
tatacacacacgcac

SEQ ID NO: 1236305 - DNA, 15 bp, Homo sapiens
gtatacacacacgca

SEQ ID NO: 1236306 - DNA, 15 bp, Homo sapiens
cgtatacacacacgc

SEQ ID NO: 1236307 - DNA, 15 bp, Homo sapiens
acgtatacacacacg

SEQ ID NO: 1236308 - DNA, 15 bp, Homo sapiens
cacgtatacacacac

SEQ ID NO: 1236309 - DNA, 15 bp, Homo sapiens
acacgtatacacaca

SEQ ID NO: 1236310 - DNA, 15 bp, Homo sapiens
cacacgtatacacac

SEQ ID NO: 1236311 - DNA, 15 bp, Homo sapiens
acacacgtatacaca

SEQ ID NO: 1236312 - DNA, 15 bp, Homo sapiens
tacacacgtatacac

SEQ ID NO: 1236313 - DNA, 15 bp, Homo sapiens
atacacacgtataca

SEQ ID NO: 1236314 - DNA, 15 bp, Homo sapiens
catacacacgtatac

SEQ ID NO: 1236315 - DNA, 15 bp, Homo sapiens
acatacacacgtata

SEQ ID NO: 1236316 - DNA, 15 bp, Homo sapiens
cacatacacacgtat

SEQ ID NO: 1236317 - DNA, 15 bp, Homo sapiens
gcacatacacacgta

SEQ ID NO: 1236318 - DNA, 15 bp, Homo sapiens
tgcacatacacacgt

SEQ ID NO: 1236319 - DNA, 15 bp, Homo sapiens
ttgcacatacacacg

SEQ ID NO: 1236320 - DNA, 15 bp, Homo sapiens
cttgcacatacacac

SEQ ID NO: 1236321 - DNA, 15 bp, Homo sapiens
gcttgcacatacaca

SEQ ID NO: 1236322 - DNA, 15 bp, Homo sapiens
tgcttgcacatacac

SEQ ID NO: 1236323 - DNA, 15 bp, Homo sapiens
atgcttgcacataca

SEQ ID NO: 1236324 - DNA, 15 bp, Homo sapiens
catgcttgcacatac

SEQ ID NO: 1236325 - DNA, 15 bp, Homo sapiens
acatgcttgcacata

SEQ ID NO: 1236326 - DNA, 15 bp, Homo sapiens
cacatgcttgcacat

SEQ ID NO: 1236327 - DNA, 15 bp, Homo sapiens
acacatgcttgcaca

SEQ ID NO: 1236328 - DNA, 15 bp, Homo sapiens
cacacatgcttgcac

SEQ ID NO: 1236329 - DNA, 15 bp, Homo sapiens
acacacatgcttgca

SEQ ID NO: 1236330 - DNA, 15 bp, Homo sapiens
cacacacatgcttgc

SEQ ID NO: 1236331 - DNA, 15 bp, Homo sapiens
acacacacatgcttg

SEQ ID NO: 1236332 - DNA, 15 bp, Homo sapiens
cacacacacatgctt

SEQ ID NO: 1236333 - DNA, 15 bp, Homo sapiens
gcacacacacatgct

SEQ ID NO: 1236334 - DNA, 15 bp, Homo sapiens
tgcacacacacatgc

SEQ ID NO: 1236335 - DNA, 15 bp, Homo sapiens
gtgcacacacacatg

SEQ ID NO: 1236336 - DNA, 15 bp, Homo sapiens
tgtgcacacacacat

SEQ ID NO: 1236337 - DNA, 15 bp, Homo sapiens
atgtgcacacacaca

SEQ ID NO: 1236338 - DNA, 15 bp, Homo sapiens
tatgtgcacacacac

SEQ ID NO: 1236339 - DNA, 15 bp, Homo sapiens
atatgtgcacacaca

SEQ ID NO: 1236340 - DNA, 15 bp, Homo sapiens
catatgtgcacacac

SEQ ID NO: 1236341 - DNA, 15 bp, Homo sapiens
ccatatgtgcacaca

SEQ ID NO: 1236342 - DNA, 15 bp, Homo sapiens
tccatatgtgcacac

SEQ ID NO: 1236343 - DNA, 15 bp, Homo sapiens
ctccatatgtgcaca

SEQ ID NO: 1236344 - DNA, 15 bp, Homo sapiens
cctccatatgtgcac

SEQ ID NO: 1236345 - DNA, 15 bp, Homo sapiens
acctccatatgtgca

SEQ ID NO: 1236346 - DNA, 15 bp, Homo sapiens
tacctccatatgtgc

SEQ ID NO: 1236347 - DNA, 15 bp, Homo sapiens
atacctccatatgtg

SEQ ID NO: 1236348 - DNA, 15 bp, Homo sapiens
catacctccatatgt

SEQ ID NO: 1236349 - DNA, 15 bp, Homo sapiens
ccatacctccatatg

SEQ ID NO: 1236350 - DNA, 15 bp, Homo sapiens
cccatacctccatat

SEQ ID NO: 1236351 - DNA, 15 bp, Homo sapiens
acccatacctccata

SEQ ID NO: 1236352 - DNA, 15 bp, Homo sapiens
tacccatacctccat

SEQ ID NO: 1236353 - DNA, 15 bp, Homo sapiens
atacccatacctcca

SEQ ID NO: 1236354 - DNA, 15 bp, Homo sapiens
catacccatacctcc

SEQ ID NO: 1236355 - DNA, 15 bp, Homo sapiens
ccatacccatacctc

SEQ ID NO: 1236356 - DNA, 15 bp, Homo sapiens
tccatacccatacct

SEQ ID NO: 1236357 - DNA, 15 bp, Homo sapiens
ttccatacccatacc

SEQ ID NO: 1236358 - DNA, 15 bp, Homo sapiens
cttccatacccatac

SEQ ID NO: 1236359 - DNA, 15 bp, Homo sapiens
ccttccatacccata

SEQ ID NO: 1236360 - DNA, 15 bp, Homo sapiens
gccttccatacccat

SEQ ID NO: 1236361 - DNA, 15 bp, Homo sapiens
agccttccataccca

SEQ ID NO: 1236362 - DNA, 15 bp, Homo sapiens
cagccttccataccc

SEQ ID NO: 1236363 - DNA, 15 bp, Homo sapiens
tcagccttccatacc

SEQ ID NO: 1236364 - DNA, 15 bp, Homo sapiens
ctcagccttccatac

SEQ ID NO: 1236365 - DNA, 15 bp, Homo sapiens
cctcagccttccata

SEQ ID NO: 1236366 - DNA, 15 bp, Homo sapiens
acctcagccttccat

SEQ ID NO: 1236367 - DNA, 15 bp, Homo sapiens
acacctcagccttcc

SEQ ID NO: 1236368 - DNA, 15 bp, Homo sapiens
aacacctcagccttc

SEQ ID NO: 1236369 - DNA, 15 bp, Homo sapiens
aaacacctcagcctt

SEQ ID NO: 1236370 - DNA, 15 bp, Homo sapiens
caaacacctcagcct

SEQ ID NO: 1236371 - DNA, 15 bp, Homo sapiens
tcaaacacctcagcc

SEQ ID NO: 1236372 - DNA, 15 bp, Homo sapiens
ttcaaacacctcagc

SEQ ID NO: 1236373 - DNA, 15 bp, Homo sapiens
tttcaaacacctcag

SEQ ID NO: 1236374 - DNA, 15 bp, Homo sapiens
atttcaaacacctca

SEQ ID NO: 1236375 - DNA, 15 bp, Homo sapiens
tatttcaaacacctc

SEQ ID NO: 1236376 - DNA, 15 bp, Homo sapiens
ttatttcaaacacct

SEQ ID NO: 1236377 - DNA, 15 bp, Homo sapiens
tttatttcaaacacc

SEQ ID NO: 1236378 - DNA, 15 bp, Homo sapiens
gtttatttcaaacac

SEQ ID NO: 1236379 - DNA, 15 bp, Homo sapiens
tgtttatttcaaaca

SEQ ID NO: 1236380 - DNA, 15 bp, Homo sapiens
gtgtttatttcaaac

SEQ ID NO: 1236381 - DNA, 15 bp, Homo sapiens
cgtgtttatttcaaa

SEQ ID NO: 1236382 - DNA, 15 bp, Homo sapiens
ccgtgtttatttcaa

SEQ ID NO: 1236383 - DNA, 15 bp, Homo sapiens
accgtgtttatttca

SEQ ID NO: 1236384 - DNA, 15 bp, Homo sapiens
caccgtgtttatttc

SEQ ID NO: 1236385 - DNA, 15 bp, Homo sapiens
acaccgtgtttattt

SEQ ID NO: 1236386 - DNA, 15 bp, Homo sapiens
tacaccgtgtttatt

SEQ ID NO: 1236387 - DNA, 15 bp, Homo sapiens
atacaccgtgtttat

SEQ ID NO: 1236388 - DNA, 15 bp, Homo sapiens
aatacaccgtgttta

SEQ ID NO: 1236389 - DNA, 15 bp, Homo sapiens
caatacaccgtgttt

SEQ ID NO: 1236390 - DNA, 15 bp, Homo sapiens
tcaatacaccgtgtt

SEQ ID NO: 1236391 - DNA, 15 bp, Homo sapiens
gtcaatacaccgtgt

SEQ ID NO: 1236392 - DNA, 15 bp, Homo sapiens
agtcaatacaccgtg

SEQ ID NO: 1236393 - DNA, 15 bp, Homo sapiens
gagtcaatacaccgt

SEQ ID NO: 1236394 - DNA, 15 bp, Homo sapiens
tgagtcaatacaccg

SEQ ID NO: 1236395 - DNA, 15 bp, Homo sapiens
ctgagtcaatacacc

SEQ ID NO: 1236396 - DNA, 15 bp, Homo sapiens
actgagtcaatacac

SEQ ID NO: 1236397 - DNA, 15 bp, Homo sapiens
aactgagtcaataca

SEQ ID NO: 1236398 - DNA, 15 bp, Homo sapiens
gaactgagtcaatac

SEQ ID NO: 1236399 - DNA, 15 bp, Homo sapiens
tgaactgagtcaata

SEQ ID NO: 1236400 - DNA, 15 bp, Homo sapiens
ttgaactgagtcaat

SEQ ID NO: 1236401 - DNA, 15 bp, Homo sapiens
attgaactgagtcaa

SEQ ID NO: 1236402 - DNA, 15 bp, Homo sapiens
cattgaactgagtca

SEQ ID NO: 1236403 - DNA, 15 bp, Homo sapiens
tcattgaactgagtc

SEQ ID NO: 1236404 - DNA, 15 bp, Homo sapiens
gtcattgaactgagt

SEQ ID NO: 1236405 - DNA, 15 bp, Homo sapiens
tgtcattgaactgag

SEQ ID NO: 1236406 - DNA, 15 bp, Homo sapiens
atgtcattgaactga

SEQ ID NO: 1236407 - DNA, 15 bp, Homo sapiens
tatgtcattgaactg

SEQ ID NO: 1236408 - DNA, 15 bp, Homo sapiens
ttatgtcattgaact

SEQ ID NO: 1236409 - DNA, 15 bp, Homo sapiens
gttatgtcattgaac

SEQ ID NO: 1236410 - DNA, 15 bp, Homo sapiens
tgttatgtcattgaa

SEQ ID NO: 1236411 - DNA, 15 bp, Homo sapiens
ttgttatgtcattga

SEQ ID NO: 1236412 - DNA, 15 bp, Homo sapiens
tttgttatgtcattg

SEQ ID NO: 1236413 - DNA, 15 bp, Homo sapiens
ttttgttatgtcatt

SEQ ID NO: 1236414 - DNA, 15 bp, Homo sapiens
tttttgttatgtcat

SEQ ID NO: 1236415 - DNA, 15 bp, Homo sapiens
ctttttgttatgtca

SEQ ID NO: 1236416 - DNA, 15 bp, Homo sapiens
cctttttgttatgtc

SEQ ID NO: 1236417 - DNA, 15 bp, Homo sapiens
tcctttttgttatgt

SEQ ID NO: 1236418 - DNA, 15 bp, Homo sapiens
ttcctttttgttatg

SEQ ID NO: 1236419 - DNA, 15 bp, Homo sapiens
attcctttttgttat

SEQ ID NO: 1236420 - DNA, 15 bp, Homo sapiens
aattcctttttgtta

SEQ ID NO: 1236421 - DNA, 15 bp, Homo sapiens
caattcctttttgtt

SEQ ID NO: 1236422 - DNA, 15 bp, Homo sapiens
acaattcctttttgt

SEQ ID NO: 1236423 - DNA, 15 bp, Homo sapiens
cacaattcctttttg

SEQ ID NO: 1236424 - DNA, 15 bp, Homo sapiens
gcacaattccttttt

SEQ ID NO: 1236425 - DNA, 15 bp, Homo sapiens
tgcacaattcctttt

SEQ ID NO: 1236426 - DNA, 15 bp, Homo sapiens
atgcacaattccttt

SEQ ID NO: 1236427 - DNA, 15 bp, Homo sapiens
tatgcacaattcctt

SEQ ID NO: 1236428 - DNA, 15 bp, Homo sapiens
atatgcacaattcct

SEQ ID NO: 1236429 - DNA, 15 bp, Homo sapiens
catatgcacaattcc

SEQ ID NO: 1236430 - DNA, 15 bp, Homo sapiens
acatatgcacaattc

SEQ ID NO: 1236431 - DNA, 15 bp, Homo sapiens
cacatatgcacaatt

SEQ ID NO: 1236432 - DNA, 15 bp, Homo sapiens
tcacatatgcacaat

SEQ ID NO: 1236433 - DNA, 15 bp, Homo sapiens
atcacatatgcacaa

SEQ ID NO: 1236434 - DNA, 15 bp, Homo sapiens
aatcacatatgcaca

SEQ ID NO: 1236435 - DNA, 15 bp, Homo sapiens
aaatcacatatgcac

SEQ ID NO: 1236436 - DNA, 15 bp, Homo sapiens
gaaatcacatatgca

SEQ ID NO: 1236437 - DNA, 15 bp, Homo sapiens
agaaatcacatatgc

SEQ ID NO: 1236438 - DNA, 15 bp, Homo sapiens
gagaaatcacatatg

SEQ ID NO: 1236439 - DNA, 15 bp, Homo sapiens
agagaaatcacatat

SEQ ID NO: 1236440 - DNA, 15 bp, Homo sapiens
aagagaaatcacata

SEQ ID NO: 1236441 - DNA, 15 bp, Homo sapiens
taagagaaatcacat

SEQ ID NO: 1236442 - DNA, 15 bp, Homo sapiens
ataagagaaatcaca

SEQ ID NO: 1236443 - DNA, 15 bp, Homo sapiens
aataagagaaatcac

SEQ ID NO: 1236444 - DNA, 15 bp, Homo sapiens
taataagagaaatca

SEQ ID NO: 1236445 - DNA, 15 bp, Homo sapiens
ttaataagagaaatc

SEQ ID NO: 1236446 - DNA, 15 bp, Homo sapiens
tttaataagagaaat

SEQ ID NO: 1236447 - DNA, 15 bp, Homo sapiens
ctttaataagagaaa

SEQ ID NO: 1236448 - DNA, 15 bp, Homo sapiens
tctttaataagagaa

SEQ ID NO: 1236449 - DNA, 15 bp, Homo sapiens
ttctttaataagaga

SEQ ID NO: 1236450 - DNA, 15 bp, Homo sapiens
tttctttaataagag

SEQ ID NO: 1236451 - DNA, 15 bp, Homo sapiens
ttttctttaataaga

SEQ ID NO: 1236452 - DNA, 15 bp, Homo sapiens
gttttctttaataag

SEQ ID NO: 1236453 - DNA, 15 bp, Homo sapiens
tgttttctttaataa

SEQ ID NO: 1236454 - DNA, 15 bp, Homo sapiens
atgttttctttaata

SEQ ID NO: 1236455 - DNA, 15 bp, Homo sapiens
catgttttctttaat

SEQ ID NO: 1236456 - DNA, 15 bp, Homo sapiens
gcatgttttctttaa

SEQ ID NO: 1236457 - DNA, 15 bp, Homo sapiens
ggcatgttttcttta

SEQ ID NO: 1236458 - DNA, 15 bp, Homo sapiens
cggcatgttttcttt

SEQ ID NO: 1236459 - DNA, 15 bp, Homo sapiens
ccggcatgttttctt

SEQ ID NO: 1236460 - DNA, 15 bp, Homo sapiens
cccggcatgttttct

SEQ ID NO: 1236461 - DNA, 15 bp, Homo sapiens
gcccggcatgttttc

SEQ ID NO: 1236462 - DNA, 15 bp, Homo sapiens
tgcccggcatgtttt

SEQ ID NO: 1236463 - DNA, 15 bp, Homo sapiens
gtgcccggcatgttt

SEQ ID NO: 1236464 - DNA, 15 bp, Homo sapiens
tgtgcccggcatgtt

SEQ ID NO: 1236465 - DNA, 15 bp, Homo sapiens
ctgtgcccggcatgt

SEQ ID NO: 1236466 - DNA, 15 bp, Homo sapiens
actgtgcccggcatg

SEQ ID NO: 1236467 - DNA, 15 bp, Homo sapiens
cactgtgcccggcat

SEQ ID NO: 1236468 - DNA, 15 bp, Homo sapiens
ccactgtgcccggca

SEQ ID NO: 1236469 - DNA, 15 bp, Homo sapiens
cgtgagccactgtgc

SEQ ID NO: 1236470 - DNA, 15 bp, Homo sapiens
gcgtgagccactgtg

SEQ ID NO: 1236471 - DNA, 15 bp, Homo sapiens
ggcgtgagccactgt

SEQ ID NO: 1236472 - DNA, 15 bp, Homo sapiens
aggcgtgagccactg

SEQ ID NO: 1236473 - DNA, 15 bp, Homo sapiens
cgggattacaggcgt

SEQ ID NO: 1236474 - DNA, 15 bp, Homo sapiens
ccgggattacaggcg

SEQ ID NO: 1236475 - DNA, 15 bp, Homo sapiens
caaagtgccgggatt

SEQ ID NO: 1236476 - DNA, 15 bp, Homo sapiens
ccaaagtgccgggat

SEQ ID NO: 1236477 - DNA, 15 bp, Homo sapiens
cccaaagtgccggga

SEQ ID NO: 1236478 - DNA, 15 bp, Homo sapiens
tcccaaagtgccggg

SEQ ID NO: 1236479 - DNA, 15 bp, Homo sapiens
ctcccaaagtgccgg

SEQ ID NO: 1236480 - DNA, 15 bp, Homo sapiens
cctcccaaagtgccg

SEQ ID NO: 1236481 - DNA, 15 bp, Homo sapiens
gcctcccaaagtgcc

SEQ ID NO: 1236482 - DNA, 15 bp, Homo sapiens
gcccacctcggcctc

SEQ ID NO: 1236483 - DNA, 15 bp, Homo sapiens
cgcccacctcggcct

SEQ ID NO: 1236484 - DNA, 15 bp, Homo sapiens
ccgcccacctcggcc

SEQ ID NO: 1236485 - DNA, 15 bp, Homo sapiens
tccgcccacctcggc

SEQ ID NO: 1236486 - DNA, 15 bp, Homo sapiens
cgtgatccgcccacc

SEQ ID NO: 1236487 - DNA, 15 bp, Homo sapiens
tcgtgatccgcccac

SEQ ID NO: 1236488 - DNA, 15 bp, Homo sapiens
ctcgtgatccgccca

SEQ ID NO: 1236489 - DNA, 15 bp, Homo sapiens
gctgacctcgtgatc

SEQ ID NO: 1236490 - DNA, 15 bp, Homo sapiens
tgctgacctcgtgat

SEQ ID NO: 1236491 - DNA, 15 bp, Homo sapiens
ctgctgacctcgtga

SEQ ID NO: 1236492 - DNA, 15 bp, Homo sapiens
actgctgacctcgtg

SEQ ID NO: 1236493 - DNA, 15 bp, Homo sapiens
aactgctgacctcgt

SEQ ID NO: 1236494 - DNA, 15 bp, Homo sapiens
gaactgctgacctcg

SEQ ID NO: 1236495 - DNA, 15 bp, Homo sapiens
tgaactgctgacctc

SEQ ID NO: 1236496 - DNA, 15 bp, Homo sapiens
ttgaactgctgacct

SEQ ID NO: 1236497 - DNA, 15 bp, Homo sapiens
cttgaactgctgacc

SEQ ID NO: 1236498 - DNA, 15 bp, Homo sapiens
tcttgaactgctgac

SEQ ID NO: 1236499 - DNA, 15 bp, Homo sapiens
gtcttgaactgctga

SEQ ID NO: 1236500 - DNA, 15 bp, Homo sapiens
ggtcttgaactgctg

SEQ ID NO: 1236501 - DNA, 15 bp, Homo sapiens
tggtcttgaactgct

SEQ ID NO: 1236502 - DNA, 15 bp, Homo sapiens
ctggtcttgaactgc

SEQ ID NO: 1236503 - DNA, 15 bp, Homo sapiens
gctggtcttgaactg

SEQ ID NO: 1236504 - DNA, 15 bp, Homo sapiens
cgctggtcttgaact

SEQ ID NO: 1236505 - DNA, 15 bp, Homo sapiens
acgctggtcttgaac

SEQ ID NO: 1236506 - DNA, 15 bp, Homo sapiens
cacgctggtcttgaa

SEQ ID NO: 1236507 - DNA, 15 bp, Homo sapiens
ccacgctggtcttga

SEQ ID NO: 1236508 - DNA, 15 bp, Homo sapiens
gccacgctggtcttg

SEQ ID NO: 1236509 - DNA, 15 bp, Homo sapiens
ggccacgctggtctt

SEQ ID NO: 1236510 - DNA, 15 bp, Homo sapiens
tggccacgctggtct

SEQ ID NO: 1236511 - DNA, 15 bp, Homo sapiens
ttggccacgctggtc

SEQ ID NO: 1236512 - DNA, 15 bp, Homo sapiens
gttggccacgctggt

SEQ ID NO: 1236513 - DNA, 15 bp, Homo sapiens
tgttggccacgctgg

SEQ ID NO: 1236514 - DNA, 15 bp, Homo sapiens
atgttggccacgctg

SEQ ID NO: 1236515 - DNA, 15 bp, Homo sapiens
catgttggccacgct

SEQ ID NO: 1236516 - DNA, 15 bp, Homo sapiens
ccatgttggccacgc

SEQ ID NO: 1236517 - DNA, 15 bp, Homo sapiens
accatgttggccacg

SEQ ID NO: 1236518 - DNA, 15 bp, Homo sapiens
caccatgttggccac

SEQ ID NO: 1236519 - DNA, 15 bp, Homo sapiens
cagatggggtttcac

SEQ ID NO: 1236520 - DNA, 15 bp, Homo sapiens
agtacagatggggtt

SEQ ID NO: 1236521 - DNA, 15 bp, Homo sapiens
tagtacagatggggt

SEQ ID NO: 1236522 - DNA, 15 bp, Homo sapiens
ttagtacagatgggg

SEQ ID NO: 1236523 - DNA, 15 bp, Homo sapiens
tttagtacagatggg

SEQ ID NO: 1236524 - DNA, 15 bp, Homo sapiens
ttttagtacagatgg

SEQ ID NO: 1236525 - DNA, 15 bp, Homo sapiens
tttttagtacagatg

SEQ ID NO: 1236526 - DNA, 15 bp, Homo sapiens
atttttagtacagat

SEQ ID NO: 1236527 - DNA, 15 bp, Homo sapiens
cgtatttttagtaca

SEQ ID NO: 1236528 - DNA, 15 bp, Homo sapiens
tcgtatttttagtac

SEQ ID NO: 1236529 - DNA, 15 bp, Homo sapiens
ttcgtatttttagta

SEQ ID NO: 1236530 - DNA, 15 bp, Homo sapiens
tttcgtatttttagt

SEQ ID NO: 1236531 - DNA, 15 bp, Homo sapiens
ttttcgtatttttag

SEQ ID NO: 1236532 - DNA, 15 bp, Homo sapiens
attttcgtattttta

SEQ ID NO: 1236533 - DNA, 15 bp, Homo sapiens
cattttcgtattttt

SEQ ID NO: 1236534 - DNA, 15 bp, Homo sapiens
acattttcgtatttt

SEQ ID NO: 1236535 - DNA, 15 bp, Homo sapiens
cacattttcgtattt

SEQ ID NO: 1236536 - DNA, 15 bp, Homo sapiens
gcacattttcgtatt

SEQ ID NO: 1236537 - DNA, 15 bp, Homo sapiens
ggcacattttcgtat

SEQ ID NO: 1236538 - DNA, 15 bp, Homo sapiens
tggcacattttcgta

SEQ ID NO: 1236539 - DNA, 15 bp, Homo sapiens
ctggcacattttcgt

SEQ ID NO: 1236540 - DNA, 15 bp, Homo sapiens
cctggcacattttcg

SEQ ID NO: 1236541 - DNA, 15 bp, Homo sapiens
gcctggcacattttc

SEQ ID NO: 1236542 - DNA, 15 bp, Homo sapiens
tgcctggcacatttt

SEQ ID NO: 1236543 - DNA, 15 bp, Homo sapiens
atgcctggcacattt

SEQ ID NO: 1236544 - DNA, 15 bp, Homo sapiens
catgcctggcacatt

SEQ ID NO: 1236545 - DNA, 15 bp, Homo sapiens
ccatgcctggcacat

SEQ ID NO: 1236546 - DNA, 15 bp, Homo sapiens
accatgcctggcaca

SEQ ID NO: 1236547 - DNA, 15 bp, Homo sapiens
caccatgcctggcac

SEQ ID NO: 1236548 - DNA, 15 bp, Homo sapiens
ccaccatgcctggca

SEQ ID NO: 1236549 - DNA, 15 bp, Homo sapiens
ggcctgccaccatgc

SEQ ID NO: 1236550 - DNA, 15 bp, Homo sapiens
gggcctgccaccatg

SEQ ID NO: 1236551 - DNA, 15 bp, Homo sapiens
ggggcctgccaccat

SEQ ID NO: 1236552 - DNA, 15 bp, Homo sapiens
aggggcctgccacca

SEQ ID NO: 1236553 - DNA, 15 bp, Homo sapiens
caggggcctgccacc

SEQ ID NO: 1236554 - DNA, 15 bp, Homo sapiens
acaggggcctgccac

SEQ ID NO: 1236555 - DNA, 15 bp, Homo sapiens
tacaggggcctgcca

SEQ ID NO: 1236556 - DNA, 15 bp, Homo sapiens
ttacaggggcctgcc

SEQ ID NO: 1236557 - DNA, 15 bp, Homo sapiens
attacaggggcctgc

SEQ ID NO: 1236558 - DNA, 15 bp, Homo sapiens
gattacaggggcctg

SEQ ID NO: 1236559 - DNA, 15 bp, Homo sapiens
ggattacaggggcct

SEQ ID NO: 1236560 - DNA, 15 bp, Homo sapiens
gggattacaggggcc

SEQ ID NO: 1236561 - DNA, 15 bp, Homo sapiens
tgggattacaggggc

SEQ ID NO: 1236562 - DNA, 15 bp, Homo sapiens
ccaagcgattctcct

SEQ ID NO: 1236563 - DNA, 15 bp, Homo sapiens
tccaagcgattctcc

SEQ ID NO: 1236564 - DNA, 15 bp, Homo sapiens
gtccaagcgattctc

SEQ ID NO: 1236565 - DNA, 15 bp, Homo sapiens
ggtccaagcgattct

SEQ ID NO: 1236566 - DNA, 15 bp, Homo sapiens
aggtccaagcgattc

SEQ ID NO: 1236567 - DNA, 15 bp, Homo sapiens
caggtccaagcgatt

SEQ ID NO: 1236568 - DNA, 15 bp, Homo sapiens
ccaggtccaagcgat

SEQ ID NO: 1236569 - DNA, 15 bp, Homo sapiens
cccaggtccaagcga

SEQ ID NO: 1236570 - DNA, 15 bp, Homo sapiens
tcccaggtccaagcg

SEQ ID NO: 1236571 - DNA, 15 bp, Homo sapiens
ctcccaggtccaagc

SEQ ID NO: 1236572 - DNA, 15 bp, Homo sapiens
cctcccaggtccaag

SEQ ID NO: 1236573 - DNA, 15 bp, Homo sapiens
gcctcccaggtccaa

SEQ ID NO: 1236574 - DNA, 15 bp, Homo sapiens
cgcctcccaggtcca

SEQ ID NO: 1236575 - DNA, 15 bp, Homo sapiens
ccgcctcccaggtcc

SEQ ID NO: 1236576 - DNA, 15 bp, Homo sapiens
tccgcctcccaggtc

SEQ ID NO: 1236577 - DNA, 15 bp, Homo sapiens
ggtctcggctcactg

SEQ ID NO: 1236578 - DNA, 15 bp, Homo sapiens
cggtctcggctcact

SEQ ID NO: 1236579 - DNA, 15 bp, Homo sapiens
acggtctcggctcac

SEQ ID NO: 1236580 - DNA, 15 bp, Homo sapiens
cacggtctcggctca

SEQ ID NO: 1236581 - DNA, 15 bp, Homo sapiens
gcacggtctcggctc

SEQ ID NO: 1236582 - DNA, 15 bp, Homo sapiens
ggcacggtctcggct

SEQ ID NO: 1236583 - DNA, 15 bp, Homo sapiens
tggcacggtctcggc

SEQ ID NO: 1236584 - DNA, 15 bp, Homo sapiens
atggcacggtctcgg

SEQ ID NO: 1236585 - DNA, 15 bp, Homo sapiens
aatggcacggtctcg

SEQ ID NO: 1236586 - DNA, 15 bp, Homo sapiens
caatggcacggtctc

SEQ ID NO: 1236587 - DNA, 15 bp, Homo sapiens
gcaatggcacggtct

SEQ ID NO: 1236588 - DNA, 15 bp, Homo sapiens
tgcaatggcacggtc

SEQ ID NO: 1236589 - DNA, 15 bp, Homo sapiens
gtgcaatggcacggt

SEQ ID NO: 1236590 - DNA, 15 bp, Homo sapiens
agtgcaatggcacgg

SEQ ID NO: 1236591 - DNA, 15 bp, Homo sapiens
tcgctgtgttgccca

SEQ ID NO: 1236592 - DNA, 15 bp, Homo sapiens
ctcgctgtgttgccc

SEQ ID NO: 1236593 - DNA, 15 bp, Homo sapiens
tctcgctgtgttgcc

SEQ ID NO: 1236594 - DNA, 15 bp, Homo sapiens
gtctcgctgtgttgc

SEQ ID NO: 1236595 - DNA, 15 bp, Homo sapiens
agtctcgctgtgttg

SEQ ID NO: 1236596 - DNA, 15 bp, Homo sapiens
gagtctcgctgtgtt

SEQ ID NO: 1236597 - DNA, 15 bp, Homo sapiens
ggagtctcgctgtgt

SEQ ID NO: 1236598 - DNA, 15 bp, Homo sapiens
tggagtctcgctgtg

SEQ ID NO: 1236599 - DNA, 15 bp, Homo sapiens
atggagtctcgctgt

SEQ ID NO: 1236600 - DNA, 15 bp, Homo sapiens
gatggagtctcgctg

SEQ ID NO: 1236601 - DNA, 15 bp, Homo sapiens
gcctttttttttttt

SEQ ID NO: 1236602 - DNA, 15 bp, Homo sapiens
tgccttttttttttt

SEQ ID NO: 1236603 - DNA, 15 bp, Homo sapiens
ttgcctttttttttt

SEQ ID NO: 1236604 - DNA, 15 bp, Homo sapiens
tttgccttttttttt

SEQ ID NO: 1236605 - DNA, 15 bp, Homo sapiens
ttttgcctttttttt

SEQ ID NO: 1236606 - DNA, 15 bp, Homo sapiens
attttgccttttttt

SEQ ID NO: 1236607 - DNA, 15 bp, Homo sapiens
aattttgcctttttt

SEQ ID NO: 1236608 - DNA, 15 bp, Homo sapiens
aaattttgccttttt

SEQ ID NO: 1236609 - DNA, 15 bp, Homo sapiens
gaaattttgcctttt

SEQ ID NO: 1236610 - DNA, 15 bp, Homo sapiens
ggaaattttgccttt

SEQ ID NO: 1236611 - DNA, 15 bp, Homo sapiens
aggaaattttgcctt

SEQ ID NO: 1236612 - DNA, 15 bp, Homo sapiens
taggaaattttgcct

SEQ ID NO: 1236613 - DNA, 15 bp, Homo sapiens
ctaggaaattttgcc

SEQ ID NO: 1236614 - DNA, 15 bp, Homo sapiens
tctaggaaattttgc

SEQ ID NO: 1236615 - DNA, 15 bp, Homo sapiens
gtctaggaaattttg

SEQ ID NO: 1236616 - DNA, 15 bp, Homo sapiens
cgtctaggaaatttt

SEQ ID NO: 1236617 - DNA, 15 bp, Homo sapiens
tcgtctaggaaattt

SEQ ID NO: 1236618 - DNA, 15 bp, Homo sapiens
ttcgtctaggaaatt

SEQ ID NO: 1236619 - DNA, 15 bp, Homo sapiens
cttcgtctaggaaat

SEQ ID NO: 1236620 - DNA, 15 bp, Homo sapiens
tcttcgtctaggaaa

SEQ ID NO: 1236621 - DNA, 15 bp, Homo sapiens
ttcttcgtctaggaa

SEQ ID NO: 1236622 - DNA, 15 bp, Homo sapiens
tttcttcgtctagga

SEQ ID NO: 1236623 - DNA, 15 bp, Homo sapiens
atttcttcgtctagg

SEQ ID NO: 1236624 - DNA, 15 bp, Homo sapiens
tatttcttcgtctag

SEQ ID NO: 1236625 - DNA, 15 bp, Homo sapiens
ttatttcttcgtcta

SEQ ID NO: 1236626 - DNA, 15 bp, Homo sapiens
tttatttcttcgtct

SEQ ID NO: 1236627 - DNA, 15 bp, Homo sapiens
ttttatttcttcgtc

SEQ ID NO: 1236628 - DNA, 15 bp, Homo sapiens
tttttatttcttcgt

SEQ ID NO: 1236629 - DNA, 15 bp, Homo sapiens
gtttttatttcttcg

SEQ ID NO: 1236630 - DNA, 15 bp, Homo sapiens
ggtttttatttcttc

SEQ ID NO: 1236631 - DNA, 15 bp, Homo sapiens
tggtttttatttctt

SEQ ID NO: 1236632 - DNA, 15 bp, Homo sapiens
ttggtttttatttct

SEQ ID NO: 1236633 - DNA, 15 bp, Homo sapiens
gttggtttttatttc

SEQ ID NO: 1236634 - DNA, 15 bp, Homo sapiens
agttggtttttattt

SEQ ID NO: 1236635 - DNA, 15 bp, Homo sapiens
aagttggtttttatt

SEQ ID NO: 1236636 - DNA, 15 bp, Homo sapiens
taagttggtttttat

SEQ ID NO: 1236637 - DNA, 15 bp, Homo sapiens
ataagttggttttta

SEQ ID NO: 1236638 - DNA, 15 bp, Homo sapiens
cataagttggttttt

SEQ ID NO: 1236639 - DNA, 15 bp, Homo sapiens
acataagttggtttt

SEQ ID NO: 1236640 - DNA, 15 bp, Homo sapiens
tacataagttggttt

SEQ ID NO: 1236641 - DNA, 15 bp, Homo sapiens
ttacataagttggtt

SEQ ID NO: 1236642 - DNA, 15 bp, Homo sapiens
tttacataagttggt

SEQ ID NO: 1236643 - DNA, 15 bp, Homo sapiens
atttacataagttgg

SEQ ID NO: 1236644 - DNA, 15 bp, Homo sapiens
catttacataagttg

SEQ ID NO: 1236645 - DNA, 15 bp, Homo sapiens
tcatttacataagtt

SEQ ID NO: 1236646 - DNA, 15 bp, Homo sapiens
ttcatttacataagt

SEQ ID NO: 1236647 - DNA, 15 bp, Homo sapiens
gttcatttacataag

SEQ ID NO: 1236648 - DNA, 15 bp, Homo sapiens
tgttcatttacataa

SEQ ID NO: 1236649 - DNA, 15 bp, Homo sapiens
ttgttcatttacata

SEQ ID NO: 1236650 - DNA, 15 bp, Homo sapiens
cttgttcatttacat

SEQ ID NO: 1236651 - DNA, 15 bp, Homo sapiens
acttgttcatttaca

SEQ ID NO: 1236652 - DNA, 15 bp, Homo sapiens
tacttgttcatttac

SEQ ID NO: 1236653 - DNA, 15 bp, Homo sapiens
ttacttgttcattta

SEQ ID NO: 1236654 - DNA, 15 bp, Homo sapiens
attacttgttcattt

SEQ ID NO: 1236655 - DNA, 15 bp, Homo sapiens
aattacttgttcatt

SEQ ID NO: 1236656 - DNA, 15 bp, Homo sapiens
taattacttgttcat

SEQ ID NO: 1236657 - DNA, 15 bp, Homo sapiens
gtaattacttgttca

SEQ ID NO: 1236658 - DNA, 15 bp, Homo sapiens
ggtaattacttgttc

SEQ ID NO: 1236659 - DNA, 15 bp, Homo sapiens
tggtaattacttgtt

SEQ ID NO: 1236660 - DNA, 15 bp, Homo sapiens
gtggtaattacttgt

SEQ ID NO: 1236661 - DNA, 15 bp, Homo sapiens
agtggtaattacttg

SEQ ID NO: 1236662 - DNA, 15 bp, Homo sapiens
cagtggtaattactt

SEQ ID NO: 1236663 - DNA, 15 bp, Homo sapiens
tcagtggtaattact

SEQ ID NO: 1236664 - DNA, 15 bp, Homo sapiens
gtcagtggtaattac

SEQ ID NO: 1236665 - DNA, 15 bp, Homo sapiens
tgtcagtggtaatta

SEQ ID NO: 1236666 - DNA, 15 bp, Homo sapiens
atgtcagtggtaatt

SEQ ID NO: 1236667 - DNA, 15 bp, Homo sapiens
tatgtcagtggtaat

SEQ ID NO: 1236668 - DNA, 15 bp, Homo sapiens
ttatgtcagtggtaa

SEQ ID NO: 1236669 - DNA, 15 bp, Homo sapiens
attatgtcagtggta

SEQ ID NO: 1236670 - DNA, 15 bp, Homo sapiens
tattatgtcagtggt

SEQ ID NO: 1236671 - DNA, 15 bp, Homo sapiens
atattatgtcagtgg

SEQ ID NO: 1236672 - DNA, 15 bp, Homo sapiens
catattatgtcagtg

SEQ ID NO: 1236673 - DNA, 15 bp, Homo sapiens
gcatattatgtcagt

SEQ ID NO: 1236674 - DNA, 15 bp, Homo sapiens
agcatattatgtcag

SEQ ID NO: 1236675 - DNA, 15 bp, Homo sapiens
aagcatattatgtca

SEQ ID NO: 1236676 - DNA, 15 bp, Homo sapiens
caagcatattatgtc

SEQ ID NO: 1236677 - DNA, 15 bp, Homo sapiens
ccaagcatattatgt

SEQ ID NO: 1236678 - DNA, 15 bp, Homo sapiens
gccaagcatattatg

SEQ ID NO: 1236679 - DNA, 15 bp, Homo sapiens
agccaagcatattat

SEQ ID NO: 1236680 - DNA, 15 bp, Homo sapiens
cagccaagcatatta

SEQ ID NO: 1236681 - DNA, 15 bp, Homo sapiens
acagccaagcatatt

SEQ ID NO: 1236682 - DNA, 15 bp, Homo sapiens
aacagccaagcatat

SEQ ID NO: 1236683 - DNA, 15 bp, Homo sapiens
caacagccaagcata

SEQ ID NO: 1236684 - DNA, 15 bp, Homo sapiens
tcaacagccaagcat

SEQ ID NO: 1236685 - DNA, 15 bp, Homo sapiens
ttcaacagccaagca

SEQ ID NO: 1236686 - DNA, 15 bp, Homo sapiens
gttcaacagccaagc

SEQ ID NO: 1236687 - DNA, 15 bp, Homo sapiens
agttcaacagccaag

SEQ ID NO: 1236688 - DNA, 15 bp, Homo sapiens
tagttcaacagccaa

SEQ ID NO: 1236689 - DNA, 15 bp, Homo sapiens
gtagttcaacagcca

SEQ ID NO: 1236690 - DNA, 15 bp, Homo sapiens
tgtagttcaacagcc

SEQ ID NO: 1236691 - DNA, 15 bp, Homo sapiens
ctgtagttcaacagc

SEQ ID NO: 1236692 - DNA, 15 bp, Homo sapiens
cctgtagttcaacag

SEQ ID NO: 1236693 - DNA, 15 bp, Homo sapiens
gcctgtagttcaaca

SEQ ID NO: 1236694 - DNA, 15 bp, Homo sapiens
ggcctgtagttcaac

SEQ ID NO: 1236695 - DNA, 15 bp, Homo sapiens
tggcctgtagttcaa

SEQ ID NO: 1236696 - DNA, 15 bp, Homo sapiens
atggcctgtagttca

SEQ ID NO: 1236697 - DNA, 15 bp, Homo sapiens
aatggcctgtagttc

SEQ ID NO: 1236698 - DNA, 15 bp, Homo sapiens
taatggcctgtagtt

SEQ ID NO: 1236699 - DNA, 15 bp, Homo sapiens
ttaatggcctgtagt

SEQ ID NO: 1236700 - DNA, 15 bp, Homo sapiens
tttaatggcctgtag

SEQ ID NO: 1236701 - DNA, 15 bp, Homo sapiens
atttaatggcctgta

SEQ ID NO: 1236702 - DNA, 15 bp, Homo sapiens
gatttaatggcctgt

SEQ ID NO: 1236703 - DNA, 15 bp, Homo sapiens
ggatttaatggcctg

SEQ ID NO: 1236704 - DNA, 15 bp, Homo sapiens
aggatttaatggcct

SEQ ID NO: 1236705 - DNA, 15 bp, Homo sapiens
taggatttaatggcc

SEQ ID NO: 1236706 - DNA, 15 bp, Homo sapiens
ataggatttaatggc

SEQ ID NO: 1236707 - DNA, 15 bp, Homo sapiens
aataggatttaatgg

SEQ ID NO: 1236708 - DNA, 15 bp, Homo sapiens
aaataggatttaatg

SEQ ID NO: 1236709 - DNA, 15 bp, Homo sapiens
gaaataggatttaat

SEQ ID NO: 1236710 - DNA, 15 bp, Homo sapiens
tgaaataggatttaa

SEQ ID NO: 1236711 - DNA, 15 bp, Homo sapiens
ttgaaataggattta

SEQ ID NO: 1236712 - DNA, 15 bp, Homo sapiens
cttgaaataggattt

SEQ ID NO: 1236713 - DNA, 15 bp, Homo sapiens
acttgaaataggatt

SEQ ID NO: 1236714 - DNA, 15 bp, Homo sapiens
aacttgaaataggat

SEQ ID NO: 1236715 - DNA, 15 bp, Homo sapiens
caacttgaaatagga

SEQ ID NO: 1236716 - DNA, 15 bp, Homo sapiens
tcaacttgaaatagg

SEQ ID NO: 1236717 - DNA, 15 bp, Homo sapiens
ttcaacttgaaatag

SEQ ID NO: 1236718 - DNA, 15 bp, Homo sapiens
tttcaacttgaaata

SEQ ID NO: 1236719 - DNA, 15 bp, Homo sapiens
atttcaacttgaaat

SEQ ID NO: 1236720 - DNA, 15 bp, Homo sapiens
catttcaacttgaaa

SEQ ID NO: 1236721 - DNA, 15 bp, Homo sapiens
tcatttcaacttgaa

SEQ ID NO: 1236722 - DNA, 15 bp, Homo sapiens
ctcatttcaacttga

SEQ ID NO: 1236723 - DNA, 15 bp, Homo sapiens
tctcatttcaacttg

SEQ ID NO: 1236724 - DNA, 15 bp, Homo sapiens
ctctcatttcaactt

SEQ ID NO: 1236725 - DNA, 15 bp, Homo sapiens
tctctcatttcaact

SEQ ID NO: 1236726 - DNA, 15 bp, Homo sapiens
ttctctcatttcaac

SEQ ID NO: 1236727 - DNA, 15 bp, Homo sapiens
gttctctcatttcaa

SEQ ID NO: 1236728 - DNA, 15 bp, Homo sapiens
agttctctcatttca

SEQ ID NO: 1236729 - DNA, 15 bp, Homo sapiens
cagttctctcatttc

SEQ ID NO: 1236730 - DNA, 15 bp, Homo sapiens
gcagttctctcattt

SEQ ID NO: 1236731 - DNA, 15 bp, Homo sapiens
ggcagttctctcatt

SEQ ID NO: 1236732 - DNA, 15 bp, Homo sapiens
gggcagttctctcat

SEQ ID NO: 1236733 - DNA, 15 bp, Homo sapiens
ggggcagttctctca

SEQ ID NO: 1236734 - DNA, 15 bp, Homo sapiens
tggggcagttctctc

SEQ ID NO: 1236735 - DNA, 15 bp, Homo sapiens
ttggggcagttctct

SEQ ID NO: 1236736 - DNA, 15 bp, Homo sapiens
cttggggcagttctc

SEQ ID NO: 1236737 - DNA, 15 bp, Homo sapiens
ccttggggcagttct

SEQ ID NO: 1236738 - DNA, 15 bp, Homo sapiens
tccttggggcagttc

SEQ ID NO: 1236739 - DNA, 15 bp, Homo sapiens
gtccttggggcagtt

SEQ ID NO: 1236740 - DNA, 15 bp, Homo sapiens
tgtccttggggcagt

SEQ ID NO: 1236741 - DNA, 15 bp, Homo sapiens
atgtccttggggcag

SEQ ID NO: 1236742 - DNA, 15 bp, Homo sapiens
aatgtccttggggca

SEQ ID NO: 1236743 - DNA, 15 bp, Homo sapiens
aaatgtccttggggc

SEQ ID NO: 1236744 - DNA, 15 bp, Homo sapiens
caaatgtccttgggg

SEQ ID NO: 1236745 - DNA, 15 bp, Homo sapiens
ccaaatgtccttggg

SEQ ID NO: 1236746 - DNA, 15 bp, Homo sapiens
accaaatgtccttgg

SEQ ID NO: 1236747 - DNA, 15 bp, Homo sapiens
taccaaatgtccttg

SEQ ID NO: 1236748 - DNA, 15 bp, Homo sapiens
ttaccaaatgtcctt

SEQ ID NO: 1236749 - DNA, 15 bp, Homo sapiens
tttaccaaatgtcct

SEQ ID NO: 1236750 - DNA, 15 bp, Homo sapiens
atttaccaaatgtcc

SEQ ID NO: 1236751 - DNA, 15 bp, Homo sapiens
gatttaccaaatgtc

SEQ ID NO: 1236752 - DNA, 15 bp, Homo sapiens
ggatttaccaaatgt

SEQ ID NO: 1236753 - DNA, 15 bp, Homo sapiens
tggatttaccaaatg

SEQ ID NO: 1236754 - DNA, 15 bp, Homo sapiens
atggatttaccaaat

SEQ ID NO: 1236755 - DNA, 15 bp, Homo sapiens
catggatttaccaaa

SEQ ID NO: 1236756 - DNA, 15 bp, Homo sapiens
gcatggatttaccaa

SEQ ID NO: 1236757 - DNA, 15 bp, Homo sapiens
ggcatggatttacca

SEQ ID NO: 1236758 - DNA, 15 bp, Homo sapiens
aggcatggatttacc

SEQ ID NO: 1236759 - DNA, 15 bp, Homo sapiens
taggcatggatttac

SEQ ID NO: 1236760 - DNA, 15 bp, Homo sapiens
ataggcatggattta

SEQ ID NO: 1236761 - DNA, 15 bp, Homo sapiens
tataggcatggattt

SEQ ID NO: 1236762 - DNA, 15 bp, Homo sapiens
ctataggcatggatt

SEQ ID NO: 1236763 - DNA, 15 bp, Homo sapiens
gctataggcatggat

SEQ ID NO: 1236764 - DNA, 15 bp, Homo sapiens
agctataggcatgga

SEQ ID NO: 1236765 - DNA, 15 bp, Homo sapiens
cagctataggcatgg

SEQ ID NO: 1236766 - DNA, 15 bp, Homo sapiens
tcagctataggcatg

SEQ ID NO: 1236767 - DNA, 15 bp, Homo sapiens
ttcagctataggcat

SEQ ID NO: 1236768 - DNA, 15 bp, Homo sapiens
cttcagctataggca

SEQ ID NO: 1236769 - DNA, 15 bp, Homo sapiens
ccttcagctataggc

SEQ ID NO: 1236770 - DNA, 15 bp, Homo sapiens
accttcagctatagg

SEQ ID NO: 1236771 - DNA, 15 bp, Homo sapiens
gaccttcagctatag

SEQ ID NO: 1236772 - DNA, 15 bp, Homo sapiens
agaccttcagctata

SEQ ID NO: 1236773 - DNA, 15 bp, Homo sapiens
cagaccttcagctat

SEQ ID NO: 1236774 - DNA, 15 bp, Homo sapiens
tcagaccttcagcta

SEQ ID NO: 1236775 - DNA, 15 bp, Homo sapiens
ctcagaccttcagct

SEQ ID NO: 1236776 - DNA, 15 bp, Homo sapiens
tctcagaccttcagc

SEQ ID NO: 1236777 - DNA, 15 bp, Homo sapiens
gtctcagaccttcag

SEQ ID NO: 1236778 - DNA, 15 bp, Homo sapiens
tgtctcagaccttca

SEQ ID NO: 1236779 - DNA, 15 bp, Homo sapiens
ctgtctcagaccttc

SEQ ID NO: 1236780 - DNA, 15 bp, Homo sapiens
tctgtctcagacctt

SEQ ID NO: 1236781 - DNA, 15 bp, Homo sapiens
gtctgtctcagacct

SEQ ID NO: 1236782 - DNA, 15 bp, Homo sapiens
ggtctgtctcagacc

SEQ ID NO: 1236783 - DNA, 15 bp, Homo sapiens
aggtctgtctcagac

SEQ ID NO: 1236784 - DNA, 15 bp, Homo sapiens
aaggtctgtctcaga

SEQ ID NO: 1236785 - DNA, 15 bp, Homo sapiens
caaggtctgtctcag

SEQ ID NO: 1236786 - DNA, 15 bp, Homo sapiens
acaaggtctgtctca

SEQ ID NO: 1236787 - DNA, 15 bp, Homo sapiens
tacaaggtctgtctc

SEQ ID NO: 1236788 - DNA, 15 bp, Homo sapiens
atacaaggtctgtct

SEQ ID NO: 1236789 - DNA, 15 bp, Homo sapiens
aatacaaggtctgtc

SEQ ID NO: 1236790 - DNA, 15 bp, Homo sapiens
aaatacaaggtctgt

SEQ ID NO: 1236791 - DNA, 15 bp, Homo sapiens
aaaatacaaggtctg

SEQ ID NO: 1236792 - DNA, 15 bp, Homo sapiens
taaaatacaaggtct

SEQ ID NO: 1236793 - DNA, 15 bp, Homo sapiens
ttaaaatacaaggtc

SEQ ID NO: 1236794 - DNA, 15 bp, Homo sapiens
tttaaaatacaaggt

SEQ ID NO: 1236795 - DNA, 15 bp, Homo sapiens
gtttaaaatacaagg

SEQ ID NO: 1236796 - DNA, 15 bp, Homo sapiens
agtttaaaatacaag

SEQ ID NO: 1236797 - DNA, 15 bp, Homo sapiens
cagtttaaaatacaa

SEQ ID NO: 1236798 - DNA, 15 bp, Homo sapiens
acagtttaaaataca

SEQ ID NO: 1236799 - DNA, 15 bp, Homo sapiens
cacagtttaaaatac

SEQ ID NO: 1236800 - DNA, 15 bp, Homo sapiens
ccacagtttaaaata

SEQ ID NO: 1236801 - DNA, 15 bp, Homo sapiens
gccacagtttaaaat

SEQ ID NO: 1236802 - DNA, 15 bp, Homo sapiens
ggccacagtttaaaa

SEQ ID NO: 1236803 - DNA, 15 bp, Homo sapiens
gggccacagtttaaa

SEQ ID NO: 1236804 - DNA, 15 bp, Homo sapiens
ggggccacagtttaa

SEQ ID NO: 1236805 - DNA, 15 bp, Homo sapiens
tggggccacagttta

SEQ ID NO: 1236806 - DNA, 15 bp, Homo sapiens
ctggggccacagttt

SEQ ID NO: 1236807 - DNA, 15 bp, Homo sapiens
tctggggccacagtt

SEQ ID NO: 1236808 - DNA, 15 bp, Homo sapiens
ctctggggccacagt

SEQ ID NO: 1236809 - DNA, 15 bp, Homo sapiens
tctctggggccacag

SEQ ID NO: 1236810 - DNA, 15 bp, Homo sapiens
ctctctggggccaca

SEQ ID NO: 1236811 - DNA, 15 bp, Homo sapiens
gctctctggggccac

SEQ ID NO: 1236812 - DNA, 15 bp, Homo sapiens
agctctctggggcca

SEQ ID NO: 1236813 - DNA, 15 bp, Homo sapiens
tagctctctggggcc

SEQ ID NO: 1236814 - DNA, 15 bp, Homo sapiens
atagctctctggggc

SEQ ID NO: 1236815 - DNA, 15 bp, Homo sapiens
catagctctctgggg

SEQ ID NO: 1236816 - DNA, 15 bp, Homo sapiens
acatagctctctggg

SEQ ID NO: 1236817 - DNA, 15 bp, Homo sapiens
aacatagctctctgg

SEQ ID NO: 1236818 - DNA, 15 bp, Homo sapiens
gaacatagctctctg

SEQ ID NO: 1236819 - DNA, 15 bp, Homo sapiens
agaacatagctctct

SEQ ID NO: 1236820 - DNA, 15 bp, Homo sapiens
gagaacatagctctc

SEQ ID NO: 1236821 - DNA, 15 bp, Homo sapiens
ggagaacatagctct

SEQ ID NO: 1236822 - DNA, 15 bp, Homo sapiens
cggagaacatagctc

SEQ ID NO: 1236823 - DNA, 15 bp, Homo sapiens
tcggagaacatagct

SEQ ID NO: 1236824 - DNA, 15 bp, Homo sapiens
gtcggagaacatagc

SEQ ID NO: 1236825 - DNA, 15 bp, Homo sapiens
agtcggagaacatag

SEQ ID NO: 1236826 - DNA, 15 bp, Homo sapiens
cagtcggagaacata

SEQ ID NO: 1236827 - DNA, 15 bp, Homo sapiens
gcagtcggagaacat

SEQ ID NO: 1236828 - DNA, 15 bp, Homo sapiens
ggcagtcggagaaca

SEQ ID NO: 1236829 - DNA, 15 bp, Homo sapiens
cggcagtcggagaac

SEQ ID NO: 1236830 - DNA, 15 bp, Homo sapiens
gcggcagtcggagaa

SEQ ID NO: 1236831 - DNA, 15 bp, Homo sapiens
tgcggcagtcggaga

SEQ ID NO: 1236832 - DNA, 15 bp, Homo sapiens
ctgcggcagtcggag

SEQ ID NO: 1236833 - DNA, 15 bp, Homo sapiens
gctgcggcagtcgga

SEQ ID NO: 1236834 - DNA, 15 bp, Homo sapiens
ggctgcggcagtcgg

SEQ ID NO: 1236835 - DNA, 15 bp, Homo sapiens
tggctgcggcagtcg

SEQ ID NO: 1236836 - DNA, 15 bp, Homo sapiens
ttggctgcggcagtc

SEQ ID NO: 1236837 - DNA, 15 bp, Homo sapiens
cttggctgcggcagt

SEQ ID NO: 1236838 - DNA, 15 bp, Homo sapiens
ccttggctgcggcag

SEQ ID NO: 1236839 - DNA, 15 bp, Homo sapiens
gccttggctgcggca

SEQ ID NO: 1236840 - DNA, 15 bp, Homo sapiens
tgccttggctgcggc

SEQ ID NO: 1236841 - DNA, 15 bp, Homo sapiens
atgccttggctgcgg

SEQ ID NO: 1236842 - DNA, 15 bp, Homo sapiens
catgccttggctgcg

SEQ ID NO: 1236843 - DNA, 15 bp, Homo sapiens
gcatgccttggctgc

SEQ ID NO: 1236844 - DNA, 15 bp, Homo sapiens
agcatgccttggctg

SEQ ID NO: 1236845 - DNA, 15 bp, Homo sapiens
cagcatgccttggct

SEQ ID NO: 1236846 - DNA, 15 bp, Homo sapiens
gcagcatgccttggc

SEQ ID NO: 1236847 - DNA, 15 bp, Homo sapiens
agcagcatgccttgg

SEQ ID NO: 1236848 - DNA, 15 bp, Homo sapiens
gagcagcatgccttg

SEQ ID NO: 1236849 - DNA, 15 bp, Homo sapiens
tgagcagcatgcctt

SEQ ID NO: 1236850 - DNA, 15 bp, Homo sapiens
ctgagcagcatgcct

SEQ ID NO: 1236851 - DNA, 15 bp, Homo sapiens
actgagcagcatgcc

SEQ ID NO: 1236852 - DNA, 15 bp, Homo sapiens
gactgagcagcatgc

SEQ ID NO: 1236853 - DNA, 15 bp, Homo sapiens
ggactgagcagcatg

SEQ ID NO: 1236854 - DNA, 15 bp, Homo sapiens
gggactgagcagcat

SEQ ID NO: 1236855 - DNA, 15 bp, Homo sapiens
agggactgagcagca

SEQ ID NO: 1236856 - DNA, 15 bp, Homo sapiens
gagggactgagcagc

SEQ ID NO: 1236857 - DNA, 15 bp, Homo sapiens
tgagggactgagcag

SEQ ID NO: 1236858 - DNA, 15 bp, Homo sapiens
ttgagggactgagca

SEQ ID NO: 1236859 - DNA, 15 bp, Homo sapiens
cttgagggactgagc

SEQ ID NO: 1236860 - DNA, 15 bp, Homo sapiens
gcttgagggactgag

SEQ ID NO: 1236861 - DNA, 15 bp, Homo sapiens
ggcttgagggactga

SEQ ID NO: 1236862 - DNA, 15 bp, Homo sapiens
tggcttgagggactg

SEQ ID NO: 1236863 - DNA, 15 bp, Homo sapiens
atggcttgagggact

SEQ ID NO: 1236864 - DNA, 15 bp, Homo sapiens
gatggcttgagggac

SEQ ID NO: 1236865 - DNA, 15 bp, Homo sapiens
ggatggcttgaggga

SEQ ID NO: 1236866 - DNA, 15 bp, Homo sapiens
gggatggcttgaggg

SEQ ID NO: 1236867 - DNA, 15 bp, Homo sapiens
ggggatggcttgagg

SEQ ID NO: 1236868 - DNA, 15 bp, Homo sapiens
aggggatggcttgag

SEQ ID NO: 1236869 - DNA, 15 bp, Homo sapiens
caggggatggcttga

SEQ ID NO: 1236870 - DNA, 15 bp, Homo sapiens
tcaggggatggcttg

SEQ ID NO: 1236871 - DNA, 15 bp, Homo sapiens
ctcaggggatggctt

SEQ ID NO: 1236872 - DNA, 15 bp, Homo sapiens
cctcaggggatggct

SEQ ID NO: 1236873 - DNA, 15 bp, Homo sapiens
ccctcaggggatggc

SEQ ID NO: 1236874 - DNA, 15 bp, Homo sapiens
gccctcaggggatgg

SEQ ID NO: 1236875 - DNA, 15 bp, Homo sapiens
agccctcaggggatg

SEQ ID NO: 1236876 - DNA, 15 bp, Homo sapiens
gagccctcaggggat

SEQ ID NO: 1236877 - DNA, 15 bp, Homo sapiens
agagccctcagggga

SEQ ID NO: 1236878 - DNA, 15 bp, Homo sapiens
aagagccctcagggg

SEQ ID NO: 1236879 - DNA, 15 bp, Homo sapiens
gaagagccctcaggg

SEQ ID NO: 1236880 - DNA, 15 bp, Homo sapiens
tgaagagccctcagg

SEQ ID NO: 1236881 - DNA, 15 bp, Homo sapiens
gtgaagagccctcag

SEQ ID NO: 1236882 - DNA, 15 bp, Homo sapiens
tgtgaagagccctca

SEQ ID NO: 1236883 - DNA, 15 bp, Homo sapiens
ctgtgaagagccctc

SEQ ID NO: 1236884 - DNA, 15 bp, Homo sapiens
tctgtgaagagccct

SEQ ID NO: 1236885 - DNA, 15 bp, Homo sapiens
ctctgtgaagagccc

SEQ ID NO: 1236886 - DNA, 15 bp, Homo sapiens
tctctgtgaagagcc

SEQ ID NO: 1236887 - DNA, 15 bp, Homo sapiens
atctctgtgaagagc

SEQ ID NO: 1236888 - DNA, 15 bp, Homo sapiens
gatctctgtgaagag

SEQ ID NO: 1236889 - DNA, 15 bp, Homo sapiens
agatctctgtgaaga

SEQ ID NO: 1236890 - DNA, 15 bp, Homo sapiens
tagatctctgtgaag

SEQ ID NO: 1236891 - DNA, 15 bp, Homo sapiens
ttagatctctgtgaa

SEQ ID NO: 1236892 - DNA, 15 bp, Homo sapiens
attagatctctgtga

SEQ ID NO: 1236893 - DNA, 15 bp, Homo sapiens
gattagatctctgtg

SEQ ID NO: 1236894 - DNA, 15 bp, Homo sapiens
ggattagatctctgt

SEQ ID NO: 1236895 - DNA, 15 bp, Homo sapiens
aggattagatctctg

SEQ ID NO: 1236896 - DNA, 15 bp, Homo sapiens
gaggattagatctct

SEQ ID NO: 1236897 - DNA, 15 bp, Homo sapiens
tgaggattagatctc

SEQ ID NO: 1236898 - DNA, 15 bp, Homo sapiens
atgaggattagatct

SEQ ID NO: 1236899 - DNA, 15 bp, Homo sapiens
catgaggattagatc

SEQ ID NO: 1236900 - DNA, 15 bp, Homo sapiens
acatgaggattagat

SEQ ID NO: 1236901 - DNA, 15 bp, Homo sapiens
tacatgaggattaga

SEQ ID NO: 1236902 - DNA, 15 bp, Homo sapiens
ttacatgaggattag

SEQ ID NO: 1236903 - DNA, 15 bp, Homo sapiens
attacatgaggatta

SEQ ID NO: 1236904 - DNA, 15 bp, Homo sapiens
aattacatgaggatt

SEQ ID NO: 1236905 - DNA, 15 bp, Homo sapiens
taattacatgaggat

SEQ ID NO: 1236906 - DNA, 15 bp, Homo sapiens
ttaattacatgagga

SEQ ID NO: 1236907 - DNA, 15 bp, Homo sapiens
cttaattacatgagg

SEQ ID NO: 1236908 - DNA, 15 bp, Homo sapiens
acttaattacatgag

SEQ ID NO: 1236909 - DNA, 15 bp, Homo sapiens
gacttaattacatga

SEQ ID NO: 1236910 - DNA, 15 bp, Homo sapiens
agacttaattacatg

SEQ ID NO: 1236911 - DNA, 15 bp, Homo sapiens
aagacttaattacat

SEQ ID NO: 1236912 - DNA, 15 bp, Homo sapiens
gaagacttaattaca

SEQ ID NO: 1236913 - DNA, 15 bp, Homo sapiens
tgaagacttaattac

SEQ ID NO: 1236914 - DNA, 15 bp, Homo sapiens
ttgaagacttaatta

SEQ ID NO: 1236915 - DNA, 15 bp, Homo sapiens
gttgaagacttaatt

SEQ ID NO: 1236916 - DNA, 15 bp, Homo sapiens
agttgaagacttaat

SEQ ID NO: 1236917 - DNA, 15 bp, Homo sapiens
aagttgaagacttaa

SEQ ID NO: 1236918 - DNA, 15 bp, Homo sapiens
taagttgaagactta

SEQ ID NO: 1236919 - DNA, 15 bp, Homo sapiens
ataagttgaagactt

SEQ ID NO: 1236920 - DNA, 15 bp, Homo sapiens
aataagttgaagact

SEQ ID NO: 1236921 - DNA, 15 bp, Homo sapiens
aaataagttgaagac

SEQ ID NO: 1236922 - DNA, 15 bp, Homo sapiens
aaaataagttgaaga

SEQ ID NO: 1236923 - DNA, 15 bp, Homo sapiens
gaaaataagttgaag

SEQ ID NO: 1236924 - DNA, 15 bp, Homo sapiens
agaaaataagttgaa

SEQ ID NO: 1236925 - DNA, 15 bp, Homo sapiens
aagaaaataagttga

SEQ ID NO: 1236926 - DNA, 15 bp, Homo sapiens
taagaaaataagttg

SEQ ID NO: 1236927 - DNA, 15 bp, Homo sapiens
gtaagaaaataagtt

SEQ ID NO: 1236928 - DNA, 15 bp, Homo sapiens
tgtaagaaaataagt

SEQ ID NO: 1236929 - DNA, 15 bp, Homo sapiens
gtgtaagaaaataag

SEQ ID NO: 1236930 - DNA, 15 bp, Homo sapiens
tgtgtaagaaaataa

SEQ ID NO: 1236931 - DNA, 15 bp, Homo sapiens
atgtgtaagaaaata

SEQ ID NO: 1236932 - DNA, 15 bp, Homo sapiens
aatgtgtaagaaaat

SEQ ID NO: 1236933 - DNA, 15 bp, Homo sapiens
caatgtgtaagaaaa

SEQ ID NO: 1236934 - DNA, 15 bp, Homo sapiens
acaatgtgtaagaaa

SEQ ID NO: 1236935 - DNA, 15 bp, Homo sapiens
aacaatgtgtaagaa

SEQ ID NO: 1236936 - DNA, 15 bp, Homo sapiens
taacaatgtgtaaga

SEQ ID NO: 1236937 - DNA, 15 bp, Homo sapiens
ataacaatgtgtaag

SEQ ID NO: 1236938 - DNA, 15 bp, Homo sapiens
cataacaatgtgtaa

SEQ ID NO: 1236939 - DNA, 15 bp, Homo sapiens
tcataacaatgtgta

SEQ ID NO: 1236940 - DNA, 15 bp, Homo sapiens
ttcataacaatgtgt

SEQ ID NO: 1236941 - DNA, 15 bp, Homo sapiens
cttcataacaatgtg

SEQ ID NO: 1236942 - DNA, 15 bp, Homo sapiens
acttcataacaatgt

SEQ ID NO: 1236943 - DNA, 15 bp, Homo sapiens
cacttcataacaatg

SEQ ID NO: 1236944 - DNA, 15 bp, Homo sapiens
gcacttcataacaat

SEQ ID NO: 1236945 - DNA, 15 bp, Homo sapiens
tgcacttcataacaa

SEQ ID NO: 1236946 - DNA, 15 bp, Homo sapiens
gtgcacttcataaca

SEQ ID NO: 1236947 - DNA, 15 bp, Homo sapiens
tgtgcacttcataac

SEQ ID NO: 1236948 - DNA, 15 bp, Homo sapiens
atgtgcacttcataa

SEQ ID NO: 1236949 - DNA, 15 bp, Homo sapiens
tatgtgcacttcata

SEQ ID NO: 1236950 - DNA, 15 bp, Homo sapiens
ttatgtgcacttcat

SEQ ID NO: 1236951 - DNA, 15 bp, Homo sapiens
tttatgtgcacttca

SEQ ID NO: 1236952 - DNA, 15 bp, Homo sapiens
atttatgtgcacttc

SEQ ID NO: 1236953 - DNA, 15 bp, Homo sapiens
gatttatgtgcactt

SEQ ID NO: 1236954 - DNA, 15 bp, Homo sapiens
agatttatgtgcact

SEQ ID NO: 1236955 - DNA, 15 bp, Homo sapiens
cagatttatgtgcac

SEQ ID NO: 1236956 - DNA, 15 bp, Homo sapiens
gcagatttatgtgca

SEQ ID NO: 1236957 - DNA, 15 bp, Homo sapiens
tgcagatttatgtgc

SEQ ID NO: 1236958 - DNA, 15 bp, Homo sapiens
ctgcagatttatgtg

SEQ ID NO: 1236959 - DNA, 15 bp, Homo sapiens
tctgcagatttatgt

SEQ ID NO: 1236960 - DNA, 15 bp, Homo sapiens
ctctgcagatttatg

SEQ ID NO: 1236961 - DNA, 15 bp, Homo sapiens
cctctgcagatttat

SEQ ID NO: 1236962 - DNA, 15 bp, Homo sapiens
acctctgcagattta

SEQ ID NO: 1236963 - DNA, 15 bp, Homo sapiens
tacctctgcagattt

SEQ ID NO: 1236964 - DNA, 15 bp, Homo sapiens
atacctctgcagatt

SEQ ID NO: 1236965 - DNA, 15 bp, Homo sapiens
aatacctctgcagat

SEQ ID NO: 1236966 - DNA, 15 bp, Homo sapiens
aaatacctctgcaga

SEQ ID NO: 1236967 - DNA, 15 bp, Homo sapiens
aaaatacctctgcag

SEQ ID NO: 1236968 - DNA, 15 bp, Homo sapiens
aaaaatacctctgca

SEQ ID NO: 1236969 - DNA, 15 bp, Homo sapiens
aaaaaatacctctgc

SEQ ID NO: 1236970 - DNA, 15 bp, Homo sapiens
gaaaaaatacctctg

SEQ ID NO: 1236971 - DNA, 15 bp, Homo sapiens
ggaaaaaatacctct

SEQ ID NO: 1236972 - DNA, 15 bp, Homo sapiens
gggaaaaaatacctc

SEQ ID NO: 1236973 - DNA, 15 bp, Homo sapiens
ggggaaaaaatacct

SEQ ID NO: 1236974 - DNA, 15 bp, Homo sapiens
aggggaaaaaatacc

SEQ ID NO: 1236975 - DNA, 15 bp, Homo sapiens
aaggggaaaaaatac

SEQ ID NO: 1236976 - DNA, 15 bp, Homo sapiens
taaggggaaaaaata

SEQ ID NO: 1236977 - DNA, 15 bp, Homo sapiens
ttaaggggaaaaaat

SEQ ID NO: 1236978 - DNA, 15 bp, Homo sapiens
attaaggggaaaaaa

SEQ ID NO: 1236979 - DNA, 15 bp, Homo sapiens
aattaaggggaaaaa

SEQ ID NO: 1236980 - DNA, 15 bp, Homo sapiens
taattaaggggaaaa

SEQ ID NO: 1236981 - DNA, 15 bp, Homo sapiens
ttaattaaggggaaa

SEQ ID NO: 1236982 - DNA, 15 bp, Homo sapiens
cttaattaaggggaa

SEQ ID NO: 1236983 - DNA, 15 bp, Homo sapiens
tcttaattaagggga

SEQ ID NO: 1236984 - DNA, 15 bp, Homo sapiens
ttcttaattaagggg

SEQ ID NO: 1236985 - DNA, 15 bp, Homo sapiens
tttcttaattaaggg

SEQ ID NO: 1236986 - DNA, 15 bp, Homo sapiens
atttcttaattaagg

SEQ ID NO: 1236987 - DNA, 15 bp, Homo sapiens
tatttcttaattaag

SEQ ID NO: 1236988 - DNA, 15 bp, Homo sapiens
gtatttcttaattaa

SEQ ID NO: 1236989 - DNA, 15 bp, Homo sapiens
agtatttcttaatta

SEQ ID NO: 1236990 - DNA, 15 bp, Homo sapiens
gagtatttcttaatt

SEQ ID NO: 1236991 - DNA, 15 bp, Homo sapiens
tgagtatttcttaat

SEQ ID NO: 1236992 - DNA, 15 bp, Homo sapiens
gtgagtatttcttaa

SEQ ID NO: 1236993 - DNA, 15 bp, Homo sapiens
tgtgagtatttctta

SEQ ID NO: 1236994 - DNA, 15 bp, Homo sapiens
ctgtgagtatttctt

SEQ ID NO: 1236995 - DNA, 15 bp, Homo sapiens
cctgtgagtatttct

SEQ ID NO: 1236996 - DNA, 15 bp, Homo sapiens
ccctgtgagtatttc

SEQ ID NO: 1236997 - DNA, 15 bp, Homo sapiens
cccctgtgagtattt

SEQ ID NO: 1236998 - DNA, 15 bp, Homo sapiens
ccccctgtgagtatt

SEQ ID NO: 1236999 - DNA, 15 bp, Homo sapiens
accccctgtgagtat

SEQ ID NO: 1237000 - DNA, 15 bp, Homo sapiens
aaccccctgtgagta

SEQ ID NO: 1237001 - DNA, 15 bp, Homo sapiens
gaaccccctgtgagt

SEQ ID NO: 1237002 - DNA, 15 bp, Homo sapiens
tgaaccccctgtgag

SEQ ID NO: 1237003 - DNA, 15 bp, Homo sapiens
ttgaaccccctgtga

SEQ ID NO: 1237004 - DNA, 15 bp, Homo sapiens
attgaaccccctgtg

SEQ ID NO: 1237005 - DNA, 15 bp, Homo sapiens
cattgaaccccctgt

SEQ ID NO: 1237006 - DNA, 15 bp, Homo sapiens
tcattgaaccccctg

SEQ ID NO: 1237007 - DNA, 15 bp, Homo sapiens
ttcattgaaccccct

SEQ ID NO: 1237008 - DNA, 15 bp, Homo sapiens
tttcattgaaccccc

SEQ ID NO: 1237009 - DNA, 15 bp, Homo sapiens
ctttcattgaacccc

SEQ ID NO: 1237010 - DNA, 15 bp, Homo sapiens
cctttcattgaaccc

SEQ ID NO: 1237011 - DNA, 15 bp, Homo sapiens
ccctttcattgaacc

SEQ ID NO: 1237012 - DNA, 15 bp, Homo sapiens
tccctttcattgaac

SEQ ID NO: 1237013 - DNA, 15 bp, Homo sapiens
gtccctttcattgaa

SEQ ID NO: 1237014 - DNA, 15 bp, Homo sapiens
tgtccctttcattga

SEQ ID NO: 1237015 - DNA, 15 bp, Homo sapiens
ctgtccctttcattg

SEQ ID NO: 1237016 - DNA, 15 bp, Homo sapiens
cctgtccctttcatt

SEQ ID NO: 1237017 - DNA, 15 bp, Homo sapiens
gcctgtccctttcat

SEQ ID NO: 1237018 - DNA, 15 bp, Homo sapiens
agcctgtccctttca

SEQ ID NO: 1237019 - DNA, 15 bp, Homo sapiens
gagcctgtccctttc

SEQ ID NO: 1237020 - DNA, 15 bp, Homo sapiens
agagcctgtcccttt

SEQ ID NO: 1237021 - DNA, 15 bp, Homo sapiens
gagagcctgtccctt

SEQ ID NO: 1237022 - DNA, 15 bp, Homo sapiens
ggagagcctgtccct

SEQ ID NO: 1237023 - DNA, 15 bp, Homo sapiens
tggagagcctgtccc

SEQ ID NO: 1237024 - DNA, 15 bp, Homo sapiens
ctggagagcctgtcc

SEQ ID NO: 1237025 - DNA, 15 bp, Homo sapiens
gctggagagcctgtc

SEQ ID NO: 1237026 - DNA, 15 bp, Homo sapiens
tgctggagagcctgt

SEQ ID NO: 1237027 - DNA, 15 bp, Homo sapiens
atgctggagagcctg

SEQ ID NO: 1237028 - DNA, 15 bp, Homo sapiens
tatgctggagagcct

SEQ ID NO: 1237029 - DNA, 15 bp, Homo sapiens
gtatgctggagagcc

SEQ ID NO: 1237030 - DNA, 15 bp, Homo sapiens
agtatgctggagagc

SEQ ID NO: 1237031 - DNA, 15 bp, Homo sapiens
aagtatgctggagag

SEQ ID NO: 1237032 - DNA, 15 bp, Homo sapiens
gaagtatgctggaga

SEQ ID NO: 1237033 - DNA, 15 bp, Homo sapiens
tgaagtatgctggag

SEQ ID NO: 1237034 - DNA, 15 bp, Homo sapiens
ctgaagtatgctgga

SEQ ID NO: 1237035 - DNA, 15 bp, Homo sapiens
gctgaagtatgctgg

SEQ ID NO: 1237036 - DNA, 15 bp, Homo sapiens
tgctgaagtatgctg

SEQ ID NO: 1237037 - DNA, 15 bp, Homo sapiens
ttgctgaagtatgct

SEQ ID NO: 1237038 - DNA, 15 bp, Homo sapiens
tttgctgaagtatgc

SEQ ID NO: 1237039 - DNA, 15 bp, Homo sapiens
ctttgctgaagtatg

SEQ ID NO: 1237040 - DNA, 15 bp, Homo sapiens
tctttgctgaagtat

SEQ ID NO: 1237041 - DNA, 15 bp, Homo sapiens
atctttgctgaagta

SEQ ID NO: 1237042 - DNA, 15 bp, Homo sapiens
catctttgctgaagt

SEQ ID NO: 1237043 - DNA, 15 bp, Homo sapiens
gcatctttgctgaag

SEQ ID NO: 1237044 - DNA, 15 bp, Homo sapiens
cgcatctttgctgaa

SEQ ID NO: 1237045 - DNA, 15 bp, Homo sapiens
acgcatctttgctga

SEQ ID NO: 1237046 - DNA, 15 bp, Homo sapiens
tacgcatctttgctg

SEQ ID NO: 1237047 - DNA, 15 bp, Homo sapiens
ttacgcatctttgct

SEQ ID NO: 1237048 - DNA, 15 bp, Homo sapiens
gttacgcatctttgc

SEQ ID NO: 1237049 - DNA, 15 bp, Homo sapiens
cgttacgcatctttg

SEQ ID NO: 1237050 - DNA, 15 bp, Homo sapiens
gcgttacgcatcttt

SEQ ID NO: 1237051 - DNA, 15 bp, Homo sapiens
agcgttacgcatctt

SEQ ID NO: 1237052 - DNA, 15 bp, Homo sapiens
aagcgttacgcatct

SEQ ID NO: 1237053 - DNA, 15 bp, Homo sapiens
aaagcgttacgcatc

SEQ ID NO: 1237054 - DNA, 15 bp, Homo sapiens
taaagcgttacgcat

SEQ ID NO: 1237055 - DNA, 15 bp, Homo sapiens
ctaaagcgttacgca

SEQ ID NO: 1237056 - DNA, 15 bp, Homo sapiens
tctaaagcgttacgc

SEQ ID NO: 1237057 - DNA, 15 bp, Homo sapiens
ttctaaagcgttacg

SEQ ID NO: 1237058 - DNA, 15 bp, Homo sapiens
tttctaaagcgttac

SEQ ID NO: 1237059 - DNA, 15 bp, Homo sapiens
gtttctaaagcgtta

SEQ ID NO: 1237060 - DNA, 15 bp, Homo sapiens
tgtttctaaagcgtt

SEQ ID NO: 1237061 - DNA, 15 bp, Homo sapiens
ctgtttctaaagcgt

SEQ ID NO: 1237062 - DNA, 15 bp, Homo sapiens
tctgtttctaaagcg

SEQ ID NO: 1237063 - DNA, 15 bp, Homo sapiens
atctgtttctaaagc

SEQ ID NO: 1237064 - DNA, 15 bp, Homo sapiens
gatctgtttctaaag

SEQ ID NO: 1237065 - DNA, 15 bp, Homo sapiens
tgatctgtttctaaa

SEQ ID NO: 1237066 - DNA, 15 bp, Homo sapiens
atgatctgtttctaa

SEQ ID NO: 1237067 - DNA, 15 bp, Homo sapiens
gatgatctgtttcta

SEQ ID NO: 1237068 - DNA, 15 bp, Homo sapiens
ggatgatctgtttct

SEQ ID NO: 1237069 - DNA, 15 bp, Homo sapiens
tggatgatctgtttc

SEQ ID NO: 1237070 - DNA, 15 bp, Homo sapiens
ttggatgatctgttt

SEQ ID NO: 1237071 - DNA, 15 bp, Homo sapiens
attggatgatctgtt

SEQ ID NO: 1237072 - DNA, 15 bp, Homo sapiens
aattggatgatctgt

SEQ ID NO: 1237073 - DNA, 15 bp, Homo sapiens
aaattggatgatctg

SEQ ID NO: 1237074 - DNA, 15 bp, Homo sapiens
aaaattggatgatct

SEQ ID NO: 1237075 - DNA, 15 bp, Homo sapiens
caaaattggatgatc

SEQ ID NO: 1237076 - DNA, 15 bp, Homo sapiens
acaaaattggatgat

SEQ ID NO: 1237077 - DNA, 15 bp, Homo sapiens
tacaaaattggatga

SEQ ID NO: 1237078 - DNA, 15 bp, Homo sapiens
atacaaaattggatg

SEQ ID NO: 1237079 - DNA, 15 bp, Homo sapiens
aatacaaaattggat

SEQ ID NO: 1237080 - DNA, 15 bp, Homo sapiens
gaatacaaaattgga

SEQ ID NO: 1237081 - DNA, 15 bp, Homo sapiens
agaatacaaaattgg

SEQ ID NO: 1237082 - DNA, 15 bp, Homo sapiens
aagaatacaaaattg

SEQ ID NO: 1237083 - DNA, 15 bp, Homo sapiens
aaagaatacaaaatt

SEQ ID NO: 1237084 - DNA, 15 bp, Homo sapiens
caaagaatacaaaat

SEQ ID NO: 1237085 - DNA, 15 bp, Homo sapiens
gcaaagaatacaaaa

SEQ ID NO: 1237086 - DNA, 15 bp, Homo sapiens
tgcaaagaatacaaa

SEQ ID NO: 1237087 - DNA, 15 bp, Homo sapiens
ctgcaaagaatacaa

SEQ ID NO: 1237088 - DNA, 15 bp, Homo sapiens
actgcaaagaataca

SEQ ID NO: 1237089 - DNA, 15 bp, Homo sapiens
gactgcaaagaatac

SEQ ID NO: 1237090 - DNA, 15 bp, Homo sapiens
tgactgcaaagaata

SEQ ID NO: 1237091 - DNA, 15 bp, Homo sapiens
ttgactgcaaagaat

SEQ ID NO: 1237092 - DNA, 15 bp, Homo sapiens
tttgactgcaaagaa

SEQ ID NO: 1237093 - DNA, 15 bp, Homo sapiens
atttgactgcaaaga

SEQ ID NO: 1237094 - DNA, 15 bp, Homo sapiens
catttgactgcaaag

SEQ ID NO: 1237095 - DNA, 15 bp, Homo sapiens
acatttgactgcaaa

SEQ ID NO: 1237096 - DNA, 15 bp, Homo sapiens
aacatttgactgcaa

SEQ ID NO: 1237097 - DNA, 15 bp, Homo sapiens
gaacatttgactgca

SEQ ID NO: 1237098 - DNA, 15 bp, Homo sapiens
tgaacatttgactgc

SEQ ID NO: 1237099 - DNA, 15 bp, Homo sapiens
atgaacatttgactg

SEQ ID NO: 1237100 - DNA, 15 bp, Homo sapiens
tatgaacatttgact

SEQ ID NO: 1237101 - DNA, 15 bp, Homo sapiens
gtatgaacatttgac

SEQ ID NO: 1237102 - DNA, 15 bp, Homo sapiens
tgtatgaacatttga

SEQ ID NO: 1237103 - DNA, 15 bp, Homo sapiens
ctgtatgaacatttg

SEQ ID NO: 1237104 - DNA, 15 bp, Homo sapiens
actgtatgaacattt

SEQ ID NO: 1237105 - DNA, 15 bp, Homo sapiens
cactgtatgaacatt

SEQ ID NO: 1237106 - DNA, 15 bp, Homo sapiens
gcactgtatgaacat

SEQ ID NO: 1237107 - DNA, 15 bp, Homo sapiens
agcactgtatgaaca

SEQ ID NO: 1237108 - DNA, 15 bp, Homo sapiens
aagcactgtatgaac

SEQ ID NO: 1237109 - DNA, 15 bp, Homo sapiens
aaagcactgtatgaa

SEQ ID NO: 1237110 - DNA, 15 bp, Homo sapiens
taaagcactgtatga

SEQ ID NO: 1237111 - DNA, 15 bp, Homo sapiens
ctaaagcactgtatg

SEQ ID NO: 1237112 - DNA, 15 bp, Homo sapiens
gctaaagcactgtat

SEQ ID NO: 1237113 - DNA, 15 bp, Homo sapiens
tgctaaagcactgta

SEQ ID NO: 1237114 - DNA, 15 bp, Homo sapiens
ctgctaaagcactgt

SEQ ID NO: 1237115 - DNA, 15 bp, Homo sapiens
tctgctaaagcactg

SEQ ID NO: 1237116 - DNA, 15 bp, Homo sapiens
atctgctaaagcact

SEQ ID NO: 1237117 - DNA, 15 bp, Homo sapiens
catctgctaaagcac

SEQ ID NO: 1237118 - DNA, 15 bp, Homo sapiens
acatctgctaaagca

SEQ ID NO: 1237119 - DNA, 15 bp, Homo sapiens
cacatctgctaaagc

SEQ ID NO: 1237120 - DNA, 15 bp, Homo sapiens
tcacatctgctaaag

SEQ ID NO: 1237121 - DNA, 15 bp, Homo sapiens
gtcacatctgctaaa

SEQ ID NO: 1237122 - DNA, 15 bp, Homo sapiens
tgtcacatctgctaa

SEQ ID NO: 1237123 - DNA, 15 bp, Homo sapiens
atgtcacatctgcta

SEQ ID NO: 1237124 - DNA, 15 bp, Homo sapiens
gatgtcacatctgct

SEQ ID NO: 1237125 - DNA, 15 bp, Homo sapiens
agatgtcacatctgc

SEQ ID NO: 1237126 - DNA, 15 bp, Homo sapiens
aagatgtcacatctg

SEQ ID NO: 1237127 - DNA, 15 bp, Homo sapiens
aaagatgtcacatct

SEQ ID NO: 1237128 - DNA, 15 bp, Homo sapiens
gaaagatgtcacatc

SEQ ID NO: 1237129 - DNA, 15 bp, Homo sapiens
agaaagatgtcacat

SEQ ID NO: 1237130 - DNA, 15 bp, Homo sapiens
gagaaagatgtcaca

SEQ ID NO: 1237131 - DNA, 15 bp, Homo sapiens
agagaaagatgtcac

SEQ ID NO: 1237132 - DNA, 15 bp, Homo sapiens
cagagaaagatgtca

SEQ ID NO: 1237133 - DNA, 15 bp, Homo sapiens
tcagagaaagatgtc

SEQ ID NO: 1237134 - DNA, 15 bp, Homo sapiens
ctcagagaaagatgt

SEQ ID NO: 1237135 - DNA, 15 bp, Homo sapiens
tctcagagaaagatg

SEQ ID NO: 1237136 - DNA, 15 bp, Homo sapiens
gtctcagagaaagat

SEQ ID NO: 1237137 - DNA, 15 bp, Homo sapiens
agtctcagagaaaga

SEQ ID NO: 1237138 - DNA, 15 bp, Homo sapiens
cagtctcagagaaag

SEQ ID NO: 1237139 - DNA, 15 bp, Homo sapiens
tcagtctcagagaaa

SEQ ID NO: 1237140 - DNA, 15 bp, Homo sapiens
gtcagtctcagagaa

SEQ ID NO: 1237141 - DNA, 15 bp, Homo sapiens
tgtcagtctcagaga

SEQ ID NO: 1237142 - DNA, 15 bp, Homo sapiens
atgtcagtctcagag

SEQ ID NO: 1237143 - DNA, 15 bp, Homo sapiens
tatgtcagtctcaga

SEQ ID NO: 1237144 - DNA, 15 bp, Homo sapiens
ttatgtcagtctcag

SEQ ID NO: 1237145 - DNA, 15 bp, Homo sapiens
tttatgtcagtctca

SEQ ID NO: 1237146 - DNA, 15 bp, Homo sapiens
ctttatgtcagtctc

SEQ ID NO: 1237147 - DNA, 15 bp, Homo sapiens
tctttatgtcagtct

SEQ ID NO: 1237148 - DNA, 15 bp, Homo sapiens
ttctttatgtcagtc

SEQ ID NO: 1237149 - DNA, 15 bp, Homo sapiens
tttctttatgtcagt

SEQ ID NO: 1237150 - DNA, 15 bp, Homo sapiens
ttttctttatgtcag

SEQ ID NO: 1237151 - DNA, 15 bp, Homo sapiens
tttttctttatgtca

SEQ ID NO: 1237152 - DNA, 15 bp, Homo sapiens
ttttttctttatgtc

SEQ ID NO: 1237153 - DNA, 15 bp, Homo sapiens
tttttttctttatgt

SEQ ID NO: 1237154 - DNA, 15 bp, Homo sapiens
atttttttctttatg

SEQ ID NO: 1237155 - DNA, 15 bp, Homo sapiens
tatttttttctttat

SEQ ID NO: 1237156 - DNA, 15 bp, Homo sapiens
tatatttttttcttt

SEQ ID NO: 1237157 - DNA, 15 bp, Homo sapiens
atatatttttttctt

SEQ ID NO: 1237158 - DNA, 15 bp, Homo sapiens
aatatatttttttct

SEQ ID NO: 1237159 - DNA, 15 bp, Homo sapiens
taatatatttttttc

SEQ ID NO: 1237160 - DNA, 15 bp, Homo sapiens
ttaatatattttttt

SEQ ID NO: 1237161 - DNA, 15 bp, Homo sapiens
attaatatatttttt

SEQ ID NO: 1237162 - DNA, 15 bp, Homo sapiens
gattaatatattttt

SEQ ID NO: 1237163 - DNA, 15 bp, Homo sapiens
tgattaatatatttt

SEQ ID NO: 1237164 - DNA, 15 bp, Homo sapiens
ctgattaatatattt

SEQ ID NO: 1237165 - DNA, 15 bp, Homo sapiens
tctgattaatatatt

SEQ ID NO: 1237166 - DNA, 15 bp, Homo sapiens
ctctgattaatatat

SEQ ID NO: 1237167 - DNA, 15 bp, Homo sapiens
tctctgattaatata

SEQ ID NO: 1237168 - DNA, 15 bp, Homo sapiens
atctctgattaatat

SEQ ID NO: 1237169 - DNA, 15 bp, Homo sapiens
tatctctgattaata

SEQ ID NO: 1237170 - DNA, 15 bp, Homo sapiens
ttatctctgattaat

SEQ ID NO: 1237171 - DNA, 15 bp, Homo sapiens
tttatctctgattaa

SEQ ID NO: 1237172 - DNA, 15 bp, Homo sapiens
ctttatctctgatta

SEQ ID NO: 1237173 - DNA, 15 bp, Homo sapiens
tctttatctctgatt

SEQ ID NO: 1237174 - DNA, 15 bp, Homo sapiens
gtctttatctctgat

SEQ ID NO: 1237175 - DNA, 15 bp, Homo sapiens
tgtctttatctctga

SEQ ID NO: 1237176 - DNA, 15 bp, Homo sapiens
ttgtctttatctctg

SEQ ID NO: 1237177 - DNA, 15 bp, Homo sapiens
gttgtctttatctct

SEQ ID NO: 1237178 - DNA, 15 bp, Homo sapiens
ggttgtctttatctc

SEQ ID NO: 1237179 - DNA, 15 bp, Homo sapiens
aggttgtctttatct

SEQ ID NO: 1237180 - DNA, 15 bp, Homo sapiens
taggttgtctttatc

SEQ ID NO: 1237181 - DNA, 15 bp, Homo sapiens
ataggttgtctttat

SEQ ID NO: 1237182 - DNA, 15 bp, Homo sapiens
gataggttgtcttta

SEQ ID NO: 1237183 - DNA, 15 bp, Homo sapiens
agataggttgtcttt

SEQ ID NO: 1237184 - DNA, 15 bp, Homo sapiens
aagataggttgtctt

SEQ ID NO: 1237185 - DNA, 15 bp, Homo sapiens
taagataggttgtct

SEQ ID NO: 1237186 - DNA, 15 bp, Homo sapiens
gtaagataggttgtc

SEQ ID NO: 1237187 - DNA, 15 bp, Homo sapiens
agtaagataggttgt

SEQ ID NO: 1237188 - DNA, 15 bp, Homo sapiens
gagtaagataggttg

SEQ ID NO: 1237189 - DNA, 15 bp, Homo sapiens
agagtaagataggtt

SEQ ID NO: 1237190 - DNA, 15 bp, Homo sapiens
aagagtaagataggt

SEQ ID NO: 1237191 - DNA, 15 bp, Homo sapiens
aaagagtaagatagg

SEQ ID NO: 1237192 - DNA, 15 bp, Homo sapiens
aaaagagtaagatag

SEQ ID NO: 1237193 - DNA, 15 bp, Homo sapiens
gaaaagagtaagata

SEQ ID NO: 1237194 - DNA, 15 bp, Homo sapiens
tgaaaagagtaagat

SEQ ID NO: 1237195 - DNA, 15 bp, Homo sapiens
gtgaaaagagtaaga

SEQ ID NO: 1237196 - DNA, 15 bp, Homo sapiens
ggtgaaaagagtaag

SEQ ID NO: 1237197 - DNA, 15 bp, Homo sapiens
tggtgaaaagagtaa

SEQ ID NO: 1237198 - DNA, 15 bp, Homo sapiens
ttggtgaaaagagta

SEQ ID NO: 1237199 - DNA, 15 bp, Homo sapiens
tttggtgaaaagagt

SEQ ID NO: 1237200 - DNA, 15 bp, Homo sapiens
ttttggtgaaaagag

SEQ ID NO: 1237201 - DNA, 15 bp, Homo sapiens
gttttggtgaaaaga

SEQ ID NO: 1237202 - DNA, 15 bp, Homo sapiens
tgttttggtgaaaag

SEQ ID NO: 1237203 - DNA, 15 bp, Homo sapiens
ctgttttggtgaaaa

SEQ ID NO: 1237204 - DNA, 15 bp, Homo sapiens
gctgttttggtgaaa

SEQ ID NO: 1237205 - DNA, 15 bp, Homo sapiens
ggctgttttggtgaa

SEQ ID NO: 1237206 - DNA, 15 bp, Homo sapiens
tggctgttttggtga

SEQ ID NO: 1237207 - DNA, 15 bp, Homo sapiens
gtggctgttttggtg

SEQ ID NO: 1237208 - DNA, 15 bp, Homo sapiens
agtggctgttttggt

SEQ ID NO: 1237209 - DNA, 15 bp, Homo sapiens
gagtggctgttttgg

SEQ ID NO: 1237210 - DNA, 15 bp, Homo sapiens
tgagtggctgttttg

SEQ ID NO: 1237211 - DNA, 15 bp, Homo sapiens
ctgagtggctgtttt

SEQ ID NO: 1237212 - DNA, 15 bp, Homo sapiens
cctgagtggctgttt

SEQ ID NO: 1237213 - DNA, 15 bp, Homo sapiens
ccctgagtggctgtt

SEQ ID NO: 1237214 - DNA, 15 bp, Homo sapiens
tccctgagtggctgt

SEQ ID NO: 1237215 - DNA, 15 bp, Homo sapiens
gtccctgagtggctg

SEQ ID NO: 1237216 - DNA, 15 bp, Homo sapiens
cgtccctgagtggct

SEQ ID NO: 1237217 - DNA, 15 bp, Homo sapiens
ccgtccctgagtggc

SEQ ID NO: 1237218 - DNA, 15 bp, Homo sapiens
gccgtccctgagtgg

SEQ ID NO: 1237219 - DNA, 15 bp, Homo sapiens
agccgtccctgagtg

SEQ ID NO: 1237220 - DNA, 15 bp, Homo sapiens
cagccgtccctgagt

SEQ ID NO: 1237221 - DNA, 15 bp, Homo sapiens
ccagccgtccctgag

SEQ ID NO: 1237222 - DNA, 15 bp, Homo sapiens
tccagccgtccctga

SEQ ID NO: 1237223 - DNA, 15 bp, Homo sapiens
atccagccgtccctg

SEQ ID NO: 1237224 - DNA, 15 bp, Homo sapiens
gatccagccgtccct

SEQ ID NO: 1237225 - DNA, 15 bp, Homo sapiens
ggatccagccgtccc

SEQ ID NO: 1237226 - DNA, 15 bp, Homo sapiens
gggatccagccgtcc

SEQ ID NO: 1237227 - DNA, 15 bp, Homo sapiens
agggatccagccgtc

SEQ ID NO: 1237228 - DNA, 15 bp, Homo sapiens
aagggatccagccgt

SEQ ID NO: 1237229 - DNA, 15 bp, Homo sapiens
aaagggatccagccg

SEQ ID NO: 1237230 - DNA, 15 bp, Homo sapiens
taaagggatccagcc

SEQ ID NO: 1237231 - DNA, 15 bp, Homo sapiens
ataaagggatccagc

SEQ ID NO: 1237232 - DNA, 15 bp, Homo sapiens
gataaagggatccag

SEQ ID NO: 1237233 - DNA, 15 bp, Homo sapiens
ggataaagggatcca

SEQ ID NO: 1237234 - DNA, 15 bp, Homo sapiens
gggataaagggatcc

SEQ ID NO: 1237235 - DNA, 15 bp, Homo sapiens
tgggataaagggatc

SEQ ID NO: 1237236 - DNA, 15 bp, Homo sapiens
gtgggataaagggat

SEQ ID NO: 1237237 - DNA, 15 bp, Homo sapiens
cgtgggataaaggga

SEQ ID NO: 1237238 - DNA, 15 bp, Homo sapiens
ccgtgggataaaggg

SEQ ID NO: 1237239 - DNA, 15 bp, Homo sapiens
gccgtgggataaagg

SEQ ID NO: 1237240 - DNA, 15 bp, Homo sapiens
tgccgtgggataaag

SEQ ID NO: 1237241 - DNA, 15 bp, Homo sapiens
ttgccgtgggataaa

SEQ ID NO: 1237242 - DNA, 15 bp, Homo sapiens
tttgccgtgggataa

SEQ ID NO: 1237243 - DNA, 15 bp, Homo sapiens
atttgccgtgggata

SEQ ID NO: 1237244 - DNA, 15 bp, Homo sapiens
catttgccgtgggat

SEQ ID NO: 1237245 - DNA, 15 bp, Homo sapiens
tcatttgccgtggga

SEQ ID NO: 1237246 - DNA, 15 bp, Homo sapiens
ttcatttgccgtggg

SEQ ID NO: 1237247 - DNA, 15 bp, Homo sapiens
gttcatttgccgtgg

SEQ ID NO: 1237248 - DNA, 15 bp, Homo sapiens
tgttcatttgccgtg

SEQ ID NO: 1237249 - DNA, 15 bp, Homo sapiens
gtgttcatttgccgt

SEQ ID NO: 1237250 - DNA, 15 bp, Homo sapiens
agtgttcatttgccg

SEQ ID NO: 1237251 - DNA, 15 bp, Homo sapiens
aagtgttcatttgcc

SEQ ID NO: 1237252 - DNA, 15 bp, Homo sapiens
taagtgttcatttgc

SEQ ID NO: 1237253 - DNA, 15 bp, Homo sapiens
ttaagtgttcatttg

SEQ ID NO: 1237254 - DNA, 15 bp, Homo sapiens
gttaagtgttcattt

SEQ ID NO: 1237255 - DNA, 15 bp, Homo sapiens
agttaagtgttcatt

SEQ ID NO: 1237256 - DNA, 15 bp, Homo sapiens
tagttaagtgttcat

SEQ ID NO: 1237257 - DNA, 15 bp, Homo sapiens
gtagttaagtgttca

SEQ ID NO: 1237258 - DNA, 15 bp, Homo sapiens
agtagttaagtgttc

SEQ ID NO: 1237259 - DNA, 15 bp, Homo sapiens
aagtagttaagtgtt

SEQ ID NO: 1237260 - DNA, 15 bp, Homo sapiens
aaagtagttaagtgt

SEQ ID NO: 1237261 - DNA, 15 bp, Homo sapiens
gaaagtagttaagtg

SEQ ID NO: 1237262 - DNA, 15 bp, Homo sapiens
tgaaagtagttaagt

SEQ ID NO: 1237263 - DNA, 15 bp, Homo sapiens
ctgaaagtagttaag

SEQ ID NO: 1237264 - DNA, 15 bp, Homo sapiens
actgaaagtagttaa

SEQ ID NO: 1237265 - DNA, 15 bp, Homo sapiens
tactgaaagtagtta

SEQ ID NO: 1237266 - DNA, 15 bp, Homo sapiens
ttactgaaagtagtt

SEQ ID NO: 1237267 - DNA, 15 bp, Homo sapiens
cttactgaaagtagt

SEQ ID NO: 1237268 - DNA, 15 bp, Homo sapiens
tcttactgaaagtag

SEQ ID NO: 1237269 - DNA, 15 bp, Homo sapiens
ttcttactgaaagta

SEQ ID NO: 1237270 - DNA, 15 bp, Homo sapiens
cttcttactgaaagt

SEQ ID NO: 1237271 - DNA, 15 bp, Homo sapiens
gcttcttactgaaag

SEQ ID NO: 1237272 - DNA, 15 bp, Homo sapiens
ggcttcttactgaaa

SEQ ID NO: 1237273 - DNA, 15 bp, Homo sapiens
tggcttcttactgaa

SEQ ID NO: 1237274 - DNA, 15 bp, Homo sapiens
gtggcttcttactga

SEQ ID NO: 1237275 - DNA, 15 bp, Homo sapiens
tgtggcttcttactg

SEQ ID NO: 1237276 - DNA, 15 bp, Homo sapiens
atgtggcttcttact

SEQ ID NO: 1237277 - DNA, 15 bp, Homo sapiens
aatgtggcttcttac

SEQ ID NO: 1237278 - DNA, 15 bp, Homo sapiens
gaatgtggcttctta

SEQ ID NO: 1237279 - DNA, 15 bp, Homo sapiens
tgaatgtggcttctt

SEQ ID NO: 1237280 - DNA, 15 bp, Homo sapiens
ctgaatgtggcttct

SEQ ID NO: 1237281 - DNA, 15 bp, Homo sapiens
tctgaatgtggcttc

SEQ ID NO: 1237282 - DNA, 15 bp, Homo sapiens
ttctgaatgtggctt

SEQ ID NO: 1237283 - DNA, 15 bp, Homo sapiens
attctgaatgtggct

SEQ ID NO: 1237284 - DNA, 15 bp, Homo sapiens
gattctgaatgtggc

SEQ ID NO: 1237285 - DNA, 15 bp, Homo sapiens
agattctgaatgtgg

SEQ ID NO: 1237286 - DNA, 15 bp, Homo sapiens
tagattctgaatgtg

SEQ ID NO: 1237287 - DNA, 15 bp, Homo sapiens
gtagattctgaatgt

SEQ ID NO: 1237288 - DNA, 15 bp, Homo sapiens
ggtagattctgaatg

SEQ ID NO: 1237289 - DNA, 15 bp, Homo sapiens
tggtagattctgaat

SEQ ID NO: 1237290 - DNA, 15 bp, Homo sapiens
atggtagattctgaa

SEQ ID NO: 1237291 - DNA, 15 bp, Homo sapiens
gatggtagattctga

SEQ ID NO: 1237292 - DNA, 15 bp, Homo sapiens
agatggtagattctg

SEQ ID NO: 1237293 - DNA, 15 bp, Homo sapiens
gagatggtagattct

SEQ ID NO: 1237294 - DNA, 15 bp, Homo sapiens
ggagatggtagattc

SEQ ID NO: 1237295 - DNA, 15 bp, Homo sapiens
gggagatggtagatt

SEQ ID NO: 1237296 - DNA, 15 bp, Homo sapiens
agggagatggtagat

SEQ ID NO: 1237297 - DNA, 15 bp, Homo sapiens
gagggagatggtaga

SEQ ID NO: 1237298 - DNA, 15 bp, Homo sapiens
tgagggagatggtag

SEQ ID NO: 1237299 - DNA, 15 bp, Homo sapiens
gtgagggagatggta

SEQ ID NO: 1237300 - DNA, 15 bp, Homo sapiens
agtgagggagatggt

SEQ ID NO: 1237301 - DNA, 15 bp, Homo sapiens
aagtgagggagatgg

SEQ ID NO: 1237302 - DNA, 15 bp, Homo sapiens
gaagtgagggagatg

SEQ ID NO: 1237303 - DNA, 15 bp, Homo sapiens
agaagtgagggagat

SEQ ID NO: 1237304 - DNA, 15 bp, Homo sapiens
gagaagtgagggaga

SEQ ID NO: 1237305 - DNA, 15 bp, Homo sapiens
agagaagtgagggag

SEQ ID NO: 1237306 - DNA, 15 bp, Homo sapiens
tagagaagtgaggga

SEQ ID NO: 1237307 - DNA, 15 bp, Homo sapiens
gtagagaagtgaggg

SEQ ID NO: 1237308 - DNA, 15 bp, Homo sapiens
tgtagagaagtgagg

SEQ ID NO: 1237309 - DNA, 15 bp, Homo sapiens
atgtagagaagtgag

SEQ ID NO: 1237310 - DNA, 15 bp, Homo sapiens
gatgtagagaagtga

SEQ ID NO: 1237311 - DNA, 15 bp, Homo sapiens
ggatgtagagaagtg

SEQ ID NO: 1237312 - DNA, 15 bp, Homo sapiens
gggatgtagagaagt

SEQ ID NO: 1237313 - DNA, 15 bp, Homo sapiens
agggatgtagagaag

SEQ ID NO: 1237314 - DNA, 15 bp, Homo sapiens
gagggatgtagagaa

SEQ ID NO: 1237315 - DNA, 15 bp, Homo sapiens
tgagggatgtagaga

SEQ ID NO: 1237316 - DNA, 15 bp, Homo sapiens
atgagggatgtagag

SEQ ID NO: 1237317 - DNA, 15 bp, Homo sapiens
aatgagggatgtaga

SEQ ID NO: 1237318 - DNA, 15 bp, Homo sapiens
gaatgagggatgtag

SEQ ID NO: 1237319 - DNA, 15 bp, Homo sapiens
cgaatgagggatgta

SEQ ID NO: 1237320 - DNA, 15 bp, Homo sapiens
ccgaatgagggatgt

SEQ ID NO: 1237321 - DNA, 15 bp, Homo sapiens
gccgaatgagggatg

SEQ ID NO: 1237322 - DNA, 15 bp, Homo sapiens
tgccgaatgagggat

SEQ ID NO: 1237323 - DNA, 15 bp, Homo sapiens
atgccgaatgaggga

SEQ ID NO: 1237324 - DNA, 15 bp, Homo sapiens
gatgccgaatgaggg

SEQ ID NO: 1237325 - DNA, 15 bp, Homo sapiens
tgatgccgaatgagg

SEQ ID NO: 1237326 - DNA, 15 bp, Homo sapiens
gtgatgccgaatgag

SEQ ID NO: 1237327 - DNA, 15 bp, Homo sapiens
agtgatgccgaatga

SEQ ID NO: 1237328 - DNA, 15 bp, Homo sapiens
gagtgatgccgaatg

SEQ ID NO: 1237329 - DNA, 15 bp, Homo sapiens
tgagtgatgccgaat

SEQ ID NO: 1237330 - DNA, 15 bp, Homo sapiens
gtgagtgatgccgaa

SEQ ID NO: 1237331 - DNA, 15 bp, Homo sapiens
agtgagtgatgccga

SEQ ID NO: 1237332 - DNA, 15 bp, Homo sapiens
aagtgagtgatgccg

SEQ ID NO: 1237333 - DNA, 15 bp, Homo sapiens
aaagtgagtgatgcc

SEQ ID NO: 1237334 - DNA, 15 bp, Homo sapiens
caaagtgagtgatgc

SEQ ID NO: 1237335 - DNA, 15 bp, Homo sapiens
tcaaagtgagtgatg

SEQ ID NO: 1237336 - DNA, 15 bp, Homo sapiens
ttcaaagtgagtgat

SEQ ID NO: 1237337 - DNA, 15 bp, Homo sapiens
cttcaaagtgagtga

SEQ ID NO: 1237338 - DNA, 15 bp, Homo sapiens
ccttcaaagtgagtg

SEQ ID NO: 1237339 - DNA, 15 bp, Homo sapiens
tccttcaaagtgagt

SEQ ID NO: 1237340 - DNA, 15 bp, Homo sapiens
ctccttcaaagtgag

SEQ ID NO: 1237341 - DNA, 15 bp, Homo sapiens
tctccttcaaagtga

SEQ ID NO: 1237342 - DNA, 15 bp, Homo sapiens
ttctccttcaaagtg

SEQ ID NO: 1237343 - DNA, 15 bp, Homo sapiens
cttctccttcaaagt

SEQ ID NO: 1237344 - DNA, 15 bp, Homo sapiens
tcttctccttcaaag

SEQ ID NO: 1237345 - DNA, 15 bp, Homo sapiens
ttcttctccttcaaa

SEQ ID NO: 1237346 - DNA, 15 bp, Homo sapiens
tttcttctccttcaa

SEQ ID NO: 1237347 - DNA, 15 bp, Homo sapiens
ttttcttctccttca

SEQ ID NO: 1237348 - DNA, 15 bp, Homo sapiens
attttcttctccttc

SEQ ID NO: 1237349 - DNA, 15 bp, Homo sapiens
cattttcttctcctt

SEQ ID NO: 1237350 - DNA, 15 bp, Homo sapiens
tcattttcttctcct

SEQ ID NO: 1237351 - DNA, 15 bp, Homo sapiens
gtcattttcttctcc

SEQ ID NO: 1237352 - DNA, 15 bp, Homo sapiens
tgtcattttcttctc

SEQ ID NO: 1237353 - DNA, 15 bp, Homo sapiens
ttgtcattttcttct

SEQ ID NO: 1237354 - DNA, 15 bp, Homo sapiens
tttgtcattttcttc

SEQ ID NO: 1237355 - DNA, 15 bp, Homo sapiens
atttgtcattttctt

SEQ ID NO: 1237356 - DNA, 15 bp, Homo sapiens
tatttgtcattttct

SEQ ID NO: 1237357 - DNA, 15 bp, Homo sapiens
atatttgtcattttc

SEQ ID NO: 1237358 - DNA, 15 bp, Homo sapiens
catatttgtcatttt

SEQ ID NO: 1237359 - DNA, 15 bp, Homo sapiens
ccatatttgtcattt

SEQ ID NO: 1237360 - DNA, 15 bp, Homo sapiens
gccatatttgtcatt

SEQ ID NO: 1237361 - DNA, 15 bp, Homo sapiens
agccatatttgtcat

SEQ ID NO: 1237362 - DNA, 15 bp, Homo sapiens
tagccatatttgtca

SEQ ID NO: 1237363 - DNA, 15 bp, Homo sapiens
gtagccatatttgtc

SEQ ID NO: 1237364 - DNA, 15 bp, Homo sapiens
tgtagccatatttgt

SEQ ID NO: 1237365 - DNA, 15 bp, Homo sapiens
atgtagccatatttg

SEQ ID NO: 1237366 - DNA, 15 bp, Homo sapiens
aatgtagccatattt

SEQ ID NO: 1237367 - DNA, 15 bp, Homo sapiens
aaatgtagccatatt

SEQ ID NO: 1237368 - DNA, 15 bp, Homo sapiens
taaatgtagccatat

SEQ ID NO: 1237369 - DNA, 15 bp, Homo sapiens
ttaaatgtagccata

SEQ ID NO: 1237370 - DNA, 15 bp, Homo sapiens
tttaaatgtagccat

SEQ ID NO: 1237371 - DNA, 15 bp, Homo sapiens
ctttaaatgtagcca

SEQ ID NO: 1237372 - DNA, 15 bp, Homo sapiens
cctttaaatgtagcc

SEQ ID NO: 1237373 - DNA, 15 bp, Homo sapiens
tcctttaaatgtagc

SEQ ID NO: 1237374 - DNA, 15 bp, Homo sapiens
gtcctttaaatgtag

SEQ ID NO: 1237375 - DNA, 15 bp, Homo sapiens
agtcctttaaatgta

SEQ ID NO: 1237376 - DNA, 15 bp, Homo sapiens
aagtcctttaaatgt

SEQ ID NO: 1237377 - DNA, 15 bp, Homo sapiens
aaagtcctttaaatg

SEQ ID NO: 1237378 - DNA, 15 bp, Homo sapiens
taaagtcctttaaat

SEQ ID NO: 1237379 - DNA, 15 bp, Homo sapiens
ctaaagtcctttaaa

SEQ ID NO: 1237380 - DNA, 15 bp, Homo sapiens
tctaaagtcctttaa

SEQ ID NO: 1237381 - DNA, 15 bp, Homo sapiens
ttctaaagtccttta

SEQ ID NO: 1237382 - DNA, 15 bp, Homo sapiens
attctaaagtccttt

SEQ ID NO: 1237383 - DNA, 15 bp, Homo sapiens
tattctaaagtcctt

SEQ ID NO: 1237384 - DNA, 15 bp, Homo sapiens
ttattctaaagtcct

SEQ ID NO: 1237385 - DNA, 15 bp, Homo sapiens
attattctaaagtcc

SEQ ID NO: 1237386 - DNA, 15 bp, Homo sapiens
tattattctaaagtc

SEQ ID NO: 1237387 - DNA, 15 bp, Homo sapiens
atattattctaaagt

SEQ ID NO: 1237388 - DNA, 15 bp, Homo sapiens
aatattattctaaag

SEQ ID NO: 1237389 - DNA, 15 bp, Homo sapiens
caatattattctaaa

SEQ ID NO: 1237390 - DNA, 15 bp, Homo sapiens
tcaatattattctaa

SEQ ID NO: 1237391 - DNA, 15 bp, Homo sapiens
atcaatattattcta

SEQ ID NO: 1237392 - DNA, 15 bp, Homo sapiens
tatcaatattattct

SEQ ID NO: 1237393 - DNA, 15 bp, Homo sapiens
gtatcaatattattc

SEQ ID NO: 1237394 - DNA, 15 bp, Homo sapiens
ggtatcaatattatt

SEQ ID NO: 1237395 - DNA, 15 bp, Homo sapiens
tggtatcaatattat

SEQ ID NO: 1237396 - DNA, 15 bp, Homo sapiens
atggtatcaatatta

SEQ ID NO: 1237397 - DNA, 15 bp, Homo sapiens
aatggtatcaatatt

SEQ ID NO: 1237398 - DNA, 15 bp, Homo sapiens
gaatggtatcaatat

SEQ ID NO: 1237399 - DNA, 15 bp, Homo sapiens
tgaatggtatcaata

SEQ ID NO: 1237400 - DNA, 15 bp, Homo sapiens
gtgaatggtatcaat

SEQ ID NO: 1237401 - DNA, 15 bp, Homo sapiens
agtgaatggtatcaa

SEQ ID NO: 1237402 - DNA, 15 bp, Homo sapiens
aagtgaatggtatca

SEQ ID NO: 1237403 - DNA, 15 bp, Homo sapiens
taagtgaatggtatc

SEQ ID NO: 1237404 - DNA, 15 bp, Homo sapiens
ctaagtgaatggtat

SEQ ID NO: 1237405 - DNA, 15 bp, Homo sapiens
cctaagtgaatggta

SEQ ID NO: 1237406 - DNA, 15 bp, Homo sapiens
acctaagtgaatggt

SEQ ID NO: 1237407 - DNA, 15 bp, Homo sapiens
aacctaagtgaatgg

SEQ ID NO: 1237408 - DNA, 15 bp, Homo sapiens
taacctaagtgaatg

SEQ ID NO: 1237409 - DNA, 15 bp, Homo sapiens
ataacctaagtgaat

SEQ ID NO: 1237410 - DNA, 15 bp, Homo sapiens
aataacctaagtgaa

SEQ ID NO: 1237411 - DNA, 15 bp, Homo sapiens
taataacctaagtga

SEQ ID NO: 1237412 - DNA, 15 bp, Homo sapiens
gtaataacctaagtg

SEQ ID NO: 1237413 - DNA, 15 bp, Homo sapiens
tgtaataacctaagt

SEQ ID NO: 1237414 - DNA, 15 bp, Homo sapiens
atgtaataacctaag

SEQ ID NO: 1237415 - DNA, 15 bp, Homo sapiens
aatgtaataacctaa

SEQ ID NO: 1237416 - DNA, 15 bp, Homo sapiens
taatgtaataaccta

SEQ ID NO: 1237417 - DNA, 15 bp, Homo sapiens
ataatgtaataacct

SEQ ID NO: 1237418 - DNA, 15 bp, Homo sapiens
aataatgtaataacc

SEQ ID NO: 1237419 - DNA, 15 bp, Homo sapiens
aaataatgtaataac

SEQ ID NO: 1237420 - DNA, 15 bp, Homo sapiens
taaataatgtaataa

SEQ ID NO: 1237421 - DNA, 15 bp, Homo sapiens
ttaaataatgtaata

SEQ ID NO: 1237422 - DNA, 15 bp, Homo sapiens
cttaaataatgtaat

SEQ ID NO: 1237423 - DNA, 15 bp, Homo sapiens
tcttaaataatgtaa

SEQ ID NO: 1237424 - DNA, 15 bp, Homo sapiens
gtcttaaataatgta

SEQ ID NO: 1237425 - DNA, 15 bp, Homo sapiens
ggtcttaaataatgt

SEQ ID NO: 1237426 - DNA, 15 bp, Homo sapiens
aggtcttaaataatg

SEQ ID NO: 1237427 - DNA, 15 bp, Homo sapiens
taggtcttaaataat

SEQ ID NO: 1237428 - DNA, 15 bp, Homo sapiens
ataggtcttaaataa

SEQ ID NO: 1237429 - DNA, 15 bp, Homo sapiens
cataggtcttaaata

SEQ ID NO: 1237430 - DNA, 15 bp, Homo sapiens
tcataggtcttaaat

SEQ ID NO: 1237431 - DNA, 15 bp, Homo sapiens
atcataggtcttaaa

SEQ ID NO: 1237432 - DNA, 15 bp, Homo sapiens
tatcataggtcttaa

SEQ ID NO: 1237433 - DNA, 15 bp, Homo sapiens
ctatcataggtctta

SEQ ID NO: 1237434 - DNA, 15 bp, Homo sapiens
actatcataggtctt

SEQ ID NO: 1237435 - DNA, 15 bp, Homo sapiens
aactatcataggtct

SEQ ID NO: 1237436 - DNA, 15 bp, Homo sapiens
gaactatcataggtc

SEQ ID NO: 1237437 - DNA, 15 bp, Homo sapiens
tgaactatcataggt

SEQ ID NO: 1237438 - DNA, 15 bp, Homo sapiens
ttgaactatcatagg

SEQ ID NO: 1237439 - DNA, 15 bp, Homo sapiens
cttgaactatcatag

SEQ ID NO: 1237440 - DNA, 15 bp, Homo sapiens
acttgaactatcata

SEQ ID NO: 1237441 - DNA, 15 bp, Homo sapiens
cacttgaactatcat

SEQ ID NO: 1237442 - DNA, 15 bp, Homo sapiens
tcacttgaactatca

SEQ ID NO: 1237443 - DNA, 15 bp, Homo sapiens
gtcacttgaactatc

SEQ ID NO: 1237444 - DNA, 15 bp, Homo sapiens
ggtcacttgaactat

SEQ ID NO: 1237445 - DNA, 15 bp, Homo sapiens
tggtcacttgaacta

SEQ ID NO: 1237446 - DNA, 15 bp, Homo sapiens
gtggtcacttgaact

SEQ ID NO: 1237447 - DNA, 15 bp, Homo sapiens
tgtggtcacttgaac

SEQ ID NO: 1237448 - DNA, 15 bp, Homo sapiens
ttgtggtcacttgaa

SEQ ID NO: 1237449 - DNA, 15 bp, Homo sapiens
tttgtggtcacttga

SEQ ID NO: 1237450 - DNA, 15 bp, Homo sapiens
gtttgtggtcacttg

SEQ ID NO: 1237451 - DNA, 15 bp, Homo sapiens
agtttgtggtcactt

SEQ ID NO: 1237452 - DNA, 15 bp, Homo sapiens
cagtttgtggtcact

SEQ ID NO: 1237453 - DNA, 15 bp, Homo sapiens
tcagtttgtggtcac

SEQ ID NO: 1237454 - DNA, 15 bp, Homo sapiens
ttcagtttgtggtca

SEQ ID NO: 1237455 - DNA, 15 bp, Homo sapiens
cttcagtttgtggtc

SEQ ID NO: 1237456 - DNA, 15 bp, Homo sapiens
acttcagtttgtggt

SEQ ID NO: 1237457 - DNA, 15 bp, Homo sapiens
gacttcagtttgtgg

SEQ ID NO: 1237458 - DNA, 15 bp, Homo sapiens
ggacttcagtttgtg

SEQ ID NO: 1237459 - DNA, 15 bp, Homo sapiens
aggacttcagtttgt

SEQ ID NO: 1237460 - DNA, 15 bp, Homo sapiens
gaggacttcagtttg

SEQ ID NO: 1237461 - DNA, 15 bp, Homo sapiens
tgaggacttcagttt

SEQ ID NO: 1237462 - DNA, 15 bp, Homo sapiens
ctgaggacttcagtt

SEQ ID NO: 1237463 - DNA, 15 bp, Homo sapiens
actgaggacttcagt

SEQ ID NO: 1237464 - DNA, 15 bp, Homo sapiens
aactgaggacttcag

SEQ ID NO: 1237465 - DNA, 15 bp, Homo sapiens
taactgaggacttca

SEQ ID NO: 1237466 - DNA, 15 bp, Homo sapiens
ataactgaggacttc

SEQ ID NO: 1237467 - DNA, 15 bp, Homo sapiens
tataactgaggactt

SEQ ID NO: 1237468 - DNA, 15 bp, Homo sapiens
ttataactgaggact

SEQ ID NO: 1237469 - DNA, 15 bp, Homo sapiens
tttataactgaggac

SEQ ID NO: 1237470 - DNA, 15 bp, Homo sapiens
ttttataactgagga

SEQ ID NO: 1237471 - DNA, 15 bp, Homo sapiens
attttataactgagg

SEQ ID NO: 1237472 - DNA, 15 bp, Homo sapiens
tattttataactgag

SEQ ID NO: 1237473 - DNA, 15 bp, Homo sapiens
ttattttataactga

SEQ ID NO: 1237474 - DNA, 15 bp, Homo sapiens
attattttataactg

SEQ ID NO: 1237475 - DNA, 15 bp, Homo sapiens
tattattttataact

SEQ ID NO: 1237476 - DNA, 15 bp, Homo sapiens
gtattattttataac

SEQ ID NO: 1237477 - DNA, 15 bp, Homo sapiens
tgtattattttataa

SEQ ID NO: 1237478 - DNA, 15 bp, Homo sapiens
gtgtattattttata

SEQ ID NO: 1237479 - DNA, 15 bp, Homo sapiens
tgtgtattattttat

SEQ ID NO: 1237480 - DNA, 15 bp, Homo sapiens
gtgtgtattatttta

SEQ ID NO: 1237481 - DNA, 15 bp, Homo sapiens
ggtgtgtattatttt

SEQ ID NO: 1237482 - DNA, 15 bp, Homo sapiens
tggtgtgtattattt

SEQ ID NO: 1237483 - DNA, 15 bp, Homo sapiens
atggtgtgtattatt

SEQ ID NO: 1237484 - DNA, 15 bp, Homo sapiens
aatggtgtgtattat

SEQ ID NO: 1237485 - DNA, 15 bp, Homo sapiens
gaatggtgtgtatta

SEQ ID NO: 1237486 - DNA, 15 bp, Homo sapiens
tgaatggtgtgtatt

SEQ ID NO: 1237487 - DNA, 15 bp, Homo sapiens
ttgaatggtgtgtat

SEQ ID NO: 1237488 - DNA, 15 bp, Homo sapiens
attgaatggtgtgta

SEQ ID NO: 1237489 - DNA, 15 bp, Homo sapiens
gattgaatggtgtgt

SEQ ID NO: 1237490 - DNA, 15 bp, Homo sapiens
ggattgaatggtgtg

SEQ ID NO: 1237491 - DNA, 15 bp, Homo sapiens
gggattgaatggtgt

SEQ ID NO: 1237492 - DNA, 15 bp, Homo sapiens
ggggattgaatggtg

SEQ ID NO: 1237493 - DNA, 15 bp, Homo sapiens
aggggattgaatggt

SEQ ID NO: 1237494 - DNA, 15 bp, Homo sapiens
aaggggattgaatgg

SEQ ID NO: 1237495 - DNA, 15 bp, Homo sapiens
aaaggggattgaatg

SEQ ID NO: 1237496 - DNA, 15 bp, Homo sapiens
caaaggggattgaat

SEQ ID NO: 1237497 - DNA, 15 bp, Homo sapiens
ccaaaggggattgaa

SEQ ID NO: 1237498 - DNA, 15 bp, Homo sapiens
gccaaaggggattga

SEQ ID NO: 1237499 - DNA, 15 bp, Homo sapiens
agccaaaggggattg

SEQ ID NO: 1237500 - DNA, 15 bp, Homo sapiens
aagccaaaggggatt

SEQ ID NO: 1237501 - DNA, 15 bp, Homo sapiens
taagccaaaggggat

SEQ ID NO: 1237502 - DNA, 15 bp, Homo sapiens
ttaagccaaagggga

SEQ ID NO: 1237503 - DNA, 15 bp, Homo sapiens
tttaagccaaagggg

SEQ ID NO: 1237504 - DNA, 15 bp, Homo sapiens
ttttaagccaaaggg

SEQ ID NO: 1237505 - DNA, 15 bp, Homo sapiens
gttttaagccaaagg

SEQ ID NO: 1237506 - DNA, 15 bp, Homo sapiens
ggttttaagccaaag

SEQ ID NO: 1237507 - DNA, 15 bp, Homo sapiens
tggttttaagccaaa

SEQ ID NO: 1237508 - DNA, 15 bp, Homo sapiens
gtggttttaagccaa

SEQ ID NO: 1237509 - DNA, 15 bp, Homo sapiens
agtggttttaagcca

SEQ ID NO: 1237510 - DNA, 15 bp, Homo sapiens
cagtggttttaagcc

SEQ ID NO: 1237511 - DNA, 15 bp, Homo sapiens
acagtggttttaagc

SEQ ID NO: 1237512 - DNA, 15 bp, Homo sapiens
cacagtggttttaag

SEQ ID NO: 1237513 - DNA, 15 bp, Homo sapiens
tcacagtggttttaa

SEQ ID NO: 1237514 - DNA, 15 bp, Homo sapiens
ttcacagtggtttta

SEQ ID NO: 1237515 - DNA, 15 bp, Homo sapiens
tttcacagtggtttt

SEQ ID NO: 1237516 - DNA, 15 bp, Homo sapiens
atttcacagtggttt

SEQ ID NO: 1237517 - DNA, 15 bp, Homo sapiens
gatttcacagtggtt

SEQ ID NO: 1237518 - DNA, 15 bp, Homo sapiens
tgatttcacagtggt

SEQ ID NO: 1237519 - DNA, 15 bp, Homo sapiens
ttgatttcacagtgg

SEQ ID NO: 1237520 - DNA, 15 bp, Homo sapiens
cttgatttcacagtg

SEQ ID NO: 1237521 - DNA, 15 bp, Homo sapiens
tcttgatttcacagt

SEQ ID NO: 1237522 - DNA, 15 bp, Homo sapiens
atcttgatttcacag

SEQ ID NO: 1237523 - DNA, 15 bp, Homo sapiens
tatcttgatttcaca

SEQ ID NO: 1237524 - DNA, 15 bp, Homo sapiens
ttatcttgatttcac

SEQ ID NO: 1237525 - DNA, 15 bp, Homo sapiens
attatcttgatttca

SEQ ID NO: 1237526 - DNA, 15 bp, Homo sapiens
gattatcttgatttc

SEQ ID NO: 1237527 - DNA, 15 bp, Homo sapiens
ggattatcttgattt

SEQ ID NO: 1237528 - DNA, 15 bp, Homo sapiens
tggattatcttgatt

SEQ ID NO: 1237529 - DNA, 15 bp, Homo sapiens
ctggattatcttgat

SEQ ID NO: 1237530 - DNA, 15 bp, Homo sapiens
cctggattatcttga

SEQ ID NO: 1237531 - DNA, 15 bp, Homo sapiens
tcctggattatcttg

SEQ ID NO: 1237532 - DNA, 15 bp, Homo sapiens
ttcctggattatctt

SEQ ID NO: 1237533 - DNA, 15 bp, Homo sapiens
gttcctggattatct

SEQ ID NO: 1237534 - DNA, 15 bp, Homo sapiens
agttcctggattatc

SEQ ID NO: 1237535 - DNA, 15 bp, Homo sapiens
cagttcctggattat

SEQ ID NO: 1237536 - DNA, 15 bp, Homo sapiens
acagttcctggatta

SEQ ID NO: 1237537 - DNA, 15 bp, Homo sapiens
aacagttcctggatt

SEQ ID NO: 1237538 - DNA, 15 bp, Homo sapiens
caacagttcctggat

SEQ ID NO: 1237539 - DNA, 15 bp, Homo sapiens
acaacagttcctgga

SEQ ID NO: 1237540 - DNA, 15 bp, Homo sapiens
cacaacagttcctgg

SEQ ID NO: 1237541 - DNA, 15 bp, Homo sapiens
ccacaacagttcctg

SEQ ID NO: 1237542 - DNA, 15 bp, Homo sapiens
tccacaacagttcct

SEQ ID NO: 1237543 - DNA, 15 bp, Homo sapiens
ctccacaacagttcc

SEQ ID NO: 1237544 - DNA, 15 bp, Homo sapiens
tctccacaacagttc

SEQ ID NO: 1237545 - DNA, 15 bp, Homo sapiens
ctctccacaacagtt

SEQ ID NO: 1237546 - DNA, 15 bp, Homo sapiens
cctctccacaacagt

SEQ ID NO: 1237547 - DNA, 15 bp, Homo sapiens
ccctctccacaacag

SEQ ID NO: 1237548 - DNA, 15 bp, Homo sapiens
tccctctccacaaca

SEQ ID NO: 1237549 - DNA, 15 bp, Homo sapiens
gtccctctccacaac

SEQ ID NO: 1237550 - DNA, 15 bp, Homo sapiens
tgtccctctccacaa

SEQ ID NO: 1237551 - DNA, 15 bp, Homo sapiens
atgtccctctccaca

SEQ ID NO: 1237552 - DNA, 15 bp, Homo sapiens
catgtccctctccac

SEQ ID NO: 1237553 - DNA, 15 bp, Homo sapiens
acatgtccctctcca

SEQ ID NO: 1237554 - DNA, 15 bp, Homo sapiens
gacatgtccctctcc

SEQ ID NO: 1237555 - DNA, 15 bp, Homo sapiens
tgacatgtccctctc

SEQ ID NO: 1237556 - DNA, 15 bp, Homo sapiens
ttgacatgtccctct

SEQ ID NO: 1237557 - DNA, 15 bp, Homo sapiens
attgacatgtccctc

SEQ ID NO: 1237558 - DNA, 15 bp, Homo sapiens
aattgacatgtccct

SEQ ID NO: 1237559 - DNA, 15 bp, Homo sapiens
taattgacatgtccc

SEQ ID NO: 1237560 - DNA, 15 bp, Homo sapiens
ataattgacatgtcc

SEQ ID NO: 1237561 - DNA, 15 bp, Homo sapiens
cataattgacatgtc

SEQ ID NO: 1237562 - DNA, 15 bp, Homo sapiens
acataattgacatgt

SEQ ID NO: 1237563 - DNA, 15 bp, Homo sapiens
tacataattgacatg

SEQ ID NO: 1237564 - DNA, 15 bp, Homo sapiens
ctacataattgacat

SEQ ID NO: 1237565 - DNA, 15 bp, Homo sapiens
tctacataattgaca

SEQ ID NO: 1237566 - DNA, 15 bp, Homo sapiens
ttctacataattgac

SEQ ID NO: 1237567 - DNA, 15 bp, Homo sapiens
tttctacataattga

SEQ ID NO: 1237568 - DNA, 15 bp, Homo sapiens
atttctacataattg

SEQ ID NO: 1237569 - DNA, 15 bp, Homo sapiens
gatttctacataatt

SEQ ID NO: 1237570 - DNA, 15 bp, Homo sapiens
agatttctacataat

SEQ ID NO: 1237571 - DNA, 15 bp, Homo sapiens
tagatttctacataa

SEQ ID NO: 1237572 - DNA, 15 bp, Homo sapiens
gtagatttctacata

SEQ ID NO: 1237573 - DNA, 15 bp, Homo sapiens
tgtagatttctacat

SEQ ID NO: 1237574 - DNA, 15 bp, Homo sapiens
atgtagatttctaca

SEQ ID NO: 1237575 - DNA, 15 bp, Homo sapiens
gatgtagatttctac

SEQ ID NO: 1237576 - DNA, 15 bp, Homo sapiens
tgatgtagatttcta

SEQ ID NO: 1237577 - DNA, 15 bp, Homo sapiens
ttgatgtagatttct

SEQ ID NO: 1237578 - DNA, 15 bp, Homo sapiens
gttgatgtagatttc

SEQ ID NO: 1237579 - DNA, 15 bp, Homo sapiens
tgttgatgtagattt

SEQ ID NO: 1237580 - DNA, 15 bp, Homo sapiens
atgttgatgtagatt

SEQ ID NO: 1237581 - DNA, 15 bp, Homo sapiens
gatgttgatgtagat

SEQ ID NO: 1237582 - DNA, 15 bp, Homo sapiens
tgatgttgatgtaga

SEQ ID NO: 1237583 - DNA, 15 bp, Homo sapiens
ttgatgttgatgtag

SEQ ID NO: 1237584 - DNA, 15 bp, Homo sapiens
cttgatgttgatgta

SEQ ID NO: 1237585 - DNA, 15 bp, Homo sapiens
tcttgatgttgatgt

SEQ ID NO: 1237586 - DNA, 15 bp, Homo sapiens
atcttgatgttgatg

SEQ ID NO: 1237587 - DNA, 15 bp, Homo sapiens
gatcttgatgttgat

SEQ ID NO: 1237588 - DNA, 15 bp, Homo sapiens
tgatcttgatgttga

SEQ ID NO: 1237589 - DNA, 15 bp, Homo sapiens
atgatcttgatgttg

SEQ ID NO: 1237590 - DNA, 15 bp, Homo sapiens
gatgatcttgatgtt

SEQ ID NO: 1237591 - DNA, 15 bp, Homo sapiens
tgatgatcttgatgt

SEQ ID NO: 1237592 - DNA, 15 bp, Homo sapiens
ctgatgatcttgatg

SEQ ID NO: 1237593 - DNA, 15 bp, Homo sapiens
gctgatgatcttgat

SEQ ID NO: 1237594 - DNA, 15 bp, Homo sapiens
agctgatgatcttga

SEQ ID NO: 1237595 - DNA, 15 bp, Homo sapiens
gagctgatgatcttg

SEQ ID NO: 1237596 - DNA, 15 bp, Homo sapiens
tgagctgatgatctt

SEQ ID NO: 1237597 - DNA, 15 bp, Homo sapiens
ttgagctgatgatct

SEQ ID NO: 1237598 - DNA, 15 bp, Homo sapiens
gttgagctgatgatc

SEQ ID NO: 1237599 - DNA, 15 bp, Homo sapiens
tgttgagctgatgat

SEQ ID NO: 1237600 - DNA, 15 bp, Homo sapiens
atgttgagctgatga

SEQ ID NO: 1237601 - DNA, 15 bp, Homo sapiens
gatgttgagctgatg

SEQ ID NO: 1237602 - DNA, 15 bp, Homo sapiens
tgatgttgagctgat

SEQ ID NO: 1237603 - DNA, 15 bp, Homo sapiens
ttgatgttgagctga

SEQ ID NO: 1237604 - DNA, 15 bp, Homo sapiens
tttgatgttgagctg

SEQ ID NO: 1237605 - DNA, 15 bp, Homo sapiens
ttttgatgttgagct

SEQ ID NO: 1237606 - DNA, 15 bp, Homo sapiens
tttttgatgttgagc

SEQ ID NO: 1237607 - DNA, 15 bp, Homo sapiens
ttttttgatgttgag

SEQ ID NO: 1237608 - DNA, 15 bp, Homo sapiens
cttttttgatgttga

SEQ ID NO: 1237609 - DNA, 15 bp, Homo sapiens
gcttttttgatgttg

SEQ ID NO: 1237610 - DNA, 15 bp, Homo sapiens
agcttttttgatgtt

SEQ ID NO: 1237611 - DNA, 15 bp, Homo sapiens
aagcttttttgatgt

SEQ ID NO: 1237612 - DNA, 15 bp, Homo sapiens
aaagcttttttgatg

SEQ ID NO: 1237613 - DNA, 15 bp, Homo sapiens
aaaagcttttttgat

SEQ ID NO: 1237614 - DNA, 15 bp, Homo sapiens
gaaaagcttttttga

SEQ ID NO: 1237615 - DNA, 15 bp, Homo sapiens
tgaaaagcttttttg

SEQ ID NO: 1237616 - DNA, 15 bp, Homo sapiens
atgaaaagctttttt

SEQ ID NO: 1237617 - DNA, 15 bp, Homo sapiens
aatgaaaagcttttt

SEQ ID NO: 1237618 - DNA, 15 bp, Homo sapiens
aaatgaaaagctttt

SEQ ID NO: 1237619 - DNA, 15 bp, Homo sapiens
aaaatgaaaagcttt

SEQ ID NO: 1237620 - DNA, 15 bp, Homo sapiens
aaaaatgaaaagctt

SEQ ID NO: 1237621 - DNA, 15 bp, Homo sapiens
gaaaaatgaaaagct

SEQ ID NO: 1237622 - DNA, 15 bp, Homo sapiens
agaaaaatgaaaagc

SEQ ID NO: 1237623 - DNA, 15 bp, Homo sapiens
tagaaaaatgaaaag

SEQ ID NO: 1237624 - DNA, 15 bp, Homo sapiens
atagaaaaatgaaaa

SEQ ID NO: 1237625 - DNA, 15 bp, Homo sapiens
aatagaaaaatgaaa

SEQ ID NO: 1237626 - DNA, 15 bp, Homo sapiens
caatagaaaaatgaa

SEQ ID NO: 1237627 - DNA, 15 bp, Homo sapiens
tacaatagaaaaatg

SEQ ID NO: 1237628 - DNA, 15 bp, Homo sapiens
ttacaatagaaaaat

SEQ ID NO: 1237629 - DNA, 15 bp, Homo sapiens
tttacaatagaaaaa

SEQ ID NO: 1237630 - DNA, 15 bp, Homo sapiens
ttttacaatagaaaa

SEQ ID NO: 1237631 - DNA, 15 bp, Homo sapiens
attttacaatagaaa

SEQ ID NO: 1237632 - DNA, 15 bp, Homo sapiens
tattttacaatagaa

SEQ ID NO: 1237633 - DNA, 15 bp, Homo sapiens
ttattttacaataga

SEQ ID NO: 1237634 - DNA, 15 bp, Homo sapiens
tttattttacaatag

SEQ ID NO: 1237635 - DNA, 15 bp, Homo sapiens
gtttattttacaata

SEQ ID NO: 1237636 - DNA, 15 bp, Homo sapiens
tgtttattttacaat

SEQ ID NO: 1237637 - DNA, 15 bp, Homo sapiens
ttgtttattttacaa

SEQ ID NO: 1237638 - DNA, 15 bp, Homo sapiens
tttgtttattttaca

SEQ ID NO: 1237639 - DNA, 15 bp, Homo sapiens
atttgtttattttac

SEQ ID NO: 1237640 - DNA, 15 bp, Homo sapiens
tatttgtttatttta

SEQ ID NO: 1237641 - DNA, 15 bp, Homo sapiens
atatttgtttatttt

SEQ ID NO: 1237642 - DNA, 15 bp, Homo sapiens
catatttgtttattt

SEQ ID NO: 1237643 - DNA, 15 bp, Homo sapiens
ccatatttgtttatt

SEQ ID NO: 1237644 - DNA, 15 bp, Homo sapiens
tccatatttgtttat

SEQ ID NO: 1237645 - DNA, 15 bp, Homo sapiens
ttccatatttgttta

SEQ ID NO: 1237646 - DNA, 15 bp, Homo sapiens
tttccatatttgttt

SEQ ID NO: 1237647 - DNA, 15 bp, Homo sapiens
ctttccatatttgtt

SEQ ID NO: 1237648 - DNA, 15 bp, Homo sapiens
actttccatatttgt

SEQ ID NO: 1237649 - DNA, 15 bp, Homo sapiens
tactttccatatttg

SEQ ID NO: 1237650 - DNA, 15 bp, Homo sapiens
atactttccatattt

SEQ ID NO: 1237651 - DNA, 15 bp, Homo sapiens
tatactttccatatt

SEQ ID NO: 1237652 - DNA, 15 bp, Homo sapiens
ctatactttccatat

SEQ ID NO: 1237653 - DNA, 15 bp, Homo sapiens
actatactttccata

SEQ ID NO: 1237654 - DNA, 15 bp, Homo sapiens
aactatactttccat

SEQ ID NO: 1237655 - DNA, 15 bp, Homo sapiens
taactatactttcca

SEQ ID NO: 1237656 - DNA, 15 bp, Homo sapiens
ctaactatactttcc

SEQ ID NO: 1237657 - DNA, 15 bp, Homo sapiens
gctaactatactttc

SEQ ID NO: 1237658 - DNA, 15 bp, Homo sapiens
agctaactatacttt

SEQ ID NO: 1237659 - DNA, 15 bp, Homo sapiens
tagctaactatactt

SEQ ID NO: 1237660 - DNA, 15 bp, Homo sapiens
gtagctaactatact

SEQ ID NO: 1237661 - DNA, 15 bp, Homo sapiens
tgtagctaactatac

SEQ ID NO: 1237662 - DNA, 15 bp, Homo sapiens
ttgtagctaactata

SEQ ID NO: 1237663 - DNA, 15 bp, Homo sapiens
attgtagctaactat

SEQ ID NO: 1237664 - DNA, 15 bp, Homo sapiens
cattgtagctaacta

SEQ ID NO: 1237665 - DNA, 15 bp, Homo sapiens
tcattgtagctaact

SEQ ID NO: 1237666 - DNA, 15 bp, Homo sapiens
atcattgtagctaac

SEQ ID NO: 1237667 - DNA, 15 bp, Homo sapiens
tatcattgtagctaa

SEQ ID NO: 1237668 - DNA, 15 bp, Homo sapiens
gtatcattgtagcta

SEQ ID NO: 1237669 - DNA, 15 bp, Homo sapiens
tgtatcattgtagct

SEQ ID NO: 1237670 - DNA, 15 bp, Homo sapiens
gtgtatcattgtagc

SEQ ID NO: 1237671 - DNA, 15 bp, Homo sapiens
tgtgtatcattgtag

SEQ ID NO: 1237672 - DNA, 15 bp, Homo sapiens
gtgtgtatcattgta

SEQ ID NO: 1237673 - DNA, 15 bp, Homo sapiens
tgtgtgtatcattgt

SEQ ID NO: 1237674 - DNA, 15 bp, Homo sapiens
gtgtgtgtatcattg

SEQ ID NO: 1237675 - DNA, 15 bp, Homo sapiens
tgtgtgtgtatcatt

SEQ ID NO: 1237676 - DNA, 15 bp, Homo sapiens
gtgtgtgtgtatcat

SEQ ID NO: 1237677 - DNA, 15 bp, Homo sapiens
tgtgtgtgtgtatca

SEQ ID NO: 1237678 - DNA, 15 bp, Homo sapiens
ttgtgtgtgtgtatc

SEQ ID NO: 1237679 - DNA, 15 bp, Homo sapiens
gttttttgtgtgtgt

SEQ ID NO: 1237680 - DNA, 15 bp, Homo sapiens
ggttttttgtgtgtg

SEQ ID NO: 1237681 - DNA, 15 bp, Homo sapiens
aggttttttgtgtgt

SEQ ID NO: 1237682 - DNA, 15 bp, Homo sapiens
taggttttttgtgtg

SEQ ID NO: 1237683 - DNA, 15 bp, Homo sapiens
ataggttttttgtgt

SEQ ID NO: 1237684 - DNA, 15 bp, Homo sapiens
tataggttttttgtg

SEQ ID NO: 1237685 - DNA, 15 bp, Homo sapiens
ctataggttttttgt

SEQ ID NO: 1237686 - DNA, 15 bp, Homo sapiens
cctataggttttttg

SEQ ID NO: 1237687 - DNA, 15 bp, Homo sapiens
gcctataggtttttt

SEQ ID NO: 1237688 - DNA, 15 bp, Homo sapiens
ggcctataggttttt

SEQ ID NO: 1237689 - DNA, 15 bp, Homo sapiens
cggcctataggtttt

SEQ ID NO: 1237690 - DNA, 15 bp, Homo sapiens
ccggcctataggttt

SEQ ID NO: 1237691 - DNA, 15 bp, Homo sapiens
cccggcctataggtt

SEQ ID NO: 1237692 - DNA, 15 bp, Homo sapiens
gcccggcctataggt

SEQ ID NO: 1237693 - DNA, 15 bp, Homo sapiens
cgcccggcctatagg

SEQ ID NO: 1237694 - DNA, 15 bp, Homo sapiens
gcgcccggcctatag

SEQ ID NO: 1237695 - DNA, 15 bp, Homo sapiens
tgcgcccggcctata

SEQ ID NO: 1237696 - DNA, 15 bp, Homo sapiens
ctgcgcccggcctat

SEQ ID NO: 1237697 - DNA, 15 bp, Homo sapiens
actgcgcccggccta

SEQ ID NO: 1237698 - DNA, 15 bp, Homo sapiens
cactgcgcccggcct

SEQ ID NO: 1237699 - DNA, 15 bp, Homo sapiens
gtgagccactgcgcc

SEQ ID NO: 1237700 - DNA, 15 bp, Homo sapiens
cgtgagccactgcgc

SEQ ID NO: 1237701 - DNA, 15 bp, Homo sapiens
gcgtgagccactgcg

SEQ ID NO: 1237702 - DNA, 15 bp, Homo sapiens
ggcgtgagccactgc

SEQ ID NO: 1237703 - DNA, 15 bp, Homo sapiens
caccagtacagggaa

SEQ ID NO: 1237704 - DNA, 15 bp, Homo sapiens
ccaccagtacaggga

SEQ ID NO: 1237705 - DNA, 15 bp, Homo sapiens
cccaccagtacaggg

SEQ ID NO: 1237706 - DNA, 15 bp, Homo sapiens
acccaccagtacagg

SEQ ID NO: 1237707 - DNA, 15 bp, Homo sapiens
cacccaccagtacag

SEQ ID NO: 1237708 - DNA, 15 bp, Homo sapiens
tcacccaccagtaca

SEQ ID NO: 1237709 - DNA, 15 bp, Homo sapiens
gtcacccaccagtac

SEQ ID NO: 1237710 - DNA, 15 bp, Homo sapiens
tgtcacccaccagta

SEQ ID NO: 1237711 - DNA, 15 bp, Homo sapiens
atgtcacccaccagt

SEQ ID NO: 1237712 - DNA, 15 bp, Homo sapiens
catgtcacccaccag

SEQ ID NO: 1237713 - DNA, 15 bp, Homo sapiens
ccatgtcacccacca

SEQ ID NO: 1237714 - DNA, 15 bp, Homo sapiens
tccatgtcacccacc

SEQ ID NO: 1237715 - DNA, 15 bp, Homo sapiens
gtccatgtcacccac

SEQ ID NO: 1237716 - DNA, 15 bp, Homo sapiens
tgtccatgtcaccca

SEQ ID NO: 1237717 - DNA, 15 bp, Homo sapiens
ttgtccatgtcaccc

SEQ ID NO: 1237718 - DNA, 15 bp, Homo sapiens
gttgtccatgtcacc

SEQ ID NO: 1237719 - DNA, 15 bp, Homo sapiens
tgttgtccatgtcac

SEQ ID NO: 1237720 - DNA, 15 bp, Homo sapiens
ctgttgtccatgtca

SEQ ID NO: 1237721 - DNA, 15 bp, Homo sapiens
actgttgtccatgtc

SEQ ID NO: 1237722 - DNA, 15 bp, Homo sapiens
cactgttgtccatgt

SEQ ID NO: 1237723 - DNA, 15 bp, Homo sapiens
ccactgttgtccatg

SEQ ID NO: 1237724 - DNA, 15 bp, Homo sapiens
gccactgttgtccat

SEQ ID NO: 1237725 - DNA, 15 bp, Homo sapiens
tgccactgttgtcca

SEQ ID NO: 1237726 - DNA, 15 bp, Homo sapiens
ctgccactgttgtcc

SEQ ID NO: 1237727 - DNA, 15 bp, Homo sapiens
actgccactgttgtc

SEQ ID NO: 1237728 - DNA, 15 bp, Homo sapiens
gactgccactgttgt

SEQ ID NO: 1237729 - DNA, 15 bp, Homo sapiens
agactgccactgttg

SEQ ID NO: 1237730 - DNA, 15 bp, Homo sapiens
gagactgccactgtt

SEQ ID NO: 1237731 - DNA, 15 bp, Homo sapiens
tgagactgccactgt

SEQ ID NO: 1237732 - DNA, 15 bp, Homo sapiens
ttgagactgccactg

SEQ ID NO: 1237733 - DNA, 15 bp, Homo sapiens
gttgagactgccact

SEQ ID NO: 1237734 - DNA, 15 bp, Homo sapiens
cgttgagactgccac

SEQ ID NO: 1237735 - DNA, 15 bp, Homo sapiens
gcgttgagactgcca

SEQ ID NO: 1237736 - DNA, 15 bp, Homo sapiens
agcgttgagactgcc

SEQ ID NO: 1237737 - DNA, 15 bp, Homo sapiens
gagcgttgagactgc

SEQ ID NO: 1237738 - DNA, 15 bp, Homo sapiens
tgagcgttgagactg

SEQ ID NO: 1237739 - DNA, 15 bp, Homo sapiens
ctgagcgttgagact

SEQ ID NO: 1237740 - DNA, 15 bp, Homo sapiens
cctgagcgttgagac

SEQ ID NO: 1237741 - DNA, 15 bp, Homo sapiens
acctgagcgttgaga

SEQ ID NO: 1237742 - DNA, 15 bp, Homo sapiens
gacctgagcgttgag

SEQ ID NO: 1237743 - DNA, 15 bp, Homo sapiens
tgacctgagcgttga

SEQ ID NO: 1237744 - DNA, 15 bp, Homo sapiens
atgacctgagcgttg

SEQ ID NO: 1237745 - DNA, 15 bp, Homo sapiens
aatgacctgagcgtt

SEQ ID NO: 1237746 - DNA, 15 bp, Homo sapiens
gaatgacctgagcgt

SEQ ID NO: 1237747 - DNA, 15 bp, Homo sapiens
tgaatgacctgagcg

SEQ ID NO: 1237748 - DNA, 15 bp, Homo sapiens
gtgaatgacctgagc

SEQ ID NO: 1237749 - DNA, 15 bp, Homo sapiens
ggtgaatgacctgag

SEQ ID NO: 1237750 - DNA, 15 bp, Homo sapiens
tggtgaatgacctga

SEQ ID NO: 1237751 - DNA, 15 bp, Homo sapiens
ctggtgaatgacctg

SEQ ID NO: 1237752 - DNA, 15 bp, Homo sapiens
gctggtgaatgacct

SEQ ID NO: 1237753 - DNA, 15 bp, Homo sapiens
agctggtgaatgacc

SEQ ID NO: 1237754 - DNA, 15 bp, Homo sapiens
cagctggtgaatgac

SEQ ID NO: 1237755 - DNA, 15 bp, Homo sapiens
ccagctggtgaatga

SEQ ID NO: 1237756 - DNA, 15 bp, Homo sapiens
cccagctggtgaatg

SEQ ID NO: 1237757 - DNA, 15 bp, Homo sapiens
gcccagctggtgaat

SEQ ID NO: 1237758 - DNA, 15 bp, Homo sapiens
ggcccagctggtgaa

SEQ ID NO: 1237759 - DNA, 15 bp, Homo sapiens
gggcccagctggtga

SEQ ID NO: 1237760 - DNA, 15 bp, Homo sapiens
ggggcccagctggtg

SEQ ID NO: 1237761 - DNA, 15 bp, Homo sapiens
cggggcccagctggt

SEQ ID NO: 1237762 - DNA, 15 bp, Homo sapiens
ccggggcccagctgg

SEQ ID NO: 1237763 - DNA, 15 bp, Homo sapiens
accggggcccagctg

SEQ ID NO: 1237764 - DNA, 15 bp, Homo sapiens
gaccggggcccagct

SEQ ID NO: 1237765 - DNA, 15 bp, Homo sapiens
agaccggggcccagc

SEQ ID NO: 1237766 - DNA, 15 bp, Homo sapiens
gagaccggggcccag

SEQ ID NO: 1237767 - DNA, 15 bp, Homo sapiens
tgagaccggggccca

SEQ ID NO: 1237768 - DNA, 15 bp, Homo sapiens
ctgagaccggggccc

SEQ ID NO: 1237769 - DNA, 15 bp, Homo sapiens
cctgagaccggggcc

SEQ ID NO: 1237770 - DNA, 15 bp, Homo sapiens
acctgagaccggggc

SEQ ID NO: 1237771 - DNA, 15 bp, Homo sapiens
gacctgagaccgggg

SEQ ID NO: 1237772 - DNA, 15 bp, Homo sapiens
ggacctgagaccggg

SEQ ID NO: 1237773 - DNA, 15 bp, Homo sapiens
tggacctgagaccgg

SEQ ID NO: 1237774 - DNA, 15 bp, Homo sapiens
ttggacctgagaccg

SEQ ID NO: 1237775 - DNA, 15 bp, Homo sapiens
cttggacctgagacc

SEQ ID NO: 1237776 - DNA, 15 bp, Homo sapiens
tcttggacctgagac

SEQ ID NO: 1237777 - DNA, 15 bp, Homo sapiens
atcttggacctgaga

SEQ ID NO: 1237778 - DNA, 15 bp, Homo sapiens
catcttggacctgag

SEQ ID NO: 1237779 - DNA, 15 bp, Homo sapiens
ccatcttggacctga

SEQ ID NO: 1237780 - DNA, 15 bp, Homo sapiens
gccatcttggacctg

SEQ ID NO: 1237781 - DNA, 15 bp, Homo sapiens
ggccatcttggacct

SEQ ID NO: 1237782 - DNA, 15 bp, Homo sapiens
tggccatcttggacc

SEQ ID NO: 1237783 - DNA, 15 bp, Homo sapiens
atggccatcttggac

SEQ ID NO: 1237784 - DNA, 15 bp, Homo sapiens
gatggccatcttgga

SEQ ID NO: 1237785 - DNA, 15 bp, Homo sapiens
ggatggccatcttgg

SEQ ID NO: 1237786 - DNA, 15 bp, Homo sapiens
tggatggccatcttg

SEQ ID NO: 1237787 - DNA, 15 bp, Homo sapiens
ctggatggccatctt

SEQ ID NO: 1237788 - DNA, 15 bp, Homo sapiens
cctggatggccatct

SEQ ID NO: 1237789 - DNA, 15 bp, Homo sapiens
acctggatggccatc

SEQ ID NO: 1237790 - DNA, 15 bp, Homo sapiens
cacctggatggccat

SEQ ID NO: 1237791 - DNA, 15 bp, Homo sapiens
tcacctggatggcca

SEQ ID NO: 1237792 - DNA, 15 bp, Homo sapiens
ctcacctggatggcc

SEQ ID NO: 1237793 - DNA, 15 bp, Homo sapiens
actcacctggatggc

SEQ ID NO: 1237794 - DNA, 15 bp, Homo sapiens
cactcacctggatgg

SEQ ID NO: 1237795 - DNA, 15 bp, Homo sapiens
ccactcacctggatg

SEQ ID NO: 1237796 - DNA, 15 bp, Homo sapiens
cccactcacctggat

SEQ ID NO: 1237797 - DNA, 15 bp, Homo sapiens
ccccactcacctgga

SEQ ID NO: 1237798 - DNA, 15 bp, Homo sapiens
gccccactcacctgg

SEQ ID NO: 1237799 - DNA, 15 bp, Homo sapiens
tgccccactcacctg

SEQ ID NO: 1237800 - DNA, 15 bp, Homo sapiens
gtgccccactcacct

SEQ ID NO: 1237801 - DNA, 15 bp, Homo sapiens
cgtgccccactcacc

SEQ ID NO: 1237802 - DNA, 15 bp, Homo sapiens
ccgtgccccactcac

SEQ ID NO: 1237803 - DNA, 15 bp, Homo sapiens
tccgtgccccactca

SEQ ID NO: 1237804 - DNA, 15 bp, Homo sapiens
ctccgtgccccactc

SEQ ID NO: 1237805 - DNA, 15 bp, Homo sapiens
cctccgtgccccact

SEQ ID NO: 1237806 - DNA, 15 bp, Homo sapiens
gcctccgtgccccac

SEQ ID NO: 1237807 - DNA, 15 bp, Homo sapiens
agcctccgtgcccca

SEQ ID NO: 1237808 - DNA, 15 bp, Homo sapiens
cagcctccgtgcccc

SEQ ID NO: 1237809 - DNA, 15 bp, Homo sapiens
gcagcctccgtgccc

SEQ ID NO: 1237810 - DNA, 15 bp, Homo sapiens
agcagcctccgtgcc

SEQ ID NO: 1237811 - DNA, 15 bp, Homo sapiens
cagcagcctccgtgc

SEQ ID NO: 1237812 - DNA, 15 bp, Homo sapiens
gcagcagcctccgtg

SEQ ID NO: 1237813 - DNA, 15 bp, Homo sapiens
agcagcagcctccgt

SEQ ID NO: 1237814 - DNA, 15 bp, Homo sapiens
gagcagcagcctccg

SEQ ID NO: 1237815 - DNA, 15 bp, Homo sapiens
ggagcagcagcctcc

SEQ ID NO: 1237816 - DNA, 15 bp, Homo sapiens
gggagcagcagcctc

SEQ ID NO: 1237817 - DNA, 15 bp, Homo sapiens
ggggagcagcagcct

SEQ ID NO: 1237818 - DNA, 15 bp, Homo sapiens
aggggagcagcagcc

SEQ ID NO: 1237819 - DNA, 15 bp, Homo sapiens
gaggggagcagcagc

SEQ ID NO: 1237820 - DNA, 15 bp, Homo sapiens
cgaggggagcagcag

SEQ ID NO: 1237821 - DNA, 15 bp, Homo sapiens
ccgaggggagcagca

SEQ ID NO: 1237822 - DNA, 15 bp, Homo sapiens
gccgaggggagcagc

SEQ ID NO: 1237823 - DNA, 15 bp, Homo sapiens
ggccgaggggagcag

SEQ ID NO: 1237824 - DNA, 15 bp, Homo sapiens
tggccgaggggagca

SEQ ID NO: 1237825 - DNA, 15 bp, Homo sapiens
gtggccgaggggagc

SEQ ID NO: 1237826 - DNA, 15 bp, Homo sapiens
ggtggccgaggggag

SEQ ID NO: 1237827 - DNA, 15 bp, Homo sapiens
cggtggccgagggga

SEQ ID NO: 1237828 - DNA, 15 bp, Homo sapiens
acggtggccgagggg

SEQ ID NO: 1237829 - DNA, 15 bp, Homo sapiens
cacggtggccgaggg

SEQ ID NO: 1237830 - DNA, 15 bp, Homo sapiens
tcacggtggccgagg

SEQ ID NO: 1237831 - DNA, 15 bp, Homo sapiens
ctcacggtggccgag

SEQ ID NO: 1237832 - DNA, 15 bp, Homo sapiens
gctcacggtggccga

SEQ ID NO: 1237833 - DNA, 15 bp, Homo sapiens
tgctcacggtggccg

SEQ ID NO: 1237834 - DNA, 15 bp, Homo sapiens
ctgctcacggtggcc

SEQ ID NO: 1237835 - DNA, 15 bp, Homo sapiens
cctgctcacggtggc

SEQ ID NO: 1237836 - DNA, 15 bp, Homo sapiens
ccctgctcacggtgg

SEQ ID NO: 1237837 - DNA, 15 bp, Homo sapiens
tccctgctcacggtg

SEQ ID NO: 1237838 - DNA, 15 bp, Homo sapiens
ctccctgctcacggt

SEQ ID NO: 1237839 - DNA, 15 bp, Homo sapiens
gctccctgctcacgg

SEQ ID NO: 1237840 - DNA, 15 bp, Homo sapiens
ggctccctgctcacg

SEQ ID NO: 1237841 - DNA, 15 bp, Homo sapiens
cggctccctgctcac

SEQ ID NO: 1237842 - DNA, 15 bp, Homo sapiens
gcggctccctgctca

SEQ ID NO: 1237843 - DNA, 15 bp, Homo sapiens
ggcggctccctgctc

SEQ ID NO: 1237844 - DNA, 15 bp, Homo sapiens
gggcggctccctgct

SEQ ID NO: 1237845 - DNA, 15 bp, Homo sapiens
agggcggctccctgc

SEQ ID NO: 1237846 - DNA, 15 bp, Homo sapiens
gagggcggctccctg

SEQ ID NO: 1237847 - DNA, 15 bp, Homo sapiens
tgagggcggctccct

SEQ ID NO: 1237848 - DNA, 15 bp, Homo sapiens
gtgagggcggctccc

SEQ ID NO: 1237849 - DNA, 15 bp, Homo sapiens
tgtgagggcggctcc

SEQ ID NO: 1237850 - DNA, 15 bp, Homo sapiens
gtgtgagggcggctc

SEQ ID NO: 1237851 - DNA, 15 bp, Homo sapiens
ggtgtgagggcggct

SEQ ID NO: 1237852 - DNA, 15 bp, Homo sapiens
gggtgtgagggcggc

SEQ ID NO: 1237853 - DNA, 15 bp, Homo sapiens
ggggtgtgagggcgg

SEQ ID NO: 1237854 - DNA, 15 bp, Homo sapiens
gggggtgtgagggcg

SEQ ID NO: 1237855 - DNA, 15 bp, Homo sapiens
agggggtgtgagggc

SEQ ID NO: 1237856 - DNA, 15 bp, Homo sapiens
gagggggtgtgaggg

SEQ ID NO: 1237857 - DNA, 15 bp, Homo sapiens
ggagggggtgtgagg

SEQ ID NO: 1237858 - DNA, 15 bp, Homo sapiens
aggagggggtgtgag

SEQ ID NO: 1237859 - DNA, 15 bp, Homo sapiens
gaggagggggtgtga

SEQ ID NO: 1237860 - DNA, 15 bp, Homo sapiens
agaggagggggtgtg

SEQ ID NO: 1237861 - DNA, 15 bp, Homo sapiens
gagaggagggggtgt

SEQ ID NO: 1237862 - DNA, 15 bp, Homo sapiens
ggagaggagggggtg

SEQ ID NO: 1237863 - DNA, 15 bp, Homo sapiens
tggagaggagggggt

SEQ ID NO: 1237864 - DNA, 15 bp, Homo sapiens
gtggagaggaggggg

SEQ ID NO: 1237865 - DNA, 15 bp, Homo sapiens
tgtggagaggagggg

SEQ ID NO: 1237866 - DNA, 15 bp, Homo sapiens
ctgtggagaggaggg

SEQ ID NO: 1237867 - DNA, 15 bp, Homo sapiens
tctgtggagaggagg

SEQ ID NO: 1237868 - DNA, 15 bp, Homo sapiens
gtctgtggagaggag

SEQ ID NO: 1237869 - DNA, 15 bp, Homo sapiens
ggtctgtggagagga

SEQ ID NO: 1237870 - DNA, 15 bp, Homo sapiens
gggtctgtggagagg

SEQ ID NO: 1237871 - DNA, 15 bp, Homo sapiens
tgggtctgtggagag

SEQ ID NO: 1237872 - DNA, 15 bp, Homo sapiens
ctgggtctgtggaga

SEQ ID NO: 1237873 - DNA, 15 bp, Homo sapiens
gctgggtctgtggag

SEQ ID NO: 1237874 - DNA, 15 bp, Homo sapiens
tgctgggtctgtgga

SEQ ID NO: 1237875 - DNA, 15 bp, Homo sapiens
ctgctgggtctgtgg

SEQ ID NO: 1237876 - DNA, 15 bp, Homo sapiens
actgctgggtctgtg

SEQ ID NO: 1237877 - DNA, 15 bp, Homo sapiens
gactgctgggtctgt

SEQ ID NO: 1237878 - DNA, 15 bp, Homo sapiens
cgactgctgggtctg

SEQ ID NO: 1237879 - DNA, 15 bp, Homo sapiens
tcgactgctgggtct

SEQ ID NO: 1237880 - DNA, 15 bp, Homo sapiens
ttcgactgctgggtc

SEQ ID NO: 1237881 - DNA, 15 bp, Homo sapiens
cttcgactgctgggt

SEQ ID NO: 1237882 - DNA, 15 bp, Homo sapiens
acttcgactgctggg

SEQ ID NO: 1237883 - DNA, 15 bp, Homo sapiens
aacttcgactgctgg

SEQ ID NO: 1237884 - DNA, 15 bp, Homo sapiens
aaacttcgactgctg

SEQ ID NO: 1237885 - DNA, 15 bp, Homo sapiens
caaacttcgactgct

SEQ ID NO: 1237886 - DNA, 15 bp, Homo sapiens
acaaacttcgactgc

SEQ ID NO: 1237887 - DNA, 15 bp, Homo sapiens
cacaaacttcgactg

SEQ ID NO: 1237888 - DNA, 15 bp, Homo sapiens
tcacaaacttcgact

SEQ ID NO: 1237889 - DNA, 15 bp, Homo sapiens
ttcacaaacttcgac

SEQ ID NO: 1237890 - DNA, 15 bp, Homo sapiens
gttcacaaacttcga

SEQ ID NO: 1237891 - DNA, 15 bp, Homo sapiens
agttcacaaacttcg

SEQ ID NO: 1237892 - DNA, 15 bp, Homo sapiens
cagttcacaaacttc

SEQ ID NO: 1237893 - DNA, 15 bp, Homo sapiens
ccagttcacaaactt

SEQ ID NO: 1237894 - DNA, 15 bp, Homo sapiens
gccagttcacaaact

SEQ ID NO: 1237895 - DNA, 15 bp, Homo sapiens
tgccagttcacaaac

SEQ ID NO: 1237896 - DNA, 15 bp, Homo sapiens
ctgccagttcacaaa

SEQ ID NO: 1237897 - DNA, 15 bp, Homo sapiens
cctgccagttcacaa

SEQ ID NO: 1237898 - DNA, 15 bp, Homo sapiens
acctgccagttcaca

SEQ ID NO: 1237899 - DNA, 15 bp, Homo sapiens
cacctgccagttcac

SEQ ID NO: 1237900 - DNA, 15 bp, Homo sapiens
ccacctgccagttca

SEQ ID NO: 1237901 - DNA, 15 bp, Homo sapiens
tccacctgccagttc

SEQ ID NO: 1237902 - DNA, 15 bp, Homo sapiens
gtccacctgccagtt

SEQ ID NO: 1237903 - DNA, 15 bp, Homo sapiens
cgtccacctgccagt

SEQ ID NO: 1237904 - DNA, 15 bp, Homo sapiens
ccgtccacctgccag

SEQ ID NO: 1237905 - DNA, 15 bp, Homo sapiens
cccgtccacctgcca

SEQ ID NO: 1237906 - DNA, 15 bp, Homo sapiens
ccccgtccacctgcc

SEQ ID NO: 1237907 - DNA, 15 bp, Homo sapiens
tccccgtccacctgc

SEQ ID NO: 1237908 - DNA, 15 bp, Homo sapiens
ctccccgtccacctg

SEQ ID NO: 1237909 - DNA, 15 bp, Homo sapiens
actccccgtccacct

SEQ ID NO: 1237910 - DNA, 15 bp, Homo sapiens
tactccccgtccacc

SEQ ID NO: 1237911 - DNA, 15 bp, Homo sapiens
atactccccgtccac

SEQ ID NO: 1237912 - DNA, 15 bp, Homo sapiens
gatactccccgtcca

SEQ ID NO: 1237913 - DNA, 15 bp, Homo sapiens
cgatactccccgtcc

SEQ ID NO: 1237914 - DNA, 15 bp, Homo sapiens
ccgatactccccgtc

SEQ ID NO: 1237915 - DNA, 15 bp, Homo sapiens
cccgatactccccgt

SEQ ID NO: 1237916 - DNA, 15 bp, Homo sapiens
ccccgatactccccg

SEQ ID NO: 1237917 - DNA, 15 bp, Homo sapiens
gccccgatactcccc

SEQ ID NO: 1237918 - DNA, 15 bp, Homo sapiens
agccccgatactccc

SEQ ID NO: 1237919 - DNA, 15 bp, Homo sapiens
gagccccgatactcc

SEQ ID NO: 1237920 - DNA, 15 bp, Homo sapiens
agagccccgatactc

SEQ ID NO: 1237921 - DNA, 15 bp, Homo sapiens
cagagccccgatact

SEQ ID NO: 1237922 - DNA, 15 bp, Homo sapiens
tcagagccccgatac

SEQ ID NO: 1237923 - DNA, 15 bp, Homo sapiens
gtcagagccccgata

SEQ ID NO: 1237924 - DNA, 15 bp, Homo sapiens
agtcagagccccgat

SEQ ID NO: 1237925 - DNA, 15 bp, Homo sapiens
aagtcagagccccga

SEQ ID NO: 1237926 - DNA, 15 bp, Homo sapiens
gaagtcagagccccg

SEQ ID NO: 1237927 - DNA, 15 bp, Homo sapiens
tgaagtcagagcccc

SEQ ID NO: 1237928 - DNA, 15 bp, Homo sapiens
gtgaagtcagagccc

SEQ ID NO: 1237929 - DNA, 15 bp, Homo sapiens
tgtgaagtcagagcc

SEQ ID NO: 1237930 - DNA, 15 bp, Homo sapiens
ctgtgaagtcagagc

SEQ ID NO: 1237931 - DNA, 15 bp, Homo sapiens
gctgtgaagtcagag

SEQ ID NO: 1237932 - DNA, 15 bp, Homo sapiens
tgctgtgaagtcaga

SEQ ID NO: 1237933 - DNA, 15 bp, Homo sapiens
ctgctgtgaagtcag

SEQ ID NO: 1237934 - DNA, 15 bp, Homo sapiens
gctgctgtgaagtca

SEQ ID NO: 1237935 - DNA, 15 bp, Homo sapiens
ggctgctgtgaagtc

SEQ ID NO: 1237936 - DNA, 15 bp, Homo sapiens
cggctgctgtgaagt

SEQ ID NO: 1237937 - DNA, 15 bp, Homo sapiens
acggctgctgtgaag

SEQ ID NO: 1237938 - DNA, 15 bp, Homo sapiens
gacggctgctgtgaa

SEQ ID NO: 1237939 - DNA, 15 bp, Homo sapiens
tgacggctgctgtga

SEQ ID NO: 1237940 - DNA, 15 bp, Homo sapiens
gtgacggctgctgtg

SEQ ID NO: 1237941 - DNA, 15 bp, Homo sapiens
ggtgacggctgctgt

SEQ ID NO: 1237942 - DNA, 15 bp, Homo sapiens
gggtgacggctgctg

SEQ ID NO: 1237943 - DNA, 15 bp, Homo sapiens
agggtgacggctgct

SEQ ID NO: 1237944 - DNA, 15 bp, Homo sapiens
cagggtgacggctgc

SEQ ID NO: 1237945 - DNA, 15 bp, Homo sapiens
ccagggtgacggctg

SEQ ID NO: 1237946 - DNA, 15 bp, Homo sapiens
cccagggtgacggct

SEQ ID NO: 1237947 - DNA, 15 bp, Homo sapiens
ccccagggtgacggc

SEQ ID NO: 1237948 - DNA, 15 bp, Homo sapiens
tccccagggtgacgg

SEQ ID NO: 1237949 - DNA, 15 bp, Homo sapiens
ttccccagggtgacg

SEQ ID NO: 1237950 - DNA, 15 bp, Homo sapiens
gttccccagggtgac

SEQ ID NO: 1237951 - DNA, 15 bp, Homo sapiens
ggttccccagggtga

SEQ ID NO: 1237952 - DNA, 15 bp, Homo sapiens
gggttccccagggtg

SEQ ID NO: 1237953 - DNA, 15 bp, Homo sapiens
tgggttccccagggt

SEQ ID NO: 1237954 - DNA, 15 bp, Homo sapiens
ctgggttccccaggg

SEQ ID NO: 1237955 - DNA, 15 bp, Homo sapiens
tctgggttccccagg

SEQ ID NO: 1237956 - DNA, 15 bp, Homo sapiens
gtctgggttccccag

SEQ ID NO: 1237957 - DNA, 15 bp, Homo sapiens
cgtctgggttcccca

SEQ ID NO: 1237958 - DNA, 15 bp, Homo sapiens
acgtctgggttcccc

SEQ ID NO: 1237959 - DNA, 15 bp, Homo sapiens
gacgtctgggttccc

SEQ ID NO: 1237960 - DNA, 15 bp, Homo sapiens
ggacgtctgggttcc

SEQ ID NO: 1237961 - DNA, 15 bp, Homo sapiens
aggacgtctgggttc

SEQ ID NO: 1237962 - DNA, 15 bp, Homo sapiens
gaggacgtctgggtt

SEQ ID NO: 1237963 - DNA, 15 bp, Homo sapiens
cgaggacgtctgggt

SEQ ID NO: 1237964 - DNA, 15 bp, Homo sapiens
acgaggacgtctggg

SEQ ID NO: 1237965 - DNA, 15 bp, Homo sapiens
cacgaggacgtctgg

SEQ ID NO: 1237966 - DNA, 15 bp, Homo sapiens
ccacgaggacgtctg

SEQ ID NO: 1237967 - DNA, 15 bp, Homo sapiens
cccacgaggacgtct

SEQ ID NO: 1237968 - DNA, 15 bp, Homo sapiens
acccacgaggacgtc

SEQ ID NO: 1237969 - DNA, 15 bp, Homo sapiens
aacccacgaggacgt

SEQ ID NO: 1237970 - DNA, 15 bp, Homo sapiens
gaacccacgaggacg

SEQ ID NO: 1237971 - DNA, 15 bp, Homo sapiens
tgaacccacgaggac

SEQ ID NO: 1237972 - DNA, 15 bp, Homo sapiens
ctgaacccacgagga

SEQ ID NO: 1237973 - DNA, 15 bp, Homo sapiens
cctgaacccacgagg

SEQ ID NO: 1237974 - DNA, 15 bp, Homo sapiens
acctgaacccacgag

SEQ ID NO: 1237975 - DNA, 15 bp, Homo sapiens
tacctgaacccacga

SEQ ID NO: 1237976 - DNA, 15 bp, Homo sapiens
ttacctgaacccacg

SEQ ID NO: 1237977 - DNA, 15 bp, Homo sapiens
cttacctgaacccac

SEQ ID NO: 1237978 - DNA, 15 bp, Homo sapiens
tcttacctgaaccca

SEQ ID NO: 1237979 - DNA, 15 bp, Homo sapiens
ctcttacctgaaccc

SEQ ID NO: 1237980 - DNA, 15 bp, Homo sapiens
cctcttacctgaacc

SEQ ID NO: 1237981 - DNA, 15 bp, Homo sapiens
gcctcttacctgaac

SEQ ID NO: 1237982 - DNA, 15 bp, Homo sapiens
cgcctcttacctgaa

SEQ ID NO: 1237983 - DNA, 15 bp, Homo sapiens
ccgcctcttacctga

SEQ ID NO: 1237984 - DNA, 15 bp, Homo sapiens
tccgcctcttacctg

SEQ ID NO: 1237985 - DNA, 15 bp, Homo sapiens
ctccgcctcttacct

SEQ ID NO: 1237986 - DNA, 15 bp, Homo sapiens
cctccgcctcttacc

SEQ ID NO: 1237987 - DNA, 15 bp, Homo sapiens
ccctccgcctcttac

SEQ ID NO: 1237988 - DNA, 15 bp, Homo sapiens
gccctccgcctctta

SEQ ID NO: 1237989 - DNA, 15 bp, Homo sapiens
agccctccgcctctt

SEQ ID NO: 1237990 - DNA, 15 bp, Homo sapiens
aagccctccgcctct

SEQ ID NO: 1237991 - DNA, 15 bp, Homo sapiens
caagccctccgcctc

SEQ ID NO: 1237992 - DNA, 15 bp, Homo sapiens
ccaagccctccgcct

SEQ ID NO: 1237993 - DNA, 15 bp, Homo sapiens
tccaagccctccgcc

SEQ ID NO: 1237994 - DNA, 15 bp, Homo sapiens
ctccaagccctccgc

SEQ ID NO: 1237995 - DNA, 15 bp, Homo sapiens
cctccaagccctccg

SEQ ID NO: 1237996 - DNA, 15 bp, Homo sapiens
ccctccaagccctcc

SEQ ID NO: 1237997 - DNA, 15 bp, Homo sapiens
accctccaagccctc

SEQ ID NO: 1237998 - DNA, 15 bp, Homo sapiens
caccctccaagccct

SEQ ID NO: 1237999 - DNA, 15 bp, Homo sapiens
ccaccctccaagccc

SEQ ID NO: 1238000 - DNA, 15 bp, Homo sapiens
accaccctccaagcc

SEQ ID NO: 1238001 - DNA, 15 bp, Homo sapiens
gaccaccctccaagc

SEQ ID NO: 1238002 - DNA, 15 bp, Homo sapiens
tgaccaccctccaag

SEQ ID NO: 1238003 - DNA, 15 bp, Homo sapiens
gtgaccaccctccaa

SEQ ID NO: 1238004 - DNA, 15 bp, Homo sapiens
tgtgaccaccctcca

SEQ ID NO: 1238005 - DNA, 15 bp, Homo sapiens
ttgtgaccaccctcc

SEQ ID NO: 1238006 - DNA, 15 bp, Homo sapiens
tttgtgaccaccctc

SEQ ID NO: 1238007 - DNA, 15 bp, Homo sapiens
ttttgtgaccaccct

SEQ ID NO: 1238008 - DNA, 15 bp, Homo sapiens
gttttgtgaccaccc

SEQ ID NO: 1238009 - DNA, 15 bp, Homo sapiens
agttttgtgaccacc

SEQ ID NO: 1238010 - DNA, 15 bp, Homo sapiens
cagttttgtgaccac

SEQ ID NO: 1238011 - DNA, 15 bp, Homo sapiens
gcagttttgtgacca

SEQ ID NO: 1238012 - DNA, 15 bp, Homo sapiens
tgcagttttgtgacc

SEQ ID NO: 1238013 - DNA, 15 bp, Homo sapiens
ctgcagttttgtgac

SEQ ID NO: 1238014 - DNA, 15 bp, Homo sapiens
actgcagttttgtga

SEQ ID NO: 1238015 - DNA, 15 bp, Homo sapiens
aactgcagttttgtg

SEQ ID NO: 1238016 - DNA, 15 bp, Homo sapiens
gaactgcagttttgt

SEQ ID NO: 1238017 - DNA, 15 bp, Homo sapiens
agaactgcagttttg

SEQ ID NO: 1238018 - DNA, 15 bp, Homo sapiens
cagaactgcagtttt

SEQ ID NO: 1238019 - DNA, 15 bp, Homo sapiens
ccagaactgcagttt

SEQ ID NO: 1238020 - DNA, 15 bp, Homo sapiens
gccagaactgcagtt

SEQ ID NO: 1238021 - DNA, 15 bp, Homo sapiens
agccagaactgcagt

SEQ ID NO: 1238022 - DNA, 15 bp, Homo sapiens
aagccagaactgcag

SEQ ID NO: 1238023 - DNA, 15 bp, Homo sapiens
aaagccagaactgca

SEQ ID NO: 1238024 - DNA, 15 bp, Homo sapiens
caaagccagaactgc

SEQ ID NO: 1238025 - DNA, 15 bp, Homo sapiens
gcaaagccagaactg

SEQ ID NO: 1238026 - DNA, 15 bp, Homo sapiens
ggcaaagccagaact

SEQ ID NO: 1238027 - DNA, 15 bp, Homo sapiens
tggcaaagccagaac

SEQ ID NO: 1238028 - DNA, 15 bp, Homo sapiens
ctggcaaagccagaa

SEQ ID NO: 1238029 - DNA, 15 bp, Homo sapiens
gctggcaaagccaga

SEQ ID NO: 1238030 - DNA, 15 bp, Homo sapiens
tgctggcaaagccag

SEQ ID NO: 1238031 - DNA, 15 bp, Homo sapiens
ttgctggcaaagcca

SEQ ID NO: 1238032 - DNA, 15 bp, Homo sapiens
tttgctggcaaagcc

SEQ ID NO: 1238033 - DNA, 15 bp, Homo sapiens
atttgctggcaaagc

SEQ ID NO: 1238034 - DNA, 15 bp, Homo sapiens
gatttgctggcaaag

SEQ ID NO: 1238035 - DNA, 15 bp, Homo sapiens
ggatttgctggcaaa

SEQ ID NO: 1238036 - DNA, 15 bp, Homo sapiens
tggatttgctggcaa

SEQ ID NO: 1238037 - DNA, 15 bp, Homo sapiens
gtggatttgctggca

SEQ ID NO: 1238038 - DNA, 15 bp, Homo sapiens
ggtggatttgctggc

SEQ ID NO: 1238039 - DNA, 15 bp, Homo sapiens
gggtggatttgctgg

SEQ ID NO: 1238040 - DNA, 15 bp, Homo sapiens
ggggtggatttgctg

SEQ ID NO: 1238041 - DNA, 15 bp, Homo sapiens
tggggtggatttgct

SEQ ID NO: 1238042 - DNA, 15 bp, Homo sapiens
atggggtggatttgc

SEQ ID NO: 1238043 - DNA, 15 bp, Homo sapiens
aatggggtggatttg

SEQ ID NO: 1238044 - DNA, 15 bp, Homo sapiens
aaatggggtggattt

SEQ ID NO: 1238045 - DNA, 15 bp, Homo sapiens
caaatggggtggatt

SEQ ID NO: 1238046 - DNA, 15 bp, Homo sapiens
acaaatggggtggat

SEQ ID NO: 1238047 - DNA, 15 bp, Homo sapiens
cacaaatggggtgga

SEQ ID NO: 1238048 - DNA, 15 bp, Homo sapiens
tcacaaatggggtgg

SEQ ID NO: 1238049 - DNA, 15 bp, Homo sapiens
ttcacaaatggggtg

SEQ ID NO: 1238050 - DNA, 15 bp, Homo sapiens
gttcacaaatggggt

SEQ ID NO: 1238051 - DNA, 15 bp, Homo sapiens
ggttcacaaatgggg

SEQ ID NO: 1238052 - DNA, 15 bp, Homo sapiens
aggttcacaaatggg

SEQ ID NO: 1238053 - DNA, 15 bp, Homo sapiens
gaggttcacaaatgg

SEQ ID NO: 1238054 - DNA, 15 bp, Homo sapiens
ggaggttcacaaatg

SEQ ID NO: 1238055 - DNA, 15 bp, Homo sapiens
aggaggttcacaaat

SEQ ID NO: 1238056 - DNA, 15 bp, Homo sapiens
aaggaggttcacaaa

SEQ ID NO: 1238057 - DNA, 15 bp, Homo sapiens
aaaggaggttcacaa

SEQ ID NO: 1238058 - DNA, 15 bp, Homo sapiens
aaaaggaggttcaca

SEQ ID NO: 1238059 - DNA, 15 bp, Homo sapiens
gaaaaggaggttcac

SEQ ID NO: 1238060 - DNA, 15 bp, Homo sapiens
agaaaaggaggttca

SEQ ID NO: 1238061 - DNA, 15 bp, Homo sapiens
cagaaaaggaggttc

SEQ ID NO: 1238062 - DNA, 15 bp, Homo sapiens
gcagaaaaggaggtt

SEQ ID NO: 1238063 - DNA, 15 bp, Homo sapiens
ggcagaaaaggaggt

SEQ ID NO: 1238064 - DNA, 15 bp, Homo sapiens
tggcagaaaaggagg

SEQ ID NO: 1238065 - DNA, 15 bp, Homo sapiens
gtggcagaaaaggag

SEQ ID NO: 1238066 - DNA, 15 bp, Homo sapiens
agtggcagaaaagga

SEQ ID NO: 1238067 - DNA, 15 bp, Homo sapiens
cagtggcagaaaagg

SEQ ID NO: 1238068 - DNA, 15 bp, Homo sapiens
ccagtggcagaaaag

SEQ ID NO: 1238069 - DNA, 15 bp, Homo sapiens
tccagtggcagaaaa

SEQ ID NO: 1238070 - DNA, 15 bp, Homo sapiens
ctccagtggcagaaa

SEQ ID NO: 1238071 - DNA, 15 bp, Homo sapiens
tctccagtggcagaa

SEQ ID NO: 1238072 - DNA, 15 bp, Homo sapiens
ttctccagtggcaga

SEQ ID NO: 1238073 - DNA, 15 bp, Homo sapiens
cttctccagtggcag

SEQ ID NO: 1238074 - DNA, 15 bp, Homo sapiens
acttctccagtggca

SEQ ID NO: 1238075 - DNA, 15 bp, Homo sapiens
cacttctccagtggc

SEQ ID NO: 1238076 - DNA, 15 bp, Homo sapiens
ccacttctccagtgg

SEQ ID NO: 1238077 - DNA, 15 bp, Homo sapiens
gccacttctccagtg

SEQ ID NO: 1238078 - DNA, 15 bp, Homo sapiens
agccacttctccagt

SEQ ID NO: 1238079 - DNA, 15 bp, Homo sapiens
gagccacttctccag

SEQ ID NO: 1238080 - DNA, 15 bp, Homo sapiens
tgagccacttctcca

SEQ ID NO: 1238081 - DNA, 15 bp, Homo sapiens
ctgagccacttctcc

SEQ ID NO: 1238082 - DNA, 15 bp, Homo sapiens
gctgagccacttctc

SEQ ID NO: 1238083 - DNA, 15 bp, Homo sapiens
tgctgagccacttct

SEQ ID NO: 1238084 - DNA, 15 bp, Homo sapiens
ctgctgagccacttc

SEQ ID NO: 1238085 - DNA, 15 bp, Homo sapiens
cctgctgagccactt

SEQ ID NO: 1238086 - DNA, 15 bp, Homo sapiens
tcctgctgagccact

SEQ ID NO: 1238087 - DNA, 15 bp, Homo sapiens
ctcctgctgagccac

SEQ ID NO: 1238088 - DNA, 15 bp, Homo sapiens
actcctgctgagcca

SEQ ID NO: 1238089 - DNA, 15 bp, Homo sapiens
cactcctgctgagcc

SEQ ID NO: 1238090 - DNA, 15 bp, Homo sapiens
tcactcctgctgagc

SEQ ID NO: 1238091 - DNA, 15 bp, Homo sapiens
atcactcctgctgag

SEQ ID NO: 1238092 - DNA, 15 bp, Homo sapiens
aatcactcctgctga

SEQ ID NO: 1238093 - DNA, 15 bp, Homo sapiens
aaatcactcctgctg

SEQ ID NO: 1238094 - DNA, 15 bp, Homo sapiens
aaaatcactcctgct

SEQ ID NO: 1238095 - DNA, 15 bp, Homo sapiens
caaaatcactcctgc

SEQ ID NO: 1238096 - DNA, 15 bp, Homo sapiens
tcaaaatcactcctg

SEQ ID NO: 1238097 - DNA, 15 bp, Homo sapiens
ttcaaaatcactcct

SEQ ID NO: 1238098 - DNA, 15 bp, Homo sapiens
tttcaaaatcactcc

SEQ ID NO: 1238099 - DNA, 15 bp, Homo sapiens
gtttcaaaatcactc

SEQ ID NO: 1238100 - DNA, 15 bp, Homo sapiens
tgtttcaaaatcact

SEQ ID NO: 1238101 - DNA, 15 bp, Homo sapiens
atgtttcaaaatcac

SEQ ID NO: 1238102 - DNA, 15 bp, Homo sapiens
gatgtttcaaaatca

SEQ ID NO: 1238103 - DNA, 15 bp, Homo sapiens
tgatgtttcaaaatc

SEQ ID NO: 1238104 - DNA, 15 bp, Homo sapiens
ctgatgtttcaaaat

SEQ ID NO: 1238105 - DNA, 15 bp, Homo sapiens
cctgatgtttcaaaa

SEQ ID NO: 1238106 - DNA, 15 bp, Homo sapiens
gcctgatgtttcaaa

SEQ ID NO: 1238107 - DNA, 15 bp, Homo sapiens
tgcctgatgtttcaa

SEQ ID NO: 1238108 - DNA, 15 bp, Homo sapiens
ttgcctgatgtttca

SEQ ID NO: 1238109 - DNA, 15 bp, Homo sapiens
gttgcctgatgtttc

SEQ ID NO: 1238110 - DNA, 15 bp, Homo sapiens
tgttgcctgatgttt

SEQ ID NO: 1238111 - DNA, 15 bp, Homo sapiens
atgttgcctgatgtt

SEQ ID NO: 1238112 - DNA, 15 bp, Homo sapiens
tatgttgcctgatgt

SEQ ID NO: 1238113 - DNA, 15 bp, Homo sapiens
gtatgttgcctgatg

SEQ ID NO: 1238114 - DNA, 15 bp, Homo sapiens
agtatgttgcctgat

SEQ ID NO: 1238115 - DNA, 15 bp, Homo sapiens
tagtatgttgcctga

SEQ ID NO: 1238116 - DNA, 15 bp, Homo sapiens
gtagtatgttgcctg

SEQ ID NO: 1238117 - DNA, 15 bp, Homo sapiens
tgtagtatgttgcct

SEQ ID NO: 1238118 - DNA, 15 bp, Homo sapiens
ctgtagtatgttgcc

SEQ ID NO: 1238119 - DNA, 15 bp, Homo sapiens
actgtagtatgttgc

SEQ ID NO: 1238120 - DNA, 15 bp, Homo sapiens
cactgtagtatgttg

SEQ ID NO: 1238121 - DNA, 15 bp, Homo sapiens
ccactgtagtatgtt

SEQ ID NO: 1238122 - DNA, 15 bp, Homo sapiens
cccactgtagtatgt

SEQ ID NO: 1238123 - DNA, 15 bp, Homo sapiens
acccactgtagtatg

SEQ ID NO: 1238124 - DNA, 15 bp, Homo sapiens
cacccactgtagtat

SEQ ID NO: 1238125 - DNA, 15 bp, Homo sapiens
tcacccactgtagta

SEQ ID NO: 1238126 - DNA, 15 bp, Homo sapiens
ctcacccactgtagt

SEQ ID NO: 1238127 - DNA, 15 bp, Homo sapiens
tctcacccactgtag

SEQ ID NO: 1238128 - DNA, 15 bp, Homo sapiens
gtctcacccactgta

SEQ ID NO: 1238129 - DNA, 15 bp, Homo sapiens
cgtctcacccactgt

SEQ ID NO: 1238130 - DNA, 15 bp, Homo sapiens
ccgtctcacccactg

SEQ ID NO: 1238131 - DNA, 15 bp, Homo sapiens
accgtctcacccact

SEQ ID NO: 1238132 - DNA, 15 bp, Homo sapiens
gaccgtctcacccac

SEQ ID NO: 1238133 - DNA, 15 bp, Homo sapiens
tgaccgtctcaccca

SEQ ID NO: 1238134 - DNA, 15 bp, Homo sapiens
gtgaccgtctcaccc

SEQ ID NO: 1238135 - DNA, 15 bp, Homo sapiens
ggtgaccgtctcacc

SEQ ID NO: 1238136 - DNA, 15 bp, Homo sapiens
gggtgaccgtctcac

SEQ ID NO: 1238137 - DNA, 15 bp, Homo sapiens
tgggtgaccgtctca

SEQ ID NO: 1238138 - DNA, 15 bp, Homo sapiens
gtgggtgaccgtctc

SEQ ID NO: 1238139 - DNA, 15 bp, Homo sapiens
agtgggtgaccgtct

SEQ ID NO: 1238140 - DNA, 15 bp, Homo sapiens
cagtgggtgaccgtc

SEQ ID NO: 1238141 - DNA, 15 bp, Homo sapiens
tcagtgggtgaccgt

SEQ ID NO: 1238142 - DNA, 15 bp, Homo sapiens
gtcagtgggtgaccg

SEQ ID NO: 1238143 - DNA, 15 bp, Homo sapiens
ggtcagtgggtgacc

SEQ ID NO: 1238144 - DNA, 15 bp, Homo sapiens
tggtcagtgggtgac

SEQ ID NO: 1238145 - DNA, 15 bp, Homo sapiens
atggtcagtgggtga

SEQ ID NO: 1238146 - DNA, 15 bp, Homo sapiens
catggtcagtgggtg

SEQ ID NO: 1238147 - DNA, 15 bp, Homo sapiens
tcatggtcagtgggt

SEQ ID NO: 1238148 - DNA, 15 bp, Homo sapiens
ctcatggtcagtggg

SEQ ID NO: 1238149 - DNA, 15 bp, Homo sapiens
actcatggtcagtgg

SEQ ID NO: 1238150 - DNA, 15 bp, Homo sapiens
cactcatggtcagtg

SEQ ID NO: 1238151 - DNA, 15 bp, Homo sapiens
ccactcatggtcagt

SEQ ID NO: 1238152 - DNA, 15 bp, Homo sapiens
cccactcatggtcag

SEQ ID NO: 1238153 - DNA, 15 bp, Homo sapiens
acccactcatggtca

SEQ ID NO: 1238154 - DNA, 15 bp, Homo sapiens
cacccactcatggtc

SEQ ID NO: 1238155 - DNA, 15 bp, Homo sapiens
tcacccactcatggt

SEQ ID NO: 1238156 - DNA, 15 bp, Homo sapiens
ctcacccactcatgg

SEQ ID NO: 1238157 - DNA, 15 bp, Homo sapiens
actcacccactcatg

SEQ ID NO: 1238158 - DNA, 15 bp, Homo sapiens
gactcacccactcat

SEQ ID NO: 1238159 - DNA, 15 bp, Homo sapiens
tgactcacccactca

SEQ ID NO: 1238160 - DNA, 15 bp, Homo sapiens
ctgactcacccactc

SEQ ID NO: 1238161 - DNA, 15 bp, Homo sapiens
tctgactcacccact

SEQ ID NO: 1238162 - DNA, 15 bp, Homo sapiens
ctctgactcacccac

SEQ ID NO: 1238163 - DNA, 15 bp, Homo sapiens
gctctgactcaccca

SEQ ID NO: 1238164 - DNA, 15 bp, Homo sapiens
tgctctgactcaccc

SEQ ID NO: 1238165 - DNA, 15 bp, Homo sapiens
ctgctctgactcacc

SEQ ID NO: 1238166 - DNA, 15 bp, Homo sapiens
actgctctgactcac

SEQ ID NO: 1238167 - DNA, 15 bp, Homo sapiens
gactgctctgactca

SEQ ID NO: 1238168 - DNA, 15 bp, Homo sapiens
agactgctctgactc

SEQ ID NO: 1238169 - DNA, 15 bp, Homo sapiens
aagactgctctgact

SEQ ID NO: 1238170 - DNA, 15 bp, Homo sapiens
aaagactgctctgac

SEQ ID NO: 1238171 - DNA, 15 bp, Homo sapiens
aaaagactgctctga

SEQ ID NO: 1238172 - DNA, 15 bp, Homo sapiens
aaaaagactgctctg

SEQ ID NO: 1238173 - DNA, 15 bp, Homo sapiens
aaaaaagactgctct

SEQ ID NO: 1238174 - DNA, 15 bp, Homo sapiens
aaaaaaagactgctc

SEQ ID NO: 1238175 - DNA, 15 bp, Homo sapiens
aaaaaaaagactgct

SEQ ID NO: 1238176 - DNA, 15 bp, Homo sapiens
aaaaaaaaagactgc

SEQ ID NO: 1238177 - DNA, 15 bp, Homo sapiens
aaaaaaaaaagactg

SEQ ID NO: 1238178 - DNA, 15 bp, Homo sapiens
aaaaaaaaaaagact

SEQ ID NO: 1238179 - DNA, 15 bp, Homo sapiens
aagcaagactccatc

SEQ ID NO: 1238180 - DNA, 15 bp, Homo sapiens
aaagcaagactccat

SEQ ID NO: 1238181 - DNA, 15 bp, Homo sapiens
taaagcaagactcca

SEQ ID NO: 1238182 - DNA, 15 bp, Homo sapiens
ataaagcaagactcc

SEQ ID NO: 1238183 - DNA, 15 bp, Homo sapiens
gataaagcaagactc

SEQ ID NO: 1238184 - DNA, 15 bp, Homo sapiens
tgataaagcaagact

SEQ ID NO: 1238185 - DNA, 15 bp, Homo sapiens
gtgataaagcaagac

SEQ ID NO: 1238186 - DNA, 15 bp, Homo sapiens
ggtgataaagcaaga

SEQ ID NO: 1238187 - DNA, 15 bp, Homo sapiens
gggtgataaagcaag

SEQ ID NO: 1238188 - DNA, 15 bp, Homo sapiens
tgggtgataaagcaa

SEQ ID NO: 1238189 - DNA, 15 bp, Homo sapiens
ctgggtgataaagca

SEQ ID NO: 1238190 - DNA, 15 bp, Homo sapiens
cctgggtgataaagc

SEQ ID NO: 1238191 - DNA, 15 bp, Homo sapiens
acctgggtgataaag

SEQ ID NO: 1238192 - DNA, 15 bp, Homo sapiens
aacctgggtgataaa

SEQ ID NO: 1238193 - DNA, 15 bp, Homo sapiens
caacctgggtgataa

SEQ ID NO: 1238194 - DNA, 15 bp, Homo sapiens
ccaacctgggtgata

SEQ ID NO: 1238195 - DNA, 15 bp, Homo sapiens
tccaacctgggtgat

SEQ ID NO: 1238196 - DNA, 15 bp, Homo sapiens
ctccaacctgggtga

SEQ ID NO: 1238197 - DNA, 15 bp, Homo sapiens
actccaacctgggtg

SEQ ID NO: 1238198 - DNA, 15 bp, Homo sapiens
cactccaacctgggt

SEQ ID NO: 1238199 - DNA, 15 bp, Homo sapiens
gcactccaacctggg

SEQ ID NO: 1238200 - DNA, 15 bp, Homo sapiens
ggcactccaacctgg

SEQ ID NO: 1238201 - DNA, 15 bp, Homo sapiens
cggcactccaacctg

SEQ ID NO: 1238202 - DNA, 15 bp, Homo sapiens
acggcactccaacct

SEQ ID NO: 1238203 - DNA, 15 bp, Homo sapiens
cacggcactccaacc

SEQ ID NO: 1238204 - DNA, 15 bp, Homo sapiens
ccacggcactccaac

SEQ ID NO: 1238205 - DNA, 15 bp, Homo sapiens
gccacggcactccaa

SEQ ID NO: 1238206 - DNA, 15 bp, Homo sapiens
tgccacggcactcca

SEQ ID NO: 1238207 - DNA, 15 bp, Homo sapiens
gtgccacggcactcc

SEQ ID NO: 1238208 - DNA, 15 bp, Homo sapiens
cgtgccacggcactc

SEQ ID NO: 1238209 - DNA, 15 bp, Homo sapiens
tcgtgccacggcact

SEQ ID NO: 1238210 - DNA, 15 bp, Homo sapiens
atcgtgccacggcac

SEQ ID NO: 1238211 - DNA, 15 bp, Homo sapiens
gatcgtgccacggca

SEQ ID NO: 1238212 - DNA, 15 bp, Homo sapiens
agatcgtgccacggc

SEQ ID NO: 1238213 - DNA, 15 bp, Homo sapiens
aagatcgtgccacgg

SEQ ID NO: 1238214 - DNA, 15 bp, Homo sapiens
caagatcgtgccacg

SEQ ID NO: 1238215 - DNA, 15 bp, Homo sapiens
aggagatggaggttg

SEQ ID NO: 1238216 - DNA, 15 bp, Homo sapiens
caggagatggaggtt

SEQ ID NO: 1238217 - DNA, 15 bp, Homo sapiens
ccaggagatggaggt

SEQ ID NO: 1238218 - DNA, 15 bp, Homo sapiens
cccaggagatggagg

SEQ ID NO: 1238219 - DNA, 15 bp, Homo sapiens
acccaggagatggag

SEQ ID NO: 1238220 - DNA, 15 bp, Homo sapiens
aacccaggagatgga

SEQ ID NO: 1238221 - DNA, 15 bp, Homo sapiens
gaacccaggagatgg

SEQ ID NO: 1238222 - DNA, 15 bp, Homo sapiens
tgaacccaggagatg

SEQ ID NO: 1238223 - DNA, 15 bp, Homo sapiens
atgaacccaggagat

SEQ ID NO: 1238224 - DNA, 15 bp, Homo sapiens
catgaacccaggaga

SEQ ID NO: 1238225 - DNA, 15 bp, Homo sapiens
tgcatgaacccagga

SEQ ID NO: 1238226 - DNA, 15 bp, Homo sapiens
ttgcatgaacccagg

SEQ ID NO: 1238227 - DNA, 15 bp, Homo sapiens
attgcatgaacccag

SEQ ID NO: 1238228 - DNA, 15 bp, Homo sapiens
aattgcatgaaccca

SEQ ID NO: 1238229 - DNA, 15 bp, Homo sapiens
gaattgcatgaaccc

SEQ ID NO: 1238230 - DNA, 15 bp, Homo sapiens
agaattgcatgaacc

SEQ ID NO: 1238231 - DNA, 15 bp, Homo sapiens
gagaattgcatgaac

SEQ ID NO: 1238232 - DNA, 15 bp, Homo sapiens
ggagaattgcatgaa

SEQ ID NO: 1238233 - DNA, 15 bp, Homo sapiens
aggagaattgcatga

SEQ ID NO: 1238234 - DNA, 15 bp, Homo sapiens
caggagaattgcatg

SEQ ID NO: 1238235 - DNA, 15 bp, Homo sapiens
gcaggagaattgcat

SEQ ID NO: 1238236 - DNA, 15 bp, Homo sapiens
ggcaggagaattgca

SEQ ID NO: 1238237 - DNA, 15 bp, Homo sapiens
agcgcatgcctgtaa

SEQ ID NO: 1238238 - DNA, 15 bp, Homo sapiens
tagcgcatgcctgta

SEQ ID NO: 1238239 - DNA, 15 bp, Homo sapiens
gtagcgcatgcctgt

SEQ ID NO: 1238240 - DNA, 15 bp, Homo sapiens
ggtagcgcatgcctg

SEQ ID NO: 1238241 - DNA, 15 bp, Homo sapiens
tggtagcgcatgcct

SEQ ID NO: 1238242 - DNA, 15 bp, Homo sapiens
gtggtagcgcatgcc

SEQ ID NO: 1238243 - DNA, 15 bp, Homo sapiens
cgtggtagcgcatgc

SEQ ID NO: 1238244 - DNA, 15 bp, Homo sapiens
gcgtggtagcgcatg

SEQ ID NO: 1238245 - DNA, 15 bp, Homo sapiens
ggcgtggtagcgcat

SEQ ID NO: 1238246 - DNA, 15 bp, Homo sapiens
aggcgtggtagcgca

SEQ ID NO: 1238247 - DNA, 15 bp, Homo sapiens
caggcgtggtagcgc

SEQ ID NO: 1238248 - DNA, 15 bp, Homo sapiens
ccaggcgtggtagcg

SEQ ID NO: 1238249 - DNA, 15 bp, Homo sapiens
gccaggcgtggtagc

SEQ ID NO: 1238250 - DNA, 15 bp, Homo sapiens
agccaggcgtggtag

SEQ ID NO: 1238251 - DNA, 15 bp, Homo sapiens
tagccaggcgtggta

SEQ ID NO: 1238252 - DNA, 15 bp, Homo sapiens
gtggtgaaaccctgt

SEQ ID NO: 1238253 - DNA, 15 bp, Homo sapiens
tgtggtgaaaccctg

SEQ ID NO: 1238254 - DNA, 15 bp, Homo sapiens
atgtggtgaaaccct

SEQ ID NO: 1238255 - DNA, 15 bp, Homo sapiens
aatgtggtgaaaccc

SEQ ID NO: 1238256 - DNA, 15 bp, Homo sapiens
caatgtggtgaaacc

SEQ ID NO: 1238257 - DNA, 15 bp, Homo sapiens
ccaatgtggtgaaac

SEQ ID NO: 1238258 - DNA, 15 bp, Homo sapiens
accaatgtggtgaaa

SEQ ID NO: 1238259 - DNA, 15 bp, Homo sapiens
gaccaatgtggtgaa

SEQ ID NO: 1238260 - DNA, 15 bp, Homo sapiens
tgaccaatgtggtga

SEQ ID NO: 1238261 - DNA, 15 bp, Homo sapiens
ctgaccaatgtggtg

SEQ ID NO: 1238262 - DNA, 15 bp, Homo sapiens
cctgaccaatgtggt

SEQ ID NO: 1238263 - DNA, 15 bp, Homo sapiens
gcctgaccaatgtgg

SEQ ID NO: 1238264 - DNA, 15 bp, Homo sapiens
agcctgaccaatgtg

SEQ ID NO: 1238265 - DNA, 15 bp, Homo sapiens
cagcctgaccaatgt

SEQ ID NO: 1238266 - DNA, 15 bp, Homo sapiens
ccagcctgaccaatg

SEQ ID NO: 1238267 - DNA, 15 bp, Homo sapiens
ccttgaggtcaggag

SEQ ID NO: 1238268 - DNA, 15 bp, Homo sapiens
cccttgaggtcagga

SEQ ID NO: 1238269 - DNA, 15 bp, Homo sapiens
tcccttgaggtcagg

SEQ ID NO: 1238270 - DNA, 15 bp, Homo sapiens
atcccttgaggtcag

SEQ ID NO: 1238271 - DNA, 15 bp, Homo sapiens
gatcccttgaggtca

SEQ ID NO: 1238272 - DNA, 15 bp, Homo sapiens
ggatcccttgaggtc

SEQ ID NO: 1238273 - DNA, 15 bp, Homo sapiens
tggatcccttgaggt

SEQ ID NO: 1238274 - DNA, 15 bp, Homo sapiens
gtggatcccttgagg

SEQ ID NO: 1238275 - DNA, 15 bp, Homo sapiens
gggtggatcccttga

SEQ ID NO: 1238276 - DNA, 15 bp, Homo sapiens
tgggtggatcccttg

SEQ ID NO: 1238277 - DNA, 15 bp, Homo sapiens
gtgggtggatccctt

SEQ ID NO: 1238278 - DNA, 15 bp, Homo sapiens
ggtgggtggatccct

SEQ ID NO: 1238279 - DNA, 15 bp, Homo sapiens
aggtgggtggatccc

SEQ ID NO: 1238280 - DNA, 15 bp, Homo sapiens
gaggtgggtggatcc

SEQ ID NO: 1238281 - DNA, 15 bp, Homo sapiens
gtggtggctcacacc

SEQ ID NO: 1238282 - DNA, 15 bp, Homo sapiens
cgtggtggctcacac

SEQ ID NO: 1238283 - DNA, 15 bp, Homo sapiens
gcgtggtggctcaca

SEQ ID NO: 1238284 - DNA, 15 bp, Homo sapiens
tgggcgtggtggctc

SEQ ID NO: 1238285 - DNA, 15 bp, Homo sapiens
ctgggcgtggtggct

SEQ ID NO: 1238286 - DNA, 15 bp, Homo sapiens
ggctgggcgtggtgg

SEQ ID NO: 1238287 - DNA, 15 bp, Homo sapiens
tggctgggcgtggtg

SEQ ID NO: 1238288 - DNA, 15 bp, Homo sapiens
ctggctgggcgtggt

SEQ ID NO: 1238289 - DNA, 15 bp, Homo sapiens
actggctgggcgtgg

SEQ ID NO: 1238290 - DNA, 15 bp, Homo sapiens
gactggctgggcgtg

SEQ ID NO: 1238291 - DNA, 15 bp, Homo sapiens
tgactggctgggcgt

SEQ ID NO: 1238292 - DNA, 15 bp, Homo sapiens
ctgactggctgggcg

SEQ ID NO: 1238293 - DNA, 15 bp, Homo sapiens
gctgactggctgggc

SEQ ID NO: 1238294 - DNA, 15 bp, Homo sapiens
cgctgactggctggg

SEQ ID NO: 1238295 - DNA, 15 bp, Homo sapiens
gcgctgactggctgg

SEQ ID NO: 1238296 - DNA, 15 bp, Homo sapiens
tgcgctgactggctg

SEQ ID NO: 1238297 - DNA, 15 bp, Homo sapiens
ttgcgctgactggct

SEQ ID NO: 1238298 - DNA, 15 bp, Homo sapiens
attgcgctgactggc

SEQ ID NO: 1238299 - DNA, 15 bp, Homo sapiens
aattgcgctgactgg

SEQ ID NO: 1238300 - DNA, 15 bp, Homo sapiens
aaattgcgctgactg

SEQ ID NO: 1238301 - DNA, 15 bp, Homo sapiens
aaaattgcgctgact

SEQ ID NO: 1238302 - DNA, 15 bp, Homo sapiens
taaaattgcgctgac

SEQ ID NO: 1238303 - DNA, 15 bp, Homo sapiens
ttaaaattgcgctga

SEQ ID NO: 1238304 - DNA, 15 bp, Homo sapiens
gttaaaattgcgctg

SEQ ID NO: 1238305 - DNA, 15 bp, Homo sapiens
agttaaaattgcgct

SEQ ID NO: 1238306 - DNA, 15 bp, Homo sapiens
cagttaaaattgcgc

SEQ ID NO: 1238307 - DNA, 15 bp, Homo sapiens
tcagttaaaattgcg

SEQ ID NO: 1238308 - DNA, 15 bp, Homo sapiens
ctcagttaaaattgc

SEQ ID NO: 1238309 - DNA, 15 bp, Homo sapiens
tctcagttaaaattg

SEQ ID NO: 1238310 - DNA, 15 bp, Homo sapiens
atctcagttaaaatt

SEQ ID NO: 1238311 - DNA, 15 bp, Homo sapiens
aatctcagttaaaat

SEQ ID NO: 1238312 - DNA, 15 bp, Homo sapiens
aaatctcagttaaaa

SEQ ID NO: 1238313 - DNA, 15 bp, Homo sapiens
aaaatctcagttaaa

SEQ ID NO: 1238314 - DNA, 15 bp, Homo sapiens
gaaaatctcagttaa

SEQ ID NO: 1238315 - DNA, 15 bp, Homo sapiens
agaaaatctcagtta

SEQ ID NO: 1238316 - DNA, 15 bp, Homo sapiens
aagaaaatctcagtt

SEQ ID NO: 1238317 - DNA, 15 bp, Homo sapiens
aaagaaaatctcagt

SEQ ID NO: 1238318 - DNA, 15 bp, Homo sapiens
aaaagaaaatctcag

SEQ ID NO: 1238319 - DNA, 15 bp, Homo sapiens
caaaagaaaatctca

SEQ ID NO: 1238320 - DNA, 15 bp, Homo sapiens
acaaaagaaaatctc

SEQ ID NO: 1238321 - DNA, 15 bp, Homo sapiens
tacaaaagaaaatct

SEQ ID NO: 1238322 - DNA, 15 bp, Homo sapiens
atacaaaagaaaatc

SEQ ID NO: 1238323 - DNA, 15 bp, Homo sapiens
aatacaaaagaaaat

SEQ ID NO: 1238324 - DNA, 15 bp, Homo sapiens
taatacaaaagaaaa

SEQ ID NO: 1238325 - DNA, 15 bp, Homo sapiens
ttaatacaaaagaaa

SEQ ID NO: 1238326 - DNA, 15 bp, Homo sapiens
tttaatacaaaagaa

SEQ ID NO: 1238327 - DNA, 15 bp, Homo sapiens
ttttaatacaaaaga

SEQ ID NO: 1238328 - DNA, 15 bp, Homo sapiens
tttttaatacaaaag

SEQ ID NO: 1238329 - DNA, 15 bp, Homo sapiens
ttttttaatacaaaa

SEQ ID NO: 1238330 - DNA, 15 bp, Homo sapiens
attttttaatacaaa

SEQ ID NO: 1238331 - DNA, 15 bp, Homo sapiens
cattttttaatacaa

SEQ ID NO: 1238332 - DNA, 15 bp, Homo sapiens
acattttttaataca

SEQ ID NO: 1238333 - DNA, 15 bp, Homo sapiens
aacattttttaatac

SEQ ID NO: 1238334 - DNA, 15 bp, Homo sapiens
aaacattttttaata

SEQ ID NO: 1238335 - DNA, 15 bp, Homo sapiens
aaaacattttttaat

SEQ ID NO: 1238336 - DNA, 15 bp, Homo sapiens
taaaacattttttaa

SEQ ID NO: 1238337 - DNA, 15 bp, Homo sapiens
ttaaaacatttttta

SEQ ID NO: 1238338 - DNA, 15 bp, Homo sapiens
cttaaaacatttttt

SEQ ID NO: 1238339 - DNA, 15 bp, Homo sapiens
tcttaaaacattttt

SEQ ID NO: 1238340 - DNA, 15 bp, Homo sapiens
atcttaaaacatttt

SEQ ID NO: 1238341 - DNA, 15 bp, Homo sapiens
catcttaaaacattt

SEQ ID NO: 1238342 - DNA, 15 bp, Homo sapiens
ccatcttaaaacatt

SEQ ID NO: 1238343 - DNA, 15 bp, Homo sapiens
cccatcttaaaacat

SEQ ID NO: 1238344 - DNA, 15 bp, Homo sapiens
ccccatcttaaaaca

SEQ ID NO: 1238345 - DNA, 15 bp, Homo sapiens
accccatcttaaaac

SEQ ID NO: 1238346 - DNA, 15 bp, Homo sapiens
gaccccatcttaaaa

SEQ ID NO: 1238347 - DNA, 15 bp, Homo sapiens
agaccccatcttaaa

SEQ ID NO: 1238348 - DNA, 15 bp, Homo sapiens
aagaccccatcttaa

SEQ ID NO: 1238349 - DNA, 15 bp, Homo sapiens
caagaccccatctta

SEQ ID NO: 1238350 - DNA, 15 bp, Homo sapiens
gcaagaccccatctt

SEQ ID NO: 1238351 - DNA, 15 bp, Homo sapiens
cagcaagaccccatc

SEQ ID NO: 1238352 - DNA, 15 bp, Homo sapiens
acagcaagaccccat

SEQ ID NO: 1238353 - DNA, 15 bp, Homo sapiens
tacagcaagacccca

SEQ ID NO: 1238354 - DNA, 15 bp, Homo sapiens
atacagcaagacccc

SEQ ID NO: 1238355 - DNA, 15 bp, Homo sapiens
aatacagcaagaccc

SEQ ID NO: 1238356 - DNA, 15 bp, Homo sapiens
caatacagcaagacc

SEQ ID NO: 1238357 - DNA, 15 bp, Homo sapiens
ccaatacagcaagac

SEQ ID NO: 1238358 - DNA, 15 bp, Homo sapiens
gccaatacagcaaga

SEQ ID NO: 1238359 - DNA, 15 bp, Homo sapiens
ggccaatacagcaag

SEQ ID NO: 1238360 - DNA, 15 bp, Homo sapiens
tggccaatacagcaa

SEQ ID NO: 1238361 - DNA, 15 bp, Homo sapiens
ctggccaatacagca

SEQ ID NO: 1238362 - DNA, 15 bp, Homo sapiens
cctggccaatacagc

SEQ ID NO: 1238363 - DNA, 15 bp, Homo sapiens
gcctggccaatacag

SEQ ID NO: 1238364 - DNA, 15 bp, Homo sapiens
agcctggccaataca

SEQ ID NO: 1238365 - DNA, 15 bp, Homo sapiens
cagcctggccaatac

SEQ ID NO: 1238366 - DNA, 15 bp, Homo sapiens
ccaagaccagcctgg

SEQ ID NO: 1238367 - DNA, 15 bp, Homo sapiens
tccaagaccagcctg

SEQ ID NO: 1238368 - DNA, 15 bp, Homo sapiens
ttccaagaccagcct

SEQ ID NO: 1238369 - DNA, 15 bp, Homo sapiens
gttccaagaccagcc

SEQ ID NO: 1238370 - DNA, 15 bp, Homo sapiens
agttccaagaccagc

SEQ ID NO: 1238371 - DNA, 15 bp, Homo sapiens
gagttccaagaccag

SEQ ID NO: 1238372 - DNA, 15 bp, Homo sapiens
ggagttccaagacca

SEQ ID NO: 1238373 - DNA, 15 bp, Homo sapiens
aggagttccaagacc

SEQ ID NO: 1238374 - DNA, 15 bp, Homo sapiens
caggagttccaagac

SEQ ID NO: 1238375 - DNA, 15 bp, Homo sapiens
ccaggagttccaaga

SEQ ID NO: 1238376 - DNA, 15 bp, Homo sapiens
gccaggagttccaag

SEQ ID NO: 1238377 - DNA, 15 bp, Homo sapiens
agccaggagttccaa

SEQ ID NO: 1238378 - DNA, 15 bp, Homo sapiens
aagccaggagttcca

SEQ ID NO: 1238379 - DNA, 15 bp, Homo sapiens
gaagccaggagttcc

SEQ ID NO: 1238380 - DNA, 15 bp, Homo sapiens
tgaagccaggagttc

SEQ ID NO: 1238381 - DNA, 15 bp, Homo sapiens
ttgaagccaggagtt

SEQ ID NO: 1238382 - DNA, 15 bp, Homo sapiens
cttgaagccaggagt

SEQ ID NO: 1238383 - DNA, 15 bp, Homo sapiens
gcttgaagccaggag

SEQ ID NO: 1238384 - DNA, 15 bp, Homo sapiens
tgcttgaagccagga

SEQ ID NO: 1238385 - DNA, 15 bp, Homo sapiens
ttgcttgaagccagg

SEQ ID NO: 1238386 - DNA, 15 bp, Homo sapiens
attgcttgaagccag

SEQ ID NO: 1238387 - DNA, 15 bp, Homo sapiens
gattgcttgaagcca

SEQ ID NO: 1238388 - DNA, 15 bp, Homo sapiens
ggattgcttgaagcc

SEQ ID NO: 1238389 - DNA, 15 bp, Homo sapiens
aggattgcttgaagc

SEQ ID NO: 1238390 - DNA, 15 bp, Homo sapiens
gaggattgcttgaag

SEQ ID NO: 1238391 - DNA, 15 bp, Homo sapiens
aaggtgggaggattg

SEQ ID NO: 1238392 - DNA, 15 bp, Homo sapiens
caaggtgggaggatt

SEQ ID NO: 1238393 - DNA, 15 bp, Homo sapiens
tcaaggtgggaggat

SEQ ID NO: 1238394 - DNA, 15 bp, Homo sapiens
gtcaaggtgggagga

SEQ ID NO: 1238395 - DNA, 15 bp, Homo sapiens
ggtcaaggtgggagg

SEQ ID NO: 1238396 - DNA, 15 bp, Homo sapiens
aggtcaaggtgggag

SEQ ID NO: 1238397 - DNA, 15 bp, Homo sapiens
aaggtcaaggtggga

SEQ ID NO: 1238398 - DNA, 15 bp, Homo sapiens
gaaggtcaaggtggg

SEQ ID NO: 1238399 - DNA, 15 bp, Homo sapiens
ggaaggtcaaggtgg

SEQ ID NO: 1238400 - DNA, 15 bp, Homo sapiens
tggaaggtcaaggtg

SEQ ID NO: 1238401 - DNA, 15 bp, Homo sapiens
ttggaaggtcaaggt

SEQ ID NO: 1238402 - DNA, 15 bp, Homo sapiens
tttggaaggtcaagg

SEQ ID NO: 1238403 - DNA, 15 bp, Homo sapiens
ctttggaaggtcaag

SEQ ID NO: 1238404 - DNA, 15 bp, Homo sapiens
actttggaaggtcaa

SEQ ID NO: 1238405 - DNA, 15 bp, Homo sapiens
cactttggaaggtca

SEQ ID NO: 1238406 - DNA, 15 bp, Homo sapiens
gcactttggaaggtc

SEQ ID NO: 1238407 - DNA, 15 bp, Homo sapiens
agcactttggaaggt

SEQ ID NO: 1238408 - DNA, 15 bp, Homo sapiens
catcccagcactttg

SEQ ID NO: 1238409 - DNA, 15 bp, Homo sapiens
aggtggctcacgcct

SEQ ID NO: 1238410 - DNA, 15 bp, Homo sapiens
gaggtggctcacgcc

SEQ ID NO: 1238411 - DNA, 15 bp, Homo sapiens
cgaggtggctcacgc

SEQ ID NO: 1238412 - DNA, 15 bp, Homo sapiens
gcgaggtggctcacg

SEQ ID NO: 1238413 - DNA, 15 bp, Homo sapiens
ggcgaggtggctcac

SEQ ID NO: 1238414 - DNA, 15 bp, Homo sapiens
aggcgaggtggctca

SEQ ID NO: 1238415 - DNA, 15 bp, Homo sapiens
caggcgaggtggctc

SEQ ID NO: 1238416 - DNA, 15 bp, Homo sapiens
ccaggcgaggtggct

SEQ ID NO: 1238417 - DNA, 15 bp, Homo sapiens
gccaggcgaggtggc

SEQ ID NO: 1238418 - DNA, 15 bp, Homo sapiens
ggccaggcgaggtgg

SEQ ID NO: 1238419 - DNA, 15 bp, Homo sapiens
tggccaggcgaggtg

SEQ ID NO: 1238420 - DNA, 15 bp, Homo sapiens
ctggccaggcgaggt

SEQ ID NO: 1238421 - DNA, 15 bp, Homo sapiens
cctggccaggcgagg

SEQ ID NO: 1238422 - DNA, 15 bp, Homo sapiens
ccctggccaggcgag

SEQ ID NO: 1238423 - DNA, 15 bp, Homo sapiens
tccctggccaggcga

SEQ ID NO: 1238424 - DNA, 15 bp, Homo sapiens
ttccctggccaggcg

SEQ ID NO: 1238425 - DNA, 15 bp, Homo sapiens
tttccctggccaggc

SEQ ID NO: 1238426 - DNA, 15 bp, Homo sapiens
gtttccctggccagg

SEQ ID NO: 1238427 - DNA, 15 bp, Homo sapiens
tgtttccctggccag

SEQ ID NO: 1238428 - DNA, 15 bp, Homo sapiens
ctgtttccctggcca

SEQ ID NO: 1238429 - DNA, 15 bp, Homo sapiens
gctgtttccctggcc

SEQ ID NO: 1238430 - DNA, 15 bp, Homo sapiens
agctgtttccctggc

SEQ ID NO: 1238431 - DNA, 15 bp, Homo sapiens
aagctgtttccctgg

SEQ ID NO: 1238432 - DNA, 15 bp, Homo sapiens
aaagctgtttccctg

SEQ ID NO: 1238433 - DNA, 15 bp, Homo sapiens
aaaagctgtttccct

SEQ ID NO: 1238434 - DNA, 15 bp, Homo sapiens
gaaaagctgtttccc

SEQ ID NO: 1238435 - DNA, 15 bp, Homo sapiens
tgaaaagctgtttcc

SEQ ID NO: 1238436 - DNA, 15 bp, Homo sapiens
ctgaaaagctgtttc

SEQ ID NO: 1238437 - DNA, 15 bp, Homo sapiens
gctgaaaagctgttt

SEQ ID NO: 1238438 - DNA, 15 bp, Homo sapiens
ggctgaaaagctgtt

SEQ ID NO: 1238439 - DNA, 15 bp, Homo sapiens
aggctgaaaagctgt

SEQ ID NO: 1238440 - DNA, 15 bp, Homo sapiens
caggctgaaaagctg

SEQ ID NO: 1238441 - DNA, 15 bp, Homo sapiens
gcaggctgaaaagct

SEQ ID NO: 1238442 - DNA, 15 bp, Homo sapiens
tgcaggctgaaaagc

SEQ ID NO: 1238443 - DNA, 15 bp, Homo sapiens
ttgcaggctgaaaag

SEQ ID NO: 1238444 - DNA, 15 bp, Homo sapiens
cttgcaggctgaaaa

SEQ ID NO: 1238445 - DNA, 15 bp, Homo sapiens
acttgcaggctgaaa

SEQ ID NO: 1238446 - DNA, 15 bp, Homo sapiens
tacttgcaggctgaa

SEQ ID NO: 1238447 - DNA, 15 bp, Homo sapiens
ctacttgcaggctga

SEQ ID NO: 1238448 - DNA, 15 bp, Homo sapiens
actacttgcaggctg

SEQ ID NO: 1238449 - DNA, 15 bp, Homo sapiens
cactacttgcaggct

SEQ ID NO: 1238450 - DNA, 15 bp, Homo sapiens
gcactacttgcaggc

SEQ ID NO: 1238451 - DNA, 15 bp, Homo sapiens
tgcactacttgcagg

SEQ ID NO: 1238452 - DNA, 15 bp, Homo sapiens
ctgcactacttgcag

SEQ ID NO: 1238453 - DNA, 15 bp, Homo sapiens
actgcactacttgca

SEQ ID NO: 1238454 - DNA, 15 bp, Homo sapiens
gactgcactacttgc

SEQ ID NO: 1238455 - DNA, 15 bp, Homo sapiens
cgactgcactacttg

SEQ ID NO: 1238456 - DNA, 15 bp, Homo sapiens
ccgactgcactactt

SEQ ID NO: 1238457 - DNA, 15 bp, Homo sapiens
cccgactgcactact

SEQ ID NO: 1238458 - DNA, 15 bp, Homo sapiens
tcccgactgcactac

SEQ ID NO: 1238459 - DNA, 15 bp, Homo sapiens
gtcccgactgcacta

SEQ ID NO: 1238460 - DNA, 15 bp, Homo sapiens
agtcccgactgcact

SEQ ID NO: 1238461 - DNA, 15 bp, Homo sapiens
gagtcccgactgcac

SEQ ID NO: 1238462 - DNA, 15 bp, Homo sapiens
cgagtcccgactgca

SEQ ID NO: 1238463 - DNA, 15 bp, Homo sapiens
acgagtcccgactgc

SEQ ID NO: 1238464 - DNA, 15 bp, Homo sapiens
cacgagtcccgactg

SEQ ID NO: 1238465 - DNA, 15 bp, Homo sapiens
tcacgagtcccgact

SEQ ID NO: 1238466 - DNA, 15 bp, Homo sapiens
ttcacgagtcccgac

SEQ ID NO: 1238467 - DNA, 15 bp, Homo sapiens
tttcacgagtcccga

SEQ ID NO: 1238468 - DNA, 15 bp, Homo sapiens
ctttcacgagtcccg

SEQ ID NO: 1238469 - DNA, 15 bp, Homo sapiens
cctttcacgagtccc

SEQ ID NO: 1238470 - DNA, 15 bp, Homo sapiens
tcctttcacgagtcc

SEQ ID NO: 1238471 - DNA, 15 bp, Homo sapiens
ttcctttcacgagtc

SEQ ID NO: 1238472 - DNA, 15 bp, Homo sapiens
gttcctttcacgagt

SEQ ID NO: 1238473 - DNA, 15 bp, Homo sapiens
agttcctttcacgag

SEQ ID NO: 1238474 - DNA, 15 bp, Homo sapiens
aagttcctttcacga

SEQ ID NO: 1238475 - DNA, 15 bp, Homo sapiens
caagttcctttcacg

SEQ ID NO: 1238476 - DNA, 15 bp, Homo sapiens
tcaagttcctttcac

SEQ ID NO: 1238477 - DNA, 15 bp, Homo sapiens
ctcaagttcctttca

SEQ ID NO: 1238478 - DNA, 15 bp, Homo sapiens
cctcaagttcctttc

SEQ ID NO: 1238479 - DNA, 15 bp, Homo sapiens
ccctcaagttccttt

SEQ ID NO: 1238480 - DNA, 15 bp, Homo sapiens
tccctcaagttcctt

SEQ ID NO: 1238481 - DNA, 15 bp, Homo sapiens
ctccctcaagttcct

SEQ ID NO: 1238482 - DNA, 15 bp, Homo sapiens
cctccctcaagttcc

SEQ ID NO: 1238483 - DNA, 15 bp, Homo sapiens
tcctccctcaagttc

SEQ ID NO: 1238484 - DNA, 15 bp, Homo sapiens
atcctccctcaagtt

SEQ ID NO: 1238485 - DNA, 15 bp, Homo sapiens
catcctccctcaagt

SEQ ID NO: 1238486 - DNA, 15 bp, Homo sapiens
ccatcctccctcaag

SEQ ID NO: 1238487 - DNA, 15 bp, Homo sapiens
accatcctccctcaa

SEQ ID NO: 1238488 - DNA, 15 bp, Homo sapiens
gaccatcctccctca

SEQ ID NO: 1238489 - DNA, 15 bp, Homo sapiens
ggaccatcctccctc

SEQ ID NO: 1238490 - DNA, 15 bp, Homo sapiens
gggaccatcctccct

SEQ ID NO: 1238491 - DNA, 15 bp, Homo sapiens
ggggaccatcctccc

SEQ ID NO: 1238492 - DNA, 15 bp, Homo sapiens
aggggaccatcctcc

SEQ ID NO: 1238493 - DNA, 15 bp, Homo sapiens
caggggaccatcctc

SEQ ID NO: 1238494 - DNA, 15 bp, Homo sapiens
ccaggggaccatcct

SEQ ID NO: 1238495 - DNA, 15 bp, Homo sapiens
accaggggaccatcc

SEQ ID NO: 1238496 - DNA, 15 bp, Homo sapiens
aaccaggggaccatc

SEQ ID NO: 1238497 - DNA, 15 bp, Homo sapiens
caaccaggggaccat

SEQ ID NO: 1238498 - DNA, 15 bp, Homo sapiens
gcaaccaggggacca

SEQ ID NO: 1238499 - DNA, 15 bp, Homo sapiens
tgcaaccaggggacc

SEQ ID NO: 1238500 - DNA, 15 bp, Homo sapiens
atgcaaccaggggac

SEQ ID NO: 1238501 - DNA, 15 bp, Homo sapiens
tatgcaaccagggga

SEQ ID NO: 1238502 - DNA, 15 bp, Homo sapiens
ttatgcaaccagggg

SEQ ID NO: 1238503 - DNA, 15 bp, Homo sapiens
cttatgcaaccaggg

SEQ ID NO: 1238504 - DNA, 15 bp, Homo sapiens
ccttatgcaaccagg

SEQ ID NO: 1238505 - DNA, 15 bp, Homo sapiens
gccttatgcaaccag

SEQ ID NO: 1238506 - DNA, 15 bp, Homo sapiens
agccttatgcaacca

SEQ ID NO: 1238507 - DNA, 15 bp, Homo sapiens
aagccttatgcaacc

SEQ ID NO: 1238508 - DNA, 15 bp, Homo sapiens
aaagccttatgcaac

SEQ ID NO: 1238509 - DNA, 15 bp, Homo sapiens
caaagccttatgcaa

SEQ ID NO: 1238510 - DNA, 15 bp, Homo sapiens
gcaaagccttatgca

SEQ ID NO: 1238511 - DNA, 15 bp, Homo sapiens
tgcaaagccttatgc

SEQ ID NO: 1238512 - DNA, 15 bp, Homo sapiens
ctgcaaagccttatg

SEQ ID NO: 1238513 - DNA, 15 bp, Homo sapiens
tctgcaaagccttat

SEQ ID NO: 1238514 - DNA, 15 bp, Homo sapiens
ctctgcaaagcctta

SEQ ID NO: 1238515 - DNA, 15 bp, Homo sapiens
gctctgcaaagcctt

SEQ ID NO: 1238516 - DNA, 15 bp, Homo sapiens
ggctctgcaaagcct

SEQ ID NO: 1238517 - DNA, 15 bp, Homo sapiens
aggctctgcaaagcc

SEQ ID NO: 1238518 - DNA, 15 bp, Homo sapiens
aaggctctgcaaagc

SEQ ID NO: 1238519 - DNA, 15 bp, Homo sapiens
caaggctctgcaaag

SEQ ID NO: 1238520 - DNA, 15 bp, Homo sapiens
ccaaggctctgcaaa

SEQ ID NO: 1238521 - DNA, 15 bp, Homo sapiens
gccaaggctctgcaa

SEQ ID NO: 1238522 - DNA, 15 bp, Homo sapiens
ggccaaggctctgca

SEQ ID NO: 1238523 - DNA, 15 bp, Homo sapiens
aggccaaggctctgc

SEQ ID NO: 1238524 - DNA, 15 bp, Homo sapiens
aaggccaaggctctg

SEQ ID NO: 1238525 - DNA, 15 bp, Homo sapiens
gaaggccaaggctct

SEQ ID NO: 1238526 - DNA, 15 bp, Homo sapiens
cgaaggccaaggctc

SEQ ID NO: 1238527 - DNA, 15 bp, Homo sapiens
gcgaaggccaaggct

SEQ ID NO: 1238528 - DNA, 15 bp, Homo sapiens
agcgaaggccaaggc

SEQ ID NO: 1238529 - DNA, 15 bp, Homo sapiens
gagcgaaggccaagg

SEQ ID NO: 1238530 - DNA, 15 bp, Homo sapiens
agagcgaaggccaag

SEQ ID NO: 1238531 - DNA, 15 bp, Homo sapiens
cagagcgaaggccaa

SEQ ID NO: 1238532 - DNA, 15 bp, Homo sapiens
tcagagcgaaggcca

SEQ ID NO: 1238533 - DNA, 15 bp, Homo sapiens
ctcagagcgaaggcc

SEQ ID NO: 1238534 - DNA, 15 bp, Homo sapiens
actcagagcgaaggc

SEQ ID NO: 1238535 - DNA, 15 bp, Homo sapiens
cactcagagcgaagg

SEQ ID NO: 1238536 - DNA, 15 bp, Homo sapiens
tcactcagagcgaag

SEQ ID NO: 1238537 - DNA, 15 bp, Homo sapiens
ctcactcagagcgaa

SEQ ID NO: 1238538 - DNA, 15 bp, Homo sapiens
actcactcagagcga

SEQ ID NO: 1238539 - DNA, 15 bp, Homo sapiens
gactcactcagagcg

SEQ ID NO: 1238540 - DNA, 15 bp, Homo sapiens
agactcactcagagc

SEQ ID NO: 1238541 - DNA, 15 bp, Homo sapiens
cagactcactcagag

SEQ ID NO: 1238542 - DNA, 15 bp, Homo sapiens
ccagactcactcaga

SEQ ID NO: 1238543 - DNA, 15 bp, Homo sapiens
cccagactcactcag

SEQ ID NO: 1238544 - DNA, 15 bp, Homo sapiens
ccccagactcactca

SEQ ID NO: 1238545 - DNA, 15 bp, Homo sapiens
gccccagactcactc

SEQ ID NO: 1238546 - DNA, 15 bp, Homo sapiens
agccccagactcact

SEQ ID NO: 1238547 - DNA, 15 bp, Homo sapiens
aagccccagactcac

SEQ ID NO: 1238548 - DNA, 15 bp, Homo sapiens
aaagccccagactca

SEQ ID NO: 1238549 - DNA, 15 bp, Homo sapiens
gaaagccccagactc

SEQ ID NO: 1238550 - DNA, 15 bp, Homo sapiens
cgaaagccccagact

SEQ ID NO: 1238551 - DNA, 15 bp, Homo sapiens
ccgaaagccccagac

SEQ ID NO: 1238552 - DNA, 15 bp, Homo sapiens
tccgaaagccccaga

SEQ ID NO: 1238553 - DNA, 15 bp, Homo sapiens
ttccgaaagccccag

SEQ ID NO: 1238554 - DNA, 15 bp, Homo sapiens
tttccgaaagcccca

SEQ ID NO: 1238555 - DNA, 15 bp, Homo sapiens
gtttccgaaagcccc

SEQ ID NO: 1238556 - DNA, 15 bp, Homo sapiens
ggtttccgaaagccc

SEQ ID NO: 1238557 - DNA, 15 bp, Homo sapiens
tggtttccgaaagcc

SEQ ID NO: 1238558 - DNA, 15 bp, Homo sapiens
ttggtttccgaaagc

SEQ ID NO: 1238559 - DNA, 15 bp, Homo sapiens
cttggtttccgaaag

SEQ ID NO: 1238560 - DNA, 15 bp, Homo sapiens
ccttggtttccgaaa

SEQ ID NO: 1238561 - DNA, 15 bp, Homo sapiens
gccttggtttccgaa

SEQ ID NO: 1238562 - DNA, 15 bp, Homo sapiens
tgccttggtttccga

SEQ ID NO: 1238563 - DNA, 15 bp, Homo sapiens
atgccttggtttccg

SEQ ID NO: 1238564 - DNA, 15 bp, Homo sapiens
tatgccttggtttcc

SEQ ID NO: 1238565 - DNA, 15 bp, Homo sapiens
ctatgccttggtttc

SEQ ID NO: 1238566 - DNA, 15 bp, Homo sapiens
gctatgccttggttt

SEQ ID NO: 1238567 - DNA, 15 bp, Homo sapiens
agctatgccttggtt

SEQ ID NO: 1238568 - DNA, 15 bp, Homo sapiens
aagctatgccttggt

SEQ ID NO: 1238569 - DNA, 15 bp, Homo sapiens
gaagctatgccttgg

SEQ ID NO: 1238570 - DNA, 15 bp, Homo sapiens
agaagctatgccttg

SEQ ID NO: 1238571 - DNA, 15 bp, Homo sapiens
gagaagctatgcctt

SEQ ID NO: 1238572 - DNA, 15 bp, Homo sapiens
tgagaagctatgcct

SEQ ID NO: 1238573 - DNA, 15 bp, Homo sapiens
gtgagaagctatgcc

SEQ ID NO: 1238574 - DNA, 15 bp, Homo sapiens
tgtgagaagctatgc

SEQ ID NO: 1238575 - DNA, 15 bp, Homo sapiens
ctgtgagaagctatg

SEQ ID NO: 1238576 - DNA, 15 bp, Homo sapiens
cctgtgagaagctat

SEQ ID NO: 1238577 - DNA, 15 bp, Homo sapiens
tcctgtgagaagcta

SEQ ID NO: 1238578 - DNA, 15 bp, Homo sapiens
gtcctgtgagaagct

SEQ ID NO: 1238579 - DNA, 15 bp, Homo sapiens
ggtcctgtgagaagc

SEQ ID NO: 1238580 - DNA, 15 bp, Homo sapiens
gggtcctgtgagaag

SEQ ID NO: 1238581 - DNA, 15 bp, Homo sapiens
agggtcctgtgagaa

SEQ ID NO: 1238582 - DNA, 15 bp, Homo sapiens
cagggtcctgtgaga

SEQ ID NO: 1238583 - DNA, 15 bp, Homo sapiens
gcagggtcctgtgag

SEQ ID NO: 1238584 - DNA, 15 bp, Homo sapiens
tgcagggtcctgtga

SEQ ID NO: 1238585 - DNA, 15 bp, Homo sapiens
ctgcagggtcctgtg

SEQ ID NO: 1238586 - DNA, 15 bp, Homo sapiens
gctgcagggtcctgt

SEQ ID NO: 1238587 - DNA, 15 bp, Homo sapiens
agctgcagggtcctg

SEQ ID NO: 1238588 - DNA, 15 bp, Homo sapiens
cagctgcagggtcct

SEQ ID NO: 1238589 - DNA, 15 bp, Homo sapiens
ccagctgcagggtcc

SEQ ID NO: 1238590 - DNA, 15 bp, Homo sapiens
gccagctgcagggtc

SEQ ID NO: 1238591 - DNA, 15 bp, Homo sapiens
cgccagctgcagggt

SEQ ID NO: 1238592 - DNA, 15 bp, Homo sapiens
acgccagctgcaggg

SEQ ID NO: 1238593 - DNA, 15 bp, Homo sapiens
tacgccagctgcagg

SEQ ID NO: 1238594 - DNA, 15 bp, Homo sapiens
ctacgccagctgcag

SEQ ID NO: 1238595 - DNA, 15 bp, Homo sapiens
tctacgccagctgca

SEQ ID NO: 1238596 - DNA, 15 bp, Homo sapiens
ctctacgccagctgc

SEQ ID NO: 1238597 - DNA, 15 bp, Homo sapiens
tctctacgccagctg

SEQ ID NO: 1238598 - DNA, 15 bp, Homo sapiens
ctctctacgccagct

SEQ ID NO: 1238599 - DNA, 15 bp, Homo sapiens
gctctctacgccagc

SEQ ID NO: 1238600 - DNA, 15 bp, Homo sapiens
tgctctctacgccag

SEQ ID NO: 1238601 - DNA, 15 bp, Homo sapiens
ctgctctctacgcca

SEQ ID NO: 1238602 - DNA, 15 bp, Homo sapiens
tctgctctctacgcc

SEQ ID NO: 1238603 - DNA, 15 bp, Homo sapiens
gtctgctctctacgc

SEQ ID NO: 1238604 - DNA, 15 bp, Homo sapiens
agtctgctctctacg

SEQ ID NO: 1238605 - DNA, 15 bp, Homo sapiens
gagtctgctctctac

SEQ ID NO: 1238606 - DNA, 15 bp, Homo sapiens
ggagtctgctctcta

SEQ ID NO: 1238607 - DNA, 15 bp, Homo sapiens
tggagtctgctctct

SEQ ID NO: 1238608 - DNA, 15 bp, Homo sapiens
ttggagtctgctctc

SEQ ID NO: 1238609 - DNA, 15 bp, Homo sapiens
tttggagtctgctct

SEQ ID NO: 1238610 - DNA, 15 bp, Homo sapiens
ctttggagtctgctc

SEQ ID NO: 1238611 - DNA, 15 bp, Homo sapiens
cctttggagtctgct

SEQ ID NO: 1238612 - DNA, 15 bp, Homo sapiens
ccctttggagtctgc

SEQ ID NO: 1238613 - DNA, 15 bp, Homo sapiens
cccctttggagtctg

SEQ ID NO: 1238614 - DNA, 15 bp, Homo sapiens
ccccctttggagtct

SEQ ID NO: 1238615 - DNA, 15 bp, Homo sapiens
accccctttggagtc

SEQ ID NO: 1238616 - DNA, 15 bp, Homo sapiens
taccccctttggagt

SEQ ID NO: 1238617 - DNA, 15 bp, Homo sapiens
gtaccccctttggag

SEQ ID NO: 1238618 - DNA, 15 bp, Homo sapiens
ggtaccccctttgga

SEQ ID NO: 1238619 - DNA, 15 bp, Homo sapiens
tggtaccccctttgg

SEQ ID NO: 1238620 - DNA, 15 bp, Homo sapiens
gtggtaccccctttg

SEQ ID NO: 1238621 - DNA, 15 bp, Homo sapiens
agtggtacccccttt

SEQ ID NO: 1238622 - DNA, 15 bp, Homo sapiens
cagtggtaccccctt

SEQ ID NO: 1238623 - DNA, 15 bp, Homo sapiens
ccagtggtaccccct

SEQ ID NO: 1238624 - DNA, 15 bp, Homo sapiens
cccagtggtaccccc

SEQ ID NO: 1238625 - DNA, 15 bp, Homo sapiens
tcccagtggtacccc

SEQ ID NO: 1238626 - DNA, 15 bp, Homo sapiens
ctcccagtggtaccc

SEQ ID NO: 1238627 - DNA, 15 bp, Homo sapiens
cctcccagtggtacc

SEQ ID NO: 1238628 - DNA, 15 bp, Homo sapiens
ccctcccagtggtac

SEQ ID NO: 1238629 - DNA, 15 bp, Homo sapiens
tccctcccagtggta

SEQ ID NO: 1238630 - DNA, 15 bp, Homo sapiens
ctccctcccagtggt

SEQ ID NO: 1238631 - DNA, 15 bp, Homo sapiens
actccctcccagtgg

SEQ ID NO: 1238632 - DNA, 15 bp, Homo sapiens
cactccctcccagtg

SEQ ID NO: 1238633 - DNA, 15 bp, Homo sapiens
ccactccctcccagt

SEQ ID NO: 1238634 - DNA, 15 bp, Homo sapiens
tccactccctcccag

SEQ ID NO: 1238635 - DNA, 15 bp, Homo sapiens
gtccactccctccca

SEQ ID NO: 1238636 - DNA, 15 bp, Homo sapiens
cgtccactccctccc

SEQ ID NO: 1238637 - DNA, 15 bp, Homo sapiens
ccgtccactccctcc

SEQ ID NO: 1238638 - DNA, 15 bp, Homo sapiens
cccgtccactccctc

SEQ ID NO: 1238639 - DNA, 15 bp, Homo sapiens
ccccgtccactccct

SEQ ID NO: 1238640 - DNA, 15 bp, Homo sapiens
tccccgtccactccc

SEQ ID NO: 1238641 - DNA, 15 bp, Homo sapiens
ctccccgtccactcc

SEQ ID NO: 1238642 - DNA, 15 bp, Homo sapiens
tctccccgtccactc

SEQ ID NO: 1238643 - DNA, 15 bp, Homo sapiens
ctctccccgtccact

SEQ ID NO: 1238644 - DNA, 15 bp, Homo sapiens
cctctccccgtccac

SEQ ID NO: 1238645 - DNA, 15 bp, Homo sapiens
tcctctccccgtcca

SEQ ID NO: 1238646 - DNA, 15 bp, Homo sapiens
cctcctctccccgtc

SEQ ID NO: 1238647 - DNA, 15 bp, Homo sapiens
acctcctctccccgt

SEQ ID NO: 1238648 - DNA, 15 bp, Homo sapiens
aacctcctctccccg

SEQ ID NO: 1238649 - DNA, 15 bp, Homo sapiens
caacctcctctcccc

SEQ ID NO: 1238650 - DNA, 15 bp, Homo sapiens
ccaacctcctctccc

SEQ ID NO: 1238651 - DNA, 15 bp, Homo sapiens
tccaacctcctctcc

SEQ ID NO: 1238652 - DNA, 15 bp, Homo sapiens
atccaacctcctctc

SEQ ID NO: 1238653 - DNA, 15 bp, Homo sapiens
aatccaacctcctct

SEQ ID NO: 1238654 - DNA, 15 bp, Homo sapiens
gaatccaacctcctc

SEQ ID NO: 1238655 - DNA, 15 bp, Homo sapiens
agaatccaacctcct

SEQ ID NO: 1238656 - DNA, 15 bp, Homo sapiens
cagaatccaacctcc

SEQ ID NO: 1238657 - DNA, 15 bp, Homo sapiens
ccagaatccaacctc

SEQ ID NO: 1238658 - DNA, 15 bp, Homo sapiens
tccagaatccaacct

SEQ ID NO: 1238659 - DNA, 15 bp, Homo sapiens
atccagaatccaacc

SEQ ID NO: 1238660 - DNA, 15 bp, Homo sapiens
catccagaatccaac

SEQ ID NO: 1238661 - DNA, 15 bp, Homo sapiens
acatccagaatccaa

SEQ ID NO: 1238662 - DNA, 15 bp, Homo sapiens
aacatccagaatcca

SEQ ID NO: 1238663 - DNA, 15 bp, Homo sapiens
caacatccagaatcc

SEQ ID NO: 1238664 - DNA, 15 bp, Homo sapiens
acaacatccagaatc

SEQ ID NO: 1238665 - DNA, 15 bp, Homo sapiens
aacaacatccagaat

SEQ ID NO: 1238666 - DNA, 15 bp, Homo sapiens
aaacaacatccagaa

SEQ ID NO: 1238667 - DNA, 15 bp, Homo sapiens
caaacaacatccaga

SEQ ID NO: 1238668 - DNA, 15 bp, Homo sapiens
tcaaacaacatccag

SEQ ID NO: 1238669 - DNA, 15 bp, Homo sapiens
ttcaaacaacatcca

SEQ ID NO: 1238670 - DNA, 15 bp, Homo sapiens
cttcaaacaacatcc

SEQ ID NO: 1238671 - DNA, 15 bp, Homo sapiens
ccttcaaacaacatc

SEQ ID NO: 1238672 - DNA, 15 bp, Homo sapiens
gccttcaaacaacat

SEQ ID NO: 1238673 - DNA, 15 bp, Homo sapiens
tgccttcaaacaaca

SEQ ID NO: 1238674 - DNA, 15 bp, Homo sapiens
ctgccttcaaacaac

SEQ ID NO: 1238675 - DNA, 15 bp, Homo sapiens
tctgccttcaaacaa

SEQ ID NO: 1238676 - DNA, 15 bp, Homo sapiens
ctctgccttcaaaca

SEQ ID NO: 1238677 - DNA, 15 bp, Homo sapiens
gctctgccttcaaac

SEQ ID NO: 1238678 - DNA, 15 bp, Homo sapiens
agctctgccttcaaa

SEQ ID NO: 1238679 - DNA, 15 bp, Homo sapiens
cagctctgccttcaa

SEQ ID NO: 1238680 - DNA, 15 bp, Homo sapiens
gcagctctgccttca

SEQ ID NO: 1238681 - DNA, 15 bp, Homo sapiens
ggcagctctgccttc

SEQ ID NO: 1238682 - DNA, 15 bp, Homo sapiens
tggcagctctgcctt

SEQ ID NO: 1238683 - DNA, 15 bp, Homo sapiens
ctggcagctctgcct

SEQ ID NO: 1238684 - DNA, 15 bp, Homo sapiens
cctggcagctctgcc

SEQ ID NO: 1238685 - DNA, 15 bp, Homo sapiens
tcctggcagctctgc

SEQ ID NO: 1238686 - DNA, 15 bp, Homo sapiens
atcctggcagctctg

SEQ ID NO: 1238687 - DNA, 15 bp, Homo sapiens
aatcctggcagctct

SEQ ID NO: 1238688 - DNA, 15 bp, Homo sapiens
aaatcctggcagctc

SEQ ID NO: 1238689 - DNA, 15 bp, Homo sapiens
caaatcctggcagct

SEQ ID NO: 1238690 - DNA, 15 bp, Homo sapiens
acaaatcctggcagc

SEQ ID NO: 1238691 - DNA, 15 bp, Homo sapiens
aacaaatcctggcag

SEQ ID NO: 1238692 - DNA, 15 bp, Homo sapiens
caacaaatcctggca

SEQ ID NO: 1238693 - DNA, 15 bp, Homo sapiens
tcaacaaatcctggc

SEQ ID NO: 1238694 - DNA, 15 bp, Homo sapiens
ctcaacaaatcctgg

SEQ ID NO: 1238695 - DNA, 15 bp, Homo sapiens
tctcaacaaatcctg

SEQ ID NO: 1238696 - DNA, 15 bp, Homo sapiens
gtctcaacaaatcct

SEQ ID NO: 1238697 - DNA, 15 bp, Homo sapiens
ggtctcaacaaatcc

SEQ ID NO: 1238698 - DNA, 15 bp, Homo sapiens
cggtctcaacaaatc

SEQ ID NO: 1238699 - DNA, 15 bp, Homo sapiens
ccggtctcaacaaat

SEQ ID NO: 1238700 - DNA, 15 bp, Homo sapiens
tccggtctcaacaaa

SEQ ID NO: 1238701 - DNA, 15 bp, Homo sapiens
atccggtctcaacaa

SEQ ID NO: 1238702 - DNA, 15 bp, Homo sapiens
catccggtctcaaca

SEQ ID NO: 1238703 - DNA, 15 bp, Homo sapiens
ccatccggtctcaac

SEQ ID NO: 1238704 - DNA, 15 bp, Homo sapiens
tccatccggtctcaa

SEQ ID NO: 1238705 - DNA, 15 bp, Homo sapiens
ctccatccggtctca

SEQ ID NO: 1238706 - DNA, 15 bp, Homo sapiens
cctccatccggtctc

SEQ ID NO: 1238707 - DNA, 15 bp, Homo sapiens
gcctccatccggtct

SEQ ID NO: 1238708 - DNA, 15 bp, Homo sapiens
cgcctccatccggtc

SEQ ID NO: 1238709 - DNA, 15 bp, Homo sapiens
tcgcctccatccggt

SEQ ID NO: 1238710 - DNA, 15 bp, Homo sapiens
atcgcctccatccgg

SEQ ID NO: 1238711 - DNA, 15 bp, Homo sapiens
catcgcctccatccg

SEQ ID NO: 1238712 - DNA, 15 bp, Homo sapiens
tcatcgcctccatcc

SEQ ID NO: 1238713 - DNA, 15 bp, Homo sapiens
gtcatcgcctccatc

SEQ ID NO: 1238714 - DNA, 15 bp, Homo sapiens
agtcatcgcctccat

SEQ ID NO: 1238715 - DNA, 15 bp, Homo sapiens
gagtcatcgcctcca

SEQ ID NO: 1238716 - DNA, 15 bp, Homo sapiens
agagtcatcgcctcc

SEQ ID NO: 1238717 - DNA, 15 bp, Homo sapiens
cagagtcatcgcctc

SEQ ID NO: 1238718 - DNA, 15 bp, Homo sapiens
acagagtcatcgcct

SEQ ID NO: 1238719 - DNA, 15 bp, Homo sapiens
tacagagtcatcgcc

SEQ ID NO: 1238720 - DNA, 15 bp, Homo sapiens
ctacagagtcatcgc

SEQ ID NO: 1238721 - DNA, 15 bp, Homo sapiens
actacagagtcatcg

SEQ ID NO: 1238722 - DNA, 15 bp, Homo sapiens
aactacagagtcatc

SEQ ID NO: 1238723 - DNA, 15 bp, Homo sapiens
aaactacagagtcat

SEQ ID NO: 1238724 - DNA, 15 bp, Homo sapiens
aaaactacagagtca

SEQ ID NO: 1238725 - DNA, 15 bp, Homo sapiens
aaaaactacagagtc

SEQ ID NO: 1238726 - DNA, 15 bp, Homo sapiens
caaaaactacagagt

SEQ ID NO: 1238727 - DNA, 15 bp, Homo sapiens
ccaaaaactacagag

SEQ ID NO: 1238728 - DNA, 15 bp, Homo sapiens
gccaaaaactacaga

SEQ ID NO: 1238729 - DNA, 15 bp, Homo sapiens
agccaaaaactacag

SEQ ID NO: 1238730 - DNA, 15 bp, Homo sapiens
cagccaaaaactaca

SEQ ID NO: 1238731 - DNA, 15 bp, Homo sapiens
ccagccaaaaactac

SEQ ID NO: 1238732 - DNA, 15 bp, Homo sapiens
tccagccaaaaacta

SEQ ID NO: 1238733 - DNA, 15 bp, Homo sapiens
ttccagccaaaaact

SEQ ID NO: 1238734 - DNA, 15 bp, Homo sapiens
gttccagccaaaaac

SEQ ID NO: 1238735 - DNA, 15 bp, Homo sapiens
agttccagccaaaaa

SEQ ID NO: 1238736 - DNA, 15 bp, Homo sapiens
cagttccagccaaaa

SEQ ID NO: 1238737 - DNA, 15 bp, Homo sapiens
ccagttccagccaaa

SEQ ID NO: 1238738 - DNA, 15 bp, Homo sapiens
tccagttccagccaa

SEQ ID NO: 1238739 - DNA, 15 bp, Homo sapiens
ttccagttccagcca

SEQ ID NO: 1238740 - DNA, 15 bp, Homo sapiens
tccttccagttccag

SEQ ID NO: 1238741 - DNA, 15 bp, Homo sapiens
atccttccagttcca

SEQ ID NO: 1238742 - DNA, 15 bp, Homo sapiens
catccttccagttcc

SEQ ID NO: 1238743 - DNA, 15 bp, Homo sapiens
ccatccttccagttc

SEQ ID NO: 1238744 - DNA, 15 bp, Homo sapiens
tccatccttccagtt

SEQ ID NO: 1238745 - DNA, 15 bp, Homo sapiens
ctccatccttccagt

SEQ ID NO: 1238746 - DNA, 15 bp, Homo sapiens
actccatccttccag

SEQ ID NO: 1238747 - DNA, 15 bp, Homo sapiens
aactccatccttcca

SEQ ID NO: 1238748 - DNA, 15 bp, Homo sapiens
aaactccatccttcc

SEQ ID NO: 1238749 - DNA, 15 bp, Homo sapiens
gaaactccatccttc

SEQ ID NO: 1238750 - DNA, 15 bp, Homo sapiens
cgaaactccatcctt

SEQ ID NO: 1238751 - DNA, 15 bp, Homo sapiens
ccgaaactccatcct

SEQ ID NO: 1238752 - DNA, 15 bp, Homo sapiens
tccgaaactccatcc

SEQ ID NO: 1238753 - DNA, 15 bp, Homo sapiens
atccgaaactccatc

SEQ ID NO: 1238754 - DNA, 15 bp, Homo sapiens
aatccgaaactccat

SEQ ID NO: 1238755 - DNA, 15 bp, Homo sapiens
caatccgaaactcca

SEQ ID NO: 1238756 - DNA, 15 bp, Homo sapiens
gcaatccgaaactcc

SEQ ID NO: 1238757 - DNA, 15 bp, Homo sapiens
ggcaatccgaaactc

SEQ ID NO: 1238758 - DNA, 15 bp, Homo sapiens
tggcaatccgaaact

SEQ ID NO: 1238759 - DNA, 15 bp, Homo sapiens
ctggcaatccgaaac

SEQ ID NO: 1238760 - DNA, 15 bp, Homo sapiens
gctggcaatccgaaa

SEQ ID NO: 1238761 - DNA, 15 bp, Homo sapiens
agctggcaatccgaa

SEQ ID NO: 1238762 - DNA, 15 bp, Homo sapiens
aagctggcaatccga

SEQ ID NO: 1238763 - DNA, 15 bp, Homo sapiens
aaagctggcaatccg

SEQ ID NO: 1238764 - DNA, 15 bp, Homo sapiens
caaagctggcaatcc

SEQ ID NO: 1238765 - DNA, 15 bp, Homo sapiens
acaaagctggcaatc

SEQ ID NO: 1238766 - DNA, 15 bp, Homo sapiens
cacaaagctggcaat

SEQ ID NO: 1238767 - DNA, 15 bp, Homo sapiens
acacaaagctggcaa

SEQ ID NO: 1238768 - DNA, 15 bp, Homo sapiens
gacacaaagctggca

SEQ ID NO: 1238769 - DNA, 15 bp, Homo sapiens
agacacaaagctggc

SEQ ID NO: 1238770 - DNA, 15 bp, Homo sapiens
aagacacaaagctgg

SEQ ID NO: 1238771 - DNA, 15 bp, Homo sapiens
aaagacacaaagctg

SEQ ID NO: 1238772 - DNA, 15 bp, Homo sapiens
caaagacacaaagct

SEQ ID NO: 1238773 - DNA, 15 bp, Homo sapiens
acaaagacacaaagc

SEQ ID NO: 1238774 - DNA, 15 bp, Homo sapiens
cacaaagacacaaag

SEQ ID NO: 1238775 - DNA, 15 bp, Homo sapiens
gcacaaagacacaaa

SEQ ID NO: 1238776 - DNA, 15 bp, Homo sapiens
tgcacaaagacacaa

SEQ ID NO: 1238777 - DNA, 15 bp, Homo sapiens
ctgcacaaagacaca

SEQ ID NO: 1238778 - DNA, 15 bp, Homo sapiens
gctgcacaaagacac

SEQ ID NO: 1238779 - DNA, 15 bp, Homo sapiens
ggctgcacaaagaca

SEQ ID NO: 1238780 - DNA, 15 bp, Homo sapiens
tggctgcacaaagac

SEQ ID NO: 1238781 - DNA, 15 bp, Homo sapiens
atggctgcacaaaga

SEQ ID NO: 1238782 - DNA, 15 bp, Homo sapiens
gatggctgcacaaag

SEQ ID NO: 1238783 - DNA, 15 bp, Homo sapiens
ggatggctgcacaaa

SEQ ID NO: 1238784 - DNA, 15 bp, Homo sapiens
tggatggctgcacaa

SEQ ID NO: 1238785 - DNA, 15 bp, Homo sapiens
gtggatggctgcaca

SEQ ID NO: 1238786 - DNA, 15 bp, Homo sapiens
agtggatggctgcac

SEQ ID NO: 1238787 - DNA, 15 bp, Homo sapiens
cagtggatggctgca

SEQ ID NO: 1238788 - DNA, 15 bp, Homo sapiens
acagtggatggctgc

SEQ ID NO: 1238789 - DNA, 15 bp, Homo sapiens
cacagtggatggctg

SEQ ID NO: 1238790 - DNA, 15 bp, Homo sapiens
acacagtggatggct

SEQ ID NO: 1238791 - DNA, 15 bp, Homo sapiens
gacacagtggatggc

SEQ ID NO: 1238792 - DNA, 15 bp, Homo sapiens
cgacacagtggatgg

SEQ ID NO: 1238793 - DNA, 15 bp, Homo sapiens
acgacacagtggatg

SEQ ID NO: 1238794 - DNA, 15 bp, Homo sapiens
cacgacacagtggat

SEQ ID NO: 1238795 - DNA, 15 bp, Homo sapiens
ccacgacacagtgga

SEQ ID NO: 1238796 - DNA, 15 bp, Homo sapiens
tccacgacacagtgg

SEQ ID NO: 1238797 - DNA, 15 bp, Homo sapiens
ctccacgacacagtg

SEQ ID NO: 1238798 - DNA, 15 bp, Homo sapiens
tctccacgacacagt

SEQ ID NO: 1238799 - DNA, 15 bp, Homo sapiens
ctctccacgacacag

SEQ ID NO: 1238800 - DNA, 15 bp, Homo sapiens
gctctccacgacaca

SEQ ID NO: 1238801 - DNA, 15 bp, Homo sapiens
tgctctccacgacac

SEQ ID NO: 1238802 - DNA, 15 bp, Homo sapiens
ctgctctccacgaca

SEQ ID NO: 1238803 - DNA, 15 bp, Homo sapiens
cctgctctccacgac

SEQ ID NO: 1238804 - DNA, 15 bp, Homo sapiens
gcctgctctccacga

SEQ ID NO: 1238805 - DNA, 15 bp, Homo sapiens
agcctgctctccacg

SEQ ID NO: 1238806 - DNA, 15 bp, Homo sapiens
gagcctgctctccac

SEQ ID NO: 1238807 - DNA, 15 bp, Homo sapiens
agagcctgctctcca

SEQ ID NO: 1238808 - DNA, 15 bp, Homo sapiens
aagagcctgctctcc

SEQ ID NO: 1238809 - DNA, 15 bp, Homo sapiens
caagagcctgctctc

SEQ ID NO: 1238810 - DNA, 15 bp, Homo sapiens
tcaagagcctgctct

SEQ ID NO: 1238811 - DNA, 15 bp, Homo sapiens
ctcaagagcctgctc

SEQ ID NO: 1238812 - DNA, 15 bp, Homo sapiens
gctcaagagcctgct

SEQ ID NO: 1238813 - DNA, 15 bp, Homo sapiens
cgctcaagagcctgc

SEQ ID NO: 1238814 - DNA, 15 bp, Homo sapiens
gcgctcaagagcctg

SEQ ID NO: 1238815 - DNA, 15 bp, Homo sapiens
agcgctcaagagcct

SEQ ID NO: 1238816 - DNA, 15 bp, Homo sapiens
cagcgctcaagagcc

SEQ ID NO: 1238817 - DNA, 15 bp, Homo sapiens
tcagcgctcaagagc

SEQ ID NO: 1238818 - DNA, 15 bp, Homo sapiens
ctcagcgctcaagag

SEQ ID NO: 1238819 - DNA, 15 bp, Homo sapiens
actcagcgctcaaga

SEQ ID NO: 1238820 - DNA, 15 bp, Homo sapiens
gactcagcgctcaag

SEQ ID NO: 1238821 - DNA, 15 bp, Homo sapiens
ggactcagcgctcaa

SEQ ID NO: 1238822 - DNA, 15 bp, Homo sapiens
aggactcagcgctca

SEQ ID NO: 1238823 - DNA, 15 bp, Homo sapiens
caggactcagcgctc

SEQ ID NO: 1238824 - DNA, 15 bp, Homo sapiens
tcaggactcagcgct

SEQ ID NO: 1238825 - DNA, 15 bp, Homo sapiens
ctcaggactcagcgc

SEQ ID NO: 1238826 - DNA, 15 bp, Homo sapiens
actcaggactcagcg

SEQ ID NO: 1238827 - DNA, 15 bp, Homo sapiens
cactcaggactcagc

SEQ ID NO: 1238828 - DNA, 15 bp, Homo sapiens
tcactcaggactcag

SEQ ID NO: 1238829 - DNA, 15 bp, Homo sapiens
ttcactcaggactca

SEQ ID NO: 1238830 - DNA, 15 bp, Homo sapiens
attcactcaggactc

SEQ ID NO: 1238831 - DNA, 15 bp, Homo sapiens
cattcactcaggact

SEQ ID NO: 1238832 - DNA, 15 bp, Homo sapiens
tcattcactcaggac

SEQ ID NO: 1238833 - DNA, 15 bp, Homo sapiens
gtcattcactcagga

SEQ ID NO: 1238834 - DNA, 15 bp, Homo sapiens
agtcattcactcagg

SEQ ID NO: 1238835 - DNA, 15 bp, Homo sapiens
gagtcattcactcag

SEQ ID NO: 1238836 - DNA, 15 bp, Homo sapiens
cgagtcattcactca

SEQ ID NO: 1238837 - DNA, 15 bp, Homo sapiens
acgagtcattcactc

SEQ ID NO: 1238838 - DNA, 15 bp, Homo sapiens
cacgagtcattcact

SEQ ID NO: 1238839 - DNA, 15 bp, Homo sapiens
gcacgagtcattcac

SEQ ID NO: 1238840 - DNA, 15 bp, Homo sapiens
tgcacgagtcattca

SEQ ID NO: 1238841 - DNA, 15 bp, Homo sapiens
ctgcacgagtcattc

SEQ ID NO: 1238842 - DNA, 15 bp, Homo sapiens
cctgcacgagtcatt

SEQ ID NO: 1238843 - DNA, 15 bp, Homo sapiens
gcctgcacgagtcat

SEQ ID NO: 1238844 - DNA, 15 bp, Homo sapiens
cgcctgcacgagtca

SEQ ID NO: 1238845 - DNA, 15 bp, Homo sapiens
ccgcctgcacgagtc

SEQ ID NO: 1238846 - DNA, 15 bp, Homo sapiens
cccgcctgcacgagt

SEQ ID NO: 1238847 - DNA, 15 bp, Homo sapiens
ccccgcctgcacgag

SEQ ID NO: 1238848 - DNA, 15 bp, Homo sapiens
tccccgcctgcacga

SEQ ID NO: 1238849 - DNA, 15 bp, Homo sapiens
ctccccgcctgcacg

SEQ ID NO: 1238850 - DNA, 15 bp, Homo sapiens
cctccccgcctgcac

SEQ ID NO: 1238851 - DNA, 15 bp, Homo sapiens
ccctccccgcctgca

SEQ ID NO: 1238852 - DNA, 15 bp, Homo sapiens
cccctccccgcctgc

SEQ ID NO: 1238853 - DNA, 15 bp, Homo sapiens
tcccctccccgcctg

SEQ ID NO: 1238854 - DNA, 15 bp, Homo sapiens
ctcccctccccgcct

SEQ ID NO: 1238855 - DNA, 15 bp, Homo sapiens
gctcccctccccgcc

SEQ ID NO: 1238856 - DNA, 15 bp, Homo sapiens
agctcccctccccgc

SEQ ID NO: 1238857 - DNA, 15 bp, Homo sapiens
tagctcccctccccg

SEQ ID NO: 1238858 - DNA, 15 bp, Homo sapiens
ctagctcccctcccc

SEQ ID NO: 1238859 - DNA, 15 bp, Homo sapiens
cctagctcccctccc

SEQ ID NO: 1238860 - DNA, 15 bp, Homo sapiens
ccctagctcccctcc

SEQ ID NO: 1238861 - DNA, 15 bp, Homo sapiens
accctagctcccctc

SEQ ID NO: 1238862 - DNA, 15 bp, Homo sapiens
aaccctagctcccct

SEQ ID NO: 1238863 - DNA, 15 bp, Homo sapiens
caaccctagctcccc

SEQ ID NO: 1238864 - DNA, 15 bp, Homo sapiens
ccaaccctagctccc

SEQ ID NO: 1238865 - DNA, 15 bp, Homo sapiens
gccaaccctagctcc

SEQ ID NO: 1238866 - DNA, 15 bp, Homo sapiens
ggccaaccctagctc

SEQ ID NO: 1238867 - DNA, 15 bp, Homo sapiens
aggccaaccctagct

SEQ ID NO: 1238868 - DNA, 15 bp, Homo sapiens
aaggccaaccctagc

SEQ ID NO: 1238869 - DNA, 15 bp, Homo sapiens
caaggccaaccctag

SEQ ID NO: 1238870 - DNA, 15 bp, Homo sapiens
ccaaggccaacccta

SEQ ID NO: 1238871 - DNA, 15 bp, Homo sapiens
tccaaggccaaccct

SEQ ID NO: 1238872 - DNA, 15 bp, Homo sapiens
gtccaaggccaaccc

SEQ ID NO: 1238873 - DNA, 15 bp, Homo sapiens
ggtccaaggccaacc

SEQ ID NO: 1238874 - DNA, 15 bp, Homo sapiens
gggtccaaggccaac

SEQ ID NO: 1238875 - DNA, 15 bp, Homo sapiens
ggggtccaaggccaa

SEQ ID NO: 1238876 - DNA, 15 bp, Homo sapiens
aggggtccaaggcca

SEQ ID NO: 1238877 - DNA, 15 bp, Homo sapiens
caggggtccaaggcc

SEQ ID NO: 1238878 - DNA, 15 bp, Homo sapiens
ccaggggtccaaggc

SEQ ID NO: 1238879 - DNA, 15 bp, Homo sapiens
cccaggggtccaagg

SEQ ID NO: 1238880 - DNA, 15 bp, Homo sapiens
tcccaggggtccaag

SEQ ID NO: 1238881 - DNA, 15 bp, Homo sapiens
ctcccaggggtccaa

SEQ ID NO: 1238882 - DNA, 15 bp, Homo sapiens
actcccaggggtcca

SEQ ID NO: 1238883 - DNA, 15 bp, Homo sapiens
cactcccaggggtcc

SEQ ID NO: 1238884 - DNA, 15 bp, Homo sapiens
gcactcccaggggtc

SEQ ID NO: 1238885 - DNA, 15 bp, Homo sapiens
ggcactcccaggggt

SEQ ID NO: 1238886 - DNA, 15 bp, Homo sapiens
aggcactcccagggg

SEQ ID NO: 1238887 - DNA, 15 bp, Homo sapiens
taggcactcccaggg

SEQ ID NO: 1238888 - DNA, 15 bp, Homo sapiens
ctaggcactcccagg

SEQ ID NO: 1238889 - DNA, 15 bp, Homo sapiens
cctaggcactcccag

SEQ ID NO: 1238890 - DNA, 15 bp, Homo sapiens
ccctaggcactccca

SEQ ID NO: 1238891 - DNA, 15 bp, Homo sapiens
tccctaggcactccc

SEQ ID NO: 1238892 - DNA, 15 bp, Homo sapiens
ctccctaggcactcc

SEQ ID NO: 1238893 - DNA, 15 bp, Homo sapiens
tctccctaggcactc

SEQ ID NO: 1238894 - DNA, 15 bp, Homo sapiens
ctctccctaggcact

SEQ ID NO: 1238895 - DNA, 15 bp, Homo sapiens
actctccctaggcac

SEQ ID NO: 1238896 - DNA, 15 bp, Homo sapiens
gactctccctaggca

SEQ ID NO: 1238897 - DNA, 15 bp, Homo sapiens
tgactctccctaggc

SEQ ID NO: 1238898 - DNA, 15 bp, Homo sapiens
gtgactctccctagg

SEQ ID NO: 1238899 - DNA, 15 bp, Homo sapiens
ggtgactctccctag

SEQ ID NO: 1238900 - DNA, 15 bp, Homo sapiens
tggtgactctcccta

SEQ ID NO: 1238901 - DNA, 15 bp, Homo sapiens
gtggtgactctccct

SEQ ID NO: 1238902 - DNA, 15 bp, Homo sapiens
agtggtgactctccc

SEQ ID NO: 1238903 - DNA, 15 bp, Homo sapiens
aagtggtgactctcc

SEQ ID NO: 1238904 - DNA, 15 bp, Homo sapiens
gaagtggtgactctc

SEQ ID NO: 1238905 - DNA, 15 bp, Homo sapiens
agaagtggtgactct

SEQ ID NO: 1238906 - DNA, 15 bp, Homo sapiens
gagaagtggtgactc

SEQ ID NO: 1238907 - DNA, 15 bp, Homo sapiens
cgagaagtggtgact

SEQ ID NO: 1238908 - DNA, 15 bp, Homo sapiens
gcgagaagtggtgac

SEQ ID NO: 1238909 - DNA, 15 bp, Homo sapiens
agcgagaagtggtga

SEQ ID NO: 1238910 - DNA, 15 bp, Homo sapiens
cagcgagaagtggtg

SEQ ID NO: 1238911 - DNA, 15 bp, Homo sapiens
gcagcgagaagtggt

SEQ ID NO: 1238912 - DNA, 15 bp, Homo sapiens
tgcagcgagaagtgg

SEQ ID NO: 1238913 - DNA, 15 bp, Homo sapiens
ctgcagcgagaagtg

SEQ ID NO: 1238914 - DNA, 15 bp, Homo sapiens
cctgcagcgagaagt

SEQ ID NO: 1238915 - DNA, 15 bp, Homo sapiens
tcctgcagcgagaag

SEQ ID NO: 1238916 - DNA, 15 bp, Homo sapiens
ctcctgcagcgagaa

SEQ ID NO: 1238917 - DNA, 15 bp, Homo sapiens
gctcctgcagcgaga

SEQ ID NO: 1238918 - DNA, 15 bp, Homo sapiens
ggctcctgcagcgag

SEQ ID NO: 1238919 - DNA, 15 bp, Homo sapiens
gggctcctgcagcga

SEQ ID NO: 1238920 - DNA, 15 bp, Homo sapiens
tgggctcctgcagcg

SEQ ID NO: 1238921 - DNA, 15 bp, Homo sapiens
ctgggctcctgcagc

SEQ ID NO: 1238922 - DNA, 15 bp, Homo sapiens
cctgggctcctgcag

SEQ ID NO: 1238923 - DNA, 15 bp, Homo sapiens
ccctgggctcctgca

SEQ ID NO: 1238924 - DNA, 15 bp, Homo sapiens
tccctgggctcctgc

SEQ ID NO: 1238925 - DNA, 15 bp, Homo sapiens
ctccctgggctcctg

SEQ ID NO: 1238926 - DNA, 15 bp, Homo sapiens
tctccctgggctcct

SEQ ID NO: 1238927 - DNA, 15 bp, Homo sapiens
gtctccctgggctcc

SEQ ID NO: 1238928 - DNA, 15 bp, Homo sapiens
agtctccctgggctc

SEQ ID NO: 1238929 - DNA, 15 bp, Homo sapiens
gagtctccctgggct

SEQ ID NO: 1238930 - DNA, 15 bp, Homo sapiens
tgagtctccctgggc

SEQ ID NO: 1238931 - DNA, 15 bp, Homo sapiens
ttgagtctccctggg

SEQ ID NO: 1238932 - DNA, 15 bp, Homo sapiens
tttgagtctccctgg

SEQ ID NO: 1238933 - DNA, 15 bp, Homo sapiens
ttttgagtctccctg

SEQ ID NO: 1238934 - DNA, 15 bp, Homo sapiens
cttttgagtctccct

SEQ ID NO: 1238935 - DNA, 15 bp, Homo sapiens
acttttgagtctccc

SEQ ID NO: 1238936 - DNA, 15 bp, Homo sapiens
cacttttgagtctcc

SEQ ID NO: 1238937 - DNA, 15 bp, Homo sapiens
acacttttgagtctc

SEQ ID NO: 1238938 - DNA, 15 bp, Homo sapiens
aacacttttgagtct

SEQ ID NO: 1238939 - DNA, 15 bp, Homo sapiens
caacacttttgagtc

SEQ ID NO: 1238940 - DNA, 15 bp, Homo sapiens
tcaacacttttgagt

SEQ ID NO: 1238941 - DNA, 15 bp, Homo sapiens
gtcaacacttttgag

SEQ ID NO: 1238942 - DNA, 15 bp, Homo sapiens
agtcaacacttttga

SEQ ID NO: 1238943 - DNA, 15 bp, Homo sapiens
aagtcaacacttttg

SEQ ID NO: 1238944 - DNA, 15 bp, Homo sapiens
aaagtcaacactttt

SEQ ID NO: 1238945 - DNA, 15 bp, Homo sapiens
aaaagtcaacacttt

SEQ ID NO: 1238946 - DNA, 15 bp, Homo sapiens
caaaagtcaacactt

SEQ ID NO: 1238947 - DNA, 15 bp, Homo sapiens
tcaaaagtcaacact

SEQ ID NO: 1238948 - DNA, 15 bp, Homo sapiens
ctcaaaagtcaacac

SEQ ID NO: 1238949 - DNA, 15 bp, Homo sapiens
gctcaaaagtcaaca

SEQ ID NO: 1238950 - DNA, 15 bp, Homo sapiens
agctcaaaagtcaac

SEQ ID NO: 1238951 - DNA, 15 bp, Homo sapiens
cagctcaaaagtcaa

SEQ ID NO: 1238952 - DNA, 15 bp, Homo sapiens
gcagctcaaaagtca

SEQ ID NO: 1238953 - DNA, 15 bp, Homo sapiens
ggcagctcaaaagtc

SEQ ID NO: 1238954 - DNA, 15 bp, Homo sapiens
tggcagctcaaaagt

SEQ ID NO: 1238955 - DNA, 15 bp, Homo sapiens
ctggcagctcaaaag

SEQ ID NO: 1238956 - DNA, 15 bp, Homo sapiens
tctggcagctcaaaa

SEQ ID NO: 1238957 - DNA, 15 bp, Homo sapiens
ctctggcagctcaaa

SEQ ID NO: 1238958 - DNA, 15 bp, Homo sapiens
cctctggcagctcaa

SEQ ID NO: 1238959 - DNA, 15 bp, Homo sapiens
tcctctggcagctca

SEQ ID NO: 1238960 - DNA, 15 bp, Homo sapiens
ctcctctggcagctc

SEQ ID NO: 1238961 - DNA, 15 bp, Homo sapiens
cctcctctggcagct

SEQ ID NO: 1238962 - DNA, 15 bp, Homo sapiens
tcctcctctggcagc

SEQ ID NO: 1238963 - DNA, 15 bp, Homo sapiens
ctcctcctctggcag

SEQ ID NO: 1238964 - DNA, 15 bp, Homo sapiens
tctcctcctctggca

SEQ ID NO: 1238965 - DNA, 15 bp, Homo sapiens
ttctcctcctctggc

SEQ ID NO: 1238966 - DNA, 15 bp, Homo sapiens
cttctcctcctctgg

SEQ ID NO: 1238967 - DNA, 15 bp, Homo sapiens
ccttctcctcctctg

SEQ ID NO: 1238968 - DNA, 15 bp, Homo sapiens
cccttctcctcctct

SEQ ID NO: 1238969 - DNA, 15 bp, Homo sapiens
ccccttctcctcctc

SEQ ID NO: 1238970 - DNA, 15 bp, Homo sapiens
gccccttctcctcct

SEQ ID NO: 1238971 - DNA, 15 bp, Homo sapiens
agccccttctcctcc

SEQ ID NO: 1238972 - DNA, 15 bp, Homo sapiens
tagccccttctcctc

SEQ ID NO: 1238973 - DNA, 15 bp, Homo sapiens
gtagccccttctcct

SEQ ID NO: 1238974 - DNA, 15 bp, Homo sapiens
ggtagccccttctcc

SEQ ID NO: 1238975 - DNA, 15 bp, Homo sapiens
gggtagccccttctc

SEQ ID NO: 1238976 - DNA, 15 bp, Homo sapiens
ggggtagccccttct

SEQ ID NO: 1238977 - DNA, 15 bp, Homo sapiens
cggggtagccccttc

SEQ ID NO: 1238978 - DNA, 15 bp, Homo sapiens
ccggggtagcccctt

SEQ ID NO: 1238979 - DNA, 15 bp, Homo sapiens
gccggggtagcccct

SEQ ID NO: 1238980 - DNA, 15 bp, Homo sapiens
agccggggtagcccc

SEQ ID NO: 1238981 - DNA, 15 bp, Homo sapiens
cagccggggtagccc

SEQ ID NO: 1238982 - DNA, 15 bp, Homo sapiens
ccagccggggtagcc

SEQ ID NO: 1238983 - DNA, 15 bp, Homo sapiens
cccagccggggtagc

SEQ ID NO: 1238984 - DNA, 15 bp, Homo sapiens
ccccagccggggtag

SEQ ID NO: 1238985 - DNA, 15 bp, Homo sapiens
cccccagccggggta

SEQ ID NO: 1238986 - DNA, 15 bp, Homo sapiens
tcccccagccggggt

SEQ ID NO: 1238987 - DNA, 15 bp, Homo sapiens
gtcccccagccgggg

SEQ ID NO: 1238988 - DNA, 15 bp, Homo sapiens
tgtcccccagccggg

SEQ ID NO: 1238989 - DNA, 15 bp, Homo sapiens
ctgtcccccagccgg

SEQ ID NO: 1238990 - DNA, 15 bp, Homo sapiens
cctgtcccccagccg

SEQ ID NO: 1238991 - DNA, 15 bp, Homo sapiens
tcctgtcccccagcc

SEQ ID NO: 1238992 - DNA, 15 bp, Homo sapiens
ctcctgtcccccagc

SEQ ID NO: 1238993 - DNA, 15 bp, Homo sapiens
gctcctgtcccccag

SEQ ID NO: 1238994 - DNA, 15 bp, Homo sapiens
tgctcctgtccccca

SEQ ID NO: 1238995 - DNA, 15 bp, Homo sapiens
ttgctcctgtccccc

SEQ ID NO: 1238996 - DNA, 15 bp, Homo sapiens
cttgctcctgtcccc

SEQ ID NO: 1238997 - DNA, 15 bp, Homo sapiens
tcttgctcctgtccc

SEQ ID NO: 1238998 - DNA, 15 bp, Homo sapiens
ttcttgctcctgtcc

SEQ ID NO: 1238999 - DNA, 15 bp, Homo sapiens
cttcttgctcctgtc

SEQ ID NO: 1239000 - DNA, 15 bp, Homo sapiens
tcttcttgctcctgt

SEQ ID NO: 1239001 - DNA, 15 bp, Homo sapiens
atcttcttgctcctg

SEQ ID NO: 1239002 - DNA, 15 bp, Homo sapiens
aatcttcttgctcct

SEQ ID NO: 1239003 - DNA, 15 bp, Homo sapiens
gaatcttcttgctcc

SEQ ID NO: 1239004 - DNA, 15 bp, Homo sapiens
ggaatcttcttgctc

SEQ ID NO: 1239005 - DNA, 15 bp, Homo sapiens
tggaatcttcttgct

SEQ ID NO: 1239006 - DNA, 15 bp, Homo sapiens
ctggaatcttcttgc

SEQ ID NO: 1239007 - DNA, 15 bp, Homo sapiens
tgtggtagtatgttg

SEQ ID NO: 1239008 - DNA, 15 bp, Homo sapiens
ttgtggtagtatgtt

SEQ ID NO: 1239009 - DNA, 15 bp, Homo sapiens
tttgtggtagtatgt

SEQ ID NO: 1239010 - DNA, 15 bp, Homo sapiens
ctttgtggtagtatg

SEQ ID NO: 1239011 - DNA, 15 bp, Homo sapiens
gctttgtggtagtat

SEQ ID NO: 1239012 - DNA, 15 bp, Homo sapiens
ggctttgtggtagta

SEQ ID NO: 1239013 - DNA, 15 bp, Homo sapiens
tggctttgtggtagt

SEQ ID NO: 1239014 - DNA, 15 bp, Homo sapiens
ctggctttgtggtag

SEQ ID NO: 1239015 - DNA, 15 bp, Homo sapiens
actggctttgtggta

SEQ ID NO: 1239016 - DNA, 15 bp, Homo sapiens
cactggctttgtggt

SEQ ID NO: 1239017 - DNA, 15 bp, Homo sapiens
tcactggctttgtgg

SEQ ID NO: 1239018 - DNA, 15 bp, Homo sapiens
gtcactggctttgtg

SEQ ID NO: 1239019 - DNA, 15 bp, Homo sapiens
ggtcactggctttgt

SEQ ID NO: 1239020 - DNA, 15 bp, Homo sapiens
tggtcactggctttg

SEQ ID NO: 1239021 - DNA, 15 bp, Homo sapiens
ctggtcactggcttt

SEQ ID NO: 1239022 - DNA, 15 bp, Homo sapiens
cctggtcactggctt

SEQ ID NO: 1239023 - DNA, 15 bp, Homo sapiens
acctggtcactggct

SEQ ID NO: 1239024 - DNA, 15 bp, Homo sapiens
cacctggtcactggc

SEQ ID NO: 1239025 - DNA, 15 bp, Homo sapiens
tcacctggtcactgg

SEQ ID NO: 1239026 - DNA, 15 bp, Homo sapiens
ctcacctggtcactg

SEQ ID NO: 1239027 - DNA, 15 bp, Homo sapiens
actcacctggtcact

SEQ ID NO: 1239028 - DNA, 15 bp, Homo sapiens
cactcacctggtcac

SEQ ID NO: 1239029 - DNA, 15 bp, Homo sapiens
ccactcacctggtca

SEQ ID NO: 1239030 - DNA, 15 bp, Homo sapiens
cccactcacctggtc

SEQ ID NO: 1239031 - DNA, 15 bp, Homo sapiens
acccactcacctggt

SEQ ID NO: 1239032 - DNA, 15 bp, Homo sapiens
cacccactcacctgg

SEQ ID NO: 1239033 - DNA, 15 bp, Homo sapiens
gcacccactcacctg

SEQ ID NO: 1239034 - DNA, 15 bp, Homo sapiens
tgcacccactcacct

SEQ ID NO: 1239035 - DNA, 15 bp, Homo sapiens
ctgcacccactcacc

SEQ ID NO: 1239036 - DNA, 15 bp, Homo sapiens
cctgcacccactcac

SEQ ID NO: 1239037 - DNA, 15 bp, Homo sapiens
ccctgcacccactca

SEQ ID NO: 1239038 - DNA, 15 bp, Homo sapiens
tccctgcacccactc

SEQ ID NO: 1239039 - DNA, 15 bp, Homo sapiens
gtccctgcacccact

SEQ ID NO: 1239040 - DNA, 15 bp, Homo sapiens
agtccctgcacccac

SEQ ID NO: 1239041 - DNA, 15 bp, Homo sapiens
tagtccctgcaccca

SEQ ID NO: 1239042 - DNA, 15 bp, Homo sapiens
ctagtccctgcaccc

SEQ ID NO: 1239043 - DNA, 15 bp, Homo sapiens
gctagtccctgcacc

SEQ ID NO: 1239044 - DNA, 15 bp, Homo sapiens
agctagtccctgcac

SEQ ID NO: 1239045 - DNA, 15 bp, Homo sapiens
cagctagtccctgca

SEQ ID NO: 1239046 - DNA, 15 bp, Homo sapiens
ccagctagtccctgc

SEQ ID NO: 1239047 - DNA, 15 bp, Homo sapiens
accagctagtccctg

SEQ ID NO: 1239048 - DNA, 15 bp, Homo sapiens
caccagctagtccct

SEQ ID NO: 1239049 - DNA, 15 bp, Homo sapiens
gcaccagctagtccc

SEQ ID NO: 1239050 - DNA, 15 bp, Homo sapiens
agcaccagctagtcc

SEQ ID NO: 1239051 - DNA, 15 bp, Homo sapiens
cagcaccagctagtc

SEQ ID NO: 1239052 - DNA, 15 bp, Homo sapiens
gcagcaccagctagt

SEQ ID NO: 1239053 - DNA, 15 bp, Homo sapiens
ggcagcaccagctag

SEQ ID NO: 1239054 - DNA, 15 bp, Homo sapiens
tggcagcaccagcta

SEQ ID NO: 1239055 - DNA, 15 bp, Homo sapiens
ctggcagcaccagct

SEQ ID NO: 1239056 - DNA, 15 bp, Homo sapiens
cctggcagcaccagc

SEQ ID NO: 1239057 - DNA, 15 bp, Homo sapiens
ccctggcagcaccag

SEQ ID NO: 1239058 - DNA, 15 bp, Homo sapiens
cccctggcagcacca

SEQ ID NO: 1239059 - DNA, 15 bp, Homo sapiens
gcccctggcagcacc

SEQ ID NO: 1239060 - DNA, 15 bp, Homo sapiens
agcccctggcagcac

SEQ ID NO: 1239061 - DNA, 15 bp, Homo sapiens
cagcccctggcagca

SEQ ID NO: 1239062 - DNA, 15 bp, Homo sapiens
gcagcccctggcagc

SEQ ID NO: 1239063 - DNA, 15 bp, Homo sapiens
agcagcccctggcag

SEQ ID NO: 1239064 - DNA, 15 bp, Homo sapiens
cagcagcccctggca

SEQ ID NO: 1239065 - DNA, 15 bp, Homo sapiens
ccagcagcccctggc

SEQ ID NO: 1239066 - DNA, 15 bp, Homo sapiens
cccagcagcccctgg

SEQ ID NO: 1239067 - DNA, 15 bp, Homo sapiens
gcccagcagcccctg

SEQ ID NO: 1239068 - DNA, 15 bp, Homo sapiens
ggcccagcagcccct

SEQ ID NO: 1239069 - DNA, 15 bp, Homo sapiens
aggcccagcagcccc

SEQ ID NO: 1239070 - DNA, 15 bp, Homo sapiens
caggcccagcagccc

SEQ ID NO: 1239071 - DNA, 15 bp, Homo sapiens
ccaggcccagcagcc

SEQ ID NO: 1239072 - DNA, 15 bp, Homo sapiens
tccaggcccagcagc

SEQ ID NO: 1239073 - DNA, 15 bp, Homo sapiens
ttccaggcccagcag

SEQ ID NO: 1239074 - DNA, 15 bp, Homo sapiens
cttccaggcccagca

SEQ ID NO: 1239075 - DNA, 15 bp, Homo sapiens
acttccaggcccagc

SEQ ID NO: 1239076 - DNA, 15 bp, Homo sapiens
gacttccaggcccag

SEQ ID NO: 1239077 - DNA, 15 bp, Homo sapiens
ggacttccaggccca

SEQ ID NO: 1239078 - DNA, 15 bp, Homo sapiens
tggacttccaggccc

SEQ ID NO: 1239079 - DNA, 15 bp, Homo sapiens
ctggacttccaggcc

SEQ ID NO: 1239080 - DNA, 15 bp, Homo sapiens
cctggacttccaggc

SEQ ID NO: 1239081 - DNA, 15 bp, Homo sapiens
acctggacttccagg

SEQ ID NO: 1239082 - DNA, 15 bp, Homo sapiens
cacctggacttccag

SEQ ID NO: 1239083 - DNA, 15 bp, Homo sapiens
ccacctggacttcca

SEQ ID NO: 1239084 - DNA, 15 bp, Homo sapiens
cccacctggacttcc

SEQ ID NO: 1239085 - DNA, 15 bp, Homo sapiens
ccccacctggacttc

SEQ ID NO: 1239086 - DNA, 15 bp, Homo sapiens
gccccacctggactt

SEQ ID NO: 1239087 - DNA, 15 bp, Homo sapiens
ggccccacctggact

SEQ ID NO: 1239088 - DNA, 15 bp, Homo sapiens
tggccccacctggac

SEQ ID NO: 1239089 - DNA, 15 bp, Homo sapiens
gtggccccacctgga

SEQ ID NO: 1239090 - DNA, 15 bp, Homo sapiens
agtggccccacctgg

SEQ ID NO: 1239091 - DNA, 15 bp, Homo sapiens
aagtggccccacctg

SEQ ID NO: 1239092 - DNA, 15 bp, Homo sapiens
caagtggccccacct

SEQ ID NO: 1239093 - DNA, 15 bp, Homo sapiens
gcaagtggccccacc

SEQ ID NO: 1239094 - DNA, 15 bp, Homo sapiens
agcaagtggccccac

SEQ ID NO: 1239095 - DNA, 15 bp, Homo sapiens
tagcaagtggcccca

SEQ ID NO: 1239096 - DNA, 15 bp, Homo sapiens
ttagcaagtggcccc

SEQ ID NO: 1239097 - DNA, 15 bp, Homo sapiens
attagcaagtggccc

SEQ ID NO: 1239098 - DNA, 15 bp, Homo sapiens
aattagcaagtggcc

SEQ ID NO: 1239099 - DNA, 15 bp, Homo sapiens
gaattagcaagtggc

SEQ ID NO: 1239100 - DNA, 15 bp, Homo sapiens
agaattagcaagtgg

SEQ ID NO: 1239101 - DNA, 15 bp, Homo sapiens
gagaattagcaagtg

SEQ ID NO: 1239102 - DNA, 15 bp, Homo sapiens
tgagaattagcaagt

SEQ ID NO: 1239103 - DNA, 15 bp, Homo sapiens
atgagaattagcaag

SEQ ID NO: 1239104 - DNA, 15 bp, Homo sapiens
catgagaattagcaa

SEQ ID NO: 1239105 - DNA, 15 bp, Homo sapiens
acatgagaattagca

SEQ ID NO: 1239106 - DNA, 15 bp, Homo sapiens
cacatgagaattagc

SEQ ID NO: 1239107 - DNA, 15 bp, Homo sapiens
acacatgagaattag

SEQ ID NO: 1239108 - DNA, 15 bp, Homo sapiens
aacacatgagaatta

SEQ ID NO: 1239109 - DNA, 15 bp, Homo sapiens
caacacatgagaatt

SEQ ID NO: 1239110 - DNA, 15 bp, Homo sapiens
gcaacacatgagaat

SEQ ID NO: 1239111 - DNA, 15 bp, Homo sapiens
agcaacacatgagaa

SEQ ID NO: 1239112 - DNA, 15 bp, Homo sapiens
gagcaacacatgaga

SEQ ID NO: 1239113 - DNA, 15 bp, Homo sapiens
ggagcaacacatgag

SEQ ID NO: 1239114 - DNA, 15 bp, Homo sapiens
cggagcaacacatga

SEQ ID NO: 1239115 - DNA, 15 bp, Homo sapiens
ccggagcaacacatg

SEQ ID NO: 1239116 - DNA, 15 bp, Homo sapiens
gccggagcaacacat

SEQ ID NO: 1239117 - DNA, 15 bp, Homo sapiens
ggccggagcaacaca

SEQ ID NO: 1239118 - DNA, 15 bp, Homo sapiens
gggccggagcaacac

SEQ ID NO: 1239119 - DNA, 15 bp, Homo sapiens
ggggccggagcaaca

SEQ ID NO: 1239120 - DNA, 15 bp, Homo sapiens
aggggccggagcaac

SEQ ID NO: 1239121 - DNA, 15 bp, Homo sapiens
gaggggccggagcaa

SEQ ID NO: 1239122 - DNA, 15 bp, Homo sapiens
ggaggggccggagca

SEQ ID NO: 1239123 - DNA, 15 bp, Homo sapiens
tggaggggccggagc

SEQ ID NO: 1239124 - DNA, 15 bp, Homo sapiens
ctggaggggccggag

SEQ ID NO: 1239125 - DNA, 15 bp, Homo sapiens
gctggaggggccgga

SEQ ID NO: 1239126 - DNA, 15 bp, Homo sapiens
agctggaggggccgg

SEQ ID NO: 1239127 - DNA, 15 bp, Homo sapiens
cagctggaggggccg

SEQ ID NO: 1239128 - DNA, 15 bp, Homo sapiens
gcagctggaggggcc

SEQ ID NO: 1239129 - DNA, 15 bp, Homo sapiens
tgcagctggaggggc

SEQ ID NO: 1239130 - DNA, 15 bp, Homo sapiens
ctgcagctggagggg

SEQ ID NO: 1239131 - DNA, 15 bp, Homo sapiens
cctgcagctggaggg

SEQ ID NO: 1239132 - DNA, 15 bp, Homo sapiens
acctgcagctggagg

SEQ ID NO: 1239133 - DNA, 15 bp, Homo sapiens
cacctgcagctggag

SEQ ID NO: 1239134 - DNA, 15 bp, Homo sapiens
ccacctgcagctgga

SEQ ID NO: 1239135 - DNA, 15 bp, Homo sapiens
cccacctgcagctgg

SEQ ID NO: 1239136 - DNA, 15 bp, Homo sapiens
acccacctgcagctg

SEQ ID NO: 1239137 - DNA, 15 bp, Homo sapiens
cacccacctgcagct

SEQ ID NO: 1239138 - DNA, 15 bp, Homo sapiens
acacccacctgcagc

SEQ ID NO: 1239139 - DNA, 15 bp, Homo sapiens
cacacccacctgcag

SEQ ID NO: 1239140 - DNA, 15 bp, Homo sapiens
ccacacccacctgca

SEQ ID NO: 1239141 - DNA, 15 bp, Homo sapiens
tccacacccacctgc

SEQ ID NO: 1239142 - DNA, 15 bp, Homo sapiens
ctccacacccacctg

SEQ ID NO: 1239143 - DNA, 15 bp, Homo sapiens
actccacacccacct

SEQ ID NO: 1239144 - DNA, 15 bp, Homo sapiens
aactccacacccacc

SEQ ID NO: 1239145 - DNA, 15 bp, Homo sapiens
aaactccacacccac

SEQ ID NO: 1239146 - DNA, 15 bp, Homo sapiens
caaactccacaccca

SEQ ID NO: 1239147 - DNA, 15 bp, Homo sapiens
tcaaactccacaccc

SEQ ID NO: 1239148 - DNA, 15 bp, Homo sapiens
ctcaaactccacacc

SEQ ID NO: 1239149 - DNA, 15 bp, Homo sapiens
cctcaaactccacac

SEQ ID NO: 1239150 - DNA, 15 bp, Homo sapiens
gcctcaaactccaca

SEQ ID NO: 1239151 - DNA, 15 bp, Homo sapiens
ggcctcaaactccac

SEQ ID NO: 1239152 - DNA, 15 bp, Homo sapiens
tggcctcaaactcca

SEQ ID NO: 1239153 - DNA, 15 bp, Homo sapiens
ctggcctcaaactcc

SEQ ID NO: 1239154 - DNA, 15 bp, Homo sapiens
gctggcctcaaactc

SEQ ID NO: 1239155 - DNA, 15 bp, Homo sapiens
tgctggcctcaaact

SEQ ID NO: 1239156 - DNA, 15 bp, Homo sapiens
gtgctggcctcaaac

SEQ ID NO: 1239157 - DNA, 15 bp, Homo sapiens
tgtgctggcctcaaa

SEQ ID NO: 1239158 - DNA, 15 bp, Homo sapiens
ttgtgctggcctcaa

SEQ ID NO: 1239159 - DNA, 15 bp, Homo sapiens
cttgtgctggcctca

SEQ ID NO: 1239160 - DNA, 15 bp, Homo sapiens
ccttgtgctggcctc

SEQ ID NO: 1239161 - DNA, 15 bp, Homo sapiens
tccttgtgctggcct

SEQ ID NO: 1239162 - DNA, 15 bp, Homo sapiens
atccttgtgctggcc

SEQ ID NO: 1239163 - DNA, 15 bp, Homo sapiens
catccttgtgctggc

SEQ ID NO: 1239164 - DNA, 15 bp, Homo sapiens
gcatccttgtgctgg

SEQ ID NO: 1239165 - DNA, 15 bp, Homo sapiens
tgcatccttgtgctg

SEQ ID NO: 1239166 - DNA, 15 bp, Homo sapiens
ctgcatccttgtgct

SEQ ID NO: 1239167 - DNA, 15 bp, Homo sapiens
cctgcatccttgtgc

SEQ ID NO: 1239168 - DNA, 15 bp, Homo sapiens
tcctgcatccttgtg

SEQ ID NO: 1239169 - DNA, 15 bp, Homo sapiens
gtcctgcatccttgt

SEQ ID NO: 1239170 - DNA, 15 bp, Homo sapiens
tgtcctgcatccttg

SEQ ID NO: 1239171 - DNA, 15 bp, Homo sapiens
gtgtcctgcatcctt

SEQ ID NO: 1239172 - DNA, 15 bp, Homo sapiens
ggtgtcctgcatcct

SEQ ID NO: 1239173 - DNA, 15 bp, Homo sapiens
tggtgtcctgcatcc

SEQ ID NO: 1239174 - DNA, 15 bp, Homo sapiens
ctggtgtcctgcatc

SEQ ID NO: 1239175 - DNA, 15 bp, Homo sapiens
gctggtgtcctgcat

SEQ ID NO: 1239176 - DNA, 15 bp, Homo sapiens
cgctggtgtcctgca

SEQ ID NO: 1239177 - DNA, 15 bp, Homo sapiens
acgctggtgtcctgc

SEQ ID NO: 1239178 - DNA, 15 bp, Homo sapiens
gacgctggtgtcctg

SEQ ID NO: 1239179 - DNA, 15 bp, Homo sapiens
agacgctggtgtcct

SEQ ID NO: 1239180 - DNA, 15 bp, Homo sapiens
gagacgctggtgtcc

SEQ ID NO: 1239181 - DNA, 15 bp, Homo sapiens
ggagacgctggtgtc

SEQ ID NO: 1239182 - DNA, 15 bp, Homo sapiens
aggagacgctggtgt

SEQ ID NO: 1239183 - DNA, 15 bp, Homo sapiens
aaggagacgctggtg

SEQ ID NO: 1239184 - DNA, 15 bp, Homo sapiens
gaaggagacgctggt

SEQ ID NO: 1239185 - DNA, 15 bp, Homo sapiens
cgaaggagacgctgg

SEQ ID NO: 1239186 - DNA, 15 bp, Homo sapiens
ccgaaggagacgctg

SEQ ID NO: 1239187 - DNA, 15 bp, Homo sapiens
cccgaaggagacgct

SEQ ID NO: 1239188 - DNA, 15 bp, Homo sapiens
acccgaaggagacgc

SEQ ID NO: 1239189 - DNA, 15 bp, Homo sapiens
tacccgaaggagacg

SEQ ID NO: 1239190 - DNA, 15 bp, Homo sapiens
gtacccgaaggagac

SEQ ID NO: 1239191 - DNA, 15 bp, Homo sapiens
ggtacccgaaggaga

SEQ ID NO: 1239192 - DNA, 15 bp, Homo sapiens
tggtacccgaaggag

SEQ ID NO: 1239193 - DNA, 15 bp, Homo sapiens
ctggtacccgaagga

SEQ ID NO: 1239194 - DNA, 15 bp, Homo sapiens
gctggtacccgaagg

SEQ ID NO: 1239195 - DNA, 15 bp, Homo sapiens
agctggtacccgaag

SEQ ID NO: 1239196 - DNA, 15 bp, Homo sapiens
cagctggtacccgaa

SEQ ID NO: 1239197 - DNA, 15 bp, Homo sapiens
ccagctggtacccga

SEQ ID NO: 1239198 - DNA, 15 bp, Homo sapiens
tccagctggtacccg

SEQ ID NO: 1239199 - DNA, 15 bp, Homo sapiens
gtccagctggtaccc

SEQ ID NO: 1239200 - DNA, 15 bp, Homo sapiens
ggtccagctggtacc

SEQ ID NO: 1239201 - DNA, 15 bp, Homo sapiens
aggtccagctggtac

SEQ ID NO: 1239202 - DNA, 15 bp, Homo sapiens
caggtccagctggta

SEQ ID NO: 1239203 - DNA, 15 bp, Homo sapiens
gcaggtccagctggt

SEQ ID NO: 1239204 - DNA, 15 bp, Homo sapiens
ggcaggtccagctgg

SEQ ID NO: 1239205 - DNA, 15 bp, Homo sapiens
gggcaggtccagctg

SEQ ID NO: 1239206 - DNA, 15 bp, Homo sapiens
tgggcaggtccagct

SEQ ID NO: 1239207 - DNA, 15 bp, Homo sapiens
ttgggcaggtccagc

SEQ ID NO: 1239208 - DNA, 15 bp, Homo sapiens
cttgggcaggtccag

SEQ ID NO: 1239209 - DNA, 15 bp, Homo sapiens
ccttgggcaggtcca

SEQ ID NO: 1239210 - DNA, 15 bp, Homo sapiens
gccttgggcaggtcc

SEQ ID NO: 1239211 - DNA, 15 bp, Homo sapiens
ggccttgggcaggtc

SEQ ID NO: 1239212 - DNA, 15 bp, Homo sapiens
tggccttgggcaggt

SEQ ID NO: 1239213 - DNA, 15 bp, Homo sapiens
ttggccttgggcagg

SEQ ID NO: 1239214 - DNA, 15 bp, Homo sapiens
gttggccttgggcag

SEQ ID NO: 1239215 - DNA, 15 bp, Homo sapiens
ggttggccttgggca

SEQ ID NO: 1239216 - DNA, 15 bp, Homo sapiens
aggttggccttgggc

SEQ ID NO: 1239217 - DNA, 15 bp, Homo sapiens
gaggttggccttggg

SEQ ID NO: 1239218 - DNA, 15 bp, Homo sapiens
ggaggttggccttgg

SEQ ID NO: 1239219 - DNA, 15 bp, Homo sapiens
aggaggttggccttg

SEQ ID NO: 1239220 - DNA, 15 bp, Homo sapiens
gaggaggttggcctt

SEQ ID NO: 1239221 - DNA, 15 bp, Homo sapiens
agaggaggttggcct

SEQ ID NO: 1239222 - DNA, 15 bp, Homo sapiens
aagaggaggttggcc

SEQ ID NO: 1239223 - DNA, 15 bp, Homo sapiens
gaagaggaggttggc

SEQ ID NO: 1239224 - DNA, 15 bp, Homo sapiens
tgaagaggaggttgg

SEQ ID NO: 1239225 - DNA, 15 bp, Homo sapiens
ttgaagaggaggttg

SEQ ID NO: 1239226 - DNA, 15 bp, Homo sapiens
tttgaagaggaggtt

SEQ ID NO: 1239227 - DNA, 15 bp, Homo sapiens
ctttgaagaggaggt

SEQ ID NO: 1239228 - DNA, 15 bp, Homo sapiens
cctttgaagaggagg

SEQ ID NO: 1239229 - DNA, 15 bp, Homo sapiens
acctttgaagaggag

SEQ ID NO: 1239230 - DNA, 15 bp, Homo sapiens
tacctttgaagagga

SEQ ID NO: 1239231 - DNA, 15 bp, Homo sapiens
ttacctttgaagagg

SEQ ID NO: 1239232 - DNA, 15 bp, Homo sapiens
tttacctttgaagag

SEQ ID NO: 1239233 - DNA, 15 bp, Homo sapiens
ctttacctttgaaga

SEQ ID NO: 1239234 - DNA, 15 bp, Homo sapiens
cctttacctttgaag

SEQ ID NO: 1239235 - DNA, 15 bp, Homo sapiens
acctttacctttgaa

SEQ ID NO: 1239236 - DNA, 15 bp, Homo sapiens
gacctttacctttga

SEQ ID NO: 1239237 - DNA, 15 bp, Homo sapiens
agacctttacctttg

SEQ ID NO: 1239238 - DNA, 15 bp, Homo sapiens
gagacctttaccttt

SEQ ID NO: 1239239 - DNA, 15 bp, Homo sapiens
cgagacctttacctt

SEQ ID NO: 1239240 - DNA, 15 bp, Homo sapiens
ccgagacctttacct

SEQ ID NO: 1239241 - DNA, 15 bp, Homo sapiens
accgagacctttacc

SEQ ID NO: 1239242 - DNA, 15 bp, Homo sapiens
aaccgagacctttac

SEQ ID NO: 1239243 - DNA, 15 bp, Homo sapiens
gaaccgagaccttta

SEQ ID NO: 1239244 - DNA, 15 bp, Homo sapiens
ggaaccgagaccttt

SEQ ID NO: 1239245 - DNA, 15 bp, Homo sapiens
gggaaccgagacctt

SEQ ID NO: 1239246 - DNA, 15 bp, Homo sapiens
ggggaaccgagacct

SEQ ID NO: 1239247 - DNA, 15 bp, Homo sapiens
aggggaaccgagacc

SEQ ID NO: 1239248 - DNA, 15 bp, Homo sapiens
taggggaaccgagac

SEQ ID NO: 1239249 - DNA, 15 bp, Homo sapiens
gtaggggaaccgaga

SEQ ID NO: 1239250 - DNA, 15 bp, Homo sapiens
cgtaggggaaccgag

SEQ ID NO: 1239251 - DNA, 15 bp, Homo sapiens
gcgtaggggaaccga

SEQ ID NO: 1239252 - DNA, 15 bp, Homo sapiens
cgcgtaggggaaccg

SEQ ID NO: 1239253 - DNA, 15 bp, Homo sapiens
ccgcgtaggggaacc

SEQ ID NO: 1239254 - DNA, 15 bp, Homo sapiens
cccgcgtaggggaac

SEQ ID NO: 1239255 - DNA, 15 bp, Homo sapiens
tcccgcgtaggggaa

SEQ ID NO: 1239256 - DNA, 15 bp, Homo sapiens
ttcccgcgtagggga

SEQ ID NO: 1239257 - DNA, 15 bp, Homo sapiens
tttcccgcgtagggg

SEQ ID NO: 1239258 - DNA, 15 bp, Homo sapiens
gtttcccgcgtaggg

SEQ ID NO: 1239259 - DNA, 15 bp, Homo sapiens
tgtttcccgcgtagg

SEQ ID NO: 1239260 - DNA, 15 bp, Homo sapiens
ctgtttcccgcgtag

SEQ ID NO: 1239261 - DNA, 15 bp, Homo sapiens
cctgtttcccgcgta

SEQ ID NO: 1239262 - DNA, 15 bp, Homo sapiens
gcctgtttcccgcgt

SEQ ID NO: 1239263 - DNA, 15 bp, Homo sapiens
tgcctgtttcccgcg

SEQ ID NO: 1239264 - DNA, 15 bp, Homo sapiens
ctgcctgtttcccgc

SEQ ID NO: 1239265 - DNA, 15 bp, Homo sapiens
cctgcctgtttcccg

SEQ ID NO: 1239266 - DNA, 15 bp, Homo sapiens
tcctgcctgtttccc

SEQ ID NO: 1239267 - DNA, 15 bp, Homo sapiens
ctcctgcctgtttcc

SEQ ID NO: 1239268 - DNA, 15 bp, Homo sapiens
cctcctgcctgtttc

SEQ ID NO: 1239269 - DNA, 15 bp, Homo sapiens
acctcctgcctgttt

SEQ ID NO: 1239270 - DNA, 15 bp, Homo sapiens
cacctcctgcctgtt

SEQ ID NO: 1239271 - DNA, 15 bp, Homo sapiens
tcacctcctgcctgt

SEQ ID NO: 1239272 - DNA, 15 bp, Homo sapiens
gtcacctcctgcctg

SEQ ID NO: 1239273 - DNA, 15 bp, Homo sapiens
agtcacctcctgcct

SEQ ID NO: 1239274 - DNA, 15 bp, Homo sapiens
gagtcacctcctgcc

SEQ ID NO: 1239275 - DNA, 15 bp, Homo sapiens
tgagtcacctcctgc

SEQ ID NO: 1239276 - DNA, 15 bp, Homo sapiens
ttgagtcacctcctg

SEQ ID NO: 1239277 - DNA, 15 bp, Homo sapiens
gttgagtcacctcct

SEQ ID NO: 1239278 - DNA, 15 bp, Homo sapiens
agttgagtcacctcc

SEQ ID NO: 1239279 - DNA, 15 bp, Homo sapiens
gagttgagtcacctc

SEQ ID NO: 1239280 - DNA, 15 bp, Homo sapiens
agagttgagtcacct

SEQ ID NO: 1239281 - DNA, 15 bp, Homo sapiens
cagagttgagtcacc

SEQ ID NO: 1239282 - DNA, 15 bp, Homo sapiens
tcagagttgagtcac

SEQ ID NO: 1239283 - DNA, 15 bp, Homo sapiens
ctcagagttgagtca

SEQ ID NO: 1239284 - DNA, 15 bp, Homo sapiens
actcagagttgagtc

SEQ ID NO: 1239285 - DNA, 15 bp, Homo sapiens
cactcagagttgagt

SEQ ID NO: 1239286 - DNA, 15 bp, Homo sapiens
ccactcagagttgag

SEQ ID NO: 1239287 - DNA, 15 bp, Homo sapiens
tccactcagagttga

SEQ ID NO: 1239288 - DNA, 15 bp, Homo sapiens
atccactcagagttg

SEQ ID NO: 1239289 - DNA, 15 bp, Homo sapiens
catccactcagagtt

SEQ ID NO: 1239290 - DNA, 15 bp, Homo sapiens
acatccactcagagt

SEQ ID NO: 1239291 - DNA, 15 bp, Homo sapiens
cacatccactcagag

SEQ ID NO: 1239292 - DNA, 15 bp, Homo sapiens
acacatccactcaga

SEQ ID NO: 1239293 - DNA, 15 bp, Homo sapiens
cacacatccactcag

SEQ ID NO: 1239294 - DNA, 15 bp, Homo sapiens
ccacacatccactca

SEQ ID NO: 1239295 - DNA, 15 bp, Homo sapiens
cccacacatccactc

SEQ ID NO: 1239296 - DNA, 15 bp, Homo sapiens
gcccacacatccact

SEQ ID NO: 1239297 - DNA, 15 bp, Homo sapiens
ggcccacacatccac

SEQ ID NO: 1239298 - DNA, 15 bp, Homo sapiens
tggcccacacatcca

SEQ ID NO: 1239299 - DNA, 15 bp, Homo sapiens
gtggcccacacatcc

SEQ ID NO: 1239300 - DNA, 15 bp, Homo sapiens
ggtggcccacacatc

SEQ ID NO: 1239301 - DNA, 15 bp, Homo sapiens
tggtggcccacacat

SEQ ID NO: 1239302 - DNA, 15 bp, Homo sapiens
gtggtggcccacaca

SEQ ID NO: 1239303 - DNA, 15 bp, Homo sapiens
tgtggtggcccacac

SEQ ID NO: 1239304 - DNA, 15 bp, Homo sapiens
ctgtggtggcccaca

SEQ ID NO: 1239305 - DNA, 15 bp, Homo sapiens
cctgtggtggcccac

SEQ ID NO: 1239306 - DNA, 15 bp, Homo sapiens
acctgtggtggccca

SEQ ID NO: 1239307 - DNA, 15 bp, Homo sapiens
cacctgtggtggccc

SEQ ID NO: 1239308 - DNA, 15 bp, Homo sapiens
agcacctgtggtggc

SEQ ID NO: 1239309 - DNA, 15 bp, Homo sapiens
cagcacctgtggtgg

SEQ ID NO: 1239310 - DNA, 15 bp, Homo sapiens
ccagcacctgtggtg

SEQ ID NO: 1239311 - DNA, 15 bp, Homo sapiens
tccagcacctgtggt

SEQ ID NO: 1239312 - DNA, 15 bp, Homo sapiens
ctccagcacctgtgg

SEQ ID NO: 1239313 - DNA, 15 bp, Homo sapiens
cctccagcacctgtg

SEQ ID NO: 1239314 - DNA, 15 bp, Homo sapiens
tcctccagcacctgt

SEQ ID NO: 1239315 - DNA, 15 bp, Homo sapiens
gtcctccagcacctg

SEQ ID NO: 1239316 - DNA, 15 bp, Homo sapiens
tgtcctccagcacct

SEQ ID NO: 1239317 - DNA, 15 bp, Homo sapiens
ctgtcctccagcacc

SEQ ID NO: 1239318 - DNA, 15 bp, Homo sapiens
actgtcctccagcac

SEQ ID NO: 1239319 - DNA, 15 bp, Homo sapiens
cactgtcctccagca

SEQ ID NO: 1239320 - DNA, 15 bp, Homo sapiens
acactgtcctccagc

SEQ ID NO: 1239321 - DNA, 15 bp, Homo sapiens
cacactgtcctccag

SEQ ID NO: 1239322 - DNA, 15 bp, Homo sapiens
gcacactgtcctcca

SEQ ID NO: 1239323 - DNA, 15 bp, Homo sapiens
agcacactgtcctcc

SEQ ID NO: 1239324 - DNA, 15 bp, Homo sapiens
cagcacactgtcctc

SEQ ID NO: 1239325 - DNA, 15 bp, Homo sapiens
gcagcacactgtcct

SEQ ID NO: 1239326 - DNA, 15 bp, Homo sapiens
ggcagcacactgtcc

SEQ ID NO: 1239327 - DNA, 15 bp, Homo sapiens
tggcagcacactgtc

SEQ ID NO: 1239328 - DNA, 15 bp, Homo sapiens
gtggcagcacactgt

SEQ ID NO: 1239329 - DNA, 15 bp, Homo sapiens
ggtggcagcacactg

SEQ ID NO: 1239330 - DNA, 15 bp, Homo sapiens
gggtggcagcacact

SEQ ID NO: 1239331 - DNA, 15 bp, Homo sapiens
agggtggcagcacac

SEQ ID NO: 1239332 - DNA, 15 bp, Homo sapiens
cagggtggcagcaca

SEQ ID NO: 1239333 - DNA, 15 bp, Homo sapiens
acagggtggcagcac

SEQ ID NO: 1239334 - DNA, 15 bp, Homo sapiens
cacagggtggcagca

SEQ ID NO: 1239335 - DNA, 15 bp, Homo sapiens
ccacagggtggcagc

SEQ ID NO: 1239336 - DNA, 15 bp, Homo sapiens
cccacagggtggcag

SEQ ID NO: 1239337 - DNA, 15 bp, Homo sapiens
gcccacagggtggca

SEQ ID NO: 1239338 - DNA, 15 bp, Homo sapiens
ggcccacagggtggc

SEQ ID NO: 1239339 - DNA, 15 bp, Homo sapiens
aggcccacagggtgg

SEQ ID NO: 1239340 - DNA, 15 bp, Homo sapiens
gaggcccacagggtg

SEQ ID NO: 1239341 - DNA, 15 bp, Homo sapiens
ggaggcccacagggt

SEQ ID NO: 1239342 - DNA, 15 bp, Homo sapiens
tggaggcccacaggg

SEQ ID NO: 1239343 - DNA, 15 bp, Homo sapiens
gtggaggcccacagg

SEQ ID NO: 1239344 - DNA, 15 bp, Homo sapiens
tgtggaggcccacag

SEQ ID NO: 1239345 - DNA, 15 bp, Homo sapiens
atgtggaggcccaca

SEQ ID NO: 1239346 - DNA, 15 bp, Homo sapiens
aatgtggaggcccac

SEQ ID NO: 1239347 - DNA, 15 bp, Homo sapiens
taatgtggaggccca

SEQ ID NO: 1239348 - DNA, 15 bp, Homo sapiens
gtaatgtggaggccc

SEQ ID NO: 1239349 - DNA, 15 bp, Homo sapiens
ggtaatgtggaggcc

SEQ ID NO: 1239350 - DNA, 15 bp, Homo sapiens
tggtaatgtggaggc

SEQ ID NO: 1239351 - DNA, 15 bp, Homo sapiens
ctggtaatgtggagg

SEQ ID NO: 1239352 - DNA, 15 bp, Homo sapiens
cctggtaatgtggag

SEQ ID NO: 1239353 - DNA, 15 bp, Homo sapiens
ccctggtaatgtgga

SEQ ID NO: 1239354 - DNA, 15 bp, Homo sapiens
tccctggtaatgtgg

SEQ ID NO: 1239355 - DNA, 15 bp, Homo sapiens
ttccctggtaatgtg

SEQ ID NO: 1239356 - DNA, 15 bp, Homo sapiens
gttccctggtaatgt

SEQ ID NO: 1239357 - DNA, 15 bp, Homo sapiens
tgttccctggtaatg

SEQ ID NO: 1239358 - DNA, 15 bp, Homo sapiens
gtgttccctggtaat

SEQ ID NO: 1239359 - DNA, 15 bp, Homo sapiens
agtgttccctggtaa

SEQ ID NO: 1239360 - DNA, 15 bp, Homo sapiens
aagtgttccctggta

SEQ ID NO: 1239361 - DNA, 15 bp, Homo sapiens
caagtgttccctggt

SEQ ID NO: 1239362 - DNA, 15 bp, Homo sapiens
acaagtgttccctgg

SEQ ID NO: 1239363 - DNA, 15 bp, Homo sapiens
aacaagtgttccctg

SEQ ID NO: 1239364 - DNA, 15 bp, Homo sapiens
taacaagtgttccct

SEQ ID NO: 1239365 - DNA, 15 bp, Homo sapiens
ttaacaagtgttccc

SEQ ID NO: 1239366 - DNA, 15 bp, Homo sapiens
tttaacaagtgttcc

SEQ ID NO: 1239367 - DNA, 15 bp, Homo sapiens
ttttaacaagtgttc

SEQ ID NO: 1239368 - DNA, 15 bp, Homo sapiens
cttttaacaagtgtt

SEQ ID NO: 1239369 - DNA, 15 bp, Homo sapiens
ccttttaacaagtgt

SEQ ID NO: 1239370 - DNA, 15 bp, Homo sapiens
accttttaacaagtg

SEQ ID NO: 1239371 - DNA, 15 bp, Homo sapiens
taccttttaacaagt

SEQ ID NO: 1239372 - DNA, 15 bp, Homo sapiens
ctaccttttaacaag

SEQ ID NO: 1239373 - DNA, 15 bp, Homo sapiens
cctaccttttaacaa

SEQ ID NO: 1239374 - DNA, 15 bp, Homo sapiens
acctaccttttaaca

SEQ ID NO: 1239375 - DNA, 15 bp, Homo sapiens
cacctaccttttaac

SEQ ID NO: 1239376 - DNA, 15 bp, Homo sapiens
ccacctaccttttaa

SEQ ID NO: 1239377 - DNA, 15 bp, Homo sapiens
cccacctacctttta

SEQ ID NO: 1239378 - DNA, 15 bp, Homo sapiens
ccccacctacctttt

SEQ ID NO: 1239379 - DNA, 15 bp, Homo sapiens
gccccacctaccttt

SEQ ID NO: 1239380 - DNA, 15 bp, Homo sapiens
ggccccacctacctt

SEQ ID NO: 1239381 - DNA, 15 bp, Homo sapiens
cggccccacctacct

SEQ ID NO: 1239382 - DNA, 15 bp, Homo sapiens
ccggccccacctacc

SEQ ID NO: 1239383 - DNA, 15 bp, Homo sapiens
cccggccccacctac

SEQ ID NO: 1239384 - DNA, 15 bp, Homo sapiens
acccggccccaccta

SEQ ID NO: 1239385 - DNA, 15 bp, Homo sapiens
cacccggccccacct

SEQ ID NO: 1239386 - DNA, 15 bp, Homo sapiens
gcacccggccccacc

SEQ ID NO: 1239387 - DNA, 15 bp, Homo sapiens
cgcacccggccccac

SEQ ID NO: 1239388 - DNA, 15 bp, Homo sapiens
ccgcacccggcccca

SEQ ID NO: 1239389 - DNA, 15 bp, Homo sapiens
accgcacccggcccc

SEQ ID NO: 1239390 - DNA, 15 bp, Homo sapiens
caccgcacccggccc

SEQ ID NO: 1239391 - DNA, 15 bp, Homo sapiens
ccaccgcacccggcc

SEQ ID NO: 1239392 - DNA, 15 bp, Homo sapiens
gccaccgcacccggc

SEQ ID NO: 1239393 - DNA, 15 bp, Homo sapiens
agccaccgcacccgg

SEQ ID NO: 1239394 - DNA, 15 bp, Homo sapiens
gagccaccgcacccg

SEQ ID NO: 1239395 - DNA, 15 bp, Homo sapiens
tgagccaccgcaccc

SEQ ID NO: 1239396 - DNA, 15 bp, Homo sapiens
cgtgagccaccgcac

SEQ ID NO: 1239397 - DNA, 15 bp, Homo sapiens
gcgtgagccaccgca

SEQ ID NO: 1239398 - DNA, 15 bp, Homo sapiens
ggcccgccttggcct

SEQ ID NO: 1239399 - DNA, 15 bp, Homo sapiens
cggcccgccttggcc

SEQ ID NO: 1239400 - DNA, 15 bp, Homo sapiens
tcggcccgccttggc

SEQ ID NO: 1239401 - DNA, 15 bp, Homo sapiens
ctcggcccgccttgg

SEQ ID NO: 1239402 - DNA, 15 bp, Homo sapiens
cctcggcccgccttg

SEQ ID NO: 1239403 - DNA, 15 bp, Homo sapiens
acctcggcccgcctt

SEQ ID NO: 1239404 - DNA, 15 bp, Homo sapiens
tacctcggcccgcct

SEQ ID NO: 1239405 - DNA, 15 bp, Homo sapiens
ttacctcggcccgcc

SEQ ID NO: 1239406 - DNA, 15 bp, Homo sapiens
cttacctcggcccgc

SEQ ID NO: 1239407 - DNA, 15 bp, Homo sapiens
ccttacctcggcccg

SEQ ID NO: 1239408 - DNA, 15 bp, Homo sapiens
tccttacctcggccc

SEQ ID NO: 1239409 - DNA, 15 bp, Homo sapiens
ctccttacctcggcc

SEQ ID NO: 1239410 - DNA, 15 bp, Homo sapiens
tctccttacctcggc

SEQ ID NO: 1239411 - DNA, 15 bp, Homo sapiens
atctccttacctcgg

SEQ ID NO: 1239412 - DNA, 15 bp, Homo sapiens
aatctccttacctcg

SEQ ID NO: 1239413 - DNA, 15 bp, Homo sapiens
caatctccttacctc

SEQ ID NO: 1239414 - DNA, 15 bp, Homo sapiens
tcaatctccttacct

SEQ ID NO: 1239415 - DNA, 15 bp, Homo sapiens
ctcaatctccttacc

SEQ ID NO: 1239416 - DNA, 15 bp, Homo sapiens
tctcaatctccttac

SEQ ID NO: 1239417 - DNA, 15 bp, Homo sapiens
gtctcaatctcctta

SEQ ID NO: 1239418 - DNA, 15 bp, Homo sapiens
ggtctcaatctcctt

SEQ ID NO: 1239419 - DNA, 15 bp, Homo sapiens
atggtctcaatctcc

SEQ ID NO: 1239420 - DNA, 15 bp, Homo sapiens
gatggtctcaatctc

SEQ ID NO: 1239421 - DNA, 15 bp, Homo sapiens
ggatggtctcaatct

SEQ ID NO: 1239422 - DNA, 15 bp, Homo sapiens
aggatggtctcaatc

SEQ ID NO: 1239423 - DNA, 15 bp, Homo sapiens
caggatggtctcaat

SEQ ID NO: 1239424 - DNA, 15 bp, Homo sapiens
ccaggatggtctcaa

SEQ ID NO: 1239425 - DNA, 15 bp, Homo sapiens
gccaggatggtctca

SEQ ID NO: 1239426 - DNA, 15 bp, Homo sapiens
agtttcaccgtgtta

SEQ ID NO: 1239427 - DNA, 15 bp, Homo sapiens
gagtttcaccgtgtt

SEQ ID NO: 1239428 - DNA, 15 bp, Homo sapiens
ggagtttcaccgtgt

SEQ ID NO: 1239429 - DNA, 15 bp, Homo sapiens
cggagtttcaccgtg

SEQ ID NO: 1239430 - DNA, 15 bp, Homo sapiens
acggagtttcaccgt

SEQ ID NO: 1239431 - DNA, 15 bp, Homo sapiens
gacggagtttcaccg

SEQ ID NO: 1239432 - DNA, 15 bp, Homo sapiens
agtagagacggagtt

SEQ ID NO: 1239433 - DNA, 15 bp, Homo sapiens
tagtagagacggagt

SEQ ID NO: 1239434 - DNA, 15 bp, Homo sapiens
ttagtagagacggag

SEQ ID NO: 1239435 - DNA, 15 bp, Homo sapiens
tttagtagagacgga

SEQ ID NO: 1239436 - DNA, 15 bp, Homo sapiens
gtttttgtattttta

SEQ ID NO: 1239437 - DNA, 15 bp, Homo sapiens
tgtttttgtattttt

SEQ ID NO: 1239438 - DNA, 15 bp, Homo sapiens
ttgtttttgtatttt

SEQ ID NO: 1239439 - DNA, 15 bp, Homo sapiens
tttgtttttgtattt

SEQ ID NO: 1239440 - DNA, 15 bp, Homo sapiens
ttttgtttttgtatt

SEQ ID NO: 1239441 - DNA, 15 bp, Homo sapiens
attttgtttttgtat

SEQ ID NO: 1239442 - DNA, 15 bp, Homo sapiens
aattttgtttttgta

SEQ ID NO: 1239443 - DNA, 15 bp, Homo sapiens
taattttgtttttgt

SEQ ID NO: 1239444 - DNA, 15 bp, Homo sapiens
ctaattttgtttttg

SEQ ID NO: 1239445 - DNA, 15 bp, Homo sapiens
gctaattttgttttt

SEQ ID NO: 1239446 - DNA, 15 bp, Homo sapiens
ggctaattttgtttt

SEQ ID NO: 1239447 - DNA, 15 bp, Homo sapiens
cggctaattttgttt

SEQ ID NO: 1239448 - DNA, 15 bp, Homo sapiens
ccggctaattttgtt

SEQ ID NO: 1239449 - DNA, 15 bp, Homo sapiens
aaccacacccggcta

SEQ ID NO: 1239450 - DNA, 15 bp, Homo sapiens
caaccacacccggct

SEQ ID NO: 1239451 - DNA, 15 bp, Homo sapiens
gcaaccacacccggc

SEQ ID NO: 1239452 - DNA, 15 bp, Homo sapiens
cgcaaccacacccgg

SEQ ID NO: 1239453 - DNA, 15 bp, Homo sapiens
ccgcaaccacacccg

SEQ ID NO: 1239454 - DNA, 15 bp, Homo sapiens
cccgcaaccacaccc

SEQ ID NO: 1239455 - DNA, 15 bp, Homo sapiens
acccgcaaccacacc

SEQ ID NO: 1239456 - DNA, 15 bp, Homo sapiens
cacccgcaaccacac

SEQ ID NO: 1239457 - DNA, 15 bp, Homo sapiens
gcacccgcaaccaca

SEQ ID NO: 1239458 - DNA, 15 bp, Homo sapiens
ggcacccgcaaccac

SEQ ID NO: 1239459 - DNA, 15 bp, Homo sapiens
aggcacccgcaacca

SEQ ID NO: 1239460 - DNA, 15 bp, Homo sapiens
taggcacccgcaacc

SEQ ID NO: 1239461 - DNA, 15 bp, Homo sapiens
ataggcacccgcaac

SEQ ID NO: 1239462 - DNA, 15 bp, Homo sapiens
tataggcacccgcaa

SEQ ID NO: 1239463 - DNA, 15 bp, Homo sapiens
ctataggcacccgca

SEQ ID NO: 1239464 - DNA, 15 bp, Homo sapiens
actataggcacccgc

SEQ ID NO: 1239465 - DNA, 15 bp, Homo sapiens
gactataggcacccg

SEQ ID NO: 1239466 - DNA, 15 bp, Homo sapiens
ggactataggcaccc

SEQ ID NO: 1239467 - DNA, 15 bp, Homo sapiens
gggactataggcacc

SEQ ID NO: 1239468 - DNA, 15 bp, Homo sapiens
tgggactataggcac

SEQ ID NO: 1239469 - DNA, 15 bp, Homo sapiens
ttgggactataggca

SEQ ID NO: 1239470 - DNA, 15 bp, Homo sapiens
gttgggactataggc

SEQ ID NO: 1239471 - DNA, 15 bp, Homo sapiens
agttgggactatagg

SEQ ID NO: 1239472 - DNA, 15 bp, Homo sapiens
tagttgggactatag

SEQ ID NO: 1239473 - DNA, 15 bp, Homo sapiens
gtagttgggactata

SEQ ID NO: 1239474 - DNA, 15 bp, Homo sapiens
agtagttgggactat

SEQ ID NO: 1239475 - DNA, 15 bp, Homo sapiens
tcagtagttgggact

SEQ ID NO: 1239476 - DNA, 15 bp, Homo sapiens
ctcagtagttgggac

SEQ ID NO: 1239477 - DNA, 15 bp, Homo sapiens
cctcagtagttggga

SEQ ID NO: 1239478 - DNA, 15 bp, Homo sapiens
gcctcagtagttggg

SEQ ID NO: 1239479 - DNA, 15 bp, Homo sapiens
agcctcagtagttgg

SEQ ID NO: 1239480 - DNA, 15 bp, Homo sapiens
cagcctcagtagttg

SEQ ID NO: 1239481 - DNA, 15 bp, Homo sapiens
tcagcctcagtagtt

SEQ ID NO: 1239482 - DNA, 15 bp, Homo sapiens
ctcagcctcagtagt

SEQ ID NO: 1239483 - DNA, 15 bp, Homo sapiens
cctcagcctcagtag

SEQ ID NO: 1239484 - DNA, 15 bp, Homo sapiens
gcctcagcctcagta

SEQ ID NO: 1239485 - DNA, 15 bp, Homo sapiens
cgcctcagcctcagt

SEQ ID NO: 1239486 - DNA, 15 bp, Homo sapiens
ccgcctcagcctcag

SEQ ID NO: 1239487 - DNA, 15 bp, Homo sapiens
cccgcctcagcctca

SEQ ID NO: 1239488 - DNA, 15 bp, Homo sapiens
ttcccgcctcagcct

SEQ ID NO: 1239489 - DNA, 15 bp, Homo sapiens
tttcccgcctcagcc

SEQ ID NO: 1239490 - DNA, 15 bp, Homo sapiens
ttttcccgcctcagc

SEQ ID NO: 1239491 - DNA, 15 bp, Homo sapiens
attttcccgcctcag

SEQ ID NO: 1239492 - DNA, 15 bp, Homo sapiens
cattttcccgcctca

SEQ ID NO: 1239493 - DNA, 15 bp, Homo sapiens
ccattttcccgcctc

SEQ ID NO: 1239494 - DNA, 15 bp, Homo sapiens
accattttcccgcct

SEQ ID NO: 1239495 - DNA, 15 bp, Homo sapiens
taccattttcccgcc

SEQ ID NO: 1239496 - DNA, 15 bp, Homo sapiens
ataccattttcccgc

SEQ ID NO: 1239497 - DNA, 15 bp, Homo sapiens
cataccattttcccg

SEQ ID NO: 1239498 - DNA, 15 bp, Homo sapiens
tcataccattttccc

SEQ ID NO: 1239499 - DNA, 15 bp, Homo sapiens
ttcataccattttcc

SEQ ID NO: 1239500 - DNA, 15 bp, Homo sapiens
gttcataccattttc

SEQ ID NO: 1239501 - DNA, 15 bp, Homo sapiens
ggttcataccatttt

SEQ ID NO: 1239502 - DNA, 15 bp, Homo sapiens
gggttcataccattt

SEQ ID NO: 1239503 - DNA, 15 bp, Homo sapiens
tgggttcataccatt

SEQ ID NO: 1239504 - DNA, 15 bp, Homo sapiens
ctgggttcataccat

SEQ ID NO: 1239505 - DNA, 15 bp, Homo sapiens
cctgggttcatacca

SEQ ID NO: 1239506 - DNA, 15 bp, Homo sapiens
tcctgggttcatacc

SEQ ID NO: 1239507 - DNA, 15 bp, Homo sapiens
ctcctgggttcatac

SEQ ID NO: 1239508 - DNA, 15 bp, Homo sapiens
cctcctgggttcata

SEQ ID NO: 1239509 - DNA, 15 bp, Homo sapiens
cgcaagctccgcctc

SEQ ID NO: 1239510 - DNA, 15 bp, Homo sapiens
ccgcaagctccgcct

SEQ ID NO: 1239511 - DNA, 15 bp, Homo sapiens
accgcaagctccgcc

SEQ ID NO: 1239512 - DNA, 15 bp, Homo sapiens
caccgcaagctccgc

SEQ ID NO: 1239513 - DNA, 15 bp, Homo sapiens
tcaccgcaagctccg

SEQ ID NO: 1239514 - DNA, 15 bp, Homo sapiens
cgatctcggctcacc

SEQ ID NO: 1239515 - DNA, 15 bp, Homo sapiens
ggtggcacgatctcg

SEQ ID NO: 1239516 - DNA, 15 bp, Homo sapiens
cggtggcacgatctc

SEQ ID NO: 1239517 - DNA, 15 bp, Homo sapiens
gcggtggcacgatct

SEQ ID NO: 1239518 - DNA, 15 bp, Homo sapiens
tgcggtggcacgatc

SEQ ID NO: 1239519 - DNA, 15 bp, Homo sapiens
gtgcggtggcacgat

SEQ ID NO: 1239520 - DNA, 15 bp, Homo sapiens
agtgcggtggcacga

SEQ ID NO: 1239521 - DNA, 15 bp, Homo sapiens
gagtgcggtggcacg

SEQ ID NO: 1239522 - DNA, 15 bp, Homo sapiens
ggagtgcggtggcac

SEQ ID NO: 1239523 - DNA, 15 bp, Homo sapiens
tggagtgcggtggca

SEQ ID NO: 1239524 - DNA, 15 bp, Homo sapiens
ctggagtgcggtggc

SEQ ID NO: 1239525 - DNA, 15 bp, Homo sapiens
tggagtcttgctctg

SEQ ID NO: 1239526 - DNA, 15 bp, Homo sapiens
cttttttttttttga

SEQ ID NO: 1239527 - DNA, 15 bp, Homo sapiens
acttttttttttttg

SEQ ID NO: 1239528 - DNA, 15 bp, Homo sapiens
cctactttttttttt

SEQ ID NO: 1239529 - DNA, 15 bp, Homo sapiens
acctacttttttttt

SEQ ID NO: 1239530 - DNA, 15 bp, Homo sapiens
cacctactttttttt

SEQ ID NO: 1239531 - DNA, 15 bp, Homo sapiens
ccacctacttttttt

SEQ ID NO: 1239532 - DNA, 15 bp, Homo sapiens
tccacctactttttt

SEQ ID NO: 1239533 - DNA, 15 bp, Homo sapiens
gtccacctacttttt

SEQ ID NO: 1239534 - DNA, 15 bp, Homo sapiens
tgtccacctactttt

SEQ ID NO: 1239535 - DNA, 15 bp, Homo sapiens
ttgtccacctacttt

SEQ ID NO: 1239536 - DNA, 15 bp, Homo sapiens
gttgtccacctactt

SEQ ID NO: 1239537 - DNA, 15 bp, Homo sapiens
ggttgtccacctact

SEQ ID NO: 1239538 - DNA, 15 bp, Homo sapiens
gggttgtccacctac

SEQ ID NO: 1239539 - DNA, 15 bp, Homo sapiens
agggttgtccaccta

SEQ ID NO: 1239540 - DNA, 15 bp, Homo sapiens
gagggttgtccacct

SEQ ID NO: 1239541 - DNA, 15 bp, Homo sapiens
agagggttgtccacc

SEQ ID NO: 1239542 - DNA, 15 bp, Homo sapiens
tagagggttgtccac

SEQ ID NO: 1239543 - DNA, 15 bp, Homo sapiens
gtagagggttgtcca

SEQ ID NO: 1239544 - DNA, 15 bp, Homo sapiens
agtagagggttgtcc

SEQ ID NO: 1239545 - DNA, 15 bp, Homo sapiens
tagtagagggttgtc

SEQ ID NO: 1239546 - DNA, 15 bp, Homo sapiens
atagtagagggttgt

SEQ ID NO: 1239547 - DNA, 15 bp, Homo sapiens
catagtagagggttg

SEQ ID NO: 1239548 - DNA, 15 bp, Homo sapiens
acatagtagagggtt

SEQ ID NO: 1239549 - DNA, 15 bp, Homo sapiens
aacatagtagagggt

SEQ ID NO: 1239550 - DNA, 15 bp, Homo sapiens
aaacatagtagaggg

SEQ ID NO: 1239551 - DNA, 15 bp, Homo sapiens
aaaacatagtagagg

SEQ ID NO: 1239552 - DNA, 15 bp, Homo sapiens
taaaacatagtagag

SEQ ID NO: 1239553 - DNA, 15 bp, Homo sapiens
ataaaacatagtaga

SEQ ID NO: 1239554 - DNA, 15 bp, Homo sapiens
cataaaacatagtag

SEQ ID NO: 1239555 - DNA, 15 bp, Homo sapiens
gcataaaacatagta

SEQ ID NO: 1239556 - DNA, 15 bp, Homo sapiens
agcataaaacatagt

SEQ ID NO: 1239557 - DNA, 15 bp, Homo sapiens
aagcataaaacatag

SEQ ID NO: 1239558 - DNA, 15 bp, Homo sapiens
caagcataaaacata

SEQ ID NO: 1239559 - DNA, 15 bp, Homo sapiens
ccaagcataaaacat

SEQ ID NO: 1239560 - DNA, 15 bp, Homo sapiens
tccaagcataaaaca

SEQ ID NO: 1239561 - DNA, 15 bp, Homo sapiens
ttccaagcataaaac

SEQ ID NO: 1239562 - DNA, 15 bp, Homo sapiens
tttccaagcataaaa

SEQ ID NO: 1239563 - DNA, 15 bp, Homo sapiens
ttttccaagcataaa

SEQ ID NO: 1239564 - DNA, 15 bp, Homo sapiens
tttttccaagcataa

SEQ ID NO: 1239565 - DNA, 15 bp, Homo sapiens
ttttttccaagcata

SEQ ID NO: 1239566 - DNA, 15 bp, Homo sapiens
tttttttccaagcat

SEQ ID NO: 1239567 - DNA, 15 bp, Homo sapiens
ttttttttccaagca

SEQ ID NO: 1239568 - DNA, 15 bp, Homo sapiens
tttttttttccaagc

SEQ ID NO: 1239569 - DNA, 15 bp, Homo sapiens
ctttttttttccaag

SEQ ID NO: 1239570 - DNA, 15 bp, Homo sapiens
actttttttttccaa

SEQ ID NO: 1239571 - DNA, 15 bp, Homo sapiens
tactttttttttcca

SEQ ID NO: 1239572 - DNA, 15 bp, Homo sapiens
ctactttttttttcc

SEQ ID NO: 1239573 - DNA, 15 bp, Homo sapiens
cctactttttttttc

SEQ ID NO: 1239574 - DNA, 15 bp, Homo sapiens
tacctactttttttt

SEQ ID NO: 1239575 - DNA, 15 bp, Homo sapiens
ctacctacttttttt

SEQ ID NO: 1239576 - DNA, 15 bp, Homo sapiens
tctacctactttttt

SEQ ID NO: 1239577 - DNA, 15 bp, Homo sapiens
ctctacctacttttt

SEQ ID NO: 1239578 - DNA, 15 bp, Homo sapiens
gctctacctactttt

SEQ ID NO: 1239579 - DNA, 15 bp, Homo sapiens
tgctctacctacttt

SEQ ID NO: 1239580 - DNA, 15 bp, Homo sapiens
ctgctctacctactt

SEQ ID NO: 1239581 - DNA, 15 bp, Homo sapiens
gctgctctacctact

SEQ ID NO: 1239582 - DNA, 15 bp, Homo sapiens
ggctgctctacctac

SEQ ID NO: 1239583 - DNA, 15 bp, Homo sapiens
tggctgctctaccta

SEQ ID NO: 1239584 - DNA, 15 bp, Homo sapiens
ctggctgctctacct

SEQ ID NO: 1239585 - DNA, 15 bp, Homo sapiens
cctggctgctctacc

SEQ ID NO: 1239586 - DNA, 15 bp, Homo sapiens
gcctggctgctctac

SEQ ID NO: 1239587 - DNA, 15 bp, Homo sapiens
cgcctggctgctcta

SEQ ID NO: 1239588 - DNA, 15 bp, Homo sapiens
acgcctggctgctct

SEQ ID NO: 1239589 - DNA, 15 bp, Homo sapiens
cacgcctggctgctc

SEQ ID NO: 1239590 - DNA, 15 bp, Homo sapiens
ccacgcctggctgct

SEQ ID NO: 1239591 - DNA, 15 bp, Homo sapiens
tcaccacgcctggct

SEQ ID NO: 1239592 - DNA, 15 bp, Homo sapiens
gtcaccacgcctggc

SEQ ID NO: 1239593 - DNA, 15 bp, Homo sapiens
agtcaccacgcctgg

SEQ ID NO: 1239594 - DNA, 15 bp, Homo sapiens
gagtcaccacgcctg

SEQ ID NO: 1239595 - DNA, 15 bp, Homo sapiens
tgagtcaccacgcct

SEQ ID NO: 1239596 - DNA, 15 bp, Homo sapiens
gtgagtcaccacgcc

SEQ ID NO: 1239597 - DNA, 15 bp, Homo sapiens
cgtgagtcaccacgc

SEQ ID NO: 1239598 - DNA, 15 bp, Homo sapiens
gcgtgagtcaccacg

SEQ ID NO: 1239599 - DNA, 15 bp, Homo sapiens
ggcgtgagtcaccac

SEQ ID NO: 1239600 - DNA, 15 bp, Homo sapiens
aggcgtgagtcacca

SEQ ID NO: 1239601 - DNA, 15 bp, Homo sapiens
caggcgtgagtcacc

SEQ ID NO: 1239602 - DNA, 15 bp, Homo sapiens
acaggcgtgagtcac

SEQ ID NO: 1239603 - DNA, 15 bp, Homo sapiens
tacaggcgtgagtca

SEQ ID NO: 1239604 - DNA, 15 bp, Homo sapiens
ttacaggcgtgagtc

SEQ ID NO: 1239605 - DNA, 15 bp, Homo sapiens
attacaggcgtgagt

SEQ ID NO: 1239606 - DNA, 15 bp, Homo sapiens
atgctgggattacag

SEQ ID NO: 1239607 - DNA, 15 bp, Homo sapiens
aatgctgggattaca

SEQ ID NO: 1239608 - DNA, 15 bp, Homo sapiens
aaatgctgggattac

SEQ ID NO: 1239609 - DNA, 15 bp, Homo sapiens
aaaatgctgggatta

SEQ ID NO: 1239610 - DNA, 15 bp, Homo sapiens
caaaatgctgggatt

SEQ ID NO: 1239611 - DNA, 15 bp, Homo sapiens
ccaaaatgctgggat

SEQ ID NO: 1239612 - DNA, 15 bp, Homo sapiens
cccaaaatgctggga

SEQ ID NO: 1239613 - DNA, 15 bp, Homo sapiens
tcccaaaatgctggg

SEQ ID NO: 1239614 - DNA, 15 bp, Homo sapiens
ctcccaaaatgctgg

SEQ ID NO: 1239615 - DNA, 15 bp, Homo sapiens
cctcccaaaatgctg

SEQ ID NO: 1239616 - DNA, 15 bp, Homo sapiens
gcctcccaaaatgct

SEQ ID NO: 1239617 - DNA, 15 bp, Homo sapiens
ggcctcccaaaatgc

SEQ ID NO: 1239618 - DNA, 15 bp, Homo sapiens
tggcctcccaaaatg

SEQ ID NO: 1239619 - DNA, 15 bp, Homo sapiens
ttggcctcccaaaat

SEQ ID NO: 1239620 - DNA, 15 bp, Homo sapiens
cttggcctcccaaaa

SEQ ID NO: 1239621 - DNA, 15 bp, Homo sapiens
gcttggcctcccaaa

SEQ ID NO: 1239622 - DNA, 15 bp, Homo sapiens
ggcttggcctcccaa

SEQ ID NO: 1239623 - DNA, 15 bp, Homo sapiens
tggcttggcctccca

SEQ ID NO: 1239624 - DNA, 15 bp, Homo sapiens
ctggcttggcctccc

SEQ ID NO: 1239625 - DNA, 15 bp, Homo sapiens
cctggcttggcctcc

SEQ ID NO: 1239626 - DNA, 15 bp, Homo sapiens
acctggcttggcctc

SEQ ID NO: 1239627 - DNA, 15 bp, Homo sapiens
tacctggcttggcct

SEQ ID NO: 1239628 - DNA, 15 bp, Homo sapiens
ctacctggcttggcc

SEQ ID NO: 1239629 - DNA, 15 bp, Homo sapiens
tctacctggcttggc

SEQ ID NO: 1239630 - DNA, 15 bp, Homo sapiens
ttctacctggcttgg

SEQ ID NO: 1239631 - DNA, 15 bp, Homo sapiens
attctacctggcttg

SEQ ID NO: 1239632 - DNA, 15 bp, Homo sapiens
tattctacctggctt

SEQ ID NO: 1239633 - DNA, 15 bp, Homo sapiens
gtattctacctggct

SEQ ID NO: 1239634 - DNA, 15 bp, Homo sapiens
agtattctacctggc

SEQ ID NO: 1239635 - DNA, 15 bp, Homo sapiens
aagtattctacctgg

SEQ ID NO: 1239636 - DNA, 15 bp, Homo sapiens
caagtattctacctg

SEQ ID NO: 1239637 - DNA, 15 bp, Homo sapiens
tcaagtattctacct

SEQ ID NO: 1239638 - DNA, 15 bp, Homo sapiens
ctcaagtattctacc

SEQ ID NO: 1239639 - DNA, 15 bp, Homo sapiens
cctcaagtattctac

SEQ ID NO: 1239640 - DNA, 15 bp, Homo sapiens
gcctcaagtattcta

SEQ ID NO: 1239641 - DNA, 15 bp, Homo sapiens
ggcctcaagtattct

SEQ ID NO: 1239642 - DNA, 15 bp, Homo sapiens
tggcctcaagtattc

SEQ ID NO: 1239643 - DNA, 15 bp, Homo sapiens
ctggcctcaagtatt

SEQ ID NO: 1239644 - DNA, 15 bp, Homo sapiens
cctggcctcaagtat

SEQ ID NO: 1239645 - DNA, 15 bp, Homo sapiens
tcctggcctcaagta

SEQ ID NO: 1239646 - DNA, 15 bp, Homo sapiens
caactcctggcctca

SEQ ID NO: 1239647 - DNA, 15 bp, Homo sapiens
ccaactcctggcctc

SEQ ID NO: 1239648 - DNA, 15 bp, Homo sapiens
tccaactcctggcct

SEQ ID NO: 1239649 - DNA, 15 bp, Homo sapiens
ctccaactcctggcc

SEQ ID NO: 1239650 - DNA, 15 bp, Homo sapiens
tctccaactcctggc

SEQ ID NO: 1239651 - DNA, 15 bp, Homo sapiens
gtctccaactcctgg

SEQ ID NO: 1239652 - DNA, 15 bp, Homo sapiens
ggtctccaactcctg

SEQ ID NO: 1239653 - DNA, 15 bp, Homo sapiens
tggtctccaactcct

SEQ ID NO: 1239654 - DNA, 15 bp, Homo sapiens
gccaggctggtctcc

SEQ ID NO: 1239655 - DNA, 15 bp, Homo sapiens
cgttggccaggctgg

SEQ ID NO: 1239656 - DNA, 15 bp, Homo sapiens
acgttggccaggctg

SEQ ID NO: 1239657 - DNA, 15 bp, Homo sapiens
cacgttggccaggct

SEQ ID NO: 1239658 - DNA, 15 bp, Homo sapiens
ccacgttggccaggc

SEQ ID NO: 1239659 - DNA, 15 bp, Homo sapiens
accacgttggccagg

SEQ ID NO: 1239660 - DNA, 15 bp, Homo sapiens
caccacgttggccag

SEQ ID NO: 1239661 - DNA, 15 bp, Homo sapiens
tcaccacgttggcca

SEQ ID NO: 1239662 - DNA, 15 bp, Homo sapiens
ttcaccacgttggcc

SEQ ID NO: 1239663 - DNA, 15 bp, Homo sapiens
tttcaccacgttggc

SEQ ID NO: 1239664 - DNA, 15 bp, Homo sapiens
atttcaccacgttgg

SEQ ID NO: 1239665 - DNA, 15 bp, Homo sapiens
gatttcaccacgttg

SEQ ID NO: 1239666 - DNA, 15 bp, Homo sapiens
ggatttcaccacgtt

SEQ ID NO: 1239667 - DNA, 15 bp, Homo sapiens
gggatttcaccacgt

SEQ ID NO: 1239668 - DNA, 15 bp, Homo sapiens
ggggatttcaccacg

SEQ ID NO: 1239669 - DNA, 15 bp, Homo sapiens
aggggatttcaccac

SEQ ID NO: 1239670 - DNA, 15 bp, Homo sapiens
gaggggatttcacca

SEQ ID NO: 1239671 - DNA, 15 bp, Homo sapiens
agaggggatttcacc

SEQ ID NO: 1239672 - DNA, 15 bp, Homo sapiens
gagaggggatttcac

SEQ ID NO: 1239673 - DNA, 15 bp, Homo sapiens
agagaggggatttca

SEQ ID NO: 1239674 - DNA, 15 bp, Homo sapiens
tagagaggggatttc

SEQ ID NO: 1239675 - DNA, 15 bp, Homo sapiens
gtagagaggggattt

SEQ ID NO: 1239676 - DNA, 15 bp, Homo sapiens
agtagagaggggatt

SEQ ID NO: 1239677 - DNA, 15 bp, Homo sapiens
tagtagagaggggat

SEQ ID NO: 1239678 - DNA, 15 bp, Homo sapiens
ttagtagagagggga

SEQ ID NO: 1239679 - DNA, 15 bp, Homo sapiens
tttagtagagagggg

SEQ ID NO: 1239680 - DNA, 15 bp, Homo sapiens
ttttagtagagaggg

SEQ ID NO: 1239681 - DNA, 15 bp, Homo sapiens
cttttagtagagagg

SEQ ID NO: 1239682 - DNA, 15 bp, Homo sapiens
acttttagtagagag

SEQ ID NO: 1239683 - DNA, 15 bp, Homo sapiens
taccacacctggcta

SEQ ID NO: 1239684 - DNA, 15 bp, Homo sapiens
ctaccacacctggct

SEQ ID NO: 1239685 - DNA, 15 bp, Homo sapiens
gctaccacacctggc

SEQ ID NO: 1239686 - DNA, 15 bp, Homo sapiens
cgctaccacacctgg

SEQ ID NO: 1239687 - DNA, 15 bp, Homo sapiens
acgctaccacacctg

SEQ ID NO: 1239688 - DNA, 15 bp, Homo sapiens
cacgctaccacacct

SEQ ID NO: 1239689 - DNA, 15 bp, Homo sapiens
gcacgctaccacacc

SEQ ID NO: 1239690 - DNA, 15 bp, Homo sapiens
agcacgctaccacac

SEQ ID NO: 1239691 - DNA, 15 bp, Homo sapiens
cagcacgctaccaca

SEQ ID NO: 1239692 - DNA, 15 bp, Homo sapiens
gcagcacgctaccac

SEQ ID NO: 1239693 - DNA, 15 bp, Homo sapiens
tgcagcacgctacca

SEQ ID NO: 1239694 - DNA, 15 bp, Homo sapiens
ttgcagcacgctacc

SEQ ID NO: 1239695 - DNA, 15 bp, Homo sapiens
gttgcagcacgctac

SEQ ID NO: 1239696 - DNA, 15 bp, Homo sapiens
agttgcagcacgcta

SEQ ID NO: 1239697 - DNA, 15 bp, Homo sapiens
cagttgcagcacgct

SEQ ID NO: 1239698 - DNA, 15 bp, Homo sapiens
acagttgcagcacgc

SEQ ID NO: 1239699 - DNA, 15 bp, Homo sapiens
tacagttgcagcacg

SEQ ID NO: 1239700 - DNA, 15 bp, Homo sapiens
ctacagttgcagcac

SEQ ID NO: 1239701 - DNA, 15 bp, Homo sapiens
actacagttgcagca

SEQ ID NO: 1239702 - DNA, 15 bp, Homo sapiens
gactacagttgcagc

SEQ ID NO: 1239703 - DNA, 15 bp, Homo sapiens
ggactacagttgcag

SEQ ID NO: 1239704 - DNA, 15 bp, Homo sapiens
gggactacagttgca

SEQ ID NO: 1239705 - DNA, 15 bp, Homo sapiens
ggggactacagttgc

SEQ ID NO: 1239706 - DNA, 15 bp, Homo sapiens
cggggactacagttg

SEQ ID NO: 1239707 - DNA, 15 bp, Homo sapiens
gcggggactacagtt

SEQ ID NO: 1239708 - DNA, 15 bp, Homo sapiens
agcggggactacagt

SEQ ID NO: 1239709 - DNA, 15 bp, Homo sapiens
tagcggggactacag

SEQ ID NO: 1239710 - DNA, 15 bp, Homo sapiens
gtagcggggactaca

SEQ ID NO: 1239711 - DNA, 15 bp, Homo sapiens
agtagcggggactac

SEQ ID NO: 1239712 - DNA, 15 bp, Homo sapiens
aagtagcggggacta

SEQ ID NO: 1239713 - DNA, 15 bp, Homo sapiens
taagtagcggggact

SEQ ID NO: 1239714 - DNA, 15 bp, Homo sapiens
ctaagtagcggggac

SEQ ID NO: 1239715 - DNA, 15 bp, Homo sapiens
cctaagtagcgggga

SEQ ID NO: 1239716 - DNA, 15 bp, Homo sapiens
tcctaagtagcgggg

SEQ ID NO: 1239717 - DNA, 15 bp, Homo sapiens
ctcctaagtagcggg

SEQ ID NO: 1239718 - DNA, 15 bp, Homo sapiens
cctcctaagtagcgg

SEQ ID NO: 1239719 - DNA, 15 bp, Homo sapiens
gcctcctaagtagcg

SEQ ID NO: 1239720 - DNA, 15 bp, Homo sapiens
aagtgattcttgtgc

SEQ ID NO: 1239721 - DNA, 15 bp, Homo sapiens
caagtgattcttgtg

SEQ ID NO: 1239722 - DNA, 15 bp, Homo sapiens
tcaagtgattcttgt

SEQ ID NO: 1239723 - DNA, 15 bp, Homo sapiens
ttcaagtgattcttg

SEQ ID NO: 1239724 - DNA, 15 bp, Homo sapiens
gttcaagtgattctt

SEQ ID NO: 1239725 - DNA, 15 bp, Homo sapiens
cctgcaacctccgcc

SEQ ID NO: 1239726 - DNA, 15 bp, Homo sapiens
ccctgcaacctccgc

SEQ ID NO: 1239727 - DNA, 15 bp, Homo sapiens
tccctgcaacctccg

SEQ ID NO: 1239728 - DNA, 15 bp, Homo sapiens
ctccctgcaacctcc

SEQ ID NO: 1239729 - DNA, 15 bp, Homo sapiens
actccctgcaacctc

SEQ ID NO: 1239730 - DNA, 15 bp, Homo sapiens
aactccctgcaacct

SEQ ID NO: 1239731 - DNA, 15 bp, Homo sapiens
caactccctgcaacc

SEQ ID NO: 1239732 - DNA, 15 bp, Homo sapiens
tcaactccctgcaac

SEQ ID NO: 1239733 - DNA, 15 bp, Homo sapiens
ctcaactccctgcaa

SEQ ID NO: 1239734 - DNA, 15 bp, Homo sapiens
tctcaactccctgca

SEQ ID NO: 1239735 - DNA, 15 bp, Homo sapiens
gtctcaactccctgc

SEQ ID NO: 1239736 - DNA, 15 bp, Homo sapiens
agtctcaactccctg

SEQ ID NO: 1239737 - DNA, 15 bp, Homo sapiens
cagtctcaactccct

SEQ ID NO: 1239738 - DNA, 15 bp, Homo sapiens
gcagtctcaactccc

SEQ ID NO: 1239739 - DNA, 15 bp, Homo sapiens
tgcagtctcaactcc

SEQ ID NO: 1239740 - DNA, 15 bp, Homo sapiens
gtgcagtctcaactc

SEQ ID NO: 1239741 - DNA, 15 bp, Homo sapiens
ggtgcagtctcaact

SEQ ID NO: 1239742 - DNA, 15 bp, Homo sapiens
tggtgcagtctcaac

SEQ ID NO: 1239743 - DNA, 15 bp, Homo sapiens
gtggtgcagtctcaa

SEQ ID NO: 1239744 - DNA, 15 bp, Homo sapiens
agtggtgcagtctca

SEQ ID NO: 1239745 - DNA, 15 bp, Homo sapiens
cagtggtgcagtctc

SEQ ID NO: 1239746 - DNA, 15 bp, Homo sapiens
gcagtggtgcagtct

SEQ ID NO: 1239747 - DNA, 15 bp, Homo sapiens
tgcagtggtgcagtc

SEQ ID NO: 1239748 - DNA, 15 bp, Homo sapiens
gtgcagtggtgcagt

SEQ ID NO: 1239749 - DNA, 15 bp, Homo sapiens
agtgcagtggtgcag

SEQ ID NO: 1239750 - DNA, 15 bp, Homo sapiens
ggagatggagtctca

SEQ ID NO: 1239751 - DNA, 15 bp, Homo sapiens
tttttttggagatgg

SEQ ID NO: 1239752 - DNA, 15 bp, Homo sapiens
ttttttttggagatg

SEQ ID NO: 1239753 - DNA, 15 bp, Homo sapiens
attttttttggagat

SEQ ID NO: 1239754 - DNA, 15 bp, Homo sapiens
tattttttttggaga

SEQ ID NO: 1239755 - DNA, 15 bp, Homo sapiens
ttattttttttggag

SEQ ID NO: 1239756 - DNA, 15 bp, Homo sapiens
tttattttttttgga

SEQ ID NO: 1239757 - DNA, 15 bp, Homo sapiens
ttttattttttttgg

SEQ ID NO: 1239758 - DNA, 15 bp, Homo sapiens
cattttatttttttt

SEQ ID NO: 1239759 - DNA, 15 bp, Homo sapiens
tcattttattttttt

SEQ ID NO: 1239760 - DNA, 15 bp, Homo sapiens
tttatttcattttat

SEQ ID NO: 1239761 - DNA, 15 bp, Homo sapiens
atttatttcatttta

SEQ ID NO: 1239762 - DNA, 15 bp, Homo sapiens
tatttatttcatttt

SEQ ID NO: 1239763 - DNA, 15 bp, Homo sapiens
ttatttatttcattt

SEQ ID NO: 1239764 - DNA, 15 bp, Homo sapiens
tttatttatttcatt

SEQ ID NO: 1239765 - DNA, 15 bp, Homo sapiens
atttatttatttcat

SEQ ID NO: 1239766 - DNA, 15 bp, Homo sapiens
tatttatttatttca

SEQ ID NO: 1239767 - DNA, 15 bp, Homo sapiens
ttatttatttatttc

SEQ ID NO: 1239768 - DNA, 15 bp, Homo sapiens
acatttatttattta

SEQ ID NO: 1239769 - DNA, 15 bp, Homo sapiens
aacatttatttattt

SEQ ID NO: 1239770 - DNA, 15 bp, Homo sapiens
taacatttatttatt

SEQ ID NO: 1239771 - DNA, 15 bp, Homo sapiens
ttaacatttatttat

SEQ ID NO: 1239772 - DNA, 15 bp, Homo sapiens
tttaacatttattta

SEQ ID NO: 1239773 - DNA, 15 bp, Homo sapiens
ttttaacatttattt

SEQ ID NO: 1239774 - DNA, 15 bp, Homo sapiens
tttttaacatttatt

SEQ ID NO: 1239775 - DNA, 15 bp, Homo sapiens
ttttttaacatttat

SEQ ID NO: 1239776 - DNA, 15 bp, Homo sapiens
tttttttaacattta

SEQ ID NO: 1239777 - DNA, 15 bp, Homo sapiens
ttttttttaacattt

SEQ ID NO: 1239778 - DNA, 15 bp, Homo sapiens
attttttttaacatt

SEQ ID NO: 1239779 - DNA, 15 bp, Homo sapiens
gattttttttaacat

SEQ ID NO: 1239780 - DNA, 15 bp, Homo sapiens
agattttttttaaca

SEQ ID NO: 1239781 - DNA, 15 bp, Homo sapiens
cagattttttttaac

SEQ ID NO: 1239782 - DNA, 15 bp, Homo sapiens
ccagattttttttaa

SEQ ID NO: 1239783 - DNA, 15 bp, Homo sapiens
accagatttttttta

SEQ ID NO: 1239784 - DNA, 15 bp, Homo sapiens
caccagatttttttt

SEQ ID NO: 1239785 - DNA, 15 bp, Homo sapiens
ccaccagattttttt

SEQ ID NO: 1239786 - DNA, 15 bp, Homo sapiens
tccaccagatttttt

SEQ ID NO: 1239787 - DNA, 15 bp, Homo sapiens
ctccaccagattttt

SEQ ID NO: 1239788 - DNA, 15 bp, Homo sapiens
gctccaccagatttt

SEQ ID NO: 1239789 - DNA, 15 bp, Homo sapiens
tgctccaccagattt

SEQ ID NO: 1239790 - DNA, 15 bp, Homo sapiens
atgctccaccagatt

SEQ ID NO: 1239791 - DNA, 15 bp, Homo sapiens
gatgctccaccagat

SEQ ID NO: 1239792 - DNA, 15 bp, Homo sapiens
agatgctccaccaga

SEQ ID NO: 1239793 - DNA, 15 bp, Homo sapiens
cagatgctccaccag

SEQ ID NO: 1239794 - DNA, 15 bp, Homo sapiens
tcagatgctccacca

SEQ ID NO: 1239795 - DNA, 15 bp, Homo sapiens
atcagatgctccacc

SEQ ID NO: 1239796 - DNA, 15 bp, Homo sapiens
catcagatgctccac

SEQ ID NO: 1239797 - DNA, 15 bp, Homo sapiens
ccatcagatgctcca

SEQ ID NO: 1239798 - DNA, 15 bp, Homo sapiens
cccatcagatgctcc

SEQ ID NO: 1239799 - DNA, 15 bp, Homo sapiens
acccatcagatgctc

SEQ ID NO: 1239800 - DNA, 15 bp, Homo sapiens
cacccatcagatgct

SEQ ID NO: 1239801 - DNA, 15 bp, Homo sapiens
acacccatcagatgc

SEQ ID NO: 1239802 - DNA, 15 bp, Homo sapiens
aacacccatcagatg

SEQ ID NO: 1239803 - DNA, 15 bp, Homo sapiens
aaacacccatcagat

SEQ ID NO: 1239804 - DNA, 15 bp, Homo sapiens
caaacacccatcaga

SEQ ID NO: 1239805 - DNA, 15 bp, Homo sapiens
ccaaacacccatcag

SEQ ID NO: 1239806 - DNA, 15 bp, Homo sapiens
cccaaacacccatca

SEQ ID NO: 1239807 - DNA, 15 bp, Homo sapiens
gcccaaacacccatc

SEQ ID NO: 1239808 - DNA, 15 bp, Homo sapiens
ggcccaaacacccat

SEQ ID NO: 1239809 - DNA, 15 bp, Homo sapiens
tggcccaaacaccca

SEQ ID NO: 1239810 - DNA, 15 bp, Homo sapiens
ttggcccaaacaccc

SEQ ID NO: 1239811 - DNA, 15 bp, Homo sapiens
cttggcccaaacacc

SEQ ID NO: 1239812 - DNA, 15 bp, Homo sapiens
gcttggcccaaacac

SEQ ID NO: 1239813 - DNA, 15 bp, Homo sapiens
agcttggcccaaaca

SEQ ID NO: 1239814 - DNA, 15 bp, Homo sapiens
cagcttggcccaaac

SEQ ID NO: 1239815 - DNA, 15 bp, Homo sapiens
ccagcttggcccaaa

SEQ ID NO: 1239816 - DNA, 15 bp, Homo sapiens
tccagcttggcccaa

SEQ ID NO: 1239817 - DNA, 15 bp, Homo sapiens
ctccagcttggccca

SEQ ID NO: 1239818 - DNA, 15 bp, Homo sapiens
gctccagcttggccc

SEQ ID NO: 1239819 - DNA, 15 bp, Homo sapiens
agctccagcttggcc

SEQ ID NO: 1239820 - DNA, 15 bp, Homo sapiens
aagctccagcttggc

SEQ ID NO: 1239821 - DNA, 15 bp, Homo sapiens
aaagctccagcttgg

SEQ ID NO: 1239822 - DNA, 15 bp, Homo sapiens
caaagctccagcttg

SEQ ID NO: 1239823 - DNA, 15 bp, Homo sapiens
acaaagctccagctt

SEQ ID NO: 1239824 - DNA, 15 bp, Homo sapiens
gacaaagctccagct

SEQ ID NO: 1239825 - DNA, 15 bp, Homo sapiens
ggacaaagctccagc

SEQ ID NO: 1239826 - DNA, 15 bp, Homo sapiens
tggacaaagctccag

SEQ ID NO: 1239827 - DNA, 15 bp, Homo sapiens
atggacaaagctcca

SEQ ID NO: 1239828 - DNA, 15 bp, Homo sapiens
gatggacaaagctcc

SEQ ID NO: 1239829 - DNA, 15 bp, Homo sapiens
ggatggacaaagctc

SEQ ID NO: 1239830 - DNA, 15 bp, Homo sapiens
gggatggacaaagct

SEQ ID NO: 1239831 - DNA, 15 bp, Homo sapiens
ggggatggacaaagc

SEQ ID NO: 1239832 - DNA, 15 bp, Homo sapiens
aggggatggacaaag

SEQ ID NO: 1239833 - DNA, 15 bp, Homo sapiens
gaggggatggacaaa

SEQ ID NO: 1239834 - DNA, 15 bp, Homo sapiens
agaggggatggacaa

SEQ ID NO: 1239835 - DNA, 15 bp, Homo sapiens
aagaggggatggaca

SEQ ID NO: 1239836 - DNA, 15 bp, Homo sapiens
taagaggggatggac

SEQ ID NO: 1239837 - DNA, 15 bp, Homo sapiens
ataagaggggatgga

SEQ ID NO: 1239838 - DNA, 15 bp, Homo sapiens
aataagaggggatgg

SEQ ID NO: 1239839 - DNA, 15 bp, Homo sapiens
aaataagaggggatg

SEQ ID NO: 1239840 - DNA, 15 bp, Homo sapiens
aaaataagaggggat

SEQ ID NO: 1239841 - DNA, 15 bp, Homo sapiens
aaaaataagagggga

SEQ ID NO: 1239842 - DNA, 15 bp, Homo sapiens
gaaaaataagagggg

SEQ ID NO: 1239843 - DNA, 15 bp, Homo sapiens
agaaaaataagaggg

SEQ ID NO: 1239844 - DNA, 15 bp, Homo sapiens
cagaaaaataagagg

SEQ ID NO: 1239845 - DNA, 15 bp, Homo sapiens
gcagaaaaataagag

SEQ ID NO: 1239846 - DNA, 15 bp, Homo sapiens
tgcagaaaaataaga

SEQ ID NO: 1239847 - DNA, 15 bp, Homo sapiens
gtgcagaaaaataag

SEQ ID NO: 1239848 - DNA, 15 bp, Homo sapiens
agtgcagaaaaataa

SEQ ID NO: 1239849 - DNA, 15 bp, Homo sapiens
aagtgcagaaaaata

SEQ ID NO: 1239850 - DNA, 15 bp, Homo sapiens
caagtgcagaaaaat

SEQ ID NO: 1239851 - DNA, 15 bp, Homo sapiens
tcaagtgcagaaaaa

SEQ ID NO: 1239852 - DNA, 15 bp, Homo sapiens
gtcaagtgcagaaaa

SEQ ID NO: 1239853 - DNA, 15 bp, Homo sapiens
agtcaagtgcagaaa

SEQ ID NO: 1239854 - DNA, 15 bp, Homo sapiens
gagtcaagtgcagaa

SEQ ID NO: 1239855 - DNA, 15 bp, Homo sapiens
agagtcaagtgcaga

SEQ ID NO: 1239856 - DNA, 15 bp, Homo sapiens
gagagtcaagtgcag

SEQ ID NO: 1239857 - DNA, 15 bp, Homo sapiens
agagagtcaagtgca

SEQ ID NO: 1239858 - DNA, 15 bp, Homo sapiens
aagagagtcaagtgc

SEQ ID NO: 1239859 - DNA, 15 bp, Homo sapiens
taagagagtcaagtg

SEQ ID NO: 1239860 - DNA, 15 bp, Homo sapiens
ataagagagtcaagt

SEQ ID NO: 1239861 - DNA, 15 bp, Homo sapiens
aataagagagtcaag

SEQ ID NO: 1239862 - DNA, 15 bp, Homo sapiens
aaataagagagtcaa

SEQ ID NO: 1239863 - DNA, 15 bp, Homo sapiens
aaaataagagagtca

SEQ ID NO: 1239864 - DNA, 15 bp, Homo sapiens
aaaaataagagagtc

SEQ ID NO: 1239865 - DNA, 15 bp, Homo sapiens
gaaaaataagagagt

SEQ ID NO: 1239866 - DNA, 15 bp, Homo sapiens
agaaaaataagagag

SEQ ID NO: 1239867 - DNA, 15 bp, Homo sapiens
cagaaaaataagaga

SEQ ID NO: 1239868 - DNA, 15 bp, Homo sapiens
tcagaaaaataagag

SEQ ID NO: 1239869 - DNA, 15 bp, Homo sapiens
ctcagaaaaataaga

SEQ ID NO: 1239870 - DNA, 15 bp, Homo sapiens
tctcagaaaaataag

SEQ ID NO: 1239871 - DNA, 15 bp, Homo sapiens
gtctcagaaaaataa

SEQ ID NO: 1239872 - DNA, 15 bp, Homo sapiens
agtctcagaaaaata

SEQ ID NO: 1239873 - DNA, 15 bp, Homo sapiens
cagtctcagaaaaat

SEQ ID NO: 1239874 - DNA, 15 bp, Homo sapiens
ccagtctcagaaaaa

SEQ ID NO: 1239875 - DNA, 15 bp, Homo sapiens
accagtctcagaaaa

SEQ ID NO: 1239876 - DNA, 15 bp, Homo sapiens
gaccagtctcagaaa

SEQ ID NO: 1239877 - DNA, 15 bp, Homo sapiens
agaccagtctcagaa

SEQ ID NO: 1239878 - DNA, 15 bp, Homo sapiens
gagaccagtctcaga

SEQ ID NO: 1239879 - DNA, 15 bp, Homo sapiens
ggagaccagtctcag

SEQ ID NO: 1239880 - DNA, 15 bp, Homo sapiens
gggagaccagtctca

SEQ ID NO: 1239881 - DNA, 15 bp, Homo sapiens
agggagaccagtctc

SEQ ID NO: 1239882 - DNA, 15 bp, Homo sapiens
gagggagaccagtct

SEQ ID NO: 1239883 - DNA, 15 bp, Homo sapiens
agagggagaccagtc

SEQ ID NO: 1239884 - DNA, 15 bp, Homo sapiens
cagagggagaccagt

SEQ ID NO: 1239885 - DNA, 15 bp, Homo sapiens
acagagggagaccag

SEQ ID NO: 1239886 - DNA, 15 bp, Homo sapiens
gacagagggagacca

SEQ ID NO: 1239887 - DNA, 15 bp, Homo sapiens
cgacagagggagacc

SEQ ID NO: 1239888 - DNA, 15 bp, Homo sapiens
ctgggcgacagaggg

SEQ ID NO: 1239889 - DNA, 15 bp, Homo sapiens
cctgggcgacagagg

SEQ ID NO: 1239890 - DNA, 15 bp, Homo sapiens
tagcctgggcgacag

SEQ ID NO: 1239891 - DNA, 15 bp, Homo sapiens
ctagcctgggcgaca

SEQ ID NO: 1239892 - DNA, 15 bp, Homo sapiens
tctagcctgggcgac

SEQ ID NO: 1239893 - DNA, 15 bp, Homo sapiens
ctctagcctgggcga

SEQ ID NO: 1239894 - DNA, 15 bp, Homo sapiens
actctagcctgggcg

SEQ ID NO: 1239895 - DNA, 15 bp, Homo sapiens
gctgcactctagcct

SEQ ID NO: 1239896 - DNA, 15 bp, Homo sapiens
tgctgcactctagcc

SEQ ID NO: 1239897 - DNA, 15 bp, Homo sapiens
ctgctgcactctagc

SEQ ID NO: 1239898 - DNA, 15 bp, Homo sapiens
actgctgcactctag

SEQ ID NO: 1239899 - DNA, 15 bp, Homo sapiens
cactgctgcactcta

SEQ ID NO: 1239900 - DNA, 15 bp, Homo sapiens
gcactgctgcactct

SEQ ID NO: 1239901 - DNA, 15 bp, Homo sapiens
tgcactgctgcactc

SEQ ID NO: 1239902 - DNA, 15 bp, Homo sapiens
ttgcactgctgcact

SEQ ID NO: 1239903 - DNA, 15 bp, Homo sapiens
gttgcactgctgcac

SEQ ID NO: 1239904 - DNA, 15 bp, Homo sapiens
agttgcactgctgca

SEQ ID NO: 1239905 - DNA, 15 bp, Homo sapiens
cagttgcactgctgc

SEQ ID NO: 1239906 - DNA, 15 bp, Homo sapiens
gcagttgcactgctg

SEQ ID NO: 1239907 - DNA, 15 bp, Homo sapiens
cgcagttgcactgct

SEQ ID NO: 1239908 - DNA, 15 bp, Homo sapiens
ccgcagttgcactgc

SEQ ID NO: 1239909 - DNA, 15 bp, Homo sapiens
gccgcagttgcactg

SEQ ID NO: 1239910 - DNA, 15 bp, Homo sapiens
agccgcagttgcact

SEQ ID NO: 1239911 - DNA, 15 bp, Homo sapiens
gagccgcagttgcac

SEQ ID NO: 1239912 - DNA, 15 bp, Homo sapiens
tgagccgcagttgca

SEQ ID NO: 1239913 - DNA, 15 bp, Homo sapiens
gtgagccgcagttgc

SEQ ID NO: 1239914 - DNA, 15 bp, Homo sapiens
agtgagccgcagttg

SEQ ID NO: 1239915 - DNA, 15 bp, Homo sapiens
cagtgagccgcagtt

SEQ ID NO: 1239916 - DNA, 15 bp, Homo sapiens
gcagtgagccgcagt

SEQ ID NO: 1239917 - DNA, 15 bp, Homo sapiens
tgcagtgagccgcag

SEQ ID NO: 1239918 - DNA, 15 bp, Homo sapiens
ctgcagtgagccgca

SEQ ID NO: 1239919 - DNA, 15 bp, Homo sapiens
gctgcagtgagccgc

SEQ ID NO: 1239920 - DNA, 15 bp, Homo sapiens
gcccgggaggtggag

SEQ ID NO: 1239921 - DNA, 15 bp, Homo sapiens
agcccgggaggtgga

SEQ ID NO: 1239922 - DNA, 15 bp, Homo sapiens
gagcccgggaggtgg

SEQ ID NO: 1239923 - DNA, 15 bp, Homo sapiens
tgagcccgggaggtg

SEQ ID NO: 1239924 - DNA, 15 bp, Homo sapiens
ttgagcccgggaggt

SEQ ID NO: 1239925 - DNA, 15 bp, Homo sapiens
cttgagcccgggagg

SEQ ID NO: 1239926 - DNA, 15 bp, Homo sapiens
gcttgagcccgggag

SEQ ID NO: 1239927 - DNA, 15 bp, Homo sapiens
tgcttgagcccggga

SEQ ID NO: 1239928 - DNA, 15 bp, Homo sapiens
ctgcttgagcccggg

SEQ ID NO: 1239929 - DNA, 15 bp, Homo sapiens
gctgcttgagcccgg

SEQ ID NO: 1239930 - DNA, 15 bp, Homo sapiens
ggctgcttgagcccg

SEQ ID NO: 1239931 - DNA, 15 bp, Homo sapiens
aggctgcttgagccc

SEQ ID NO: 1239932 - DNA, 15 bp, Homo sapiens
aaggctgcttgagcc

SEQ ID NO: 1239933 - DNA, 15 bp, Homo sapiens
gaaggctgcttgagc

SEQ ID NO: 1239934 - DNA, 15 bp, Homo sapiens
ggaaggctgcttgag

SEQ ID NO: 1239935 - DNA, 15 bp, Homo sapiens
gggaaggctgcttga

SEQ ID NO: 1239936 - DNA, 15 bp, Homo sapiens
tgggaaggctgcttg

SEQ ID NO: 1239937 - DNA, 15 bp, Homo sapiens
gtgggaaggctgctt

SEQ ID NO: 1239938 - DNA, 15 bp, Homo sapiens
ggtgggaaggctgct

SEQ ID NO: 1239939 - DNA, 15 bp, Homo sapiens
aggtgggaaggctgc

SEQ ID NO: 1239940 - DNA, 15 bp, Homo sapiens
gaggtgggaaggctg

SEQ ID NO: 1239941 - DNA, 15 bp, Homo sapiens
tgaggtgggaaggct

SEQ ID NO: 1239942 - DNA, 15 bp, Homo sapiens
ctgaggtgggaaggc

SEQ ID NO: 1239943 - DNA, 15 bp, Homo sapiens
gctgaggtgggaagg

SEQ ID NO: 1239944 - DNA, 15 bp, Homo sapiens
caggaggctgaggtg

SEQ ID NO: 1239945 - DNA, 15 bp, Homo sapiens
tcaggaggctgaggt

SEQ ID NO: 1239946 - DNA, 15 bp, Homo sapiens
tagctactcaggagg

SEQ ID NO: 1239947 - DNA, 15 bp, Homo sapiens
ctagctactcaggag

SEQ ID NO: 1239948 - DNA, 15 bp, Homo sapiens
cctagctactcagga

SEQ ID NO: 1239949 - DNA, 15 bp, Homo sapiens
tcctagctactcagg

SEQ ID NO: 1239950 - DNA, 15 bp, Homo sapiens
gtcctagctactcag

SEQ ID NO: 1239951 - DNA, 15 bp, Homo sapiens
ggtcctagctactca

SEQ ID NO: 1239952 - DNA, 15 bp, Homo sapiens
tggtcctagctactc

SEQ ID NO: 1239953 - DNA, 15 bp, Homo sapiens
gtggtcctagctact

SEQ ID NO: 1239954 - DNA, 15 bp, Homo sapiens
tgtggtcctagctac

SEQ ID NO: 1239955 - DNA, 15 bp, Homo sapiens
ctgtggtcctagcta

SEQ ID NO: 1239956 - DNA, 15 bp, Homo sapiens
cctgtggtcctagct

SEQ ID NO: 1239957 - DNA, 15 bp, Homo sapiens
acctgtggtcctagc

SEQ ID NO: 1239958 - DNA, 15 bp, Homo sapiens
cacctgtggtcctag

SEQ ID NO: 1239959 - DNA, 15 bp, Homo sapiens
acacctgtggtccta

SEQ ID NO: 1239960 - DNA, 15 bp, Homo sapiens
tacacctgtggtcct

SEQ ID NO: 1239961 - DNA, 15 bp, Homo sapiens
atacacctgtggtcc

SEQ ID NO: 1239962 - DNA, 15 bp, Homo sapiens
catacacctgtggtc

SEQ ID NO: 1239963 - DNA, 15 bp, Homo sapiens
gcatacacctgtggt

SEQ ID NO: 1239964 - DNA, 15 bp, Homo sapiens
ggcatacacctgtgg

SEQ ID NO: 1239965 - DNA, 15 bp, Homo sapiens
tggcatacacctgtg

SEQ ID NO: 1239966 - DNA, 15 bp, Homo sapiens
gtggcatacacctgt

SEQ ID NO: 1239967 - DNA, 15 bp, Homo sapiens
ggtggcatacacctg

SEQ ID NO: 1239968 - DNA, 15 bp, Homo sapiens
tggtggcatacacct

SEQ ID NO: 1239969 - DNA, 15 bp, Homo sapiens
ctggtggcatacacc

SEQ ID NO: 1239970 - DNA, 15 bp, Homo sapiens
cctggtggcatacac

SEQ ID NO: 1239971 - DNA, 15 bp, Homo sapiens
gcctggtggcataca

SEQ ID NO: 1239972 - DNA, 15 bp, Homo sapiens
ggcctggtggcatac

SEQ ID NO: 1239973 - DNA, 15 bp, Homo sapiens
gggcctggtggcata

SEQ ID NO: 1239974 - DNA, 15 bp, Homo sapiens
tgggcctggtggcat

SEQ ID NO: 1239975 - DNA, 15 bp, Homo sapiens
ctgggcctggtggca

SEQ ID NO: 1239976 - DNA, 15 bp, Homo sapiens
gctgggcctggtggc

SEQ ID NO: 1239977 - DNA, 15 bp, Homo sapiens
agctgggcctggtgg

SEQ ID NO: 1239978 - DNA, 15 bp, Homo sapiens
tagctgggcctggtg

SEQ ID NO: 1239979 - DNA, 15 bp, Homo sapiens
ttagctgggcctggt

SEQ ID NO: 1239980 - DNA, 15 bp, Homo sapiens
attagctgggcctgg

SEQ ID NO: 1239981 - DNA, 15 bp, Homo sapiens
aattagctgggcctg

SEQ ID NO: 1239982 - DNA, 15 bp, Homo sapiens
aaattagctgggcct

SEQ ID NO: 1239983 - DNA, 15 bp, Homo sapiens
aaaattagctgggcc

SEQ ID NO: 1239984 - DNA, 15 bp, Homo sapiens
tcaaaaaaattagct

SEQ ID NO: 1239985 - DNA, 15 bp, Homo sapiens
atcaaaaaaattagc

SEQ ID NO: 1239986 - DNA, 15 bp, Homo sapiens
tatcaaaaaaattag

SEQ ID NO: 1239987 - DNA, 15 bp, Homo sapiens
ctatcaaaaaaatta

SEQ ID NO: 1239988 - DNA, 15 bp, Homo sapiens
actatcaaaaaaatt

SEQ ID NO: 1239989 - DNA, 15 bp, Homo sapiens
aactatcaaaaaaat

SEQ ID NO: 1239990 - DNA, 15 bp, Homo sapiens
aaactatcaaaaaaa

SEQ ID NO: 1239991 - DNA, 15 bp, Homo sapiens
aaaactatcaaaaaa

SEQ ID NO: 1239992 - DNA, 15 bp, Homo sapiens
caaaactatcaaaaa

SEQ ID NO: 1239993 - DNA, 15 bp, Homo sapiens
ccaaaactatcaaaa

SEQ ID NO: 1239994 - DNA, 15 bp, Homo sapiens
cccaaaactatcaaa

SEQ ID NO: 1239995 - DNA, 15 bp, Homo sapiens
tcccaaaactatcaa

SEQ ID NO: 1239996 - DNA, 15 bp, Homo sapiens
ctcccaaaactatca

SEQ ID NO: 1239997 - DNA, 15 bp, Homo sapiens
tctcccaaaactatc

SEQ ID NO: 1239998 - DNA, 15 bp, Homo sapiens
gtctcccaaaactat

SEQ ID NO: 1239999 - DNA, 15 bp, Homo sapiens
tgtctcccaaaacta

SEQ ID NO: 1240000 - DNA, 15 bp, Homo sapiens
atgtctcccaaaact

SEQ ID NO: 1240001 - DNA, 15 bp, Homo sapiens
catgtctcccaaaac

SEQ ID NO: 1240002 - DNA, 15 bp, Homo sapiens
ccatgtctcccaaaa

SEQ ID NO: 1240003 - DNA, 15 bp, Homo sapiens
cccatgtctcccaaa

SEQ ID NO: 1240004 - DNA, 15 bp, Homo sapiens
ccccatgtctcccaa

SEQ ID NO: 1240005 - DNA, 15 bp, Homo sapiens
cccccatgtctccca

SEQ ID NO: 1240006 - DNA, 15 bp, Homo sapiens
acccccatgtctccc

SEQ ID NO: 1240007 - DNA, 15 bp, Homo sapiens
aacccccatgtctcc

SEQ ID NO: 1240008 - DNA, 15 bp, Homo sapiens
aaacccccatgtctc

SEQ ID NO: 1240009 - DNA, 15 bp, Homo sapiens
gaaacccccatgtct

SEQ ID NO: 1240010 - DNA, 15 bp, Homo sapiens
tgaaacccccatgtc

SEQ ID NO: 1240011 - DNA, 15 bp, Homo sapiens
gtgaaacccccatgt

SEQ ID NO: 1240012 - DNA, 15 bp, Homo sapiens
ggtgaaacccccatg

SEQ ID NO: 1240013 - DNA, 15 bp, Homo sapiens
ggcttgagtccagga

SEQ ID NO: 1240014 - DNA, 15 bp, Homo sapiens
aggcttgagtccagg

SEQ ID NO: 1240015 - DNA, 15 bp, Homo sapiens
aaggcttgagtccag

SEQ ID NO: 1240016 - DNA, 15 bp, Homo sapiens
caaggcttgagtcca

SEQ ID NO: 1240017 - DNA, 15 bp, Homo sapiens
ccaaggcttgagtcc

SEQ ID NO: 1240018 - DNA, 15 bp, Homo sapiens
gccaaggcttgagtc

SEQ ID NO: 1240019 - DNA, 15 bp, Homo sapiens
ggccaaggcttgagt

SEQ ID NO: 1240020 - DNA, 15 bp, Homo sapiens
aggccaaggcttgag

SEQ ID NO: 1240021 - DNA, 15 bp, Homo sapiens
gaggccaaggcttga

SEQ ID NO: 1240022 - DNA, 15 bp, Homo sapiens
ggaggccaaggcttg

SEQ ID NO: 1240023 - DNA, 15 bp, Homo sapiens
gggaggccaaggctt

SEQ ID NO: 1240024 - DNA, 15 bp, Homo sapiens
tgggaggccaaggct

SEQ ID NO: 1240025 - DNA, 15 bp, Homo sapiens
tgtggtggctcacac

SEQ ID NO: 1240026 - DNA, 15 bp, Homo sapiens
gtgtggtggctcaca

SEQ ID NO: 1240027 - DNA, 15 bp, Homo sapiens
ctggctgggtgtggt

SEQ ID NO: 1240028 - DNA, 15 bp, Homo sapiens
accctggctgggtgt

SEQ ID NO: 1240029 - DNA, 15 bp, Homo sapiens
taccctggctgggtg

SEQ ID NO: 1240030 - DNA, 15 bp, Homo sapiens
ctaccctggctgggt

SEQ ID NO: 1240031 - DNA, 15 bp, Homo sapiens
tctaccctggctggg

SEQ ID NO: 1240032 - DNA, 15 bp, Homo sapiens
ttctaccctggctgg

SEQ ID NO: 1240033 - DNA, 15 bp, Homo sapiens
cttctaccctggctg

SEQ ID NO: 1240034 - DNA, 15 bp, Homo sapiens
ccttctaccctggct

SEQ ID NO: 1240035 - DNA, 15 bp, Homo sapiens
gccttctaccctggc

SEQ ID NO: 1240036 - DNA, 15 bp, Homo sapiens
tgccttctaccctgg

SEQ ID NO: 1240037 - DNA, 15 bp, Homo sapiens
gtgccttctaccctg

SEQ ID NO: 1240038 - DNA, 15 bp, Homo sapiens
agtgccttctaccct

SEQ ID NO: 1240039 - DNA, 15 bp, Homo sapiens
aagtgccttctaccc

SEQ ID NO: 1240040 - DNA, 15 bp, Homo sapiens
aaagtgccttctacc

SEQ ID NO: 1240041 - DNA, 15 bp, Homo sapiens
caaagtgccttctac

SEQ ID NO: 1240042 - DNA, 15 bp, Homo sapiens
ccaaagtgccttcta

SEQ ID NO: 1240043 - DNA, 15 bp, Homo sapiens
tccaaagtgccttct

SEQ ID NO: 1240044 - DNA, 15 bp, Homo sapiens
ttccaaagtgccttc

SEQ ID NO: 1240045 - DNA, 15 bp, Homo sapiens
cttccaaagtgcctt

SEQ ID NO: 1240046 - DNA, 15 bp, Homo sapiens
gcttccaaagtgcct

SEQ ID NO: 1240047 - DNA, 15 bp, Homo sapiens
ggcttccaaagtgcc

SEQ ID NO: 1240048 - DNA, 15 bp, Homo sapiens
aggcttccaaagtgc

SEQ ID NO: 1240049 - DNA, 15 bp, Homo sapiens
gaggcttccaaagtg

SEQ ID NO: 1240050 - DNA, 15 bp, Homo sapiens
cgaggcttccaaagt

SEQ ID NO: 1240051 - DNA, 15 bp, Homo sapiens
tcgaggcttccaaag

SEQ ID NO: 1240052 - DNA, 15 bp, Homo sapiens
ctcgaggcttccaaa

SEQ ID NO: 1240053 - DNA, 15 bp, Homo sapiens
gctcgaggcttccaa

SEQ ID NO: 1240054 - DNA, 15 bp, Homo sapiens
ggctcgaggcttcca

SEQ ID NO: 1240055 - DNA, 15 bp, Homo sapiens
aggctcgaggcttcc

SEQ ID NO: 1240056 - DNA, 15 bp, Homo sapiens
caggctcgaggcttc

SEQ ID NO: 1240057 - DNA, 15 bp, Homo sapiens
gcaggctcgaggctt

SEQ ID NO: 1240058 - DNA, 15 bp, Homo sapiens
ggcaggctcgaggct

SEQ ID NO: 1240059 - DNA, 15 bp, Homo sapiens
gggcaggctcgaggc

SEQ ID NO: 1240060 - DNA, 15 bp, Homo sapiens
ggggcaggctcgagg

SEQ ID NO: 1240061 - DNA, 15 bp, Homo sapiens
tggggcaggctcgag

SEQ ID NO: 1240062 - DNA, 15 bp, Homo sapiens
atggggcaggctcga

SEQ ID NO: 1240063 - DNA, 15 bp, Homo sapiens
aatggggcaggctcg

SEQ ID NO: 1240064 - DNA, 15 bp, Homo sapiens
gaatggggcaggctc

SEQ ID NO: 1240065 - DNA, 15 bp, Homo sapiens
tgaatggggcaggct

SEQ ID NO: 1240066 - DNA, 15 bp, Homo sapiens
atgaatggggcaggc

SEQ ID NO: 1240067 - DNA, 15 bp, Homo sapiens
gatgaatggggcagg

SEQ ID NO: 1240068 - DNA, 15 bp, Homo sapiens
agatgaatggggcag

SEQ ID NO: 1240069 - DNA, 15 bp, Homo sapiens
aagatgaatggggca

SEQ ID NO: 1240070 - DNA, 15 bp, Homo sapiens
taagatgaatggggc

SEQ ID NO: 1240071 - DNA, 15 bp, Homo sapiens
gtaagatgaatgggg

SEQ ID NO: 1240072 - DNA, 15 bp, Homo sapiens
cgtaagatgaatggg

SEQ ID NO: 1240073 - DNA, 15 bp, Homo sapiens
acgtaagatgaatgg

SEQ ID NO: 1240074 - DNA, 15 bp, Homo sapiens
aacgtaagatgaatg

SEQ ID NO: 1240075 - DNA, 15 bp, Homo sapiens
taacgtaagatgaat

SEQ ID NO: 1240076 - DNA, 15 bp, Homo sapiens
ctaacgtaagatgaa

SEQ ID NO: 1240077 - DNA, 15 bp, Homo sapiens
actaacgtaagatga

SEQ ID NO: 1240078 - DNA, 15 bp, Homo sapiens
cactaacgtaagatg

SEQ ID NO: 1240079 - DNA, 15 bp, Homo sapiens
ccactaacgtaagat

SEQ ID NO: 1240080 - DNA, 15 bp, Homo sapiens
tccactaacgtaaga

SEQ ID NO: 1240081 - DNA, 15 bp, Homo sapiens
ttccactaacgtaag

SEQ ID NO: 1240082 - DNA, 15 bp, Homo sapiens
tttccactaacgtaa

SEQ ID NO: 1240083 - DNA, 15 bp, Homo sapiens
gtttccactaacgta

SEQ ID NO: 1240084 - DNA, 15 bp, Homo sapiens
agtttccactaacgt

SEQ ID NO: 1240085 - DNA, 15 bp, Homo sapiens
cagtttccactaacg

SEQ ID NO: 1240086 - DNA, 15 bp, Homo sapiens
tcagtttccactaac

SEQ ID NO: 1240087 - DNA, 15 bp, Homo sapiens
ctcagtttccactaa

SEQ ID NO: 1240088 - DNA, 15 bp, Homo sapiens
cctcagtttccacta

SEQ ID NO: 1240089 - DNA, 15 bp, Homo sapiens
gcctcagtttccact

SEQ ID NO: 1240090 - DNA, 15 bp, Homo sapiens
agcctcagtttccac

SEQ ID NO: 1240091 - DNA, 15 bp, Homo sapiens
aagcctcagtttcca

SEQ ID NO: 1240092 - DNA, 15 bp, Homo sapiens
gaagcctcagtttcc

SEQ ID NO: 1240093 - DNA, 15 bp, Homo sapiens
ggaagcctcagtttc

SEQ ID NO: 1240094 - DNA, 15 bp, Homo sapiens
tggaagcctcagttt

SEQ ID NO: 1240095 - DNA, 15 bp, Homo sapiens
ctggaagcctcagtt

SEQ ID NO: 1240096 - DNA, 15 bp, Homo sapiens
tctggaagcctcagt

SEQ ID NO: 1240097 - DNA, 15 bp, Homo sapiens
ctctggaagcctcag

SEQ ID NO: 1240098 - DNA, 15 bp, Homo sapiens
cctctggaagcctca

SEQ ID NO: 1240099 - DNA, 15 bp, Homo sapiens
acctctggaagcctc

SEQ ID NO: 1240100 - DNA, 15 bp, Homo sapiens
aacctctggaagcct

SEQ ID NO: 1240101 - DNA, 15 bp, Homo sapiens
aaacctctggaagcc

SEQ ID NO: 1240102 - DNA, 15 bp, Homo sapiens
gaaacctctggaagc

SEQ ID NO: 1240103 - DNA, 15 bp, Homo sapiens
tgaaacctctggaag

SEQ ID NO: 1240104 - DNA, 15 bp, Homo sapiens
ttgaaacctctggaa

SEQ ID NO: 1240105 - DNA, 15 bp, Homo sapiens
cttgaaacctctgga

SEQ ID NO: 1240106 - DNA, 15 bp, Homo sapiens
ccttgaaacctctgg

SEQ ID NO: 1240107 - DNA, 15 bp, Homo sapiens
accttgaaacctctg

SEQ ID NO: 1240108 - DNA, 15 bp, Homo sapiens
gaccttgaaacctct

SEQ ID NO: 1240109 - DNA, 15 bp, Homo sapiens
tgaccttgaaacctc

SEQ ID NO: 1240110 - DNA, 15 bp, Homo sapiens
gtgaccttgaaacct

SEQ ID NO: 1240111 - DNA, 15 bp, Homo sapiens
tgtgaccttgaaacc

SEQ ID NO: 1240112 - DNA, 15 bp, Homo sapiens
ttgtgaccttgaaac

SEQ ID NO: 1240113 - DNA, 15 bp, Homo sapiens
gttgtgaccttgaaa

SEQ ID NO: 1240114 - DNA, 15 bp, Homo sapiens
agttgtgaccttgaa

SEQ ID NO: 1240115 - DNA, 15 bp, Homo sapiens
tagttgtgaccttga

SEQ ID NO: 1240116 - DNA, 15 bp, Homo sapiens
ttagttgtgaccttg

SEQ ID NO: 1240117 - DNA, 15 bp, Homo sapiens
tttagttgtgacctt

SEQ ID NO: 1240118 - DNA, 15 bp, Homo sapiens
atttagttgtgacct

SEQ ID NO: 1240119 - DNA, 15 bp, Homo sapiens
gatttagttgtgacc

SEQ ID NO: 1240120 - DNA, 15 bp, Homo sapiens
ggatttagttgtgac

SEQ ID NO: 1240121 - DNA, 15 bp, Homo sapiens
tggatttagttgtga

SEQ ID NO: 1240122 - DNA, 15 bp, Homo sapiens
ctggatttagttgtg

SEQ ID NO: 1240123 - DNA, 15 bp, Homo sapiens
tctggatttagttgt

SEQ ID NO: 1240124 - DNA, 15 bp, Homo sapiens
ttctggatttagttg

SEQ ID NO: 1240125 - DNA, 15 bp, Homo sapiens
gttctggatttagtt

SEQ ID NO: 1240126 - DNA, 15 bp, Homo sapiens
ggttctggatttagt

SEQ ID NO: 1240127 - DNA, 15 bp, Homo sapiens
aggttctggatttag

SEQ ID NO: 1240128 - DNA, 15 bp, Homo sapiens
gaggttctggattta

SEQ ID NO: 1240129 - DNA, 15 bp, Homo sapiens
tgaggttctggattt

SEQ ID NO: 1240130 - DNA, 15 bp, Homo sapiens
atgaggttctggatt

SEQ ID NO: 1240131 - DNA, 15 bp, Homo sapiens
gatgaggttctggat

SEQ ID NO: 1240132 - DNA, 15 bp, Homo sapiens
agatgaggttctgga

SEQ ID NO: 1240133 - DNA, 15 bp, Homo sapiens
gagatgaggttctgg

SEQ ID NO: 1240134 - DNA, 15 bp, Homo sapiens
tgagatgaggttctg

SEQ ID NO: 1240135 - DNA, 15 bp, Homo sapiens
ctgagatgaggttct

SEQ ID NO: 1240136 - DNA, 15 bp, Homo sapiens
cctgagatgaggttc

SEQ ID NO: 1240137 - DNA, 15 bp, Homo sapiens
gcctgagatgaggtt

SEQ ID NO: 1240138 - DNA, 15 bp, Homo sapiens
tgcctgagatgaggt

SEQ ID NO: 1240139 - DNA, 15 bp, Homo sapiens
gtgcctgagatgagg

SEQ ID NO: 1240140 - DNA, 15 bp, Homo sapiens
tgtgcctgagatgag

SEQ ID NO: 1240141 - DNA, 15 bp, Homo sapiens
gtgtgcctgagatga

SEQ ID NO: 1240142 - DNA, 15 bp, Homo sapiens
agtgtgcctgagatg

SEQ ID NO: 1240143 - DNA, 15 bp, Homo sapiens
cagtgtgcctgagat

SEQ ID NO: 1240144 - DNA, 15 bp, Homo sapiens
ccagtgtgcctgaga

SEQ ID NO: 1240145 - DNA, 15 bp, Homo sapiens
accagtgtgcctgag

SEQ ID NO: 1240146 - DNA, 15 bp, Homo sapiens
gaccagtgtgcctga

SEQ ID NO: 1240147 - DNA, 15 bp, Homo sapiens
cgaccagtgtgcctg

SEQ ID NO: 1240148 - DNA, 15 bp, Homo sapiens
acgaccagtgtgcct

SEQ ID NO: 1240149 - DNA, 15 bp, Homo sapiens
tacgaccagtgtgcc

SEQ ID NO: 1240150 - DNA, 15 bp, Homo sapiens
ctacgaccagtgtgc

SEQ ID NO: 1240151 - DNA, 15 bp, Homo sapiens
actacgaccagtgtg

SEQ ID NO: 1240152 - DNA, 15 bp, Homo sapiens
gactacgaccagtgt

SEQ ID NO: 1240153 - DNA, 15 bp, Homo sapiens
ggactacgaccagtg

SEQ ID NO: 1240154 - DNA, 15 bp, Homo sapiens
gggactacgaccagt

SEQ ID NO: 1240155 - DNA, 15 bp, Homo sapiens
tgggactacgaccag

SEQ ID NO: 1240156 - DNA, 15 bp, Homo sapiens
ttgggactacgacca

SEQ ID NO: 1240157 - DNA, 15 bp, Homo sapiens
attgggactacgacc

SEQ ID NO: 1240158 - DNA, 15 bp, Homo sapiens
cattgggactacgac

SEQ ID NO: 1240159 - DNA, 15 bp, Homo sapiens
acattgggactacga

SEQ ID NO: 1240160 - DNA, 15 bp, Homo sapiens
gacattgggactacg

SEQ ID NO: 1240161 - DNA, 15 bp, Homo sapiens
ggacattgggactac

SEQ ID NO: 1240162 - DNA, 15 bp, Homo sapiens
tggacattgggacta

SEQ ID NO: 1240163 - DNA, 15 bp, Homo sapiens
ctggacattgggact

SEQ ID NO: 1240164 - DNA, 15 bp, Homo sapiens
actggacattgggac

SEQ ID NO: 1240165 - DNA, 15 bp, Homo sapiens
gactggacattggga

SEQ ID NO: 1240166 - DNA, 15 bp, Homo sapiens
agactggacattggg

SEQ ID NO: 1240167 - DNA, 15 bp, Homo sapiens
aagactggacattgg

SEQ ID NO: 1240168 - DNA, 15 bp, Homo sapiens
taagactggacattg

SEQ ID NO: 1240169 - DNA, 15 bp, Homo sapiens
ttaagactggacatt

SEQ ID NO: 1240170 - DNA, 15 bp, Homo sapiens
cttaagactggacat

SEQ ID NO: 1240171 - DNA, 15 bp, Homo sapiens
acttaagactggaca

SEQ ID NO: 1240172 - DNA, 15 bp, Homo sapiens
gacttaagactggac

SEQ ID NO: 1240173 - DNA, 15 bp, Homo sapiens
agacttaagactgga

SEQ ID NO: 1240174 - DNA, 15 bp, Homo sapiens
aagacttaagactgg

SEQ ID NO: 1240175 - DNA, 15 bp, Homo sapiens
gaagacttaagactg

SEQ ID NO: 1240176 - DNA, 15 bp, Homo sapiens
agaagacttaagact

SEQ ID NO: 1240177 - DNA, 15 bp, Homo sapiens
aagaagacttaagac

SEQ ID NO: 1240178 - DNA, 15 bp, Homo sapiens
caagaagacttaaga

SEQ ID NO: 1240179 - DNA, 15 bp, Homo sapiens
ccaagaagacttaag

SEQ ID NO: 1240180 - DNA, 15 bp, Homo sapiens
tccaagaagacttaa

SEQ ID NO: 1240181 - DNA, 15 bp, Homo sapiens
atccaagaagactta

SEQ ID NO: 1240182 - DNA, 15 bp, Homo sapiens
tatccaagaagactt

SEQ ID NO: 1240183 - DNA, 15 bp, Homo sapiens
atatccaagaagact

SEQ ID NO: 1240184 - DNA, 15 bp, Homo sapiens
gatatccaagaagac

SEQ ID NO: 1240185 - DNA, 15 bp, Homo sapiens
agatatccaagaaga

SEQ ID NO: 1240186 - DNA, 15 bp, Homo sapiens
cagatatccaagaag

SEQ ID NO: 1240187 - DNA, 15 bp, Homo sapiens
acagatatccaagaa

SEQ ID NO: 1240188 - DNA, 15 bp, Homo sapiens
cacagatatccaaga

SEQ ID NO: 1240189 - DNA, 15 bp, Homo sapiens
ccacagatatccaag

SEQ ID NO: 1240190 - DNA, 15 bp, Homo sapiens
gccacagatatccaa

SEQ ID NO: 1240191 - DNA, 15 bp, Homo sapiens
agccacagatatcca

SEQ ID NO: 1240192 - DNA, 15 bp, Homo sapiens
gagccacagatatcc

SEQ ID NO: 1240193 - DNA, 15 bp, Homo sapiens
tgagccacagatatc

SEQ ID NO: 1240194 - DNA, 15 bp, Homo sapiens
gtgagccacagatat

SEQ ID NO: 1240195 - DNA, 15 bp, Homo sapiens
tgtgagccacagata

SEQ ID NO: 1240196 - DNA, 15 bp, Homo sapiens
ctgtgagccacagat

SEQ ID NO: 1240197 - DNA, 15 bp, Homo sapiens
tctgtgagccacaga

SEQ ID NO: 1240198 - DNA, 15 bp, Homo sapiens
atctgtgagccacag

SEQ ID NO: 1240199 - DNA, 15 bp, Homo sapiens
aatctgtgagccaca

SEQ ID NO: 1240200 - DNA, 15 bp, Homo sapiens
aaatctgtgagccac

SEQ ID NO: 1240201 - DNA, 15 bp, Homo sapiens
aaaatctgtgagcca

SEQ ID NO: 1240202 - DNA, 15 bp, Homo sapiens
caaaatctgtgagcc

SEQ ID NO: 1240203 - DNA, 15 bp, Homo sapiens
ccaaaatctgtgagc

SEQ ID NO: 1240204 - DNA, 15 bp, Homo sapiens
cccaaaatctgtgag

SEQ ID NO: 1240205 - DNA, 15 bp, Homo sapiens
acccaaaatctgtga

SEQ ID NO: 1240206 - DNA, 15 bp, Homo sapiens
cacccaaaatctgtg

SEQ ID NO: 1240207 - DNA, 15 bp, Homo sapiens
acacccaaaatctgt

SEQ ID NO: 1240208 - DNA, 15 bp, Homo sapiens
aacacccaaaatctg

SEQ ID NO: 1240209 - DNA, 15 bp, Homo sapiens
aaacacccaaaatct

SEQ ID NO: 1240210 - DNA, 15 bp, Homo sapiens
caaacacccaaaatc

SEQ ID NO: 1240211 - DNA, 15 bp, Homo sapiens
tcaaacacccaaaat

SEQ ID NO: 1240212 - DNA, 15 bp, Homo sapiens
ctcaaacacccaaaa

SEQ ID NO: 1240213 - DNA, 15 bp, Homo sapiens
gctcaaacacccaaa

SEQ ID NO: 1240214 - DNA, 15 bp, Homo sapiens
ggctcaaacacccaa

SEQ ID NO: 1240215 - DNA, 15 bp, Homo sapiens
aggctcaaacaccca

SEQ ID NO: 1240216 - DNA, 15 bp, Homo sapiens
gaggctcaaacaccc

SEQ ID NO: 1240217 - DNA, 15 bp, Homo sapiens
ggaggctcaaacacc

SEQ ID NO: 1240218 - DNA, 15 bp, Homo sapiens
aggaggctcaaacac

SEQ ID NO: 1240219 - DNA, 15 bp, Homo sapiens
caggaggctcaaaca

SEQ ID NO: 1240220 - DNA, 15 bp, Homo sapiens
gcaggaggctcaaac

SEQ ID NO: 1240221 - DNA, 15 bp, Homo sapiens
agcaggaggctcaaa

SEQ ID NO: 1240222 - DNA, 15 bp, Homo sapiens
cagcaggaggctcaa

SEQ ID NO: 1240223 - DNA, 15 bp, Homo sapiens
tcagcaggaggctca

SEQ ID NO: 1240224 - DNA, 15 bp, Homo sapiens
ctcagcaggaggctc

SEQ ID NO: 1240225 - DNA, 15 bp, Homo sapiens
gctcagcaggaggct

SEQ ID NO: 1240226 - DNA, 15 bp, Homo sapiens
tgctcagcaggaggc

SEQ ID NO: 1240227 - DNA, 15 bp, Homo sapiens
gtgctcagcaggagg

SEQ ID NO: 1240228 - DNA, 15 bp, Homo sapiens
agtgctcagcaggag

SEQ ID NO: 1240229 - DNA, 15 bp, Homo sapiens
cagtgctcagcagga

SEQ ID NO: 1240230 - DNA, 15 bp, Homo sapiens
gcagtgctcagcagg

SEQ ID NO: 1240231 - DNA, 15 bp, Homo sapiens
agcagtgctcagcag

SEQ ID NO: 1240232 - DNA, 15 bp, Homo sapiens
cagcagtgctcagca

SEQ ID NO: 1240233 - DNA, 15 bp, Homo sapiens
ccagcagtgctcagc

SEQ ID NO: 1240234 - DNA, 15 bp, Homo sapiens
cccagcagtgctcag

SEQ ID NO: 1240235 - DNA, 15 bp, Homo sapiens
ccccagcagtgctca

SEQ ID NO: 1240236 - DNA, 15 bp, Homo sapiens
gccccagcagtgctc

SEQ ID NO: 1240237 - DNA, 15 bp, Homo sapiens
ggccccagcagtgct

SEQ ID NO: 1240238 - DNA, 15 bp, Homo sapiens
tggccccagcagtgc

SEQ ID NO: 1240239 - DNA, 15 bp, Homo sapiens
gtggccccagcagtg

SEQ ID NO: 1240240 - DNA, 15 bp, Homo sapiens
tgtggccccagcagt

SEQ ID NO: 1240241 - DNA, 15 bp, Homo sapiens
ctgtggccccagcag

SEQ ID NO: 1240242 - DNA, 15 bp, Homo sapiens
gctgtggccccagca

SEQ ID NO: 1240243 - DNA, 15 bp, Homo sapiens
cgctgtggccccagc

SEQ ID NO: 1240244 - DNA, 15 bp, Homo sapiens
ccgctgtggccccag

SEQ ID NO: 1240245 - DNA, 15 bp, Homo sapiens
accgctgtggcccca

SEQ ID NO: 1240246 - DNA, 15 bp, Homo sapiens
caccgctgtggcccc

SEQ ID NO: 1240247 - DNA, 15 bp, Homo sapiens
tcaccgctgtggccc

SEQ ID NO: 1240248 - DNA, 15 bp, Homo sapiens
gtcaccgctgtggcc

SEQ ID NO: 1240249 - DNA, 15 bp, Homo sapiens
ggtcaccgctgtggc

SEQ ID NO: 1240250 - DNA, 15 bp, Homo sapiens
tggtcaccgctgtgg

SEQ ID NO: 1240251 - DNA, 15 bp, Homo sapiens
ctggtcaccgctgtg

SEQ ID NO: 1240252 - DNA, 15 bp, Homo sapiens
gctggtcaccgctgt

SEQ ID NO: 1240253 - DNA, 15 bp, Homo sapiens
ggctggtcaccgctg

SEQ ID NO: 1240254 - DNA, 15 bp, Homo sapiens
gggctggtcaccgct

SEQ ID NO: 1240255 - DNA, 15 bp, Homo sapiens
agggctggtcaccgc

SEQ ID NO: 1240256 - DNA, 15 bp, Homo sapiens
cagggctggtcaccg

SEQ ID NO: 1240257 - DNA, 15 bp, Homo sapiens
acagggctggtcacc

SEQ ID NO: 1240258 - DNA, 15 bp, Homo sapiens
gacagggctggtcac

SEQ ID NO: 1240259 - DNA, 15 bp, Homo sapiens
agacagggctggtca

SEQ ID NO: 1240260 - DNA, 15 bp, Homo sapiens
aagacagggctggtc

SEQ ID NO: 1240261 - DNA, 15 bp, Homo sapiens
gaagacagggctggt

SEQ ID NO: 1240262 - DNA, 15 bp, Homo sapiens
tgaagacagggctgg

SEQ ID NO: 1240263 - DNA, 15 bp, Homo sapiens
gtgaagacagggctg

SEQ ID NO: 1240264 - DNA, 15 bp, Homo sapiens
cgtgaagacagggct

SEQ ID NO: 1240265 - DNA, 15 bp, Homo sapiens
ccgtgaagacagggc

SEQ ID NO: 1240266 - DNA, 15 bp, Homo sapiens
cccgtgaagacaggg

SEQ ID NO: 1240267 - DNA, 15 bp, Homo sapiens
tcccgtgaagacagg

SEQ ID NO: 1240268 - DNA, 15 bp, Homo sapiens
gtcccgtgaagacag

SEQ ID NO: 1240269 - DNA, 15 bp, Homo sapiens
agtcccgtgaagaca

SEQ ID NO: 1240270 - DNA, 15 bp, Homo sapiens
gagtcccgtgaagac

SEQ ID NO: 1240271 - DNA, 15 bp, Homo sapiens
tgagtcccgtgaaga

SEQ ID NO: 1240272 - DNA, 15 bp, Homo sapiens
ctgagtcccgtgaag

SEQ ID NO: 1240273 - DNA, 15 bp, Homo sapiens
actgagtcccgtgaa

SEQ ID NO: 1240274 - DNA, 15 bp, Homo sapiens
cactgagtcccgtga

SEQ ID NO: 1240275 - DNA, 15 bp, Homo sapiens
tcactgagtcccgtg

SEQ ID NO: 1240276 - DNA, 15 bp, Homo sapiens
ctcactgagtcccgt

SEQ ID NO: 1240277 - DNA, 15 bp, Homo sapiens
tctcactgagtcccg

SEQ ID NO: 1240278 - DNA, 15 bp, Homo sapiens
ctctcactgagtccc

SEQ ID NO: 1240279 - DNA, 15 bp, Homo sapiens
cctctcactgagtcc

SEQ ID NO: 1240280 - DNA, 15 bp, Homo sapiens
tcctctcactgagtc

SEQ ID NO: 1240281 - DNA, 15 bp, Homo sapiens
ttcctctcactgagt

SEQ ID NO: 1240282 - DNA, 15 bp, Homo sapiens
gttcctctcactgag

SEQ ID NO: 1240283 - DNA, 15 bp, Homo sapiens
tgttcctctcactga

SEQ ID NO: 1240284 - DNA, 15 bp, Homo sapiens
ctgttcctctcactg

SEQ ID NO: 1240285 - DNA, 15 bp, Homo sapiens
tctgttcctctcact

SEQ ID NO: 1240286 - DNA, 15 bp, Homo sapiens
atctgttcctctcac

SEQ ID NO: 1240287 - DNA, 15 bp, Homo sapiens
aatctgttcctctca

SEQ ID NO: 1240288 - DNA, 15 bp, Homo sapiens
gaatctgttcctctc

SEQ ID NO: 1240289 - DNA, 15 bp, Homo sapiens
tgaatctgttcctct

SEQ ID NO: 1240290 - DNA, 15 bp, Homo sapiens
atgaatctgttcctc

SEQ ID NO: 1240291 - DNA, 15 bp, Homo sapiens
cggatgaatctgttc

SEQ ID NO: 1240292 - DNA, 15 bp, Homo sapiens
gcggatgaatctgtt

SEQ ID NO: 1240293 - DNA, 15 bp, Homo sapiens
tgcggatgaatctgt

SEQ ID NO: 1240294 - DNA, 15 bp, Homo sapiens
ctgcggatgaatctg

SEQ ID NO: 1240295 - DNA, 15 bp, Homo sapiens
tctgcggatgaatct

SEQ ID NO: 1240296 - DNA, 15 bp, Homo sapiens
ctctgcggatgaatc

SEQ ID NO: 1240297 - DNA, 15 bp, Homo sapiens
actctgcggatgaat

SEQ ID NO: 1240298 - DNA, 15 bp, Homo sapiens
cactctgcggatgaa

SEQ ID NO: 1240299 - DNA, 15 bp, Homo sapiens
ccactctgcggatga

SEQ ID NO: 1240300 - DNA, 15 bp, Homo sapiens
cccactctgcggatg

SEQ ID NO: 1240301 - DNA, 15 bp, Homo sapiens
gcccactctgcggat

SEQ ID NO: 1240302 - DNA, 15 bp, Homo sapiens
tgcccactctgcgga

SEQ ID NO: 1240303 - DNA, 15 bp, Homo sapiens
ctgcccactctgcgg

SEQ ID NO: 1240304 - DNA, 15 bp, Homo sapiens
cctgcccactctgcg

SEQ ID NO: 1240305 - DNA, 15 bp, Homo sapiens
tcctgcccactctgc

SEQ ID NO: 1240306 - DNA, 15 bp, Homo sapiens
gtcctgcccactctg

SEQ ID NO: 1240307 - DNA, 15 bp, Homo sapiens
agtcctgcccactct

SEQ ID NO: 1240308 - DNA, 15 bp, Homo sapiens
tagtcctgcccactc

SEQ ID NO: 1240309 - DNA, 15 bp, Homo sapiens
ctagtcctgcccact

SEQ ID NO: 1240310 - DNA, 15 bp, Homo sapiens
cctagtcctgcccac

SEQ ID NO: 1240311 - DNA, 15 bp, Homo sapiens
acctagtcctgccca

SEQ ID NO: 1240312 - DNA, 15 bp, Homo sapiens
aacctagtcctgccc

SEQ ID NO: 1240313 - DNA, 15 bp, Homo sapiens
caacctagtcctgcc

SEQ ID NO: 1240314 - DNA, 15 bp, Homo sapiens
ccaacctagtcctgc

SEQ ID NO: 1240315 - DNA, 15 bp, Homo sapiens
cccaacctagtcctg

SEQ ID NO: 1240316 - DNA, 15 bp, Homo sapiens
ccccaacctagtcct

SEQ ID NO: 1240317 - DNA, 15 bp, Homo sapiens
cccccaacctagtcc

SEQ ID NO: 1240318 - DNA, 15 bp, Homo sapiens
tcccccaacctagtc

SEQ ID NO: 1240319 - DNA, 15 bp, Homo sapiens
ttcccccaacctagt

SEQ ID NO: 1240320 - DNA, 15 bp, Homo sapiens
gttcccccaacctag

SEQ ID NO: 1240321 - DNA, 15 bp, Homo sapiens
ggttcccccaaccta

SEQ ID NO: 1240322 - DNA, 15 bp, Homo sapiens
gggttcccccaacct

SEQ ID NO: 1240323 - DNA, 15 bp, Homo sapiens
tgggttcccccaacc

SEQ ID NO: 1240324 - DNA, 15 bp, Homo sapiens
ctgggttcccccaac

SEQ ID NO: 1240325 - DNA, 15 bp, Homo sapiens
cccctgggttccccc

SEQ ID NO: 1240326 - DNA, 15 bp, Homo sapiens
acccctgggttcccc

SEQ ID NO: 1240327 - DNA, 15 bp, Homo sapiens
gacccctgggttccc

SEQ ID NO: 1240328 - DNA, 15 bp, Homo sapiens
agacccctgggttcc

SEQ ID NO: 1240329 - DNA, 15 bp, Homo sapiens
tagacccctgggttc

SEQ ID NO: 1240330 - DNA, 15 bp, Homo sapiens
ctagacccctgggtt

SEQ ID NO: 1240331 - DNA, 15 bp, Homo sapiens
tctagacccctgggt

SEQ ID NO: 1240332 - DNA, 15 bp, Homo sapiens
ctctagacccctggg

SEQ ID NO: 1240333 - DNA, 15 bp, Homo sapiens
cctctagacccctgg

SEQ ID NO: 1240334 - DNA, 15 bp, Homo sapiens
ccctctagacccctg

SEQ ID NO: 1240335 - DNA, 15 bp, Homo sapiens
gccctctagacccct

SEQ ID NO: 1240336 - DNA, 15 bp, Homo sapiens
agccctctagacccc

SEQ ID NO: 1240337 - DNA, 15 bp, Homo sapiens
aagccctctagaccc

SEQ ID NO: 1240338 - DNA, 15 bp, Homo sapiens
aaagccctctagacc

SEQ ID NO: 1240339 - DNA, 15 bp, Homo sapiens
aaaagccctctagac

SEQ ID NO: 1240340 - DNA, 15 bp, Homo sapiens
gaaaagccctctaga

SEQ ID NO: 1240341 - DNA, 15 bp, Homo sapiens
tgaaaagccctctag

SEQ ID NO: 1240342 - DNA, 15 bp, Homo sapiens
ctgaaaagccctcta

SEQ ID NO: 1240343 - DNA, 15 bp, Homo sapiens
tctgaaaagccctct

SEQ ID NO: 1240344 - DNA, 15 bp, Homo sapiens
ctctgaaaagccctc

SEQ ID NO: 1240345 - DNA, 15 bp, Homo sapiens
cctctgaaaagccct

SEQ ID NO: 1240346 - DNA, 15 bp, Homo sapiens
ccctctgaaaagccc

SEQ ID NO: 1240347 - DNA, 15 bp, Homo sapiens
gccctctgaaaagcc

SEQ ID NO: 1240348 - DNA, 15 bp, Homo sapiens
tgccctctgaaaagc

SEQ ID NO: 1240349 - DNA, 15 bp, Homo sapiens
ctgccctctgaaaag

SEQ ID NO: 1240350 - DNA, 15 bp, Homo sapiens
cctgccctctgaaaa

SEQ ID NO: 1240351 - DNA, 15 bp, Homo sapiens
ccctgccctctgaaa

SEQ ID NO: 1240352 - DNA, 15 bp, Homo sapiens
cccctgccctctgaa

SEQ ID NO: 1240353 - DNA, 15 bp, Homo sapiens
acccctgccctctga

SEQ ID NO: 1240354 - DNA, 15 bp, Homo sapiens
gacccctgccctctg

SEQ ID NO: 1240355 - DNA, 15 bp, Homo sapiens
tgacccctgccctct

SEQ ID NO: 1240356 - DNA, 15 bp, Homo sapiens
gtgacccctgccctc

SEQ ID NO: 1240357 - DNA, 15 bp, Homo sapiens
agtgacccctgccct

SEQ ID NO: 1240358 - DNA, 15 bp, Homo sapiens
cagtgacccctgccc

SEQ ID NO: 1240359 - DNA, 15 bp, Homo sapiens
tcagtgacccctgcc

SEQ ID NO: 1240360 - DNA, 15 bp, Homo sapiens
ctcagtgacccctgc

SEQ ID NO: 1240361 - DNA, 15 bp, Homo sapiens
gctcagtgacccctg

SEQ ID NO: 1240362 - DNA, 15 bp, Homo sapiens
cgctcagtgacccct

SEQ ID NO: 1240363 - DNA, 15 bp, Homo sapiens
ccgctcagtgacccc

SEQ ID NO: 1240364 - DNA, 15 bp, Homo sapiens
tccgctcagtgaccc

SEQ ID NO: 1240365 - DNA, 15 bp, Homo sapiens
ctccgctcagtgacc

SEQ ID NO: 1240366 - DNA, 15 bp, Homo sapiens
tctccgctcagtgac

SEQ ID NO: 1240367 - DNA, 15 bp, Homo sapiens
ctctccgctcagtga

SEQ ID NO: 1240368 - DNA, 15 bp, Homo sapiens
gctctccgctcagtg

SEQ ID NO: 1240369 - DNA, 15 bp, Homo sapiens
tgctctccgctcagt

SEQ ID NO: 1240370 - DNA, 15 bp, Homo sapiens
ctgctctccgctcag

SEQ ID NO: 1240371 - DNA, 15 bp, Homo sapiens
tctgctctccgctca

SEQ ID NO: 1240372 - DNA, 15 bp, Homo sapiens
ctctgctctccgctc

SEQ ID NO: 1240373 - DNA, 15 bp, Homo sapiens
cctctgctctccgct

SEQ ID NO: 1240374 - DNA, 15 bp, Homo sapiens
tcctctgctctccgc

SEQ ID NO: 1240375 - DNA, 15 bp, Homo sapiens
ctcctctgctctccg

SEQ ID NO: 1240376 - DNA, 15 bp, Homo sapiens
cctcctctgctctcc

SEQ ID NO: 1240377 - DNA, 15 bp, Homo sapiens
tcctcctctgctctc

SEQ ID NO: 1240378 - DNA, 15 bp, Homo sapiens
ctcctcctctgctct

SEQ ID NO: 1240379 - DNA, 15 bp, Homo sapiens
actcctcctctgctc

SEQ ID NO: 1240380 - DNA, 15 bp, Homo sapiens
cactcctcctctgct

SEQ ID NO: 1240381 - DNA, 15 bp, Homo sapiens
tcactcctcctctgc

SEQ ID NO: 1240382 - DNA, 15 bp, Homo sapiens
ctcactcctcctctg

SEQ ID NO: 1240383 - DNA, 15 bp, Homo sapiens
gctcactcctcctct

SEQ ID NO: 1240384 - DNA, 15 bp, Homo sapiens
ggctcactcctcctc

SEQ ID NO: 1240385 - DNA, 15 bp, Homo sapiens
tggctcactcctcct

SEQ ID NO: 1240386 - DNA, 15 bp, Homo sapiens
atggctcactcctcc

SEQ ID NO: 1240387 - DNA, 15 bp, Homo sapiens
aatggctcactcctc

SEQ ID NO: 1240388 - DNA, 15 bp, Homo sapiens
aaatggctcactcct

SEQ ID NO: 1240389 - DNA, 15 bp, Homo sapiens
caaatggctcactcc

SEQ ID NO: 1240390 - DNA, 15 bp, Homo sapiens
gcaaatggctcactc

SEQ ID NO: 1240391 - DNA, 15 bp, Homo sapiens
agcaaatggctcact

SEQ ID NO: 1240392 - DNA, 15 bp, Homo sapiens
gagcaaatggctcac

SEQ ID NO: 1240393 - DNA, 15 bp, Homo sapiens
ggagcaaatggctca

SEQ ID NO: 1240394 - DNA, 15 bp, Homo sapiens
tggagcaaatggctc

SEQ ID NO: 1240395 - DNA, 15 bp, Homo sapiens
ctggagcaaatggct

SEQ ID NO: 1240396 - DNA, 15 bp, Homo sapiens
gctggagcaaatggc

SEQ ID NO: 1240397 - DNA, 15 bp, Homo sapiens
cgctggagcaaatgg

SEQ ID NO: 1240398 - DNA, 15 bp, Homo sapiens
acgctggagcaaatg

SEQ ID NO: 1240399 - DNA, 15 bp, Homo sapiens
cacgctggagcaaat

SEQ ID NO: 1240400 - DNA, 15 bp, Homo sapiens
tcacgctggagcaaa

SEQ ID NO: 1240401 - DNA, 15 bp, Homo sapiens
ttcacgctggagcaa

SEQ ID NO: 1240402 - DNA, 15 bp, Homo sapiens
cttcacgctggagca

SEQ ID NO: 1240403 - DNA, 15 bp, Homo sapiens
acttcacgctggagc

SEQ ID NO: 1240404 - DNA, 15 bp, Homo sapiens
aacttcacgctggag

SEQ ID NO: 1240405 - DNA, 15 bp, Homo sapiens
caacttcacgctgga

SEQ ID NO: 1240406 - DNA, 15 bp, Homo sapiens
acaacttcacgctgg

SEQ ID NO: 1240407 - DNA, 15 bp, Homo sapiens
aacaacttcacgctg

SEQ ID NO: 1240408 - DNA, 15 bp, Homo sapiens
caacaacttcacgct

SEQ ID NO: 1240409 - DNA, 15 bp, Homo sapiens
ccaacaacttcacgc

SEQ ID NO: 1240410 - DNA, 15 bp, Homo sapiens
accaacaacttcacg

SEQ ID NO: 1240411 - DNA, 15 bp, Homo sapiens
caccaacaacttcac

SEQ ID NO: 1240412 - DNA, 15 bp, Homo sapiens
acaccaacaacttca

SEQ ID NO: 1240413 - DNA, 15 bp, Homo sapiens
cacaccaacaacttc

SEQ ID NO: 1240414 - DNA, 15 bp, Homo sapiens
tcacaccaacaactt

SEQ ID NO: 1240415 - DNA, 15 bp, Homo sapiens
atcacaccaacaact

SEQ ID NO: 1240416 - DNA, 15 bp, Homo sapiens
catcacaccaacaac

SEQ ID NO: 1240417 - DNA, 15 bp, Homo sapiens
ccatcacaccaacaa

SEQ ID NO: 1240418 - DNA, 15 bp, Homo sapiens
cccatcacaccaaca

SEQ ID NO: 1240419 - DNA, 15 bp, Homo sapiens
ccccatcacaccaac

SEQ ID NO: 1240420 - DNA, 15 bp, Homo sapiens
accccatcacaccaa

SEQ ID NO: 1240421 - DNA, 15 bp, Homo sapiens
aaccccatcacacca

SEQ ID NO: 1240422 - DNA, 15 bp, Homo sapiens
aaaccccatcacacc

SEQ ID NO: 1240423 - DNA, 15 bp, Homo sapiens
gaaaccccatcacac

SEQ ID NO: 1240424 - DNA, 15 bp, Homo sapiens
tgaaaccccatcaca

SEQ ID NO: 1240425 - DNA, 15 bp, Homo sapiens
ctgaaaccccatcac

SEQ ID NO: 1240426 - DNA, 15 bp, Homo sapiens
cctgaaaccccatca

SEQ ID NO: 1240427 - DNA, 15 bp, Homo sapiens
ccctgaaaccccatc

SEQ ID NO: 1240428 - DNA, 15 bp, Homo sapiens
accctgaaaccccat

SEQ ID NO: 1240429 - DNA, 15 bp, Homo sapiens
caccctgaaacccca

SEQ ID NO: 1240430 - DNA, 15 bp, Homo sapiens
ccaccctgaaacccc

SEQ ID NO: 1240431 - DNA, 15 bp, Homo sapiens
gccaccctgaaaccc

SEQ ID NO: 1240432 - DNA, 15 bp, Homo sapiens
tgccaccctgaaacc

SEQ ID NO: 1240433 - DNA, 15 bp, Homo sapiens
ctgccaccctgaaac

SEQ ID NO: 1240434 - DNA, 15 bp, Homo sapiens
cctgccaccctgaaa

SEQ ID NO: 1240435 - DNA, 15 bp, Homo sapiens
tcctgccaccctgaa

SEQ ID NO: 1240436 - DNA, 15 bp, Homo sapiens
ctcctgccaccctga

SEQ ID NO: 1240437 - DNA, 15 bp, Homo sapiens
gctcctgccaccctg

SEQ ID NO: 1240438 - DNA, 15 bp, Homo sapiens
tgctcctgccaccct

SEQ ID NO: 1240439 - DNA, 15 bp, Homo sapiens
ctgctcctgccaccc

SEQ ID NO: 1240440 - DNA, 15 bp, Homo sapiens
actgctcctgccacc

SEQ ID NO: 1240441 - DNA, 15 bp, Homo sapiens
cactgctcctgccac

SEQ ID NO: 1240442 - DNA, 15 bp, Homo sapiens
acactgctcctgcca

SEQ ID NO: 1240443 - DNA, 15 bp, Homo sapiens
cacactgctcctgcc

SEQ ID NO: 1240444 - DNA, 15 bp, Homo sapiens
ccacactgctcctgc

SEQ ID NO: 1240445 - DNA, 15 bp, Homo sapiens
accacactgctcctg

SEQ ID NO: 1240446 - DNA, 15 bp, Homo sapiens
aaccacactgctcct

SEQ ID NO: 1240447 - DNA, 15 bp, Homo sapiens
taaccacactgctcc

SEQ ID NO: 1240448 - DNA, 15 bp, Homo sapiens
ttaaccacactgctc

SEQ ID NO: 1240449 - DNA, 15 bp, Homo sapiens
tttaaccacactgct

SEQ ID NO: 1240450 - DNA, 15 bp, Homo sapiens
ctttaaccacactgc

SEQ ID NO: 1240451 - DNA, 15 bp, Homo sapiens
cctttaaccacactg

SEQ ID NO: 1240452 - DNA, 15 bp, Homo sapiens
acctttaaccacact

SEQ ID NO: 1240453 - DNA, 15 bp, Homo sapiens
gacctttaaccacac

SEQ ID NO: 1240454 - DNA, 15 bp, Homo sapiens
agacctttaaccaca

SEQ ID NO: 1240455 - DNA, 15 bp, Homo sapiens
cagacctttaaccac

SEQ ID NO: 1240456 - DNA, 15 bp, Homo sapiens
ccagacctttaacca

SEQ ID NO: 1240457 - DNA, 15 bp, Homo sapiens
tccagacctttaacc

SEQ ID NO: 1240458 - DNA, 15 bp, Homo sapiens
ttccagacctttaac

SEQ ID NO: 1240459 - DNA, 15 bp, Homo sapiens
cttccagacctttaa

SEQ ID NO: 1240460 - DNA, 15 bp, Homo sapiens
gcttccagaccttta

SEQ ID NO: 1240461 - DNA, 15 bp, Homo sapiens
agcttccagaccttt

SEQ ID NO: 1240462 - DNA, 15 bp, Homo sapiens
cagcttccagacctt

SEQ ID NO: 1240463 - DNA, 15 bp, Homo sapiens
acagcttccagacct

SEQ ID NO: 1240464 - DNA, 15 bp, Homo sapiens
gacagcttccagacc

SEQ ID NO: 1240465 - DNA, 15 bp, Homo sapiens
cgacagcttccagac

SEQ ID NO: 1240466 - DNA, 15 bp, Homo sapiens
ccgacagcttccaga

SEQ ID NO: 1240467 - DNA, 15 bp, Homo sapiens
gccgacagcttccag

SEQ ID NO: 1240468 - DNA, 15 bp, Homo sapiens
tgccgacagcttcca

SEQ ID NO: 1240469 - DNA, 15 bp, Homo sapiens
atgccgacagcttcc

SEQ ID NO: 1240470 - DNA, 15 bp, Homo sapiens
catgccgacagcttc

SEQ ID NO: 1240471 - DNA, 15 bp, Homo sapiens
acatgccgacagctt

SEQ ID NO: 1240472 - DNA, 15 bp, Homo sapiens
cacatgccgacagct

SEQ ID NO: 1240473 - DNA, 15 bp, Homo sapiens
ccacatgccgacagc

SEQ ID NO: 1240474 - DNA, 15 bp, Homo sapiens
gccacatgccgacag

SEQ ID NO: 1240475 - DNA, 15 bp, Homo sapiens
agccacatgccgaca

SEQ ID NO: 1240476 - DNA, 15 bp, Homo sapiens
cagccacatgccgac

SEQ ID NO: 1240477 - DNA, 15 bp, Homo sapiens
ccagccacatgccga

SEQ ID NO: 1240478 - DNA, 15 bp, Homo sapiens
accagccacatgccg

SEQ ID NO: 1240479 - DNA, 15 bp, Homo sapiens
taccagccacatgcc

SEQ ID NO: 1240480 - DNA, 15 bp, Homo sapiens
ataccagccacatgc

SEQ ID NO: 1240481 - DNA, 15 bp, Homo sapiens
gataccagccacatg

SEQ ID NO: 1240482 - DNA, 15 bp, Homo sapiens
ggataccagccacat

SEQ ID NO: 1240483 - DNA, 15 bp, Homo sapiens
tggataccagccaca

SEQ ID NO: 1240484 - DNA, 15 bp, Homo sapiens
ttggataccagccac

SEQ ID NO: 1240485 - DNA, 15 bp, Homo sapiens
cttggataccagcca

SEQ ID NO: 1240486 - DNA, 15 bp, Homo sapiens
ccttggataccagcc

SEQ ID NO: 1240487 - DNA, 15 bp, Homo sapiens
accttggataccagc

SEQ ID NO: 1240488 - DNA, 15 bp, Homo sapiens
caccttggataccag

SEQ ID NO: 1240489 - DNA, 15 bp, Homo sapiens
ccaccttggatacca

SEQ ID NO: 1240490 - DNA, 15 bp, Homo sapiens
gccaccttggatacc

SEQ ID NO: 1240491 - DNA, 15 bp, Homo sapiens
ggccaccttggatac

SEQ ID NO: 1240492 - DNA, 15 bp, Homo sapiens
tggccaccttggata

SEQ ID NO: 1240493 - DNA, 15 bp, Homo sapiens
ctggccaccttggat

SEQ ID NO: 1240494 - DNA, 15 bp, Homo sapiens
cctggccaccttgga

SEQ ID NO: 1240495 - DNA, 15 bp, Homo sapiens
tcctggccaccttgg

SEQ ID NO: 1240496 - DNA, 15 bp, Homo sapiens
ttcctggccaccttg

SEQ ID NO: 1240497 - DNA, 15 bp, Homo sapiens
gttcctggccacctt

SEQ ID NO: 1240498 - DNA, 15 bp, Homo sapiens
agttcctggccacct

SEQ ID NO: 1240499 - DNA, 15 bp, Homo sapiens
gagttcctggccacc

SEQ ID NO: 1240500 - DNA, 15 bp, Homo sapiens
agagttcctggccac

SEQ ID NO: 1240501 - DNA, 15 bp, Homo sapiens
cagagttcctggcca

SEQ ID NO: 1240502 - DNA, 15 bp, Homo sapiens
gcagagttcctggcc

SEQ ID NO: 1240503 - DNA, 15 bp, Homo sapiens
tgcagagttcctggc

SEQ ID NO: 1240504 - DNA, 15 bp, Homo sapiens
atgcagagttcctgg

SEQ ID NO: 1240505 - DNA, 15 bp, Homo sapiens
catgcagagttcctg

SEQ ID NO: 1240506 - DNA, 15 bp, Homo sapiens
ccatgcagagttcct

SEQ ID NO: 1240507 - DNA, 15 bp, Homo sapiens
tccatgcagagttcc

SEQ ID NO: 1240508 - DNA, 15 bp, Homo sapiens
atccatgcagagttc

SEQ ID NO: 1240509 - DNA, 15 bp, Homo sapiens
tatccatgcagagtt

SEQ ID NO: 1240510 - DNA, 15 bp, Homo sapiens
atatccatgcagagt

SEQ ID NO: 1240511 - DNA, 15 bp, Homo sapiens
catatccatgcagag

SEQ ID NO: 1240512 - DNA, 15 bp, Homo sapiens
ccatatccatgcaga

SEQ ID NO: 1240513 - DNA, 15 bp, Homo sapiens
accatatccatgcag

SEQ ID NO: 1240514 - DNA, 15 bp, Homo sapiens
caccatatccatgca

SEQ ID NO: 1240515 - DNA, 15 bp, Homo sapiens
ccaccatatccatgc

SEQ ID NO: 1240516 - DNA, 15 bp, Homo sapiens
cccaccatatccatg

SEQ ID NO: 1240517 - DNA, 15 bp, Homo sapiens
tcccaccatatccat

SEQ ID NO: 1240518 - DNA, 15 bp, Homo sapiens
ttcccaccatatcca

SEQ ID NO: 1240519 - DNA, 15 bp, Homo sapiens
cttcccaccatatcc

SEQ ID NO: 1240520 - DNA, 15 bp, Homo sapiens
gcttcccaccatatc

SEQ ID NO: 1240521 - DNA, 15 bp, Homo sapiens
agcttcccaccatat

SEQ ID NO: 1240522 - DNA, 15 bp, Homo sapiens
cagcttcccaccata

SEQ ID NO: 1240523 - DNA, 15 bp, Homo sapiens
ccagcttcccaccat

SEQ ID NO: 1240524 - DNA, 15 bp, Homo sapiens
gccagcttcccacca

SEQ ID NO: 1240525 - DNA, 15 bp, Homo sapiens
tgccagcttcccacc

SEQ ID NO: 1240526 - DNA, 15 bp, Homo sapiens
gtgccagcttcccac

SEQ ID NO: 1240527 - DNA, 15 bp, Homo sapiens
cgtgccagcttccca

SEQ ID NO: 1240528 - DNA, 15 bp, Homo sapiens
gcgtgccagcttccc

SEQ ID NO: 1240529 - DNA, 15 bp, Homo sapiens
ggcgtgccagcttcc

SEQ ID NO: 1240530 - DNA, 15 bp, Homo sapiens
aggcgtgccagcttc

SEQ ID NO: 1240531 - DNA, 15 bp, Homo sapiens
gaggcgtgccagctt

SEQ ID NO: 1240532 - DNA, 15 bp, Homo sapiens
agaggcgtgccagct

SEQ ID NO: 1240533 - DNA, 15 bp, Homo sapiens
gagaggcgtgccagc

SEQ ID NO: 1240534 - DNA, 15 bp, Homo sapiens
tgagaggcgtgccag

SEQ ID NO: 1240535 - DNA, 15 bp, Homo sapiens
gtgagaggcgtgcca

SEQ ID NO: 1240536 - DNA, 15 bp, Homo sapiens
ggtgagaggcgtgcc

SEQ ID NO: 1240537 - DNA, 15 bp, Homo sapiens
aggtgagaggcgtgc

SEQ ID NO: 1240538 - DNA, 15 bp, Homo sapiens
gaggtgagaggcgtg

SEQ ID NO: 1240539 - DNA, 15 bp, Homo sapiens
tgaggtgagaggcgt

SEQ ID NO: 1240540 - DNA, 15 bp, Homo sapiens
ctgaggtgagaggcg

SEQ ID NO: 1240541 - DNA, 15 bp, Homo sapiens
gctgaggtgagaggc

SEQ ID NO: 1240542 - DNA, 15 bp, Homo sapiens
agctgaggtgagagg

SEQ ID NO: 1240543 - DNA, 15 bp, Homo sapiens
gagctgaggtgagag

SEQ ID NO: 1240544 - DNA, 15 bp, Homo sapiens
agagctgaggtgaga

SEQ ID NO: 1240545 - DNA, 15 bp, Homo sapiens
aagagctgaggtgag

SEQ ID NO: 1240546 - DNA, 15 bp, Homo sapiens
gaagagctgaggtga

SEQ ID NO: 1240547 - DNA, 15 bp, Homo sapiens
ggaagagctgaggtg

SEQ ID NO: 1240548 - DNA, 15 bp, Homo sapiens
gggaagagctgaggt

SEQ ID NO: 1240549 - DNA, 15 bp, Homo sapiens
agggaagagctgagg

SEQ ID NO: 1240550 - DNA, 15 bp, Homo sapiens
cagggaagagctgag

SEQ ID NO: 1240551 - DNA, 15 bp, Homo sapiens
gcagggaagagctga

SEQ ID NO: 1240552 - DNA, 15 bp, Homo sapiens
tgcagggaagagctg

SEQ ID NO: 1240553 - DNA, 15 bp, Homo sapiens
ctgcagggaagagct

SEQ ID NO: 1240554 - DNA, 15 bp, Homo sapiens
cctgcagggaagagc

SEQ ID NO: 1240555 - DNA, 15 bp, Homo sapiens
gcctgcagggaagag

SEQ ID NO: 1240556 - DNA, 15 bp, Homo sapiens
agcctgcagggaaga

SEQ ID NO: 1240557 - DNA, 15 bp, Homo sapiens
gagcctgcagggaag

SEQ ID NO: 1240558 - DNA, 15 bp, Homo sapiens
agagcctgcagggaa

SEQ ID NO: 1240559 - DNA, 15 bp, Homo sapiens
cagagcctgcaggga

SEQ ID NO: 1240560 - DNA, 15 bp, Homo sapiens
acagagcctgcaggg

SEQ ID NO: 1240561 - DNA, 15 bp, Homo sapiens
cacagagcctgcagg

SEQ ID NO: 1240562 - DNA, 15 bp, Homo sapiens
ccacagagcctgcag

SEQ ID NO: 1240563 - DNA, 15 bp, Homo sapiens
tccacagagcctgca

SEQ ID NO: 1240564 - DNA, 15 bp, Homo sapiens
atccacagagcctgc

SEQ ID NO: 1240565 - DNA, 15 bp, Homo sapiens
tatccacagagcctg

SEQ ID NO: 1240566 - DNA, 15 bp, Homo sapiens
ctatccacagagcct

SEQ ID NO: 1240567 - DNA, 15 bp, Homo sapiens
gctatccacagagcc

SEQ ID NO: 1240568 - DNA, 15 bp, Homo sapiens
tgctatccacagagc

SEQ ID NO: 1240569 - DNA, 15 bp, Homo sapiens
ttgctatccacagag

SEQ ID NO: 1240570 - DNA, 15 bp, Homo sapiens
gttgctatccacaga

SEQ ID NO: 1240571 - DNA, 15 bp, Homo sapiens
agttgctatccacag

SEQ ID NO: 1240572 - DNA, 15 bp, Homo sapiens
cagttgctatccaca

SEQ ID NO: 1240573 - DNA, 15 bp, Homo sapiens
ccagttgctatccac

SEQ ID NO: 1240574 - DNA, 15 bp, Homo sapiens
tccagttgctatcca

SEQ ID NO: 1240575 - DNA, 15 bp, Homo sapiens
atccagttgctatcc

SEQ ID NO: 1240576 - DNA, 15 bp, Homo sapiens
gatccagttgctatc

SEQ ID NO: 1240577 - DNA, 15 bp, Homo sapiens
cgatccagttgctat

SEQ ID NO: 1240578 - DNA, 15 bp, Homo sapiens
acgatccagttgcta

SEQ ID NO: 1240579 - DNA, 15 bp, Homo sapiens
cacgatccagttgct

SEQ ID NO: 1240580 - DNA, 15 bp, Homo sapiens
ccacgatccagttgc

SEQ ID NO: 1240581 - DNA, 15 bp, Homo sapiens
cccacgatccagttg

SEQ ID NO: 1240582 - DNA, 15 bp, Homo sapiens
acccacgatccagtt

SEQ ID NO: 1240583 - DNA, 15 bp, Homo sapiens
cacccacgatccagt

SEQ ID NO: 1240584 - DNA, 15 bp, Homo sapiens
gcacccacgatccag

SEQ ID NO: 1240585 - DNA, 15 bp, Homo sapiens
ggcacccacgatcca

SEQ ID NO: 1240586 - DNA, 15 bp, Homo sapiens
tggcacccacgatcc

SEQ ID NO: 1240587 - DNA, 15 bp, Homo sapiens
gtggcacccacgatc

SEQ ID NO: 1240588 - DNA, 15 bp, Homo sapiens
cgtggcacccacgat

SEQ ID NO: 1240589 - DNA, 15 bp, Homo sapiens
gcgtggcacccacga

SEQ ID NO: 1240590 - DNA, 15 bp, Homo sapiens
agcgtggcacccacg

SEQ ID NO: 1240591 - DNA, 15 bp, Homo sapiens
cagcgtggcacccac

SEQ ID NO: 1240592 - DNA, 15 bp, Homo sapiens
ccagcgtggcaccca

SEQ ID NO: 1240593 - DNA, 15 bp, Homo sapiens
tccagcgtggcaccc

SEQ ID NO: 1240594 - DNA, 15 bp, Homo sapiens
ctccagcgtggcacc

SEQ ID NO: 1240595 - DNA, 15 bp, Homo sapiens
tctccagcgtggcac

SEQ ID NO: 1240596 - DNA, 15 bp, Homo sapiens
ttctccagcgtggca

SEQ ID NO: 1240597 - DNA, 15 bp, Homo sapiens
cttctccagcgtggc

SEQ ID NO: 1240598 - DNA, 15 bp, Homo sapiens
tcttctccagcgtgg

SEQ ID NO: 1240599 - DNA, 15 bp, Homo sapiens
ttcttctccagcgtg

SEQ ID NO: 1240600 - DNA, 15 bp, Homo sapiens
cttcttctccagcgt

SEQ ID NO: 1240601 - DNA, 15 bp, Homo sapiens
gcttcttctccagcg

SEQ ID NO: 1240602 - DNA, 15 bp, Homo sapiens
agcttcttctccagc

SEQ ID NO: 1240603 - DNA, 15 bp, Homo sapiens
gagcttcttctccag

SEQ ID NO: 1240604 - DNA, 15 bp, Homo sapiens
ggagcttcttctcca

SEQ ID NO: 1240605 - DNA, 15 bp, Homo sapiens
gggagcttcttctcc

SEQ ID NO: 1240606 - DNA, 15 bp, Homo sapiens
tgggagcttcttctc

SEQ ID NO: 1240607 - DNA, 15 bp, Homo sapiens
gtgggagcttcttct

SEQ ID NO: 1240608 - DNA, 15 bp, Homo sapiens
ggtgggagcttcttc

SEQ ID NO: 1240609 - DNA, 15 bp, Homo sapiens
gggtgggagcttctt

SEQ ID NO: 1240610 - DNA, 15 bp, Homo sapiens
ggggtgggagcttct

SEQ ID NO: 1240611 - DNA, 15 bp, Homo sapiens
aggggtgggagcttc

SEQ ID NO: 1240612 - DNA, 15 bp, Homo sapiens
caggggtgggagctt

SEQ ID NO: 1240613 - DNA, 15 bp, Homo sapiens
gcaggggtgggagct

SEQ ID NO: 1240614 - DNA, 15 bp, Homo sapiens
ggcaggggtgggagc

SEQ ID NO: 1240615 - DNA, 15 bp, Homo sapiens
gggcaggggtgggag

SEQ ID NO: 1240616 - DNA, 15 bp, Homo sapiens
ggggcaggggtggga

SEQ ID NO: 1240617 - DNA, 15 bp, Homo sapiens
aggggcaggggtggg

SEQ ID NO: 1240618 - DNA, 15 bp, Homo sapiens
caggggcaggggtgg

SEQ ID NO: 1240619 - DNA, 15 bp, Homo sapiens
tcaggggcaggggtg

SEQ ID NO: 1240620 - DNA, 15 bp, Homo sapiens
gtcaggggcaggggt

SEQ ID NO: 1240621 - DNA, 15 bp, Homo sapiens
tgtcaggggcagggg

SEQ ID NO: 1240622 - DNA, 15 bp, Homo sapiens
gtgtcaggggcaggg

SEQ ID NO: 1240623 - DNA, 15 bp, Homo sapiens
agtgtcaggggcagg

SEQ ID NO: 1240624 - DNA, 15 bp, Homo sapiens
cagtgtcaggggcag

SEQ ID NO: 1240625 - DNA, 15 bp, Homo sapiens
ccagtgtcaggggca

SEQ ID NO: 1240626 - DNA, 15 bp, Homo sapiens
gccagtgtcaggggc

SEQ ID NO: 1240627 - DNA, 15 bp, Homo sapiens
ggccagtgtcagggg

SEQ ID NO: 1240628 - DNA, 15 bp, Homo sapiens
gggccagtgtcaggg

SEQ ID NO: 1240629 - DNA, 15 bp, Homo sapiens
agggccagtgtcagg

SEQ ID NO: 1240630 - DNA, 15 bp, Homo sapiens
aagggccagtgtcag

SEQ ID NO: 1240631 - DNA, 15 bp, Homo sapiens
caagggccagtgtca

SEQ ID NO: 1240632 - DNA, 15 bp, Homo sapiens
ccaagggccagtgtc

SEQ ID NO: 1240633 - DNA, 15 bp, Homo sapiens
cccaagggccagtgt

SEQ ID NO: 1240634 - DNA, 15 bp, Homo sapiens
ccccaagggccagtg

SEQ ID NO: 1240635 - DNA, 15 bp, Homo sapiens
gccccaagggccagt

SEQ ID NO: 1240636 - DNA, 15 bp, Homo sapiens
ggccccaagggccag

SEQ ID NO: 1240637 - DNA, 15 bp, Homo sapiens
aggccccaagggcca

SEQ ID NO: 1240638 - DNA, 15 bp, Homo sapiens
aaggccccaagggcc

SEQ ID NO: 1240639 - DNA, 15 bp, Homo sapiens
gaaggccccaagggc

SEQ ID NO: 1240640 - DNA, 15 bp, Homo sapiens
ggaaggccccaaggg

SEQ ID NO: 1240641 - DNA, 15 bp, Homo sapiens
aggaaggccccaagg

SEQ ID NO: 1240642 - DNA, 15 bp, Homo sapiens
caggaaggccccaag

SEQ ID NO: 1240643 - DNA, 15 bp, Homo sapiens
tcaggaaggccccaa

SEQ ID NO: 1240644 - DNA, 15 bp, Homo sapiens
ttcaggaaggcccca

SEQ ID NO: 1240645 - DNA, 15 bp, Homo sapiens
attcaggaaggcccc

SEQ ID NO: 1240646 - DNA, 15 bp, Homo sapiens
gattcaggaaggccc

SEQ ID NO: 1240647 - DNA, 15 bp, Homo sapiens
tgattcaggaaggcc

SEQ ID NO: 1240648 - DNA, 15 bp, Homo sapiens
gtgattcaggaaggc

SEQ ID NO: 1240649 - DNA, 15 bp, Homo sapiens
ggtgattcaggaagg

SEQ ID NO: 1240650 - DNA, 15 bp, Homo sapiens
cggtgattcaggaag

SEQ ID NO: 1240651 - DNA, 15 bp, Homo sapiens
gcaatggacaggcca

SEQ ID NO: 1240652 - DNA, 15 bp, Homo sapiens
agcaatggacaggcc

SEQ ID NO: 1240653 - DNA, 15 bp, Homo sapiens
tagcaatggacaggc

SEQ ID NO: 1240654 - DNA, 15 bp, Homo sapiens
ctagcaatggacagg

SEQ ID NO: 1240655 - DNA, 15 bp, Homo sapiens
gctagcaatggacag

SEQ ID NO: 1240656 - DNA, 15 bp, Homo sapiens
ggctagcaatggaca

SEQ ID NO: 1240657 - DNA, 15 bp, Homo sapiens
gggctagcaatggac

SEQ ID NO: 1240658 - DNA, 15 bp, Homo sapiens
agggctagcaatgga

SEQ ID NO: 1240659 - DNA, 15 bp, Homo sapiens
tagggctagcaatgg

SEQ ID NO: 1240660 - DNA, 15 bp, Homo sapiens
ttagggctagcaatg

SEQ ID NO: 1240661 - DNA, 15 bp, Homo sapiens
gttagggctagcaat

SEQ ID NO: 1240662 - DNA, 15 bp, Homo sapiens
tgttagggctagcaa

SEQ ID NO: 1240663 - DNA, 15 bp, Homo sapiens
atgttagggctagca

SEQ ID NO: 1240664 - DNA, 15 bp, Homo sapiens
tatgttagggctagc

SEQ ID NO: 1240665 - DNA, 15 bp, Homo sapiens
ctatgttagggctag

SEQ ID NO: 1240666 - DNA, 15 bp, Homo sapiens
cctatgttagggcta

SEQ ID NO: 1240667 - DNA, 15 bp, Homo sapiens
tcctatgttagggct

SEQ ID NO: 1240668 - DNA, 15 bp, Homo sapiens
gtcctatgttagggc

SEQ ID NO: 1240669 - DNA, 15 bp, Homo sapiens
ggtcctatgttaggg

SEQ ID NO: 1240670 - DNA, 15 bp, Homo sapiens
cggtcctatgttagg

SEQ ID NO: 1240671 - DNA, 15 bp, Homo sapiens
gcggtcctatgttag

SEQ ID NO: 1240672 - DNA, 15 bp, Homo sapiens
agcggtcctatgtta

SEQ ID NO: 1240673 - DNA, 15 bp, Homo sapiens
cagcggtcctatgtt

SEQ ID NO: 1240674 - DNA, 15 bp, Homo sapiens
acagcggtcctatgt

SEQ ID NO: 1240675 - DNA, 15 bp, Homo sapiens
cacagcggtcctatg

SEQ ID NO: 1240676 - DNA, 15 bp, Homo sapiens
acacagcggtcctat

SEQ ID NO: 1240677 - DNA, 15 bp, Homo sapiens
cacacagcggtccta

SEQ ID NO: 1240678 - DNA, 15 bp, Homo sapiens
gcacacagcggtcct

SEQ ID NO: 1240679 - DNA, 15 bp, Homo sapiens
ggcacacagcggtcc

SEQ ID NO: 1240680 - DNA, 15 bp, Homo sapiens
tggcacacagcggtc

SEQ ID NO: 1240681 - DNA, 15 bp, Homo sapiens
ctggcacacagcggt

SEQ ID NO: 1240682 - DNA, 15 bp, Homo sapiens
ccctggcacacagcg

SEQ ID NO: 1240683 - DNA, 15 bp, Homo sapiens
gccctggcacacagc

SEQ ID NO: 1240684 - DNA, 15 bp, Homo sapiens
agccctggcacacag

SEQ ID NO: 1240685 - DNA, 15 bp, Homo sapiens
cagccctggcacaca

SEQ ID NO: 1240686 - DNA, 15 bp, Homo sapiens
acagccctggcacac

SEQ ID NO: 1240687 - DNA, 15 bp, Homo sapiens
gacagccctggcaca

SEQ ID NO: 1240688 - DNA, 15 bp, Homo sapiens
ggacagccctggcac

SEQ ID NO: 1240689 - DNA, 15 bp, Homo sapiens
aggacagccctggca

SEQ ID NO: 1240690 - DNA, 15 bp, Homo sapiens
gaggacagccctggc

SEQ ID NO: 1240691 - DNA, 15 bp, Homo sapiens
ggaggacagccctgg

SEQ ID NO: 1240692 - DNA, 15 bp, Homo sapiens
tggaggacagccctg

SEQ ID NO: 1240693 - DNA, 15 bp, Homo sapiens
atggaggacagccct

SEQ ID NO: 1240694 - DNA, 15 bp, Homo sapiens
catggaggacagccc

SEQ ID NO: 1240695 - DNA, 15 bp, Homo sapiens
gcatggaggacagcc

SEQ ID NO: 1240696 - DNA, 15 bp, Homo sapiens
agcatggaggacagc

SEQ ID NO: 1240697 - DNA, 15 bp, Homo sapiens
gagcatggaggacag

SEQ ID NO: 1240698 - DNA, 15 bp, Homo sapiens
tgagcatggaggaca

SEQ ID NO: 1240699 - DNA, 15 bp, Homo sapiens
ttgagcatggaggac

SEQ ID NO: 1240700 - DNA, 15 bp, Homo sapiens
attgagcatggagga

SEQ ID NO: 1240701 - DNA, 15 bp, Homo sapiens
tattgagcatggagg

SEQ ID NO: 1240702 - DNA, 15 bp, Homo sapiens
gtattgagcatggag

SEQ ID NO: 1240703 - DNA, 15 bp, Homo sapiens
tgtattgagcatgga

SEQ ID NO: 1240704 - DNA, 15 bp, Homo sapiens
gtgtattgagcatgg

SEQ ID NO: 1240705 - DNA, 15 bp, Homo sapiens
cgtgtattgagcatg

SEQ ID NO: 1240706 - DNA, 15 bp, Homo sapiens
acgtgtattgagcat

SEQ ID NO: 1240707 - DNA, 15 bp, Homo sapiens
aacgtgtattgagca

SEQ ID NO: 1240708 - DNA, 15 bp, Homo sapiens
taacgtgtattgagc

SEQ ID NO: 1240709 - DNA, 15 bp, Homo sapiens
ctaacgtgtattgag

SEQ ID NO: 1240710 - DNA, 15 bp, Homo sapiens
gctaacgtgtattga

SEQ ID NO: 1240711 - DNA, 15 bp, Homo sapiens
agctaacgtgtattg

SEQ ID NO: 1240712 - DNA, 15 bp, Homo sapiens
aagctaacgtgtatt

SEQ ID NO: 1240713 - DNA, 15 bp, Homo sapiens
caagctaacgtgtat

SEQ ID NO: 1240714 - DNA, 15 bp, Homo sapiens
acaagctaacgtgta

SEQ ID NO: 1240715 - DNA, 15 bp, Homo sapiens
gacaagctaacgtgt

SEQ ID NO: 1240716 - DNA, 15 bp, Homo sapiens
tgacaagctaacgtg

SEQ ID NO: 1240717 - DNA, 15 bp, Homo sapiens
gtgacaagctaacgt

SEQ ID NO: 1240718 - DNA, 15 bp, Homo sapiens
ggtgacaagctaacg

SEQ ID NO: 1240719 - DNA, 15 bp, Homo sapiens
tggtgacaagctaac

SEQ ID NO: 1240720 - DNA, 15 bp, Homo sapiens
ttggtgacaagctaa

SEQ ID NO: 1240721 - DNA, 15 bp, Homo sapiens
tttggtgacaagcta

SEQ ID NO: 1240722 - DNA, 15 bp, Homo sapiens
gtttggtgacaagct

SEQ ID NO: 1240723 - DNA, 15 bp, Homo sapiens
tgtttggtgacaagc

SEQ ID NO: 1240724 - DNA, 15 bp, Homo sapiens
atgtttggtgacaag

SEQ ID NO: 1240725 - DNA, 15 bp, Homo sapiens
tatgtttggtgacaa

SEQ ID NO: 1240726 - DNA, 15 bp, Homo sapiens
gtatgtttggtgaca

SEQ ID NO: 1240727 - DNA, 15 bp, Homo sapiens
ggtatgtttggtgac

SEQ ID NO: 1240728 - DNA, 15 bp, Homo sapiens
gggtatgtttggtga

SEQ ID NO: 1240729 - DNA, 15 bp, Homo sapiens
cgggtatgtttggtg

SEQ ID NO: 1240730 - DNA, 15 bp, Homo sapiens
acgggtatgtttggt

SEQ ID NO: 1240731 - DNA, 15 bp, Homo sapiens
cacgggtatgtttgg

SEQ ID NO: 1240732 - DNA, 15 bp, Homo sapiens
gcacgggtatgtttg

SEQ ID NO: 1240733 - DNA, 15 bp, Homo sapiens
ggcacgggtatgttt

SEQ ID NO: 1240734 - DNA, 15 bp, Homo sapiens
cggcacgggtatgtt

SEQ ID NO: 1240735 - DNA, 15 bp, Homo sapiens
gcggcacgggtatgt

SEQ ID NO: 1240736 - DNA, 15 bp, Homo sapiens
agcggcacgggtatg

SEQ ID NO: 1240737 - DNA, 15 bp, Homo sapiens
cagcggcacgggtat

SEQ ID NO: 1240738 - DNA, 15 bp, Homo sapiens
gcagcggcacgggta

SEQ ID NO: 1240739 - DNA, 15 bp, Homo sapiens
agcagcggcacgggt

SEQ ID NO: 1240740 - DNA, 15 bp, Homo sapiens
aagcagcggcacggg

SEQ ID NO: 1240741 - DNA, 15 bp, Homo sapiens
aaagcagcggcacgg

SEQ ID NO: 1240742 - DNA, 15 bp, Homo sapiens
gaaagcagcggcacg

SEQ ID NO: 1240743 - DNA, 15 bp, Homo sapiens
ggaaagcagcggcac

SEQ ID NO: 1240744 - DNA, 15 bp, Homo sapiens
gggaaagcagcggca

SEQ ID NO: 1240745 - DNA, 15 bp, Homo sapiens
tgggaaagcagcggc

SEQ ID NO: 1240746 - DNA, 15 bp, Homo sapiens
ctgggaaagcagcgg

SEQ ID NO: 1240747 - DNA, 15 bp, Homo sapiens
actgggaaagcagcg

SEQ ID NO: 1240748 - DNA, 15 bp, Homo sapiens
gactgggaaagcagc

SEQ ID NO: 1240749 - DNA, 15 bp, Homo sapiens
agactgggaaagcag

SEQ ID NO: 1240750 - DNA, 15 bp, Homo sapiens
cagactgggaaagca

SEQ ID NO: 1240751 - DNA, 15 bp, Homo sapiens
tcagactgggaaagc

SEQ ID NO: 1240752 - DNA, 15 bp, Homo sapiens
atcagactgggaaag

SEQ ID NO: 1240753 - DNA, 15 bp, Homo sapiens
catcagactgggaaa

SEQ ID NO: 1240754 - DNA, 15 bp, Homo sapiens
tcatcagactgggaa

SEQ ID NO: 1240755 - DNA, 15 bp, Homo sapiens
ctcatcagactggga

SEQ ID NO: 1240756 - DNA, 15 bp, Homo sapiens
gctcatcagactggg

SEQ ID NO: 1240757 - DNA, 15 bp, Homo sapiens
tgctcatcagactgg

SEQ ID NO: 1240758 - DNA, 15 bp, Homo sapiens
ttgctcatcagactg

SEQ ID NO: 1240759 - DNA, 15 bp, Homo sapiens
tttgctcatcagact

SEQ ID NO: 1240760 - DNA, 15 bp, Homo sapiens
ctttgctcatcagac

SEQ ID NO: 1240761 - DNA, 15 bp, Homo sapiens
cctttgctcatcaga

SEQ ID NO: 1240762 - DNA, 15 bp, Homo sapiens
tcctttgctcatcag

SEQ ID NO: 1240763 - DNA, 15 bp, Homo sapiens
ttcctttgctcatca

SEQ ID NO: 1240764 - DNA, 15 bp, Homo sapiens
gttcctttgctcatc

SEQ ID NO: 1240765 - DNA, 15 bp, Homo sapiens
agttcctttgctcat

SEQ ID NO: 1240766 - DNA, 15 bp, Homo sapiens
aagttcctttgctca

SEQ ID NO: 1240767 - DNA, 15 bp, Homo sapiens
caagttcctttgctc

SEQ ID NO: 1240768 - DNA, 15 bp, Homo sapiens
tcaagttcctttgct

SEQ ID NO: 1240769 - DNA, 15 bp, Homo sapiens
atcaagttcctttgc

SEQ ID NO: 1240770 - DNA, 15 bp, Homo sapiens
catcaagttcctttg

SEQ ID NO: 1240771 - DNA, 15 bp, Homo sapiens
gcatcaagttccttt

SEQ ID NO: 1240772 - DNA, 15 bp, Homo sapiens
agcatcaagttcctt

SEQ ID NO: 1240773 - DNA, 15 bp, Homo sapiens
gagcatcaagttcct

SEQ ID NO: 1240774 - DNA, 15 bp, Homo sapiens
tgagcatcaagttcc

SEQ ID NO: 1240775 - DNA, 15 bp, Homo sapiens
ctgagcatcaagttc

SEQ ID NO: 1240776 - DNA, 15 bp, Homo sapiens
tctgagcatcaagtt

SEQ ID NO: 1240777 - DNA, 15 bp, Homo sapiens
ctctgagcatcaagt

SEQ ID NO: 1240778 - DNA, 15 bp, Homo sapiens
tctctgagcatcaag

SEQ ID NO: 1240779 - DNA, 15 bp, Homo sapiens
ctctctgagcatcaa

SEQ ID NO: 1240780 - DNA, 15 bp, Homo sapiens
cctctctgagcatca

SEQ ID NO: 1240781 - DNA, 15 bp, Homo sapiens
tcctctctgagcatc

SEQ ID NO: 1240782 - DNA, 15 bp, Homo sapiens
gtcctctctgagcat

SEQ ID NO: 1240783 - DNA, 15 bp, Homo sapiens
tgtcctctctgagca

SEQ ID NO: 1240784 - DNA, 15 bp, Homo sapiens
ttgtcctctctgagc

SEQ ID NO: 1240785 - DNA, 15 bp, Homo sapiens
cttgtcctctctgag

SEQ ID NO: 1240786 - DNA, 15 bp, Homo sapiens
acttgtcctctctga

SEQ ID NO: 1240787 - DNA, 15 bp, Homo sapiens
gacttgtcctctctg

SEQ ID NO: 1240788 - DNA, 15 bp, Homo sapiens
tgacttgtcctctct

SEQ ID NO: 1240789 - DNA, 15 bp, Homo sapiens
atgacttgtcctctc

SEQ ID NO: 1240790 - DNA, 15 bp, Homo sapiens
aatgacttgtcctct

SEQ ID NO: 1240791 - DNA, 15 bp, Homo sapiens
aaatgacttgtcctc

SEQ ID NO: 1240792 - DNA, 15 bp, Homo sapiens
caaatgacttgtcct

SEQ ID NO: 1240793 - DNA, 15 bp, Homo sapiens
gcaaatgacttgtcc

SEQ ID NO: 1240794 - DNA, 15 bp, Homo sapiens
ggcaaatgacttgtc

SEQ ID NO: 1240795 - DNA, 15 bp, Homo sapiens
gggcaaatgacttgt

SEQ ID NO: 1240796 - DNA, 15 bp, Homo sapiens
tgggcaaatgacttg

SEQ ID NO: 1240797 - DNA, 15 bp, Homo sapiens
ttgggcaaatgactt

SEQ ID NO: 1240798 - DNA, 15 bp, Homo sapiens
accttgggcaaatga

SEQ ID NO: 1240799 - DNA, 15 bp, Homo sapiens
gaccttgggcaaatg

SEQ ID NO: 1240800 - DNA, 15 bp, Homo sapiens
tgaccttgggcaaat

SEQ ID NO: 1240801 - DNA, 15 bp, Homo sapiens
gtgaccttgggcaaa

SEQ ID NO: 1240802 - DNA, 15 bp, Homo sapiens
tgtgaccttgggcaa

SEQ ID NO: 1240803 - DNA, 15 bp, Homo sapiens
gtgtgaccttgggca

SEQ ID NO: 1240804 - DNA, 15 bp, Homo sapiens
tgtgtgaccttgggc

SEQ ID NO: 1240805 - DNA, 15 bp, Homo sapiens
cagctgtgtgacctt

SEQ ID NO: 1240806 - DNA, 15 bp, Homo sapiens
ccagctgtgtgacct

SEQ ID NO: 1240807 - DNA, 15 bp, Homo sapiens
gccagctgtgtgacc

SEQ ID NO: 1240808 - DNA, 15 bp, Homo sapiens
tgccagctgtgtgac

SEQ ID NO: 1240809 - DNA, 15 bp, Homo sapiens
ttgccagctgtgtga

SEQ ID NO: 1240810 - DNA, 15 bp, Homo sapiens
gttgccagctgtgtg

SEQ ID NO: 1240811 - DNA, 15 bp, Homo sapiens
agttgccagctgtgt

SEQ ID NO: 1240812 - DNA, 15 bp, Homo sapiens
cagttgccagctgtg

SEQ ID NO: 1240813 - DNA, 15 bp, Homo sapiens
ccagttgccagctgt

SEQ ID NO: 1240814 - DNA, 15 bp, Homo sapiens
gccagttgccagctg

SEQ ID NO: 1240815 - DNA, 15 bp, Homo sapiens
tgccagttgccagct

SEQ ID NO: 1240816 - DNA, 15 bp, Homo sapiens
ctgccagttgccagc

SEQ ID NO: 1240817 - DNA, 15 bp, Homo sapiens
tctgccagttgccag

SEQ ID NO: 1240818 - DNA, 15 bp, Homo sapiens
ctctgccagttgcca

SEQ ID NO: 1240819 - DNA, 15 bp, Homo sapiens
gctctgccagttgcc

SEQ ID NO: 1240820 - DNA, 15 bp, Homo sapiens
ggctctgccagttgc

SEQ ID NO: 1240821 - DNA, 15 bp, Homo sapiens
tggctctgccagttg

SEQ ID NO: 1240822 - DNA, 15 bp, Homo sapiens
ctggctctgccagtt

SEQ ID NO: 1240823 - DNA, 15 bp, Homo sapiens
cctggctctgccagt

SEQ ID NO: 1240824 - DNA, 15 bp, Homo sapiens
tcctggctctgccag

SEQ ID NO: 1240825 - DNA, 15 bp, Homo sapiens
atcctggctctgcca

SEQ ID NO: 1240826 - DNA, 15 bp, Homo sapiens
aatcctggctctgcc

SEQ ID NO: 1240827 - DNA, 15 bp, Homo sapiens
gaatcctggctctgc

SEQ ID NO: 1240828 - DNA, 15 bp, Homo sapiens
tgaatcctggctctg

SEQ ID NO: 1240829 - DNA, 15 bp, Homo sapiens
gtgaatcctggctct

SEQ ID NO: 1240830 - DNA, 15 bp, Homo sapiens
cgtgaatcctggctc

SEQ ID NO: 1240831 - DNA, 15 bp, Homo sapiens
gcgtgaatcctggct

SEQ ID NO: 1240832 - DNA, 15 bp, Homo sapiens
ggcgtgaatcctggc

SEQ ID NO: 1240833 - DNA, 15 bp, Homo sapiens
gggcgtgaatcctgg

SEQ ID NO: 1240834 - DNA, 15 bp, Homo sapiens
agggcgtgaatcctg

SEQ ID NO: 1240835 - DNA, 15 bp, Homo sapiens
cagggcgtgaatcct

SEQ ID NO: 1240836 - DNA, 15 bp, Homo sapiens
ccagggcgtgaatcc

SEQ ID NO: 1240837 - DNA, 15 bp, Homo sapiens
gccagggcgtgaatc

SEQ ID NO: 1240838 - DNA, 15 bp, Homo sapiens
tgccagggcgtgaat

SEQ ID NO: 1240839 - DNA, 15 bp, Homo sapiens
ttgccagggcgtgaa

SEQ ID NO: 1240840 - DNA, 15 bp, Homo sapiens
attgccagggcgtga

SEQ ID NO: 1240841 - DNA, 15 bp, Homo sapiens
aattgccagggcgtg

SEQ ID NO: 1240842 - DNA, 15 bp, Homo sapiens
aaattgccagggcgt

SEQ ID NO: 1240843 - DNA, 15 bp, Homo sapiens
caaattgccagggcg

SEQ ID NO: 1240844 - DNA, 15 bp, Homo sapiens
tcaaattgccagggc

SEQ ID NO: 1240845 - DNA, 15 bp, Homo sapiens
gtcaaattgccaggg

SEQ ID NO: 1240846 - DNA, 15 bp, Homo sapiens
agtcaaattgccagg

SEQ ID NO: 1240847 - DNA, 15 bp, Homo sapiens
gagtcaaattgccag

SEQ ID NO: 1240848 - DNA, 15 bp, Homo sapiens
ggagtcaaattgcca

SEQ ID NO: 1240849 - DNA, 15 bp, Homo sapiens
ttctggagtcaaatt

SEQ ID NO: 1240850 - DNA, 15 bp, Homo sapiens
attctggagtcaaat

SEQ ID NO: 1240851 - DNA, 15 bp, Homo sapiens
gattctggagtcaaa

SEQ ID NO: 1240852 - DNA, 15 bp, Homo sapiens
ggattctggagtcaa

SEQ ID NO: 1240853 - DNA, 15 bp, Homo sapiens
aggattctggagtca

SEQ ID NO: 1240854 - DNA, 15 bp, Homo sapiens
taggattctggagtc

SEQ ID NO: 1240855 - DNA, 15 bp, Homo sapiens
ttaggattctggagt

SEQ ID NO: 1240856 - DNA, 15 bp, Homo sapiens
gttaggattctggag

SEQ ID NO: 1240857 - DNA, 15 bp, Homo sapiens
ggttaggattctgga

SEQ ID NO: 1240858 - DNA, 15 bp, Homo sapiens
aggttaggattctgg

SEQ ID NO: 1240859 - DNA, 15 bp, Homo sapiens
aaggttaggattctg

SEQ ID NO: 1240860 - DNA, 15 bp, Homo sapiens
taaggttaggattct

SEQ ID NO: 1240861 - DNA, 15 bp, Homo sapiens
ttaaggttaggattc

SEQ ID NO: 1240862 - DNA, 15 bp, Homo sapiens
gttaaggttaggatt

SEQ ID NO: 1240863 - DNA, 15 bp, Homo sapiens
ggttaaggttaggat

SEQ ID NO: 1240864 - DNA, 15 bp, Homo sapiens
gggttaaggttagga

SEQ ID NO: 1240865 - DNA, 15 bp, Homo sapiens
tgggttaaggttagg

SEQ ID NO: 1240866 - DNA, 15 bp, Homo sapiens
ctgggttaaggttag

SEQ ID NO: 1240867 - DNA, 15 bp, Homo sapiens
tctgggttaaggtta

SEQ ID NO: 1240868 - DNA, 15 bp, Homo sapiens
ttctgggttaaggtt

SEQ ID NO: 1240869 - DNA, 15 bp, Homo sapiens
cttctgggttaaggt

SEQ ID NO: 1240870 - DNA, 15 bp, Homo sapiens
gcttctgggttaagg

SEQ ID NO: 1240871 - DNA, 15 bp, Homo sapiens
tgcttctgggttaag

SEQ ID NO: 1240872 - DNA, 15 bp, Homo sapiens
gtgcttctgggttaa

SEQ ID NO: 1240873 - DNA, 15 bp, Homo sapiens
cgtgcttctgggtta

SEQ ID NO: 1240874 - DNA, 15 bp, Homo sapiens
ccgtgcttctgggtt

SEQ ID NO: 1240875 - DNA, 15 bp, Homo sapiens
gccgtgcttctgggt

SEQ ID NO: 1240876 - DNA, 15 bp, Homo sapiens
agccgtgcttctggg

SEQ ID NO: 1240877 - DNA, 15 bp, Homo sapiens
aagccgtgcttctgg

SEQ ID NO: 1240878 - DNA, 15 bp, Homo sapiens
gaagccgtgcttctg

SEQ ID NO: 1240879 - DNA, 15 bp, Homo sapiens
tgaagccgtgcttct

SEQ ID NO: 1240880 - DNA, 15 bp, Homo sapiens
ttgaagccgtgcttc

SEQ ID NO: 1240881 - DNA, 15 bp, Homo sapiens
cttgaagccgtgctt

SEQ ID NO: 1240882 - DNA, 15 bp, Homo sapiens
gcttgaagccgtgct

SEQ ID NO: 1240883 - DNA, 15 bp, Homo sapiens
ggcttgaagccgtgc

SEQ ID NO: 1240884 - DNA, 15 bp, Homo sapiens
gggcttgaagccgtg

SEQ ID NO: 1240885 - DNA, 15 bp, Homo sapiens
ggggcttgaagccgt

SEQ ID NO: 1240886 - DNA, 15 bp, Homo sapiens
aggggcttgaagccg

SEQ ID NO: 1240887 - DNA, 15 bp, Homo sapiens
caggggcttgaagcc

SEQ ID NO: 1240888 - DNA, 15 bp, Homo sapiens
ccaggggcttgaagc

SEQ ID NO: 1240889 - DNA, 15 bp, Homo sapiens
tccaggggcttgaag

SEQ ID NO: 1240890 - DNA, 15 bp, Homo sapiens
ttccaggggcttgaa

SEQ ID NO: 1240891 - DNA, 15 bp, Homo sapiens
tttccaggggcttga

SEQ ID NO: 1240892 - DNA, 15 bp, Homo sapiens
gtttccaggggcttg

SEQ ID NO: 1240893 - DNA, 15 bp, Homo sapiens
ggtttccaggggctt

SEQ ID NO: 1240894 - DNA, 15 bp, Homo sapiens
tggtttccaggggct

SEQ ID NO: 1240895 - DNA, 15 bp, Homo sapiens
gtggtttccaggggc

SEQ ID NO: 1240896 - DNA, 15 bp, Homo sapiens
tgtggtttccagggg

SEQ ID NO: 1240897 - DNA, 15 bp, Homo sapiens
ttgtggtttccaggg

SEQ ID NO: 1240898 - DNA, 15 bp, Homo sapiens
attgtggtttccagg

SEQ ID NO: 1240899 - DNA, 15 bp, Homo sapiens
tattgtggtttccag

SEQ ID NO: 1240900 - DNA, 15 bp, Homo sapiens
gtattgtggtttcca

SEQ ID NO: 1240901 - DNA, 15 bp, Homo sapiens
ggtattgtggtttcc

SEQ ID NO: 1240902 - DNA, 15 bp, Homo sapiens
aggtattgtggtttc

SEQ ID NO: 1240903 - DNA, 15 bp, Homo sapiens
caggtattgtggttt

SEQ ID NO: 1240904 - DNA, 15 bp, Homo sapiens
acaggtattgtggtt

SEQ ID NO: 1240905 - DNA, 15 bp, Homo sapiens
cacaggtattgtggt

SEQ ID NO: 1240906 - DNA, 15 bp, Homo sapiens
ccacaggtattgtgg

SEQ ID NO: 1240907 - DNA, 15 bp, Homo sapiens
gccacaggtattgtg

SEQ ID NO: 1240908 - DNA, 15 bp, Homo sapiens
tgccacaggtattgt

SEQ ID NO: 1240909 - DNA, 15 bp, Homo sapiens
ctgccacaggtattg

SEQ ID NO: 1240910 - DNA, 15 bp, Homo sapiens
gctgccacaggtatt

SEQ ID NO: 1240911 - DNA, 15 bp, Homo sapiens
ggctgccacaggtat

SEQ ID NO: 1240912 - DNA, 15 bp, Homo sapiens
tggctgccacaggta

SEQ ID NO: 1240913 - DNA, 15 bp, Homo sapiens
ctggctgccacaggt

SEQ ID NO: 1240914 - DNA, 15 bp, Homo sapiens
cctggctgccacagg

SEQ ID NO: 1240915 - DNA, 15 bp, Homo sapiens
ccctggctgccacag

SEQ ID NO: 1240916 - DNA, 15 bp, Homo sapiens
cccctggctgccaca

SEQ ID NO: 1240917 - DNA, 15 bp, Homo sapiens
ccccctggctgccac

SEQ ID NO: 1240918 - DNA, 15 bp, Homo sapiens
tccccctggctgcca

SEQ ID NO: 1240919 - DNA, 15 bp, Homo sapiens
ctccccctggctgcc

SEQ ID NO: 1240920 - DNA, 15 bp, Homo sapiens
cctccccctggctgc

SEQ ID NO: 1240921 - DNA, 15 bp, Homo sapiens
acctccccctggctg

SEQ ID NO: 1240922 - DNA, 15 bp, Homo sapiens
cacctccccctggct

SEQ ID NO: 1240923 - DNA, 15 bp, Homo sapiens
gcacctccccctggc

SEQ ID NO: 1240924 - DNA, 15 bp, Homo sapiens
agcacctccccctgg

SEQ ID NO: 1240925 - DNA, 15 bp, Homo sapiens
cagcacctccccctg

SEQ ID NO: 1240926 - DNA, 15 bp, Homo sapiens
ccagcacctccccct

SEQ ID NO: 1240927 - DNA, 15 bp, Homo sapiens
tccagcacctccccc

SEQ ID NO: 1240928 - DNA, 15 bp, Homo sapiens
ttccagcacctcccc

SEQ ID NO: 1240929 - DNA, 15 bp, Homo sapiens
attccagcacctccc

SEQ ID NO: 1240930 - DNA, 15 bp, Homo sapiens
gattccagcacctcc

SEQ ID NO: 1240931 - DNA, 15 bp, Homo sapiens
agattccagcacctc

SEQ ID NO: 1240932 - DNA, 15 bp, Homo sapiens
gagattccagcacct

SEQ ID NO: 1240933 - DNA, 15 bp, Homo sapiens
tgagattccagcacc

SEQ ID NO: 1240934 - DNA, 15 bp, Homo sapiens
atgagattccagcac

SEQ ID NO: 1240935 - DNA, 15 bp, Homo sapiens
aatgagattccagca

SEQ ID NO: 1240936 - DNA, 15 bp, Homo sapiens
aaatgagattccagc

SEQ ID NO: 1240937 - DNA, 15 bp, Homo sapiens
gaaatgagattccag

SEQ ID NO: 1240938 - DNA, 15 bp, Homo sapiens
tgaaatgagattcca

SEQ ID NO: 1240939 - DNA, 15 bp, Homo sapiens
gtgaaatgagattcc

SEQ ID NO: 1240940 - DNA, 15 bp, Homo sapiens
tgtgaaatgagattc

SEQ ID NO: 1240941 - DNA, 15 bp, Homo sapiens
atgtgaaatgagatt

SEQ ID NO: 1240942 - DNA, 15 bp, Homo sapiens
catgtgaaatgagat

SEQ ID NO: 1240943 - DNA, 15 bp, Homo sapiens
acatgtgaaatgaga

SEQ ID NO: 1240944 - DNA, 15 bp, Homo sapiens
cacatgtgaaatgag

SEQ ID NO: 1240945 - DNA, 15 bp, Homo sapiens
ccacatgtgaaatga

SEQ ID NO: 1240946 - DNA, 15 bp, Homo sapiens
cccacatgtgaaatg

SEQ ID NO: 1240947 - DNA, 15 bp, Homo sapiens
ccccacatgtgaaat

SEQ ID NO: 1240948 - DNA, 15 bp, Homo sapiens
tccccacatgtgaaa

SEQ ID NO: 1240949 - DNA, 15 bp, Homo sapiens
ctccccacatgtgaa

SEQ ID NO: 1240950 - DNA, 15 bp, Homo sapiens
cctccccacatgtga

SEQ ID NO: 1240951 - DNA, 15 bp, Homo sapiens
ccctccccacatgtg

SEQ ID NO: 1240952 - DNA, 15 bp, Homo sapiens
cccctccccacatgt

SEQ ID NO: 1240953 - DNA, 15 bp, Homo sapiens
ccccctccccacatg

SEQ ID NO: 1240954 - DNA, 15 bp, Homo sapiens
gccccctccccacat

SEQ ID NO: 1240955 - DNA, 15 bp, Homo sapiens
agccccctccccaca

SEQ ID NO: 1240956 - DNA, 15 bp, Homo sapiens
gagccccctccccac

SEQ ID NO: 1240957 - DNA, 15 bp, Homo sapiens
ggagccccctcccca

SEQ ID NO: 1240958 - DNA, 15 bp, Homo sapiens
gggagccccctcccc

SEQ ID NO: 1240959 - DNA, 15 bp, Homo sapiens
ggggagccccctccc

SEQ ID NO: 1240960 - DNA, 15 bp, Homo sapiens
aggggagccccctcc

SEQ ID NO: 1240961 - DNA, 15 bp, Homo sapiens
caggggagccccctc

SEQ ID NO: 1240962 - DNA, 15 bp, Homo sapiens
acaggggagccccct

SEQ ID NO: 1240963 - DNA, 15 bp, Homo sapiens
cacaggggagccccc

SEQ ID NO: 1240964 - DNA, 15 bp, Homo sapiens
gcacaggggagcccc

SEQ ID NO: 1240965 - DNA, 15 bp, Homo sapiens
agcacaggggagccc

SEQ ID NO: 1240966 - DNA, 15 bp, Homo sapiens
gagcacaggggagcc

SEQ ID NO: 1240967 - DNA, 15 bp, Homo sapiens
tgagcacaggggagc

SEQ ID NO: 1240968 - DNA, 15 bp, Homo sapiens
ttgagcacaggggag

SEQ ID NO: 1240969 - DNA, 15 bp, Homo sapiens
cttgagcacagggga

SEQ ID NO: 1240970 - DNA, 15 bp, Homo sapiens
ccttgagcacagggg

SEQ ID NO: 1240971 - DNA, 15 bp, Homo sapiens
accttgagcacaggg

SEQ ID NO: 1240972 - DNA, 15 bp, Homo sapiens
gaccttgagcacagg

SEQ ID NO: 1240973 - DNA, 15 bp, Homo sapiens
tgaccttgagcacag

SEQ ID NO: 1240974 - DNA, 15 bp, Homo sapiens
gtgaccttgagcaca

SEQ ID NO: 1240975 - DNA, 15 bp, Homo sapiens
tgtgaccttgagcac

SEQ ID NO: 1240976 - DNA, 15 bp, Homo sapiens
gttgtgaccttgagc

SEQ ID NO: 1240977 - DNA, 15 bp, Homo sapiens
ggttgtgaccttgag

SEQ ID NO: 1240978 - DNA, 15 bp, Homo sapiens
tggttgtgaccttga

SEQ ID NO: 1240979 - DNA, 15 bp, Homo sapiens
ttggttgtgaccttg

SEQ ID NO: 1240980 - DNA, 15 bp, Homo sapiens
tttggttgtgacctt

SEQ ID NO: 1240981 - DNA, 15 bp, Homo sapiens
ctttggttgtgacct

SEQ ID NO: 1240982 - DNA, 15 bp, Homo sapiens
tctttggttgtgacc

SEQ ID NO: 1240983 - DNA, 15 bp, Homo sapiens
ctctttggttgtgac

SEQ ID NO: 1240984 - DNA, 15 bp, Homo sapiens
cctctttggttgtga

SEQ ID NO: 1240985 - DNA, 15 bp, Homo sapiens
tcctctttggttgtg

SEQ ID NO: 1240986 - DNA, 15 bp, Homo sapiens
ttcctctttggttgt

SEQ ID NO: 1240987 - DNA, 15 bp, Homo sapiens
cttcctctttggttg

SEQ ID NO: 1240988 - DNA, 15 bp, Homo sapiens
gcttcctctttggtt

SEQ ID NO: 1240989 - DNA, 15 bp, Homo sapiens
agcttcctctttggt

SEQ ID NO: 1240990 - DNA, 15 bp, Homo sapiens
cagcttcctctttgg

SEQ ID NO: 1240991 - DNA, 15 bp, Homo sapiens
acagcttcctctttg

SEQ ID NO: 1240992 - DNA, 15 bp, Homo sapiens
cacagcttcctcttt

SEQ ID NO: 1240993 - DNA, 15 bp, Homo sapiens
tcacagcttcctctt

SEQ ID NO: 1240994 - DNA, 15 bp, Homo sapiens
atcacagcttcctct

SEQ ID NO: 1240995 - DNA, 15 bp, Homo sapiens
aatcacagcttcctc

SEQ ID NO: 1240996 - DNA, 15 bp, Homo sapiens
taatcacagcttcct

SEQ ID NO: 1240997 - DNA, 15 bp, Homo sapiens
ttaatcacagcttcc

SEQ ID NO: 1240998 - DNA, 15 bp, Homo sapiens
tttaatcacagcttc

SEQ ID NO: 1240999 - DNA, 15 bp, Homo sapiens
ttttaatcacagctt

SEQ ID NO: 1241000 - DNA, 15 bp, Homo sapiens
gttttaatcacagct

SEQ ID NO: 1241001 - DNA, 15 bp, Homo sapiens
ggttttaatcacagc

SEQ ID NO: 1241002 - DNA, 15 bp, Homo sapiens
gggttttaatcacag

SEQ ID NO: 1241003 - DNA, 15 bp, Homo sapiens
tgggttttaatcaca

SEQ ID NO: 1241004 - DNA, 15 bp, Homo sapiens
ctgggttttaatcac

SEQ ID NO: 1241005 - DNA, 15 bp, Homo sapiens
cctgggttttaatca

SEQ ID NO: 1241006 - DNA, 15 bp, Homo sapiens
acctgggttttaatc

SEQ ID NO: 1241007 - DNA, 15 bp, Homo sapiens
gacctgggttttaat

SEQ ID NO: 1241008 - DNA, 15 bp, Homo sapiens
ggacctgggttttaa

SEQ ID NO: 1241009 - DNA, 15 bp, Homo sapiens
gggacctgggtttta

SEQ ID NO: 1241010 - DNA, 15 bp, Homo sapiens
tgggacctgggtttt

SEQ ID NO: 1241011 - DNA, 15 bp, Homo sapiens
atgggacctgggttt

SEQ ID NO: 1241012 - DNA, 15 bp, Homo sapiens
aatgggacctgggtt

SEQ ID NO: 1241013 - DNA, 15 bp, Homo sapiens
aaatgggacctgggt

SEQ ID NO: 1241014 - DNA, 15 bp, Homo sapiens
caaatgggacctggg

SEQ ID NO: 1241015 - DNA, 15 bp, Homo sapiens
gcaaatgggacctgg

SEQ ID NO: 1241016 - DNA, 15 bp, Homo sapiens
tgcaaatgggacctg

SEQ ID NO: 1241017 - DNA, 15 bp, Homo sapiens
ttgcaaatgggacct

SEQ ID NO: 1241018 - DNA, 15 bp, Homo sapiens
tttgcaaatgggacc

SEQ ID NO: 1241019 - DNA, 15 bp, Homo sapiens
ctttgcaaatgggac

SEQ ID NO: 1241020 - DNA, 15 bp, Homo sapiens
gctttgcaaatggga

SEQ ID NO: 1241021 - DNA, 15 bp, Homo sapiens
ggctttgcaaatggg

SEQ ID NO: 1241022 - DNA, 15 bp, Homo sapiens
aggctttgcaaatgg

SEQ ID NO: 1241023 - DNA, 15 bp, Homo sapiens
gaggctttgcaaatg

SEQ ID NO: 1241024 - DNA, 15 bp, Homo sapiens
cgaggctttgcaaat

SEQ ID NO: 1241025 - DNA, 15 bp, Homo sapiens
tcgaggctttgcaaa

SEQ ID NO: 1241026 - DNA, 15 bp, Homo sapiens
gtcgaggctttgcaa

SEQ ID NO: 1241027 - DNA, 15 bp, Homo sapiens
agtcgaggctttgca

SEQ ID NO: 1241028 - DNA, 15 bp, Homo sapiens
aagtcgaggctttgc

SEQ ID NO: 1241029 - DNA, 15 bp, Homo sapiens
aaagtcgaggctttg

SEQ ID NO: 1241030 - DNA, 15 bp, Homo sapiens
aaaagtcgaggcttt

SEQ ID NO: 1241031 - DNA, 15 bp, Homo sapiens
taaaagtcgaggctt

SEQ ID NO: 1241032 - DNA, 15 bp, Homo sapiens
ctaaaagtcgaggct

SEQ ID NO: 1241033 - DNA, 15 bp, Homo sapiens
gctaaaagtcgaggc

SEQ ID NO: 1241034 - DNA, 15 bp, Homo sapiens
tgctaaaagtcgagg

SEQ ID NO: 1241035 - DNA, 15 bp, Homo sapiens
ctgctaaaagtcgag

SEQ ID NO: 1241036 - DNA, 15 bp, Homo sapiens
cctgctaaaagtcga

SEQ ID NO: 1241037 - DNA, 15 bp, Homo sapiens
acctgctaaaagtcg

SEQ ID NO: 1241038 - DNA, 15 bp, Homo sapiens
cacctgctaaaagtc

SEQ ID NO: 1241039 - DNA, 15 bp, Homo sapiens
gcacctgctaaaagt

SEQ ID NO: 1241040 - DNA, 15 bp, Homo sapiens
tgcacctgctaaaag

SEQ ID NO: 1241041 - DNA, 15 bp, Homo sapiens
atgcacctgctaaaa

SEQ ID NO: 1241042 - DNA, 15 bp, Homo sapiens
gatgcacctgctaaa

SEQ ID NO: 1241043 - DNA, 15 bp, Homo sapiens
tgatgcacctgctaa

SEQ ID NO: 1241044 - DNA, 15 bp, Homo sapiens
atgatgcacctgcta

SEQ ID NO: 1241045 - DNA, 15 bp, Homo sapiens
tatgatgcacctgct

SEQ ID NO: 1241046 - DNA, 15 bp, Homo sapiens
gtatgatgcacctgc

SEQ ID NO: 1241047 - DNA, 15 bp, Homo sapiens
agtatgatgcacctg

SEQ ID NO: 1241048 - DNA, 15 bp, Homo sapiens
cagtatgatgcacct

SEQ ID NO: 1241049 - DNA, 15 bp, Homo sapiens
acagtatgatgcacc

SEQ ID NO: 1241050 - DNA, 15 bp, Homo sapiens
aacagtatgatgcac

SEQ ID NO: 1241051 - DNA, 15 bp, Homo sapiens
gaacagtatgatgca

SEQ ID NO: 1241052 - DNA, 15 bp, Homo sapiens
ggaacagtatgatgc

SEQ ID NO: 1241053 - DNA, 15 bp, Homo sapiens
gggaacagtatgatg

SEQ ID NO: 1241054 - DNA, 15 bp, Homo sapiens
tgggaacagtatgat

SEQ ID NO: 1241055 - DNA, 15 bp, Homo sapiens
gtgggaacagtatga

SEQ ID NO: 1241056 - DNA, 15 bp, Homo sapiens
ggtgggaacagtatg

SEQ ID NO: 1241057 - DNA, 15 bp, Homo sapiens
gggtgggaacagtat

SEQ ID NO: 1241058 - DNA, 15 bp, Homo sapiens
ggggtgggaacagta

SEQ ID NO: 1241059 - DNA, 15 bp, Homo sapiens
aggggtgggaacagt

SEQ ID NO: 1241060 - DNA, 15 bp, Homo sapiens
gaggggtgggaacag

SEQ ID NO: 1241061 - DNA, 15 bp, Homo sapiens
ggaggggtgggaaca

SEQ ID NO: 1241062 - DNA, 15 bp, Homo sapiens
gggaggggtgggaac

SEQ ID NO: 1241063 - DNA, 15 bp, Homo sapiens
tgggaggggtgggaa

SEQ ID NO: 1241064 - DNA, 15 bp, Homo sapiens
atgggaggggtggga

SEQ ID NO: 1241065 - DNA, 15 bp, Homo sapiens
gatgggaggggtggg

SEQ ID NO: 1241066 - DNA, 15 bp, Homo sapiens
ggatgggaggggtgg

SEQ ID NO: 1241067 - DNA, 15 bp, Homo sapiens
gggatgggaggggtg

SEQ ID NO: 1241068 - DNA, 15 bp, Homo sapiens
tgggatgggaggggt

SEQ ID NO: 1241069 - DNA, 15 bp, Homo sapiens
gtgggatgggagggg

SEQ ID NO: 1241070 - DNA, 15 bp, Homo sapiens
agtgggatgggaggg

SEQ ID NO: 1241071 - DNA, 15 bp, Homo sapiens
aagtgggatgggagg

SEQ ID NO: 1241072 - DNA, 15 bp, Homo sapiens
gaagtgggatgggag

SEQ ID NO: 1241073 - DNA, 15 bp, Homo sapiens
agaagtgggatggga

SEQ ID NO: 1241074 - DNA, 15 bp, Homo sapiens
cagaagtgggatggg

SEQ ID NO: 1241075 - DNA, 15 bp, Homo sapiens
acagaagtgggatgg

SEQ ID NO: 1241076 - DNA, 15 bp, Homo sapiens
gacagaagtgggatg

SEQ ID NO: 1241077 - DNA, 15 bp, Homo sapiens
ggacagaagtgggat

SEQ ID NO: 1241078 - DNA, 15 bp, Homo sapiens
tggacagaagtggga

SEQ ID NO: 1241079 - DNA, 15 bp, Homo sapiens
ctggacagaagtggg

SEQ ID NO: 1241080 - DNA, 15 bp, Homo sapiens
gctggacagaagtgg

SEQ ID NO: 1241081 - DNA, 15 bp, Homo sapiens
ggctggacagaagtg

SEQ ID NO: 1241082 - DNA, 15 bp, Homo sapiens
cggctggacagaagt

SEQ ID NO: 1241083 - DNA, 15 bp, Homo sapiens
gcggctggacagaag

SEQ ID NO: 1241084 - DNA, 15 bp, Homo sapiens
ggcggctggacagaa

SEQ ID NO: 1241085 - DNA, 15 bp, Homo sapiens
aggcggctggacaga

SEQ ID NO: 1241086 - DNA, 15 bp, Homo sapiens
taggcggctggacag

SEQ ID NO: 1241087 - DNA, 15 bp, Homo sapiens
ctaggcggctggaca

SEQ ID NO: 1241088 - DNA, 15 bp, Homo sapiens
gctaggcggctggac

SEQ ID NO: 1241089 - DNA, 15 bp, Homo sapiens
ggctaggcggctgga

SEQ ID NO: 1241090 - DNA, 15 bp, Homo sapiens
gggctaggcggctgg

SEQ ID NO: 1241091 - DNA, 15 bp, Homo sapiens
ggggctaggcggctg

SEQ ID NO: 1241092 - DNA, 15 bp, Homo sapiens
tggggctaggcggct

SEQ ID NO: 1241093 - DNA, 15 bp, Homo sapiens
gtggggctaggcggc

SEQ ID NO: 1241094 - DNA, 15 bp, Homo sapiens
agtggggctaggcgg

SEQ ID NO: 1241095 - DNA, 15 bp, Homo sapiens
aagtggggctaggcg

SEQ ID NO: 1241096 - DNA, 15 bp, Homo sapiens
aaagtggggctaggc

SEQ ID NO: 1241097 - DNA, 15 bp, Homo sapiens
gaaagtggggctagg

SEQ ID NO: 1241098 - DNA, 15 bp, Homo sapiens
agaaagtggggctag

SEQ ID NO: 1241099 - DNA, 15 bp, Homo sapiens
aagaaagtggggcta

SEQ ID NO: 1241100 - DNA, 15 bp, Homo sapiens
aaagaaagtggggct

SEQ ID NO: 1241101 - DNA, 15 bp, Homo sapiens
aaaagaaagtggggc

SEQ ID NO: 1241102 - DNA, 15 bp, Homo sapiens
aaaaagaaagtgggg

SEQ ID NO: 1241103 - DNA, 15 bp, Homo sapiens
aaaaaagaaagtggg

SEQ ID NO: 1241104 - DNA, 15 bp, Homo sapiens
aaaaaaagaaagtgg

SEQ ID NO: 1241105 - DNA, 15 bp, Homo sapiens
aaaaaaaagaaagtg

SEQ ID NO: 1241106 - DNA, 15 bp, Homo sapiens
gaaaaaaaagaaagt

SEQ ID NO: 1241107 - DNA, 15 bp, Homo sapiens
agaaaaaaaagaaag

SEQ ID NO: 1241108 - DNA, 15 bp, Homo sapiens
aagaaaaaaaagaaa

SEQ ID NO: 1241109 - DNA, 15 bp, Homo sapiens
aaagaaaaaaaagaa

SEQ ID NO: 1241110 - DNA, 15 bp, Homo sapiens
aaaagaaaaaaaaga

SEQ ID NO: 1241111 - DNA, 15 bp, Homo sapiens
aaaaagaaaaaaaag

SEQ ID NO: 1241112 - DNA, 15 bp, Homo sapiens
ctgtctcaaaaaaag

SEQ ID NO: 1241113 - DNA, 15 bp, Homo sapiens
gagactgtctcaaaa

SEQ ID NO: 1241114 - DNA, 15 bp, Homo sapiens
ggagactgtctcaaa

SEQ ID NO: 1241115 - DNA, 15 bp, Homo sapiens
gggagactgtctcaa

SEQ ID NO: 1241116 - DNA, 15 bp, Homo sapiens
agggagactgtctca

SEQ ID NO: 1241117 - DNA, 15 bp, Homo sapiens
gagggagactgtctc

SEQ ID NO: 1241118 - DNA, 15 bp, Homo sapiens
agagggagactgtct

SEQ ID NO: 1241119 - DNA, 15 bp, Homo sapiens
aagagggagactgtc

SEQ ID NO: 1241120 - DNA, 15 bp, Homo sapiens
caagagggagactgt

SEQ ID NO: 1241121 - DNA, 15 bp, Homo sapiens
gcaagagggagactg

SEQ ID NO: 1241122 - DNA, 15 bp, Homo sapiens
agcaagagggagact

SEQ ID NO: 1241123 - DNA, 15 bp, Homo sapiens
cagcaagagggagac

SEQ ID NO: 1241124 - DNA, 15 bp, Homo sapiens
tcagcaagagggaga

SEQ ID NO: 1241125 - DNA, 15 bp, Homo sapiens
ctcagcaagagggag

SEQ ID NO: 1241126 - DNA, 15 bp, Homo sapiens
cctcagcaagaggga

SEQ ID NO: 1241127 - DNA, 15 bp, Homo sapiens
gcctcagcaagaggg

SEQ ID NO: 1241128 - DNA, 15 bp, Homo sapiens
agcctcagcaagagg

SEQ ID NO: 1241129 - DNA, 15 bp, Homo sapiens
cagcctcagcaagag

SEQ ID NO: 1241130 - DNA, 15 bp, Homo sapiens
ccagcctcagcaaga

SEQ ID NO: 1241131 - DNA, 15 bp, Homo sapiens
tccagcctcagcaag

SEQ ID NO: 1241132 - DNA, 15 bp, Homo sapiens
ctccagcctcagcaa

SEQ ID NO: 1241133 - DNA, 15 bp, Homo sapiens
actccagcctcagca

SEQ ID NO: 1241134 - DNA, 15 bp, Homo sapiens
cactccagcctcagc

SEQ ID NO: 1241135 - DNA, 15 bp, Homo sapiens
tcgccactgcactcc

SEQ ID NO: 1241136 - DNA, 15 bp, Homo sapiens
ctcgccactgcactc

SEQ ID NO: 1241137 - DNA, 15 bp, Homo sapiens
tctcgccactgcact

SEQ ID NO: 1241138 - DNA, 15 bp, Homo sapiens
atctcgccactgcac

SEQ ID NO: 1241139 - DNA, 15 bp, Homo sapiens
gatctcgccactgca

SEQ ID NO: 1241140 - DNA, 15 bp, Homo sapiens
agatctcgccactgc

SEQ ID NO: 1241141 - DNA, 15 bp, Homo sapiens
gagatctcgccactg

SEQ ID NO: 1241142 - DNA, 15 bp, Homo sapiens
cgagatctcgccact

SEQ ID NO: 1241143 - DNA, 15 bp, Homo sapiens
ccgagatctcgccac

SEQ ID NO: 1241144 - DNA, 15 bp, Homo sapiens
gccgagatctcgcca

SEQ ID NO: 1241145 - DNA, 15 bp, Homo sapiens
agccgagatctcgcc

SEQ ID NO: 1241146 - DNA, 15 bp, Homo sapiens
gagccgagatctcgc

SEQ ID NO: 1241147 - DNA, 15 bp, Homo sapiens
tgagccgagatctcg

SEQ ID NO: 1241148 - DNA, 15 bp, Homo sapiens
gtgagccgagatctc

SEQ ID NO: 1241149 - DNA, 15 bp, Homo sapiens
agtgagccgagatct

SEQ ID NO: 1241150 - DNA, 15 bp, Homo sapiens
ggaggttacagtgag

SEQ ID NO: 1241151 - DNA, 15 bp, Homo sapiens
cggaggttacagtga

SEQ ID NO: 1241152 - DNA, 15 bp, Homo sapiens
gcggaggttacagtg

SEQ ID NO: 1241153 - DNA, 15 bp, Homo sapiens
ggcggaggttacagt

SEQ ID NO: 1241154 - DNA, 15 bp, Homo sapiens
aggcggaggttacag

SEQ ID NO: 1241155 - DNA, 15 bp, Homo sapiens
gaggcggaggttaca

SEQ ID NO: 1241156 - DNA, 15 bp, Homo sapiens
ggaggcggaggttac

SEQ ID NO: 1241157 - DNA, 15 bp, Homo sapiens
gggaggcggaggtta

SEQ ID NO: 1241158 - DNA, 15 bp, Homo sapiens
atcctagctacttgg

SEQ ID NO: 1241159 - DNA, 15 bp, Homo sapiens
aatcctagctacttg

SEQ ID NO: 1241160 - DNA, 15 bp, Homo sapiens
taatcctagctactt

SEQ ID NO: 1241161 - DNA, 15 bp, Homo sapiens
gtaatcctagctact

SEQ ID NO: 1241162 - DNA, 15 bp, Homo sapiens
tgtaatcctagctac

SEQ ID NO: 1241163 - DNA, 15 bp, Homo sapiens
ctgtaatcctagcta

SEQ ID NO: 1241164 - DNA, 15 bp, Homo sapiens
cgcctgtaatcctag

SEQ ID NO: 1241165 - DNA, 15 bp, Homo sapiens
gcgcctgtaatccta

SEQ ID NO: 1241166 - DNA, 15 bp, Homo sapiens
ggcgcctgtaatcct

SEQ ID NO: 1241167 - DNA, 15 bp, Homo sapiens
gcgtggtggcgggcg

SEQ ID NO: 1241168 - DNA, 15 bp, Homo sapiens
ggcgtggtggcgggc

SEQ ID NO: 1241169 - DNA, 15 bp, Homo sapiens
aggcgtggtggcggg

SEQ ID NO: 1241170 - DNA, 15 bp, Homo sapiens
gttagccaggcgtgg

SEQ ID NO: 1241171 - DNA, 15 bp, Homo sapiens
agttagccaggcgtg

SEQ ID NO: 1241172 - DNA, 15 bp, Homo sapiens
aagttagccaggcgt

SEQ ID NO: 1241173 - DNA, 15 bp, Homo sapiens
aaagttagccaggcg

SEQ ID NO: 1241174 - DNA, 15 bp, Homo sapiens
aaaagttagccaggc

SEQ ID NO: 1241175 - DNA, 15 bp, Homo sapiens
caaaagttagccagg

SEQ ID NO: 1241176 - DNA, 15 bp, Homo sapiens
acaaaagttagccag

SEQ ID NO: 1241177 - DNA, 15 bp, Homo sapiens
tacaaaagttagcca

SEQ ID NO: 1241178 - DNA, 15 bp, Homo sapiens
atacaaaagttagcc

SEQ ID NO: 1241179 - DNA, 15 bp, Homo sapiens
aatacaaaagttagc

SEQ ID NO: 1241180 - DNA, 15 bp, Homo sapiens
aaatacaaaagttag

SEQ ID NO: 1241181 - DNA, 15 bp, Homo sapiens
aaaatacaaaagtta

SEQ ID NO: 1241182 - DNA, 15 bp, Homo sapiens
aaaaatacaaaagtt

SEQ ID NO: 1241183 - DNA, 15 bp, Homo sapiens
taaaaatacaaaagt

SEQ ID NO: 1241184 - DNA, 15 bp, Homo sapiens
aaggtcaggagtttg

SEQ ID NO: 1241185 - DNA, 15 bp, Homo sapiens
taaggtcaggagttt

SEQ ID NO: 1241186 - DNA, 15 bp, Homo sapiens
ttaaggtcaggagtt

SEQ ID NO: 1241187 - DNA, 15 bp, Homo sapiens
cttaaggtcaggagt

SEQ ID NO: 1241188 - DNA, 15 bp, Homo sapiens
acttaaggtcaggag

SEQ ID NO: 1241189 - DNA, 15 bp, Homo sapiens
cacttaaggtcagga

SEQ ID NO: 1241190 - DNA, 15 bp, Homo sapiens
tcacttaaggtcagg

SEQ ID NO: 1241191 - DNA, 15 bp, Homo sapiens
atcacttaaggtcag

SEQ ID NO: 1241192 - DNA, 15 bp, Homo sapiens
aatcacttaaggtca

SEQ ID NO: 1241193 - DNA, 15 bp, Homo sapiens
gaatcacttaaggtc

SEQ ID NO: 1241194 - DNA, 15 bp, Homo sapiens
cgaatcacttaaggt

SEQ ID NO: 1241195 - DNA, 15 bp, Homo sapiens
gcgaatcacttaagg

SEQ ID NO: 1241196 - DNA, 15 bp, Homo sapiens
ggcgaatcacttaag

SEQ ID NO: 1241197 - DNA, 15 bp, Homo sapiens
gggcgaatcacttaa

SEQ ID NO: 1241198 - DNA, 15 bp, Homo sapiens
tgggcgaatcactta

SEQ ID NO: 1241199 - DNA, 15 bp, Homo sapiens
gtgggcgaatcactt

SEQ ID NO: 1241200 - DNA, 15 bp, Homo sapiens
agtgggcgaatcact

SEQ ID NO: 1241201 - DNA, 15 bp, Homo sapiens
cagtgggcgaatcac

SEQ ID NO: 1241202 - DNA, 15 bp, Homo sapiens
acagtgggcgaatca

SEQ ID NO: 1241203 - DNA, 15 bp, Homo sapiens
cacagtgggcgaatc

SEQ ID NO: 1241204 - DNA, 15 bp, Homo sapiens
ccacagtgggcgaat

SEQ ID NO: 1241205 - DNA, 15 bp, Homo sapiens
gccacagtgggcgaa

SEQ ID NO: 1241206 - DNA, 15 bp, Homo sapiens
ggccacagtgggcga

SEQ ID NO: 1241207 - DNA, 15 bp, Homo sapiens
aggccacagtgggcg

SEQ ID NO: 1241208 - DNA, 15 bp, Homo sapiens
gaggccacagtgggc

SEQ ID NO: 1241209 - DNA, 15 bp, Homo sapiens
ggaggccacagtggg

SEQ ID NO: 1241210 - DNA, 15 bp, Homo sapiens
gggaggccacagtgg

SEQ ID NO: 1241211 - DNA, 15 bp, Homo sapiens
tgggaggccacagtg

SEQ ID NO: 1241212 - DNA, 15 bp, Homo sapiens
ttgggaggccacagt

SEQ ID NO: 1241213 - DNA, 15 bp, Homo sapiens
tttgggaggccacag

SEQ ID NO: 1241214 - DNA, 15 bp, Homo sapiens
ctttgggaggccaca

SEQ ID NO: 1241215 - DNA, 15 bp, Homo sapiens
actttgggaggccac

SEQ ID NO: 1241216 - DNA, 15 bp, Homo sapiens
ggtagctcacgcctg

SEQ ID NO: 1241217 - DNA, 15 bp, Homo sapiens
cggtagctcacgcct

SEQ ID NO: 1241218 - DNA, 15 bp, Homo sapiens
gcggtagctcacgcc

SEQ ID NO: 1241219 - DNA, 15 bp, Homo sapiens
ggcggtagctcacgc

SEQ ID NO: 1241220 - DNA, 15 bp, Homo sapiens
gggcggtagctcacg

SEQ ID NO: 1241221 - DNA, 15 bp, Homo sapiens
ggggcggtagctcac

SEQ ID NO: 1241222 - DNA, 15 bp, Homo sapiens
gggggcggtagctca

SEQ ID NO: 1241223 - DNA, 15 bp, Homo sapiens
tgggggcggtagctc

SEQ ID NO: 1241224 - DNA, 15 bp, Homo sapiens
ctgggggcggtagct

SEQ ID NO: 1241225 - DNA, 15 bp, Homo sapiens
gctgggggcggtagc

SEQ ID NO: 1241226 - DNA, 15 bp, Homo sapiens
ggctgggggcggtag

SEQ ID NO: 1241227 - DNA, 15 bp, Homo sapiens
gggctgggggcggta

SEQ ID NO: 1241228 - DNA, 15 bp, Homo sapiens
ggggctgggggcggt

SEQ ID NO: 1241229 - DNA, 15 bp, Homo sapiens
aggggctgggggcgg

SEQ ID NO: 1241230 - DNA, 15 bp, Homo sapiens
gaggggctgggggcg

SEQ ID NO: 1241231 - DNA, 15 bp, Homo sapiens
gggaggggctggggg

SEQ ID NO: 1241232 - DNA, 15 bp, Homo sapiens
atgggaggggctggg

SEQ ID NO: 1241233 - DNA, 15 bp, Homo sapiens
gatgggaggggctgg

SEQ ID NO: 1241234 - DNA, 15 bp, Homo sapiens
ggatgggaggggctg

SEQ ID NO: 1241235 - DNA, 15 bp, Homo sapiens
gggatgggaggggct

SEQ ID NO: 1241236 - DNA, 15 bp, Homo sapiens
tgggatgggaggggc

SEQ ID NO: 1241237 - DNA, 15 bp, Homo sapiens
gggctggacagaagt

SEQ ID NO: 1241238 - DNA, 15 bp, Homo sapiens
ggggctggacagaag

SEQ ID NO: 1241239 - DNA, 15 bp, Homo sapiens
gggggctggacagaa

SEQ ID NO: 1241240 - DNA, 15 bp, Homo sapiens
agggggctggacaga

SEQ ID NO: 1241241 - DNA, 15 bp, Homo sapiens
tagggggctggacag

SEQ ID NO: 1241242 - DNA, 15 bp, Homo sapiens
ctagggggctggaca

SEQ ID NO: 1241243 - DNA, 15 bp, Homo sapiens
gctagggggctggac

SEQ ID NO: 1241244 - DNA, 15 bp, Homo sapiens
ggctagggggctgga

SEQ ID NO: 1241245 - DNA, 15 bp, Homo sapiens
gggctagggggctgg

SEQ ID NO: 1241246 - DNA, 15 bp, Homo sapiens
agggctagggggctg

SEQ ID NO: 1241247 - DNA, 15 bp, Homo sapiens
tagggctagggggct

SEQ ID NO: 1241248 - DNA, 15 bp, Homo sapiens
gtagggctagggggc

SEQ ID NO: 1241249 - DNA, 15 bp, Homo sapiens
agtagggctaggggg

SEQ ID NO: 1241250 - DNA, 15 bp, Homo sapiens
aagtagggctagggg

SEQ ID NO: 1241251 - DNA, 15 bp, Homo sapiens
aaagtagggctaggg

SEQ ID NO: 1241252 - DNA, 15 bp, Homo sapiens
gaaagtagggctagg

SEQ ID NO: 1241253 - DNA, 15 bp, Homo sapiens
agaaagtagggctag

SEQ ID NO: 1241254 - DNA, 15 bp, Homo sapiens
aagaaagtagggcta

SEQ ID NO: 1241255 - DNA, 15 bp, Homo sapiens
aaagaaagtagggct

SEQ ID NO: 1241256 - DNA, 15 bp, Homo sapiens
gaaagaaagtagggc

SEQ ID NO: 1241257 - DNA, 15 bp, Homo sapiens
agaaagaaagtaggg

SEQ ID NO: 1241258 - DNA, 15 bp, Homo sapiens
cagaaagaaagtagg

SEQ ID NO: 1241259 - DNA, 15 bp, Homo sapiens
ccagaaagaaagtag

SEQ ID NO: 1241260 - DNA, 15 bp, Homo sapiens
cccagaaagaaagta

SEQ ID NO: 1241261 - DNA, 15 bp, Homo sapiens
tcccagaaagaaagt

SEQ ID NO: 1241262 - DNA, 15 bp, Homo sapiens
atcccagaaagaaag

SEQ ID NO: 1241263 - DNA, 15 bp, Homo sapiens
gatcccagaaagaaa

SEQ ID NO: 1241264 - DNA, 15 bp, Homo sapiens
ggatcccagaaagaa

SEQ ID NO: 1241265 - DNA, 15 bp, Homo sapiens
tggatcccagaaaga

SEQ ID NO: 1241266 - DNA, 15 bp, Homo sapiens
ctggatcccagaaag

SEQ ID NO: 1241267 - DNA, 15 bp, Homo sapiens
cctggatcccagaaa

SEQ ID NO: 1241268 - DNA, 15 bp, Homo sapiens
tcctggatcccagaa

SEQ ID NO: 1241269 - DNA, 15 bp, Homo sapiens
ctcctggatcccaga

SEQ ID NO: 1241270 - DNA, 15 bp, Homo sapiens
actcctggatcccag

SEQ ID NO: 1241271 - DNA, 15 bp, Homo sapiens
gactcctggatccca

SEQ ID NO: 1241272 - DNA, 15 bp, Homo sapiens
ggactcctggatccc

SEQ ID NO: 1241273 - DNA, 15 bp, Homo sapiens
tggactcctggatcc

SEQ ID NO: 1241274 - DNA, 15 bp, Homo sapiens
ctggactcctggatc

SEQ ID NO: 1241275 - DNA, 15 bp, Homo sapiens
tctggactcctggat

SEQ ID NO: 1241276 - DNA, 15 bp, Homo sapiens
atctggactcctgga

SEQ ID NO: 1241277 - DNA, 15 bp, Homo sapiens
gatctggactcctgg

SEQ ID NO: 1241278 - DNA, 15 bp, Homo sapiens
ggatctggactcctg

SEQ ID NO: 1241279 - DNA, 15 bp, Homo sapiens
gggatctggactcct

SEQ ID NO: 1241280 - DNA, 15 bp, Homo sapiens
ggggatctggactcc

SEQ ID NO: 1241281 - DNA, 15 bp, Homo sapiens
tggggatctggactc

SEQ ID NO: 1241282 - DNA, 15 bp, Homo sapiens
ctggggatctggact

SEQ ID NO: 1241283 - DNA, 15 bp, Homo sapiens
gctggggatctggac

SEQ ID NO: 1241284 - DNA, 15 bp, Homo sapiens
gggggctggggatct

SEQ ID NO: 1241285 - DNA, 15 bp, Homo sapiens
agggggctggggatc

SEQ ID NO: 1241286 - DNA, 15 bp, Homo sapiens
gagggggctggggat

SEQ ID NO: 1241287 - DNA, 15 bp, Homo sapiens
agagggggctgggga

SEQ ID NO: 1241288 - DNA, 15 bp, Homo sapiens
gagagggggctgggg

SEQ ID NO: 1241289 - DNA, 15 bp, Homo sapiens
ggagagggggctggg

SEQ ID NO: 1241290 - DNA, 15 bp, Homo sapiens
tggagagggggctgg

SEQ ID NO: 1241291 - DNA, 15 bp, Homo sapiens
ctggagagggggctg

SEQ ID NO: 1241292 - DNA, 15 bp, Homo sapiens
tctggagagggggct

SEQ ID NO: 1241293 - DNA, 15 bp, Homo sapiens
atctggagagggggc

SEQ ID NO: 1241294 - DNA, 15 bp, Homo sapiens
aatctggagaggggg

SEQ ID NO: 1241295 - DNA, 15 bp, Homo sapiens
taatctggagagggg

SEQ ID NO: 1241296 - DNA, 15 bp, Homo sapiens
gtaatctggagaggg

SEQ ID NO: 1241297 - DNA, 15 bp, Homo sapiens
tgtaatctggagagg

SEQ ID NO: 1241298 - DNA, 15 bp, Homo sapiens
atgtaatctggagag

SEQ ID NO: 1241299 - DNA, 15 bp, Homo sapiens
aatgtaatctggaga

SEQ ID NO: 1241300 - DNA, 15 bp, Homo sapiens
gaatgtaatctggag

SEQ ID NO: 1241301 - DNA, 15 bp, Homo sapiens
tgaatgtaatctgga

SEQ ID NO: 1241302 - DNA, 15 bp, Homo sapiens
atgaatgtaatctgg

SEQ ID NO: 1241303 - DNA, 15 bp, Homo sapiens
gatgaatgtaatctg

SEQ ID NO: 1241304 - DNA, 15 bp, Homo sapiens
ggatgaatgtaatct

SEQ ID NO: 1241305 - DNA, 15 bp, Homo sapiens
tggatgaatgtaatc

SEQ ID NO: 1241306 - DNA, 15 bp, Homo sapiens
ctggatgaatgtaat

SEQ ID NO: 1241307 - DNA, 15 bp, Homo sapiens
cctggatgaatgtaa

SEQ ID NO: 1241308 - DNA, 15 bp, Homo sapiens
gcctggatgaatgta

SEQ ID NO: 1241309 - DNA, 15 bp, Homo sapiens
tgcctggatgaatgt

SEQ ID NO: 1241310 - DNA, 15 bp, Homo sapiens
gtgcctggatgaatg

SEQ ID NO: 1241311 - DNA, 15 bp, Homo sapiens
tgtgcctggatgaat

SEQ ID NO: 1241312 - DNA, 15 bp, Homo sapiens
ctgtgcctggatgaa

SEQ ID NO: 1241313 - DNA, 15 bp, Homo sapiens
cctgtgcctggatga

SEQ ID NO: 1241314 - DNA, 15 bp, Homo sapiens
tcctgtgcctggatg

SEQ ID NO: 1241315 - DNA, 15 bp, Homo sapiens
ttcctgtgcctggat

SEQ ID NO: 1241316 - DNA, 15 bp, Homo sapiens
tttcctgtgcctgga

SEQ ID NO: 1241317 - DNA, 15 bp, Homo sapiens
cctttcctgtgcctg

SEQ ID NO: 1241318 - DNA, 15 bp, Homo sapiens
tcctttcctgtgcct

SEQ ID NO: 1241319 - DNA, 15 bp, Homo sapiens
gtcctttcctgtgcc

SEQ ID NO: 1241320 - DNA, 15 bp, Homo sapiens
tgtcctttcctgtgc

SEQ ID NO: 1241321 - DNA, 15 bp, Homo sapiens
ctgtcctttcctgtg

SEQ ID NO: 1241322 - DNA, 15 bp, Homo sapiens
cctgtcctttcctgt

SEQ ID NO: 1241323 - DNA, 15 bp, Homo sapiens
ccctgtcctttcctg

SEQ ID NO: 1241324 - DNA, 15 bp, Homo sapiens
accctgtcctttcct

SEQ ID NO: 1241325 - DNA, 15 bp, Homo sapiens
gaccctgtcctttcc

SEQ ID NO: 1241326 - DNA, 15 bp, Homo sapiens
tgaccctgtcctttc

SEQ ID NO: 1241327 - DNA, 15 bp, Homo sapiens
ctgaccctgtccttt

SEQ ID NO: 1241328 - DNA, 15 bp, Homo sapiens
cctgaccctgtcctt

SEQ ID NO: 1241329 - DNA, 15 bp, Homo sapiens
tcctgaccctgtcct

SEQ ID NO: 1241330 - DNA, 15 bp, Homo sapiens
ttcctgaccctgtcc

SEQ ID NO: 1241331 - DNA, 15 bp, Homo sapiens
tttcctgaccctgtc

SEQ ID NO: 1241332 - DNA, 15 bp, Homo sapiens
ctttcctgaccctgt

SEQ ID NO: 1241333 - DNA, 15 bp, Homo sapiens
cctttcctgaccctg

SEQ ID NO: 1241334 - DNA, 15 bp, Homo sapiens
tcctttcctgaccct

SEQ ID NO: 1241335 - DNA, 15 bp, Homo sapiens
ctcctttcctgaccc

SEQ ID NO: 1241336 - DNA, 15 bp, Homo sapiens
cctcctttcctgacc

SEQ ID NO: 1241337 - DNA, 15 bp, Homo sapiens
tcctcctttcctgac

SEQ ID NO: 1241338 - DNA, 15 bp, Homo sapiens
gtcctcctttcctga

SEQ ID NO: 1241339 - DNA, 15 bp, Homo sapiens
agtcctcctttcctg

SEQ ID NO: 1241340 - DNA, 15 bp, Homo sapiens
gagtcctcctttcct

SEQ ID NO: 1241341 - DNA, 15 bp, Homo sapiens
agagtcctcctttcc

SEQ ID NO: 1241342 - DNA, 15 bp, Homo sapiens
cagagtcctcctttc

SEQ ID NO: 1241343 - DNA, 15 bp, Homo sapiens
ccagagtcctccttt

SEQ ID NO: 1241344 - DNA, 15 bp, Homo sapiens
cccagagtcctcctt

SEQ ID NO: 1241345 - DNA, 15 bp, Homo sapiens
gcccagagtcctcct

SEQ ID NO: 1241346 - DNA, 15 bp, Homo sapiens
cgcccagagtcctcc

SEQ ID NO: 1241347 - DNA, 15 bp, Homo sapiens
ccgcccagagtcctc

SEQ ID NO: 1241348 - DNA, 15 bp, Homo sapiens
gccgcccagagtcct

SEQ ID NO: 1241349 - DNA, 15 bp, Homo sapiens
tgccgcccagagtcc

SEQ ID NO: 1241350 - DNA, 15 bp, Homo sapiens
ctgccgcccagagtc

SEQ ID NO: 1241351 - DNA, 15 bp, Homo sapiens
gctgccgcccagagt

SEQ ID NO: 1241352 - DNA, 15 bp, Homo sapiens
ggctgccgcccagag

SEQ ID NO: 1241353 - DNA, 15 bp, Homo sapiens
aggctgccgcccaga

SEQ ID NO: 1241354 - DNA, 15 bp, Homo sapiens
gaggctgccgcccag

SEQ ID NO: 1241355 - DNA, 15 bp, Homo sapiens
ggaggctgccgccca

SEQ ID NO: 1241356 - DNA, 15 bp, Homo sapiens
tggaggctgccgccc

SEQ ID NO: 1241357 - DNA, 15 bp, Homo sapiens
gtggaggctgccgcc

SEQ ID NO: 1241358 - DNA, 15 bp, Homo sapiens
tgtggaggctgccgc

SEQ ID NO: 1241359 - DNA, 15 bp, Homo sapiens
atgtggaggctgccg

SEQ ID NO: 1241360 - DNA, 15 bp, Homo sapiens
aatgtggaggctgcc

SEQ ID NO: 1241361 - DNA, 15 bp, Homo sapiens
gaatgtggaggctgc

SEQ ID NO: 1241362 - DNA, 15 bp, Homo sapiens
ggaatgtggaggctg

SEQ ID NO: 1241363 - DNA, 15 bp, Homo sapiens
gggaatgtggaggct

SEQ ID NO: 1241364 - DNA, 15 bp, Homo sapiens
ggggaatgtggaggc

SEQ ID NO: 1241365 - DNA, 15 bp, Homo sapiens
aggggaatgtggagg

SEQ ID NO: 1241366 - DNA, 15 bp, Homo sapiens
aaggggaatgtggag

SEQ ID NO: 1241367 - DNA, 15 bp, Homo sapiens
gaaggggaatgtgga

SEQ ID NO: 1241368 - DNA, 15 bp, Homo sapiens
ggaaggggaatgtgg

SEQ ID NO: 1241369 - DNA, 15 bp, Homo sapiens
tggaaggggaatgtg

SEQ ID NO: 1241370 - DNA, 15 bp, Homo sapiens
gtggaaggggaatgt

SEQ ID NO: 1241371 - DNA, 15 bp, Homo sapiens
cgtggaaggggaatg

SEQ ID NO: 1241372 - DNA, 15 bp, Homo sapiens
gcgtggaaggggaat

SEQ ID NO: 1241373 - DNA, 15 bp, Homo sapiens
agcgtggaaggggaa

SEQ ID NO: 1241374 - DNA, 15 bp, Homo sapiens
aagcgtggaagggga

SEQ ID NO: 1241375 - DNA, 15 bp, Homo sapiens
caagcgtggaagggg

SEQ ID NO: 1241376 - DNA, 15 bp, Homo sapiens
ccaagcgtggaaggg

SEQ ID NO: 1241377 - DNA, 15 bp, Homo sapiens
gccaagcgtggaagg

SEQ ID NO: 1241378 - DNA, 15 bp, Homo sapiens
ggccaagcgtggaag

SEQ ID NO: 1241379 - DNA, 15 bp, Homo sapiens
gggccaagcgtggaa

SEQ ID NO: 1241380 - DNA, 15 bp, Homo sapiens
ggggccaagcgtgga

SEQ ID NO: 1241381 - DNA, 15 bp, Homo sapiens
gggggccaagcgtgg

SEQ ID NO: 1241382 - DNA, 15 bp, Homo sapiens
tgggggccaagcgtg

SEQ ID NO: 1241383 - DNA, 15 bp, Homo sapiens
ctgggggccaagcgt

SEQ ID NO: 1241384 - DNA, 15 bp, Homo sapiens
tctgggggccaagcg

SEQ ID NO: 1241385 - DNA, 15 bp, Homo sapiens
ttctgggggccaagc

SEQ ID NO: 1241386 - DNA, 15 bp, Homo sapiens
attctgggggccaag

SEQ ID NO: 1241387 - DNA, 15 bp, Homo sapiens
cattctgggggccaa

SEQ ID NO: 1241388 - DNA, 15 bp, Homo sapiens
ccattctgggggcca

SEQ ID NO: 1241389 - DNA, 15 bp, Homo sapiens
tccattctgggggcc

SEQ ID NO: 1241390 - DNA, 15 bp, Homo sapiens
ctccattctgggggc

SEQ ID NO: 1241391 - DNA, 15 bp, Homo sapiens
cctccattctggggg

SEQ ID NO: 1241392 - DNA, 15 bp, Homo sapiens
tcctccattctgggg

SEQ ID NO: 1241393 - DNA, 15 bp, Homo sapiens
ctcctccattctggg

SEQ ID NO: 1241394 - DNA, 15 bp, Homo sapiens
cctcctccattctgg

SEQ ID NO: 1241395 - DNA, 15 bp, Homo sapiens
ccctcctccattctg

SEQ ID NO: 1241396 - DNA, 15 bp, Homo sapiens
accctcctccattct

SEQ ID NO: 1241397 - DNA, 15 bp, Homo sapiens
caccctcctccattc

SEQ ID NO: 1241398 - DNA, 15 bp, Homo sapiens
acaccctcctccatt

SEQ ID NO: 1241399 - DNA, 15 bp, Homo sapiens
gacaccctcctccat

SEQ ID NO: 1241400 - DNA, 15 bp, Homo sapiens
agacaccctcctcca

SEQ ID NO: 1241401 - DNA, 15 bp, Homo sapiens
cagacaccctcctcc

SEQ ID NO: 1241402 - DNA, 15 bp, Homo sapiens
acagacaccctcctc

SEQ ID NO: 1241403 - DNA, 15 bp, Homo sapiens
tacagacaccctcct

SEQ ID NO: 1241404 - DNA, 15 bp, Homo sapiens
atacagacaccctcc

SEQ ID NO: 1241405 - DNA, 15 bp, Homo sapiens
aatacagacaccctc

SEQ ID NO: 1241406 - DNA, 15 bp, Homo sapiens
taatacagacaccct

SEQ ID NO: 1241407 - DNA, 15 bp, Homo sapiens
gtaatacagacaccc

SEQ ID NO: 1241408 - DNA, 15 bp, Homo sapiens
agtaatacagacacc

SEQ ID NO: 1241409 - DNA, 15 bp, Homo sapiens
cagtaatacagacac

SEQ ID NO: 1241410 - DNA, 15 bp, Homo sapiens
ccagtaatacagaca

SEQ ID NO: 1241411 - DNA, 15 bp, Homo sapiens
cccagtaatacagac

SEQ ID NO: 1241412 - DNA, 15 bp, Homo sapiens
gcccagtaatacaga

SEQ ID NO: 1241413 - DNA, 15 bp, Homo sapiens
cgcccagtaatacag

SEQ ID NO: 1241414 - DNA, 15 bp, Homo sapiens
tcgcccagtaataca

SEQ ID NO: 1241415 - DNA, 15 bp, Homo sapiens
ctcgcccagtaatac

SEQ ID NO: 1241416 - DNA, 15 bp, Homo sapiens
cctcgcccagtaata

SEQ ID NO: 1241417 - DNA, 15 bp, Homo sapiens
acctcgcccagtaat

SEQ ID NO: 1241418 - DNA, 15 bp, Homo sapiens
cacctcgcccagtaa

SEQ ID NO: 1241419 - DNA, 15 bp, Homo sapiens
acacctcgcccagta

SEQ ID NO: 1241420 - DNA, 15 bp, Homo sapiens
gacacctcgcccagt

SEQ ID NO: 1241421 - DNA, 15 bp, Homo sapiens
ggacacctcgcccag

SEQ ID NO: 1241422 - DNA, 15 bp, Homo sapiens
aggacacctcgccca

SEQ ID NO: 1241423 - DNA, 15 bp, Homo sapiens
gaggacacctcgccc

SEQ ID NO: 1241424 - DNA, 15 bp, Homo sapiens
ggaggacacctcgcc

SEQ ID NO: 1241425 - DNA, 15 bp, Homo sapiens
gggaggacacctcgc

SEQ ID NO: 1241426 - DNA, 15 bp, Homo sapiens
agggaggacacctcg

SEQ ID NO: 1241427 - DNA, 15 bp, Homo sapiens
aagggaggacacctc

SEQ ID NO: 1241428 - DNA, 15 bp, Homo sapiens
gaagggaggacacct

SEQ ID NO: 1241429 - DNA, 15 bp, Homo sapiens
ggaagggaggacacc

SEQ ID NO: 1241430 - DNA, 15 bp, Homo sapiens
aggaagggaggacac

SEQ ID NO: 1241431 - DNA, 15 bp, Homo sapiens
caggaagggaggaca

SEQ ID NO: 1241432 - DNA, 15 bp, Homo sapiens
ccaggaagggaggac

SEQ ID NO: 1241433 - DNA, 15 bp, Homo sapiens
cccaggaagggagga

SEQ ID NO: 1241434 - DNA, 15 bp, Homo sapiens
ccccaggaagggagg

SEQ ID NO: 1241435 - DNA, 15 bp, Homo sapiens
tccccaggaagggag

SEQ ID NO: 1241436 - DNA, 15 bp, Homo sapiens
gtccccaggaaggga

SEQ ID NO: 1241437 - DNA, 15 bp, Homo sapiens
agtccccaggaaggg

SEQ ID NO: 1241438 - DNA, 15 bp, Homo sapiens
cagtccccaggaagg

SEQ ID NO: 1241439 - DNA, 15 bp, Homo sapiens
acagtccccaggaag

SEQ ID NO: 1241440 - DNA, 15 bp, Homo sapiens
cacagtccccaggaa

SEQ ID NO: 1241441 - DNA, 15 bp, Homo sapiens
ccacagtccccagga

SEQ ID NO: 1241442 - DNA, 15 bp, Homo sapiens
cccacagtccccagg

SEQ ID NO: 1241443 - DNA, 15 bp, Homo sapiens
ccccacagtccccag

SEQ ID NO: 1241444 - DNA, 15 bp, Homo sapiens
cccccacagtcccca

SEQ ID NO: 1241445 - DNA, 15 bp, Homo sapiens
ccccccacagtcccc

SEQ ID NO: 1241446 - DNA, 15 bp, Homo sapiens
accccccacagtccc

SEQ ID NO: 1241447 - DNA, 15 bp, Homo sapiens
caccccccacagtcc

SEQ ID NO: 1241448 - DNA, 15 bp, Homo sapiens
ccaccccccacagtc

SEQ ID NO: 1241449 - DNA, 15 bp, Homo sapiens
accaccccccacagt

SEQ ID NO: 1241450 - DNA, 15 bp, Homo sapiens
gaccaccccccacag

SEQ ID NO: 1241451 - DNA, 15 bp, Homo sapiens
tgaccaccccccaca

SEQ ID NO: 1241452 - DNA, 15 bp, Homo sapiens
ttgaccaccccccac

SEQ ID NO: 1241453 - DNA, 15 bp, Homo sapiens
tttgaccacccccca

SEQ ID NO: 1241454 - DNA, 15 bp, Homo sapiens
ttttgaccacccccc

SEQ ID NO: 1241455 - DNA, 15 bp, Homo sapiens
cttttgaccaccccc

SEQ ID NO: 1241456 - DNA, 15 bp, Homo sapiens
tcttttgaccacccc

SEQ ID NO: 1241457 - DNA, 15 bp, Homo sapiens
gtcttttgaccaccc

SEQ ID NO: 1241458 - DNA, 15 bp, Homo sapiens
ggtcttttgaccacc

SEQ ID NO: 1241459 - DNA, 15 bp, Homo sapiens
aggtcttttgaccac

SEQ ID NO: 1241460 - DNA, 15 bp, Homo sapiens
gaggtcttttgacca

SEQ ID NO: 1241461 - DNA, 15 bp, Homo sapiens
agaggtcttttgacc

SEQ ID NO: 1241462 - DNA, 15 bp, Homo sapiens
tagaggtcttttgac

SEQ ID NO: 1241463 - DNA, 15 bp, Homo sapiens
atagaggtcttttga

SEQ ID NO: 1241464 - DNA, 15 bp, Homo sapiens
catagaggtcttttg

SEQ ID NO: 1241465 - DNA, 15 bp, Homo sapiens
gcatagaggtctttt

SEQ ID NO: 1241466 - DNA, 15 bp, Homo sapiens
ggcatagaggtcttt

SEQ ID NO: 1241467 - DNA, 15 bp, Homo sapiens
gggcatagaggtctt

SEQ ID NO: 1241468 - DNA, 15 bp, Homo sapiens
ggggcatagaggtct

SEQ ID NO: 1241469 - DNA, 15 bp, Homo sapiens
tggggcatagaggtc

SEQ ID NO: 1241470 - DNA, 15 bp, Homo sapiens
gtggggcatagaggt

SEQ ID NO: 1241471 - DNA, 15 bp, Homo sapiens
ggtggggcatagagg

SEQ ID NO: 1241472 - DNA, 15 bp, Homo sapiens
aggtggggcatagag

SEQ ID NO: 1241473 - DNA, 15 bp, Homo sapiens
gaggtggggcataga

SEQ ID NO: 1241474 - DNA, 15 bp, Homo sapiens
ggaggtggggcatag

SEQ ID NO: 1241475 - DNA, 15 bp, Homo sapiens
aggaggtggggcata

SEQ ID NO: 1241476 - DNA, 15 bp, Homo sapiens
aaggaggtggggcat

SEQ ID NO: 1241477 - DNA, 15 bp, Homo sapiens
gaaggaggtggggca

SEQ ID NO: 1241478 - DNA, 15 bp, Homo sapiens
ggaaggaggtggggc

SEQ ID NO: 1241479 - DNA, 15 bp, Homo sapiens
aggaaggaggtgggg

SEQ ID NO: 1241480 - DNA, 15 bp, Homo sapiens
gaggaaggaggtggg

SEQ ID NO: 1241481 - DNA, 15 bp, Homo sapiens
ggaggaaggaggtgg

SEQ ID NO: 1241482 - DNA, 15 bp, Homo sapiens
gggaggaaggaggtg

SEQ ID NO: 1241483 - DNA, 15 bp, Homo sapiens
agggaggaaggaggt

SEQ ID NO: 1241484 - DNA, 15 bp, Homo sapiens
gagggaggaaggagg

SEQ ID NO: 1241485 - DNA, 15 bp, Homo sapiens
agagggaggaaggag

SEQ ID NO: 1241486 - DNA, 15 bp, Homo sapiens
cagagggaggaagga

SEQ ID NO: 1241487 - DNA, 15 bp, Homo sapiens
gcagagggaggaagg

SEQ ID NO: 1241488 - DNA, 15 bp, Homo sapiens
ggcagagggaggaag

SEQ ID NO: 1241489 - DNA, 15 bp, Homo sapiens
gggcagagggaggaa

SEQ ID NO: 1241490 - DNA, 15 bp, Homo sapiens
agggcagagggagga

SEQ ID NO: 1241491 - DNA, 15 bp, Homo sapiens
cagggcagagggagg

SEQ ID NO: 1241492 - DNA, 15 bp, Homo sapiens
gcagggcagagggag

SEQ ID NO: 1241493 - DNA, 15 bp, Homo sapiens
agcagggcagaggga

SEQ ID NO: 1241494 - DNA, 15 bp, Homo sapiens
cagcagggcagaggg

SEQ ID NO: 1241495 - DNA, 15 bp, Homo sapiens
acagcagggcagagg

SEQ ID NO: 1241496 - DNA, 15 bp, Homo sapiens
cacagcagggcagag

SEQ ID NO: 1241497 - DNA, 15 bp, Homo sapiens
gcacagcagggcaga

SEQ ID NO: 1241498 - DNA, 15 bp, Homo sapiens
ggcacagcagggcag

SEQ ID NO: 1241499 - DNA, 15 bp, Homo sapiens
aggcacagcagggca

SEQ ID NO: 1241500 - DNA, 15 bp, Homo sapiens
caggcacagcagggc

SEQ ID NO: 1241501 - DNA, 15 bp, Homo sapiens
ccaggcacagcaggg

SEQ ID NO: 1241502 - DNA, 15 bp, Homo sapiens
cccaggcacagcagg

SEQ ID NO: 1241503 - DNA, 15 bp, Homo sapiens
ccccaggcacagcag

SEQ ID NO: 1241504 - DNA, 15 bp, Homo sapiens
gccccaggcacagca

SEQ ID NO: 1241505 - DNA, 15 bp, Homo sapiens
tgccccaggcacagc

SEQ ID NO: 1241506 - DNA, 15 bp, Homo sapiens
ctgccccaggcacag

SEQ ID NO: 1241507 - DNA, 15 bp, Homo sapiens
cctgccccaggcaca

SEQ ID NO: 1241508 - DNA, 15 bp, Homo sapiens
ccctgccccaggcac

SEQ ID NO: 1241509 - DNA, 15 bp, Homo sapiens
cccctgccccaggca

SEQ ID NO: 1241510 - DNA, 15 bp, Homo sapiens
ccccctgccccaggc

SEQ ID NO: 1241511 - DNA, 15 bp, Homo sapiens
tccccctgccccagg

SEQ ID NO: 1241512 - DNA, 15 bp, Homo sapiens
ctccccctgccccag

SEQ ID NO: 1241513 - DNA, 15 bp, Homo sapiens
tctccccctgcccca

SEQ ID NO: 1241514 - DNA, 15 bp, Homo sapiens
ttctccccctgcccc

SEQ ID NO: 1241515 - DNA, 15 bp, Homo sapiens
gttctccccctgccc

SEQ ID NO: 1241516 - DNA, 15 bp, Homo sapiens
tgttctccccctgcc

SEQ ID NO: 1241517 - DNA, 15 bp, Homo sapiens
ctgttctccccctgc

SEQ ID NO: 1241518 - DNA, 15 bp, Homo sapiens
gctgttctccccctg

SEQ ID NO: 1241519 - DNA, 15 bp, Homo sapiens
ggctgttctccccct

SEQ ID NO: 1241520 - DNA, 15 bp, Homo sapiens
gggctgttctccccc

SEQ ID NO: 1241521 - DNA, 15 bp, Homo sapiens
tgggctgttctcccc

SEQ ID NO: 1241522 - DNA, 15 bp, Homo sapiens
gtgggctgttctccc

SEQ ID NO: 1241523 - DNA, 15 bp, Homo sapiens
ggtgggctgttctcc

SEQ ID NO: 1241524 - DNA, 15 bp, Homo sapiens
aggtgggctgttctc

SEQ ID NO: 1241525 - DNA, 15 bp, Homo sapiens
gaggtgggctgttct

SEQ ID NO: 1241526 - DNA, 15 bp, Homo sapiens
cgaggtgggctgttc

SEQ ID NO: 1241527 - DNA, 15 bp, Homo sapiens
acgaggtgggctgtt

SEQ ID NO: 1241528 - DNA, 15 bp, Homo sapiens
cacgaggtgggctgt

SEQ ID NO: 1241529 - DNA, 15 bp, Homo sapiens
tcacgaggtgggctg

SEQ ID NO: 1241530 - DNA, 15 bp, Homo sapiens
gtcacgaggtgggct

SEQ ID NO: 1241531 - DNA, 15 bp, Homo sapiens
agtcacgaggtgggc

SEQ ID NO: 1241532 - DNA, 15 bp, Homo sapiens
cagtcacgaggtggg

SEQ ID NO: 1241533 - DNA, 15 bp, Homo sapiens
ccagtcacgaggtgg

SEQ ID NO: 1241534 - DNA, 15 bp, Homo sapiens
cccagtcacgaggtg

SEQ ID NO: 1241535 - DNA, 15 bp, Homo sapiens
ccccagtcacgaggt

SEQ ID NO: 1241536 - DNA, 15 bp, Homo sapiens
cccccagtcacgagg

SEQ ID NO: 1241537 - DNA, 15 bp, Homo sapiens
gcccccagtcacgag

SEQ ID NO: 1241538 - DNA, 15 bp, Homo sapiens
agcccccagtcacga

SEQ ID NO: 1241539 - DNA, 15 bp, Homo sapiens
cagcccccagtcacg

SEQ ID NO: 1241540 - DNA, 15 bp, Homo sapiens
ccagcccccagtcac

SEQ ID NO: 1241541 - DNA, 15 bp, Homo sapiens
gccagcccccagtca

SEQ ID NO: 1241542 - DNA, 15 bp, Homo sapiens
ggccagcccccagtc

SEQ ID NO: 1241543 - DNA, 15 bp, Homo sapiens
gggccagcccccagt

SEQ ID NO: 1241544 - DNA, 15 bp, Homo sapiens
tgggccagcccccag

SEQ ID NO: 1241545 - DNA, 15 bp, Homo sapiens
ctgggccagccccca

SEQ ID NO: 1241546 - DNA, 15 bp, Homo sapiens
gctgggccagccccc

SEQ ID NO: 1241547 - DNA, 15 bp, Homo sapiens
ggctgggccagcccc

SEQ ID NO: 1241548 - DNA, 15 bp, Homo sapiens
gggctgggccagccc

SEQ ID NO: 1241549 - DNA, 15 bp, Homo sapiens
cgggctgggccagcc

SEQ ID NO: 1241550 - DNA, 15 bp, Homo sapiens
gcgggctgggccagc

SEQ ID NO: 1241551 - DNA, 15 bp, Homo sapiens
ggcgggctgggccag

SEQ ID NO: 1241552 - DNA, 15 bp, Homo sapiens
gggcgggctgggcca

SEQ ID NO: 1241553 - DNA, 15 bp, Homo sapiens
agggcgggctgggcc

SEQ ID NO: 1241554 - DNA, 15 bp, Homo sapiens
tagggcgggctgggc

SEQ ID NO: 1241555 - DNA, 15 bp, Homo sapiens
atagggcgggctggg

SEQ ID NO: 1241556 - DNA, 15 bp, Homo sapiens
gatagggcgggctgg

SEQ ID NO: 1241557 - DNA, 15 bp, Homo sapiens
ggatagggcgggctg

SEQ ID NO: 1241558 - DNA, 15 bp, Homo sapiens
gggatagggcgggct

SEQ ID NO: 1241559 - DNA, 15 bp, Homo sapiens
agggatagggcgggc

SEQ ID NO: 1241560 - DNA, 15 bp, Homo sapiens
cagggatagggcggg

SEQ ID NO: 1241561 - DNA, 15 bp, Homo sapiens
ccagggatagggcgg

SEQ ID NO: 1241562 - DNA, 15 bp, Homo sapiens
cccagggatagggcg

SEQ ID NO: 1241563 - DNA, 15 bp, Homo sapiens
ccccagggatagggc

SEQ ID NO: 1241564 - DNA, 15 bp, Homo sapiens
cccccagggataggg

SEQ ID NO: 1241565 - DNA, 15 bp, Homo sapiens
tcccccagggatagg

SEQ ID NO: 1241566 - DNA, 15 bp, Homo sapiens
ctcccccagggatag

SEQ ID NO: 1241567 - DNA, 15 bp, Homo sapiens
cctcccccagggata

SEQ ID NO: 1241568 - DNA, 15 bp, Homo sapiens
ccctcccccagggat

SEQ ID NO: 1241569 - DNA, 15 bp, Homo sapiens
cccctcccccaggga

SEQ ID NO: 1241570 - DNA, 15 bp, Homo sapiens
ccccctcccccaggg

SEQ ID NO: 1241571 - DNA, 15 bp, Homo sapiens
gccccctcccccagg

SEQ ID NO: 1241572 - DNA, 15 bp, Homo sapiens
tcccgccccctcccc

SEQ ID NO: 1241573 - DNA, 15 bp, Homo sapiens
gtcccgccccctccc

SEQ ID NO: 1241574 - DNA, 15 bp, Homo sapiens
tgtcccgccccctcc

SEQ ID NO: 1241575 - DNA, 15 bp, Homo sapiens
ctgtcccgccccctc

SEQ ID NO: 1241576 - DNA, 15 bp, Homo sapiens
cctgtcccgccccct

SEQ ID NO: 1241577 - DNA, 15 bp, Homo sapiens
ccctgtcccgccccc

SEQ ID NO: 1241578 - DNA, 15 bp, Homo sapiens
cccctgtcccgcccc

SEQ ID NO: 1241579 - DNA, 15 bp, Homo sapiens
ccccctgtcccgccc

SEQ ID NO: 1241580 - DNA, 15 bp, Homo sapiens
tccccctgtcccgcc

SEQ ID NO: 1241581 - DNA, 15 bp, Homo sapiens
ctccccctgtcccgc

SEQ ID NO: 1241582 - DNA, 15 bp, Homo sapiens
gctccccctgtcccg

SEQ ID NO: 1241583 - DNA, 15 bp, Homo sapiens
ggctccccctgtccc

SEQ ID NO: 1241584 - DNA, 15 bp, Homo sapiens
gggctccccctgtcc

SEQ ID NO: 1241585 - DNA, 15 bp, Homo sapiens
agggctccccctgtc

SEQ ID NO: 1241586 - DNA, 15 bp, Homo sapiens
tagggctccccctgt

SEQ ID NO: 1241587 - DNA, 15 bp, Homo sapiens
atagggctccccctg

SEQ ID NO: 1241588 - DNA, 15 bp, Homo sapiens
tatagggctccccct

SEQ ID NO: 1241589 - DNA, 15 bp, Homo sapiens
ttatagggctccccc

SEQ ID NO: 1241590 - DNA, 15 bp, Homo sapiens
attatagggctcccc

SEQ ID NO: 1241591 - DNA, 15 bp, Homo sapiens
aattatagggctccc

SEQ ID NO: 1241592 - DNA, 15 bp, Homo sapiens
caattatagggctcc

SEQ ID NO: 1241593 - DNA, 15 bp, Homo sapiens
ccaattatagggctc

SEQ ID NO: 1241594 - DNA, 15 bp, Homo sapiens
tccaattatagggct

SEQ ID NO: 1241595 - DNA, 15 bp, Homo sapiens
gtccaattatagggc

SEQ ID NO: 1241596 - DNA, 15 bp, Homo sapiens
tgtccaattataggg

SEQ ID NO: 1241597 - DNA, 15 bp, Homo sapiens
ttgtccaattatagg

SEQ ID NO: 1241598 - DNA, 15 bp, Homo sapiens
cttgtccaattatag

SEQ ID NO: 1241599 - DNA, 15 bp, Homo sapiens
acttgtccaattata

SEQ ID NO: 1241600 - DNA, 15 bp, Homo sapiens
gacttgtccaattat

SEQ ID NO: 1241601 - DNA, 15 bp, Homo sapiens
agacttgtccaatta

SEQ ID NO: 1241602 - DNA, 15 bp, Homo sapiens
cagacttgtccaatt

SEQ ID NO: 1241603 - DNA, 15 bp, Homo sapiens
ccagacttgtccaat

SEQ ID NO: 1241604 - DNA, 15 bp, Homo sapiens
cccagacttgtccaa

SEQ ID NO: 1241605 - DNA, 15 bp, Homo sapiens
tcccagacttgtcca

SEQ ID NO: 1241606 - DNA, 15 bp, Homo sapiens
atcccagacttgtcc

SEQ ID NO: 1241607 - DNA, 15 bp, Homo sapiens
gatcccagacttgtc

SEQ ID NO: 1241608 - DNA, 15 bp, Homo sapiens
ggatcccagacttgt

SEQ ID NO: 1241609 - DNA, 15 bp, Homo sapiens
aggatcccagacttg

SEQ ID NO: 1241610 - DNA, 15 bp, Homo sapiens
aaggatcccagactt

SEQ ID NO: 1241611 - DNA, 15 bp, Homo sapiens
caaggatcccagact

SEQ ID NO: 1241612 - DNA, 15 bp, Homo sapiens
tcaaggatcccagac

SEQ ID NO: 1241613 - DNA, 15 bp, Homo sapiens
ctcaaggatcccaga

SEQ ID NO: 1241614 - DNA, 15 bp, Homo sapiens
actcaaggatcccag

SEQ ID NO: 1241615 - DNA, 15 bp, Homo sapiens
gactcaaggatccca

SEQ ID NO: 1241616 - DNA, 15 bp, Homo sapiens
ggactcaaggatccc

SEQ ID NO: 1241617 - DNA, 15 bp, Homo sapiens
aggactcaaggatcc

SEQ ID NO: 1241618 - DNA, 15 bp, Homo sapiens
taggactcaaggatc

SEQ ID NO: 1241619 - DNA, 15 bp, Homo sapiens
gtaggactcaaggat

SEQ ID NO: 1241620 - DNA, 15 bp, Homo sapiens
agtaggactcaagga

SEQ ID NO: 1241621 - DNA, 15 bp, Homo sapiens
gagtaggactcaagg

SEQ ID NO: 1241622 - DNA, 15 bp, Homo sapiens
tgagtaggactcaag

SEQ ID NO: 1241623 - DNA, 15 bp, Homo sapiens
ctgagtaggactcaa

SEQ ID NO: 1241624 - DNA, 15 bp, Homo sapiens
gctgagtaggactca

SEQ ID NO: 1241625 - DNA, 15 bp, Homo sapiens
ggctgagtaggactc

SEQ ID NO: 1241626 - DNA, 15 bp, Homo sapiens
gggctgagtaggact

SEQ ID NO: 1241627 - DNA, 15 bp, Homo sapiens
ggggctgagtaggac

SEQ ID NO: 1241628 - DNA, 15 bp, Homo sapiens
tggggctgagtagga

SEQ ID NO: 1241629 - DNA, 15 bp, Homo sapiens
ctggggctgagtagg

SEQ ID NO: 1241630 - DNA, 15 bp, Homo sapiens
gctggggctgagtag

SEQ ID NO: 1241631 - DNA, 15 bp, Homo sapiens
cgctggggctgagta

SEQ ID NO: 1241632 - DNA, 15 bp, Homo sapiens
ccgctggggctgagt

SEQ ID NO: 1241633 - DNA, 15 bp, Homo sapiens
tccgctggggctgag

SEQ ID NO: 1241634 - DNA, 15 bp, Homo sapiens
ctccgctggggctga

SEQ ID NO: 1241635 - DNA, 15 bp, Homo sapiens
cctccgctggggctg

SEQ ID NO: 1241636 - DNA, 15 bp, Homo sapiens
acctccgctggggct

SEQ ID NO: 1241637 - DNA, 15 bp, Homo sapiens
cacctccgctggggc

SEQ ID NO: 1241638 - DNA, 15 bp, Homo sapiens
tcacctccgctgggg

SEQ ID NO: 1241639 - DNA, 15 bp, Homo sapiens
ttcacctccgctggg

SEQ ID NO: 1241640 - DNA, 15 bp, Homo sapiens
cttcacctccgctgg

SEQ ID NO: 1241641 - DNA, 15 bp, Homo sapiens
ccttcacctccgctg

SEQ ID NO: 1241642 - DNA, 15 bp, Homo sapiens
tccttcacctccgct

SEQ ID NO: 1241643 - DNA, 15 bp, Homo sapiens
gtccttcacctccgc

SEQ ID NO: 1241644 - DNA, 15 bp, Homo sapiens
cgtccttcacctccg

SEQ ID NO: 1241645 - DNA, 15 bp, Homo sapiens
acgtccttcacctcc

SEQ ID NO: 1241646 - DNA, 15 bp, Homo sapiens
gacgtccttcacctc

SEQ ID NO: 1241647 - DNA, 15 bp, Homo sapiens
ggacgtccttcacct

SEQ ID NO: 1241648 - DNA, 15 bp, Homo sapiens
aggacgtccttcacc

SEQ ID NO: 1241649 - DNA, 15 bp, Homo sapiens
aaggacgtccttcac

SEQ ID NO: 1241650 - DNA, 15 bp, Homo sapiens
gaaggacgtccttca

SEQ ID NO: 1241651 - DNA, 15 bp, Homo sapiens
ggaaggacgtccttc

SEQ ID NO: 1241652 - DNA, 15 bp, Homo sapiens
gggaaggacgtcctt

SEQ ID NO: 1241653 - DNA, 15 bp, Homo sapiens
ggggaaggacgtcct

SEQ ID NO: 1241654 - DNA, 15 bp, Homo sapiens
tggggaaggacgtcc

SEQ ID NO: 1241655 - DNA, 15 bp, Homo sapiens
ctggggaaggacgtc

SEQ ID NO: 1241656 - DNA, 15 bp, Homo sapiens
cctggggaaggacgt

SEQ ID NO: 1241657 - DNA, 15 bp, Homo sapiens
tcctggggaaggacg

SEQ ID NO: 1241658 - DNA, 15 bp, Homo sapiens
ctcctggggaaggac

SEQ ID NO: 1241659 - DNA, 15 bp, Homo sapiens
gctcctggggaagga

SEQ ID NO: 1241660 - DNA, 15 bp, Homo sapiens
ggctcctggggaagg

SEQ ID NO: 1241661 - DNA, 15 bp, Homo sapiens
cggctcctggggaag

SEQ ID NO: 1241662 - DNA, 15 bp, Homo sapiens
ccggctcctggggaa

SEQ ID NO: 1241663 - DNA, 15 bp, Homo sapiens
accggctcctgggga

SEQ ID NO: 1241664 - DNA, 15 bp, Homo sapiens
caccggctcctgggg

SEQ ID NO: 1241665 - DNA, 15 bp, Homo sapiens
tcaccggctcctggg

SEQ ID NO: 1241666 - DNA, 15 bp, Homo sapiens
ctcaccggctcctgg

SEQ ID NO: 1241667 - DNA, 15 bp, Homo sapiens
tctcaccggctcctg

SEQ ID NO: 1241668 - DNA, 15 bp, Homo sapiens
ttctcaccggctcct

SEQ ID NO: 1241669 - DNA, 15 bp, Homo sapiens
cttctcaccggctcc

SEQ ID NO: 1241670 - DNA, 15 bp, Homo sapiens
gcttctcaccggctc

SEQ ID NO: 1241671 - DNA, 15 bp, Homo sapiens
cgcttctcaccggct

SEQ ID NO: 1241672 - DNA, 15 bp, Homo sapiens
gcgcttctcaccggc

SEQ ID NO: 1241673 - DNA, 15 bp, Homo sapiens
tgcgcttctcaccgg

SEQ ID NO: 1241674 - DNA, 15 bp, Homo sapiens
ctgcgcttctcaccg

SEQ ID NO: 1241675 - DNA, 15 bp, Homo sapiens
actgcgcttctcacc

SEQ ID NO: 1241676 - DNA, 15 bp, Homo sapiens
gactgcgcttctcac

SEQ ID NO: 1241677 - DNA, 15 bp, Homo sapiens
cgactgcgcttctca

SEQ ID NO: 1241678 - DNA, 15 bp, Homo sapiens
ccgactgcgcttctc

SEQ ID NO: 1241679 - DNA, 15 bp, Homo sapiens
ccaccttggcctggc

SEQ ID NO: 1241680 - DNA, 15 bp, Homo sapiens
tccaccttggcctgg

SEQ ID NO: 1241681 - DNA, 15 bp, Homo sapiens
ctccaccttggcctg

SEQ ID NO: 1241682 - DNA, 15 bp, Homo sapiens
gctccaccttggcct

SEQ ID NO: 1241683 - DNA, 15 bp, Homo sapiens
tgctccaccttggcc

SEQ ID NO: 1241684 - DNA, 15 bp, Homo sapiens
ttgctccaccttggc

SEQ ID NO: 1241685 - DNA, 15 bp, Homo sapiens
cttgctccaccttgg

SEQ ID NO: 1241686 - DNA, 15 bp, Homo sapiens
gcttgctccaccttg

SEQ ID NO: 1241687 - DNA, 15 bp, Homo sapiens
cgcttgctccacctt

SEQ ID NO: 1241688 - DNA, 15 bp, Homo sapiens
ccgcttgctccacct

SEQ ID NO: 1241689 - DNA, 15 bp, Homo sapiens
accgcttgctccacc

SEQ ID NO: 1241690 - DNA, 15 bp, Homo sapiens
caccgcttgctccac

SEQ ID NO: 1241691 - DNA, 15 bp, Homo sapiens
ccaccgcttgctcca

SEQ ID NO: 1241692 - DNA, 15 bp, Homo sapiens
tccaccgcttgctcc

SEQ ID NO: 1241693 - DNA, 15 bp, Homo sapiens
ctccaccgcttgctc

SEQ ID NO: 1241694 - DNA, 15 bp, Homo sapiens
tctccaccgcttgct

SEQ ID NO: 1241695 - DNA, 15 bp, Homo sapiens
gtctccaccgcttgc

SEQ ID NO: 1241696 - DNA, 15 bp, Homo sapiens
tgtctccaccgcttg

SEQ ID NO: 1241697 - DNA, 15 bp, Homo sapiens
ctgtctccaccgctt

SEQ ID NO: 1241698 - DNA, 15 bp, Homo sapiens
tctgtctccaccgct

SEQ ID NO: 1241699 - DNA, 15 bp, Homo sapiens
ctctgtctccaccgc

SEQ ID NO: 1241700 - DNA, 15 bp, Homo sapiens
gctctgtctccaccg

SEQ ID NO: 1241701 - DNA, 15 bp, Homo sapiens
ggctctgtctccacc

SEQ ID NO: 1241702 - DNA, 15 bp, Homo sapiens
cggctctgtctccac

SEQ ID NO: 1241703 - DNA, 15 bp, Homo sapiens
ccggctctgtctcca

SEQ ID NO: 1241704 - DNA, 15 bp, Homo sapiens
tccggctctgtctcc

SEQ ID NO: 1241705 - DNA, 15 bp, Homo sapiens
ctccggctctgtctc

SEQ ID NO: 1241706 - DNA, 15 bp, Homo sapiens
gctccggctctgtct

SEQ ID NO: 1241707 - DNA, 15 bp, Homo sapiens
ggctccggctctgtc

SEQ ID NO: 1241708 - DNA, 15 bp, Homo sapiens
gggctccggctctgt

SEQ ID NO: 1241709 - DNA, 15 bp, Homo sapiens
cgggctccggctctg

SEQ ID NO: 1241710 - DNA, 15 bp, Homo sapiens
tcgggctccggctct

SEQ ID NO: 1241711 - DNA, 15 bp, Homo sapiens
ctcgggctccggctc

SEQ ID NO: 1241712 - DNA, 15 bp, Homo sapiens
gctcgggctccggct

SEQ ID NO: 1241713 - DNA, 15 bp, Homo sapiens
agctcgggctccggc

SEQ ID NO: 1241714 - DNA, 15 bp, Homo sapiens
cagctcgggctccgg

SEQ ID NO: 1241715 - DNA, 15 bp, Homo sapiens
gcagctcgggctccg

SEQ ID NO: 1241716 - DNA, 15 bp, Homo sapiens
cgcagctcgggctcc

SEQ ID NO: 1241717 - DNA, 15 bp, Homo sapiens
gcgcagctcgggctc

SEQ ID NO: 1241718 - DNA, 15 bp, Homo sapiens
ggcgcagctcgggct

SEQ ID NO: 1241719 - DNA, 15 bp, Homo sapiens
tggcgcagctcgggc

SEQ ID NO: 1241720 - DNA, 15 bp, Homo sapiens
ctggcgcagctcggg

SEQ ID NO: 1241721 - DNA, 15 bp, Homo sapiens
gctggcgcagctcgg

SEQ ID NO: 1241722 - DNA, 15 bp, Homo sapiens
tgctggcgcagctcg

SEQ ID NO: 1241723 - DNA, 15 bp, Homo sapiens
ctgctggcgcagctc

SEQ ID NO: 1241724 - DNA, 15 bp, Homo sapiens
tctgctggcgcagct

SEQ ID NO: 1241725 - DNA, 15 bp, Homo sapiens
gtctgctggcgcagc

SEQ ID NO: 1241726 - DNA, 15 bp, Homo sapiens
ggtctgctggcgcag

SEQ ID NO: 1241727 - DNA, 15 bp, Homo sapiens
cggtctgctggcgca

SEQ ID NO: 1241728 - DNA, 15 bp, Homo sapiens
tcggtctgctggcgc

SEQ ID NO: 1241729 - DNA, 15 bp, Homo sapiens
ctcggtctgctggcg

SEQ ID NO: 1241730 - DNA, 15 bp, Homo sapiens
actcggtctgctggc

SEQ ID NO: 1241731 - DNA, 15 bp, Homo sapiens
cactcggtctgctgg

SEQ ID NO: 1241732 - DNA, 15 bp, Homo sapiens
ccactcggtctgctg

SEQ ID NO: 1241733 - DNA, 15 bp, Homo sapiens
gccactcggtctgct

SEQ ID NO: 1241734 - DNA, 15 bp, Homo sapiens
tgccactcggtctgc

SEQ ID NO: 1241735 - DNA, 15 bp, Homo sapiens
ctgccactcggtctg

SEQ ID NO: 1241736 - DNA, 15 bp, Homo sapiens
tctgccactcggtct

SEQ ID NO: 1241737 - DNA, 15 bp, Homo sapiens
ctctgccactcggtc

SEQ ID NO: 1241738 - DNA, 15 bp, Homo sapiens
gctctgccactcggt

SEQ ID NO: 1241739 - DNA, 15 bp, Homo sapiens
cgctctgccactcgg

SEQ ID NO: 1241740 - DNA, 15 bp, Homo sapiens
ccgctctgccactcg

SEQ ID NO: 1241741 - DNA, 15 bp, Homo sapiens
gccgctctgccactc

SEQ ID NO: 1241742 - DNA, 15 bp, Homo sapiens
ggccgctctgccact

SEQ ID NO: 1241743 - DNA, 15 bp, Homo sapiens
tggccgctctgccac

SEQ ID NO: 1241744 - DNA, 15 bp, Homo sapiens
ctggccgctctgcca

SEQ ID NO: 1241745 - DNA, 15 bp, Homo sapiens
gctggccgctctgcc

SEQ ID NO: 1241746 - DNA, 15 bp, Homo sapiens
cgctggccgctctgc

SEQ ID NO: 1241747 - DNA, 15 bp, Homo sapiens
gcgctggccgctctg

SEQ ID NO: 1241748 - DNA, 15 bp, Homo sapiens
agcgctggccgctct

SEQ ID NO: 1241749 - DNA, 15 bp, Homo sapiens
cagcgctggccgctc

SEQ ID NO: 1241750 - DNA, 15 bp, Homo sapiens
ccagcgctggccgct

SEQ ID NO: 1241751 - DNA, 15 bp, Homo sapiens
cccagcgctggccgc

SEQ ID NO: 1241752 - DNA, 15 bp, Homo sapiens
tcccagcgctggccg

SEQ ID NO: 1241753 - DNA, 15 bp, Homo sapiens
ttcccagcgctggcc

SEQ ID NO: 1241754 - DNA, 15 bp, Homo sapiens
gttcccagcgctggc

SEQ ID NO: 1241755 - DNA, 15 bp, Homo sapiens
agttcccagcgctgg

SEQ ID NO: 1241756 - DNA, 15 bp, Homo sapiens
cagttcccagcgctg

SEQ ID NO: 1241757 - DNA, 15 bp, Homo sapiens
ccagttcccagcgct

SEQ ID NO: 1241758 - DNA, 15 bp, Homo sapiens
gccagttcccagcgc

SEQ ID NO: 1241759 - DNA, 15 bp, Homo sapiens
tgccagttcccagcg

SEQ ID NO: 1241760 - DNA, 15 bp, Homo sapiens
gtgccagttcccagc

SEQ ID NO: 1241761 - DNA, 15 bp, Homo sapiens
ccagtgccagttccc

SEQ ID NO: 1241762 - DNA, 15 bp, Homo sapiens
cccagtgccagttcc

SEQ ID NO: 1241763 - DNA, 15 bp, Homo sapiens
acccagtgccagttc

SEQ ID NO: 1241764 - DNA, 15 bp, Homo sapiens
gacccagtgccagtt

SEQ ID NO: 1241765 - DNA, 15 bp, Homo sapiens
cgacccagtgccagt

SEQ ID NO: 1241766 - DNA, 15 bp, Homo sapiens
gcgacccagtgccag

SEQ ID NO: 1241767 - DNA, 15 bp, Homo sapiens
agcgacccagtgcca

SEQ ID NO: 1241768 - DNA, 15 bp, Homo sapiens
aagcgacccagtgcc

SEQ ID NO: 1241769 - DNA, 15 bp, Homo sapiens
aaagcgacccagtgc

SEQ ID NO: 1241770 - DNA, 15 bp, Homo sapiens
aaaagcgacccagtg

SEQ ID NO: 1241771 - DNA, 15 bp, Homo sapiens
caaaagcgacccagt

SEQ ID NO: 1241772 - DNA, 15 bp, Homo sapiens
ccaaaagcgacccag

SEQ ID NO: 1241773 - DNA, 15 bp, Homo sapiens
cccaaaagcgaccca

SEQ ID NO: 1241774 - DNA, 15 bp, Homo sapiens
tcccaaaagcgaccc

SEQ ID NO: 1241775 - DNA, 15 bp, Homo sapiens
atcccaaaagcgacc

SEQ ID NO: 1241776 - DNA, 15 bp, Homo sapiens
aatcccaaaagcgac

SEQ ID NO: 1241777 - DNA, 15 bp, Homo sapiens
taatcccaaaagcga

SEQ ID NO: 1241778 - DNA, 15 bp, Homo sapiens
gtaatcccaaaagcg

SEQ ID NO: 1241779 - DNA, 15 bp, Homo sapiens
ggtaatcccaaaagc

SEQ ID NO: 1241780 - DNA, 15 bp, Homo sapiens
aggtaatcccaaaag

SEQ ID NO: 1241781 - DNA, 15 bp, Homo sapiens
caggtaatcccaaaa

SEQ ID NO: 1241782 - DNA, 15 bp, Homo sapiens
gcaggtaatcccaaa

SEQ ID NO: 1241783 - DNA, 15 bp, Homo sapiens
cgcaggtaatcccaa

SEQ ID NO: 1241784 - DNA, 15 bp, Homo sapiens
gcgcaggtaatccca

SEQ ID NO: 1241785 - DNA, 15 bp, Homo sapiens
agcgcaggtaatccc

SEQ ID NO: 1241786 - DNA, 15 bp, Homo sapiens
cagcgcaggtaatcc

SEQ ID NO: 1241787 - DNA, 15 bp, Homo sapiens
ccagcgcaggtaatc

SEQ ID NO: 1241788 - DNA, 15 bp, Homo sapiens
cccagcgcaggtaat

SEQ ID NO: 1241789 - DNA, 15 bp, Homo sapiens
acccagcgcaggtaa

SEQ ID NO: 1241790 - DNA, 15 bp, Homo sapiens
cacccagcgcaggta

SEQ ID NO: 1241791 - DNA, 15 bp, Homo sapiens
gcacccagcgcaggt

SEQ ID NO: 1241792 - DNA, 15 bp, Homo sapiens
tgcacccagcgcagg

SEQ ID NO: 1241793 - DNA, 15 bp, Homo sapiens
ctgcacccagcgcag

SEQ ID NO: 1241794 - DNA, 15 bp, Homo sapiens
tctgcacccagcgca

SEQ ID NO: 1241795 - DNA, 15 bp, Homo sapiens
gtctgcacccagcgc

SEQ ID NO: 1241796 - DNA, 15 bp, Homo sapiens
tgtctgcacccagcg

SEQ ID NO: 1241797 - DNA, 15 bp, Homo sapiens
gtgtctgcacccagc

SEQ ID NO: 1241798 - DNA, 15 bp, Homo sapiens
agtgtctgcacccag

SEQ ID NO: 1241799 - DNA, 15 bp, Homo sapiens
cagtgtctgcaccca

SEQ ID NO: 1241800 - DNA, 15 bp, Homo sapiens
acagtgtctgcaccc

SEQ ID NO: 1241801 - DNA, 15 bp, Homo sapiens
gacagtgtctgcacc

SEQ ID NO: 1241802 - DNA, 15 bp, Homo sapiens
agacagtgtctgcac

SEQ ID NO: 1241803 - DNA, 15 bp, Homo sapiens
cagacagtgtctgca

SEQ ID NO: 1241804 - DNA, 15 bp, Homo sapiens
tcagacagtgtctgc

SEQ ID NO: 1241805 - DNA, 15 bp, Homo sapiens
ctcagacagtgtctg

SEQ ID NO: 1241806 - DNA, 15 bp, Homo sapiens
gctcagacagtgtct

SEQ ID NO: 1241807 - DNA, 15 bp, Homo sapiens
tgctcagacagtgtc

SEQ ID NO: 1241808 - DNA, 15 bp, Homo sapiens
ctgctcagacagtgt

SEQ ID NO: 1241809 - DNA, 15 bp, Homo sapiens
cctgctcagacagtg

SEQ ID NO: 1241810 - DNA, 15 bp, Homo sapiens
acctgctcagacagt

SEQ ID NO: 1241811 - DNA, 15 bp, Homo sapiens
cacctgctcagacag

SEQ ID NO: 1241812 - DNA, 15 bp, Homo sapiens
gcacctgctcagaca

SEQ ID NO: 1241813 - DNA, 15 bp, Homo sapiens
tgcacctgctcagac

SEQ ID NO: 1241814 - DNA, 15 bp, Homo sapiens
ctgcacctgctcaga

SEQ ID NO: 1241815 - DNA, 15 bp, Homo sapiens
cctgcacctgctcag

SEQ ID NO: 1241816 - DNA, 15 bp, Homo sapiens
tcctgcacctgctca

SEQ ID NO: 1241817 - DNA, 15 bp, Homo sapiens
ctcctgcacctgctc

SEQ ID NO: 1241818 - DNA, 15 bp, Homo sapiens
cctcctgcacctgct

SEQ ID NO: 1241819 - DNA, 15 bp, Homo sapiens
tcctcctgcacctgc

SEQ ID NO: 1241820 - DNA, 15 bp, Homo sapiens
ctcctcctgcacctg

SEQ ID NO: 1241821 - DNA, 15 bp, Homo sapiens
gctcctcctgcacct

SEQ ID NO: 1241822 - DNA, 15 bp, Homo sapiens
agctcctcctgcacc

SEQ ID NO: 1241823 - DNA, 15 bp, Homo sapiens
cagctcctcctgcac

SEQ ID NO: 1241824 - DNA, 15 bp, Homo sapiens
gcagctcctcctgca

SEQ ID NO: 1241825 - DNA, 15 bp, Homo sapiens
agcagctcctcctgc

SEQ ID NO: 1241826 - DNA, 15 bp, Homo sapiens
gagcagctcctcctg

SEQ ID NO: 1241827 - DNA, 15 bp, Homo sapiens
tgagcagctcctcct

SEQ ID NO: 1241828 - DNA, 15 bp, Homo sapiens
ctgagcagctcctcc

SEQ ID NO: 1241829 - DNA, 15 bp, Homo sapiens
gctgagcagctcctc

SEQ ID NO: 1241830 - DNA, 15 bp, Homo sapiens
agctgagcagctcct

SEQ ID NO: 1241831 - DNA, 15 bp, Homo sapiens
gagctgagcagctcc

SEQ ID NO: 1241832 - DNA, 15 bp, Homo sapiens
ggagctgagcagctc

SEQ ID NO: 1241833 - DNA, 15 bp, Homo sapiens
gggagctgagcagct

SEQ ID NO: 1241834 - DNA, 15 bp, Homo sapiens
tgggagctgagcagc

SEQ ID NO: 1241835 - DNA, 15 bp, Homo sapiens
ctgggagctgagcag

SEQ ID NO: 1241836 - DNA, 15 bp, Homo sapiens
cctgggagctgagca

SEQ ID NO: 1241837 - DNA, 15 bp, Homo sapiens
acctgggagctgagc

SEQ ID NO: 1241838 - DNA, 15 bp, Homo sapiens
gacctgggagctgag

SEQ ID NO: 1241839 - DNA, 15 bp, Homo sapiens
tgacctgggagctga

SEQ ID NO: 1241840 - DNA, 15 bp, Homo sapiens
gtgacctgggagctg

SEQ ID NO: 1241841 - DNA, 15 bp, Homo sapiens
ggtgacctgggagct

SEQ ID NO: 1241842 - DNA, 15 bp, Homo sapiens
gggtgacctgggagc

SEQ ID NO: 1241843 - DNA, 15 bp, Homo sapiens
tgggtgacctgggag

SEQ ID NO: 1241844 - DNA, 15 bp, Homo sapiens
ctgggtgacctggga

SEQ ID NO: 1241845 - DNA, 15 bp, Homo sapiens
cctgggtgacctggg

SEQ ID NO: 1241846 - DNA, 15 bp, Homo sapiens
tcctgggtgacctgg

SEQ ID NO: 1241847 - DNA, 15 bp, Homo sapiens
ttcctgggtgacctg

SEQ ID NO: 1241848 - DNA, 15 bp, Homo sapiens
gttcctgggtgacct

SEQ ID NO: 1241849 - DNA, 15 bp, Homo sapiens
agttcctgggtgacc

SEQ ID NO: 1241850 - DNA, 15 bp, Homo sapiens
cagttcctgggtgac

SEQ ID NO: 1241851 - DNA, 15 bp, Homo sapiens
tcagttcctgggtga

SEQ ID NO: 1241852 - DNA, 15 bp, Homo sapiens
ctcagttcctgggtg

SEQ ID NO: 1241853 - DNA, 15 bp, Homo sapiens
cctcagttcctgggt

SEQ ID NO: 1241854 - DNA, 15 bp, Homo sapiens
acctcagttcctggg

SEQ ID NO: 1241855 - DNA, 15 bp, Homo sapiens
cacctcagttcctgg

SEQ ID NO: 1241856 - DNA, 15 bp, Homo sapiens
tcacctcagttcctg

SEQ ID NO: 1241857 - DNA, 15 bp, Homo sapiens
ctcacctcagttcct

SEQ ID NO: 1241858 - DNA, 15 bp, Homo sapiens
actcacctcagttcc

SEQ ID NO: 1241859 - DNA, 15 bp, Homo sapiens
cactcacctcagttc

SEQ ID NO: 1241860 - DNA, 15 bp, Homo sapiens
acactcacctcagtt

SEQ ID NO: 1241861 - DNA, 15 bp, Homo sapiens
gacactcacctcagt

SEQ ID NO: 1241862 - DNA, 15 bp, Homo sapiens
ggacactcacctcag

SEQ ID NO: 1241863 - DNA, 15 bp, Homo sapiens
gggacactcacctca

SEQ ID NO: 1241864 - DNA, 15 bp, Homo sapiens
ggggacactcacctc

SEQ ID NO: 1241865 - DNA, 15 bp, Homo sapiens
tggggacactcacct

SEQ ID NO: 1241866 - DNA, 15 bp, Homo sapiens
atggggacactcacc

SEQ ID NO: 1241867 - DNA, 15 bp, Homo sapiens
gatggggacactcac

SEQ ID NO: 1241868 - DNA, 15 bp, Homo sapiens
ggatggggacactca

SEQ ID NO: 1241869 - DNA, 15 bp, Homo sapiens
aggatggggacactc

SEQ ID NO: 1241870 - DNA, 15 bp, Homo sapiens
caggatggggacact

SEQ ID NO: 1241871 - DNA, 15 bp, Homo sapiens
ccaggatggggacac

SEQ ID NO: 1241872 - DNA, 15 bp, Homo sapiens
gccaggatggggaca

SEQ ID NO: 1241873 - DNA, 15 bp, Homo sapiens
ggccaggatggggac

SEQ ID NO: 1241874 - DNA, 15 bp, Homo sapiens
gggccaggatgggga

SEQ ID NO: 1241875 - DNA, 15 bp, Homo sapiens
agggccaggatgggg

SEQ ID NO: 1241876 - DNA, 15 bp, Homo sapiens
aagggccaggatggg

SEQ ID NO: 1241877 - DNA, 15 bp, Homo sapiens
caagggccaggatgg

SEQ ID NO: 1241878 - DNA, 15 bp, Homo sapiens
tcaagggccaggatg

SEQ ID NO: 1241879 - DNA, 15 bp, Homo sapiens
gtcaagggccaggat

SEQ ID NO: 1241880 - DNA, 15 bp, Homo sapiens
ggtcaagggccagga

SEQ ID NO: 1241881 - DNA, 15 bp, Homo sapiens
gggtcaagggccagg

SEQ ID NO: 1241882 - DNA, 15 bp, Homo sapiens
agggtcaagggccag

SEQ ID NO: 1241883 - DNA, 15 bp, Homo sapiens
gagggtcaagggcca

SEQ ID NO: 1241884 - DNA, 15 bp, Homo sapiens
ggagggtcaagggcc

SEQ ID NO: 1241885 - DNA, 15 bp, Homo sapiens
aggagggtcaagggc

SEQ ID NO: 1241886 - DNA, 15 bp, Homo sapiens
caggagggtcaaggg

SEQ ID NO: 1241887 - DNA, 15 bp, Homo sapiens
ccaggagggtcaagg

SEQ ID NO: 1241888 - DNA, 15 bp, Homo sapiens
accaggagggtcaag

SEQ ID NO: 1241889 - DNA, 15 bp, Homo sapiens
caccaggagggtcaa

SEQ ID NO: 1241890 - DNA, 15 bp, Homo sapiens
ccaccaggagggtca

SEQ ID NO: 1241891 - DNA, 15 bp, Homo sapiens
cccaccaggagggtc

SEQ ID NO: 1241892 - DNA, 15 bp, Homo sapiens
gcccaccaggagggt

SEQ ID NO: 1241893 - DNA, 15 bp, Homo sapiens
cgcccaccaggaggg

SEQ ID NO: 1241894 - DNA, 15 bp, Homo sapiens
ccgcccaccaggagg

SEQ ID NO: 1241895 - DNA, 15 bp, Homo sapiens
gccgcccaccaggag

SEQ ID NO: 1241896 - DNA, 15 bp, Homo sapiens
agccgcccaccagga

SEQ ID NO: 1241897 - DNA, 15 bp, Homo sapiens
tagccgcccaccagg

SEQ ID NO: 1241898 - DNA, 15 bp, Homo sapiens
atagccgcccaccag

SEQ ID NO: 1241899 - DNA, 15 bp, Homo sapiens
tatagccgcccacca

SEQ ID NO: 1241900 - DNA, 15 bp, Homo sapiens
gtatagccgcccacc

SEQ ID NO: 1241901 - DNA, 15 bp, Homo sapiens
ggtatagccgcccac

SEQ ID NO: 1241902 - DNA, 15 bp, Homo sapiens
aggtatagccgccca

SEQ ID NO: 1241903 - DNA, 15 bp, Homo sapiens
gaggtatagccgccc

SEQ ID NO: 1241904 - DNA, 15 bp, Homo sapiens
ggaggtatagccgcc

SEQ ID NO: 1241905 - DNA, 15 bp, Homo sapiens
gggaggtatagccgc

SEQ ID NO: 1241906 - DNA, 15 bp, Homo sapiens
ggggaggtatagccg

SEQ ID NO: 1241907 - DNA, 15 bp, Homo sapiens
tggggaggtatagcc

SEQ ID NO: 1241908 - DNA, 15 bp, Homo sapiens
ctggggaggtatagc

SEQ ID NO: 1241909 - DNA, 15 bp, Homo sapiens
cctggggaggtatag

SEQ ID NO: 1241910 - DNA, 15 bp, Homo sapiens
acctggggaggtata

SEQ ID NO: 1241911 - DNA, 15 bp, Homo sapiens
gacctggggaggtat

SEQ ID NO: 1241912 - DNA, 15 bp, Homo sapiens
ggacctggggaggta

SEQ ID NO: 1241913 - DNA, 15 bp, Homo sapiens
tggacctggggaggt

SEQ ID NO: 1241914 - DNA, 15 bp, Homo sapiens
ctggacctggggagg

SEQ ID NO: 1241915 - DNA, 15 bp, Homo sapiens
cctggacctggggag

SEQ ID NO: 1241916 - DNA, 15 bp, Homo sapiens
acctggacctgggga

SEQ ID NO: 1241917 - DNA, 15 bp, Homo sapiens
aacctggacctgggg

SEQ ID NO: 1241918 - DNA, 15 bp, Homo sapiens
aaacctggacctggg

SEQ ID NO: 1241919 - DNA, 15 bp, Homo sapiens
gaaacctggacctgg

SEQ ID NO: 1241920 - DNA, 15 bp, Homo sapiens
tgaaacctggacctg

SEQ ID NO: 1241921 - DNA, 15 bp, Homo sapiens
atgaaacctggacct

SEQ ID NO: 1241922 - DNA, 15 bp, Homo sapiens
aatgaaacctggacc

SEQ ID NO: 1241923 - DNA, 15 bp, Homo sapiens
gaatgaaacctggac

SEQ ID NO: 1241924 - DNA, 15 bp, Homo sapiens
agaatgaaacctgga

SEQ ID NO: 1241925 - DNA, 15 bp, Homo sapiens
cagaatgaaacctgg

SEQ ID NO: 1241926 - DNA, 15 bp, Homo sapiens
gcagaatgaaacctg

SEQ ID NO: 1241927 - DNA, 15 bp, Homo sapiens
ggcagaatgaaacct

SEQ ID NO: 1241928 - DNA, 15 bp, Homo sapiens
gggcagaatgaaacc

SEQ ID NO: 1241929 - DNA, 15 bp, Homo sapiens
ggggcagaatgaaac

SEQ ID NO: 1241930 - DNA, 15 bp, Homo sapiens
aggggcagaatgaaa

SEQ ID NO: 1241931 - DNA, 15 bp, Homo sapiens
caggggcagaatgaa

SEQ ID NO: 1241932 - DNA, 15 bp, Homo sapiens
acaggggcagaatga

SEQ ID NO: 1241933 - DNA, 15 bp, Homo sapiens
gacaggggcagaatg

SEQ ID NO: 1241934 - DNA, 15 bp, Homo sapiens
cgacaggggcagaat

SEQ ID NO: 1241935 - DNA, 15 bp, Homo sapiens
gcgacaggggcagaa

SEQ ID NO: 1241936 - DNA, 15 bp, Homo sapiens
agcgacaggggcaga

SEQ ID NO: 1241937 - DNA, 15 bp, Homo sapiens
tagcgacaggggcag

SEQ ID NO: 1241938 - DNA, 15 bp, Homo sapiens
ttagcgacaggggca

SEQ ID NO: 1241939 - DNA, 15 bp, Homo sapiens
cttagcgacaggggc

SEQ ID NO: 1241940 - DNA, 15 bp, Homo sapiens
acttagcgacagggg

SEQ ID NO: 1241941 - DNA, 15 bp, Homo sapiens
gacttagcgacaggg

SEQ ID NO: 1241942 - DNA, 15 bp, Homo sapiens
agacttagcgacagg

SEQ ID NO: 1241943 - DNA, 15 bp, Homo sapiens
aagacttagcgacag

SEQ ID NO: 1241944 - DNA, 15 bp, Homo sapiens
caagacttagcgaca

SEQ ID NO: 1241945 - DNA, 15 bp, Homo sapiens
ccaagacttagcgac

SEQ ID NO: 1241946 - DNA, 15 bp, Homo sapiens
cccaagacttagcga

SEQ ID NO: 1241947 - DNA, 15 bp, Homo sapiens
ccccaagacttagcg

SEQ ID NO: 1241948 - DNA, 15 bp, Homo sapiens
cccccaagacttagc

SEQ ID NO: 1241949 - DNA, 15 bp, Homo sapiens
ccccccaagacttag

SEQ ID NO: 1241950 - DNA, 15 bp, Homo sapiens
gccccccaagactta

SEQ ID NO: 1241951 - DNA, 15 bp, Homo sapiens
ggccccccaagactt

SEQ ID NO: 1241952 - DNA, 15 bp, Homo sapiens
aggccccccaagact

SEQ ID NO: 1241953 - DNA, 15 bp, Homo sapiens
caggccccccaagac

SEQ ID NO: 1241954 - DNA, 15 bp, Homo sapiens
ccaggccccccaaga

SEQ ID NO: 1241955 - DNA, 15 bp, Homo sapiens
cccaggccccccaag

SEQ ID NO: 1241956 - DNA, 15 bp, Homo sapiens
acccaggccccccaa

SEQ ID NO: 1241957 - DNA, 15 bp, Homo sapiens
gacccaggcccccca

SEQ ID NO: 1241958 - DNA, 15 bp, Homo sapiens
agacccaggcccccc

SEQ ID NO: 1241959 - DNA, 15 bp, Homo sapiens
gagacccaggccccc

SEQ ID NO: 1241960 - DNA, 15 bp, Homo sapiens
agagacccaggcccc

SEQ ID NO: 1241961 - DNA, 15 bp, Homo sapiens
cagagacccaggccc

SEQ ID NO: 1241962 - DNA, 15 bp, Homo sapiens
gcagagacccaggcc

SEQ ID NO: 1241963 - DNA, 15 bp, Homo sapiens
agcagagacccaggc

SEQ ID NO: 1241964 - DNA, 15 bp, Homo sapiens
cagcagagacccagg

SEQ ID NO: 1241965 - DNA, 15 bp, Homo sapiens
ccagcagagacccag

SEQ ID NO: 1241966 - DNA, 15 bp, Homo sapiens
accagcagagaccca

SEQ ID NO: 1241967 - DNA, 15 bp, Homo sapiens
aaccagcagagaccc

SEQ ID NO: 1241968 - DNA, 15 bp, Homo sapiens
gaaccagcagagacc

SEQ ID NO: 1241969 - DNA, 15 bp, Homo sapiens
agaaccagcagagac

SEQ ID NO: 1241970 - DNA, 15 bp, Homo sapiens
tagaaccagcagaga

SEQ ID NO: 1241971 - DNA, 15 bp, Homo sapiens
ctagaaccagcagag

SEQ ID NO: 1241972 - DNA, 15 bp, Homo sapiens
gctagaaccagcaga

SEQ ID NO: 1241973 - DNA, 15 bp, Homo sapiens
agctagaaccagcag

SEQ ID NO: 1241974 - DNA, 15 bp, Homo sapiens
aagctagaaccagca

SEQ ID NO: 1241975 - DNA, 15 bp, Homo sapiens
gaagctagaaccagc

SEQ ID NO: 1241976 - DNA, 15 bp, Homo sapiens
ggaagctagaaccag

SEQ ID NO: 1241977 - DNA, 15 bp, Homo sapiens
aggaagctagaacca

SEQ ID NO: 1241978 - DNA, 15 bp, Homo sapiens
gaggaagctagaacc

SEQ ID NO: 1241979 - DNA, 15 bp, Homo sapiens
agaggaagctagaac

SEQ ID NO: 1241980 - DNA, 15 bp, Homo sapiens
aagaggaagctagaa

SEQ ID NO: 1241981 - DNA, 15 bp, Homo sapiens
gaagaggaagctaga

SEQ ID NO: 1241982 - DNA, 15 bp, Homo sapiens
ggaagaggaagctag

SEQ ID NO: 1241983 - DNA, 15 bp, Homo sapiens
gggaagaggaagcta

SEQ ID NO: 1241984 - DNA, 15 bp, Homo sapiens
tgggaagaggaagct

SEQ ID NO: 1241985 - DNA, 15 bp, Homo sapiens
atgggaagaggaagc

SEQ ID NO: 1241986 - DNA, 15 bp, Homo sapiens
aatgggaagaggaag

SEQ ID NO: 1241987 - DNA, 15 bp, Homo sapiens
aaatgggaagaggaa

SEQ ID NO: 1241988 - DNA, 15 bp, Homo sapiens
gaaatgggaagagga

SEQ ID NO: 1241989 - DNA, 15 bp, Homo sapiens
agaaatgggaagagg

SEQ ID NO: 1241990 - DNA, 15 bp, Homo sapiens
cagaaatgggaagag

SEQ ID NO: 1241991 - DNA, 15 bp, Homo sapiens
tcagaaatgggaaga

SEQ ID NO: 1241992 - DNA, 15 bp, Homo sapiens
gtcagaaatgggaag

SEQ ID NO: 1241993 - DNA, 15 bp, Homo sapiens
agtcagaaatgggaa

SEQ ID NO: 1241994 - DNA, 15 bp, Homo sapiens
gagtcagaaatggga

SEQ ID NO: 1241995 - DNA, 15 bp, Homo sapiens
ggagtcagaaatggg

SEQ ID NO: 1241996 - DNA, 15 bp, Homo sapiens
aggagtcagaaatgg

SEQ ID NO: 1241997 - DNA, 15 bp, Homo sapiens
caggagtcagaaatg

SEQ ID NO: 1241998 - DNA, 15 bp, Homo sapiens
ccaggagtcagaaat

SEQ ID NO: 1241999 - DNA, 15 bp, Homo sapiens
gccaggagtcagaaa

SEQ ID NO: 1242000 - DNA, 15 bp, Homo sapiens
agccaggagtcagaa

SEQ ID NO: 1242001 - DNA, 15 bp, Homo sapiens
aagccaggagtcaga

SEQ ID NO: 1242002 - DNA, 15 bp, Homo sapiens
aaagccaggagtcag

SEQ ID NO: 1242003 - DNA, 15 bp, Homo sapiens
taaagccaggagtca

SEQ ID NO: 1242004 - DNA, 15 bp, Homo sapiens
ctaaagccaggagtc

SEQ ID NO: 1242005 - DNA, 15 bp, Homo sapiens
gctaaagccaggagt

SEQ ID NO: 1242006 - DNA, 15 bp, Homo sapiens
agctaaagccaggag

SEQ ID NO: 1242007 - DNA, 15 bp, Homo sapiens
gagctaaagccagga

SEQ ID NO: 1242008 - DNA, 15 bp, Homo sapiens
agagctaaagccagg

SEQ ID NO: 1242009 - DNA, 15 bp, Homo sapiens
gagagctaaagccag

SEQ ID NO: 1242010 - DNA, 15 bp, Homo sapiens
agagagctaaagcca

SEQ ID NO: 1242011 - DNA, 15 bp, Homo sapiens
cagagagctaaagcc

SEQ ID NO: 1242012 - DNA, 15 bp, Homo sapiens
ccagagagctaaagc

SEQ ID NO: 1242013 - DNA, 15 bp, Homo sapiens
tccagagagctaaag

SEQ ID NO: 1242014 - DNA, 15 bp, Homo sapiens
ttccagagagctaaa

SEQ ID NO: 1242015 - DNA, 15 bp, Homo sapiens
attccagagagctaa

SEQ ID NO: 1242016 - DNA, 15 bp, Homo sapiens
aattccagagagcta

SEQ ID NO: 1242017 - DNA, 15 bp, Homo sapiens
gaattccagagagct

SEQ ID NO: 1242018 - DNA, 15 bp, Homo sapiens
agaattccagagagc

SEQ ID NO: 1242019 - DNA, 15 bp, Homo sapiens
gagaattccagagag

SEQ ID NO: 1242020 - DNA, 15 bp, Homo sapiens
agagaattccagaga

SEQ ID NO: 1242021 - DNA, 15 bp, Homo sapiens
gagagaattccagag

SEQ ID NO: 1242022 - DNA, 15 bp, Homo sapiens
agagagaattccaga

SEQ ID NO: 1242023 - DNA, 15 bp, Homo sapiens
gagagagaattccag

SEQ ID NO: 1242024 - DNA, 15 bp, Homo sapiens
agagagagaattcca

SEQ ID NO: 1242025 - DNA, 15 bp, Homo sapiens
gagagagagaattcc

SEQ ID NO: 1242026 - DNA, 15 bp, Homo sapiens
tgagagagagaattc

SEQ ID NO: 1242027 - DNA, 15 bp, Homo sapiens
ctgagagagagaatt

SEQ ID NO: 1242028 - DNA, 15 bp, Homo sapiens
gctgagagagagaat

SEQ ID NO: 1242029 - DNA, 15 bp, Homo sapiens
agctgagagagagaa

SEQ ID NO: 1242030 - DNA, 15 bp, Homo sapiens
aagctgagagagaga

SEQ ID NO: 1242031 - DNA, 15 bp, Homo sapiens
aaagctgagagagag

SEQ ID NO: 1242032 - DNA, 15 bp, Homo sapiens
caaagctgagagaga

SEQ ID NO: 1242033 - DNA, 15 bp, Homo sapiens
acaaagctgagagag

SEQ ID NO: 1242034 - DNA, 15 bp, Homo sapiens
gacaaagctgagaga

SEQ ID NO: 1242035 - DNA, 15 bp, Homo sapiens
agacaaagctgagag

SEQ ID NO: 1242036 - DNA, 15 bp, Homo sapiens
gagacaaagctgaga

SEQ ID NO: 1242037 - DNA, 15 bp, Homo sapiens
agagacaaagctgag

SEQ ID NO: 1242038 - DNA, 15 bp, Homo sapiens
gagagacaaagctga

SEQ ID NO: 1242039 - DNA, 15 bp, Homo sapiens
agagagacaaagctg

SEQ ID NO: 1242040 - DNA, 15 bp, Homo sapiens
gagagagacaaagct

SEQ ID NO: 1242041 - DNA, 15 bp, Homo sapiens
agagagagacaaagc

SEQ ID NO: 1242042 - DNA, 15 bp, Homo sapiens
gagagagagacaaag

SEQ ID NO: 1242043 - DNA, 15 bp, Homo sapiens
agagagagagacaaa

SEQ ID NO: 1242044 - DNA, 15 bp, Homo sapiens
aagagagagagacaa

SEQ ID NO: 1242045 - DNA, 15 bp, Homo sapiens
gaagagagagagaca

SEQ ID NO: 1242046 - DNA, 15 bp, Homo sapiens
ggaagagagagagac

SEQ ID NO: 1242047 - DNA, 15 bp, Homo sapiens
gggaagagagagaga

SEQ ID NO: 1242048 - DNA, 15 bp, Homo sapiens
aagggaagagagaga

SEQ ID NO: 1242049 - DNA, 15 bp, Homo sapiens
gaagggaagagagag

SEQ ID NO: 1242050 - DNA, 15 bp, Homo sapiens
agaagggaagagaga

SEQ ID NO: 1242051 - DNA, 15 bp, Homo sapiens
cagaagggaagagag

SEQ ID NO: 1242052 - DNA, 15 bp, Homo sapiens
tcagaagggaagaga

SEQ ID NO: 1242053 - DNA, 15 bp, Homo sapiens
gtcagaagggaagag

SEQ ID NO: 1242054 - DNA, 15 bp, Homo sapiens
agtcagaagggaaga

SEQ ID NO: 1242055 - DNA, 15 bp, Homo sapiens
gagtcagaagggaag

SEQ ID NO: 1242056 - DNA, 15 bp, Homo sapiens
tgagtcagaagggaa

SEQ ID NO: 1242057 - DNA, 15 bp, Homo sapiens
ctgagtcagaaggga

SEQ ID NO: 1242058 - DNA, 15 bp, Homo sapiens
actgagtcagaaggg

SEQ ID NO: 1242059 - DNA, 15 bp, Homo sapiens
gactgagtcagaagg

SEQ ID NO: 1242060 - DNA, 15 bp, Homo sapiens
agactgagtcagaag

SEQ ID NO: 1242061 - DNA, 15 bp, Homo sapiens
gagactgagtcagaa

SEQ ID NO: 1242062 - DNA, 15 bp, Homo sapiens
agagactgagtcaga

SEQ ID NO: 1242063 - DNA, 15 bp, Homo sapiens
gagagactgagtcag

SEQ ID NO: 1242064 - DNA, 15 bp, Homo sapiens
tgagagactgagtca

SEQ ID NO: 1242065 - DNA, 15 bp, Homo sapiens
gtgagagactgagtc

SEQ ID NO: 1242066 - DNA, 15 bp, Homo sapiens
tgtgagagactgagt

SEQ ID NO: 1242067 - DNA, 15 bp, Homo sapiens
gtgtgagagactgag

SEQ ID NO: 1242068 - DNA, 15 bp, Homo sapiens
agtgtgagagactga

SEQ ID NO: 1242069 - DNA, 15 bp, Homo sapiens
gagtgtgagagactg

SEQ ID NO: 1242070 - DNA, 15 bp, Homo sapiens
cgagtgtgagagact

SEQ ID NO: 1242071 - DNA, 15 bp, Homo sapiens
acgagtgtgagagac

SEQ ID NO: 1242072 - DNA, 15 bp, Homo sapiens
gacgagtgtgagaga

SEQ ID NO: 1242073 - DNA, 15 bp, Homo sapiens
ggacgagtgtgagag

SEQ ID NO: 1242074 - DNA, 15 bp, Homo sapiens
aggacgagtgtgaga

SEQ ID NO: 1242075 - DNA, 15 bp, Homo sapiens
caggacgagtgtgag

SEQ ID NO: 1242076 - DNA, 15 bp, Homo sapiens
ccaggacgagtgtga

SEQ ID NO: 1242077 - DNA, 15 bp, Homo sapiens
gccaggacgagtgtg

SEQ ID NO: 1242078 - DNA, 15 bp, Homo sapiens
agccaggacgagtgt

SEQ ID NO: 1242079 - DNA, 15 bp, Homo sapiens
gagccaggacgagtg

SEQ ID NO: 1242080 - DNA, 15 bp, Homo sapiens
agagccaggacgagt

SEQ ID NO: 1242081 - DNA, 15 bp, Homo sapiens
cagagccaggacgag

SEQ ID NO: 1242082 - DNA, 15 bp, Homo sapiens
acagagccaggacga

SEQ ID NO: 1242083 - DNA, 15 bp, Homo sapiens
gacagagccaggacg

SEQ ID NO: 1242084 - DNA, 15 bp, Homo sapiens
agacagagccaggac

SEQ ID NO: 1242085 - DNA, 15 bp, Homo sapiens
gagacagagccagga

SEQ ID NO: 1242086 - DNA, 15 bp, Homo sapiens
agagacagagccagg

SEQ ID NO: 1242087 - DNA, 15 bp, Homo sapiens
cagagacagagccag

SEQ ID NO: 1242088 - DNA, 15 bp, Homo sapiens
acagagacagagcca

SEQ ID NO: 1242089 - DNA, 15 bp, Homo sapiens
gacagagacagagcc

SEQ ID NO: 1242090 - DNA, 15 bp, Homo sapiens
ggacagagacagagc

SEQ ID NO: 1242091 - DNA, 15 bp, Homo sapiens
aggacagagacagag

SEQ ID NO: 1242092 - DNA, 15 bp, Homo sapiens
aaggacagagacaga

SEQ ID NO: 1242093 - DNA, 15 bp, Homo sapiens
gaaggacagagacag

SEQ ID NO: 1242094 - DNA, 15 bp, Homo sapiens
ggaaggacagagaca

SEQ ID NO: 1242095 - DNA, 15 bp, Homo sapiens
gggaaggacagagac

SEQ ID NO: 1242096 - DNA, 15 bp, Homo sapiens
agggaaggacagaga

SEQ ID NO: 1242097 - DNA, 15 bp, Homo sapiens
tagggaaggacagag

SEQ ID NO: 1242098 - DNA, 15 bp, Homo sapiens
ctagggaaggacaga

SEQ ID NO: 1242099 - DNA, 15 bp, Homo sapiens
gcaccaacctgaatc

SEQ ID NO: 1242100 - DNA, 15 bp, Homo sapiens
agcaccaacctgaat

SEQ ID NO: 1242101 - DNA, 15 bp, Homo sapiens
cagcaccaacctgaa

SEQ ID NO: 1242102 - DNA, 15 bp, Homo sapiens
tcagcaccaacctga

SEQ ID NO: 1242103 - DNA, 15 bp, Homo sapiens
ctcagcaccaacctg

SEQ ID NO: 1242104 - DNA, 15 bp, Homo sapiens
actcagcaccaacct

SEQ ID NO: 1242105 - DNA, 15 bp, Homo sapiens
cactcagcaccaacc

SEQ ID NO: 1242106 - DNA, 15 bp, Homo sapiens
gcactcagcaccaac

SEQ ID NO: 1242107 - DNA, 15 bp, Homo sapiens
ggcactcagcaccaa

SEQ ID NO: 1242108 - DNA, 15 bp, Homo sapiens
aggcactcagcacca

SEQ ID NO: 1242109 - DNA, 15 bp, Homo sapiens
caggcactcagcacc

SEQ ID NO: 1242110 - DNA, 15 bp, Homo sapiens
ccaggcactcagcac

SEQ ID NO: 1242111 - DNA, 15 bp, Homo sapiens
cccaggcactcagca

SEQ ID NO: 1242112 - DNA, 15 bp, Homo sapiens
tcccaggcactcagc

SEQ ID NO: 1242113 - DNA, 15 bp, Homo sapiens
ctcccaggcactcag

SEQ ID NO: 1242114 - DNA, 15 bp, Homo sapiens
cctcccaggcactca

SEQ ID NO: 1242115 - DNA, 15 bp, Homo sapiens
ccctcccaggcactc

SEQ ID NO: 1242116 - DNA, 15 bp, Homo sapiens
tccctcccaggcact

SEQ ID NO: 1242117 - DNA, 15 bp, Homo sapiens
gtccctcccaggcac

SEQ ID NO: 1242118 - DNA, 15 bp, Homo sapiens
tgtccctcccaggca

SEQ ID NO: 1242119 - DNA, 15 bp, Homo sapiens
gtgtccctcccaggc

SEQ ID NO: 1242120 - DNA, 15 bp, Homo sapiens
ggtgtccctcccagg

SEQ ID NO: 1242121 - DNA, 15 bp, Homo sapiens
gggtgtccctcccag

SEQ ID NO: 1242122 - DNA, 15 bp, Homo sapiens
cgggtgtccctccca

SEQ ID NO: 1242123 - DNA, 15 bp, Homo sapiens
gcgggtgtccctccc

SEQ ID NO: 1242124 - DNA, 15 bp, Homo sapiens
ggcgggtgtccctcc

SEQ ID NO: 1242125 - DNA, 15 bp, Homo sapiens
aggcgggtgtccctc

SEQ ID NO: 1242126 - DNA, 15 bp, Homo sapiens
taggcgggtgtccct

SEQ ID NO: 1242127 - DNA, 15 bp, Homo sapiens
gtaggcgggtgtccc

SEQ ID NO: 1242128 - DNA, 15 bp, Homo sapiens
tgtaggcgggtgtcc

SEQ ID NO: 1242129 - DNA, 15 bp, Homo sapiens
gtgtaggcgggtgtc

SEQ ID NO: 1242130 - DNA, 15 bp, Homo sapiens
agtgtaggcgggtgt

SEQ ID NO: 1242131 - DNA, 15 bp, Homo sapiens
gagtgtaggcgggtg

SEQ ID NO: 1242132 - DNA, 15 bp, Homo sapiens
agagtgtaggcgggt

SEQ ID NO: 1242133 - DNA, 15 bp, Homo sapiens
cagagtgtaggcggg

SEQ ID NO: 1242134 - DNA, 15 bp, Homo sapiens
gcagagtgtaggcgg

SEQ ID NO: 1242135 - DNA, 15 bp, Homo sapiens
tgcagagtgtaggcg

SEQ ID NO: 1242136 - DNA, 15 bp, Homo sapiens
ttgcagagtgtaggc

SEQ ID NO: 1242137 - DNA, 15 bp, Homo sapiens
cttgcagagtgtagg

SEQ ID NO: 1242138 - DNA, 15 bp, Homo sapiens
tcttgcagagtgtag

SEQ ID NO: 1242139 - DNA, 15 bp, Homo sapiens
ttcttgcagagtgta

SEQ ID NO: 1242140 - DNA, 15 bp, Homo sapiens
tttcttgcagagtgt

SEQ ID NO: 1242141 - DNA, 15 bp, Homo sapiens
gtttcttgcagagtg

SEQ ID NO: 1242142 - DNA, 15 bp, Homo sapiens
agtttcttgcagagt

SEQ ID NO: 1242143 - DNA, 15 bp, Homo sapiens
gagtttcttgcagag

SEQ ID NO: 1242144 - DNA, 15 bp, Homo sapiens
tgagtttcttgcaga

SEQ ID NO: 1242145 - DNA, 15 bp, Homo sapiens
ttgagtttcttgcag

SEQ ID NO: 1242146 - DNA, 15 bp, Homo sapiens
tttgagtttcttgca

SEQ ID NO: 1242147 - DNA, 15 bp, Homo sapiens
ttttgagtttcttgc

SEQ ID NO: 1242148 - DNA, 15 bp, Homo sapiens
tttttgagtttcttg

SEQ ID NO: 1242149 - DNA, 15 bp, Homo sapiens
ctttttgagtttctt

SEQ ID NO: 1242150 - DNA, 15 bp, Homo sapiens
cctttttgagtttct

SEQ ID NO: 1242151 - DNA, 15 bp, Homo sapiens
ccctttttgagtttc

SEQ ID NO: 1242152 - DNA, 15 bp, Homo sapiens
tccctttttgagttt

SEQ ID NO: 1242153 - DNA, 15 bp, Homo sapiens
ctccctttttgagtt

SEQ ID NO: 1242154 - DNA, 15 bp, Homo sapiens
tctccctttttgagt

SEQ ID NO: 1242155 - DNA, 15 bp, Homo sapiens
atctccctttttgag

SEQ ID NO: 1242156 - DNA, 15 bp, Homo sapiens
catctccctttttga

SEQ ID NO: 1242157 - DNA, 15 bp, Homo sapiens
tcatctccctttttg

SEQ ID NO: 1242158 - DNA, 15 bp, Homo sapiens
ctcatctcccttttt

SEQ ID NO: 1242159 - DNA, 15 bp, Homo sapiens
cctcatctccctttt

SEQ ID NO: 1242160 - DNA, 15 bp, Homo sapiens
ccctcatctcccttt

SEQ ID NO: 1242161 - DNA, 15 bp, Homo sapiens
cccctcatctccctt

SEQ ID NO: 1242162 - DNA, 15 bp, Homo sapiens
tcccctcatctccct

SEQ ID NO: 1242163 - DNA, 15 bp, Homo sapiens
atcccctcatctccc

SEQ ID NO: 1242164 - DNA, 15 bp, Homo sapiens
gatcccctcatctcc

SEQ ID NO: 1242165 - DNA, 15 bp, Homo sapiens
cgatcccctcatctc

SEQ ID NO: 1242166 - DNA, 15 bp, Homo sapiens
acgatcccctcatct

SEQ ID NO: 1242167 - DNA, 15 bp, Homo sapiens
cacgatcccctcatc

SEQ ID NO: 1242168 - DNA, 15 bp, Homo sapiens
ccacgatcccctcat

SEQ ID NO: 1242169 - DNA, 15 bp, Homo sapiens
cccacgatcccctca

SEQ ID NO: 1242170 - DNA, 15 bp, Homo sapiens
tcccacgatcccctc

SEQ ID NO: 1242171 - DNA, 15 bp, Homo sapiens
ctcccacgatcccct

SEQ ID NO: 1242172 - DNA, 15 bp, Homo sapiens
cctcccacgatcccc

SEQ ID NO: 1242173 - DNA, 15 bp, Homo sapiens
ccctcccacgatccc

SEQ ID NO: 1242174 - DNA, 15 bp, Homo sapiens
tccctcccacgatcc

SEQ ID NO: 1242175 - DNA, 15 bp, Homo sapiens
ctccctcccacgatc

SEQ ID NO: 1242176 - DNA, 15 bp, Homo sapiens
cctccctcccacgat

SEQ ID NO: 1242177 - DNA, 15 bp, Homo sapiens
acctccctcccacga

SEQ ID NO: 1242178 - DNA, 15 bp, Homo sapiens
tacctccctcccacg

SEQ ID NO: 1242179 - DNA, 15 bp, Homo sapiens
ctacctccctcccac

SEQ ID NO: 1242180 - DNA, 15 bp, Homo sapiens
cctacctccctccca

SEQ ID NO: 1242181 - DNA, 15 bp, Homo sapiens
ccctacctccctccc

SEQ ID NO: 1242182 - DNA, 15 bp, Homo sapiens
tccctacctccctcc

SEQ ID NO: 1242183 - DNA, 15 bp, Homo sapiens
ctccctacctccctc

SEQ ID NO: 1242184 - DNA, 15 bp, Homo sapiens
cctccctacctccct

SEQ ID NO: 1242185 - DNA, 15 bp, Homo sapiens
ccctccctacctccc

SEQ ID NO: 1242186 - DNA, 15 bp, Homo sapiens
tccctccctacctcc

SEQ ID NO: 1242187 - DNA, 15 bp, Homo sapiens
ctccctccctacctc

SEQ ID NO: 1242188 - DNA, 15 bp, Homo sapiens
cctccctccctacct

SEQ ID NO: 1242189 - DNA, 15 bp, Homo sapiens
tcctccctccctacc

SEQ ID NO: 1242190 - DNA, 15 bp, Homo sapiens
ctcctccctccctac

SEQ ID NO: 1242191 - DNA, 15 bp, Homo sapiens
cctcctccctcccta

SEQ ID NO: 1242192 - DNA, 15 bp, Homo sapiens
accctcctccctccc

SEQ ID NO: 1242193 - DNA, 15 bp, Homo sapiens
caccctcctccctcc

SEQ ID NO: 1242194 - DNA, 15 bp, Homo sapiens
gcaccctcctccctc

SEQ ID NO: 1242195 - DNA, 15 bp, Homo sapiens
ggcaccctcctccct

SEQ ID NO: 1242196 - DNA, 15 bp, Homo sapiens
tggcaccctcctccc

SEQ ID NO: 1242197 - DNA, 15 bp, Homo sapiens
gtggcaccctcctcc

SEQ ID NO: 1242198 - DNA, 15 bp, Homo sapiens
agtggcaccctcctc

SEQ ID NO: 1242199 - DNA, 15 bp, Homo sapiens
cagtggcaccctcct

SEQ ID NO: 1242200 - DNA, 15 bp, Homo sapiens
tcagtggcaccctcc

SEQ ID NO: 1242201 - DNA, 15 bp, Homo sapiens
atcagtggcaccctc

SEQ ID NO: 1242202 - DNA, 15 bp, Homo sapiens
gatcagtggcaccct

SEQ ID NO: 1242203 - DNA, 15 bp, Homo sapiens
ggatcagtggcaccc

SEQ ID NO: 1242204 - DNA, 15 bp, Homo sapiens
gggatcagtggcacc

SEQ ID NO: 1242205 - DNA, 15 bp, Homo sapiens
ggggatcagtggcac

SEQ ID NO: 1242206 - DNA, 15 bp, Homo sapiens
aggggatcagtggca

SEQ ID NO: 1242207 - DNA, 15 bp, Homo sapiens
caggggatcagtggc

SEQ ID NO: 1242208 - DNA, 15 bp, Homo sapiens
tcaggggatcagtgg

SEQ ID NO: 1242209 - DNA, 15 bp, Homo sapiens
ttcaggggatcagtg

SEQ ID NO: 1242210 - DNA, 15 bp, Homo sapiens
gttcaggggatcagt

SEQ ID NO: 1242211 - DNA, 15 bp, Homo sapiens
ggttcaggggatcag

SEQ ID NO: 1242212 - DNA, 15 bp, Homo sapiens
gggttcaggggatca

SEQ ID NO: 1242213 - DNA, 15 bp, Homo sapiens
ggggttcaggggatc

SEQ ID NO: 1242214 - DNA, 15 bp, Homo sapiens
aggggttcaggggat

SEQ ID NO: 1242215 - DNA, 15 bp, Homo sapiens
caggggttcagggga

SEQ ID NO: 1242216 - DNA, 15 bp, Homo sapiens
gcaggggttcagggg

SEQ ID NO: 1242217 - DNA, 15 bp, Homo sapiens
ggcaggggttcaggg

SEQ ID NO: 1242218 - DNA, 15 bp, Homo sapiens
aggcaggggttcagg

SEQ ID NO: 1242219 - DNA, 15 bp, Homo sapiens
gaggcaggggttcag

SEQ ID NO: 1242220 - DNA, 15 bp, Homo sapiens
agaggcaggggttca

SEQ ID NO: 1242221 - DNA, 15 bp, Homo sapiens
cagaggcaggggttc

SEQ ID NO: 1242222 - DNA, 15 bp, Homo sapiens
gcagaggcaggggtt

SEQ ID NO: 1242223 - DNA, 15 bp, Homo sapiens
ggcagaggcaggggt

SEQ ID NO: 1242224 - DNA, 15 bp, Homo sapiens
aggcagaggcagggg

SEQ ID NO: 1242225 - DNA, 15 bp, Homo sapiens
gaggcagaggcaggg

SEQ ID NO: 1242226 - DNA, 15 bp, Homo sapiens
tggaggcagaggcag

SEQ ID NO: 1242227 - DNA, 15 bp, Homo sapiens
ctggaggcagaggca

SEQ ID NO: 1242228 - DNA, 15 bp, Homo sapiens
tctggaggcagaggc

SEQ ID NO: 1242229 - DNA, 15 bp, Homo sapiens
ctctggaggcagagg

SEQ ID NO: 1242230 - DNA, 15 bp, Homo sapiens
actctggaggcagag

SEQ ID NO: 1242231 - DNA, 15 bp, Homo sapiens
cactctggaggcaga

SEQ ID NO: 1242232 - DNA, 15 bp, Homo sapiens
gcactctggaggcag

SEQ ID NO: 1242233 - DNA, 15 bp, Homo sapiens
ggcactctggaggca

SEQ ID NO: 1242234 - DNA, 15 bp, Homo sapiens
gggcactctggaggc

SEQ ID NO: 1242235 - DNA, 15 bp, Homo sapiens
ggggcactctggagg

SEQ ID NO: 1242236 - DNA, 15 bp, Homo sapiens
aggggcactctggag

SEQ ID NO: 1242237 - DNA, 15 bp, Homo sapiens
gaggggcactctgga

SEQ ID NO: 1242238 - DNA, 15 bp, Homo sapiens
ggaggggcactctgg

SEQ ID NO: 1242239 - DNA, 15 bp, Homo sapiens
cggaggggcactctg

SEQ ID NO: 1242240 - DNA, 15 bp, Homo sapiens
ccggaggggcactct

SEQ ID NO: 1242241 - DNA, 15 bp, Homo sapiens
gccggaggggcactc

SEQ ID NO: 1242242 - DNA, 15 bp, Homo sapiens
ggccggaggggcact

SEQ ID NO: 1242243 - DNA, 15 bp, Homo sapiens
aggccggaggggcac

SEQ ID NO: 1242244 - DNA, 15 bp, Homo sapiens
gaggccggaggggca

SEQ ID NO: 1242245 - DNA, 15 bp, Homo sapiens
cgaggccggaggggc

SEQ ID NO: 1242246 - DNA, 15 bp, Homo sapiens
gcgaggccggagggg

SEQ ID NO: 1242247 - DNA, 15 bp, Homo sapiens
ggcgaggccggaggg

SEQ ID NO: 1242248 - DNA, 15 bp, Homo sapiens
tggcgaggccggagg

SEQ ID NO: 1242249 - DNA, 15 bp, Homo sapiens
atggcgaggccggag

SEQ ID NO: 1242250 - DNA, 15 bp, Homo sapiens
catggcgaggccgga

SEQ ID NO: 1242251 - DNA, 15 bp, Homo sapiens
tcatggcgaggccgg

SEQ ID NO: 1242252 - DNA, 15 bp, Homo sapiens
ctcatggcgaggccg

SEQ ID NO: 1242253 - DNA, 15 bp, Homo sapiens
cctcatggcgaggcc

SEQ ID NO: 1242254 - DNA, 15 bp, Homo sapiens
gcctcatggcgaggc

SEQ ID NO: 1242255 - DNA, 15 bp, Homo sapiens
agcctcatggcgagg

SEQ ID NO: 1242256 - DNA, 15 bp, Homo sapiens
gagcctcatggcgag

SEQ ID NO: 1242257 - DNA, 15 bp, Homo sapiens
agagcctcatggcga

SEQ ID NO: 1242258 - DNA, 15 bp, Homo sapiens
aagagcctcatggcg

SEQ ID NO: 1242259 - DNA, 15 bp, Homo sapiens
gaagagcctcatggc

SEQ ID NO: 1242260 - DNA, 15 bp, Homo sapiens
ggaagagcctcatgg

SEQ ID NO: 1242261 - DNA, 15 bp, Homo sapiens
aggaagagcctcatg

SEQ ID NO: 1242262 - DNA, 15 bp, Homo sapiens
caggaagagcctcat

SEQ ID NO: 1242263 - DNA, 15 bp, Homo sapiens
acaggaagagcctca

SEQ ID NO: 1242264 - DNA, 15 bp, Homo sapiens
gacaggaagagcctc

SEQ ID NO: 1242265 - DNA, 15 bp, Homo sapiens
cgacaggaagagcct

SEQ ID NO: 1242266 - DNA, 15 bp, Homo sapiens
gcgacaggaagagcc

SEQ ID NO: 1242267 - DNA, 15 bp, Homo sapiens
agcgacaggaagagc

SEQ ID NO: 1242268 - DNA, 15 bp, Homo sapiens
gagcgacaggaagag

SEQ ID NO: 1242269 - DNA, 15 bp, Homo sapiens
ggagcgacaggaaga

SEQ ID NO: 1242270 - DNA, 15 bp, Homo sapiens
gggagcgacaggaag

SEQ ID NO: 1242271 - DNA, 15 bp, Homo sapiens
cgggagcgacaggaa

SEQ ID NO: 1242272 - DNA, 15 bp, Homo sapiens
ccgggagcgacagga

SEQ ID NO: 1242273 - DNA, 15 bp, Homo sapiens
accgggagcgacagg

SEQ ID NO: 1242274 - DNA, 15 bp, Homo sapiens
gaccgggagcgacag

SEQ ID NO: 1242275 - DNA, 15 bp, Homo sapiens
ggaccgggagcgaca

SEQ ID NO: 1242276 - DNA, 15 bp, Homo sapiens
aggaccgggagcgac

SEQ ID NO: 1242277 - DNA, 15 bp, Homo sapiens
caggaccgggagcga

SEQ ID NO: 1242278 - DNA, 15 bp, Homo sapiens
ccaggaccgggagcg

SEQ ID NO: 1242279 - DNA, 15 bp, Homo sapiens
accaggaccgggagc

SEQ ID NO: 1242280 - DNA, 15 bp, Homo sapiens
caccaggaccgggag

SEQ ID NO: 1242281 - DNA, 15 bp, Homo sapiens
ccaccaggaccggga

SEQ ID NO: 1242282 - DNA, 15 bp, Homo sapiens
accaccaggaccggg

SEQ ID NO: 1242283 - DNA, 15 bp, Homo sapiens
caccaccaggaccgg

SEQ ID NO: 1242284 - DNA, 15 bp, Homo sapiens
ccaccaccaggaccg

SEQ ID NO: 1242285 - DNA, 15 bp, Homo sapiens
accaccaccaggacc

SEQ ID NO: 1242286 - DNA, 15 bp, Homo sapiens
aaccaccaccaggac

SEQ ID NO: 1242287 - DNA, 15 bp, Homo sapiens
gaaccaccaccagga

SEQ ID NO: 1242288 - DNA, 15 bp, Homo sapiens
agaaccaccaccagg

SEQ ID NO: 1242289 - DNA, 15 bp, Homo sapiens
cagaaccaccaccag

SEQ ID NO: 1242290 - DNA, 15 bp, Homo sapiens
acagaaccaccacca

SEQ ID NO: 1242291 - DNA, 15 bp, Homo sapiens
gacagaaccaccacc

SEQ ID NO: 1242292 - DNA, 15 bp, Homo sapiens
cgacagaaccaccac

SEQ ID NO: 1242293 - DNA, 15 bp, Homo sapiens
tcgacagaaccacca

SEQ ID NO: 1242294 - DNA, 15 bp, Homo sapiens
atcgacagaaccacc

SEQ ID NO: 1242295 - DNA, 15 bp, Homo sapiens
gatcgacagaaccac

SEQ ID NO: 1242296 - DNA, 15 bp, Homo sapiens
cgatcgacagaacca

SEQ ID NO: 1242297 - DNA, 15 bp, Homo sapiens
acgatcgacagaacc

SEQ ID NO: 1242298 - DNA, 15 bp, Homo sapiens
gacgatcgacagaac

SEQ ID NO: 1242299 - DNA, 15 bp, Homo sapiens
agacgatcgacagaa

SEQ ID NO: 1242300 - DNA, 15 bp, Homo sapiens
aagacgatcgacaga

SEQ ID NO: 1242301 - DNA, 15 bp, Homo sapiens
caagacgatcgacag

SEQ ID NO: 1242302 - DNA, 15 bp, Homo sapiens
ccaagacgatcgaca

SEQ ID NO: 1242303 - DNA, 15 bp, Homo sapiens
tccaagacgatcgac

SEQ ID NO: 1242304 - DNA, 15 bp, Homo sapiens
ttccaagacgatcga

SEQ ID NO: 1242305 - DNA, 15 bp, Homo sapiens
cttccaagacgatcg

SEQ ID NO: 1242306 - DNA, 15 bp, Homo sapiens
ccttccaagacgatc

SEQ ID NO: 1242307 - DNA, 15 bp, Homo sapiens
accttccaagacgat

SEQ ID NO: 1242308 - DNA, 15 bp, Homo sapiens
taccttccaagacga

SEQ ID NO: 1242309 - DNA, 15 bp, Homo sapiens
ttaccttccaagacg

SEQ ID NO: 1242310 - DNA, 15 bp, Homo sapiens
tttaccttccaagac

SEQ ID NO: 1242311 - DNA, 15 bp, Homo sapiens
ttttaccttccaaga

SEQ ID NO: 1242312 - DNA, 15 bp, Homo sapiens
cttttaccttccaag

SEQ ID NO: 1242313 - DNA, 15 bp, Homo sapiens
acttttaccttccaa

SEQ ID NO: 1242314 - DNA, 15 bp, Homo sapiens
cacttttaccttcca

SEQ ID NO: 1242315 - DNA, 15 bp, Homo sapiens
ccacttttaccttcc

SEQ ID NO: 1242316 - DNA, 15 bp, Homo sapiens
cccacttttaccttc

SEQ ID NO: 1242317 - DNA, 15 bp, Homo sapiens
tcccacttttacctt

SEQ ID NO: 1242318 - DNA, 15 bp, Homo sapiens
atcccacttttacct

SEQ ID NO: 1242319 - DNA, 15 bp, Homo sapiens
catcccacttttacc

SEQ ID NO: 1242320 - DNA, 15 bp, Homo sapiens
ccatcccacttttac

SEQ ID NO: 1242321 - DNA, 15 bp, Homo sapiens
cccatcccactttta

SEQ ID NO: 1242322 - DNA, 15 bp, Homo sapiens
tcccatcccactttt

SEQ ID NO: 1242323 - DNA, 15 bp, Homo sapiens
ctcccatcccacttt

SEQ ID NO: 1242324 - DNA, 15 bp, Homo sapiens
tctcccatcccactt

SEQ ID NO: 1242325 - DNA, 15 bp, Homo sapiens
ttctcccatcccact

SEQ ID NO: 1242326 - DNA, 15 bp, Homo sapiens
attctcccatcccac

SEQ ID NO: 1242327 - DNA, 15 bp, Homo sapiens
aattctcccatccca

SEQ ID NO: 1242328 - DNA, 15 bp, Homo sapiens
caattctcccatccc

SEQ ID NO: 1242329 - DNA, 15 bp, Homo sapiens
gcaattctcccatcc

SEQ ID NO: 1242330 - DNA, 15 bp, Homo sapiens
cgcaattctcccatc

SEQ ID NO: 1242331 - DNA, 15 bp, Homo sapiens
ccgcaattctcccat

SEQ ID NO: 1242332 - DNA, 15 bp, Homo sapiens
tccgcaattctccca

SEQ ID NO: 1242333 - DNA, 15 bp, Homo sapiens
ctccgcaattctccc

SEQ ID NO: 1242334 - DNA, 15 bp, Homo sapiens
actccgcaattctcc

SEQ ID NO: 1242335 - DNA, 15 bp, Homo sapiens
aactccgcaattctc

SEQ ID NO: 1242336 - DNA, 15 bp, Homo sapiens
caactccgcaattct

SEQ ID NO: 1242337 - DNA, 15 bp, Homo sapiens
ccaactccgcaattc

SEQ ID NO: 1242338 - DNA, 15 bp, Homo sapiens
tccaactccgcaatt

SEQ ID NO: 1242339 - DNA, 15 bp, Homo sapiens
ctccaactccgcaat

SEQ ID NO: 1242340 - DNA, 15 bp, Homo sapiens
tctccaactccgcaa

SEQ ID NO: 1242341 - DNA, 15 bp, Homo sapiens
atctccaactccgca

SEQ ID NO: 1242342 - DNA, 15 bp, Homo sapiens
aatctccaactccgc

SEQ ID NO: 1242343 - DNA, 15 bp, Homo sapiens
aaatctccaactccg

SEQ ID NO: 1242344 - DNA, 15 bp, Homo sapiens
caaatctccaactcc

SEQ ID NO: 1242345 - DNA, 15 bp, Homo sapiens
ccaaatctccaactc

SEQ ID NO: 1242346 - DNA, 15 bp, Homo sapiens
tccaaatctccaact

SEQ ID NO: 1242347 - DNA, 15 bp, Homo sapiens
ttccaaatctccaac

SEQ ID NO: 1242348 - DNA, 15 bp, Homo sapiens
cttccaaatctccaa

SEQ ID NO: 1242349 - DNA, 15 bp, Homo sapiens
tcttccaaatctcca

SEQ ID NO: 1242350 - DNA, 15 bp, Homo sapiens
ctcttccaaatctcc

SEQ ID NO: 1242351 - DNA, 15 bp, Homo sapiens
actcttccaaatctc

SEQ ID NO: 1242352 - DNA, 15 bp, Homo sapiens
cactcttccaaatct

SEQ ID NO: 1242353 - DNA, 15 bp, Homo sapiens
tcactcttccaaatc

SEQ ID NO: 1242354 - DNA, 15 bp, Homo sapiens
ttcactcttccaaat

SEQ ID NO: 1242355 - DNA, 15 bp, Homo sapiens
cttcactcttccaaa

SEQ ID NO: 1242356 - DNA, 15 bp, Homo sapiens
ccttcactcttccaa

SEQ ID NO: 1242357 - DNA, 15 bp, Homo sapiens
accttcactcttcca

SEQ ID NO: 1242358 - DNA, 15 bp, Homo sapiens
caccttcactcttcc

SEQ ID NO: 1242359 - DNA, 15 bp, Homo sapiens
ccaccttcactcttc

SEQ ID NO: 1242360 - DNA, 15 bp, Homo sapiens
gccaccttcactctt

SEQ ID NO: 1242361 - DNA, 15 bp, Homo sapiens
agccaccttcactct

SEQ ID NO: 1242362 - DNA, 15 bp, Homo sapiens
tagccaccttcactc

SEQ ID NO: 1242363 - DNA, 15 bp, Homo sapiens
gtagccaccttcact

SEQ ID NO: 1242364 - DNA, 15 bp, Homo sapiens
tgtagccaccttcac

SEQ ID NO: 1242365 - DNA, 15 bp, Homo sapiens
ctgtagccaccttca

SEQ ID NO: 1242366 - DNA, 15 bp, Homo sapiens
cctgtagccaccttc

SEQ ID NO: 1242367 - DNA, 15 bp, Homo sapiens
gcctgtagccacctt

SEQ ID NO: 1242368 - DNA, 15 bp, Homo sapiens
ggcctgtagccacct

SEQ ID NO: 1242369 - DNA, 15 bp, Homo sapiens
aggcctgtagccacc

SEQ ID NO: 1242370 - DNA, 15 bp, Homo sapiens
caggcctgtagccac

SEQ ID NO: 1242371 - DNA, 15 bp, Homo sapiens
ccaggcctgtagcca

SEQ ID NO: 1242372 - DNA, 15 bp, Homo sapiens
cccaggcctgtagcc

SEQ ID NO: 1242373 - DNA, 15 bp, Homo sapiens
ccccaggcctgtagc

SEQ ID NO: 1242374 - DNA, 15 bp, Homo sapiens
accccaggcctgtag

SEQ ID NO: 1242375 - DNA, 15 bp, Homo sapiens
gaccccaggcctgta

SEQ ID NO: 1242376 - DNA, 15 bp, Homo sapiens
ggaccccaggcctgt

SEQ ID NO: 1242377 - DNA, 15 bp, Homo sapiens
gggaccccaggcctg

SEQ ID NO: 1242378 - DNA, 15 bp, Homo sapiens
cgggaccccaggcct

SEQ ID NO: 1242379 - DNA, 15 bp, Homo sapiens
gccgggaccccaggc

SEQ ID NO: 1242380 - DNA, 15 bp, Homo sapiens
agccgggaccccagg

SEQ ID NO: 1242381 - DNA, 15 bp, Homo sapiens
aagccgggaccccag

SEQ ID NO: 1242382 - DNA, 15 bp, Homo sapiens
taagccgggacccca

SEQ ID NO: 1242383 - DNA, 15 bp, Homo sapiens
ctaagccgggacccc

SEQ ID NO: 1242384 - DNA, 15 bp, Homo sapiens
tctaagccgggaccc

SEQ ID NO: 1242385 - DNA, 15 bp, Homo sapiens
ctctaagccgggacc

SEQ ID NO: 1242386 - DNA, 15 bp, Homo sapiens
cctctaagccgggac

SEQ ID NO: 1242387 - DNA, 15 bp, Homo sapiens
tcctctaagccggga

SEQ ID NO: 1242388 - DNA, 15 bp, Homo sapiens
gtcctctaagccggg

SEQ ID NO: 1242389 - DNA, 15 bp, Homo sapiens
ggtcctctaagccgg

SEQ ID NO: 1242390 - DNA, 15 bp, Homo sapiens
aggtcctctaagccg

SEQ ID NO: 1242391 - DNA, 15 bp, Homo sapiens
gaggtcctctaagcc

SEQ ID NO: 1242392 - DNA, 15 bp, Homo sapiens
agaggtcctctaagc

SEQ ID NO: 1242393 - DNA, 15 bp, Homo sapiens
cagaggtcctctaag

SEQ ID NO: 1242394 - DNA, 15 bp, Homo sapiens
tcagaggtcctctaa

SEQ ID NO: 1242395 - DNA, 15 bp, Homo sapiens
ctcagaggtcctcta

SEQ ID NO: 1242396 - DNA, 15 bp, Homo sapiens
tctcagaggtcctct

SEQ ID NO: 1242397 - DNA, 15 bp, Homo sapiens
ctctcagaggtcctc

SEQ ID NO: 1242398 - DNA, 15 bp, Homo sapiens
gctctcagaggtcct

SEQ ID NO: 1242399 - DNA, 15 bp, Homo sapiens
agctctcagaggtcc

SEQ ID NO: 1242400 - DNA, 15 bp, Homo sapiens
gagctctcagaggtc

SEQ ID NO: 1242401 - DNA, 15 bp, Homo sapiens
ggagctctcagaggt

SEQ ID NO: 1242402 - DNA, 15 bp, Homo sapiens
cggagctctcagagg

SEQ ID NO: 1242403 - DNA, 15 bp, Homo sapiens
ccggagctctcagag

SEQ ID NO: 1242404 - DNA, 15 bp, Homo sapiens
cccggagctctcaga

SEQ ID NO: 1242405 - DNA, 15 bp, Homo sapiens
ccccggagctctcag

SEQ ID NO: 1242406 - DNA, 15 bp, Homo sapiens
gccccggagctctca

SEQ ID NO: 1242407 - DNA, 15 bp, Homo sapiens
ggccccggagctctc

SEQ ID NO: 1242408 - DNA, 15 bp, Homo sapiens
gggccccggagctct

SEQ ID NO: 1242409 - DNA, 15 bp, Homo sapiens
ggggccccggagctc

SEQ ID NO: 1242410 - DNA, 15 bp, Homo sapiens
aggggccccggagct

SEQ ID NO: 1242411 - DNA, 15 bp, Homo sapiens
aaggggccccggagc

SEQ ID NO: 1242412 - DNA, 15 bp, Homo sapiens
gaaggggccccggag

SEQ ID NO: 1242413 - DNA, 15 bp, Homo sapiens
agaaggggccccgga

SEQ ID NO: 1242414 - DNA, 15 bp, Homo sapiens
cagaaggggccccgg

SEQ ID NO: 1242415 - DNA, 15 bp, Homo sapiens
ccagaaggggccccg

SEQ ID NO: 1242416 - DNA, 15 bp, Homo sapiens
cccagaaggggcccc

SEQ ID NO: 1242417 - DNA, 15 bp, Homo sapiens
acccagaaggggccc

SEQ ID NO: 1242418 - DNA, 15 bp, Homo sapiens
gacccagaaggggcc

SEQ ID NO: 1242419 - DNA, 15 bp, Homo sapiens
cgacccagaaggggc

SEQ ID NO: 1242420 - DNA, 15 bp, Homo sapiens
acgacccagaagggg

SEQ ID NO: 1242421 - DNA, 15 bp, Homo sapiens
cacgacccagaaggg

SEQ ID NO: 1242422 - DNA, 15 bp, Homo sapiens
ccacgacccagaagg

SEQ ID NO: 1242423 - DNA, 15 bp, Homo sapiens
accacgacccagaag

SEQ ID NO: 1242424 - DNA, 15 bp, Homo sapiens
aaccacgacccagaa

SEQ ID NO: 1242425 - DNA, 15 bp, Homo sapiens
caaccacgacccaga

SEQ ID NO: 1242426 - DNA, 15 bp, Homo sapiens
gcaaccacgacccag

SEQ ID NO: 1242427 - DNA, 15 bp, Homo sapiens
ggcaaccacgaccca

SEQ ID NO: 1242428 - DNA, 15 bp, Homo sapiens
aggcaaccacgaccc

SEQ ID NO: 1242429 - DNA, 15 bp, Homo sapiens
gaggcaaccacgacc

SEQ ID NO: 1242430 - DNA, 15 bp, Homo sapiens
tgaggcaaccacgac

SEQ ID NO: 1242431 - DNA, 15 bp, Homo sapiens
atgaggcaaccacga

SEQ ID NO: 1242432 - DNA, 15 bp, Homo sapiens
gatgaggcaaccacg

SEQ ID NO: 1242433 - DNA, 15 bp, Homo sapiens
cgatgaggcaaccac

SEQ ID NO: 1242434 - DNA, 15 bp, Homo sapiens
acgatgaggcaacca

SEQ ID NO: 1242435 - DNA, 15 bp, Homo sapiens
cacgatgaggcaacc

SEQ ID NO: 1242436 - DNA, 15 bp, Homo sapiens
ccacgatgaggcaac

SEQ ID NO: 1242437 - DNA, 15 bp, Homo sapiens
accacgatgaggcaa

SEQ ID NO: 1242438 - DNA, 15 bp, Homo sapiens
gaccacgatgaggca

SEQ ID NO: 1242439 - DNA, 15 bp, Homo sapiens
cgaccacgatgaggc

SEQ ID NO: 1242440 - DNA, 15 bp, Homo sapiens
ccgaccacgatgagg

SEQ ID NO: 1242441 - DNA, 15 bp, Homo sapiens
cccgaccacgatgag

SEQ ID NO: 1242442 - DNA, 15 bp, Homo sapiens
acccgaccacgatga

SEQ ID NO: 1242443 - DNA, 15 bp, Homo sapiens
cacccgaccacgatg

SEQ ID NO: 1242444 - DNA, 15 bp, Homo sapiens
ccacccgaccacgat

SEQ ID NO: 1242445 - DNA, 15 bp, Homo sapiens
cccacccgaccacga

SEQ ID NO: 1242446 - DNA, 15 bp, Homo sapiens
acccacccgaccacg

SEQ ID NO: 1242447 - DNA, 15 bp, Homo sapiens
gacccacccgaccac

SEQ ID NO: 1242448 - DNA, 15 bp, Homo sapiens
agacccacccgacca

SEQ ID NO: 1242449 - DNA, 15 bp, Homo sapiens
gagacccacccgacc

SEQ ID NO: 1242450 - DNA, 15 bp, Homo sapiens
ggagacccacccgac

SEQ ID NO: 1242451 - DNA, 15 bp, Homo sapiens
tggagacccacccga

SEQ ID NO: 1242452 - DNA, 15 bp, Homo sapiens
ctggagacccacccg

SEQ ID NO: 1242453 - DNA, 15 bp, Homo sapiens
cctggagacccaccc

SEQ ID NO: 1242454 - DNA, 15 bp, Homo sapiens
acctggagacccacc

SEQ ID NO: 1242455 - DNA, 15 bp, Homo sapiens
aacctggagacccac

SEQ ID NO: 1242456 - DNA, 15 bp, Homo sapiens
gaacctggagaccca

SEQ ID NO: 1242457 - DNA, 15 bp, Homo sapiens
agaacctggagaccc

SEQ ID NO: 1242458 - DNA, 15 bp, Homo sapiens
gagaacctggagacc

SEQ ID NO: 1242459 - DNA, 15 bp, Homo sapiens
ggagaacctggagac

SEQ ID NO: 1242460 - DNA, 15 bp, Homo sapiens
gggagaacctggaga

SEQ ID NO: 1242461 - DNA, 15 bp, Homo sapiens
tgggagaacctggag

SEQ ID NO: 1242462 - DNA, 15 bp, Homo sapiens
ctgggagaacctgga

SEQ ID NO: 1242463 - DNA, 15 bp, Homo sapiens
cctgggagaacctgg

SEQ ID NO: 1242464 - DNA, 15 bp, Homo sapiens
gcctgggagaacctg

SEQ ID NO: 1242465 - DNA, 15 bp, Homo sapiens
agcctgggagaacct

SEQ ID NO: 1242466 - DNA, 15 bp, Homo sapiens
gagcctgggagaacc

SEQ ID NO: 1242467 - DNA, 15 bp, Homo sapiens
tgagcctgggagaac

SEQ ID NO: 1242468 - DNA, 15 bp, Homo sapiens
ctgagcctgggagaa

SEQ ID NO: 1242469 - DNA, 15 bp, Homo sapiens
actgagcctgggaga

SEQ ID NO: 1242470 - DNA, 15 bp, Homo sapiens
gactgagcctgggag

SEQ ID NO: 1242471 - DNA, 15 bp, Homo sapiens
ggactgagcctggga

SEQ ID NO: 1242472 - DNA, 15 bp, Homo sapiens
gggactgagcctggg

SEQ ID NO: 1242473 - DNA, 15 bp, Homo sapiens
cgggactgagcctgg

SEQ ID NO: 1242474 - DNA, 15 bp, Homo sapiens
gcgggactgagcctg

SEQ ID NO: 1242475 - DNA, 15 bp, Homo sapiens
tgcgggactgagcct

SEQ ID NO: 1242476 - DNA, 15 bp, Homo sapiens
ctgcgggactgagcc

SEQ ID NO: 1242477 - DNA, 15 bp, Homo sapiens
cctgcgggactgagc

SEQ ID NO: 1242478 - DNA, 15 bp, Homo sapiens
gcctgcgggactgag

SEQ ID NO: 1242479 - DNA, 15 bp, Homo sapiens
cgcctgcgggactga

SEQ ID NO: 1242480 - DNA, 15 bp, Homo sapiens
gcgcctgcgggactg

SEQ ID NO: 1242481 - DNA, 15 bp, Homo sapiens
ggcgcctgcgggact

SEQ ID NO: 1242482 - DNA, 15 bp, Homo sapiens
tggcgcctgcgggac

SEQ ID NO: 1242483 - DNA, 15 bp, Homo sapiens
ttggcgcctgcggga

SEQ ID NO: 1242484 - DNA, 15 bp, Homo sapiens
tttggcgcctgcggg

SEQ ID NO: 1242485 - DNA, 15 bp, Homo sapiens
atttggcgcctgcgg

SEQ ID NO: 1242486 - DNA, 15 bp, Homo sapiens
gatttggcgcctgcg

SEQ ID NO: 1242487 - DNA, 15 bp, Homo sapiens
agatttggcgcctgc

SEQ ID NO: 1242488 - DNA, 15 bp, Homo sapiens
cagatttggcgcctg

SEQ ID NO: 1242489 - DNA, 15 bp, Homo sapiens
gcagatttggcgcct

SEQ ID NO: 1242490 - DNA, 15 bp, Homo sapiens
cgcagatttggcgcc

SEQ ID NO: 1242491 - DNA, 15 bp, Homo sapiens
gcgcagatttggcgc

SEQ ID NO: 1242492 - DNA, 15 bp, Homo sapiens
tgcgcagatttggcg

SEQ ID NO: 1242493 - DNA, 15 bp, Homo sapiens
ctgcgcagatttggc

SEQ ID NO: 1242494 - DNA, 15 bp, Homo sapiens
cctgcgcagatttgg

SEQ ID NO: 1242495 - DNA, 15 bp, Homo sapiens
tcctgcgcagatttg

SEQ ID NO: 1242496 - DNA, 15 bp, Homo sapiens
ctcctgcgcagattt

SEQ ID NO: 1242497 - DNA, 15 bp, Homo sapiens
tctcctgcgcagatt

SEQ ID NO: 1242498 - DNA, 15 bp, Homo sapiens
ctctcctgcgcagat

SEQ ID NO: 1242499 - DNA, 15 bp, Homo sapiens
gctctcctgcgcaga

SEQ ID NO: 1242500 - DNA, 15 bp, Homo sapiens
tgctctcctgcgcag

SEQ ID NO: 1242501 - DNA, 15 bp, Homo sapiens
gtgctctcctgcgca

SEQ ID NO: 1242502 - DNA, 15 bp, Homo sapiens
agtgctctcctgcgc

SEQ ID NO: 1242503 - DNA, 15 bp, Homo sapiens
tagtgctctcctgcg

SEQ ID NO: 1242504 - DNA, 15 bp, Homo sapiens
ctagtgctctcctgc

SEQ ID NO: 1242505 - DNA, 15 bp, Homo sapiens
gctagtgctctcctg

SEQ ID NO: 1242506 - DNA, 15 bp, Homo sapiens
tgctagtgctctcct

SEQ ID NO: 1242507 - DNA, 15 bp, Homo sapiens
ttgctagtgctctcc

SEQ ID NO: 1242508 - DNA, 15 bp, Homo sapiens
gttgctagtgctctc

SEQ ID NO: 1242509 - DNA, 15 bp, Homo sapiens
ggttgctagtgctct

SEQ ID NO: 1242510 - DNA, 15 bp, Homo sapiens
cggttgctagtgctc

SEQ ID NO: 1242511 - DNA, 15 bp, Homo sapiens
tcggttgctagtgct

SEQ ID NO: 1242512 - DNA, 15 bp, Homo sapiens
atcggttgctagtgc

SEQ ID NO: 1242513 - DNA, 15 bp, Homo sapiens
catcggttgctagtg

SEQ ID NO: 1242514 - DNA, 15 bp, Homo sapiens
tcatcggttgctagt

SEQ ID NO: 1242515 - DNA, 15 bp, Homo sapiens
gtcatcggttgctag

SEQ ID NO: 1242516 - DNA, 15 bp, Homo sapiens
cgtcatcggttgcta

SEQ ID NO: 1242517 - DNA, 15 bp, Homo sapiens
acgtcatcggttgct

SEQ ID NO: 1242518 - DNA, 15 bp, Homo sapiens
tacgtcatcggttgc

SEQ ID NO: 1242519 - DNA, 15 bp, Homo sapiens
atacgtcatcggttg

SEQ ID NO: 1242520 - DNA, 15 bp, Homo sapiens
aatacgtcatcggtt

SEQ ID NO: 1242521 - DNA, 15 bp, Homo sapiens
caatacgtcatcggt

SEQ ID NO: 1242522 - DNA, 15 bp, Homo sapiens
tcaatacgtcatcgg

SEQ ID NO: 1242523 - DNA, 15 bp, Homo sapiens
ctcaatacgtcatcg

SEQ ID NO: 1242524 - DNA, 15 bp, Homo sapiens
cctcaatacgtcatc

SEQ ID NO: 1242525 - DNA, 15 bp, Homo sapiens
gcctcaatacgtcat

SEQ ID NO: 1242526 - DNA, 15 bp, Homo sapiens
ggcctcaatacgtca

SEQ ID NO: 1242527 - DNA, 15 bp, Homo sapiens
gggcctcaatacgtc

SEQ ID NO: 1242528 - DNA, 15 bp, Homo sapiens
tgggcctcaatacgt

SEQ ID NO: 1242529 - DNA, 15 bp, Homo sapiens
gtgggcctcaatacg

SEQ ID NO: 1242530 - DNA, 15 bp, Homo sapiens
tgtgggcctcaatac

SEQ ID NO: 1242531 - DNA, 15 bp, Homo sapiens
gtgtgggcctcaata

SEQ ID NO: 1242532 - DNA, 15 bp, Homo sapiens
ggtgtgggcctcaat

SEQ ID NO: 1242533 - DNA, 15 bp, Homo sapiens
aggtgtgggcctcaa

SEQ ID NO: 1242534 - DNA, 15 bp, Homo sapiens
gaggtgtgggcctca

SEQ ID NO: 1242535 - DNA, 15 bp, Homo sapiens
agaggtgtgggcctc

SEQ ID NO: 1242536 - DNA, 15 bp, Homo sapiens
cagaggtgtgggcct

SEQ ID NO: 1242537 - DNA, 15 bp, Homo sapiens
ccagaggtgtgggcc

SEQ ID NO: 1242538 - DNA, 15 bp, Homo sapiens
cccagaggtgtgggc

SEQ ID NO: 1242539 - DNA, 15 bp, Homo sapiens
tcccagaggtgtggg

SEQ ID NO: 1242540 - DNA, 15 bp, Homo sapiens
atcccagaggtgtgg

SEQ ID NO: 1242541 - DNA, 15 bp, Homo sapiens
aatcccagaggtgtg

SEQ ID NO: 1242542 - DNA, 15 bp, Homo sapiens
caatcccagaggtgt

SEQ ID NO: 1242543 - DNA, 15 bp, Homo sapiens
ccaatcccagaggtg

SEQ ID NO: 1242544 - DNA, 15 bp, Homo sapiens
gccaatcccagaggt

SEQ ID NO: 1242545 - DNA, 15 bp, Homo sapiens
agccaatcccagagg

SEQ ID NO: 1242546 - DNA, 15 bp, Homo sapiens
cagccaatcccagag

SEQ ID NO: 1242547 - DNA, 15 bp, Homo sapiens
acagccaatcccaga

SEQ ID NO: 1242548 - DNA, 15 bp, Homo sapiens
gacagccaatcccag

SEQ ID NO: 1242549 - DNA, 15 bp, Homo sapiens
ggacagccaatccca

SEQ ID NO: 1242550 - DNA, 15 bp, Homo sapiens
aggacagccaatccc

SEQ ID NO: 1242551 - DNA, 15 bp, Homo sapiens
caggacagccaatcc

SEQ ID NO: 1242552 - DNA, 15 bp, Homo sapiens
gcaggacagccaatc

SEQ ID NO: 1242553 - DNA, 15 bp, Homo sapiens
agcaggacagccaat

SEQ ID NO: 1242554 - DNA, 15 bp, Homo sapiens
aagcaggacagccaa

SEQ ID NO: 1242555 - DNA, 15 bp, Homo sapiens
gaagcaggacagcca

SEQ ID NO: 1242556 - DNA, 15 bp, Homo sapiens
cgaagcaggacagcc

SEQ ID NO: 1242557 - DNA, 15 bp, Homo sapiens
tcgaagcaggacagc

SEQ ID NO: 1242558 - DNA, 15 bp, Homo sapiens
gtcgaagcaggacag

SEQ ID NO: 1242559 - DNA, 15 bp, Homo sapiens
tgtcgaagcaggaca

SEQ ID NO: 1242560 - DNA, 15 bp, Homo sapiens
ctgtcgaagcaggac

SEQ ID NO: 1242561 - DNA, 15 bp, Homo sapiens
gctgtcgaagcagga

SEQ ID NO: 1242562 - DNA, 15 bp, Homo sapiens
ggctgtcgaagcagg

SEQ ID NO: 1242563 - DNA, 15 bp, Homo sapiens
aggctgtcgaagcag

SEQ ID NO: 1242564 - DNA, 15 bp, Homo sapiens
aaggctgtcgaagca

SEQ ID NO: 1242565 - DNA, 15 bp, Homo sapiens
caaggctgtcgaagc

SEQ ID NO: 1242566 - DNA, 15 bp, Homo sapiens
tcaaggctgtcgaag

SEQ ID NO: 1242567 - DNA, 15 bp, Homo sapiens
ttcaaggctgtcgaa

SEQ ID NO: 1242568 - DNA, 15 bp, Homo sapiens
tttcaaggctgtcga

SEQ ID NO: 1242569 - DNA, 15 bp, Homo sapiens
ctttcaaggctgtcg

SEQ ID NO: 1242570 - DNA, 15 bp, Homo sapiens
actttcaaggctgtc

SEQ ID NO: 1242571 - DNA, 15 bp, Homo sapiens
cactttcaaggctgt

SEQ ID NO: 1242572 - DNA, 15 bp, Homo sapiens
ccactttcaaggctg

SEQ ID NO: 1242573 - DNA, 15 bp, Homo sapiens
cccactttcaaggct

SEQ ID NO: 1242574 - DNA, 15 bp, Homo sapiens
acccactttcaaggc

SEQ ID NO: 1242575 - DNA, 15 bp, Homo sapiens
tacccactttcaagg

SEQ ID NO: 1242576 - DNA, 15 bp, Homo sapiens
ttacccactttcaag

SEQ ID NO: 1242577 - DNA, 15 bp, Homo sapiens
cttacccactttcaa

SEQ ID NO: 1242578 - DNA, 15 bp, Homo sapiens
gcttacccactttca

SEQ ID NO: 1242579 - DNA, 15 bp, Homo sapiens
agcttacccactttc

SEQ ID NO: 1242580 - DNA, 15 bp, Homo sapiens
cagcttacccacttt

SEQ ID NO: 1242581 - DNA, 15 bp, Homo sapiens
ccagcttacccactt

SEQ ID NO: 1242582 - DNA, 15 bp, Homo sapiens
cccagcttacccact

SEQ ID NO: 1242583 - DNA, 15 bp, Homo sapiens
acccagcttacccac

SEQ ID NO: 1242584 - DNA, 15 bp, Homo sapiens
cacccagcttaccca

SEQ ID NO: 1242585 - DNA, 15 bp, Homo sapiens
ccacccagcttaccc

SEQ ID NO: 1242586 - DNA, 15 bp, Homo sapiens
cccacccagcttacc

SEQ ID NO: 1242587 - DNA, 15 bp, Homo sapiens
ccccacccagcttac

SEQ ID NO: 1242588 - DNA, 15 bp, Homo sapiens
cccccacccagctta

SEQ ID NO: 1242589 - DNA, 15 bp, Homo sapiens
ccccccacccagctt

SEQ ID NO: 1242590 - DNA, 15 bp, Homo sapiens
gccccccacccagct

SEQ ID NO: 1242591 - DNA, 15 bp, Homo sapiens
agccccccacccagc

SEQ ID NO: 1242592 - DNA, 15 bp, Homo sapiens
gagccccccacccag

SEQ ID NO: 1242593 - DNA, 15 bp, Homo sapiens
agagccccccaccca

SEQ ID NO: 1242594 - DNA, 15 bp, Homo sapiens
cagagccccccaccc

SEQ ID NO: 1242595 - DNA, 15 bp, Homo sapiens
ccagagccccccacc

SEQ ID NO: 1242596 - DNA, 15 bp, Homo sapiens
cccagagccccccac

SEQ ID NO: 1242597 - DNA, 15 bp, Homo sapiens
tcccagagcccccca

SEQ ID NO: 1242598 - DNA, 15 bp, Homo sapiens
ctcccagagcccccc

SEQ ID NO: 1242599 - DNA, 15 bp, Homo sapiens
tctcccagagccccc

SEQ ID NO: 1242600 - DNA, 15 bp, Homo sapiens
ctctcccagagcccc

SEQ ID NO: 1242601 - DNA, 15 bp, Homo sapiens
cctctcccagagccc

SEQ ID NO: 1242602 - DNA, 15 bp, Homo sapiens
acctctcccagagcc

SEQ ID NO: 1242603 - DNA, 15 bp, Homo sapiens
gacctctcccagagc

SEQ ID NO: 1242604 - DNA, 15 bp, Homo sapiens
tgacctctcccagag

SEQ ID NO: 1242605 - DNA, 15 bp, Homo sapiens
ctgacctctcccaga

SEQ ID NO: 1242606 - DNA, 15 bp, Homo sapiens
actgacctctcccag

SEQ ID NO: 1242607 - DNA, 15 bp, Homo sapiens
cactgacctctccca

SEQ ID NO: 1242608 - DNA, 15 bp, Homo sapiens
gcactgacctctccc

SEQ ID NO: 1242609 - DNA, 15 bp, Homo sapiens
agcactgacctctcc

SEQ ID NO: 1242610 - DNA, 15 bp, Homo sapiens
cagcactgacctctc

SEQ ID NO: 1242611 - DNA, 15 bp, Homo sapiens
tcagcactgacctct

SEQ ID NO: 1242612 - DNA, 15 bp, Homo sapiens
ctcagcactgacctc

SEQ ID NO: 1242613 - DNA, 15 bp, Homo sapiens
actcagcactgacct

SEQ ID NO: 1242614 - DNA, 15 bp, Homo sapiens
tactcagcactgacc

SEQ ID NO: 1242615 - DNA, 15 bp, Homo sapiens
ttactcagcactgac

SEQ ID NO: 1242616 - DNA, 15 bp, Homo sapiens
cttactcagcactga

SEQ ID NO: 1242617 - DNA, 15 bp, Homo sapiens
ccttactcagcactg

SEQ ID NO: 1242618 - DNA, 15 bp, Homo sapiens
gccttactcagcact

SEQ ID NO: 1242619 - DNA, 15 bp, Homo sapiens
tgccttactcagcac

SEQ ID NO: 1242620 - DNA, 15 bp, Homo sapiens
ttgccttactcagca

SEQ ID NO: 1242621 - DNA, 15 bp, Homo sapiens
attgccttactcagc

SEQ ID NO: 1242622 - DNA, 15 bp, Homo sapiens
aattgccttactcag

SEQ ID NO: 1242623 - DNA, 15 bp, Homo sapiens
gaattgccttactca

SEQ ID NO: 1242624 - DNA, 15 bp, Homo sapiens
ggaattgccttactc

SEQ ID NO: 1242625 - DNA, 15 bp, Homo sapiens
gggaattgccttact

SEQ ID NO: 1242626 - DNA, 15 bp, Homo sapiens
tgggaattgccttac

SEQ ID NO: 1242627 - DNA, 15 bp, Homo sapiens
ctgggaattgcctta

SEQ ID NO: 1242628 - DNA, 15 bp, Homo sapiens
gctgggaattgcctt

SEQ ID NO: 1242629 - DNA, 15 bp, Homo sapiens
tgctgggaattgcct

SEQ ID NO: 1242630 - DNA, 15 bp, Homo sapiens
ctgctgggaattgcc

SEQ ID NO: 1242631 - DNA, 15 bp, Homo sapiens
gctgctgggaattgc

SEQ ID NO: 1242632 - DNA, 15 bp, Homo sapiens
agctgctgggaattg

SEQ ID NO: 1242633 - DNA, 15 bp, Homo sapiens
aagctgctgggaatt

SEQ ID NO: 1242634 - DNA, 15 bp, Homo sapiens
caagctgctgggaat

SEQ ID NO: 1242635 - DNA, 15 bp, Homo sapiens
tcaagctgctgggaa

SEQ ID NO: 1242636 - DNA, 15 bp, Homo sapiens
ctcaagctgctggga

SEQ ID NO: 1242637 - DNA, 15 bp, Homo sapiens
gctcaagctgctggg

SEQ ID NO: 1242638 - DNA, 15 bp, Homo sapiens
ggctcaagctgctgg

SEQ ID NO: 1242639 - DNA, 15 bp, Homo sapiens
gggctcaagctgctg

SEQ ID NO: 1242640 - DNA, 15 bp, Homo sapiens
ggggctcaagctgct

SEQ ID NO: 1242641 - DNA, 15 bp, Homo sapiens
tggggctcaagctgc

SEQ ID NO: 1242642 - DNA, 15 bp, Homo sapiens
gtggggctcaagctg

SEQ ID NO: 1242643 - DNA, 15 bp, Homo sapiens
ggtggggctcaagct

SEQ ID NO: 1242644 - DNA, 15 bp, Homo sapiens
tggtggggctcaagc

SEQ ID NO: 1242645 - DNA, 15 bp, Homo sapiens
ctggtggggctcaag

SEQ ID NO: 1242646 - DNA, 15 bp, Homo sapiens
cctggtggggctcaa

SEQ ID NO: 1242647 - DNA, 15 bp, Homo sapiens
acctggtggggctca

SEQ ID NO: 1242648 - DNA, 15 bp, Homo sapiens
gacctggtggggctc

SEQ ID NO: 1242649 - DNA, 15 bp, Homo sapiens
tgacctggtggggct

SEQ ID NO: 1242650 - DNA, 15 bp, Homo sapiens
gtgacctggtggggc

SEQ ID NO: 1242651 - DNA, 15 bp, Homo sapiens
agtgacctggtgggg

SEQ ID NO: 1242652 - DNA, 15 bp, Homo sapiens
gagtgacctggtggg

SEQ ID NO: 1242653 - DNA, 15 bp, Homo sapiens
ggagtgacctggtgg

SEQ ID NO: 1242654 - DNA, 15 bp, Homo sapiens
tggagtgacctggtg

SEQ ID NO: 1242655 - DNA, 15 bp, Homo sapiens
ctggagtgacctggt

SEQ ID NO: 1242656 - DNA, 15 bp, Homo sapiens
actggagtgacctgg

SEQ ID NO: 1242657 - DNA, 15 bp, Homo sapiens
tactggagtgacctg

SEQ ID NO: 1242658 - DNA, 15 bp, Homo sapiens
atactggagtgacct

SEQ ID NO: 1242659 - DNA, 15 bp, Homo sapiens
aatactggagtgacc

SEQ ID NO: 1242660 - DNA, 15 bp, Homo sapiens
gaatactggagtgac

SEQ ID NO: 1242661 - DNA, 15 bp, Homo sapiens
ggaatactggagtga

SEQ ID NO: 1242662 - DNA, 15 bp, Homo sapiens
aggaatactggagtg

SEQ ID NO: 1242663 - DNA, 15 bp, Homo sapiens
gaggaatactggagt

SEQ ID NO: 1242664 - DNA, 15 bp, Homo sapiens
ggaggaatactggag

SEQ ID NO: 1242665 - DNA, 15 bp, Homo sapiens
gggaggaatactgga

SEQ ID NO: 1242666 - DNA, 15 bp, Homo sapiens
ggggaggaatactgg

SEQ ID NO: 1242667 - DNA, 15 bp, Homo sapiens
tggggaggaatactg

SEQ ID NO: 1242668 - DNA, 15 bp, Homo sapiens
atggggaggaatact

SEQ ID NO: 1242669 - DNA, 15 bp, Homo sapiens
aatggggaggaatac

SEQ ID NO: 1242670 - DNA, 15 bp, Homo sapiens
gaatggggaggaata

SEQ ID NO: 1242671 - DNA, 15 bp, Homo sapiens
agaatggggaggaat

SEQ ID NO: 1242672 - DNA, 15 bp, Homo sapiens
aagaatggggaggaa

SEQ ID NO: 1242673 - DNA, 15 bp, Homo sapiens
aaagaatggggagga

SEQ ID NO: 1242674 - DNA, 15 bp, Homo sapiens
aaaagaatggggagg

SEQ ID NO: 1242675 - DNA, 15 bp, Homo sapiens
aaaaagaatggggag

SEQ ID NO: 1242676 - DNA, 15 bp, Homo sapiens
aaaaaagaatgggga

SEQ ID NO: 1242677 - DNA, 15 bp, Homo sapiens
aaaaaaagaatgggg

SEQ ID NO: 1242678 - DNA, 15 bp, Homo sapiens
aaaaaaaagaatggg

SEQ ID NO: 1242679 - DNA, 15 bp, Homo sapiens
aaaaaaaaagaatgg

SEQ ID NO: 1242680 - DNA, 15 bp, Homo sapiens
aaaaaaaaaagaatg

SEQ ID NO: 1242681 - DNA, 15 bp, Homo sapiens
gagaaaaaaaaaaaa

SEQ ID NO: 1242682 - DNA, 15 bp, Homo sapiens
agagaaaaaaaaaaa

SEQ ID NO: 1242683 - DNA, 15 bp, Homo sapiens
aagagaaaaaaaaaa

SEQ ID NO: 1242684 - DNA, 15 bp, Homo sapiens
caagagaaaaaaaaa

SEQ ID NO: 1242685 - DNA, 15 bp, Homo sapiens
tcaagagaaaaaaaa

SEQ ID NO: 1242686 - DNA, 15 bp, Homo sapiens
ctcaagagaaaaaaa

SEQ ID NO: 1242687 - DNA, 15 bp, Homo sapiens
tctcaagagaaaaaa

SEQ ID NO: 1242688 - DNA, 15 bp, Homo sapiens
gtctcaagagaaaaa

SEQ ID NO: 1242689 - DNA, 15 bp, Homo sapiens
cgtctcaagagaaaa

SEQ ID NO: 1242690 - DNA, 15 bp, Homo sapiens
ccgtctcaagagaaa

SEQ ID NO: 1242691 - DNA, 15 bp, Homo sapiens
tccgtctcaagagaa

SEQ ID NO: 1242692 - DNA, 15 bp, Homo sapiens
ctccgtctcaagaga

SEQ ID NO: 1242693 - DNA, 15 bp, Homo sapiens
actccgtctcaagag

SEQ ID NO: 1242694 - DNA, 15 bp, Homo sapiens
gactccgtctcaaga

SEQ ID NO: 1242695 - DNA, 15 bp, Homo sapiens
agactccgtctcaag

SEQ ID NO: 1242696 - DNA, 15 bp, Homo sapiens
cggcgacagagcgag

SEQ ID NO: 1242697 - DNA, 15 bp, Homo sapiens
tcggcgacagagcga

SEQ ID NO: 1242698 - DNA, 15 bp, Homo sapiens
ctcggcgacagagcg

SEQ ID NO: 1242699 - DNA, 15 bp, Homo sapiens
cctcggcgacagagc

SEQ ID NO: 1242700 - DNA, 15 bp, Homo sapiens
gcctcggcgacagag

SEQ ID NO: 1242701 - DNA, 15 bp, Homo sapiens
agcctcggcgacaga

SEQ ID NO: 1242702 - DNA, 15 bp, Homo sapiens
cagcctcggcgacag

SEQ ID NO: 1242703 - DNA, 15 bp, Homo sapiens
ccagcctcggcgaca

SEQ ID NO: 1242704 - DNA, 15 bp, Homo sapiens
tccagcctcggcgac

SEQ ID NO: 1242705 - DNA, 15 bp, Homo sapiens
ctccagcctcggcga

SEQ ID NO: 1242706 - DNA, 15 bp, Homo sapiens
actccagcctcggcg

SEQ ID NO: 1242707 - DNA, 15 bp, Homo sapiens
cactccagcctcggc

SEQ ID NO: 1242708 - DNA, 15 bp, Homo sapiens
gcactccagcctcgg

SEQ ID NO: 1242709 - DNA, 15 bp, Homo sapiens
tgcactccagcctcg

SEQ ID NO: 1242710 - DNA, 15 bp, Homo sapiens
cgcgccactgcactc

SEQ ID NO: 1242711 - DNA, 15 bp, Homo sapiens
tcgcgccactgcact

SEQ ID NO: 1242712 - DNA, 15 bp, Homo sapiens
atcgcgccactgcac

SEQ ID NO: 1242713 - DNA, 15 bp, Homo sapiens
gatcgcgccactgca

SEQ ID NO: 1242714 - DNA, 15 bp, Homo sapiens
agatcgcgccactgc

SEQ ID NO: 1242715 - DNA, 15 bp, Homo sapiens
gagatcgcgccactg

SEQ ID NO: 1242716 - DNA, 15 bp, Homo sapiens
agggaggcggagctt

SEQ ID NO: 1242717 - DNA, 15 bp, Homo sapiens
cagggaggcggagct

SEQ ID NO: 1242718 - DNA, 15 bp, Homo sapiens
ccagggaggcggagc

SEQ ID NO: 1242719 - DNA, 15 bp, Homo sapiens
accagggaggcggag

SEQ ID NO: 1242720 - DNA, 15 bp, Homo sapiens
aaccagggaggcgga

SEQ ID NO: 1242721 - DNA, 15 bp, Homo sapiens
gaaccagggaggcgg

SEQ ID NO: 1242722 - DNA, 15 bp, Homo sapiens
tgaaccagggaggcg

SEQ ID NO: 1242723 - DNA, 15 bp, Homo sapiens
gtgaaccagggaggc

SEQ ID NO: 1242724 - DNA, 15 bp, Homo sapiens
cgtgaaccagggagg

SEQ ID NO: 1242725 - DNA, 15 bp, Homo sapiens
gcgtgaaccagggag

SEQ ID NO: 1242726 - DNA, 15 bp, Homo sapiens
ggcgtgaaccaggga

SEQ ID NO: 1242727 - DNA, 15 bp, Homo sapiens
tggcgtgaaccaggg

SEQ ID NO: 1242728 - DNA, 15 bp, Homo sapiens
atggcgtgaaccagg

SEQ ID NO: 1242729 - DNA, 15 bp, Homo sapiens
aatggcgtgaaccag

SEQ ID NO: 1242730 - DNA, 15 bp, Homo sapiens
gaatggcgtgaacca

SEQ ID NO: 1242731 - DNA, 15 bp, Homo sapiens
tgctgaggcaggaga

SEQ ID NO: 1242732 - DNA, 15 bp, Homo sapiens
ctgctgaggcaggag

SEQ ID NO: 1242733 - DNA, 15 bp, Homo sapiens
cctgctgaggcagga

SEQ ID NO: 1242734 - DNA, 15 bp, Homo sapiens
tcctgctgaggcagg

SEQ ID NO: 1242735 - DNA, 15 bp, Homo sapiens
gtcctgctgaggcag

SEQ ID NO: 1242736 - DNA, 15 bp, Homo sapiens
agtcctgctgaggca

SEQ ID NO: 1242737 - DNA, 15 bp, Homo sapiens
tagtcctgctgaggc

SEQ ID NO: 1242738 - DNA, 15 bp, Homo sapiens
gtagtcctgctgagg

SEQ ID NO: 1242739 - DNA, 15 bp, Homo sapiens
tgtagtcctgctgag

SEQ ID NO: 1242740 - DNA, 15 bp, Homo sapiens
ctgtagtcctgctga

SEQ ID NO: 1242741 - DNA, 15 bp, Homo sapiens
cctgtagtcctgctg

SEQ ID NO: 1242742 - DNA, 15 bp, Homo sapiens
gcctgtagtcctgct

SEQ ID NO: 1242743 - DNA, 15 bp, Homo sapiens
cgcctgtagtcctgc

SEQ ID NO: 1242744 - DNA, 15 bp, Homo sapiens
gcgcctgtagtcctg

SEQ ID NO: 1242745 - DNA, 15 bp, Homo sapiens
ggcgcctgtagtcct

SEQ ID NO: 1242746 - DNA, 15 bp, Homo sapiens
cgcggtggcgggcgc

SEQ ID NO: 1242747 - DNA, 15 bp, Homo sapiens
gcgcggtggcgggcg

SEQ ID NO: 1242748 - DNA, 15 bp, Homo sapiens
ggcgcggtggcgggc

SEQ ID NO: 1242749 - DNA, 15 bp, Homo sapiens
gggcgcggtggcggg

SEQ ID NO: 1242750 - DNA, 15 bp, Homo sapiens
cgggcgcggtggcgg

SEQ ID NO: 1242751 - DNA, 15 bp, Homo sapiens
ccgggcgcggtggcg

SEQ ID NO: 1242752 - DNA, 15 bp, Homo sapiens
agccgggcgcggtgg

SEQ ID NO: 1242753 - DNA, 15 bp, Homo sapiens
tagccgggcgcggtg

SEQ ID NO: 1242754 - DNA, 15 bp, Homo sapiens
ttagccgggcgcggt

SEQ ID NO: 1242755 - DNA, 15 bp, Homo sapiens
attagccgggcgcgg

SEQ ID NO: 1242756 - DNA, 15 bp, Homo sapiens
aattagccgggcgcg

SEQ ID NO: 1242757 - DNA, 15 bp, Homo sapiens
aaattagccgggcgc

SEQ ID NO: 1242758 - DNA, 15 bp, Homo sapiens
gaaaatacaaaaaat

SEQ ID NO: 1242759 - DNA, 15 bp, Homo sapiens
tgtctctactgaaaa

SEQ ID NO: 1242760 - DNA, 15 bp, Homo sapiens
ctgtctctactgaaa

SEQ ID NO: 1242761 - DNA, 15 bp, Homo sapiens
ccacggtgaaaccct

SEQ ID NO: 1242762 - DNA, 15 bp, Homo sapiens
accacggtgaaaccc

SEQ ID NO: 1242763 - DNA, 15 bp, Homo sapiens
gaccacggtgaaacc

SEQ ID NO: 1242764 - DNA, 15 bp, Homo sapiens
agaccacggtgaaac

SEQ ID NO: 1242765 - DNA, 15 bp, Homo sapiens
gagaccacggtgaaa

SEQ ID NO: 1242766 - DNA, 15 bp, Homo sapiens
cgagaccacggtgaa

SEQ ID NO: 1242767 - DNA, 15 bp, Homo sapiens
tcgagaccacggtga

SEQ ID NO: 1242768 - DNA, 15 bp, Homo sapiens
atcgagaccacggtg

SEQ ID NO: 1242769 - DNA, 15 bp, Homo sapiens
gatcgagaccacggt

SEQ ID NO: 1242770 - DNA, 15 bp, Homo sapiens
agatcgagaccacgg

SEQ ID NO: 1242771 - DNA, 15 bp, Homo sapiens
gagatcgagaccacg

SEQ ID NO: 1242772 - DNA, 15 bp, Homo sapiens
ggagatcgagaccac

SEQ ID NO: 1242773 - DNA, 15 bp, Homo sapiens
agtcaggagatcgag

SEQ ID NO: 1242774 - DNA, 15 bp, Homo sapiens
aagtcaggagatcga

SEQ ID NO: 1242775 - DNA, 15 bp, Homo sapiens
aaagtcaggagatcg

SEQ ID NO: 1242776 - DNA, 15 bp, Homo sapiens
caaagtcaggagatc

SEQ ID NO: 1242777 - DNA, 15 bp, Homo sapiens
acaaagtcaggagat

SEQ ID NO: 1242778 - DNA, 15 bp, Homo sapiens
cacaaagtcaggaga

SEQ ID NO: 1242779 - DNA, 15 bp, Homo sapiens
tcacaaagtcaggag

SEQ ID NO: 1242780 - DNA, 15 bp, Homo sapiens
atcacaaagtcagga

SEQ ID NO: 1242781 - DNA, 15 bp, Homo sapiens
gatcacaaagtcagg

SEQ ID NO: 1242782 - DNA, 15 bp, Homo sapiens
ggatcacaaagtcag

SEQ ID NO: 1242783 - DNA, 15 bp, Homo sapiens
cggatcacaaagtca

SEQ ID NO: 1242784 - DNA, 15 bp, Homo sapiens
gcggatcacaaagtc

SEQ ID NO: 1242785 - DNA, 15 bp, Homo sapiens
ggcggatcacaaagt

SEQ ID NO: 1242786 - DNA, 15 bp, Homo sapiens
aggcggatcacaaag

SEQ ID NO: 1242787 - DNA, 15 bp, Homo sapiens
caggcggatcacaaa

SEQ ID NO: 1242788 - DNA, 15 bp, Homo sapiens
gcaggcggatcacaa

SEQ ID NO: 1242789 - DNA, 15 bp, Homo sapiens
ggcaggcggatcaca

SEQ ID NO: 1242790 - DNA, 15 bp, Homo sapiens
tcgaggcaggcggat

SEQ ID NO: 1242791 - DNA, 15 bp, Homo sapiens
gtcgaggcaggcgga

SEQ ID NO: 1242792 - DNA, 15 bp, Homo sapiens
ggtcgaggcaggcgg

SEQ ID NO: 1242793 - DNA, 15 bp, Homo sapiens
aggtcgaggcaggcg

SEQ ID NO: 1242794 - DNA, 15 bp, Homo sapiens
gaggtcgaggcaggc

SEQ ID NO: 1242795 - DNA, 15 bp, Homo sapiens
acgcggtggctcacg

SEQ ID NO: 1242796 - DNA, 15 bp, Homo sapiens
gacgcggtggctcac

SEQ ID NO: 1242797 - DNA, 15 bp, Homo sapiens
ggacgcggtggctca

SEQ ID NO: 1242798 - DNA, 15 bp, Homo sapiens
cggacgcggtggctc

SEQ ID NO: 1242799 - DNA, 15 bp, Homo sapiens
ccggacgcggtggct

SEQ ID NO: 1242800 - DNA, 15 bp, Homo sapiens
gccggacgcggtggc

SEQ ID NO: 1242801 - DNA, 15 bp, Homo sapiens
ggccggacgcggtgg

SEQ ID NO: 1242802 - DNA, 15 bp, Homo sapiens
tggccggacgcggtg

SEQ ID NO: 1242803 - DNA, 15 bp, Homo sapiens
atggccggacgcggt

SEQ ID NO: 1242804 - DNA, 15 bp, Homo sapiens
aatggccggacgcgg

SEQ ID NO: 1242805 - DNA, 15 bp, Homo sapiens
gaatggccggacgcg

SEQ ID NO: 1242806 - DNA, 15 bp, Homo sapiens
ggaatggccggacgc

SEQ ID NO: 1242807 - DNA, 15 bp, Homo sapiens
aggaatggccggacg

SEQ ID NO: 1242808 - DNA, 15 bp, Homo sapiens
gaggaatggccggac

SEQ ID NO: 1242809 - DNA, 15 bp, Homo sapiens
ggaggaatggccgga

SEQ ID NO: 1242810 - DNA, 15 bp, Homo sapiens
gggaggaatggccgg

SEQ ID NO: 1242811 - DNA, 15 bp, Homo sapiens
ggggaggaatggccg

SEQ ID NO: 1242812 - DNA, 15 bp, Homo sapiens
tggggaggaatggcc

SEQ ID NO: 1242813 - DNA, 15 bp, Homo sapiens
atggggaggaatggc

SEQ ID NO: 1242814 - DNA, 15 bp, Homo sapiens
aatggggaggaatgg

SEQ ID NO: 1242815 - DNA, 15 bp, Homo sapiens
gaatggggaggaatg

SEQ ID NO: 1242816 - DNA, 15 bp, Homo sapiens
tagaatggggaggaa

SEQ ID NO: 1242817 - DNA, 15 bp, Homo sapiens
ttagaatggggagga

SEQ ID NO: 1242818 - DNA, 15 bp, Homo sapiens
gttagaatggggagg

SEQ ID NO: 1242819 - DNA, 15 bp, Homo sapiens
ggttagaatggggag

SEQ ID NO: 1242820 - DNA, 15 bp, Homo sapiens
tggttagaatgggga

SEQ ID NO: 1242821 - DNA, 15 bp, Homo sapiens
gtggttagaatgggg

SEQ ID NO: 1242822 - DNA, 15 bp, Homo sapiens
tgtggttagaatggg

SEQ ID NO: 1242823 - DNA, 15 bp, Homo sapiens
atgtggttagaatgg

SEQ ID NO: 1242824 - DNA, 15 bp, Homo sapiens
catgtggttagaatg

SEQ ID NO: 1242825 - DNA, 15 bp, Homo sapiens
tcatgtggttagaat

SEQ ID NO: 1242826 - DNA, 15 bp, Homo sapiens
atcatgtggttagaa

SEQ ID NO: 1242827 - DNA, 15 bp, Homo sapiens
gatcatgtggttaga

SEQ ID NO: 1242828 - DNA, 15 bp, Homo sapiens
ggatcatgtggttag

SEQ ID NO: 1242829 - DNA, 15 bp, Homo sapiens
gggatcatgtggtta

SEQ ID NO: 1242830 - DNA, 15 bp, Homo sapiens
ggggatcatgtggtt

SEQ ID NO: 1242831 - DNA, 15 bp, Homo sapiens
tggggatcatgtggt

SEQ ID NO: 1242832 - DNA, 15 bp, Homo sapiens
ttggggatcatgtgg

SEQ ID NO: 1242833 - DNA, 15 bp, Homo sapiens
cttggggatcatgtg

SEQ ID NO: 1242834 - DNA, 15 bp, Homo sapiens
ccttggggatcatgt

SEQ ID NO: 1242835 - DNA, 15 bp, Homo sapiens
tccttggggatcatg

SEQ ID NO: 1242836 - DNA, 15 bp, Homo sapiens
atccttggggatcat

SEQ ID NO: 1242837 - DNA, 15 bp, Homo sapiens
gatccttggggatca

SEQ ID NO: 1242838 - DNA, 15 bp, Homo sapiens
agatccttggggatc

SEQ ID NO: 1242839 - DNA, 15 bp, Homo sapiens
gagatccttggggat

SEQ ID NO: 1242840 - DNA, 15 bp, Homo sapiens
tagagatccttgggg

SEQ ID NO: 1242841 - DNA, 15 bp, Homo sapiens
atagagatccttggg

SEQ ID NO: 1242842 - DNA, 15 bp, Homo sapiens
gatagagatccttgg

SEQ ID NO: 1242843 - DNA, 15 bp, Homo sapiens
ggatagagatccttg

SEQ ID NO: 1242844 - DNA, 15 bp, Homo sapiens
tggatagagatcctt

SEQ ID NO: 1242845 - DNA, 15 bp, Homo sapiens
atggatagagatcct

SEQ ID NO: 1242846 - DNA, 15 bp, Homo sapiens
gatggatagagatcc

SEQ ID NO: 1242847 - DNA, 15 bp, Homo sapiens
ggatggatagagatc

SEQ ID NO: 1242848 - DNA, 15 bp, Homo sapiens
gggatggatagagat

SEQ ID NO: 1242849 - DNA, 15 bp, Homo sapiens
cgggatggatagaga

SEQ ID NO: 1242850 - DNA, 15 bp, Homo sapiens
ccgggatggatagag

SEQ ID NO: 1242851 - DNA, 15 bp, Homo sapiens
accgggatggataga

SEQ ID NO: 1242852 - DNA, 15 bp, Homo sapiens
taccgggatggatag

SEQ ID NO: 1242853 - DNA, 15 bp, Homo sapiens
ataccgggatggata

SEQ ID NO: 1242854 - DNA, 15 bp, Homo sapiens
gataccgggatggat

SEQ ID NO: 1242855 - DNA, 15 bp, Homo sapiens
ggataccgggatgga

SEQ ID NO: 1242856 - DNA, 15 bp, Homo sapiens
gggataccgggatgg

SEQ ID NO: 1242857 - DNA, 15 bp, Homo sapiens
tgggataccgggatg

SEQ ID NO: 1242858 - DNA, 15 bp, Homo sapiens
ttgggataccgggat

SEQ ID NO: 1242859 - DNA, 15 bp, Homo sapiens
gttgggataccggga

SEQ ID NO: 1242860 - DNA, 15 bp, Homo sapiens
ggttgggataccggg

SEQ ID NO: 1242861 - DNA, 15 bp, Homo sapiens
aggttgggataccgg

SEQ ID NO: 1242862 - DNA, 15 bp, Homo sapiens
taggttgggataccg

SEQ ID NO: 1242863 - DNA, 15 bp, Homo sapiens
ttaggttgggatacc

SEQ ID NO: 1242864 - DNA, 15 bp, Homo sapiens
cttaggttgggatac

SEQ ID NO: 1242865 - DNA, 15 bp, Homo sapiens
ccttaggttgggata

SEQ ID NO: 1242866 - DNA, 15 bp, Homo sapiens
cccttaggttgggat

SEQ ID NO: 1242867 - DNA, 15 bp, Homo sapiens
ccccttaggttggga

SEQ ID NO: 1242868 - DNA, 15 bp, Homo sapiens
cccccttaggttggg

SEQ ID NO: 1242869 - DNA, 15 bp, Homo sapiens
acccccttaggttgg

SEQ ID NO: 1242870 - DNA, 15 bp, Homo sapiens
aacccccttaggttg

SEQ ID NO: 1242871 - DNA, 15 bp, Homo sapiens
gaacccccttaggtt

SEQ ID NO: 1242872 - DNA, 15 bp, Homo sapiens
ggaacccccttaggt

SEQ ID NO: 1242873 - DNA, 15 bp, Homo sapiens
tggaacccccttagg

SEQ ID NO: 1242874 - DNA, 15 bp, Homo sapiens
ttggaacccccttag

SEQ ID NO: 1242875 - DNA, 15 bp, Homo sapiens
attggaaccccctta

SEQ ID NO: 1242876 - DNA, 15 bp, Homo sapiens
tattggaaccccctt

SEQ ID NO: 1242877 - DNA, 15 bp, Homo sapiens
ttattggaaccccct

SEQ ID NO: 1242878 - DNA, 15 bp, Homo sapiens
gttattggaaccccc

SEQ ID NO: 1242879 - DNA, 15 bp, Homo sapiens
tgttattggaacccc

SEQ ID NO: 1242880 - DNA, 15 bp, Homo sapiens
ttgttattggaaccc

SEQ ID NO: 1242881 - DNA, 15 bp, Homo sapiens
tttgttattggaacc

SEQ ID NO: 1242882 - DNA, 15 bp, Homo sapiens
atttgttattggaac

SEQ ID NO: 1242883 - DNA, 15 bp, Homo sapiens
aatttgttattggaa

SEQ ID NO: 1242884 - DNA, 15 bp, Homo sapiens
aaatttgttattgga

SEQ ID NO: 1242885 - DNA, 15 bp, Homo sapiens
aaaatttgttattgg

SEQ ID NO: 1242886 - DNA, 15 bp, Homo sapiens
aaaaatttgttattg

SEQ ID NO: 1242887 - DNA, 15 bp, Homo sapiens
caaaaatttgttatt

SEQ ID NO: 1242888 - DNA, 15 bp, Homo sapiens
ccaaaaatttgttat

SEQ ID NO: 1242889 - DNA, 15 bp, Homo sapiens
gccaaaaatttgtta

SEQ ID NO: 1242890 - DNA, 15 bp, Homo sapiens
ggccaaaaatttgtt

SEQ ID NO: 1242891 - DNA, 15 bp, Homo sapiens
cggccaaaaatttgt

SEQ ID NO: 1242892 - DNA, 15 bp, Homo sapiens
ccggccaaaaatttg

SEQ ID NO: 1242893 - DNA, 15 bp, Homo sapiens
cccggccaaaaattt

SEQ ID NO: 1242894 - DNA, 15 bp, Homo sapiens
gcccggccaaaaatt

SEQ ID NO: 1242895 - DNA, 15 bp, Homo sapiens
tgcccggccaaaaat

SEQ ID NO: 1242896 - DNA, 15 bp, Homo sapiens
ctgcccggccaaaaa

SEQ ID NO: 1242897 - DNA, 15 bp, Homo sapiens
cctgcccggccaaaa

SEQ ID NO: 1242898 - DNA, 15 bp, Homo sapiens
ccctgcccggccaaa

SEQ ID NO: 1242899 - DNA, 15 bp, Homo sapiens
accctgcccggccaa

SEQ ID NO: 1242900 - DNA, 15 bp, Homo sapiens
caccctgcccggcca

SEQ ID NO: 1242901 - DNA, 15 bp, Homo sapiens
ccaccctgcccggcc

SEQ ID NO: 1242902 - DNA, 15 bp, Homo sapiens
gccaccctgcccggc

SEQ ID NO: 1242903 - DNA, 15 bp, Homo sapiens
agccaccctgcccgg

SEQ ID NO: 1242904 - DNA, 15 bp, Homo sapiens
gagccaccctgcccg

SEQ ID NO: 1242905 - DNA, 15 bp, Homo sapiens
atgagccaccctgcc

SEQ ID NO: 1242906 - DNA, 15 bp, Homo sapiens
catgagccaccctgc

SEQ ID NO: 1242907 - DNA, 15 bp, Homo sapiens
gcatgagccaccctg

SEQ ID NO: 1242908 - DNA, 15 bp, Homo sapiens
ggcatgagccaccct

SEQ ID NO: 1242909 - DNA, 15 bp, Homo sapiens
aggcatgagccaccc

SEQ ID NO: 1242910 - DNA, 15 bp, Homo sapiens
ttcgaactcctgacc

SEQ ID NO: 1242911 - DNA, 15 bp, Homo sapiens
tttcgaactcctgac

SEQ ID NO: 1242912 - DNA, 15 bp, Homo sapiens
gtttcgaactcctga

SEQ ID NO: 1242913 - DNA, 15 bp, Homo sapiens
ggtttcgaactcctg

SEQ ID NO: 1242914 - DNA, 15 bp, Homo sapiens
tggtttcgaactcct

SEQ ID NO: 1242915 - DNA, 15 bp, Homo sapiens
ctggtttcgaactcc

SEQ ID NO: 1242916 - DNA, 15 bp, Homo sapiens
ttggccaggctggtt

SEQ ID NO: 1242917 - DNA, 15 bp, Homo sapiens
aagtttcaccatgtt

SEQ ID NO: 1242918 - DNA, 15 bp, Homo sapiens
gaagtttcaccatgt

SEQ ID NO: 1242919 - DNA, 15 bp, Homo sapiens
cgaagtttcaccatg

SEQ ID NO: 1242920 - DNA, 15 bp, Homo sapiens
acgaagtttcaccat

SEQ ID NO: 1242921 - DNA, 15 bp, Homo sapiens
gacgaagtttcacca

SEQ ID NO: 1242922 - DNA, 15 bp, Homo sapiens
agacgaagtttcacc

SEQ ID NO: 1242923 - DNA, 15 bp, Homo sapiens
gagacgaagtttcac

SEQ ID NO: 1242924 - DNA, 15 bp, Homo sapiens
agagacgaagtttca

SEQ ID NO: 1242925 - DNA, 15 bp, Homo sapiens
tagagacgaagtttc

SEQ ID NO: 1242926 - DNA, 15 bp, Homo sapiens
gtagagacgaagttt

SEQ ID NO: 1242927 - DNA, 15 bp, Homo sapiens
agtagagacgaagtt

SEQ ID NO: 1242928 - DNA, 15 bp, Homo sapiens
tagtagagacgaagt

SEQ ID NO: 1242929 - DNA, 15 bp, Homo sapiens
ttagtagagacgaag

SEQ ID NO: 1242930 - DNA, 15 bp, Homo sapiens
tttagtagagacgaa

SEQ ID NO: 1242931 - DNA, 15 bp, Homo sapiens
tggctaatttttttg

SEQ ID NO: 1242932 - DNA, 15 bp, Homo sapiens
ctggctaattttttt

SEQ ID NO: 1242933 - DNA, 15 bp, Homo sapiens
tccacacctggctaa

SEQ ID NO: 1242934 - DNA, 15 bp, Homo sapiens
ctccacacctggcta

SEQ ID NO: 1242935 - DNA, 15 bp, Homo sapiens
cctccacacctggct

SEQ ID NO: 1242936 - DNA, 15 bp, Homo sapiens
gcctccacacctggc

SEQ ID NO: 1242937 - DNA, 15 bp, Homo sapiens
tgcctccacacctgg

SEQ ID NO: 1242938 - DNA, 15 bp, Homo sapiens
gtgcctccacacctg

SEQ ID NO: 1242939 - DNA, 15 bp, Homo sapiens
cgtgcctccacacct

SEQ ID NO: 1242940 - DNA, 15 bp, Homo sapiens
gcgtgcctccacacc

SEQ ID NO: 1242941 - DNA, 15 bp, Homo sapiens
cgcgtgcctccacac

SEQ ID NO: 1242942 - DNA, 15 bp, Homo sapiens
gcgcgtgcctccaca

SEQ ID NO: 1242943 - DNA, 15 bp, Homo sapiens
ggcgcgtgcctccac

SEQ ID NO: 1242944 - DNA, 15 bp, Homo sapiens
aggcgcgtgcctcca

SEQ ID NO: 1242945 - DNA, 15 bp, Homo sapiens
caggcgcgtgcctcc

SEQ ID NO: 1242946 - DNA, 15 bp, Homo sapiens
acaggcgcgtgcctc

SEQ ID NO: 1242947 - DNA, 15 bp, Homo sapiens
tacaggcgcgtgcct

SEQ ID NO: 1242948 - DNA, 15 bp, Homo sapiens
cctacaggcgcgtgc

SEQ ID NO: 1242949 - DNA, 15 bp, Homo sapiens
gcctacaggcgcgtg

SEQ ID NO: 1242950 - DNA, 15 bp, Homo sapiens
ggcctacaggcgcgt

SEQ ID NO: 1242951 - DNA, 15 bp, Homo sapiens
gggcctacaggcgcg

SEQ ID NO: 1242952 - DNA, 15 bp, Homo sapiens
tgggcctacaggcgc

SEQ ID NO: 1242953 - DNA, 15 bp, Homo sapiens
ctgggcctacaggcg

SEQ ID NO: 1242954 - DNA, 15 bp, Homo sapiens
gctgggcctacaggc

SEQ ID NO: 1242955 - DNA, 15 bp, Homo sapiens
agctgggcctacagg

SEQ ID NO: 1242956 - DNA, 15 bp, Homo sapiens
tagctgggcctacag

SEQ ID NO: 1242957 - DNA, 15 bp, Homo sapiens
gtagctgggcctaca

SEQ ID NO: 1242958 - DNA, 15 bp, Homo sapiens
agtagctgggcctac

SEQ ID NO: 1242959 - DNA, 15 bp, Homo sapiens
gagtagctgggccta

SEQ ID NO: 1242960 - DNA, 15 bp, Homo sapiens
cgagtagctgggcct

SEQ ID NO: 1242961 - DNA, 15 bp, Homo sapiens
ccgagtagctgggcc

SEQ ID NO: 1242962 - DNA, 15 bp, Homo sapiens
ctcactgcaacctcc

SEQ ID NO: 1242963 - DNA, 15 bp, Homo sapiens
tatgatctcggctca

SEQ ID NO: 1242964 - DNA, 15 bp, Homo sapiens
gtatgatctcggctc

SEQ ID NO: 1242965 - DNA, 15 bp, Homo sapiens
ggtatgatctcggct

SEQ ID NO: 1242966 - DNA, 15 bp, Homo sapiens
tggtatgatctcggc

SEQ ID NO: 1242967 - DNA, 15 bp, Homo sapiens
gtggtatgatctcgg

SEQ ID NO: 1242968 - DNA, 15 bp, Homo sapiens
agtggtatgatctcg

SEQ ID NO: 1242969 - DNA, 15 bp, Homo sapiens
cagtggtatgatctc

SEQ ID NO: 1242970 - DNA, 15 bp, Homo sapiens
agccaggctggagtg

SEQ ID NO: 1242971 - DNA, 15 bp, Homo sapiens
cagccaggctggagt

SEQ ID NO: 1242972 - DNA, 15 bp, Homo sapiens
tcagccaggctggag

SEQ ID NO: 1242973 - DNA, 15 bp, Homo sapiens
gtcagccaggctgga

SEQ ID NO: 1242974 - DNA, 15 bp, Homo sapiens
tgtcagccaggctgg

SEQ ID NO: 1242975 - DNA, 15 bp, Homo sapiens
gtgtcagccaggctg

SEQ ID NO: 1242976 - DNA, 15 bp, Homo sapiens
tgtgtcagccaggct

SEQ ID NO: 1242977 - DNA, 15 bp, Homo sapiens
ctgtgtcagccaggc

SEQ ID NO: 1242978 - DNA, 15 bp, Homo sapiens
gctgtgtcagccagg

SEQ ID NO: 1242979 - DNA, 15 bp, Homo sapiens
tgctgtgtcagccag

SEQ ID NO: 1242980 - DNA, 15 bp, Homo sapiens
ttgctgtgtcagcca

SEQ ID NO: 1242981 - DNA, 15 bp, Homo sapiens
cttgctgtgtcagcc

SEQ ID NO: 1242982 - DNA, 15 bp, Homo sapiens
tcttgctgtgtcagc

SEQ ID NO: 1242983 - DNA, 15 bp, Homo sapiens
gtcttgctgtgtcag

SEQ ID NO: 1242984 - DNA, 15 bp, Homo sapiens
agtcttgctgtgtca

SEQ ID NO: 1242985 - DNA, 15 bp, Homo sapiens
gagtcttgctgtgtc

SEQ ID NO: 1242986 - DNA, 15 bp, Homo sapiens
ggagtcttgctgtgt

SEQ ID NO: 1242987 - DNA, 15 bp, Homo sapiens
cggagtcttgctgtg

SEQ ID NO: 1242988 - DNA, 15 bp, Homo sapiens
acggagtcttgctgt

SEQ ID NO: 1242989 - DNA, 15 bp, Homo sapiens
gacggagtcttgctg

SEQ ID NO: 1242990 - DNA, 15 bp, Homo sapiens
tttgttttgagacgg

SEQ ID NO: 1242991 - DNA, 15 bp, Homo sapiens
ttttgttttgagacg

SEQ ID NO: 1242992 - DNA, 15 bp, Homo sapiens
gttttgttttgagac

SEQ ID NO: 1242993 - DNA, 15 bp, Homo sapiens
tgttttgttttgaga

SEQ ID NO: 1242994 - DNA, 15 bp, Homo sapiens
ttgttttgttttgag

SEQ ID NO: 1242995 - DNA, 15 bp, Homo sapiens
tttgttttgttttga

SEQ ID NO: 1242996 - DNA, 15 bp, Homo sapiens
ctatttttgttttgt

SEQ ID NO: 1242997 - DNA, 15 bp, Homo sapiens
gctatttttgttttg

SEQ ID NO: 1242998 - DNA, 15 bp, Homo sapiens
agctatttttgtttt

SEQ ID NO: 1242999 - DNA, 15 bp, Homo sapiens
cagctatttttgttt

SEQ ID NO: 1243000 - DNA, 15 bp, Homo sapiens
ccagctatttttgtt

SEQ ID NO: 1243001 - DNA, 15 bp, Homo sapiens
cccagctatttttgt

SEQ ID NO: 1243002 - DNA, 15 bp, Homo sapiens
acccagctatttttg

SEQ ID NO: 1243003 - DNA, 15 bp, Homo sapiens
cacccagctattttt

SEQ ID NO: 1243004 - DNA, 15 bp, Homo sapiens
acacccagctatttt

SEQ ID NO: 1243005 - DNA, 15 bp, Homo sapiens
cacacccagctattt

SEQ ID NO: 1243006 - DNA, 15 bp, Homo sapiens
ccacacccagctatt

SEQ ID NO: 1243007 - DNA, 15 bp, Homo sapiens
accacacccagctat

SEQ ID NO: 1243008 - DNA, 15 bp, Homo sapiens
tgtgcaccaccacac

SEQ ID NO: 1243009 - DNA, 15 bp, Homo sapiens
gtgtgcaccaccaca

SEQ ID NO: 1243010 - DNA, 15 bp, Homo sapiens
ggtgtgcaccaccac

SEQ ID NO: 1243011 - DNA, 15 bp, Homo sapiens
gttctcctgcctcag

SEQ ID NO: 1243012 - DNA, 15 bp, Homo sapiens
agttctcctgcctca

SEQ ID NO: 1243013 - DNA, 15 bp, Homo sapiens
cagttctcctgcctc

SEQ ID NO: 1243014 - DNA, 15 bp, Homo sapiens
gcagttctcctgcct

SEQ ID NO: 1243015 - DNA, 15 bp, Homo sapiens
agcagttctcctgcc

SEQ ID NO: 1243016 - DNA, 15 bp, Homo sapiens
aagcagttctcctgc

SEQ ID NO: 1243017 - DNA, 15 bp, Homo sapiens
caagcagttctcctg

SEQ ID NO: 1243018 - DNA, 15 bp, Homo sapiens
tcaagcagttctcct

SEQ ID NO: 1243019 - DNA, 15 bp, Homo sapiens
ttcaagcagttctcc

SEQ ID NO: 1243020 - DNA, 15 bp, Homo sapiens
gttcaagcagttctc

SEQ ID NO: 1243021 - DNA, 15 bp, Homo sapiens
ggttcaagcagttct

SEQ ID NO: 1243022 - DNA, 15 bp, Homo sapiens
gggttcaagcagttc

SEQ ID NO: 1243023 - DNA, 15 bp, Homo sapiens
cgggttcaagcagtt

SEQ ID NO: 1243024 - DNA, 15 bp, Homo sapiens
ccgggttcaagcagt

SEQ ID NO: 1243025 - DNA, 15 bp, Homo sapiens
cccgggttcaagcag

SEQ ID NO: 1243026 - DNA, 15 bp, Homo sapiens
accacctcccgggtt

SEQ ID NO: 1243027 - DNA, 15 bp, Homo sapiens
caccacctcccgggt

SEQ ID NO: 1243028 - DNA, 15 bp, Homo sapiens
ccaccacctcccggg

SEQ ID NO: 1243029 - DNA, 15 bp, Homo sapiens
accaccacctcccgg

SEQ ID NO: 1243030 - DNA, 15 bp, Homo sapiens
aaccaccacctcccg

SEQ ID NO: 1243031 - DNA, 15 bp, Homo sapiens
caaccaccacctccc

SEQ ID NO: 1243032 - DNA, 15 bp, Homo sapiens
gcaaccaccacctcc

SEQ ID NO: 1243033 - DNA, 15 bp, Homo sapiens
tgcaaccaccacctc

SEQ ID NO: 1243034 - DNA, 15 bp, Homo sapiens
ctgcaaccaccacct

SEQ ID NO: 1243035 - DNA, 15 bp, Homo sapiens
actgcaaccaccacc

SEQ ID NO: 1243036 - DNA, 15 bp, Homo sapiens
tactgcaaccaccac

SEQ ID NO: 1243037 - DNA, 15 bp, Homo sapiens
ctactgcaaccacca

SEQ ID NO: 1243038 - DNA, 15 bp, Homo sapiens
cctactgcaaccacc

SEQ ID NO: 1243039 - DNA, 15 bp, Homo sapiens
gcctactgcaaccac

SEQ ID NO: 1243040 - DNA, 15 bp, Homo sapiens
ggcctactgcaacca

SEQ ID NO: 1243041 - DNA, 15 bp, Homo sapiens
cggcctactgcaacc

SEQ ID NO: 1243042 - DNA, 15 bp, Homo sapiens
tcggcctactgcaac

SEQ ID NO: 1243043 - DNA, 15 bp, Homo sapiens
ctcggcctactgcaa

SEQ ID NO: 1243044 - DNA, 15 bp, Homo sapiens
tctcggcctactgca

SEQ ID NO: 1243045 - DNA, 15 bp, Homo sapiens
atctcggcctactgc

SEQ ID NO: 1243046 - DNA, 15 bp, Homo sapiens
gatctcggcctactg

SEQ ID NO: 1243047 - DNA, 15 bp, Homo sapiens
tgatctcggcctact

SEQ ID NO: 1243048 - DNA, 15 bp, Homo sapiens
atgatctcggcctac

SEQ ID NO: 1243049 - DNA, 15 bp, Homo sapiens
catgatctcggccta

SEQ ID NO: 1243050 - DNA, 15 bp, Homo sapiens
gcatgatctcggcct

SEQ ID NO: 1243051 - DNA, 15 bp, Homo sapiens
gcccaagctggagtg

SEQ ID NO: 1243052 - DNA, 15 bp, Homo sapiens
agcccaagctggagt

SEQ ID NO: 1243053 - DNA, 15 bp, Homo sapiens
tagcccaagctggag

SEQ ID NO: 1243054 - DNA, 15 bp, Homo sapiens
gtagcccaagctgga

SEQ ID NO: 1243055 - DNA, 15 bp, Homo sapiens
tgtagcccaagctgg

SEQ ID NO: 1243056 - DNA, 15 bp, Homo sapiens
ctgtagcccaagctg

SEQ ID NO: 1243057 - DNA, 15 bp, Homo sapiens
tctgtagcccaagct

SEQ ID NO: 1243058 - DNA, 15 bp, Homo sapiens
ctctgtagcccaagc

SEQ ID NO: 1243059 - DNA, 15 bp, Homo sapiens
gctctgtagcccaag

SEQ ID NO: 1243060 - DNA, 15 bp, Homo sapiens
tgctctgtagcccaa

SEQ ID NO: 1243061 - DNA, 15 bp, Homo sapiens
ttgctctgtagccca

SEQ ID NO: 1243062 - DNA, 15 bp, Homo sapiens
cttgctctgtagccc

SEQ ID NO: 1243063 - DNA, 15 bp, Homo sapiens
tcttgctctgtagcc

SEQ ID NO: 1243064 - DNA, 15 bp, Homo sapiens
gtcttgctctgtagc

SEQ ID NO: 1243065 - DNA, 15 bp, Homo sapiens
agtcttgctctgtag

SEQ ID NO: 1243066 - DNA, 15 bp, Homo sapiens
gagtcttgctctgta

SEQ ID NO: 1243067 - DNA, 15 bp, Homo sapiens
tttttttttggagat

SEQ ID NO: 1243068 - DNA, 15 bp, Homo sapiens
atttgtttttttttt

SEQ ID NO: 1243069 - DNA, 15 bp, Homo sapiens
aatttgttttttttt

SEQ ID NO: 1243070 - DNA, 15 bp, Homo sapiens
aaatttgtttttttt

SEQ ID NO: 1243071 - DNA, 15 bp, Homo sapiens
aaaatttgttttttt

SEQ ID NO: 1243072 - DNA, 15 bp, Homo sapiens
caaaatttgtttttt

SEQ ID NO: 1243073 - DNA, 15 bp, Homo sapiens
tcaaaatttgttttt

SEQ ID NO: 1243074 - DNA, 15 bp, Homo sapiens
ttcaaaatttgtttt

SEQ ID NO: 1243075 - DNA, 15 bp, Homo sapiens
gttcaaaatttgttt

SEQ ID NO: 1243076 - DNA, 15 bp, Homo sapiens
ggttcaaaatttgtt

SEQ ID NO: 1243077 - DNA, 15 bp, Homo sapiens
gggttcaaaatttgt

SEQ ID NO: 1243078 - DNA, 15 bp, Homo sapiens
ggggttcaaaatttg

SEQ ID NO: 1243079 - DNA, 15 bp, Homo sapiens
aggggttcaaaattt

SEQ ID NO: 1243080 - DNA, 15 bp, Homo sapiens
caggggttcaaaatt

SEQ ID NO: 1243081 - DNA, 15 bp, Homo sapiens
gcaggggttcaaaat

SEQ ID NO: 1243082 - DNA, 15 bp, Homo sapiens
ggcaggggttcaaaa

SEQ ID NO: 1243083 - DNA, 15 bp, Homo sapiens
gggcaggggttcaaa

SEQ ID NO: 1243084 - DNA, 15 bp, Homo sapiens
tgggcaggggttcaa

SEQ ID NO: 1243085 - DNA, 15 bp, Homo sapiens
atgggcaggggttca

SEQ ID NO: 1243086 - DNA, 15 bp, Homo sapiens
gatgggcaggggttc

SEQ ID NO: 1243087 - DNA, 15 bp, Homo sapiens
agatgggcaggggtt

SEQ ID NO: 1243088 - DNA, 15 bp, Homo sapiens
aagatgggcaggggt

SEQ ID NO: 1243089 - DNA, 15 bp, Homo sapiens
gaagatgggcagggg

SEQ ID NO: 1243090 - DNA, 15 bp, Homo sapiens
ggaagatgggcaggg

SEQ ID NO: 1243091 - DNA, 15 bp, Homo sapiens
gccaggaagatgggc

SEQ ID NO: 1243092 - DNA, 15 bp, Homo sapiens
tgccaggaagatggg

SEQ ID NO: 1243093 - DNA, 15 bp, Homo sapiens
ctgccaggaagatgg

SEQ ID NO: 1243094 - DNA, 15 bp, Homo sapiens
cctgccaggaagatg

SEQ ID NO: 1243095 - DNA, 15 bp, Homo sapiens
gcctgccaggaagat

SEQ ID NO: 1243096 - DNA, 15 bp, Homo sapiens
ggcctgccaggaaga

SEQ ID NO: 1243097 - DNA, 15 bp, Homo sapiens
gggcctgccaggaag

SEQ ID NO: 1243098 - DNA, 15 bp, Homo sapiens
tgggcctgccaggaa

SEQ ID NO: 1243099 - DNA, 15 bp, Homo sapiens
ctgggcctgccagga

SEQ ID NO: 1243100 - DNA, 15 bp, Homo sapiens
gctgggcctgccagg

SEQ ID NO: 1243101 - DNA, 15 bp, Homo sapiens
ggctgggcctgccag

SEQ ID NO: 1243102 - DNA, 15 bp, Homo sapiens
gggctgggcctgcca

SEQ ID NO: 1243103 - DNA, 15 bp, Homo sapiens
ggggctgggcctgcc

SEQ ID NO: 1243104 - DNA, 15 bp, Homo sapiens
tggggctgggcctgc

SEQ ID NO: 1243105 - DNA, 15 bp, Homo sapiens
ctggggctgggcctg

SEQ ID NO: 1243106 - DNA, 15 bp, Homo sapiens
gctggggctgggcct

SEQ ID NO: 1243107 - DNA, 15 bp, Homo sapiens
ggctggggctgggcc

SEQ ID NO: 1243108 - DNA, 15 bp, Homo sapiens
gggctggggctgggc

SEQ ID NO: 1243109 - DNA, 15 bp, Homo sapiens
tgggctggggctggg

SEQ ID NO: 1243110 - DNA, 15 bp, Homo sapiens
ctgggctggggctgg

SEQ ID NO: 1243111 - DNA, 15 bp, Homo sapiens
cctgggctggggctg

SEQ ID NO: 1243112 - DNA, 15 bp, Homo sapiens
ccctgggctggggct

SEQ ID NO: 1243113 - DNA, 15 bp, Homo sapiens
cccctgggctggggc

SEQ ID NO: 1243114 - DNA, 15 bp, Homo sapiens
tcccctgggctgggg

SEQ ID NO: 1243115 - DNA, 15 bp, Homo sapiens
gtcccctgggctggg

SEQ ID NO: 1243116 - DNA, 15 bp, Homo sapiens
ggtcccctgggctgg

SEQ ID NO: 1243117 - DNA, 15 bp, Homo sapiens
gggtcccctgggctg

SEQ ID NO: 1243118 - DNA, 15 bp, Homo sapiens
ggggtcccctgggct

SEQ ID NO: 1243119 - DNA, 15 bp, Homo sapiens
tggggtcccctgggc

SEQ ID NO: 1243120 - DNA, 15 bp, Homo sapiens
ctggggtcccctggg

SEQ ID NO: 1243121 - DNA, 15 bp, Homo sapiens
tctggggtcccctgg

SEQ ID NO: 1243122 - DNA, 15 bp, Homo sapiens
gtctggggtcccctg

SEQ ID NO: 1243123 - DNA, 15 bp, Homo sapiens
cgtctggggtcccct

SEQ ID NO: 1243124 - DNA, 15 bp, Homo sapiens
acgtctggggtcccc

SEQ ID NO: 1243125 - DNA, 15 bp, Homo sapiens
gacgtctggggtccc

SEQ ID NO: 1243126 - DNA, 15 bp, Homo sapiens
agacgtctggggtcc

SEQ ID NO: 1243127 - DNA, 15 bp, Homo sapiens
gagacgtctggggtc

SEQ ID NO: 1243128 - DNA, 15 bp, Homo sapiens
ggagacgtctggggt

SEQ ID NO: 1243129 - DNA, 15 bp, Homo sapiens
tggagacgtctgggg

SEQ ID NO: 1243130 - DNA, 15 bp, Homo sapiens
ctggagacgtctggg

SEQ ID NO: 1243131 - DNA, 15 bp, Homo sapiens
actggagacgtctgg

SEQ ID NO: 1243132 - DNA, 15 bp, Homo sapiens
cactggagacgtctg

SEQ ID NO: 1243133 - DNA, 15 bp, Homo sapiens
gcactggagacgtct

SEQ ID NO: 1243134 - DNA, 15 bp, Homo sapiens
ggcactggagacgtc

SEQ ID NO: 1243135 - DNA, 15 bp, Homo sapiens
aggcactggagacgt

SEQ ID NO: 1243136 - DNA, 15 bp, Homo sapiens
aaggcactggagacg

SEQ ID NO: 1243137 - DNA, 15 bp, Homo sapiens
caaggcactggagac

SEQ ID NO: 1243138 - DNA, 15 bp, Homo sapiens
ccaaggcactggaga

SEQ ID NO: 1243139 - DNA, 15 bp, Homo sapiens
tccaaggcactggag

SEQ ID NO: 1243140 - DNA, 15 bp, Homo sapiens
atccaaggcactgga

SEQ ID NO: 1243141 - DNA, 15 bp, Homo sapiens
tatccaaggcactgg

SEQ ID NO: 1243142 - DNA, 15 bp, Homo sapiens
ttatccaaggcactg

SEQ ID NO: 1243143 - DNA, 15 bp, Homo sapiens
cttatccaaggcact

SEQ ID NO: 1243144 - DNA, 15 bp, Homo sapiens
gcttatccaaggcac

SEQ ID NO: 1243145 - DNA, 15 bp, Homo sapiens
agcttatccaaggca

SEQ ID NO: 1243146 - DNA, 15 bp, Homo sapiens
cagcttatccaaggc

SEQ ID NO: 1243147 - DNA, 15 bp, Homo sapiens
tcagcttatccaagg

SEQ ID NO: 1243148 - DNA, 15 bp, Homo sapiens
ttcagcttatccaag

SEQ ID NO: 1243149 - DNA, 15 bp, Homo sapiens
cttcagcttatccaa

SEQ ID NO: 1243150 - DNA, 15 bp, Homo sapiens
ccttcagcttatcca

SEQ ID NO: 1243151 - DNA, 15 bp, Homo sapiens
tccttcagcttatcc

SEQ ID NO: 1243152 - DNA, 15 bp, Homo sapiens
ctccttcagcttatc

SEQ ID NO: 1243153 - DNA, 15 bp, Homo sapiens
actccttcagcttat

SEQ ID NO: 1243154 - DNA, 15 bp, Homo sapiens
aactccttcagctta

SEQ ID NO: 1243155 - DNA, 15 bp, Homo sapiens
aaactccttcagctt

SEQ ID NO: 1243156 - DNA, 15 bp, Homo sapiens
caaactccttcagct

SEQ ID NO: 1243157 - DNA, 15 bp, Homo sapiens
ccaaactccttcagc

SEQ ID NO: 1243158 - DNA, 15 bp, Homo sapiens
tccaaactccttcag

SEQ ID NO: 1243159 - DNA, 15 bp, Homo sapiens
ttccaaactccttca

SEQ ID NO: 1243160 - DNA, 15 bp, Homo sapiens
tttccaaactccttc

SEQ ID NO: 1243161 - DNA, 15 bp, Homo sapiens
gtttccaaactcctt

SEQ ID NO: 1243162 - DNA, 15 bp, Homo sapiens
tgtttccaaactcct

SEQ ID NO: 1243163 - DNA, 15 bp, Homo sapiens
gtgtttccaaactcc

SEQ ID NO: 1243164 - DNA, 15 bp, Homo sapiens
tgtgtttccaaactc

SEQ ID NO: 1243165 - DNA, 15 bp, Homo sapiens
gtgtgtttccaaact

SEQ ID NO: 1243166 - DNA, 15 bp, Homo sapiens
agtgtgtttccaaac

SEQ ID NO: 1243167 - DNA, 15 bp, Homo sapiens
cagtgtgtttccaaa

SEQ ID NO: 1243168 - DNA, 15 bp, Homo sapiens
ccagtgtgtttccaa

SEQ ID NO: 1243169 - DNA, 15 bp, Homo sapiens
tccagtgtgtttcca

SEQ ID NO: 1243170 - DNA, 15 bp, Homo sapiens
ctccagtgtgtttcc

SEQ ID NO: 1243171 - DNA, 15 bp, Homo sapiens
cctccagtgtgtttc

SEQ ID NO: 1243172 - DNA, 15 bp, Homo sapiens
tcctccagtgtgttt

SEQ ID NO: 1243173 - DNA, 15 bp, Homo sapiens
gtcctccagtgtgtt

SEQ ID NO: 1243174 - DNA, 15 bp, Homo sapiens
tgtcctccagtgtgt

SEQ ID NO: 1243175 - DNA, 15 bp, Homo sapiens
ttgtcctccagtgtg

SEQ ID NO: 1243176 - DNA, 15 bp, Homo sapiens
cttgtcctccagtgt

SEQ ID NO: 1243177 - DNA, 15 bp, Homo sapiens
ccttgtcctccagtg

SEQ ID NO: 1243178 - DNA, 15 bp, Homo sapiens
gccttgtcctccagt

SEQ ID NO: 1243179 - DNA, 15 bp, Homo sapiens
agccttgtcctccag

SEQ ID NO: 1243180 - DNA, 15 bp, Homo sapiens
gagccttgtcctcca

SEQ ID NO: 1243181 - DNA, 15 bp, Homo sapiens
cgagccttgtcctcc

SEQ ID NO: 1243182 - DNA, 15 bp, Homo sapiens
ccgagccttgtcctc

SEQ ID NO: 1243183 - DNA, 15 bp, Homo sapiens
cccgagccttgtcct

SEQ ID NO: 1243184 - DNA, 15 bp, Homo sapiens
tcccgagccttgtcc

SEQ ID NO: 1243185 - DNA, 15 bp, Homo sapiens
ttcccgagccttgtc

SEQ ID NO: 1243186 - DNA, 15 bp, Homo sapiens
gttcccgagccttgt

SEQ ID NO: 1243187 - DNA, 15 bp, Homo sapiens
agttcccgagccttg

SEQ ID NO: 1243188 - DNA, 15 bp, Homo sapiens
gagttcccgagcctt

SEQ ID NO: 1243189 - DNA, 15 bp, Homo sapiens
tgagttcccgagcct

SEQ ID NO: 1243190 - DNA, 15 bp, Homo sapiens
atgagttcccgagcc

SEQ ID NO: 1243191 - DNA, 15 bp, Homo sapiens
gatgagttcccgagc

SEQ ID NO: 1243192 - DNA, 15 bp, Homo sapiens
tgatgagttcccgag

SEQ ID NO: 1243193 - DNA, 15 bp, Homo sapiens
ctgatgagttcccga

SEQ ID NO: 1243194 - DNA, 15 bp, Homo sapiens
gctgatgagttcccg

SEQ ID NO: 1243195 - DNA, 15 bp, Homo sapiens
ggctgatgagttccc

SEQ ID NO: 1243196 - DNA, 15 bp, Homo sapiens
cggctgatgagttcc

SEQ ID NO: 1243197 - DNA, 15 bp, Homo sapiens
gcggctgatgagttc

SEQ ID NO: 1243198 - DNA, 15 bp, Homo sapiens
tgcggctgatgagtt

SEQ ID NO: 1243199 - DNA, 15 bp, Homo sapiens
atgcggctgatgagt

SEQ ID NO: 1243200 - DNA, 15 bp, Homo sapiens
gatgcggctgatgag

SEQ ID NO: 1243201 - DNA, 15 bp, Homo sapiens
tgatgcggctgatga

SEQ ID NO: 1243202 - DNA, 15 bp, Homo sapiens
ttgatgcggctgatg

SEQ ID NO: 1243203 - DNA, 15 bp, Homo sapiens
tttgatgcggctgat

SEQ ID NO: 1243204 - DNA, 15 bp, Homo sapiens
gtttgatgcggctga

SEQ ID NO: 1243205 - DNA, 15 bp, Homo sapiens
tgtttgatgcggctg

SEQ ID NO: 1243206 - DNA, 15 bp, Homo sapiens
ctgtttgatgcggct

SEQ ID NO: 1243207 - DNA, 15 bp, Homo sapiens
tctgtttgatgcggc

SEQ ID NO: 1243208 - DNA, 15 bp, Homo sapiens
ctctgtttgatgcgg

SEQ ID NO: 1243209 - DNA, 15 bp, Homo sapiens
actctgtttgatgcg

SEQ ID NO: 1243210 - DNA, 15 bp, Homo sapiens
cactctgtttgatgc

SEQ ID NO: 1243211 - DNA, 15 bp, Homo sapiens
tcactctgtttgatg

SEQ ID NO: 1243212 - DNA, 15 bp, Homo sapiens
ttcactctgtttgat

SEQ ID NO: 1243213 - DNA, 15 bp, Homo sapiens
gttcactctgtttga

SEQ ID NO: 1243214 - DNA, 15 bp, Homo sapiens
agttcactctgtttg

SEQ ID NO: 1243215 - DNA, 15 bp, Homo sapiens
aagttcactctgttt

SEQ ID NO: 1243216 - DNA, 15 bp, Homo sapiens
aaagttcactctgtt

SEQ ID NO: 1243217 - DNA, 15 bp, Homo sapiens
gaaagttcactctgt

SEQ ID NO: 1243218 - DNA, 15 bp, Homo sapiens
agaaagttcactctg

SEQ ID NO: 1243219 - DNA, 15 bp, Homo sapiens
cagaaagttcactct

SEQ ID NO: 1243220 - DNA, 15 bp, Homo sapiens
gcagaaagttcactc

SEQ ID NO: 1243221 - DNA, 15 bp, Homo sapiens
ggcagaaagttcact

SEQ ID NO: 1243222 - DNA, 15 bp, Homo sapiens
tggcagaaagttcac

SEQ ID NO: 1243223 - DNA, 15 bp, Homo sapiens
ttggcagaaagttca

SEQ ID NO: 1243224 - DNA, 15 bp, Homo sapiens
cttggcagaaagttc

SEQ ID NO: 1243225 - DNA, 15 bp, Homo sapiens
tcttggcagaaagtt

SEQ ID NO: 1243226 - DNA, 15 bp, Homo sapiens
atcttggcagaaagt

SEQ ID NO: 1243227 - DNA, 15 bp, Homo sapiens
catcttggcagaaag

SEQ ID NO: 1243228 - DNA, 15 bp, Homo sapiens
gcatcttggcagaaa

SEQ ID NO: 1243229 - DNA, 15 bp, Homo sapiens
cgcatcttggcagaa

SEQ ID NO: 1243230 - DNA, 15 bp, Homo sapiens
ccgcatcttggcaga

SEQ ID NO: 1243231 - DNA, 15 bp, Homo sapiens
accgcatcttggcag

SEQ ID NO: 1243232 - DNA, 15 bp, Homo sapiens
aaccgcatcttggca

SEQ ID NO: 1243233 - DNA, 15 bp, Homo sapiens
taaccgcatcttggc

SEQ ID NO: 1243234 - DNA, 15 bp, Homo sapiens
ctaaccgcatcttgg

SEQ ID NO: 1243235 - DNA, 15 bp, Homo sapiens
tctaaccgcatcttg

SEQ ID NO: 1243236 - DNA, 15 bp, Homo sapiens
ttctaaccgcatctt

SEQ ID NO: 1243237 - DNA, 15 bp, Homo sapiens
gttctaaccgcatct

SEQ ID NO: 1243238 - DNA, 15 bp, Homo sapiens
ggttctaaccgcatc

SEQ ID NO: 1243239 - DNA, 15 bp, Homo sapiens
gggttctaaccgcat

SEQ ID NO: 1243240 - DNA, 15 bp, Homo sapiens
agggttctaaccgca

SEQ ID NO: 1243241 - DNA, 15 bp, Homo sapiens
aagggttctaaccgc

SEQ ID NO: 1243242 - DNA, 15 bp, Homo sapiens
gaagggttctaaccg

SEQ ID NO: 1243243 - DNA, 15 bp, Homo sapiens
ggaagggttctaacc

SEQ ID NO: 1243244 - DNA, 15 bp, Homo sapiens
gggaagggttctaac

SEQ ID NO: 1243245 - DNA, 15 bp, Homo sapiens
tgggaagggttctaa

SEQ ID NO: 1243246 - DNA, 15 bp, Homo sapiens
ctgggaagggttcta

SEQ ID NO: 1243247 - DNA, 15 bp, Homo sapiens
cctgggaagggttct

SEQ ID NO: 1243248 - DNA, 15 bp, Homo sapiens
ccctgggaagggttc

SEQ ID NO: 1243249 - DNA, 15 bp, Homo sapiens
gccctgggaagggtt

SEQ ID NO: 1243250 - DNA, 15 bp, Homo sapiens
tgccctgggaagggt

SEQ ID NO: 1243251 - DNA, 15 bp, Homo sapiens
gtgccctgggaaggg

SEQ ID NO: 1243252 - DNA, 15 bp, Homo sapiens
cgtgccctgggaagg

SEQ ID NO: 1243253 - DNA, 15 bp, Homo sapiens
ccgtgccctgggaag

SEQ ID NO: 1243254 - DNA, 15 bp, Homo sapiens
cccgtgccctgggaa

SEQ ID NO: 1243255 - DNA, 15 bp, Homo sapiens
tcccgtgccctggga

SEQ ID NO: 1243256 - DNA, 15 bp, Homo sapiens
ctcccgtgccctggg

SEQ ID NO: 1243257 - DNA, 15 bp, Homo sapiens
tctcccgtgccctgg

SEQ ID NO: 1243258 - DNA, 15 bp, Homo sapiens
ctctcccgtgccctg

SEQ ID NO: 1243259 - DNA, 15 bp, Homo sapiens
gctctcccgtgccct

SEQ ID NO: 1243260 - DNA, 15 bp, Homo sapiens
agctctcccgtgccc

SEQ ID NO: 1243261 - DNA, 15 bp, Homo sapiens
cagctctcccgtgcc

SEQ ID NO: 1243262 - DNA, 15 bp, Homo sapiens
ccagctctcccgtgc

SEQ ID NO: 1243263 - DNA, 15 bp, Homo sapiens
cccagctctcccgtg

SEQ ID NO: 1243264 - DNA, 15 bp, Homo sapiens
ccccagctctcccgt

SEQ ID NO: 1243265 - DNA, 15 bp, Homo sapiens
accccagctctcccg

SEQ ID NO: 1243266 - DNA, 15 bp, Homo sapiens
caccccagctctccc

SEQ ID NO: 1243267 - DNA, 15 bp, Homo sapiens
acaccccagctctcc

SEQ ID NO: 1243268 - DNA, 15 bp, Homo sapiens
cacaccccagctctc

SEQ ID NO: 1243269 - DNA, 15 bp, Homo sapiens
acacaccccagctct

SEQ ID NO: 1243270 - DNA, 15 bp, Homo sapiens
aacacaccccagctc

SEQ ID NO: 1243271 - DNA, 15 bp, Homo sapiens
aaacacaccccagct

SEQ ID NO: 1243272 - DNA, 15 bp, Homo sapiens
aaaacacaccccagc

SEQ ID NO: 1243273 - DNA, 15 bp, Homo sapiens
aaaaacacaccccag

SEQ ID NO: 1243274 - DNA, 15 bp, Homo sapiens
caaaaacacacccca

SEQ ID NO: 1243275 - DNA, 15 bp, Homo sapiens
ccaaaaacacacccc

SEQ ID NO: 1243276 - DNA, 15 bp, Homo sapiens
cccaaaaacacaccc

SEQ ID NO: 1243277 - DNA, 15 bp, Homo sapiens
acccaaaaacacacc

SEQ ID NO: 1243278 - DNA, 15 bp, Homo sapiens
cacccaaaaacacac

SEQ ID NO: 1243279 - DNA, 15 bp, Homo sapiens
ccacccaaaaacaca

SEQ ID NO: 1243280 - DNA, 15 bp, Homo sapiens
tccacccaaaaacac

SEQ ID NO: 1243281 - DNA, 15 bp, Homo sapiens
ctccacccaaaaaca

SEQ ID NO: 1243282 - DNA, 15 bp, Homo sapiens
gctccacccaaaaac

SEQ ID NO: 1243283 - DNA, 15 bp, Homo sapiens
ggctccacccaaaaa

SEQ ID NO: 1243284 - DNA, 15 bp, Homo sapiens
gggctccacccaaaa

SEQ ID NO: 1243285 - DNA, 15 bp, Homo sapiens
agggctccacccaaa

SEQ ID NO: 1243286 - DNA, 15 bp, Homo sapiens
cagggctccacccaa

SEQ ID NO: 1243287 - DNA, 15 bp, Homo sapiens
ccagggctccaccca

SEQ ID NO: 1243288 - DNA, 15 bp, Homo sapiens
gccagggctccaccc

SEQ ID NO: 1243289 - DNA, 15 bp, Homo sapiens
tgccagggctccacc

SEQ ID NO: 1243290 - DNA, 15 bp, Homo sapiens
ctgccagggctccac

SEQ ID NO: 1243291 - DNA, 15 bp, Homo sapiens
tctgccagggctcca

SEQ ID NO: 1243292 - DNA, 15 bp, Homo sapiens
atctgccagggctcc

SEQ ID NO: 1243293 - DNA, 15 bp, Homo sapiens
catctgccagggctc

SEQ ID NO: 1243294 - DNA, 15 bp, Homo sapiens
ccatctgccagggct

SEQ ID NO: 1243295 - DNA, 15 bp, Homo sapiens
accatctgccagggc

SEQ ID NO: 1243296 - DNA, 15 bp, Homo sapiens
gaccatctgccaggg

SEQ ID NO: 1243297 - DNA, 15 bp, Homo sapiens
ggaccatctgccagg

SEQ ID NO: 1243298 - DNA, 15 bp, Homo sapiens
tggaccatctgccag

SEQ ID NO: 1243299 - DNA, 15 bp, Homo sapiens
ttggaccatctgcca

SEQ ID NO: 1243300 - DNA, 15 bp, Homo sapiens
cttggaccatctgcc

SEQ ID NO: 1243301 - DNA, 15 bp, Homo sapiens
tcttggaccatctgc

SEQ ID NO: 1243302 - DNA, 15 bp, Homo sapiens
atcttggaccatctg

SEQ ID NO: 1243303 - DNA, 15 bp, Homo sapiens
catcttggaccatct

SEQ ID NO: 1243304 - DNA, 15 bp, Homo sapiens
tcatcttggaccatc

SEQ ID NO: 1243305 - DNA, 15 bp, Homo sapiens
ttcatcttggaccat

SEQ ID NO: 1243306 - DNA, 15 bp, Homo sapiens
gttcatcttggacca

SEQ ID NO: 1243307 - DNA, 15 bp, Homo sapiens
tgttcatcttggacc

SEQ ID NO: 1243308 - DNA, 15 bp, Homo sapiens
ctgttcatcttggac

SEQ ID NO: 1243309 - DNA, 15 bp, Homo sapiens
tctgttcatcttgga

SEQ ID NO: 1243310 - DNA, 15 bp, Homo sapiens
atctgttcatcttgg

SEQ ID NO: 1243311 - DNA, 15 bp, Homo sapiens
aatctgttcatcttg

SEQ ID NO: 1243312 - DNA, 15 bp, Homo sapiens
caatctgttcatctt

SEQ ID NO: 1243313 - DNA, 15 bp, Homo sapiens
tcaatctgttcatct

SEQ ID NO: 1243314 - DNA, 15 bp, Homo sapiens
ttcaatctgttcatc

SEQ ID NO: 1243315 - DNA, 15 bp, Homo sapiens
tttcaatctgttcat

SEQ ID NO: 1243316 - DNA, 15 bp, Homo sapiens
ttttcaatctgttca

SEQ ID NO: 1243317 - DNA, 15 bp, Homo sapiens
tttttcaatctgttc

SEQ ID NO: 1243318 - DNA, 15 bp, Homo sapiens
ttttttcaatctgtt

SEQ ID NO: 1243319 - DNA, 15 bp, Homo sapiens
tttttttcaatctgt

SEQ ID NO: 1243320 - DNA, 15 bp, Homo sapiens
ttttttttcaatctg

SEQ ID NO: 1243321 - DNA, 15 bp, Homo sapiens
tttttttttcaatct

SEQ ID NO: 1243322 - DNA, 15 bp, Homo sapiens
gtttttttttcaatc

SEQ ID NO: 1243323 - DNA, 15 bp, Homo sapiens
tgtttttttttcaat

SEQ ID NO: 1243324 - DNA, 15 bp, Homo sapiens
ttgtttttttttcaa

SEQ ID NO: 1243325 - DNA, 15 bp, Homo sapiens
cttgtttttttttca

SEQ ID NO: 1243326 - DNA, 15 bp, Homo sapiens
acttgtttttttttc

SEQ ID NO: 1243327 - DNA, 15 bp, Homo sapiens
gacttgttttttttt

SEQ ID NO: 1243328 - DNA, 15 bp, Homo sapiens
ggacttgtttttttt

SEQ ID NO: 1243329 - DNA, 15 bp, Homo sapiens
aggacttgttttttt

SEQ ID NO: 1243330 - DNA, 15 bp, Homo sapiens
caggacttgtttttt

SEQ ID NO: 1243331 - DNA, 15 bp, Homo sapiens
ccaggacttgttttt

SEQ ID NO: 1243332 - DNA, 15 bp, Homo sapiens
tccaggacttgtttt

SEQ ID NO: 1243333 - DNA, 15 bp, Homo sapiens
ctccaggacttgttt

SEQ ID NO: 1243334 - DNA, 15 bp, Homo sapiens
tctccaggacttgtt

SEQ ID NO: 1243335 - DNA, 15 bp, Homo sapiens
ctctccaggacttgt

SEQ ID NO: 1243336 - DNA, 15 bp, Homo sapiens
cctctccaggacttg

SEQ ID NO: 1243337 - DNA, 15 bp, Homo sapiens
gcctctccaggactt

SEQ ID NO: 1243338 - DNA, 15 bp, Homo sapiens
agcctctccaggact

SEQ ID NO: 1243339 - DNA, 15 bp, Homo sapiens
cagcctctccaggac

SEQ ID NO: 1243340 - DNA, 15 bp, Homo sapiens
tcagcctctccagga

SEQ ID NO: 1243341 - DNA, 15 bp, Homo sapiens
gtcagcctctccagg

SEQ ID NO: 1243342 - DNA, 15 bp, Homo sapiens
tgtcagcctctccag

SEQ ID NO: 1243343 - DNA, 15 bp, Homo sapiens
ttgtcagcctctcca

SEQ ID NO: 1243344 - DNA, 15 bp, Homo sapiens
gttgtcagcctctcc

SEQ ID NO: 1243345 - DNA, 15 bp, Homo sapiens
tgttgtcagcctctc

SEQ ID NO: 1243346 - DNA, 15 bp, Homo sapiens
atgttgtcagcctct

SEQ ID NO: 1243347 - DNA, 15 bp, Homo sapiens
gatgttgtcagcctc

SEQ ID NO: 1243348 - DNA, 15 bp, Homo sapiens
ggatgttgtcagcct

SEQ ID NO: 1243349 - DNA, 15 bp, Homo sapiens
gggatgttgtcagcc

SEQ ID NO: 1243350 - DNA, 15 bp, Homo sapiens
agggatgttgtcagc

SEQ ID NO: 1243351 - DNA, 15 bp, Homo sapiens
gagggatgttgtcag

SEQ ID NO: 1243352 - DNA, 15 bp, Homo sapiens
agagggatgttgtca

SEQ ID NO: 1243353 - DNA, 15 bp, Homo sapiens
cagagggatgttgtc

SEQ ID NO: 1243354 - DNA, 15 bp, Homo sapiens
ccagagggatgttgt

SEQ ID NO: 1243355 - DNA, 15 bp, Homo sapiens
accagagggatgttg

SEQ ID NO: 1243356 - DNA, 15 bp, Homo sapiens
gaccagagggatgtt

SEQ ID NO: 1243357 - DNA, 15 bp, Homo sapiens
tgaccagagggatgt

SEQ ID NO: 1243358 - DNA, 15 bp, Homo sapiens
gtgaccagagggatg

SEQ ID NO: 1243359 - DNA, 15 bp, Homo sapiens
tgtgaccagagggat

SEQ ID NO: 1243360 - DNA, 15 bp, Homo sapiens
gtgtgaccagaggga

SEQ ID NO: 1243361 - DNA, 15 bp, Homo sapiens
tgtgtgaccagaggg

SEQ ID NO: 1243362 - DNA, 15 bp, Homo sapiens
ctgtgtgaccagagg

SEQ ID NO: 1243363 - DNA, 15 bp, Homo sapiens
gctgtgtgaccagag

SEQ ID NO: 1243364 - DNA, 15 bp, Homo sapiens
agctgtgtgaccaga

SEQ ID NO: 1243365 - DNA, 15 bp, Homo sapiens
tagctgtgtgaccag

SEQ ID NO: 1243366 - DNA, 15 bp, Homo sapiens
ctagctgtgtgacca

SEQ ID NO: 1243367 - DNA, 15 bp, Homo sapiens
tctagctgtgtgacc

SEQ ID NO: 1243368 - DNA, 15 bp, Homo sapiens
atctagctgtgtgac

SEQ ID NO: 1243369 - DNA, 15 bp, Homo sapiens
gatctagctgtgtga

SEQ ID NO: 1243370 - DNA, 15 bp, Homo sapiens
agatctagctgtgtg

SEQ ID NO: 1243371 - DNA, 15 bp, Homo sapiens
gagatctagctgtgt

SEQ ID NO: 1243372 - DNA, 15 bp, Homo sapiens
tgagatctagctgtg

SEQ ID NO: 1243373 - DNA, 15 bp, Homo sapiens
ttgagatctagctgt

SEQ ID NO: 1243374 - DNA, 15 bp, Homo sapiens
cttgagatctagctg

SEQ ID NO: 1243375 - DNA, 15 bp, Homo sapiens
ccttgagatctagct

SEQ ID NO: 1243376 - DNA, 15 bp, Homo sapiens
accttgagatctagc

SEQ ID NO: 1243377 - DNA, 15 bp, Homo sapiens
caccttgagatctag

SEQ ID NO: 1243378 - DNA, 15 bp, Homo sapiens
gcaccttgagatcta

SEQ ID NO: 1243379 - DNA, 15 bp, Homo sapiens
agcaccttgagatct

SEQ ID NO: 1243380 - DNA, 15 bp, Homo sapiens
gagcaccttgagatc

SEQ ID NO: 1243381 - DNA, 15 bp, Homo sapiens
tgagcaccttgagat

SEQ ID NO: 1243382 - DNA, 15 bp, Homo sapiens
ctgagcaccttgaga

SEQ ID NO: 1243383 - DNA, 15 bp, Homo sapiens
tctgagcaccttgag

SEQ ID NO: 1243384 - DNA, 15 bp, Homo sapiens
gtctgagcaccttga

SEQ ID NO: 1243385 - DNA, 15 bp, Homo sapiens
agtctgagcaccttg

SEQ ID NO: 1243386 - DNA, 15 bp, Homo sapiens
aagtctgagcacctt

SEQ ID NO: 1243387 - DNA, 15 bp, Homo sapiens
gaagtctgagcacct

SEQ ID NO: 1243388 - DNA, 15 bp, Homo sapiens
tgaagtctgagcacc

SEQ ID NO: 1243389 - DNA, 15 bp, Homo sapiens
ttgaagtctgagcac

SEQ ID NO: 1243390 - DNA, 15 bp, Homo sapiens
cttgaagtctgagca

SEQ ID NO: 1243391 - DNA, 15 bp, Homo sapiens
ccttgaagtctgagc

SEQ ID NO: 1243392 - DNA, 15 bp, Homo sapiens
tccttgaagtctgag

SEQ ID NO: 1243393 - DNA, 15 bp, Homo sapiens
gtccttgaagtctga

SEQ ID NO: 1243394 - DNA, 15 bp, Homo sapiens
tgtccttgaagtctg

SEQ ID NO: 1243395 - DNA, 15 bp, Homo sapiens
ctgtccttgaagtct

SEQ ID NO: 1243396 - DNA, 15 bp, Homo sapiens
actgtccttgaagtc

SEQ ID NO: 1243397 - DNA, 15 bp, Homo sapiens
aactgtccttgaagt

SEQ ID NO: 1243398 - DNA, 15 bp, Homo sapiens
aaactgtccttgaag

SEQ ID NO: 1243399 - DNA, 15 bp, Homo sapiens
gaaactgtccttgaa

SEQ ID NO: 1243400 - DNA, 15 bp, Homo sapiens
ggaaactgtccttga

SEQ ID NO: 1243401 - DNA, 15 bp, Homo sapiens
gggaaactgtccttg

SEQ ID NO: 1243402 - DNA, 15 bp, Homo sapiens
agggaaactgtcctt

SEQ ID NO: 1243403 - DNA, 15 bp, Homo sapiens
cagggaaactgtcct

SEQ ID NO: 1243404 - DNA, 15 bp, Homo sapiens
tcagggaaactgtcc

SEQ ID NO: 1243405 - DNA, 15 bp, Homo sapiens
gtcagggaaactgtc

SEQ ID NO: 1243406 - DNA, 15 bp, Homo sapiens
agtcagggaaactgt

SEQ ID NO: 1243407 - DNA, 15 bp, Homo sapiens
gagtcagggaaactg

SEQ ID NO: 1243408 - DNA, 15 bp, Homo sapiens
ggagtcagggaaact

SEQ ID NO: 1243409 - DNA, 15 bp, Homo sapiens
gggagtcagggaaac

SEQ ID NO: 1243410 - DNA, 15 bp, Homo sapiens
tgggagtcagggaaa

SEQ ID NO: 1243411 - DNA, 15 bp, Homo sapiens
atgggagtcagggaa

SEQ ID NO: 1243412 - DNA, 15 bp, Homo sapiens
gatgggagtcaggga

SEQ ID NO: 1243413 - DNA, 15 bp, Homo sapiens
ggatgggagtcaggg

SEQ ID NO: 1243414 - DNA, 15 bp, Homo sapiens
tggatgggagtcagg

SEQ ID NO: 1243415 - DNA, 15 bp, Homo sapiens
ctggatgggagtcag

SEQ ID NO: 1243416 - DNA, 15 bp, Homo sapiens
cctggatgggagtca

SEQ ID NO: 1243417 - DNA, 15 bp, Homo sapiens
gcctggatgggagtc

SEQ ID NO: 1243418 - DNA, 15 bp, Homo sapiens
ggcctggatgggagt

SEQ ID NO: 1243419 - DNA, 15 bp, Homo sapiens
tggcctggatgggag

SEQ ID NO: 1243420 - DNA, 15 bp, Homo sapiens
atggcctggatggga

SEQ ID NO: 1243421 - DNA, 15 bp, Homo sapiens
tatggcctggatggg

SEQ ID NO: 1243422 - DNA, 15 bp, Homo sapiens
atatggcctggatgg

SEQ ID NO: 1243423 - DNA, 15 bp, Homo sapiens
aatatggcctggatg

SEQ ID NO: 1243424 - DNA, 15 bp, Homo sapiens
aaatatggcctggat

SEQ ID NO: 1243425 - DNA, 15 bp, Homo sapiens
aaaatatggcctgga

SEQ ID NO: 1243426 - DNA, 15 bp, Homo sapiens
taaaatatggcctgg

SEQ ID NO: 1243427 - DNA, 15 bp, Homo sapiens
ttaaaatatggcctg

SEQ ID NO: 1243428 - DNA, 15 bp, Homo sapiens
tttaaaatatggcct

SEQ ID NO: 1243429 - DNA, 15 bp, Homo sapiens
ttttaaaatatggcc

SEQ ID NO: 1243430 - DNA, 15 bp, Homo sapiens
cttttaaaatatggc

SEQ ID NO: 1243431 - DNA, 15 bp, Homo sapiens
tcttttaaaatatgg

SEQ ID NO: 1243432 - DNA, 15 bp, Homo sapiens
catcttttaaaatat

SEQ ID NO: 1243433 - DNA, 15 bp, Homo sapiens
ccatcttttaaaata

SEQ ID NO: 1243434 - DNA, 15 bp, Homo sapiens
accatcttttaaaat

SEQ ID NO: 1243435 - DNA, 15 bp, Homo sapiens
gaccatcttttaaaa

SEQ ID NO: 1243436 - DNA, 15 bp, Homo sapiens
agaccatcttttaaa

SEQ ID NO: 1243437 - DNA, 15 bp, Homo sapiens
aagaccatcttttaa

SEQ ID NO: 1243438 - DNA, 15 bp, Homo sapiens
caagaccatctttta

SEQ ID NO: 1243439 - DNA, 15 bp, Homo sapiens
ccaagaccatctttt

SEQ ID NO: 1243440 - DNA, 15 bp, Homo sapiens
cccaagaccatcttt

SEQ ID NO: 1243441 - DNA, 15 bp, Homo sapiens
gcccaagaccatctt

SEQ ID NO: 1243442 - DNA, 15 bp, Homo sapiens
agcccaagaccatct

SEQ ID NO: 1243443 - DNA, 15 bp, Homo sapiens
cagcccaagaccatc

SEQ ID NO: 1243444 - DNA, 15 bp, Homo sapiens
ccagcccaagaccat

SEQ ID NO: 1243445 - DNA, 15 bp, Homo sapiens
cccagcccaagacca

SEQ ID NO: 1243446 - DNA, 15 bp, Homo sapiens
gcccagcccaagacc

SEQ ID NO: 1243447 - DNA, 15 bp, Homo sapiens
tgcccagcccaagac

SEQ ID NO: 1243448 - DNA, 15 bp, Homo sapiens
gtgcccagcccaaga

SEQ ID NO: 1243449 - DNA, 15 bp, Homo sapiens
cgtgcccagcccaag

SEQ ID NO: 1243450 - DNA, 15 bp, Homo sapiens
ccgtgcccagcccaa

SEQ ID NO: 1243451 - DNA, 15 bp, Homo sapiens
accgtgcccagccca

SEQ ID NO: 1243452 - DNA, 15 bp, Homo sapiens
caccgtgcccagccc

SEQ ID NO: 1243453 - DNA, 15 bp, Homo sapiens
gcaagcatgagccac

SEQ ID NO: 1243454 - DNA, 15 bp, Homo sapiens
tgcaagcatgagcca

SEQ ID NO: 1243455 - DNA, 15 bp, Homo sapiens
ttgcaagcatgagcc

SEQ ID NO: 1243456 - DNA, 15 bp, Homo sapiens
attgcaagcatgagc

SEQ ID NO: 1243457 - DNA, 15 bp, Homo sapiens
gattgcaagcatgag

SEQ ID NO: 1243458 - DNA, 15 bp, Homo sapiens
ggattgcaagcatga

SEQ ID NO: 1243459 - DNA, 15 bp, Homo sapiens
gggattgcaagcatg

SEQ ID NO: 1243460 - DNA, 15 bp, Homo sapiens
tgggattgcaagcat

SEQ ID NO: 1243461 - DNA, 15 bp, Homo sapiens
ctgggattgcaagca

SEQ ID NO: 1243462 - DNA, 15 bp, Homo sapiens
gctgggattgcaagc

SEQ ID NO: 1243463 - DNA, 15 bp, Homo sapiens
tgctgggattgcaag

SEQ ID NO: 1243464 - DNA, 15 bp, Homo sapiens
gtgctgggattgcaa

SEQ ID NO: 1243465 - DNA, 15 bp, Homo sapiens
taagtgctgggattg

SEQ ID NO: 1243466 - DNA, 15 bp, Homo sapiens
ctaagtgctgggatt

SEQ ID NO: 1243467 - DNA, 15 bp, Homo sapiens
cctaagtgctgggat

SEQ ID NO: 1243468 - DNA, 15 bp, Homo sapiens
ccctaagtgctggga

SEQ ID NO: 1243469 - DNA, 15 bp, Homo sapiens
tccctaagtgctggg

SEQ ID NO: 1243470 - DNA, 15 bp, Homo sapiens
ctccctaagtgctgg

SEQ ID NO: 1243471 - DNA, 15 bp, Homo sapiens
cctccctaagtgctg

SEQ ID NO: 1243472 - DNA, 15 bp, Homo sapiens
gcctccctaagtgct

SEQ ID NO: 1243473 - DNA, 15 bp, Homo sapiens
ggcctccctaagtgc

SEQ ID NO: 1243474 - DNA, 15 bp, Homo sapiens
cggcctccctaagtg

SEQ ID NO: 1243475 - DNA, 15 bp, Homo sapiens
tcggcctccctaagt

SEQ ID NO: 1243476 - DNA, 15 bp, Homo sapiens
ctcggcctccctaag

SEQ ID NO: 1243477 - DNA, 15 bp, Homo sapiens
cctcggcctccctaa

SEQ ID NO: 1243478 - DNA, 15 bp, Homo sapiens
acctcggcctcccta

SEQ ID NO: 1243479 - DNA, 15 bp, Homo sapiens
cacctcggcctccct

SEQ ID NO: 1243480 - DNA, 15 bp, Homo sapiens
gcccacctcggcctc

SEQ ID NO: 1243481 - DNA, 15 bp, Homo sapiens
agcccacctcggcct

SEQ ID NO: 1243482 - DNA, 15 bp, Homo sapiens
cagcccacctcggcc

SEQ ID NO: 1243483 - DNA, 15 bp, Homo sapiens
tcagcccacctcggc

SEQ ID NO: 1243484 - DNA, 15 bp, Homo sapiens
atcagcccacctcgg

SEQ ID NO: 1243485 - DNA, 15 bp, Homo sapiens
aatcagcccacctcg

SEQ ID NO: 1243486 - DNA, 15 bp, Homo sapiens
caatcagcccacctc

SEQ ID NO: 1243487 - DNA, 15 bp, Homo sapiens
gcaatcagcccacct

SEQ ID NO: 1243488 - DNA, 15 bp, Homo sapiens
ggcaatcagcccacc

SEQ ID NO: 1243489 - DNA, 15 bp, Homo sapiens
aggcaatcagcccac

SEQ ID NO: 1243490 - DNA, 15 bp, Homo sapiens
caggcaatcagccca

SEQ ID NO: 1243491 - DNA, 15 bp, Homo sapiens
tcaggcaatcagccc

SEQ ID NO: 1243492 - DNA, 15 bp, Homo sapiens
ctcaggcaatcagcc

SEQ ID NO: 1243493 - DNA, 15 bp, Homo sapiens
cctcaggcaatcagc

SEQ ID NO: 1243494 - DNA, 15 bp, Homo sapiens
acctcaggcaatcag

SEQ ID NO: 1243495 - DNA, 15 bp, Homo sapiens
gacctcaggcaatca

SEQ ID NO: 1243496 - DNA, 15 bp, Homo sapiens
tgacctcaggcaatc

SEQ ID NO: 1243497 - DNA, 15 bp, Homo sapiens
ctgacctcaggcaat

SEQ ID NO: 1243498 - DNA, 15 bp, Homo sapiens
cctgacctcaggcaa

SEQ ID NO: 1243499 - DNA, 15 bp, Homo sapiens
tcctgacctcaggca

SEQ ID NO: 1243500 - DNA, 15 bp, Homo sapiens
ctcctgacctcaggc

SEQ ID NO: 1243501 - DNA, 15 bp, Homo sapiens
tcagactggtctcga

SEQ ID NO: 1243502 - DNA, 15 bp, Homo sapiens
gtcagactggtctcg

SEQ ID NO: 1243503 - DNA, 15 bp, Homo sapiens
agtagagacaaggtt

SEQ ID NO: 1243504 - DNA, 15 bp, Homo sapiens
tagtagagacaaggt

SEQ ID NO: 1243505 - DNA, 15 bp, Homo sapiens
ttagtagagacaagg

SEQ ID NO: 1243506 - DNA, 15 bp, Homo sapiens
tttagtagagacaag

SEQ ID NO: 1243507 - DNA, 15 bp, Homo sapiens
ttttagtagagacaa

SEQ ID NO: 1243508 - DNA, 15 bp, Homo sapiens
cctaatttttttgta

SEQ ID NO: 1243509 - DNA, 15 bp, Homo sapiens
ctgcctaattttttt

SEQ ID NO: 1243510 - DNA, 15 bp, Homo sapiens
cctgcctaatttttt

SEQ ID NO: 1243511 - DNA, 15 bp, Homo sapiens
gcctgcctaattttt

SEQ ID NO: 1243512 - DNA, 15 bp, Homo sapiens
tgcctgcctaatttt

SEQ ID NO: 1243513 - DNA, 15 bp, Homo sapiens
atgcctgcctaattt

SEQ ID NO: 1243514 - DNA, 15 bp, Homo sapiens
catgcctgcctaatt

SEQ ID NO: 1243515 - DNA, 15 bp, Homo sapiens
ccatgcctgcctaat

SEQ ID NO: 1243516 - DNA, 15 bp, Homo sapiens
accatgcctgcctaa

SEQ ID NO: 1243517 - DNA, 15 bp, Homo sapiens
caccatgcctgccta

SEQ ID NO: 1243518 - DNA, 15 bp, Homo sapiens
ccaccatgcctgcct

SEQ ID NO: 1243519 - DNA, 15 bp, Homo sapiens
gccaccatgcctgcc

SEQ ID NO: 1243520 - DNA, 15 bp, Homo sapiens
cgccaccatgcctgc

SEQ ID NO: 1243521 - DNA, 15 bp, Homo sapiens
acgccaccatgcctg

SEQ ID NO: 1243522 - DNA, 15 bp, Homo sapiens
cacgccaccatgcct

SEQ ID NO: 1243523 - DNA, 15 bp, Homo sapiens
gcacgccaccatgcc

SEQ ID NO: 1243524 - DNA, 15 bp, Homo sapiens
tgcacgccaccatgc

SEQ ID NO: 1243525 - DNA, 15 bp, Homo sapiens
gtgcacgccaccatg

SEQ ID NO: 1243526 - DNA, 15 bp, Homo sapiens
ggtgcacgccaccat

SEQ ID NO: 1243527 - DNA, 15 bp, Homo sapiens
ttacaggtgcacgcc

SEQ ID NO: 1243528 - DNA, 15 bp, Homo sapiens
attacaggtgcacgc

SEQ ID NO: 1243529 - DNA, 15 bp, Homo sapiens
gattacaggtgcacg

SEQ ID NO: 1243530 - DNA, 15 bp, Homo sapiens
ggattacaggtgcac

SEQ ID NO: 1243531 - DNA, 15 bp, Homo sapiens
ctagctgggattaca

SEQ ID NO: 1243532 - DNA, 15 bp, Homo sapiens
actagctgggattac

SEQ ID NO: 1243533 - DNA, 15 bp, Homo sapiens
gactagctgggatta

SEQ ID NO: 1243534 - DNA, 15 bp, Homo sapiens
cgactagctgggatt

SEQ ID NO: 1243535 - DNA, 15 bp, Homo sapiens
ccgactagctgggat

SEQ ID NO: 1243536 - DNA, 15 bp, Homo sapiens
cccgactagctggga

SEQ ID NO: 1243537 - DNA, 15 bp, Homo sapiens
tcccgactagctggg

SEQ ID NO: 1243538 - DNA, 15 bp, Homo sapiens
ctcccgactagctgg

SEQ ID NO: 1243539 - DNA, 15 bp, Homo sapiens
cctcccgactagctg

SEQ ID NO: 1243540 - DNA, 15 bp, Homo sapiens
gcctcccgactagct

SEQ ID NO: 1243541 - DNA, 15 bp, Homo sapiens
agcctcccgactagc

SEQ ID NO: 1243542 - DNA, 15 bp, Homo sapiens
cagcctcccgactag

SEQ ID NO: 1243543 - DNA, 15 bp, Homo sapiens
tcagcctcccgacta

SEQ ID NO: 1243544 - DNA, 15 bp, Homo sapiens
ctcagcctcccgact

SEQ ID NO: 1243545 - DNA, 15 bp, Homo sapiens
cctcagcctcccgac

SEQ ID NO: 1243546 - DNA, 15 bp, Homo sapiens
cccctgcctcagcct

SEQ ID NO: 1243547 - DNA, 15 bp, Homo sapiens
tcccctgcctcagcc

SEQ ID NO: 1243548 - DNA, 15 bp, Homo sapiens
ttcccctgcctcagc

SEQ ID NO: 1243549 - DNA, 15 bp, Homo sapiens
attcccctgcctcag

SEQ ID NO: 1243550 - DNA, 15 bp, Homo sapiens
aattcccctgcctca

SEQ ID NO: 1243551 - DNA, 15 bp, Homo sapiens
caattcccctgcctc

SEQ ID NO: 1243552 - DNA, 15 bp, Homo sapiens
gcaattcccctgcct

SEQ ID NO: 1243553 - DNA, 15 bp, Homo sapiens
agcaattcccctgcc

SEQ ID NO: 1243554 - DNA, 15 bp, Homo sapiens
aagcaattcccctgc

SEQ ID NO: 1243555 - DNA, 15 bp, Homo sapiens
caagcaattcccctg

SEQ ID NO: 1243556 - DNA, 15 bp, Homo sapiens
tcaagcaattcccct

SEQ ID NO: 1243557 - DNA, 15 bp, Homo sapiens
ttcaagcaattcccc

SEQ ID NO: 1243558 - DNA, 15 bp, Homo sapiens
gttcaagcaattccc

SEQ ID NO: 1243559 - DNA, 15 bp, Homo sapiens
ggttcaagcaattcc

SEQ ID NO: 1243560 - DNA, 15 bp, Homo sapiens
tggttcaagcaattc

SEQ ID NO: 1243561 - DNA, 15 bp, Homo sapiens
ctggttcaagcaatt

SEQ ID NO: 1243562 - DNA, 15 bp, Homo sapiens
cctggttcaagcaat

SEQ ID NO: 1243563 - DNA, 15 bp, Homo sapiens
tcctggttcaagcaa

SEQ ID NO: 1243564 - DNA, 15 bp, Homo sapiens
ttcctggttcaagca

SEQ ID NO: 1243565 - DNA, 15 bp, Homo sapiens
cttcctggttcaagc

SEQ ID NO: 1243566 - DNA, 15 bp, Homo sapiens
ccttcctggttcaag

SEQ ID NO: 1243567 - DNA, 15 bp, Homo sapiens
accttcctggttcaa

SEQ ID NO: 1243568 - DNA, 15 bp, Homo sapiens
caccttcctggttca

SEQ ID NO: 1243569 - DNA, 15 bp, Homo sapiens
ccaccttcctggttc

SEQ ID NO: 1243570 - DNA, 15 bp, Homo sapiens
cccaccttcctggtt

SEQ ID NO: 1243571 - DNA, 15 bp, Homo sapiens
actagggacaggtct

SEQ ID NO: 1243572 - DNA, 15 bp, Homo sapiens
aactagggacaggtc

SEQ ID NO: 1243573 - DNA, 15 bp, Homo sapiens
gaactagggacaggt

SEQ ID NO: 1243574 - DNA, 15 bp, Homo sapiens
tgaactagggacagg

SEQ ID NO: 1243575 - DNA, 15 bp, Homo sapiens
gtgaactagggacag

SEQ ID NO: 1243576 - DNA, 15 bp, Homo sapiens
tgtgaactagggaca

SEQ ID NO: 1243577 - DNA, 15 bp, Homo sapiens
ctgtgaactagggac

SEQ ID NO: 1243578 - DNA, 15 bp, Homo sapiens
cctgtgaactaggga

SEQ ID NO: 1243579 - DNA, 15 bp, Homo sapiens
acctgtgaactaggg

SEQ ID NO: 1243580 - DNA, 15 bp, Homo sapiens
gacctgtgaactagg

SEQ ID NO: 1243581 - DNA, 15 bp, Homo sapiens
tgacctgtgaactag

SEQ ID NO: 1243582 - DNA, 15 bp, Homo sapiens
gtgacctgtgaacta

SEQ ID NO: 1243583 - DNA, 15 bp, Homo sapiens
ggtgacctgtgaact

SEQ ID NO: 1243584 - DNA, 15 bp, Homo sapiens
aggtgacctgtgaac

SEQ ID NO: 1243585 - DNA, 15 bp, Homo sapiens
taggtgacctgtgaa

SEQ ID NO: 1243586 - DNA, 15 bp, Homo sapiens
ctaggtgacctgtga

SEQ ID NO: 1243587 - DNA, 15 bp, Homo sapiens
cctaggtgacctgtg

SEQ ID NO: 1243588 - DNA, 15 bp, Homo sapiens
tcctaggtgacctgt

SEQ ID NO: 1243589 - DNA, 15 bp, Homo sapiens
atcctaggtgacctg

SEQ ID NO: 1243590 - DNA, 15 bp, Homo sapiens
aatcctaggtgacct

SEQ ID NO: 1243591 - DNA, 15 bp, Homo sapiens
gaatcctaggtgacc

SEQ ID NO: 1243592 - DNA, 15 bp, Homo sapiens
agaatcctaggtgac

SEQ ID NO: 1243593 - DNA, 15 bp, Homo sapiens
aagaatcctaggtga

SEQ ID NO: 1243594 - DNA, 15 bp, Homo sapiens
aaagaatcctaggtg

SEQ ID NO: 1243595 - DNA, 15 bp, Homo sapiens
aaaagaatcctaggt

SEQ ID NO: 1243596 - DNA, 15 bp, Homo sapiens
aaaaagaatcctagg

SEQ ID NO: 1243597 - DNA, 15 bp, Homo sapiens
aaaaaagaatcctag

SEQ ID NO: 1243598 - DNA, 15 bp, Homo sapiens
aaaaaaagaatccta

SEQ ID NO: 1243599 - DNA, 15 bp, Homo sapiens
aaaaaaaagaatcct

SEQ ID NO: 1243600 - DNA, 15 bp, Homo sapiens
aaaaaaaaagaatcc

SEQ ID NO: 1243601 - DNA, 15 bp, Homo sapiens
aaaaaaaaaagaatc

SEQ ID NO: 1243602 - DNA, 15 bp, Homo sapiens
agaaaaaaaaaaaga

SEQ ID NO: 1243603 - DNA, 15 bp, Homo sapiens
aagaaaaaaaaaaag

SEQ ID NO: 1243604 - DNA, 15 bp, Homo sapiens
atctcaaagaaaaaa

SEQ ID NO: 1243605 - DNA, 15 bp, Homo sapiens
catctcaaagaaaaa

SEQ ID NO: 1243606 - DNA, 15 bp, Homo sapiens
ccatctcaaagaaaa

SEQ ID NO: 1243607 - DNA, 15 bp, Homo sapiens
cccatctcaaagaaa

SEQ ID NO: 1243608 - DNA, 15 bp, Homo sapiens
ccccatctcaaagaa

SEQ ID NO: 1243609 - DNA, 15 bp, Homo sapiens
accccatctcaaaga

SEQ ID NO: 1243610 - DNA, 15 bp, Homo sapiens
aaccccatctcaaag

SEQ ID NO: 1243611 - DNA, 15 bp, Homo sapiens
aaaccccatctcaaa

SEQ ID NO: 1243612 - DNA, 15 bp, Homo sapiens
gaaaccccatctcaa

SEQ ID NO: 1243613 - DNA, 15 bp, Homo sapiens
cgaaaccccatctca

SEQ ID NO: 1243614 - DNA, 15 bp, Homo sapiens
agcgaaaccccatct

SEQ ID NO: 1243615 - DNA, 15 bp, Homo sapiens
gagcgaaaccccatc

SEQ ID NO: 1243616 - DNA, 15 bp, Homo sapiens
agagcgaaaccccat

SEQ ID NO: 1243617 - DNA, 15 bp, Homo sapiens
aagagcgaaacccca

SEQ ID NO: 1243618 - DNA, 15 bp, Homo sapiens
caagagcgaaacccc

SEQ ID NO: 1243619 - DNA, 15 bp, Homo sapiens
acaagagcgaaaccc

SEQ ID NO: 1243620 - DNA, 15 bp, Homo sapiens
aacaagagcgaaacc

SEQ ID NO: 1243621 - DNA, 15 bp, Homo sapiens
gccattgcactccag

SEQ ID NO: 1243622 - DNA, 15 bp, Homo sapiens
cgccattgcactcca

SEQ ID NO: 1243623 - DNA, 15 bp, Homo sapiens
gcgccattgcactcc

SEQ ID NO: 1243624 - DNA, 15 bp, Homo sapiens
cgcgccattgcactc

SEQ ID NO: 1243625 - DNA, 15 bp, Homo sapiens
tcgcgccattgcact

SEQ ID NO: 1243626 - DNA, 15 bp, Homo sapiens
atcgcgccattgcac

SEQ ID NO: 1243627 - DNA, 15 bp, Homo sapiens
gatcgcgccattgca

SEQ ID NO: 1243628 - DNA, 15 bp, Homo sapiens
agatcgcgccattgc

SEQ ID NO: 1243629 - DNA, 15 bp, Homo sapiens
gagatcgcgccattg

SEQ ID NO: 1243630 - DNA, 15 bp, Homo sapiens
tgagatcgcgccatt

SEQ ID NO: 1243631 - DNA, 15 bp, Homo sapiens
ctgagatcgcgccat

SEQ ID NO: 1243632 - DNA, 15 bp, Homo sapiens
gctgagatcgcgcca

SEQ ID NO: 1243633 - DNA, 15 bp, Homo sapiens
agctgagatcgcgcc

SEQ ID NO: 1243634 - DNA, 15 bp, Homo sapiens
gagctgagatcgcgc

SEQ ID NO: 1243635 - DNA, 15 bp, Homo sapiens
tgagctgagatcgcg

SEQ ID NO: 1243636 - DNA, 15 bp, Homo sapiens
tttgcagtgagctga

SEQ ID NO: 1243637 - DNA, 15 bp, Homo sapiens
gtttgcagtgagctg

SEQ ID NO: 1243638 - DNA, 15 bp, Homo sapiens
agtttgcagtgagct

SEQ ID NO: 1243639 - DNA, 15 bp, Homo sapiens
aagtttgcagtgagc

SEQ ID NO: 1243640 - DNA, 15 bp, Homo sapiens
aaagtttgcagtgag

SEQ ID NO: 1243641 - DNA, 15 bp, Homo sapiens
caaagtttgcagtga

SEQ ID NO: 1243642 - DNA, 15 bp, Homo sapiens
gcaaagtttgcagtg

SEQ ID NO: 1243643 - DNA, 15 bp, Homo sapiens
ggcaaagtttgcagt

SEQ ID NO: 1243644 - DNA, 15 bp, Homo sapiens
aggcaaagtttgcag

SEQ ID NO: 1243645 - DNA, 15 bp, Homo sapiens
gaggcaaagtttgca

SEQ ID NO: 1243646 - DNA, 15 bp, Homo sapiens
ggaggcaaagtttgc

SEQ ID NO: 1243647 - DNA, 15 bp, Homo sapiens
gggaggcaaagtttg

SEQ ID NO: 1243648 - DNA, 15 bp, Homo sapiens
cgggaggcaaagttt

SEQ ID NO: 1243649 - DNA, 15 bp, Homo sapiens
ccgggaggcaaagtt

SEQ ID NO: 1243650 - DNA, 15 bp, Homo sapiens
cccgggaggcaaagt

SEQ ID NO: 1243651 - DNA, 15 bp, Homo sapiens
acccgggaggcaaag

SEQ ID NO: 1243652 - DNA, 15 bp, Homo sapiens
aacccgggaggcaaa

SEQ ID NO: 1243653 - DNA, 15 bp, Homo sapiens
gaacccgggaggcaa

SEQ ID NO: 1243654 - DNA, 15 bp, Homo sapiens
atttgaacccgggag

SEQ ID NO: 1243655 - DNA, 15 bp, Homo sapiens
catttgaacccggga

SEQ ID NO: 1243656 - DNA, 15 bp, Homo sapiens
tcatttgaacccggg

SEQ ID NO: 1243657 - DNA, 15 bp, Homo sapiens
atcatttgaacccgg

SEQ ID NO: 1243658 - DNA, 15 bp, Homo sapiens
aatcatttgaacccg

SEQ ID NO: 1243659 - DNA, 15 bp, Homo sapiens
cacatgcctgtaatc

SEQ ID NO: 1243660 - DNA, 15 bp, Homo sapiens
gcacatgcctgtaat

SEQ ID NO: 1243661 - DNA, 15 bp, Homo sapiens
ggcacatgcctgtaa

SEQ ID NO: 1243662 - DNA, 15 bp, Homo sapiens
gtggcacatgcctgt

SEQ ID NO: 1243663 - DNA, 15 bp, Homo sapiens
tgtggtggcacatgc

SEQ ID NO: 1243664 - DNA, 15 bp, Homo sapiens
gtgtggtggcacatg

SEQ ID NO: 1243665 - DNA, 15 bp, Homo sapiens
ggtgtggtggcacat

SEQ ID NO: 1243666 - DNA, 15 bp, Homo sapiens
accaggtgtggtggc

SEQ ID NO: 1243667 - DNA, 15 bp, Homo sapiens
aaccaggtgtggtgg

SEQ ID NO: 1243668 - DNA, 15 bp, Homo sapiens
taaccaggtgtggtg

SEQ ID NO: 1243669 - DNA, 15 bp, Homo sapiens
ttaaccaggtgtggt

SEQ ID NO: 1243670 - DNA, 15 bp, Homo sapiens
attaaccaggtgtgg

SEQ ID NO: 1243671 - DNA, 15 bp, Homo sapiens
aattaaccaggtgtg

SEQ ID NO: 1243672 - DNA, 15 bp, Homo sapiens
aaattaaccaggtgt

SEQ ID NO: 1243673 - DNA, 15 bp, Homo sapiens
aaaattaaccaggtg

SEQ ID NO: 1243674 - DNA, 15 bp, Homo sapiens
caaaattaaccaggt

SEQ ID NO: 1243675 - DNA, 15 bp, Homo sapiens
acaaaattaaccagg

SEQ ID NO: 1243676 - DNA, 15 bp, Homo sapiens
tacaaaattaaccag

SEQ ID NO: 1243677 - DNA, 15 bp, Homo sapiens
atacaaaattaacca

SEQ ID NO: 1243678 - DNA, 15 bp, Homo sapiens
aatacaaaattaacc

SEQ ID NO: 1243679 - DNA, 15 bp, Homo sapiens
aaatacaaaattaac

SEQ ID NO: 1243680 - DNA, 15 bp, Homo sapiens
aaaatacaaaattaa

SEQ ID NO: 1243681 - DNA, 15 bp, Homo sapiens
agaaaccctgtctgt

SEQ ID NO: 1243682 - DNA, 15 bp, Homo sapiens
gagaaaccctgtctg

SEQ ID NO: 1243683 - DNA, 15 bp, Homo sapiens
ggagaaaccctgtct

SEQ ID NO: 1243684 - DNA, 15 bp, Homo sapiens
cggagaaaccctgtc

SEQ ID NO: 1243685 - DNA, 15 bp, Homo sapiens
acggagaaaccctgt

SEQ ID NO: 1243686 - DNA, 15 bp, Homo sapiens
caacacggagaaacc

SEQ ID NO: 1243687 - DNA, 15 bp, Homo sapiens
ccaacacggagaaac

SEQ ID NO: 1243688 - DNA, 15 bp, Homo sapiens
accaacacggagaaa

SEQ ID NO: 1243689 - DNA, 15 bp, Homo sapiens
gaccaacacggagaa

SEQ ID NO: 1243690 - DNA, 15 bp, Homo sapiens
tgaccaacacggaga

SEQ ID NO: 1243691 - DNA, 15 bp, Homo sapiens
ctgaccaacacggag

SEQ ID NO: 1243692 - DNA, 15 bp, Homo sapiens
cctgaccaacacgga

SEQ ID NO: 1243693 - DNA, 15 bp, Homo sapiens
gcctgaccaacacgg

SEQ ID NO: 1243694 - DNA, 15 bp, Homo sapiens
agcctgaccaacacg

SEQ ID NO: 1243695 - DNA, 15 bp, Homo sapiens
cagcctgaccaacac

SEQ ID NO: 1243696 - DNA, 15 bp, Homo sapiens
cggggttcgagacca

SEQ ID NO: 1243697 - DNA, 15 bp, Homo sapiens
tcggggttcgagacc

SEQ ID NO: 1243698 - DNA, 15 bp, Homo sapiens
gtcggggttcgagac

SEQ ID NO: 1243699 - DNA, 15 bp, Homo sapiens
ggtcggggttcgaga

SEQ ID NO: 1243700 - DNA, 15 bp, Homo sapiens
aggtcggggttcgag

SEQ ID NO: 1243701 - DNA, 15 bp, Homo sapiens
gaggtcggggttcga

SEQ ID NO: 1243702 - DNA, 15 bp, Homo sapiens
tgaggtcggggttcg

SEQ ID NO: 1243703 - DNA, 15 bp, Homo sapiens
ctgaggtcggggttc

SEQ ID NO: 1243704 - DNA, 15 bp, Homo sapiens
cctgaggtcggggtt

SEQ ID NO: 1243705 - DNA, 15 bp, Homo sapiens
acctgaggtcggggt

SEQ ID NO: 1243706 - DNA, 15 bp, Homo sapiens
cacctgaggtcgggg

SEQ ID NO: 1243707 - DNA, 15 bp, Homo sapiens
ttgaggcaggtggat

SEQ ID NO: 1243708 - DNA, 15 bp, Homo sapiens
gttgaggcaggtgga

SEQ ID NO: 1243709 - DNA, 15 bp, Homo sapiens
ggttgaggcaggtgg

SEQ ID NO: 1243710 - DNA, 15 bp, Homo sapiens
aggttgaggcaggtg

SEQ ID NO: 1243711 - DNA, 15 bp, Homo sapiens
gaggttgaggcaggt

SEQ ID NO: 1243712 - DNA, 15 bp, Homo sapiens
tgggaggttgaggca

SEQ ID NO: 1243713 - DNA, 15 bp, Homo sapiens
gcactttgggaggtt

SEQ ID NO: 1243714 - DNA, 15 bp, Homo sapiens
ctggccaggcacagt

SEQ ID NO: 1243715 - DNA, 15 bp, Homo sapiens
actggccaggcacag

SEQ ID NO: 1243716 - DNA, 15 bp, Homo sapiens
gactggccaggcaca

SEQ ID NO: 1243717 - DNA, 15 bp, Homo sapiens
tgactggccaggcac

SEQ ID NO: 1243718 - DNA, 15 bp, Homo sapiens
gtgactggccaggca

SEQ ID NO: 1243719 - DNA, 15 bp, Homo sapiens
ggtgactggccaggc

SEQ ID NO: 1243720 - DNA, 15 bp, Homo sapiens
aggtgactggccagg

SEQ ID NO: 1243721 - DNA, 15 bp, Homo sapiens
taggtgactggccag

SEQ ID NO: 1243722 - DNA, 15 bp, Homo sapiens
ctaggtgactggcca

SEQ ID NO: 1243723 - DNA, 15 bp, Homo sapiens
cctaggtgactggcc

SEQ ID NO: 1243724 - DNA, 15 bp, Homo sapiens
ccctaggtgactggc

SEQ ID NO: 1243725 - DNA, 15 bp, Homo sapiens
accctaggtgactgg

SEQ ID NO: 1243726 - DNA, 15 bp, Homo sapiens
aaccctaggtgactg

SEQ ID NO: 1243727 - DNA, 15 bp, Homo sapiens
gaaccctaggtgact

SEQ ID NO: 1243728 - DNA, 15 bp, Homo sapiens
agaaccctaggtgac

SEQ ID NO: 1243729 - DNA, 15 bp, Homo sapiens
cagaaccctaggtga

SEQ ID NO: 1243730 - DNA, 15 bp, Homo sapiens
gcagaaccctaggtg

SEQ ID NO: 1243731 - DNA, 15 bp, Homo sapiens
agcagaaccctaggt

SEQ ID NO: 1243732 - DNA, 15 bp, Homo sapiens
cagcagaaccctagg

SEQ ID NO: 1243733 - DNA, 15 bp, Homo sapiens
ccagcagaaccctag

SEQ ID NO: 1243734 - DNA, 15 bp, Homo sapiens
tccagcagaacccta

SEQ ID NO: 1243735 - DNA, 15 bp, Homo sapiens
ttccagcagaaccct

SEQ ID NO: 1243736 - DNA, 15 bp, Homo sapiens
gttccagcagaaccc

SEQ ID NO: 1243737 - DNA, 15 bp, Homo sapiens
agttccagcagaacc

SEQ ID NO: 1243738 - DNA, 15 bp, Homo sapiens
tagttccagcagaac

SEQ ID NO: 1243739 - DNA, 15 bp, Homo sapiens
gtagttccagcagaa

SEQ ID NO: 1243740 - DNA, 15 bp, Homo sapiens
agtagttccagcaga

SEQ ID NO: 1243741 - DNA, 15 bp, Homo sapiens
cagtagttccagcag

SEQ ID NO: 1243742 - DNA, 15 bp, Homo sapiens
tcagtagttccagca

SEQ ID NO: 1243743 - DNA, 15 bp, Homo sapiens
ttcagtagttccagc

SEQ ID NO: 1243744 - DNA, 15 bp, Homo sapiens
gttcagtagttccag

SEQ ID NO: 1243745 - DNA, 15 bp, Homo sapiens
agttcagtagttcca

SEQ ID NO: 1243746 - DNA, 15 bp, Homo sapiens
cagttcagtagttcc

SEQ ID NO: 1243747 - DNA, 15 bp, Homo sapiens
acagttcagtagttc

SEQ ID NO: 1243748 - DNA, 15 bp, Homo sapiens
tacagttcagtagtt

SEQ ID NO: 1243749 - DNA, 15 bp, Homo sapiens
ctacagttcagtagt

SEQ ID NO: 1243750 - DNA, 15 bp, Homo sapiens
actacagttcagtag

SEQ ID NO: 1243751 - DNA, 15 bp, Homo sapiens
aactacagttcagta

SEQ ID NO: 1243752 - DNA, 15 bp, Homo sapiens
gaactacagttcagt

SEQ ID NO: 1243753 - DNA, 15 bp, Homo sapiens
tgaactacagttcag

SEQ ID NO: 1243754 - DNA, 15 bp, Homo sapiens
ctgaactacagttca

SEQ ID NO: 1243755 - DNA, 15 bp, Homo sapiens
actgaactacagttc

SEQ ID NO: 1243756 - DNA, 15 bp, Homo sapiens
tactgaactacagtt

SEQ ID NO: 1243757 - DNA, 15 bp, Homo sapiens
ctactgaactacagt

SEQ ID NO: 1243758 - DNA, 15 bp, Homo sapiens
cctactgaactacag

SEQ ID NO: 1243759 - DNA, 15 bp, Homo sapiens
acctactgaactaca

SEQ ID NO: 1243760 - DNA, 15 bp, Homo sapiens
cacctactgaactac

SEQ ID NO: 1243761 - DNA, 15 bp, Homo sapiens
tcacctactgaacta

SEQ ID NO: 1243762 - DNA, 15 bp, Homo sapiens
atcacctactgaact

SEQ ID NO: 1243763 - DNA, 15 bp, Homo sapiens
gatcacctactgaac

SEQ ID NO: 1243764 - DNA, 15 bp, Homo sapiens
agatcacctactgaa

SEQ ID NO: 1243765 - DNA, 15 bp, Homo sapiens
aagatcacctactga

SEQ ID NO: 1243766 - DNA, 15 bp, Homo sapiens
taagatcacctactg

SEQ ID NO: 1243767 - DNA, 15 bp, Homo sapiens
gtaagatcacctact

SEQ ID NO: 1243768 - DNA, 15 bp, Homo sapiens
ggtaagatcacctac

SEQ ID NO: 1243769 - DNA, 15 bp, Homo sapiens
tggtaagatcaccta

SEQ ID NO: 1243770 - DNA, 15 bp, Homo sapiens
gtggtaagatcacct

SEQ ID NO: 1243771 - DNA, 15 bp, Homo sapiens
tgtggtaagatcacc

SEQ ID NO: 1243772 - DNA, 15 bp, Homo sapiens
ctgtggtaagatcac

SEQ ID NO: 1243773 - DNA, 15 bp, Homo sapiens
actgtggtaagatca

SEQ ID NO: 1243774 - DNA, 15 bp, Homo sapiens
tactgtggtaagatc

SEQ ID NO: 1243775 - DNA, 15 bp, Homo sapiens
ctactgtggtaagat

SEQ ID NO: 1243776 - DNA, 15 bp, Homo sapiens
cctactgtggtaaga

SEQ ID NO: 1243777 - DNA, 15 bp, Homo sapiens
ccctactgtggtaag

SEQ ID NO: 1243778 - DNA, 15 bp, Homo sapiens
accctactgtggtaa

SEQ ID NO: 1243779 - DNA, 15 bp, Homo sapiens
aaccctactgtggta

SEQ ID NO: 1243780 - DNA, 15 bp, Homo sapiens
aaaccctactgtggt

SEQ ID NO: 1243781 - DNA, 15 bp, Homo sapiens
caaaccctactgtgg

SEQ ID NO: 1243782 - DNA, 15 bp, Homo sapiens
acaaaccctactgtg

SEQ ID NO: 1243783 - DNA, 15 bp, Homo sapiens
aacaaaccctactgt

SEQ ID NO: 1243784 - DNA, 15 bp, Homo sapiens
caacaaaccctactg

SEQ ID NO: 1243785 - DNA, 15 bp, Homo sapiens
gcaacaaaccctact

SEQ ID NO: 1243786 - DNA, 15 bp, Homo sapiens
agcaacaaaccctac

SEQ ID NO: 1243787 - DNA, 15 bp, Homo sapiens
cagcaacaaacccta

SEQ ID NO: 1243788 - DNA, 15 bp, Homo sapiens
ccagcaacaaaccct

SEQ ID NO: 1243789 - DNA, 15 bp, Homo sapiens
tccagcaacaaaccc

SEQ ID NO: 1243790 - DNA, 15 bp, Homo sapiens
ctccagcaacaaacc

SEQ ID NO: 1243791 - DNA, 15 bp, Homo sapiens
actccagcaacaaac

SEQ ID NO: 1243792 - DNA, 15 bp, Homo sapiens
aactccagcaacaaa

SEQ ID NO: 1243793 - DNA, 15 bp, Homo sapiens
caactccagcaacaa

SEQ ID NO: 1243794 - DNA, 15 bp, Homo sapiens
gcaactccagcaaca

SEQ ID NO: 1243795 - DNA, 15 bp, Homo sapiens
tgcaactccagcaac

SEQ ID NO: 1243796 - DNA, 15 bp, Homo sapiens
atgcaactccagcaa

SEQ ID NO: 1243797 - DNA, 15 bp, Homo sapiens
aatgcaactccagca

SEQ ID NO: 1243798 - DNA, 15 bp, Homo sapiens
taatgcaactccagc

SEQ ID NO: 1243799 - DNA, 15 bp, Homo sapiens
ctaatgcaactccag

SEQ ID NO: 1243800 - DNA, 15 bp, Homo sapiens
gctaatgcaactcca

SEQ ID NO: 1243801 - DNA, 15 bp, Homo sapiens
agctaatgcaactcc

SEQ ID NO: 1243802 - DNA, 15 bp, Homo sapiens
tagctaatgcaactc

SEQ ID NO: 1243803 - DNA, 15 bp, Homo sapiens
ttagctaatgcaact

SEQ ID NO: 1243804 - DNA, 15 bp, Homo sapiens
tttagctaatgcaac

SEQ ID NO: 1243805 - DNA, 15 bp, Homo sapiens
gtttagctaatgcaa

SEQ ID NO: 1243806 - DNA, 15 bp, Homo sapiens
tgtttagctaatgca

SEQ ID NO: 1243807 - DNA, 15 bp, Homo sapiens
ctgtttagctaatgc

SEQ ID NO: 1243808 - DNA, 15 bp, Homo sapiens
cctgtttagctaatg

SEQ ID NO: 1243809 - DNA, 15 bp, Homo sapiens
ccctgtttagctaat

SEQ ID NO: 1243810 - DNA, 15 bp, Homo sapiens
accctgtttagctaa

SEQ ID NO: 1243811 - DNA, 15 bp, Homo sapiens
gaccctgtttagcta

SEQ ID NO: 1243812 - DNA, 15 bp, Homo sapiens
agaccctgtttagct

SEQ ID NO: 1243813 - DNA, 15 bp, Homo sapiens
aagaccctgtttagc

SEQ ID NO: 1243814 - DNA, 15 bp, Homo sapiens
aaagaccctgtttag

SEQ ID NO: 1243815 - DNA, 15 bp, Homo sapiens
aaaagaccctgttta

SEQ ID NO: 1243816 - DNA, 15 bp, Homo sapiens
taaaagaccctgttt

SEQ ID NO: 1243817 - DNA, 15 bp, Homo sapiens
ctaaaagaccctgtt

SEQ ID NO: 1243818 - DNA, 15 bp, Homo sapiens
tctaaaagaccctgt

SEQ ID NO: 1243819 - DNA, 15 bp, Homo sapiens
gtctaaaagaccctg

SEQ ID NO: 1243820 - DNA, 15 bp, Homo sapiens
tgtctaaaagaccct

SEQ ID NO: 1243821 - DNA, 15 bp, Homo sapiens
gtgtctaaaagaccc

SEQ ID NO: 1243822 - DNA, 15 bp, Homo sapiens
agtgtctaaaagacc

SEQ ID NO: 1243823 - DNA, 15 bp, Homo sapiens
cagtgtctaaaagac

SEQ ID NO: 1243824 - DNA, 15 bp, Homo sapiens
ccagtgtctaaaaga

SEQ ID NO: 1243825 - DNA, 15 bp, Homo sapiens
tccagtgtctaaaag

SEQ ID NO: 1243826 - DNA, 15 bp, Homo sapiens
ttccagtgtctaaaa

SEQ ID NO: 1243827 - DNA, 15 bp, Homo sapiens
attccagtgtctaaa

SEQ ID NO: 1243828 - DNA, 15 bp, Homo sapiens
gattccagtgtctaa

SEQ ID NO: 1243829 - DNA, 15 bp, Homo sapiens
agattccagtgtcta

SEQ ID NO: 1243830 - DNA, 15 bp, Homo sapiens
tagattccagtgtct

SEQ ID NO: 1243831 - DNA, 15 bp, Homo sapiens
ttagattccagtgtc

SEQ ID NO: 1243832 - DNA, 15 bp, Homo sapiens
cttagattccagtgt

SEQ ID NO: 1243833 - DNA, 15 bp, Homo sapiens
gcttagattccagtg

SEQ ID NO: 1243834 - DNA, 15 bp, Homo sapiens
agcttagattccagt

SEQ ID NO: 1243835 - DNA, 15 bp, Homo sapiens
cagcttagattccag

SEQ ID NO: 1243836 - DNA, 15 bp, Homo sapiens
tcagcttagattcca

SEQ ID NO: 1243837 - DNA, 15 bp, Homo sapiens
ttcagcttagattcc

SEQ ID NO: 1243838 - DNA, 15 bp, Homo sapiens
cttcagcttagattc

SEQ ID NO: 1243839 - DNA, 15 bp, Homo sapiens
ccttcagcttagatt

SEQ ID NO: 1243840 - DNA, 15 bp, Homo sapiens
gccttcagcttagat

SEQ ID NO: 1243841 - DNA, 15 bp, Homo sapiens
agccttcagcttaga

SEQ ID NO: 1243842 - DNA, 15 bp, Homo sapiens
tagccttcagcttag

SEQ ID NO: 1243843 - DNA, 15 bp, Homo sapiens
ttagccttcagctta

SEQ ID NO: 1243844 - DNA, 15 bp, Homo sapiens
attagccttcagctt

SEQ ID NO: 1243845 - DNA, 15 bp, Homo sapiens
tattagccttcagct

SEQ ID NO: 1243846 - DNA, 15 bp, Homo sapiens
ttattagccttcagc

SEQ ID NO: 1243847 - DNA, 15 bp, Homo sapiens
attattagccttcag

SEQ ID NO: 1243848 - DNA, 15 bp, Homo sapiens
tattattagccttca

SEQ ID NO: 1243849 - DNA, 15 bp, Homo sapiens
atattattagccttc

SEQ ID NO: 1243850 - DNA, 15 bp, Homo sapiens
aatattattagcctt

SEQ ID NO: 1243851 - DNA, 15 bp, Homo sapiens
taatattattagcct

SEQ ID NO: 1243852 - DNA, 15 bp, Homo sapiens
ataatattattagcc

SEQ ID NO: 1243853 - DNA, 15 bp, Homo sapiens
aataatattattagc

SEQ ID NO: 1243854 - DNA, 15 bp, Homo sapiens
aaataatattattag

SEQ ID NO: 1243855 - DNA, 15 bp, Homo sapiens
caaataatattatta

SEQ ID NO: 1243856 - DNA, 15 bp, Homo sapiens
tcaaataatattatt

SEQ ID NO: 1243857 - DNA, 15 bp, Homo sapiens
ttcaaataatattat

SEQ ID NO: 1243858 - DNA, 15 bp, Homo sapiens
cttcaaataatatta

SEQ ID NO: 1243859 - DNA, 15 bp, Homo sapiens
tcttcaaataatatt

SEQ ID NO: 1243860 - DNA, 15 bp, Homo sapiens
atcttcaaataatat

SEQ ID NO: 1243861 - DNA, 15 bp, Homo sapiens
catcttcaaataata

SEQ ID NO: 1243862 - DNA, 15 bp, Homo sapiens
ccatcttcaaataat

SEQ ID NO: 1243863 - DNA, 15 bp, Homo sapiens
accatcttcaaataa

SEQ ID NO: 1243864 - DNA, 15 bp, Homo sapiens
caccatcttcaaata

SEQ ID NO: 1243865 - DNA, 15 bp, Homo sapiens
tcaccatcttcaaat

SEQ ID NO: 1243866 - DNA, 15 bp, Homo sapiens
ttcaccatcttcaaa

SEQ ID NO: 1243867 - DNA, 15 bp, Homo sapiens
tttcaccatcttcaa

SEQ ID NO: 1243868 - DNA, 15 bp, Homo sapiens
ctttcaccatcttca

SEQ ID NO: 1243869 - DNA, 15 bp, Homo sapiens
actttcaccatcttc

SEQ ID NO: 1243870 - DNA, 15 bp, Homo sapiens
aactttcaccatctt

SEQ ID NO: 1243871 - DNA, 15 bp, Homo sapiens
taactttcaccatct

SEQ ID NO: 1243872 - DNA, 15 bp, Homo sapiens
ttaactttcaccatc

SEQ ID NO: 1243873 - DNA, 15 bp, Homo sapiens
attaactttcaccat

SEQ ID NO: 1243874 - DNA, 15 bp, Homo sapiens
aattaactttcacca

SEQ ID NO: 1243875 - DNA, 15 bp, Homo sapiens
gaattaactttcacc

SEQ ID NO: 1243876 - DNA, 15 bp, Homo sapiens
agaattaactttcac

SEQ ID NO: 1243877 - DNA, 15 bp, Homo sapiens
tagaattaactttca

SEQ ID NO: 1243878 - DNA, 15 bp, Homo sapiens
gtagaattaactttc

SEQ ID NO: 1243879 - DNA, 15 bp, Homo sapiens
agtagaattaacttt

SEQ ID NO: 1243880 - DNA, 15 bp, Homo sapiens
tagtagaattaactt

SEQ ID NO: 1243881 - DNA, 15 bp, Homo sapiens
ttagtagaattaact

SEQ ID NO: 1243882 - DNA, 15 bp, Homo sapiens
tttagtagaattaac

SEQ ID NO: 1243883 - DNA, 15 bp, Homo sapiens
ttttagtagaattaa

SEQ ID NO: 1243884 - DNA, 15 bp, Homo sapiens
attttagtagaatta

SEQ ID NO: 1243885 - DNA, 15 bp, Homo sapiens
aattttagtagaatt

SEQ ID NO: 1243886 - DNA, 15 bp, Homo sapiens
gaattttagtagaat

SEQ ID NO: 1243887 - DNA, 15 bp, Homo sapiens
ggaattttagtagaa

SEQ ID NO: 1243888 - DNA, 15 bp, Homo sapiens
tggaattttagtaga

SEQ ID NO: 1243889 - DNA, 15 bp, Homo sapiens
atggaattttagtag

SEQ ID NO: 1243890 - DNA, 15 bp, Homo sapiens
gatggaattttagta

SEQ ID NO: 1243891 - DNA, 15 bp, Homo sapiens
tgatggaattttagt

SEQ ID NO: 1243892 - DNA, 15 bp, Homo sapiens
atgatggaattttag

SEQ ID NO: 1243893 - DNA, 15 bp, Homo sapiens
tatgatggaatttta

SEQ ID NO: 1243894 - DNA, 15 bp, Homo sapiens
ttatgatggaatttt

SEQ ID NO: 1243895 - DNA, 15 bp, Homo sapiens
tttatgatggaattt

SEQ ID NO: 1243896 - DNA, 15 bp, Homo sapiens
ttttatgatggaatt

SEQ ID NO: 1243897 - DNA, 15 bp, Homo sapiens
gttttatgatggaat

SEQ ID NO: 1243898 - DNA, 15 bp, Homo sapiens
agttttatgatggaa

SEQ ID NO: 1243899 - DNA, 15 bp, Homo sapiens
cagttttatgatgga

SEQ ID NO: 1243900 - DNA, 15 bp, Homo sapiens
acagttttatgatgg

SEQ ID NO: 1243901 - DNA, 15 bp, Homo sapiens
cacagttttatgatg

SEQ ID NO: 1243902 - DNA, 15 bp, Homo sapiens
ccacagttttatgat

SEQ ID NO: 1243903 - DNA, 15 bp, Homo sapiens
gccacagttttatga

SEQ ID NO: 1243904 - DNA, 15 bp, Homo sapiens
tgccacagttttatg

SEQ ID NO: 1243905 - DNA, 15 bp, Homo sapiens
atgccacagttttat

SEQ ID NO: 1243906 - DNA, 15 bp, Homo sapiens
aatgccacagtttta

SEQ ID NO: 1243907 - DNA, 15 bp, Homo sapiens
caatgccacagtttt

SEQ ID NO: 1243908 - DNA, 15 bp, Homo sapiens
acaatgccacagttt

SEQ ID NO: 1243909 - DNA, 15 bp, Homo sapiens
cacaatgccacagtt

SEQ ID NO: 1243910 - DNA, 15 bp, Homo sapiens
tcacaatgccacagt

SEQ ID NO: 1243911 - DNA, 15 bp, Homo sapiens
ttcacaatgccacag

SEQ ID NO: 1243912 - DNA, 15 bp, Homo sapiens
cttcacaatgccaca

SEQ ID NO: 1243913 - DNA, 15 bp, Homo sapiens
ccttcacaatgccac

SEQ ID NO: 1243914 - DNA, 15 bp, Homo sapiens
tccttcacaatgcca

SEQ ID NO: 1243915 - DNA, 15 bp, Homo sapiens
atccttcacaatgcc

SEQ ID NO: 1243916 - DNA, 15 bp, Homo sapiens
aatccttcacaatgc

SEQ ID NO: 1243917 - DNA, 15 bp, Homo sapiens
caatccttcacaatg

SEQ ID NO: 1243918 - DNA, 15 bp, Homo sapiens
acaatccttcacaat

SEQ ID NO: 1243919 - DNA, 15 bp, Homo sapiens
aacaatccttcacaa

SEQ ID NO: 1243920 - DNA, 15 bp, Homo sapiens
caacaatccttcaca

SEQ ID NO: 1243921 - DNA, 15 bp, Homo sapiens
ccaacaatccttcac

SEQ ID NO: 1243922 - DNA, 15 bp, Homo sapiens
gccaacaatccttca

SEQ ID NO: 1243923 - DNA, 15 bp, Homo sapiens
tgccaacaatccttc

SEQ ID NO: 1243924 - DNA, 15 bp, Homo sapiens
ttgccaacaatcctt

SEQ ID NO: 1243925 - DNA, 15 bp, Homo sapiens
gttgccaacaatcct

SEQ ID NO: 1243926 - DNA, 15 bp, Homo sapiens
tgttgccaacaatcc

SEQ ID NO: 1243927 - DNA, 15 bp, Homo sapiens
ttgttgccaacaatc

SEQ ID NO: 1243928 - DNA, 15 bp, Homo sapiens
tttgttgccaacaat

SEQ ID NO: 1243929 - DNA, 15 bp, Homo sapiens
atttgttgccaacaa

SEQ ID NO: 1243930 - DNA, 15 bp, Homo sapiens
tatttgttgccaaca

SEQ ID NO: 1243931 - DNA, 15 bp, Homo sapiens
ttatttgttgccaac

SEQ ID NO: 1243932 - DNA, 15 bp, Homo sapiens
tttatttgttgccaa

SEQ ID NO: 1243933 - DNA, 15 bp, Homo sapiens
atttatttgttgcca

SEQ ID NO: 1243934 - DNA, 15 bp, Homo sapiens
tatttatttgttgcc

SEQ ID NO: 1243935 - DNA, 15 bp, Homo sapiens
ctatttatttgttgc

SEQ ID NO: 1243936 - DNA, 15 bp, Homo sapiens
tctatttatttgttg

SEQ ID NO: 1243937 - DNA, 15 bp, Homo sapiens
gtctatttatttgtt

SEQ ID NO: 1243938 - DNA, 15 bp, Homo sapiens
cgtctatttatttgt

SEQ ID NO: 1243939 - DNA, 15 bp, Homo sapiens
tcgtctatttatttg

SEQ ID NO: 1243940 - DNA, 15 bp, Homo sapiens
atcgtctatttattt

SEQ ID NO: 1243941 - DNA, 15 bp, Homo sapiens
tatcgtctatttatt

SEQ ID NO: 1243942 - DNA, 15 bp, Homo sapiens
ctatcgtctatttat

SEQ ID NO: 1243943 - DNA, 15 bp, Homo sapiens
actatcgtctattta

SEQ ID NO: 1243944 - DNA, 15 bp, Homo sapiens
tactatcgtctattt

SEQ ID NO: 1243945 - DNA, 15 bp, Homo sapiens
atactatcgtctatt

SEQ ID NO: 1243946 - DNA, 15 bp, Homo sapiens
tatactatcgtctat

SEQ ID NO: 1243947 - DNA, 15 bp, Homo sapiens
ctatactatcgtcta

SEQ ID NO: 1243948 - DNA, 15 bp, Homo sapiens
actatactatcgtct

SEQ ID NO: 1243949 - DNA, 15 bp, Homo sapiens
aactatactatcgtc

SEQ ID NO: 1243950 - DNA, 15 bp, Homo sapiens
aaactatactatcgt

SEQ ID NO: 1243951 - DNA, 15 bp, Homo sapiens
gaaactatactatcg

SEQ ID NO: 1243952 - DNA, 15 bp, Homo sapiens
agaaactatactatc

SEQ ID NO: 1243953 - DNA, 15 bp, Homo sapiens
gagaaactatactat

SEQ ID NO: 1243954 - DNA, 15 bp, Homo sapiens
tgagaaactatacta

SEQ ID NO: 1243955 - DNA, 15 bp, Homo sapiens
ttgagaaactatact

SEQ ID NO: 1243956 - DNA, 15 bp, Homo sapiens
attgagaaactatac

SEQ ID NO: 1243957 - DNA, 15 bp, Homo sapiens
aattgagaaactata

SEQ ID NO: 1243958 - DNA, 15 bp, Homo sapiens
aaattgagaaactat

SEQ ID NO: 1243959 - DNA, 15 bp, Homo sapiens
taaattgagaaacta

SEQ ID NO: 1243960 - DNA, 15 bp, Homo sapiens
ataaattgagaaact

SEQ ID NO: 1243961 - DNA, 15 bp, Homo sapiens
cataaattgagaaac

SEQ ID NO: 1243962 - DNA, 15 bp, Homo sapiens
ccataaattgagaaa

SEQ ID NO: 1243963 - DNA, 15 bp, Homo sapiens
cccataaattgagaa

SEQ ID NO: 1243964 - DNA, 15 bp, Homo sapiens
tcccataaattgaga

SEQ ID NO: 1243965 - DNA, 15 bp, Homo sapiens
ctcccataaattgag

SEQ ID NO: 1243966 - DNA, 15 bp, Homo sapiens
actcccataaattga

SEQ ID NO: 1243967 - DNA, 15 bp, Homo sapiens
gactcccataaattg

SEQ ID NO: 1243968 - DNA, 15 bp, Homo sapiens
tgactcccataaatt

SEQ ID NO: 1243969 - DNA, 15 bp, Homo sapiens
atgactcccataaat

SEQ ID NO: 1243970 - DNA, 15 bp, Homo sapiens
catgactcccataaa

SEQ ID NO: 1243971 - DNA, 15 bp, Homo sapiens
ccatgactcccataa

SEQ ID NO: 1243972 - DNA, 15 bp, Homo sapiens
gccatgactcccata

SEQ ID NO: 1243973 - DNA, 15 bp, Homo sapiens
ggccatgactcccat

SEQ ID NO: 1243974 - DNA, 15 bp, Homo sapiens
tggccatgactccca

SEQ ID NO: 1243975 - DNA, 15 bp, Homo sapiens
ttggccatgactccc

SEQ ID NO: 1243976 - DNA, 15 bp, Homo sapiens
tttggccatgactcc

SEQ ID NO: 1243977 - DNA, 15 bp, Homo sapiens
atttggccatgactc

SEQ ID NO: 1243978 - DNA, 15 bp, Homo sapiens
catttggccatgact

SEQ ID NO: 1243979 - DNA, 15 bp, Homo sapiens
acatttggccatgac

SEQ ID NO: 1243980 - DNA, 15 bp, Homo sapiens
gacatttggccatga

SEQ ID NO: 1243981 - DNA, 15 bp, Homo sapiens
agacatttggccatg

SEQ ID NO: 1243982 - DNA, 15 bp, Homo sapiens
gagacatttggccat

SEQ ID NO: 1243983 - DNA, 15 bp, Homo sapiens
agagacatttggcca

SEQ ID NO: 1243984 - DNA, 15 bp, Homo sapiens
tagagacatttggcc

SEQ ID NO: 1243985 - DNA, 15 bp, Homo sapiens
ttagagacatttggc

SEQ ID NO: 1243986 - DNA, 15 bp, Homo sapiens
tttagagacatttgg

SEQ ID NO: 1243987 - DNA, 15 bp, Homo sapiens
gtttagagacatttg

SEQ ID NO: 1243988 - DNA, 15 bp, Homo sapiens
agtttagagacattt

SEQ ID NO: 1243989 - DNA, 15 bp, Homo sapiens
gagtttagagacatt

SEQ ID NO: 1243990 - DNA, 15 bp, Homo sapiens
ggagtttagagacat

SEQ ID NO: 1243991 - DNA, 15 bp, Homo sapiens
gggagtttagagaca

SEQ ID NO: 1243992 - DNA, 15 bp, Homo sapiens
agggagtttagagac

SEQ ID NO: 1243993 - DNA, 15 bp, Homo sapiens
aagggagtttagaga

SEQ ID NO: 1243994 - DNA, 15 bp, Homo sapiens
gaagggagtttagag

SEQ ID NO: 1243995 - DNA, 15 bp, Homo sapiens
agaagggagtttaga

SEQ ID NO: 1243996 - DNA, 15 bp, Homo sapiens
aagaagggagtttag

SEQ ID NO: 1243997 - DNA, 15 bp, Homo sapiens
aaagaagggagttta

SEQ ID NO: 1243998 - DNA, 15 bp, Homo sapiens
taaagaagggagttt

SEQ ID NO: 1243999 - DNA, 15 bp, Homo sapiens
ataaagaagggagtt

SEQ ID NO: 1244000 - DNA, 15 bp, Homo sapiens
aataaagaagggagt

SEQ ID NO: 1244001 - DNA, 15 bp, Homo sapiens
aaataaagaagggag

SEQ ID NO: 1244002 - DNA, 15 bp, Homo sapiens
taaataaagaaggga

SEQ ID NO: 1244003 - DNA, 15 bp, Homo sapiens
ttaaataaagaaggg

SEQ ID NO: 1244004 - DNA, 15 bp, Homo sapiens
cttaaataaagaagg

SEQ ID NO: 1244005 - DNA, 15 bp, Homo sapiens
tcttaaataaagaag

SEQ ID NO: 1244006 - DNA, 15 bp, Homo sapiens
ttcttaaataaagaa

SEQ ID NO: 1244007 - DNA, 15 bp, Homo sapiens
tttcttaaataaaga

SEQ ID NO: 1244008 - DNA, 15 bp, Homo sapiens
ttttcttaaataaag

SEQ ID NO: 1244009 - DNA, 15 bp, Homo sapiens
attttcttaaataaa

SEQ ID NO: 1244010 - DNA, 15 bp, Homo sapiens
aattttcttaaataa

SEQ ID NO: 1244011 - DNA, 15 bp, Homo sapiens
caattttcttaaata

SEQ ID NO: 1244012 - DNA, 15 bp, Homo sapiens
tcaattttcttaaat

SEQ ID NO: 1244013 - DNA, 15 bp, Homo sapiens
atcaattttcttaaa

SEQ ID NO: 1244014 - DNA, 15 bp, Homo sapiens
aatcaattttcttaa

SEQ ID NO: 1244015 - DNA, 15 bp, Homo sapiens
taatcaattttctta

SEQ ID NO: 1244016 - DNA, 15 bp, Homo sapiens
ataatcaattttctt

SEQ ID NO: 1244017 - DNA, 15 bp, Homo sapiens
aataatcaattttct

SEQ ID NO: 1244018 - DNA, 15 bp, Homo sapiens
taataatcaattttc

SEQ ID NO: 1244019 - DNA, 15 bp, Homo sapiens
ttaataatcaatttt

SEQ ID NO: 1244020 - DNA, 15 bp, Homo sapiens
tttaataatcaattt

SEQ ID NO: 1244021 - DNA, 15 bp, Homo sapiens
ttttaataatcaatt

SEQ ID NO: 1244022 - DNA, 15 bp, Homo sapiens
tttttaataatcaat

SEQ ID NO: 1244023 - DNA, 15 bp, Homo sapiens
atttttaataatcaa

SEQ ID NO: 1244024 - DNA, 15 bp, Homo sapiens
catttttaataatca

SEQ ID NO: 1244025 - DNA, 15 bp, Homo sapiens
ccatttttaataatc

SEQ ID NO: 1244026 - DNA, 15 bp, Homo sapiens
gccatttttaataat

SEQ ID NO: 1244027 - DNA, 15 bp, Homo sapiens
ggccatttttaataa

SEQ ID NO: 1244028 - DNA, 15 bp, Homo sapiens
tggccatttttaata

SEQ ID NO: 1244029 - DNA, 15 bp, Homo sapiens
ctggccatttttaat

SEQ ID NO: 1244030 - DNA, 15 bp, Homo sapiens
actggccatttttaa

SEQ ID NO: 1244031 - DNA, 15 bp, Homo sapiens
cactggccattttta

SEQ ID NO: 1244032 - DNA, 15 bp, Homo sapiens
ccactggccattttt

SEQ ID NO: 1244033 - DNA, 15 bp, Homo sapiens
accactggccatttt

SEQ ID NO: 1244034 - DNA, 15 bp, Homo sapiens
aaccactggccattt

SEQ ID NO: 1244035 - DNA, 15 bp, Homo sapiens
gaaccactggccatt

SEQ ID NO: 1244036 - DNA, 15 bp, Homo sapiens
tgaaccactggccat

SEQ ID NO: 1244037 - DNA, 15 bp, Homo sapiens
gtgaaccactggcca

SEQ ID NO: 1244038 - DNA, 15 bp, Homo sapiens
cgtgaaccactggcc

SEQ ID NO: 1244039 - DNA, 15 bp, Homo sapiens
gcgtgaaccactggc

SEQ ID NO: 1244040 - DNA, 15 bp, Homo sapiens
ggcgtgaaccactgg

SEQ ID NO: 1244041 - DNA, 15 bp, Homo sapiens
ttgggattacaggcg

SEQ ID NO: 1244042 - DNA, 15 bp, Homo sapiens
tgttgggattacagg

SEQ ID NO: 1244043 - DNA, 15 bp, Homo sapiens
gtgttgggattacag

SEQ ID NO: 1244044 - DNA, 15 bp, Homo sapiens
agtgttgggattaca

SEQ ID NO: 1244045 - DNA, 15 bp, Homo sapiens
aagtgttgggattac

SEQ ID NO: 1244046 - DNA, 15 bp, Homo sapiens
ccccaaagtgttggg

SEQ ID NO: 1244047 - DNA, 15 bp, Homo sapiens
cccccaaagtgttgg

SEQ ID NO: 1244048 - DNA, 15 bp, Homo sapiens
ccccccaaagtgttg

SEQ ID NO: 1244049 - DNA, 15 bp, Homo sapiens
gccccccaaagtgtt

SEQ ID NO: 1244050 - DNA, 15 bp, Homo sapiens
ggccccccaaagtgt

SEQ ID NO: 1244051 - DNA, 15 bp, Homo sapiens
tggccccccaaagtg

SEQ ID NO: 1244052 - DNA, 15 bp, Homo sapiens
ttggccccccaaagt

SEQ ID NO: 1244053 - DNA, 15 bp, Homo sapiens
cttggccccccaaag

SEQ ID NO: 1244054 - DNA, 15 bp, Homo sapiens
ccttggccccccaaa

SEQ ID NO: 1244055 - DNA, 15 bp, Homo sapiens
accttggccccccaa

SEQ ID NO: 1244056 - DNA, 15 bp, Homo sapiens
caccttggcccccca

SEQ ID NO: 1244057 - DNA, 15 bp, Homo sapiens
ccaccttggcccccc

SEQ ID NO: 1244058 - DNA, 15 bp, Homo sapiens
cccaccttggccccc

SEQ ID NO: 1244059 - DNA, 15 bp, Homo sapiens
gcccaccttggcccc

SEQ ID NO: 1244060 - DNA, 15 bp, Homo sapiens
cgcccaccttggccc

SEQ ID NO: 1244061 - DNA, 15 bp, Homo sapiens
tcaggctggtctcga

SEQ ID NO: 1244062 - DNA, 15 bp, Homo sapiens
gtcaggctggtctcg

SEQ ID NO: 1244063 - DNA, 15 bp, Homo sapiens
gggatttcaccatgt

SEQ ID NO: 1244064 - DNA, 15 bp, Homo sapiens
cgggatttcaccatg

SEQ ID NO: 1244065 - DNA, 15 bp, Homo sapiens
agagacgggatttca

SEQ ID NO: 1244066 - DNA, 15 bp, Homo sapiens
tagagacgggatttc

SEQ ID NO: 1244067 - DNA, 15 bp, Homo sapiens
gtagagacgggattt

SEQ ID NO: 1244068 - DNA, 15 bp, Homo sapiens
agtagagacgggatt

SEQ ID NO: 1244069 - DNA, 15 bp, Homo sapiens
tagtagagacgggat

SEQ ID NO: 1244070 - DNA, 15 bp, Homo sapiens
ttagtagagacggga

SEQ ID NO: 1244071 - DNA, 15 bp, Homo sapiens
ttatttttagtagag

SEQ ID NO: 1244072 - DNA, 15 bp, Homo sapiens
tttatttttagtaga

SEQ ID NO: 1244073 - DNA, 15 bp, Homo sapiens
ttttatttttagtag

SEQ ID NO: 1244074 - DNA, 15 bp, Homo sapiens
tttttatttttagta

SEQ ID NO: 1244075 - DNA, 15 bp, Homo sapiens
ttttttatttttagt

SEQ ID NO: 1244076 - DNA, 15 bp, Homo sapiens
attttttatttttag

SEQ ID NO: 1244077 - DNA, 15 bp, Homo sapiens
ctagctgggattaca

SEQ ID NO: 1244078 - DNA, 15 bp, Homo sapiens
actagctgggattac

SEQ ID NO: 1244079 - DNA, 15 bp, Homo sapiens
aactagctgggatta

SEQ ID NO: 1244080 - DNA, 15 bp, Homo sapiens
caactagctgggatt

SEQ ID NO: 1244081 - DNA, 15 bp, Homo sapiens
ccaactagctgggat

SEQ ID NO: 1244082 - DNA, 15 bp, Homo sapiens
tccaactagctggga

SEQ ID NO: 1244083 - DNA, 15 bp, Homo sapiens
ttccaactagctggg

SEQ ID NO: 1244084 - DNA, 15 bp, Homo sapiens
cttccaactagctgg

SEQ ID NO: 1244085 - DNA, 15 bp, Homo sapiens
ccttccaactagctg

SEQ ID NO: 1244086 - DNA, 15 bp, Homo sapiens
accttccaactagct

SEQ ID NO: 1244087 - DNA, 15 bp, Homo sapiens
aaccttccaactagc

SEQ ID NO: 1244088 - DNA, 15 bp, Homo sapiens
caaccttccaactag

SEQ ID NO: 1244089 - DNA, 15 bp, Homo sapiens
tcaaccttccaacta

SEQ ID NO: 1244090 - DNA, 15 bp, Homo sapiens
ctcaaccttccaact

SEQ ID NO: 1244091 - DNA, 15 bp, Homo sapiens
cctcaaccttccaac

SEQ ID NO: 1244092 - DNA, 15 bp, Homo sapiens
gcctcaaccttccaa

SEQ ID NO: 1244093 - DNA, 15 bp, Homo sapiens
tgcctcaaccttcca

SEQ ID NO: 1244094 - DNA, 15 bp, Homo sapiens
ctgcctcaaccttcc

SEQ ID NO: 1244095 - DNA, 15 bp, Homo sapiens
cctgcctcaaccttc

SEQ ID NO: 1244096 - DNA, 15 bp, Homo sapiens
tcctgcctcaacctt

SEQ ID NO: 1244097 - DNA, 15 bp, Homo sapiens
tacgatcttggctca

SEQ ID NO: 1244098 - DNA, 15 bp, Homo sapiens
gtacgatcttggctc

SEQ ID NO: 1244099 - DNA, 15 bp, Homo sapiens
ggtacgatcttggct

SEQ ID NO: 1244100 - DNA, 15 bp, Homo sapiens
tggtacgatcttggc

SEQ ID NO: 1244101 - DNA, 15 bp, Homo sapiens
atggtacgatcttgg

SEQ ID NO: 1244102 - DNA, 15 bp, Homo sapiens
aatggtacgatcttg

SEQ ID NO: 1244103 - DNA, 15 bp, Homo sapiens
caatggtacgatctt

SEQ ID NO: 1244104 - DNA, 15 bp, Homo sapiens
gcaatggtacgatct

SEQ ID NO: 1244105 - DNA, 15 bp, Homo sapiens
tgcaatggtacgatc

SEQ ID NO: 1244106 - DNA, 15 bp, Homo sapiens
gtgcaatggtacgat

SEQ ID NO: 1244107 - DNA, 15 bp, Homo sapiens
agtgcaatggtacga

SEQ ID NO: 1244108 - DNA, 15 bp, Homo sapiens
gagtgcaatggtacg

SEQ ID NO: 1244109 - DNA, 15 bp, Homo sapiens
ggagtgcaatggtac

SEQ ID NO: 1244110 - DNA, 15 bp, Homo sapiens
tggagtgcaatggta

SEQ ID NO: 1244111 - DNA, 15 bp, Homo sapiens
ccttgttgcccaggc

SEQ ID NO: 1244112 - DNA, 15 bp, Homo sapiens
cccttgttgcccagg

SEQ ID NO: 1244113 - DNA, 15 bp, Homo sapiens
gcccttgttgcccag

SEQ ID NO: 1244114 - DNA, 15 bp, Homo sapiens
tgcccttgttgccca

SEQ ID NO: 1244115 - DNA, 15 bp, Homo sapiens
ttgcccttgttgccc

SEQ ID NO: 1244116 - DNA, 15 bp, Homo sapiens
tttgcccttgttgcc

SEQ ID NO: 1244117 - DNA, 15 bp, Homo sapiens
ttttgcccttgttgc

SEQ ID NO: 1244118 - DNA, 15 bp, Homo sapiens
gttttgcccttgttg

SEQ ID NO: 1244119 - DNA, 15 bp, Homo sapiens
tgttttgcccttgtt

SEQ ID NO: 1244120 - DNA, 15 bp, Homo sapiens
ttgttttgcccttgt

SEQ ID NO: 1244121 - DNA, 15 bp, Homo sapiens
cttgttttgcccttg

SEQ ID NO: 1244122 - DNA, 15 bp, Homo sapiens
tcttgttttgccctt

SEQ ID NO: 1244123 - DNA, 15 bp, Homo sapiens
atcttgttttgccct

SEQ ID NO: 1244124 - DNA, 15 bp, Homo sapiens
tatcttgttttgccc

SEQ ID NO: 1244125 - DNA, 15 bp, Homo sapiens
ttatcttgttttgcc

SEQ ID NO: 1244126 - DNA, 15 bp, Homo sapiens
tttatcttgttttgc

SEQ ID NO: 1244127 - DNA, 15 bp, Homo sapiens
ttttatcttgttttg

SEQ ID NO: 1244128 - DNA, 15 bp, Homo sapiens
tttttatcttgtttt

SEQ ID NO: 1244129 - DNA, 15 bp, Homo sapiens
ttttttatcttgttt

SEQ ID NO: 1244130 - DNA, 15 bp, Homo sapiens
tttttttatcttgtt

SEQ ID NO: 1244131 - DNA, 15 bp, Homo sapiens
ttttttttatcttgt

SEQ ID NO: 1244132 - DNA, 15 bp, Homo sapiens
tttttttttatcttg

SEQ ID NO: 1244133 - DNA, 15 bp, Homo sapiens
ttttttttttatctt

SEQ ID NO: 1244134 - DNA, 15 bp, Homo sapiens
attttttttttatct

SEQ ID NO: 1244135 - DNA, 15 bp, Homo sapiens
aattttttttttatc

SEQ ID NO: 1244136 - DNA, 15 bp, Homo sapiens
taattttttttttat

SEQ ID NO: 1244137 - DNA, 15 bp, Homo sapiens
acgtaattttttttt

SEQ ID NO: 1244138 - DNA, 15 bp, Homo sapiens
cacgtaatttttttt

SEQ ID NO: 1244139 - DNA, 15 bp, Homo sapiens
tcacgtaattttttt

SEQ ID NO: 1244140 - DNA, 15 bp, Homo sapiens
gtcacgtaatttttt

SEQ ID NO: 1244141 - DNA, 15 bp, Homo sapiens
ggtcacgtaattttt

SEQ ID NO: 1244142 - DNA, 15 bp, Homo sapiens
cggtcacgtaatttt

SEQ ID NO: 1244143 - DNA, 15 bp, Homo sapiens
ccggtcacgtaattt

SEQ ID NO: 1244144 - DNA, 15 bp, Homo sapiens
cccggtcacgtaatt

SEQ ID NO: 1244145 - DNA, 15 bp, Homo sapiens
gcccggtcacgtaat

SEQ ID NO: 1244146 - DNA, 15 bp, Homo sapiens
cgcccggtcacgtaa

SEQ ID NO: 1244147 - DNA, 15 bp, Homo sapiens
gcgcccggtcacgta

SEQ ID NO: 1244148 - DNA, 15 bp, Homo sapiens
cgcgcccggtcacgt

SEQ ID NO: 1244149 - DNA, 15 bp, Homo sapiens
ccgcgcccggtcacg

SEQ ID NO: 1244150 - DNA, 15 bp, Homo sapiens
accgcgcccggtcac

SEQ ID NO: 1244151 - DNA, 15 bp, Homo sapiens
caccgcgcccggtca

SEQ ID NO: 1244152 - DNA, 15 bp, Homo sapiens
tcaccgcgcccggtc

SEQ ID NO: 1244153 - DNA, 15 bp, Homo sapiens
atcaccgcgcccggt

SEQ ID NO: 1244154 - DNA, 15 bp, Homo sapiens
catcaccgcgcccgg

SEQ ID NO: 1244155 - DNA, 15 bp, Homo sapiens
acatcaccgcgcccg

SEQ ID NO: 1244156 - DNA, 15 bp, Homo sapiens
tacatcaccgcgccc

SEQ ID NO: 1244157 - DNA, 15 bp, Homo sapiens
gtacatcaccgcgcc

SEQ ID NO: 1244158 - DNA, 15 bp, Homo sapiens
tgtacatcaccgcgc

SEQ ID NO: 1244159 - DNA, 15 bp, Homo sapiens
gtgtacatcaccgcg

SEQ ID NO: 1244160 - DNA, 15 bp, Homo sapiens
agtgtacatcaccgc

SEQ ID NO: 1244161 - DNA, 15 bp, Homo sapiens
aagtgtacatcaccg

SEQ ID NO: 1244162 - DNA, 15 bp, Homo sapiens
caagtgtacatcacc

SEQ ID NO: 1244163 - DNA, 15 bp, Homo sapiens
acaagtgtacatcac

SEQ ID NO: 1244164 - DNA, 15 bp, Homo sapiens
tacaagtgtacatca

SEQ ID NO: 1244165 - DNA, 15 bp, Homo sapiens
ttacaagtgtacatc

SEQ ID NO: 1244166 - DNA, 15 bp, Homo sapiens
attacaagtgtacat

SEQ ID NO: 1244167 - DNA, 15 bp, Homo sapiens
tattacaagtgtaca

SEQ ID NO: 1244168 - DNA, 15 bp, Homo sapiens
gtattacaagtgtac

SEQ ID NO: 1244169 - DNA, 15 bp, Homo sapiens
ggtattacaagtgta

SEQ ID NO: 1244170 - DNA, 15 bp, Homo sapiens
tggtattacaagtgt

SEQ ID NO: 1244171 - DNA, 15 bp, Homo sapiens
ctggtattacaagtg

SEQ ID NO: 1244172 - DNA, 15 bp, Homo sapiens
gctggtattacaagt

SEQ ID NO: 1244173 - DNA, 15 bp, Homo sapiens
tgctggtattacaag

SEQ ID NO: 1244174 - DNA, 15 bp, Homo sapiens
gtgctggtattacaa

SEQ ID NO: 1244175 - DNA, 15 bp, Homo sapiens
agtgctggtattaca

SEQ ID NO: 1244176 - DNA, 15 bp, Homo sapiens
cagtgctggtattac

SEQ ID NO: 1244177 - DNA, 15 bp, Homo sapiens
acagtgctggtatta

SEQ ID NO: 1244178 - DNA, 15 bp, Homo sapiens
cacagtgctggtatt

SEQ ID NO: 1244179 - DNA, 15 bp, Homo sapiens
ccacagtgctggtat

SEQ ID NO: 1244180 - DNA, 15 bp, Homo sapiens
cccacagtgctggta

SEQ ID NO: 1244181 - DNA, 15 bp, Homo sapiens
tcccacagtgctggt

SEQ ID NO: 1244182 - DNA, 15 bp, Homo sapiens
ggcctcccacagtgc

SEQ ID NO: 1244183 - DNA, 15 bp, Homo sapiens
tggcctcccacagtg

SEQ ID NO: 1244184 - DNA, 15 bp, Homo sapiens
ttggcctcccacagt

SEQ ID NO: 1244185 - DNA, 15 bp, Homo sapiens
cttggcctcccacag

SEQ ID NO: 1244186 - DNA, 15 bp, Homo sapiens
ccttggcctcccaca

SEQ ID NO: 1244187 - DNA, 15 bp, Homo sapiens
accttggcctcccac

SEQ ID NO: 1244188 - DNA, 15 bp, Homo sapiens
tcaccttggcctccc

SEQ ID NO: 1244189 - DNA, 15 bp, Homo sapiens
ctcaccttggcctcc

SEQ ID NO: 1244190 - DNA, 15 bp, Homo sapiens
tctcaccttggcctc

SEQ ID NO: 1244191 - DNA, 15 bp, Homo sapiens
ctctcaccttggcct

SEQ ID NO: 1244192 - DNA, 15 bp, Homo sapiens
cctctcaccttggcc

SEQ ID NO: 1244193 - DNA, 15 bp, Homo sapiens
tcctctcaccttggc

SEQ ID NO: 1244194 - DNA, 15 bp, Homo sapiens
atcctctcaccttgg

SEQ ID NO: 1244195 - DNA, 15 bp, Homo sapiens
gatcctctcaccttg

SEQ ID NO: 1244196 - DNA, 15 bp, Homo sapiens
tgatcctctcacctt

SEQ ID NO: 1244197 - DNA, 15 bp, Homo sapiens
gtgatcctctcacct

SEQ ID NO: 1244198 - DNA, 15 bp, Homo sapiens
agtgatcctctcacc

SEQ ID NO: 1244199 - DNA, 15 bp, Homo sapiens
aagtgatcctctcac

SEQ ID NO: 1244200 - DNA, 15 bp, Homo sapiens
cctcaagtgatcctc

SEQ ID NO: 1244201 - DNA, 15 bp, Homo sapiens
gcctcaagtgatcct

SEQ ID NO: 1244202 - DNA, 15 bp, Homo sapiens
agcctcaagtgatcc

SEQ ID NO: 1244203 - DNA, 15 bp, Homo sapiens
cagcctcaagtgatc

SEQ ID NO: 1244204 - DNA, 15 bp, Homo sapiens
ccagcctcaagtgat

SEQ ID NO: 1244205 - DNA, 15 bp, Homo sapiens
accagcctcaagtga

SEQ ID NO: 1244206 - DNA, 15 bp, Homo sapiens
taccagcctcaagtg

SEQ ID NO: 1244207 - DNA, 15 bp, Homo sapiens
ctaccagcctcaagt

SEQ ID NO: 1244208 - DNA, 15 bp, Homo sapiens
actaccagcctcaag

SEQ ID NO: 1244209 - DNA, 15 bp, Homo sapiens
aactaccagcctcaa

SEQ ID NO: 1244210 - DNA, 15 bp, Homo sapiens
aaactaccagcctca

SEQ ID NO: 1244211 - DNA, 15 bp, Homo sapiens
caaactaccagcctc

SEQ ID NO: 1244212 - DNA, 15 bp, Homo sapiens
tcaaactaccagcct

SEQ ID NO: 1244213 - DNA, 15 bp, Homo sapiens
ctcaaactaccagcc

SEQ ID NO: 1244214 - DNA, 15 bp, Homo sapiens
tctcaaactaccagc

SEQ ID NO: 1244215 - DNA, 15 bp, Homo sapiens
gtctcaaactaccag

SEQ ID NO: 1244216 - DNA, 15 bp, Homo sapiens
ggtctcaaactacca

SEQ ID NO: 1244217 - DNA, 15 bp, Homo sapiens
tggtctcaaactacc

SEQ ID NO: 1244218 - DNA, 15 bp, Homo sapiens
ctggtctcaaactac

SEQ ID NO: 1244219 - DNA, 15 bp, Homo sapiens
gctggtctcaaacta

SEQ ID NO: 1244220 - DNA, 15 bp, Homo sapiens
taggctggtctcaaa

SEQ ID NO: 1244221 - DNA, 15 bp, Homo sapiens
ctaggctggtctcaa

SEQ ID NO: 1244222 - DNA, 15 bp, Homo sapiens
actaggctggtctca

SEQ ID NO: 1244223 - DNA, 15 bp, Homo sapiens
gactaggctggtctc

SEQ ID NO: 1244224 - DNA, 15 bp, Homo sapiens
tgactaggctggtct

SEQ ID NO: 1244225 - DNA, 15 bp, Homo sapiens
ttgactaggctggtc

SEQ ID NO: 1244226 - DNA, 15 bp, Homo sapiens
gttgactaggctggt

SEQ ID NO: 1244227 - DNA, 15 bp, Homo sapiens
tgttgactaggctgg

SEQ ID NO: 1244228 - DNA, 15 bp, Homo sapiens
atgttgactaggctg

SEQ ID NO: 1244229 - DNA, 15 bp, Homo sapiens
tatgttgactaggct

SEQ ID NO: 1244230 - DNA, 15 bp, Homo sapiens
ctatgttgactaggc

SEQ ID NO: 1244231 - DNA, 15 bp, Homo sapiens
actatgttgactagg

SEQ ID NO: 1244232 - DNA, 15 bp, Homo sapiens
cactatgttgactag

SEQ ID NO: 1244233 - DNA, 15 bp, Homo sapiens
tcactatgttgacta

SEQ ID NO: 1244234 - DNA, 15 bp, Homo sapiens
ctcactatgttgact

SEQ ID NO: 1244235 - DNA, 15 bp, Homo sapiens
tctcactatgttgac

SEQ ID NO: 1244236 - DNA, 15 bp, Homo sapiens
atctcactatgttga

SEQ ID NO: 1244237 - DNA, 15 bp, Homo sapiens
ggatctcactatgtt

SEQ ID NO: 1244238 - DNA, 15 bp, Homo sapiens
gggatctcactatgt

SEQ ID NO: 1244239 - DNA, 15 bp, Homo sapiens
agggatctcactatg

SEQ ID NO: 1244240 - DNA, 15 bp, Homo sapiens
cagggatctcactat

SEQ ID NO: 1244241 - DNA, 15 bp, Homo sapiens
acagggatctcacta

SEQ ID NO: 1244242 - DNA, 15 bp, Homo sapiens
aacagggatctcact

SEQ ID NO: 1244243 - DNA, 15 bp, Homo sapiens
aaacagggatctcac

SEQ ID NO: 1244244 - DNA, 15 bp, Homo sapiens
gaaacagggatctca

SEQ ID NO: 1244245 - DNA, 15 bp, Homo sapiens
agaaacagggatctc

SEQ ID NO: 1244246 - DNA, 15 bp, Homo sapiens
tagaaacagggatct

SEQ ID NO: 1244247 - DNA, 15 bp, Homo sapiens
atagaaacagggatc

SEQ ID NO: 1244248 - DNA, 15 bp, Homo sapiens
tatagaaacagggat

SEQ ID NO: 1244249 - DNA, 15 bp, Homo sapiens
ttatagaaacaggga

SEQ ID NO: 1244250 - DNA, 15 bp, Homo sapiens
tttatagaaacaggg

SEQ ID NO: 1244251 - DNA, 15 bp, Homo sapiens
ttttatagaaacagg

SEQ ID NO: 1244252 - DNA, 15 bp, Homo sapiens
tttttatagaaacag

SEQ ID NO: 1244253 - DNA, 15 bp, Homo sapiens
ttttttatagaaaca

SEQ ID NO: 1244254 - DNA, 15 bp, Homo sapiens
aaattttttatagaa

SEQ ID NO: 1244255 - DNA, 15 bp, Homo sapiens
caaattttttataga

SEQ ID NO: 1244256 - DNA, 15 bp, Homo sapiens
gcaaattttttatag

SEQ ID NO: 1244257 - DNA, 15 bp, Homo sapiens
agcaaattttttata

SEQ ID NO: 1244258 - DNA, 15 bp, Homo sapiens
cagcaaattttttat

SEQ ID NO: 1244259 - DNA, 15 bp, Homo sapiens
ccagcaaatttttta

SEQ ID NO: 1244260 - DNA, 15 bp, Homo sapiens
cccagcaaatttttt

SEQ ID NO: 1244261 - DNA, 15 bp, Homo sapiens
gcccagcaaattttt

SEQ ID NO: 1244262 - DNA, 15 bp, Homo sapiens
agcccagcaaatttt

SEQ ID NO: 1244263 - DNA, 15 bp, Homo sapiens
tagcccagcaaattt

SEQ ID NO: 1244264 - DNA, 15 bp, Homo sapiens
gtagcccagcaaatt

SEQ ID NO: 1244265 - DNA, 15 bp, Homo sapiens
agtagcccagcaaat

SEQ ID NO: 1244266 - DNA, 15 bp, Homo sapiens
tagtagcccagcaaa

SEQ ID NO: 1244267 - DNA, 15 bp, Homo sapiens
ttagtagcccagcaa

SEQ ID NO: 1244268 - DNA, 15 bp, Homo sapiens
tttagtagcccagca

SEQ ID NO: 1244269 - DNA, 15 bp, Homo sapiens
ttttagtagcccagc

SEQ ID NO: 1244270 - DNA, 15 bp, Homo sapiens
tttttagtagcccag

SEQ ID NO: 1244271 - DNA, 15 bp, Homo sapiens
ttttttagtagccca

SEQ ID NO: 1244272 - DNA, 15 bp, Homo sapiens
attttttagtagccc

SEQ ID NO: 1244273 - DNA, 15 bp, Homo sapiens
tattttttagtagcc

SEQ ID NO: 1244274 - DNA, 15 bp, Homo sapiens
ctattttttagtagc

SEQ ID NO: 1244275 - DNA, 15 bp, Homo sapiens
tctattttttagtag

SEQ ID NO: 1244276 - DNA, 15 bp, Homo sapiens
gtctattttttagta

SEQ ID NO: 1244277 - DNA, 15 bp, Homo sapiens
agtctattttttagt

SEQ ID NO: 1244278 - DNA, 15 bp, Homo sapiens
cagtctattttttag

SEQ ID NO: 1244279 - DNA, 15 bp, Homo sapiens
acagtctatttttta

SEQ ID NO: 1244280 - DNA, 15 bp, Homo sapiens
tacagtctatttttt

SEQ ID NO: 1244281 - DNA, 15 bp, Homo sapiens
ctacagtctattttt

SEQ ID NO: 1244282 - DNA, 15 bp, Homo sapiens
actacagtctatttt

SEQ ID NO: 1244283 - DNA, 15 bp, Homo sapiens
aactacagtctattt

SEQ ID NO: 1244284 - DNA, 15 bp, Homo sapiens
gaactacagtctatt

SEQ ID NO: 1244285 - DNA, 15 bp, Homo sapiens
ggaactacagtctat

SEQ ID NO: 1244286 - DNA, 15 bp, Homo sapiens
tggaactacagtcta

SEQ ID NO: 1244287 - DNA, 15 bp, Homo sapiens
ttggaactacagtct

SEQ ID NO: 1244288 - DNA, 15 bp, Homo sapiens
gttggaactacagtc

SEQ ID NO: 1244289 - DNA, 15 bp, Homo sapiens
agttggaactacagt

SEQ ID NO: 1244290 - DNA, 15 bp, Homo sapiens
tagttggaactacag

SEQ ID NO: 1244291 - DNA, 15 bp, Homo sapiens
gtagttggaactaca

SEQ ID NO: 1244292 - DNA, 15 bp, Homo sapiens
agtagttggaactac

SEQ ID NO: 1244293 - DNA, 15 bp, Homo sapiens
aagtagttggaacta

SEQ ID NO: 1244294 - DNA, 15 bp, Homo sapiens
caagtagttggaact

SEQ ID NO: 1244295 - DNA, 15 bp, Homo sapiens
ccaagtagttggaac

SEQ ID NO: 1244296 - DNA, 15 bp, Homo sapiens
cccaagtagttggaa

SEQ ID NO: 1244297 - DNA, 15 bp, Homo sapiens
tcccaagtagttgga

SEQ ID NO: 1244298 - DNA, 15 bp, Homo sapiens
ctcccaagtagttgg

SEQ ID NO: 1244299 - DNA, 15 bp, Homo sapiens
cctcccaagtagttg

SEQ ID NO: 1244300 - DNA, 15 bp, Homo sapiens
gcctcccaagtagtt

SEQ ID NO: 1244301 - DNA, 15 bp, Homo sapiens
aacctcagcctccca

SEQ ID NO: 1244302 - DNA, 15 bp, Homo sapiens
caacctcagcctccc

SEQ ID NO: 1244303 - DNA, 15 bp, Homo sapiens
acaacctcagcctcc

SEQ ID NO: 1244304 - DNA, 15 bp, Homo sapiens
tacaacctcagcctc

SEQ ID NO: 1244305 - DNA, 15 bp, Homo sapiens
ctacaacctcagcct

SEQ ID NO: 1244306 - DNA, 15 bp, Homo sapiens
actacaacctcagcc

SEQ ID NO: 1244307 - DNA, 15 bp, Homo sapiens
cactacaacctcagc

SEQ ID NO: 1244308 - DNA, 15 bp, Homo sapiens
tcactacaacctcag

SEQ ID NO: 1244309 - DNA, 15 bp, Homo sapiens
ctcactacaacctca

SEQ ID NO: 1244310 - DNA, 15 bp, Homo sapiens
agctcactacaacct

SEQ ID NO: 1244311 - DNA, 15 bp, Homo sapiens
tagctcactacaacc

SEQ ID NO: 1244312 - DNA, 15 bp, Homo sapiens
atagctcactacaac

SEQ ID NO: 1244313 - DNA, 15 bp, Homo sapiens
catagctcactacaa

SEQ ID NO: 1244314 - DNA, 15 bp, Homo sapiens
tcatagctcactaca

SEQ ID NO: 1244315 - DNA, 15 bp, Homo sapiens
atcatagctcactac

SEQ ID NO: 1244316 - DNA, 15 bp, Homo sapiens
caatcatagctcact

SEQ ID NO: 1244317 - DNA, 15 bp, Homo sapiens
gctcaatcatagctc

SEQ ID NO: 1244318 - DNA, 15 bp, Homo sapiens
ggctcaatcatagct

SEQ ID NO: 1244319 - DNA, 15 bp, Homo sapiens
tggctcaatcatagc

SEQ ID NO: 1244320 - DNA, 15 bp, Homo sapiens
gtggctcaatcatag

SEQ ID NO: 1244321 - DNA, 15 bp, Homo sapiens
agtggctcaatcata

SEQ ID NO: 1244322 - DNA, 15 bp, Homo sapiens
cagtggctcaatcat

SEQ ID NO: 1244323 - DNA, 15 bp, Homo sapiens
tcagtggctcaatca

SEQ ID NO: 1244324 - DNA, 15 bp, Homo sapiens
ttcagtggctcaatc

SEQ ID NO: 1244325 - DNA, 15 bp, Homo sapiens
gttcagtggctcaat

SEQ ID NO: 1244326 - DNA, 15 bp, Homo sapiens
agttcagtggctcaa

SEQ ID NO: 1244327 - DNA, 15 bp, Homo sapiens
gagttcagtggctca

SEQ ID NO: 1244328 - DNA, 15 bp, Homo sapiens
agagttcagtggctc

SEQ ID NO: 1244329 - DNA, 15 bp, Homo sapiens
tagagttcagtggct

SEQ ID NO: 1244330 - DNA, 15 bp, Homo sapiens
ttagagttcagtggc

SEQ ID NO: 1244331 - DNA, 15 bp, Homo sapiens
gttagagttcagtgg

SEQ ID NO: 1244332 - DNA, 15 bp, Homo sapiens
ggttagagttcagtg

SEQ ID NO: 1244333 - DNA, 15 bp, Homo sapiens
aggttagagttcagt

SEQ ID NO: 1244334 - DNA, 15 bp, Homo sapiens
caggttagagttcag

SEQ ID NO: 1244335 - DNA, 15 bp, Homo sapiens
ccaggttagagttca

SEQ ID NO: 1244336 - DNA, 15 bp, Homo sapiens
cccaggttagagttc

SEQ ID NO: 1244337 - DNA, 15 bp, Homo sapiens
acccaggttagagtt

SEQ ID NO: 1244338 - DNA, 15 bp, Homo sapiens
cacccaggttagagt

SEQ ID NO: 1244339 - DNA, 15 bp, Homo sapiens
tcacccaggttagag

SEQ ID NO: 1244340 - DNA, 15 bp, Homo sapiens
atcacccaggttaga

SEQ ID NO: 1244341 - DNA, 15 bp, Homo sapiens
tatcacccaggttag

SEQ ID NO: 1244342 - DNA, 15 bp, Homo sapiens
ctatcacccaggtta

SEQ ID NO: 1244343 - DNA, 15 bp, Homo sapiens
tctatcacccaggtt

SEQ ID NO: 1244344 - DNA, 15 bp, Homo sapiens
ctctatcacccaggt

SEQ ID NO: 1244345 - DNA, 15 bp, Homo sapiens
gctctatcacccagg

SEQ ID NO: 1244346 - DNA, 15 bp, Homo sapiens
tgctctatcacccag

SEQ ID NO: 1244347 - DNA, 15 bp, Homo sapiens
ttgctctatcaccca

SEQ ID NO: 1244348 - DNA, 15 bp, Homo sapiens
cttgctctatcaccc

SEQ ID NO: 1244349 - DNA, 15 bp, Homo sapiens
tcttgctctatcacc

SEQ ID NO: 1244350 - DNA, 15 bp, Homo sapiens
gtcttgctctatcac

SEQ ID NO: 1244351 - DNA, 15 bp, Homo sapiens
tgtcttgctctatca

SEQ ID NO: 1244352 - DNA, 15 bp, Homo sapiens
gtgtcttgctctatc

SEQ ID NO: 1244353 - DNA, 15 bp, Homo sapiens
agtgtcttgctctat

SEQ ID NO: 1244354 - DNA, 15 bp, Homo sapiens
cagtgtcttgctcta

SEQ ID NO: 1244355 - DNA, 15 bp, Homo sapiens
gagacagtgtcttgc

SEQ ID NO: 1244356 - DNA, 15 bp, Homo sapiens
tgagacagtgtcttg

SEQ ID NO: 1244357 - DNA, 15 bp, Homo sapiens
ttgagacagtgtctt

SEQ ID NO: 1244358 - DNA, 15 bp, Homo sapiens
tttgagacagtgtct

SEQ ID NO: 1244359 - DNA, 15 bp, Homo sapiens
ttttgagacagtgtc

SEQ ID NO: 1244360 - DNA, 15 bp, Homo sapiens
tttttgagacagtgt

SEQ ID NO: 1244361 - DNA, 15 bp, Homo sapiens
ttttttgagacagtg

SEQ ID NO: 1244362 - DNA, 15 bp, Homo sapiens
cacttttttttttga

SEQ ID NO: 1244363 - DNA, 15 bp, Homo sapiens
tcacttttttttttg

SEQ ID NO: 1244364 - DNA, 15 bp, Homo sapiens
gtcactttttttttt

SEQ ID NO: 1244365 - DNA, 15 bp, Homo sapiens
agtcacttttttttt

SEQ ID NO: 1244366 - DNA, 15 bp, Homo sapiens
cagtcactttttttt

SEQ ID NO: 1244367 - DNA, 15 bp, Homo sapiens
gcagtcacttttttt

SEQ ID NO: 1244368 - DNA, 15 bp, Homo sapiens
ggcagtcactttttt

SEQ ID NO: 1244369 - DNA, 15 bp, Homo sapiens
tggcagtcacttttt

SEQ ID NO: 1244370 - DNA, 15 bp, Homo sapiens
gtggcagtcactttt

SEQ ID NO: 1244371 - DNA, 15 bp, Homo sapiens
tgtggcagtcacttt

SEQ ID NO: 1244372 - DNA, 15 bp, Homo sapiens
gtgtggcagtcactt

SEQ ID NO: 1244373 - DNA, 15 bp, Homo sapiens
tgtgtggcagtcact

SEQ ID NO: 1244374 - DNA, 15 bp, Homo sapiens
atgtgtggcagtcac

SEQ ID NO: 1244375 - DNA, 15 bp, Homo sapiens
tatgtgtggcagtca

SEQ ID NO: 1244376 - DNA, 15 bp, Homo sapiens
ttatgtgtggcagtc

SEQ ID NO: 1244377 - DNA, 15 bp, Homo sapiens
tttatgtgtggcagt

SEQ ID NO: 1244378 - DNA, 15 bp, Homo sapiens
atttatgtgtggcag

SEQ ID NO: 1244379 - DNA, 15 bp, Homo sapiens
aatttatgtgtggca

SEQ ID NO: 1244380 - DNA, 15 bp, Homo sapiens
aaatttatgtgtggc

SEQ ID NO: 1244381 - DNA, 15 bp, Homo sapiens
gaaatttatgtgtgg

SEQ ID NO: 1244382 - DNA, 15 bp, Homo sapiens
agaaatttatgtgtg

SEQ ID NO: 1244383 - DNA, 15 bp, Homo sapiens
aagaaatttatgtgt

SEQ ID NO: 1244384 - DNA, 15 bp, Homo sapiens
aaagaaatttatgtg

SEQ ID NO: 1244385 - DNA, 15 bp, Homo sapiens
gaaagaaatttatgt

SEQ ID NO: 1244386 - DNA, 15 bp, Homo sapiens
agaaagaaatttatg

SEQ ID NO: 1244387 - DNA, 15 bp, Homo sapiens
aagaaagaaatttat

SEQ ID NO: 1244388 - DNA, 15 bp, Homo sapiens
aaagaaagaaattta

SEQ ID NO: 1244389 - DNA, 15 bp, Homo sapiens
aaaagaaagaaattt

SEQ ID NO: 1244390 - DNA, 15 bp, Homo sapiens
taaaagaaagaaatt

SEQ ID NO: 1244391 - DNA, 15 bp, Homo sapiens
ataaaagaaagaaat

SEQ ID NO: 1244392 - DNA, 15 bp, Homo sapiens
aataaaagaaagaaa

SEQ ID NO: 1244393 - DNA, 15 bp, Homo sapiens
taataaaagaaagaa

SEQ ID NO: 1244394 - DNA, 15 bp, Homo sapiens
ataataaaagaaaga

SEQ ID NO: 1244395 - DNA, 15 bp, Homo sapiens
aataataaaagaaag

SEQ ID NO: 1244396 - DNA, 15 bp, Homo sapiens
taataataaaagaaa

SEQ ID NO: 1244397 - DNA, 15 bp, Homo sapiens
ataataataaaagaa

SEQ ID NO: 1244398 - DNA, 15 bp, Homo sapiens
aataataataaaaga

SEQ ID NO: 1244399 - DNA, 15 bp, Homo sapiens
taataataataaaag

SEQ ID NO: 1244400 - DNA, 15 bp, Homo sapiens
ataataataataaaa

SEQ ID NO: 1244401 - DNA, 15 bp, Homo sapiens
aataataataataaa

SEQ ID NO: 1244402 - DNA, 15 bp, Homo sapiens
aaaataataataata

SEQ ID NO: 1244403 - DNA, 15 bp, Homo sapiens
aaaaataataataat

SEQ ID NO: 1244404 - DNA, 15 bp, Homo sapiens
caaaaaataataata

SEQ ID NO: 1244405 - DNA, 15 bp, Homo sapiens
tcaaaaaataataat

SEQ ID NO: 1244406 - DNA, 15 bp, Homo sapiens
ctcaaaaaataataa

SEQ ID NO: 1244407 - DNA, 15 bp, Homo sapiens
tctcaaaaaataata

SEQ ID NO: 1244408 - DNA, 15 bp, Homo sapiens
gtctcaaaaaataat

SEQ ID NO: 1244409 - DNA, 15 bp, Homo sapiens
tctgtctcaaaaaat

SEQ ID NO: 1244410 - DNA, 15 bp, Homo sapiens
taggttgcagtgagc

SEQ ID NO: 1244411 - DNA, 15 bp, Homo sapiens
gtaggttgcagtgag

SEQ ID NO: 1244412 - DNA, 15 bp, Homo sapiens
ggtaggttgcagtga

SEQ ID NO: 1244413 - DNA, 15 bp, Homo sapiens
gggtaggttgcagtg

SEQ ID NO: 1244414 - DNA, 15 bp, Homo sapiens
ggggtaggttgcagt

SEQ ID NO: 1244415 - DNA, 15 bp, Homo sapiens
aggggtaggttgcag

SEQ ID NO: 1244416 - DNA, 15 bp, Homo sapiens
gaggggtaggttgca

SEQ ID NO: 1244417 - DNA, 15 bp, Homo sapiens
ggaggggtaggttgc

SEQ ID NO: 1244418 - DNA, 15 bp, Homo sapiens
aggaggggtaggttg

SEQ ID NO: 1244419 - DNA, 15 bp, Homo sapiens
caggaggggtaggtt

SEQ ID NO: 1244420 - DNA, 15 bp, Homo sapiens
ccaggaggggtaggt

SEQ ID NO: 1244421 - DNA, 15 bp, Homo sapiens
cccaggaggggtagg

SEQ ID NO: 1244422 - DNA, 15 bp, Homo sapiens
acccaggaggggtag

SEQ ID NO: 1244423 - DNA, 15 bp, Homo sapiens
aacccaggaggggta

SEQ ID NO: 1244424 - DNA, 15 bp, Homo sapiens
gaacccaggaggggt

SEQ ID NO: 1244425 - DNA, 15 bp, Homo sapiens
tgaacccaggagggg

SEQ ID NO: 1244426 - DNA, 15 bp, Homo sapiens
ttgaacccaggaggg

SEQ ID NO: 1244427 - DNA, 15 bp, Homo sapiens
tcttgaacccaggag

SEQ ID NO: 1244428 - DNA, 15 bp, Homo sapiens
ctcttgaacccagga

SEQ ID NO: 1244429 - DNA, 15 bp, Homo sapiens
gagaatctcttgaac

SEQ ID NO: 1244430 - DNA, 15 bp, Homo sapiens
ggagaatctcttgaa

SEQ ID NO: 1244431 - DNA, 15 bp, Homo sapiens
aggagaatctcttga

SEQ ID NO: 1244432 - DNA, 15 bp, Homo sapiens
caggagaatctcttg

SEQ ID NO: 1244433 - DNA, 15 bp, Homo sapiens
gcaggagaatctctt

SEQ ID NO: 1244434 - DNA, 15 bp, Homo sapiens
cgcacctgtagtccc

SEQ ID NO: 1244435 - DNA, 15 bp, Homo sapiens
ggtgcgcacctgtag

SEQ ID NO: 1244436 - DNA, 15 bp, Homo sapiens
atggtggtgcgcacc

SEQ ID NO: 1244437 - DNA, 15 bp, Homo sapiens
catggtggtgcgcac

SEQ ID NO: 1244438 - DNA, 15 bp, Homo sapiens
gcatggtggtgcgca

SEQ ID NO: 1244439 - DNA, 15 bp, Homo sapiens
ggcatggtggtgcgc

SEQ ID NO: 1244440 - DNA, 15 bp, Homo sapiens
gggcatggtggtgcg

SEQ ID NO: 1244441 - DNA, 15 bp, Homo sapiens
caaaattagctgggc

SEQ ID NO: 1244442 - DNA, 15 bp, Homo sapiens
acaaaattagctggg

SEQ ID NO: 1244443 - DNA, 15 bp, Homo sapiens
tacaaaattagctgg

SEQ ID NO: 1244444 - DNA, 15 bp, Homo sapiens
atacaaaattagctg

SEQ ID NO: 1244445 - DNA, 15 bp, Homo sapiens
aatacaaaattagct

SEQ ID NO: 1244446 - DNA, 15 bp, Homo sapiens
atgtactaaaaatac

SEQ ID NO: 1244447 - DNA, 15 bp, Homo sapiens
tatgtactaaaaata

SEQ ID NO: 1244448 - DNA, 15 bp, Homo sapiens
gtatgtactaaaaat

SEQ ID NO: 1244449 - DNA, 15 bp, Homo sapiens
cgtatgtactaaaaa

SEQ ID NO: 1244450 - DNA, 15 bp, Homo sapiens
ccgtatgtactaaaa

SEQ ID NO: 1244451 - DNA, 15 bp, Homo sapiens
cccgtatgtactaaa

SEQ ID NO: 1244452 - DNA, 15 bp, Homo sapiens
ccccgtatgtactaa

SEQ ID NO: 1244453 - DNA, 15 bp, Homo sapiens
accccgtatgtacta

SEQ ID NO: 1244454 - DNA, 15 bp, Homo sapiens
aaccccgtatgtact

SEQ ID NO: 1244455 - DNA, 15 bp, Homo sapiens
aaaccccgtatgtac

SEQ ID NO: 1244456 - DNA, 15 bp, Homo sapiens
gaaaccccgtatgta

SEQ ID NO: 1244457 - DNA, 15 bp, Homo sapiens
tgaaaccccgtatgt

SEQ ID NO: 1244458 - DNA, 15 bp, Homo sapiens
gtgaaaccccgtatg

SEQ ID NO: 1244459 - DNA, 15 bp, Homo sapiens
gatcagcctggccaa

SEQ ID NO: 1244460 - DNA, 15 bp, Homo sapiens
aagatcagcctggcc

SEQ ID NO: 1244461 - DNA, 15 bp, Homo sapiens
caagatcagcctggc

SEQ ID NO: 1244462 - DNA, 15 bp, Homo sapiens
tcaagatcagcctgg

SEQ ID NO: 1244463 - DNA, 15 bp, Homo sapiens
ttcaagatcagcctg

SEQ ID NO: 1244464 - DNA, 15 bp, Homo sapiens
gttcaagatcagcct

SEQ ID NO: 1244465 - DNA, 15 bp, Homo sapiens
agttcaagatcagcc

SEQ ID NO: 1244466 - DNA, 15 bp, Homo sapiens
gagttcaagatcagc

SEQ ID NO: 1244467 - DNA, 15 bp, Homo sapiens
ggagttcaagatcag

SEQ ID NO: 1244468 - DNA, 15 bp, Homo sapiens
aggagttcaagatca

SEQ ID NO: 1244469 - DNA, 15 bp, Homo sapiens
caggagttcaagatc

SEQ ID NO: 1244470 - DNA, 15 bp, Homo sapiens
ccaggagttcaagat

SEQ ID NO: 1244471 - DNA, 15 bp, Homo sapiens
ggccaaggtgggcag

SEQ ID NO: 1244472 - DNA, 15 bp, Homo sapiens
aggccaaggtgggca

SEQ ID NO: 1244473 - DNA, 15 bp, Homo sapiens
ataatcccaacactt

SEQ ID NO: 1244474 - DNA, 15 bp, Homo sapiens
tataatcccaacact

SEQ ID NO: 1244475 - DNA, 15 bp, Homo sapiens
ctataatcccaacac

SEQ ID NO: 1244476 - DNA, 15 bp, Homo sapiens
cctataatcccaaca

SEQ ID NO: 1244477 - DNA, 15 bp, Homo sapiens
acctataatcccaac

SEQ ID NO: 1244478 - DNA, 15 bp, Homo sapiens
cacctataatcccaa

SEQ ID NO: 1244479 - DNA, 15 bp, Homo sapiens
agtggctcacaccta

SEQ ID NO: 1244480 - DNA, 15 bp, Homo sapiens
tgggtgcagtggctc

SEQ ID NO: 1244481 - DNA, 15 bp, Homo sapiens
ctgggtgcagtggct

SEQ ID NO: 1244482 - DNA, 15 bp, Homo sapiens
gctgggtgcagtggc

SEQ ID NO: 1244483 - DNA, 15 bp, Homo sapiens
ggctgggtgcagtgg

SEQ ID NO: 1244484 - DNA, 15 bp, Homo sapiens
ttggctgggtgcagt

SEQ ID NO: 1244485 - DNA, 15 bp, Homo sapiens
gttggctgggtgcag

SEQ ID NO: 1244486 - DNA, 15 bp, Homo sapiens
tgttggctgggtgca

SEQ ID NO: 1244487 - DNA, 15 bp, Homo sapiens
atgttggctgggtgc

SEQ ID NO: 1244488 - DNA, 15 bp, Homo sapiens
gatgttggctgggtg

SEQ ID NO: 1244489 - DNA, 15 bp, Homo sapiens
tgatgttggctgggt

SEQ ID NO: 1244490 - DNA, 15 bp, Homo sapiens
atgatgttggctggg

SEQ ID NO: 1244491 - DNA, 15 bp, Homo sapiens
tatgatgttggctgg

SEQ ID NO: 1244492 - DNA, 15 bp, Homo sapiens
ctatgatgttggctg

SEQ ID NO: 1244493 - DNA, 15 bp, Homo sapiens
tctatgatgttggct

SEQ ID NO: 1244494 - DNA, 15 bp, Homo sapiens
atctatgatgttggc

SEQ ID NO: 1244495 - DNA, 15 bp, Homo sapiens
aatctatgatgttgg

SEQ ID NO: 1244496 - DNA, 15 bp, Homo sapiens
aaatctatgatgttg

SEQ ID NO: 1244497 - DNA, 15 bp, Homo sapiens
gaaatctatgatgtt

SEQ ID NO: 1244498 - DNA, 15 bp, Homo sapiens
agaaatctatgatgt

SEQ ID NO: 1244499 - DNA, 15 bp, Homo sapiens
cagaaatctatgatg

SEQ ID NO: 1244500 - DNA, 15 bp, Homo sapiens
ccagaaatctatgat

SEQ ID NO: 1244501 - DNA, 15 bp, Homo sapiens
gccagaaatctatga

SEQ ID NO: 1244502 - DNA, 15 bp, Homo sapiens
agccagaaatctatg

SEQ ID NO: 1244503 - DNA, 15 bp, Homo sapiens
aagccagaaatctat

SEQ ID NO: 1244504 - DNA, 15 bp, Homo sapiens
aaagccagaaatcta

SEQ ID NO: 1244505 - DNA, 15 bp, Homo sapiens
taaagccagaaatct

SEQ ID NO: 1244506 - DNA, 15 bp, Homo sapiens
ttaaagccagaaatc

SEQ ID NO: 1244507 - DNA, 15 bp, Homo sapiens
tttaaagccagaaat

SEQ ID NO: 1244508 - DNA, 15 bp, Homo sapiens
ttttaaagccagaaa

SEQ ID NO: 1244509 - DNA, 15 bp, Homo sapiens
tttttaaagccagaa

SEQ ID NO: 1244510 - DNA, 15 bp, Homo sapiens
ttttttaaagccaga

SEQ ID NO: 1244511 - DNA, 15 bp, Homo sapiens
tttttttaaagccag

SEQ ID NO: 1244512 - DNA, 15 bp, Homo sapiens
atttttttaaagcca

SEQ ID NO: 1244513 - DNA, 15 bp, Homo sapiens
gatttttttaaagcc

SEQ ID NO: 1244514 - DNA, 15 bp, Homo sapiens
aagatttttttaaag

SEQ ID NO: 1244515 - DNA, 15 bp, Homo sapiens
caagatttttttaaa

SEQ ID NO: 1244516 - DNA, 15 bp, Homo sapiens
ccaagatttttttaa

SEQ ID NO: 1244517 - DNA, 15 bp, Homo sapiens
gccaagattttttta

SEQ ID NO: 1244518 - DNA, 15 bp, Homo sapiens
agccaagattttttt

SEQ ID NO: 1244519 - DNA, 15 bp, Homo sapiens
cagccaagatttttt

SEQ ID NO: 1244520 - DNA, 15 bp, Homo sapiens
acagccaagattttt

SEQ ID NO: 1244521 - DNA, 15 bp, Homo sapiens
tacagccaagatttt

SEQ ID NO: 1244522 - DNA, 15 bp, Homo sapiens
gtacagccaagattt

SEQ ID NO: 1244523 - DNA, 15 bp, Homo sapiens
agtacagccaagatt

SEQ ID NO: 1244524 - DNA, 15 bp, Homo sapiens
cagtacagccaagat

SEQ ID NO: 1244525 - DNA, 15 bp, Homo sapiens
tcagtacagccaaga

SEQ ID NO: 1244526 - DNA, 15 bp, Homo sapiens
atcagtacagccaag

SEQ ID NO: 1244527 - DNA, 15 bp, Homo sapiens
aatcagtacagccaa

SEQ ID NO: 1244528 - DNA, 15 bp, Homo sapiens
caatcagtacagcca

SEQ ID NO: 1244529 - DNA, 15 bp, Homo sapiens
tcaatcagtacagcc

SEQ ID NO: 1244530 - DNA, 15 bp, Homo sapiens
ctcaatcagtacagc

SEQ ID NO: 1244531 - DNA, 15 bp, Homo sapiens
gctcaatcagtacag

SEQ ID NO: 1244532 - DNA, 15 bp, Homo sapiens
ggctcaatcagtaca

SEQ ID NO: 1244533 - DNA, 15 bp, Homo sapiens
aggctcaatcagtac

SEQ ID NO: 1244534 - DNA, 15 bp, Homo sapiens
gaggctcaatcagta

SEQ ID NO: 1244535 - DNA, 15 bp, Homo sapiens
ggaggctcaatcagt

SEQ ID NO: 1244536 - DNA, 15 bp, Homo sapiens
aggaggctcaatcag

SEQ ID NO: 1244537 - DNA, 15 bp, Homo sapiens
gaggaggctcaatca

SEQ ID NO: 1244538 - DNA, 15 bp, Homo sapiens
ggaggaggctcaatc

SEQ ID NO: 1244539 - DNA, 15 bp, Homo sapiens
gggaggaggctcaat

SEQ ID NO: 1244540 - DNA, 15 bp, Homo sapiens
ggggaggaggctcaa

SEQ ID NO: 1244541 - DNA, 15 bp, Homo sapiens
tggggaggaggctca

SEQ ID NO: 1244542 - DNA, 15 bp, Homo sapiens
ttggggaggaggctc

SEQ ID NO: 1244543 - DNA, 15 bp, Homo sapiens
attggggaggaggct

SEQ ID NO: 1244544 - DNA, 15 bp, Homo sapiens
gattggggaggaggc

SEQ ID NO: 1244545 - DNA, 15 bp, Homo sapiens
agattggggaggagg

SEQ ID NO: 1244546 - DNA, 15 bp, Homo sapiens
aagattggggaggag

SEQ ID NO: 1244547 - DNA, 15 bp, Homo sapiens
taagattggggagga

SEQ ID NO: 1244548 - DNA, 15 bp, Homo sapiens
gtaagattggggagg

SEQ ID NO: 1244549 - DNA, 15 bp, Homo sapiens
tgtaagattggggag

SEQ ID NO: 1244550 - DNA, 15 bp, Homo sapiens
ctgtaagattgggga

SEQ ID NO: 1244551 - DNA, 15 bp, Homo sapiens
tctgtaagattgggg

SEQ ID NO: 1244552 - DNA, 15 bp, Homo sapiens
ctctgtaagattggg

SEQ ID NO: 1244553 - DNA, 15 bp, Homo sapiens
cctctgtaagattgg

SEQ ID NO: 1244554 - DNA, 15 bp, Homo sapiens
tcctctgtaagattg

SEQ ID NO: 1244555 - DNA, 15 bp, Homo sapiens
ttcctctgtaagatt

SEQ ID NO: 1244556 - DNA, 15 bp, Homo sapiens
cttcctctgtaagat

SEQ ID NO: 1244557 - DNA, 15 bp, Homo sapiens
ccttcctctgtaaga

SEQ ID NO: 1244558 - DNA, 15 bp, Homo sapiens
tccttcctctgtaag

SEQ ID NO: 1244559 - DNA, 15 bp, Homo sapiens
ttccttcctctgtaa

SEQ ID NO: 1244560 - DNA, 15 bp, Homo sapiens
gttccttcctctgta

SEQ ID NO: 1244561 - DNA, 15 bp, Homo sapiens
agttccttcctctgt

SEQ ID NO: 1244562 - DNA, 15 bp, Homo sapiens
tagttccttcctctg

SEQ ID NO: 1244563 - DNA, 15 bp, Homo sapiens
ttagttccttcctct

SEQ ID NO: 1244564 - DNA, 15 bp, Homo sapiens
cttagttccttcctc

SEQ ID NO: 1244565 - DNA, 15 bp, Homo sapiens
tcttagttccttcct

SEQ ID NO: 1244566 - DNA, 15 bp, Homo sapiens
gtcttagttccttcc

SEQ ID NO: 1244567 - DNA, 15 bp, Homo sapiens
tgtcttagttccttc

SEQ ID NO: 1244568 - DNA, 15 bp, Homo sapiens
gtgtcttagttcctt

SEQ ID NO: 1244569 - DNA, 15 bp, Homo sapiens
tgtgtcttagttcct

SEQ ID NO: 1244570 - DNA, 15 bp, Homo sapiens
ctgtgtcttagttcc

SEQ ID NO: 1244571 - DNA, 15 bp, Homo sapiens
tctgtgtcttagttc

SEQ ID NO: 1244572 - DNA, 15 bp, Homo sapiens
ctctgtgtcttagtt

SEQ ID NO: 1244573 - DNA, 15 bp, Homo sapiens
tctctgtgtcttagt

SEQ ID NO: 1244574 - DNA, 15 bp, Homo sapiens
ctctctgtgtcttag

SEQ ID NO: 1244575 - DNA, 15 bp, Homo sapiens
cctctctgtgtctta

SEQ ID NO: 1244576 - DNA, 15 bp, Homo sapiens
ccctctctgtgtctt

SEQ ID NO: 1244577 - DNA, 15 bp, Homo sapiens
accctctctgtgtct

SEQ ID NO: 1244578 - DNA, 15 bp, Homo sapiens
caccctctctgtgtc

SEQ ID NO: 1244579 - DNA, 15 bp, Homo sapiens
tcaccctctctgtgt

SEQ ID NO: 1244580 - DNA, 15 bp, Homo sapiens
ctcaccctctctgtg

SEQ ID NO: 1244581 - DNA, 15 bp, Homo sapiens
tctcaccctctctgt

SEQ ID NO: 1244582 - DNA, 15 bp, Homo sapiens
ttctcaccctctctg

SEQ ID NO: 1244583 - DNA, 15 bp, Homo sapiens
tttctcaccctctct

SEQ ID NO: 1244584 - DNA, 15 bp, Homo sapiens
ttttctcaccctctc

SEQ ID NO: 1244585 - DNA, 15 bp, Homo sapiens
cttttctcaccctct

SEQ ID NO: 1244586 - DNA, 15 bp, Homo sapiens
acttttctcaccctc

SEQ ID NO: 1244587 - DNA, 15 bp, Homo sapiens
aacttttctcaccct

SEQ ID NO: 1244588 - DNA, 15 bp, Homo sapiens
gaacttttctcaccc

SEQ ID NO: 1244589 - DNA, 15 bp, Homo sapiens
ggaacttttctcacc

SEQ ID NO: 1244590 - DNA, 15 bp, Homo sapiens
gggaacttttctcac

SEQ ID NO: 1244591 - DNA, 15 bp, Homo sapiens
tgggaacttttctca

SEQ ID NO: 1244592 - DNA, 15 bp, Homo sapiens
ttgggaacttttctc

SEQ ID NO: 1244593 - DNA, 15 bp, Homo sapiens
tttgggaacttttct

SEQ ID NO: 1244594 - DNA, 15 bp, Homo sapiens
ctttgggaacttttc

SEQ ID NO: 1244595 - DNA, 15 bp, Homo sapiens
tctttgggaactttt

SEQ ID NO: 1244596 - DNA, 15 bp, Homo sapiens
gtctttgggaacttt

SEQ ID NO: 1244597 - DNA, 15 bp, Homo sapiens
tgtctttgggaactt

SEQ ID NO: 1244598 - DNA, 15 bp, Homo sapiens
gtgtctttgggaact

SEQ ID NO: 1244599 - DNA, 15 bp, Homo sapiens
tgtgtctttgggaac

SEQ ID NO: 1244600 - DNA, 15 bp, Homo sapiens
gtgtgtctttgggaa

SEQ ID NO: 1244601 - DNA, 15 bp, Homo sapiens
tgtgtgtctttggga

SEQ ID NO: 1244602 - DNA, 15 bp, Homo sapiens
ctgtgtgtctttggg

SEQ ID NO: 1244603 - DNA, 15 bp, Homo sapiens
gctgtgtgtctttgg

SEQ ID NO: 1244604 - DNA, 15 bp, Homo sapiens
tgctgtgtgtctttg

SEQ ID NO: 1244605 - DNA, 15 bp, Homo sapiens
ttgctgtgtgtcttt

SEQ ID NO: 1244606 - DNA, 15 bp, Homo sapiens
tttgctgtgtgtctt

SEQ ID NO: 1244607 - DNA, 15 bp, Homo sapiens
atttgctgtgtgtct

SEQ ID NO: 1244608 - DNA, 15 bp, Homo sapiens
aatttgctgtgtgtc

SEQ ID NO: 1244609 - DNA, 15 bp, Homo sapiens
aaatttgctgtgtgt

SEQ ID NO: 1244610 - DNA, 15 bp, Homo sapiens
taaatttgctgtgtg

SEQ ID NO: 1244611 - DNA, 15 bp, Homo sapiens
ctaaatttgctgtgt

SEQ ID NO: 1244612 - DNA, 15 bp, Homo sapiens
cctaaatttgctgtg

SEQ ID NO: 1244613 - DNA, 15 bp, Homo sapiens
tcctaaatttgctgt

SEQ ID NO: 1244614 - DNA, 15 bp, Homo sapiens
gtcctaaatttgctg

SEQ ID NO: 1244615 - DNA, 15 bp, Homo sapiens
agtcctaaatttgct

SEQ ID NO: 1244616 - DNA, 15 bp, Homo sapiens
cagtcctaaatttgc

SEQ ID NO: 1244617 - DNA, 15 bp, Homo sapiens
ccagtcctaaatttg

SEQ ID NO: 1244618 - DNA, 15 bp, Homo sapiens
cccagtcctaaattt

SEQ ID NO: 1244619 - DNA, 15 bp, Homo sapiens
gcccagtcctaaatt

SEQ ID NO: 1244620 - DNA, 15 bp, Homo sapiens
agcccagtcctaaat

SEQ ID NO: 1244621 - DNA, 15 bp, Homo sapiens
gagcccagtcctaaa

SEQ ID NO: 1244622 - DNA, 15 bp, Homo sapiens
ggagcccagtcctaa

SEQ ID NO: 1244623 - DNA, 15 bp, Homo sapiens
tggagcccagtccta

SEQ ID NO: 1244624 - DNA, 15 bp, Homo sapiens
ctggagcccagtcct

SEQ ID NO: 1244625 - DNA, 15 bp, Homo sapiens
actggagcccagtcc

SEQ ID NO: 1244626 - DNA, 15 bp, Homo sapiens
aactggagcccagtc

SEQ ID NO: 1244627 - DNA, 15 bp, Homo sapiens
gaactggagcccagt

SEQ ID NO: 1244628 - DNA, 15 bp, Homo sapiens
agaactggagcccag

SEQ ID NO: 1244629 - DNA, 15 bp, Homo sapiens
gagaactggagccca

SEQ ID NO: 1244630 - DNA, 15 bp, Homo sapiens
agagaactggagccc

SEQ ID NO: 1244631 - DNA, 15 bp, Homo sapiens
gagagaactggagcc

SEQ ID NO: 1244632 - DNA, 15 bp, Homo sapiens
tgagagaactggagc

SEQ ID NO: 1244633 - DNA, 15 bp, Homo sapiens
ttgagagaactggag

SEQ ID NO: 1244634 - DNA, 15 bp, Homo sapiens
cttgagagaactgga

SEQ ID NO: 1244635 - DNA, 15 bp, Homo sapiens
ccttgagagaactgg

SEQ ID NO: 1244636 - DNA, 15 bp, Homo sapiens
cccttgagagaactg

SEQ ID NO: 1244637 - DNA, 15 bp, Homo sapiens
gcccttgagagaact

SEQ ID NO: 1244638 - DNA, 15 bp, Homo sapiens
agcccttgagagaac

SEQ ID NO: 1244639 - DNA, 15 bp, Homo sapiens
aagcccttgagagaa

SEQ ID NO: 1244640 - DNA, 15 bp, Homo sapiens
aaagcccttgagaga

SEQ ID NO: 1244641 - DNA, 15 bp, Homo sapiens
aaaagcccttgagag

SEQ ID NO: 1244642 - DNA, 15 bp, Homo sapiens
gaaaagcccttgaga

SEQ ID NO: 1244643 - DNA, 15 bp, Homo sapiens
ggaaaagcccttgag

SEQ ID NO: 1244644 - DNA, 15 bp, Homo sapiens
tggaaaagcccttga

SEQ ID NO: 1244645 - DNA, 15 bp, Homo sapiens
gtggaaaagcccttg

SEQ ID NO: 1244646 - DNA, 15 bp, Homo sapiens
tgtggaaaagccctt

SEQ ID NO: 1244647 - DNA, 15 bp, Homo sapiens
ctgtggaaaagccct

SEQ ID NO: 1244648 - DNA, 15 bp, Homo sapiens
gctgtggaaaagccc

SEQ ID NO: 1244649 - DNA, 15 bp, Homo sapiens
ggctgtggaaaagcc

SEQ ID NO: 1244650 - DNA, 15 bp, Homo sapiens
gggctgtggaaaagc

SEQ ID NO: 1244651 - DNA, 15 bp, Homo sapiens
tgggctgtggaaaag

SEQ ID NO: 1244652 - DNA, 15 bp, Homo sapiens
ttgggctgtggaaaa

SEQ ID NO: 1244653 - DNA, 15 bp, Homo sapiens
cttgggctgtggaaa

SEQ ID NO: 1244654 - DNA, 15 bp, Homo sapiens
ccttgggctgtggaa

SEQ ID NO: 1244655 - DNA, 15 bp, Homo sapiens
accttgggctgtgga

SEQ ID NO: 1244656 - DNA, 15 bp, Homo sapiens
gaccttgggctgtgg

SEQ ID NO: 1244657 - DNA, 15 bp, Homo sapiens
agaccttgggctgtg

SEQ ID NO: 1244658 - DNA, 15 bp, Homo sapiens
gagaccttgggctgt

SEQ ID NO: 1244659 - DNA, 15 bp, Homo sapiens
agagaccttgggctg

SEQ ID NO: 1244660 - DNA, 15 bp, Homo sapiens
gagagaccttgggct

SEQ ID NO: 1244661 - DNA, 15 bp, Homo sapiens
tgagagaccttgggc

SEQ ID NO: 1244662 - DNA, 15 bp, Homo sapiens
gtgagagaccttggg

SEQ ID NO: 1244663 - DNA, 15 bp, Homo sapiens
tgtgagagaccttgg

SEQ ID NO: 1244664 - DNA, 15 bp, Homo sapiens
gtgtgagagaccttg

SEQ ID NO: 1244665 - DNA, 15 bp, Homo sapiens
ggtgtgagagacctt

SEQ ID NO: 1244666 - DNA, 15 bp, Homo sapiens
aggtgtgagagacct

SEQ ID NO: 1244667 - DNA, 15 bp, Homo sapiens
caggtgtgagagacc

SEQ ID NO: 1244668 - DNA, 15 bp, Homo sapiens
acaggtgtgagagac

SEQ ID NO: 1244669 - DNA, 15 bp, Homo sapiens
aacaggtgtgagaga

SEQ ID NO: 1244670 - DNA, 15 bp, Homo sapiens
gaacaggtgtgagag

SEQ ID NO: 1244671 - DNA, 15 bp, Homo sapiens
ggaacaggtgtgaga

SEQ ID NO: 1244672 - DNA, 15 bp, Homo sapiens
gggaacaggtgtgag

SEQ ID NO: 1244673 - DNA, 15 bp, Homo sapiens
tgggaacaggtgtga

SEQ ID NO: 1244674 - DNA, 15 bp, Homo sapiens
gtgggaacaggtgtg

SEQ ID NO: 1244675 - DNA, 15 bp, Homo sapiens
tgtgggaacaggtgt

SEQ ID NO: 1244676 - DNA, 15 bp, Homo sapiens
ctgtgggaacaggtg

SEQ ID NO: 1244677 - DNA, 15 bp, Homo sapiens
gctgtgggaacaggt

SEQ ID NO: 1244678 - DNA, 15 bp, Homo sapiens
agctgtgggaacagg

SEQ ID NO: 1244679 - DNA, 15 bp, Homo sapiens
cagctgtgggaacag

SEQ ID NO: 1244680 - DNA, 15 bp, Homo sapiens
gcagctgtgggaaca

SEQ ID NO: 1244681 - DNA, 15 bp, Homo sapiens
ggcagctgtgggaac

SEQ ID NO: 1244682 - DNA, 15 bp, Homo sapiens
tggcagctgtgggaa

SEQ ID NO: 1244683 - DNA, 15 bp, Homo sapiens
ctggcagctgtggga

SEQ ID NO: 1244684 - DNA, 15 bp, Homo sapiens
actggcagctgtggg

SEQ ID NO: 1244685 - DNA, 15 bp, Homo sapiens
gactggcagctgtgg

SEQ ID NO: 1244686 - DNA, 15 bp, Homo sapiens
agactggcagctgtg

SEQ ID NO: 1244687 - DNA, 15 bp, Homo sapiens
aagactggcagctgt

SEQ ID NO: 1244688 - DNA, 15 bp, Homo sapiens
caagactggcagctg

SEQ ID NO: 1244689 - DNA, 15 bp, Homo sapiens
acaagactggcagct

SEQ ID NO: 1244690 - DNA, 15 bp, Homo sapiens
gacaagactggcagc

SEQ ID NO: 1244691 - DNA, 15 bp, Homo sapiens
tgacaagactggcag

SEQ ID NO: 1244692 - DNA, 15 bp, Homo sapiens
ttgacaagactggca

SEQ ID NO: 1244693 - DNA, 15 bp, Homo sapiens
cttgacaagactggc

SEQ ID NO: 1244694 - DNA, 15 bp, Homo sapiens
ccttgacaagactgg

SEQ ID NO: 1244695 - DNA, 15 bp, Homo sapiens
accttgacaagactg

SEQ ID NO: 1244696 - DNA, 15 bp, Homo sapiens
aaccttgacaagact

SEQ ID NO: 1244697 - DNA, 15 bp, Homo sapiens
caaccttgacaagac

SEQ ID NO: 1244698 - DNA, 15 bp, Homo sapiens
gcaaccttgacaaga

SEQ ID NO: 1244699 - DNA, 15 bp, Homo sapiens
ggcaaccttgacaag

SEQ ID NO: 1244700 - DNA, 15 bp, Homo sapiens
tggcaaccttgacaa

SEQ ID NO: 1244701 - DNA, 15 bp, Homo sapiens
ctggcaaccttgaca

SEQ ID NO: 1244702 - DNA, 15 bp, Homo sapiens
actggcaaccttgac

SEQ ID NO: 1244703 - DNA, 15 bp, Homo sapiens
gactggcaaccttga

SEQ ID NO: 1244704 - DNA, 15 bp, Homo sapiens
agactggcaaccttg

SEQ ID NO: 1244705 - DNA, 15 bp, Homo sapiens
gagactggcaacctt

SEQ ID NO: 1244706 - DNA, 15 bp, Homo sapiens
agagactggcaacct

SEQ ID NO: 1244707 - DNA, 15 bp, Homo sapiens
cagagactggcaacc

SEQ ID NO: 1244708 - DNA, 15 bp, Homo sapiens
ccagagactggcaac

SEQ ID NO: 1244709 - DNA, 15 bp, Homo sapiens
cccagagactggcaa

SEQ ID NO: 1244710 - DNA, 15 bp, Homo sapiens
ccccagagactggca

SEQ ID NO: 1244711 - DNA, 15 bp, Homo sapiens
gccccagagactggc

SEQ ID NO: 1244712 - DNA, 15 bp, Homo sapiens
cgccccagagactgg

SEQ ID NO: 1244713 - DNA, 15 bp, Homo sapiens
acgccccagagactg

SEQ ID NO: 1244714 - DNA, 15 bp, Homo sapiens
aacgccccagagact

SEQ ID NO: 1244715 - DNA, 15 bp, Homo sapiens
caacgccccagagac

SEQ ID NO: 1244716 - DNA, 15 bp, Homo sapiens
gcaacgccccagaga

SEQ ID NO: 1244717 - DNA, 15 bp, Homo sapiens
agcaacgccccagag

SEQ ID NO: 1244718 - DNA, 15 bp, Homo sapiens
cagcaacgccccaga

SEQ ID NO: 1244719 - DNA, 15 bp, Homo sapiens
ccagcaacgccccag

SEQ ID NO: 1244720 - DNA, 15 bp, Homo sapiens
accagcaacgcccca

SEQ ID NO: 1244721 - DNA, 15 bp, Homo sapiens
aaccagcaacgcccc

SEQ ID NO: 1244722 - DNA, 15 bp, Homo sapiens
gaaccagcaacgccc

SEQ ID NO: 1244723 - DNA, 15 bp, Homo sapiens
ggaaccagcaacgcc

SEQ ID NO: 1244724 - DNA, 15 bp, Homo sapiens
aggaaccagcaacgc

SEQ ID NO: 1244725 - DNA, 15 bp, Homo sapiens
caggaaccagcaacg

SEQ ID NO: 1244726 - DNA, 15 bp, Homo sapiens
ccaggaaccagcaac

SEQ ID NO: 1244727 - DNA, 15 bp, Homo sapiens
gccaggaaccagcaa

SEQ ID NO: 1244728 - DNA, 15 bp, Homo sapiens
agccaggaaccagca

SEQ ID NO: 1244729 - DNA, 15 bp, Homo sapiens
gagccaggaaccagc

SEQ ID NO: 1244730 - DNA, 15 bp, Homo sapiens
ggagccaggaaccag

SEQ ID NO: 1244731 - DNA, 15 bp, Homo sapiens
gggagccaggaacca

SEQ ID NO: 1244732 - DNA, 15 bp, Homo sapiens
agggagccaggaacc

SEQ ID NO: 1244733 - DNA, 15 bp, Homo sapiens
tagggagccaggaac

SEQ ID NO: 1244734 - DNA, 15 bp, Homo sapiens
ttagggagccaggaa

SEQ ID NO: 1244735 - DNA, 15 bp, Homo sapiens
tttagggagccagga

SEQ ID NO: 1244736 - DNA, 15 bp, Homo sapiens
ttttagggagccagg

SEQ ID NO: 1244737 - DNA, 15 bp, Homo sapiens
attttagggagccag

SEQ ID NO: 1244738 - DNA, 15 bp, Homo sapiens
tattttagggagcca

SEQ ID NO: 1244739 - DNA, 15 bp, Homo sapiens
gtattttagggagcc

SEQ ID NO: 1244740 - DNA, 15 bp, Homo sapiens
tgtattttagggagc

SEQ ID NO: 1244741 - DNA, 15 bp, Homo sapiens
ctgtattttagggag

SEQ ID NO: 1244742 - DNA, 15 bp, Homo sapiens
cctgtattttaggga

SEQ ID NO: 1244743 - DNA, 15 bp, Homo sapiens
ccctgtattttaggg

SEQ ID NO: 1244744 - DNA, 15 bp, Homo sapiens
gccctgtattttagg

SEQ ID NO: 1244745 - DNA, 15 bp, Homo sapiens
ggccctgtattttag

SEQ ID NO: 1244746 - DNA, 15 bp, Homo sapiens
gggccctgtatttta

SEQ ID NO: 1244747 - DNA, 15 bp, Homo sapiens
tgggccctgtatttt

SEQ ID NO: 1244748 - DNA, 15 bp, Homo sapiens
ttgggccctgtattt

SEQ ID NO: 1244749 - DNA, 15 bp, Homo sapiens
cttgggccctgtatt

SEQ ID NO: 1244750 - DNA, 15 bp, Homo sapiens
ccttgggccctgtat

SEQ ID NO: 1244751 - DNA, 15 bp, Homo sapiens
cccttgggccctgta

SEQ ID NO: 1244752 - DNA, 15 bp, Homo sapiens
acccttgggccctgt

SEQ ID NO: 1244753 - DNA, 15 bp, Homo sapiens
gacccttgggccctg

SEQ ID NO: 1244754 - DNA, 15 bp, Homo sapiens
ggacccttgggccct

SEQ ID NO: 1244755 - DNA, 15 bp, Homo sapiens
aggacccttgggccc

SEQ ID NO: 1244756 - DNA, 15 bp, Homo sapiens
gaggacccttgggcc

SEQ ID NO: 1244757 - DNA, 15 bp, Homo sapiens
ggaggacccttgggc

SEQ ID NO: 1244758 - DNA, 15 bp, Homo sapiens
gggaggacccttggg

SEQ ID NO: 1244759 - DNA, 15 bp, Homo sapiens
ggggaggacccttgg

SEQ ID NO: 1244760 - DNA, 15 bp, Homo sapiens
gggggaggacccttg

SEQ ID NO: 1244761 - DNA, 15 bp, Homo sapiens
tgggggaggaccctt

SEQ ID NO: 1244762 - DNA, 15 bp, Homo sapiens
gtgggggaggaccct

SEQ ID NO: 1244763 - DNA, 15 bp, Homo sapiens
agtgggggaggaccc

SEQ ID NO: 1244764 - DNA, 15 bp, Homo sapiens
aagtgggggaggacc

SEQ ID NO: 1244765 - DNA, 15 bp, Homo sapiens
aaagtgggggaggac

SEQ ID NO: 1244766 - DNA, 15 bp, Homo sapiens
gaaagtgggggagga

SEQ ID NO: 1244767 - DNA, 15 bp, Homo sapiens
ggaaagtgggggagg

SEQ ID NO: 1244768 - DNA, 15 bp, Homo sapiens
aggaaagtgggggag

SEQ ID NO: 1244769 - DNA, 15 bp, Homo sapiens
caggaaagtggggga

SEQ ID NO: 1244770 - DNA, 15 bp, Homo sapiens
acaggaaagtggggg

SEQ ID NO: 1244771 - DNA, 15 bp, Homo sapiens
gacaggaaagtgggg

SEQ ID NO: 1244772 - DNA, 15 bp, Homo sapiens
ggacaggaaagtggg

SEQ ID NO: 1244773 - DNA, 15 bp, Homo sapiens
aggacaggaaagtgg

SEQ ID NO: 1244774 - DNA, 15 bp, Homo sapiens
caggacaggaaagtg

SEQ ID NO: 1244775 - DNA, 15 bp, Homo sapiens
gcaggacaggaaagt

SEQ ID NO: 1244776 - DNA, 15 bp, Homo sapiens
ggcaggacaggaaag

SEQ ID NO: 1244777 - DNA, 15 bp, Homo sapiens
cggcaggacaggaaa

SEQ ID NO: 1244778 - DNA, 15 bp, Homo sapiens
acggcaggacaggaa

SEQ ID NO: 1244779 - DNA, 15 bp, Homo sapiens
cacggcaggacagga

SEQ ID NO: 1244780 - DNA, 15 bp, Homo sapiens
tcacggcaggacagg

SEQ ID NO: 1244781 - DNA, 15 bp, Homo sapiens
ctcacggcaggacag

SEQ ID NO: 1244782 - DNA, 15 bp, Homo sapiens
gctcacggcaggaca

SEQ ID NO: 1244783 - DNA, 15 bp, Homo sapiens
ggctcacggcaggac

SEQ ID NO: 1244784 - DNA, 15 bp, Homo sapiens
gggctcacggcagga

SEQ ID NO: 1244785 - DNA, 15 bp, Homo sapiens
ggggctcacggcagg

SEQ ID NO: 1244786 - DNA, 15 bp, Homo sapiens
gggggctcacggcag

SEQ ID NO: 1244787 - DNA, 15 bp, Homo sapiens
ggggggctcacggca

SEQ ID NO: 1244788 - DNA, 15 bp, Homo sapiens
tggggggctcacggc

SEQ ID NO: 1244789 - DNA, 15 bp, Homo sapiens
gtggggggctcacgg

SEQ ID NO: 1244790 - DNA, 15 bp, Homo sapiens
ggtggggggctcacg

SEQ ID NO: 1244791 - DNA, 15 bp, Homo sapiens
gggtggggggctcac

SEQ ID NO: 1244792 - DNA, 15 bp, Homo sapiens
ggggtggggggctca

SEQ ID NO: 1244793 - DNA, 15 bp, Homo sapiens
gggggtggggggctc

SEQ ID NO: 1244794 - DNA, 15 bp, Homo sapiens
tgggggtggggggct

SEQ ID NO: 1244795 - DNA, 15 bp, Homo sapiens
gtgggggtggggggc

SEQ ID NO: 1244796 - DNA, 15 bp, Homo sapiens
agtgggggtgggggg

SEQ ID NO: 1244797 - DNA, 15 bp, Homo sapiens
aagtgggggtggggg

SEQ ID NO: 1244798 - DNA, 15 bp, Homo sapiens
gaagtgggggtgggg

SEQ ID NO: 1244799 - DNA, 15 bp, Homo sapiens
ggaagtgggggtggg

SEQ ID NO: 1244800 - DNA, 15 bp, Homo sapiens
tggaagtgggggtgg

SEQ ID NO: 1244801 - DNA, 15 bp, Homo sapiens
ctggaagtgggggtg

SEQ ID NO: 1244802 - DNA, 15 bp, Homo sapiens
tctggaagtgggggt

SEQ ID NO: 1244803 - DNA, 15 bp, Homo sapiens
gtctggaagtggggg

SEQ ID NO: 1244804 - DNA, 15 bp, Homo sapiens
cgtctggaagtgggg

SEQ ID NO: 1244805 - DNA, 15 bp, Homo sapiens
ccgtctggaagtggg

SEQ ID NO: 1244806 - DNA, 15 bp, Homo sapiens
tccgtctggaagtgg

SEQ ID NO: 1244807 - DNA, 15 bp, Homo sapiens
atccgtctggaagtg

SEQ ID NO: 1244808 - DNA, 15 bp, Homo sapiens
aatccgtctggaagt

SEQ ID NO: 1244809 - DNA, 15 bp, Homo sapiens
caatccgtctggaag

SEQ ID NO: 1244810 - DNA, 15 bp, Homo sapiens
ccaatccgtctggaa

SEQ ID NO: 1244811 - DNA, 15 bp, Homo sapiens
cccaatccgtctgga

SEQ ID NO: 1244812 - DNA, 15 bp, Homo sapiens
tcccaatccgtctgg

SEQ ID NO: 1244813 - DNA, 15 bp, Homo sapiens
ctcccaatccgtctg

SEQ ID NO: 1244814 - DNA, 15 bp, Homo sapiens
gctcccaatccgtct

SEQ ID NO: 1244815 - DNA, 15 bp, Homo sapiens
agctcccaatccgtc

SEQ ID NO: 1244816 - DNA, 15 bp, Homo sapiens
cagctcccaatccgt

SEQ ID NO: 1244817 - DNA, 15 bp, Homo sapiens
acagctcccaatccg

SEQ ID NO: 1244818 - DNA, 15 bp, Homo sapiens
cacagctcccaatcc

SEQ ID NO: 1244819 - DNA, 15 bp, Homo sapiens
tcacagctcccaatc

SEQ ID NO: 1244820 - DNA, 15 bp, Homo sapiens
gtcacagctcccaat

SEQ ID NO: 1244821 - DNA, 15 bp, Homo sapiens
ggtcacagctcccaa

SEQ ID NO: 1244822 - DNA, 15 bp, Homo sapiens
gggtcacagctccca

SEQ ID NO: 1244823 - DNA, 15 bp, Homo sapiens
ggggtcacagctccc

SEQ ID NO: 1244824 - DNA, 15 bp, Homo sapiens
gggggtcacagctcc

SEQ ID NO: 1244825 - DNA, 15 bp, Homo sapiens
tgggggtcacagctc

SEQ ID NO: 1244826 - DNA, 15 bp, Homo sapiens
ctgggggtcacagct

SEQ ID NO: 1244827 - DNA, 15 bp, Homo sapiens
gctgggggtcacagc

SEQ ID NO: 1244828 - DNA, 15 bp, Homo sapiens
agctgggggtcacag

SEQ ID NO: 1244829 - DNA, 15 bp, Homo sapiens
gagctgggggtcaca

SEQ ID NO: 1244830 - DNA, 15 bp, Homo sapiens
agagctgggggtcac

SEQ ID NO: 1244831 - DNA, 15 bp, Homo sapiens
cagagctgggggtca

SEQ ID NO: 1244832 - DNA, 15 bp, Homo sapiens
acagagctgggggtc

SEQ ID NO: 1244833 - DNA, 15 bp, Homo sapiens
cacagagctgggggt

SEQ ID NO: 1244834 - DNA, 15 bp, Homo sapiens
ccacagagctggggg

SEQ ID NO: 1244835 - DNA, 15 bp, Homo sapiens
accacagagctgggg

SEQ ID NO: 1244836 - DNA, 15 bp, Homo sapiens
gaccacagagctggg

SEQ ID NO: 1244837 - DNA, 15 bp, Homo sapiens
ggaccacagagctgg

SEQ ID NO: 1244838 - DNA, 15 bp, Homo sapiens
gggaccacagagctg

SEQ ID NO: 1244839 - DNA, 15 bp, Homo sapiens
tgggaccacagagct

SEQ ID NO: 1244840 - DNA, 15 bp, Homo sapiens
ttgggaccacagagc

SEQ ID NO: 1244841 - DNA, 15 bp, Homo sapiens
tttgggaccacagag

SEQ ID NO: 1244842 - DNA, 15 bp, Homo sapiens
ctttgggaccacaga

SEQ ID NO: 1244843 - DNA, 15 bp, Homo sapiens
cctttgggaccacag

SEQ ID NO: 1244844 - DNA, 15 bp, Homo sapiens
ccctttgggaccaca

SEQ ID NO: 1244845 - DNA, 15 bp, Homo sapiens
tccctttgggaccac

SEQ ID NO: 1244846 - DNA, 15 bp, Homo sapiens
ctccctttgggacca

SEQ ID NO: 1244847 - DNA, 15 bp, Homo sapiens
cctccctttgggacc

SEQ ID NO: 1244848 - DNA, 15 bp, Homo sapiens
acctccctttgggac

SEQ ID NO: 1244849 - DNA, 15 bp, Homo sapiens
gacctccctttggga

SEQ ID NO: 1244850 - DNA, 15 bp, Homo sapiens
tgacctccctttggg

SEQ ID NO: 1244851 - DNA, 15 bp, Homo sapiens
ctgacctccctttgg

SEQ ID NO: 1244852 - DNA, 15 bp, Homo sapiens
gctgacctccctttg

SEQ ID NO: 1244853 - DNA, 15 bp, Homo sapiens
agctgacctcccttt

SEQ ID NO: 1244854 - DNA, 15 bp, Homo sapiens
tagctgacctccctt

SEQ ID NO: 1244855 - DNA, 15 bp, Homo sapiens
ttagctgacctccct

SEQ ID NO: 1244856 - DNA, 15 bp, Homo sapiens
tttagctgacctccc

SEQ ID NO: 1244857 - DNA, 15 bp, Homo sapiens
ctttagctgacctcc

SEQ ID NO: 1244858 - DNA, 15 bp, Homo sapiens
gctttagctgacctc

SEQ ID NO: 1244859 - DNA, 15 bp, Homo sapiens
tgctttagctgacct

SEQ ID NO: 1244860 - DNA, 15 bp, Homo sapiens
ctgctttagctgacc

SEQ ID NO: 1244861 - DNA, 15 bp, Homo sapiens
gctgctttagctgac

SEQ ID NO: 1244862 - DNA, 15 bp, Homo sapiens
agctgctttagctga

SEQ ID NO: 1244863 - DNA, 15 bp, Homo sapiens
tagctgctttagctg

SEQ ID NO: 1244864 - DNA, 15 bp, Homo sapiens
gtagctgctttagct

SEQ ID NO: 1244865 - DNA, 15 bp, Homo sapiens
ggtagctgctttagc

SEQ ID NO: 1244866 - DNA, 15 bp, Homo sapiens
tggtagctgctttag

SEQ ID NO: 1244867 - DNA, 15 bp, Homo sapiens
ctggtagctgcttta

SEQ ID NO: 1244868 - DNA, 15 bp, Homo sapiens
cctggtagctgcttt

SEQ ID NO: 1244869 - DNA, 15 bp, Homo sapiens
ccctggtagctgctt

SEQ ID NO: 1244870 - DNA, 15 bp, Homo sapiens
cccctggtagctgct

SEQ ID NO: 1244871 - DNA, 15 bp, Homo sapiens
tcccctggtagctgc

SEQ ID NO: 1244872 - DNA, 15 bp, Homo sapiens
gtcccctggtagctg

SEQ ID NO: 1244873 - DNA, 15 bp, Homo sapiens
agtcccctggtagct

SEQ ID NO: 1244874 - DNA, 15 bp, Homo sapiens
aagtcccctggtagc

SEQ ID NO: 1244875 - DNA, 15 bp, Homo sapiens
taagtcccctggtag

SEQ ID NO: 1244876 - DNA, 15 bp, Homo sapiens
ataagtcccctggta

SEQ ID NO: 1244877 - DNA, 15 bp, Homo sapiens
aataagtcccctggt

SEQ ID NO: 1244878 - DNA, 15 bp, Homo sapiens
caataagtcccctgg

SEQ ID NO: 1244879 - DNA, 15 bp, Homo sapiens
gcaataagtcccctg

SEQ ID NO: 1244880 - DNA, 15 bp, Homo sapiens
ggcaataagtcccct

SEQ ID NO: 1244881 - DNA, 15 bp, Homo sapiens
gggcaataagtcccc

SEQ ID NO: 1244882 - DNA, 15 bp, Homo sapiens
tgggcaataagtccc

SEQ ID NO: 1244883 - DNA, 15 bp, Homo sapiens
ttgggcaataagtcc

SEQ ID NO: 1244884 - DNA, 15 bp, Homo sapiens
gttgggcaataagtc

SEQ ID NO: 1244885 - DNA, 15 bp, Homo sapiens
tgttgggcaataagt

SEQ ID NO: 1244886 - DNA, 15 bp, Homo sapiens
ctgttgggcaataag

SEQ ID NO: 1244887 - DNA, 15 bp, Homo sapiens
cctgttgggcaataa

SEQ ID NO: 1244888 - DNA, 15 bp, Homo sapiens
ccctgttgggcaata

SEQ ID NO: 1244889 - DNA, 15 bp, Homo sapiens
tccctgttgggcaat

SEQ ID NO: 1244890 - DNA, 15 bp, Homo sapiens
ctccctgttgggcaa

SEQ ID NO: 1244891 - DNA, 15 bp, Homo sapiens
actccctgttgggca

SEQ ID NO: 1244892 - DNA, 15 bp, Homo sapiens
cactccctgttgggc

SEQ ID NO: 1244893 - DNA, 15 bp, Homo sapiens
ccactccctgttggg

SEQ ID NO: 1244894 - DNA, 15 bp, Homo sapiens
gccactccctgttgg

SEQ ID NO: 1244895 - DNA, 15 bp, Homo sapiens
agccactccctgttg

SEQ ID NO: 1244896 - DNA, 15 bp, Homo sapiens
tagccactccctgtt

SEQ ID NO: 1244897 - DNA, 15 bp, Homo sapiens
atagccactccctgt

SEQ ID NO: 1244898 - DNA, 15 bp, Homo sapiens
catagccactccctg

SEQ ID NO: 1244899 - DNA, 15 bp, Homo sapiens
tcatagccactccct

SEQ ID NO: 1244900 - DNA, 15 bp, Homo sapiens
atcatagccactccc

SEQ ID NO: 1244901 - DNA, 15 bp, Homo sapiens
gatcatagccactcc

SEQ ID NO: 1244902 - DNA, 15 bp, Homo sapiens
tgatcatagccactc

SEQ ID NO: 1244903 - DNA, 15 bp, Homo sapiens
ttgatcatagccact

SEQ ID NO: 1244904 - DNA, 15 bp, Homo sapiens
attgatcatagccac

SEQ ID NO: 1244905 - DNA, 15 bp, Homo sapiens
cattgatcatagcca

SEQ ID NO: 1244906 - DNA, 15 bp, Homo sapiens
acattgatcatagcc

SEQ ID NO: 1244907 - DNA, 15 bp, Homo sapiens
gacattgatcatagc

SEQ ID NO: 1244908 - DNA, 15 bp, Homo sapiens
agacattgatcatag

SEQ ID NO: 1244909 - DNA, 15 bp, Homo sapiens
aagacattgatcata

SEQ ID NO: 1244910 - DNA, 15 bp, Homo sapiens
gaagacattgatcat

SEQ ID NO: 1244911 - DNA, 15 bp, Homo sapiens
agaagacattgatca

SEQ ID NO: 1244912 - DNA, 15 bp, Homo sapiens
cagaagacattgatc

SEQ ID NO: 1244913 - DNA, 15 bp, Homo sapiens
gcagaagacattgat

SEQ ID NO: 1244914 - DNA, 15 bp, Homo sapiens
agcagaagacattga

SEQ ID NO: 1244915 - DNA, 15 bp, Homo sapiens
gagcagaagacattg

SEQ ID NO: 1244916 - DNA, 15 bp, Homo sapiens
ggagcagaagacatt

SEQ ID NO: 1244917 - DNA, 15 bp, Homo sapiens
aggagcagaagacat

SEQ ID NO: 1244918 - DNA, 15 bp, Homo sapiens
gaggagcagaagaca

SEQ ID NO: 1244919 - DNA, 15 bp, Homo sapiens
agaggagcagaagac

SEQ ID NO: 1244920 - DNA, 15 bp, Homo sapiens
aagaggagcagaaga

SEQ ID NO: 1244921 - DNA, 15 bp, Homo sapiens
agggaagaggagcag

SEQ ID NO: 1244922 - DNA, 15 bp, Homo sapiens
cagggaagaggagca

SEQ ID NO: 1244923 - DNA, 15 bp, Homo sapiens
ccagggaagaggagc

SEQ ID NO: 1244924 - DNA, 15 bp, Homo sapiens
cccagggaagaggag

SEQ ID NO: 1244925 - DNA, 15 bp, Homo sapiens
acccagggaagagga

SEQ ID NO: 1244926 - DNA, 15 bp, Homo sapiens
aacccagggaagagg

SEQ ID NO: 1244927 - DNA, 15 bp, Homo sapiens
taacccagggaagag

SEQ ID NO: 1244928 - DNA, 15 bp, Homo sapiens
ttaacccagggaaga

SEQ ID NO: 1244929 - DNA, 15 bp, Homo sapiens
gttaacccagggaag

SEQ ID NO: 1244930 - DNA, 15 bp, Homo sapiens
ggttaacccagggaa

SEQ ID NO: 1244931 - DNA, 15 bp, Homo sapiens
tggttaacccaggga

SEQ ID NO: 1244932 - DNA, 15 bp, Homo sapiens
atggttaacccaggg

SEQ ID NO: 1244933 - DNA, 15 bp, Homo sapiens
aatggttaacccagg

SEQ ID NO: 1244934 - DNA, 15 bp, Homo sapiens
aaatggttaacccag

SEQ ID NO: 1244935 - DNA, 15 bp, Homo sapiens
gaaatggttaaccca

SEQ ID NO: 1244936 - DNA, 15 bp, Homo sapiens
ggaaatggttaaccc

SEQ ID NO: 1244937 - DNA, 15 bp, Homo sapiens
aggaaatggttaacc

SEQ ID NO: 1244938 - DNA, 15 bp, Homo sapiens
caggaaatggttaac

SEQ ID NO: 1244939 - DNA, 15 bp, Homo sapiens
ccaggaaatggttaa

SEQ ID NO: 1244940 - DNA, 15 bp, Homo sapiens
gccaggaaatggtta

SEQ ID NO: 1244941 - DNA, 15 bp, Homo sapiens
ggccaggaaatggtt

SEQ ID NO: 1244942 - DNA, 15 bp, Homo sapiens
gggccaggaaatggt

SEQ ID NO: 1244943 - DNA, 15 bp, Homo sapiens
agggccaggaaatgg

SEQ ID NO: 1244944 - DNA, 15 bp, Homo sapiens
cagggccaggaaatg

SEQ ID NO: 1244945 - DNA, 15 bp, Homo sapiens
ccagggccaggaaat

SEQ ID NO: 1244946 - DNA, 15 bp, Homo sapiens
gccagggccaggaaa

SEQ ID NO: 1244947 - DNA, 15 bp, Homo sapiens
ggccagggccaggaa

SEQ ID NO: 1244948 - DNA, 15 bp, Homo sapiens
gggccagggccagga

SEQ ID NO: 1244949 - DNA, 15 bp, Homo sapiens
ggggccagggccagg

SEQ ID NO: 1244950 - DNA, 15 bp, Homo sapiens
aggggccagggccag

SEQ ID NO: 1244951 - DNA, 15 bp, Homo sapiens
gaggggccagggcca

SEQ ID NO: 1244952 - DNA, 15 bp, Homo sapiens
agaggggccagggcc

SEQ ID NO: 1244953 - DNA, 15 bp, Homo sapiens
cagaggggccagggc

SEQ ID NO: 1244954 - DNA, 15 bp, Homo sapiens
acagaggggccaggg

SEQ ID NO: 1244955 - DNA, 15 bp, Homo sapiens
aacagaggggccagg

SEQ ID NO: 1244956 - DNA, 15 bp, Homo sapiens
taacagaggggccag

SEQ ID NO: 1244957 - DNA, 15 bp, Homo sapiens
ttaacagaggggcca

SEQ ID NO: 1244958 - DNA, 15 bp, Homo sapiens
attaacagaggggcc

SEQ ID NO: 1244959 - DNA, 15 bp, Homo sapiens
aattaacagaggggc

SEQ ID NO: 1244960 - DNA, 15 bp, Homo sapiens
gaattaacagagggg

SEQ ID NO: 1244961 - DNA, 15 bp, Homo sapiens
ggaattaacagaggg

SEQ ID NO: 1244962 - DNA, 15 bp, Homo sapiens
aggaattaacagagg

SEQ ID NO: 1244963 - DNA, 15 bp, Homo sapiens
gaggaattaacagag

SEQ ID NO: 1244964 - DNA, 15 bp, Homo sapiens
agaggaattaacaga

SEQ ID NO: 1244965 - DNA, 15 bp, Homo sapiens
cagaggaattaacag

SEQ ID NO: 1244966 - DNA, 15 bp, Homo sapiens
gcagaggaattaaca

SEQ ID NO: 1244967 - DNA, 15 bp, Homo sapiens
agcagaggaattaac

SEQ ID NO: 1244968 - DNA, 15 bp, Homo sapiens
tagcagaggaattaa

SEQ ID NO: 1244969 - DNA, 15 bp, Homo sapiens
ttagcagaggaatta

SEQ ID NO: 1244970 - DNA, 15 bp, Homo sapiens
gttagcagaggaatt

SEQ ID NO: 1244971 - DNA, 15 bp, Homo sapiens
ggttagcagaggaat

SEQ ID NO: 1244972 - DNA, 15 bp, Homo sapiens
aggttagcagaggaa

SEQ ID NO: 1244973 - DNA, 15 bp, Homo sapiens
caggttagcagagga

SEQ ID NO: 1244974 - DNA, 15 bp, Homo sapiens
ccaggttagcagagg

SEQ ID NO: 1244975 - DNA, 15 bp, Homo sapiens
accaggttagcagag

SEQ ID NO: 1244976 - DNA, 15 bp, Homo sapiens
taccaggttagcaga

SEQ ID NO: 1244977 - DNA, 15 bp, Homo sapiens
ataccaggttagcag

SEQ ID NO: 1244978 - DNA, 15 bp, Homo sapiens
cataccaggttagca

SEQ ID NO: 1244979 - DNA, 15 bp, Homo sapiens
ccataccaggttagc

SEQ ID NO: 1244980 - DNA, 15 bp, Homo sapiens
tccataccaggttag

SEQ ID NO: 1244981 - DNA, 15 bp, Homo sapiens
ctccataccaggtta

SEQ ID NO: 1244982 - DNA, 15 bp, Homo sapiens
cctccataccaggtt

SEQ ID NO: 1244983 - DNA, 15 bp, Homo sapiens
tcctccataccaggt

SEQ ID NO: 1244984 - DNA, 15 bp, Homo sapiens
ttcctccataccagg

SEQ ID NO: 1244985 - DNA, 15 bp, Homo sapiens
cttcctccataccag

SEQ ID NO: 1244986 - DNA, 15 bp, Homo sapiens
ccttcctccatacca

SEQ ID NO: 1244987 - DNA, 15 bp, Homo sapiens
cccttcctccatacc

SEQ ID NO: 1244988 - DNA, 15 bp, Homo sapiens
acccttcctccatac

SEQ ID NO: 1244989 - DNA, 15 bp, Homo sapiens
cacccttcctccata

SEQ ID NO: 1244990 - DNA, 15 bp, Homo sapiens
ccacccttcctccat

SEQ ID NO: 1244991 - DNA, 15 bp, Homo sapiens
tccacccttcctcca

SEQ ID NO: 1244992 - DNA, 15 bp, Homo sapiens
gtccacccttcctcc

SEQ ID NO: 1244993 - DNA, 15 bp, Homo sapiens
tgtccacccttcctc

SEQ ID NO: 1244994 - DNA, 15 bp, Homo sapiens
ttgtccacccttcct

SEQ ID NO: 1244995 - DNA, 15 bp, Homo sapiens
cttgtccacccttcc

SEQ ID NO: 1244996 - DNA, 15 bp, Homo sapiens
ccttgtccacccttc

SEQ ID NO: 1244997 - DNA, 15 bp, Homo sapiens
cccttgtccaccctt

SEQ ID NO: 1244998 - DNA, 15 bp, Homo sapiens
gcccttgtccaccct

SEQ ID NO: 1244999 - DNA, 15 bp, Homo sapiens
agcccttgtccaccc

SEQ ID NO: 1245000 - DNA, 15 bp, Homo sapiens
aagcccttgtccacc

SEQ ID NO: 1245001 - DNA, 15 bp, Homo sapiens
caagcccttgtccac

SEQ ID NO: 1245002 - DNA, 15 bp, Homo sapiens
ccaagcccttgtcca

SEQ ID NO: 1245003 - DNA, 15 bp, Homo sapiens
cccaagcccttgtcc

SEQ ID NO: 1245004 - DNA, 15 bp, Homo sapiens
tcccaagcccttgtc

SEQ ID NO: 1245005 - DNA, 15 bp, Homo sapiens
atcccaagcccttgt

SEQ ID NO: 1245006 - DNA, 15 bp, Homo sapiens
catcccaagcccttg

SEQ ID NO: 1245007 - DNA, 15 bp, Homo sapiens
ccatcccaagccctt

SEQ ID NO: 1245008 - DNA, 15 bp, Homo sapiens
tccatcccaagccct

SEQ ID NO: 1245009 - DNA, 15 bp, Homo sapiens
gtccatcccaagccc

SEQ ID NO: 1245010 - DNA, 15 bp, Homo sapiens
tgtccatcccaagcc

SEQ ID NO: 1245011 - DNA, 15 bp, Homo sapiens
gtgtccatcccaagc

SEQ ID NO: 1245012 - DNA, 15 bp, Homo sapiens
ggtgtccatcccaag

SEQ ID NO: 1245013 - DNA, 15 bp, Homo sapiens
tggtgtccatcccaa

SEQ ID NO: 1245014 - DNA, 15 bp, Homo sapiens
atggtgtccatccca

SEQ ID NO: 1245015 - DNA, 15 bp, Homo sapiens
aatggtgtccatccc

SEQ ID NO: 1245016 - DNA, 15 bp, Homo sapiens
caatggtgtccatcc

SEQ ID NO: 1245017 - DNA, 15 bp, Homo sapiens
tcaatggtgtccatc

SEQ ID NO: 1245018 - DNA, 15 bp, Homo sapiens
atcaatggtgtccat

SEQ ID NO: 1245019 - DNA, 15 bp, Homo sapiens
tatcaatggtgtcca

SEQ ID NO: 1245020 - DNA, 15 bp, Homo sapiens
atatcaatggtgtcc

SEQ ID NO: 1245021 - DNA, 15 bp, Homo sapiens
gatatcaatggtgtc

SEQ ID NO: 1245022 - DNA, 15 bp, Homo sapiens
ggatatcaatggtgt

SEQ ID NO: 1245023 - DNA, 15 bp, Homo sapiens
gggatatcaatggtg

SEQ ID NO: 1245024 - DNA, 15 bp, Homo sapiens
ggggatatcaatggt

SEQ ID NO: 1245025 - DNA, 15 bp, Homo sapiens
tggggatatcaatgg

SEQ ID NO: 1245026 - DNA, 15 bp, Homo sapiens
ctggggatatcaatg

SEQ ID NO: 1245027 - DNA, 15 bp, Homo sapiens
cctggggatatcaat

SEQ ID NO: 1245028 - DNA, 15 bp, Homo sapiens
acctggggatatcaa

SEQ ID NO: 1245029 - DNA, 15 bp, Homo sapiens
gacctggggatatca

SEQ ID NO: 1245030 - DNA, 15 bp, Homo sapiens
agacctggggatatc

SEQ ID NO: 1245031 - DNA, 15 bp, Homo sapiens
cagacctggggatat

SEQ ID NO: 1245032 - DNA, 15 bp, Homo sapiens
tcagacctggggata

SEQ ID NO: 1245033 - DNA, 15 bp, Homo sapiens
gtcagacctggggat

SEQ ID NO: 1245034 - DNA, 15 bp, Homo sapiens
tgtcagacctgggga

SEQ ID NO: 1245035 - DNA, 15 bp, Homo sapiens
atgtcagacctgggg

SEQ ID NO: 1245036 - DNA, 15 bp, Homo sapiens
tatgtcagacctggg

SEQ ID NO: 1245037 - DNA, 15 bp, Homo sapiens
ttatgtcagacctgg

SEQ ID NO: 1245038 - DNA, 15 bp, Homo sapiens
tttatgtcagacctg

SEQ ID NO: 1245039 - DNA, 15 bp, Homo sapiens
gtttatgtcagacct

SEQ ID NO: 1245040 - DNA, 15 bp, Homo sapiens
tgtttatgtcagacc

SEQ ID NO: 1245041 - DNA, 15 bp, Homo sapiens
ctgtttatgtcagac

SEQ ID NO: 1245042 - DNA, 15 bp, Homo sapiens
cctgtttatgtcaga

SEQ ID NO: 1245043 - DNA, 15 bp, Homo sapiens
gcctgtttatgtcag

SEQ ID NO: 1245044 - DNA, 15 bp, Homo sapiens
tgcctgtttatgtca

SEQ ID NO: 1245045 - DNA, 15 bp, Homo sapiens
ctgcctgtttatgtc

SEQ ID NO: 1245046 - DNA, 15 bp, Homo sapiens
cctgcctgtttatgt

SEQ ID NO: 1245047 - DNA, 15 bp, Homo sapiens
ccctgcctgtttatg

SEQ ID NO: 1245048 - DNA, 15 bp, Homo sapiens
cccctgcctgtttat

SEQ ID NO: 1245049 - DNA, 15 bp, Homo sapiens
ccccctgcctgttta

SEQ ID NO: 1245050 - DNA, 15 bp, Homo sapiens
cccccctgcctgttt

SEQ ID NO: 1245051 - DNA, 15 bp, Homo sapiens
acccccctgcctgtt

SEQ ID NO: 1245052 - DNA, 15 bp, Homo sapiens
cacccccctgcctgt

SEQ ID NO: 1245053 - DNA, 15 bp, Homo sapiens
gcacccccctgcctg

SEQ ID NO: 1245054 - DNA, 15 bp, Homo sapiens
agcacccccctgcct

SEQ ID NO: 1245055 - DNA, 15 bp, Homo sapiens
gagcacccccctgcc

SEQ ID NO: 1245056 - DNA, 15 bp, Homo sapiens
agagcacccccctgc

SEQ ID NO: 1245057 - DNA, 15 bp, Homo sapiens
gagagcacccccctg

SEQ ID NO: 1245058 - DNA, 15 bp, Homo sapiens
tgagagcacccccct

SEQ ID NO: 1245059 - DNA, 15 bp, Homo sapiens
ctgagagcacccccc

SEQ ID NO: 1245060 - DNA, 15 bp, Homo sapiens
actgagagcaccccc

SEQ ID NO: 1245061 - DNA, 15 bp, Homo sapiens
gactgagagcacccc

SEQ ID NO: 1245062 - DNA, 15 bp, Homo sapiens
ggactgagagcaccc

SEQ ID NO: 1245063 - DNA, 15 bp, Homo sapiens
aggactgagagcacc

SEQ ID NO: 1245064 - DNA, 15 bp, Homo sapiens
gaggactgagagcac

SEQ ID NO: 1245065 - DNA, 15 bp, Homo sapiens
tgaggactgagagca

SEQ ID NO: 1245066 - DNA, 15 bp, Homo sapiens
ctgaggactgagagc

SEQ ID NO: 1245067 - DNA, 15 bp, Homo sapiens
tctgaggactgagag

SEQ ID NO: 1245068 - DNA, 15 bp, Homo sapiens
atctgaggactgaga

SEQ ID NO: 1245069 - DNA, 15 bp, Homo sapiens
catctgaggactgag

SEQ ID NO: 1245070 - DNA, 15 bp, Homo sapiens
acatctgaggactga

SEQ ID NO: 1245071 - DNA, 15 bp, Homo sapiens
cacatctgaggactg

SEQ ID NO: 1245072 - DNA, 15 bp, Homo sapiens
tcacatctgaggact

SEQ ID NO: 1245073 - DNA, 15 bp, Homo sapiens
atcacatctgaggac

SEQ ID NO: 1245074 - DNA, 15 bp, Homo sapiens
gatcacatctgagga

SEQ ID NO: 1245075 - DNA, 15 bp, Homo sapiens
ggatcacatctgagg

SEQ ID NO: 1245076 - DNA, 15 bp, Homo sapiens
gggatcacatctgag

SEQ ID NO: 1245077 - DNA, 15 bp, Homo sapiens
agggatcacatctga

SEQ ID NO: 1245078 - DNA, 15 bp, Homo sapiens
cagggatcacatctg

SEQ ID NO: 1245079 - DNA, 15 bp, Homo sapiens
gcagggatcacatct

SEQ ID NO: 1245080 - DNA, 15 bp, Homo sapiens
ggcagggatcacatc

SEQ ID NO: 1245081 - DNA, 15 bp, Homo sapiens
aggcagggatcacat

SEQ ID NO: 1245082 - DNA, 15 bp, Homo sapiens
caggcagggatcaca

SEQ ID NO: 1245083 - DNA, 15 bp, Homo sapiens
tcaggcagggatcac

SEQ ID NO: 1245084 - DNA, 15 bp, Homo sapiens
ctcaggcagggatca

SEQ ID NO: 1245085 - DNA, 15 bp, Homo sapiens
gctcaggcagggatc

SEQ ID NO: 1245086 - DNA, 15 bp, Homo sapiens
agctcaggcagggat

SEQ ID NO: 1245087 - DNA, 15 bp, Homo sapiens
gagctcaggcaggga

SEQ ID NO: 1245088 - DNA, 15 bp, Homo sapiens
agagctcaggcaggg

SEQ ID NO: 1245089 - DNA, 15 bp, Homo sapiens
cagagctcaggcagg

SEQ ID NO: 1245090 - DNA, 15 bp, Homo sapiens
acagagctcaggcag

SEQ ID NO: 1245091 - DNA, 15 bp, Homo sapiens
aacagagctcaggca

SEQ ID NO: 1245092 - DNA, 15 bp, Homo sapiens
caacagagctcaggc

SEQ ID NO: 1245093 - DNA, 15 bp, Homo sapiens
ccaacagagctcagg

SEQ ID NO: 1245094 - DNA, 15 bp, Homo sapiens
gccaacagagctcag

SEQ ID NO: 1245095 - DNA, 15 bp, Homo sapiens
tgccaacagagctca

SEQ ID NO: 1245096 - DNA, 15 bp, Homo sapiens
atgccaacagagctc

SEQ ID NO: 1245097 - DNA, 15 bp, Homo sapiens
aatgccaacagagct

SEQ ID NO: 1245098 - DNA, 15 bp, Homo sapiens
gaatgccaacagagc

SEQ ID NO: 1245099 - DNA, 15 bp, Homo sapiens
ggaatgccaacagag

SEQ ID NO: 1245100 - DNA, 15 bp, Homo sapiens
tggaatgccaacaga

SEQ ID NO: 1245101 - DNA, 15 bp, Homo sapiens
atggaatgccaacag

SEQ ID NO: 1245102 - DNA, 15 bp, Homo sapiens
catggaatgccaaca

SEQ ID NO: 1245103 - DNA, 15 bp, Homo sapiens
ccatggaatgccaac

SEQ ID NO: 1245104 - DNA, 15 bp, Homo sapiens
gccatggaatgccaa

SEQ ID NO: 1245105 - DNA, 15 bp, Homo sapiens
cgccatggaatgcca

SEQ ID NO: 1245106 - DNA, 15 bp, Homo sapiens
tcgccatggaatgcc

SEQ ID NO: 1245107 - DNA, 15 bp, Homo sapiens
ctcgccatggaatgc

SEQ ID NO: 1245108 - DNA, 15 bp, Homo sapiens
cctcgccatggaatg

SEQ ID NO: 1245109 - DNA, 15 bp, Homo sapiens
gcctcgccatggaat

SEQ ID NO: 1245110 - DNA, 15 bp, Homo sapiens
agcctcgccatggaa

SEQ ID NO: 1245111 - DNA, 15 bp, Homo sapiens
gagcctcgccatgga

SEQ ID NO: 1245112 - DNA, 15 bp, Homo sapiens
agagcctcgccatgg

SEQ ID NO: 1245113 - DNA, 15 bp, Homo sapiens
aagagcctcgccatg

SEQ ID NO: 1245114 - DNA, 15 bp, Homo sapiens
gaagagcctcgccat

SEQ ID NO: 1245115 - DNA, 15 bp, Homo sapiens
tgaagagcctcgcca

SEQ ID NO: 1245116 - DNA, 15 bp, Homo sapiens
ctgaagagcctcgcc

SEQ ID NO: 1245117 - DNA, 15 bp, Homo sapiens
gctgaagagcctcgc

SEQ ID NO: 1245118 - DNA, 15 bp, Homo sapiens
ggctgaagagcctcg

SEQ ID NO: 1245119 - DNA, 15 bp, Homo sapiens
aggctgaagagcctc

SEQ ID NO: 1245120 - DNA, 15 bp, Homo sapiens
gaggctgaagagcct

SEQ ID NO: 1245121 - DNA, 15 bp, Homo sapiens
tgaggctgaagagcc

SEQ ID NO: 1245122 - DNA, 15 bp, Homo sapiens
atgaggctgaagagc

SEQ ID NO: 1245123 - DNA, 15 bp, Homo sapiens
aatgaggctgaagag

SEQ ID NO: 1245124 - DNA, 15 bp, Homo sapiens
aaatgaggctgaaga

SEQ ID NO: 1245125 - DNA, 15 bp, Homo sapiens
caaatgaggctgaag

SEQ ID NO: 1245126 - DNA, 15 bp, Homo sapiens
ccaaatgaggctgaa

SEQ ID NO: 1245127 - DNA, 15 bp, Homo sapiens
cccaaatgaggctga

SEQ ID NO: 1245128 - DNA, 15 bp, Homo sapiens
gcccaaatgaggctg

SEQ ID NO: 1245129 - DNA, 15 bp, Homo sapiens
tgcccaaatgaggct

SEQ ID NO: 1245130 - DNA, 15 bp, Homo sapiens
ctgcccaaatgaggc

SEQ ID NO: 1245131 - DNA, 15 bp, Homo sapiens
tctgcccaaatgagg

SEQ ID NO: 1245132 - DNA, 15 bp, Homo sapiens
ttctgcccaaatgag

SEQ ID NO: 1245133 - DNA, 15 bp, Homo sapiens
cttctgcccaaatga

SEQ ID NO: 1245134 - DNA, 15 bp, Homo sapiens
gcttctgcccaaatg

SEQ ID NO: 1245135 - DNA, 15 bp, Homo sapiens
cgcttctgcccaaat

SEQ ID NO: 1245136 - DNA, 15 bp, Homo sapiens
ccgcttctgcccaaa

SEQ ID NO: 1245137 - DNA, 15 bp, Homo sapiens
accgcttctgcccaa

SEQ ID NO: 1245138 - DNA, 15 bp, Homo sapiens
gaccgcttctgccca

SEQ ID NO: 1245139 - DNA, 15 bp, Homo sapiens
ggaccgcttctgccc

SEQ ID NO: 1245140 - DNA, 15 bp, Homo sapiens
aggaccgcttctgcc

SEQ ID NO: 1245141 - DNA, 15 bp, Homo sapiens
caggaccgcttctgc

SEQ ID NO: 1245142 - DNA, 15 bp, Homo sapiens
ccaggaccgcttctg

SEQ ID NO: 1245143 - DNA, 15 bp, Homo sapiens
cccaggaccgcttct

SEQ ID NO: 1245144 - DNA, 15 bp, Homo sapiens
ccccaggaccgcttc

SEQ ID NO: 1245145 - DNA, 15 bp, Homo sapiens
tccccaggaccgctt

SEQ ID NO: 1245146 - DNA, 15 bp, Homo sapiens
atccccaggaccgct

SEQ ID NO: 1245147 - DNA, 15 bp, Homo sapiens
aatccccaggaccgc

SEQ ID NO: 1245148 - DNA, 15 bp, Homo sapiens
caatccccaggaccg

SEQ ID NO: 1245149 - DNA, 15 bp, Homo sapiens
gcaatccccaggacc

SEQ ID NO: 1245150 - DNA, 15 bp, Homo sapiens
tgcaatccccaggac

SEQ ID NO: 1245151 - DNA, 15 bp, Homo sapiens
ttgcaatccccagga

SEQ ID NO: 1245152 - DNA, 15 bp, Homo sapiens
tttgcaatccccagg

SEQ ID NO: 1245153 - DNA, 15 bp, Homo sapiens
ttttgcaatccccag

SEQ ID NO: 1245154 - DNA, 15 bp, Homo sapiens
cttttgcaatcccca

SEQ ID NO: 1245155 - DNA, 15 bp, Homo sapiens
ccttttgcaatcccc

SEQ ID NO: 1245156 - DNA, 15 bp, Homo sapiens
cccttttgcaatccc

SEQ ID NO: 1245157 - DNA, 15 bp, Homo sapiens
gcccttttgcaatcc

SEQ ID NO: 1245158 - DNA, 15 bp, Homo sapiens
agcccttttgcaatc

SEQ ID NO: 1245159 - DNA, 15 bp, Homo sapiens
aagcccttttgcaat

SEQ ID NO: 1245160 - DNA, 15 bp, Homo sapiens
aaagcccttttgcaa

SEQ ID NO: 1245161 - DNA, 15 bp, Homo sapiens
gaaagcccttttgca

SEQ ID NO: 1245162 - DNA, 15 bp, Homo sapiens
agaaagcccttttgc

SEQ ID NO: 1245163 - DNA, 15 bp, Homo sapiens
aagaaagcccttttg

SEQ ID NO: 1245164 - DNA, 15 bp, Homo sapiens
aaagaaagccctttt

SEQ ID NO: 1245165 - DNA, 15 bp, Homo sapiens
aaaagaaagcccttt

SEQ ID NO: 1245166 - DNA, 15 bp, Homo sapiens
aaaaagaaagccctt

SEQ ID NO: 1245167 - DNA, 15 bp, Homo sapiens
gaaaaagaaagccct

SEQ ID NO: 1245168 - DNA, 15 bp, Homo sapiens
agaaaaagaaagccc

SEQ ID NO: 1245169 - DNA, 15 bp, Homo sapiens
aagaaaaagaaagcc

SEQ ID NO: 1245170 - DNA, 15 bp, Homo sapiens
aaagaaaaagaaagc

SEQ ID NO: 1245171 - DNA, 15 bp, Homo sapiens
aaaagaaaaagaaag

SEQ ID NO: 1245172 - DNA, 15 bp, Homo sapiens
taaaagaaaaagaaa

SEQ ID NO: 1245173 - DNA, 15 bp, Homo sapiens
ataaaagaaaaagaa

SEQ ID NO: 1245174 - DNA, 15 bp, Homo sapiens
aataaaagaaaaaga

SEQ ID NO: 1245175 - DNA, 15 bp, Homo sapiens
aaataaaagaaaaag

SEQ ID NO: 1245176 - DNA, 15 bp, Homo sapiens
taaataaaagaaaaa

SEQ ID NO: 1245177 - DNA, 15 bp, Homo sapiens
ataaataaaagaaaa

SEQ ID NO: 1245178 - DNA, 15 bp, Homo sapiens
aataaataaaagaaa

SEQ ID NO: 1245179 - DNA, 15 bp, Homo sapiens
aaataaataaaagaa

SEQ ID NO: 1245180 - DNA, 15 bp, Homo sapiens
gaaataaataaaaga

SEQ ID NO: 1245181 - DNA, 15 bp, Homo sapiens
agaaataaataaaag

SEQ ID NO: 1245182 - DNA, 15 bp, Homo sapiens
aagaaataaataaaa

SEQ ID NO: 1245183 - DNA, 15 bp, Homo sapiens
aaagaaataaataaa

SEQ ID NO: 1245184 - DNA, 15 bp, Homo sapiens
aaaagaaataaataa

SEQ ID NO: 1245185 - DNA, 15 bp, Homo sapiens
aaaaagaaataaata

SEQ ID NO: 1245186 - DNA, 15 bp, Homo sapiens
taaaaagaaataaat

SEQ ID NO: 1245187 - DNA, 15 bp, Homo sapiens
ctaaaaagaaataaa

SEQ ID NO: 1245188 - DNA, 15 bp, Homo sapiens
tctaaaaagaaataa

SEQ ID NO: 1245189 - DNA, 15 bp, Homo sapiens
ttctaaaaagaaata

SEQ ID NO: 1245190 - DNA, 15 bp, Homo sapiens
tttctaaaaagaaat

SEQ ID NO: 1245191 - DNA, 15 bp, Homo sapiens
gtttctaaaaagaaa

SEQ ID NO: 1245192 - DNA, 15 bp, Homo sapiens
tgtttctaaaaagaa

SEQ ID NO: 1245193 - DNA, 15 bp, Homo sapiens
ctgtttctaaaaaga

SEQ ID NO: 1245194 - DNA, 15 bp, Homo sapiens
tctgtttctaaaaag

SEQ ID NO: 1245195 - DNA, 15 bp, Homo sapiens
ctctgtttctaaaaa

SEQ ID NO: 1245196 - DNA, 15 bp, Homo sapiens
actctgtttctaaaa

SEQ ID NO: 1245197 - DNA, 15 bp, Homo sapiens
gactctgtttctaaa

SEQ ID NO: 1245198 - DNA, 15 bp, Homo sapiens
agactctgtttctaa

SEQ ID NO: 1245199 - DNA, 15 bp, Homo sapiens
gagactctgtttcta

SEQ ID NO: 1245200 - DNA, 15 bp, Homo sapiens
ggagactctgtttct

SEQ ID NO: 1245201 - DNA, 15 bp, Homo sapiens
aggagactctgtttc

SEQ ID NO: 1245202 - DNA, 15 bp, Homo sapiens
aaggagactctgttt

SEQ ID NO: 1245203 - DNA, 15 bp, Homo sapiens
caaggagactctgtt

SEQ ID NO: 1245204 - DNA, 15 bp, Homo sapiens
acaaggagactctgt

SEQ ID NO: 1245205 - DNA, 15 bp, Homo sapiens
cacaaggagactctg

SEQ ID NO: 1245206 - DNA, 15 bp, Homo sapiens
acacaaggagactct

SEQ ID NO: 1245207 - DNA, 15 bp, Homo sapiens
aacacaaggagactc

SEQ ID NO: 1245208 - DNA, 15 bp, Homo sapiens
caacacaaggagact

SEQ ID NO: 1245209 - DNA, 15 bp, Homo sapiens
gcaacacaaggagac

SEQ ID NO: 1245210 - DNA, 15 bp, Homo sapiens
ggcaacacaaggaga

SEQ ID NO: 1245211 - DNA, 15 bp, Homo sapiens
gggcaacacaaggag

SEQ ID NO: 1245212 - DNA, 15 bp, Homo sapiens
tgggcaacacaagga

SEQ ID NO: 1245213 - DNA, 15 bp, Homo sapiens
ctgggcaacacaagg

SEQ ID NO: 1245214 - DNA, 15 bp, Homo sapiens
cctgggcaacacaag

SEQ ID NO: 1245215 - DNA, 15 bp, Homo sapiens
gcctgggcaacacaa

SEQ ID NO: 1245216 - DNA, 15 bp, Homo sapiens
gcctgagcccaggag

SEQ ID NO: 1245217 - DNA, 15 bp, Homo sapiens
cgcctgagcccagga

SEQ ID NO: 1245218 - DNA, 15 bp, Homo sapiens
tcgcctgagcccagg

SEQ ID NO: 1245219 - DNA, 15 bp, Homo sapiens
gtcgcctgagcccag

SEQ ID NO: 1245220 - DNA, 15 bp, Homo sapiens
ggtcgcctgagccca

SEQ ID NO: 1245221 - DNA, 15 bp, Homo sapiens
gggtcgcctgagccc

SEQ ID NO: 1245222 - DNA, 15 bp, Homo sapiens
agggtcgcctgagcc

SEQ ID NO: 1245223 - DNA, 15 bp, Homo sapiens
gagggtcgcctgagc

SEQ ID NO: 1245224 - DNA, 15 bp, Homo sapiens
ggagggtcgcctgag

SEQ ID NO: 1245225 - DNA, 15 bp, Homo sapiens
gggagggtcgcctga

SEQ ID NO: 1245226 - DNA, 15 bp, Homo sapiens
cgggagggtcgcctg

SEQ ID NO: 1245227 - DNA, 15 bp, Homo sapiens
gcgggagggtcgcct

SEQ ID NO: 1245228 - DNA, 15 bp, Homo sapiens
ggcgggagggtcgcc

SEQ ID NO: 1245229 - DNA, 15 bp, Homo sapiens
aggcgggagggtcgc

SEQ ID NO: 1245230 - DNA, 15 bp, Homo sapiens
gaggcgggagggtcg

SEQ ID NO: 1245231 - DNA, 15 bp, Homo sapiens
tgaggcgggagggtc

SEQ ID NO: 1245232 - DNA, 15 bp, Homo sapiens
ctgaggcgggagggt

SEQ ID NO: 1245233 - DNA, 15 bp, Homo sapiens
gctgaggcgggaggg

SEQ ID NO: 1245234 - DNA, 15 bp, Homo sapiens
agaaggctgaggcgg

SEQ ID NO: 1245235 - DNA, 15 bp, Homo sapiens
aagaaggctgaggcg

SEQ ID NO: 1245236 - DNA, 15 bp, Homo sapiens
aaagaaggctgaggc

SEQ ID NO: 1245237 - DNA, 15 bp, Homo sapiens
caaagaaggctgagg

SEQ ID NO: 1245238 - DNA, 15 bp, Homo sapiens
acaaagaaggctgag

SEQ ID NO: 1245239 - DNA, 15 bp, Homo sapiens
tacaaagaaggctga

SEQ ID NO: 1245240 - DNA, 15 bp, Homo sapiens
ttacaaagaaggctg

SEQ ID NO: 1245241 - DNA, 15 bp, Homo sapiens
gttacaaagaaggct

SEQ ID NO: 1245242 - DNA, 15 bp, Homo sapiens
agttacaaagaaggc

SEQ ID NO: 1245243 - DNA, 15 bp, Homo sapiens
cagttacaaagaagg

SEQ ID NO: 1245244 - DNA, 15 bp, Homo sapiens
ccagttacaaagaag

SEQ ID NO: 1245245 - DNA, 15 bp, Homo sapiens
tccagttacaaagaa

SEQ ID NO: 1245246 - DNA, 15 bp, Homo sapiens
ttccagttacaaaga

SEQ ID NO: 1245247 - DNA, 15 bp, Homo sapiens
gttccagttacaaag

SEQ ID NO: 1245248 - DNA, 15 bp, Homo sapiens
agttccagttacaaa

SEQ ID NO: 1245249 - DNA, 15 bp, Homo sapiens
tagttccagttacaa

SEQ ID NO: 1245250 - DNA, 15 bp, Homo sapiens
gtagttccagttaca

SEQ ID NO: 1245251 - DNA, 15 bp, Homo sapiens
tgtagttccagttac

SEQ ID NO: 1245252 - DNA, 15 bp, Homo sapiens
ctgtagttccagtta

SEQ ID NO: 1245253 - DNA, 15 bp, Homo sapiens
cctgtagttccagtt

SEQ ID NO: 1245254 - DNA, 15 bp, Homo sapiens
acctgtagttccagt

SEQ ID NO: 1245255 - DNA, 15 bp, Homo sapiens
cacctgtagttccag

SEQ ID NO: 1245256 - DNA, 15 bp, Homo sapiens
gcacacctgtagttc

SEQ ID NO: 1245257 - DNA, 15 bp, Homo sapiens
tgcacacctgtagtt

SEQ ID NO: 1245258 - DNA, 15 bp, Homo sapiens
gtgcacacctgtagt

SEQ ID NO: 1245259 - DNA, 15 bp, Homo sapiens
ggtgcacacctgtag

SEQ ID NO: 1245260 - DNA, 15 bp, Homo sapiens
agcatggtggtgcac

SEQ ID NO: 1245261 - DNA, 15 bp, Homo sapiens
aagcatggtggtgca

SEQ ID NO: 1245262 - DNA, 15 bp, Homo sapiens
taagcatggtggtgc

SEQ ID NO: 1245263 - DNA, 15 bp, Homo sapiens
ctaagcatggtggtg

SEQ ID NO: 1245264 - DNA, 15 bp, Homo sapiens
tctaagcatggtggt

SEQ ID NO: 1245265 - DNA, 15 bp, Homo sapiens
atctaagcatggtgg

SEQ ID NO: 1245266 - DNA, 15 bp, Homo sapiens
tatctaagcatggtg

SEQ ID NO: 1245267 - DNA, 15 bp, Homo sapiens
ttatctaagcatggt

SEQ ID NO: 1245268 - DNA, 15 bp, Homo sapiens
attatctaagcatgg

SEQ ID NO: 1245269 - DNA, 15 bp, Homo sapiens
aattatctaagcatg

SEQ ID NO: 1245270 - DNA, 15 bp, Homo sapiens
aaattatctaagcat

SEQ ID NO: 1245271 - DNA, 15 bp, Homo sapiens
aaaattatctaagca

SEQ ID NO: 1245272 - DNA, 15 bp, Homo sapiens
aaaaattatctaagc

SEQ ID NO: 1245273 - DNA, 15 bp, Homo sapiens
caaaaattatctaag

SEQ ID NO: 1245274 - DNA, 15 bp, Homo sapiens
acaaaaattatctaa

SEQ ID NO: 1245275 - DNA, 15 bp, Homo sapiens
tacaaaaattatcta

SEQ ID NO: 1245276 - DNA, 15 bp, Homo sapiens
atacaaaaattatct

SEQ ID NO: 1245277 - DNA, 15 bp, Homo sapiens
aatacaaaaattatc

SEQ ID NO: 1245278 - DNA, 15 bp, Homo sapiens
aaatacaaaaattat

SEQ ID NO: 1245279 - DNA, 15 bp, Homo sapiens
cacaaaaaatacaaa

SEQ ID NO: 1245280 - DNA, 15 bp, Homo sapiens
acacaaaaaatacaa

SEQ ID NO: 1245281 - DNA, 15 bp, Homo sapiens
tacacaaaaaataca

SEQ ID NO: 1245282 - DNA, 15 bp, Homo sapiens
ctacacaaaaaatac

SEQ ID NO: 1245283 - DNA, 15 bp, Homo sapiens
tctacacaaaaaata

SEQ ID NO: 1245284 - DNA, 15 bp, Homo sapiens
ctctacacaaaaaat

SEQ ID NO: 1245285 - DNA, 15 bp, Homo sapiens
cctctacacaaaaaa

SEQ ID NO: 1245286 - DNA, 15 bp, Homo sapiens
ccctctacacaaaaa

SEQ ID NO: 1245287 - DNA, 15 bp, Homo sapiens
accctctacacaaaa

SEQ ID NO: 1245288 - DNA, 15 bp, Homo sapiens
caccctctacacaaa

SEQ ID NO: 1245289 - DNA, 15 bp, Homo sapiens
ccaccctctacacaa

SEQ ID NO: 1245290 - DNA, 15 bp, Homo sapiens
cccaccctctacaca

SEQ ID NO: 1245291 - DNA, 15 bp, Homo sapiens
acccaccctctacac

SEQ ID NO: 1245292 - DNA, 15 bp, Homo sapiens
aacccaccctctaca

SEQ ID NO: 1245293 - DNA, 15 bp, Homo sapiens
gaacccaccctctac

SEQ ID NO: 1245294 - DNA, 15 bp, Homo sapiens
agaacccaccctcta

SEQ ID NO: 1245295 - DNA, 15 bp, Homo sapiens
gagaacccaccctct

SEQ ID NO: 1245296 - DNA, 15 bp, Homo sapiens
cgagaacccaccctc

SEQ ID NO: 1245297 - DNA, 15 bp, Homo sapiens
gcgagaacccaccct

SEQ ID NO: 1245298 - DNA, 15 bp, Homo sapiens
agcgagaacccaccc

SEQ ID NO: 1245299 - DNA, 15 bp, Homo sapiens
tagcgagaacccacc

SEQ ID NO: 1245300 - DNA, 15 bp, Homo sapiens
atagcgagaacccac

SEQ ID NO: 1245301 - DNA, 15 bp, Homo sapiens
catagcgagaaccca

SEQ ID NO: 1245302 - DNA, 15 bp, Homo sapiens
acatagcgagaaccc

SEQ ID NO: 1245303 - DNA, 15 bp, Homo sapiens
aacatagcgagaacc

SEQ ID NO: 1245304 - DNA, 15 bp, Homo sapiens
caacatagcgagaac

SEQ ID NO: 1245305 - DNA, 15 bp, Homo sapiens
gcaacatagcgagaa

SEQ ID NO: 1245306 - DNA, 15 bp, Homo sapiens
ttgggcaacatagcg

SEQ ID NO: 1245307 - DNA, 15 bp, Homo sapiens
cttgggcaacatagc

SEQ ID NO: 1245308 - DNA, 15 bp, Homo sapiens
gcttgggcaacatag

SEQ ID NO: 1245309 - DNA, 15 bp, Homo sapiens
agcttgggcaacata

SEQ ID NO: 1245310 - DNA, 15 bp, Homo sapiens
cagcttgggcaacat

SEQ ID NO: 1245311 - DNA, 15 bp, Homo sapiens
accagcttgggcaac

SEQ ID NO: 1245312 - DNA, 15 bp, Homo sapiens
gaccagcttgggcaa

SEQ ID NO: 1245313 - DNA, 15 bp, Homo sapiens
agaccagcttgggca

SEQ ID NO: 1245314 - DNA, 15 bp, Homo sapiens
gagaccagcttgggc

SEQ ID NO: 1245315 - DNA, 15 bp, Homo sapiens
cgagaccagcttggg

SEQ ID NO: 1245316 - DNA, 15 bp, Homo sapiens
tcgagaccagcttgg

SEQ ID NO: 1245317 - DNA, 15 bp, Homo sapiens
ttcgagaccagcttg

SEQ ID NO: 1245318 - DNA, 15 bp, Homo sapiens
gttcgagaccagctt

SEQ ID NO: 1245319 - DNA, 15 bp, Homo sapiens
agttcgagaccagct

SEQ ID NO: 1245320 - DNA, 15 bp, Homo sapiens
taggaggattgcttg

SEQ ID NO: 1245321 - DNA, 15 bp, Homo sapiens
gtaggaggattgctt

SEQ ID NO: 1245322 - DNA, 15 bp, Homo sapiens
ggtaggaggattgct

SEQ ID NO: 1245323 - DNA, 15 bp, Homo sapiens
aggtaggaggattgc

SEQ ID NO: 1245324 - DNA, 15 bp, Homo sapiens
aaggtaggaggattg

SEQ ID NO: 1245325 - DNA, 15 bp, Homo sapiens
caaggtaggaggatt

SEQ ID NO: 1245326 - DNA, 15 bp, Homo sapiens
ccaaggtaggaggat

SEQ ID NO: 1245327 - DNA, 15 bp, Homo sapiens
gccaaggtaggagga

SEQ ID NO: 1245328 - DNA, 15 bp, Homo sapiens
ggccaaggtaggagg

SEQ ID NO: 1245329 - DNA, 15 bp, Homo sapiens
aggccaaggtaggag

SEQ ID NO: 1245330 - DNA, 15 bp, Homo sapiens
gaggccaaggtagga

SEQ ID NO: 1245331 - DNA, 15 bp, Homo sapiens
ggaggccaaggtagg

SEQ ID NO: 1245332 - DNA, 15 bp, Homo sapiens
gggaggccaaggtag

SEQ ID NO: 1245333 - DNA, 15 bp, Homo sapiens
ttgtgcctgtaatcc

SEQ ID NO: 1245334 - DNA, 15 bp, Homo sapiens
cttgtgcctgtaatc

SEQ ID NO: 1245335 - DNA, 15 bp, Homo sapiens
gcttgtgcctgtaat

SEQ ID NO: 1245336 - DNA, 15 bp, Homo sapiens
ggcttgtgcctgtaa

SEQ ID NO: 1245337 - DNA, 15 bp, Homo sapiens
tggcttgtgcctgta

SEQ ID NO: 1245338 - DNA, 15 bp, Homo sapiens
gtggcttgtgcctgt

SEQ ID NO: 1245339 - DNA, 15 bp, Homo sapiens
ggtggcttgtgcctg

SEQ ID NO: 1245340 - DNA, 15 bp, Homo sapiens
cggtggcttgtgcct

SEQ ID NO: 1245341 - DNA, 15 bp, Homo sapiens
gcggtggcttgtgcc

SEQ ID NO: 1245342 - DNA, 15 bp, Homo sapiens
cgcggtggcttgtgc

SEQ ID NO: 1245343 - DNA, 15 bp, Homo sapiens
gcgcggtggcttgtg

SEQ ID NO: 1245344 - DNA, 15 bp, Homo sapiens
ggcgcggtggcttgt

SEQ ID NO: 1245345 - DNA, 15 bp, Homo sapiens
gggcgcggtggcttg

SEQ ID NO: 1245346 - DNA, 15 bp, Homo sapiens
cgggcgcggtggctt

SEQ ID NO: 1245347 - DNA, 15 bp, Homo sapiens
aatggccgggcgcgg

SEQ ID NO: 1245348 - DNA, 15 bp, Homo sapiens
aaatggccgggcgcg

SEQ ID NO: 1245349 - DNA, 15 bp, Homo sapiens
gaaatggccgggcgc

SEQ ID NO: 1245350 - DNA, 15 bp, Homo sapiens
agaaatggccgggcg

SEQ ID NO: 1245351 - DNA, 15 bp, Homo sapiens
aagaaatggccgggc

SEQ ID NO: 1245352 - DNA, 15 bp, Homo sapiens
aaagaaatggccggg

SEQ ID NO: 1245353 - DNA, 15 bp, Homo sapiens
aaaagaaatggccgg

SEQ ID NO: 1245354 - DNA, 15 bp, Homo sapiens
gaaaagaaatggccg

SEQ ID NO: 1245355 - DNA, 15 bp, Homo sapiens
agaaaagaaatggcc

SEQ ID NO: 1245356 - DNA, 15 bp, Homo sapiens
aagaaaagaaatggc

SEQ ID NO: 1245357 - DNA, 15 bp, Homo sapiens
aaagaaaagaaatgg

SEQ ID NO: 1245358 - DNA, 15 bp, Homo sapiens
caaaaagaaaagaaa

SEQ ID NO: 1245359 - DNA, 15 bp, Homo sapiens
tcaaaaagaaaagaa

SEQ ID NO: 1245360 - DNA, 15 bp, Homo sapiens
tctcaaaaagaaaag

SEQ ID NO: 1245361 - DNA, 15 bp, Homo sapiens
tgtctcaaaaagaaa

SEQ ID NO: 1245362 - DNA, 15 bp, Homo sapiens
ctgtctcaaaaagaa

SEQ ID NO: 1245363 - DNA, 15 bp, Homo sapiens
tctgtctcaaaaaga

SEQ ID NO: 1245364 - DNA, 15 bp, Homo sapiens
atctgtctcaaaaag

SEQ ID NO: 1245365 - DNA, 15 bp, Homo sapiens
aatctgtctcaaaaa

SEQ ID NO: 1245366 - DNA, 15 bp, Homo sapiens
aaatctgtctcaaaa

SEQ ID NO: 1245367 - DNA, 15 bp, Homo sapiens
aaaatctgtctcaaa

SEQ ID NO: 1245368 - DNA, 15 bp, Homo sapiens
aaaaatctgtctcaa

SEQ ID NO: 1245369 - DNA, 15 bp, Homo sapiens
caaaaatctgtctca

SEQ ID NO: 1245370 - DNA, 15 bp, Homo sapiens
gcaaaaatctgtctc

SEQ ID NO: 1245371 - DNA, 15 bp, Homo sapiens
agcaaaaatctgtct

SEQ ID NO: 1245372 - DNA, 15 bp, Homo sapiens
gagcaaaaatctgtc

SEQ ID NO: 1245373 - DNA, 15 bp, Homo sapiens
agagcaaaaatctgt

SEQ ID NO: 1245374 - DNA, 15 bp, Homo sapiens
aagagcaaaaatctg

SEQ ID NO: 1245375 - DNA, 15 bp, Homo sapiens
caagagcaaaaatct

SEQ ID NO: 1245376 - DNA, 15 bp, Homo sapiens
acaagagcaaaaatc

SEQ ID NO: 1245377 - DNA, 15 bp, Homo sapiens
aacaagagcaaaaat

SEQ ID NO: 1245378 - DNA, 15 bp, Homo sapiens
caacaagagcaaaaa

SEQ ID NO: 1245379 - DNA, 15 bp, Homo sapiens
gcaacaagagcaaaa

SEQ ID NO: 1245380 - DNA, 15 bp, Homo sapiens
ggcaacaagagcaaa

SEQ ID NO: 1245381 - DNA, 15 bp, Homo sapiens
gggcaacaagagcaa

SEQ ID NO: 1245382 - DNA, 15 bp, Homo sapiens
aagatcgcgccattg

SEQ ID NO: 1245383 - DNA, 15 bp, Homo sapiens
caagatcgcgccatt

SEQ ID NO: 1245384 - DNA, 15 bp, Homo sapiens
ccaagatcgcgccat

SEQ ID NO: 1245385 - DNA, 15 bp, Homo sapiens
gccaagatcgcgcca

SEQ ID NO: 1245386 - DNA, 15 bp, Homo sapiens
agccaagatcgcgcc

SEQ ID NO: 1245387 - DNA, 15 bp, Homo sapiens
gagccaagatcgcgc

SEQ ID NO: 1245388 - DNA, 15 bp, Homo sapiens
tgagccaagatcgcg

SEQ ID NO: 1245389 - DNA, 15 bp, Homo sapiens
tgcttgaacctggga

SEQ ID NO: 1245390 - DNA, 15 bp, Homo sapiens
ttgcttgaacctggg

SEQ ID NO: 1245391 - DNA, 15 bp, Homo sapiens
attgcttgaacctgg

SEQ ID NO: 1245392 - DNA, 15 bp, Homo sapiens
aattgcttgaacctg

SEQ ID NO: 1245393 - DNA, 15 bp, Homo sapiens
ctcccagctactcgg

SEQ ID NO: 1245394 - DNA, 15 bp, Homo sapiens
actcccagctactcg

SEQ ID NO: 1245395 - DNA, 15 bp, Homo sapiens
tactcccagctactc

SEQ ID NO: 1245396 - DNA, 15 bp, Homo sapiens
gtactcccagctact

SEQ ID NO: 1245397 - DNA, 15 bp, Homo sapiens
tgtactcccagctac

SEQ ID NO: 1245398 - DNA, 15 bp, Homo sapiens
ctgtactcccagcta

SEQ ID NO: 1245399 - DNA, 15 bp, Homo sapiens
cctgtactcccagct

SEQ ID NO: 1245400 - DNA, 15 bp, Homo sapiens
gcctgtactcccagc

SEQ ID NO: 1245401 - DNA, 15 bp, Homo sapiens
tgcctgtactcccag

SEQ ID NO: 1245402 - DNA, 15 bp, Homo sapiens
atgcctgtactccca

SEQ ID NO: 1245403 - DNA, 15 bp, Homo sapiens
catgcctgtactccc

SEQ ID NO: 1245404 - DNA, 15 bp, Homo sapiens
gcatgcctgtactcc

SEQ ID NO: 1245405 - DNA, 15 bp, Homo sapiens
tgcatgcctgtactc

SEQ ID NO: 1245406 - DNA, 15 bp, Homo sapiens
ttgggcatggtggtg

SEQ ID NO: 1245407 - DNA, 15 bp, Homo sapiens
aaaaattagttgggc

SEQ ID NO: 1245408 - DNA, 15 bp, Homo sapiens
aaaaaattagttggg

SEQ ID NO: 1245409 - DNA, 15 bp, Homo sapiens
caaaaaattagttgg

SEQ ID NO: 1245410 - DNA, 15 bp, Homo sapiens
acaaaaaattagttg

SEQ ID NO: 1245411 - DNA, 15 bp, Homo sapiens
tacaaaaaattagtt

SEQ ID NO: 1245412 - DNA, 15 bp, Homo sapiens
atacaaaaaattagt

SEQ ID NO: 1245413 - DNA, 15 bp, Homo sapiens
taaatacaaaaaatt

SEQ ID NO: 1245414 - DNA, 15 bp, Homo sapiens
ctaaatacaaaaaat

SEQ ID NO: 1245415 - DNA, 15 bp, Homo sapiens
actaaatacaaaaaa

SEQ ID NO: 1245416 - DNA, 15 bp, Homo sapiens
tactaaatacaaaaa

SEQ ID NO: 1245417 - DNA, 15 bp, Homo sapiens
ctactaaatacaaaa

SEQ ID NO: 1245418 - DNA, 15 bp, Homo sapiens
tctactaaatacaaa

SEQ ID NO: 1245419 - DNA, 15 bp, Homo sapiens
ctctactaaatacaa

SEQ ID NO: 1245420 - DNA, 15 bp, Homo sapiens
tctctactaaataca

SEQ ID NO: 1245421 - DNA, 15 bp, Homo sapiens
atctctactaaatac

SEQ ID NO: 1245422 - DNA, 15 bp, Homo sapiens
catctctactaaata

SEQ ID NO: 1245423 - DNA, 15 bp, Homo sapiens
ccatctctactaaat

SEQ ID NO: 1245424 - DNA, 15 bp, Homo sapiens
catggtgaaactcca

SEQ ID NO: 1245425 - DNA, 15 bp, Homo sapiens
taacatggtgaaact

SEQ ID NO: 1245426 - DNA, 15 bp, Homo sapiens
aactaacatggtgaa

SEQ ID NO: 1245427 - DNA, 15 bp, Homo sapiens
taactaacatggtga

SEQ ID NO: 1245428 - DNA, 15 bp, Homo sapiens
ctaactaacatggtg

SEQ ID NO: 1245429 - DNA, 15 bp, Homo sapiens
cctaactaacatggt

SEQ ID NO: 1245430 - DNA, 15 bp, Homo sapiens
gcctaactaacatgg

SEQ ID NO: 1245431 - DNA, 15 bp, Homo sapiens
agcctaactaacatg

SEQ ID NO: 1245432 - DNA, 15 bp, Homo sapiens
tagcctaactaacat

SEQ ID NO: 1245433 - DNA, 15 bp, Homo sapiens
ctagcctaactaaca

SEQ ID NO: 1245434 - DNA, 15 bp, Homo sapiens
actagcctaactaac

SEQ ID NO: 1245435 - DNA, 15 bp, Homo sapiens
gactagcctaactaa

SEQ ID NO: 1245436 - DNA, 15 bp, Homo sapiens
agactagcctaacta

SEQ ID NO: 1245437 - DNA, 15 bp, Homo sapiens
aagactagcctaact

SEQ ID NO: 1245438 - DNA, 15 bp, Homo sapiens
caagactagcctaac

SEQ ID NO: 1245439 - DNA, 15 bp, Homo sapiens
tcaagactagcctaa

SEQ ID NO: 1245440 - DNA, 15 bp, Homo sapiens
ttcaagactagccta

SEQ ID NO: 1245441 - DNA, 15 bp, Homo sapiens
tgacagatcacttga

SEQ ID NO: 1245442 - DNA, 15 bp, Homo sapiens
ttgacagatcacttg

SEQ ID NO: 1245443 - DNA, 15 bp, Homo sapiens
gttgacagatcactt

SEQ ID NO: 1245444 - DNA, 15 bp, Homo sapiens
ggttgacagatcact

SEQ ID NO: 1245445 - DNA, 15 bp, Homo sapiens
aggttgacagatcac

SEQ ID NO: 1245446 - DNA, 15 bp, Homo sapiens
gaggttgacagatca

SEQ ID NO: 1245447 - DNA, 15 bp, Homo sapiens
cgaggttgacagatc

SEQ ID NO: 1245448 - DNA, 15 bp, Homo sapiens
ccgaggttgacagat

SEQ ID NO: 1245449 - DNA, 15 bp, Homo sapiens
gccgaggttgacaga

SEQ ID NO: 1245450 - DNA, 15 bp, Homo sapiens
agccgaggttgacag

SEQ ID NO: 1245451 - DNA, 15 bp, Homo sapiens
aagccgaggttgaca

SEQ ID NO: 1245452 - DNA, 15 bp, Homo sapiens
gaagccgaggttgac

SEQ ID NO: 1245453 - DNA, 15 bp, Homo sapiens
ggaagccgaggttga

SEQ ID NO: 1245454 - DNA, 15 bp, Homo sapiens
gggaagccgaggttg

SEQ ID NO: 1245455 - DNA, 15 bp, Homo sapiens
tgggaagccgaggtt

SEQ ID NO: 1245456 - DNA, 15 bp, Homo sapiens
ttgggaagccgaggt

SEQ ID NO: 1245457 - DNA, 15 bp, Homo sapiens
gaggccgggcacggt

SEQ ID NO: 1245458 - DNA, 15 bp, Homo sapiens
ggaggccgggcacgg

SEQ ID NO: 1245459 - DNA, 15 bp, Homo sapiens
cggaggccgggcacg

SEQ ID NO: 1245460 - DNA, 15 bp, Homo sapiens
ccggaggccgggcac

SEQ ID NO: 1245461 - DNA, 15 bp, Homo sapiens
gccggaggccgggca

SEQ ID NO: 1245462 - DNA, 15 bp, Homo sapiens
ggccggaggccgggc

SEQ ID NO: 1245463 - DNA, 15 bp, Homo sapiens
tggccggaggccggg

SEQ ID NO: 1245464 - DNA, 15 bp, Homo sapiens
atggccggaggccgg

SEQ ID NO: 1245465 - DNA, 15 bp, Homo sapiens
aatggccggaggccg

SEQ ID NO: 1245466 - DNA, 15 bp, Homo sapiens
aaatggccggaggcc

SEQ ID NO: 1245467 - DNA, 15 bp, Homo sapiens
gaaatggccggaggc

SEQ ID NO: 1245468 - DNA, 15 bp, Homo sapiens
agaaatggccggagg

SEQ ID NO: 1245469 - DNA, 15 bp, Homo sapiens
aagaaatggccggag

SEQ ID NO: 1245470 - DNA, 15 bp, Homo sapiens
taagaaatggccgga

SEQ ID NO: 1245471 - DNA, 15 bp, Homo sapiens
ttaagaaatggccgg

SEQ ID NO: 1245472 - DNA, 15 bp, Homo sapiens
attaagaaatggccg

SEQ ID NO: 1245473 - DNA, 15 bp, Homo sapiens
tattaagaaatggcc

SEQ ID NO: 1245474 - DNA, 15 bp, Homo sapiens
atattaagaaatggc

SEQ ID NO: 1245475 - DNA, 15 bp, Homo sapiens
catattaagaaatgg

SEQ ID NO: 1245476 - DNA, 15 bp, Homo sapiens
tcatattaagaaatg

SEQ ID NO: 1245477 - DNA, 15 bp, Homo sapiens
atcatattaagaaat

SEQ ID NO: 1245478 - DNA, 15 bp, Homo sapiens
gatcatattaagaaa

SEQ ID NO: 1245479 - DNA, 15 bp, Homo sapiens
ggatcatattaagaa

SEQ ID NO: 1245480 - DNA, 15 bp, Homo sapiens
tggatcatattaaga

SEQ ID NO: 1245481 - DNA, 15 bp, Homo sapiens
ttggatcatattaag

SEQ ID NO: 1245482 - DNA, 15 bp, Homo sapiens
attggatcatattaa

SEQ ID NO: 1245483 - DNA, 15 bp, Homo sapiens
aattggatcatatta

SEQ ID NO: 1245484 - DNA, 15 bp, Homo sapiens
taattggatcatatt

SEQ ID NO: 1245485 - DNA, 15 bp, Homo sapiens
gtaattggatcatat

SEQ ID NO: 1245486 - DNA, 15 bp, Homo sapiens
tgtaattggatcata

SEQ ID NO: 1245487 - DNA, 15 bp, Homo sapiens
atgtaattggatcat

SEQ ID NO: 1245488 - DNA, 15 bp, Homo sapiens
tatgtaattggatca

SEQ ID NO: 1245489 - DNA, 15 bp, Homo sapiens
gtatgtaattggatc

SEQ ID NO: 1245490 - DNA, 15 bp, Homo sapiens
ggtatgtaattggat

SEQ ID NO: 1245491 - DNA, 15 bp, Homo sapiens
aggtatgtaattgga

SEQ ID NO: 1245492 - DNA, 15 bp, Homo sapiens
taggtatgtaattgg

SEQ ID NO: 1245493 - DNA, 15 bp, Homo sapiens
gtaggtatgtaattg

SEQ ID NO: 1245494 - DNA, 15 bp, Homo sapiens
agtaggtatgtaatt

SEQ ID NO: 1245495 - DNA, 15 bp, Homo sapiens
cagtaggtatgtaat

SEQ ID NO: 1245496 - DNA, 15 bp, Homo sapiens
tcagtaggtatgtaa

SEQ ID NO: 1245497 - DNA, 15 bp, Homo sapiens
atcagtaggtatgta

SEQ ID NO: 1245498 - DNA, 15 bp, Homo sapiens
tatcagtaggtatgt

SEQ ID NO: 1245499 - DNA, 15 bp, Homo sapiens
ttatcagtaggtatg

SEQ ID NO: 1245500 - DNA, 15 bp, Homo sapiens
tttatcagtaggtat

SEQ ID NO: 1245501 - DNA, 15 bp, Homo sapiens
atttatcagtaggta

SEQ ID NO: 1245502 - DNA, 15 bp, Homo sapiens
tatttatcagtaggt

SEQ ID NO: 1245503 - DNA, 15 bp, Homo sapiens
atatttatcagtagg

SEQ ID NO: 1245504 - DNA, 15 bp, Homo sapiens
aatatttatcagtag

SEQ ID NO: 1245505 - DNA, 15 bp, Homo sapiens
aaatatttatcagta

SEQ ID NO: 1245506 - DNA, 15 bp, Homo sapiens
taaatatttatcagt

SEQ ID NO: 1245507 - DNA, 15 bp, Homo sapiens
ataaatatttatcag

SEQ ID NO: 1245508 - DNA, 15 bp, Homo sapiens
gataaatatttatca

SEQ ID NO: 1245509 - DNA, 15 bp, Homo sapiens
tgataaatatttatc

SEQ ID NO: 1245510 - DNA, 15 bp, Homo sapiens
atgataaatatttat

SEQ ID NO: 1245511 - DNA, 15 bp, Homo sapiens
tatgataaatattta

SEQ ID NO: 1245512 - DNA, 15 bp, Homo sapiens
ttatgataaatattt

SEQ ID NO: 1245513 - DNA, 15 bp, Homo sapiens
gttatgataaatatt

SEQ ID NO: 1245514 - DNA, 15 bp, Homo sapiens
agttatgataaatat

SEQ ID NO: 1245515 - DNA, 15 bp, Homo sapiens
aagttatgataaata

SEQ ID NO: 1245516 - DNA, 15 bp, Homo sapiens
aaagttatgataaat

SEQ ID NO: 1245517 - DNA, 15 bp, Homo sapiens
aaaagttatgataaa

SEQ ID NO: 1245518 - DNA, 15 bp, Homo sapiens
gaaaagttatgataa

SEQ ID NO: 1245519 - DNA, 15 bp, Homo sapiens
ggaaaagttatgata

SEQ ID NO: 1245520 - DNA, 15 bp, Homo sapiens
aggaaaagttatgat

SEQ ID NO: 1245521 - DNA, 15 bp, Homo sapiens
taggaaaagttatga

SEQ ID NO: 1245522 - DNA, 15 bp, Homo sapiens
ataggaaaagttatg

SEQ ID NO: 1245523 - DNA, 15 bp, Homo sapiens
aataggaaaagttat

SEQ ID NO: 1245524 - DNA, 15 bp, Homo sapiens
caataggaaaagtta

SEQ ID NO: 1245525 - DNA, 15 bp, Homo sapiens
acaataggaaaagtt

SEQ ID NO: 1245526 - DNA, 15 bp, Homo sapiens
tacaataggaaaagt

SEQ ID NO: 1245527 - DNA, 15 bp, Homo sapiens
ttacaataggaaaag

SEQ ID NO: 1245528 - DNA, 15 bp, Homo sapiens
tttacaataggaaaa

SEQ ID NO: 1245529 - DNA, 15 bp, Homo sapiens
gtttacaataggaaa

SEQ ID NO: 1245530 - DNA, 15 bp, Homo sapiens
tgtttacaataggaa

SEQ ID NO: 1245531 - DNA, 15 bp, Homo sapiens
ttgtttacaatagga

SEQ ID NO: 1245532 - DNA, 15 bp, Homo sapiens
attgtttacaatagg

SEQ ID NO: 1245533 - DNA, 15 bp, Homo sapiens
cattgtttacaatag

SEQ ID NO: 1245534 - DNA, 15 bp, Homo sapiens
acattgtttacaata

SEQ ID NO: 1245535 - DNA, 15 bp, Homo sapiens
aacattgtttacaat

SEQ ID NO: 1245536 - DNA, 15 bp, Homo sapiens
caacattgtttacaa

SEQ ID NO: 1245537 - DNA, 15 bp, Homo sapiens
gcaacattgtttaca

SEQ ID NO: 1245538 - DNA, 15 bp, Homo sapiens
tgcaacattgtttac

SEQ ID NO: 1245539 - DNA, 15 bp, Homo sapiens
ttgcaacattgttta

SEQ ID NO: 1245540 - DNA, 15 bp, Homo sapiens
attgcaacattgttt

SEQ ID NO: 1245541 - DNA, 15 bp, Homo sapiens
aattgcaacattgtt

SEQ ID NO: 1245542 - DNA, 15 bp, Homo sapiens
taattgcaacattgt

SEQ ID NO: 1245543 - DNA, 15 bp, Homo sapiens
ttaattgcaacattg

SEQ ID NO: 1245544 - DNA, 15 bp, Homo sapiens
attaattgcaacatt

SEQ ID NO: 1245545 - DNA, 15 bp, Homo sapiens
tattaattgcaacat

SEQ ID NO: 1245546 - DNA, 15 bp, Homo sapiens
atattaattgcaaca

SEQ ID NO: 1245547 - DNA, 15 bp, Homo sapiens
gatattaattgcaac

SEQ ID NO: 1245548 - DNA, 15 bp, Homo sapiens
agatattaattgcaa

SEQ ID NO: 1245549 - DNA, 15 bp, Homo sapiens
aagatattaattgca

SEQ ID NO: 1245550 - DNA, 15 bp, Homo sapiens
aaagatattaattgc

SEQ ID NO: 1245551 - DNA, 15 bp, Homo sapiens
caaagatattaattg

SEQ ID NO: 1245552 - DNA, 15 bp, Homo sapiens
ccaaagatattaatt

SEQ ID NO: 1245553 - DNA, 15 bp, Homo sapiens
cccaaagatattaat

SEQ ID NO: 1245554 - DNA, 15 bp, Homo sapiens
acccaaagatattaa

SEQ ID NO: 1245555 - DNA, 15 bp, Homo sapiens
tacccaaagatatta

SEQ ID NO: 1245556 - DNA, 15 bp, Homo sapiens
atacccaaagatatt

SEQ ID NO: 1245557 - DNA, 15 bp, Homo sapiens
gatacccaaagatat

SEQ ID NO: 1245558 - DNA, 15 bp, Homo sapiens
ggatacccaaagata

SEQ ID NO: 1245559 - DNA, 15 bp, Homo sapiens
cggatacccaaagat

SEQ ID NO: 1245560 - DNA, 15 bp, Homo sapiens
gcggatacccaaaga

SEQ ID NO: 1245561 - DNA, 15 bp, Homo sapiens
tgcggatacccaaag

SEQ ID NO: 1245562 - DNA, 15 bp, Homo sapiens
ttgcggatacccaaa

SEQ ID NO: 1245563 - DNA, 15 bp, Homo sapiens
tttgcggatacccaa

SEQ ID NO: 1245564 - DNA, 15 bp, Homo sapiens
atttgcggataccca

SEQ ID NO: 1245565 - DNA, 15 bp, Homo sapiens
aatttgcggataccc

SEQ ID NO: 1245566 - DNA, 15 bp, Homo sapiens
aaatttgcggatacc

SEQ ID NO: 1245567 - DNA, 15 bp, Homo sapiens
caaatttgcggatac

SEQ ID NO: 1245568 - DNA, 15 bp, Homo sapiens
acaaatttgcggata

SEQ ID NO: 1245569 - DNA, 15 bp, Homo sapiens
cacaaatttgcggat

SEQ ID NO: 1245570 - DNA, 15 bp, Homo sapiens
gcacaaatttgcgga

SEQ ID NO: 1245571 - DNA, 15 bp, Homo sapiens
tgcacaaatttgcgg

SEQ ID NO: 1245572 - DNA, 15 bp, Homo sapiens
ttgcacaaatttgcg

SEQ ID NO: 1245573 - DNA, 15 bp, Homo sapiens
tttgcacaaatttgc

SEQ ID NO: 1245574 - DNA, 15 bp, Homo sapiens
ctttgcacaaatttg

SEQ ID NO: 1245575 - DNA, 15 bp, Homo sapiens
actttgcacaaattt

SEQ ID NO: 1245576 - DNA, 15 bp, Homo sapiens
cactttgcacaaatt

SEQ ID NO: 1245577 - DNA, 15 bp, Homo sapiens
gcactttgcacaaat

SEQ ID NO: 1245578 - DNA, 15 bp, Homo sapiens
tgcactttgcacaaa

SEQ ID NO: 1245579 - DNA, 15 bp, Homo sapiens
atgcactttgcacaa

SEQ ID NO: 1245580 - DNA, 15 bp, Homo sapiens
catgcactttgcaca

SEQ ID NO: 1245581 - DNA, 15 bp, Homo sapiens
acatgcactttgcac

SEQ ID NO: 1245582 - DNA, 15 bp, Homo sapiens
tacatgcactttgca

SEQ ID NO: 1245583 - DNA, 15 bp, Homo sapiens
atacatgcactttgc

SEQ ID NO: 1245584 - DNA, 15 bp, Homo sapiens
aatacatgcactttg

SEQ ID NO: 1245585 - DNA, 15 bp, Homo sapiens
aaatacatgcacttt

SEQ ID NO: 1245586 - DNA, 15 bp, Homo sapiens
gaaatacatgcactt

SEQ ID NO: 1245587 - DNA, 15 bp, Homo sapiens
agaaatacatgcact

SEQ ID NO: 1245588 - DNA, 15 bp, Homo sapiens
cagaaatacatgcac

SEQ ID NO: 1245589 - DNA, 15 bp, Homo sapiens
acagaaatacatgca

SEQ ID NO: 1245590 - DNA, 15 bp, Homo sapiens
tacagaaatacatgc

SEQ ID NO: 1245591 - DNA, 15 bp, Homo sapiens
ctacagaaatacatg

SEQ ID NO: 1245592 - DNA, 15 bp, Homo sapiens
gctacagaaatacat

SEQ ID NO: 1245593 - DNA, 15 bp, Homo sapiens
tgctacagaaataca

SEQ ID NO: 1245594 - DNA, 15 bp, Homo sapiens
ttgctacagaaatac

SEQ ID NO: 1245595 - DNA, 15 bp, Homo sapiens
cttgctacagaaata

SEQ ID NO: 1245596 - DNA, 15 bp, Homo sapiens
acttgctacagaaat

SEQ ID NO: 1245597 - DNA, 15 bp, Homo sapiens
aacttgctacagaaa

SEQ ID NO: 1245598 - DNA, 15 bp, Homo sapiens
aaacttgctacagaa

SEQ ID NO: 1245599 - DNA, 15 bp, Homo sapiens
gaaacttgctacaga

SEQ ID NO: 1245600 - DNA, 15 bp, Homo sapiens
ggaaacttgctacag

SEQ ID NO: 1245601 - DNA, 15 bp, Homo sapiens
aggaaacttgctaca

SEQ ID NO: 1245602 - DNA, 15 bp, Homo sapiens
taggaaacttgctac

SEQ ID NO: 1245603 - DNA, 15 bp, Homo sapiens
ctaggaaacttgcta

SEQ ID NO: 1245604 - DNA, 15 bp, Homo sapiens
tctaggaaacttgct

SEQ ID NO: 1245605 - DNA, 15 bp, Homo sapiens
ttctaggaaacttgc

SEQ ID NO: 1245606 - DNA, 15 bp, Homo sapiens
tttctaggaaacttg

SEQ ID NO: 1245607 - DNA, 15 bp, Homo sapiens
atttctaggaaactt

SEQ ID NO: 1245608 - DNA, 15 bp, Homo sapiens
catttctaggaaact

SEQ ID NO: 1245609 - DNA, 15 bp, Homo sapiens
acatttctaggaaac

SEQ ID NO: 1245610 - DNA, 15 bp, Homo sapiens
aacatttctaggaaa

SEQ ID NO: 1245611 - DNA, 15 bp, Homo sapiens
taacatttctaggaa

SEQ ID NO: 1245612 - DNA, 15 bp, Homo sapiens
ctaacatttctagga

SEQ ID NO: 1245613 - DNA, 15 bp, Homo sapiens
cctaacatttctagg

SEQ ID NO: 1245614 - DNA, 15 bp, Homo sapiens
acctaacatttctag

SEQ ID NO: 1245615 - DNA, 15 bp, Homo sapiens
gacctaacatttcta

SEQ ID NO: 1245616 - DNA, 15 bp, Homo sapiens
tgacctaacatttct

SEQ ID NO: 1245617 - DNA, 15 bp, Homo sapiens
ttgacctaacatttc

SEQ ID NO: 1245618 - DNA, 15 bp, Homo sapiens
tttgacctaacattt

SEQ ID NO: 1245619 - DNA, 15 bp, Homo sapiens
ctttgacctaacatt

SEQ ID NO: 1245620 - DNA, 15 bp, Homo sapiens
tctttgacctaacat

SEQ ID NO: 1245621 - DNA, 15 bp, Homo sapiens
atctttgacctaaca

SEQ ID NO: 1245622 - DNA, 15 bp, Homo sapiens
tatctttgacctaac

SEQ ID NO: 1245623 - DNA, 15 bp, Homo sapiens
atatctttgacctaa

SEQ ID NO: 1245624 - DNA, 15 bp, Homo sapiens
catatctttgaccta

SEQ ID NO: 1245625 - DNA, 15 bp, Homo sapiens
gcatatctttgacct

SEQ ID NO: 1245626 - DNA, 15 bp, Homo sapiens
tgcatatctttgacc

SEQ ID NO: 1245627 - DNA, 15 bp, Homo sapiens
gtgcatatctttgac

SEQ ID NO: 1245628 - DNA, 15 bp, Homo sapiens
tgtgcatatctttga

SEQ ID NO: 1245629 - DNA, 15 bp, Homo sapiens
atgtgcatatctttg

SEQ ID NO: 1245630 - DNA, 15 bp, Homo sapiens
aatgtgcatatcttt

SEQ ID NO: 1245631 - DNA, 15 bp, Homo sapiens
aaatgtgcatatctt

SEQ ID NO: 1245632 - DNA, 15 bp, Homo sapiens
caaatgtgcatatct

SEQ ID NO: 1245633 - DNA, 15 bp, Homo sapiens
tcaaatgtgcatatc

SEQ ID NO: 1245634 - DNA, 15 bp, Homo sapiens
actttcaaatgtgca

SEQ ID NO: 1245635 - DNA, 15 bp, Homo sapiens
aactttcaaatgtgc

SEQ ID NO: 1245636 - DNA, 15 bp, Homo sapiens
gaactttcaaatgtg

SEQ ID NO: 1245637 - DNA, 15 bp, Homo sapiens
tgaactttcaaatgt

SEQ ID NO: 1245638 - DNA, 15 bp, Homo sapiens
ttgaactttcaaatg

SEQ ID NO: 1245639 - DNA, 15 bp, Homo sapiens
gttgaactttcaaat

SEQ ID NO: 1245640 - DNA, 15 bp, Homo sapiens
tgttgaactttcaaa

SEQ ID NO: 1245641 - DNA, 15 bp, Homo sapiens
ctgttgaactttcaa

SEQ ID NO: 1245642 - DNA, 15 bp, Homo sapiens
actgttgaactttca

SEQ ID NO: 1245643 - DNA, 15 bp, Homo sapiens
gactgttgaactttc

SEQ ID NO: 1245644 - DNA, 15 bp, Homo sapiens
tgactgttgaacttt

SEQ ID NO: 1245645 - DNA, 15 bp, Homo sapiens
atgactgttgaactt

SEQ ID NO: 1245646 - DNA, 15 bp, Homo sapiens
aatgactgttgaact

SEQ ID NO: 1245647 - DNA, 15 bp, Homo sapiens
caatgactgttgaac

SEQ ID NO: 1245648 - DNA, 15 bp, Homo sapiens
acaatgactgttgaa

SEQ ID NO: 1245649 - DNA, 15 bp, Homo sapiens
gacaatgactgttga

SEQ ID NO: 1245650 - DNA, 15 bp, Homo sapiens
tgacaatgactgttg

SEQ ID NO: 1245651 - DNA, 15 bp, Homo sapiens
ttgacaatgactgtt

SEQ ID NO: 1245652 - DNA, 15 bp, Homo sapiens
tttgacaatgactgt

SEQ ID NO: 1245653 - DNA, 15 bp, Homo sapiens
atttgacaatgactg

SEQ ID NO: 1245654 - DNA, 15 bp, Homo sapiens
catttgacaatgact

SEQ ID NO: 1245655 - DNA, 15 bp, Homo sapiens
gcatttgacaatgac

SEQ ID NO: 1245656 - DNA, 15 bp, Homo sapiens
ggcatttgacaatga

SEQ ID NO: 1245657 - DNA, 15 bp, Homo sapiens
aggcatttgacaatg

SEQ ID NO: 1245658 - DNA, 15 bp, Homo sapiens
aaggcatttgacaat

SEQ ID NO: 1245659 - DNA, 15 bp, Homo sapiens
gaaggcatttgacaa

SEQ ID NO: 1245660 - DNA, 15 bp, Homo sapiens
agaaggcatttgaca

SEQ ID NO: 1245661 - DNA, 15 bp, Homo sapiens
tagaaggcatttgac

SEQ ID NO: 1245662 - DNA, 15 bp, Homo sapiens
ttagaaggcatttga

SEQ ID NO: 1245663 - DNA, 15 bp, Homo sapiens
cttagaaggcatttg

SEQ ID NO: 1245664 - DNA, 15 bp, Homo sapiens
tcttagaaggcattt

SEQ ID NO: 1245665 - DNA, 15 bp, Homo sapiens
ttcttagaaggcatt

SEQ ID NO: 1245666 - DNA, 15 bp, Homo sapiens
cttcttagaaggcat

SEQ ID NO: 1245667 - DNA, 15 bp, Homo sapiens
acttcttagaaggca

SEQ ID NO: 1245668 - DNA, 15 bp, Homo sapiens
aacttcttagaaggc

SEQ ID NO: 1245669 - DNA, 15 bp, Homo sapiens
aaacttcttagaagg

SEQ ID NO: 1245670 - DNA, 15 bp, Homo sapiens
aaaacttcttagaag

SEQ ID NO: 1245671 - DNA, 15 bp, Homo sapiens
gaaaacttcttagaa

SEQ ID NO: 1245672 - DNA, 15 bp, Homo sapiens
agaaaacttcttaga

SEQ ID NO: 1245673 - DNA, 15 bp, Homo sapiens
cagaaaacttcttag

SEQ ID NO: 1245674 - DNA, 15 bp, Homo sapiens
ccagaaaacttctta

SEQ ID NO: 1245675 - DNA, 15 bp, Homo sapiens
gccagaaaacttctt

SEQ ID NO: 1245676 - DNA, 15 bp, Homo sapiens
ggccagaaaacttct

SEQ ID NO: 1245677 - DNA, 15 bp, Homo sapiens
tggccagaaaacttc

SEQ ID NO: 1245678 - DNA, 15 bp, Homo sapiens
ctggccagaaaactt

SEQ ID NO: 1245679 - DNA, 15 bp, Homo sapiens
cctggccagaaaact

SEQ ID NO: 1245680 - DNA, 15 bp, Homo sapiens
gcctggccagaaaac

SEQ ID NO: 1245681 - DNA, 15 bp, Homo sapiens
tgcctggccagaaaa

SEQ ID NO: 1245682 - DNA, 15 bp, Homo sapiens
gtgcctggccagaaa

SEQ ID NO: 1245683 - DNA, 15 bp, Homo sapiens
agtgcctggccagaa

SEQ ID NO: 1245684 - DNA, 15 bp, Homo sapiens
cagtgcctggccaga

SEQ ID NO: 1245685 - DNA, 15 bp, Homo sapiens
acagtgcctggccag

SEQ ID NO: 1245686 - DNA, 15 bp, Homo sapiens
cacagtgcctggcca

SEQ ID NO: 1245687 - DNA, 15 bp, Homo sapiens
ccacagtgcctggcc

SEQ ID NO: 1245688 - DNA, 15 bp, Homo sapiens
gccacagtgcctggc

SEQ ID NO: 1245689 - DNA, 15 bp, Homo sapiens
agccacagtgcctgg

SEQ ID NO: 1245690 - DNA, 15 bp, Homo sapiens
gagccacagtgcctg

SEQ ID NO: 1245691 - DNA, 15 bp, Homo sapiens
tgagccacagtgcct

SEQ ID NO: 1245692 - DNA, 15 bp, Homo sapiens
gtgagccacagtgcc

SEQ ID NO: 1245693 - DNA, 15 bp, Homo sapiens
tgtgagccacagtgc

SEQ ID NO: 1245694 - DNA, 15 bp, Homo sapiens
gtgtgagccacagtg

SEQ ID NO: 1245695 - DNA, 15 bp, Homo sapiens
ggtgtgagccacagt

SEQ ID NO: 1245696 - DNA, 15 bp, Homo sapiens
aggtgtgagccacag

SEQ ID NO: 1245697 - DNA, 15 bp, Homo sapiens
caggtgtgagccaca

SEQ ID NO: 1245698 - DNA, 15 bp, Homo sapiens
tagtgttgggattac

SEQ ID NO: 1245699 - DNA, 15 bp, Homo sapiens
atagtgttgggatta

SEQ ID NO: 1245700 - DNA, 15 bp, Homo sapiens
catagtgttgggatt

SEQ ID NO: 1245701 - DNA, 15 bp, Homo sapiens
ccatagtgttgggat

SEQ ID NO: 1245702 - DNA, 15 bp, Homo sapiens
cccatagtgttggga

SEQ ID NO: 1245703 - DNA, 15 bp, Homo sapiens
tcccatagtgttggg

SEQ ID NO: 1245704 - DNA, 15 bp, Homo sapiens
ctcccatagtgttgg

SEQ ID NO: 1245705 - DNA, 15 bp, Homo sapiens
cctcccatagtgttg

SEQ ID NO: 1245706 - DNA, 15 bp, Homo sapiens
gcctcccatagtgtt

SEQ ID NO: 1245707 - DNA, 15 bp, Homo sapiens
ggcctcccatagtgt

SEQ ID NO: 1245708 - DNA, 15 bp, Homo sapiens
tggcctcccatagtg

SEQ ID NO: 1245709 - DNA, 15 bp, Homo sapiens
ttggcctcccatagt

SEQ ID NO: 1245710 - DNA, 15 bp, Homo sapiens
cttggcctcccatag

SEQ ID NO: 1245711 - DNA, 15 bp, Homo sapiens
ccttggcctcccata

SEQ ID NO: 1245712 - DNA, 15 bp, Homo sapiens
accttggcctcccat

SEQ ID NO: 1245713 - DNA, 15 bp, Homo sapiens
ttctgacctcaggtg

SEQ ID NO: 1245714 - DNA, 15 bp, Homo sapiens
cttctgacctcaggt

SEQ ID NO: 1245715 - DNA, 15 bp, Homo sapiens
acttctgacctcagg

SEQ ID NO: 1245716 - DNA, 15 bp, Homo sapiens
aacttctgacctcag

SEQ ID NO: 1245717 - DNA, 15 bp, Homo sapiens
cgaacttctgacctc

SEQ ID NO: 1245718 - DNA, 15 bp, Homo sapiens
tcgaacttctgacct

SEQ ID NO: 1245719 - DNA, 15 bp, Homo sapiens
ctcgaacttctgacc

SEQ ID NO: 1245720 - DNA, 15 bp, Homo sapiens
tctcgaacttctgac

SEQ ID NO: 1245721 - DNA, 15 bp, Homo sapiens
gtctcgaacttctga

SEQ ID NO: 1245722 - DNA, 15 bp, Homo sapiens
ggtctcgaacttctg

SEQ ID NO: 1245723 - DNA, 15 bp, Homo sapiens
tggtctcgaacttct

SEQ ID NO: 1245724 - DNA, 15 bp, Homo sapiens
ctggtctcgaacttc

SEQ ID NO: 1245725 - DNA, 15 bp, Homo sapiens
gctggtctcgaactt

SEQ ID NO: 1245726 - DNA, 15 bp, Homo sapiens
tcatgttggtcaggc

SEQ ID NO: 1245727 - DNA, 15 bp, Homo sapiens
atcatgttggtcagg

SEQ ID NO: 1245728 - DNA, 15 bp, Homo sapiens
catcatgttggtcag

SEQ ID NO: 1245729 - DNA, 15 bp, Homo sapiens
ccatcatgttggtca

SEQ ID NO: 1245730 - DNA, 15 bp, Homo sapiens
tccatcatgttggtc

SEQ ID NO: 1245731 - DNA, 15 bp, Homo sapiens
ttccatcatgttggt

SEQ ID NO: 1245732 - DNA, 15 bp, Homo sapiens
gttccatcatgttgg

SEQ ID NO: 1245733 - DNA, 15 bp, Homo sapiens
ggttccatcatgttg

SEQ ID NO: 1245734 - DNA, 15 bp, Homo sapiens
gggttccatcatgtt

SEQ ID NO: 1245735 - DNA, 15 bp, Homo sapiens
ggggttccatcatgt

SEQ ID NO: 1245736 - DNA, 15 bp, Homo sapiens
tggggttccatcatg

SEQ ID NO: 1245737 - DNA, 15 bp, Homo sapiens
atggggttccatcat

SEQ ID NO: 1245738 - DNA, 15 bp, Homo sapiens
gatggggttccatca

SEQ ID NO: 1245739 - DNA, 15 bp, Homo sapiens
agatggggttccatc

SEQ ID NO: 1245740 - DNA, 15 bp, Homo sapiens
gagatggggttccat

SEQ ID NO: 1245741 - DNA, 15 bp, Homo sapiens
ggagatggggttcca

SEQ ID NO: 1245742 - DNA, 15 bp, Homo sapiens
tggagatggggttcc

SEQ ID NO: 1245743 - DNA, 15 bp, Homo sapiens
gtggagatggggttc

SEQ ID NO: 1245744 - DNA, 15 bp, Homo sapiens
agtggagatggggtt

SEQ ID NO: 1245745 - DNA, 15 bp, Homo sapiens
tagtggagatggggt

SEQ ID NO: 1245746 - DNA, 15 bp, Homo sapiens
ttagtggagatgggg

SEQ ID NO: 1245747 - DNA, 15 bp, Homo sapiens
tttagtggagatggg

SEQ ID NO: 1245748 - DNA, 15 bp, Homo sapiens
ttttagtggagatgg

SEQ ID NO: 1245749 - DNA, 15 bp, Homo sapiens
tttttagtggagatg

SEQ ID NO: 1245750 - DNA, 15 bp, Homo sapiens
atttttagtggagat

SEQ ID NO: 1245751 - DNA, 15 bp, Homo sapiens
tatttttagtggaga

SEQ ID NO: 1245752 - DNA, 15 bp, Homo sapiens
gtatttttagtggag

SEQ ID NO: 1245753 - DNA, 15 bp, Homo sapiens
tgtatttttagtgga

SEQ ID NO: 1245754 - DNA, 15 bp, Homo sapiens
ttgtatttttagtgg

SEQ ID NO: 1245755 - DNA, 15 bp, Homo sapiens
tttgtatttttagtg

SEQ ID NO: 1245756 - DNA, 15 bp, Homo sapiens
tcacacccggctaat

SEQ ID NO: 1245757 - DNA, 15 bp, Homo sapiens
atcacacccggctaa

SEQ ID NO: 1245758 - DNA, 15 bp, Homo sapiens
catcacacccggcta

SEQ ID NO: 1245759 - DNA, 15 bp, Homo sapiens
ccatcacacccggct

SEQ ID NO: 1245760 - DNA, 15 bp, Homo sapiens
gccatcacacccggc

SEQ ID NO: 1245761 - DNA, 15 bp, Homo sapiens
tgccatcacacccgg

SEQ ID NO: 1245762 - DNA, 15 bp, Homo sapiens
gtgccatcacacccg

SEQ ID NO: 1245763 - DNA, 15 bp, Homo sapiens
tgtgccatcacaccc

SEQ ID NO: 1245764 - DNA, 15 bp, Homo sapiens
atgtgccatcacacc

SEQ ID NO: 1245765 - DNA, 15 bp, Homo sapiens
catgtgccatcacac

SEQ ID NO: 1245766 - DNA, 15 bp, Homo sapiens
gcatgtgccatcaca

SEQ ID NO: 1245767 - DNA, 15 bp, Homo sapiens
ggcatgtgccatcac

SEQ ID NO: 1245768 - DNA, 15 bp, Homo sapiens
aggcatgtgccatca

SEQ ID NO: 1245769 - DNA, 15 bp, Homo sapiens
caggcatgtgccatc

SEQ ID NO: 1245770 - DNA, 15 bp, Homo sapiens
acaggcatgtgccat

SEQ ID NO: 1245771 - DNA, 15 bp, Homo sapiens
aacaggcatgtgcca

SEQ ID NO: 1245772 - DNA, 15 bp, Homo sapiens
taacaggcatgtgcc

SEQ ID NO: 1245773 - DNA, 15 bp, Homo sapiens
ttaacaggcatgtgc

SEQ ID NO: 1245774 - DNA, 15 bp, Homo sapiens
attaacaggcatgtg

SEQ ID NO: 1245775 - DNA, 15 bp, Homo sapiens
gattaacaggcatgt

SEQ ID NO: 1245776 - DNA, 15 bp, Homo sapiens
ggattaacaggcatg

SEQ ID NO: 1245777 - DNA, 15 bp, Homo sapiens
gggattaacaggcat

SEQ ID NO: 1245778 - DNA, 15 bp, Homo sapiens
tgggattaacaggca

SEQ ID NO: 1245779 - DNA, 15 bp, Homo sapiens
ctgggattaacaggc

SEQ ID NO: 1245780 - DNA, 15 bp, Homo sapiens
gctgggattaacagg

SEQ ID NO: 1245781 - DNA, 15 bp, Homo sapiens
agctgggattaacag

SEQ ID NO: 1245782 - DNA, 15 bp, Homo sapiens
tagctgggattaaca

SEQ ID NO: 1245783 - DNA, 15 bp, Homo sapiens
gtagctgggattaac

SEQ ID NO: 1245784 - DNA, 15 bp, Homo sapiens
agttcaagcaattct

SEQ ID NO: 1245785 - DNA, 15 bp, Homo sapiens
gagttcaagcaattc

SEQ ID NO: 1245786 - DNA, 15 bp, Homo sapiens
cgagttcaagcaatt

SEQ ID NO: 1245787 - DNA, 15 bp, Homo sapiens
ccgagttcaagcaat

SEQ ID NO: 1245788 - DNA, 15 bp, Homo sapiens
cccgagttcaagcaa

SEQ ID NO: 1245789 - DNA, 15 bp, Homo sapiens
aaacctccacctccc

SEQ ID NO: 1245790 - DNA, 15 bp, Homo sapiens
caaacctccacctcc

SEQ ID NO: 1245791 - DNA, 15 bp, Homo sapiens
gcaaacctccacctc

SEQ ID NO: 1245792 - DNA, 15 bp, Homo sapiens
tgcaaacctccacct

SEQ ID NO: 1245793 - DNA, 15 bp, Homo sapiens
ctgcaaacctccacc

SEQ ID NO: 1245794 - DNA, 15 bp, Homo sapiens
actgcaaacctccac

SEQ ID NO: 1245795 - DNA, 15 bp, Homo sapiens
cactgcaaacctcca

SEQ ID NO: 1245796 - DNA, 15 bp, Homo sapiens
tcactgcaaacctcc

SEQ ID NO: 1245797 - DNA, 15 bp, Homo sapiens
ctcactgcaaacctc

SEQ ID NO: 1245798 - DNA, 15 bp, Homo sapiens
gctcactgcaaacct

SEQ ID NO: 1245799 - DNA, 15 bp, Homo sapiens
agctcactgcaaacc

SEQ ID NO: 1245800 - DNA, 15 bp, Homo sapiens
cagctcactgcaaac

SEQ ID NO: 1245801 - DNA, 15 bp, Homo sapiens
tcagctcactgcaaa

SEQ ID NO: 1245802 - DNA, 15 bp, Homo sapiens
acaatctcagctcac

SEQ ID NO: 1245803 - DNA, 15 bp, Homo sapiens
cacaatctcagctca

SEQ ID NO: 1245804 - DNA, 15 bp, Homo sapiens
gcacaatctcagctc

SEQ ID NO: 1245805 - DNA, 15 bp, Homo sapiens
ggcacaatctcagct

SEQ ID NO: 1245806 - DNA, 15 bp, Homo sapiens
tggcacaatctcagc

SEQ ID NO: 1245807 - DNA, 15 bp, Homo sapiens
atggcacaatctcag

SEQ ID NO: 1245808 - DNA, 15 bp, Homo sapiens
aatggcacaatctca

SEQ ID NO: 1245809 - DNA, 15 bp, Homo sapiens
caatggcacaatctc

SEQ ID NO: 1245810 - DNA, 15 bp, Homo sapiens
agcaatggcacaatc

SEQ ID NO: 1245811 - DNA, 15 bp, Homo sapiens
gagcaatggcacaat

SEQ ID NO: 1245812 - DNA, 15 bp, Homo sapiens
agagcaatggcacaa

SEQ ID NO: 1245813 - DNA, 15 bp, Homo sapiens
gagagcaatggcaca

SEQ ID NO: 1245814 - DNA, 15 bp, Homo sapiens
agagagcaatggcac

SEQ ID NO: 1245815 - DNA, 15 bp, Homo sapiens
tagagagcaatggca

SEQ ID NO: 1245816 - DNA, 15 bp, Homo sapiens
ctagagagcaatggc

SEQ ID NO: 1245817 - DNA, 15 bp, Homo sapiens
cctagagagcaatgg

SEQ ID NO: 1245818 - DNA, 15 bp, Homo sapiens
gcctagagagcaatg

SEQ ID NO: 1245819 - DNA, 15 bp, Homo sapiens
agcctagagagcaat

SEQ ID NO: 1245820 - DNA, 15 bp, Homo sapiens
cagcctagagagcaa

SEQ ID NO: 1245821 - DNA, 15 bp, Homo sapiens
ccagcctagagagca

SEQ ID NO: 1245822 - DNA, 15 bp, Homo sapiens
cccagcctagagagc

SEQ ID NO: 1245823 - DNA, 15 bp, Homo sapiens
acccagcctagagag

SEQ ID NO: 1245824 - DNA, 15 bp, Homo sapiens
aacccagcctagaga

SEQ ID NO: 1245825 - DNA, 15 bp, Homo sapiens
caacccagcctagag

SEQ ID NO: 1245826 - DNA, 15 bp, Homo sapiens
tcaacccagcctaga

SEQ ID NO: 1245827 - DNA, 15 bp, Homo sapiens
gtcaacccagcctag

SEQ ID NO: 1245828 - DNA, 15 bp, Homo sapiens
agtcaacccagccta

SEQ ID NO: 1245829 - DNA, 15 bp, Homo sapiens
gagtcaacccagcct

SEQ ID NO: 1245830 - DNA, 15 bp, Homo sapiens
ggagtcaacccagcc

SEQ ID NO: 1245831 - DNA, 15 bp, Homo sapiens
aggagtcaacccagc

SEQ ID NO: 1245832 - DNA, 15 bp, Homo sapiens
gaggagtcaacccag

SEQ ID NO: 1245833 - DNA, 15 bp, Homo sapiens
ggaggagtcaaccca

SEQ ID NO: 1245834 - DNA, 15 bp, Homo sapiens
gggaggagtcaaccc

SEQ ID NO: 1245835 - DNA, 15 bp, Homo sapiens
ggggaggagtcaacc

SEQ ID NO: 1245836 - DNA, 15 bp, Homo sapiens
gggggaggagtcaac

SEQ ID NO: 1245837 - DNA, 15 bp, Homo sapiens
tgggggaggagtcaa

SEQ ID NO: 1245838 - DNA, 15 bp, Homo sapiens
ttgggggaggagtca

SEQ ID NO: 1245839 - DNA, 15 bp, Homo sapiens
tttgggggaggagtc

SEQ ID NO: 1245840 - DNA, 15 bp, Homo sapiens
ttttgggggaggagt

SEQ ID NO: 1245841 - DNA, 15 bp, Homo sapiens
gttttgggggaggag

SEQ ID NO: 1245842 - DNA, 15 bp, Homo sapiens
tgttttgggggagga

SEQ ID NO: 1245843 - DNA, 15 bp, Homo sapiens
ttgttttgggggagg

SEQ ID NO: 1245844 - DNA, 15 bp, Homo sapiens
tttgttttgggggag

SEQ ID NO: 1245845 - DNA, 15 bp, Homo sapiens
gtttgttttggggga

SEQ ID NO: 1245846 - DNA, 15 bp, Homo sapiens
tgtttgttttggggg

SEQ ID NO: 1245847 - DNA, 15 bp, Homo sapiens
ttgtttgttttgggg

SEQ ID NO: 1245848 - DNA, 15 bp, Homo sapiens
tttgtttgttttggg

SEQ ID NO: 1245849 - DNA, 15 bp, Homo sapiens
ggtttgtttgtttgt

SEQ ID NO: 1245850 - DNA, 15 bp, Homo sapiens
tggtttgtttgtttg

SEQ ID NO: 1245851 - DNA, 15 bp, Homo sapiens
ttggtttgtttgttt

SEQ ID NO: 1245852 - DNA, 15 bp, Homo sapiens
tttggtttgtttgtt

SEQ ID NO: 1245853 - DNA, 15 bp, Homo sapiens
ttttggtttgtttgt

SEQ ID NO: 1245854 - DNA, 15 bp, Homo sapiens
tttttggtttgtttg

SEQ ID NO: 1245855 - DNA, 15 bp, Homo sapiens
ttttttggtttgttt

SEQ ID NO: 1245856 - DNA, 15 bp, Homo sapiens
gttttttggtttgtt

SEQ ID NO: 1245857 - DNA, 15 bp, Homo sapiens
tgttttttggtttgt

SEQ ID NO: 1245858 - DNA, 15 bp, Homo sapiens
ttgttttttggtttg

SEQ ID NO: 1245859 - DNA, 15 bp, Homo sapiens
tttgttttttggttt

SEQ ID NO: 1245860 - DNA, 15 bp, Homo sapiens
atttgttttttggtt

SEQ ID NO: 1245861 - DNA, 15 bp, Homo sapiens
catttgttttttggt

SEQ ID NO: 1245862 - DNA, 15 bp, Homo sapiens
gcatttgttttttgg

SEQ ID NO: 1245863 - DNA, 15 bp, Homo sapiens
ggcatttgttttttg

SEQ ID NO: 1245864 - DNA, 15 bp, Homo sapiens
aggcatttgtttttt

SEQ ID NO: 1245865 - DNA, 15 bp, Homo sapiens
aaggcatttgttttt

SEQ ID NO: 1245866 - DNA, 15 bp, Homo sapiens
gaaggcatttgtttt

SEQ ID NO: 1245867 - DNA, 15 bp, Homo sapiens
agaaggcatttgttt

SEQ ID NO: 1245868 - DNA, 15 bp, Homo sapiens
tagaaggcatttgtt

SEQ ID NO: 1245869 - DNA, 15 bp, Homo sapiens
ttagaaggcatttgt

SEQ ID NO: 1245870 - DNA, 15 bp, Homo sapiens
tgaaaacttcttaga

SEQ ID NO: 1245871 - DNA, 15 bp, Homo sapiens
gtgaaaacttcttag

SEQ ID NO: 1245872 - DNA, 15 bp, Homo sapiens
ggtgaaaacttctta

SEQ ID NO: 1245873 - DNA, 15 bp, Homo sapiens
cggtgaaaacttctt

SEQ ID NO: 1245874 - DNA, 15 bp, Homo sapiens
ccggtgaaaacttct

SEQ ID NO: 1245875 - DNA, 15 bp, Homo sapiens
gccggtgaaaacttc

SEQ ID NO: 1245876 - DNA, 15 bp, Homo sapiens
agccggtgaaaactt

SEQ ID NO: 1245877 - DNA, 15 bp, Homo sapiens
cagccggtgaaaact

SEQ ID NO: 1245878 - DNA, 15 bp, Homo sapiens
ccagccggtgaaaac

SEQ ID NO: 1245879 - DNA, 15 bp, Homo sapiens
cccagccggtgaaaa

SEQ ID NO: 1245880 - DNA, 15 bp, Homo sapiens
gcccagccggtgaaa

SEQ ID NO: 1245881 - DNA, 15 bp, Homo sapiens
tgcccagccggtgaa

SEQ ID NO: 1245882 - DNA, 15 bp, Homo sapiens
gtgcccagccggtga

SEQ ID NO: 1245883 - DNA, 15 bp, Homo sapiens
tgtgcccagccggtg

SEQ ID NO: 1245884 - DNA, 15 bp, Homo sapiens
ctgtgcccagccggt

SEQ ID NO: 1245885 - DNA, 15 bp, Homo sapiens
actgtgcccagccgg

SEQ ID NO: 1245886 - DNA, 15 bp, Homo sapiens
acatgagccactgtg

SEQ ID NO: 1245887 - DNA, 15 bp, Homo sapiens
aacatgagccactgt

SEQ ID NO: 1245888 - DNA, 15 bp, Homo sapiens
aaacatgagccactg

SEQ ID NO: 1245889 - DNA, 15 bp, Homo sapiens
caaacatgagccact

SEQ ID NO: 1245890 - DNA, 15 bp, Homo sapiens
acaaacatgagccac

SEQ ID NO: 1245891 - DNA, 15 bp, Homo sapiens
tacaaacatgagcca

SEQ ID NO: 1245892 - DNA, 15 bp, Homo sapiens
ttacaaacatgagcc

SEQ ID NO: 1245893 - DNA, 15 bp, Homo sapiens
attacaaacatgagc

SEQ ID NO: 1245894 - DNA, 15 bp, Homo sapiens
gattacaaacatgag

SEQ ID NO: 1245895 - DNA, 15 bp, Homo sapiens
agattacaaacatga

SEQ ID NO: 1245896 - DNA, 15 bp, Homo sapiens
gagattacaaacatg

SEQ ID NO: 1245897 - DNA, 15 bp, Homo sapiens
tgagattacaaacat

SEQ ID NO: 1245898 - DNA, 15 bp, Homo sapiens
ctgagattacaaaca

SEQ ID NO: 1245899 - DNA, 15 bp, Homo sapiens
gctgagattacaaac

SEQ ID NO: 1245900 - DNA, 15 bp, Homo sapiens
tgctgagattacaaa

SEQ ID NO: 1245901 - DNA, 15 bp, Homo sapiens
gtgctgagattacaa

SEQ ID NO: 1245902 - DNA, 15 bp, Homo sapiens
gcttgcctcagcctc

SEQ ID NO: 1245903 - DNA, 15 bp, Homo sapiens
cgcttgcctcagcct

SEQ ID NO: 1245904 - DNA, 15 bp, Homo sapiens
ccgcttgcctcagcc

SEQ ID NO: 1245905 - DNA, 15 bp, Homo sapiens
tccgcttgcctcagc

SEQ ID NO: 1245906 - DNA, 15 bp, Homo sapiens
atccgcttgcctcag

SEQ ID NO: 1245907 - DNA, 15 bp, Homo sapiens
gatccgcttgcctca

SEQ ID NO: 1245908 - DNA, 15 bp, Homo sapiens
tgatccgcttgcctc

SEQ ID NO: 1245909 - DNA, 15 bp, Homo sapiens
gtgatccgcttgcct

SEQ ID NO: 1245910 - DNA, 15 bp, Homo sapiens
agtgatccgcttgcc

SEQ ID NO: 1245911 - DNA, 15 bp, Homo sapiens
cagtgatccgcttgc

SEQ ID NO: 1245912 - DNA, 15 bp, Homo sapiens
ccagtgatccgcttg

SEQ ID NO: 1245913 - DNA, 15 bp, Homo sapiens
tccagtgatccgctt

SEQ ID NO: 1245914 - DNA, 15 bp, Homo sapiens
ctccagtgatccgct

SEQ ID NO: 1245915 - DNA, 15 bp, Homo sapiens
gctccagtgatccgc

SEQ ID NO: 1245916 - DNA, 15 bp, Homo sapiens
ggctccagtgatccg

SEQ ID NO: 1245917 - DNA, 15 bp, Homo sapiens
gggctccagtgatcc

SEQ ID NO: 1245918 - DNA, 15 bp, Homo sapiens
tgggctccagtgatc

SEQ ID NO: 1245919 - DNA, 15 bp, Homo sapiens
ctgggctccagtgat

SEQ ID NO: 1245920 - DNA, 15 bp, Homo sapiens
cctgggctccagtga

SEQ ID NO: 1245921 - DNA, 15 bp, Homo sapiens
tcctgggctccagtg

SEQ ID NO: 1245922 - DNA, 15 bp, Homo sapiens
ctcctgggctccagt

SEQ ID NO: 1245923 - DNA, 15 bp, Homo sapiens
actcctgggctccag

SEQ ID NO: 1245924 - DNA, 15 bp, Homo sapiens
aactcctgggctcca

SEQ ID NO: 1245925 - DNA, 15 bp, Homo sapiens
aaactcctgggctcc

SEQ ID NO: 1245926 - DNA, 15 bp, Homo sapiens
tagggtctcactatg

SEQ ID NO: 1245927 - DNA, 15 bp, Homo sapiens
atagggtctcactat

SEQ ID NO: 1245928 - DNA, 15 bp, Homo sapiens
gatagggtctcacta

SEQ ID NO: 1245929 - DNA, 15 bp, Homo sapiens
agatagggtctcact

SEQ ID NO: 1245930 - DNA, 15 bp, Homo sapiens
gagatagggtctcac

SEQ ID NO: 1245931 - DNA, 15 bp, Homo sapiens
agagatagggtctca

SEQ ID NO: 1245932 - DNA, 15 bp, Homo sapiens
tagagatagggtctc

SEQ ID NO: 1245933 - DNA, 15 bp, Homo sapiens
gtagagatagggtct

SEQ ID NO: 1245934 - DNA, 15 bp, Homo sapiens
tgtagagatagggtc

SEQ ID NO: 1245935 - DNA, 15 bp, Homo sapiens
ttgtagagatagggt

SEQ ID NO: 1245936 - DNA, 15 bp, Homo sapiens
attgtagagataggg

SEQ ID NO: 1245937 - DNA, 15 bp, Homo sapiens
tattgtagagatagg

SEQ ID NO: 1245938 - DNA, 15 bp, Homo sapiens
gtattgtagagatag

SEQ ID NO: 1245939 - DNA, 15 bp, Homo sapiens
tgtattgtagagata

SEQ ID NO: 1245940 - DNA, 15 bp, Homo sapiens
ttgtattgtagagat

SEQ ID NO: 1245941 - DNA, 15 bp, Homo sapiens
cttgtattgtagaga

SEQ ID NO: 1245942 - DNA, 15 bp, Homo sapiens
gcttgtattgtagag

SEQ ID NO: 1245943 - DNA, 15 bp, Homo sapiens
tgcttgtattgtaga

SEQ ID NO: 1245944 - DNA, 15 bp, Homo sapiens
ttgcttgtattgtag

SEQ ID NO: 1245945 - DNA, 15 bp, Homo sapiens
cttgcttgtattgta

SEQ ID NO: 1245946 - DNA, 15 bp, Homo sapiens
gcttgcttgtattgt

SEQ ID NO: 1245947 - DNA, 15 bp, Homo sapiens
tgcttgcttgtattg

SEQ ID NO: 1245948 - DNA, 15 bp, Homo sapiens
ttgcttgcttgtatt

SEQ ID NO: 1245949 - DNA, 15 bp, Homo sapiens
tttgcttgcttgtat

SEQ ID NO: 1245950 - DNA, 15 bp, Homo sapiens
ttttgcttgcttgta

SEQ ID NO: 1245951 - DNA, 15 bp, Homo sapiens
tttttgcttgcttgt

SEQ ID NO: 1245952 - DNA, 15 bp, Homo sapiens
ttttttgcttgcttg

SEQ ID NO: 1245953 - DNA, 15 bp, Homo sapiens
tttttttgcttgctt

SEQ ID NO: 1245954 - DNA, 15 bp, Homo sapiens
ttttttttgcttgct

SEQ ID NO: 1245955 - DNA, 15 bp, Homo sapiens
gttttttttgcttgc

SEQ ID NO: 1245956 - DNA, 15 bp, Homo sapiens
tgttttttttgcttg

SEQ ID NO: 1245957 - DNA, 15 bp, Homo sapiens
ttgttttttttgctt

SEQ ID NO: 1245958 - DNA, 15 bp, Homo sapiens
tttgttttttttgct

SEQ ID NO: 1245959 - DNA, 15 bp, Homo sapiens
gtttgttttttttgc

SEQ ID NO: 1245960 - DNA, 15 bp, Homo sapiens
tgtttgttttttttg

SEQ ID NO: 1245961 - DNA, 15 bp, Homo sapiens
ctgtttgtttttttt

SEQ ID NO: 1245962 - DNA, 15 bp, Homo sapiens
tctgtttgttttttt

SEQ ID NO: 1245963 - DNA, 15 bp, Homo sapiens
ttctgtttgtttttt

SEQ ID NO: 1245964 - DNA, 15 bp, Homo sapiens
tttctgtttgttttt

SEQ ID NO: 1245965 - DNA, 15 bp, Homo sapiens
atttctgtttgtttt

SEQ ID NO: 1245966 - DNA, 15 bp, Homo sapiens
aatttctgtttgttt

SEQ ID NO: 1245967 - DNA, 15 bp, Homo sapiens
taatttctgtttgtt

SEQ ID NO: 1245968 - DNA, 15 bp, Homo sapiens
ctaatttctgtttgt

SEQ ID NO: 1245969 - DNA, 15 bp, Homo sapiens
gctaatttctgtttg

SEQ ID NO: 1245970 - DNA, 15 bp, Homo sapiens
agctaatttctgttt

SEQ ID NO: 1245971 - DNA, 15 bp, Homo sapiens
tagctaatttctgtt

SEQ ID NO: 1245972 - DNA, 15 bp, Homo sapiens
ctagctaatttctgt

SEQ ID NO: 1245973 - DNA, 15 bp, Homo sapiens
cctagctaatttctg

SEQ ID NO: 1245974 - DNA, 15 bp, Homo sapiens
gcctagctaatttct

SEQ ID NO: 1245975 - DNA, 15 bp, Homo sapiens
tgcctagctaatttc

SEQ ID NO: 1245976 - DNA, 15 bp, Homo sapiens
ccaccatgcctagct

SEQ ID NO: 1245977 - DNA, 15 bp, Homo sapiens
aagccaccatgccta

SEQ ID NO: 1245978 - DNA, 15 bp, Homo sapiens
caagccaccatgcct

SEQ ID NO: 1245979 - DNA, 15 bp, Homo sapiens
acaagccaccatgcc

SEQ ID NO: 1245980 - DNA, 15 bp, Homo sapiens
cacaagccaccatgc

SEQ ID NO: 1245981 - DNA, 15 bp, Homo sapiens
gcacaagccaccatg

SEQ ID NO: 1245982 - DNA, 15 bp, Homo sapiens
ggcacaagccaccat

SEQ ID NO: 1245983 - DNA, 15 bp, Homo sapiens
aggcacaagccacca

SEQ ID NO: 1245984 - DNA, 15 bp, Homo sapiens
caggcacaagccacc

SEQ ID NO: 1245985 - DNA, 15 bp, Homo sapiens
acaggcacaagccac

SEQ ID NO: 1245986 - DNA, 15 bp, Homo sapiens
tacaggcacaagcca

SEQ ID NO: 1245987 - DNA, 15 bp, Homo sapiens
ttacaggcacaagcc

SEQ ID NO: 1245988 - DNA, 15 bp, Homo sapiens
attacaggcacaagc

SEQ ID NO: 1245989 - DNA, 15 bp, Homo sapiens
gattacaggcacaag

SEQ ID NO: 1245990 - DNA, 15 bp, Homo sapiens
ggattacaggcacaa

SEQ ID NO: 1245991 - DNA, 15 bp, Homo sapiens
gtctgggattacagg

SEQ ID NO: 1245992 - DNA, 15 bp, Homo sapiens
tgtctgggattacag

SEQ ID NO: 1245993 - DNA, 15 bp, Homo sapiens
gtgtctgggattaca

SEQ ID NO: 1245994 - DNA, 15 bp, Homo sapiens
ggtgtctgggattac

SEQ ID NO: 1245995 - DNA, 15 bp, Homo sapiens
gggtgtctgggatta

SEQ ID NO: 1245996 - DNA, 15 bp, Homo sapiens
ggggtgtctgggatt

SEQ ID NO: 1245997 - DNA, 15 bp, Homo sapiens
cggggtgtctgggat

SEQ ID NO: 1245998 - DNA, 15 bp, Homo sapiens
ccggggtgtctggga

SEQ ID NO: 1245999 - DNA, 15 bp, Homo sapiens
cccggggtgtctggg

SEQ ID NO: 1246000 - DNA, 15 bp, Homo sapiens
tcccggggtgtctgg

SEQ ID NO: 1246001 - DNA, 15 bp, Homo sapiens
ctcccggggtgtctg

SEQ ID NO: 1246002 - DNA, 15 bp, Homo sapiens
cctcccggggtgtct

SEQ ID NO: 1246003 - DNA, 15 bp, Homo sapiens
gcctcccggggtgtc

SEQ ID NO: 1246004 - DNA, 15 bp, Homo sapiens
agcctcccggggtgt

SEQ ID NO: 1246005 - DNA, 15 bp, Homo sapiens
cagcctcccggggtg

SEQ ID NO: 1246006 - DNA, 15 bp, Homo sapiens
tcagcctcccggggt

SEQ ID NO: 1246007 - DNA, 15 bp, Homo sapiens
ctcagcctcccgggg

SEQ ID NO: 1246008 - DNA, 15 bp, Homo sapiens
cctcagcctcccggg

SEQ ID NO: 1246009 - DNA, 15 bp, Homo sapiens
acctcagcctcccgg

SEQ ID NO: 1246010 - DNA, 15 bp, Homo sapiens
cacctcagcctcccg

SEQ ID NO: 1246011 - DNA, 15 bp, Homo sapiens
agttctcccacctca

SEQ ID NO: 1246012 - DNA, 15 bp, Homo sapiens
cagttctcccacctc

SEQ ID NO: 1246013 - DNA, 15 bp, Homo sapiens
gcagttctcccacct

SEQ ID NO: 1246014 - DNA, 15 bp, Homo sapiens
agcagttctcccacc

SEQ ID NO: 1246015 - DNA, 15 bp, Homo sapiens
aagcagttctcccac

SEQ ID NO: 1246016 - DNA, 15 bp, Homo sapiens
caagcagttctccca

SEQ ID NO: 1246017 - DNA, 15 bp, Homo sapiens
tcaagcagttctccc

SEQ ID NO: 1246018 - DNA, 15 bp, Homo sapiens
ctcaagcagttctcc

SEQ ID NO: 1246019 - DNA, 15 bp, Homo sapiens
gctcaagcagttctc

SEQ ID NO: 1246020 - DNA, 15 bp, Homo sapiens
ggctcaagcagttct

SEQ ID NO: 1246021 - DNA, 15 bp, Homo sapiens
aggctcaagcagttc

SEQ ID NO: 1246022 - DNA, 15 bp, Homo sapiens
caggctcaagcagtt

SEQ ID NO: 1246023 - DNA, 15 bp, Homo sapiens
ccaggctcaagcagt

SEQ ID NO: 1246024 - DNA, 15 bp, Homo sapiens
cccaggctcaagcag

SEQ ID NO: 1246025 - DNA, 15 bp, Homo sapiens
aacctcccaggctca

SEQ ID NO: 1246026 - DNA, 15 bp, Homo sapiens
caacctcccaggctc

SEQ ID NO: 1246027 - DNA, 15 bp, Homo sapiens
tctcaacctcccagg

SEQ ID NO: 1246028 - DNA, 15 bp, Homo sapiens
gtctcaacctcccag

SEQ ID NO: 1246029 - DNA, 15 bp, Homo sapiens
agtctcaacctccca

SEQ ID NO: 1246030 - DNA, 15 bp, Homo sapiens
cagtctcaacctccc

SEQ ID NO: 1246031 - DNA, 15 bp, Homo sapiens
gcagtctcaacctcc

SEQ ID NO: 1246032 - DNA, 15 bp, Homo sapiens
tgcagtctcaacctc

SEQ ID NO: 1246033 - DNA, 15 bp, Homo sapiens
ctgcagtctcaacct

SEQ ID NO: 1246034 - DNA, 15 bp, Homo sapiens
actgcagtctcaacc

SEQ ID NO: 1246035 - DNA, 15 bp, Homo sapiens
tactgcagtctcaac

SEQ ID NO: 1246036 - DNA, 15 bp, Homo sapiens
ttactgcagtctcaa

SEQ ID NO: 1246037 - DNA, 15 bp, Homo sapiens
cttactgcagtctca

SEQ ID NO: 1246038 - DNA, 15 bp, Homo sapiens
gcttactgcagtctc

SEQ ID NO: 1246039 - DNA, 15 bp, Homo sapiens
agcttactgcagtct

SEQ ID NO: 1246040 - DNA, 15 bp, Homo sapiens
cagcttactgcagtc

SEQ ID NO: 1246041 - DNA, 15 bp, Homo sapiens
acagcttactgcagt

SEQ ID NO: 1246042 - DNA, 15 bp, Homo sapiens
cacagcttactgcag

SEQ ID NO: 1246043 - DNA, 15 bp, Homo sapiens
tcacagcttactgca

SEQ ID NO: 1246044 - DNA, 15 bp, Homo sapiens
gtcacagcttactgc

SEQ ID NO: 1246045 - DNA, 15 bp, Homo sapiens
cgtcacagcttactg

SEQ ID NO: 1246046 - DNA, 15 bp, Homo sapiens
ccgtcacagcttact

SEQ ID NO: 1246047 - DNA, 15 bp, Homo sapiens
gccgtcacagcttac

SEQ ID NO: 1246048 - DNA, 15 bp, Homo sapiens
tgccgtcacagctta

SEQ ID NO: 1246049 - DNA, 15 bp, Homo sapiens
gtgccgtcacagctt

SEQ ID NO: 1246050 - DNA, 15 bp, Homo sapiens
ggtgccgtcacagct

SEQ ID NO: 1246051 - DNA, 15 bp, Homo sapiens
tggtgccgtcacagc

SEQ ID NO: 1246052 - DNA, 15 bp, Homo sapiens
gtggtgccgtcacag

SEQ ID NO: 1246053 - DNA, 15 bp, Homo sapiens
agtggtgccgtcaca

SEQ ID NO: 1246054 - DNA, 15 bp, Homo sapiens
cagtggtgccgtcac

SEQ ID NO: 1246055 - DNA, 15 bp, Homo sapiens
gcagtggtgccgtca

SEQ ID NO: 1246056 - DNA, 15 bp, Homo sapiens
tgcagtggtgccgtc

SEQ ID NO: 1246057 - DNA, 15 bp, Homo sapiens
gtgcagtggtgccgt

SEQ ID NO: 1246058 - DNA, 15 bp, Homo sapiens
agtgcagtggtgccg

SEQ ID NO: 1246059 - DNA, 15 bp, Homo sapiens
cgtctcactctgttg

SEQ ID NO: 1246060 - DNA, 15 bp, Homo sapiens
gcgtctcactctgtt

SEQ ID NO: 1246061 - DNA, 15 bp, Homo sapiens
agcgtctcactctgt

SEQ ID NO: 1246062 - DNA, 15 bp, Homo sapiens
cagcgtctcactctg

SEQ ID NO: 1246063 - DNA, 15 bp, Homo sapiens
acagcgtctcactct

SEQ ID NO: 1246064 - DNA, 15 bp, Homo sapiens
gacagcgtctcactc

SEQ ID NO: 1246065 - DNA, 15 bp, Homo sapiens
agacagcgtctcact

SEQ ID NO: 1246066 - DNA, 15 bp, Homo sapiens
gagacagcgtctcac

SEQ ID NO: 1246067 - DNA, 15 bp, Homo sapiens
tgagacagcgtctca

SEQ ID NO: 1246068 - DNA, 15 bp, Homo sapiens
aaaactttttttttt

SEQ ID NO: 1246069 - DNA, 15 bp, Homo sapiens
gaaaacttttttttt

SEQ ID NO: 1246070 - DNA, 15 bp, Homo sapiens
tgaaaactttttttt

SEQ ID NO: 1246071 - DNA, 15 bp, Homo sapiens
gtgaaaacttttttt

SEQ ID NO: 1246072 - DNA, 15 bp, Homo sapiens
ggtgaaaactttttt

SEQ ID NO: 1246073 - DNA, 15 bp, Homo sapiens
tggtgaaaacttttt

SEQ ID NO: 1246074 - DNA, 15 bp, Homo sapiens
ttggtgaaaactttt

SEQ ID NO: 1246075 - DNA, 15 bp, Homo sapiens
gttggtgaaaacttt

SEQ ID NO: 1246076 - DNA, 15 bp, Homo sapiens
tgttggtgaaaactt

SEQ ID NO: 1246077 - DNA, 15 bp, Homo sapiens
atgttggtgaaaact

SEQ ID NO: 1246078 - DNA, 15 bp, Homo sapiens
aatgttggtgaaaac

SEQ ID NO: 1246079 - DNA, 15 bp, Homo sapiens
gaatgttggtgaaaa

SEQ ID NO: 1246080 - DNA, 15 bp, Homo sapiens
agaatgttggtgaaa

SEQ ID NO: 1246081 - DNA, 15 bp, Homo sapiens
aagaatgttggtgaa

SEQ ID NO: 1246082 - DNA, 15 bp, Homo sapiens
aaagaatgttggtga

SEQ ID NO: 1246083 - DNA, 15 bp, Homo sapiens
aaaagaatgttggtg

SEQ ID NO: 1246084 - DNA, 15 bp, Homo sapiens
aaaaagaatgttggt

SEQ ID NO: 1246085 - DNA, 15 bp, Homo sapiens
aaaaaagaatgttgg

SEQ ID NO: 1246086 - DNA, 15 bp, Homo sapiens
aaaaaaagaatgttg

SEQ ID NO: 1246087 - DNA, 15 bp, Homo sapiens
caaaaaaagaatgtt

SEQ ID NO: 1246088 - DNA, 15 bp, Homo sapiens
acaaaaaaagaatgt

SEQ ID NO: 1246089 - DNA, 15 bp, Homo sapiens
aacaaaaaaagaatg

SEQ ID NO: 1246090 - DNA, 15 bp, Homo sapiens
aaacaaaaaaagaat

SEQ ID NO: 1246091 - DNA, 15 bp, Homo sapiens
aaaacaaaaaaagaa

SEQ ID NO: 1246092 - DNA, 15 bp, Homo sapiens
caaaacaaaaaaaga

SEQ ID NO: 1246093 - DNA, 15 bp, Homo sapiens
acaaaacaaaaaaag

SEQ ID NO: 1246094 - DNA, 15 bp, Homo sapiens
aacaaaacaaaaaaa

SEQ ID NO: 1246095 - DNA, 15 bp, Homo sapiens
tgtctcaaaacaaaa

SEQ ID NO: 1246096 - DNA, 15 bp, Homo sapiens
ctgtctcaaaacaaa

SEQ ID NO: 1246097 - DNA, 15 bp, Homo sapiens
cctgtctcaaaacaa

SEQ ID NO: 1246098 - DNA, 15 bp, Homo sapiens
ccctgtctcaaaaca

SEQ ID NO: 1246099 - DNA, 15 bp, Homo sapiens
accctgtctcaaaac

SEQ ID NO: 1246100 - DNA, 15 bp, Homo sapiens
aacagagcgagaccc

SEQ ID NO: 1246101 - DNA, 15 bp, Homo sapiens
caacagagcgagacc

SEQ ID NO: 1246102 - DNA, 15 bp, Homo sapiens
agcaacagagcgaga

SEQ ID NO: 1246103 - DNA, 15 bp, Homo sapiens
gagcaacagagcgag

SEQ ID NO: 1246104 - DNA, 15 bp, Homo sapiens
agagcaacagagcga

SEQ ID NO: 1246105 - DNA, 15 bp, Homo sapiens
cagagcaacagagcg

SEQ ID NO: 1246106 - DNA, 15 bp, Homo sapiens
ccagagcaacagagc

SEQ ID NO: 1246107 - DNA, 15 bp, Homo sapiens
gccagagcaacagag

SEQ ID NO: 1246108 - DNA, 15 bp, Homo sapiens
agccagagcaacaga

SEQ ID NO: 1246109 - DNA, 15 bp, Homo sapiens
cagccagagcaacag

SEQ ID NO: 1246110 - DNA, 15 bp, Homo sapiens
ccagccagagcaaca

SEQ ID NO: 1246111 - DNA, 15 bp, Homo sapiens
tccagccagagcaac

SEQ ID NO: 1246112 - DNA, 15 bp, Homo sapiens
ctccagccagagcaa

SEQ ID NO: 1246113 - DNA, 15 bp, Homo sapiens
actccagccagagca

SEQ ID NO: 1246114 - DNA, 15 bp, Homo sapiens
tactccagccagagc

SEQ ID NO: 1246115 - DNA, 15 bp, Homo sapiens
gtactccagccagag

SEQ ID NO: 1246116 - DNA, 15 bp, Homo sapiens
tgtactccagccaga

SEQ ID NO: 1246117 - DNA, 15 bp, Homo sapiens
ctgtactccagccag

SEQ ID NO: 1246118 - DNA, 15 bp, Homo sapiens
actgtactccagcca

SEQ ID NO: 1246119 - DNA, 15 bp, Homo sapiens
aagccactgtactcc

SEQ ID NO: 1246120 - DNA, 15 bp, Homo sapiens
caagccactgtactc

SEQ ID NO: 1246121 - DNA, 15 bp, Homo sapiens
tcaagccactgtact

SEQ ID NO: 1246122 - DNA, 15 bp, Homo sapiens
atcaagccactgtac

SEQ ID NO: 1246123 - DNA, 15 bp, Homo sapiens
gatcaagccactgta

SEQ ID NO: 1246124 - DNA, 15 bp, Homo sapiens
tgatcaagccactgt

SEQ ID NO: 1246125 - DNA, 15 bp, Homo sapiens
atgatcaagccactg

SEQ ID NO: 1246126 - DNA, 15 bp, Homo sapiens
tatgatcaagccact

SEQ ID NO: 1246127 - DNA, 15 bp, Homo sapiens
ctatgatcaagccac

SEQ ID NO: 1246128 - DNA, 15 bp, Homo sapiens
gctatgatcaagcca

SEQ ID NO: 1246129 - DNA, 15 bp, Homo sapiens
agctatgatcaagcc

SEQ ID NO: 1246130 - DNA, 15 bp, Homo sapiens
gagctatgatcaagc

SEQ ID NO: 1246131 - DNA, 15 bp, Homo sapiens
tgagctatgatcaag

SEQ ID NO: 1246132 - DNA, 15 bp, Homo sapiens
gtgagctatgatcaa

SEQ ID NO: 1246133 - DNA, 15 bp, Homo sapiens
cgttcaaggctgcag

SEQ ID NO: 1246134 - DNA, 15 bp, Homo sapiens
gcgttcaaggctgca

SEQ ID NO: 1246135 - DNA, 15 bp, Homo sapiens
cgcgttcaaggctgc

SEQ ID NO: 1246136 - DNA, 15 bp, Homo sapiens
acgcgttcaaggctg

SEQ ID NO: 1246137 - DNA, 15 bp, Homo sapiens
tacgcgttcaaggct

SEQ ID NO: 1246138 - DNA, 15 bp, Homo sapiens
ttacgcgttcaaggc

SEQ ID NO: 1246139 - DNA, 15 bp, Homo sapiens
cttacgcgttcaagg

SEQ ID NO: 1246140 - DNA, 15 bp, Homo sapiens
acttacgcgttcaag

SEQ ID NO: 1246141 - DNA, 15 bp, Homo sapiens
gacttacgcgttcaa

SEQ ID NO: 1246142 - DNA, 15 bp, Homo sapiens
ggacttacgcgttca

SEQ ID NO: 1246143 - DNA, 15 bp, Homo sapiens
aggacttacgcgttc

SEQ ID NO: 1246144 - DNA, 15 bp, Homo sapiens
gaggacttacgcgtt

SEQ ID NO: 1246145 - DNA, 15 bp, Homo sapiens
ggaggacttacgcgt

SEQ ID NO: 1246146 - DNA, 15 bp, Homo sapiens
gggaggacttacgcg

SEQ ID NO: 1246147 - DNA, 15 bp, Homo sapiens
cgggaggacttacgc

SEQ ID NO: 1246148 - DNA, 15 bp, Homo sapiens
gcgggaggacttacg

SEQ ID NO: 1246149 - DNA, 15 bp, Homo sapiens
ggcgggaggacttac

SEQ ID NO: 1246150 - DNA, 15 bp, Homo sapiens
aggcgggaggactta

SEQ ID NO: 1246151 - DNA, 15 bp, Homo sapiens
gaggcgggaggactt

SEQ ID NO: 1246152 - DNA, 15 bp, Homo sapiens
tgaggcgggaggact

SEQ ID NO: 1246153 - DNA, 15 bp, Homo sapiens
ttgaggcgggaggac

SEQ ID NO: 1246154 - DNA, 15 bp, Homo sapiens
gttgaggcgggagga

SEQ ID NO: 1246155 - DNA, 15 bp, Homo sapiens
ggttgaggcgggagg

SEQ ID NO: 1246156 - DNA, 15 bp, Homo sapiens
aggttgaggcgggag

SEQ ID NO: 1246157 - DNA, 15 bp, Homo sapiens
gaggttgaggcggga

SEQ ID NO: 1246158 - DNA, 15 bp, Homo sapiens
tgaggttgaggcggg

SEQ ID NO: 1246159 - DNA, 15 bp, Homo sapiens
gtgaggttgaggcgg

SEQ ID NO: 1246160 - DNA, 15 bp, Homo sapiens
tgtgaggttgaggcg

SEQ ID NO: 1246161 - DNA, 15 bp, Homo sapiens
ttgtgaggttgaggc

SEQ ID NO: 1246162 - DNA, 15 bp, Homo sapiens
gttgtgaggttgagg

SEQ ID NO: 1246163 - DNA, 15 bp, Homo sapiens
ggttgtgaggttgag

SEQ ID NO: 1246164 - DNA, 15 bp, Homo sapiens
tggttgtgaggttga

SEQ ID NO: 1246165 - DNA, 15 bp, Homo sapiens
ctggttgtgaggttg

SEQ ID NO: 1246166 - DNA, 15 bp, Homo sapiens
gctggttgtgaggtt

SEQ ID NO: 1246167 - DNA, 15 bp, Homo sapiens
agctggttgtgaggt

SEQ ID NO: 1246168 - DNA, 15 bp, Homo sapiens
cagctggttgtgagg

SEQ ID NO: 1246169 - DNA, 15 bp, Homo sapiens
ccagctggttgtgag

SEQ ID NO: 1246170 - DNA, 15 bp, Homo sapiens
cccagctggttgtga

SEQ ID NO: 1246171 - DNA, 15 bp, Homo sapiens
tcccagctggttgtg

SEQ ID NO: 1246172 - DNA, 15 bp, Homo sapiens
gtcccagctggttgt

SEQ ID NO: 1246173 - DNA, 15 bp, Homo sapiens
ggtcccagctggttg

SEQ ID NO: 1246174 - DNA, 15 bp, Homo sapiens
aggtcccagctggtt

SEQ ID NO: 1246175 - DNA, 15 bp, Homo sapiens
taggtcccagctggt

SEQ ID NO: 1246176 - DNA, 15 bp, Homo sapiens
gtaggtcccagctgg

SEQ ID NO: 1246177 - DNA, 15 bp, Homo sapiens
tgtaggtcccagctg

SEQ ID NO: 1246178 - DNA, 15 bp, Homo sapiens
ctgtaggtcccagct

SEQ ID NO: 1246179 - DNA, 15 bp, Homo sapiens
cctgtaggtcccagc

SEQ ID NO: 1246180 - DNA, 15 bp, Homo sapiens
gcctgtaggtcccag

SEQ ID NO: 1246181 - DNA, 15 bp, Homo sapiens
tgcctgtaggtccca

SEQ ID NO: 1246182 - DNA, 15 bp, Homo sapiens
gtgcctgtaggtccc

SEQ ID NO: 1246183 - DNA, 15 bp, Homo sapiens
tgtgcctgtaggtcc

SEQ ID NO: 1246184 - DNA, 15 bp, Homo sapiens
atgtgcctgtaggtc

SEQ ID NO: 1246185 - DNA, 15 bp, Homo sapiens
tatgtgcctgtaggt

SEQ ID NO: 1246186 - DNA, 15 bp, Homo sapiens
gtatgtgcctgtagg

SEQ ID NO: 1246187 - DNA, 15 bp, Homo sapiens
agtatgtgcctgtag

SEQ ID NO: 1246188 - DNA, 15 bp, Homo sapiens
cagtatgtgcctgta

SEQ ID NO: 1246189 - DNA, 15 bp, Homo sapiens
gcagtatgtgcctgt

SEQ ID NO: 1246190 - DNA, 15 bp, Homo sapiens
ggcagtatgtgcctg

SEQ ID NO: 1246191 - DNA, 15 bp, Homo sapiens
tggcagtatgtgcct

SEQ ID NO: 1246192 - DNA, 15 bp, Homo sapiens
atggcagtatgtgcc

SEQ ID NO: 1246193 - DNA, 15 bp, Homo sapiens
catggcagtatgtgc

SEQ ID NO: 1246194 - DNA, 15 bp, Homo sapiens
gcatggcagtatgtg

SEQ ID NO: 1246195 - DNA, 15 bp, Homo sapiens
agcatggcagtatgt

SEQ ID NO: 1246196 - DNA, 15 bp, Homo sapiens
aagcatggcagtatg

SEQ ID NO: 1246197 - DNA, 15 bp, Homo sapiens
caagcatggcagtat

SEQ ID NO: 1246198 - DNA, 15 bp, Homo sapiens
ccaagcatggcagta

SEQ ID NO: 1246199 - DNA, 15 bp, Homo sapiens
accaagcatggcagt

SEQ ID NO: 1246200 - DNA, 15 bp, Homo sapiens
aaccaagcatggcag

SEQ ID NO: 1246201 - DNA, 15 bp, Homo sapiens
taaccaagcatggca

SEQ ID NO: 1246202 - DNA, 15 bp, Homo sapiens
ttaaccaagcatggc

SEQ ID NO: 1246203 - DNA, 15 bp, Homo sapiens
attaaccaagcatgg

SEQ ID NO: 1246204 - DNA, 15 bp, Homo sapiens
aattaaccaagcatg

SEQ ID NO: 1246205 - DNA, 15 bp, Homo sapiens
aaattaaccaagcat

SEQ ID NO: 1246206 - DNA, 15 bp, Homo sapiens
aaaattaaccaagca

SEQ ID NO: 1246207 - DNA, 15 bp, Homo sapiens
aaaaattaaccaagc

SEQ ID NO: 1246208 - DNA, 15 bp, Homo sapiens
taaaaattaaccaag

SEQ ID NO: 1246209 - DNA, 15 bp, Homo sapiens
ttaaaaattaaccaa

SEQ ID NO: 1246210 - DNA, 15 bp, Homo sapiens
tttaaaaattaacca

SEQ ID NO: 1246211 - DNA, 15 bp, Homo sapiens
atttaaaaattaacc

SEQ ID NO: 1246212 - DNA, 15 bp, Homo sapiens
aatttaaaaattaac

SEQ ID NO: 1246213 - DNA, 15 bp, Homo sapiens
aaatttaaaaattaa

SEQ ID NO: 1246214 - DNA, 15 bp, Homo sapiens
aaaaatttaaaaatt

SEQ ID NO: 1246215 - DNA, 15 bp, Homo sapiens
aacagtgagaccctg

SEQ ID NO: 1246216 - DNA, 15 bp, Homo sapiens
aaacagtgagaccct

SEQ ID NO: 1246217 - DNA, 15 bp, Homo sapiens
aaaacagtgagaccc

SEQ ID NO: 1246218 - DNA, 15 bp, Homo sapiens
caaaacagtgagacc

SEQ ID NO: 1246219 - DNA, 15 bp, Homo sapiens
gcaaaacagtgagac

SEQ ID NO: 1246220 - DNA, 15 bp, Homo sapiens
ggcaaaacagtgaga

SEQ ID NO: 1246221 - DNA, 15 bp, Homo sapiens
gggcaaaacagtgag

SEQ ID NO: 1246222 - DNA, 15 bp, Homo sapiens
tgggcaaaacagtga

SEQ ID NO: 1246223 - DNA, 15 bp, Homo sapiens
ctgggcaaaacagtg

SEQ ID NO: 1246224 - DNA, 15 bp, Homo sapiens
cctgggcaaaacagt

SEQ ID NO: 1246225 - DNA, 15 bp, Homo sapiens
gcctgggcaaaacag

SEQ ID NO: 1246226 - DNA, 15 bp, Homo sapiens
agcctgggcaaaaca

SEQ ID NO: 1246227 - DNA, 15 bp, Homo sapiens
cagcctgggcaaaac

SEQ ID NO: 1246228 - DNA, 15 bp, Homo sapiens
accagcctgggcaaa

SEQ ID NO: 1246229 - DNA, 15 bp, Homo sapiens
agagaccagcctggg

SEQ ID NO: 1246230 - DNA, 15 bp, Homo sapiens
tagagaccagcctgg

SEQ ID NO: 1246231 - DNA, 15 bp, Homo sapiens
ctagagaccagcctg

SEQ ID NO: 1246232 - DNA, 15 bp, Homo sapiens
gctagagaccagcct

SEQ ID NO: 1246233 - DNA, 15 bp, Homo sapiens
ggctagagaccagcc

SEQ ID NO: 1246234 - DNA, 15 bp, Homo sapiens
aggctagagaccagc

SEQ ID NO: 1246235 - DNA, 15 bp, Homo sapiens
gaggctagagaccag

SEQ ID NO: 1246236 - DNA, 15 bp, Homo sapiens
tgaggctagagacca

SEQ ID NO: 1246237 - DNA, 15 bp, Homo sapiens
ttgaggctagagacc

SEQ ID NO: 1246238 - DNA, 15 bp, Homo sapiens
cttgaggctagagac

SEQ ID NO: 1246239 - DNA, 15 bp, Homo sapiens
gcttgaggctagaga

SEQ ID NO: 1246240 - DNA, 15 bp, Homo sapiens
cgcttgaggctagag

SEQ ID NO: 1246241 - DNA, 15 bp, Homo sapiens
ccgcttgaggctaga

SEQ ID NO: 1246242 - DNA, 15 bp, Homo sapiens
accgcttgaggctag

SEQ ID NO: 1246243 - DNA, 15 bp, Homo sapiens
gaccgcttgaggcta

SEQ ID NO: 1246244 - DNA, 15 bp, Homo sapiens
ggaccgcttgaggct

SEQ ID NO: 1246245 - DNA, 15 bp, Homo sapiens
aggaccgcttgaggc

SEQ ID NO: 1246246 - DNA, 15 bp, Homo sapiens
taggaccgcttgagg

SEQ ID NO: 1246247 - DNA, 15 bp, Homo sapiens
gtaggaccgcttgag

SEQ ID NO: 1246248 - DNA, 15 bp, Homo sapiens
ggtaggaccgcttga

SEQ ID NO: 1246249 - DNA, 15 bp, Homo sapiens
tggtaggaccgcttg

SEQ ID NO: 1246250 - DNA, 15 bp, Homo sapiens
atggtaggaccgctt

SEQ ID NO: 1246251 - DNA, 15 bp, Homo sapiens
gatggtaggaccgct

SEQ ID NO: 1246252 - DNA, 15 bp, Homo sapiens
agatggtaggaccgc

SEQ ID NO: 1246253 - DNA, 15 bp, Homo sapiens
gagatggtaggaccg

SEQ ID NO: 1246254 - DNA, 15 bp, Homo sapiens
cgagatggtaggacc

SEQ ID NO: 1246255 - DNA, 15 bp, Homo sapiens
ccgagatggtaggac

SEQ ID NO: 1246256 - DNA, 15 bp, Homo sapiens
gccgagatggtagga

SEQ ID NO: 1246257 - DNA, 15 bp, Homo sapiens
ggccgagatggtagg

SEQ ID NO: 1246258 - DNA, 15 bp, Homo sapiens
aggccgagatggtag

SEQ ID NO: 1246259 - DNA, 15 bp, Homo sapiens
gaggccgagatggta

SEQ ID NO: 1246260 - DNA, 15 bp, Homo sapiens
ggaggccgagatggt

SEQ ID NO: 1246261 - DNA, 15 bp, Homo sapiens
tggaggccgagatgg

SEQ ID NO: 1246262 - DNA, 15 bp, Homo sapiens
ttggaggccgagatg

SEQ ID NO: 1246263 - DNA, 15 bp, Homo sapiens
tttggaggccgagat

SEQ ID NO: 1246264 - DNA, 15 bp, Homo sapiens
ttttggaggccgaga

SEQ ID NO: 1246265 - DNA, 15 bp, Homo sapiens
tttttggaggccgag

SEQ ID NO: 1246266 - DNA, 15 bp, Homo sapiens
ctttttggaggccga

SEQ ID NO: 1246267 - DNA, 15 bp, Homo sapiens
gctttttggaggccg

SEQ ID NO: 1246268 - DNA, 15 bp, Homo sapiens
tgctttttggaggcc

SEQ ID NO: 1246269 - DNA, 15 bp, Homo sapiens
gtgctttttggaggc

SEQ ID NO: 1246270 - DNA, 15 bp, Homo sapiens
agtgctttttggagg

SEQ ID NO: 1246271 - DNA, 15 bp, Homo sapiens
aagtgctttttggag

SEQ ID NO: 1246272 - DNA, 15 bp, Homo sapiens
caagtgctttttgga

SEQ ID NO: 1246273 - DNA, 15 bp, Homo sapiens
ccaagtgctttttgg

SEQ ID NO: 1246274 - DNA, 15 bp, Homo sapiens
cccaagtgctttttg

SEQ ID NO: 1246275 - DNA, 15 bp, Homo sapiens
tcccaagtgcttttt

SEQ ID NO: 1246276 - DNA, 15 bp, Homo sapiens
atcccaagtgctttt

SEQ ID NO: 1246277 - DNA, 15 bp, Homo sapiens
aatcccaagtgcttt

SEQ ID NO: 1246278 - DNA, 15 bp, Homo sapiens
taatcccaagtgctt

SEQ ID NO: 1246279 - DNA, 15 bp, Homo sapiens
gtaatcccaagtgct

SEQ ID NO: 1246280 - DNA, 15 bp, Homo sapiens
ggtaatcccaagtgc

SEQ ID NO: 1246281 - DNA, 15 bp, Homo sapiens
tggtaatcccaagtg

SEQ ID NO: 1246282 - DNA, 15 bp, Homo sapiens
ctggtaatcccaagt

SEQ ID NO: 1246283 - DNA, 15 bp, Homo sapiens
gctggtaatcccaag

SEQ ID NO: 1246284 - DNA, 15 bp, Homo sapiens
tgctggtaatcccaa

SEQ ID NO: 1246285 - DNA, 15 bp, Homo sapiens
atgctggtaatccca

SEQ ID NO: 1246286 - DNA, 15 bp, Homo sapiens
catgctggtaatccc

SEQ ID NO: 1246287 - DNA, 15 bp, Homo sapiens
tcatgctggtaatcc

SEQ ID NO: 1246288 - DNA, 15 bp, Homo sapiens
ctcatgctggtaatc

SEQ ID NO: 1246289 - DNA, 15 bp, Homo sapiens
gctcatgctggtaat

SEQ ID NO: 1246290 - DNA, 15 bp, Homo sapiens
ggctcatgctggtaa

SEQ ID NO: 1246291 - DNA, 15 bp, Homo sapiens
tggctcatgctggta

SEQ ID NO: 1246292 - DNA, 15 bp, Homo sapiens
gtggctcatgctggt

SEQ ID NO: 1246293 - DNA, 15 bp, Homo sapiens
agtggctcatgctgg

SEQ ID NO: 1246294 - DNA, 15 bp, Homo sapiens
cagtggctcatgctg

SEQ ID NO: 1246295 - DNA, 15 bp, Homo sapiens
gcagtggctcatgct

SEQ ID NO: 1246296 - DNA, 15 bp, Homo sapiens
tggccaggtgcagtg

SEQ ID NO: 1246297 - DNA, 15 bp, Homo sapiens
gtggccaggtgcagt

SEQ ID NO: 1246298 - DNA, 15 bp, Homo sapiens
ggtggccaggtgcag

SEQ ID NO: 1246299 - DNA, 15 bp, Homo sapiens
tggtggccaggtgca

SEQ ID NO: 1246300 - DNA, 15 bp, Homo sapiens
ttggtggccaggtgc

SEQ ID NO: 1246301 - DNA, 15 bp, Homo sapiens
gttggtggccaggtg

SEQ ID NO: 1246302 - DNA, 15 bp, Homo sapiens
ggttggtggccaggt

SEQ ID NO: 1246303 - DNA, 15 bp, Homo sapiens
aggttggtggccagg

SEQ ID NO: 1246304 - DNA, 15 bp, Homo sapiens
taggttggtggccag

SEQ ID NO: 1246305 - DNA, 15 bp, Homo sapiens
gtaggttggtggcca

SEQ ID NO: 1246306 - DNA, 15 bp, Homo sapiens
tgtaggttggtggcc

SEQ ID NO: 1246307 - DNA, 15 bp, Homo sapiens
ctgtaggttggtggc

SEQ ID NO: 1246308 - DNA, 15 bp, Homo sapiens
actgtaggttggtgg

SEQ ID NO: 1246309 - DNA, 15 bp, Homo sapiens
gactgtaggttggtg

SEQ ID NO: 1246310 - DNA, 15 bp, Homo sapiens
agactgtaggttggt

SEQ ID NO: 1246311 - DNA, 15 bp, Homo sapiens
aagactgtaggttgg

SEQ ID NO: 1246312 - DNA, 15 bp, Homo sapiens
taagactgtaggttg

SEQ ID NO: 1246313 - DNA, 15 bp, Homo sapiens
ataagactgtaggtt

SEQ ID NO: 1246314 - DNA, 15 bp, Homo sapiens
gataagactgtaggt

SEQ ID NO: 1246315 - DNA, 15 bp, Homo sapiens
tgataagactgtagg

SEQ ID NO: 1246316 - DNA, 15 bp, Homo sapiens
atgataagactgtag

SEQ ID NO: 1246317 - DNA, 15 bp, Homo sapiens
gatgataagactgta

SEQ ID NO: 1246318 - DNA, 15 bp, Homo sapiens
tgatgataagactgt

SEQ ID NO: 1246319 - DNA, 15 bp, Homo sapiens
gtgatgataagactg

SEQ ID NO: 1246320 - DNA, 15 bp, Homo sapiens
agtgatgataagact

SEQ ID NO: 1246321 - DNA, 15 bp, Homo sapiens
cagtgatgataagac

SEQ ID NO: 1246322 - DNA, 15 bp, Homo sapiens
tcagtgatgataaga

SEQ ID NO: 1246323 - DNA, 15 bp, Homo sapiens
ctcagtgatgataag

SEQ ID NO: 1246324 - DNA, 15 bp, Homo sapiens
actcagtgatgataa

SEQ ID NO: 1246325 - DNA, 15 bp, Homo sapiens
aactcagtgatgata

SEQ ID NO: 1246326 - DNA, 15 bp, Homo sapiens
gaactcagtgatgat

SEQ ID NO: 1246327 - DNA, 15 bp, Homo sapiens
cgaactcagtgatga

SEQ ID NO: 1246328 - DNA, 15 bp, Homo sapiens
acgaactcagtgatg

SEQ ID NO: 1246329 - DNA, 15 bp, Homo sapiens
tacgaactcagtgat

SEQ ID NO: 1246330 - DNA, 15 bp, Homo sapiens
atacgaactcagtga

SEQ ID NO: 1246331 - DNA, 15 bp, Homo sapiens
gatacgaactcagtg

SEQ ID NO: 1246332 - DNA, 15 bp, Homo sapiens
agatacgaactcagt

SEQ ID NO: 1246333 - DNA, 15 bp, Homo sapiens
tagatacgaactcag

SEQ ID NO: 1246334 - DNA, 15 bp, Homo sapiens
gtagatacgaactca

SEQ ID NO: 1246335 - DNA, 15 bp, Homo sapiens
ggtagatacgaactc

SEQ ID NO: 1246336 - DNA, 15 bp, Homo sapiens
aggtagatacgaact

SEQ ID NO: 1246337 - DNA, 15 bp, Homo sapiens
caggtagatacgaac

SEQ ID NO: 1246338 - DNA, 15 bp, Homo sapiens
gcaggtagatacgaa

SEQ ID NO: 1246339 - DNA, 15 bp, Homo sapiens
tgcaggtagatacga

SEQ ID NO: 1246340 - DNA, 15 bp, Homo sapiens
atgcaggtagatacg

SEQ ID NO: 1246341 - DNA, 15 bp, Homo sapiens
gatgcaggtagatac

SEQ ID NO: 1246342 - DNA, 15 bp, Homo sapiens
ggatgcaggtagata

SEQ ID NO: 1246343 - DNA, 15 bp, Homo sapiens
aggatgcaggtagat

SEQ ID NO: 1246344 - DNA, 15 bp, Homo sapiens
caggatgcaggtaga

SEQ ID NO: 1246345 - DNA, 15 bp, Homo sapiens
acaggatgcaggtag

SEQ ID NO: 1246346 - DNA, 15 bp, Homo sapiens
gacaggatgcaggta

SEQ ID NO: 1246347 - DNA, 15 bp, Homo sapiens
ggacaggatgcaggt

SEQ ID NO: 1246348 - DNA, 15 bp, Homo sapiens
tggacaggatgcagg

SEQ ID NO: 1246349 - DNA, 15 bp, Homo sapiens
ttggacaggatgcag

SEQ ID NO: 1246350 - DNA, 15 bp, Homo sapiens
attggacaggatgca

SEQ ID NO: 1246351 - DNA, 15 bp, Homo sapiens
tattggacaggatgc

SEQ ID NO: 1246352 - DNA, 15 bp, Homo sapiens
gtattggacaggatg

SEQ ID NO: 1246353 - DNA, 15 bp, Homo sapiens
agtattggacaggat

SEQ ID NO: 1246354 - DNA, 15 bp, Homo sapiens
gagtattggacagga

SEQ ID NO: 1246355 - DNA, 15 bp, Homo sapiens
ggagtattggacagg

SEQ ID NO: 1246356 - DNA, 15 bp, Homo sapiens
cggagtattggacag

SEQ ID NO: 1246357 - DNA, 15 bp, Homo sapiens
acggagtattggaca

SEQ ID NO: 1246358 - DNA, 15 bp, Homo sapiens
tacggagtattggac

SEQ ID NO: 1246359 - DNA, 15 bp, Homo sapiens
gtacggagtattgga

SEQ ID NO: 1246360 - DNA, 15 bp, Homo sapiens
agtacggagtattgg

SEQ ID NO: 1246361 - DNA, 15 bp, Homo sapiens
tagtacggagtattg

SEQ ID NO: 1246362 - DNA, 15 bp, Homo sapiens
gtagtacggagtatt

SEQ ID NO: 1246363 - DNA, 15 bp, Homo sapiens
ggtagtacggagtat

SEQ ID NO: 1246364 - DNA, 15 bp, Homo sapiens
tggtagtacggagta

SEQ ID NO: 1246365 - DNA, 15 bp, Homo sapiens
ttggtagtacggagt

SEQ ID NO: 1246366 - DNA, 15 bp, Homo sapiens
attggtagtacggag

SEQ ID NO: 1246367 - DNA, 15 bp, Homo sapiens
gattggtagtacgga

SEQ ID NO: 1246368 - DNA, 15 bp, Homo sapiens
agattggtagtacgg

SEQ ID NO: 1246369 - DNA, 15 bp, Homo sapiens
aagattggtagtacg

SEQ ID NO: 1246370 - DNA, 15 bp, Homo sapiens
aaagattggtagtac

SEQ ID NO: 1246371 - DNA, 15 bp, Homo sapiens
gaaagattggtagta

SEQ ID NO: 1246372 - DNA, 15 bp, Homo sapiens
tgaaagattggtagt

SEQ ID NO: 1246373 - DNA, 15 bp, Homo sapiens
ttgaaagattggtag

SEQ ID NO: 1246374 - DNA, 15 bp, Homo sapiens
tttgaaagattggta

SEQ ID NO: 1246375 - DNA, 15 bp, Homo sapiens
atttgaaagattggt

SEQ ID NO: 1246376 - DNA, 15 bp, Homo sapiens
aatttgaaagattgg

SEQ ID NO: 1246377 - DNA, 15 bp, Homo sapiens
aaatttgaaagattg

SEQ ID NO: 1246378 - DNA, 15 bp, Homo sapiens
aaaatttgaaagatt

SEQ ID NO: 1246379 - DNA, 15 bp, Homo sapiens
aaaaatttgaaagat

SEQ ID NO: 1246380 - DNA, 15 bp, Homo sapiens
caaaaatttgaaaga

SEQ ID NO: 1246381 - DNA, 15 bp, Homo sapiens
acaaaaatttgaaag

SEQ ID NO: 1246382 - DNA, 15 bp, Homo sapiens
gacaaaaatttgaaa

SEQ ID NO: 1246383 - DNA, 15 bp, Homo sapiens
cgacaaaaatttgaa

SEQ ID NO: 1246384 - DNA, 15 bp, Homo sapiens
ccgacaaaaatttga

SEQ ID NO: 1246385 - DNA, 15 bp, Homo sapiens
gccgacaaaaatttg

SEQ ID NO: 1246386 - DNA, 15 bp, Homo sapiens
agccgacaaaaattt

SEQ ID NO: 1246387 - DNA, 15 bp, Homo sapiens
cagccgacaaaaatt

SEQ ID NO: 1246388 - DNA, 15 bp, Homo sapiens
ccagccgacaaaaat

SEQ ID NO: 1246389 - DNA, 15 bp, Homo sapiens
cccagccgacaaaaa

SEQ ID NO: 1246390 - DNA, 15 bp, Homo sapiens
gcccagccgacaaaa

SEQ ID NO: 1246391 - DNA, 15 bp, Homo sapiens
tgcccagccgacaaa

SEQ ID NO: 1246392 - DNA, 15 bp, Homo sapiens
gtgcccagccgacaa

SEQ ID NO: 1246393 - DNA, 15 bp, Homo sapiens
ggagacgccattggg

SEQ ID NO: 1246394 - DNA, 15 bp, Homo sapiens
gggagacgccattgg

SEQ ID NO: 1246395 - DNA, 15 bp, Homo sapiens
tgggagacgccattg

SEQ ID NO: 1246396 - DNA, 15 bp, Homo sapiens
atgggagacgccatt

SEQ ID NO: 1246397 - DNA, 15 bp, Homo sapiens
gatgggagacgccat

SEQ ID NO: 1246398 - DNA, 15 bp, Homo sapiens
agatgggagacgcca

SEQ ID NO: 1246399 - DNA, 15 bp, Homo sapiens
gagatgggagacgcc

SEQ ID NO: 1246400 - DNA, 15 bp, Homo sapiens
ggagatgggagacgc

SEQ ID NO: 1246401 - DNA, 15 bp, Homo sapiens
gggagatgggagacg

SEQ ID NO: 1246402 - DNA, 15 bp, Homo sapiens
ggggagatgggagac

SEQ ID NO: 1246403 - DNA, 15 bp, Homo sapiens
gggggagatgggaga

SEQ ID NO: 1246404 - DNA, 15 bp, Homo sapiens
cgggggagatgggag

SEQ ID NO: 1246405 - DNA, 15 bp, Homo sapiens
gcgggggagatggga

SEQ ID NO: 1246406 - DNA, 15 bp, Homo sapiens
tgcgggggagatggg

SEQ ID NO: 1246407 - DNA, 15 bp, Homo sapiens
atgcgggggagatgg

SEQ ID NO: 1246408 - DNA, 15 bp, Homo sapiens
catgcgggggagatg

SEQ ID NO: 1246409 - DNA, 15 bp, Homo sapiens
ccatgcgggggagat

SEQ ID NO: 1246410 - DNA, 15 bp, Homo sapiens
cccatgcgggggaga

SEQ ID NO: 1246411 - DNA, 15 bp, Homo sapiens
tcccatgcgggggag

SEQ ID NO: 1246412 - DNA, 15 bp, Homo sapiens
ttcccatgcggggga

SEQ ID NO: 1246413 - DNA, 15 bp, Homo sapiens
tttcccatgcggggg

SEQ ID NO: 1246414 - DNA, 15 bp, Homo sapiens
ctttcccatgcgggg

SEQ ID NO: 1246415 - DNA, 15 bp, Homo sapiens
cctttcccatgcggg

SEQ ID NO: 1246416 - DNA, 15 bp, Homo sapiens
gcctttcccatgcgg

SEQ ID NO: 1246417 - DNA, 15 bp, Homo sapiens
ggcctttcccatgcg

SEQ ID NO: 1246418 - DNA, 15 bp, Homo sapiens
cggcctttcccatgc

SEQ ID NO: 1246419 - DNA, 15 bp, Homo sapiens
ccggcctttcccatg

SEQ ID NO: 1246420 - DNA, 15 bp, Homo sapiens
accggcctttcccat

SEQ ID NO: 1246421 - DNA, 15 bp, Homo sapiens
caccggcctttccca

SEQ ID NO: 1246422 - DNA, 15 bp, Homo sapiens
gcaccggcctttccc

SEQ ID NO: 1246423 - DNA, 15 bp, Homo sapiens
agcaccggcctttcc

SEQ ID NO: 1246424 - DNA, 15 bp, Homo sapiens
cagcaccggcctttc

SEQ ID NO: 1246425 - DNA, 15 bp, Homo sapiens
gcagcaccggccttt

SEQ ID NO: 1246426 - DNA, 15 bp, Homo sapiens
ggcagcaccggcctt

SEQ ID NO: 1246427 - DNA, 15 bp, Homo sapiens
gggcagcaccggcct

SEQ ID NO: 1246428 - DNA, 15 bp, Homo sapiens
agggcagcaccggcc

SEQ ID NO: 1246429 - DNA, 15 bp, Homo sapiens
gagggcagcaccggc

SEQ ID NO: 1246430 - DNA, 15 bp, Homo sapiens
agagggcagcaccgg

SEQ ID NO: 1246431 - DNA, 15 bp, Homo sapiens
cagagggcagcaccg

SEQ ID NO: 1246432 - DNA, 15 bp, Homo sapiens
ccagagggcagcacc

SEQ ID NO: 1246433 - DNA, 15 bp, Homo sapiens
cccagagggcagcac

SEQ ID NO: 1246434 - DNA, 15 bp, Homo sapiens
tcccagagggcagca

SEQ ID NO: 1246435 - DNA, 15 bp, Homo sapiens
ctcccagagggcagc

SEQ ID NO: 1246436 - DNA, 15 bp, Homo sapiens
gctcccagagggcag

SEQ ID NO: 1246437 - DNA, 15 bp, Homo sapiens
ggctcccagagggca

SEQ ID NO: 1246438 - DNA, 15 bp, Homo sapiens
aggctcccagagggc

SEQ ID NO: 1246439 - DNA, 15 bp, Homo sapiens
caggctcccagaggg

SEQ ID NO: 1246440 - DNA, 15 bp, Homo sapiens
ccaggctcccagagg

SEQ ID NO: 1246441 - DNA, 15 bp, Homo sapiens
gccaggctcccagag

SEQ ID NO: 1246442 - DNA, 15 bp, Homo sapiens
tgccaggctcccaga

SEQ ID NO: 1246443 - DNA, 15 bp, Homo sapiens
ctgccaggctcccag

SEQ ID NO: 1246444 - DNA, 15 bp, Homo sapiens
cctgccaggctccca

SEQ ID NO: 1246445 - DNA, 15 bp, Homo sapiens
tcctgccaggctccc

SEQ ID NO: 1246446 - DNA, 15 bp, Homo sapiens
ctcctgccaggctcc

SEQ ID NO: 1246447 - DNA, 15 bp, Homo sapiens
cctcctgccaggctc

SEQ ID NO: 1246448 - DNA, 15 bp, Homo sapiens
tcctcctgccaggct

SEQ ID NO: 1246449 - DNA, 15 bp, Homo sapiens
ttcctcctgccaggc

SEQ ID NO: 1246450 - DNA, 15 bp, Homo sapiens
gttcctcctgccagg

SEQ ID NO: 1246451 - DNA, 15 bp, Homo sapiens
tgttcctcctgccag

SEQ ID NO: 1246452 - DNA, 15 bp, Homo sapiens
gtgttcctcctgcca

SEQ ID NO: 1246453 - DNA, 15 bp, Homo sapiens
agtgttcctcctgcc

SEQ ID NO: 1246454 - DNA, 15 bp, Homo sapiens
cagtgttcctcctgc

SEQ ID NO: 1246455 - DNA, 15 bp, Homo sapiens
ccagtgttcctcctg

SEQ ID NO: 1246456 - DNA, 15 bp, Homo sapiens
cccagtgttcctcct

SEQ ID NO: 1246457 - DNA, 15 bp, Homo sapiens
acccagtgttcctcc

SEQ ID NO: 1246458 - DNA, 15 bp, Homo sapiens
aacccagtgttcctc

SEQ ID NO: 1246459 - DNA, 15 bp, Homo sapiens
caacccagtgttcct

SEQ ID NO: 1246460 - DNA, 15 bp, Homo sapiens
ccaacccagtgttcc

SEQ ID NO: 1246461 - DNA, 15 bp, Homo sapiens
cccaacccagtgttc

SEQ ID NO: 1246462 - DNA, 15 bp, Homo sapiens
ccccaacccagtgtt

SEQ ID NO: 1246463 - DNA, 15 bp, Homo sapiens
tccccaacccagtgt

SEQ ID NO: 1246464 - DNA, 15 bp, Homo sapiens
ctccccaacccagtg

SEQ ID NO: 1246465 - DNA, 15 bp, Homo sapiens
cctccccaacccagt

SEQ ID NO: 1246466 - DNA, 15 bp, Homo sapiens
ccctccccaacccag

SEQ ID NO: 1246467 - DNA, 15 bp, Homo sapiens
cccctccccaaccca

SEQ ID NO: 1246468 - DNA, 15 bp, Homo sapiens
ccccctccccaaccc

SEQ ID NO: 1246469 - DNA, 15 bp, Homo sapiens
cccccctccccaacc

SEQ ID NO: 1246470 - DNA, 15 bp, Homo sapiens
gcccccctccccaac

SEQ ID NO: 1246471 - DNA, 15 bp, Homo sapiens
tgcccccctccccaa

SEQ ID NO: 1246472 - DNA, 15 bp, Homo sapiens
atgcccccctcccca

SEQ ID NO: 1246473 - DNA, 15 bp, Homo sapiens
catgcccccctcccc

SEQ ID NO: 1246474 - DNA, 15 bp, Homo sapiens
acatgcccccctccc

SEQ ID NO: 1246475 - DNA, 15 bp, Homo sapiens
cacatgcccccctcc

SEQ ID NO: 1246476 - DNA, 15 bp, Homo sapiens
acacatgcccccctc

SEQ ID NO: 1246477 - DNA, 15 bp, Homo sapiens
cacacatgcccccct

SEQ ID NO: 1246478 - DNA, 15 bp, Homo sapiens
ccacacatgcccccc

SEQ ID NO: 1246479 - DNA, 15 bp, Homo sapiens
accacacatgccccc

SEQ ID NO: 1246480 - DNA, 15 bp, Homo sapiens
gaccacacatgcccc

SEQ ID NO: 1246481 - DNA, 15 bp, Homo sapiens
ggaccacacatgccc

SEQ ID NO: 1246482 - DNA, 15 bp, Homo sapiens
gggaccacacatgcc

SEQ ID NO: 1246483 - DNA, 15 bp, Homo sapiens
tgggaccacacatgc

SEQ ID NO: 1246484 - DNA, 15 bp, Homo sapiens
ttgggaccacacatg

SEQ ID NO: 1246485 - DNA, 15 bp, Homo sapiens
cttgggaccacacat

SEQ ID NO: 1246486 - DNA, 15 bp, Homo sapiens
acttgggaccacaca

SEQ ID NO: 1246487 - DNA, 15 bp, Homo sapiens
gacttgggaccacac

SEQ ID NO: 1246488 - DNA, 15 bp, Homo sapiens
agacttgggaccaca

SEQ ID NO: 1246489 - DNA, 15 bp, Homo sapiens
cagacttgggaccac

SEQ ID NO: 1246490 - DNA, 15 bp, Homo sapiens
ccagacttgggacca

SEQ ID NO: 1246491 - DNA, 15 bp, Homo sapiens
tccagacttgggacc

SEQ ID NO: 1246492 - DNA, 15 bp, Homo sapiens
ttccagacttgggac

SEQ ID NO: 1246493 - DNA, 15 bp, Homo sapiens
cttccagacttggga

SEQ ID NO: 1246494 - DNA, 15 bp, Homo sapiens
tcttccagacttggg

SEQ ID NO: 1246495 - DNA, 15 bp, Homo sapiens
ttcttccagacttgg

SEQ ID NO: 1246496 - DNA, 15 bp, Homo sapiens
cttcttccagacttg

SEQ ID NO: 1246497 - DNA, 15 bp, Homo sapiens
gcttcttccagactt

SEQ ID NO: 1246498 - DNA, 15 bp, Homo sapiens
agcttcttccagact

SEQ ID NO: 1246499 - DNA, 15 bp, Homo sapiens
gagcttcttccagac

SEQ ID NO: 1246500 - DNA, 15 bp, Homo sapiens
ggagcttcttccaga

SEQ ID NO: 1246501 - DNA, 15 bp, Homo sapiens
aggagcttcttccag

SEQ ID NO: 1246502 - DNA, 15 bp, Homo sapiens
aaggagcttcttcca

SEQ ID NO: 1246503 - DNA, 15 bp, Homo sapiens
gaaggagcttcttcc

SEQ ID NO: 1246504 - DNA, 15 bp, Homo sapiens
ggaaggagcttcttc

SEQ ID NO: 1246505 - DNA, 15 bp, Homo sapiens
aggaaggagcttctt

SEQ ID NO: 1246506 - DNA, 15 bp, Homo sapiens
gaggaaggagcttct

SEQ ID NO: 1246507 - DNA, 15 bp, Homo sapiens
agaggaaggagcttc

SEQ ID NO: 1246508 - DNA, 15 bp, Homo sapiens
aagaggaaggagctt

SEQ ID NO: 1246509 - DNA, 15 bp, Homo sapiens
gaagaggaaggagct

SEQ ID NO: 1246510 - DNA, 15 bp, Homo sapiens
agaagaggaaggagc

SEQ ID NO: 1246511 - DNA, 15 bp, Homo sapiens
gagaagaggaaggag

SEQ ID NO: 1246512 - DNA, 15 bp, Homo sapiens
ggagaagaggaagga

SEQ ID NO: 1246513 - DNA, 15 bp, Homo sapiens
gggagaagaggaagg

SEQ ID NO: 1246514 - DNA, 15 bp, Homo sapiens
cgggagaagaggaag

SEQ ID NO: 1246515 - DNA, 15 bp, Homo sapiens
gcgggagaagaggaa

SEQ ID NO: 1246516 - DNA, 15 bp, Homo sapiens
agcgggagaagagga

SEQ ID NO: 1246517 - DNA, 15 bp, Homo sapiens
cagcgggagaagagg

SEQ ID NO: 1246518 - DNA, 15 bp, Homo sapiens
ccagcgggagaagag

SEQ ID NO: 1246519 - DNA, 15 bp, Homo sapiens
cccagcgggagaaga

SEQ ID NO: 1246520 - DNA, 15 bp, Homo sapiens
tcccagcgggagaag

SEQ ID NO: 1246521 - DNA, 15 bp, Homo sapiens
ctcccagcgggagaa

SEQ ID NO: 1246522 - DNA, 15 bp, Homo sapiens
gctcccagcgggaga

SEQ ID NO: 1246523 - DNA, 15 bp, Homo sapiens
agctcccagcgggag

SEQ ID NO: 1246524 - DNA, 15 bp, Homo sapiens
cagctcccagcggga

SEQ ID NO: 1246525 - DNA, 15 bp, Homo sapiens
gcagctcccagcggg

SEQ ID NO: 1246526 - DNA, 15 bp, Homo sapiens
cgcagctcccagcgg

SEQ ID NO: 1246527 - DNA, 15 bp, Homo sapiens
acgcagctcccagcg

SEQ ID NO: 1246528 - DNA, 15 bp, Homo sapiens
cacccccattctcca

SEQ ID NO: 1246529 - DNA, 15 bp, Homo sapiens
gcacccccattctcc

SEQ ID NO: 1246530 - DNA, 15 bp, Homo sapiens
agcacccccattctc

SEQ ID NO: 1246531 - DNA, 15 bp, Homo sapiens
cagcacccccattct

SEQ ID NO: 1246532 - DNA, 15 bp, Homo sapiens
gcagcacccccattc

SEQ ID NO: 1246533 - DNA, 15 bp, Homo sapiens
ggcagcacccccatt

SEQ ID NO: 1246534 - DNA, 15 bp, Homo sapiens
aggcagcacccccat

SEQ ID NO: 1246535 - DNA, 15 bp, Homo sapiens
caggcagcaccccca

SEQ ID NO: 1246536 - DNA, 15 bp, Homo sapiens
gcaggcagcaccccc

SEQ ID NO: 1246537 - DNA, 15 bp, Homo sapiens
tgcaggcagcacccc

SEQ ID NO: 1246538 - DNA, 15 bp, Homo sapiens
ctgcaggcagcaccc

SEQ ID NO: 1246539 - DNA, 15 bp, Homo sapiens
actgcaggcagcacc

SEQ ID NO: 1246540 - DNA, 15 bp, Homo sapiens
gactgcaggcagcac

SEQ ID NO: 1246541 - DNA, 15 bp, Homo sapiens
tgactgcaggcagca

SEQ ID NO: 1246542 - DNA, 15 bp, Homo sapiens
ttgactgcaggcagc

SEQ ID NO: 1246543 - DNA, 15 bp, Homo sapiens
tttgactgcaggcag

SEQ ID NO: 1246544 - DNA, 15 bp, Homo sapiens
ttttgactgcaggca

SEQ ID NO: 1246545 - DNA, 15 bp, Homo sapiens
gttttgactgcaggc

SEQ ID NO: 1246546 - DNA, 15 bp, Homo sapiens
cgttttgactgcagg

SEQ ID NO: 1246547 - DNA, 15 bp, Homo sapiens
ccgttttgactgcag

SEQ ID NO: 1246548 - DNA, 15 bp, Homo sapiens
tccgttttgactgca

SEQ ID NO: 1246549 - DNA, 15 bp, Homo sapiens
ctccgttttgactgc

SEQ ID NO: 1246550 - DNA, 15 bp, Homo sapiens
actccgttttgactg

SEQ ID NO: 1246551 - DNA, 15 bp, Homo sapiens
cactccgttttgact

SEQ ID NO: 1246552 - DNA, 15 bp, Homo sapiens
ccactccgttttgac

SEQ ID NO: 1246553 - DNA, 15 bp, Homo sapiens
cccactccgttttga

SEQ ID NO: 1246554 - DNA, 15 bp, Homo sapiens
ccccactccgttttg

SEQ ID NO: 1246555 - DNA, 15 bp, Homo sapiens
cccccactccgtttt

SEQ ID NO: 1246556 - DNA, 15 bp, Homo sapiens
acccccactccgttt

SEQ ID NO: 1246557 - DNA, 15 bp, Homo sapiens
cacccccactccgtt

SEQ ID NO: 1246558 - DNA, 15 bp, Homo sapiens
gcacccccactccgt

SEQ ID NO: 1246559 - DNA, 15 bp, Homo sapiens
ggcacccccactccg

SEQ ID NO: 1246560 - DNA, 15 bp, Homo sapiens
gggcacccccactcc

SEQ ID NO: 1246561 - DNA, 15 bp, Homo sapiens
tgggcacccccactc

SEQ ID NO: 1246562 - DNA, 15 bp, Homo sapiens
ctgggcacccccact

SEQ ID NO: 1246563 - DNA, 15 bp, Homo sapiens
gctgggcacccccac

SEQ ID NO: 1246564 - DNA, 15 bp, Homo sapiens
agctgggcaccccca

SEQ ID NO: 1246565 - DNA, 15 bp, Homo sapiens
gagctgggcaccccc

SEQ ID NO: 1246566 - DNA, 15 bp, Homo sapiens
tgagctgggcacccc

SEQ ID NO: 1246567 - DNA, 15 bp, Homo sapiens
ctgagctgggcaccc

SEQ ID NO: 1246568 - DNA, 15 bp, Homo sapiens
cctgagctgggcacc

SEQ ID NO: 1246569 - DNA, 15 bp, Homo sapiens
ccctgagctgggcac

SEQ ID NO: 1246570 - DNA, 15 bp, Homo sapiens
gccctgagctgggca

SEQ ID NO: 1246571 - DNA, 15 bp, Homo sapiens
ggccctgagctgggc

SEQ ID NO: 1246572 - DNA, 15 bp, Homo sapiens
tggccctgagctggg

SEQ ID NO: 1246573 - DNA, 15 bp, Homo sapiens
ctggccctgagctgg

SEQ ID NO: 1246574 - DNA, 15 bp, Homo sapiens
tctggccctgagctg

SEQ ID NO: 1246575 - DNA, 15 bp, Homo sapiens
ttctggccctgagct

SEQ ID NO: 1246576 - DNA, 15 bp, Homo sapiens
attctggccctgagc

SEQ ID NO: 1246577 - DNA, 15 bp, Homo sapiens
cattctggccctgag

SEQ ID NO: 1246578 - DNA, 15 bp, Homo sapiens
tcattctggccctga

SEQ ID NO: 1246579 - DNA, 15 bp, Homo sapiens
atcattctggccctg

SEQ ID NO: 1246580 - DNA, 15 bp, Homo sapiens
gatcattctggccct

SEQ ID NO: 1246581 - DNA, 15 bp, Homo sapiens
ggatcattctggccc

SEQ ID NO: 1246582 - DNA, 15 bp, Homo sapiens
aggatcattctggcc

SEQ ID NO: 1246583 - DNA, 15 bp, Homo sapiens
taggatcattctggc

SEQ ID NO: 1246584 - DNA, 15 bp, Homo sapiens
ataggatcattctgg

SEQ ID NO: 1246585 - DNA, 15 bp, Homo sapiens
aataggatcattctg

SEQ ID NO: 1246586 - DNA, 15 bp, Homo sapiens
gaataggatcattct

SEQ ID NO: 1246587 - DNA, 15 bp, Homo sapiens
ggaataggatcattc

SEQ ID NO: 1246588 - DNA, 15 bp, Homo sapiens
gggaataggatcatt

SEQ ID NO: 1246589 - DNA, 15 bp, Homo sapiens
cgggaataggatcat

SEQ ID NO: 1246590 - DNA, 15 bp, Homo sapiens
ccgggaataggatca

SEQ ID NO: 1246591 - DNA, 15 bp, Homo sapiens
gccgggaataggatc

SEQ ID NO: 1246592 - DNA, 15 bp, Homo sapiens
tgccgggaataggat

SEQ ID NO: 1246593 - DNA, 15 bp, Homo sapiens
gtgccgggaatagga

SEQ ID NO: 1246594 - DNA, 15 bp, Homo sapiens
agtgccgggaatagg

SEQ ID NO: 1246595 - DNA, 15 bp, Homo sapiens
aagtgccgggaatag

SEQ ID NO: 1246596 - DNA, 15 bp, Homo sapiens
gaagtgccgggaata

SEQ ID NO: 1246597 - DNA, 15 bp, Homo sapiens
agaagtgccgggaat

SEQ ID NO: 1246598 - DNA, 15 bp, Homo sapiens
gagaagtgccgggaa

SEQ ID NO: 1246599 - DNA, 15 bp, Homo sapiens
tgagaagtgccggga

SEQ ID NO: 1246600 - DNA, 15 bp, Homo sapiens
ctgagaagtgccggg

SEQ ID NO: 1246601 - DNA, 15 bp, Homo sapiens
actgagaagtgccgg

SEQ ID NO: 1246602 - DNA, 15 bp, Homo sapiens
cactgagaagtgccg

SEQ ID NO: 1246603 - DNA, 15 bp, Homo sapiens
tcactgagaagtgcc

SEQ ID NO: 1246604 - DNA, 15 bp, Homo sapiens
ctcactgagaagtgc

SEQ ID NO: 1246605 - DNA, 15 bp, Homo sapiens
cctcactgagaagtg

SEQ ID NO: 1246606 - DNA, 15 bp, Homo sapiens
gcctcactgagaagt

SEQ ID NO: 1246607 - DNA, 15 bp, Homo sapiens
agcctcactgagaag

SEQ ID NO: 1246608 - DNA, 15 bp, Homo sapiens
gagcctcactgagaa

SEQ ID NO: 1246609 - DNA, 15 bp, Homo sapiens
agagcctcactgaga

SEQ ID NO: 1246610 - DNA, 15 bp, Homo sapiens
cagagcctcactgag

SEQ ID NO: 1246611 - DNA, 15 bp, Homo sapiens
acagagcctcactga

SEQ ID NO: 1246612 - DNA, 15 bp, Homo sapiens
cacagagcctcactg

SEQ ID NO: 1246613 - DNA, 15 bp, Homo sapiens
ccacagagcctcact

SEQ ID NO: 1246614 - DNA, 15 bp, Homo sapiens
gccacagagcctcac

SEQ ID NO: 1246615 - DNA, 15 bp, Homo sapiens
agccacagagcctca

SEQ ID NO: 1246616 - DNA, 15 bp, Homo sapiens
gagccacagagcctc

SEQ ID NO: 1246617 - DNA, 15 bp, Homo sapiens
tgagccacagagcct

SEQ ID NO: 1246618 - DNA, 15 bp, Homo sapiens
ggtgagccacagagc

SEQ ID NO: 1246619 - DNA, 15 bp, Homo sapiens
aggtgagccacagag

SEQ ID NO: 1246620 - DNA, 15 bp, Homo sapiens
taggtgagccacaga

SEQ ID NO: 1246621 - DNA, 15 bp, Homo sapiens
ttaggtgagccacag

SEQ ID NO: 1246622 - DNA, 15 bp, Homo sapiens
cttaggtgagccaca

SEQ ID NO: 1246623 - DNA, 15 bp, Homo sapiens
tcttaggtgagccac

SEQ ID NO: 1246624 - DNA, 15 bp, Homo sapiens
ttcttaggtgagcca

SEQ ID NO: 1246625 - DNA, 15 bp, Homo sapiens
tttcttaggtgagcc

SEQ ID NO: 1246626 - DNA, 15 bp, Homo sapiens
gtttcttaggtgagc

SEQ ID NO: 1246627 - DNA, 15 bp, Homo sapiens
ggtttcttaggtgag

SEQ ID NO: 1246628 - DNA, 15 bp, Homo sapiens
tggtttcttaggtga

SEQ ID NO: 1246629 - DNA, 15 bp, Homo sapiens
ctggtttcttaggtg

SEQ ID NO: 1246630 - DNA, 15 bp, Homo sapiens
gctggtttcttaggt

SEQ ID NO: 1246631 - DNA, 15 bp, Homo sapiens
ggctggtttcttagg

SEQ ID NO: 1246632 - DNA, 15 bp, Homo sapiens
aggctggtttcttag

SEQ ID NO: 1246633 - DNA, 15 bp, Homo sapiens
gaggctggtttctta

SEQ ID NO: 1246634 - DNA, 15 bp, Homo sapiens
ggaggctggtttctt

SEQ ID NO: 1246635 - DNA, 15 bp, Homo sapiens
gggaggctggtttct

SEQ ID NO: 1246636 - DNA, 15 bp, Homo sapiens
agggaggctggtttc

SEQ ID NO: 1246637 - DNA, 15 bp, Homo sapiens
aagggaggctggttt

SEQ ID NO: 1246638 - DNA, 15 bp, Homo sapiens
caagggaggctggtt

SEQ ID NO: 1246639 - DNA, 15 bp, Homo sapiens
gcaagggaggctggt

SEQ ID NO: 1246640 - DNA, 15 bp, Homo sapiens
tgcaagggaggctgg

SEQ ID NO: 1246641 - DNA, 15 bp, Homo sapiens
ctgcaagggaggctg

SEQ ID NO: 1246642 - DNA, 15 bp, Homo sapiens
cctgcaagggaggct

SEQ ID NO: 1246643 - DNA, 15 bp, Homo sapiens
gcctgcaagggaggc

SEQ ID NO: 1246644 - DNA, 15 bp, Homo sapiens
tgcctgcaagggagg

SEQ ID NO: 1246645 - DNA, 15 bp, Homo sapiens
ttgcctgcaagggag

SEQ ID NO: 1246646 - DNA, 15 bp, Homo sapiens
gttgcctgcaaggga

SEQ ID NO: 1246647 - DNA, 15 bp, Homo sapiens
cgttgcctgcaaggg

SEQ ID NO: 1246648 - DNA, 15 bp, Homo sapiens
ccgttgcctgcaagg

SEQ ID NO: 1246649 - DNA, 15 bp, Homo sapiens
gccgttgcctgcaag

SEQ ID NO: 1246650 - DNA, 15 bp, Homo sapiens
ggccgttgcctgcaa

SEQ ID NO: 1246651 - DNA, 15 bp, Homo sapiens
aggccgttgcctgca

SEQ ID NO: 1246652 - DNA, 15 bp, Homo sapiens
taggccgttgcctgc

SEQ ID NO: 1246653 - DNA, 15 bp, Homo sapiens
ctaggccgttgcctg

SEQ ID NO: 1246654 - DNA, 15 bp, Homo sapiens
gctaggccgttgcct

SEQ ID NO: 1246655 - DNA, 15 bp, Homo sapiens
agctaggccgttgcc

SEQ ID NO: 1246656 - DNA, 15 bp, Homo sapiens
cagctaggccgttgc

SEQ ID NO: 1246657 - DNA, 15 bp, Homo sapiens
ccagctaggccgttg

SEQ ID NO: 1246658 - DNA, 15 bp, Homo sapiens
gccagctaggccgtt

SEQ ID NO: 1246659 - DNA, 15 bp, Homo sapiens
ggccagctaggccgt

SEQ ID NO: 1246660 - DNA, 15 bp, Homo sapiens
aggccagctaggccg

SEQ ID NO: 1246661 - DNA, 15 bp, Homo sapiens
caggccagctaggcc

SEQ ID NO: 1246662 - DNA, 15 bp, Homo sapiens
ccaggccagctaggc

SEQ ID NO: 1246663 - DNA, 15 bp, Homo sapiens
accaggccagctagg

SEQ ID NO: 1246664 - DNA, 15 bp, Homo sapiens
gaccaggccagctag

SEQ ID NO: 1246665 - DNA, 15 bp, Homo sapiens
agaccaggccagcta

SEQ ID NO: 1246666 - DNA, 15 bp, Homo sapiens
cagaccaggccagct

SEQ ID NO: 1246667 - DNA, 15 bp, Homo sapiens
ccagaccaggccagc

SEQ ID NO: 1246668 - DNA, 15 bp, Homo sapiens
tccagaccaggccag

SEQ ID NO: 1246669 - DNA, 15 bp, Homo sapiens
ctccagaccaggcca

SEQ ID NO: 1246670 - DNA, 15 bp, Homo sapiens
cctccagaccaggcc

SEQ ID NO: 1246671 - DNA, 15 bp, Homo sapiens
gcctccagaccaggc

SEQ ID NO: 1246672 - DNA, 15 bp, Homo sapiens
agcctccagaccagg

SEQ ID NO: 1246673 - DNA, 15 bp, Homo sapiens
gagcctccagaccag

SEQ ID NO: 1246674 - DNA, 15 bp, Homo sapiens
agagcctccagacca

SEQ ID NO: 1246675 - DNA, 15 bp, Homo sapiens
gagagcctccagacc

SEQ ID NO: 1246676 - DNA, 15 bp, Homo sapiens
agagagcctccagac

SEQ ID NO: 1246677 - DNA, 15 bp, Homo sapiens
aagagagcctccaga

SEQ ID NO: 1246678 - DNA, 15 bp, Homo sapiens
gaagagagcctccag

SEQ ID NO: 1246679 - DNA, 15 bp, Homo sapiens
tgaagagagcctcca

SEQ ID NO: 1246680 - DNA, 15 bp, Homo sapiens
ttgaagagagcctcc

SEQ ID NO: 1246681 - DNA, 15 bp, Homo sapiens
tttgaagagagcctc

SEQ ID NO: 1246682 - DNA, 15 bp, Homo sapiens
atttgaagagagcct

SEQ ID NO: 1246683 - DNA, 15 bp, Homo sapiens
tatttgaagagagcc

SEQ ID NO: 1246684 - DNA, 15 bp, Homo sapiens
atatttgaagagagc

SEQ ID NO: 1246685 - DNA, 15 bp, Homo sapiens
aatatttgaagagag

SEQ ID NO: 1246686 - DNA, 15 bp, Homo sapiens
aaatatttgaagaga

SEQ ID NO: 1246687 - DNA, 15 bp, Homo sapiens
taaatatttgaagag

SEQ ID NO: 1246688 - DNA, 15 bp, Homo sapiens
gtaaatatttgaaga

SEQ ID NO: 1246689 - DNA, 15 bp, Homo sapiens
tgtaaatatttgaag

SEQ ID NO: 1246690 - DNA, 15 bp, Homo sapiens
atgtaaatatttgaa

SEQ ID NO: 1246691 - DNA, 15 bp, Homo sapiens
gatgtaaatatttga

SEQ ID NO: 1246692 - DNA, 15 bp, Homo sapiens
ggatgtaaatatttg

SEQ ID NO: 1246693 - DNA, 15 bp, Homo sapiens
tggatgtaaatattt

SEQ ID NO: 1246694 - DNA, 15 bp, Homo sapiens
gtggatgtaaatatt

SEQ ID NO: 1246695 - DNA, 15 bp, Homo sapiens
tgtggatgtaaatat

SEQ ID NO: 1246696 - DNA, 15 bp, Homo sapiens
gtgtggatgtaaata

SEQ ID NO: 1246697 - DNA, 15 bp, Homo sapiens
ggtgtggatgtaaat

SEQ ID NO: 1246698 - DNA, 15 bp, Homo sapiens
gggtgtggatgtaaa

SEQ ID NO: 1246699 - DNA, 15 bp, Homo sapiens
tgggtgtggatgtaa

SEQ ID NO: 1246700 - DNA, 15 bp, Homo sapiens
ttgggtgtggatgta

SEQ ID NO: 1246701 - DNA, 15 bp, Homo sapiens
cttgggtgtggatgt

SEQ ID NO: 1246702 - DNA, 15 bp, Homo sapiens
tcttgggtgtggatg

SEQ ID NO: 1246703 - DNA, 15 bp, Homo sapiens
atcttgggtgtggat

SEQ ID NO: 1246704 - DNA, 15 bp, Homo sapiens
tatcttgggtgtgga

SEQ ID NO: 1246705 - DNA, 15 bp, Homo sapiens
gtatcttgggtgtgg

SEQ ID NO: 1246706 - DNA, 15 bp, Homo sapiens
tgtatcttgggtgtg

SEQ ID NO: 1246707 - DNA, 15 bp, Homo sapiens
ctgtatcttgggtgt

SEQ ID NO: 1246708 - DNA, 15 bp, Homo sapiens
actgtatcttgggtg

SEQ ID NO: 1246709 - DNA, 15 bp, Homo sapiens
gactgtatcttgggt

SEQ ID NO: 1246710 - DNA, 15 bp, Homo sapiens
agactgtatcttggg

SEQ ID NO: 1246711 - DNA, 15 bp, Homo sapiens
aagactgtatcttgg

SEQ ID NO: 1246712 - DNA, 15 bp, Homo sapiens
caagactgtatcttg

SEQ ID NO: 1246713 - DNA, 15 bp, Homo sapiens
tcaagactgtatctt

SEQ ID NO: 1246714 - DNA, 15 bp, Homo sapiens
ctcaagactgtatct

SEQ ID NO: 1246715 - DNA, 15 bp, Homo sapiens
tctcaagactgtatc

SEQ ID NO: 1246716 - DNA, 15 bp, Homo sapiens
atctcaagactgtat

SEQ ID NO: 1246717 - DNA, 15 bp, Homo sapiens
aatctcaagactgta

SEQ ID NO: 1246718 - DNA, 15 bp, Homo sapiens
aaatctcaagactgt

SEQ ID NO: 1246719 - DNA, 15 bp, Homo sapiens
caaatctcaagactg

SEQ ID NO: 1246720 - DNA, 15 bp, Homo sapiens
tcaaatctcaagact

SEQ ID NO: 1246721 - DNA, 15 bp, Homo sapiens
gtcaaatctcaagac

SEQ ID NO: 1246722 - DNA, 15 bp, Homo sapiens
agtcaaatctcaaga

SEQ ID NO: 1246723 - DNA, 15 bp, Homo sapiens
gagtcaaatctcaag

SEQ ID NO: 1246724 - DNA, 15 bp, Homo sapiens
cgagtcaaatctcaa

SEQ ID NO: 1246725 - DNA, 15 bp, Homo sapiens
gcgagtcaaatctca

SEQ ID NO: 1246726 - DNA, 15 bp, Homo sapiens
tgcgagtcaaatctc

SEQ ID NO: 1246727 - DNA, 15 bp, Homo sapiens
atgcgagtcaaatct

SEQ ID NO: 1246728 - DNA, 15 bp, Homo sapiens
catgcgagtcaaatc

SEQ ID NO: 1246729 - DNA, 15 bp, Homo sapiens
tcatgcgagtcaaat

SEQ ID NO: 1246730 - DNA, 15 bp, Homo sapiens
atcatgcgagtcaaa

SEQ ID NO: 1246731 - DNA, 15 bp, Homo sapiens
aatcatgcgagtcaa

SEQ ID NO: 1246732 - DNA, 15 bp, Homo sapiens
caatcatgcgagtca

SEQ ID NO: 1246733 - DNA, 15 bp, Homo sapiens
gcaatcatgcgagtc

SEQ ID NO: 1246734 - DNA, 15 bp, Homo sapiens
agcaatcatgcgagt

SEQ ID NO: 1246735 - DNA, 15 bp, Homo sapiens
tagcaatcatgcgag

SEQ ID NO: 1246736 - DNA, 15 bp, Homo sapiens
atagcaatcatgcga

SEQ ID NO: 1246737 - DNA, 15 bp, Homo sapiens
catagcaatcatgcg

SEQ ID NO: 1246738 - DNA, 15 bp, Homo sapiens
ccatagcaatcatgc

SEQ ID NO: 1246739 - DNA, 15 bp, Homo sapiens
cccatagcaatcatg

SEQ ID NO: 1246740 - DNA, 15 bp, Homo sapiens
tcccatagcaatcat

SEQ ID NO: 1246741 - DNA, 15 bp, Homo sapiens
gtcccatagcaatca

SEQ ID NO: 1246742 - DNA, 15 bp, Homo sapiens
tgtcccatagcaatc

SEQ ID NO: 1246743 - DNA, 15 bp, Homo sapiens
ttgtcccatagcaat

SEQ ID NO: 1246744 - DNA, 15 bp, Homo sapiens
cttgtcccatagcaa

SEQ ID NO: 1246745 - DNA, 15 bp, Homo sapiens
acttgtcccatagca

SEQ ID NO: 1246746 - DNA, 15 bp, Homo sapiens
aacttgtcccatagc

SEQ ID NO: 1246747 - DNA, 15 bp, Homo sapiens
aaacttgtcccatag

SEQ ID NO: 1246748 - DNA, 15 bp, Homo sapiens
aaaacttgtcccata

SEQ ID NO: 1246749 - DNA, 15 bp, Homo sapiens
gaaaacttgtcccat

SEQ ID NO: 1246750 - DNA, 15 bp, Homo sapiens
tgaaaacttgtccca

SEQ ID NO: 1246751 - DNA, 15 bp, Homo sapiens
atgaaaacttgtccc

SEQ ID NO: 1246752 - DNA, 15 bp, Homo sapiens
gatgaaaacttgtcc

SEQ ID NO: 1246753 - DNA, 15 bp, Homo sapiens
agatgaaaacttgtc

SEQ ID NO: 1246754 - DNA, 15 bp, Homo sapiens
cagatgaaaacttgt

SEQ ID NO: 1246755 - DNA, 15 bp, Homo sapiens
gcagatgaaaacttg

SEQ ID NO: 1246756 - DNA, 15 bp, Homo sapiens
tgcagatgaaaactt

SEQ ID NO: 1246757 - DNA, 15 bp, Homo sapiens
ctgcagatgaaaact

SEQ ID NO: 1246758 - DNA, 15 bp, Homo sapiens
actgcagatgaaaac

SEQ ID NO: 1246759 - DNA, 15 bp, Homo sapiens
aactgcagatgaaaa

SEQ ID NO: 1246760 - DNA, 15 bp, Homo sapiens
aaactgcagatgaaa

SEQ ID NO: 1246761 - DNA, 15 bp, Homo sapiens
taaactgcagatgaa

SEQ ID NO: 1246762 - DNA, 15 bp, Homo sapiens
ttaaactgcagatga

SEQ ID NO: 1246763 - DNA, 15 bp, Homo sapiens
tttaaactgcagatg

SEQ ID NO: 1246764 - DNA, 15 bp, Homo sapiens
atttaaactgcagat

SEQ ID NO: 1246765 - DNA, 15 bp, Homo sapiens
gatttaaactgcaga

SEQ ID NO: 1246766 - DNA, 15 bp, Homo sapiens
agatttaaactgcag

SEQ ID NO: 1246767 - DNA, 15 bp, Homo sapiens
cagatttaaactgca

SEQ ID NO: 1246768 - DNA, 15 bp, Homo sapiens
acagatttaaactgc

SEQ ID NO: 1246769 - DNA, 15 bp, Homo sapiens
aacagatttaaactg

SEQ ID NO: 1246770 - DNA, 15 bp, Homo sapiens
aaacagatttaaact

SEQ ID NO: 1246771 - DNA, 15 bp, Homo sapiens
gaaacagatttaaac

SEQ ID NO: 1246772 - DNA, 15 bp, Homo sapiens
ggaaacagatttaaa

SEQ ID NO: 1246773 - DNA, 15 bp, Homo sapiens
gggaaacagatttaa

SEQ ID NO: 1246774 - DNA, 15 bp, Homo sapiens
tgggaaacagattta

SEQ ID NO: 1246775 - DNA, 15 bp, Homo sapiens
ttgggaaacagattt

SEQ ID NO: 1246776 - DNA, 15 bp, Homo sapiens
gttgggaaacagatt

SEQ ID NO: 1246777 - DNA, 15 bp, Homo sapiens
agttgggaaacagat

SEQ ID NO: 1246778 - DNA, 15 bp, Homo sapiens
aagttgggaaacaga

SEQ ID NO: 1246779 - DNA, 15 bp, Homo sapiens
taagttgggaaacag

SEQ ID NO: 1246780 - DNA, 15 bp, Homo sapiens
gtaagttgggaaaca

SEQ ID NO: 1246781 - DNA, 15 bp, Homo sapiens
tgtaagttgggaaac

SEQ ID NO: 1246782 - DNA, 15 bp, Homo sapiens
atgtaagttgggaaa

SEQ ID NO: 1246783 - DNA, 15 bp, Homo sapiens
aatgtaagttgggaa

SEQ ID NO: 1246784 - DNA, 15 bp, Homo sapiens
taatgtaagttggga

SEQ ID NO: 1246785 - DNA, 15 bp, Homo sapiens
ctaatgtaagttggg

SEQ ID NO: 1246786 - DNA, 15 bp, Homo sapiens
cctaatgtaagttgg

SEQ ID NO: 1246787 - DNA, 15 bp, Homo sapiens
ccctaatgtaagttg

SEQ ID NO: 1246788 - DNA, 15 bp, Homo sapiens
cccctaatgtaagtt

SEQ ID NO: 1246789 - DNA, 15 bp, Homo sapiens
acccctaatgtaagt

SEQ ID NO: 1246790 - DNA, 15 bp, Homo sapiens
aacccctaatgtaag

SEQ ID NO: 1246791 - DNA, 15 bp, Homo sapiens
aaacccctaatgtaa

SEQ ID NO: 1246792 - DNA, 15 bp, Homo sapiens
caaacccctaatgta

SEQ ID NO: 1246793 - DNA, 15 bp, Homo sapiens
ccaaacccctaatgt

SEQ ID NO: 1246794 - DNA, 15 bp, Homo sapiens
tccaaacccctaatg

SEQ ID NO: 1246795 - DNA, 15 bp, Homo sapiens
ttccaaacccctaat

SEQ ID NO: 1246796 - DNA, 15 bp, Homo sapiens
attccaaacccctaa

SEQ ID NO: 1246797 - DNA, 15 bp, Homo sapiens
aattccaaaccccta

SEQ ID NO: 1246798 - DNA, 15 bp, Homo sapiens
gaattccaaacccct

SEQ ID NO: 1246799 - DNA, 15 bp, Homo sapiens
agaattccaaacccc

SEQ ID NO: 1246800 - DNA, 15 bp, Homo sapiens
tagaattccaaaccc

SEQ ID NO: 1246801 - DNA, 15 bp, Homo sapiens
ctagaattccaaacc

SEQ ID NO: 1246802 - DNA, 15 bp, Homo sapiens
tctagaattccaaac

SEQ ID NO: 1246803 - DNA, 15 bp, Homo sapiens
atctagaattccaaa

SEQ ID NO: 1246804 - DNA, 15 bp, Homo sapiens
gatctagaattccaa

SEQ ID NO: 1246805 - DNA, 15 bp, Homo sapiens
cgatctagaattcca

SEQ ID NO: 1246806 - DNA, 15 bp, Homo sapiens
acgatctagaattcc

SEQ ID NO: 1246807 - DNA, 15 bp, Homo sapiens
tacgatctagaattc

SEQ ID NO: 1246808 - DNA, 15 bp, Homo sapiens
atacgatctagaatt

SEQ ID NO: 1246809 - DNA, 15 bp, Homo sapiens
aatacgatctagaat

SEQ ID NO: 1246810 - DNA, 15 bp, Homo sapiens
aaatacgatctagaa

SEQ ID NO: 1246811 - DNA, 15 bp, Homo sapiens
caaatacgatctaga

SEQ ID NO: 1246812 - DNA, 15 bp, Homo sapiens
tcaaatacgatctag

SEQ ID NO: 1246813 - DNA, 15 bp, Homo sapiens
ttcaaatacgatcta

SEQ ID NO: 1246814 - DNA, 15 bp, Homo sapiens
cttcaaatacgatct

SEQ ID NO: 1246815 - DNA, 15 bp, Homo sapiens
acttcaaatacgatc

SEQ ID NO: 1246816 - DNA, 15 bp, Homo sapiens
cacttcaaatacgat

SEQ ID NO: 1246817 - DNA, 15 bp, Homo sapiens
acacttcaaatacga

SEQ ID NO: 1246818 - DNA, 15 bp, Homo sapiens
aacacttcaaatacg

SEQ ID NO: 1246819 - DNA, 15 bp, Homo sapiens
caacacttcaaatac

SEQ ID NO: 1246820 - DNA, 15 bp, Homo sapiens
ccaacacttcaaata

SEQ ID NO: 1246821 - DNA, 15 bp, Homo sapiens
accaacacttcaaat

SEQ ID NO: 1246822 - DNA, 15 bp, Homo sapiens
caccaacacttcaaa

SEQ ID NO: 1246823 - DNA, 15 bp, Homo sapiens
gcaccaacacttcaa

SEQ ID NO: 1246824 - DNA, 15 bp, Homo sapiens
ggcaccaacacttca

SEQ ID NO: 1246825 - DNA, 15 bp, Homo sapiens
tggcaccaacacttc

SEQ ID NO: 1246826 - DNA, 15 bp, Homo sapiens
gtggcaccaacactt

SEQ ID NO: 1246827 - DNA, 15 bp, Homo sapiens
tgtggcaccaacact

SEQ ID NO: 1246828 - DNA, 15 bp, Homo sapiens
gtgtggcaccaacac

SEQ ID NO: 1246829 - DNA, 15 bp, Homo sapiens
tgtgtggcaccaaca

SEQ ID NO: 1246830 - DNA, 15 bp, Homo sapiens
gtgtgtggcaccaac

SEQ ID NO: 1246831 - DNA, 15 bp, Homo sapiens
tgtgtgtggcaccaa

SEQ ID NO: 1246832 - DNA, 15 bp, Homo sapiens
gtgtgtgtggcacca

SEQ ID NO: 1246833 - DNA, 15 bp, Homo sapiens
ggtgtgtgtggcacc

SEQ ID NO: 1246834 - DNA, 15 bp, Homo sapiens
aggtgtgtgtggcac

SEQ ID NO: 1246835 - DNA, 15 bp, Homo sapiens
aaggtgtgtgtggca

SEQ ID NO: 1246836 - DNA, 15 bp, Homo sapiens
taaggtgtgtgtggc

SEQ ID NO: 1246837 - DNA, 15 bp, Homo sapiens
ttaaggtgtgtgtgg

SEQ ID NO: 1246838 - DNA, 15 bp, Homo sapiens
gttaaggtgtgtgtg

SEQ ID NO: 1246839 - DNA, 15 bp, Homo sapiens
tgttaaggtgtgtgt

SEQ ID NO: 1246840 - DNA, 15 bp, Homo sapiens
gtgttaaggtgtgtg

SEQ ID NO: 1246841 - DNA, 15 bp, Homo sapiens
ggtgttaaggtgtgt

SEQ ID NO: 1246842 - DNA, 15 bp, Homo sapiens
aggtgttaaggtgtg

SEQ ID NO: 1246843 - DNA, 15 bp, Homo sapiens
caggtgttaaggtgt

SEQ ID NO: 1246844 - DNA, 15 bp, Homo sapiens
gcaggtgttaaggtg

SEQ ID NO: 1246845 - DNA, 15 bp, Homo sapiens
tgcaggtgttaaggt

SEQ ID NO: 1246846 - DNA, 15 bp, Homo sapiens
gtgcaggtgttaagg

SEQ ID NO: 1246847 - DNA, 15 bp, Homo sapiens
cgtgcaggtgttaag

SEQ ID NO: 1246848 - DNA, 15 bp, Homo sapiens
gcgtgcaggtgttaa

SEQ ID NO: 1246849 - DNA, 15 bp, Homo sapiens
agcgtgcaggtgtta

SEQ ID NO: 1246850 - DNA, 15 bp, Homo sapiens
cagcgtgcaggtgtt

SEQ ID NO: 1246851 - DNA, 15 bp, Homo sapiens
ccagcgtgcaggtgt

SEQ ID NO: 1246852 - DNA, 15 bp, Homo sapiens
gccagcgtgcaggtg

SEQ ID NO: 1246853 - DNA, 15 bp, Homo sapiens
tgccagcgtgcaggt

SEQ ID NO: 1246854 - DNA, 15 bp, Homo sapiens
ttgccagcgtgcagg

SEQ ID NO: 1246855 - DNA, 15 bp, Homo sapiens
gttgccagcgtgcag

SEQ ID NO: 1246856 - DNA, 15 bp, Homo sapiens
tgttgccagcgtgca

SEQ ID NO: 1246857 - DNA, 15 bp, Homo sapiens
ttgttgccagcgtgc

SEQ ID NO: 1246858 - DNA, 15 bp, Homo sapiens
tttgttgccagcgtg

SEQ ID NO: 1246859 - DNA, 15 bp, Homo sapiens
ttttgttgccagcgt

SEQ ID NO: 1246860 - DNA, 15 bp, Homo sapiens
gttttgttgccagcg

SEQ ID NO: 1246861 - DNA, 15 bp, Homo sapiens
ggttttgttgccagc

SEQ ID NO: 1246862 - DNA, 15 bp, Homo sapiens
cggttttgttgccag

SEQ ID NO: 1246863 - DNA, 15 bp, Homo sapiens
acggttttgttgcca

SEQ ID NO: 1246864 - DNA, 15 bp, Homo sapiens
gacggttttgttgcc

SEQ ID NO: 1246865 - DNA, 15 bp, Homo sapiens
ggacggttttgttgc

SEQ ID NO: 1246866 - DNA, 15 bp, Homo sapiens
cggacggttttgttg

SEQ ID NO: 1246867 - DNA, 15 bp, Homo sapiens
gcggacggttttgtt

SEQ ID NO: 1246868 - DNA, 15 bp, Homo sapiens
agcggacggttttgt

SEQ ID NO: 1246869 - DNA, 15 bp, Homo sapiens
gagcggacggttttg

SEQ ID NO: 1246870 - DNA, 15 bp, Homo sapiens
agagcggacggtttt

SEQ ID NO: 1246871 - DNA, 15 bp, Homo sapiens
cagagcggacggttt

SEQ ID NO: 1246872 - DNA, 15 bp, Homo sapiens
gcagagcggacggtt

SEQ ID NO: 1246873 - DNA, 15 bp, Homo sapiens
tgcagagcggacggt

SEQ ID NO: 1246874 - DNA, 15 bp, Homo sapiens
ctgcagagcggacgg

SEQ ID NO: 1246875 - DNA, 15 bp, Homo sapiens
gctgcagagcggacg

SEQ ID NO: 1246876 - DNA, 15 bp, Homo sapiens
tgctgcagagcggac

SEQ ID NO: 1246877 - DNA, 15 bp, Homo sapiens
gtgctgcagagcgga

SEQ ID NO: 1246878 - DNA, 15 bp, Homo sapiens
tgtgctgcagagcgg

SEQ ID NO: 1246879 - DNA, 15 bp, Homo sapiens
ctgtgctgcagagcg

SEQ ID NO: 1246880 - DNA, 15 bp, Homo sapiens
gctgtgctgcagagc

SEQ ID NO: 1246881 - DNA, 15 bp, Homo sapiens
agctgtgctgcagag

SEQ ID NO: 1246882 - DNA, 15 bp, Homo sapiens
cagctgtgctgcaga

SEQ ID NO: 1246883 - DNA, 15 bp, Homo sapiens
ccagctgtgctgcag

SEQ ID NO: 1246884 - DNA, 15 bp, Homo sapiens
cccagctgtgctgca

SEQ ID NO: 1246885 - DNA, 15 bp, Homo sapiens
ccccagctgtgctgc

SEQ ID NO: 1246886 - DNA, 15 bp, Homo sapiens
accccagctgtgctg

SEQ ID NO: 1246887 - DNA, 15 bp, Homo sapiens
gaccccagctgtgct

SEQ ID NO: 1246888 - DNA, 15 bp, Homo sapiens
tgaccccagctgtgc

SEQ ID NO: 1246889 - DNA, 15 bp, Homo sapiens
gtgaccccagctgtg

SEQ ID NO: 1246890 - DNA, 15 bp, Homo sapiens
ggtgaccccagctgt

SEQ ID NO: 1246891 - DNA, 15 bp, Homo sapiens
aggtgaccccagctg

SEQ ID NO: 1246892 - DNA, 15 bp, Homo sapiens
caggtgaccccagct

SEQ ID NO: 1246893 - DNA, 15 bp, Homo sapiens
tcaggtgaccccagc

SEQ ID NO: 1246894 - DNA, 15 bp, Homo sapiens
gtcaggtgaccccag

SEQ ID NO: 1246895 - DNA, 15 bp, Homo sapiens
ggtcaggtgacccca

SEQ ID NO: 1246896 - DNA, 15 bp, Homo sapiens
aggtcaggtgacccc

SEQ ID NO: 1246897 - DNA, 15 bp, Homo sapiens
aaggtcaggtgaccc

SEQ ID NO: 1246898 - DNA, 15 bp, Homo sapiens
aaaggtcaggtgacc

SEQ ID NO: 1246899 - DNA, 15 bp, Homo sapiens
gaaaggtcaggtgac

SEQ ID NO: 1246900 - DNA, 15 bp, Homo sapiens
agaaaggtcaggtga

SEQ ID NO: 1246901 - DNA, 15 bp, Homo sapiens
gagaaaggtcaggtg

SEQ ID NO: 1246902 - DNA, 15 bp, Homo sapiens
ggagaaaggtcaggt

SEQ ID NO: 1246903 - DNA, 15 bp, Homo sapiens
aggagaaaggtcagg

SEQ ID NO: 1246904 - DNA, 15 bp, Homo sapiens
caggagaaaggtcag

SEQ ID NO: 1246905 - DNA, 15 bp, Homo sapiens
acaggagaaaggtca

SEQ ID NO: 1246906 - DNA, 15 bp, Homo sapiens
gacaggagaaaggtc

SEQ ID NO: 1246907 - DNA, 15 bp, Homo sapiens
ggacaggagaaaggt

SEQ ID NO: 1246908 - DNA, 15 bp, Homo sapiens
gggacaggagaaagg

SEQ ID NO: 1246909 - DNA, 15 bp, Homo sapiens
ggggacaggagaaag

SEQ ID NO: 1246910 - DNA, 15 bp, Homo sapiens
gggggacaggagaaa

SEQ ID NO: 1246911 - DNA, 15 bp, Homo sapiens
ggggggacaggagaa

SEQ ID NO: 1246912 - DNA, 15 bp, Homo sapiens
gggggggacaggaga

SEQ ID NO: 1246913 - DNA, 15 bp, Homo sapiens
tgggggggacaggag

SEQ ID NO: 1246914 - DNA, 15 bp, Homo sapiens
gtgggggggacagga

SEQ ID NO: 1246915 - DNA, 15 bp, Homo sapiens
agtgggggggacagg

SEQ ID NO: 1246916 - DNA, 15 bp, Homo sapiens
aagtgggggggacag

SEQ ID NO: 1246917 - DNA, 15 bp, Homo sapiens
caagtgggggggaca

SEQ ID NO: 1246918 - DNA, 15 bp, Homo sapiens
tcaagtgggggggac

SEQ ID NO: 1246919 - DNA, 15 bp, Homo sapiens
ctcaagtggggggga

SEQ ID NO: 1246920 - DNA, 15 bp, Homo sapiens
gctcaagtggggggg

SEQ ID NO: 1246921 - DNA, 15 bp, Homo sapiens
agctcaagtgggggg

SEQ ID NO: 1246922 - DNA, 15 bp, Homo sapiens
gagctcaagtggggg

SEQ ID NO: 1246923 - DNA, 15 bp, Homo sapiens
tgagctcaagtgggg

SEQ ID NO: 1246924 - DNA, 15 bp, Homo sapiens
ctgagctcaagtggg

SEQ ID NO: 1246925 - DNA, 15 bp, Homo sapiens
actgagctcaagtgg

SEQ ID NO: 1246926 - DNA, 15 bp, Homo sapiens
cactgagctcaagtg

SEQ ID NO: 1246927 - DNA, 15 bp, Homo sapiens
ccactgagctcaagt

SEQ ID NO: 1246928 - DNA, 15 bp, Homo sapiens
gccactgagctcaag

SEQ ID NO: 1246929 - DNA, 15 bp, Homo sapiens
agccactgagctcaa

SEQ ID NO: 1246930 - DNA, 15 bp, Homo sapiens
cagccactgagctca

SEQ ID NO: 1246931 - DNA, 15 bp, Homo sapiens
ccagccactgagctc

SEQ ID NO: 1246932 - DNA, 15 bp, Homo sapiens
cccagccactgagct

SEQ ID NO: 1246933 - DNA, 15 bp, Homo sapiens
gcccagccactgagc

SEQ ID NO: 1246934 - DNA, 15 bp, Homo sapiens
tgcccagccactgag

SEQ ID NO: 1246935 - DNA, 15 bp, Homo sapiens
ctgcccagccactga

SEQ ID NO: 1246936 - DNA, 15 bp, Homo sapiens
gctgcccagccactg

SEQ ID NO: 1246937 - DNA, 15 bp, Homo sapiens
tgctgcccagccact

SEQ ID NO: 1246938 - DNA, 15 bp, Homo sapiens
ctgctgcccagccac

SEQ ID NO: 1246939 - DNA, 15 bp, Homo sapiens
cctgctgcccagcca

SEQ ID NO: 1246940 - DNA, 15 bp, Homo sapiens
ccctgctgcccagcc

SEQ ID NO: 1246941 - DNA, 15 bp, Homo sapiens
cccctgctgcccagc

SEQ ID NO: 1246942 - DNA, 15 bp, Homo sapiens
tcccctgctgcccag

SEQ ID NO: 1246943 - DNA, 15 bp, Homo sapiens
atcccctgctgccca

SEQ ID NO: 1246944 - DNA, 15 bp, Homo sapiens
catcccctgctgccc

SEQ ID NO: 1246945 - DNA, 15 bp, Homo sapiens
gcatcccctgctgcc

SEQ ID NO: 1246946 - DNA, 15 bp, Homo sapiens
tgcatcccctgctgc

SEQ ID NO: 1246947 - DNA, 15 bp, Homo sapiens
atgcatcccctgctg

SEQ ID NO: 1246948 - DNA, 15 bp, Homo sapiens
catgcatcccctgct

SEQ ID NO: 1246949 - DNA, 15 bp, Homo sapiens
ccatgcatcccctgc

SEQ ID NO: 1246950 - DNA, 15 bp, Homo sapiens
gccatgcatcccctg

SEQ ID NO: 1246951 - DNA, 15 bp, Homo sapiens
ggccatgcatcccct

SEQ ID NO: 1246952 - DNA, 15 bp, Homo sapiens
tggccatgcatcccc

SEQ ID NO: 1246953 - DNA, 15 bp, Homo sapiens
gtggccatgcatccc

SEQ ID NO: 1246954 - DNA, 15 bp, Homo sapiens
agtggccatgcatcc

SEQ ID NO: 1246955 - DNA, 15 bp, Homo sapiens
cagtggccatgcatc

SEQ ID NO: 1246956 - DNA, 15 bp, Homo sapiens
ccagtggccatgcat

SEQ ID NO: 1246957 - DNA, 15 bp, Homo sapiens
gccagtggccatgca

SEQ ID NO: 1246958 - DNA, 15 bp, Homo sapiens
ggccagtggccatgc

SEQ ID NO: 1246959 - DNA, 15 bp, Homo sapiens
cggccagtggccatg

SEQ ID NO: 1246960 - DNA, 15 bp, Homo sapiens
ccggccagtggccat

SEQ ID NO: 1246961 - DNA, 15 bp, Homo sapiens
gccggccagtggcca

SEQ ID NO: 1246962 - DNA, 15 bp, Homo sapiens
ggccggccagtggcc

SEQ ID NO: 1246963 - DNA, 15 bp, Homo sapiens
tggccggccagtggc

SEQ ID NO: 1246964 - DNA, 15 bp, Homo sapiens
ctggccggccagtgg

SEQ ID NO: 1246965 - DNA, 15 bp, Homo sapiens
cctggccggccagtg

SEQ ID NO: 1246966 - DNA, 15 bp, Homo sapiens
acctggccggccagt

SEQ ID NO: 1246967 - DNA, 15 bp, Homo sapiens
cacctggccggccag

SEQ ID NO: 1246968 - DNA, 15 bp, Homo sapiens
gcacctggccggcca

SEQ ID NO: 1246969 - DNA, 15 bp, Homo sapiens
tgcacctggccggcc

SEQ ID NO: 1246970 - DNA, 15 bp, Homo sapiens
ctgcacctggccggc

SEQ ID NO: 1246971 - DNA, 15 bp, Homo sapiens
gctgcacctggccgg

SEQ ID NO: 1246972 - DNA, 15 bp, Homo sapiens
agctgcacctggccg

SEQ ID NO: 1246973 - DNA, 15 bp, Homo sapiens
gagctgcacctggcc

SEQ ID NO: 1246974 - DNA, 15 bp, Homo sapiens
agagctgcacctggc

SEQ ID NO: 1246975 - DNA, 15 bp, Homo sapiens
gagagctgcacctgg

SEQ ID NO: 1246976 - DNA, 15 bp, Homo sapiens
tgagagctgcacctg

SEQ ID NO: 1246977 - DNA, 15 bp, Homo sapiens
ctgagagctgcacct

SEQ ID NO: 1246978 - DNA, 15 bp, Homo sapiens
gctgagagctgcacc

SEQ ID NO: 1246979 - DNA, 15 bp, Homo sapiens
agctgagagctgcac

SEQ ID NO: 1246980 - DNA, 15 bp, Homo sapiens
cagctgagagctgca

SEQ ID NO: 1246981 - DNA, 15 bp, Homo sapiens
ccagctgagagctgc

SEQ ID NO: 1246982 - DNA, 15 bp, Homo sapiens
cccagctgagagctg

SEQ ID NO: 1246983 - DNA, 15 bp, Homo sapiens
ccccagctgagagct

SEQ ID NO: 1246984 - DNA, 15 bp, Homo sapiens
accccagctgagagc

SEQ ID NO: 1246985 - DNA, 15 bp, Homo sapiens
caccccagctgagag

SEQ ID NO: 1246986 - DNA, 15 bp, Homo sapiens
acaccccagctgaga

SEQ ID NO: 1246987 - DNA, 15 bp, Homo sapiens
aacaccccagctgag

SEQ ID NO: 1246988 - DNA, 15 bp, Homo sapiens
gaacaccccagctga

SEQ ID NO: 1246989 - DNA, 15 bp, Homo sapiens
tgaacaccccagctg

SEQ ID NO: 1246990 - DNA, 15 bp, Homo sapiens
ctgaacaccccagct

SEQ ID NO: 1246991 - DNA, 15 bp, Homo sapiens
tctgaacaccccagc

SEQ ID NO: 1246992 - DNA, 15 bp, Homo sapiens
ctctgaacaccccag

SEQ ID NO: 1246993 - DNA, 15 bp, Homo sapiens
cctctgaacacccca

SEQ ID NO: 1246994 - DNA, 15 bp, Homo sapiens
tcctctgaacacccc

SEQ ID NO: 1246995 - DNA, 15 bp, Homo sapiens
gtcctctgaacaccc

SEQ ID NO: 1246996 - DNA, 15 bp, Homo sapiens
cgtcctctgaacacc

SEQ ID NO: 1246997 - DNA, 15 bp, Homo sapiens
gcgtcctctgaacac

SEQ ID NO: 1246998 - DNA, 15 bp, Homo sapiens
ggcgtcctctgaaca

SEQ ID NO: 1246999 - DNA, 15 bp, Homo sapiens
aggcgtcctctgaac

SEQ ID NO: 1247000 - DNA, 15 bp, Homo sapiens
caggcgtcctctgaa

SEQ ID NO: 1247001 - DNA, 15 bp, Homo sapiens
acaggcgtcctctga

SEQ ID NO: 1247002 - DNA, 15 bp, Homo sapiens
cacaggcgtcctctg

SEQ ID NO: 1247003 - DNA, 15 bp, Homo sapiens
acacaggcgtcctct

SEQ ID NO: 1247004 - DNA, 15 bp, Homo sapiens
gacacaggcgtcctc

SEQ ID NO: 1247005 - DNA, 15 bp, Homo sapiens
ggacacaggcgtcct

SEQ ID NO: 1247006 - DNA, 15 bp, Homo sapiens
aggacacaggcgtcc

SEQ ID NO: 1247007 - DNA, 15 bp, Homo sapiens
gaggacacaggcgtc

SEQ ID NO: 1247008 - DNA, 15 bp, Homo sapiens
ggaggacacaggcgt

SEQ ID NO: 1247009 - DNA, 15 bp, Homo sapiens
gggaggacacaggcg

SEQ ID NO: 1247010 - DNA, 15 bp, Homo sapiens
ggggaggacacaggc

SEQ ID NO: 1247011 - DNA, 15 bp, Homo sapiens
aggggaggacacagg

SEQ ID NO: 1247012 - DNA, 15 bp, Homo sapiens
gaggggaggacacag

SEQ ID NO: 1247013 - DNA, 15 bp, Homo sapiens
ggaggggaggacaca

SEQ ID NO: 1247014 - DNA, 15 bp, Homo sapiens
gggaggggaggacac

SEQ ID NO: 1247015 - DNA, 15 bp, Homo sapiens
ggggaggggaggaca

SEQ ID NO: 1247016 - DNA, 15 bp, Homo sapiens
gggggaggggaggac

SEQ ID NO: 1247017 - DNA, 15 bp, Homo sapiens
tgggggaggggagga

SEQ ID NO: 1247018 - DNA, 15 bp, Homo sapiens
atgggggaggggagg

SEQ ID NO: 1247019 - DNA, 15 bp, Homo sapiens
gatgggggaggggag

SEQ ID NO: 1247020 - DNA, 15 bp, Homo sapiens
ggatgggggagggga

SEQ ID NO: 1247021 - DNA, 15 bp, Homo sapiens
gggatgggggagggg

SEQ ID NO: 1247022 - DNA, 15 bp, Homo sapiens
agggatgggggaggg

SEQ ID NO: 1247023 - DNA, 15 bp, Homo sapiens
gagggatgggggagg

SEQ ID NO: 1247024 - DNA, 15 bp, Homo sapiens
agagggatgggggag

SEQ ID NO: 1247025 - DNA, 15 bp, Homo sapiens
cagagggatggggga

SEQ ID NO: 1247026 - DNA, 15 bp, Homo sapiens
acagagggatggggg

SEQ ID NO: 1247027 - DNA, 15 bp, Homo sapiens
gacagagggatgggg

SEQ ID NO: 1247028 - DNA, 15 bp, Homo sapiens
tgacagagggatggg

SEQ ID NO: 1247029 - DNA, 15 bp, Homo sapiens
gtgacagagggatgg

SEQ ID NO: 1247030 - DNA, 15 bp, Homo sapiens
ggtgacagagggatg

SEQ ID NO: 1247031 - DNA, 15 bp, Homo sapiens
gggtgacagagggat

SEQ ID NO: 1247032 - DNA, 15 bp, Homo sapiens
agggtgacagaggga

SEQ ID NO: 1247033 - DNA, 15 bp, Homo sapiens
aagggtgacagaggg

SEQ ID NO: 1247034 - DNA, 15 bp, Homo sapiens
caagggtgacagagg

SEQ ID NO: 1247035 - DNA, 15 bp, Homo sapiens
ccaagggtgacagag

SEQ ID NO: 1247036 - DNA, 15 bp, Homo sapiens
tccaagggtgacaga

SEQ ID NO: 1247037 - DNA, 15 bp, Homo sapiens
ctccaagggtgacag

SEQ ID NO: 1247038 - DNA, 15 bp, Homo sapiens
cctccaagggtgaca

SEQ ID NO: 1247039 - DNA, 15 bp, Homo sapiens
gcctccaagggtgac

SEQ ID NO: 1247040 - DNA, 15 bp, Homo sapiens
tgcctccaagggtga

SEQ ID NO: 1247041 - DNA, 15 bp, Homo sapiens
ctgcctccaagggtg

SEQ ID NO: 1247042 - DNA, 15 bp, Homo sapiens
tctgcctccaagggt

SEQ ID NO: 1247043 - DNA, 15 bp, Homo sapiens
ctctgcctccaaggg

SEQ ID NO: 1247044 - DNA, 15 bp, Homo sapiens
tctctgcctccaagg

SEQ ID NO: 1247045 - DNA, 15 bp, Homo sapiens
ttctctgcctccaag

SEQ ID NO: 1247046 - DNA, 15 bp, Homo sapiens
gttctctgcctccaa

SEQ ID NO: 1247047 - DNA, 15 bp, Homo sapiens
agttctctgcctcca

SEQ ID NO: 1247048 - DNA, 15 bp, Homo sapiens
aagttctctgcctcc

SEQ ID NO: 1247049 - DNA, 15 bp, Homo sapiens
aaagttctctgcctc

SEQ ID NO: 1247050 - DNA, 15 bp, Homo sapiens
caaagttctctgcct

SEQ ID NO: 1247051 - DNA, 15 bp, Homo sapiens
gcaaagttctctgcc

SEQ ID NO: 1247052 - DNA, 15 bp, Homo sapiens
ggcaaagttctctgc

SEQ ID NO: 1247053 - DNA, 15 bp, Homo sapiens
gggcaaagttctctg

SEQ ID NO: 1247054 - DNA, 15 bp, Homo sapiens
cgggcaaagttctct

SEQ ID NO: 1247055 - DNA, 15 bp, Homo sapiens
acgggcaaagttctc

SEQ ID NO: 1247056 - DNA, 15 bp, Homo sapiens
gacgggcaaagttct

SEQ ID NO: 1247057 - DNA, 15 bp, Homo sapiens
tgacgggcaaagttc

SEQ ID NO: 1247058 - DNA, 15 bp, Homo sapiens
ctgacgggcaaagtt

SEQ ID NO: 1247059 - DNA, 15 bp, Homo sapiens
actgacgggcaaagt

SEQ ID NO: 1247060 - DNA, 15 bp, Homo sapiens
gactgacgggcaaag

SEQ ID NO: 1247061 - DNA, 15 bp, Homo sapiens
ggactgacgggcaaa

SEQ ID NO: 1247062 - DNA, 15 bp, Homo sapiens
gggactgacgggcaa

SEQ ID NO: 1247063 - DNA, 15 bp, Homo sapiens
tgggactgacgggca

SEQ ID NO: 1247064 - DNA, 15 bp, Homo sapiens
atgggactgacgggc

SEQ ID NO: 1247065 - DNA, 15 bp, Homo sapiens
catgggactgacggg

SEQ ID NO: 1247066 - DNA, 15 bp, Homo sapiens
ccatgggactgacgg

SEQ ID NO: 1247067 - DNA, 15 bp, Homo sapiens
cccatgggactgacg

SEQ ID NO: 1247068 - DNA, 15 bp, Homo sapiens
ccccatgggactgac

SEQ ID NO: 1247069 - DNA, 15 bp, Homo sapiens
tccccatgggactga

SEQ ID NO: 1247070 - DNA, 15 bp, Homo sapiens
ttccccatgggactg

SEQ ID NO: 1247071 - DNA, 15 bp, Homo sapiens
attccccatgggact

SEQ ID NO: 1247072 - DNA, 15 bp, Homo sapiens
cattccccatgggac

SEQ ID NO: 1247073 - DNA, 15 bp, Homo sapiens
acattccccatggga

SEQ ID NO: 1247074 - DNA, 15 bp, Homo sapiens
gacattccccatggg

SEQ ID NO: 1247075 - DNA, 15 bp, Homo sapiens
tgacattccccatgg

SEQ ID NO: 1247076 - DNA, 15 bp, Homo sapiens
ttgacattccccatg

SEQ ID NO: 1247077 - DNA, 15 bp, Homo sapiens
gttgacattccccat

SEQ ID NO: 1247078 - DNA, 15 bp, Homo sapiens
tgttgacattcccca

SEQ ID NO: 1247079 - DNA, 15 bp, Homo sapiens
ctgttgacattcccc

SEQ ID NO: 1247080 - DNA, 15 bp, Homo sapiens
cctgttgacattccc

SEQ ID NO: 1247081 - DNA, 15 bp, Homo sapiens
gcctgttgacattcc

SEQ ID NO: 1247082 - DNA, 15 bp, Homo sapiens
tgcctgttgacattc

SEQ ID NO: 1247083 - DNA, 15 bp, Homo sapiens
ctgcctgttgacatt

SEQ ID NO: 1247084 - DNA, 15 bp, Homo sapiens
cctgcctgttgacat

SEQ ID NO: 1247085 - DNA, 15 bp, Homo sapiens
ccctgcctgttgaca

SEQ ID NO: 1247086 - DNA, 15 bp, Homo sapiens
cccctgcctgttgac

SEQ ID NO: 1247087 - DNA, 15 bp, Homo sapiens
gcccctgcctgttga

SEQ ID NO: 1247088 - DNA, 15 bp, Homo sapiens
tgcccctgcctgttg

SEQ ID NO: 1247089 - DNA, 15 bp, Homo sapiens
ctgcccctgcctgtt

SEQ ID NO: 1247090 - DNA, 15 bp, Homo sapiens
gctgcccctgcctgt

SEQ ID NO: 1247091 - DNA, 15 bp, Homo sapiens
tgctgcccctgcctg

SEQ ID NO: 1247092 - DNA, 15 bp, Homo sapiens
gtgctgcccctgcct

SEQ ID NO: 1247093 - DNA, 15 bp, Homo sapiens
agtgctgcccctgcc

SEQ ID NO: 1247094 - DNA, 15 bp, Homo sapiens
cagtgctgcccctgc

SEQ ID NO: 1247095 - DNA, 15 bp, Homo sapiens
tgcagtgctgcccct

SEQ ID NO: 1247096 - DNA, 15 bp, Homo sapiens
ctgcagtgctgcccc

SEQ ID NO: 1247097 - DNA, 15 bp, Homo sapiens
tctgcagtgctgccc

SEQ ID NO: 1247098 - DNA, 15 bp, Homo sapiens
ctctgcagtgctgcc

SEQ ID NO: 1247099 - DNA, 15 bp, Homo sapiens
tctctgcagtgctgc

SEQ ID NO: 1247100 - DNA, 15 bp, Homo sapiens
atctctgcagtgctg

SEQ ID NO: 1247101 - DNA, 15 bp, Homo sapiens
aatctctgcagtgct

SEQ ID NO: 1247102 - DNA, 15 bp, Homo sapiens
aaatctctgcagtgc

SEQ ID NO: 1247103 - DNA, 15 bp, Homo sapiens
gaaatctctgcagtg

SEQ ID NO: 1247104 - DNA, 15 bp, Homo sapiens
tgaaatctctgcagt

SEQ ID NO: 1247105 - DNA, 15 bp, Homo sapiens
atgaaatctctgcag

SEQ ID NO: 1247106 - DNA, 15 bp, Homo sapiens
gatgaaatctctgca

SEQ ID NO: 1247107 - DNA, 15 bp, Homo sapiens
tgatgaaatctctgc

SEQ ID NO: 1247108 - DNA, 15 bp, Homo sapiens
atgatgaaatctctg

SEQ ID NO: 1247109 - DNA, 15 bp, Homo sapiens
catgatgaaatctct

SEQ ID NO: 1247110 - DNA, 15 bp, Homo sapiens
ccatgatgaaatctc

SEQ ID NO: 1247111 - DNA, 15 bp, Homo sapiens
accatgatgaaatct

SEQ ID NO: 1247112 - DNA, 15 bp, Homo sapiens
gaccatgatgaaatc

SEQ ID NO: 1247113 - DNA, 15 bp, Homo sapiens
agaccatgatgaaat

SEQ ID NO: 1247114 - DNA, 15 bp, Homo sapiens
gagaccatgatgaaa

SEQ ID NO: 1247115 - DNA, 15 bp, Homo sapiens
ggagaccatgatgaa

SEQ ID NO: 1247116 - DNA, 15 bp, Homo sapiens
gggagaccatgatga

SEQ ID NO: 1247117 - DNA, 15 bp, Homo sapiens
tgggagaccatgatg

SEQ ID NO: 1247118 - DNA, 15 bp, Homo sapiens
ctgggagaccatgat

SEQ ID NO: 1247119 - DNA, 15 bp, Homo sapiens
cctgggagaccatga

SEQ ID NO: 1247120 - DNA, 15 bp, Homo sapiens
gcctgggagaccatg

SEQ ID NO: 1247121 - DNA, 15 bp, Homo sapiens
ggcctgggagaccat

SEQ ID NO: 1247122 - DNA, 15 bp, Homo sapiens
gggcctgggagacca

SEQ ID NO: 1247123 - DNA, 15 bp, Homo sapiens
agggcctgggagacc

SEQ ID NO: 1247124 - DNA, 15 bp, Homo sapiens
tgagggcctgggaga

SEQ ID NO: 1247125 - DNA, 15 bp, Homo sapiens
ctgagggcctgggag

SEQ ID NO: 1247126 - DNA, 15 bp, Homo sapiens
cctgagggcctggga

SEQ ID NO: 1247127 - DNA, 15 bp, Homo sapiens
gcctgagggcctggg

SEQ ID NO: 1247128 - DNA, 15 bp, Homo sapiens
agcctgagggcctgg

SEQ ID NO: 1247129 - DNA, 15 bp, Homo sapiens
gagcctgagggcctg

SEQ ID NO: 1247130 - DNA, 15 bp, Homo sapiens
ggagcctgagggcct

SEQ ID NO: 1247131 - DNA, 15 bp, Homo sapiens
aggagcctgagggcc

SEQ ID NO: 1247132 - DNA, 15 bp, Homo sapiens
gaggagcctgagggc

SEQ ID NO: 1247133 - DNA, 15 bp, Homo sapiens
agaggagcctgaggg

SEQ ID NO: 1247134 - DNA, 15 bp, Homo sapiens
cagaggagcctgagg

SEQ ID NO: 1247135 - DNA, 15 bp, Homo sapiens
gcagaggagcctgag

SEQ ID NO: 1247136 - DNA, 15 bp, Homo sapiens
ggcagaggagcctga

SEQ ID NO: 1247137 - DNA, 15 bp, Homo sapiens
aggcagaggagcctg

SEQ ID NO: 1247138 - DNA, 15 bp, Homo sapiens
aaggcagaggagcct

SEQ ID NO: 1247139 - DNA, 15 bp, Homo sapiens
gaaggcagaggagcc

SEQ ID NO: 1247140 - DNA, 15 bp, Homo sapiens
agaaggcagaggagc

SEQ ID NO: 1247141 - DNA, 15 bp, Homo sapiens
cagaaggcagaggag

SEQ ID NO: 1247142 - DNA, 15 bp, Homo sapiens
gcagaaggcagagga

SEQ ID NO: 1247143 - DNA, 15 bp, Homo sapiens
agcagaaggcagagg

SEQ ID NO: 1247144 - DNA, 15 bp, Homo sapiens
aagcagaaggcagag

SEQ ID NO: 1247145 - DNA, 15 bp, Homo sapiens
caagcagaaggcaga

SEQ ID NO: 1247146 - DNA, 15 bp, Homo sapiens
ccaagcagaaggcag

SEQ ID NO: 1247147 - DNA, 15 bp, Homo sapiens
cccaagcagaaggca

SEQ ID NO: 1247148 - DNA, 15 bp, Homo sapiens
gcccaagcagaaggc

SEQ ID NO: 1247149 - DNA, 15 bp, Homo sapiens
agcccaagcagaagg

SEQ ID NO: 1247150 - DNA, 15 bp, Homo sapiens
aagcccaagcagaag

SEQ ID NO: 1247151 - DNA, 15 bp, Homo sapiens
gaagcccaagcagaa

SEQ ID NO: 1247152 - DNA, 15 bp, Homo sapiens
tgaagcccaagcaga

SEQ ID NO: 1247153 - DNA, 15 bp, Homo sapiens
ctgaagcccaagcag

SEQ ID NO: 1247154 - DNA, 15 bp, Homo sapiens
cctgaagcccaagca

SEQ ID NO: 1247155 - DNA, 15 bp, Homo sapiens
ccctgaagcccaagc

SEQ ID NO: 1247156 - DNA, 15 bp, Homo sapiens
gccctgaagcccaag

SEQ ID NO: 1247157 - DNA, 15 bp, Homo sapiens
agccctgaagcccaa

SEQ ID NO: 1247158 - DNA, 15 bp, Homo sapiens
cagccctgaagccca

SEQ ID NO: 1247159 - DNA, 15 bp, Homo sapiens
gcagccctgaagccc

SEQ ID NO: 1247160 - DNA, 15 bp, Homo sapiens
ggcagccctgaagcc

SEQ ID NO: 1247161 - DNA, 15 bp, Homo sapiens
aggcagccctgaagc

SEQ ID NO: 1247162 - DNA, 15 bp, Homo sapiens
caggcagccctgaag

SEQ ID NO: 1247163 - DNA, 15 bp, Homo sapiens
ccaggcagccctgaa

SEQ ID NO: 1247164 - DNA, 15 bp, Homo sapiens
gccaggcagccctga

SEQ ID NO: 1247165 - DNA, 15 bp, Homo sapiens
agccaggcagccctg

SEQ ID NO: 1247166 - DNA, 15 bp, Homo sapiens
cagccaggcagccct

SEQ ID NO: 1247167 - DNA, 15 bp, Homo sapiens
gcagccaggcagccc

SEQ ID NO: 1247168 - DNA, 15 bp, Homo sapiens
tgcagccaggcagcc

SEQ ID NO: 1247169 - DNA, 15 bp, Homo sapiens
ctgcagccaggcagc

SEQ ID NO: 1247170 - DNA, 15 bp, Homo sapiens
cctgcagccaggcag

SEQ ID NO: 1247171 - DNA, 15 bp, Homo sapiens
acctgcagccaggca

SEQ ID NO: 1247172 - DNA, 15 bp, Homo sapiens
cacctgcagccaggc

SEQ ID NO: 1247173 - DNA, 15 bp, Homo sapiens
gcacctgcagccagg

SEQ ID NO: 1247174 - DNA, 15 bp, Homo sapiens
cgcacctgcagccag

SEQ ID NO: 1247175 - DNA, 15 bp, Homo sapiens
acgcacctgcagcca

SEQ ID NO: 1247176 - DNA, 15 bp, Homo sapiens
gacgcacctgcagcc

SEQ ID NO: 1247177 - DNA, 15 bp, Homo sapiens
ggacgcacctgcagc

SEQ ID NO: 1247178 - DNA, 15 bp, Homo sapiens
cggacgcacctgcag

SEQ ID NO: 1247179 - DNA, 15 bp, Homo sapiens
ccggacgcacctgca

SEQ ID NO: 1247180 - DNA, 15 bp, Homo sapiens
cccggacgcacctgc

SEQ ID NO: 1247181 - DNA, 15 bp, Homo sapiens
ccccggacgcacctg

SEQ ID NO: 1247182 - DNA, 15 bp, Homo sapiens
tccccggacgcacct

SEQ ID NO: 1247183 - DNA, 15 bp, Homo sapiens
ctccccggacgcacc

SEQ ID NO: 1247184 - DNA, 15 bp, Homo sapiens
cctccccggacgcac

SEQ ID NO: 1247185 - DNA, 15 bp, Homo sapiens
acctccccggacgca

SEQ ID NO: 1247186 - DNA, 15 bp, Homo sapiens
aacctccccggacgc

SEQ ID NO: 1247187 - DNA, 15 bp, Homo sapiens
aaacctccccggacg

SEQ ID NO: 1247188 - DNA, 15 bp, Homo sapiens
aaaacctccccggac

SEQ ID NO: 1247189 - DNA, 15 bp, Homo sapiens
gaaaacctccccgga

SEQ ID NO: 1247190 - DNA, 15 bp, Homo sapiens
agaaaacctccccgg

SEQ ID NO: 1247191 - DNA, 15 bp, Homo sapiens
gagaaaacctccccg

SEQ ID NO: 1247192 - DNA, 15 bp, Homo sapiens
ggagaaaacctcccc

SEQ ID NO: 1247193 - DNA, 15 bp, Homo sapiens
tggagaaaacctccc

SEQ ID NO: 1247194 - DNA, 15 bp, Homo sapiens
atggagaaaacctcc

SEQ ID NO: 1247195 - DNA, 15 bp, Homo sapiens
tatggagaaaacctc

SEQ ID NO: 1247196 - DNA, 15 bp, Homo sapiens
ttatggagaaaacct

SEQ ID NO: 1247197 - DNA, 15 bp, Homo sapiens
tttatggagaaaacc

SEQ ID NO: 1247198 - DNA, 15 bp, Homo sapiens
gtttatggagaaaac

SEQ ID NO: 1247199 - DNA, 15 bp, Homo sapiens
agtttatggagaaaa

SEQ ID NO: 1247200 - DNA, 15 bp, Homo sapiens
aagtttatggagaaa

SEQ ID NO: 1247201 - DNA, 15 bp, Homo sapiens
caagtttatggagaa

SEQ ID NO: 1247202 - DNA, 15 bp, Homo sapiens
ccaagtttatggaga

SEQ ID NO: 1247203 - DNA, 15 bp, Homo sapiens
accaagtttatggag

SEQ ID NO: 1247204 - DNA, 15 bp, Homo sapiens
caccaagtttatgga

SEQ ID NO: 1247205 - DNA, 15 bp, Homo sapiens
ccaccaagtttatgg

SEQ ID NO: 1247206 - DNA, 15 bp, Homo sapiens
tccaccaagtttatg

SEQ ID NO: 1247207 - DNA, 15 bp, Homo sapiens
ttccaccaagtttat

SEQ ID NO: 1247208 - DNA, 15 bp, Homo sapiens
cttccaccaagttta

SEQ ID NO: 1247209 - DNA, 15 bp, Homo sapiens
ccttccaccaagttt

SEQ ID NO: 1247210 - DNA, 15 bp, Homo sapiens
cccttccaccaagtt

SEQ ID NO: 1247211 - DNA, 15 bp, Homo sapiens
gcccttccaccaagt

SEQ ID NO: 1247212 - DNA, 15 bp, Homo sapiens
tgcccttccaccaag

SEQ ID NO: 1247213 - DNA, 15 bp, Homo sapiens
ctgcccttccaccaa

SEQ ID NO: 1247214 - DNA, 15 bp, Homo sapiens
actgcccttccacca

SEQ ID NO: 1247215 - DNA, 15 bp, Homo sapiens
cactgcccttccacc

SEQ ID NO: 1247216 - DNA, 15 bp, Homo sapiens
ccactgcccttccac

SEQ ID NO: 1247217 - DNA, 15 bp, Homo sapiens
cccactgcccttcca

SEQ ID NO: 1247218 - DNA, 15 bp, Homo sapiens
gcccactgcccttcc

SEQ ID NO: 1247219 - DNA, 15 bp, Homo sapiens
tgcccactgcccttc

SEQ ID NO: 1247220 - DNA, 15 bp, Homo sapiens
ttgcccactgccctt

SEQ ID NO: 1247221 - DNA, 15 bp, Homo sapiens
tttgcccactgccct

SEQ ID NO: 1247222 - DNA, 15 bp, Homo sapiens
atttgcccactgccc

SEQ ID NO: 1247223 - DNA, 15 bp, Homo sapiens
gatttgcccactgcc

SEQ ID NO: 1247224 - DNA, 15 bp, Homo sapiens
ggatttgcccactgc

SEQ ID NO: 1247225 - DNA, 15 bp, Homo sapiens
tggatttgcccactg

SEQ ID NO: 1247226 - DNA, 15 bp, Homo sapiens
ctggatttgcccact

SEQ ID NO: 1247227 - DNA, 15 bp, Homo sapiens
cctggatttgcccac

SEQ ID NO: 1247228 - DNA, 15 bp, Homo sapiens
tcctggatttgccca

SEQ ID NO: 1247229 - DNA, 15 bp, Homo sapiens
ctcctggatttgccc

SEQ ID NO: 1247230 - DNA, 15 bp, Homo sapiens
gctcctggatttgcc

SEQ ID NO: 1247231 - DNA, 15 bp, Homo sapiens
ggctcctggatttgc

SEQ ID NO: 1247232 - DNA, 15 bp, Homo sapiens
tggctcctggatttg

SEQ ID NO: 1247233 - DNA, 15 bp, Homo sapiens
ctggctcctggattt

SEQ ID NO: 1247234 - DNA, 15 bp, Homo sapiens
gctggctcctggatt

SEQ ID NO: 1247235 - DNA, 15 bp, Homo sapiens
ggctggctcctggat

SEQ ID NO: 1247236 - DNA, 15 bp, Homo sapiens
gggctggctcctgga

SEQ ID NO: 1247237 - DNA, 15 bp, Homo sapiens
cgggctggctcctgg

SEQ ID NO: 1247238 - DNA, 15 bp, Homo sapiens
ccgggctggctcctg

SEQ ID NO: 1247239 - DNA, 15 bp, Homo sapiens
cccgggctggctcct

SEQ ID NO: 1247240 - DNA, 15 bp, Homo sapiens
gcccgggctggctcc

SEQ ID NO: 1247241 - DNA, 15 bp, Homo sapiens
agcccgggctggctc

SEQ ID NO: 1247242 - DNA, 15 bp, Homo sapiens
aagcccgggctggct

SEQ ID NO: 1247243 - DNA, 15 bp, Homo sapiens
gaagcccgggctggc

SEQ ID NO: 1247244 - DNA, 15 bp, Homo sapiens
ggaagcccgggctgg

SEQ ID NO: 1247245 - DNA, 15 bp, Homo sapiens
gggaagcccgggctg

SEQ ID NO: 1247246 - DNA, 15 bp, Homo sapiens
tgggaagcccgggct

SEQ ID NO: 1247247 - DNA, 15 bp, Homo sapiens
ttgggaagcccgggc

SEQ ID NO: 1247248 - DNA, 15 bp, Homo sapiens
tttgggaagcccggg

SEQ ID NO: 1247249 - DNA, 15 bp, Homo sapiens
gtttgggaagcccgg

SEQ ID NO: 1247250 - DNA, 15 bp, Homo sapiens
ggtttgggaagcccg

SEQ ID NO: 1247251 - DNA, 15 bp, Homo sapiens
gggtttgggaagccc

SEQ ID NO: 1247252 - DNA, 15 bp, Homo sapiens
ggggtttgggaagcc

SEQ ID NO: 1247253 - DNA, 15 bp, Homo sapiens
cggggtttgggaagc

SEQ ID NO: 1247254 - DNA, 15 bp, Homo sapiens
gcggggtttgggaag

SEQ ID NO: 1247255 - DNA, 15 bp, Homo sapiens
ggcggggtttgggaa

SEQ ID NO: 1247256 - DNA, 15 bp, Homo sapiens
gggcggggtttggga

SEQ ID NO: 1247257 - DNA, 15 bp, Homo sapiens
agggcggggtttggg

SEQ ID NO: 1247258 - DNA, 15 bp, Homo sapiens
aagggcggggtttgg

SEQ ID NO: 1247259 - DNA, 15 bp, Homo sapiens
caagggcggggtttg

SEQ ID NO: 1247260 - DNA, 15 bp, Homo sapiens
gcaagggcggggttt

SEQ ID NO: 1247261 - DNA, 15 bp, Homo sapiens
agcaagggcggggtt

SEQ ID NO: 1247262 - DNA, 15 bp, Homo sapiens
gagcaagggcggggt

SEQ ID NO: 1247263 - DNA, 15 bp, Homo sapiens
ggagcaagggcgggg

SEQ ID NO: 1247264 - DNA, 15 bp, Homo sapiens
cggagcaagggcggg

SEQ ID NO: 1247265 - DNA, 15 bp, Homo sapiens
ccggagcaagggcgg

SEQ ID NO: 1247266 - DNA, 15 bp, Homo sapiens
tccggagcaagggcg

SEQ ID NO: 1247267 - DNA, 15 bp, Homo sapiens
gtccggagcaagggc

SEQ ID NO: 1247268 - DNA, 15 bp, Homo sapiens
tgtccggagcaaggg

SEQ ID NO: 1247269 - DNA, 15 bp, Homo sapiens
gtgtccggagcaagg

SEQ ID NO: 1247270 - DNA, 15 bp, Homo sapiens
ggtgtccggagcaag

SEQ ID NO: 1247271 - DNA, 15 bp, Homo sapiens
gggtgtccggagcaa

SEQ ID NO: 1247272 - DNA, 15 bp, Homo sapiens
ggggtgtccggagca

SEQ ID NO: 1247273 - DNA, 15 bp, Homo sapiens
gggggtgtccggagc

SEQ ID NO: 1247274 - DNA, 15 bp, Homo sapiens
tgggggtgtccggag

SEQ ID NO: 1247275 - DNA, 15 bp, Homo sapiens
atgggggtgtccgga

SEQ ID NO: 1247276 - DNA, 15 bp, Homo sapiens
gatgggggtgtccgg

SEQ ID NO: 1247277 - DNA, 15 bp, Homo sapiens
ggatgggggtgtccg

SEQ ID NO: 1247278 - DNA, 15 bp, Homo sapiens
tggatgggggtgtcc

SEQ ID NO: 1247279 - DNA, 15 bp, Homo sapiens
gtggatgggggtgtc

SEQ ID NO: 1247280 - DNA, 15 bp, Homo sapiens
ggtggatgggggtgt

SEQ ID NO: 1247281 - DNA, 15 bp, Homo sapiens
tggtggatgggggtg

SEQ ID NO: 1247282 - DNA, 15 bp, Homo sapiens
ctggtggatgggggt

SEQ ID NO: 1247283 - DNA, 15 bp, Homo sapiens
cctggtggatggggg

SEQ ID NO: 1247284 - DNA, 15 bp, Homo sapiens
tcctggtggatgggg

SEQ ID NO: 1247285 - DNA, 15 bp, Homo sapiens
ctcctggtggatggg

SEQ ID NO: 1247286 - DNA, 15 bp, Homo sapiens
cctcctggtggatgg

SEQ ID NO: 1247287 - DNA, 15 bp, Homo sapiens
ccctcctggtggatg

SEQ ID NO: 1247288 - DNA, 15 bp, Homo sapiens
accctcctggtggat

SEQ ID NO: 1247289 - DNA, 15 bp, Homo sapiens
aaccctcctggtgga

SEQ ID NO: 1247290 - DNA, 15 bp, Homo sapiens
aaaccctcctggtgg

SEQ ID NO: 1247291 - DNA, 15 bp, Homo sapiens
aaaaccctcctggtg

SEQ ID NO: 1247292 - DNA, 15 bp, Homo sapiens
gaaaaccctcctggt

SEQ ID NO: 1247293 - DNA, 15 bp, Homo sapiens
agaaaaccctcctgg

SEQ ID NO: 1247294 - DNA, 15 bp, Homo sapiens
cagaaaaccctcctg

SEQ ID NO: 1247295 - DNA, 15 bp, Homo sapiens
ccagaaaaccctcct

SEQ ID NO: 1247296 - DNA, 15 bp, Homo sapiens
gccagaaaaccctcc

SEQ ID NO: 1247297 - DNA, 15 bp, Homo sapiens
cgccagaaaaccctc

SEQ ID NO: 1247298 - DNA, 15 bp, Homo sapiens
ccgccagaaaaccct

SEQ ID NO: 1247299 - DNA, 15 bp, Homo sapiens
gccgccagaaaaccc

SEQ ID NO: 1247300 - DNA, 15 bp, Homo sapiens
agccgccagaaaacc

SEQ ID NO: 1247301 - DNA, 15 bp, Homo sapiens
gagccgccagaaaac

SEQ ID NO: 1247302 - DNA, 15 bp, Homo sapiens
ggagccgccagaaaa

SEQ ID NO: 1247303 - DNA, 15 bp, Homo sapiens
aggagccgccagaaa

SEQ ID NO: 1247304 - DNA, 15 bp, Homo sapiens
caggagccgccagaa

SEQ ID NO: 1247305 - DNA, 15 bp, Homo sapiens
acaggagccgccaga

SEQ ID NO: 1247306 - DNA, 15 bp, Homo sapiens
aacaggagccgccag

SEQ ID NO: 1247307 - DNA, 15 bp, Homo sapiens
gaacaggagccgcca

SEQ ID NO: 1247308 - DNA, 15 bp, Homo sapiens
tgaacaggagccgcc

SEQ ID NO: 1247309 - DNA, 15 bp, Homo sapiens
ttgaacaggagccgc

SEQ ID NO: 1247310 - DNA, 15 bp, Homo sapiens
attgaacaggagccg

SEQ ID NO: 1247311 - DNA, 15 bp, Homo sapiens
aattgaacaggagcc

SEQ ID NO: 1247312 - DNA, 15 bp, Homo sapiens
aaattgaacaggagc

SEQ ID NO: 1247313 - DNA, 15 bp, Homo sapiens
gaaattgaacaggag

SEQ ID NO: 1247314 - DNA, 15 bp, Homo sapiens
agaaattgaacagga

SEQ ID NO: 1247315 - DNA, 15 bp, Homo sapiens
aagaaattgaacagg

SEQ ID NO: 1247316 - DNA, 15 bp, Homo sapiens
aaagaaattgaacag

SEQ ID NO: 1247317 - DNA, 15 bp, Homo sapiens
gaaagaaattgaaca

SEQ ID NO: 1247318 - DNA, 15 bp, Homo sapiens
ggaaagaaattgaac

SEQ ID NO: 1247319 - DNA, 15 bp, Homo sapiens
aggaaagaaattgaa

SEQ ID NO: 1247320 - DNA, 15 bp, Homo sapiens
aaggaaagaaattga

SEQ ID NO: 1247321 - DNA, 15 bp, Homo sapiens
gaaggaaagaaattg

SEQ ID NO: 1247322 - DNA, 15 bp, Homo sapiens
agaaggaaagaaatt

SEQ ID NO: 1247323 - DNA, 15 bp, Homo sapiens
tagaaggaaagaaat

SEQ ID NO: 1247324 - DNA, 15 bp, Homo sapiens
ctagaaggaaagaaa

SEQ ID NO: 1247325 - DNA, 15 bp, Homo sapiens
tctagaaggaaagaa

SEQ ID NO: 1247326 - DNA, 15 bp, Homo sapiens
ttctagaaggaaaga

SEQ ID NO: 1247327 - DNA, 15 bp, Homo sapiens
tttctagaaggaaag

SEQ ID NO: 1247328 - DNA, 15 bp, Homo sapiens
gtttctagaaggaaa

SEQ ID NO: 1247329 - DNA, 15 bp, Homo sapiens
ggtttctagaaggaa

SEQ ID NO: 1247330 - DNA, 15 bp, Homo sapiens
tggtttctagaagga

SEQ ID NO: 1247331 - DNA, 15 bp, Homo sapiens
ctggtttctagaagg

SEQ ID NO: 1247332 - DNA, 15 bp, Homo sapiens
gctggtttctagaag

SEQ ID NO: 1247333 - DNA, 15 bp, Homo sapiens
tgctggtttctagaa

SEQ ID NO: 1247334 - DNA, 15 bp, Homo sapiens
atgctggtttctaga

SEQ ID NO: 1247335 - DNA, 15 bp, Homo sapiens
gatgctggtttctag

SEQ ID NO: 1247336 - DNA, 15 bp, Homo sapiens
ggatgctggtttcta

SEQ ID NO: 1247337 - DNA, 15 bp, Homo sapiens
tggatgctggtttct

SEQ ID NO: 1247338 - DNA, 15 bp, Homo sapiens
ctggatgctggtttc

SEQ ID NO: 1247339 - DNA, 15 bp, Homo sapiens
cctggatgctggttt

SEQ ID NO: 1247340 - DNA, 15 bp, Homo sapiens
gcctggatgctggtt

SEQ ID NO: 1247341 - DNA, 15 bp, Homo sapiens
tgcctggatgctggt

SEQ ID NO: 1247342 - DNA, 15 bp, Homo sapiens
gtgcctggatgctgg

SEQ ID NO: 1247343 - DNA, 15 bp, Homo sapiens
tgtgcctggatgctg

SEQ ID NO: 1247344 - DNA, 15 bp, Homo sapiens
ctgtgcctggatgct

SEQ ID NO: 1247345 - DNA, 15 bp, Homo sapiens
cctgtgcctggatgc

SEQ ID NO: 1247346 - DNA, 15 bp, Homo sapiens
tcctgtgcctggatg

SEQ ID NO: 1247347 - DNA, 15 bp, Homo sapiens
ctcctgtgcctggat

SEQ ID NO: 1247348 - DNA, 15 bp, Homo sapiens
cctcctgtgcctgga

SEQ ID NO: 1247349 - DNA, 15 bp, Homo sapiens
ccctcctgtgcctgg

SEQ ID NO: 1247350 - DNA, 15 bp, Homo sapiens
cccctcctgtgcctg

SEQ ID NO: 1247351 - DNA, 15 bp, Homo sapiens
tcccctcctgtgcct

SEQ ID NO: 1247352 - DNA, 15 bp, Homo sapiens
ctcccctcctgtgcc

SEQ ID NO: 1247353 - DNA, 15 bp, Homo sapiens
cctcccctcctgtgc

SEQ ID NO: 1247354 - DNA, 15 bp, Homo sapiens
gcctcccctcctgtg

SEQ ID NO: 1247355 - DNA, 15 bp, Homo sapiens
ggcctcccctcctgt

SEQ ID NO: 1247356 - DNA, 15 bp, Homo sapiens
gggcctcccctcctg

SEQ ID NO: 1247357 - DNA, 15 bp, Homo sapiens
agggcctcccctcct

SEQ ID NO: 1247358 - DNA, 15 bp, Homo sapiens
aagggcctcccctcc

SEQ ID NO: 1247359 - DNA, 15 bp, Homo sapiens
gaagggcctcccctc

SEQ ID NO: 1247360 - DNA, 15 bp, Homo sapiens
agaagggcctcccct

SEQ ID NO: 1247361 - DNA, 15 bp, Homo sapiens
aagaagggcctcccc

SEQ ID NO: 1247362 - DNA, 15 bp, Homo sapiens
caagaagggcctccc

SEQ ID NO: 1247363 - DNA, 15 bp, Homo sapiens
ccaagaagggcctcc

SEQ ID NO: 1247364 - DNA, 15 bp, Homo sapiens
accaagaagggcctc

SEQ ID NO: 1247365 - DNA, 15 bp, Homo sapiens
caccaagaagggcct

SEQ ID NO: 1247366 - DNA, 15 bp, Homo sapiens
ccaccaagaagggcc

SEQ ID NO: 1247367 - DNA, 15 bp, Homo sapiens
gccaccaagaagggc

SEQ ID NO: 1247368 - DNA, 15 bp, Homo sapiens
ggccaccaagaaggg

SEQ ID NO: 1247369 - DNA, 15 bp, Homo sapiens
gggccaccaagaagg

SEQ ID NO: 1247370 - DNA, 15 bp, Homo sapiens
tgggccaccaagaag

SEQ ID NO: 1247371 - DNA, 15 bp, Homo sapiens
ctgggccaccaagaa

SEQ ID NO: 1247372 - DNA, 15 bp, Homo sapiens
cctgggccaccaaga

SEQ ID NO: 1247373 - DNA, 15 bp, Homo sapiens
gcctgggccaccaag

SEQ ID NO: 1247374 - DNA, 15 bp, Homo sapiens
agcctgggccaccaa

SEQ ID NO: 1247375 - DNA, 15 bp, Homo sapiens
aagcctgggccacca

SEQ ID NO: 1247376 - DNA, 15 bp, Homo sapiens
aaagcctgggccacc

SEQ ID NO: 1247377 - DNA, 15 bp, Homo sapiens
caaagcctgggccac

SEQ ID NO: 1247378 - DNA, 15 bp, Homo sapiens
ccaaagcctgggcca

SEQ ID NO: 1247379 - DNA, 15 bp, Homo sapiens
gccaaagcctgggcc

SEQ ID NO: 1247380 - DNA, 15 bp, Homo sapiens
cgccaaagcctgggc

SEQ ID NO: 1247381 - DNA, 15 bp, Homo sapiens
ccgccaaagcctggg

SEQ ID NO: 1247382 - DNA, 15 bp, Homo sapiens
cccgccaaagcctgg

SEQ ID NO: 1247383 - DNA, 15 bp, Homo sapiens
atcccgccaaagcct

SEQ ID NO: 1247384 - DNA, 15 bp, Homo sapiens
aatcccgccaaagcc

SEQ ID NO: 1247385 - DNA, 15 bp, Homo sapiens
taatcccgccaaagc

SEQ ID NO: 1247386 - DNA, 15 bp, Homo sapiens
ataatcccgccaaag

SEQ ID NO: 1247387 - DNA, 15 bp, Homo sapiens
aataatcccgccaaa

SEQ ID NO: 1247388 - DNA, 15 bp, Homo sapiens
aaataatcccgccaa

SEQ ID NO: 1247389 - DNA, 15 bp, Homo sapiens
aaaataatcccgcca

SEQ ID NO: 1247390 - DNA, 15 bp, Homo sapiens
aaaaataatcccgcc

SEQ ID NO: 1247391 - DNA, 15 bp, Homo sapiens
gaaaaataatcccgc

SEQ ID NO: 1247392 - DNA, 15 bp, Homo sapiens
tgaaaaataatcccg

SEQ ID NO: 1247393 - DNA, 15 bp, Homo sapiens
ttgaaaaataatccc

SEQ ID NO: 1247394 - DNA, 15 bp, Homo sapiens
tttgaaaaataatcc

SEQ ID NO: 1247395 - DNA, 15 bp, Homo sapiens
ctttgaaaaataatc

SEQ ID NO: 1247396 - DNA, 15 bp, Homo sapiens
ttctttgaaaaataa

SEQ ID NO: 1247397 - DNA, 15 bp, Homo sapiens
gttctttgaaaaata

SEQ ID NO: 1247398 - DNA, 15 bp, Homo sapiens
agttctttgaaaaat

SEQ ID NO: 1247399 - DNA, 15 bp, Homo sapiens
aagttctttgaaaaa

SEQ ID NO: 1247400 - DNA, 15 bp, Homo sapiens
aaagttctttgaaaa

SEQ ID NO: 1247401 - DNA, 15 bp, Homo sapiens
taaagttctttgaaa

SEQ ID NO: 1247402 - DNA, 15 bp, Homo sapiens
ctaaagttctttgaa

SEQ ID NO: 1247403 - DNA, 15 bp, Homo sapiens
cctaaagttctttga

SEQ ID NO: 1247404 - DNA, 15 bp, Homo sapiens
tcctaaagttctttg

SEQ ID NO: 1247405 - DNA, 15 bp, Homo sapiens
ctcctaaagttcttt

SEQ ID NO: 1247406 - DNA, 15 bp, Homo sapiens
actcctaaagttctt

SEQ ID NO: 1247407 - DNA, 15 bp, Homo sapiens
cactcctaaagttct

SEQ ID NO: 1247408 - DNA, 15 bp, Homo sapiens
ccactcctaaagttc

SEQ ID NO: 1247409 - DNA, 15 bp, Homo sapiens
cccactcctaaagtt

SEQ ID NO: 1247410 - DNA, 15 bp, Homo sapiens
acccactcctaaagt

SEQ ID NO: 1247411 - DNA, 15 bp, Homo sapiens
cacccactcctaaag

SEQ ID NO: 1247412 - DNA, 15 bp, Homo sapiens
ccacccactcctaaa

SEQ ID NO: 1247413 - DNA, 15 bp, Homo sapiens
accacccactcctaa

SEQ ID NO: 1247414 - DNA, 15 bp, Homo sapiens
caccacccactccta

SEQ ID NO: 1247415 - DNA, 15 bp, Homo sapiens
gcaccacccactcct

SEQ ID NO: 1247416 - DNA, 15 bp, Homo sapiens
agcaccacccactcc

SEQ ID NO: 1247417 - DNA, 15 bp, Homo sapiens
aagcaccacccactc

SEQ ID NO: 1247418 - DNA, 15 bp, Homo sapiens
aaagcaccacccact

SEQ ID NO: 1247419 - DNA, 15 bp, Homo sapiens
gaaagcaccacccac

SEQ ID NO: 1247420 - DNA, 15 bp, Homo sapiens
ggaaagcaccaccca

SEQ ID NO: 1247421 - DNA, 15 bp, Homo sapiens
aggaaagcaccaccc

SEQ ID NO: 1247422 - DNA, 15 bp, Homo sapiens
caggaaagcaccacc

SEQ ID NO: 1247423 - DNA, 15 bp, Homo sapiens
ccaggaaagcaccac

SEQ ID NO: 1247424 - DNA, 15 bp, Homo sapiens
gccaggaaagcacca

SEQ ID NO: 1247425 - DNA, 15 bp, Homo sapiens
ggccaggaaagcacc

SEQ ID NO: 1247426 - DNA, 15 bp, Homo sapiens
gggccaggaaagcac

SEQ ID NO: 1247427 - DNA, 15 bp, Homo sapiens
ggggccaggaaagca

SEQ ID NO: 1247428 - DNA, 15 bp, Homo sapiens
gggggccaggaaagc

SEQ ID NO: 1247429 - DNA, 15 bp, Homo sapiens
tgggggccaggaaag

SEQ ID NO: 1247430 - DNA, 15 bp, Homo sapiens
atgggggccaggaaa

SEQ ID NO: 1247431 - DNA, 15 bp, Homo sapiens
catgggggccaggaa

SEQ ID NO: 1247432 - DNA, 15 bp, Homo sapiens
ccatgggggccagga

SEQ ID NO: 1247433 - DNA, 15 bp, Homo sapiens
cccatgggggccagg

SEQ ID NO: 1247434 - DNA, 15 bp, Homo sapiens
gcccatgggggccag

SEQ ID NO: 1247435 - DNA, 15 bp, Homo sapiens
ggcccatgggggcca

SEQ ID NO: 1247436 - DNA, 15 bp, Homo sapiens
gggcccatgggggcc

SEQ ID NO: 1247437 - DNA, 15 bp, Homo sapiens
ggggcccatgggggc

SEQ ID NO: 1247438 - DNA, 15 bp, Homo sapiens
aggggcccatggggg

SEQ ID NO: 1247439 - DNA, 15 bp, Homo sapiens
caggggcccatgggg

SEQ ID NO: 1247440 - DNA, 15 bp, Homo sapiens
gcaggggcccatggg

SEQ ID NO: 1247441 - DNA, 15 bp, Homo sapiens
ggcaggggcccatgg

SEQ ID NO: 1247442 - DNA, 15 bp, Homo sapiens
aggcaggggcccatg

SEQ ID NO: 1247443 - DNA, 15 bp, Homo sapiens
caggcaggggcccat

SEQ ID NO: 1247444 - DNA, 15 bp, Homo sapiens
acaggcaggggccca

SEQ ID NO: 1247445 - DNA, 15 bp, Homo sapiens
cacaggcaggggccc

SEQ ID NO: 1247446 - DNA, 15 bp, Homo sapiens
tcacaggcaggggcc

SEQ ID NO: 1247447 - DNA, 15 bp, Homo sapiens
ctcacaggcaggggc

SEQ ID NO: 1247448 - DNA, 15 bp, Homo sapiens
cctcacaggcagggg

SEQ ID NO: 1247449 - DNA, 15 bp, Homo sapiens
acctcacaggcaggg

SEQ ID NO: 1247450 - DNA, 15 bp, Homo sapiens
gacctcacaggcagg

SEQ ID NO: 1247451 - DNA, 15 bp, Homo sapiens
cgacctcacaggcag

SEQ ID NO: 1247452 - DNA, 15 bp, Homo sapiens
ccgacctcacaggca

SEQ ID NO: 1247453 - DNA, 15 bp, Homo sapiens
tccgacctcacaggc

SEQ ID NO: 1247454 - DNA, 15 bp, Homo sapiens
gtccgacctcacagg

SEQ ID NO: 1247455 - DNA, 15 bp, Homo sapiens
tgtccgacctcacag

SEQ ID NO: 1247456 - DNA, 15 bp, Homo sapiens
ttgtccgacctcaca

SEQ ID NO: 1247457 - DNA, 15 bp, Homo sapiens
cttgtccgacctcac

SEQ ID NO: 1247458 - DNA, 15 bp, Homo sapiens
gcttgtccgacctca

SEQ ID NO: 1247459 - DNA, 15 bp, Homo sapiens
cgcttgtccgacctc

SEQ ID NO: 1247460 - DNA, 15 bp, Homo sapiens
gcgcttgtccgacct

SEQ ID NO: 1247461 - DNA, 15 bp, Homo sapiens
tgcgcttgtccgacc

SEQ ID NO: 1247462 - DNA, 15 bp, Homo sapiens
ctgcgcttgtccgac

SEQ ID NO: 1247463 - DNA, 15 bp, Homo sapiens
cctgcgcttgtccga

SEQ ID NO: 1247464 - DNA, 15 bp, Homo sapiens
ccctgcgcttgtccg

SEQ ID NO: 1247465 - DNA, 15 bp, Homo sapiens
tccctgcgcttgtcc

SEQ ID NO: 1247466 - DNA, 15 bp, Homo sapiens
ctccctgcgcttgtc

SEQ ID NO: 1247467 - DNA, 15 bp, Homo sapiens
actccctgcgcttgt

SEQ ID NO: 1247468 - DNA, 15 bp, Homo sapiens
gactccctgcgcttg

SEQ ID NO: 1247469 - DNA, 15 bp, Homo sapiens
agactccctgcgctt

SEQ ID NO: 1247470 - DNA, 15 bp, Homo sapiens
cagactccctgcgct

SEQ ID NO: 1247471 - DNA, 15 bp, Homo sapiens
ccagactccctgcgc

SEQ ID NO: 1247472 - DNA, 15 bp, Homo sapiens
cccagactccctgcg

SEQ ID NO: 1247473 - DNA, 15 bp, Homo sapiens
ccccagactccctgc

SEQ ID NO: 1247474 - DNA, 15 bp, Homo sapiens
gccccagactccctg

SEQ ID NO: 1247475 - DNA, 15 bp, Homo sapiens
ggccccagactccct

SEQ ID NO: 1247476 - DNA, 15 bp, Homo sapiens
aggccccagactccc

SEQ ID NO: 1247477 - DNA, 15 bp, Homo sapiens
gaggccccagactcc

SEQ ID NO: 1247478 - DNA, 15 bp, Homo sapiens
agaggccccagactc

SEQ ID NO: 1247479 - DNA, 15 bp, Homo sapiens
gagaggccccagact

SEQ ID NO: 1247480 - DNA, 15 bp, Homo sapiens
tgagaggccccagac

SEQ ID NO: 1247481 - DNA, 15 bp, Homo sapiens
ctgagaggccccaga

SEQ ID NO: 1247482 - DNA, 15 bp, Homo sapiens
tctgagaggccccag

SEQ ID NO: 1247483 - DNA, 15 bp, Homo sapiens
ctctgagaggcccca

SEQ ID NO: 1247484 - DNA, 15 bp, Homo sapiens
actctgagaggcccc

SEQ ID NO: 1247485 - DNA, 15 bp, Homo sapiens
cactctgagaggccc

SEQ ID NO: 1247486 - DNA, 15 bp, Homo sapiens
gcactctgagaggcc

SEQ ID NO: 1247487 - DNA, 15 bp, Homo sapiens
tgcactctgagaggc

SEQ ID NO: 1247488 - DNA, 15 bp, Homo sapiens
ctgcactctgagagg

SEQ ID NO: 1247489 - DNA, 15 bp, Homo sapiens
cctgcactctgagag

SEQ ID NO: 1247490 - DNA, 15 bp, Homo sapiens
tcctgcactctgaga

SEQ ID NO: 1247491 - DNA, 15 bp, Homo sapiens
ttcctgcactctgag

SEQ ID NO: 1247492 - DNA, 15 bp, Homo sapiens
cttcctgcactctga

SEQ ID NO: 1247493 - DNA, 15 bp, Homo sapiens
acttcctgcactctg

SEQ ID NO: 1247494 - DNA, 15 bp, Homo sapiens
cacttcctgcactct

SEQ ID NO: 1247495 - DNA, 15 bp, Homo sapiens
gcacttcctgcactc

SEQ ID NO: 1247496 - DNA, 15 bp, Homo sapiens
cgcacttcctgcact

SEQ ID NO: 1247497 - DNA, 15 bp, Homo sapiens
gcgcacttcctgcac

SEQ ID NO: 1247498 - DNA, 15 bp, Homo sapiens
tgcgcacttcctgca

SEQ ID NO: 1247499 - DNA, 15 bp, Homo sapiens
gtgcgcacttcctgc

SEQ ID NO: 1247500 - DNA, 15 bp, Homo sapiens
tgtgcgcacttcctg

SEQ ID NO: 1247501 - DNA, 15 bp, Homo sapiens
ctgtgcgcacttcct

SEQ ID NO: 1247502 - DNA, 15 bp, Homo sapiens
cctgtgcgcacttcc

SEQ ID NO: 1247503 - DNA, 15 bp, Homo sapiens
ccctgtgcgcacttc

SEQ ID NO: 1247504 - DNA, 15 bp, Homo sapiens
accctgtgcgcactt

SEQ ID NO: 1247505 - DNA, 15 bp, Homo sapiens
caccctgtgcgcact

SEQ ID NO: 1247506 - DNA, 15 bp, Homo sapiens
gcaccctgtgcgcac

SEQ ID NO: 1247507 - DNA, 15 bp, Homo sapiens
agcaccctgtgcgca

SEQ ID NO: 1247508 - DNA, 15 bp, Homo sapiens
gagcaccctgtgcgc

SEQ ID NO: 1247509 - DNA, 15 bp, Homo sapiens
ggagcaccctgtgcg

SEQ ID NO: 1247510 - DNA, 15 bp, Homo sapiens
gggagcaccctgtgc

SEQ ID NO: 1247511 - DNA, 15 bp, Homo sapiens
tgggagcaccctgtg

SEQ ID NO: 1247512 - DNA, 15 bp, Homo sapiens
ctgggagcaccctgt

SEQ ID NO: 1247513 - DNA, 15 bp, Homo sapiens
cctgggagcaccctg

SEQ ID NO: 1247514 - DNA, 15 bp, Homo sapiens
gcctgggagcaccct

SEQ ID NO: 1247515 - DNA, 15 bp, Homo sapiens
agcctgggagcaccc

SEQ ID NO: 1247516 - DNA, 15 bp, Homo sapiens
cagcctgggagcacc

SEQ ID NO: 1247517 - DNA, 15 bp, Homo sapiens
ccagcctgggagcac

SEQ ID NO: 1247518 - DNA, 15 bp, Homo sapiens
cccagcctgggagca

SEQ ID NO: 1247519 - DNA, 15 bp, Homo sapiens
ccccagcctgggagc

SEQ ID NO: 1247520 - DNA, 15 bp, Homo sapiens
tccccagcctgggag

SEQ ID NO: 1247521 - DNA, 15 bp, Homo sapiens
ctccccagcctggga

SEQ ID NO: 1247522 - DNA, 15 bp, Homo sapiens
gctccccagcctggg

SEQ ID NO: 1247523 - DNA, 15 bp, Homo sapiens
tgctccccagcctgg

SEQ ID NO: 1247524 - DNA, 15 bp, Homo sapiens
gtgctccccagcctg

SEQ ID NO: 1247525 - DNA, 15 bp, Homo sapiens
tgtgctccccagcct

SEQ ID NO: 1247526 - DNA, 15 bp, Homo sapiens
ctgtgctccccagcc

SEQ ID NO: 1247527 - DNA, 15 bp, Homo sapiens
cctgtgctccccagc

SEQ ID NO: 1247528 - DNA, 15 bp, Homo sapiens
acctgtgctccccag

SEQ ID NO: 1247529 - DNA, 15 bp, Homo sapiens
tacctgtgctcccca

SEQ ID NO: 1247530 - DNA, 15 bp, Homo sapiens
ctacctgtgctcccc

SEQ ID NO: 1247531 - DNA, 15 bp, Homo sapiens
cctacctgtgctccc

SEQ ID NO: 1247532 - DNA, 15 bp, Homo sapiens
ccctacctgtgctcc

SEQ ID NO: 1247533 - DNA, 15 bp, Homo sapiens
cccctacctgtgctc

SEQ ID NO: 1247534 - DNA, 15 bp, Homo sapiens
tcccctacctgtgct

SEQ ID NO: 1247535 - DNA, 15 bp, Homo sapiens
gtcccctacctgtgc

SEQ ID NO: 1247536 - DNA, 15 bp, Homo sapiens
cgtcccctacctgtg

SEQ ID NO: 1247537 - DNA, 15 bp, Homo sapiens
ccgtcccctacctgt

SEQ ID NO: 1247538 - DNA, 15 bp, Homo sapiens
accgtcccctacctg

SEQ ID NO: 1247539 - DNA, 15 bp, Homo sapiens
caccgtcccctacct

SEQ ID NO: 1247540 - DNA, 15 bp, Homo sapiens
gcaccgtcccctacc

SEQ ID NO: 1247541 - DNA, 15 bp, Homo sapiens
cgcaccgtcccctac

SEQ ID NO: 1247542 - DNA, 15 bp, Homo sapiens
acgcaccgtccccta

SEQ ID NO: 1247543 - DNA, 15 bp, Homo sapiens
cacgcaccgtcccct

SEQ ID NO: 1247544 - DNA, 15 bp, Homo sapiens
ccacgcaccgtcccc

SEQ ID NO: 1247545 - DNA, 15 bp, Homo sapiens
cccacgcaccgtccc

SEQ ID NO: 1247546 - DNA, 15 bp, Homo sapiens
ccccacgcaccgtcc

SEQ ID NO: 1247547 - DNA, 15 bp, Homo sapiens
cccccacgcaccgtc

SEQ ID NO: 1247548 - DNA, 15 bp, Homo sapiens
tcccccacgcaccgt

SEQ ID NO: 1247549 - DNA, 15 bp, Homo sapiens
atcccccacgcaccg

SEQ ID NO: 1247550 - DNA, 15 bp, Homo sapiens
catcccccacgcacc

SEQ ID NO: 1247551 - DNA, 15 bp, Homo sapiens
ccatcccccacgcac

SEQ ID NO: 1247552 - DNA, 15 bp, Homo sapiens
gccatcccccacgca

SEQ ID NO: 1247553 - DNA, 15 bp, Homo sapiens
cgccatcccccacgc

SEQ ID NO: 1247554 - DNA, 15 bp, Homo sapiens
gcgccatcccccacg

SEQ ID NO: 1247555 - DNA, 15 bp, Homo sapiens
ggcgccatcccccac

SEQ ID NO: 1247556 - DNA, 15 bp, Homo sapiens
aggcgccatccccca

SEQ ID NO: 1247557 - DNA, 15 bp, Homo sapiens
caggcgccatccccc

SEQ ID NO: 1247558 - DNA, 15 bp, Homo sapiens
ccaggcgccatcccc

SEQ ID NO: 1247559 - DNA, 15 bp, Homo sapiens
cccaggcgccatccc

SEQ ID NO: 1247560 - DNA, 15 bp, Homo sapiens
ccccaggcgccatcc

SEQ ID NO: 1247561 - DNA, 15 bp, Homo sapiens
gccccaggcgccatc

SEQ ID NO: 1247562 - DNA, 15 bp, Homo sapiens
tgccccaggcgccat

SEQ ID NO: 1247563 - DNA, 15 bp, Homo sapiens
atgccccaggcgcca

SEQ ID NO: 1247564 - DNA, 15 bp, Homo sapiens
catgccccaggcgcc

SEQ ID NO: 1247565 - DNA, 15 bp, Homo sapiens
ccatgccccaggcgc

SEQ ID NO: 1247566 - DNA, 15 bp, Homo sapiens
cccatgccccaggcg

SEQ ID NO: 1247567 - DNA, 15 bp, Homo sapiens
ccccatgccccaggc

SEQ ID NO: 1247568 - DNA, 15 bp, Homo sapiens
cccccatgccccagg

SEQ ID NO: 1247569 - DNA, 15 bp, Homo sapiens
tcccccatgccccag

SEQ ID NO: 1247570 - DNA, 15 bp, Homo sapiens
atcccccatgcccca

SEQ ID NO: 1247571 - DNA, 15 bp, Homo sapiens
catcccccatgcccc

SEQ ID NO: 1247572 - DNA, 15 bp, Homo sapiens
ccatcccccatgccc

SEQ ID NO: 1247573 - DNA, 15 bp, Homo sapiens
cccatcccccatgcc

SEQ ID NO: 1247574 - DNA, 15 bp, Homo sapiens
ccccatcccccatgc

SEQ ID NO: 1247575 - DNA, 15 bp, Homo sapiens
accccatcccccatg

SEQ ID NO: 1247576 - DNA, 15 bp, Homo sapiens
acaccccatccccca

SEQ ID NO: 1247577 - DNA, 15 bp, Homo sapiens
cacaccccatccccc

SEQ ID NO: 1247578 - DNA, 15 bp, Homo sapiens
ccacaccccatcccc

SEQ ID NO: 1247579 - DNA, 15 bp, Homo sapiens
cccacaccccatccc

SEQ ID NO: 1247580 - DNA, 15 bp, Homo sapiens
tcccacaccccatcc

SEQ ID NO: 1247581 - DNA, 15 bp, Homo sapiens
ttcccacaccccatc

SEQ ID NO: 1247582 - DNA, 15 bp, Homo sapiens
tttcccacaccccat

SEQ ID NO: 1247583 - DNA, 15 bp, Homo sapiens
gtttcccacacccca

SEQ ID NO: 1247584 - DNA, 15 bp, Homo sapiens
cgtttcccacacccc

SEQ ID NO: 1247585 - DNA, 15 bp, Homo sapiens
ccgtttcccacaccc

SEQ ID NO: 1247586 - DNA, 15 bp, Homo sapiens
gccgtttcccacacc

SEQ ID NO: 1247587 - DNA, 15 bp, Homo sapiens
tgccgtttcccacac

SEQ ID NO: 1247588 - DNA, 15 bp, Homo sapiens
atgccgtttcccaca

SEQ ID NO: 1247589 - DNA, 15 bp, Homo sapiens
catgccgtttcccac

SEQ ID NO: 1247590 - DNA, 15 bp, Homo sapiens
acatgccgtttccca

SEQ ID NO: 1247591 - DNA, 15 bp, Homo sapiens
cacatgccgtttccc

SEQ ID NO: 1247592 - DNA, 15 bp, Homo sapiens
ccacatgccgtttcc

SEQ ID NO: 1247593 - DNA, 15 bp, Homo sapiens
cccacatgccgtttc

SEQ ID NO: 1247594 - DNA, 15 bp, Homo sapiens
ccccacatgccgttt

SEQ ID NO: 1247595 - DNA, 15 bp, Homo sapiens
gccccacatgccgtt

SEQ ID NO: 1247596 - DNA, 15 bp, Homo sapiens
cgccccacatgccgt

SEQ ID NO: 1247597 - DNA, 15 bp, Homo sapiens
acgccccacatgccg

SEQ ID NO: 1247598 - DNA, 15 bp, Homo sapiens
tacgccccacatgcc

SEQ ID NO: 1247599 - DNA, 15 bp, Homo sapiens
ctacgccccacatgc

SEQ ID NO: 1247600 - DNA, 15 bp, Homo sapiens
cctacgccccacatg

SEQ ID NO: 1247601 - DNA, 15 bp, Homo sapiens
ccctacgccccacat

SEQ ID NO: 1247602 - DNA, 15 bp, Homo sapiens
cccctacgccccaca

SEQ ID NO: 1247603 - DNA, 15 bp, Homo sapiens
tcccctacgccccac

SEQ ID NO: 1247604 - DNA, 15 bp, Homo sapiens
atcccctacgcccca

SEQ ID NO: 1247605 - DNA, 15 bp, Homo sapiens
catcccctacgcccc

SEQ ID NO: 1247606 - DNA, 15 bp, Homo sapiens
ccatcccctacgccc

SEQ ID NO: 1247607 - DNA, 15 bp, Homo sapiens
cccatcccctacgcc

SEQ ID NO: 1247608 - DNA, 15 bp, Homo sapiens
ccccatcccctacgc

SEQ ID NO: 1247609 - DNA, 15 bp, Homo sapiens
accccatcccctacg

SEQ ID NO: 1247610 - DNA, 15 bp, Homo sapiens
caccccatcccctac

SEQ ID NO: 1247611 - DNA, 15 bp, Homo sapiens
acaccccatccccta

SEQ ID NO: 1247612 - DNA, 15 bp, Homo sapiens
cacaccccatcccct

SEQ ID NO: 1247613 - DNA, 15 bp, Homo sapiens
tccacaccccatccc

SEQ ID NO: 1247614 - DNA, 15 bp, Homo sapiens
ctccacaccccatcc

SEQ ID NO: 1247615 - DNA, 15 bp, Homo sapiens
cctccacaccccatc

SEQ ID NO: 1247616 - DNA, 15 bp, Homo sapiens
tcctccacaccccat

SEQ ID NO: 1247617 - DNA, 15 bp, Homo sapiens
atcctccacacccca

SEQ ID NO: 1247618 - DNA, 15 bp, Homo sapiens
gatcctccacacccc

SEQ ID NO: 1247619 - DNA, 15 bp, Homo sapiens
cgatcctccacaccc

SEQ ID NO: 1247620 - DNA, 15 bp, Homo sapiens
ccgatcctccacacc

SEQ ID NO: 1247621 - DNA, 15 bp, Homo sapiens
cccgatcctccacac

SEQ ID NO: 1247622 - DNA, 15 bp, Homo sapiens
ccccgatcctccaca

SEQ ID NO: 1247623 - DNA, 15 bp, Homo sapiens
cccccgatcctccac

SEQ ID NO: 1247624 - DNA, 15 bp, Homo sapiens
acccccgatcctcca

SEQ ID NO: 1247625 - DNA, 15 bp, Homo sapiens
cacccccgatcctcc

SEQ ID NO: 1247626 - DNA, 15 bp, Homo sapiens
ccacccccgatcctc

SEQ ID NO: 1247627 - DNA, 15 bp, Homo sapiens
cccacccccgatcct

SEQ ID NO: 1247628 - DNA, 15 bp, Homo sapiens
ccccacccccgatcc

SEQ ID NO: 1247629 - DNA, 15 bp, Homo sapiens
tccccacccccgatc

SEQ ID NO: 1247630 - DNA, 15 bp, Homo sapiens
atccccacccccgat

SEQ ID NO: 1247631 - DNA, 15 bp, Homo sapiens
catccccacccccga

SEQ ID NO: 1247632 - DNA, 15 bp, Homo sapiens
gccatccccaccccc

SEQ ID NO: 1247633 - DNA, 15 bp, Homo sapiens
cgccatccccacccc

SEQ ID NO: 1247634 - DNA, 15 bp, Homo sapiens
acgccatccccaccc

SEQ ID NO: 1247635 - DNA, 15 bp, Homo sapiens
cacgccatccccacc

SEQ ID NO: 1247636 - DNA, 15 bp, Homo sapiens
acacgccatccccac

SEQ ID NO: 1247637 - DNA, 15 bp, Homo sapiens
cacacgccatcccca

SEQ ID NO: 1247638 - DNA, 15 bp, Homo sapiens
ccacacgccatcccc

SEQ ID NO: 1247639 - DNA, 15 bp, Homo sapiens
cccacacgccatccc

SEQ ID NO: 1247640 - DNA, 15 bp, Homo sapiens
ccccacacgccatcc

SEQ ID NO: 1247641 - DNA, 15 bp, Homo sapiens
accccacacgccatc

SEQ ID NO: 1247642 - DNA, 15 bp, Homo sapiens
caccccacacgccat

SEQ ID NO: 1247643 - DNA, 15 bp, Homo sapiens
acaccccacacgcca

SEQ ID NO: 1247644 - DNA, 15 bp, Homo sapiens
cacaccccacacgcc

SEQ ID NO: 1247645 - DNA, 15 bp, Homo sapiens
ccacaccccacacgc

SEQ ID NO: 1247646 - DNA, 15 bp, Homo sapiens
cccacaccccacacg

SEQ ID NO: 1247647 - DNA, 15 bp, Homo sapiens
ccccacaccccacac

SEQ ID NO: 1247648 - DNA, 15 bp, Homo sapiens
cccccacaccccaca

SEQ ID NO: 1247649 - DNA, 15 bp, Homo sapiens
tcccccacaccccac

SEQ ID NO: 1247650 - DNA, 15 bp, Homo sapiens
atcccccacacccca

SEQ ID NO: 1247651 - DNA, 15 bp, Homo sapiens
catcccccacacccc

SEQ ID NO: 1247652 - DNA, 15 bp, Homo sapiens
ccatcccccacaccc

SEQ ID NO: 1247653 - DNA, 15 bp, Homo sapiens
cccatcccccacacc

SEQ ID NO: 1247654 - DNA, 15 bp, Homo sapiens
gcccatcccccacac

SEQ ID NO: 1247655 - DNA, 15 bp, Homo sapiens
ggcccatcccccaca

SEQ ID NO: 1247656 - DNA, 15 bp, Homo sapiens
cggcccatcccccac

SEQ ID NO: 1247657 - DNA, 15 bp, Homo sapiens
acggcccatccccca

SEQ ID NO: 1247658 - DNA, 15 bp, Homo sapiens
cacggcccatccccc

SEQ ID NO: 1247659 - DNA, 15 bp, Homo sapiens
ccacggcccatcccc

SEQ ID NO: 1247660 - DNA, 15 bp, Homo sapiens
cccacggcccatccc

SEQ ID NO: 1247661 - DNA, 15 bp, Homo sapiens
ccccacggcccatcc

SEQ ID NO: 1247662 - DNA, 15 bp, Homo sapiens
cccccacggcccatc

SEQ ID NO: 1247663 - DNA, 15 bp, Homo sapiens
ccccccacggcccat

SEQ ID NO: 1247664 - DNA, 15 bp, Homo sapiens
cccccccacggccca

SEQ ID NO: 1247665 - DNA, 15 bp, Homo sapiens
acccccccacggccc

SEQ ID NO: 1247666 - DNA, 15 bp, Homo sapiens
cacccccccacggcc

SEQ ID NO: 1247667 - DNA, 15 bp, Homo sapiens
ccacccccccacggc

SEQ ID NO: 1247668 - DNA, 15 bp, Homo sapiens
cccacccccccacgg

SEQ ID NO: 1247669 - DNA, 15 bp, Homo sapiens
ccccacccccccacg

SEQ ID NO: 1247670 - DNA, 15 bp, Homo sapiens
gccccacccccccac

SEQ ID NO: 1247671 - DNA, 15 bp, Homo sapiens
ggccccaccccccca

SEQ ID NO: 1247672 - DNA, 15 bp, Homo sapiens
aggccccaccccccc

SEQ ID NO: 1247673 - DNA, 15 bp, Homo sapiens
caggccccacccccc

SEQ ID NO: 1247674 - DNA, 15 bp, Homo sapiens
ccaggccccaccccc

SEQ ID NO: 1247675 - DNA, 15 bp, Homo sapiens
cccaggccccacccc

SEQ ID NO: 1247676 - DNA, 15 bp, Homo sapiens
tcccaggccccaccc

SEQ ID NO: 1247677 - DNA, 15 bp, Homo sapiens
ttcccaggccccacc

SEQ ID NO: 1247678 - DNA, 15 bp, Homo sapiens
tttcccaggccccac

SEQ ID NO: 1247679 - DNA, 15 bp, Homo sapiens
gtttcccaggcccca

SEQ ID NO: 1247680 - DNA, 15 bp, Homo sapiens
tgtttcccaggcccc

SEQ ID NO: 1247681 - DNA, 15 bp, Homo sapiens
ctgtttcccaggccc

SEQ ID NO: 1247682 - DNA, 15 bp, Homo sapiens
gctgtttcccaggcc

SEQ ID NO: 1247683 - DNA, 15 bp, Homo sapiens
tgctgtttcccaggc

SEQ ID NO: 1247684 - DNA, 15 bp, Homo sapiens
atgctgtttcccagg

SEQ ID NO: 1247685 - DNA, 15 bp, Homo sapiens
catgctgtttcccag

SEQ ID NO: 1247686 - DNA, 15 bp, Homo sapiens
acatgctgtttccca

SEQ ID NO: 1247687 - DNA, 15 bp, Homo sapiens
cacatgctgtttccc

SEQ ID NO: 1247688 - DNA, 15 bp, Homo sapiens
ccacatgctgtttcc

SEQ ID NO: 1247689 - DNA, 15 bp, Homo sapiens
cccacatgctgtttc

SEQ ID NO: 1247690 - DNA, 15 bp, Homo sapiens
ccccacatgctgttt

SEQ ID NO: 1247691 - DNA, 15 bp, Homo sapiens
gccccacatgctgtt

SEQ ID NO: 1247692 - DNA, 15 bp, Homo sapiens
tgccccacatgctgt

SEQ ID NO: 1247693 - DNA, 15 bp, Homo sapiens
atgccccacatgctg

SEQ ID NO: 1247694 - DNA, 15 bp, Homo sapiens
catgccccacatgct

SEQ ID NO: 1247695 - DNA, 15 bp, Homo sapiens
ccatgccccacatgc

SEQ ID NO: 1247696 - DNA, 15 bp, Homo sapiens
cccatgccccacatg

SEQ ID NO: 1247697 - DNA, 15 bp, Homo sapiens
ccccatgccccacat

SEQ ID NO: 1247698 - DNA, 15 bp, Homo sapiens
accccatgccccaca

SEQ ID NO: 1247699 - DNA, 15 bp, Homo sapiens
caccccatgccccac

SEQ ID NO: 1247700 - DNA, 15 bp, Homo sapiens
acaccccatgcccca

SEQ ID NO: 1247701 - DNA, 15 bp, Homo sapiens
cacaccccatgcccc

SEQ ID NO: 1247702 - DNA, 15 bp, Homo sapiens
ccacaccccatgccc

SEQ ID NO: 1247703 - DNA, 15 bp, Homo sapiens
cccacaccccatgcc

SEQ ID NO: 1247704 - DNA, 15 bp, Homo sapiens
ccccacaccccatgc

SEQ ID NO: 1247705 - DNA, 15 bp, Homo sapiens
cccccacaccccatg

SEQ ID NO: 1247706 - DNA, 15 bp, Homo sapiens
acccccacaccccat

SEQ ID NO: 1247707 - DNA, 15 bp, Homo sapiens
cacccccacacccca

SEQ ID NO: 1247708 - DNA, 15 bp, Homo sapiens
tcacccccacacccc

SEQ ID NO: 1247709 - DNA, 15 bp, Homo sapiens
ctcacccccacaccc

SEQ ID NO: 1247710 - DNA, 15 bp, Homo sapiens
cctcacccccacacc

SEQ ID NO: 1247711 - DNA, 15 bp, Homo sapiens
acctcacccccacac

SEQ ID NO: 1247712 - DNA, 15 bp, Homo sapiens
cacctcacccccaca

SEQ ID NO: 1247713 - DNA, 15 bp, Homo sapiens
acacctcacccccac

SEQ ID NO: 1247714 - DNA, 15 bp, Homo sapiens
cacacctcaccccca

SEQ ID NO: 1247715 - DNA, 15 bp, Homo sapiens
ccacacctcaccccc

SEQ ID NO: 1247716 - DNA, 15 bp, Homo sapiens
cccacacctcacccc

SEQ ID NO: 1247717 - DNA, 15 bp, Homo sapiens
tcccacacctcaccc

SEQ ID NO: 1247718 - DNA, 15 bp, Homo sapiens
ttcccacacctcacc

SEQ ID NO: 1247719 - DNA, 15 bp, Homo sapiens
tttcccacacctcac

SEQ ID NO: 1247720 - DNA, 15 bp, Homo sapiens
ctttcccacacctca

SEQ ID NO: 1247721 - DNA, 15 bp, Homo sapiens
actttcccacacctc

SEQ ID NO: 1247722 - DNA, 15 bp, Homo sapiens
cactttcccacacct

SEQ ID NO: 1247723 - DNA, 15 bp, Homo sapiens
acactttcccacacc

SEQ ID NO: 1247724 - DNA, 15 bp, Homo sapiens
cacactttcccacac

SEQ ID NO: 1247725 - DNA, 15 bp, Homo sapiens
acacactttcccaca

SEQ ID NO: 1247726 - DNA, 15 bp, Homo sapiens
cacacactttcccac

SEQ ID NO: 1247727 - DNA, 15 bp, Homo sapiens
ccacacactttccca

SEQ ID NO: 1247728 - DNA, 15 bp, Homo sapiens
cccacacactttccc

SEQ ID NO: 1247729 - DNA, 15 bp, Homo sapiens
ccccacacactttcc

SEQ ID NO: 1247730 - DNA, 15 bp, Homo sapiens
accccacacactttc

SEQ ID NO: 1247731 - DNA, 15 bp, Homo sapiens
caccccacacacttt

SEQ ID NO: 1247732 - DNA, 15 bp, Homo sapiens
acaccccacacactt

SEQ ID NO: 1247733 - DNA, 15 bp, Homo sapiens
cacaccccacacact

SEQ ID NO: 1247734 - DNA, 15 bp, Homo sapiens
ccacaccccacacac

SEQ ID NO: 1247735 - DNA, 15 bp, Homo sapiens
cccacaccccacaca

SEQ ID NO: 1247736 - DNA, 15 bp, Homo sapiens
ccccatcccccacac

SEQ ID NO: 1247737 - DNA, 15 bp, Homo sapiens
gccccatcccccaca

SEQ ID NO: 1247738 - DNA, 15 bp, Homo sapiens
tgccccatcccccac

SEQ ID NO: 1247739 - DNA, 15 bp, Homo sapiens
atgccccatccccca

SEQ ID NO: 1247740 - DNA, 15 bp, Homo sapiens
catgccccatccccc

SEQ ID NO: 1247741 - DNA, 15 bp, Homo sapiens
ccatgccccatcccc

SEQ ID NO: 1247742 - DNA, 15 bp, Homo sapiens
tccatgccccatccc

SEQ ID NO: 1247743 - DNA, 15 bp, Homo sapiens
ttccatgccccatcc

SEQ ID NO: 1247744 - DNA, 15 bp, Homo sapiens
tttccatgccccatc

SEQ ID NO: 1247745 - DNA, 15 bp, Homo sapiens
ctttccatgccccat

SEQ ID NO: 1247746 - DNA, 15 bp, Homo sapiens
cctttccatgcccca

SEQ ID NO: 1247747 - DNA, 15 bp, Homo sapiens
ccctttccatgcccc

SEQ ID NO: 1247748 - DNA, 15 bp, Homo sapiens
gccctttccatgccc

SEQ ID NO: 1247749 - DNA, 15 bp, Homo sapiens
cgccctttccatgcc

SEQ ID NO: 1247750 - DNA, 15 bp, Homo sapiens
acgccctttccatgc

SEQ ID NO: 1247751 - DNA, 15 bp, Homo sapiens
cacgccctttccatg

SEQ ID NO: 1247752 - DNA, 15 bp, Homo sapiens
acacgccctttccat

SEQ ID NO: 1247753 - DNA, 15 bp, Homo sapiens
cacacgccctttcca

SEQ ID NO: 1247754 - DNA, 15 bp, Homo sapiens
ccacacgccctttcc

SEQ ID NO: 1247755 - DNA, 15 bp, Homo sapiens
cccacacgccctttc

SEQ ID NO: 1247756 - DNA, 15 bp, Homo sapiens
ccccacacgcccttt

SEQ ID NO: 1247757 - DNA, 15 bp, Homo sapiens
accccacacgccctt

SEQ ID NO: 1247758 - DNA, 15 bp, Homo sapiens
caccccacacgccct

SEQ ID NO: 1247759 - DNA, 15 bp, Homo sapiens
gcaccccacacgccc

SEQ ID NO: 1247760 - DNA, 15 bp, Homo sapiens
tgcaccccacacgcc

SEQ ID NO: 1247761 - DNA, 15 bp, Homo sapiens
ctgcaccccacacgc

SEQ ID NO: 1247762 - DNA, 15 bp, Homo sapiens
cctgcaccccacacg

SEQ ID NO: 1247763 - DNA, 15 bp, Homo sapiens
ccctgcaccccacac

SEQ ID NO: 1247764 - DNA, 15 bp, Homo sapiens
cccctgcaccccaca

SEQ ID NO: 1247765 - DNA, 15 bp, Homo sapiens
tcccctgcaccccac

SEQ ID NO: 1247766 - DNA, 15 bp, Homo sapiens
atcccctgcacccca

SEQ ID NO: 1247767 - DNA, 15 bp, Homo sapiens
catcccctgcacccc

SEQ ID NO: 1247768 - DNA, 15 bp, Homo sapiens
ccatcccctgcaccc

SEQ ID NO: 1247769 - DNA, 15 bp, Homo sapiens
cccatcccctgcacc

SEQ ID NO: 1247770 - DNA, 15 bp, Homo sapiens
ccccatcccctgcac

SEQ ID NO: 1247771 - DNA, 15 bp, Homo sapiens
gccccatcccctgca

SEQ ID NO: 1247772 - DNA, 15 bp, Homo sapiens
tgccccatcccctgc

SEQ ID NO: 1247773 - DNA, 15 bp, Homo sapiens
atgccccatcccctg

SEQ ID NO: 1247774 - DNA, 15 bp, Homo sapiens
catgccccatcccct

SEQ ID NO: 1247775 - DNA, 15 bp, Homo sapiens
ctccatgccccatcc

SEQ ID NO: 1247776 - DNA, 15 bp, Homo sapiens
cctccatgccccatc

SEQ ID NO: 1247777 - DNA, 15 bp, Homo sapiens
acctccatgccccat

SEQ ID NO: 1247778 - DNA, 15 bp, Homo sapiens
cacctccatgcccca

SEQ ID NO: 1247779 - DNA, 15 bp, Homo sapiens
acacctccatgcccc

SEQ ID NO: 1247780 - DNA, 15 bp, Homo sapiens
cacacctccatgccc

SEQ ID NO: 1247781 - DNA, 15 bp, Homo sapiens
ccacacctccatgcc

SEQ ID NO: 1247782 - DNA, 15 bp, Homo sapiens
cccacacctccatgc

SEQ ID NO: 1247783 - DNA, 15 bp, Homo sapiens
ccccacacctccatg

SEQ ID NO: 1247784 - DNA, 15 bp, Homo sapiens
cccccacacctccat

SEQ ID NO: 1247785 - DNA, 15 bp, Homo sapiens
tcccccacacctcca

SEQ ID NO: 1247786 - DNA, 15 bp, Homo sapiens
atcccccacacctcc

SEQ ID NO: 1247787 - DNA, 15 bp, Homo sapiens
catcccccacacctc

SEQ ID NO: 1247788 - DNA, 15 bp, Homo sapiens
ccatcccccacacct

SEQ ID NO: 1247789 - DNA, 15 bp, Homo sapiens
accccatcccccaca

SEQ ID NO: 1247790 - DNA, 15 bp, Homo sapiens
caccccatcccccac

SEQ ID NO: 1247791 - DNA, 15 bp, Homo sapiens
acacaccccatcccc

SEQ ID NO: 1247792 - DNA, 15 bp, Homo sapiens
cacacaccccatccc

SEQ ID NO: 1247793 - DNA, 15 bp, Homo sapiens
ccacacaccccatcc

SEQ ID NO: 1247794 - DNA, 15 bp, Homo sapiens
cccacacaccccatc

SEQ ID NO: 1247795 - DNA, 15 bp, Homo sapiens
ccccacacaccccat

SEQ ID NO: 1247796 - DNA, 15 bp, Homo sapiens
accccacacacccca

SEQ ID NO: 1247797 - DNA, 15 bp, Homo sapiens
caccccacacacccc

SEQ ID NO: 1247798 - DNA, 15 bp, Homo sapiens
acaccccacacaccc

SEQ ID NO: 1247799 - DNA, 15 bp, Homo sapiens
gacaccccacacacc

SEQ ID NO: 1247800 - DNA, 15 bp, Homo sapiens
cgacaccccacacac

SEQ ID NO: 1247801 - DNA, 15 bp, Homo sapiens
ccgacaccccacaca

SEQ ID NO: 1247802 - DNA, 15 bp, Homo sapiens
cccgacaccccacac

SEQ ID NO: 1247803 - DNA, 15 bp, Homo sapiens
ccccgacaccccaca

SEQ ID NO: 1247804 - DNA, 15 bp, Homo sapiens
tccccgacaccccac

SEQ ID NO: 1247805 - DNA, 15 bp, Homo sapiens
atccccgacacccca

SEQ ID NO: 1247806 - DNA, 15 bp, Homo sapiens
catccccgacacccc

SEQ ID NO: 1247807 - DNA, 15 bp, Homo sapiens
ccatccccgacaccc

SEQ ID NO: 1247808 - DNA, 15 bp, Homo sapiens
cccatccccgacacc

SEQ ID NO: 1247809 - DNA, 15 bp, Homo sapiens
ccccatccccgacac

SEQ ID NO: 1247810 - DNA, 15 bp, Homo sapiens
gccccatccccgaca

SEQ ID NO: 1247811 - DNA, 15 bp, Homo sapiens
tgccccatccccgac

SEQ ID NO: 1247812 - DNA, 15 bp, Homo sapiens
atgccccatccccga

SEQ ID NO: 1247813 - DNA, 15 bp, Homo sapiens
catgccccatccccg

SEQ ID NO: 1247814 - DNA, 15 bp, Homo sapiens
acatgccccatcccc

SEQ ID NO: 1247815 - DNA, 15 bp, Homo sapiens
cacatgccccatccc

SEQ ID NO: 1247816 - DNA, 15 bp, Homo sapiens
ccacatgccccatcc

SEQ ID NO: 1247817 - DNA, 15 bp, Homo sapiens
cccacatgccccatc

SEQ ID NO: 1247818 - DNA, 15 bp, Homo sapiens
ccccacatgccccat

SEQ ID NO: 1247819 - DNA, 15 bp, Homo sapiens
accccacatgcccca

SEQ ID NO: 1247820 - DNA, 15 bp, Homo sapiens
caccccacatgcccc

SEQ ID NO: 1247821 - DNA, 15 bp, Homo sapiens
acaccccacatgccc

SEQ ID NO: 1247822 - DNA, 15 bp, Homo sapiens
cacaccccacatgcc

SEQ ID NO: 1247823 - DNA, 15 bp, Homo sapiens
ccacaccccacatgc

SEQ ID NO: 1247824 - DNA, 15 bp, Homo sapiens
cccacaccccacatg

SEQ ID NO: 1247825 - DNA, 15 bp, Homo sapiens
ccccacaccccacat

SEQ ID NO: 1247826 - DNA, 15 bp, Homo sapiens
tctgcaccccacacg

SEQ ID NO: 1247827 - DNA, 15 bp, Homo sapiens
ctctgcaccccacac

SEQ ID NO: 1247828 - DNA, 15 bp, Homo sapiens
cctctgcaccccaca

SEQ ID NO: 1247829 - DNA, 15 bp, Homo sapiens
tcctctgcaccccac

SEQ ID NO: 1247830 - DNA, 15 bp, Homo sapiens
atcctctgcacccca

SEQ ID NO: 1247831 - DNA, 15 bp, Homo sapiens
catcctctgcacccc

SEQ ID NO: 1247832 - DNA, 15 bp, Homo sapiens
ccatcctctgcaccc

SEQ ID NO: 1247833 - DNA, 15 bp, Homo sapiens
cccatcctctgcacc

SEQ ID NO: 1247834 - DNA, 15 bp, Homo sapiens
ccccatcctctgcac

SEQ ID NO: 1247835 - DNA, 15 bp, Homo sapiens
gccccatcctctgca

SEQ ID NO: 1247836 - DNA, 15 bp, Homo sapiens
tgccccatcctctgc

SEQ ID NO: 1247837 - DNA, 15 bp, Homo sapiens
atgccccatcctctg

SEQ ID NO: 1247838 - DNA, 15 bp, Homo sapiens
catgccccatcctct

SEQ ID NO: 1247839 - DNA, 15 bp, Homo sapiens
ccatgccccatcctc

SEQ ID NO: 1247840 - DNA, 15 bp, Homo sapiens
cccatgccccatcct

SEQ ID NO: 1247841 - DNA, 15 bp, Homo sapiens
ccccatgccccatcc

SEQ ID NO: 1247842 - DNA, 15 bp, Homo sapiens
cccccatgccccatc

SEQ ID NO: 1247843 - DNA, 15 bp, Homo sapiens
ccccccatgccccat

SEQ ID NO: 1247844 - DNA, 15 bp, Homo sapiens
cccccccatgcccca

SEQ ID NO: 1247845 - DNA, 15 bp, Homo sapiens
acccccccatgcccc

SEQ ID NO: 1247846 - DNA, 15 bp, Homo sapiens
cacccccccatgccc

SEQ ID NO: 1247847 - DNA, 15 bp, Homo sapiens
ccacccccccatgcc

SEQ ID NO: 1247848 - DNA, 15 bp, Homo sapiens
cccacccccccatgc

SEQ ID NO: 1247849 - DNA, 15 bp, Homo sapiens
ccccacccccccatg

SEQ ID NO: 1247850 - DNA, 15 bp, Homo sapiens
tccccacccccccat

SEQ ID NO: 1247851 - DNA, 15 bp, Homo sapiens
atccccaccccccca

SEQ ID NO: 1247852 - DNA, 15 bp, Homo sapiens
catccccaccccccc

SEQ ID NO: 1247853 - DNA, 15 bp, Homo sapiens
ccatccccacccccc

SEQ ID NO: 1247854 - DNA, 15 bp, Homo sapiens
tcgccatccccaccc

SEQ ID NO: 1247855 - DNA, 15 bp, Homo sapiens
ctcgccatccccacc

SEQ ID NO: 1247856 - DNA, 15 bp, Homo sapiens
actcgccatccccac

SEQ ID NO: 1247857 - DNA, 15 bp, Homo sapiens
cactcgccatcccca

SEQ ID NO: 1247858 - DNA, 15 bp, Homo sapiens
ccactcgccatcccc

SEQ ID NO: 1247859 - DNA, 15 bp, Homo sapiens
cccactcgccatccc

SEQ ID NO: 1247860 - DNA, 15 bp, Homo sapiens
ccccactcgccatcc

SEQ ID NO: 1247861 - DNA, 15 bp, Homo sapiens
gccccactcgccatc

SEQ ID NO: 1247862 - DNA, 15 bp, Homo sapiens
agccccactcgccat

SEQ ID NO: 1247863 - DNA, 15 bp, Homo sapiens
cagccccactcgcca

SEQ ID NO: 1247864 - DNA, 15 bp, Homo sapiens
ccagccccactcgcc

SEQ ID NO: 1247865 - DNA, 15 bp, Homo sapiens
cccagccccactcgc

SEQ ID NO: 1247866 - DNA, 15 bp, Homo sapiens
ccccagccccactcg

SEQ ID NO: 1247867 - DNA, 15 bp, Homo sapiens
gccccagccccactc

SEQ ID NO: 1247868 - DNA, 15 bp, Homo sapiens
ggccccagccccact

SEQ ID NO: 1247869 - DNA, 15 bp, Homo sapiens
aggccccagccccac

SEQ ID NO: 1247870 - DNA, 15 bp, Homo sapiens
caggccccagcccca

SEQ ID NO: 1247871 - DNA, 15 bp, Homo sapiens
ccaggccccagcccc

SEQ ID NO: 1247872 - DNA, 15 bp, Homo sapiens
cccaggccccagccc

SEQ ID NO: 1247873 - DNA, 15 bp, Homo sapiens
tcccaggccccagcc

SEQ ID NO: 1247874 - DNA, 15 bp, Homo sapiens
ttcccaggccccagc

SEQ ID NO: 1247875 - DNA, 15 bp, Homo sapiens
attcccaggccccag

SEQ ID NO: 1247876 - DNA, 15 bp, Homo sapiens
cattcccaggcccca

SEQ ID NO: 1247877 - DNA, 15 bp, Homo sapiens
ccattcccaggcccc

SEQ ID NO: 1247878 - DNA, 15 bp, Homo sapiens
accattcccaggccc

SEQ ID NO: 1247879 - DNA, 15 bp, Homo sapiens
caccattcccaggcc

SEQ ID NO: 1247880 - DNA, 15 bp, Homo sapiens
tcaccattcccaggc

SEQ ID NO: 1247881 - DNA, 15 bp, Homo sapiens
ctcaccattcccagg

SEQ ID NO: 1247882 - DNA, 15 bp, Homo sapiens
actcaccattcccag

SEQ ID NO: 1247883 - DNA, 15 bp, Homo sapiens
cactcaccattccca

SEQ ID NO: 1247884 - DNA, 15 bp, Homo sapiens
ccactcaccattccc

SEQ ID NO: 1247885 - DNA, 15 bp, Homo sapiens
cccactcaccattcc

SEQ ID NO: 1247886 - DNA, 15 bp, Homo sapiens
ccccactcaccattc

SEQ ID NO: 1247887 - DNA, 15 bp, Homo sapiens
gccccactcaccatt

SEQ ID NO: 1247888 - DNA, 15 bp, Homo sapiens
tgccccactcaccat

SEQ ID NO: 1247889 - DNA, 15 bp, Homo sapiens
atgccccactcacca

SEQ ID NO: 1247890 - DNA, 15 bp, Homo sapiens
catgccccactcacc

SEQ ID NO: 1247891 - DNA, 15 bp, Homo sapiens
ccatgccccactcac

SEQ ID NO: 1247892 - DNA, 15 bp, Homo sapiens
cccatgccccactca

SEQ ID NO: 1247893 - DNA, 15 bp, Homo sapiens
ccccatgccccactc

SEQ ID NO: 1247894 - DNA, 15 bp, Homo sapiens
tccccatgccccact

SEQ ID NO: 1247895 - DNA, 15 bp, Homo sapiens
atccccatgccccac

SEQ ID NO: 1247896 - DNA, 15 bp, Homo sapiens
catccccatgcccca

SEQ ID NO: 1247897 - DNA, 15 bp, Homo sapiens
ccatccccatgcccc

SEQ ID NO: 1247898 - DNA, 15 bp, Homo sapiens
gccatccccatgccc

SEQ ID NO: 1247899 - DNA, 15 bp, Homo sapiens
cgccatccccatgcc

SEQ ID NO: 1247900 - DNA, 15 bp, Homo sapiens
tcgccatccccatgc

SEQ ID NO: 1247901 - DNA, 15 bp, Homo sapiens
ctcgccatccccatg

SEQ ID NO: 1247902 - DNA, 15 bp, Homo sapiens
actcgccatccccat

SEQ ID NO: 1247903 - DNA, 15 bp, Homo sapiens
tactcgccatcccca

SEQ ID NO: 1247904 - DNA, 15 bp, Homo sapiens
ctactcgccatcccc

SEQ ID NO: 1247905 - DNA, 15 bp, Homo sapiens
cctactcgccatccc

SEQ ID NO: 1247906 - DNA, 15 bp, Homo sapiens
ccctactcgccatcc

SEQ ID NO: 1247907 - DNA, 15 bp, Homo sapiens
cccctactcgccatc

SEQ ID NO: 1247908 - DNA, 15 bp, Homo sapiens
ccccctactcgccat

SEQ ID NO: 1247909 - DNA, 15 bp, Homo sapiens
accccctactcgcca

SEQ ID NO: 1247910 - DNA, 15 bp, Homo sapiens
caccccctactcgcc

SEQ ID NO: 1247911 - DNA, 15 bp, Homo sapiens
acaccccctactcgc

SEQ ID NO: 1247912 - DNA, 15 bp, Homo sapiens
cacaccccctactcg

SEQ ID NO: 1247913 - DNA, 15 bp, Homo sapiens
ccacaccccctactc

SEQ ID NO: 1247914 - DNA, 15 bp, Homo sapiens
gccacaccccctact

SEQ ID NO: 1247915 - DNA, 15 bp, Homo sapiens
cgccacaccccctac

SEQ ID NO: 1247916 - DNA, 15 bp, Homo sapiens
acgccacacccccta

SEQ ID NO: 1247917 - DNA, 15 bp, Homo sapiens
cacgccacaccccct

SEQ ID NO: 1247918 - DNA, 15 bp, Homo sapiens
tcacgccacaccccc

SEQ ID NO: 1247919 - DNA, 15 bp, Homo sapiens
ctcacgccacacccc

SEQ ID NO: 1247920 - DNA, 15 bp, Homo sapiens
cctcacgccacaccc

SEQ ID NO: 1247921 - DNA, 15 bp, Homo sapiens
tcctcacgccacacc

SEQ ID NO: 1247922 - DNA, 15 bp, Homo sapiens
atcctcacgccacac

SEQ ID NO: 1247923 - DNA, 15 bp, Homo sapiens
catcctcacgccaca

SEQ ID NO: 1247924 - DNA, 15 bp, Homo sapiens
ccatcctcacgccac

SEQ ID NO: 1247925 - DNA, 15 bp, Homo sapiens
gccatcctcacgcca

SEQ ID NO: 1247926 - DNA, 15 bp, Homo sapiens
agccatcctcacgcc

SEQ ID NO: 1247927 - DNA, 15 bp, Homo sapiens
tagccatcctcacgc

SEQ ID NO: 1247928 - DNA, 15 bp, Homo sapiens
ctagccatcctcacg

SEQ ID NO: 1247929 - DNA, 15 bp, Homo sapiens
actagccatcctcac

SEQ ID NO: 1247930 - DNA, 15 bp, Homo sapiens
cactagccatcctca

SEQ ID NO: 1247931 - DNA, 15 bp, Homo sapiens
ccactagccatcctc

SEQ ID NO: 1247932 - DNA, 15 bp, Homo sapiens
cccactagccatcct

SEQ ID NO: 1247933 - DNA, 15 bp, Homo sapiens
ccccactagccatcc

SEQ ID NO: 1247934 - DNA, 15 bp, Homo sapiens
gccccactagccatc

SEQ ID NO: 1247935 - DNA, 15 bp, Homo sapiens
cgccccactagccat

SEQ ID NO: 1247936 - DNA, 15 bp, Homo sapiens
acgccccactagcca

SEQ ID NO: 1247937 - DNA, 15 bp, Homo sapiens
cacgccccactagcc

SEQ ID NO: 1247938 - DNA, 15 bp, Homo sapiens
ccacgccccactagc

SEQ ID NO: 1247939 - DNA, 15 bp, Homo sapiens
cccacgccccactag

SEQ ID NO: 1247940 - DNA, 15 bp, Homo sapiens
ccccacgccccacta

SEQ ID NO: 1247941 - DNA, 15 bp, Homo sapiens
tccccacgccccact

SEQ ID NO: 1247942 - DNA, 15 bp, Homo sapiens
atccccacgccccac

SEQ ID NO: 1247943 - DNA, 15 bp, Homo sapiens
catccccacgcccca

SEQ ID NO: 1247944 - DNA, 15 bp, Homo sapiens
ccatccccacgcccc

SEQ ID NO: 1247945 - DNA, 15 bp, Homo sapiens
gccatccccacgccc

SEQ ID NO: 1247946 - DNA, 15 bp, Homo sapiens
cgccatccccacgcc

SEQ ID NO: 1247947 - DNA, 15 bp, Homo sapiens
acgccatccccacgc

SEQ ID NO: 1247948 - DNA, 15 bp, Homo sapiens
cacgccatccccacg

SEQ ID NO: 1247949 - DNA, 15 bp, Homo sapiens
tccccacacgccatc

SEQ ID NO: 1247950 - DNA, 15 bp, Homo sapiens
atccccacacgccat

SEQ ID NO: 1247951 - DNA, 15 bp, Homo sapiens
catccccacacgcca

SEQ ID NO: 1247952 - DNA, 15 bp, Homo sapiens
ccatccccacacgcc

SEQ ID NO: 1247953 - DNA, 15 bp, Homo sapiens
gccatccccacacgc

SEQ ID NO: 1247954 - DNA, 15 bp, Homo sapiens
cgccatccccacacg

SEQ ID NO: 1247955 - DNA, 15 bp, Homo sapiens
tcgccatccccacac

SEQ ID NO: 1247956 - DNA, 15 bp, Homo sapiens
ctcgccatccccaca

SEQ ID NO: 1247957 - DNA, 15 bp, Homo sapiens
cccccactcgccatc

SEQ ID NO: 1247958 - DNA, 15 bp, Homo sapiens
ccccccactcgccat

SEQ ID NO: 1247959 - DNA, 15 bp, Homo sapiens
accccccactcgcca

SEQ ID NO: 1247960 - DNA, 15 bp, Homo sapiens
caccccccactcgcc

SEQ ID NO: 1247961 - DNA, 15 bp, Homo sapiens
ccaccccccactcgc

SEQ ID NO: 1247962 - DNA, 15 bp, Homo sapiens
cccaccccccactcg

SEQ ID NO: 1247963 - DNA, 15 bp, Homo sapiens
gcccaccccccactc

SEQ ID NO: 1247964 - DNA, 15 bp, Homo sapiens
agcccaccccccact

SEQ ID NO: 1247965 - DNA, 15 bp, Homo sapiens
cagcccaccccccac

SEQ ID NO: 1247966 - DNA, 15 bp, Homo sapiens
acagcccacccccca

SEQ ID NO: 1247967 - DNA, 15 bp, Homo sapiens
tcacagcccaccccc

SEQ ID NO: 1247968 - DNA, 15 bp, Homo sapiens
ctcacagcccacccc

SEQ ID NO: 1247969 - DNA, 15 bp, Homo sapiens
cctcacagcccaccc

SEQ ID NO: 1247970 - DNA, 15 bp, Homo sapiens
ccctcacagcccacc

SEQ ID NO: 1247971 - DNA, 15 bp, Homo sapiens
tccctcacagcccac

SEQ ID NO: 1247972 - DNA, 15 bp, Homo sapiens
gtccctcacagccca

SEQ ID NO: 1247973 - DNA, 15 bp, Homo sapiens
tgtccctcacagccc

SEQ ID NO: 1247974 - DNA, 15 bp, Homo sapiens
ctgtccctcacagcc

SEQ ID NO: 1247975 - DNA, 15 bp, Homo sapiens
actgtccctcacagc

SEQ ID NO: 1247976 - DNA, 15 bp, Homo sapiens
cactgtccctcacag

SEQ ID NO: 1247977 - DNA, 15 bp, Homo sapiens
gcactgtccctcaca

SEQ ID NO: 1247978 - DNA, 15 bp, Homo sapiens
ggcactgtccctcac

SEQ ID NO: 1247979 - DNA, 15 bp, Homo sapiens
aggcactgtccctca

SEQ ID NO: 1247980 - DNA, 15 bp, Homo sapiens
caggcactgtccctc

SEQ ID NO: 1247981 - DNA, 15 bp, Homo sapiens
ccaggcactgtccct

SEQ ID NO: 1247982 - DNA, 15 bp, Homo sapiens
cccaggcactgtccc

SEQ ID NO: 1247983 - DNA, 15 bp, Homo sapiens
tcccaggcactgtcc

SEQ ID NO: 1247984 - DNA, 15 bp, Homo sapiens
atcccaggcactgtc

SEQ ID NO: 1247985 - DNA, 15 bp, Homo sapiens
catcccaggcactgt

SEQ ID NO: 1247986 - DNA, 15 bp, Homo sapiens
acatcccaggcactg

SEQ ID NO: 1247987 - DNA, 15 bp, Homo sapiens
cacatcccaggcact

SEQ ID NO: 1247988 - DNA, 15 bp, Homo sapiens
ccacatcccaggcac

SEQ ID NO: 1247989 - DNA, 15 bp, Homo sapiens
cccacatcccaggca

SEQ ID NO: 1247990 - DNA, 15 bp, Homo sapiens
ccccacatcccaggc

SEQ ID NO: 1247991 - DNA, 15 bp, Homo sapiens
gccccacatcccagg

SEQ ID NO: 1247992 - DNA, 15 bp, Homo sapiens
agccccacatcccag

SEQ ID NO: 1247993 - DNA, 15 bp, Homo sapiens
cagccccacatccca

SEQ ID NO: 1247994 - DNA, 15 bp, Homo sapiens
gcagccccacatccc

SEQ ID NO: 1247995 - DNA, 15 bp, Homo sapiens
tgcagccccacatcc

SEQ ID NO: 1247996 - DNA, 15 bp, Homo sapiens
ctgcagccccacatc

SEQ ID NO: 1247997 - DNA, 15 bp, Homo sapiens
gctgcagccccacat

SEQ ID NO: 1247998 - DNA, 15 bp, Homo sapiens
ggctgcagccccaca

SEQ ID NO: 1247999 - DNA, 15 bp, Homo sapiens
gggctgcagccccac

SEQ ID NO: 1248000 - DNA, 15 bp, Homo sapiens
agggctgcagcccca

SEQ ID NO: 1248001 - DNA, 15 bp, Homo sapiens
tagggctgcagcccc

SEQ ID NO: 1248002 - DNA, 15 bp, Homo sapiens
ctagggctgcagccc

SEQ ID NO: 1248003 - DNA, 15 bp, Homo sapiens
gctagggctgcagcc

SEQ ID NO: 1248004 - DNA, 15 bp, Homo sapiens
agctagggctgcagc

SEQ ID NO: 1248005 - DNA, 15 bp, Homo sapiens
gagctagggctgcag

SEQ ID NO: 1248006 - DNA, 15 bp, Homo sapiens
tgagctagggctgca

SEQ ID NO: 1248007 - DNA, 15 bp, Homo sapiens
gtgagctagggctgc

SEQ ID NO: 1248008 - DNA, 15 bp, Homo sapiens
tgtgagctagggctg

SEQ ID NO: 1248009 - DNA, 15 bp, Homo sapiens
ctgtgagctagggct

SEQ ID NO: 1248010 - DNA, 15 bp, Homo sapiens
gctgtgagctagggc

SEQ ID NO: 1248011 - DNA, 15 bp, Homo sapiens
tgctgtgagctaggg

SEQ ID NO: 1248012 - DNA, 15 bp, Homo sapiens
atgctgtgagctagg

SEQ ID NO: 1248013 - DNA, 15 bp, Homo sapiens
catgctgtgagctag

SEQ ID NO: 1248014 - DNA, 15 bp, Homo sapiens
ccatgctgtgagcta

SEQ ID NO: 1248015 - DNA, 15 bp, Homo sapiens
gccatgctgtgagct

SEQ ID NO: 1248016 - DNA, 15 bp, Homo sapiens
ggccatgctgtgagc

SEQ ID NO: 1248017 - DNA, 15 bp, Homo sapiens
aggccatgctgtgag

SEQ ID NO: 1248018 - DNA, 15 bp, Homo sapiens
aaggccatgctgtga

SEQ ID NO: 1248019 - DNA, 15 bp, Homo sapiens
taaggccatgctgtg

SEQ ID NO: 1248020 - DNA, 15 bp, Homo sapiens
ataaggccatgctgt

SEQ ID NO: 1248021 - DNA, 15 bp, Homo sapiens
cataaggccatgctg

SEQ ID NO: 1248022 - DNA, 15 bp, Homo sapiens
tcataaggccatgct

SEQ ID NO: 1248023 - DNA, 15 bp, Homo sapiens
gtcataaggccatgc

SEQ ID NO: 1248024 - DNA, 15 bp, Homo sapiens
ggtcataaggccatg

SEQ ID NO: 1248025 - DNA, 15 bp, Homo sapiens
gggtcataaggccat

SEQ ID NO: 1248026 - DNA, 15 bp, Homo sapiens
ggggtcataaggcca

SEQ ID NO: 1248027 - DNA, 15 bp, Homo sapiens
cggggtcataaggcc

SEQ ID NO: 1248028 - DNA, 15 bp, Homo sapiens
ccggggtcataaggc

SEQ ID NO: 1248029 - DNA, 15 bp, Homo sapiens
gccggggtcataagg

SEQ ID NO: 1248030 - DNA, 15 bp, Homo sapiens
ggccggggtcataag

SEQ ID NO: 1248031 - DNA, 15 bp, Homo sapiens
tggccggggtcataa

SEQ ID NO: 1248032 - DNA, 15 bp, Homo sapiens
gtggccggggtcata

SEQ ID NO: 1248033 - DNA, 15 bp, Homo sapiens
ggtggccggggtcat

SEQ ID NO: 1248034 - DNA, 15 bp, Homo sapiens
aggtggccggggtca

SEQ ID NO: 1248035 - DNA, 15 bp, Homo sapiens
aaggtggccggggtc

SEQ ID NO: 1248036 - DNA, 15 bp, Homo sapiens
gaaggtggccggggt

SEQ ID NO: 1248037 - DNA, 15 bp, Homo sapiens
ggaaggtggccgggg

SEQ ID NO: 1248038 - DNA, 15 bp, Homo sapiens
aggaaggtggccggg

SEQ ID NO: 1248039 - DNA, 15 bp, Homo sapiens
caggaaggtggccgg

SEQ ID NO: 1248040 - DNA, 15 bp, Homo sapiens
gcaggaaggtggccg

SEQ ID NO: 1248041 - DNA, 15 bp, Homo sapiens
ggcaggaaggtggcc

SEQ ID NO: 1248042 - DNA, 15 bp, Homo sapiens
gggcaggaaggtggc

SEQ ID NO: 1248043 - DNA, 15 bp, Homo sapiens
ggggcaggaaggtgg

SEQ ID NO: 1248044 - DNA, 15 bp, Homo sapiens
tggggcaggaaggtg

SEQ ID NO: 1248045 - DNA, 15 bp, Homo sapiens
ctggggcaggaaggt

SEQ ID NO: 1248046 - DNA, 15 bp, Homo sapiens
cctggggcaggaagg

SEQ ID NO: 1248047 - DNA, 15 bp, Homo sapiens
gcctggggcaggaag

SEQ ID NO: 1248048 - DNA, 15 bp, Homo sapiens
cgcctggggcaggaa

SEQ ID NO: 1248049 - DNA, 15 bp, Homo sapiens
ccgcctggggcagga

SEQ ID NO: 1248050 - DNA, 15 bp, Homo sapiens
cccgcctggggcagg

SEQ ID NO: 1248051 - DNA, 15 bp, Homo sapiens
ccccgcctggggcag

SEQ ID NO: 1248052 - DNA, 15 bp, Homo sapiens
accccgcctggggca

SEQ ID NO: 1248053 - DNA, 15 bp, Homo sapiens
gaccccgcctggggc

SEQ ID NO: 1248054 - DNA, 15 bp, Homo sapiens
cgaccccgcctgggg

SEQ ID NO: 1248055 - DNA, 15 bp, Homo sapiens
gcgaccccgcctggg

SEQ ID NO: 1248056 - DNA, 15 bp, Homo sapiens
agcgaccccgcctgg

SEQ ID NO: 1248057 - DNA, 15 bp, Homo sapiens
tagcgaccccgcctg

SEQ ID NO: 1248058 - DNA, 15 bp, Homo sapiens
ttagcgaccccgcct

SEQ ID NO: 1248059 - DNA, 15 bp, Homo sapiens
cttagcgaccccgcc

SEQ ID NO: 1248060 - DNA, 15 bp, Homo sapiens
ccttagcgaccccgc

SEQ ID NO: 1248061 - DNA, 15 bp, Homo sapiens
gccttagcgaccccg

SEQ ID NO: 1248062 - DNA, 15 bp, Homo sapiens
ggccttagcgacccc

SEQ ID NO: 1248063 - DNA, 15 bp, Homo sapiens
aggccttagcgaccc

SEQ ID NO: 1248064 - DNA, 15 bp, Homo sapiens
gaggccttagcgacc

SEQ ID NO: 1248065 - DNA, 15 bp, Homo sapiens
tgaggccttagcgac

SEQ ID NO: 1248066 - DNA, 15 bp, Homo sapiens
ctgaggccttagcga

SEQ ID NO: 1248067 - DNA, 15 bp, Homo sapiens
cctgaggccttagcg

SEQ ID NO: 1248068 - DNA, 15 bp, Homo sapiens
tcctgaggccttagc

SEQ ID NO: 1248069 - DNA, 15 bp, Homo sapiens
ctcctgaggccttag

SEQ ID NO: 1248070 - DNA, 15 bp, Homo sapiens
cctcctgaggcctta

SEQ ID NO: 1248071 - DNA, 15 bp, Homo sapiens
tcctcctgaggcctt

SEQ ID NO: 1248072 - DNA, 15 bp, Homo sapiens
ctcctcctgaggcct

SEQ ID NO: 1248073 - DNA, 15 bp, Homo sapiens
tctcctcctgaggcc

SEQ ID NO: 1248074 - DNA, 15 bp, Homo sapiens
ttctcctcctgaggc

SEQ ID NO: 1248075 - DNA, 15 bp, Homo sapiens
tttctcctcctgagg

SEQ ID NO: 1248076 - DNA, 15 bp, Homo sapiens
gtttctcctcctgag

SEQ ID NO: 1248077 - DNA, 15 bp, Homo sapiens
tgtttctcctcctga

SEQ ID NO: 1248078 - DNA, 15 bp, Homo sapiens
gtgtttctcctcctg

SEQ ID NO: 1248079 - DNA, 15 bp, Homo sapiens
cgtgtttctcctcct

SEQ ID NO: 1248080 - DNA, 15 bp, Homo sapiens
ccgtgtttctcctcc

SEQ ID NO: 1248081 - DNA, 15 bp, Homo sapiens
cccgtgtttctcctc

SEQ ID NO: 1248082 - DNA, 15 bp, Homo sapiens
tcccgtgtttctcct

SEQ ID NO: 1248083 - DNA, 15 bp, Homo sapiens
gtcccgtgtttctcc

SEQ ID NO: 1248084 - DNA, 15 bp, Homo sapiens
tgtcccgtgtttctc

SEQ ID NO: 1248085 - DNA, 15 bp, Homo sapiens
atgtcccgtgtttct

SEQ ID NO: 1248086 - DNA, 15 bp, Homo sapiens
catgtcccgtgtttc

SEQ ID NO: 1248087 - DNA, 15 bp, Homo sapiens
gcatgtcccgtgttt

SEQ ID NO: 1248088 - DNA, 15 bp, Homo sapiens
ggcatgtcccgtgtt

SEQ ID NO: 1248089 - DNA, 15 bp, Homo sapiens
cggcatgtcccgtgt

SEQ ID NO: 1248090 - DNA, 15 bp, Homo sapiens
acggcatgtcccgtg

SEQ ID NO: 1248091 - DNA, 15 bp, Homo sapiens
cacggcatgtcccgt

SEQ ID NO: 1248092 - DNA, 15 bp, Homo sapiens
ccacggcatgtcccg

SEQ ID NO: 1248093 - DNA, 15 bp, Homo sapiens
tccacggcatgtccc

SEQ ID NO: 1248094 - DNA, 15 bp, Homo sapiens
ttccacggcatgtcc

SEQ ID NO: 1248095 - DNA, 15 bp, Homo sapiens
cttccacggcatgtc

SEQ ID NO: 1248096 - DNA, 15 bp, Homo sapiens
gcttccacggcatgt

SEQ ID NO: 1248097 - DNA, 15 bp, Homo sapiens
ggcttccacggcatg

SEQ ID NO: 1248098 - DNA, 15 bp, Homo sapiens
cggcttccacggcat

SEQ ID NO: 1248099 - DNA, 15 bp, Homo sapiens
ccggcttccacggca

SEQ ID NO: 1248100 - DNA, 15 bp, Homo sapiens
cccggcttccacggc

SEQ ID NO: 1248101 - DNA, 15 bp, Homo sapiens
ccccggcttccacgg

SEQ ID NO: 1248102 - DNA, 15 bp, Homo sapiens
gccccggcttccacg

SEQ ID NO: 1248103 - DNA, 15 bp, Homo sapiens
ggccccggcttccac

SEQ ID NO: 1248104 - DNA, 15 bp, Homo sapiens
aggccccggcttcca

SEQ ID NO: 1248105 - DNA, 15 bp, Homo sapiens
gaggccccggcttcc

SEQ ID NO: 1248106 - DNA, 15 bp, Homo sapiens
tgaggccccggcttc

SEQ ID NO: 1248107 - DNA, 15 bp, Homo sapiens
gtgaggccccggctt

SEQ ID NO: 1248108 - DNA, 15 bp, Homo sapiens
tgtgaggccccggct

SEQ ID NO: 1248109 - DNA, 15 bp, Homo sapiens
ctgtgaggccccggc

SEQ ID NO: 1248110 - DNA, 15 bp, Homo sapiens
tctgtgaggccccgg

SEQ ID NO: 1248111 - DNA, 15 bp, Homo sapiens
ctctgtgaggccccg

SEQ ID NO: 1248112 - DNA, 15 bp, Homo sapiens
cctctgtgaggcccc

SEQ ID NO: 1248113 - DNA, 15 bp, Homo sapiens
acctctgtgaggccc

SEQ ID NO: 1248114 - DNA, 15 bp, Homo sapiens
cacctctgtgaggcc

SEQ ID NO: 1248115 - DNA, 15 bp, Homo sapiens
tcacctctgtgaggc

SEQ ID NO: 1248116 - DNA, 15 bp, Homo sapiens
ctcacctctgtgagg

SEQ ID NO: 1248117 - DNA, 15 bp, Homo sapiens
gctcacctctgtgag

SEQ ID NO: 1248118 - DNA, 15 bp, Homo sapiens
tgctcacctctgtga

SEQ ID NO: 1248119 - DNA, 15 bp, Homo sapiens
ctgctcacctctgtg

SEQ ID NO: 1248120 - DNA, 15 bp, Homo sapiens
cctgctcacctctgt

SEQ ID NO: 1248121 - DNA, 15 bp, Homo sapiens
ccctgctcacctctg

SEQ ID NO: 1248122 - DNA, 15 bp, Homo sapiens
tccctgctcacctct

SEQ ID NO: 1248123 - DNA, 15 bp, Homo sapiens
gtccctgctcacctc

SEQ ID NO: 1248124 - DNA, 15 bp, Homo sapiens
agtccctgctcacct

SEQ ID NO: 1248125 - DNA, 15 bp, Homo sapiens
cagtccctgctcacc

SEQ ID NO: 1248126 - DNA, 15 bp, Homo sapiens
gcagtccctgctcac

SEQ ID NO: 1248127 - DNA, 15 bp, Homo sapiens
ggcagtccctgctca

SEQ ID NO: 1248128 - DNA, 15 bp, Homo sapiens
tggcagtccctgctc

SEQ ID NO: 1248129 - DNA, 15 bp, Homo sapiens
gtggcagtccctgct

SEQ ID NO: 1248130 - DNA, 15 bp, Homo sapiens
agtggcagtccctgc

SEQ ID NO: 1248131 - DNA, 15 bp, Homo sapiens
cagtggcagtccctg

SEQ ID NO: 1248132 - DNA, 15 bp, Homo sapiens
ccagtggcagtccct

SEQ ID NO: 1248133 - DNA, 15 bp, Homo sapiens
accagtggcagtccc

SEQ ID NO: 1248134 - DNA, 15 bp, Homo sapiens
aaccagtggcagtcc

SEQ ID NO: 1248135 - DNA, 15 bp, Homo sapiens
aaaccagtggcagtc

SEQ ID NO: 1248136 - DNA, 15 bp, Homo sapiens
aaaaccagtggcagt

SEQ ID NO: 1248137 - DNA, 15 bp, Homo sapiens
caaaaccagtggcag

SEQ ID NO: 1248138 - DNA, 15 bp, Homo sapiens
acaaaaccagtggca

SEQ ID NO: 1248139 - DNA, 15 bp, Homo sapiens
gacaaaaccagtggc

SEQ ID NO: 1248140 - DNA, 15 bp, Homo sapiens
ggacaaaaccagtgg

SEQ ID NO: 1248141 - DNA, 15 bp, Homo sapiens
aggacaaaaccagtg

SEQ ID NO: 1248142 - DNA, 15 bp, Homo sapiens
caggacaaaaccagt

SEQ ID NO: 1248143 - DNA, 15 bp, Homo sapiens
ccaggacaaaaccag

SEQ ID NO: 1248144 - DNA, 15 bp, Homo sapiens
cccaggacaaaacca

SEQ ID NO: 1248145 - DNA, 15 bp, Homo sapiens
ccccaggacaaaacc

SEQ ID NO: 1248146 - DNA, 15 bp, Homo sapiens
gccccaggacaaaac

SEQ ID NO: 1248147 - DNA, 15 bp, Homo sapiens
ggccccaggacaaaa

SEQ ID NO: 1248148 - DNA, 15 bp, Homo sapiens
gggccccaggacaaa

SEQ ID NO: 1248149 - DNA, 15 bp, Homo sapiens
tgggccccaggacaa

SEQ ID NO: 1248150 - DNA, 15 bp, Homo sapiens
ctgggccccaggaca

SEQ ID NO: 1248151 - DNA, 15 bp, Homo sapiens
actgggccccaggac

SEQ ID NO: 1248152 - DNA, 15 bp, Homo sapiens
cactgggccccagga

SEQ ID NO: 1248153 - DNA, 15 bp, Homo sapiens
ccactgggccccagg

SEQ ID NO: 1248154 - DNA, 15 bp, Homo sapiens
cccactgggccccag

SEQ ID NO: 1248155 - DNA, 15 bp, Homo sapiens
ccccactgggcccca

SEQ ID NO: 1248156 - DNA, 15 bp, Homo sapiens
cccccactgggcccc

SEQ ID NO: 1248157 - DNA, 15 bp, Homo sapiens
gcccccactgggccc

SEQ ID NO: 1248158 - DNA, 15 bp, Homo sapiens
ggcccccactgggcc

SEQ ID NO: 1248159 - DNA, 15 bp, Homo sapiens
tggcccccactgggc

SEQ ID NO: 1248160 - DNA, 15 bp, Homo sapiens
ttggcccccactggg

SEQ ID NO: 1248161 - DNA, 15 bp, Homo sapiens
gttggcccccactgg

SEQ ID NO: 1248162 - DNA, 15 bp, Homo sapiens
tgttggcccccactg

SEQ ID NO: 1248163 - DNA, 15 bp, Homo sapiens
atgttggcccccact

SEQ ID NO: 1248164 - DNA, 15 bp, Homo sapiens
gatgttggcccccac

SEQ ID NO: 1248165 - DNA, 15 bp, Homo sapiens
tgatgttggccccca

SEQ ID NO: 1248166 - DNA, 15 bp, Homo sapiens
gtgatgttggccccc

SEQ ID NO: 1248167 - DNA, 15 bp, Homo sapiens
ggtgatgttggcccc

SEQ ID NO: 1248168 - DNA, 15 bp, Homo sapiens
aggtgatgttggccc

SEQ ID NO: 1248169 - DNA, 15 bp, Homo sapiens
gaggtgatgttggcc

SEQ ID NO: 1248170 - DNA, 15 bp, Homo sapiens
ggaggtgatgttggc

SEQ ID NO: 1248171 - DNA, 15 bp, Homo sapiens
aggaggtgatgttgg

SEQ ID NO: 1248172 - DNA, 15 bp, Homo sapiens
aaggaggtgatgttg

SEQ ID NO: 1248173 - DNA, 15 bp, Homo sapiens
gaaggaggtgatgtt

SEQ ID NO: 1248174 - DNA, 15 bp, Homo sapiens
ggaaggaggtgatgt

SEQ ID NO: 1248175 - DNA, 15 bp, Homo sapiens
gggaaggaggtgatg

SEQ ID NO: 1248176 - DNA, 15 bp, Homo sapiens
ggggaaggaggtgat

SEQ ID NO: 1248177 - DNA, 15 bp, Homo sapiens
aggggaaggaggtga

SEQ ID NO: 1248178 - DNA, 15 bp, Homo sapiens
gaggggaaggaggtg

SEQ ID NO: 1248179 - DNA, 15 bp, Homo sapiens
ggaggggaaggaggt

SEQ ID NO: 1248180 - DNA, 15 bp, Homo sapiens
gggaggggaaggagg

SEQ ID NO: 1248181 - DNA, 15 bp, Homo sapiens
tgggaggggaaggag

SEQ ID NO: 1248182 - DNA, 15 bp, Homo sapiens
atgggaggggaagga

SEQ ID NO: 1248183 - DNA, 15 bp, Homo sapiens
catgggaggggaagg

SEQ ID NO: 1248184 - DNA, 15 bp, Homo sapiens
ccatgggaggggaag

SEQ ID NO: 1248185 - DNA, 15 bp, Homo sapiens
gccatgggaggggaa

SEQ ID NO: 1248186 - DNA, 15 bp, Homo sapiens
tgccatgggagggga

SEQ ID NO: 1248187 - DNA, 15 bp, Homo sapiens
ttgccatgggagggg

SEQ ID NO: 1248188 - DNA, 15 bp, Homo sapiens
tttgccatgggaggg

SEQ ID NO: 1248189 - DNA, 15 bp, Homo sapiens
ctttgccatgggagg

SEQ ID NO: 1248190 - DNA, 15 bp, Homo sapiens
tctttgccatgggag

SEQ ID NO: 1248191 - DNA, 15 bp, Homo sapiens
ctctttgccatggga

SEQ ID NO: 1248192 - DNA, 15 bp, Homo sapiens
gctctttgccatggg

SEQ ID NO: 1248193 - DNA, 15 bp, Homo sapiens
ggctctttgccatgg

SEQ ID NO: 1248194 - DNA, 15 bp, Homo sapiens
tggctctttgccatg

SEQ ID NO: 1248195 - DNA, 15 bp, Homo sapiens
ctggctctttgccat

SEQ ID NO: 1248196 - DNA, 15 bp, Homo sapiens
gctggctctttgcca

SEQ ID NO: 1248197 - DNA, 15 bp, Homo sapiens
ggctggctctttgcc

SEQ ID NO: 1248198 - DNA, 15 bp, Homo sapiens
gggctggctctttgc

SEQ ID NO: 1248199 - DNA, 15 bp, Homo sapiens
cgggctggctctttg

SEQ ID NO: 1248200 - DNA, 15 bp, Homo sapiens
gcgggctggctcttt

SEQ ID NO: 1248201 - DNA, 15 bp, Homo sapiens
cgcgggctggctctt

SEQ ID NO: 1248202 - DNA, 15 bp, Homo sapiens
ccgcgggctggctct

SEQ ID NO: 1248203 - DNA, 15 bp, Homo sapiens
cccgcgggctggctc

SEQ ID NO: 1248204 - DNA, 15 bp, Homo sapiens
ccccgcgggctggct

SEQ ID NO: 1248205 - DNA, 15 bp, Homo sapiens
accccgcgggctggc

SEQ ID NO: 1248206 - DNA, 15 bp, Homo sapiens
caccccgcgggctgg

SEQ ID NO: 1248207 - DNA, 15 bp, Homo sapiens
ccaccccgcgggctg

SEQ ID NO: 1248208 - DNA, 15 bp, Homo sapiens
gccaccccgcgggct

SEQ ID NO: 1248209 - DNA, 15 bp, Homo sapiens
agccaccccgcgggc

SEQ ID NO: 1248210 - DNA, 15 bp, Homo sapiens
tagccaccccgcggg

SEQ ID NO: 1248211 - DNA, 15 bp, Homo sapiens
gtagccaccccgcgg

SEQ ID NO: 1248212 - DNA, 15 bp, Homo sapiens
agtagccaccccgcg

SEQ ID NO: 1248213 - DNA, 15 bp, Homo sapiens
cagtagccaccccgc

SEQ ID NO: 1248214 - DNA, 15 bp, Homo sapiens
gcagtagccaccccg

SEQ ID NO: 1248215 - DNA, 15 bp, Homo sapiens
tgcagtagccacccc

SEQ ID NO: 1248216 - DNA, 15 bp, Homo sapiens
ctgcagtagccaccc

SEQ ID NO: 1248217 - DNA, 15 bp, Homo sapiens
actgcagtagccacc

SEQ ID NO: 1248218 - DNA, 15 bp, Homo sapiens
cactgcagtagccac

SEQ ID NO: 1248219 - DNA, 15 bp, Homo sapiens
gcactgcagtagcca

SEQ ID NO: 1248220 - DNA, 15 bp, Homo sapiens
ggcactgcagtagcc

SEQ ID NO: 1248221 - DNA, 15 bp, Homo sapiens
gggcactgcagtagc

SEQ ID NO: 1248222 - DNA, 15 bp, Homo sapiens
ggggcactgcagtag

SEQ ID NO: 1248223 - DNA, 15 bp, Homo sapiens
gggggcactgcagta

SEQ ID NO: 1248224 - DNA, 15 bp, Homo sapiens
ggggggcactgcagt

SEQ ID NO: 1248225 - DNA, 15 bp, Homo sapiens
tggggggcactgcag

SEQ ID NO: 1248226 - DNA, 15 bp, Homo sapiens
ttggggggcactgca

SEQ ID NO: 1248227 - DNA, 15 bp, Homo sapiens
cttggggggcactgc

SEQ ID NO: 1248228 - DNA, 15 bp, Homo sapiens
ccttggggggcactg

SEQ ID NO: 1248229 - DNA, 15 bp, Homo sapiens
tccttggggggcact

SEQ ID NO: 1248230 - DNA, 15 bp, Homo sapiens
ctccttggggggcac

SEQ ID NO: 1248231 - DNA, 15 bp, Homo sapiens
cctccttggggggca

SEQ ID NO: 1248232 - DNA, 15 bp, Homo sapiens
ccctccttggggggc

SEQ ID NO: 1248233 - DNA, 15 bp, Homo sapiens
accctccttgggggg

SEQ ID NO: 1248234 - DNA, 15 bp, Homo sapiens
caccctccttggggg

SEQ ID NO: 1248235 - DNA, 15 bp, Homo sapiens
acaccctccttgggg

SEQ ID NO: 1248236 - DNA, 15 bp, Homo sapiens
aacaccctccttggg

SEQ ID NO: 1248237 - DNA, 15 bp, Homo sapiens
gaacaccctccttgg

SEQ ID NO: 1248238 - DNA, 15 bp, Homo sapiens
ggaacaccctccttg

SEQ ID NO: 1248239 - DNA, 15 bp, Homo sapiens
gggaacaccctcctt

SEQ ID NO: 1248240 - DNA, 15 bp, Homo sapiens
agggaacaccctcct

SEQ ID NO: 1248241 - DNA, 15 bp, Homo sapiens
cagggaacaccctcc

SEQ ID NO: 1248242 - DNA, 15 bp, Homo sapiens
gcagggaacaccctc

SEQ ID NO: 1248243 - DNA, 15 bp, Homo sapiens
agcagggaacaccct

SEQ ID NO: 1248244 - DNA, 15 bp, Homo sapiens
gagcagggaacaccc

SEQ ID NO: 1248245 - DNA, 15 bp, Homo sapiens
cgagcagggaacacc

SEQ ID NO: 1248246 - DNA, 15 bp, Homo sapiens
tcgagcagggaacac

SEQ ID NO: 1248247 - DNA, 15 bp, Homo sapiens
ctcgagcagggaaca

SEQ ID NO: 1248248 - DNA, 15 bp, Homo sapiens
tctcgagcagggaac

SEQ ID NO: 1248249 - DNA, 15 bp, Homo sapiens
ctctcgagcagggaa

SEQ ID NO: 1248250 - DNA, 15 bp, Homo sapiens
cctctcgagcaggga

SEQ ID NO: 1248251 - DNA, 15 bp, Homo sapiens
tcctctcgagcaggg

SEQ ID NO: 1248252 - DNA, 15 bp, Homo sapiens
ttcctctcgagcagg

SEQ ID NO: 1248253 - DNA, 15 bp, Homo sapiens
cttcctctcgagcag

SEQ ID NO: 1248254 - DNA, 15 bp, Homo sapiens
acttcctctcgagca

SEQ ID NO: 1248255 - DNA, 15 bp, Homo sapiens
cacttcctctcgagc

SEQ ID NO: 1248256 - DNA, 15 bp, Homo sapiens
tcacttcctctcgag

SEQ ID NO: 1248257 - DNA, 15 bp, Homo sapiens
gtcacttcctctcga

SEQ ID NO: 1248258 - DNA, 15 bp, Homo sapiens
ggtcacttcctctcg

SEQ ID NO: 1248259 - DNA, 15 bp, Homo sapiens
cggtcacttcctctc

SEQ ID NO: 1248260 - DNA, 15 bp, Homo sapiens
gcggtcacttcctct

SEQ ID NO: 1248261 - DNA, 15 bp, Homo sapiens
agcggtcacttcctc

SEQ ID NO: 1248262 - DNA, 15 bp, Homo sapiens
gagcggtcacttcct

SEQ ID NO: 1248263 - DNA, 15 bp, Homo sapiens
ggagcggtcacttcc

SEQ ID NO: 1248264 - DNA, 15 bp, Homo sapiens
tggagcggtcacttc

SEQ ID NO: 1248265 - DNA, 15 bp, Homo sapiens
ctggagcggtcactt

SEQ ID NO: 1248266 - DNA, 15 bp, Homo sapiens
gctggagcggtcact

SEQ ID NO: 1248267 - DNA, 15 bp, Homo sapiens
agctggagcggtcac

SEQ ID NO: 1248268 - DNA, 15 bp, Homo sapiens
aagctggagcggtca

SEQ ID NO: 1248269 - DNA, 15 bp, Homo sapiens
caagctggagcggtc

SEQ ID NO: 1248270 - DNA, 15 bp, Homo sapiens
ccaagctggagcggt

SEQ ID NO: 1248271 - DNA, 15 bp, Homo sapiens
gccaagctggagcgg

SEQ ID NO: 1248272 - DNA, 15 bp, Homo sapiens
ggccaagctggagcg

SEQ ID NO: 1248273 - DNA, 15 bp, Homo sapiens
aggccaagctggagc

SEQ ID NO: 1248274 - DNA, 15 bp, Homo sapiens
aaggccaagctggag

SEQ ID NO: 1248275 - DNA, 15 bp, Homo sapiens
gaaggccaagctgga

SEQ ID NO: 1248276 - DNA, 15 bp, Homo sapiens
ggaaggccaagctgg

SEQ ID NO: 1248277 - DNA, 15 bp, Homo sapiens
gggaaggccaagctg

SEQ ID NO: 1248278 - DNA, 15 bp, Homo sapiens
agggaaggccaagct

SEQ ID NO: 1248279 - DNA, 15 bp, Homo sapiens
cagggaaggccaagc

SEQ ID NO: 1248280 - DNA, 15 bp, Homo sapiens
ccagggaaggccaag

SEQ ID NO: 1248281 - DNA, 15 bp, Homo sapiens
cccagggaaggccaa

SEQ ID NO: 1248282 - DNA, 15 bp, Homo sapiens
tcccagggaaggcca

SEQ ID NO: 1248283 - DNA, 15 bp, Homo sapiens
gtcccagggaaggcc

SEQ ID NO: 1248284 - DNA, 15 bp, Homo sapiens
agtcccagggaaggc

SEQ ID NO: 1248285 - DNA, 15 bp, Homo sapiens
cagtcccagggaagg

SEQ ID NO: 1248286 - DNA, 15 bp, Homo sapiens
ccagtcccagggaag

SEQ ID NO: 1248287 - DNA, 15 bp, Homo sapiens
cccagtcccagggaa

SEQ ID NO: 1248288 - DNA, 15 bp, Homo sapiens
ccccagtcccaggga

SEQ ID NO: 1248289 - DNA, 15 bp, Homo sapiens
accccagtcccaggg

SEQ ID NO: 1248290 - DNA, 15 bp, Homo sapiens
caccccagtcccagg

SEQ ID NO: 1248291 - DNA, 15 bp, Homo sapiens
gcaccccagtcccag

SEQ ID NO: 1248292 - DNA, 15 bp, Homo sapiens
tgcaccccagtccca

SEQ ID NO: 1248293 - DNA, 15 bp, Homo sapiens
ctgcaccccagtccc

SEQ ID NO: 1248294 - DNA, 15 bp, Homo sapiens
cctgcaccccagtcc

SEQ ID NO: 1248295 - DNA, 15 bp, Homo sapiens
gcctgcaccccagtc

SEQ ID NO: 1248296 - DNA, 15 bp, Homo sapiens
cgcctgcaccccagt

SEQ ID NO: 1248297 - DNA, 15 bp, Homo sapiens
tcgcctgcaccccag

SEQ ID NO: 1248298 - DNA, 15 bp, Homo sapiens
atcgcctgcacccca

SEQ ID NO: 1248299 - DNA, 15 bp, Homo sapiens
aatcgcctgcacccc

SEQ ID NO: 1248300 - DNA, 15 bp, Homo sapiens
aaatcgcctgcaccc

SEQ ID NO: 1248301 - DNA, 15 bp, Homo sapiens
aaaatcgcctgcacc

SEQ ID NO: 1248302 - DNA, 15 bp, Homo sapiens
taaaatcgcctgcac

SEQ ID NO: 1248303 - DNA, 15 bp, Homo sapiens
ataaaatcgcctgca

SEQ ID NO: 1248304 - DNA, 15 bp, Homo sapiens
gataaaatcgcctgc

SEQ ID NO: 1248305 - DNA, 15 bp, Homo sapiens
agataaaatcgcctg

SEQ ID NO: 1248306 - DNA, 15 bp, Homo sapiens
aagataaaatcgcct

SEQ ID NO: 1248307 - DNA, 15 bp, Homo sapiens
gaagataaaatcgcc

SEQ ID NO: 1248308 - DNA, 15 bp, Homo sapiens
agaagataaaatcgc

SEQ ID NO: 1248309 - DNA, 15 bp, Homo sapiens
aagaagataaaatcg

SEQ ID NO: 1248310 - DNA, 15 bp, Homo sapiens
aaagaagataaaatc

SEQ ID NO: 1248311 - DNA, 15 bp, Homo sapiens
caaagaagataaaat

SEQ ID NO: 1248312 - DNA, 15 bp, Homo sapiens
gcaaagaagataaaa

SEQ ID NO: 1248313 - DNA, 15 bp, Homo sapiens
agcaaagaagataaa

SEQ ID NO: 1248314 - DNA, 15 bp, Homo sapiens
gagcaaagaagataa

SEQ ID NO: 1248315 - DNA, 15 bp, Homo sapiens
ggagcaaagaagata

SEQ ID NO: 1248316 - DNA, 15 bp, Homo sapiens
tggagcaaagaagat

SEQ ID NO: 1248317 - DNA, 15 bp, Homo sapiens
atggagcaaagaaga

SEQ ID NO: 1248318 - DNA, 15 bp, Homo sapiens
aatggagcaaagaag

SEQ ID NO: 1248319 - DNA, 15 bp, Homo sapiens
gaatggagcaaagaa

SEQ ID NO: 1248320 - DNA, 15 bp, Homo sapiens
agaatggagcaaaga

SEQ ID NO: 1248321 - DNA, 15 bp, Homo sapiens
cagaatggagcaaag

SEQ ID NO: 1248322 - DNA, 15 bp, Homo sapiens
acagaatggagcaaa

SEQ ID NO: 1248323 - DNA, 15 bp, Homo sapiens
aacagaatggagcaa

SEQ ID NO: 1248324 - DNA, 15 bp, Homo sapiens
gaacagaatggagca

SEQ ID NO: 1248325 - DNA, 15 bp, Homo sapiens
ggaacagaatggagc

SEQ ID NO: 1248326 - DNA, 15 bp, Homo sapiens
aggaacagaatggag

SEQ ID NO: 1248327 - DNA, 15 bp, Homo sapiens
aaggaacagaatgga

SEQ ID NO: 1248328 - DNA, 15 bp, Homo sapiens
gaaggaacagaatgg

SEQ ID NO: 1248329 - DNA, 15 bp, Homo sapiens
ggaaggaacagaatg

SEQ ID NO: 1248330 - DNA, 15 bp, Homo sapiens
tggaaggaacagaat

SEQ ID NO: 1248331 - DNA, 15 bp, Homo sapiens
ctggaaggaacagaa

SEQ ID NO: 1248332 - DNA, 15 bp, Homo sapiens
tctggaaggaacaga

SEQ ID NO: 1248333 - DNA, 15 bp, Homo sapiens
atctggaaggaacag

SEQ ID NO: 1248334 - DNA, 15 bp, Homo sapiens
tatctggaaggaaca

SEQ ID NO: 1248335 - DNA, 15 bp, Homo sapiens
ttatctggaaggaac

SEQ ID NO: 1248336 - DNA, 15 bp, Homo sapiens
attatctggaaggaa

SEQ ID NO: 1248337 - DNA, 15 bp, Homo sapiens
gattatctggaagga

SEQ ID NO: 1248338 - DNA, 15 bp, Homo sapiens
cgattatctggaagg

SEQ ID NO: 1248339 - DNA, 15 bp, Homo sapiens
acgattatctggaag

SEQ ID NO: 1248340 - DNA, 15 bp, Homo sapiens
cacgattatctggaa

SEQ ID NO: 1248341 - DNA, 15 bp, Homo sapiens
acacgattatctgga

SEQ ID NO: 1248342 - DNA, 15 bp, Homo sapiens
cacacgattatctgg

SEQ ID NO: 1248343 - DNA, 15 bp, Homo sapiens
acacacgattatctg

SEQ ID NO: 1248344 - DNA, 15 bp, Homo sapiens
aacacacgattatct

SEQ ID NO: 1248345 - DNA, 15 bp, Homo sapiens
gaacacacgattatc

SEQ ID NO: 1248346 - DNA, 15 bp, Homo sapiens
agaacacacgattat

SEQ ID NO: 1248347 - DNA, 15 bp, Homo sapiens
aagaacacacgatta

SEQ ID NO: 1248348 - DNA, 15 bp, Homo sapiens
gaagaacacacgatt

SEQ ID NO: 1248349 - DNA, 15 bp, Homo sapiens
tgaagaacacacgat

SEQ ID NO: 1248350 - DNA, 15 bp, Homo sapiens
atgaagaacacacga

SEQ ID NO: 1248351 - DNA, 15 bp, Homo sapiens
gatgaagaacacacg

SEQ ID NO: 1248352 - DNA, 15 bp, Homo sapiens
tgatgaagaacacac

SEQ ID NO: 1248353 - DNA, 15 bp, Homo sapiens
ctgatgaagaacaca

SEQ ID NO: 1248354 - DNA, 15 bp, Homo sapiens
cctgatgaagaacac

SEQ ID NO: 1248355 - DNA, 15 bp, Homo sapiens
acctgatgaagaaca

SEQ ID NO: 1248356 - DNA, 15 bp, Homo sapiens
aacctgatgaagaac

SEQ ID NO: 1248357 - DNA, 15 bp, Homo sapiens
aaacctgatgaagaa

SEQ ID NO: 1248358 - DNA, 15 bp, Homo sapiens
aaaacctgatgaaga

SEQ ID NO: 1248359 - DNA, 15 bp, Homo sapiens
gaaaacctgatgaag

SEQ ID NO: 1248360 - DNA, 15 bp, Homo sapiens
ggaaaacctgatgaa

SEQ ID NO: 1248361 - DNA, 15 bp, Homo sapiens
aggaaaacctgatga

SEQ ID NO: 1248362 - DNA, 15 bp, Homo sapiens
gaggaaaacctgatg

SEQ ID NO: 1248363 - DNA, 15 bp, Homo sapiens
tgaggaaaacctgat

SEQ ID NO: 1248364 - DNA, 15 bp, Homo sapiens
ctgaggaaaacctga

SEQ ID NO: 1248365 - DNA, 15 bp, Homo sapiens
actgaggaaaacctg

SEQ ID NO: 1248366 - DNA, 15 bp, Homo sapiens
aactgaggaaaacct

SEQ ID NO: 1248367 - DNA, 15 bp, Homo sapiens
gaactgaggaaaacc

SEQ ID NO: 1248368 - DNA, 15 bp, Homo sapiens
agaactgaggaaaac

SEQ ID NO: 1248369 - DNA, 15 bp, Homo sapiens
aagaactgaggaaaa

SEQ ID NO: 1248370 - DNA, 15 bp, Homo sapiens
caagaactgaggaaa

SEQ ID NO: 1248371 - DNA, 15 bp, Homo sapiens
tcaagaactgaggaa

SEQ ID NO: 1248372 - DNA, 15 bp, Homo sapiens
ctcaagaactgagga

SEQ ID NO: 1248373 - DNA, 15 bp, Homo sapiens
tctcaagaactgagg

SEQ ID NO: 1248374 - DNA, 15 bp, Homo sapiens
ctctcaagaactgag

SEQ ID NO: 1248375 - DNA, 15 bp, Homo sapiens
gctctcaagaactga

SEQ ID NO: 1248376 - DNA, 15 bp, Homo sapiens
agctctcaagaactg

SEQ ID NO: 1248377 - DNA, 15 bp, Homo sapiens
aagctctcaagaact

SEQ ID NO: 1248378 - DNA, 15 bp, Homo sapiens
aaagctctcaagaac

SEQ ID NO: 1248379 - DNA, 15 bp, Homo sapiens
aaaagctctcaagaa

SEQ ID NO: 1248380 - DNA, 15 bp, Homo sapiens
gaaaagctctcaaga

SEQ ID NO: 1248381 - DNA, 15 bp, Homo sapiens
agaaaagctctcaag

SEQ ID NO: 1248382 - DNA, 15 bp, Homo sapiens
cagaaaagctctcaa

SEQ ID NO: 1248383 - DNA, 15 bp, Homo sapiens
tcagaaaagctctca

SEQ ID NO: 1248384 - DNA, 15 bp, Homo sapiens
atcagaaaagctctc

SEQ ID NO: 1248385 - DNA, 15 bp, Homo sapiens
catcagaaaagctct

SEQ ID NO: 1248386 - DNA, 15 bp, Homo sapiens
gcatcagaaaagctc

SEQ ID NO: 1248387 - DNA, 15 bp, Homo sapiens
tgcatcagaaaagct

SEQ ID NO: 1248388 - DNA, 15 bp, Homo sapiens
ttgcatcagaaaagc

SEQ ID NO: 1248389 - DNA, 15 bp, Homo sapiens
tttgcatcagaaaag

SEQ ID NO: 1248390 - DNA, 15 bp, Homo sapiens
atttgcatcagaaaa

SEQ ID NO: 1248391 - DNA, 15 bp, Homo sapiens
gatttgcatcagaaa

SEQ ID NO: 1248392 - DNA, 15 bp, Homo sapiens
agatttgcatcagaa

SEQ ID NO: 1248393 - DNA, 15 bp, Homo sapiens
cagatttgcatcaga

SEQ ID NO: 1248394 - DNA, 15 bp, Homo sapiens
gcagatttgcatcag

SEQ ID NO: 1248395 - DNA, 15 bp, Homo sapiens
agcagatttgcatca

SEQ ID NO: 1248396 - DNA, 15 bp, Homo sapiens
aagcagatttgcatc

SEQ ID NO: 1248397 - DNA, 15 bp, Homo sapiens
aaagcagatttgcat

SEQ ID NO: 1248398 - DNA, 15 bp, Homo sapiens
gaaagcagatttgca

SEQ ID NO: 1248399 - DNA, 15 bp, Homo sapiens
tgaaagcagatttgc

SEQ ID NO: 1248400 - DNA, 15 bp, Homo sapiens
gtgaaagcagatttg

SEQ ID NO: 1248401 - DNA, 15 bp, Homo sapiens
ggtgaaagcagattt

SEQ ID NO: 1248402 - DNA, 15 bp, Homo sapiens
gggtgaaagcagatt

SEQ ID NO: 1248403 - DNA, 15 bp, Homo sapiens
ggggtgaaagcagat

SEQ ID NO: 1248404 - DNA, 15 bp, Homo sapiens
tggggtgaaagcaga

SEQ ID NO: 1248405 - DNA, 15 bp, Homo sapiens
ctggggtgaaagcag

SEQ ID NO: 1248406 - DNA, 15 bp, Homo sapiens
cctggggtgaaagca

SEQ ID NO: 1248407 - DNA, 15 bp, Homo sapiens
ccctggggtgaaagc

SEQ ID NO: 1248408 - DNA, 15 bp, Homo sapiens
gccctggggtgaaag

SEQ ID NO: 1248409 - DNA, 15 bp, Homo sapiens
cgccctggggtgaaa

SEQ ID NO: 1248410 - DNA, 15 bp, Homo sapiens
ccgccctggggtgaa

SEQ ID NO: 1248411 - DNA, 15 bp, Homo sapiens
accgccctggggtga

SEQ ID NO: 1248412 - DNA, 15 bp, Homo sapiens
gaccgccctggggtg

SEQ ID NO: 1248413 - DNA, 15 bp, Homo sapiens
tgaccgccctggggt

SEQ ID NO: 1248414 - DNA, 15 bp, Homo sapiens
gtgaccgccctgggg

SEQ ID NO: 1248415 - DNA, 15 bp, Homo sapiens
ggtgaccgccctggg

SEQ ID NO: 1248416 - DNA, 15 bp, Homo sapiens
cggtgaccgccctgg

SEQ ID NO: 1248417 - DNA, 15 bp, Homo sapiens
ccggtgaccgccctg

SEQ ID NO: 1248418 - DNA, 15 bp, Homo sapiens
gccggtgaccgccct

SEQ ID NO: 1248419 - DNA, 15 bp, Homo sapiens
agccggtgaccgccc

SEQ ID NO: 1248420 - DNA, 15 bp, Homo sapiens
gagccggtgaccgcc

SEQ ID NO: 1248421 - DNA, 15 bp, Homo sapiens
agagccggtgaccgc

SEQ ID NO: 1248422 - DNA, 15 bp, Homo sapiens
cagagccggtgaccg

SEQ ID NO: 1248423 - DNA, 15 bp, Homo sapiens
gcagagccggtgacc

SEQ ID NO: 1248424 - DNA, 15 bp, Homo sapiens
agcagagccggtgac

SEQ ID NO: 1248425 - DNA, 15 bp, Homo sapiens
gagcagagccggtga

SEQ ID NO: 1248426 - DNA, 15 bp, Homo sapiens
tgagcagagccggtg

SEQ ID NO: 1248427 - DNA, 15 bp, Homo sapiens
gtgagcagagccggt

SEQ ID NO: 1248428 - DNA, 15 bp, Homo sapiens
tgtgagcagagccgg

SEQ ID NO: 1248429 - DNA, 15 bp, Homo sapiens
gtgtgagcagagccg

SEQ ID NO: 1248430 - DNA, 15 bp, Homo sapiens
ggtgtgagcagagcc

SEQ ID NO: 1248431 - DNA, 15 bp, Homo sapiens
tggtgtgagcagagc

SEQ ID NO: 1248432 - DNA, 15 bp, Homo sapiens
ctggtgtgagcagag

SEQ ID NO: 1248433 - DNA, 15 bp, Homo sapiens
gctggtgtgagcaga

SEQ ID NO: 1248434 - DNA, 15 bp, Homo sapiens
ggctggtgtgagcag

SEQ ID NO: 1248435 - DNA, 15 bp, Homo sapiens
aggctggtgtgagca

SEQ ID NO: 1248436 - DNA, 15 bp, Homo sapiens
gaggctggtgtgagc

SEQ ID NO: 1248437 - DNA, 15 bp, Homo sapiens
ggaggctggtgtgag

SEQ ID NO: 1248438 - DNA, 15 bp, Homo sapiens
tggaggctggtgtga

SEQ ID NO: 1248439 - DNA, 15 bp, Homo sapiens
ttggaggctggtgtg

SEQ ID NO: 1248440 - DNA, 15 bp, Homo sapiens
cttggaggctggtgt

SEQ ID NO: 1248441 - DNA, 15 bp, Homo sapiens
ccttggaggctggtg

SEQ ID NO: 1248442 - DNA, 15 bp, Homo sapiens
cccttggaggctggt

SEQ ID NO: 1248443 - DNA, 15 bp, Homo sapiens
acccttggaggctgg

SEQ ID NO: 1248444 - DNA, 15 bp, Homo sapiens
cacccttggaggctg

SEQ ID NO: 1248445 - DNA, 15 bp, Homo sapiens
acacccttggaggct

SEQ ID NO: 1248446 - DNA, 15 bp, Homo sapiens
cacacccttggaggc

SEQ ID NO: 1248447 - DNA, 15 bp, Homo sapiens
ccacacccttggagg

SEQ ID NO: 1248448 - DNA, 15 bp, Homo sapiens
cccacacccttggag

SEQ ID NO: 1248449 - DNA, 15 bp, Homo sapiens
acccacacccttgga

SEQ ID NO: 1248450 - DNA, 15 bp, Homo sapiens
cacccacacccttgg

SEQ ID NO: 1248451 - DNA, 15 bp, Homo sapiens
acacccacacccttg

SEQ ID NO: 1248452 - DNA, 15 bp, Homo sapiens
gacacccacaccctt

SEQ ID NO: 1248453 - DNA, 15 bp, Homo sapiens
ggacacccacaccct

SEQ ID NO: 1248454 - DNA, 15 bp, Homo sapiens
gggacacccacaccc

SEQ ID NO: 1248455 - DNA, 15 bp, Homo sapiens
cgggacacccacacc

SEQ ID NO: 1248456 - DNA, 15 bp, Homo sapiens
ccgggacacccacac

SEQ ID NO: 1248457 - DNA, 15 bp, Homo sapiens
cccgggacacccaca

SEQ ID NO: 1248458 - DNA, 15 bp, Homo sapiens
tcccgggacacccac

SEQ ID NO: 1248459 - DNA, 15 bp, Homo sapiens
ctcccgggacaccca

SEQ ID NO: 1248460 - DNA, 15 bp, Homo sapiens
actcccgggacaccc

SEQ ID NO: 1248461 - DNA, 15 bp, Homo sapiens
cactcccgggacacc

SEQ ID NO: 1248462 - DNA, 15 bp, Homo sapiens
acactcccgggacac

SEQ ID NO: 1248463 - DNA, 15 bp, Homo sapiens
cacactcccgggaca

SEQ ID NO: 1248464 - DNA, 15 bp, Homo sapiens
ccacactcccgggac

SEQ ID NO: 1248465 - DNA, 15 bp, Homo sapiens
cccacactcccggga

SEQ ID NO: 1248466 - DNA, 15 bp, Homo sapiens
acccacactcccggg

SEQ ID NO: 1248467 - DNA, 15 bp, Homo sapiens
cacccacactcccgg

SEQ ID NO: 1248468 - DNA, 15 bp, Homo sapiens
acacccacactcccg

SEQ ID NO: 1248469 - DNA, 15 bp, Homo sapiens
gacacccacactccc

SEQ ID NO: 1248470 - DNA, 15 bp, Homo sapiens
ggacacccacactcc

SEQ ID NO: 1248471 - DNA, 15 bp, Homo sapiens
gggacacccacactc

SEQ ID NO: 1248472 - DNA, 15 bp, Homo sapiens
cgggacacccacact

SEQ ID NO: 1248473 - DNA, 15 bp, Homo sapiens
ccccgggacacccac

SEQ ID NO: 1248474 - DNA, 15 bp, Homo sapiens
cccccgggacaccca

SEQ ID NO: 1248475 - DNA, 15 bp, Homo sapiens
gcccccgggacaccc

SEQ ID NO: 1248476 - DNA, 15 bp, Homo sapiens
cgcccccgggacacc

SEQ ID NO: 1248477 - DNA, 15 bp, Homo sapiens
acgcccccgggacac

SEQ ID NO: 1248478 - DNA, 15 bp, Homo sapiens
cacgcccccgggaca

SEQ ID NO: 1248479 - DNA, 15 bp, Homo sapiens
ccacgcccccgggac

SEQ ID NO: 1248480 - DNA, 15 bp, Homo sapiens
cccacgcccccggga

SEQ ID NO: 1248481 - DNA, 15 bp, Homo sapiens
acccacgcccccggg

SEQ ID NO: 1248482 - DNA, 15 bp, Homo sapiens
cacccacgcccccgg

SEQ ID NO: 1248483 - DNA, 15 bp, Homo sapiens
acacccacgcccccg

SEQ ID NO: 1248484 - DNA, 15 bp, Homo sapiens
gacacccacgccccc

SEQ ID NO: 1248485 - DNA, 15 bp, Homo sapiens
ggacacccacgcccc

SEQ ID NO: 1248486 - DNA, 15 bp, Homo sapiens
gggacacccacgccc

SEQ ID NO: 1248487 - DNA, 15 bp, Homo sapiens
tgggacacccacgcc

SEQ ID NO: 1248488 - DNA, 15 bp, Homo sapiens
ctgggacacccacgc

SEQ ID NO: 1248489 - DNA, 15 bp, Homo sapiens
cctgggacacccacg

SEQ ID NO: 1248490 - DNA, 15 bp, Homo sapiens
tcctgggacacccac

SEQ ID NO: 1248491 - DNA, 15 bp, Homo sapiens
ctcctgggacaccca

SEQ ID NO: 1248492 - DNA, 15 bp, Homo sapiens
actcctgggacaccc

SEQ ID NO: 1248493 - DNA, 15 bp, Homo sapiens
cactcctgggacacc

SEQ ID NO: 1248494 - DNA, 15 bp, Homo sapiens
acactcctgggacac

SEQ ID NO: 1248495 - DNA, 15 bp, Homo sapiens
cacactcctgggaca

SEQ ID NO: 1248496 - DNA, 15 bp, Homo sapiens
ccacactcctgggac

SEQ ID NO: 1248497 - DNA, 15 bp, Homo sapiens
cccacactcctggga

SEQ ID NO: 1248498 - DNA, 15 bp, Homo sapiens
acccacactcctggg

SEQ ID NO: 1248499 - DNA, 15 bp, Homo sapiens
cacccacactcctgg

SEQ ID NO: 1248500 - DNA, 15 bp, Homo sapiens
acacccacactcctg

SEQ ID NO: 1248501 - DNA, 15 bp, Homo sapiens
gacacccacactcct

SEQ ID NO: 1248502 - DNA, 15 bp, Homo sapiens
cgggacacccacgcc

SEQ ID NO: 1248503 - DNA, 15 bp, Homo sapiens
ccgggacacccacgc

SEQ ID NO: 1248504 - DNA, 15 bp, Homo sapiens
cccgggacacccacg

SEQ ID NO: 1248505 - DNA, 15 bp, Homo sapiens
tccgggacacccaca

SEQ ID NO: 1248506 - DNA, 15 bp, Homo sapiens
ctccgggacacccac

SEQ ID NO: 1248507 - DNA, 15 bp, Homo sapiens
cctccgggacaccca

SEQ ID NO: 1248508 - DNA, 15 bp, Homo sapiens
gcctccgggacaccc

SEQ ID NO: 1248509 - DNA, 15 bp, Homo sapiens
cgcctccgggacacc

SEQ ID NO: 1248510 - DNA, 15 bp, Homo sapiens
tcgcctccgggacac

SEQ ID NO: 1248511 - DNA, 15 bp, Homo sapiens
ctcgcctccgggaca

SEQ ID NO: 1248512 - DNA, 15 bp, Homo sapiens
cctcgcctccgggac

SEQ ID NO: 1248513 - DNA, 15 bp, Homo sapiens
ccctcgcctccggga

SEQ ID NO: 1248514 - DNA, 15 bp, Homo sapiens
accctcgcctccggg

SEQ ID NO: 1248515 - DNA, 15 bp, Homo sapiens
caccctcgcctccgg

SEQ ID NO: 1248516 - DNA, 15 bp, Homo sapiens
acaccctcgcctccg

SEQ ID NO: 1248517 - DNA, 15 bp, Homo sapiens
gacaccctcgcctcc

SEQ ID NO: 1248518 - DNA, 15 bp, Homo sapiens
ggacaccctcgcctc

SEQ ID NO: 1248519 - DNA, 15 bp, Homo sapiens
gggacaccctcgcct

SEQ ID NO: 1248520 - DNA, 15 bp, Homo sapiens
cgggacaccctcgcc

SEQ ID NO: 1248521 - DNA, 15 bp, Homo sapiens
ccgggacaccctcgc

SEQ ID NO: 1248522 - DNA, 15 bp, Homo sapiens
cccgggacaccctcg

SEQ ID NO: 1248523 - DNA, 15 bp, Homo sapiens
tcccgggacaccctc

SEQ ID NO: 1248524 - DNA, 15 bp, Homo sapiens
ctcccgggacaccct

SEQ ID NO: 1248525 - DNA, 15 bp, Homo sapiens
tcccccgggacaccc

SEQ ID NO: 1248526 - DNA, 15 bp, Homo sapiens
ctcccccgggacacc

SEQ ID NO: 1248527 - DNA, 15 bp, Homo sapiens
actcccccgggacac

SEQ ID NO: 1248528 - DNA, 15 bp, Homo sapiens
cactcccccgggaca

SEQ ID NO: 1248529 - DNA, 15 bp, Homo sapiens
ccactcccccgggac

SEQ ID NO: 1248530 - DNA, 15 bp, Homo sapiens
cccactcccccggga

SEQ ID NO: 1248531 - DNA, 15 bp, Homo sapiens
acccactcccccggg

SEQ ID NO: 1248532 - DNA, 15 bp, Homo sapiens
cacccactcccccgg

SEQ ID NO: 1248533 - DNA, 15 bp, Homo sapiens
acacccactcccccg

SEQ ID NO: 1248534 - DNA, 15 bp, Homo sapiens
gacacccactccccc

SEQ ID NO: 1248535 - DNA, 15 bp, Homo sapiens
ggacacccactcccc

SEQ ID NO: 1248536 - DNA, 15 bp, Homo sapiens
gggacacccactccc

SEQ ID NO: 1248537 - DNA, 15 bp, Homo sapiens
cgggacacccactcc

SEQ ID NO: 1248538 - DNA, 15 bp, Homo sapiens
ccgggacacccactc

SEQ ID NO: 1248539 - DNA, 15 bp, Homo sapiens
cccgggacacccact

SEQ ID NO: 1248540 - DNA, 15 bp, Homo sapiens
ggaacacccacgccc

SEQ ID NO: 1248541 - DNA, 15 bp, Homo sapiens
cggaacacccacgcc

SEQ ID NO: 1248542 - DNA, 15 bp, Homo sapiens
ccggaacacccacgc

SEQ ID NO: 1248543 - DNA, 15 bp, Homo sapiens
tccggaacacccacg

SEQ ID NO: 1248544 - DNA, 15 bp, Homo sapiens
taccctcgcctccgg

SEQ ID NO: 1248545 - DNA, 15 bp, Homo sapiens
ataccctcgcctccg

SEQ ID NO: 1248546 - DNA, 15 bp, Homo sapiens
gataccctcgcctcc

SEQ ID NO: 1248547 - DNA, 15 bp, Homo sapiens
ggataccctcgcctc

SEQ ID NO: 1248548 - DNA, 15 bp, Homo sapiens
gggataccctcgcct

SEQ ID NO: 1248549 - DNA, 15 bp, Homo sapiens
tgggataccctcgcc

SEQ ID NO: 1248550 - DNA, 15 bp, Homo sapiens
ctgggataccctcgc

SEQ ID NO: 1248551 - DNA, 15 bp, Homo sapiens
tctgggataccctcg

SEQ ID NO: 1248552 - DNA, 15 bp, Homo sapiens
ttctgggataccctc

SEQ ID NO: 1248553 - DNA, 15 bp, Homo sapiens
cttctgggataccct

SEQ ID NO: 1248554 - DNA, 15 bp, Homo sapiens
acttctgggataccc

SEQ ID NO: 1248555 - DNA, 15 bp, Homo sapiens
cacttctgggatacc

SEQ ID NO: 1248556 - DNA, 15 bp, Homo sapiens
acacttctgggatac

SEQ ID NO: 1248557 - DNA, 15 bp, Homo sapiens
cacacttctgggata

SEQ ID NO: 1248558 - DNA, 15 bp, Homo sapiens
tcacacttctgggat

SEQ ID NO: 1248559 - DNA, 15 bp, Homo sapiens
ctcacacttctggga

SEQ ID NO: 1248560 - DNA, 15 bp, Homo sapiens
actcacacttctggg

SEQ ID NO: 1248561 - DNA, 15 bp, Homo sapiens
cactcacacttctgg

SEQ ID NO: 1248562 - DNA, 15 bp, Homo sapiens
acactcacacttctg

SEQ ID NO: 1248563 - DNA, 15 bp, Homo sapiens
gacactcacacttct

SEQ ID NO: 1248564 - DNA, 15 bp, Homo sapiens
ggacactcacacttc

SEQ ID NO: 1248565 - DNA, 15 bp, Homo sapiens
gggacactcacactt

SEQ ID NO: 1248566 - DNA, 15 bp, Homo sapiens
tgggacactcacact

SEQ ID NO: 1248567 - DNA, 15 bp, Homo sapiens
ctgggacactcacac

SEQ ID NO: 1248568 - DNA, 15 bp, Homo sapiens
cctgggacactcaca

SEQ ID NO: 1248569 - DNA, 15 bp, Homo sapiens
ccctgggacactcac

SEQ ID NO: 1248570 - DNA, 15 bp, Homo sapiens
cccctgggacactca

SEQ ID NO: 1248571 - DNA, 15 bp, Homo sapiens
gcccctgggacactc

SEQ ID NO: 1248572 - DNA, 15 bp, Homo sapiens
cgcccctgggacact

SEQ ID NO: 1248573 - DNA, 15 bp, Homo sapiens
acgcccctgggacac

SEQ ID NO: 1248574 - DNA, 15 bp, Homo sapiens
cacgcccctgggaca

SEQ ID NO: 1248575 - DNA, 15 bp, Homo sapiens
ccacgcccctgggac

SEQ ID NO: 1248576 - DNA, 15 bp, Homo sapiens
cccacgcccctggga

SEQ ID NO: 1248577 - DNA, 15 bp, Homo sapiens
acccacgcccctggg

SEQ ID NO: 1248578 - DNA, 15 bp, Homo sapiens
cacccacgcccctgg

SEQ ID NO: 1248579 - DNA, 15 bp, Homo sapiens
acacccacgcccctg

SEQ ID NO: 1248580 - DNA, 15 bp, Homo sapiens
gacacccacgcccct

SEQ ID NO: 1248581 - DNA, 15 bp, Homo sapiens
acccccgggacaccc

SEQ ID NO: 1248582 - DNA, 15 bp, Homo sapiens
cacccccgggacacc

SEQ ID NO: 1248583 - DNA, 15 bp, Homo sapiens
acacccccgggacac

SEQ ID NO: 1248584 - DNA, 15 bp, Homo sapiens
cacacccccgggaca

SEQ ID NO: 1248585 - DNA, 15 bp, Homo sapiens
ccacacccccgggac

SEQ ID NO: 1248586 - DNA, 15 bp, Homo sapiens
cccacacccccggga

SEQ ID NO: 1248587 - DNA, 15 bp, Homo sapiens
acccacacccccggg

SEQ ID NO: 1248588 - DNA, 15 bp, Homo sapiens
cacccacacccccgg

SEQ ID NO: 1248589 - DNA, 15 bp, Homo sapiens
acacccacacccccg

SEQ ID NO: 1248590 - DNA, 15 bp, Homo sapiens
gacacccacaccccc

SEQ ID NO: 1248591 - DNA, 15 bp, Homo sapiens
ggacacccacacccc

SEQ ID NO: 1248592 - DNA, 15 bp, Homo sapiens
ccacaacccccggga

SEQ ID NO: 1248593 - DNA, 15 bp, Homo sapiens
cccacaacccccggg

SEQ ID NO: 1248594 - DNA, 15 bp, Homo sapiens
acccacaacccccgg

SEQ ID NO: 1248595 - DNA, 15 bp, Homo sapiens
cacccacaacccccg

SEQ ID NO: 1248596 - DNA, 15 bp, Homo sapiens
acacccacaaccccc

SEQ ID NO: 1248597 - DNA, 15 bp, Homo sapiens
gacacccacaacccc

SEQ ID NO: 1248598 - DNA, 15 bp, Homo sapiens
ggacacccacaaccc

SEQ ID NO: 1248599 - DNA, 15 bp, Homo sapiens
gggacacccacaacc

SEQ ID NO: 1248600 - DNA, 15 bp, Homo sapiens
cgggacacccacaac

SEQ ID NO: 1248601 - DNA, 15 bp, Homo sapiens
ccgggacacccacaa

SEQ ID NO: 1248602 - DNA, 15 bp, Homo sapiens
tgggacaccctcgcc

SEQ ID NO: 1248603 - DNA, 15 bp, Homo sapiens
ctgggacaccctcgc

SEQ ID NO: 1248604 - DNA, 15 bp, Homo sapiens
cctgggacaccctcg

SEQ ID NO: 1248605 - DNA, 15 bp, Homo sapiens
tcctgggacaccctc

SEQ ID NO: 1248606 - DNA, 15 bp, Homo sapiens
ctcctgggacaccct

SEQ ID NO: 1248607 - DNA, 15 bp, Homo sapiens
gctcctgggacaccc

SEQ ID NO: 1248608 - DNA, 15 bp, Homo sapiens
cgctcctgggacacc

SEQ ID NO: 1248609 - DNA, 15 bp, Homo sapiens
acgctcctgggacac

SEQ ID NO: 1248610 - DNA, 15 bp, Homo sapiens
cacgctcctgggaca

SEQ ID NO: 1248611 - DNA, 15 bp, Homo sapiens
ccacgctcctgggac

SEQ ID NO: 1248612 - DNA, 15 bp, Homo sapiens
cccacgctcctggga

SEQ ID NO: 1248613 - DNA, 15 bp, Homo sapiens
acccacgctcctggg

SEQ ID NO: 1248614 - DNA, 15 bp, Homo sapiens
cacccacgctcctgg

SEQ ID NO: 1248615 - DNA, 15 bp, Homo sapiens
acacccacgctcctg

SEQ ID NO: 1248616 - DNA, 15 bp, Homo sapiens
gacacccacgctcct

SEQ ID NO: 1248617 - DNA, 15 bp, Homo sapiens
tccgggacacccacg

SEQ ID NO: 1248618 - DNA, 15 bp, Homo sapiens
acccctgggacaccc

SEQ ID NO: 1248619 - DNA, 15 bp, Homo sapiens
cacccctgggacacc

SEQ ID NO: 1248620 - DNA, 15 bp, Homo sapiens
acacccctgggacac

SEQ ID NO: 1248621 - DNA, 15 bp, Homo sapiens
cacacccctgggaca

SEQ ID NO: 1248622 - DNA, 15 bp, Homo sapiens
ccacacccctgggac

SEQ ID NO: 1248623 - DNA, 15 bp, Homo sapiens
cccacacccctggga

SEQ ID NO: 1248624 - DNA, 15 bp, Homo sapiens
acccacacccctggg

SEQ ID NO: 1248625 - DNA, 15 bp, Homo sapiens
cacccacacccctgg

SEQ ID NO: 1248626 - DNA, 15 bp, Homo sapiens
acacccacacccctg

SEQ ID NO: 1248627 - DNA, 15 bp, Homo sapiens
gacacccacacccct

SEQ ID NO: 1248628 - DNA, 15 bp, Homo sapiens
tgggacacccacgct

SEQ ID NO: 1248629 - DNA, 15 bp, Homo sapiens
tccactcccccggga

SEQ ID NO: 1248630 - DNA, 15 bp, Homo sapiens
atccactcccccggg

SEQ ID NO: 1248631 - DNA, 15 bp, Homo sapiens
catccactcccccgg

SEQ ID NO: 1248632 - DNA, 15 bp, Homo sapiens
acatccactcccccg

SEQ ID NO: 1248633 - DNA, 15 bp, Homo sapiens
gacatccactccccc

SEQ ID NO: 1248634 - DNA, 15 bp, Homo sapiens
ggacatccactcccc

SEQ ID NO: 1248635 - DNA, 15 bp, Homo sapiens
gggacatccactccc

SEQ ID NO: 1248636 - DNA, 15 bp, Homo sapiens
cgggacatccactcc

SEQ ID NO: 1248637 - DNA, 15 bp, Homo sapiens
ccgggacatccactc

SEQ ID NO: 1248638 - DNA, 15 bp, Homo sapiens
cccgggacatccact

SEQ ID NO: 1248639 - DNA, 15 bp, Homo sapiens
tcccgggacatccac

SEQ ID NO: 1248640 - DNA, 15 bp, Homo sapiens
ctcccgggacatcca

SEQ ID NO: 1248641 - DNA, 15 bp, Homo sapiens
actcccgggacatcc

SEQ ID NO: 1248642 - DNA, 15 bp, Homo sapiens
cactcccgggacatc

SEQ ID NO: 1248643 - DNA, 15 bp, Homo sapiens
acactcccgggacat

SEQ ID NO: 1248644 - DNA, 15 bp, Homo sapiens
tacccacgcccccgg

SEQ ID NO: 1248645 - DNA, 15 bp, Homo sapiens
atacccacgcccccg

SEQ ID NO: 1248646 - DNA, 15 bp, Homo sapiens
gatacccacgccccc

SEQ ID NO: 1248647 - DNA, 15 bp, Homo sapiens
ggatacccacgcccc

SEQ ID NO: 1248648 - DNA, 15 bp, Homo sapiens
gggatacccacgccc

SEQ ID NO: 1248649 - DNA, 15 bp, Homo sapiens
tgggatacccacgcc

SEQ ID NO: 1248650 - DNA, 15 bp, Homo sapiens
ctgggatacccacgc

SEQ ID NO: 1248651 - DNA, 15 bp, Homo sapiens
tctgggatacccacg

SEQ ID NO: 1248652 - DNA, 15 bp, Homo sapiens
ttctgggatacccac

SEQ ID NO: 1248653 - DNA, 15 bp, Homo sapiens
cttctgggataccca

SEQ ID NO: 1248654 - DNA, 15 bp, Homo sapiens
cggacacccacgccc

SEQ ID NO: 1248655 - DNA, 15 bp, Homo sapiens
ccggacacccacgcc

SEQ ID NO: 1248656 - DNA, 15 bp, Homo sapiens
cccggacacccacgc

SEQ ID NO: 1248657 - DNA, 15 bp, Homo sapiens
ccccggacacccacg

SEQ ID NO: 1248658 - DNA, 15 bp, Homo sapiens
cccccggacacccac

SEQ ID NO: 1248659 - DNA, 15 bp, Homo sapiens
ccccccggacaccca

SEQ ID NO: 1248660 - DNA, 15 bp, Homo sapiens
gccccccggacaccc

SEQ ID NO: 1248661 - DNA, 15 bp, Homo sapiens
cgccccccggacacc

SEQ ID NO: 1248662 - DNA, 15 bp, Homo sapiens
acgccccccggacac

SEQ ID NO: 1248663 - DNA, 15 bp, Homo sapiens
cacgccccccggaca

SEQ ID NO: 1248664 - DNA, 15 bp, Homo sapiens
ccacgccccccggac

SEQ ID NO: 1248665 - DNA, 15 bp, Homo sapiens
cccacgccccccgga

SEQ ID NO: 1248666 - DNA, 15 bp, Homo sapiens
acccacgccccccgg

SEQ ID NO: 1248667 - DNA, 15 bp, Homo sapiens
cacccacgccccccg

SEQ ID NO: 1248668 - DNA, 15 bp, Homo sapiens
acacccacgcccccc

SEQ ID NO: 1248669 - DNA, 15 bp, Homo sapiens
cgacacccacgctcc

SEQ ID NO: 1248670 - DNA, 15 bp, Homo sapiens
ccgacacccacgctc

SEQ ID NO: 1248671 - DNA, 15 bp, Homo sapiens
cccgacacccacgct

SEQ ID NO: 1248672 - DNA, 15 bp, Homo sapiens
ccccgacacccacgc

SEQ ID NO: 1248673 - DNA, 15 bp, Homo sapiens
tccccgacacccacg

SEQ ID NO: 1248674 - DNA, 15 bp, Homo sapiens
gtccccgacacccac

SEQ ID NO: 1248675 - DNA, 15 bp, Homo sapiens
agtccccgacaccca

SEQ ID NO: 1248676 - DNA, 15 bp, Homo sapiens
cagtccccgacaccc

SEQ ID NO: 1248677 - DNA, 15 bp, Homo sapiens
gcagtccccgacacc

SEQ ID NO: 1248678 - DNA, 15 bp, Homo sapiens
tgcagtccccgacac

SEQ ID NO: 1248679 - DNA, 15 bp, Homo sapiens
ctgcagtccccgaca

SEQ ID NO: 1248680 - DNA, 15 bp, Homo sapiens
cctgcagtccccgac

SEQ ID NO: 1248681 - DNA, 15 bp, Homo sapiens
ccctgcagtccccga

SEQ ID NO: 1248682 - DNA, 15 bp, Homo sapiens
tccctgcagtccccg

SEQ ID NO: 1248683 - DNA, 15 bp, Homo sapiens
gtccctgcagtcccc

SEQ ID NO: 1248684 - DNA, 15 bp, Homo sapiens
tgtccctgcagtccc

SEQ ID NO: 1248685 - DNA, 15 bp, Homo sapiens
atgtccctgcagtcc

SEQ ID NO: 1248686 - DNA, 15 bp, Homo sapiens
catgtccctgcagtc

SEQ ID NO: 1248687 - DNA, 15 bp, Homo sapiens
ccatgtccctgcagt

SEQ ID NO: 1248688 - DNA, 15 bp, Homo sapiens
cccatgtccctgcag

SEQ ID NO: 1248689 - DNA, 15 bp, Homo sapiens
gcccatgtccctgca

SEQ ID NO: 1248690 - DNA, 15 bp, Homo sapiens
ggcccatgtccctgc

SEQ ID NO: 1248691 - DNA, 15 bp, Homo sapiens
aggcccatgtccctg

SEQ ID NO: 1248692 - DNA, 15 bp, Homo sapiens
gaggcccatgtccct

SEQ ID NO: 1248693 - DNA, 15 bp, Homo sapiens
ggaggcccatgtccc

SEQ ID NO: 1248694 - DNA, 15 bp, Homo sapiens
gggaggcccatgtcc

SEQ ID NO: 1248695 - DNA, 15 bp, Homo sapiens
ggggaggcccatgtc

SEQ ID NO: 1248696 - DNA, 15 bp, Homo sapiens
aggggaggcccatgt

SEQ ID NO: 1248697 - DNA, 15 bp, Homo sapiens
gaggggaggcccatg

SEQ ID NO: 1248698 - DNA, 15 bp, Homo sapiens
ggaggggaggcccat

SEQ ID NO: 1248699 - DNA, 15 bp, Homo sapiens
gggaggggaggccca

SEQ ID NO: 1248700 - DNA, 15 bp, Homo sapiens
tgggaggggaggccc

SEQ ID NO: 1248701 - DNA, 15 bp, Homo sapiens
gtgggaggggaggcc

SEQ ID NO: 1248702 - DNA, 15 bp, Homo sapiens
agtgggaggggaggc

SEQ ID NO: 1248703 - DNA, 15 bp, Homo sapiens
gagtgggaggggagg

SEQ ID NO: 1248704 - DNA, 15 bp, Homo sapiens
ggagtgggaggggag

SEQ ID NO: 1248705 - DNA, 15 bp, Homo sapiens
aggagtgggagggga

SEQ ID NO: 1248706 - DNA, 15 bp, Homo sapiens
caggagtgggagggg

SEQ ID NO: 1248707 - DNA, 15 bp, Homo sapiens
gcaggagtgggaggg

SEQ ID NO: 1248708 - DNA, 15 bp, Homo sapiens
ggcaggagtgggagg

SEQ ID NO: 1248709 - DNA, 15 bp, Homo sapiens
cggcaggagtgggag

SEQ ID NO: 1248710 - DNA, 15 bp, Homo sapiens
gcggcaggagtggga

SEQ ID NO: 1248711 - DNA, 15 bp, Homo sapiens
ggcggcaggagtggg

SEQ ID NO: 1248712 - DNA, 15 bp, Homo sapiens
gggcggcaggagtgg

SEQ ID NO: 1248713 - DNA, 15 bp, Homo sapiens
tgggcggcaggagtg

SEQ ID NO: 1248714 - DNA, 15 bp, Homo sapiens
ctgggcggcaggagt

SEQ ID NO: 1248715 - DNA, 15 bp, Homo sapiens
cctgggcggcaggag

SEQ ID NO: 1248716 - DNA, 15 bp, Homo sapiens
ccctgggcggcagga

SEQ ID NO: 1248717 - DNA, 15 bp, Homo sapiens
gccctgggcggcagg

SEQ ID NO: 1248718 - DNA, 15 bp, Homo sapiens
tgccctgggcggcag

SEQ ID NO: 1248719 - DNA, 15 bp, Homo sapiens
gtgccctgggcggca

SEQ ID NO: 1248720 - DNA, 15 bp, Homo sapiens
ggtgccctgggcggc

SEQ ID NO: 1248721 - DNA, 15 bp, Homo sapiens
aggtgccctgggcgg

SEQ ID NO: 1248722 - DNA, 15 bp, Homo sapiens
gaggtgccctgggcg

SEQ ID NO: 1248723 - DNA, 15 bp, Homo sapiens
ggaggtgccctgggc

SEQ ID NO: 1248724 - DNA, 15 bp, Homo sapiens
aggaggtgccctggg

SEQ ID NO: 1248725 - DNA, 15 bp, Homo sapiens
caggaggtgccctgg

SEQ ID NO: 1248726 - DNA, 15 bp, Homo sapiens
acaggaggtgccctg

SEQ ID NO: 1248727 - DNA, 15 bp, Homo sapiens
cacaggaggtgccct

SEQ ID NO: 1248728 - DNA, 15 bp, Homo sapiens
tcacaggaggtgccc

SEQ ID NO: 1248729 - DNA, 15 bp, Homo sapiens
ctcacaggaggtgcc

SEQ ID NO: 1248730 - DNA, 15 bp, Homo sapiens
cctcacaggaggtgc

SEQ ID NO: 1248731 - DNA, 15 bp, Homo sapiens
tcctcacaggaggtg

SEQ ID NO: 1248732 - DNA, 15 bp, Homo sapiens
gtcctcacaggaggt

SEQ ID NO: 1248733 - DNA, 15 bp, Homo sapiens
agtcctcacaggagg

SEQ ID NO: 1248734 - DNA, 15 bp, Homo sapiens
gagtcctcacaggag

SEQ ID NO: 1248735 - DNA, 15 bp, Homo sapiens
cgagtcctcacagga

SEQ ID NO: 1248736 - DNA, 15 bp, Homo sapiens
ccgagtcctcacagg

SEQ ID NO: 1248737 - DNA, 15 bp, Homo sapiens
tccgagtcctcacag

SEQ ID NO: 1248738 - DNA, 15 bp, Homo sapiens
ctccgagtcctcaca

SEQ ID NO: 1248739 - DNA, 15 bp, Homo sapiens
actccgagtcctcac

SEQ ID NO: 1248740 - DNA, 15 bp, Homo sapiens
gactccgagtcctca

SEQ ID NO: 1248741 - DNA, 15 bp, Homo sapiens
ggactccgagtcctc

SEQ ID NO: 1248742 - DNA, 15 bp, Homo sapiens
cggactccgagtcct

SEQ ID NO: 1248743 - DNA, 15 bp, Homo sapiens
acggactccgagtcc

SEQ ID NO: 1248744 - DNA, 15 bp, Homo sapiens
cacggactccgagtc

SEQ ID NO: 1248745 - DNA, 15 bp, Homo sapiens
tcacggactccgagt

SEQ ID NO: 1248746 - DNA, 15 bp, Homo sapiens
ctcacggactccgag

SEQ ID NO: 1248747 - DNA, 15 bp, Homo sapiens
actcacggactccga

SEQ ID NO: 1248748 - DNA, 15 bp, Homo sapiens
aactcacggactccg

SEQ ID NO: 1248749 - DNA, 15 bp, Homo sapiens
gaactcacggactcc

SEQ ID NO: 1248750 - DNA, 15 bp, Homo sapiens
ggaactcacggactc

SEQ ID NO: 1248751 - DNA, 15 bp, Homo sapiens
gggaactcacggact

SEQ ID NO: 1248752 - DNA, 15 bp, Homo sapiens
tgggaactcacggac

SEQ ID NO: 1248753 - DNA, 15 bp, Homo sapiens
gtgggaactcacgga

SEQ ID NO: 1248754 - DNA, 15 bp, Homo sapiens
ggtgggaactcacgg

SEQ ID NO: 1248755 - DNA, 15 bp, Homo sapiens
aggtgggaactcacg

SEQ ID NO: 1248756 - DNA, 15 bp, Homo sapiens
gaggtgggaactcac

SEQ ID NO: 1248757 - DNA, 15 bp, Homo sapiens
ggaggtgggaactca

SEQ ID NO: 1248758 - DNA, 15 bp, Homo sapiens
aggaggtgggaactc

SEQ ID NO: 1248759 - DNA, 15 bp, Homo sapiens
aaggaggtgggaact

SEQ ID NO: 1248760 - DNA, 15 bp, Homo sapiens
caaggaggtgggaac

SEQ ID NO: 1248761 - DNA, 15 bp, Homo sapiens
tcaaggaggtgggaa

SEQ ID NO: 1248762 - DNA, 15 bp, Homo sapiens
ctcaaggaggtggga

SEQ ID NO: 1248763 - DNA, 15 bp, Homo sapiens
gctcaaggaggtggg

SEQ ID NO: 1248764 - DNA, 15 bp, Homo sapiens
ggctcaaggaggtgg

SEQ ID NO: 1248765 - DNA, 15 bp, Homo sapiens
gggctcaaggaggtg

SEQ ID NO: 1248766 - DNA, 15 bp, Homo sapiens
cgggctcaaggaggt

SEQ ID NO: 1248767 - DNA, 15 bp, Homo sapiens
tcgggctcaaggagg

SEQ ID NO: 1248768 - DNA, 15 bp, Homo sapiens
atcgggctcaaggag

SEQ ID NO: 1248769 - DNA, 15 bp, Homo sapiens
aatcgggctcaagga

SEQ ID NO: 1248770 - DNA, 15 bp, Homo sapiens
gaatcgggctcaagg

SEQ ID NO: 1248771 - DNA, 15 bp, Homo sapiens
agaatcgggctcaag

SEQ ID NO: 1248772 - DNA, 15 bp, Homo sapiens
aagaatcgggctcaa

SEQ ID NO: 1248773 - DNA, 15 bp, Homo sapiens
aaagaatcgggctca

SEQ ID NO: 1248774 - DNA, 15 bp, Homo sapiens
caaagaatcgggctc

SEQ ID NO: 1248775 - DNA, 15 bp, Homo sapiens
ccaaagaatcgggct

SEQ ID NO: 1248776 - DNA, 15 bp, Homo sapiens
accaaagaatcgggc

SEQ ID NO: 1248777 - DNA, 15 bp, Homo sapiens
caccaaagaatcggg

SEQ ID NO: 1248778 - DNA, 15 bp, Homo sapiens
acaccaaagaatcgg

SEQ ID NO: 1248779 - DNA, 15 bp, Homo sapiens
gacaccaaagaatcg

SEQ ID NO: 1248780 - DNA, 15 bp, Homo sapiens
ggacaccaaagaatc

SEQ ID NO: 1248781 - DNA, 15 bp, Homo sapiens
gggacaccaaagaat

SEQ ID NO: 1248782 - DNA, 15 bp, Homo sapiens
ggggacaccaaagaa

SEQ ID NO: 1248783 - DNA, 15 bp, Homo sapiens
cggggacaccaaaga

SEQ ID NO: 1248784 - DNA, 15 bp, Homo sapiens
gcggggacaccaaag

SEQ ID NO: 1248785 - DNA, 15 bp, Homo sapiens
ggcggggacaccaaa

SEQ ID NO: 1248786 - DNA, 15 bp, Homo sapiens
aggcggggacaccaa

SEQ ID NO: 1248787 - DNA, 15 bp, Homo sapiens
caggcggggacacca

SEQ ID NO: 1248788 - DNA, 15 bp, Homo sapiens
gcaggcggggacacc

SEQ ID NO: 1248789 - DNA, 15 bp, Homo sapiens
tgcaggcggggacac

SEQ ID NO: 1248790 - DNA, 15 bp, Homo sapiens
atgcaggcggggaca

SEQ ID NO: 1248791 - DNA, 15 bp, Homo sapiens
gatgcaggcggggac

SEQ ID NO: 1248792 - DNA, 15 bp, Homo sapiens
ggatgcaggcgggga

SEQ ID NO: 1248793 - DNA, 15 bp, Homo sapiens
aggatgcaggcgggg

SEQ ID NO: 1248794 - DNA, 15 bp, Homo sapiens
gaggatgcaggcggg

SEQ ID NO: 1248795 - DNA, 15 bp, Homo sapiens
tgaggatgcaggcgg

SEQ ID NO: 1248796 - DNA, 15 bp, Homo sapiens
ctgaggatgcaggcg

SEQ ID NO: 1248797 - DNA, 15 bp, Homo sapiens
gctgaggatgcaggc

SEQ ID NO: 1248798 - DNA, 15 bp, Homo sapiens
ggctgaggatgcagg

SEQ ID NO: 1248799 - DNA, 15 bp, Homo sapiens
aggctgaggatgcag

SEQ ID NO: 1248800 - DNA, 15 bp, Homo sapiens
gaggctgaggatgca

SEQ ID NO: 1248801 - DNA, 15 bp, Homo sapiens
ggaggctgaggatgc

SEQ ID NO: 1248802 - DNA, 15 bp, Homo sapiens
aggaggctgaggatg

SEQ ID NO: 1248803 - DNA, 15 bp, Homo sapiens
aaggaggctgaggat

SEQ ID NO: 1248804 - DNA, 15 bp, Homo sapiens
gaaggaggctgagga

SEQ ID NO: 1248805 - DNA, 15 bp, Homo sapiens
ggaaggaggctgagg

SEQ ID NO: 1248806 - DNA, 15 bp, Homo sapiens
tggaaggaggctgag

SEQ ID NO: 1248807 - DNA, 15 bp, Homo sapiens
ttggaaggaggctga

SEQ ID NO: 1248808 - DNA, 15 bp, Homo sapiens
tttggaaggaggctg

SEQ ID NO: 1248809 - DNA, 15 bp, Homo sapiens
gtttggaaggaggct

SEQ ID NO: 1248810 - DNA, 15 bp, Homo sapiens
ggtttggaaggaggc

SEQ ID NO: 1248811 - DNA, 15 bp, Homo sapiens
tggtttggaaggagg

SEQ ID NO: 1248812 - DNA, 15 bp, Homo sapiens
ctggtttggaaggag

SEQ ID NO: 1248813 - DNA, 15 bp, Homo sapiens
tctggtttggaagga

SEQ ID NO: 1248814 - DNA, 15 bp, Homo sapiens
gtctggtttggaagg

SEQ ID NO: 1248815 - DNA, 15 bp, Homo sapiens
ggtctggtttggaag

SEQ ID NO: 1248816 - DNA, 15 bp, Homo sapiens
tggtctggtttggaa

SEQ ID NO: 1248817 - DNA, 15 bp, Homo sapiens
ctggtctggtttgga

SEQ ID NO: 1248818 - DNA, 15 bp, Homo sapiens
actggtctggtttgg

SEQ ID NO: 1248819 - DNA, 15 bp, Homo sapiens
aactggtctggtttg

SEQ ID NO: 1248820 - DNA, 15 bp, Homo sapiens
gaactggtctggttt

SEQ ID NO: 1248821 - DNA, 15 bp, Homo sapiens
agaactggtctggtt

SEQ ID NO: 1248822 - DNA, 15 bp, Homo sapiens
gagaactggtctggt

SEQ ID NO: 1248823 - DNA, 15 bp, Homo sapiens
agagaactggtctgg

SEQ ID NO: 1248824 - DNA, 15 bp, Homo sapiens
tagagaactggtctg

SEQ ID NO: 1248825 - DNA, 15 bp, Homo sapiens
ctagagaactggtct

SEQ ID NO: 1248826 - DNA, 15 bp, Homo sapiens
cctagagaactggtc

SEQ ID NO: 1248827 - DNA, 15 bp, Homo sapiens
ccctagagaactggt

SEQ ID NO: 1248828 - DNA, 15 bp, Homo sapiens
cccctagagaactgg

SEQ ID NO: 1248829 - DNA, 15 bp, Homo sapiens
gcccctagagaactg

SEQ ID NO: 1248830 - DNA, 15 bp, Homo sapiens
cgcccctagagaact

SEQ ID NO: 1248831 - DNA, 15 bp, Homo sapiens
acgcccctagagaac

SEQ ID NO: 1248832 - DNA, 15 bp, Homo sapiens
gacgcccctagagaa

SEQ ID NO: 1248833 - DNA, 15 bp, Homo sapiens
cgacgcccctagaga

SEQ ID NO: 1248834 - DNA, 15 bp, Homo sapiens
tcgacgcccctagag

SEQ ID NO: 1248835 - DNA, 15 bp, Homo sapiens
gtcgacgcccctaga

SEQ ID NO: 1248836 - DNA, 15 bp, Homo sapiens
cgtcgacgcccctag

SEQ ID NO: 1248837 - DNA, 15 bp, Homo sapiens
acgtcgacgccccta

SEQ ID NO: 1248838 - DNA, 15 bp, Homo sapiens
cacgtcgacgcccct

SEQ ID NO: 1248839 - DNA, 15 bp, Homo sapiens
acacgtcgacgcccc

SEQ ID NO: 1248840 - DNA, 15 bp, Homo sapiens
cacacgtcgacgccc

SEQ ID NO: 1248841 - DNA, 15 bp, Homo sapiens
tcacacgtcgacgcc

SEQ ID NO: 1248842 - DNA, 15 bp, Homo sapiens
ttcacacgtcgacgc

SEQ ID NO: 1248843 - DNA, 15 bp, Homo sapiens
tttcacacgtcgacg

SEQ ID NO: 1248844 - DNA, 15 bp, Homo sapiens
gtttcacacgtcgac

SEQ ID NO: 1248845 - DNA, 15 bp, Homo sapiens
agtttcacacgtcga

SEQ ID NO: 1248846 - DNA, 15 bp, Homo sapiens
cagtttcacacgtcg

SEQ ID NO: 1248847 - DNA, 15 bp, Homo sapiens
tcagtttcacacgtc

SEQ ID NO: 1248848 - DNA, 15 bp, Homo sapiens
atcagtttcacacgt

SEQ ID NO: 1248849 - DNA, 15 bp, Homo sapiens
aatcagtttcacacg

SEQ ID NO: 1248850 - DNA, 15 bp, Homo sapiens
aaatcagtttcacac

SEQ ID NO: 1248851 - DNA, 15 bp, Homo sapiens
aaaatcagtttcaca

SEQ ID NO: 1248852 - DNA, 15 bp, Homo sapiens
taaaatcagtttcac

SEQ ID NO: 1248853 - DNA, 15 bp, Homo sapiens
ttaaaatcagtttca

SEQ ID NO: 1248854 - DNA, 15 bp, Homo sapiens
tttaaaatcagtttc

SEQ ID NO: 1248855 - DNA, 15 bp, Homo sapiens
ctttaaaatcagttt

SEQ ID NO: 1248856 - DNA, 15 bp, Homo sapiens
tctttaaaatcagtt

SEQ ID NO: 1248857 - DNA, 15 bp, Homo sapiens
ttctttaaaatcagt

SEQ ID NO: 1248858 - DNA, 15 bp, Homo sapiens
tttctttaaaatcag

SEQ ID NO: 1248859 - DNA, 15 bp, Homo sapiens
ttttctttaaaatca

SEQ ID NO: 1248860 - DNA, 15 bp, Homo sapiens
gttttctttaaaatc

SEQ ID NO: 1248861 - DNA, 15 bp, Homo sapiens
tgttttctttaaaat

SEQ ID NO: 1248862 - DNA, 15 bp, Homo sapiens
ctgttttctttaaaa

SEQ ID NO: 1248863 - DNA, 15 bp, Homo sapiens
cctgttttctttaaa

SEQ ID NO: 1248864 - DNA, 15 bp, Homo sapiens
gcctgttttctttaa

SEQ ID NO: 1248865 - DNA, 15 bp, Homo sapiens
tgcctgttttcttta

SEQ ID NO: 1248866 - DNA, 15 bp, Homo sapiens
ctgcctgttttcttt

SEQ ID NO: 1248867 - DNA, 15 bp, Homo sapiens
actgcctgttttctt

SEQ ID NO: 1248868 - DNA, 15 bp, Homo sapiens
cactgcctgttttct

SEQ ID NO: 1248869 - DNA, 15 bp, Homo sapiens
ccactgcctgttttc

SEQ ID NO: 1248870 - DNA, 15 bp, Homo sapiens
gccactgcctgtttt

SEQ ID NO: 1248871 - DNA, 15 bp, Homo sapiens
ggccactgcctgttt

SEQ ID NO: 1248872 - DNA, 15 bp, Homo sapiens
aggccactgcctgtt

SEQ ID NO: 1248873 - DNA, 15 bp, Homo sapiens
aaggccactgcctgt

SEQ ID NO: 1248874 - DNA, 15 bp, Homo sapiens
aaaggccactgcctg

SEQ ID NO: 1248875 - DNA, 15 bp, Homo sapiens
gaaaggccactgcct

SEQ ID NO: 1248876 - DNA, 15 bp, Homo sapiens
agaaaggccactgcc

SEQ ID NO: 1248877 - DNA, 15 bp, Homo sapiens
gagaaaggccactgc

SEQ ID NO: 1248878 - DNA, 15 bp, Homo sapiens
agagaaaggccactg

SEQ ID NO: 1248879 - DNA, 15 bp, Homo sapiens
gagagaaaggccact

SEQ ID NO: 1248880 - DNA, 15 bp, Homo sapiens
cgagagaaaggccac

SEQ ID NO: 1248881 - DNA, 15 bp, Homo sapiens
ccgagagaaaggcca

SEQ ID NO: 1248882 - DNA, 15 bp, Homo sapiens
gccgagagaaaggcc

SEQ ID NO: 1248883 - DNA, 15 bp, Homo sapiens
ggccgagagaaaggc

SEQ ID NO: 1248884 - DNA, 15 bp, Homo sapiens
gggccgagagaaagg

SEQ ID NO: 1248885 - DNA, 15 bp, Homo sapiens
ggggccgagagaaag

SEQ ID NO: 1248886 - DNA, 15 bp, Homo sapiens
tggggccgagagaaa

SEQ ID NO: 1248887 - DNA, 15 bp, Homo sapiens
gtggggccgagagaa

SEQ ID NO: 1248888 - DNA, 15 bp, Homo sapiens
cgtggggccgagaga

SEQ ID NO: 1248889 - DNA, 15 bp, Homo sapiens
acgtggggccgagag

SEQ ID NO: 1248890 - DNA, 15 bp, Homo sapiens
cacgtggggccgaga

SEQ ID NO: 1248891 - DNA, 15 bp, Homo sapiens
ccacgtggggccgag

SEQ ID NO: 1248892 - DNA, 15 bp, Homo sapiens
gccacgtggggccga

SEQ ID NO: 1248893 - DNA, 15 bp, Homo sapiens
ggccacgtggggccg

SEQ ID NO: 1248894 - DNA, 15 bp, Homo sapiens
gggccacgtggggcc

SEQ ID NO: 1248895 - DNA, 15 bp, Homo sapiens
tgggccacgtggggc

SEQ ID NO: 1248896 - DNA, 15 bp, Homo sapiens
ctgggccacgtgggg

SEQ ID NO: 1248897 - DNA, 15 bp, Homo sapiens
actgggccacgtggg

SEQ ID NO: 1248898 - DNA, 15 bp, Homo sapiens
tactgggccacgtgg

SEQ ID NO: 1248899 - DNA, 15 bp, Homo sapiens
ctactgggccacgtg

SEQ ID NO: 1248900 - DNA, 15 bp, Homo sapiens
gctactgggccacgt

SEQ ID NO: 1248901 - DNA, 15 bp, Homo sapiens
cgctactgggccacg

SEQ ID NO: 1248902 - DNA, 15 bp, Homo sapiens
gcgctactgggccac

SEQ ID NO: 1248903 - DNA, 15 bp, Homo sapiens
agcgctactgggcca

SEQ ID NO: 1248904 - DNA, 15 bp, Homo sapiens
gagcgctactgggcc

SEQ ID NO: 1248905 - DNA, 15 bp, Homo sapiens
tgagcgctactgggc

SEQ ID NO: 1248906 - DNA, 15 bp, Homo sapiens
gtgagcgctactggg

SEQ ID NO: 1248907 - DNA, 15 bp, Homo sapiens
ggtgagcgctactgg

SEQ ID NO: 1248908 - DNA, 15 bp, Homo sapiens
aggtgagcgctactg

SEQ ID NO: 1248909 - DNA, 15 bp, Homo sapiens
aaggtgagcgctact

SEQ ID NO: 1248910 - DNA, 15 bp, Homo sapiens
gaaggtgagcgctac

SEQ ID NO: 1248911 - DNA, 15 bp, Homo sapiens
ggaaggtgagcgcta

SEQ ID NO: 1248912 - DNA, 15 bp, Homo sapiens
cggaaggtgagcgct

SEQ ID NO: 1248913 - DNA, 15 bp, Homo sapiens
acggaaggtgagcgc

SEQ ID NO: 1248914 - DNA, 15 bp, Homo sapiens
gacggaaggtgagcg

SEQ ID NO: 1248915 - DNA, 15 bp, Homo sapiens
ggacggaaggtgagc

SEQ ID NO: 1248916 - DNA, 15 bp, Homo sapiens
gggacggaaggtgag

SEQ ID NO: 1248917 - DNA, 15 bp, Homo sapiens
agggacggaaggtga

SEQ ID NO: 1248918 - DNA, 15 bp, Homo sapiens
aagggacggaaggtg

SEQ ID NO: 1248919 - DNA, 15 bp, Homo sapiens
gaagggacggaaggt

SEQ ID NO: 1248920 - DNA, 15 bp, Homo sapiens
agaagggacggaagg

SEQ ID NO: 1248921 - DNA, 15 bp, Homo sapiens
aagaagggacggaag

SEQ ID NO: 1248922 - DNA, 15 bp, Homo sapiens
gaagaagggacggaa

SEQ ID NO: 1248923 - DNA, 15 bp, Homo sapiens
ggaagaagggacgga

SEQ ID NO: 1248924 - DNA, 15 bp, Homo sapiens
cggaagaagggacgg

SEQ ID NO: 1248925 - DNA, 15 bp, Homo sapiens
gcggaagaagggacg

SEQ ID NO: 1248926 - DNA, 15 bp, Homo sapiens
cgcggaagaagggac

SEQ ID NO: 1248927 - DNA, 15 bp, Homo sapiens
gcgcggaagaaggga

SEQ ID NO: 1248928 - DNA, 15 bp, Homo sapiens
agcgcggaagaaggg

SEQ ID NO: 1248929 - DNA, 15 bp, Homo sapiens
gagcgcggaagaagg

SEQ ID NO: 1248930 - DNA, 15 bp, Homo sapiens
tgagcgcggaagaag

SEQ ID NO: 1248931 - DNA, 15 bp, Homo sapiens
ctgagcgcggaagaa

SEQ ID NO: 1248932 - DNA, 15 bp, Homo sapiens
actgagcgcggaaga

SEQ ID NO: 1248933 - DNA, 15 bp, Homo sapiens
tactgagcgcggaag

SEQ ID NO: 1248934 - DNA, 15 bp, Homo sapiens
ttactgagcgcggaa

SEQ ID NO: 1248935 - DNA, 15 bp, Homo sapiens
gttactgagcgcgga

SEQ ID NO: 1248936 - DNA, 15 bp, Homo sapiens
ggttactgagcgcgg

SEQ ID NO: 1248937 - DNA, 15 bp, Homo sapiens
tggttactgagcgcg

SEQ ID NO: 1248938 - DNA, 15 bp, Homo sapiens
ttggttactgagcgc

SEQ ID NO: 1248939 - DNA, 15 bp, Homo sapiens
attggttactgagcg

SEQ ID NO: 1248940 - DNA, 15 bp, Homo sapiens
aattggttactgagc

SEQ ID NO: 1248941 - DNA, 15 bp, Homo sapiens
aaattggttactgag

SEQ ID NO: 1248942 - DNA, 15 bp, Homo sapiens
taaattggttactga

SEQ ID NO: 1248943 - DNA, 15 bp, Homo sapiens
ctaaattggttactg

SEQ ID NO: 1248944 - DNA, 15 bp, Homo sapiens
cctaaattggttact

SEQ ID NO: 1248945 - DNA, 15 bp, Homo sapiens
gcctaaattggttac

SEQ ID NO: 1248946 - DNA, 15 bp, Homo sapiens
ggcctaaattggtta

SEQ ID NO: 1248947 - DNA, 15 bp, Homo sapiens
cggcctaaattggtt

SEQ ID NO: 1248948 - DNA, 15 bp, Homo sapiens
gcggcctaaattggt

SEQ ID NO: 1248949 - DNA, 15 bp, Homo sapiens
agcggcctaaattgg

SEQ ID NO: 1248950 - DNA, 15 bp, Homo sapiens
gagcggcctaaattg

SEQ ID NO: 1248951 - DNA, 15 bp, Homo sapiens
ggagcggcctaaatt

SEQ ID NO: 1248952 - DNA, 15 bp, Homo sapiens
aggagcggcctaaat

SEQ ID NO: 1248953 - DNA, 15 bp, Homo sapiens
caggagcggcctaaa

SEQ ID NO: 1248954 - DNA, 15 bp, Homo sapiens
gcaggagcggcctaa

SEQ ID NO: 1248955 - DNA, 15 bp, Homo sapiens
tgcaggagcggccta

SEQ ID NO: 1248956 - DNA, 15 bp, Homo sapiens
ctgcaggagcggcct

SEQ ID NO: 1248957 - DNA, 15 bp, Homo sapiens
tctgcaggagcggcc

SEQ ID NO: 1248958 - DNA, 15 bp, Homo sapiens
ttctgcaggagcggc

SEQ ID NO: 1248959 - DNA, 15 bp, Homo sapiens
gttctgcaggagcgg

SEQ ID NO: 1248960 - DNA, 15 bp, Homo sapiens
agttctgcaggagcg

SEQ ID NO: 1248961 - DNA, 15 bp, Homo sapiens
gagttctgcaggagc

SEQ ID NO: 1248962 - DNA, 15 bp, Homo sapiens
cgagttctgcaggag

SEQ ID NO: 1248963 - DNA, 15 bp, Homo sapiens
ccgagttctgcagga

SEQ ID NO: 1248964 - DNA, 15 bp, Homo sapiens
cccgagttctgcagg

SEQ ID NO: 1248965 - DNA, 15 bp, Homo sapiens
gcccgagttctgcag

SEQ ID NO: 1248966 - DNA, 15 bp, Homo sapiens
agcccgagttctgca

SEQ ID NO: 1248967 - DNA, 15 bp, Homo sapiens
gagcccgagttctgc

SEQ ID NO: 1248968 - DNA, 15 bp, Homo sapiens
ggagcccgagttctg

SEQ ID NO: 1248969 - DNA, 15 bp, Homo sapiens
aggagcccgagttct

SEQ ID NO: 1248970 - DNA, 15 bp, Homo sapiens
caggagcccgagttc

SEQ ID NO: 1248971 - DNA, 15 bp, Homo sapiens
gcaggagcccgagtt

SEQ ID NO: 1248972 - DNA, 15 bp, Homo sapiens
ggcaggagcccgagt

SEQ ID NO: 1248973 - DNA, 15 bp, Homo sapiens
gggcaggagcccgag

SEQ ID NO: 1248974 - DNA, 15 bp, Homo sapiens
tgggcaggagcccga

SEQ ID NO: 1248975 - DNA, 15 bp, Homo sapiens
gtgggcaggagcccg

SEQ ID NO: 1248976 - DNA, 15 bp, Homo sapiens
ggtgggcaggagccc

SEQ ID NO: 1248977 - DNA, 15 bp, Homo sapiens
cggtgggcaggagcc

SEQ ID NO: 1248978 - DNA, 15 bp, Homo sapiens
ccggtgggcaggagc

SEQ ID NO: 1248979 - DNA, 15 bp, Homo sapiens
gccggtgggcaggag

SEQ ID NO: 1248980 - DNA, 15 bp, Homo sapiens
ggccggtgggcagga

SEQ ID NO: 1248981 - DNA, 15 bp, Homo sapiens
gggccggtgggcagg

SEQ ID NO: 1248982 - DNA, 15 bp, Homo sapiens
tgggccggtgggcag

SEQ ID NO: 1248983 - DNA, 15 bp, Homo sapiens
gtgggccggtgggca

SEQ ID NO: 1248984 - DNA, 15 bp, Homo sapiens
tgtgggccggtgggc

SEQ ID NO: 1248985 - DNA, 15 bp, Homo sapiens
ctgtgggccggtggg

SEQ ID NO: 1248986 - DNA, 15 bp, Homo sapiens
gctgtgggccggtgg

SEQ ID NO: 1248987 - DNA, 15 bp, Homo sapiens
cgctgtgggccggtg

SEQ ID NO: 1248988 - DNA, 15 bp, Homo sapiens
acgctgtgggccggt

SEQ ID NO: 1248989 - DNA, 15 bp, Homo sapiens
gacgctgtgggccgg

SEQ ID NO: 1248990 - DNA, 15 bp, Homo sapiens
ggacgctgtgggccg

SEQ ID NO: 1248991 - DNA, 15 bp, Homo sapiens
tggacgctgtgggcc

SEQ ID NO: 1248992 - DNA, 15 bp, Homo sapiens
gtggacgctgtgggc

SEQ ID NO: 1248993 - DNA, 15 bp, Homo sapiens
ggtggacgctgtggg

SEQ ID NO: 1248994 - DNA, 15 bp, Homo sapiens
aggtggacgctgtgg

SEQ ID NO: 1248995 - DNA, 15 bp, Homo sapiens
caggtggacgctgtg

SEQ ID NO: 1248996 - DNA, 15 bp, Homo sapiens
tcaggtggacgctgt

SEQ ID NO: 1248997 - DNA, 15 bp, Homo sapiens
ctcaggtggacgctg

SEQ ID NO: 1248998 - DNA, 15 bp, Homo sapiens
cctcaggtggacgct

SEQ ID NO: 1248999 - DNA, 15 bp, Homo sapiens
gcctcaggtggacgc

SEQ ID NO: 1249000 - DNA, 15 bp, Homo sapiens
ggcctcaggtggacg

SEQ ID NO: 1249001 - DNA, 15 bp, Homo sapiens
aggcctcaggtggac

SEQ ID NO: 1249002 - DNA, 15 bp, Homo sapiens
gaggcctcaggtgga

SEQ ID NO: 1249003 - DNA, 15 bp, Homo sapiens
cgaggcctcaggtgg

SEQ ID NO: 1249004 - DNA, 15 bp, Homo sapiens
acgaggcctcaggtg

SEQ ID NO: 1249005 - DNA, 15 bp, Homo sapiens
gacgaggcctcaggt

SEQ ID NO: 1249006 - DNA, 15 bp, Homo sapiens
ggacgaggcctcagg

SEQ ID NO: 1249007 - DNA, 15 bp, Homo sapiens
aggacgaggcctcag

SEQ ID NO: 1249008 - DNA, 15 bp, Homo sapiens
gaggacgaggcctca

SEQ ID NO: 1249009 - DNA, 15 bp, Homo sapiens
ggaggacgaggcctc

SEQ ID NO: 1249010 - DNA, 15 bp, Homo sapiens
gggaggacgaggcct

SEQ ID NO: 1249011 - DNA, 15 bp, Homo sapiens
tgggaggacgaggcc

SEQ ID NO: 1249012 - DNA, 15 bp, Homo sapiens
ctgggaggacgaggc

SEQ ID NO: 1249013 - DNA, 15 bp, Homo sapiens
gctgggaggacgagg

SEQ ID NO: 1249014 - DNA, 15 bp, Homo sapiens
tgctgggaggacgag

SEQ ID NO: 1249015 - DNA, 15 bp, Homo sapiens
ttgctgggaggacga

SEQ ID NO: 1249016 - DNA, 15 bp, Homo sapiens
tttgctgggaggacg

SEQ ID NO: 1249017 - DNA, 15 bp, Homo sapiens
ctttgctgggaggac

SEQ ID NO: 1249018 - DNA, 15 bp, Homo sapiens
cctttgctgggagga

SEQ ID NO: 1249019 - DNA, 15 bp, Homo sapiens
acctttgctgggagg

SEQ ID NO: 1249020 - DNA, 15 bp, Homo sapiens
gacctttgctgggag

SEQ ID NO: 1249021 - DNA, 15 bp, Homo sapiens
cgacctttgctggga

SEQ ID NO: 1249022 - DNA, 15 bp, Homo sapiens
acgacctttgctggg

SEQ ID NO: 1249023 - DNA, 15 bp, Homo sapiens
gacgacctttgctgg

SEQ ID NO: 1249024 - DNA, 15 bp, Homo sapiens
ggacgacctttgctg

SEQ ID NO: 1249025 - DNA, 15 bp, Homo sapiens
gggacgacctttgct

SEQ ID NO: 1249026 - DNA, 15 bp, Homo sapiens
agggacgacctttgc

SEQ ID NO: 1249027 - DNA, 15 bp, Homo sapiens
gagggacgacctttg

SEQ ID NO: 1249028 - DNA, 15 bp, Homo sapiens
ggagggacgaccttt

SEQ ID NO: 1249029 - DNA, 15 bp, Homo sapiens
cggagggacgacctt

SEQ ID NO: 1249030 - DNA, 15 bp, Homo sapiens
ccggagggacgacct

SEQ ID NO: 1249031 - DNA, 15 bp, Homo sapiens
tccggagggacgacc

SEQ ID NO: 1249032 - DNA, 15 bp, Homo sapiens
ttccggagggacgac

SEQ ID NO: 1249033 - DNA, 15 bp, Homo sapiens
gttccggagggacga

SEQ ID NO: 1249034 - DNA, 15 bp, Homo sapiens
cgttccggagggacg

SEQ ID NO: 1249035 - DNA, 15 bp, Homo sapiens
gcgttccggagggac

SEQ ID NO: 1249036 - DNA, 15 bp, Homo sapiens
cgcgttccggaggga

SEQ ID NO: 1249037 - DNA, 15 bp, Homo sapiens
gcgcgttccggaggg

SEQ ID NO: 1249038 - DNA, 15 bp, Homo sapiens
ggcgcgttccggagg

SEQ ID NO: 1249039 - DNA, 15 bp, Homo sapiens
aggcgcgttccggag

SEQ ID NO: 1249040 - DNA, 15 bp, Homo sapiens
gaggcgcgttccgga

SEQ ID NO: 1249041 - DNA, 15 bp, Homo sapiens
ggaggcgcgttccgg

SEQ ID NO: 1249042 - DNA, 15 bp, Homo sapiens
aggaggcgcgttccg

SEQ ID NO: 1249043 - DNA, 15 bp, Homo sapiens
caggaggcgcgttcc

SEQ ID NO: 1249044 - DNA, 15 bp, Homo sapiens
gcaggaggcgcgttc

SEQ ID NO: 1249045 - DNA, 15 bp, Homo sapiens
cgcaggaggcgcgtt

SEQ ID NO: 1249046 - DNA, 15 bp, Homo sapiens
ccgcaggaggcgcgt

SEQ ID NO: 1249047 - DNA, 15 bp, Homo sapiens
gccgcaggaggcgcg

SEQ ID NO: 1249048 - DNA, 15 bp, Homo sapiens
ggccgcaggaggcgc

SEQ ID NO: 1249049 - DNA, 15 bp, Homo sapiens
aggccgcaggaggcg

SEQ ID NO: 1249050 - DNA, 15 bp, Homo sapiens
gaggccgcaggaggc

SEQ ID NO: 1249051 - DNA, 15 bp, Homo sapiens
agaggccgcaggagg

SEQ ID NO: 1249052 - DNA, 15 bp, Homo sapiens
gagaggccgcaggag

SEQ ID NO: 1249053 - DNA, 15 bp, Homo sapiens
ggagaggccgcagga

SEQ ID NO: 1249054 - DNA, 15 bp, Homo sapiens
tggagaggccgcagg

SEQ ID NO: 1249055 - DNA, 15 bp, Homo sapiens
ctggagaggccgcag

SEQ ID NO: 1249056 - DNA, 15 bp, Homo sapiens
tctggagaggccgca

SEQ ID NO: 1249057 - DNA, 15 bp, Homo sapiens
ctctggagaggccgc

SEQ ID NO: 1249058 - DNA, 15 bp, Homo sapiens
gctctggagaggccg

SEQ ID NO: 1249059 - DNA, 15 bp, Homo sapiens
ggctctggagaggcc

SEQ ID NO: 1249060 - DNA, 15 bp, Homo sapiens
gggctctggagaggc

SEQ ID NO: 1249061 - DNA, 15 bp, Homo sapiens
ggggctctggagagg

SEQ ID NO: 1249062 - DNA, 15 bp, Homo sapiens
aggggctctggagag

SEQ ID NO: 1249063 - DNA, 15 bp, Homo sapiens
gaggggctctggaga

SEQ ID NO: 1249064 - DNA, 15 bp, Homo sapiens
ggaggggctctggag

SEQ ID NO: 1249065 - DNA, 15 bp, Homo sapiens
gggaggggctctgga

SEQ ID NO: 1249066 - DNA, 15 bp, Homo sapiens
cgggaggggctctgg

SEQ ID NO: 1249067 - DNA, 15 bp, Homo sapiens
gcgggaggggctctg

SEQ ID NO: 1249068 - DNA, 15 bp, Homo sapiens
cgcgggaggggctct

SEQ ID NO: 1249069 - DNA, 15 bp, Homo sapiens
gcgcgggaggggctc

SEQ ID NO: 1249070 - DNA, 15 bp, Homo sapiens
cgcgcgggaggggct

SEQ ID NO: 1249071 - DNA, 15 bp, Homo sapiens
acgcgcgggaggggc

SEQ ID NO: 1249072 - DNA, 15 bp, Homo sapiens
gacgcgcgggagggg

SEQ ID NO: 1249073 - DNA, 15 bp, Homo sapiens
ggacgcgcgggaggg

SEQ ID NO: 1249074 - DNA, 15 bp, Homo sapiens
aggacgcgcgggagg

SEQ ID NO: 1249075 - DNA, 15 bp, Homo sapiens
gaggacgcgcgggag

SEQ ID NO: 1249076 - DNA, 15 bp, Homo sapiens
agaggacgcgcggga

SEQ ID NO: 1249077 - DNA, 15 bp, Homo sapiens
gagaggacgcgcggg

SEQ ID NO: 1249078 - DNA, 15 bp, Homo sapiens
tgagaggacgcgcgg

SEQ ID NO: 1249079 - DNA, 15 bp, Homo sapiens
ctgagaggacgcgcg

SEQ ID NO: 1249080 - DNA, 15 bp, Homo sapiens
gctgagaggacgcgc

SEQ ID NO: 1249081 - DNA, 15 bp, Homo sapiens
ggctgagaggacgcg

SEQ ID NO: 1249082 - DNA, 15 bp, Homo sapiens
gggctgagaggacgc

SEQ ID NO: 1249083 - DNA, 15 bp, Homo sapiens
ggggctgagaggacg

SEQ ID NO: 1249084 - DNA, 15 bp, Homo sapiens
cggggctgagaggac

SEQ ID NO: 1249085 - DNA, 15 bp, Homo sapiens
gcggggctgagagga

SEQ ID NO: 1249086 - DNA, 15 bp, Homo sapiens
agcggggctgagagg

SEQ ID NO: 1249087 - DNA, 15 bp, Homo sapiens
gagcggggctgagag

SEQ ID NO: 1249088 - DNA, 15 bp, Homo sapiens
cgagcggggctgaga

SEQ ID NO: 1249089 - DNA, 15 bp, Homo sapiens
gcgagcggggctgag

SEQ ID NO: 1249090 - DNA, 15 bp, Homo sapiens
ggcgagcggggctga

SEQ ID NO: 1249091 - DNA, 15 bp, Homo sapiens
aggcgagcggggctg

SEQ ID NO: 1249092 - DNA, 15 bp, Homo sapiens
gaggcgagcggggct

SEQ ID NO: 1249093 - DNA, 15 bp, Homo sapiens
ggaggcgagcggggc

SEQ ID NO: 1249094 - DNA, 15 bp, Homo sapiens
aggaggcgagcgggg

SEQ ID NO: 1249095 - DNA, 15 bp, Homo sapiens
gaggaggcgagcggg

SEQ ID NO: 1249096 - DNA, 15 bp, Homo sapiens
ggaggaggcgagcgg

SEQ ID NO: 1249097 - DNA, 15 bp, Homo sapiens
gggaggaggcgagcg

SEQ ID NO: 1249098 - DNA, 15 bp, Homo sapiens
cgggaggaggcgagc

SEQ ID NO: 1249099 - DNA, 15 bp, Homo sapiens
ccgggaggaggcgag

SEQ ID NO: 1249100 - DNA, 15 bp, Homo sapiens
cccgggaggaggcga

SEQ ID NO: 1249101 - DNA, 15 bp, Homo sapiens
ccccgggaggaggcg

SEQ ID NO: 1249102 - DNA, 15 bp, Homo sapiens
gccccgggaggaggc

SEQ ID NO: 1249103 - DNA, 15 bp, Homo sapiens
ggccccgggaggagg

SEQ ID NO: 1249104 - DNA, 15 bp, Homo sapiens
aggccccgggaggag

SEQ ID NO: 1249105 - DNA, 15 bp, Homo sapiens
gaggccccgggagga

SEQ ID NO: 1249106 - DNA, 15 bp, Homo sapiens
ggaggccccgggagg

SEQ ID NO: 1249107 - DNA, 15 bp, Homo sapiens
gggaggccccgggag

SEQ ID NO: 1249108 - DNA, 15 bp, Homo sapiens
agggaggccccggga

SEQ ID NO: 1249109 - DNA, 15 bp, Homo sapiens
gagggaggccccggg

SEQ ID NO: 1249110 - DNA, 15 bp, Homo sapiens
agagggaggccccgg

SEQ ID NO: 1249111 - DNA, 15 bp, Homo sapiens
gagagggaggccccg

SEQ ID NO: 1249112 - DNA, 15 bp, Homo sapiens
ggagagggaggcccc

SEQ ID NO: 1249113 - DNA, 15 bp, Homo sapiens
gggagagggaggccc

SEQ ID NO: 1249114 - DNA, 15 bp, Homo sapiens
cgggagagggaggcc

SEQ ID NO: 1249115 - DNA, 15 bp, Homo sapiens
gcgggagagggaggc

SEQ ID NO: 1249116 - DNA, 15 bp, Homo sapiens
ggcgggagagggagg

SEQ ID NO: 1249117 - DNA, 15 bp, Homo sapiens
aggcgggagagggag

SEQ ID NO: 1249118 - DNA, 15 bp, Homo sapiens
caggcgggagaggga

SEQ ID NO: 1249119 - DNA, 15 bp, Homo sapiens
gcaggcgggagaggg

SEQ ID NO: 1249120 - DNA, 15 bp, Homo sapiens
ggcaggcgggagagg

SEQ ID NO: 1249121 - DNA, 15 bp, Homo sapiens
gggcaggcgggagag

SEQ ID NO: 1249122 - DNA, 15 bp, Homo sapiens
ggggcaggcgggaga

SEQ ID NO: 1249123 - DNA, 15 bp, Homo sapiens
gggggcaggcgggag

SEQ ID NO: 1249124 - DNA, 15 bp, Homo sapiens
tgggggcaggcggga

SEQ ID NO: 1249125 - DNA, 15 bp, Homo sapiens
ctgggggcaggcggg

SEQ ID NO: 1249126 - DNA, 15 bp, Homo sapiens
cctgggggcaggcgg

SEQ ID NO: 1249127 - DNA, 15 bp, Homo sapiens
gcctgggggcaggcg

SEQ ID NO: 1249128 - DNA, 15 bp, Homo sapiens
ggcctgggggcaggc

SEQ ID NO: 1249129 - DNA, 15 bp, Homo sapiens
gggcctgggggcagg

SEQ ID NO: 1249130 - DNA, 15 bp, Homo sapiens
cgggcctgggggcag

SEQ ID NO: 1249131 - DNA, 15 bp, Homo sapiens
acgggcctgggggca

SEQ ID NO: 1249132 - DNA, 15 bp, Homo sapiens
gacgggcctgggggc

SEQ ID NO: 1249133 - DNA, 15 bp, Homo sapiens
agacgggcctggggg

SEQ ID NO: 1249134 - DNA, 15 bp, Homo sapiens
gagacgggcctgggg

SEQ ID NO: 1249135 - DNA, 15 bp, Homo sapiens
ggagacgggcctggg

SEQ ID NO: 1249136 - DNA, 15 bp, Homo sapiens
gggagacgggcctgg

SEQ ID NO: 1249137 - DNA, 15 bp, Homo sapiens
ggggagacgggcctg

SEQ ID NO: 1249138 - DNA, 15 bp, Homo sapiens
aggggagacgggcct

SEQ ID NO: 1249139 - DNA, 15 bp, Homo sapiens
gaggggagacgggcc

SEQ ID NO: 1249140 - DNA, 15 bp, Homo sapiens
cgaggggagacgggc

SEQ ID NO: 1249141 - DNA, 15 bp, Homo sapiens
gcgaggggagacggg

SEQ ID NO: 1249142 - DNA, 15 bp, Homo sapiens
cgcgaggggagacgg

SEQ ID NO: 1249143 - DNA, 15 bp, Homo sapiens
ccgcgaggggagacg

SEQ ID NO: 1249144 - DNA, 15 bp, Homo sapiens
cccgcgaggggagac

SEQ ID NO: 1249145 - DNA, 15 bp, Homo sapiens
gcccgcgaggggaga

SEQ ID NO: 1249146 - DNA, 15 bp, Homo sapiens
agcccgcgaggggag

SEQ ID NO: 1249147 - DNA, 15 bp, Homo sapiens
cagcccgcgagggga

SEQ ID NO: 1249148 - DNA, 15 bp, Homo sapiens
tcagcccgcgagggg

SEQ ID NO: 1249149 - DNA, 15 bp, Homo sapiens
ctcagcccgcgaggg

SEQ ID NO: 1249150 - DNA, 15 bp, Homo sapiens
cctcagcccgcgagg

SEQ ID NO: 1249151 - DNA, 15 bp, Homo sapiens
gcctcagcccgcgag

SEQ ID NO: 1249152 - DNA, 15 bp, Homo sapiens
tgcctcagcccgcga

SEQ ID NO: 1249153 - DNA, 15 bp, Homo sapiens
ctgcctcagcccgcg

SEQ ID NO: 1249154 - DNA, 15 bp, Homo sapiens
cctgcctcagcccgc

SEQ ID NO: 1249155 - DNA, 15 bp, Homo sapiens
acctgcctcagcccg

SEQ ID NO: 1249156 - DNA, 15 bp, Homo sapiens
aacctgcctcagccc

SEQ ID NO: 1249157 - DNA, 15 bp, Homo sapiens
gaacctgcctcagcc

SEQ ID NO: 1249158 - DNA, 15 bp, Homo sapiens
cgaacctgcctcagc

SEQ ID NO: 1249159 - DNA, 15 bp, Homo sapiens
ccgaacctgcctcag

SEQ ID NO: 1249160 - DNA, 15 bp, Homo sapiens
cccgaacctgcctca

SEQ ID NO: 1249161 - DNA, 15 bp, Homo sapiens
gcccgaacctgcctc

SEQ ID NO: 1249162 - DNA, 15 bp, Homo sapiens
tgcccgaacctgcct

SEQ ID NO: 1249163 - DNA, 15 bp, Homo sapiens
ctgcccgaacctgcc

SEQ ID NO: 1249164 - DNA, 15 bp, Homo sapiens
gctgcccgaacctgc

SEQ ID NO: 1249165 - DNA, 15 bp, Homo sapiens
tgctgcccgaacctg

SEQ ID NO: 1249166 - DNA, 15 bp, Homo sapiens
gtgctgcccgaacct

SEQ ID NO: 1249167 - DNA, 15 bp, Homo sapiens
cgtgctgcccgaacc

SEQ ID NO: 1249168 - DNA, 15 bp, Homo sapiens
ccgtgctgcccgaac

SEQ ID NO: 1249169 - DNA, 15 bp, Homo sapiens
gccgtgctgcccgaa

SEQ ID NO: 1249170 - DNA, 15 bp, Homo sapiens
ggccgtgctgcccga

SEQ ID NO: 1249171 - DNA, 15 bp, Homo sapiens
cggccgtgctgcccg

SEQ ID NO: 1249172 - DNA, 15 bp, Homo sapiens
gcggccgtgctgccc

SEQ ID NO: 1249173 - DNA, 15 bp, Homo sapiens
ggcggccgtgctgcc

SEQ ID NO: 1249174 - DNA, 15 bp, Homo sapiens
gggcggccgtgctgc

SEQ ID NO: 1249175 - DNA, 15 bp, Homo sapiens
ggggcggccgtgctg

SEQ ID NO: 1249176 - DNA, 15 bp, Homo sapiens
cggggcggccgtgct

SEQ ID NO: 1249177 - DNA, 15 bp, Homo sapiens
ccggggcggccgtgc

SEQ ID NO: 1249178 - DNA, 15 bp, Homo sapiens
cccggggcggccgtg

SEQ ID NO: 1249179 - DNA, 15 bp, Homo sapiens
ccccggggcggccgt

SEQ ID NO: 1249180 - DNA, 15 bp, Homo sapiens
gccccggggcggccg

SEQ ID NO: 1249181 - DNA, 15 bp, Homo sapiens
cgccccggggcggcc

SEQ ID NO: 1249182 - DNA, 15 bp, Homo sapiens
ccgccccggggcggc

SEQ ID NO: 1249183 - DNA, 15 bp, Homo sapiens
cccgccccggggcgg

SEQ ID NO: 1249184 - DNA, 15 bp, Homo sapiens
ccccgccccggggcg

SEQ ID NO: 1249185 - DNA, 15 bp, Homo sapiens
cccccgccccggggc

SEQ ID NO: 1249186 - DNA, 15 bp, Homo sapiens
acccccgccccgggg

SEQ ID NO: 1249187 - DNA, 15 bp, Homo sapiens
gacccccgccccggg

SEQ ID NO: 1249188 - DNA, 15 bp, Homo sapiens
tgacccccgccccgg

SEQ ID NO: 1249189 - DNA, 15 bp, Homo sapiens
gtgacccccgccccg

SEQ ID NO: 1249190 - DNA, 15 bp, Homo sapiens
agtgacccccgcccc

SEQ ID NO: 1249191 - DNA, 15 bp, Homo sapiens
gagtgacccccgccc

SEQ ID NO: 1249192 - DNA, 15 bp, Homo sapiens
agagtgacccccgcc

SEQ ID NO: 1249193 - DNA, 15 bp, Homo sapiens
gagagtgacccccgc

SEQ ID NO: 1249194 - DNA, 15 bp, Homo sapiens
ggagagtgacccccg

SEQ ID NO: 1249195 - DNA, 15 bp, Homo sapiens
tggagagtgaccccc

SEQ ID NO: 1249196 - DNA, 15 bp, Homo sapiens
gtggagagtgacccc

SEQ ID NO: 1249197 - DNA, 15 bp, Homo sapiens
ggtggagagtgaccc

SEQ ID NO: 1249198 - DNA, 15 bp, Homo sapiens
tggtggagagtgacc

SEQ ID NO: 1249199 - DNA, 15 bp, Homo sapiens
gtggtggagagtgac

SEQ ID NO: 1249200 - DNA, 15 bp, Homo sapiens
ggtggtggagagtga

SEQ ID NO: 1249201 - DNA, 15 bp, Homo sapiens
cggtggtggagagtg

SEQ ID NO: 1249202 - DNA, 15 bp, Homo sapiens
gcggtggtggagagt

SEQ ID NO: 1249203 - DNA, 15 bp, Homo sapiens
cgcggtggtggagag

SEQ ID NO: 1249204 - DNA, 15 bp, Homo sapiens
acgcggtggtggaga

SEQ ID NO: 1249205 - DNA, 15 bp, Homo sapiens
cacgcggtggtggag

SEQ ID NO: 1249206 - DNA, 15 bp, Homo sapiens
ccacgcggtggtgga

SEQ ID NO: 1249207 - DNA, 15 bp, Homo sapiens
accacgcggtggtgg

SEQ ID NO: 1249208 - DNA, 15 bp, Homo sapiens
caccacgcggtggtg

SEQ ID NO: 1249209 - DNA, 15 bp, Homo sapiens
gcaccacgcggtggt

SEQ ID NO: 1249210 - DNA, 15 bp, Homo sapiens
ggcaccacgcggtgg

SEQ ID NO: 1249211 - DNA, 15 bp, Homo sapiens
gggcaccacgcggtg

SEQ ID NO: 1249212 - DNA, 15 bp, Homo sapiens
tgggcaccacgcggt

SEQ ID NO: 1249213 - DNA, 15 bp, Homo sapiens
gtgggcaccacgcgg

SEQ ID NO: 1249214 - DNA, 15 bp, Homo sapiens
tgtgggcaccacgcg

SEQ ID NO: 1249215 - DNA, 15 bp, Homo sapiens
ctgtgggcaccacgc

SEQ ID NO: 1249216 - DNA, 15 bp, Homo sapiens
gctgtgggcaccacg

SEQ ID NO: 1249217 - DNA, 15 bp, Homo sapiens
agctgtgggcaccac

SEQ ID NO: 1249218 - DNA, 15 bp, Homo sapiens
gagctgtgggcacca

SEQ ID NO: 1249219 - DNA, 15 bp, Homo sapiens
tgagctgtgggcacc

SEQ ID NO: 1249220 - DNA, 15 bp, Homo sapiens
gtgagctgtgggcac

SEQ ID NO: 1249221 - DNA, 15 bp, Homo sapiens
cgtgagctgtgggca

SEQ ID NO: 1249222 - DNA, 15 bp, Homo sapiens
ccgtgagctgtgggc

SEQ ID NO: 1249223 - DNA, 15 bp, Homo sapiens
gccgtgagctgtggg

SEQ ID NO: 1249224 - DNA, 15 bp, Homo sapiens
cgccgtgagctgtgg

SEQ ID NO: 1249225 - DNA, 15 bp, Homo sapiens
gcgccgtgagctgtg

SEQ ID NO: 1249226 - DNA, 15 bp, Homo sapiens
agcgccgtgagctgt

SEQ ID NO: 1249227 - DNA, 15 bp, Homo sapiens
gagcgccgtgagctg

SEQ ID NO: 1249228 - DNA, 15 bp, Homo sapiens
ggagcgccgtgagct

SEQ ID NO: 1249229 - DNA, 15 bp, Homo sapiens
gggagcgccgtgagc

SEQ ID NO: 1249230 - DNA, 15 bp, Homo sapiens
cgggagcgccgtgag

SEQ ID NO: 1249231 - DNA, 15 bp, Homo sapiens
ccgggagcgccgtga

SEQ ID NO: 1249232 - DNA, 15 bp, Homo sapiens
cccgggagcgccgtg

SEQ ID NO: 1249233 - DNA, 15 bp, Homo sapiens
acccgggagcgccgt

SEQ ID NO: 1249234 - DNA, 15 bp, Homo sapiens
cacccgggagcgccg

SEQ ID NO: 1249235 - DNA, 15 bp, Homo sapiens
tcacccgggagcgcc

SEQ ID NO: 1249236 - DNA, 15 bp, Homo sapiens
gtcacccgggagcgc

SEQ ID NO: 1249237 - DNA, 15 bp, Homo sapiens
cgtcacccgggagcg

SEQ ID NO: 1249238 - DNA, 15 bp, Homo sapiens
ccgtcacccgggagc

SEQ ID NO: 1249239 - DNA, 15 bp, Homo sapiens
accgtcacccgggag

SEQ ID NO: 1249240 - DNA, 15 bp, Homo sapiens
gaccgtcacccggga

SEQ ID NO: 1249241 - DNA, 15 bp, Homo sapiens
ggaccgtcacccggg

SEQ ID NO: 1249242 - DNA, 15 bp, Homo sapiens
gggaccgtcacccgg

SEQ ID NO: 1249243 - DNA, 15 bp, Homo sapiens
ggggaccgtcacccg

SEQ ID NO: 1249244 - DNA, 15 bp, Homo sapiens
aggggaccgtcaccc

SEQ ID NO: 1249245 - DNA, 15 bp, Homo sapiens
gaggggaccgtcacc

SEQ ID NO: 1249246 - DNA, 15 bp, Homo sapiens
cgaggggaccgtcac

SEQ ID NO: 1249247 - DNA, 15 bp, Homo sapiens
ccgaggggaccgtca

SEQ ID NO: 1249248 - DNA, 15 bp, Homo sapiens
gccgaggggaccgtc

SEQ ID NO: 1249249 - DNA, 15 bp, Homo sapiens
agccgaggggaccgt

SEQ ID NO: 1249250 - DNA, 15 bp, Homo sapiens
cagccgaggggaccg

SEQ ID NO: 1249251 - DNA, 15 bp, Homo sapiens
acagccgaggggacc

SEQ ID NO: 1249252 - DNA, 15 bp, Homo sapiens
tacagccgaggggac

SEQ ID NO: 1249253 - DNA, 15 bp, Homo sapiens
ctacagccgagggga

SEQ ID NO: 1249254 - DNA, 15 bp, Homo sapiens
cctacagccgagggg

SEQ ID NO: 1249255 - DNA, 15 bp, Homo sapiens
ccctacagccgaggg

SEQ ID NO: 1249256 - DNA, 15 bp, Homo sapiens
gccctacagccgagg

SEQ ID NO: 1249257 - DNA, 15 bp, Homo sapiens
cgccctacagccgag

SEQ ID NO: 1249258 - DNA, 15 bp, Homo sapiens
acgccctacagccga

SEQ ID NO: 1249259 - DNA, 15 bp, Homo sapiens
gacgccctacagccg

SEQ ID NO: 1249260 - DNA, 15 bp, Homo sapiens
ggacgccctacagcc

SEQ ID NO: 1249261 - DNA, 15 bp, Homo sapiens
aggacgccctacagc

SEQ ID NO: 1249262 - DNA, 15 bp, Homo sapiens
caggacgccctacag

SEQ ID NO: 1249263 - DNA, 15 bp, Homo sapiens
tcaggacgccctaca

SEQ ID NO: 1249264 - DNA, 15 bp, Homo sapiens
ttcaggacgccctac

SEQ ID NO: 1249265 - DNA, 15 bp, Homo sapiens
cttcaggacgcccta

SEQ ID NO: 1249266 - DNA, 15 bp, Homo sapiens
tcttcaggacgccct

SEQ ID NO: 1249267 - DNA, 15 bp, Homo sapiens
ctcttcaggacgccc

SEQ ID NO: 1249268 - DNA, 15 bp, Homo sapiens
gctcttcaggacgcc

SEQ ID NO: 1249269 - DNA, 15 bp, Homo sapiens
cgctcttcaggacgc

SEQ ID NO: 1249270 - DNA, 15 bp, Homo sapiens
ccgctcttcaggacg

SEQ ID NO: 1249271 - DNA, 15 bp, Homo sapiens
gccgctcttcaggac

SEQ ID NO: 1249272 - DNA, 15 bp, Homo sapiens
ggccgctcttcagga

SEQ ID NO: 1249273 - DNA, 15 bp, Homo sapiens
aggccgctcttcagg

SEQ ID NO: 1249274 - DNA, 15 bp, Homo sapiens
caggccgctcttcag

SEQ ID NO: 1249275 - DNA, 15 bp, Homo sapiens
gcaggccgctcttca

SEQ ID NO: 1249276 - DNA, 15 bp, Homo sapiens
agcaggccgctcttc

SEQ ID NO: 1249277 - DNA, 15 bp, Homo sapiens
gagcaggccgctctt

SEQ ID NO: 1249278 - DNA, 15 bp, Homo sapiens
cgagcaggccgctct

SEQ ID NO: 1249279 - DNA, 15 bp, Homo sapiens
ccgagcaggccgctc

SEQ ID NO: 1249280 - DNA, 15 bp, Homo sapiens
tccgagcaggccgct

SEQ ID NO: 1249281 - DNA, 15 bp, Homo sapiens
ctccgagcaggccgc

SEQ ID NO: 1249282 - DNA, 15 bp, Homo sapiens
gctccgagcaggccg

SEQ ID NO: 1249283 - DNA, 15 bp, Homo sapiens
agctccgagcaggcc

SEQ ID NO: 1249284 - DNA, 15 bp, Homo sapiens
cagctccgagcaggc

SEQ ID NO: 1249285 - DNA, 15 bp, Homo sapiens
tcagctccgagcagg

SEQ ID NO: 1249286 - DNA, 15 bp, Homo sapiens
ctcagctccgagcag

SEQ ID NO: 1249287 - DNA, 15 bp, Homo sapiens
gctcagctccgagca

SEQ ID NO: 1249288 - DNA, 15 bp, Homo sapiens
cgctcagctccgagc

SEQ ID NO: 1249289 - DNA, 15 bp, Homo sapiens
gcgctcagctccgag

SEQ ID NO: 1249290 - DNA, 15 bp, Homo sapiens
tgcgctcagctccga

SEQ ID NO: 1249291 - DNA, 15 bp, Homo sapiens
gtgcgctcagctccg

SEQ ID NO: 1249292 - DNA, 15 bp, Homo sapiens
cgtgcgctcagctcc

SEQ ID NO: 1249293 - DNA, 15 bp, Homo sapiens
ccgtgcgctcagctc

SEQ ID NO: 1249294 - DNA, 15 bp, Homo sapiens
cccgtgcgctcagct

SEQ ID NO: 1249295 - DNA, 15 bp, Homo sapiens
ccccgtgcgctcagc

SEQ ID NO: 1249296 - DNA, 15 bp, Homo sapiens
accccgtgcgctcag

SEQ ID NO: 1249297 - DNA, 15 bp, Homo sapiens
aaccccgtgcgctca

SEQ ID NO: 1249298 - DNA, 15 bp, Homo sapiens
caaccccgtgcgctc

SEQ ID NO: 1249299 - DNA, 15 bp, Homo sapiens
gcaaccccgtgcgct

SEQ ID NO: 1249300 - DNA, 15 bp, Homo sapiens
ggcaaccccgtgcgc

SEQ ID NO: 1249301 - DNA, 15 bp, Homo sapiens
aggcaaccccgtgcg

SEQ ID NO: 1249302 - DNA, 15 bp, Homo sapiens
gaggcaaccccgtgc

SEQ ID NO: 1249303 - DNA, 15 bp, Homo sapiens
cgaggcaaccccgtg

SEQ ID NO: 1249304 - DNA, 15 bp, Homo sapiens
gcgaggcaaccccgt

SEQ ID NO: 1249305 - DNA, 15 bp, Homo sapiens
ggcgaggcaaccccg

SEQ ID NO: 1249306 - DNA, 15 bp, Homo sapiens
gggcgaggcaacccc

SEQ ID NO: 1249307 - DNA, 15 bp, Homo sapiens
agggcgaggcaaccc

SEQ ID NO: 1249308 - DNA, 15 bp, Homo sapiens
cagggcgaggcaacc

SEQ ID NO: 1249309 - DNA, 15 bp, Homo sapiens
ccagggcgaggcaac

SEQ ID NO: 1249310 - DNA, 15 bp, Homo sapiens
cccagggcgaggcaa

SEQ ID NO: 1249311 - DNA, 15 bp, Homo sapiens
gcccagggcgaggca

SEQ ID NO: 1249312 - DNA, 15 bp, Homo sapiens
cgcccagggcgaggc

SEQ ID NO: 1249313 - DNA, 15 bp, Homo sapiens
acgcccagggcgagg

SEQ ID NO: 1249314 - DNA, 15 bp, Homo sapiens
gacgcccagggcgag

SEQ ID NO: 1249315 - DNA, 15 bp, Homo sapiens
agacgcccagggcga

SEQ ID NO: 1249316 - DNA, 15 bp, Homo sapiens
gagacgcccagggcg

SEQ ID NO: 1249317 - DNA, 15 bp, Homo sapiens
agagacgcccagggc

SEQ ID NO: 1249318 - DNA, 15 bp, Homo sapiens
cagagacgcccaggg

SEQ ID NO: 1249319 - DNA, 15 bp, Homo sapiens
ccagagacgcccagg

SEQ ID NO: 1249320 - DNA, 15 bp, Homo sapiens
gccagagacgcccag

SEQ ID NO: 1249321 - DNA, 15 bp, Homo sapiens
ggccagagacgccca

SEQ ID NO: 1249322 - DNA, 15 bp, Homo sapiens
gggccagagacgccc

SEQ ID NO: 1249323 - DNA, 15 bp, Homo sapiens
agggccagagacgcc

SEQ ID NO: 1249324 - DNA, 15 bp, Homo sapiens
gagggccagagacgc

SEQ ID NO: 1249325 - DNA, 15 bp, Homo sapiens
tgagggccagagacg

SEQ ID NO: 1249326 - DNA, 15 bp, Homo sapiens
gtgagggccagagac

SEQ ID NO: 1249327 - DNA, 15 bp, Homo sapiens
ggtgagggccagaga

SEQ ID NO: 1249328 - DNA, 15 bp, Homo sapiens
tggtgagggccagag

SEQ ID NO: 1249329 - DNA, 15 bp, Homo sapiens
ctggtgagggccaga

SEQ ID NO: 1249330 - DNA, 15 bp, Homo sapiens
gctggtgagggccag

SEQ ID NO: 1249331 - DNA, 15 bp, Homo sapiens
ggctggtgagggcca

SEQ ID NO: 1249332 - DNA, 15 bp, Homo sapiens
gggctggtgagggcc

SEQ ID NO: 1249333 - DNA, 15 bp, Homo sapiens
ggggctggtgagggc

SEQ ID NO: 1249334 - DNA, 15 bp, Homo sapiens
cggggctggtgaggg

SEQ ID NO: 1249335 - DNA, 15 bp, Homo sapiens
acggggctggtgagg

SEQ ID NO: 1249336 - DNA, 15 bp, Homo sapiens
gacggggctggtgag

SEQ ID NO: 1249337 - DNA, 15 bp, Homo sapiens
agacggggctggtga

SEQ ID NO: 1249338 - DNA, 15 bp, Homo sapiens
aagacggggctggtg

SEQ ID NO: 1249339 - DNA, 15 bp, Homo sapiens
gaagacggggctggt

SEQ ID NO: 1249340 - DNA, 15 bp, Homo sapiens
ggaagacggggctgg

SEQ ID NO: 1249341 - DNA, 15 bp, Homo sapiens
gggaagacggggctg

SEQ ID NO: 1249342 - DNA, 15 bp, Homo sapiens
tgggaagacggggct

SEQ ID NO: 1249343 - DNA, 15 bp, Homo sapiens
atgggaagacggggc

SEQ ID NO: 1249344 - DNA, 15 bp, Homo sapiens
catgggaagacgggg

SEQ ID NO: 1249345 - DNA, 15 bp, Homo sapiens
ccatgggaagacggg

SEQ ID NO: 1249346 - DNA, 15 bp, Homo sapiens
cccatgggaagacgg

SEQ ID NO: 1249347 - DNA, 15 bp, Homo sapiens
gcccatgggaagacg

SEQ ID NO: 1249348 - DNA, 15 bp, Homo sapiens
tgcccatgggaagac

SEQ ID NO: 1249349 - DNA, 15 bp, Homo sapiens
ttgcccatgggaaga

SEQ ID NO: 1249350 - DNA, 15 bp, Homo sapiens
tttgcccatgggaag

SEQ ID NO: 1249351 - DNA, 15 bp, Homo sapiens
ttttgcccatgggaa

SEQ ID NO: 1249352 - DNA, 15 bp, Homo sapiens
gttttgcccatggga

SEQ ID NO: 1249353 - DNA, 15 bp, Homo sapiens
cgttttgcccatggg

SEQ ID NO: 1249354 - DNA, 15 bp, Homo sapiens
ccgttttgcccatgg

SEQ ID NO: 1249355 - DNA, 15 bp, Homo sapiens
gccgttttgcccatg

SEQ ID NO: 1249356 - DNA, 15 bp, Homo sapiens
cgccgttttgcccat

SEQ ID NO: 1249357 - DNA, 15 bp, Homo sapiens
ccgccgttttgccca

SEQ ID NO: 1249358 - DNA, 15 bp, Homo sapiens
accgccgttttgccc

SEQ ID NO: 1249359 - DNA, 15 bp, Homo sapiens
gaccgccgttttgcc

SEQ ID NO: 1249360 - DNA, 15 bp, Homo sapiens
ggaccgccgttttgc

SEQ ID NO: 1249361 - DNA, 15 bp, Homo sapiens
aggaccgccgttttg

SEQ ID NO: 1249362 - DNA, 15 bp, Homo sapiens
caggaccgccgtttt

SEQ ID NO: 1249363 - DNA, 15 bp, Homo sapiens
acaggaccgccgttt

SEQ ID NO: 1249364 - DNA, 15 bp, Homo sapiens
aacaggaccgccgtt

SEQ ID NO: 1249365 - DNA, 15 bp, Homo sapiens
aaacaggaccgccgt

SEQ ID NO: 1249366 - DNA, 15 bp, Homo sapiens
caaacaggaccgccg

SEQ ID NO: 1249367 - DNA, 15 bp, Homo sapiens
acaaacaggaccgcc

SEQ ID NO: 1249368 - DNA, 15 bp, Homo sapiens
gacaaacaggaccgc

SEQ ID NO: 1249369 - DNA, 15 bp, Homo sapiens
ggacaaacaggaccg

SEQ ID NO: 1249370 - DNA, 15 bp, Homo sapiens
tggacaaacaggacc

SEQ ID NO: 1249371 - DNA, 15 bp, Homo sapiens
gtggacaaacaggac

SEQ ID NO: 1249372 - DNA, 15 bp, Homo sapiens
tgtggacaaacagga

SEQ ID NO: 1249373 - DNA, 15 bp, Homo sapiens
ttgtggacaaacagg

SEQ ID NO: 1249374 - DNA, 15 bp, Homo sapiens
cttgtggacaaacag

SEQ ID NO: 1249375 - DNA, 15 bp, Homo sapiens
acttgtggacaaaca

SEQ ID NO: 1249376 - DNA, 15 bp, Homo sapiens
tacttgtggacaaac

SEQ ID NO: 1249377 - DNA, 15 bp, Homo sapiens
ttacttgtggacaaa

SEQ ID NO: 1249378 - DNA, 15 bp, Homo sapiens
gttacttgtggacaa

SEQ ID NO: 1249379 - DNA, 15 bp, Homo sapiens
ggttacttgtggaca

SEQ ID NO: 1249380 - DNA, 15 bp, Homo sapiens
cggttacttgtggac

SEQ ID NO: 1249381 - DNA, 15 bp, Homo sapiens
acggttacttgtgga

SEQ ID NO: 1249382 - DNA, 15 bp, Homo sapiens
gacggttacttgtgg

SEQ ID NO: 1249383 - DNA, 15 bp, Homo sapiens
cgacggttacttgtg

SEQ ID NO: 1249384 - DNA, 15 bp, Homo sapiens
ccgacggttacttgt

SEQ ID NO: 1249385 - DNA, 15 bp, Homo sapiens
cccgacggttacttg

SEQ ID NO: 1249386 - DNA, 15 bp, Homo sapiens
ccccgacggttactt

SEQ ID NO: 1249387 - DNA, 15 bp, Homo sapiens
accccgacggttact

SEQ ID NO: 1249388 - DNA, 15 bp, Homo sapiens
aaccccgacggttac

SEQ ID NO: 1249389 - DNA, 15 bp, Homo sapiens
taaccccgacggtta

SEQ ID NO: 1249390 - DNA, 15 bp, Homo sapiens
gtaaccccgacggtt

SEQ ID NO: 1249391 - DNA, 15 bp, Homo sapiens
cgtaaccccgacggt

SEQ ID NO: 1249392 - DNA, 15 bp, Homo sapiens
ccgtaaccccgacgg

SEQ ID NO: 1249393 - DNA, 15 bp, Homo sapiens
tccgtaaccccgacg

SEQ ID NO: 1249394 - DNA, 15 bp, Homo sapiens
ctccgtaaccccgac

SEQ ID NO: 1249395 - DNA, 15 bp, Homo sapiens
cctccgtaaccccga

SEQ ID NO: 1249396 - DNA, 15 bp, Homo sapiens
ccctccgtaaccccg

SEQ ID NO: 1249397 - DNA, 15 bp, Homo sapiens
cccctccgtaacccc

SEQ ID NO: 1249398 - DNA, 15 bp, Homo sapiens
gcccctccgtaaccc

SEQ ID NO: 1249399 - DNA, 15 bp, Homo sapiens
ggcccctccgtaacc

SEQ ID NO: 1249400 - DNA, 15 bp, Homo sapiens
tggcccctccgtaac

SEQ ID NO: 1249401 - DNA, 15 bp, Homo sapiens
ctggcccctccgtaa

SEQ ID NO: 1249402 - DNA, 15 bp, Homo sapiens
cctggcccctccgta

SEQ ID NO: 1249403 - DNA, 15 bp, Homo sapiens
tcctggcccctccgt

SEQ ID NO: 1249404 - DNA, 15 bp, Homo sapiens
ctcctggcccctccg

SEQ ID NO: 1249405 - DNA, 15 bp, Homo sapiens
gctcctggcccctcc

SEQ ID NO: 1249406 - DNA, 15 bp, Homo sapiens
agctcctggcccctc

SEQ ID NO: 1249407 - DNA, 15 bp, Homo sapiens
cagctcctggcccct

SEQ ID NO: 1249408 - DNA, 15 bp, Homo sapiens
gcagctcctggcccc

SEQ ID NO: 1249409 - DNA, 15 bp, Homo sapiens
cgcagctcctggccc

SEQ ID NO: 1249410 - DNA, 15 bp, Homo sapiens
ccgcagctcctggcc

SEQ ID NO: 1249411 - DNA, 15 bp, Homo sapiens
gccgcagctcctggc

SEQ ID NO: 1249412 - DNA, 15 bp, Homo sapiens
ccgccgcagctcctg

SEQ ID NO: 1249413 - DNA, 15 bp, Homo sapiens
cccgccgcagctcct

SEQ ID NO: 1249414 - DNA, 15 bp, Homo sapiens
ccccgccgcagctcc

SEQ ID NO: 1249415 - DNA, 15 bp, Homo sapiens
cccccgccgcagctc

SEQ ID NO: 1249416 - DNA, 15 bp, Homo sapiens
ccccccgccgcagct

SEQ ID NO: 1249417 - DNA, 15 bp, Homo sapiens
gccccccgccgcagc

SEQ ID NO: 1249418 - DNA, 15 bp, Homo sapiens
agccccccgccgcag

SEQ ID NO: 1249419 - DNA, 15 bp, Homo sapiens
cagccccccgccgca

SEQ ID NO: 1249420 - DNA, 15 bp, Homo sapiens
acagccccccgccgc

SEQ ID NO: 1249421 - DNA, 15 bp, Homo sapiens
cacagccccccgccg

SEQ ID NO: 1249422 - DNA, 15 bp, Homo sapiens
gcacagccccccgcc

SEQ ID NO: 1249423 - DNA, 15 bp, Homo sapiens
agcacagccccccgc

SEQ ID NO: 1249424 - DNA, 15 bp, Homo sapiens
gagcacagccccccg

SEQ ID NO: 1249425 - DNA, 15 bp, Homo sapiens
agagcacagcccccc

SEQ ID NO: 1249426 - DNA, 15 bp, Homo sapiens
gagagcacagccccc

SEQ ID NO: 1249427 - DNA, 15 bp, Homo sapiens
tgagagcacagcccc

SEQ ID NO: 1249428 - DNA, 15 bp, Homo sapiens
ctgagagcacagccc

SEQ ID NO: 1249429 - DNA, 15 bp, Homo sapiens
cctgagagcacagcc

SEQ ID NO: 1249430 - DNA, 15 bp, Homo sapiens
tcctgagagcacagc

SEQ ID NO: 1249431 - DNA, 15 bp, Homo sapiens
gtcctgagagcacag

SEQ ID NO: 1249432 - DNA, 15 bp, Homo sapiens
ggtcctgagagcaca

SEQ ID NO: 1249433 - DNA, 15 bp, Homo sapiens
cggtcctgagagcac

SEQ ID NO: 1249434 - DNA, 15 bp, Homo sapiens
ccggtcctgagagca

SEQ ID NO: 1249435 - DNA, 15 bp, Homo sapiens
gccggtcctgagagc

SEQ ID NO: 1249436 - DNA, 15 bp, Homo sapiens
ggccggtcctgagag

SEQ ID NO: 1249437 - DNA, 15 bp, Homo sapiens
gggccggtcctgaga

SEQ ID NO: 1249438 - DNA, 15 bp, Homo sapiens
ggggccggtcctgag

SEQ ID NO: 1249439 - DNA, 15 bp, Homo sapiens
tggggccggtcctga

SEQ ID NO: 1249440 - DNA, 15 bp, Homo sapiens
ctggggccggtcctg

SEQ ID NO: 1249441 - DNA, 15 bp, Homo sapiens
cctggggccggtcct

SEQ ID NO: 1249442 - DNA, 15 bp, Homo sapiens
tcctggggccggtcc

SEQ ID NO: 1249443 - DNA, 15 bp, Homo sapiens
ctcctggggccggtc

SEQ ID NO: 1249444 - DNA, 15 bp, Homo sapiens
cctcctggggccggt

SEQ ID NO: 1249445 - DNA, 15 bp, Homo sapiens
tcctcctggggccgg

SEQ ID NO: 1249446 - DNA, 15 bp, Homo sapiens
atcctcctggggccg

SEQ ID NO: 1249447 - DNA, 15 bp, Homo sapiens
gatcctcctggggcc

SEQ ID NO: 1249448 - DNA, 15 bp, Homo sapiens
ggatcctcctggggc

SEQ ID NO: 1249449 - DNA, 15 bp, Homo sapiens
cggatcctcctgggg

SEQ ID NO: 1249450 - DNA, 15 bp, Homo sapiens
gcggatcctcctggg

SEQ ID NO: 1249451 - DNA, 15 bp, Homo sapiens
cgcggatcctcctgg

SEQ ID NO: 1249452 - DNA, 15 bp, Homo sapiens
gcgcggatcctcctg

SEQ ID NO: 1249453 - DNA, 15 bp, Homo sapiens
cgcgcggatcctcct

SEQ ID NO: 1249454 - DNA, 15 bp, Homo sapiens
tcgcgcggatcctcc

SEQ ID NO: 1249455 - DNA, 15 bp, Homo sapiens
ctcgcgcggatcctc

SEQ ID NO: 1249456 - DNA, 15 bp, Homo sapiens
cctcgcgcggatcct

SEQ ID NO: 1249457 - DNA, 15 bp, Homo sapiens
acctcgcgcggatcc

SEQ ID NO: 1249458 - DNA, 15 bp, Homo sapiens
gacctcgcgcggatc

SEQ ID NO: 1249459 - DNA, 15 bp, Homo sapiens
agacctcgcgcggat

SEQ ID NO: 1249460 - DNA, 15 bp, Homo sapiens
cagacctcgcgcgga

SEQ ID NO: 1249461 - DNA, 15 bp, Homo sapiens
ccagacctcgcgcgg

SEQ ID NO: 1249462 - DNA, 15 bp, Homo sapiens
tccagacctcgcgcg

SEQ ID NO: 1249463 - DNA, 15 bp, Homo sapiens
ctccagacctcgcgc

SEQ ID NO: 1249464 - DNA, 15 bp, Homo sapiens
gctccagacctcgcg

SEQ ID NO: 1249465 - DNA, 15 bp, Homo sapiens
agctccagacctcgc

SEQ ID NO: 1249466 - DNA, 15 bp, Homo sapiens
gagctccagacctcg

SEQ ID NO: 1249467 - DNA, 15 bp, Homo sapiens
agagctccagacctc

SEQ ID NO: 1249468 - DNA, 15 bp, Homo sapiens
gagagctccagacct

SEQ ID NO: 1249469 - DNA, 15 bp, Homo sapiens
tgagagctccagacc

SEQ ID NO: 1249470 - DNA, 15 bp, Homo sapiens
ctgagagctccagac

SEQ ID NO: 1249471 - DNA, 15 bp, Homo sapiens
cctgagagctccaga

SEQ ID NO: 1249472 - DNA, 15 bp, Homo sapiens
ccctgagagctccag

SEQ ID NO: 1249473 - DNA, 15 bp, Homo sapiens
cccctgagagctcca

SEQ ID NO: 1249474 - DNA, 15 bp, Homo sapiens
acccctgagagctcc

SEQ ID NO: 1249475 - DNA, 15 bp, Homo sapiens
gacccctgagagctc

SEQ ID NO: 1249476 - DNA, 15 bp, Homo sapiens
cgacccctgagagct

SEQ ID NO: 1249477 - DNA, 15 bp, Homo sapiens
gcgacccctgagagc

SEQ ID NO: 1249478 - DNA, 15 bp, Homo sapiens
cgcgacccctgagag

SEQ ID NO: 1249479 - DNA, 15 bp, Homo sapiens
ccgcgacccctgaga

SEQ ID NO: 1249480 - DNA, 15 bp, Homo sapiens
cccgcgacccctgag

SEQ ID NO: 1249481 - DNA, 15 bp, Homo sapiens
ccccgcgacccctga

SEQ ID NO: 1249482 - DNA, 15 bp, Homo sapiens
cccccgcgacccctg

SEQ ID NO: 1249483 - DNA, 15 bp, Homo sapiens
tcccccgcgacccct

SEQ ID NO: 1249484 - DNA, 15 bp, Homo sapiens
gtcccccgcgacccc

SEQ ID NO: 1249485 - DNA, 15 bp, Homo sapiens
tgtcccccgcgaccc

SEQ ID NO: 1249486 - DNA, 15 bp, Homo sapiens
ctgtcccccgcgacc

SEQ ID NO: 1249487 - DNA, 15 bp, Homo sapiens
tctgtcccccgcgac

SEQ ID NO: 1249488 - DNA, 15 bp, Homo sapiens
ctctgtcccccgcga

SEQ ID NO: 1249489 - DNA, 15 bp, Homo sapiens
cctctgtcccccgcg

SEQ ID NO: 1249490 - DNA, 15 bp, Homo sapiens
ccctctgtcccccgc

SEQ ID NO: 1249491 - DNA, 15 bp, Homo sapiens
cccctctgtcccccg

SEQ ID NO: 1249492 - DNA, 15 bp, Homo sapiens
gcccctctgtccccc

SEQ ID NO: 1249493 - DNA, 15 bp, Homo sapiens
ggcccctctgtcccc

SEQ ID NO: 1249494 - DNA, 15 bp, Homo sapiens
gggcccctctgtccc

SEQ ID NO: 1249495 - DNA, 15 bp, Homo sapiens
ggggcccctctgtcc

SEQ ID NO: 1249496 - DNA, 15 bp, Homo sapiens
tggggcccctctgtc

SEQ ID NO: 1249497 - DNA, 15 bp, Homo sapiens
ttggggcccctctgt

SEQ ID NO: 1249498 - DNA, 15 bp, Homo sapiens
cttggggcccctctg

SEQ ID NO: 1249499 - DNA, 15 bp, Homo sapiens
gcttggggcccctct

SEQ ID NO: 1249500 - DNA, 15 bp, Homo sapiens
cgcttggggcccctc

SEQ ID NO: 1249501 - DNA, 15 bp, Homo sapiens
ccgcttggggcccct

SEQ ID NO: 1249502 - DNA, 15 bp, Homo sapiens
tccgcttggggcccc

SEQ ID NO: 1249503 - DNA, 15 bp, Homo sapiens
ctccgcttggggccc

SEQ ID NO: 1249504 - DNA, 15 bp, Homo sapiens
cctccgcttggggcc

SEQ ID NO: 1249505 - DNA, 15 bp, Homo sapiens
gcctccgcttggggc

SEQ ID NO: 1249506 - DNA, 15 bp, Homo sapiens
cgcctccgcttgggg

SEQ ID NO: 1249507 - DNA, 15 bp, Homo sapiens
ccgcctccgcttggg

SEQ ID NO: 1249508 - DNA, 15 bp, Homo sapiens
cccgcctccgcttgg

SEQ ID NO: 1249509 - DNA, 15 bp, Homo sapiens
ccccgcctccgcttg

SEQ ID NO: 1249510 - DNA, 15 bp, Homo sapiens
tccccgcctccgctt

SEQ ID NO: 1249511 - DNA, 15 bp, Homo sapiens
ttccccgcctccgct

SEQ ID NO: 1249512 - DNA, 15 bp, Homo sapiens
cttccccgcctccgc

SEQ ID NO: 1249513 - DNA, 15 bp, Homo sapiens
ccttccccgcctccg

SEQ ID NO: 1249514 - DNA, 15 bp, Homo sapiens
gccttccccgcctcc

SEQ ID NO: 1249515 - DNA, 15 bp, Homo sapiens
cgccttccccgcctc

SEQ ID NO: 1249516 - DNA, 15 bp, Homo sapiens
ccgccttccccgcct

SEQ ID NO: 1249517 - DNA, 15 bp, Homo sapiens
gccgccttccccgcc

SEQ ID NO: 1249518 - DNA, 15 bp, Homo sapiens
tgccgccttccccgc

SEQ ID NO: 1249519 - DNA, 15 bp, Homo sapiens
ctgccgccttccccg

SEQ ID NO: 1249520 - DNA, 15 bp, Homo sapiens
tctgccgccttcccc

SEQ ID NO: 1249521 - DNA, 15 bp, Homo sapiens
ttctgccgccttccc

SEQ ID NO: 1249522 - DNA, 15 bp, Homo sapiens
cttctgccgccttcc

SEQ ID NO: 1249523 - DNA, 15 bp, Homo sapiens
gcttctgccgccttc

SEQ ID NO: 1249524 - DNA, 15 bp, Homo sapiens
ggcttctgccgcctt

SEQ ID NO: 1249525 - DNA, 15 bp, Homo sapiens
gggcttctgccgcct

SEQ ID NO: 1249526 - DNA, 15 bp, Homo sapiens
tgggcttctgccgcc

SEQ ID NO: 1249527 - DNA, 15 bp, Homo sapiens
ctgggcttctgccgc

SEQ ID NO: 1249528 - DNA, 15 bp, Homo sapiens
cctgggcttctgccg

SEQ ID NO: 1249529 - DNA, 15 bp, Homo sapiens
tcctgggcttctgcc

SEQ ID NO: 1249530 - DNA, 15 bp, Homo sapiens
gtcctgggcttctgc

SEQ ID NO: 1249531 - DNA, 15 bp, Homo sapiens
ggtcctgggcttctg

SEQ ID NO: 1249532 - DNA, 15 bp, Homo sapiens
cggtcctgggcttct

SEQ ID NO: 1249533 - DNA, 15 bp, Homo sapiens
gcggtcctgggcttc

SEQ ID NO: 1249534 - DNA, 15 bp, Homo sapiens
ggcggtcctgggctt

SEQ ID NO: 1249535 - DNA, 15 bp, Homo sapiens
tggcggtcctgggct

SEQ ID NO: 1249536 - DNA, 15 bp, Homo sapiens
ttggcggtcctgggc

SEQ ID NO: 1249537 - DNA, 15 bp, Homo sapiens
cttggcggtcctggg

SEQ ID NO: 1249538 - DNA, 15 bp, Homo sapiens
tcttggcggtcctgg

SEQ ID NO: 1249539 - DNA, 15 bp, Homo sapiens
ctcttggcggtcctg

SEQ ID NO: 1249540 - DNA, 15 bp, Homo sapiens
gctcttggcggtcct

SEQ ID NO: 1249541 - DNA, 15 bp, Homo sapiens
agctcttggcggtcc

SEQ ID NO: 1249542 - DNA, 15 bp, Homo sapiens
cagctcttggcggtc

SEQ ID NO: 1249543 - DNA, 15 bp, Homo sapiens
ccagctcttggcggt

SEQ ID NO: 1249544 - DNA, 15 bp, Homo sapiens
gccagctcttggcgg

SEQ ID NO: 1249545 - DNA, 15 bp, Homo sapiens
cgccagctcttggcg

SEQ ID NO: 1249546 - DNA, 15 bp, Homo sapiens
tcgccagctcttggc

SEQ ID NO: 1249547 - DNA, 15 bp, Homo sapiens
ctcgccagctcttgg

SEQ ID NO: 1249548 - DNA, 15 bp, Homo sapiens
cctcgccagctcttg

SEQ ID NO: 1249549 - DNA, 15 bp, Homo sapiens
tcctcgccagctctt

SEQ ID NO: 1249550 - DNA, 15 bp, Homo sapiens
ttcctcgccagctct

SEQ ID NO: 1249551 - DNA, 15 bp, Homo sapiens
cttcctcgccagctc

SEQ ID NO: 1249552 - DNA, 15 bp, Homo sapiens
gcttcctcgccagct

SEQ ID NO: 1249553 - DNA, 15 bp, Homo sapiens
ggcttcctcgccagc

SEQ ID NO: 1249554 - DNA, 15 bp, Homo sapiens
gggcttcctcgccag

SEQ ID NO: 1249555 - DNA, 15 bp, Homo sapiens
cgggcttcctcgcca

SEQ ID NO: 1249556 - DNA, 15 bp, Homo sapiens
ccgggcttcctcgcc

SEQ ID NO: 1249557 - DNA, 15 bp, Homo sapiens
cccgggcttcctcgc

SEQ ID NO: 1249558 - DNA, 15 bp, Homo sapiens
ccccgggcttcctcg

SEQ ID NO: 1249559 - DNA, 15 bp, Homo sapiens
gccccgggcttcctc

SEQ ID NO: 1249560 - DNA, 15 bp, Homo sapiens
agccccgggcttcct

SEQ ID NO: 1249561 - DNA, 15 bp, Homo sapiens
gagccccgggcttcc

SEQ ID NO: 1249562 - DNA, 15 bp, Homo sapiens
cgagccccgggcttc

SEQ ID NO: 1249563 - DNA, 15 bp, Homo sapiens
gcgagccccgggctt

SEQ ID NO: 1249564 - DNA, 15 bp, Homo sapiens
agcgagccccgggct

SEQ ID NO: 1249565 - DNA, 15 bp, Homo sapiens
cagcgagccccgggc

SEQ ID NO: 1249566 - DNA, 15 bp, Homo sapiens
acagcgagccccggg

SEQ ID NO: 1249567 - DNA, 15 bp, Homo sapiens
gacagcgagccccgg

SEQ ID NO: 1249568 - DNA, 15 bp, Homo sapiens
cgacagcgagccccg

SEQ ID NO: 1249569 - DNA, 15 bp, Homo sapiens
ccgacagcgagcccc

SEQ ID NO: 1249570 - DNA, 15 bp, Homo sapiens
cccgacagcgagccc

SEQ ID NO: 1249571 - DNA, 15 bp, Homo sapiens
ccccgacagcgagcc

SEQ ID NO: 1249572 - DNA, 15 bp, Homo sapiens
cccccgacagcgagc

SEQ ID NO: 1249573 - DNA, 15 bp, Homo sapiens
tcccccgacagcgag

SEQ ID NO: 1249574 - DNA, 15 bp, Homo sapiens
ctcccccgacagcga

SEQ ID NO: 1249575 - DNA, 15 bp, Homo sapiens
gctcccccgacagcg

SEQ ID NO: 1249576 - DNA, 15 bp, Homo sapiens
ggctcccccgacagc

SEQ ID NO: 1249577 - DNA, 15 bp, Homo sapiens
cggctcccccgacag

SEQ ID NO: 1249578 - DNA, 15 bp, Homo sapiens
ccggctcccccgaca

SEQ ID NO: 1249579 - DNA, 15 bp, Homo sapiens
cccggctcccccgac

SEQ ID NO: 1249580 - DNA, 15 bp, Homo sapiens
gcccggctcccccga

SEQ ID NO: 1249581 - DNA, 15 bp, Homo sapiens
tgcccggctcccccg

SEQ ID NO: 1249582 - DNA, 15 bp, Homo sapiens
ctgcccggctccccc

SEQ ID NO: 1249583 - DNA, 15 bp, Homo sapiens
cctgcccggctcccc

SEQ ID NO: 1249584 - DNA, 15 bp, Homo sapiens
ccctgcccggctccc

SEQ ID NO: 1249585 - DNA, 15 bp, Homo sapiens
cccctgcccggctcc

SEQ ID NO: 1249586 - DNA, 15 bp, Homo sapiens
gcccctgcccggctc

SEQ ID NO: 1249587 - DNA, 15 bp, Homo sapiens
ggcccctgcccggct

SEQ ID NO: 1249588 - DNA, 15 bp, Homo sapiens
cggcccctgcccggc

SEQ ID NO: 1249589 - DNA, 15 bp, Homo sapiens
gcggcccctgcccgg

SEQ ID NO: 1249590 - DNA, 15 bp, Homo sapiens
cgcggcccctgcccg

SEQ ID NO: 1249591 - DNA, 15 bp, Homo sapiens
gcgcggcccctgccc

SEQ ID NO: 1249592 - DNA, 15 bp, Homo sapiens
ggcgcggcccctgcc

SEQ ID NO: 1249593 - DNA, 15 bp, Homo sapiens
aggcgcggcccctgc

SEQ ID NO: 1249594 - DNA, 15 bp, Homo sapiens
gaggcgcggcccctg

SEQ ID NO: 1249595 - DNA, 15 bp, Homo sapiens
cgaggcgcggcccct

SEQ ID NO: 1249596 - DNA, 15 bp, Homo sapiens
ccgaggcgcggcccc

SEQ ID NO: 1249597 - DNA, 15 bp, Homo sapiens
tccgaggcgcggccc

SEQ ID NO: 1249598 - DNA, 15 bp, Homo sapiens
gtccgaggcgcggcc

SEQ ID NO: 1249599 - DNA, 15 bp, Homo sapiens
ggtccgaggcgcggc

SEQ ID NO: 1249600 - DNA, 15 bp, Homo sapiens
tggtccgaggcgcgg

SEQ ID NO: 1249601 - DNA, 15 bp, Homo sapiens
ctggtccgaggcgcg

SEQ ID NO: 1249602 - DNA, 15 bp, Homo sapiens
cctggtccgaggcgc

SEQ ID NO: 1249603 - DNA, 15 bp, Homo sapiens
tcctggtccgaggcg

SEQ ID NO: 1249604 - DNA, 15 bp, Homo sapiens
gtcctggtccgaggc

SEQ ID NO: 1249605 - DNA, 15 bp, Homo sapiens
cgtcctggtccgagg

SEQ ID NO: 1249606 - DNA, 15 bp, Homo sapiens
ccgtcctggtccgag

SEQ ID NO: 1249607 - DNA, 15 bp, Homo sapiens
tccgtcctggtccga

SEQ ID NO: 1249608 - DNA, 15 bp, Homo sapiens
ctccgtcctggtccg

SEQ ID NO: 1249609 - DNA, 15 bp, Homo sapiens
cctccgtcctggtcc

SEQ ID NO: 1249610 - DNA, 15 bp, Homo sapiens
gcctccgtcctggtc

SEQ ID NO: 1249611 - DNA, 15 bp, Homo sapiens
ggcctccgtcctggt

SEQ ID NO: 1249612 - DNA, 15 bp, Homo sapiens
aggcctccgtcctgg

SEQ ID NO: 1249613 - DNA, 15 bp, Homo sapiens
caggcctccgtcctg

SEQ ID NO: 1249614 - DNA, 15 bp, Homo sapiens
ccaggcctccgtcct

SEQ ID NO: 1249615 - DNA, 15 bp, Homo sapiens
cccaggcctccgtcc

SEQ ID NO: 1249616 - DNA, 15 bp, Homo sapiens
ccccaggcctccgtc

SEQ ID NO: 1249617 - DNA, 15 bp, Homo sapiens
tccccaggcctccgt

SEQ ID NO: 1249618 - DNA, 15 bp, Homo sapiens
ttccccaggcctccg

SEQ ID NO: 1249619 - DNA, 15 bp, Homo sapiens
cttccccaggcctcc

SEQ ID NO: 1249620 - DNA, 15 bp, Homo sapiens
ccttccccaggcctc

SEQ ID NO: 1249621 - DNA, 15 bp, Homo sapiens
gccttccccaggcct

SEQ ID NO: 1249622 - DNA, 15 bp, Homo sapiens
cgccttccccaggcc

SEQ ID NO: 1249623 - DNA, 15 bp, Homo sapiens
ccgccttccccaggc

SEQ ID NO: 1249624 - DNA, 15 bp, Homo sapiens
tccgccttccccagg

SEQ ID NO: 1249625 - DNA, 15 bp, Homo sapiens
atccgccttccccag

SEQ ID NO: 1249626 - DNA, 15 bp, Homo sapiens
gatccgccttcccca

SEQ ID NO: 1249627 - DNA, 15 bp, Homo sapiens
agatccgccttcccc

SEQ ID NO: 1249628 - DNA, 15 bp, Homo sapiens
cagatccgccttccc

SEQ ID NO: 1249629 - DNA, 15 bp, Homo sapiens
ccagatccgccttcc

SEQ ID NO: 1249630 - DNA, 15 bp, Homo sapiens
gccagatccgccttc

SEQ ID NO: 1249631 - DNA, 15 bp, Homo sapiens
ggccagatccgcctt

SEQ ID NO: 1249632 - DNA, 15 bp, Homo sapiens
cggccagatccgcct

SEQ ID NO: 1249633 - DNA, 15 bp, Homo sapiens
gcggccagatccgcc

SEQ ID NO: 1249634 - DNA, 15 bp, Homo sapiens
ggcggccagatccgc

SEQ ID NO: 1249635 - DNA, 15 bp, Homo sapiens
cggcggccagatccg

SEQ ID NO: 1249636 - DNA, 15 bp, Homo sapiens
ccggcggccagatcc

SEQ ID NO: 1249637 - DNA, 15 bp, Homo sapiens
tccggcggccagatc

SEQ ID NO: 1249638 - DNA, 15 bp, Homo sapiens
ctccggcggccagat

SEQ ID NO: 1249639 - DNA, 15 bp, Homo sapiens
tctccggcggccaga

SEQ ID NO: 1249640 - DNA, 15 bp, Homo sapiens
gtctccggcggccag

SEQ ID NO: 1249641 - DNA, 15 bp, Homo sapiens
cgtctccggcggcca

SEQ ID NO: 1249642 - DNA, 15 bp, Homo sapiens
gcgtctccggcggcc

SEQ ID NO: 1249643 - DNA, 15 bp, Homo sapiens
cgcgtctccggcggc

SEQ ID NO: 1249644 - DNA, 15 bp, Homo sapiens
ccgcgtctccggcgg

SEQ ID NO: 1249645 - DNA, 15 bp, Homo sapiens
accgcgtctccggcg

SEQ ID NO: 1249646 - DNA, 15 bp, Homo sapiens
caccgcgtctccggc

SEQ ID NO: 1249647 - DNA, 15 bp, Homo sapiens
gcaccgcgtctccgg

SEQ ID NO: 1249648 - DNA, 15 bp, Homo sapiens
cgcaccgcgtctccg

SEQ ID NO: 1249649 - DNA, 15 bp, Homo sapiens
ccgcaccgcgtctcc

SEQ ID NO: 1249650 - DNA, 15 bp, Homo sapiens
cccgcaccgcgtctc

SEQ ID NO: 1249651 - DNA, 15 bp, Homo sapiens
acccgcaccgcgtct

SEQ ID NO: 1249652 - DNA, 15 bp, Homo sapiens
cacccgcaccgcgtc

SEQ ID NO: 1249653 - DNA, 15 bp, Homo sapiens
ccacccgcaccgcgt

SEQ ID NO: 1249654 - DNA, 15 bp, Homo sapiens
tccacccgcaccgcg

SEQ ID NO: 1249655 - DNA, 15 bp, Homo sapiens
ctccacccgcaccgc

SEQ ID NO: 1249656 - DNA, 15 bp, Homo sapiens
tctccacccgcaccg

SEQ ID NO: 1249657 - DNA, 15 bp, Homo sapiens
gtctccacccgcacc

SEQ ID NO: 1249658 - DNA, 15 bp, Homo sapiens
cgtctccacccgcac

SEQ ID NO: 1249659 - DNA, 15 bp, Homo sapiens
tcgtctccacccgca

SEQ ID NO: 1249660 - DNA, 15 bp, Homo sapiens
ctcgtctccacccgc

SEQ ID NO: 1249661 - DNA, 15 bp, Homo sapiens
cctcgtctccacccg

SEQ ID NO: 1249662 - DNA, 15 bp, Homo sapiens
ccctcgtctccaccc

SEQ ID NO: 1249663 - DNA, 15 bp, Homo sapiens
tccctcgtctccacc

SEQ ID NO: 1249664 - DNA, 15 bp, Homo sapiens
atccctcgtctccac

SEQ ID NO: 1249665 - DNA, 15 bp, Homo sapiens
aatccctcgtctcca

SEQ ID NO: 1249666 - DNA, 15 bp, Homo sapiens
aaatccctcgtctcc

SEQ ID NO: 1249667 - DNA, 15 bp, Homo sapiens
caaatccctcgtctc

SEQ ID NO: 1249668 - DNA, 15 bp, Homo sapiens
ccaaatccctcgtct

SEQ ID NO: 1249669 - DNA, 15 bp, Homo sapiens
tccaaatccctcgtc

SEQ ID NO: 1249670 - DNA, 15 bp, Homo sapiens
atccaaatccctcgt

SEQ ID NO: 1249671 - DNA, 15 bp, Homo sapiens
aatccaaatccctcg

SEQ ID NO: 1249672 - DNA, 15 bp, Homo sapiens
aaatccaaatccctc

SEQ ID NO: 1249673 - DNA, 15 bp, Homo sapiens
gaaatccaaatccct

SEQ ID NO: 1249674 - DNA, 15 bp, Homo sapiens
ggaaatccaaatccc

SEQ ID NO: 1249675 - DNA, 15 bp, Homo sapiens
cggaaatccaaatcc

SEQ ID NO: 1249676 - DNA, 15 bp, Homo sapiens
gcggaaatccaaatc

SEQ ID NO: 1249677 - DNA, 15 bp, Homo sapiens
cgcggaaatccaaat

SEQ ID NO: 1249678 - DNA, 15 bp, Homo sapiens
ccgcggaaatccaaa

SEQ ID NO: 1249679 - DNA, 15 bp, Homo sapiens
cccgcggaaatccaa

SEQ ID NO: 1249680 - DNA, 15 bp, Homo sapiens
gcccgcggaaatcca

SEQ ID NO: 1249681 - DNA, 15 bp, Homo sapiens
cgcccgcggaaatcc

SEQ ID NO: 1249682 - DNA, 15 bp, Homo sapiens
ccgcccgcggaaatc

SEQ ID NO: 1249683 - DNA, 15 bp, Homo sapiens
gccgcccgcggaaat

SEQ ID NO: 1249684 - DNA, 15 bp, Homo sapiens
agccgcccgcggaaa

SEQ ID NO: 1249685 - DNA, 15 bp, Homo sapiens
cagccgcccgcggaa

SEQ ID NO: 1249686 - DNA, 15 bp, Homo sapiens
acagccgcccgcgga

SEQ ID NO: 1249687 - DNA, 15 bp, Homo sapiens
tacagccgcccgcgg

SEQ ID NO: 1249688 - DNA, 15 bp, Homo sapiens
gtacagccgcccgcg

SEQ ID NO: 1249689 - DNA, 15 bp, Homo sapiens
cgtacagccgcccgc

SEQ ID NO: 1249690 - DNA, 15 bp, Homo sapiens
ccgtacagccgcccg

SEQ ID NO: 1249691 - DNA, 15 bp, Homo sapiens
tccgtacagccgccc

SEQ ID NO: 1249692 - DNA, 15 bp, Homo sapiens
atccgtacagccgcc

SEQ ID NO: 1249693 - DNA, 15 bp, Homo sapiens
aatccgtacagccgc

SEQ ID NO: 1249694 - DNA, 15 bp, Homo sapiens
aaatccgtacagccg

SEQ ID NO: 1249695 - DNA, 15 bp, Homo sapiens
gaaatccgtacagcc

SEQ ID NO: 1249696 - DNA, 15 bp, Homo sapiens
ggaaatccgtacagc

SEQ ID NO: 1249697 - DNA, 15 bp, Homo sapiens
tggaaatccgtacag

SEQ ID NO: 1249698 - DNA, 15 bp, Homo sapiens
gtggaaatccgtaca

SEQ ID NO: 1249699 - DNA, 15 bp, Homo sapiens
cgtggaaatccgtac

SEQ ID NO: 1249700 - DNA, 15 bp, Homo sapiens
gcgtggaaatccgta

SEQ ID NO: 1249701 - DNA, 15 bp, Homo sapiens
cgcgtggaaatccgt

SEQ ID NO: 1249702 - DNA, 15 bp, Homo sapiens
gcgcgtggaaatccg

SEQ ID NO: 1249703 - DNA, 15 bp, Homo sapiens
cgcgcgtggaaatcc

SEQ ID NO: 1249704 - DNA, 15 bp, Homo sapiens
ccgcgcgtggaaatc

SEQ ID NO: 1249705 - DNA, 15 bp, Homo sapiens
accgcgcgtggaaat

SEQ ID NO: 1249706 - DNA, 15 bp, Homo sapiens
aaccgcgcgtggaaa

SEQ ID NO: 1249707 - DNA, 15 bp, Homo sapiens
gaaccgcgcgtggaa

SEQ ID NO: 1249708 - DNA, 15 bp, Homo sapiens
tgaaccgcgcgtgga

SEQ ID NO: 1249709 - DNA, 15 bp, Homo sapiens
gtgaaccgcgcgtgg

SEQ ID NO: 1249710 - DNA, 15 bp, Homo sapiens
cgtgaaccgcgcgtg

SEQ ID NO: 1249711 - DNA, 15 bp, Homo sapiens
acgtgaaccgcgcgt

SEQ ID NO: 1249712 - DNA, 15 bp, Homo sapiens
cacgtgaaccgcgcg

SEQ ID NO: 1249713 - DNA, 15 bp, Homo sapiens
ccacgtgaaccgcgc

SEQ ID NO: 1249714 - DNA, 15 bp, Homo sapiens
cccacgtgaaccgcg

SEQ ID NO: 1249715 - DNA, 15 bp, Homo sapiens
gcccacgtgaaccgc

SEQ ID NO: 1249716 - DNA, 15 bp, Homo sapiens
ggcccacgtgaaccg

SEQ ID NO: 1249717 - DNA, 15 bp, Homo sapiens
gggcccacgtgaacc

SEQ ID NO: 1249718 - DNA, 15 bp, Homo sapiens
ggggcccacgtgaac

SEQ ID NO: 1249719 - DNA, 15 bp, Homo sapiens
tggggcccacgtgaa

SEQ ID NO: 1249720 - DNA, 15 bp, Homo sapiens
ctggggcccacgtga

SEQ ID NO: 1249721 - DNA, 15 bp, Homo sapiens
cctggggcccacgtg

SEQ ID NO: 1249722 - DNA, 15 bp, Homo sapiens
ccctggggcccacgt

SEQ ID NO: 1249723 - DNA, 15 bp, Homo sapiens
cccctggggcccacg

SEQ ID NO: 1249724 - DNA, 15 bp, Homo sapiens
ccccctggggcccac

SEQ ID NO: 1249725 - DNA, 15 bp, Homo sapiens
accccctggggccca

SEQ ID NO: 1249726 - DNA, 15 bp, Homo sapiens
aaccccctggggccc

SEQ ID NO: 1249727 - DNA, 15 bp, Homo sapiens
caaccccctggggcc

SEQ ID NO: 1249728 - DNA, 15 bp, Homo sapiens
gcaaccccctggggc

SEQ ID NO: 1249729 - DNA, 15 bp, Homo sapiens
ggcaaccccctgggg

SEQ ID NO: 1249730 - DNA, 15 bp, Homo sapiens
gggcaaccccctggg

SEQ ID NO: 1249731 - DNA, 15 bp, Homo sapiens
cgggcaaccccctgg

SEQ ID NO: 1249732 - DNA, 15 bp, Homo sapiens
ccgggcaaccccctg

SEQ ID NO: 1249733 - DNA, 15 bp, Homo sapiens
gccgggcaaccccct

SEQ ID NO: 1249734 - DNA, 15 bp, Homo sapiens
tgccgggcaaccccc

SEQ ID NO: 1249735 - DNA, 15 bp, Homo sapiens
gtgccgggcaacccc

SEQ ID NO: 1249736 - DNA, 15 bp, Homo sapiens
ggtgccgggcaaccc

SEQ ID NO: 1249737 - DNA, 15 bp, Homo sapiens
gggtgccgggcaacc

SEQ ID NO: 1249738 - DNA, 15 bp, Homo sapiens
cgggtgccgggcaac

SEQ ID NO: 1249739 - DNA, 15 bp, Homo sapiens
ccgggtgccgggcaa

SEQ ID NO: 1249740 - DNA, 15 bp, Homo sapiens
cccgggtgccgggca

SEQ ID NO: 1249741 - DNA, 15 bp, Homo sapiens
ccccgggtgccgggc

SEQ ID NO: 1249742 - DNA, 15 bp, Homo sapiens
gccccgggtgccggg

SEQ ID NO: 1249743 - DNA, 15 bp, Homo sapiens
ggccccgggtgccgg

SEQ ID NO: 1249744 - DNA, 15 bp, Homo sapiens
cggccccgggtgccg

SEQ ID NO: 1249745 - DNA, 15 bp, Homo sapiens
gcggccccgggtgcc

SEQ ID NO: 1249746 - DNA, 15 bp, Homo sapiens
cgcggccccgggtgc

SEQ ID NO: 1249747 - DNA, 15 bp, Homo sapiens
gcgcggccccgggtg

SEQ ID NO: 1249748 - DNA, 15 bp, Homo sapiens
ggcgcggccccgggt

SEQ ID NO: 1249749 - DNA, 15 bp, Homo sapiens
cggcgcggccccggg

SEQ ID NO: 1249750 - DNA, 15 bp, Homo sapiens
gcggcgcggccccgg

SEQ ID NO: 1249751 - DNA, 15 bp, Homo sapiens
ggcggcgcggccccg

SEQ ID NO: 1249752 - DNA, 15 bp, Homo sapiens
aggcggcgcggcccc

SEQ ID NO: 1249753 - DNA, 15 bp, Homo sapiens
aaggcggcgcggccc

SEQ ID NO: 1249754 - DNA, 15 bp, Homo sapiens
gaaggcggcgcggcc

SEQ ID NO: 1249755 - DNA, 15 bp, Homo sapiens
agaaggcggcgcggc

SEQ ID NO: 1249756 - DNA, 15 bp, Homo sapiens
gagaaggcggcgcgg

SEQ ID NO: 1249757 - DNA, 15 bp, Homo sapiens
ggagaaggcggcgcg

SEQ ID NO: 1249758 - DNA, 15 bp, Homo sapiens
aggagaaggcggcgc

SEQ ID NO: 1249759 - DNA, 15 bp, Homo sapiens
gaggagaaggcggcg

SEQ ID NO: 1249760 - DNA, 15 bp, Homo sapiens
cgaggagaaggcggc

SEQ ID NO: 1249761 - DNA, 15 bp, Homo sapiens
gcgaggagaaggcgg

SEQ ID NO: 1249762 - DNA, 15 bp, Homo sapiens
ggcgaggagaaggcg

SEQ ID NO: 1249763 - DNA, 15 bp, Homo sapiens
cggcgaggagaaggc

SEQ ID NO: 1249764 - DNA, 15 bp, Homo sapiens
ccggcgaggagaagg

SEQ ID NO: 1249765 - DNA, 15 bp, Homo sapiens
gccggcgaggagaag

SEQ ID NO: 1249766 - DNA, 15 bp, Homo sapiens
tgccggcgaggagaa

SEQ ID NO: 1249767 - DNA, 15 bp, Homo sapiens
atgccggcgaggaga

SEQ ID NO: 1249768 - DNA, 15 bp, Homo sapiens
gatgccggcgaggag

SEQ ID NO: 1249769 - DNA, 15 bp, Homo sapiens
cgatgccggcgagga

SEQ ID NO: 1249770 - DNA, 15 bp, Homo sapiens
tcgatgccggcgagg

SEQ ID NO: 1249771 - DNA, 15 bp, Homo sapiens
gtcgatgccggcgag

SEQ ID NO: 1249772 - DNA, 15 bp, Homo sapiens
ggtcgatgccggcga

SEQ ID NO: 1249773 - DNA, 15 bp, Homo sapiens
gggtcgatgccggcg

SEQ ID NO: 1249774 - DNA, 15 bp, Homo sapiens
cgggtcgatgccggc

SEQ ID NO: 1249775 - DNA, 15 bp, Homo sapiens
gcgggtcgatgccgg

SEQ ID NO: 1249776 - DNA, 15 bp, Homo sapiens
tgcgggtcgatgccg

SEQ ID NO: 1249777 - DNA, 15 bp, Homo sapiens
ctgcgggtcgatgcc

SEQ ID NO: 1249778 - DNA, 15 bp, Homo sapiens
gctgcgggtcgatgc

SEQ ID NO: 1249779 - DNA, 15 bp, Homo sapiens
ggctgcgggtcgatg

SEQ ID NO: 1249780 - DNA, 15 bp, Homo sapiens
aggctgcgggtcgat

SEQ ID NO: 1249781 - DNA, 15 bp, Homo sapiens
gaggctgcgggtcga

SEQ ID NO: 1249782 - DNA, 15 bp, Homo sapiens
tgaggctgcgggtcg

SEQ ID NO: 1249783 - DNA, 15 bp, Homo sapiens
gtgaggctgcgggtc

SEQ ID NO: 1249784 - DNA, 15 bp, Homo sapiens
cgtgaggctgcgggt

SEQ ID NO: 1249785 - DNA, 15 bp, Homo sapiens
acgtgaggctgcggg

SEQ ID NO: 1249786 - DNA, 15 bp, Homo sapiens
aacgtgaggctgcgg

SEQ ID NO: 1249787 - DNA, 15 bp, Homo sapiens
aaacgtgaggctgcg

SEQ ID NO: 1249788 - DNA, 15 bp, Homo sapiens
taaacgtgaggctgc

SEQ ID NO: 1249789 - DNA, 15 bp, Homo sapiens
gtaaacgtgaggctg

SEQ ID NO: 1249790 - DNA, 15 bp, Homo sapiens
cgtaaacgtgaggct

SEQ ID NO: 1249791 - DNA, 15 bp, Homo sapiens
gcgtaaacgtgaggc

SEQ ID NO: 1249792 - DNA, 15 bp, Homo sapiens
cgcgtaaacgtgagg

SEQ ID NO: 1249793 - DNA, 15 bp, Homo sapiens
ccgcgtaaacgtgag

SEQ ID NO: 1249794 - DNA, 15 bp, Homo sapiens
gccgcgtaaacgtga

SEQ ID NO: 1249795 - DNA, 15 bp, Homo sapiens
cgccgcgtaaacgtg

SEQ ID NO: 1249796 - DNA, 15 bp, Homo sapiens
ccgccgcgtaaacgt

SEQ ID NO: 1249797 - DNA, 15 bp, Homo sapiens
gccgccgcgtaaacg

SEQ ID NO: 1249798 - DNA, 15 bp, Homo sapiens
cgccgccgcgtaaac

SEQ ID NO: 1249799 - DNA, 15 bp, Homo sapiens
gcgccgccgcgtaaa

SEQ ID NO: 1249800 - DNA, 15 bp, Homo sapiens
ggcgccgccgcgtaa

SEQ ID NO: 1249801 - DNA, 15 bp, Homo sapiens
gggcgccgccgcgta

SEQ ID NO: 1249802 - DNA, 15 bp, Homo sapiens
cgggcgccgccgcgt

SEQ ID NO: 1249803 - DNA, 15 bp, Homo sapiens
gcgggcgccgccgcg

SEQ ID NO: 1249804 - DNA, 15 bp, Homo sapiens
tgcgggcgccgccgc

SEQ ID NO: 1249805 - DNA, 15 bp, Homo sapiens
ctgcgggcgccgccg

SEQ ID NO: 1249806 - DNA, 15 bp, Homo sapiens
gctgcgggcgccgcc

SEQ ID NO: 1249807 - DNA, 15 bp, Homo sapiens
ggctgcgggcgccgc

SEQ ID NO: 1249808 - DNA, 15 bp, Homo sapiens
gggctgcgggcgccg

SEQ ID NO: 1249809 - DNA, 15 bp, Homo sapiens
ggggctgcgggcgcc

SEQ ID NO: 1249810 - DNA, 15 bp, Homo sapiens
gggggctgcgggcgc

SEQ ID NO: 1249811 - DNA, 15 bp, Homo sapiens
agggggctgcgggcg

SEQ ID NO: 1249812 - DNA, 15 bp, Homo sapiens
aagggggctgcgggc

SEQ ID NO: 1249813 - DNA, 15 bp, Homo sapiens
gaagggggctgcggg

SEQ ID NO: 1249814 - DNA, 15 bp, Homo sapiens
cgaagggggctgcgg

SEQ ID NO: 1249815 - DNA, 15 bp, Homo sapiens
ccgaagggggctgcg

SEQ ID NO: 1249816 - DNA, 15 bp, Homo sapiens
gccgaagggggctgc

SEQ ID NO: 1249817 - DNA, 15 bp, Homo sapiens
ggccgaagggggctg

SEQ ID NO: 1249818 - DNA, 15 bp, Homo sapiens
gggccgaagggggct

SEQ ID NO: 1249819 - DNA, 15 bp, Homo sapiens
cgggccgaagggggc

SEQ ID NO: 1249820 - DNA, 15 bp, Homo sapiens
ccgggccgaaggggg

SEQ ID NO: 1249821 - DNA, 15 bp, Homo sapiens
gccgggccgaagggg

SEQ ID NO: 1249822 - DNA, 15 bp, Homo sapiens
agccgggccgaaggg

SEQ ID NO: 1249823 - DNA, 15 bp, Homo sapiens
aagccgggccgaagg

SEQ ID NO: 1249824 - DNA, 15 bp, Homo sapiens
gaagccgggccgaag

SEQ ID NO: 1249825 - DNA, 15 bp, Homo sapiens
ggaagccgggccgaa

SEQ ID NO: 1249826 - DNA, 15 bp, Homo sapiens
cggaagccgggccga

SEQ ID NO: 1249827 - DNA, 15 bp, Homo sapiens
gcggaagccgggccg

SEQ ID NO: 1249828 - DNA, 15 bp, Homo sapiens
cgcggaagccgggcc

SEQ ID NO: 1249829 - DNA, 15 bp, Homo sapiens
gcgcggaagccgggc

SEQ ID NO: 1249830 - DNA, 15 bp, Homo sapiens
cgcgcggaagccggg

SEQ ID NO: 1249831 - DNA, 15 bp, Homo sapiens
acgcgcggaagccgg

SEQ ID NO: 1249832 - DNA, 15 bp, Homo sapiens
cacgcgcggaagccg

SEQ ID NO: 1249833 - DNA, 15 bp, Homo sapiens
gcacgcgcggaagcc

SEQ ID NO: 1249834 - DNA, 15 bp, Homo sapiens
ggcacgcgcggaagc

SEQ ID NO: 1249835 - DNA, 15 bp, Homo sapiens
gggcacgcgcggaag

SEQ ID NO: 1249836 - DNA, 15 bp, Homo sapiens
ggggcacgcgcggaa

SEQ ID NO: 1249837 - DNA, 15 bp, Homo sapiens
gggggcacgcgcgga

SEQ ID NO: 1249838 - DNA, 15 bp, Homo sapiens
cgggggcacgcgcgg

SEQ ID NO: 1249839 - DNA, 15 bp, Homo sapiens
tcgggggcacgcgcg

SEQ ID NO: 1249840 - DNA, 15 bp, Homo sapiens
ctcgggggcacgcgc

SEQ ID NO: 1249841 - DNA, 15 bp, Homo sapiens
gctcgggggcacgcg

SEQ ID NO: 1249842 - DNA, 15 bp, Homo sapiens
cgctcgggggcacgc

SEQ ID NO: 1249843 - DNA, 15 bp, Homo sapiens
gcgctcgggggcacg

SEQ ID NO: 1249844 - DNA, 15 bp, Homo sapiens
cgcgctcgggggcac

SEQ ID NO: 1249845 - DNA, 15 bp, Homo sapiens
gcgcgctcgggggca

SEQ ID NO: 1249846 - DNA, 15 bp, Homo sapiens
ggcgcgctcgggggc

SEQ ID NO: 1249847 - DNA, 15 bp, Homo sapiens
gggcgcgctcggggg

SEQ ID NO: 1249848 - DNA, 15 bp, Homo sapiens
agggcgcgctcgggg

SEQ ID NO: 1249849 - DNA, 15 bp, Homo sapiens
gagggcgcgctcggg

SEQ ID NO: 1249850 - DNA, 15 bp, Homo sapiens
cgagggcgcgctcgg

SEQ ID NO: 1249851 - DNA, 15 bp, Homo sapiens
ccgagggcgcgctcg

SEQ ID NO: 1249852 - DNA, 15 bp, Homo sapiens
cccgagggcgcgctc

SEQ ID NO: 1249853 - DNA, 15 bp, Homo sapiens
tcccgagggcgcgct

SEQ ID NO: 1249854 - DNA, 15 bp, Homo sapiens
atcccgagggcgcgc

SEQ ID NO: 1249855 - DNA, 15 bp, Homo sapiens
gatcccgagggcgcg

SEQ ID NO: 1249856 - DNA, 15 bp, Homo sapiens
tgatcccgagggcgc

SEQ ID NO: 1249857 - DNA, 15 bp, Homo sapiens
ctgatcccgagggcg

SEQ ID NO: 1249858 - DNA, 15 bp, Homo sapiens
gctgatcccgagggc

SEQ ID NO: 1249859 - DNA, 15 bp, Homo sapiens
ggctgatcccgaggg

SEQ ID NO: 1249860 - DNA, 15 bp, Homo sapiens
gggctgatcccgagg

SEQ ID NO: 1249861 - DNA, 15 bp, Homo sapiens
ggggctgatcccgag

SEQ ID NO: 1249862 - DNA, 15 bp, Homo sapiens
gggggctgatcccga

SEQ ID NO: 1249863 - DNA, 15 bp, Homo sapiens
cgggggctgatcccg

SEQ ID NO: 1249864 - DNA, 15 bp, Homo sapiens
ccgggggctgatccc

SEQ ID NO: 1249865 - DNA, 15 bp, Homo sapiens
tccgggggctgatcc

SEQ ID NO: 1249866 - DNA, 15 bp, Homo sapiens
ttccgggggctgatc

SEQ ID NO: 1249867 - DNA, 15 bp, Homo sapiens
cttccgggggctgat

SEQ ID NO: 1249868 - DNA, 15 bp, Homo sapiens
gcttccgggggctga

SEQ ID NO: 1249869 - DNA, 15 bp, Homo sapiens
tgcttccgggggctg

SEQ ID NO: 1249870 - DNA, 15 bp, Homo sapiens
ctgcttccgggggct

SEQ ID NO: 1249871 - DNA, 15 bp, Homo sapiens
tctgcttccgggggc

SEQ ID NO: 1249872 - DNA, 15 bp, Homo sapiens
ctctgcttccggggg

SEQ ID NO: 1249873 - DNA, 15 bp, Homo sapiens
tctctgcttccgggg

SEQ ID NO: 1249874 - DNA, 15 bp, Homo sapiens
ctctctgcttccggg

SEQ ID NO: 1249875 - DNA, 15 bp, Homo sapiens
cctctctgcttccgg

SEQ ID NO: 1249876 - DNA, 15 bp, Homo sapiens
gcctctctgcttccg

SEQ ID NO: 1249877 - DNA, 15 bp, Homo sapiens
ggcctctctgcttcc

SEQ ID NO: 1249878 - DNA, 15 bp, Homo sapiens
tggcctctctgcttc

SEQ ID NO: 1249879 - DNA, 15 bp, Homo sapiens
ctggcctctctgctt

SEQ ID NO: 1249880 - DNA, 15 bp, Homo sapiens
cctggcctctctgct

SEQ ID NO: 1249881 - DNA, 15 bp, Homo sapiens
gcctggcctctctgc

SEQ ID NO: 1249882 - DNA, 15 bp, Homo sapiens
ggcctggcctctctg

SEQ ID NO: 1249883 - DNA, 15 bp, Homo sapiens
cggcctggcctctct

SEQ ID NO: 1249884 - DNA, 15 bp, Homo sapiens
ccggcctggcctctc

SEQ ID NO: 1249885 - DNA, 15 bp, Homo sapiens
cccggcctggcctct

SEQ ID NO: 1249886 - DNA, 15 bp, Homo sapiens
tcccggcctggcctc

SEQ ID NO: 1249887 - DNA, 15 bp, Homo sapiens
ttcccggcctggcct

SEQ ID NO: 1249888 - DNA, 15 bp, Homo sapiens
cttcccggcctggcc

SEQ ID NO: 1249889 - DNA, 15 bp, Homo sapiens
ccttcccggcctggc

SEQ ID NO: 1249890 - DNA, 15 bp, Homo sapiens
tccttcccggcctgg

SEQ ID NO: 1249891 - DNA, 15 bp, Homo sapiens
atccttcccggcctg

SEQ ID NO: 1249892 - DNA, 15 bp, Homo sapiens
catccttcccggcct

SEQ ID NO: 1249893 - DNA, 15 bp, Homo sapiens
ccatccttcccggcc

SEQ ID NO: 1249894 - DNA, 15 bp, Homo sapiens
cccatccttcccggc

SEQ ID NO: 1249895 - DNA, 15 bp, Homo sapiens
gcccatccttcccgg

SEQ ID NO: 1249896 - DNA, 15 bp, Homo sapiens
cgcccatccttcccg

SEQ ID NO: 1249897 - DNA, 15 bp, Homo sapiens
tcgcccatccttccc

SEQ ID NO: 1249898 - DNA, 15 bp, Homo sapiens
gtcgcccatccttcc

SEQ ID NO: 1249899 - DNA, 15 bp, Homo sapiens
cgtcgcccatccttc

SEQ ID NO: 1249900 - DNA, 15 bp, Homo sapiens
ccgtcgcccatcctt

SEQ ID NO: 1249901 - DNA, 15 bp, Homo sapiens
cccgtcgcccatcct

SEQ ID NO: 1249902 - DNA, 15 bp, Homo sapiens
ccccgtcgcccatcc

SEQ ID NO: 1249903 - DNA, 15 bp, Homo sapiens
cccccgtcgcccatc

SEQ ID NO: 1249904 - DNA, 15 bp, Homo sapiens
acccccgtcgcccat

SEQ ID NO: 1249905 - DNA, 15 bp, Homo sapiens
cacccccgtcgccca

SEQ ID NO: 1249906 - DNA, 15 bp, Homo sapiens
ccacccccgtcgccc

SEQ ID NO: 1249907 - DNA, 15 bp, Homo sapiens
gccacccccgtcgcc

SEQ ID NO: 1249908 - DNA, 15 bp, Homo sapiens
agccacccccgtcgc

SEQ ID NO: 1249909 - DNA, 15 bp, Homo sapiens
cagccacccccgtcg

SEQ ID NO: 1249910 - DNA, 15 bp, Homo sapiens
tcagccacccccgtc

SEQ ID NO: 1249911 - DNA, 15 bp, Homo sapiens
gtcagccacccccgt

SEQ ID NO: 1249912 - DNA, 15 bp, Homo sapiens
ggtcagccacccccg

SEQ ID NO: 1249913 - DNA, 15 bp, Homo sapiens
gggtcagccaccccc

SEQ ID NO: 1249914 - DNA, 15 bp, Homo sapiens
cgggtcagccacccc

SEQ ID NO: 1249915 - DNA, 15 bp, Homo sapiens
ccgggtcagccaccc

SEQ ID NO: 1249916 - DNA, 15 bp, Homo sapiens
cccgggtcagccacc

SEQ ID NO: 1249917 - DNA, 15 bp, Homo sapiens
tcccgggtcagccac

SEQ ID NO: 1249918 - DNA, 15 bp, Homo sapiens
ctcccgggtcagcca

SEQ ID NO: 1249919 - DNA, 15 bp, Homo sapiens
gctcccgggtcagcc

SEQ ID NO: 1249920 - DNA, 15 bp, Homo sapiens
gtgctcccgggtcag

SEQ ID NO: 1249921 - DNA, 15 bp, Homo sapiens
cgtgctcccgggtca

SEQ ID NO: 1249922 - DNA, 15 bp, Homo sapiens
ccgtgctcccgggtc

SEQ ID NO: 1249923 - DNA, 15 bp, Homo sapiens
gccgtgctcccgggt

SEQ ID NO: 1249924 - DNA, 15 bp, Homo sapiens
tgccgtgctcccggg

SEQ ID NO: 1249925 - DNA, 15 bp, Homo sapiens
ctgccgtgctcccgg

SEQ ID NO: 1249926 - DNA, 15 bp, Homo sapiens
cctgccgtgctcccg

SEQ ID NO: 1249927 - DNA, 15 bp, Homo sapiens
ccctgccgtgctccc

SEQ ID NO: 1249928 - DNA, 15 bp, Homo sapiens
tccctgccgtgctcc

SEQ ID NO: 1249929 - DNA, 15 bp, Homo sapiens
ctccctgccgtgctc

SEQ ID NO: 1249930 - DNA, 15 bp, Homo sapiens
cctccctgccgtgct

SEQ ID NO: 1249931 - DNA, 15 bp, Homo sapiens
tcctccctgccgtgc

SEQ ID NO: 1249932 - DNA, 15 bp, Homo sapiens
gtcctccctgccgtg

SEQ ID NO: 1249933 - DNA, 15 bp, Homo sapiens
tgtcctccctgccgt

SEQ ID NO: 1249934 - DNA, 15 bp, Homo sapiens
gtgtcctccctgccg

SEQ ID NO: 1249935 - DNA, 15 bp, Homo sapiens
ggtgtcctccctgcc

SEQ ID NO: 1249936 - DNA, 15 bp, Homo sapiens
gggtgtcctccctgc

SEQ ID NO: 1249937 - DNA, 15 bp, Homo sapiens
tgggtgtcctccctg

SEQ ID NO: 1249938 - DNA, 15 bp, Homo sapiens
ctgggtgtcctccct

SEQ ID NO: 1249939 - DNA, 15 bp, Homo sapiens
gctgggtgtcctccc

SEQ ID NO: 1249940 - DNA, 15 bp, Homo sapiens
ggctgggtgtcctcc

SEQ ID NO: 1249941 - DNA, 15 bp, Homo sapiens
tggctgggtgtcctc

SEQ ID NO: 1249942 - DNA, 15 bp, Homo sapiens
ctggctgggtgtcct

SEQ ID NO: 1249943 - DNA, 15 bp, Homo sapiens
cctggctgggtgtcc

SEQ ID NO: 1249944 - DNA, 15 bp, Homo sapiens
gcctggctgggtgtc

SEQ ID NO: 1249945 - DNA, 15 bp, Homo sapiens
ggcctggctgggtgt

SEQ ID NO: 1249946 - DNA, 15 bp, Homo sapiens
gggcctggctgggtg

SEQ ID NO: 1249947 - DNA, 15 bp, Homo sapiens
cgggcctggctgggt

SEQ ID NO: 1249948 - DNA, 15 bp, Homo sapiens
gcgggcctggctggg

SEQ ID NO: 1249949 - DNA, 15 bp, Homo sapiens
cgcgggcctggctgg

SEQ ID NO: 1249950 - DNA, 15 bp, Homo sapiens
tcgcgggcctggctg

SEQ ID NO: 1249951 - DNA, 15 bp, Homo sapiens
ctcgcgggcctggct

SEQ ID NO: 1249952 - DNA, 15 bp, Homo sapiens
gctcgcgggcctggc

SEQ ID NO: 1249953 - DNA, 15 bp, Homo sapiens
tgctcgcgggcctgg

SEQ ID NO: 1249954 - DNA, 15 bp, Homo sapiens
ctgctcgcgggcctg

SEQ ID NO: 1249955 - DNA, 15 bp, Homo sapiens
gctgctcgcgggcct

SEQ ID NO: 1249956 - DNA, 15 bp, Homo sapiens
cgctgctcgcgggcc

SEQ ID NO: 1249957 - DNA, 15 bp, Homo sapiens
gcgctgctcgcgggc

SEQ ID NO: 1249958 - DNA, 15 bp, Homo sapiens
ggcgctgctcgcggg

SEQ ID NO: 1249959 - DNA, 15 bp, Homo sapiens
cggcgctgctcgcgg

SEQ ID NO: 1249960 - DNA, 15 bp, Homo sapiens
gcggcgctgctcgcg

SEQ ID NO: 1249961 - DNA, 15 bp, Homo sapiens
agcggcgctgctcgc

SEQ ID NO: 1249962 - DNA, 15 bp, Homo sapiens
gagcggcgctgctcg

SEQ ID NO: 1249963 - DNA, 15 bp, Homo sapiens
ggagcggcgctgctc

SEQ ID NO: 1249964 - DNA, 15 bp, Homo sapiens
gggagcggcgctgct

SEQ ID NO: 1249965 - DNA, 15 bp, Homo sapiens
ggggagcggcgctgc

SEQ ID NO: 1249966 - DNA, 15 bp, Homo sapiens
aggggagcggcgctg

SEQ ID NO: 1249967 - DNA, 15 bp, Homo sapiens
gaggggagcggcgct

SEQ ID NO: 1249968 - DNA, 15 bp, Homo sapiens
ggaggggagcggcgc

SEQ ID NO: 1249969 - DNA, 15 bp, Homo sapiens
aggaggggagcggcg

SEQ ID NO: 1249970 - DNA, 15 bp, Homo sapiens
gaggaggggagcggc

SEQ ID NO: 1249971 - DNA, 15 bp, Homo sapiens
ggaggaggggagcgg

SEQ ID NO: 1249972 - DNA, 15 bp, Homo sapiens
tggaggaggggagcg

SEQ ID NO: 1249973 - DNA, 15 bp, Homo sapiens
ctggaggaggggagc

SEQ ID NO: 1249974 - DNA, 15 bp, Homo sapiens
cctggaggaggggag

SEQ ID NO: 1249975 - DNA, 15 bp, Homo sapiens
tcctggaggagggga

SEQ ID NO: 1249976 - DNA, 15 bp, Homo sapiens
gtcctggaggagggg

SEQ ID NO: 1249977 - DNA, 15 bp, Homo sapiens
cgtcctggaggaggg

SEQ ID NO: 1249978 - DNA, 15 bp, Homo sapiens
ccgtcctggaggagg

SEQ ID NO: 1249979 - DNA, 15 bp, Homo sapiens
cccgtcctggaggag

SEQ ID NO: 1249980 - DNA, 15 bp, Homo sapiens
gcccgtcctggagga

SEQ ID NO: 1249981 - DNA, 15 bp, Homo sapiens
cgcccgtcctggagg

SEQ ID NO: 1249982 - DNA, 15 bp, Homo sapiens
ccgcccgtcctggag

SEQ ID NO: 1249983 - DNA, 15 bp, Homo sapiens
cccgcccgtcctgga

SEQ ID NO: 1249984 - DNA, 15 bp, Homo sapiens
tcccgcccgtcctgg

SEQ ID NO: 1249985 - DNA, 15 bp, Homo sapiens
ttcccgcccgtcctg

SEQ ID NO: 1249986 - DNA, 15 bp, Homo sapiens
gttcccgcccgtcct

SEQ ID NO: 1249987 - DNA, 15 bp, Homo sapiens
ggttcccgcccgtcc

SEQ ID NO: 1249988 - DNA, 15 bp, Homo sapiens
aggttcccgcccgtc

SEQ ID NO: 1249989 - DNA, 15 bp, Homo sapiens
caggttcccgcccgt

SEQ ID NO: 1249990 - DNA, 15 bp, Homo sapiens
gcaggttcccgcccg

SEQ ID NO: 1249991 - DNA, 15 bp, Homo sapiens
cgcaggttcccgccc

SEQ ID NO: 1249992 - DNA, 15 bp, Homo sapiens
tcgcaggttcccgcc

SEQ ID NO: 1249993 - DNA, 15 bp, Homo sapiens
atcgcaggttcccgc

SEQ ID NO: 1249994 - DNA, 15 bp, Homo sapiens
catcgcaggttcccg

SEQ ID NO: 1249995 - DNA, 15 bp, Homo sapiens
gcatcgcaggttccc

SEQ ID NO: 1249996 - DNA, 15 bp, Homo sapiens
ggcatcgcaggttcc

SEQ ID NO: 1249997 - DNA, 15 bp, Homo sapiens
gggcatcgcaggttc

SEQ ID NO: 1249998 - DNA, 15 bp, Homo sapiens
ggggcatcgcaggtt

SEQ ID NO: 1249999 - DNA, 15 bp, Homo sapiens
gggggcatcgcaggt

SEQ ID NO: 1250000 - DNA, 15 bp, Homo sapiens
cgggggcatcgcagg

SEQ ID NO: 1250001 - DNA, 15 bp, Homo sapiens
gcgggggcatcgcag

SEQ ID NO: 1250002 - DNA, 15 bp, Homo sapiens
ggcgggggcatcgca

SEQ ID NO: 1250003 - DNA, 15 bp, Homo sapiens
cggcgggggcatcgc

SEQ ID NO: 1250004 - DNA, 15 bp, Homo sapiens
gcggcgggggcatcg

SEQ ID NO: 1250005 - DNA, 15 bp, Homo sapiens
cgcggcgggggcatc

SEQ ID NO: 1250006 - DNA, 15 bp, Homo sapiens
acgcggcgggggcat

SEQ ID NO: 1250007 - DNA, 15 bp, Homo sapiens
cacgcggcgggggca

SEQ ID NO: 1250008 - DNA, 15 bp, Homo sapiens
ccacgcggcgggggc

SEQ ID NO: 1250009 - DNA, 15 bp, Homo sapiens
cccacgcggcggggg

SEQ ID NO: 1250010 - DNA, 15 bp, Homo sapiens
gcccacgcggcgggg

SEQ ID NO: 1250011 - DNA, 15 bp, Homo sapiens
ggcccacgcggcggg

SEQ ID NO: 1250012 - DNA, 15 bp, Homo sapiens
cggcccacgcggcgg

SEQ ID NO: 1250013 - DNA, 15 bp, Homo sapiens
acggcccacgcggcg

SEQ ID NO: 1250014 - DNA, 15 bp, Homo sapiens
cacggcccacgcggc

SEQ ID NO: 1250015 - DNA, 15 bp, Homo sapiens
ccacggcccacgcgg

SEQ ID NO: 1250016 - DNA, 15 bp, Homo sapiens
cccacggcccacgcg

SEQ ID NO: 1250017 - DNA, 15 bp, Homo sapiens
ccccacggcccacgc

SEQ ID NO: 1250018 - DNA, 15 bp, Homo sapiens
gccccacggcccacg

SEQ ID NO: 1250019 - DNA, 15 bp, Homo sapiens
cgccccacggcccac

SEQ ID NO: 1250020 - DNA, 15 bp, Homo sapiens
ccgccccacggccca

SEQ ID NO: 1250021 - DNA, 15 bp, Homo sapiens
accgccccacggccc

SEQ ID NO: 1250022 - DNA, 15 bp, Homo sapiens
gaccgccccacggcc

SEQ ID NO: 1250023 - DNA, 15 bp, Homo sapiens
agaccgccccacggc

SEQ ID NO: 1250024 - DNA, 15 bp, Homo sapiens
gagaccgccccacgg

SEQ ID NO: 1250025 - DNA, 15 bp, Homo sapiens
ggagaccgccccacg

SEQ ID NO: 1250026 - DNA, 15 bp, Homo sapiens
cggagaccgccccac

SEQ ID NO: 1250027 - DNA, 15 bp, Homo sapiens
tcggagaccgcccca

SEQ ID NO: 1250028 - DNA, 15 bp, Homo sapiens
ctcggagaccgcccc

SEQ ID NO: 1250029 - DNA, 15 bp, Homo sapiens
cctcggagaccgccc

SEQ ID NO: 1250030 - DNA, 15 bp, Homo sapiens
gcctcggagaccgcc

SEQ ID NO: 1250031 - DNA, 15 bp, Homo sapiens
tgcctcggagaccgc

SEQ ID NO: 1250032 - DNA, 15 bp, Homo sapiens
gtgcctcggagaccg

SEQ ID NO: 1250033 - DNA, 15 bp, Homo sapiens
agtgcctcggagacc

SEQ ID NO: 1250034 - DNA, 15 bp, Homo sapiens
cagtgcctcggagac

SEQ ID NO: 1250035 - DNA, 15 bp, Homo sapiens
ccagtgcctcggaga

SEQ ID NO: 1250036 - DNA, 15 bp, Homo sapiens
cccagtgcctcggag

SEQ ID NO: 1250037 - DNA, 15 bp, Homo sapiens
gcccagtgcctcgga

SEQ ID NO: 1250038 - DNA, 15 bp, Homo sapiens
cgcccagtgcctcgg

SEQ ID NO: 1250039 - DNA, 15 bp, Homo sapiens
ccgcccagtgcctcg

SEQ ID NO: 1250040 - DNA, 15 bp, Homo sapiens
cccgcccagtgcctc

SEQ ID NO: 1250041 - DNA, 15 bp, Homo sapiens
ccccgcccagtgcct

SEQ ID NO: 1250042 - DNA, 15 bp, Homo sapiens
gccccgcccagtgcc

SEQ ID NO: 1250043 - DNA, 15 bp, Homo sapiens
tgccccgcccagtgc

SEQ ID NO: 1250044 - DNA, 15 bp, Homo sapiens
gtgccccgcccagtg

SEQ ID NO: 1250045 - DNA, 15 bp, Homo sapiens
cgtgccccgcccagt

SEQ ID NO: 1250046 - DNA, 15 bp, Homo sapiens
gcgtgccccgcccag

SEQ ID NO: 1250047 - DNA, 15 bp, Homo sapiens
cgcgtgccccgccca

SEQ ID NO: 1250048 - DNA, 15 bp, Homo sapiens
ccgcgtgccccgccc

SEQ ID NO: 1250049 - DNA, 15 bp, Homo sapiens
accgcgtgccccgcc

SEQ ID NO: 1250050 - DNA, 15 bp, Homo sapiens
caccgcgtgccccgc

SEQ ID NO: 1250051 - DNA, 15 bp, Homo sapiens
ccaccgcgtgccccg

SEQ ID NO: 1250052 - DNA, 15 bp, Homo sapiens
cccaccgcgtgcccc

SEQ ID NO: 1250053 - DNA, 15 bp, Homo sapiens
gcccaccgcgtgccc

SEQ ID NO: 1250054 - DNA, 15 bp, Homo sapiens
cgcccaccgcgtgcc

SEQ ID NO: 1250055 - DNA, 15 bp, Homo sapiens
gcgcccaccgcgtgc

SEQ ID NO: 1250056 - DNA, 15 bp, Homo sapiens
agcgcccaccgcgtg

SEQ ID NO: 1250057 - DNA, 15 bp, Homo sapiens
aagcgcccaccgcgt

SEQ ID NO: 1250058 - DNA, 15 bp, Homo sapiens
gaagcgcccaccgcg

SEQ ID NO: 1250059 - DNA, 15 bp, Homo sapiens
tgaagcgcccaccgc

SEQ ID NO: 1250060 - DNA, 15 bp, Homo sapiens
gtgaagcgcccaccg

SEQ ID NO: 1250061 - DNA, 15 bp, Homo sapiens
cgtgaagcgcccacc

SEQ ID NO: 1250062 - DNA, 15 bp, Homo sapiens
ccgtgaagcgcccac

SEQ ID NO: 1250063 - DNA, 15 bp, Homo sapiens
tccgtgaagcgccca

SEQ ID NO: 1250064 - DNA, 15 bp, Homo sapiens
ttccgtgaagcgccc

SEQ ID NO: 1250065 - DNA, 15 bp, Homo sapiens
gttccgtgaagcgcc

SEQ ID NO: 1250066 - DNA, 15 bp, Homo sapiens
agttccgtgaagcgc

SEQ ID NO: 1250067 - DNA, 15 bp, Homo sapiens
gagttccgtgaagcg

SEQ ID NO: 1250068 - DNA, 15 bp, Homo sapiens
cgagttccgtgaagc

SEQ ID NO: 1250069 - DNA, 15 bp, Homo sapiens
gcgagttccgtgaag

SEQ ID NO: 1250070 - DNA, 15 bp, Homo sapiens
tgcgagttccgtgaa

SEQ ID NO: 1250071 - DNA, 15 bp, Homo sapiens
atgcgagttccgtga

SEQ ID NO: 1250072 - DNA, 15 bp, Homo sapiens
aatgcgagttccgtg

SEQ ID NO: 1250073 - DNA, 15 bp, Homo sapiens
aaatgcgagttccgt

SEQ ID NO: 1250074 - DNA, 15 bp, Homo sapiens
gaaatgcgagttccg

SEQ ID NO: 1250075 - DNA, 15 bp, Homo sapiens
ggaaatgcgagttcc

SEQ ID NO: 1250076 - DNA, 15 bp, Homo sapiens
gggaaatgcgagttc

SEQ ID NO: 1250077 - DNA, 15 bp, Homo sapiens
tgggaaatgcgagtt

SEQ ID NO: 1250078 - DNA, 15 bp, Homo sapiens
ctgggaaatgcgagt

SEQ ID NO: 1250079 - DNA, 15 bp, Homo sapiens
actgggaaatgcgag

SEQ ID NO: 1250080 - DNA, 15 bp, Homo sapiens
gactgggaaatgcga

SEQ ID NO: 1250081 - DNA, 15 bp, Homo sapiens
agactgggaaatgcg

SEQ ID NO: 1250082 - DNA, 15 bp, Homo sapiens
aagactgggaaatgc

SEQ ID NO: 1250083 - DNA, 15 bp, Homo sapiens
gaagactgggaaatg

SEQ ID NO: 1250084 - DNA, 15 bp, Homo sapiens
cgaagactgggaaat

SEQ ID NO: 1250085 - DNA, 15 bp, Homo sapiens
acgaagactgggaaa

SEQ ID NO: 1250086 - DNA, 15 bp, Homo sapiens
tacgaagactgggaa

SEQ ID NO: 1250087 - DNA, 15 bp, Homo sapiens
ttacgaagactggga

SEQ ID NO: 1250088 - DNA, 15 bp, Homo sapiens
gttacgaagactggg

SEQ ID NO: 1250089 - DNA, 15 bp, Homo sapiens
ggttacgaagactgg

SEQ ID NO: 1250090 - DNA, 15 bp, Homo sapiens
gggttacgaagactg

SEQ ID NO: 1250091 - DNA, 15 bp, Homo sapiens
tgggttacgaagact

SEQ ID NO: 1250092 - DNA, 15 bp, Homo sapiens
ctgggttacgaagac

SEQ ID NO: 1250093 - DNA, 15 bp, Homo sapiens
cctgggttacgaaga

SEQ ID NO: 1250094 - DNA, 15 bp, Homo sapiens
tcctgggttacgaag

SEQ ID NO: 1250095 - DNA, 15 bp, Homo sapiens
ctcctgggttacgaa

SEQ ID NO: 1250096 - DNA, 15 bp, Homo sapiens
cctcctgggttacga

SEQ ID NO: 1250097 - DNA, 15 bp, Homo sapiens
tcctcctgggttacg

SEQ ID NO: 1250098 - DNA, 15 bp, Homo sapiens
ttcctcctgggttac

SEQ ID NO: 1250099 - DNA, 15 bp, Homo sapiens
cttcctcctgggtta

SEQ ID NO: 1250100 - DNA, 15 bp, Homo sapiens
gcttcctcctgggtt

SEQ ID NO: 1250101 - DNA, 15 bp, Homo sapiens
ggcttcctcctgggt

SEQ ID NO: 1250102 - DNA, 15 bp, Homo sapiens
gggcttcctcctggg

SEQ ID NO: 1250103 - DNA, 15 bp, Homo sapiens
tgggcttcctcctgg

SEQ ID NO: 1250104 - DNA, 15 bp, Homo sapiens
gtgggcttcctcctg

SEQ ID NO: 1250105 - DNA, 15 bp, Homo sapiens
cgtgggcttcctcct

SEQ ID NO: 1250106 - DNA, 15 bp, Homo sapiens
ccgtgggcttcctcc

SEQ ID NO: 1250107 - DNA, 15 bp, Homo sapiens
gccgtgggcttcctc

SEQ ID NO: 1250108 - DNA, 15 bp, Homo sapiens
cgccgtgggcttcct

SEQ ID NO: 1250109 - DNA, 15 bp, Homo sapiens
acgccgtgggcttcc

SEQ ID NO: 1250110 - DNA, 15 bp, Homo sapiens
gacgccgtgggcttc

SEQ ID NO: 1250111 - DNA, 15 bp, Homo sapiens
ggacgccgtgggctt

SEQ ID NO: 1250112 - DNA, 15 bp, Homo sapiens
aggacgccgtgggct

SEQ ID NO: 1250113 - DNA, 15 bp, Homo sapiens
caggacgccgtgggc

SEQ ID NO: 1250114 - DNA, 15 bp, Homo sapiens
gcaggacgccgtggg

SEQ ID NO: 1250115 - DNA, 15 bp, Homo sapiens
tgcaggacgccgtgg

SEQ ID NO: 1250116 - DNA, 15 bp, Homo sapiens
gtgcaggacgccgtg

SEQ ID NO: 1250117 - DNA, 15 bp, Homo sapiens
ggtgcaggacgccgt

SEQ ID NO: 1250118 - DNA, 15 bp, Homo sapiens
cggtgcaggacgccg

SEQ ID NO: 1250119 - DNA, 15 bp, Homo sapiens
ccggtgcaggacgcc

SEQ ID NO: 1250120 - DNA, 15 bp, Homo sapiens
gccggtgcaggacgc

SEQ ID NO: 1250121 - DNA, 15 bp, Homo sapiens
cgccggtgcaggacg

SEQ ID NO: 1250122 - DNA, 15 bp, Homo sapiens
gcgccggtgcaggac

SEQ ID NO: 1250123 - DNA, 15 bp, Homo sapiens
ggcgccggtgcagga

SEQ ID NO: 1250124 - DNA, 15 bp, Homo sapiens
cggcgccggtgcagg

SEQ ID NO: 1250125 - DNA, 15 bp, Homo sapiens
ccggcgccggtgcag

SEQ ID NO: 1250126 - DNA, 15 bp, Homo sapiens
gccggcgccggtgca

SEQ ID NO: 1250127 - DNA, 15 bp, Homo sapiens
cgccggcgccggtgc

SEQ ID NO: 1250128 - DNA, 15 bp, Homo sapiens
gcgccggcgccggtg

SEQ ID NO: 1250129 - DNA, 15 bp, Homo sapiens
cgcgccggcgccggt

SEQ ID NO: 1250130 - DNA, 15 bp, Homo sapiens
gcgcgccggcgccgg

SEQ ID NO: 1250131 - DNA, 15 bp, Homo sapiens
ggcgcgccggcgccg

SEQ ID NO: 1250132 - DNA, 15 bp, Homo sapiens
tggcgcgccggcgcc

SEQ ID NO: 1250133 - DNA, 15 bp, Homo sapiens
ttggcgcgccggcgc

SEQ ID NO: 1250134 - DNA, 15 bp, Homo sapiens
gttggcgcgccggcg

SEQ ID NO: 1250135 - DNA, 15 bp, Homo sapiens
cgttggcgcgccggc

SEQ ID NO: 1250136 - DNA, 15 bp, Homo sapiens
gcgttggcgcgccgg

SEQ ID NO: 1250137 - DNA, 15 bp, Homo sapiens
cgcgttggcgcgccg

SEQ ID NO: 1250138 - DNA, 15 bp, Homo sapiens
acgcgttggcgcgcc

SEQ ID NO: 1250139 - DNA, 15 bp, Homo sapiens
aacgcgttggcgcgc

SEQ ID NO: 1250140 - DNA, 15 bp, Homo sapiens
gaacgcgttggcgcg

SEQ ID NO: 1250141 - DNA, 15 bp, Homo sapiens
ggaacgcgttggcgc

SEQ ID NO: 1250142 - DNA, 15 bp, Homo sapiens
aggaacgcgttggcg

SEQ ID NO: 1250143 - DNA, 15 bp, Homo sapiens
caggaacgcgttggc

SEQ ID NO: 1250144 - DNA, 15 bp, Homo sapiens
ccaggaacgcgttgg

SEQ ID NO: 1250145 - DNA, 15 bp, Homo sapiens
tccaggaacgcgttg

SEQ ID NO: 1250146 - DNA, 15 bp, Homo sapiens
ctccaggaacgcgtt

SEQ ID NO: 1250147 - DNA, 15 bp, Homo sapiens
cctccaggaacgcgt

SEQ ID NO: 1250148 - DNA, 15 bp, Homo sapiens
tcctccaggaacgcg

SEQ ID NO: 1250149 - DNA, 15 bp, Homo sapiens
ctcctccaggaacgc

SEQ ID NO: 1250150 - DNA, 15 bp, Homo sapiens
gctcctccaggaacg

SEQ ID NO: 1250151 - DNA, 15 bp, Homo sapiens
agctcctccaggaac

SEQ ID NO: 1250152 - DNA, 15 bp, Homo sapiens
cagctcctccaggaa

SEQ ID NO: 1250153 - DNA, 15 bp, Homo sapiens
gcagctcctccagga

SEQ ID NO: 1250154 - DNA, 15 bp, Homo sapiens
cgcagctcctccagg

SEQ ID NO: 1250155 - DNA, 15 bp, Homo sapiens
ccgcagctcctccag

SEQ ID NO: 1250156 - DNA, 15 bp, Homo sapiens
gccgcagctcctcca

SEQ ID NO: 1250157 - DNA, 15 bp, Homo sapiens
ggccgcagctcctcc

SEQ ID NO: 1250158 - DNA, 15 bp, Homo sapiens
cggccgcagctcctc

SEQ ID NO: 1250159 - DNA, 15 bp, Homo sapiens
ccggccgcagctcct

SEQ ID NO: 1250160 - DNA, 15 bp, Homo sapiens
cccggccgcagctcc

SEQ ID NO: 1250161 - DNA, 15 bp, Homo sapiens
gcccggccgcagctc

SEQ ID NO: 1250162 - DNA, 15 bp, Homo sapiens
agcccggccgcagct

SEQ ID NO: 1250163 - DNA, 15 bp, Homo sapiens
gagcccggccgcagc

SEQ ID NO: 1250164 - DNA, 15 bp, Homo sapiens
ggagcccggccgcag

SEQ ID NO: 1250165 - DNA, 15 bp, Homo sapiens
gggagcccggccgca

SEQ ID NO: 1250166 - DNA, 15 bp, Homo sapiens
agggagcccggccgc

SEQ ID NO: 1250167 - DNA, 15 bp, Homo sapiens
cagggagcccggccg

SEQ ID NO: 1250168 - DNA, 15 bp, Homo sapiens
ccagggagcccggcc

SEQ ID NO: 1250169 - DNA, 15 bp, Homo sapiens
tccagggagcccggc

SEQ ID NO: 1250170 - DNA, 15 bp, Homo sapiens
ctccagggagcccgg

SEQ ID NO: 1250171 - DNA, 15 bp, Homo sapiens
tctccagggagcccg

SEQ ID NO: 1250172 - DNA, 15 bp, Homo sapiens
ctctccagggagccc

SEQ ID NO: 1250173 - DNA, 15 bp, Homo sapiens
cctctccagggagcc

SEQ ID NO: 1250174 - DNA, 15 bp, Homo sapiens
ccctctccagggagc

SEQ ID NO: 1250175 - DNA, 15 bp, Homo sapiens
tccctctccagggag

SEQ ID NO: 1250176 - DNA, 15 bp, Homo sapiens
ctccctctccaggga

SEQ ID NO: 1250177 - DNA, 15 bp, Homo sapiens
actccctctccaggg

SEQ ID NO: 1250178 - DNA, 15 bp, Homo sapiens
cactccctctccagg

SEQ ID NO: 1250179 - DNA, 15 bp, Homo sapiens
gcactccctctccag

SEQ ID NO: 1250180 - DNA, 15 bp, Homo sapiens
tgcactccctctcca

SEQ ID NO: 1250181 - DNA, 15 bp, Homo sapiens
ttgcactccctctcc

SEQ ID NO: 1250182 - DNA, 15 bp, Homo sapiens
cttgcactccctctc

SEQ ID NO: 1250183 - DNA, 15 bp, Homo sapiens
ccttgcactccctct

SEQ ID NO: 1250184 - DNA, 15 bp, Homo sapiens
tccttgcactccctc

SEQ ID NO: 1250185 - DNA, 15 bp, Homo sapiens
ctccttgcactccct

SEQ ID NO: 1250186 - DNA, 15 bp, Homo sapiens
cctccttgcactccc

SEQ ID NO: 1250187 - DNA, 15 bp, Homo sapiens
tcctccttgcactcc

SEQ ID NO: 1250188 - DNA, 15 bp, Homo sapiens
ctcctccttgcactc

SEQ ID NO: 1250189 - DNA, 15 bp, Homo sapiens
gctcctccttgcact

SEQ ID NO: 1250190 - DNA, 15 bp, Homo sapiens
tgctcctccttgcac

SEQ ID NO: 1250191 - DNA, 15 bp, Homo sapiens
ctgctcctccttgca

SEQ ID NO: 1250192 - DNA, 15 bp, Homo sapiens
actgctcctccttgc

SEQ ID NO: 1250193 - DNA, 15 bp, Homo sapiens
cactgctcctccttg

SEQ ID NO: 1250194 - DNA, 15 bp, Homo sapiens
gcactgctcctcctt

SEQ ID NO: 1250195 - DNA, 15 bp, Homo sapiens
agcactgctcctcct

SEQ ID NO: 1250196 - DNA, 15 bp, Homo sapiens
gagcactgctcctcc

SEQ ID NO: 1250197 - DNA, 15 bp, Homo sapiens
ggagcactgctcctc

SEQ ID NO: 1250198 - DNA, 15 bp, Homo sapiens
aggagcactgctcct

SEQ ID NO: 1250199 - DNA, 15 bp, Homo sapiens
aaggagcactgctcc

SEQ ID NO: 1250200 - DNA, 15 bp, Homo sapiens
gaaggagcactgctc

SEQ ID NO: 1250201 - DNA, 15 bp, Homo sapiens
cgaaggagcactgct

SEQ ID NO: 1250202 - DNA, 15 bp, Homo sapiens
tcgaaggagcactgc

SEQ ID NO: 1250203 - DNA, 15 bp, Homo sapiens
ctcgaaggagcactg

SEQ ID NO: 1250204 - DNA, 15 bp, Homo sapiens
cctcgaaggagcact

SEQ ID NO: 1250205 - DNA, 15 bp, Homo sapiens
tcctcgaaggagcac

SEQ ID NO: 1250206 - DNA, 15 bp, Homo sapiens
ctcctcgaaggagca

SEQ ID NO: 1250207 - DNA, 15 bp, Homo sapiens
cctcctcgaaggagc

SEQ ID NO: 1250208 - DNA, 15 bp, Homo sapiens
gcctcctcgaaggag

SEQ ID NO: 1250209 - DNA, 15 bp, Homo sapiens
ggcctcctcgaagga

SEQ ID NO: 1250210 - DNA, 15 bp, Homo sapiens
gggcctcctcgaagg

SEQ ID NO: 1250211 - DNA, 15 bp, Homo sapiens
cgggcctcctcgaag

SEQ ID NO: 1250212 - DNA, 15 bp, Homo sapiens
ccgggcctcctcgaa

SEQ ID NO: 1250213 - DNA, 15 bp, Homo sapiens
cccgggcctcctcga

SEQ ID NO: 1250214 - DNA, 15 bp, Homo sapiens
tcccgggcctcctcg

SEQ ID NO: 1250215 - DNA, 15 bp, Homo sapiens
ctcccgggcctcctc

SEQ ID NO: 1250216 - DNA, 15 bp, Homo sapiens
tctcccgggcctcct

SEQ ID NO: 1250217 - DNA, 15 bp, Homo sapiens
atctcccgggcctcc

SEQ ID NO: 1250218 - DNA, 15 bp, Homo sapiens
gatctcccgggcctc

SEQ ID NO: 1250219 - DNA, 15 bp, Homo sapiens
agatctcccgggcct

SEQ ID NO: 1250220 - DNA, 15 bp, Homo sapiens
aagatctcccgggcc

SEQ ID NO: 1250221 - DNA, 15 bp, Homo sapiens
gaagatctcccgggc

SEQ ID NO: 1250222 - DNA, 15 bp, Homo sapiens
tgaagatctcccggg

SEQ ID NO: 1250223 - DNA, 15 bp, Homo sapiens
ttgaagatctcccgg

SEQ ID NO: 1250224 - DNA, 15 bp, Homo sapiens
cttgaagatctcccg

SEQ ID NO: 1250225 - DNA, 15 bp, Homo sapiens
ccttgaagatctccc

SEQ ID NO: 1250226 - DNA, 15 bp, Homo sapiens
tccttgaagatctcc

SEQ ID NO: 1250227 - DNA, 15 bp, Homo sapiens
gtccttgaagatctc

SEQ ID NO: 1250228 - DNA, 15 bp, Homo sapiens
cgtccttgaagatct

SEQ ID NO: 1250229 - DNA, 15 bp, Homo sapiens
gcgtccttgaagatc

SEQ ID NO: 1250230 - DNA, 15 bp, Homo sapiens
cgcgtccttgaagat

SEQ ID NO: 1250231 - DNA, 15 bp, Homo sapiens
ccgcgtccttgaaga

SEQ ID NO: 1250232 - DNA, 15 bp, Homo sapiens
tccgcgtccttgaag

SEQ ID NO: 1250233 - DNA, 15 bp, Homo sapiens
ctccgcgtccttgaa

SEQ ID NO: 1250234 - DNA, 15 bp, Homo sapiens
tctccgcgtccttga

SEQ ID NO: 1250235 - DNA, 15 bp, Homo sapiens
ctctccgcgtccttg

SEQ ID NO: 1250236 - DNA, 15 bp, Homo sapiens
cctctccgcgtcctt

SEQ ID NO: 1250237 - DNA, 15 bp, Homo sapiens
tcctctccgcgtcct

SEQ ID NO: 1250238 - DNA, 15 bp, Homo sapiens
gtcctctccgcgtcc

SEQ ID NO: 1250239 - DNA, 15 bp, Homo sapiens
cgtcctctccgcgtc

SEQ ID NO: 1250240 - DNA, 15 bp, Homo sapiens
ccgtcctctccgcgt

SEQ ID NO: 1250241 - DNA, 15 bp, Homo sapiens
accgtcctctccgcg

SEQ ID NO: 1250242 - DNA, 15 bp, Homo sapiens
caccgtcctctccgc

SEQ ID NO: 1250243 - DNA, 15 bp, Homo sapiens
tcaccgtcctctccg

SEQ ID NO: 1250244 - DNA, 15 bp, Homo sapiens
ctcaccgtcctctcc

SEQ ID NO: 1250245 - DNA, 15 bp, Homo sapiens
gctcaccgtcctctc

SEQ ID NO: 1250246 - DNA, 15 bp, Homo sapiens
ggctcaccgtcctct

SEQ ID NO: 1250247 - DNA, 15 bp, Homo sapiens
gggctcaccgtcctc

SEQ ID NO: 1250248 - DNA, 15 bp, Homo sapiens
tgggctcaccgtcct

SEQ ID NO: 1250249 - DNA, 15 bp, Homo sapiens
ctgggctcaccgtcc

SEQ ID NO: 1250250 - DNA, 15 bp, Homo sapiens
gctgggctcaccgtc

SEQ ID NO: 1250251 - DNA, 15 bp, Homo sapiens
ggctgggctcaccgt

SEQ ID NO: 1250252 - DNA, 15 bp, Homo sapiens
aggctgggctcaccg

SEQ ID NO: 1250253 - DNA, 15 bp, Homo sapiens
gaggctgggctcacc

SEQ ID NO: 1250254 - DNA, 15 bp, Homo sapiens
cgaggctgggctcac

SEQ ID NO: 1250255 - DNA, 15 bp, Homo sapiens
ccgaggctgggctca

SEQ ID NO: 1250256 - DNA, 15 bp, Homo sapiens
cccgaggctgggctc

SEQ ID NO: 1250257 - DNA, 15 bp, Homo sapiens
ccccgaggctgggct

SEQ ID NO: 1250258 - DNA, 15 bp, Homo sapiens
gccccgaggctgggc

SEQ ID NO: 1250259 - DNA, 15 bp, Homo sapiens
cgccccgaggctggg

SEQ ID NO: 1250260 - DNA, 15 bp, Homo sapiens
gcgccccgaggctgg

SEQ ID NO: 1250261 - DNA, 15 bp, Homo sapiens
ggcgccccgaggctg

SEQ ID NO: 1250262 - DNA, 15 bp, Homo sapiens
gggcgccccgaggct

SEQ ID NO: 1250263 - DNA, 15 bp, Homo sapiens
ggggcgccccgaggc

SEQ ID NO: 1250264 - DNA, 15 bp, Homo sapiens
cggggcgccccgagg

SEQ ID NO: 1250265 - DNA, 15 bp, Homo sapiens
gcggggcgccccgag

SEQ ID NO: 1250266 - DNA, 15 bp, Homo sapiens
cgcggggcgccccga

SEQ ID NO: 1250267 - DNA, 15 bp, Homo sapiens
gcgcggggcgccccg

SEQ ID NO: 1250268 - DNA, 15 bp, Homo sapiens
ggcgcggggcgcccc

SEQ ID NO: 1250269 - DNA, 15 bp, Homo sapiens
cggcgcggggcgccc

SEQ ID NO: 1250270 - DNA, 15 bp, Homo sapiens
gcggcgcggggcgcc

SEQ ID NO: 1250271 - DNA, 15 bp, Homo sapiens
cgcggcgcggggcgc

SEQ ID NO: 1250272 - DNA, 15 bp, Homo sapiens
ccgcggcgcggggcg

SEQ ID NO: 1250273 - DNA, 15 bp, Homo sapiens
tccgcggcgcggggc

SEQ ID NO: 1250274 - DNA, 15 bp, Homo sapiens
gtccgcggcgcgggg

SEQ ID NO: 1250275 - DNA, 15 bp, Homo sapiens
tgtccgcggcgcggg

SEQ ID NO: 1250276 - DNA, 15 bp, Homo sapiens
gtgtccgcggcgcgg

SEQ ID NO: 1250277 - DNA, 15 bp, Homo sapiens
agtgtccgcggcgcg

SEQ ID NO: 1250278 - DNA, 15 bp, Homo sapiens
cagtgtccgcggcgc

SEQ ID NO: 1250279 - DNA, 15 bp, Homo sapiens
gcagtgtccgcggcg

SEQ ID NO: 1250280 - DNA, 15 bp, Homo sapiens
tgcagtgtccgcggc

SEQ ID NO: 1250281 - DNA, 15 bp, Homo sapiens
ctgcagtgtccgcgg

SEQ ID NO: 1250282 - DNA, 15 bp, Homo sapiens
cctgcagtgtccgcg

SEQ ID NO: 1250283 - DNA, 15 bp, Homo sapiens
gcctgcagtgtccgc

SEQ ID NO: 1250284 - DNA, 15 bp, Homo sapiens
cgcctgcagtgtccg

SEQ ID NO: 1250285 - DNA, 15 bp, Homo sapiens
ccgcctgcagtgtcc

SEQ ID NO: 1250286 - DNA, 15 bp, Homo sapiens
gccgcctgcagtgtc

SEQ ID NO: 1250287 - DNA, 15 bp, Homo sapiens
cgccgcctgcagtgt

SEQ ID NO: 1250288 - DNA, 15 bp, Homo sapiens
ccgccgcctgcagtg

SEQ ID NO: 1250289 - DNA, 15 bp, Homo sapiens
accgccgcctgcagt

SEQ ID NO: 1250290 - DNA, 15 bp, Homo sapiens
caccgccgcctgcag

SEQ ID NO: 1250291 - DNA, 15 bp, Homo sapiens
tcaccgccgcctgca

SEQ ID NO: 1250292 - DNA, 15 bp, Homo sapiens
ttcaccgccgcctgc

SEQ ID NO: 1250293 - DNA, 15 bp, Homo sapiens
gttcaccgccgcctg

SEQ ID NO: 1250294 - DNA, 15 bp, Homo sapiens
ggttcaccgccgcct

SEQ ID NO: 1250295 - DNA, 15 bp, Homo sapiens
tggttcaccgccgcc

SEQ ID NO: 1250296 - DNA, 15 bp, Homo sapiens
ctggttcaccgccgc

SEQ ID NO: 1250297 - DNA, 15 bp, Homo sapiens
cctggttcaccgccg

SEQ ID NO: 1250298 - DNA, 15 bp, Homo sapiens
gcctggttcaccgcc

SEQ ID NO: 1250299 - DNA, 15 bp, Homo sapiens
ggcctggttcaccgc

SEQ ID NO: 1250300 - DNA, 15 bp, Homo sapiens
cggcctggttcaccg

SEQ ID NO: 1250301 - DNA, 15 bp, Homo sapiens
gcggcctggttcacc

SEQ ID NO: 1250302 - DNA, 15 bp, Homo sapiens
cgcggcctggttcac

SEQ ID NO: 1250303 - DNA, 15 bp, Homo sapiens
acgcggcctggttca

SEQ ID NO: 1250304 - DNA, 15 bp, Homo sapiens
cacgcggcctggttc

SEQ ID NO: 1250305 - DNA, 15 bp, Homo sapiens
ccacgcggcctggtt

SEQ ID NO: 1250306 - DNA, 15 bp, Homo sapiens
cccacgcggcctggt

SEQ ID NO: 1250307 - DNA, 15 bp, Homo sapiens
ccccacgcggcctgg

SEQ ID NO: 1250308 - DNA, 15 bp, Homo sapiens
gccccacgcggcctg

SEQ ID NO: 1250309 - DNA, 15 bp, Homo sapiens
ggccccacgcggcct

SEQ ID NO: 1250310 - DNA, 15 bp, Homo sapiens
cggccccacgcggcc

SEQ ID NO: 1250311 - DNA, 15 bp, Homo sapiens
gcggccccacgcggc

SEQ ID NO: 1250312 - DNA, 15 bp, Homo sapiens
ggcggccccacgcgg

SEQ ID NO: 1250313 - DNA, 15 bp, Homo sapiens
aggcggccccacgcg

SEQ ID NO: 1250314 - DNA, 15 bp, Homo sapiens
caggcggccccacgc

SEQ ID NO: 1250315 - DNA, 15 bp, Homo sapiens
gcaggcggccccacg

SEQ ID NO: 1250316 - DNA, 15 bp, Homo sapiens
cgcaggcggccccac

SEQ ID NO: 1250317 - DNA, 15 bp, Homo sapiens
acgcaggcggcccca

SEQ ID NO: 1250318 - DNA, 15 bp, Homo sapiens
gacgcaggcggcccc

SEQ ID NO: 1250319 - DNA, 15 bp, Homo sapiens
agacgcaggcggccc

SEQ ID NO: 1250320 - DNA, 15 bp, Homo sapiens
gagacgcaggcggcc

SEQ ID NO: 1250321 - DNA, 15 bp, Homo sapiens
agagacgcaggcggc

SEQ ID NO: 1250322 - DNA, 15 bp, Homo sapiens
aagagacgcaggcgg

SEQ ID NO: 1250323 - DNA, 15 bp, Homo sapiens
aaagagacgcaggcg

SEQ ID NO: 1250324 - DNA, 15 bp, Homo sapiens
caaagagacgcaggc

SEQ ID NO: 1250325 - DNA, 15 bp, Homo sapiens
ccaaagagacgcagg

SEQ ID NO: 1250326 - DNA, 15 bp, Homo sapiens
gccaaagagacgcag

SEQ ID NO: 1250327 - DNA, 15 bp, Homo sapiens
agccaaagagacgca

SEQ ID NO: 1250328 - DNA, 15 bp, Homo sapiens
cagccaaagagacgc

SEQ ID NO: 1250329 - DNA, 15 bp, Homo sapiens
gcagccaaagagacg

SEQ ID NO: 1250330 - DNA, 15 bp, Homo sapiens
cgcagccaaagagac

SEQ ID NO: 1250331 - DNA, 15 bp, Homo sapiens
ccgcagccaaagaga

SEQ ID NO: 1250332 - DNA, 15 bp, Homo sapiens
gccgcagccaaagag

SEQ ID NO: 1250333 - DNA, 15 bp, Homo sapiens
agccgcagccaaaga

SEQ ID NO: 1250334 - DNA, 15 bp, Homo sapiens
cagccgcagccaaag

SEQ ID NO: 1250335 - DNA, 15 bp, Homo sapiens
acagccgcagccaaa

SEQ ID NO: 1250336 - DNA, 15 bp, Homo sapiens
cacagccgcagccaa

SEQ ID NO: 1250337 - DNA, 15 bp, Homo sapiens
ccacagccgcagcca

SEQ ID NO: 1250338 - DNA, 15 bp, Homo sapiens
cccacagccgcagcc

SEQ ID NO: 1250339 - DNA, 15 bp, Homo sapiens
gcccacagccgcagc

SEQ ID NO: 1250340 - DNA, 15 bp, Homo sapiens
cgcccacagccgcag

SEQ ID NO: 1250341 - DNA, 15 bp, Homo sapiens
ccgcccacagccgca

SEQ ID NO: 1250342 - DNA, 15 bp, Homo sapiens
gccgcccacagccgc

SEQ ID NO: 1250343 - DNA, 15 bp, Homo sapiens
cgccgcccacagccg

SEQ ID NO: 1250344 - DNA, 15 bp, Homo sapiens
tcgccgcccacagcc

SEQ ID NO: 1250345 - DNA, 15 bp, Homo sapiens
ttcgccgcccacagc

SEQ ID NO: 1250346 - DNA, 15 bp, Homo sapiens
gttcgccgcccacag

SEQ ID NO: 1250347 - DNA, 15 bp, Homo sapiens
tgttcgccgcccaca

SEQ ID NO: 1250348 - DNA, 15 bp, Homo sapiens
gtgttcgccgcccac

SEQ ID NO: 1250349 - DNA, 15 bp, Homo sapiens
cgtgttcgccgccca

SEQ ID NO: 1250350 - DNA, 15 bp, Homo sapiens
gcgtgttcgccgccc

SEQ ID NO: 1250351 - DNA, 15 bp, Homo sapiens
tgcgtgttcgccgcc

SEQ ID NO: 1250352 - DNA, 15 bp, Homo sapiens
ctgcgtgttcgccgc

SEQ ID NO: 1250353 - DNA, 15 bp, Homo sapiens
gctgcgtgttcgccg

SEQ ID NO: 1250354 - DNA, 15 bp, Homo sapiens
cgctgcgtgttcgcc

SEQ ID NO: 1250355 - DNA, 15 bp, Homo sapiens
ccgctgcgtgttcgc

SEQ ID NO: 1250356 - DNA, 15 bp, Homo sapiens
gccgctgcgtgttcg

SEQ ID NO: 1250357 - DNA, 15 bp, Homo sapiens
cgccgctgcgtgttc

SEQ ID NO: 1250358 - DNA, 15 bp, Homo sapiens
gcgccgctgcgtgtt

SEQ ID NO: 1250359 - DNA, 15 bp, Homo sapiens
ggcgccgctgcgtgt

SEQ ID NO: 1250360 - DNA, 15 bp, Homo sapiens
gggcgccgctgcgtg

SEQ ID NO: 1250361 - DNA, 15 bp, Homo sapiens
cgggcgccgctgcgt

SEQ ID NO: 1250362 - DNA, 15 bp, Homo sapiens
gcgggcgccgctgcg

SEQ ID NO: 1250363 - DNA, 15 bp, Homo sapiens
cgcgggcgccgctgc

SEQ ID NO: 1250364 - DNA, 15 bp, Homo sapiens
gcgcgggcgccgctg

SEQ ID NO: 1250365 - DNA, 15 bp, Homo sapiens
cgcgcgggcgccgct

SEQ ID NO: 1250366 - DNA, 15 bp, Homo sapiens
ccgcgcgggcgccgc

SEQ ID NO: 1250367 - DNA, 15 bp, Homo sapiens
gccgcgcgggcgccg

SEQ ID NO: 1250368 - DNA, 15 bp, Homo sapiens
cgccgcgcgggcgcc

SEQ ID NO: 1250369 - DNA, 15 bp, Homo sapiens
gcgccgcgcgggcgc

SEQ ID NO: 1250370 - DNA, 15 bp, Homo sapiens
agcgccgcgcgggcg

SEQ ID NO: 1250371 - DNA, 15 bp, Homo sapiens
aagcgccgcgcgggc

SEQ ID NO: 1250372 - DNA, 15 bp, Homo sapiens
aaagcgccgcgcggg

SEQ ID NO: 1250373 - DNA, 15 bp, Homo sapiens
gaaagcgccgcgcgg

SEQ ID NO: 1250374 - DNA, 15 bp, Homo sapiens
agaaagcgccgcgcg

SEQ ID NO: 1250375 - DNA, 15 bp, Homo sapiens
cagaaagcgccgcgc

SEQ ID NO: 1250376 - DNA, 15 bp, Homo sapiens
gcagaaagcgccgcg

SEQ ID NO: 1250377 - DNA, 15 bp, Homo sapiens
cgcagaaagcgccgc

SEQ ID NO: 1250378 - DNA, 15 bp, Homo sapiens
ccgcagaaagcgccg

SEQ ID NO: 1250379 - DNA, 15 bp, Homo sapiens
cccgcagaaagcgcc

SEQ ID NO: 1250380 - DNA, 15 bp, Homo sapiens
ccccgcagaaagcgc

SEQ ID NO: 1250381 - DNA, 15 bp, Homo sapiens
cccccgcagaaagcg

SEQ ID NO: 1250382 - DNA, 15 bp, Homo sapiens
acccccgcagaaagc

SEQ ID NO: 1250383 - DNA, 15 bp, Homo sapiens
gacccccgcagaaag

SEQ ID NO: 1250384 - DNA, 15 bp, Homo sapiens
cgacccccgcagaaa

SEQ ID NO: 1250385 - DNA, 15 bp, Homo sapiens
gcgacccccgcagaa

SEQ ID NO: 1250386 - DNA, 15 bp, Homo sapiens
agcgacccccgcaga

SEQ ID NO: 1250387 - DNA, 15 bp, Homo sapiens
aagcgacccccgcag

SEQ ID NO: 1250388 - DNA, 15 bp, Homo sapiens
aaagcgacccccgca

SEQ ID NO: 1250389 - DNA, 15 bp, Homo sapiens
gaaagcgacccccgc

SEQ ID NO: 1250390 - DNA, 15 bp, Homo sapiens
ggaaagcgacccccg

SEQ ID NO: 1250391 - DNA, 15 bp, Homo sapiens
cggaaagcgaccccc

SEQ ID NO: 1250392 - DNA, 15 bp, Homo sapiens
gcggaaagcgacccc

SEQ ID NO: 1250393 - DNA, 15 bp, Homo sapiens
ggcggaaagcgaccc

SEQ ID NO: 1250394 - DNA, 15 bp, Homo sapiens
gggcggaaagcgacc

SEQ ID NO: 1250395 - DNA, 15 bp, Homo sapiens
cgggcggaaagcgac

SEQ ID NO: 1250396 - DNA, 15 bp, Homo sapiens
ccgggcggaaagcga

SEQ ID NO: 1250397 - DNA, 15 bp, Homo sapiens
cccgggcggaaagcg

SEQ ID NO: 1250398 - DNA, 15 bp, Homo sapiens
ccccgggcggaaagc

SEQ ID NO: 1250399 - DNA, 15 bp, Homo sapiens
accccgggcggaaag

SEQ ID NO: 1250400 - DNA, 15 bp, Homo sapiens
caccccgggcggaaa

SEQ ID NO: 1250401 - DNA, 15 bp, Homo sapiens
tcaccccgggcggaa

SEQ ID NO: 1250402 - DNA, 15 bp, Homo sapiens
gtcaccccgggcgga

SEQ ID NO: 1250403 - DNA, 15 bp, Homo sapiens
agtcaccccgggcgg

SEQ ID NO: 1250404 - DNA, 15 bp, Homo sapiens
gagtcaccccgggcg

SEQ ID NO: 1250405 - DNA, 15 bp, Homo sapiens
ggagtcaccccgggc

SEQ ID NO: 1250406 - DNA, 15 bp, Homo sapiens
cggagtcaccccggg

SEQ ID NO: 1250407 - DNA, 15 bp, Homo sapiens
gcggagtcaccccgg

SEQ ID NO: 1250408 - DNA, 15 bp, Homo sapiens
agcggagtcaccccg

SEQ ID NO: 1250409 - DNA, 15 bp, Homo sapiens
aagcggagtcacccc

SEQ ID NO: 1250410 - DNA, 15 bp, Homo sapiens
aaagcggagtcaccc

SEQ ID NO: 1250411 - DNA, 15 bp, Homo sapiens
gaaagcggagtcacc

SEQ ID NO: 1250412 - DNA, 15 bp, Homo sapiens
ggaaagcggagtcac

SEQ ID NO: 1250413 - DNA, 15 bp, Homo sapiens
aggaaagcggagtca

SEQ ID NO: 1250414 - DNA, 15 bp, Homo sapiens
caggaaagcggagtc

SEQ ID NO: 1250415 - DNA, 15 bp, Homo sapiens
ccaggaaagcggagt

SEQ ID NO: 1250416 - DNA, 15 bp, Homo sapiens
cccaggaaagcggag

SEQ ID NO: 1250417 - DNA, 15 bp, Homo sapiens
gcccaggaaagcgga

SEQ ID NO: 1250418 - DNA, 15 bp, Homo sapiens
cgcccaggaaagcgg

SEQ ID NO: 1250419 - DNA, 15 bp, Homo sapiens
tcgcccaggaaagcg

SEQ ID NO: 1250420 - DNA, 15 bp, Homo sapiens
atcgcccaggaaagc

SEQ ID NO: 1250421 - DNA, 15 bp, Homo sapiens
catcgcccaggaaag

SEQ ID NO: 1250422 - DNA, 15 bp, Homo sapiens
gcatcgcccaggaaa

SEQ ID NO: 1250423 - DNA, 15 bp, Homo sapiens
ggcatcgcccaggaa

SEQ ID NO: 1250424 - DNA, 15 bp, Homo sapiens
gggcatcgcccagga

SEQ ID NO: 1250425 - DNA, 15 bp, Homo sapiens
ggggcatcgcccagg

SEQ ID NO: 1250426 - DNA, 15 bp, Homo sapiens
gggggcatcgcccag

SEQ ID NO: 1250427 - DNA, 15 bp, Homo sapiens
ggggggcatcgccca

SEQ ID NO: 1250428 - DNA, 15 bp, Homo sapiens
tggggggcatcgccc

SEQ ID NO: 1250429 - DNA, 15 bp, Homo sapiens
gtggggggcatcgcc

SEQ ID NO: 1250430 - DNA, 15 bp, Homo sapiens
ggtggggggcatcgc

SEQ ID NO: 1250431 - DNA, 15 bp, Homo sapiens
gggtggggggcatcg

SEQ ID NO: 1250432 - DNA, 15 bp, Homo sapiens
ggggtggggggcatc

SEQ ID NO: 1250433 - DNA, 15 bp, Homo sapiens
gggggtggggggcat

SEQ ID NO: 1250434 - DNA, 15 bp, Homo sapiens
tgggggtggggggca

SEQ ID NO: 1250435 - DNA, 15 bp, Homo sapiens
ctgggggtggggggc

SEQ ID NO: 1250436 - DNA, 15 bp, Homo sapiens
cctgggggtgggggg

SEQ ID NO: 1250437 - DNA, 15 bp, Homo sapiens
gcctgggggtggggg

SEQ ID NO: 1250438 - DNA, 15 bp, Homo sapiens
tgcctgggggtgggg

SEQ ID NO: 1250439 - DNA, 15 bp, Homo sapiens
gtgcctgggggtggg

SEQ ID NO: 1250440 - DNA, 15 bp, Homo sapiens
cgtgcctgggggtgg

SEQ ID NO: 1250441 - DNA, 15 bp, Homo sapiens
gcgtgcctgggggtg

SEQ ID NO: 1250442 - DNA, 15 bp, Homo sapiens
cgcgtgcctgggggt

SEQ ID NO: 1250443 - DNA, 15 bp, Homo sapiens
gcgcgtgcctggggg

SEQ ID NO: 1250444 - DNA, 15 bp, Homo sapiens
agcgcgtgcctgggg

SEQ ID NO: 1250445 - DNA, 15 bp, Homo sapiens
gagcgcgtgcctggg

SEQ ID NO: 1250446 - DNA, 15 bp, Homo sapiens
agagcgcgtgcctgg

SEQ ID NO: 1250447 - DNA, 15 bp, Homo sapiens
gagagcgcgtgcctg

SEQ ID NO: 1250448 - DNA, 15 bp, Homo sapiens
ggagagcgcgtgcct

SEQ ID NO: 1250449 - DNA, 15 bp, Homo sapiens
gggagagcgcgtgcc

SEQ ID NO: 1250450 - DNA, 15 bp, Homo sapiens
ggggagagcgcgtgc

SEQ ID NO: 1250451 - DNA, 15 bp, Homo sapiens
cggggagagcgcgtg

SEQ ID NO: 1250452 - DNA, 15 bp, Homo sapiens
acggggagagcgcgt

SEQ ID NO: 1250453 - DNA, 15 bp, Homo sapiens
cacggggagagcgcg

SEQ ID NO: 1250454 - DNA, 15 bp, Homo sapiens
gcacggggagagcgc

SEQ ID NO: 1250455 - DNA, 15 bp, Homo sapiens
cgcacggggagagcg

SEQ ID NO: 1250456 - DNA, 15 bp, Homo sapiens
ccgcacggggagagc

SEQ ID NO: 1250457 - DNA, 15 bp, Homo sapiens
gccgcacggggagag

SEQ ID NO: 1250458 - DNA, 15 bp, Homo sapiens
ggccgcacggggaga

SEQ ID NO: 1250459 - DNA, 15 bp, Homo sapiens
cggccgcacggggag

SEQ ID NO: 1250460 - DNA, 15 bp, Homo sapiens
gcggccgcacgggga

SEQ ID NO: 1250461 - DNA, 15 bp, Homo sapiens
tgcggccgcacgggg

SEQ ID NO: 1250462 - DNA, 15 bp, Homo sapiens
gtgcggccgcacggg

SEQ ID NO: 1250463 - DNA, 15 bp, Homo sapiens
ggtgcggccgcacgg

SEQ ID NO: 1250464 - DNA, 15 bp, Homo sapiens
cggtgcggccgcacg

SEQ ID NO: 1250465 - DNA, 15 bp, Homo sapiens
gcggtgcggccgcac

SEQ ID NO: 1250466 - DNA, 15 bp, Homo sapiens
cgcggtgcggccgca

SEQ ID NO: 1250467 - DNA, 15 bp, Homo sapiens
gcgcggtgcggccgc

SEQ ID NO: 1250468 - DNA, 15 bp, Homo sapiens
tgcgcggtgcggccg

SEQ ID NO: 1250469 - DNA, 15 bp, Homo sapiens
atgcgcggtgcggcc

SEQ ID NO: 1250470 - DNA, 15 bp, Homo sapiens
catgcgcggtgcggc

SEQ ID NO: 1250471 - DNA, 15 bp, Homo sapiens
gcatgcgcggtgcgg

SEQ ID NO: 1250472 - DNA, 15 bp, Homo sapiens
ggcatgcgcggtgcg

SEQ ID NO: 1250473 - DNA, 15 bp, Homo sapiens
cggcatgcgcggtgc

SEQ ID NO: 1250474 - DNA, 15 bp, Homo sapiens
ccggcatgcgcggtg

SEQ ID NO: 1250475 - DNA, 15 bp, Homo sapiens
accggcatgcgcggt

SEQ ID NO: 1250476 - DNA, 15 bp, Homo sapiens
aaccggcatgcgcgg

SEQ ID NO: 1250477 - DNA, 15 bp, Homo sapiens
aaaccggcatgcgcg

SEQ ID NO: 1250478 - DNA, 15 bp, Homo sapiens
aaaaccggcatgcgc

SEQ ID NO: 1250479 - DNA, 15 bp, Homo sapiens
gaaaaccggcatgcg

SEQ ID NO: 1250480 - DNA, 15 bp, Homo sapiens
tgaaaaccggcatgc

SEQ ID NO: 1250481 - DNA, 15 bp, Homo sapiens
gtgaaaaccggcatg

SEQ ID NO: 1250482 - DNA, 15 bp, Homo sapiens
tgtgaaaaccggcat

SEQ ID NO: 1250483 - DNA, 15 bp, Homo sapiens
atgtgaaaaccggca

SEQ ID NO: 1250484 - DNA, 15 bp, Homo sapiens
gatgtgaaaaccggc

SEQ ID NO: 1250485 - DNA, 15 bp, Homo sapiens
tgatgtgaaaaccgg

SEQ ID NO: 1250486 - DNA, 15 bp, Homo sapiens
ctgatgtgaaaaccg

SEQ ID NO: 1250487 - DNA, 15 bp, Homo sapiens
tctgatgtgaaaacc

SEQ ID NO: 1250488 - DNA, 15 bp, Homo sapiens
ttctgatgtgaaaac

SEQ ID NO: 1250489 - DNA, 15 bp, Homo sapiens
tttctgatgtgaaaa

SEQ ID NO: 1250490 - DNA, 15 bp, Homo sapiens
ttttctgatgtgaaa

SEQ ID NO: 1250491 - DNA, 15 bp, Homo sapiens
attttctgatgtgaa

SEQ ID NO: 1250492 - DNA, 15 bp, Homo sapiens
tattttctgatgtga

SEQ ID NO: 1250493 - DNA, 15 bp, Homo sapiens
gtattttctgatgtg

SEQ ID NO: 1250494 - DNA, 15 bp, Homo sapiens
cgtattttctgatgt

SEQ ID NO: 1250495 - DNA, 15 bp, Homo sapiens
tcgtattttctgatg

SEQ ID NO: 1250496 - DNA, 15 bp, Homo sapiens
atcgtattttctgat

SEQ ID NO: 1250497 - DNA, 15 bp, Homo sapiens
aatcgtattttctga

SEQ ID NO: 1250498 - DNA, 15 bp, Homo sapiens
aaatcgtattttctg

SEQ ID NO: 1250499 - DNA, 15 bp, Homo sapiens
caaatcgtattttct

SEQ ID NO: 1250500 - DNA, 15 bp, Homo sapiens
gcaaatcgtattttc

SEQ ID NO: 1250501 - DNA, 15 bp, Homo sapiens
tgcaaatcgtatttt

SEQ ID NO: 1250502 - DNA, 15 bp, Homo sapiens
ttgcaaatcgtattt

SEQ ID NO: 1250503 - DNA, 15 bp, Homo sapiens
tttgcaaatcgtatt

SEQ ID NO: 1250504 - DNA, 15 bp, Homo sapiens
ctttgcaaatcgtat

SEQ ID NO: 1250505 - DNA, 15 bp, Homo sapiens
gctttgcaaatcgta

SEQ ID NO: 1250506 - DNA, 15 bp, Homo sapiens
tgctttgcaaatcgt

SEQ ID NO: 1250507 - DNA, 15 bp, Homo sapiens
gtgctttgcaaatcg

SEQ ID NO: 1250508 - DNA, 15 bp, Homo sapiens
tgtgctttgcaaatc

SEQ ID NO: 1250509 - DNA, 15 bp, Homo sapiens
gtgtgctttgcaaat

SEQ ID NO: 1250510 - DNA, 15 bp, Homo sapiens
agtgtgctttgcaaa

SEQ ID NO: 1250511 - DNA, 15 bp, Homo sapiens
aagtgtgctttgcaa

SEQ ID NO: 1250512 - DNA, 15 bp, Homo sapiens
taagtgtgctttgca

SEQ ID NO: 1250513 - DNA, 15 bp, Homo sapiens
ctaagtgtgctttgc

SEQ ID NO: 1250514 - DNA, 15 bp, Homo sapiens
cctaagtgtgctttg

SEQ ID NO: 1250515 - DNA, 15 bp, Homo sapiens
ccctaagtgtgcttt

SEQ ID NO: 1250516 - DNA, 15 bp, Homo sapiens
accctaagtgtgctt

SEQ ID NO: 1250517 - DNA, 15 bp, Homo sapiens
caccctaagtgtgct

SEQ ID NO: 1250518 - DNA, 15 bp, Homo sapiens
acaccctaagtgtgc

SEQ ID NO: 1250519 - DNA, 15 bp, Homo sapiens
gacaccctaagtgtg

SEQ ID NO: 1250520 - DNA, 15 bp, Homo sapiens
ggacaccctaagtgt

SEQ ID NO: 1250521 - DNA, 15 bp, Homo sapiens
gggacaccctaagtg

SEQ ID NO: 1250522 - DNA, 15 bp, Homo sapiens
ggggacaccctaagt

SEQ ID NO: 1250523 - DNA, 15 bp, Homo sapiens
gggggacaccctaag

SEQ ID NO: 1250524 - DNA, 15 bp, Homo sapiens
agggggacaccctaa

SEQ ID NO: 1250525 - DNA, 15 bp, Homo sapiens
aagggggacacccta

SEQ ID NO: 1250526 - DNA, 15 bp, Homo sapiens
taagggggacaccct

SEQ ID NO: 1250527 - DNA, 15 bp, Homo sapiens
ttaagggggacaccc

SEQ ID NO: 1250528 - DNA, 15 bp, Homo sapiens
gttaagggggacacc

SEQ ID NO: 1250529 - DNA, 15 bp, Homo sapiens
agttaagggggacac

SEQ ID NO: 1250530 - DNA, 15 bp, Homo sapiens
aagttaagggggaca

SEQ ID NO: 1250531 - DNA, 15 bp, Homo sapiens
gaagttaagggggac

SEQ ID NO: 1250532 - DNA, 15 bp, Homo sapiens
ggaagttaaggggga

SEQ ID NO: 1250533 - DNA, 15 bp, Homo sapiens
gggaagttaaggggg

SEQ ID NO: 1250534 - DNA, 15 bp, Homo sapiens
tgggaagttaagggg

SEQ ID NO: 1250535 - DNA, 15 bp, Homo sapiens
ttgggaagttaaggg

SEQ ID NO: 1250536 - DNA, 15 bp, Homo sapiens
cttgggaagttaagg

SEQ ID NO: 1250537 - DNA, 15 bp, Homo sapiens
ccttgggaagttaag

SEQ ID NO: 1250538 - DNA, 15 bp, Homo sapiens
cccttgggaagttaa

SEQ ID NO: 1250539 - DNA, 15 bp, Homo sapiens
tcccttgggaagtta

SEQ ID NO: 1250540 - DNA, 15 bp, Homo sapiens
ctcccttgggaagtt

SEQ ID NO: 1250541 - DNA, 15 bp, Homo sapiens
actcccttgggaagt

SEQ ID NO: 1250542 - DNA, 15 bp, Homo sapiens
gactcccttgggaag

SEQ ID NO: 1250543 - DNA, 15 bp, Homo sapiens
ggactcccttgggaa

SEQ ID NO: 1250544 - DNA, 15 bp, Homo sapiens
gggactcccttggga

SEQ ID NO: 1250545 - DNA, 15 bp, Homo sapiens
ggggactcccttggg

SEQ ID NO: 1250546 - DNA, 15 bp, Homo sapiens
gggggactcccttgg

SEQ ID NO: 1250547 - DNA, 15 bp, Homo sapiens
ggggggactcccttg

SEQ ID NO: 1250548 - DNA, 15 bp, Homo sapiens
tggggggactccctt

SEQ ID NO: 1250549 - DNA, 15 bp, Homo sapiens
ctggggggactccct

SEQ ID NO: 1250550 - DNA, 15 bp, Homo sapiens
actggggggactccc

SEQ ID NO: 1250551 - DNA, 15 bp, Homo sapiens
gactggggggactcc

SEQ ID NO: 1250552 - DNA, 15 bp, Homo sapiens
ggactggggggactc

SEQ ID NO: 1250553 - DNA, 15 bp, Homo sapiens
gggactggggggact

SEQ ID NO: 1250554 - DNA, 15 bp, Homo sapiens
ggggactggggggac

SEQ ID NO: 1250555 - DNA, 15 bp, Homo sapiens
cggggactgggggga

SEQ ID NO: 1250556 - DNA, 15 bp, Homo sapiens
tcggggactgggggg

SEQ ID NO: 1250557 - DNA, 15 bp, Homo sapiens
ttcggggactggggg

SEQ ID NO: 1250558 - DNA, 15 bp, Homo sapiens
cttcggggactgggg

SEQ ID NO: 1250559 - DNA, 15 bp, Homo sapiens
ccttcggggactggg

SEQ ID NO: 1250560 - DNA, 15 bp, Homo sapiens
cccttcggggactgg

SEQ ID NO: 1250561 - DNA, 15 bp, Homo sapiens
acccttcggggactg

SEQ ID NO: 1250562 - DNA, 15 bp, Homo sapiens
gacccttcggggact

SEQ ID NO: 1250563 - DNA, 15 bp, Homo sapiens
ggacccttcggggac

SEQ ID NO: 1250564 - DNA, 15 bp, Homo sapiens
tggacccttcgggga

SEQ ID NO: 1250565 - DNA, 15 bp, Homo sapiens
ctggacccttcgggg

SEQ ID NO: 1250566 - DNA, 15 bp, Homo sapiens
cctggacccttcggg

SEQ ID NO: 1250567 - DNA, 15 bp, Homo sapiens
ccctggacccttcgg

SEQ ID NO: 1250568 - DNA, 15 bp, Homo sapiens
gccctggacccttcg

SEQ ID NO: 1250569 - DNA, 15 bp, Homo sapiens
tgccctggacccttc

SEQ ID NO: 1250570 - DNA, 15 bp, Homo sapiens
ctgccctggaccctt

SEQ ID NO: 1250571 - DNA, 15 bp, Homo sapiens
gctgccctggaccct

SEQ ID NO: 1250572 - DNA, 15 bp, Homo sapiens
ggctgccctggaccc

SEQ ID NO: 1250573 - DNA, 15 bp, Homo sapiens
aggctgccctggacc

SEQ ID NO: 1250574 - DNA, 15 bp, Homo sapiens
caggctgccctggac

SEQ ID NO: 1250575 - DNA, 15 bp, Homo sapiens
cgcaggctgccctgg

SEQ ID NO: 1250576 - DNA, 15 bp, Homo sapiens
gcgcaggctgccctg

SEQ ID NO: 1250577 - DNA, 15 bp, Homo sapiens
tgcgcaggctgccct

SEQ ID NO: 1250578 - DNA, 15 bp, Homo sapiens
atgcgcaggctgccc

SEQ ID NO: 1250579 - DNA, 15 bp, Homo sapiens
gatgcgcaggctgcc

SEQ ID NO: 1250580 - DNA, 15 bp, Homo sapiens
cgatgcgcaggctgc

SEQ ID NO: 1250581 - DNA, 15 bp, Homo sapiens
gcgatgcgcaggctg

SEQ ID NO: 1250582 - DNA, 15 bp, Homo sapiens
tgcgatgcgcaggct

SEQ ID NO: 1250583 - DNA, 15 bp, Homo sapiens
ctgcgatgcgcaggc

SEQ ID NO: 1250584 - DNA, 15 bp, Homo sapiens
tctgcgatgcgcagg

SEQ ID NO: 1250585 - DNA, 15 bp, Homo sapiens
gtctgcgatgcgcag

SEQ ID NO: 1250586 - DNA, 15 bp, Homo sapiens
cgtctgcgatgcgca

SEQ ID NO: 1250587 - DNA, 15 bp, Homo sapiens
gcgtctgcgatgcgc

SEQ ID NO: 1250588 - DNA, 15 bp, Homo sapiens
cgcgtctgcgatgcg

SEQ ID NO: 1250589 - DNA, 15 bp, Homo sapiens
gcgcgtctgcgatgc

SEQ ID NO: 1250590 - DNA, 15 bp, Homo sapiens
cgcgcgtctgcgatg

SEQ ID NO: 1250591 - DNA, 15 bp, Homo sapiens
gcgcgcgtctgcgat

SEQ ID NO: 1250592 - DNA, 15 bp, Homo sapiens
cgcgcgcgtctgcga

SEQ ID NO: 1250593 - DNA, 15 bp, Homo sapiens
ccgcgcgcgtctgcg

SEQ ID NO: 1250594 - DNA, 15 bp, Homo sapiens
gccgcgcgcgtctgc

SEQ ID NO: 1250595 - DNA, 15 bp, Homo sapiens
agccgcgcgcgtctg

SEQ ID NO: 1250596 - DNA, 15 bp, Homo sapiens
gagccgcgcgcgtct

SEQ ID NO: 1250597 - DNA, 15 bp, Homo sapiens
cgagccgcgcgcgtc

SEQ ID NO: 1250598 - DNA, 15 bp, Homo sapiens
gcgagccgcgcgcgt

SEQ ID NO: 1250599 - DNA, 15 bp, Homo sapiens
tgcgagccgcgcgcg

SEQ ID NO: 1250600 - DNA, 15 bp, Homo sapiens
ctgcgagccgcgcgc

SEQ ID NO: 1250601 - DNA, 15 bp, Homo sapiens
tctgcgagccgcgcg

SEQ ID NO: 1250602 - DNA, 15 bp, Homo sapiens
ttctgcgagccgcgc

SEQ ID NO: 1250603 - DNA, 15 bp, Homo sapiens
cttctgcgagccgcg

SEQ ID NO: 1250604 - DNA, 15 bp, Homo sapiens
ccttctgcgagccgc

SEQ ID NO: 1250605 - DNA, 15 bp, Homo sapiens
cccttctgcgagccg

SEQ ID NO: 1250606 - DNA, 15 bp, Homo sapiens
tcccttctgcgagcc

SEQ ID NO: 1250607 - DNA, 15 bp, Homo sapiens
gtcccttctgcgagc

SEQ ID NO: 1250608 - DNA, 15 bp, Homo sapiens
cgtcccttctgcgag

SEQ ID NO: 1250609 - DNA, 15 bp, Homo sapiens
acgtcccttctgcga

SEQ ID NO: 1250610 - DNA, 15 bp, Homo sapiens
cacgtcccttctgcg

SEQ ID NO: 1250611 - DNA, 15 bp, Homo sapiens
ccacgtcccttctgc

SEQ ID NO: 1250612 - DNA, 15 bp, Homo sapiens
accacgtcccttctg

SEQ ID NO: 1250613 - DNA, 15 bp, Homo sapiens
caccacgtcccttct

SEQ ID NO: 1250614 - DNA, 15 bp, Homo sapiens
tcaccacgtcccttc

SEQ ID NO: 1250615 - DNA, 15 bp, Homo sapiens
ctcaccacgtccctt

SEQ ID NO: 1250616 - DNA, 15 bp, Homo sapiens
tctcaccacgtccct

SEQ ID NO: 1250617 - DNA, 15 bp, Homo sapiens
ttctcaccacgtccc

SEQ ID NO: 1250618 - DNA, 15 bp, Homo sapiens
cttctcaccacgtcc

SEQ ID NO: 1250619 - DNA, 15 bp, Homo sapiens
gcttctcaccacgtc

SEQ ID NO: 1250620 - DNA, 15 bp, Homo sapiens
agcttctcaccacgt

SEQ ID NO: 1250621 - DNA, 15 bp, Homo sapiens
cagcttctcaccacg

SEQ ID NO: 1250622 - DNA, 15 bp, Homo sapiens
ccagcttctcaccac

SEQ ID NO: 1250623 - DNA, 15 bp, Homo sapiens
gccagcttctcacca

SEQ ID NO: 1250624 - DNA, 15 bp, Homo sapiens
ggccagcttctcacc

SEQ ID NO: 1250625 - DNA, 15 bp, Homo sapiens
gggccagcttctcac

SEQ ID NO: 1250626 - DNA, 15 bp, Homo sapiens
tgggccagcttctca

SEQ ID NO: 1250627 - DNA, 15 bp, Homo sapiens
gtgggccagcttctc

SEQ ID NO: 1250628 - DNA, 15 bp, Homo sapiens
tgtgggccagcttct

SEQ ID NO: 1250629 - DNA, 15 bp, Homo sapiens
ctgtgggccagcttc

SEQ ID NO: 1250630 - DNA, 15 bp, Homo sapiens
gctgtgggccagctt

SEQ ID NO: 1250631 - DNA, 15 bp, Homo sapiens
tgctgtgggccagct

SEQ ID NO: 1250632 - DNA, 15 bp, Homo sapiens
atgctgtgggccagc

SEQ ID NO: 1250633 - DNA, 15 bp, Homo sapiens
catgctgtgggccag

SEQ ID NO: 1250634 - DNA, 15 bp, Homo sapiens
gcatgctgtgggcca

SEQ ID NO: 1250635 - DNA, 15 bp, Homo sapiens
ggcatgctgtgggcc

SEQ ID NO: 1250636 - DNA, 15 bp, Homo sapiens
tggcatgctgtgggc

SEQ ID NO: 1250637 - DNA, 15 bp, Homo sapiens
gtggcatgctgtggg

SEQ ID NO: 1250638 - DNA, 15 bp, Homo sapiens
ggtggcatgctgtgg

SEQ ID NO: 1250639 - DNA, 15 bp, Homo sapiens
tggtggcatgctgtg

SEQ ID NO: 1250640 - DNA, 15 bp, Homo sapiens
ctggtggcatgctgt

SEQ ID NO: 1250641 - DNA, 15 bp, Homo sapiens
gctggtggcatgctg

SEQ ID NO: 1250642 - DNA, 15 bp, Homo sapiens
cgctggtggcatgct

SEQ ID NO: 1250643 - DNA, 15 bp, Homo sapiens
ccgctggtggcatgc

SEQ ID NO: 1250644 - DNA, 15 bp, Homo sapiens
gccgctggtggcatg

SEQ ID NO: 1250645 - DNA, 15 bp, Homo sapiens
tgccgctggtggcat

SEQ ID NO: 1250646 - DNA, 15 bp, Homo sapiens
gtgccgctggtggca

SEQ ID NO: 1250647 - DNA, 15 bp, Homo sapiens
ggtgccgctggtggc

SEQ ID NO: 1250648 - DNA, 15 bp, Homo sapiens
aggtgccgctggtgg

SEQ ID NO: 1250649 - DNA, 15 bp, Homo sapiens
gaggtgccgctggtg

SEQ ID NO: 1250650 - DNA, 15 bp, Homo sapiens
ggaggtgccgctggt

SEQ ID NO: 1250651 - DNA, 15 bp, Homo sapiens
aggaggtgccgctgg

SEQ ID NO: 1250652 - DNA, 15 bp, Homo sapiens
gaggaggtgccgctg

SEQ ID NO: 1250653 - DNA, 15 bp, Homo sapiens
tgaggaggtgccgct

SEQ ID NO: 1250654 - DNA, 15 bp, Homo sapiens
ctgaggaggtgccgc

SEQ ID NO: 1250655 - DNA, 15 bp, Homo sapiens
cctgaggaggtgccg

SEQ ID NO: 1250656 - DNA, 15 bp, Homo sapiens
ccctgaggaggtgcc

SEQ ID NO: 1250657 - DNA, 15 bp, Homo sapiens
gccctgaggaggtgc

SEQ ID NO: 1250658 - DNA, 15 bp, Homo sapiens
tgccctgaggaggtg

SEQ ID NO: 1250659 - DNA, 15 bp, Homo sapiens
gtgccctgaggaggt

SEQ ID NO: 1250660 - DNA, 15 bp, Homo sapiens
cgtgccctgaggagg

SEQ ID NO: 1250661 - DNA, 15 bp, Homo sapiens
acgtgccctgaggag

SEQ ID NO: 1250662 - DNA, 15 bp, Homo sapiens
cacgtgccctgagga

SEQ ID NO: 1250663 - DNA, 15 bp, Homo sapiens
acacgtgccctgagg

SEQ ID NO: 1250664 - DNA, 15 bp, Homo sapiens
gacacgtgccctgag

SEQ ID NO: 1250665 - DNA, 15 bp, Homo sapiens
cgacacgtgccctga

SEQ ID NO: 1250666 - DNA, 15 bp, Homo sapiens
ccgacacgtgccctg

SEQ ID NO: 1250667 - DNA, 15 bp, Homo sapiens
cccgacacgtgccct

SEQ ID NO: 1250668 - DNA, 15 bp, Homo sapiens
ccccgacacgtgccc

SEQ ID NO: 1250669 - DNA, 15 bp, Homo sapiens
tccccgacacgtgcc

SEQ ID NO: 1250670 - DNA, 15 bp, Homo sapiens
ctccccgacacgtgc

SEQ ID NO: 1250671 - DNA, 15 bp, Homo sapiens
tctccccgacacgtg

SEQ ID NO: 1250672 - DNA, 15 bp, Homo sapiens
ttctccccgacacgt

SEQ ID NO: 1250673 - DNA, 15 bp, Homo sapiens
tttctccccgacacg

SEQ ID NO: 1250674 - DNA, 15 bp, Homo sapiens
gtttctccccgacac

SEQ ID NO: 1250675 - DNA, 15 bp, Homo sapiens
tgtttctccccgaca

SEQ ID NO: 1250676 - DNA, 15 bp, Homo sapiens
ttgtttctccccgac

SEQ ID NO: 1250677 - DNA, 15 bp, Homo sapiens
gttgtttctccccga

SEQ ID NO: 1250678 - DNA, 15 bp, Homo sapiens
tgttgtttctccccg

SEQ ID NO: 1250679 - DNA, 15 bp, Homo sapiens
gtgttgtttctcccc

SEQ ID NO: 1250680 - DNA, 15 bp, Homo sapiens
agtgttgtttctccc

SEQ ID NO: 1250681 - DNA, 15 bp, Homo sapiens
aagtgttgtttctcc

SEQ ID NO: 1250682 - DNA, 15 bp, Homo sapiens
taagtgttgtttctc

SEQ ID NO: 1250683 - DNA, 15 bp, Homo sapiens
ctaagtgttgtttct

SEQ ID NO: 1250684 - DNA, 15 bp, Homo sapiens
cctaagtgttgtttc

SEQ ID NO: 1250685 - DNA, 15 bp, Homo sapiens
ccctaagtgttgttt

SEQ ID NO: 1250686 - DNA, 15 bp, Homo sapiens
tccctaagtgttgtt

SEQ ID NO: 1250687 - DNA, 15 bp, Homo sapiens
gtccctaagtgttgt

SEQ ID NO: 1250688 - DNA, 15 bp, Homo sapiens
ggtccctaagtgttg

SEQ ID NO: 1250689 - DNA, 15 bp, Homo sapiens
aggtccctaagtgtt

SEQ ID NO: 1250690 - DNA, 15 bp, Homo sapiens
caggtccctaagtgt

SEQ ID NO: 1250691 - DNA, 15 bp, Homo sapiens
ccaggtccctaagtg

SEQ ID NO: 1250692 - DNA, 15 bp, Homo sapiens
cccaggtccctaagt

SEQ ID NO: 1250693 - DNA, 15 bp, Homo sapiens
tcccaggtccctaag

SEQ ID NO: 1250694 - DNA, 15 bp, Homo sapiens
gtcccaggtccctaa

SEQ ID NO: 1250695 - DNA, 15 bp, Homo sapiens
agtcccaggtcccta

SEQ ID NO: 1250696 - DNA, 15 bp, Homo sapiens
aagtcccaggtccct

SEQ ID NO: 1250697 - DNA, 15 bp, Homo sapiens
aaagtcccaggtccc

SEQ ID NO: 1250698 - DNA, 15 bp, Homo sapiens
gaaagtcccaggtcc

SEQ ID NO: 1250699 - DNA, 15 bp, Homo sapiens
agaaagtcccaggtc

SEQ ID NO: 1250700 - DNA, 15 bp, Homo sapiens
gagaaagtcccaggt

SEQ ID NO: 1250701 - DNA, 15 bp, Homo sapiens
ggagaaagtcccagg

SEQ ID NO: 1250702 - DNA, 15 bp, Homo sapiens
tggagaaagtcccag

SEQ ID NO: 1250703 - DNA, 15 bp, Homo sapiens
ctggagaaagtccca

SEQ ID NO: 1250704 - DNA, 15 bp, Homo sapiens
gctggagaaagtccc

SEQ ID NO: 1250705 - DNA, 15 bp, Homo sapiens
agctggagaaagtcc

SEQ ID NO: 1250706 - DNA, 15 bp, Homo sapiens
gagctggagaaagtc

SEQ ID NO: 1250707 - DNA, 15 bp, Homo sapiens
tgagctggagaaagt

SEQ ID NO: 1250708 - DNA, 15 bp, Homo sapiens
gtgagctggagaaag

SEQ ID NO: 1250709 - DNA, 15 bp, Homo sapiens
cgtgagctggagaaa

SEQ ID NO: 1250710 - DNA, 15 bp, Homo sapiens
gcgtgagctggagaa

SEQ ID NO: 1250711 - DNA, 15 bp, Homo sapiens
agcgtgagctggaga

SEQ ID NO: 1250712 - DNA, 15 bp, Homo sapiens
gagcgtgagctggag

SEQ ID NO: 1250713 - DNA, 15 bp, Homo sapiens
tgagcgtgagctgga

SEQ ID NO: 1250714 - DNA, 15 bp, Homo sapiens
gtgagcgtgagctgg

SEQ ID NO: 1250715 - DNA, 15 bp, Homo sapiens
cgtgagcgtgagctg

SEQ ID NO: 1250716 - DNA, 15 bp, Homo sapiens
ccgtgagcgtgagct

SEQ ID NO: 1250717 - DNA, 15 bp, Homo sapiens
cccgtgagcgtgagc

SEQ ID NO: 1250718 - DNA, 15 bp, Homo sapiens
acccgtgagcgtgag

SEQ ID NO: 1250719 - DNA, 15 bp, Homo sapiens
gacccgtgagcgtga

SEQ ID NO: 1250720 - DNA, 15 bp, Homo sapiens
tgacccgtgagcgtg

SEQ ID NO: 1250721 - DNA, 15 bp, Homo sapiens
gtgacccgtgagcgt

SEQ ID NO: 1250722 - DNA, 15 bp, Homo sapiens
ggtgacccgtgagcg

SEQ ID NO: 1250723 - DNA, 15 bp, Homo sapiens
aggtgacccgtgagc

SEQ ID NO: 1250724 - DNA, 15 bp, Homo sapiens
gaggtgacccgtgag

SEQ ID NO: 1250725 - DNA, 15 bp, Homo sapiens
tgaggtgacccgtga

SEQ ID NO: 1250726 - DNA, 15 bp, Homo sapiens
gtgaggtgacccgtg

SEQ ID NO: 1250727 - DNA, 15 bp, Homo sapiens
tgtgaggtgacccgt

SEQ ID NO: 1250728 - DNA, 15 bp, Homo sapiens
gtgtgaggtgacccg

SEQ ID NO: 1250729 - DNA, 15 bp, Homo sapiens
agtgtgaggtgaccc

SEQ ID NO: 1250730 - DNA, 15 bp, Homo sapiens
gagtgtgaggtgacc

SEQ ID NO: 1250731 - DNA, 15 bp, Homo sapiens
ggagtgtgaggtgac

SEQ ID NO: 1250732 - DNA, 15 bp, Homo sapiens
tggagtgtgaggtga

SEQ ID NO: 1250733 - DNA, 15 bp, Homo sapiens
ttggagtgtgaggtg

SEQ ID NO: 1250734 - DNA, 15 bp, Homo sapiens
cttggagtgtgaggt

SEQ ID NO: 1250735 - DNA, 15 bp, Homo sapiens
tcttggagtgtgagg

SEQ ID NO: 1250736 - DNA, 15 bp, Homo sapiens
atcttggagtgtgag

SEQ ID NO: 1250737 - DNA, 15 bp, Homo sapiens
gatcttggagtgtga

SEQ ID NO: 1250738 - DNA, 15 bp, Homo sapiens
tgatcttggagtgtg

SEQ ID NO: 1250739 - DNA, 15 bp, Homo sapiens
gtgatcttggagtgt

SEQ ID NO: 1250740 - DNA, 15 bp, Homo sapiens
ggtgatcttggagtg

SEQ ID NO: 1250741 - DNA, 15 bp, Homo sapiens
aggtgatcttggagt

SEQ ID NO: 1250742 - DNA, 15 bp, Homo sapiens
gaggtgatcttggag

SEQ ID NO: 1250743 - DNA, 15 bp, Homo sapiens
tgaggtgatcttgga

SEQ ID NO: 1250744 - DNA, 15 bp, Homo sapiens
ttgaggtgatcttgg

SEQ ID NO: 1250745 - DNA, 15 bp, Homo sapiens
tttgaggtgatcttg

SEQ ID NO: 1250746 - DNA, 15 bp, Homo sapiens
ctttgaggtgatctt

SEQ ID NO: 1250747 - DNA, 15 bp, Homo sapiens
tctttgaggtgatct

SEQ ID NO: 1250748 - DNA, 15 bp, Homo sapiens
ctctttgaggtgatc

SEQ ID NO: 1250749 - DNA, 15 bp, Homo sapiens
cctctttgaggtgat

SEQ ID NO: 1250750 - DNA, 15 bp, Homo sapiens
tcctctttgaggtga

SEQ ID NO: 1250751 - DNA, 15 bp, Homo sapiens
gtcctctttgaggtg

SEQ ID NO: 1250752 - DNA, 15 bp, Homo sapiens
tgtcctctttgaggt

SEQ ID NO: 1250753 - DNA, 15 bp, Homo sapiens
gtgtcctctttgagg

SEQ ID NO: 1250754 - DNA, 15 bp, Homo sapiens
ggtgtcctctttgag

SEQ ID NO: 1250755 - DNA, 15 bp, Homo sapiens
aggtgtcctctttga

SEQ ID NO: 1250756 - DNA, 15 bp, Homo sapiens
gaggtgtcctctttg

SEQ ID NO: 1250757 - DNA, 15 bp, Homo sapiens
tgaggtgtcctcttt

SEQ ID NO: 1250758 - DNA, 15 bp, Homo sapiens
gtgaggtgtcctctt

SEQ ID NO: 1250759 - DNA, 15 bp, Homo sapiens
tgtgaggtgtcctct

SEQ ID NO: 1250760 - DNA, 15 bp, Homo sapiens
gtgtgaggtgtcctc

SEQ ID NO: 1250761 - DNA, 15 bp, Homo sapiens
tgtgtgaggtgtcct

SEQ ID NO: 1250762 - DNA, 15 bp, Homo sapiens
ctgtgtgaggtgtcc

SEQ ID NO: 1250763 - DNA, 15 bp, Homo sapiens
cctgtgtgaggtgtc

SEQ ID NO: 1250764 - DNA, 15 bp, Homo sapiens
ccctgtgtgaggtgt

SEQ ID NO: 1250765 - DNA, 15 bp, Homo sapiens
gccctgtgtgaggtg

SEQ ID NO: 1250766 - DNA, 15 bp, Homo sapiens
tgccctgtgtgaggt

SEQ ID NO: 1250767 - DNA, 15 bp, Homo sapiens
gtgccctgtgtgagg

SEQ ID NO: 1250768 - DNA, 15 bp, Homo sapiens
tgtgccctgtgtgag

SEQ ID NO: 1250769 - DNA, 15 bp, Homo sapiens
gtgtgccctgtgtga

SEQ ID NO: 1250770 - DNA, 15 bp, Homo sapiens
agtgtgccctgtgtg

SEQ ID NO: 1250771 - DNA, 15 bp, Homo sapiens
aagtgtgccctgtgt

SEQ ID NO: 1250772 - DNA, 15 bp, Homo sapiens
gaagtgtgccctgtg

SEQ ID NO: 1250773 - DNA, 15 bp, Homo sapiens
tgaagtgtgccctgt

SEQ ID NO: 1250774 - DNA, 15 bp, Homo sapiens
gtgaagtgtgccctg

SEQ ID NO: 1250775 - DNA, 15 bp, Homo sapiens
tgtgaagtgtgccct

SEQ ID NO: 1250776 - DNA, 15 bp, Homo sapiens
gtgtgaagtgtgccc

SEQ ID NO: 1250777 - DNA, 15 bp, Homo sapiens
agtgtgaagtgtgcc

SEQ ID NO: 1250778 - DNA, 15 bp, Homo sapiens
gagtgtgaagtgtgc

SEQ ID NO: 1250779 - DNA, 15 bp, Homo sapiens
tgagtgtgaagtgtg

SEQ ID NO: 1250780 - DNA, 15 bp, Homo sapiens
gtgagtgtgaagtgt

SEQ ID NO: 1250781 - DNA, 15 bp, Homo sapiens
tgtgagtgtgaagtg

SEQ ID NO: 1250782 - DNA, 15 bp, Homo sapiens
ctgtgagtgtgaagt

SEQ ID NO: 1250783 - DNA, 15 bp, Homo sapiens
cctgtgagtgtgaag

SEQ ID NO: 1250784 - DNA, 15 bp, Homo sapiens
acctgtgagtgtgaa

SEQ ID NO: 1250785 - DNA, 15 bp, Homo sapiens
gacctgtgagtgtga

SEQ ID NO: 1250786 - DNA, 15 bp, Homo sapiens
tgacctgtgagtgtg

SEQ ID NO: 1250787 - DNA, 15 bp, Homo sapiens
gtgacctgtgagtgt

SEQ ID NO: 1250788 - DNA, 15 bp, Homo sapiens
ggtgacctgtgagtg

SEQ ID NO: 1250789 - DNA, 15 bp, Homo sapiens
aggtgacctgtgagt

SEQ ID NO: 1250790 - DNA, 15 bp, Homo sapiens
gaggtgacctgtgag

SEQ ID NO: 1250791 - DNA, 15 bp, Homo sapiens
tgaggtgacctgtga

SEQ ID NO: 1250792 - DNA, 15 bp, Homo sapiens
gtgaggtgacctgtg

SEQ ID NO: 1250793 - DNA, 15 bp, Homo sapiens
tgtgaggtgacctgt

SEQ ID NO: 1250794 - DNA, 15 bp, Homo sapiens
gtgtgaggtgacctg

SEQ ID NO: 1250795 - DNA, 15 bp, Homo sapiens
agtgtgaggtgacct

SEQ ID NO: 1250796 - DNA, 15 bp, Homo sapiens
tgagtgtgaggtgac

SEQ ID NO: 1250797 - DNA, 15 bp, Homo sapiens
gtgagtgtgaggtga

SEQ ID NO: 1250798 - DNA, 15 bp, Homo sapiens
tgtgagtgtgaggtg

SEQ ID NO: 1250799 - DNA, 15 bp, Homo sapiens
ctgtgagtgtgaggt

SEQ ID NO: 1250800 - DNA, 15 bp, Homo sapiens
cctgtgagtgtgagg

SEQ ID NO: 1250801 - DNA, 15 bp, Homo sapiens
tcctgtgagtgtgag

SEQ ID NO: 1250802 - DNA, 15 bp, Homo sapiens
gtcctgtgagtgtga

SEQ ID NO: 1250803 - DNA, 15 bp, Homo sapiens
tgtcctgtgagtgtg

SEQ ID NO: 1250804 - DNA, 15 bp, Homo sapiens
gtgtcctgtgagtgt

SEQ ID NO: 1250805 - DNA, 15 bp, Homo sapiens
ggtgtcctgtgagtg

SEQ ID NO: 1250806 - DNA, 15 bp, Homo sapiens
aggtgtcctgtgagt

SEQ ID NO: 1250807 - DNA, 15 bp, Homo sapiens
gaggtgtcctgtgag

SEQ ID NO: 1250808 - DNA, 15 bp, Homo sapiens
tgaggtgtcctgtga

SEQ ID NO: 1250809 - DNA, 15 bp, Homo sapiens
gtgaggtgtcctgtg

SEQ ID NO: 1250810 - DNA, 15 bp, Homo sapiens
tgtgaggtgtcctgt

SEQ ID NO: 1250811 - DNA, 15 bp, Homo sapiens
gtgtgaggtgtcctg

SEQ ID NO: 1250812 - DNA, 15 bp, Homo sapiens
agtgtgaggtgtcct

SEQ ID NO: 1250813 - DNA, 15 bp, Homo sapiens
gagtgtgaggtgtcc

SEQ ID NO: 1250814 - DNA, 15 bp, Homo sapiens
tgagtgtgaggtgtc

SEQ ID NO: 1250815 - DNA, 15 bp, Homo sapiens
gtgagtgtgaggtgt

SEQ ID NO: 1250816 - DNA, 15 bp, Homo sapiens
ccctgtgagtgtgag

SEQ ID NO: 1250817 - DNA, 15 bp, Homo sapiens
gccctgtgagtgtga

SEQ ID NO: 1250818 - DNA, 15 bp, Homo sapiens
tgccctgtgagtgtg

SEQ ID NO: 1250819 - DNA, 15 bp, Homo sapiens
gtgccctgtgagtgt

SEQ ID NO: 1250820 - DNA, 15 bp, Homo sapiens
tgtgccctgtgagtg

SEQ ID NO: 1250821 - DNA, 15 bp, Homo sapiens
gtgtgccctgtgagt

SEQ ID NO: 1250822 - DNA, 15 bp, Homo sapiens
agtgtgccctgtgag

SEQ ID NO: 1250823 - DNA, 15 bp, Homo sapiens
aagtgtgccctgtga

SEQ ID NO: 1250824 - DNA, 15 bp, Homo sapiens
cgtgagtgtgaagtg

SEQ ID NO: 1250825 - DNA, 15 bp, Homo sapiens
ccgtgagtgtgaagt

SEQ ID NO: 1250826 - DNA, 15 bp, Homo sapiens
cccgtgagtgtgaag

SEQ ID NO: 1250827 - DNA, 15 bp, Homo sapiens
acccgtgagtgtgaa

SEQ ID NO: 1250828 - DNA, 15 bp, Homo sapiens
gacccgtgagtgtga

SEQ ID NO: 1250829 - DNA, 15 bp, Homo sapiens
tgacccgtgagtgtg

SEQ ID NO: 1250830 - DNA, 15 bp, Homo sapiens
gtgacccgtgagtgt

SEQ ID NO: 1250831 - DNA, 15 bp, Homo sapiens
ggtgacccgtgagtg

SEQ ID NO: 1250832 - DNA, 15 bp, Homo sapiens
aggtgacccgtgagt

SEQ ID NO: 1250833 - DNA, 15 bp, Homo sapiens
ttgtgtgaggtgtcc

SEQ ID NO: 1250834 - DNA, 15 bp, Homo sapiens
cttgtgtgaggtgtc

SEQ ID NO: 1250835 - DNA, 15 bp, Homo sapiens
tcttgtgtgaggtgt

SEQ ID NO: 1250836 - DNA, 15 bp, Homo sapiens
gtcttgtgtgaggtg

SEQ ID NO: 1250837 - DNA, 15 bp, Homo sapiens
tgtcttgtgtgaggt

SEQ ID NO: 1250838 - DNA, 15 bp, Homo sapiens
gtgtcttgtgtgagg

SEQ ID NO: 1250839 - DNA, 15 bp, Homo sapiens
ggtgtcttgtgtgag

SEQ ID NO: 1250840 - DNA, 15 bp, Homo sapiens
aggtgtcttgtgtga

SEQ ID NO: 1250841 - DNA, 15 bp, Homo sapiens
gaggtgtcttgtgtg

SEQ ID NO: 1250842 - DNA, 15 bp, Homo sapiens
tgaggtgtcttgtgt

SEQ ID NO: 1250843 - DNA, 15 bp, Homo sapiens
gtgaggtgtcttgtg

SEQ ID NO: 1250844 - DNA, 15 bp, Homo sapiens
tgtgaggtgtcttgt

SEQ ID NO: 1250845 - DNA, 15 bp, Homo sapiens
gtgtgaggtgtcttg

SEQ ID NO: 1250846 - DNA, 15 bp, Homo sapiens
cgtgtgaggtgtctt

SEQ ID NO: 1250847 - DNA, 15 bp, Homo sapiens
ccgtgtgaggtgtct

SEQ ID NO: 1250848 - DNA, 15 bp, Homo sapiens
cccgtgtgaggtgtc

SEQ ID NO: 1250849 - DNA, 15 bp, Homo sapiens
ccccgtgtgaggtgt

SEQ ID NO: 1250850 - DNA, 15 bp, Homo sapiens
gccccgtgtgaggtg

SEQ ID NO: 1250851 - DNA, 15 bp, Homo sapiens
tgccccgtgtgaggt

SEQ ID NO: 1250852 - DNA, 15 bp, Homo sapiens
gtgccccgtgtgagg

SEQ ID NO: 1250853 - DNA, 15 bp, Homo sapiens
tgtgccccgtgtgag

SEQ ID NO: 1250854 - DNA, 15 bp, Homo sapiens
gtgtgccccgtgtga

SEQ ID NO: 1250855 - DNA, 15 bp, Homo sapiens
agtgtgccccgtgtg

SEQ ID NO: 1250856 - DNA, 15 bp, Homo sapiens
aagtgtgccccgtgt

SEQ ID NO: 1250857 - DNA, 15 bp, Homo sapiens
gaagtgtgccccgtg

SEQ ID NO: 1250858 - DNA, 15 bp, Homo sapiens
tgaagtgtgccccgt

SEQ ID NO: 1250859 - DNA, 15 bp, Homo sapiens
gtgaagtgtgccccg

SEQ ID NO: 1250860 - DNA, 15 bp, Homo sapiens
tgtgaagtgtgcccc

SEQ ID NO: 1250861 - DNA, 15 bp, Homo sapiens
ggtgtgaggtgacct

SEQ ID NO: 1250862 - DNA, 15 bp, Homo sapiens
gggtgtgaggtgacc

SEQ ID NO: 1250863 - DNA, 15 bp, Homo sapiens
tgggtgtgaggtgac

SEQ ID NO: 1250864 - DNA, 15 bp, Homo sapiens
gtgggtgtgaggtga

SEQ ID NO: 1250865 - DNA, 15 bp, Homo sapiens
tgtgggtgtgaggtg

SEQ ID NO: 1250866 - DNA, 15 bp, Homo sapiens
ctgtgggtgtgaggt

SEQ ID NO: 1250867 - DNA, 15 bp, Homo sapiens
cctgtgggtgtgagg

SEQ ID NO: 1250868 - DNA, 15 bp, Homo sapiens
tcctgtgggtgtgag

SEQ ID NO: 1250869 - DNA, 15 bp, Homo sapiens
gtcctgtgggtgtga

SEQ ID NO: 1250870 - DNA, 15 bp, Homo sapiens
tgtcctgtgggtgtg

SEQ ID NO: 1250871 - DNA, 15 bp, Homo sapiens
gtgtcctgtgggtgt

SEQ ID NO: 1250872 - DNA, 15 bp, Homo sapiens
ggtgtcctgtgggtg

SEQ ID NO: 1250873 - DNA, 15 bp, Homo sapiens
aggtgtcctgtgggt

SEQ ID NO: 1250874 - DNA, 15 bp, Homo sapiens
gaggtgtcctgtggg

SEQ ID NO: 1250875 - DNA, 15 bp, Homo sapiens
tgaggtgtcctgtgg

SEQ ID NO: 1250876 - DNA, 15 bp, Homo sapiens
ctccatgtcctcaga

SEQ ID NO: 1250877 - DNA, 15 bp, Homo sapiens
tctccatgtcctcag

SEQ ID NO: 1250878 - DNA, 15 bp, Homo sapiens
ctctccatgtcctca

SEQ ID NO: 1250879 - DNA, 15 bp, Homo sapiens
tctctccatgtcctc

SEQ ID NO: 1250880 - DNA, 15 bp, Homo sapiens
ctctctccatgtcct

SEQ ID NO: 1250881 - DNA, 15 bp, Homo sapiens
tctctctccatgtcc

SEQ ID NO: 1250882 - DNA, 15 bp, Homo sapiens
gtctctctccatgtc

SEQ ID NO: 1250883 - DNA, 15 bp, Homo sapiens
agtctctctccatgt

SEQ ID NO: 1250884 - DNA, 15 bp, Homo sapiens
gagtctctctccatg

SEQ ID NO: 1250885 - DNA, 15 bp, Homo sapiens
tgagtctctctccat

SEQ ID NO: 1250886 - DNA, 15 bp, Homo sapiens
ttgagtctctctcca

SEQ ID NO: 1250887 - DNA, 15 bp, Homo sapiens
tttgagtctctctcc

SEQ ID NO: 1250888 - DNA, 15 bp, Homo sapiens
ctttgagtctctctc

SEQ ID NO: 1250889 - DNA, 15 bp, Homo sapiens
tctttgagtctctct

SEQ ID NO: 1250890 - DNA, 15 bp, Homo sapiens
ctctttgagtctctc

SEQ ID NO: 1250891 - DNA, 15 bp, Homo sapiens
tctctttgagtctct

SEQ ID NO: 1250892 - DNA, 15 bp, Homo sapiens
gtctctttgagtctc

SEQ ID NO: 1250893 - DNA, 15 bp, Homo sapiens
agtctctttgagtct

SEQ ID NO: 1250894 - DNA, 15 bp, Homo sapiens
gagtctctttgagtc

SEQ ID NO: 1250895 - DNA, 15 bp, Homo sapiens
ggagtctctttgagt

SEQ ID NO: 1250896 - DNA, 15 bp, Homo sapiens
tggagtctctttgag

SEQ ID NO: 1250897 - DNA, 15 bp, Homo sapiens
ttggagtctctttga

SEQ ID NO: 1250898 - DNA, 15 bp, Homo sapiens
cttggagtctctttg

SEQ ID NO: 1250899 - DNA, 15 bp, Homo sapiens
tcttggagtctcttt

SEQ ID NO: 1250900 - DNA, 15 bp, Homo sapiens
atcttggagtctctt

SEQ ID NO: 1250901 - DNA, 15 bp, Homo sapiens
aatcttggagtctct

SEQ ID NO: 1250902 - DNA, 15 bp, Homo sapiens
gaatcttggagtctc

SEQ ID NO: 1250903 - DNA, 15 bp, Homo sapiens
tgaatcttggagtct

SEQ ID NO: 1250904 - DNA, 15 bp, Homo sapiens
ttgaatcttggagtc

SEQ ID NO: 1250905 - DNA, 15 bp, Homo sapiens
tttgaatcttggagt

SEQ ID NO: 1250906 - DNA, 15 bp, Homo sapiens
ctttgaatcttggag

SEQ ID NO: 1250907 - DNA, 15 bp, Homo sapiens
tctttgaatcttgga

SEQ ID NO: 1250908 - DNA, 15 bp, Homo sapiens
ctctttgaatcttgg

SEQ ID NO: 1250909 - DNA, 15 bp, Homo sapiens
tctctttgaatcttg

SEQ ID NO: 1250910 - DNA, 15 bp, Homo sapiens
gtctctttgaatctt

SEQ ID NO: 1250911 - DNA, 15 bp, Homo sapiens
agtctctttgaatct

SEQ ID NO: 1250912 - DNA, 15 bp, Homo sapiens
tagtctctttgaatc

SEQ ID NO: 1250913 - DNA, 15 bp, Homo sapiens
ttagtctctttgaat

SEQ ID NO: 1250914 - DNA, 15 bp, Homo sapiens
attagtctctttgaa

SEQ ID NO: 1250915 - DNA, 15 bp, Homo sapiens
tattagtctctttga

SEQ ID NO: 1250916 - DNA, 15 bp, Homo sapiens
ctattagtctctttg

SEQ ID NO: 1250917 - DNA, 15 bp, Homo sapiens
tctattagtctcttt

SEQ ID NO: 1250918 - DNA, 15 bp, Homo sapiens
ctctattagtctctt

SEQ ID NO: 1250919 - DNA, 15 bp, Homo sapiens
tctctattagtctct

SEQ ID NO: 1250920 - DNA, 15 bp, Homo sapiens
gtctctattagtctc

SEQ ID NO: 1250921 - DNA, 15 bp, Homo sapiens
tgtctctattagtct

SEQ ID NO: 1250922 - DNA, 15 bp, Homo sapiens
gtgtctctattagtc

SEQ ID NO: 1250923 - DNA, 15 bp, Homo sapiens
tgtgtctctattagt

SEQ ID NO: 1250924 - DNA, 15 bp, Homo sapiens
ctgtgtctctattag

SEQ ID NO: 1250925 - DNA, 15 bp, Homo sapiens
tctgtgtctctatta

SEQ ID NO: 1250926 - DNA, 15 bp, Homo sapiens
atctctgtgtctcta

SEQ ID NO: 1250927 - DNA, 15 bp, Homo sapiens
catctctgtgtctct

SEQ ID NO: 1250928 - DNA, 15 bp, Homo sapiens
ccatctctgtgtctc

SEQ ID NO: 1250929 - DNA, 15 bp, Homo sapiens
tccatctctgtgtct

SEQ ID NO: 1250930 - DNA, 15 bp, Homo sapiens
ttccatctctgtgtc

SEQ ID NO: 1250931 - DNA, 15 bp, Homo sapiens
attccatctctgtgt

SEQ ID NO: 1250932 - DNA, 15 bp, Homo sapiens
tattccatctctgtg

SEQ ID NO: 1250933 - DNA, 15 bp, Homo sapiens
ctattccatctctgt

SEQ ID NO: 1250934 - DNA, 15 bp, Homo sapiens
tctattccatctctg

SEQ ID NO: 1250935 - DNA, 15 bp, Homo sapiens
ttctattccatctct

SEQ ID NO: 1250936 - DNA, 15 bp, Homo sapiens
tttctattccatctc

SEQ ID NO: 1250937 - DNA, 15 bp, Homo sapiens
ttttctattccatct

SEQ ID NO: 1250938 - DNA, 15 bp, Homo sapiens
cttttctattccatc

SEQ ID NO: 1250939 - DNA, 15 bp, Homo sapiens
tcttttctattccat

SEQ ID NO: 1250940 - DNA, 15 bp, Homo sapiens
atcttttctattcca

SEQ ID NO: 1250941 - DNA, 15 bp, Homo sapiens
catcttttctattcc

SEQ ID NO: 1250942 - DNA, 15 bp, Homo sapiens
tcatcttttctattc

SEQ ID NO: 1250943 - DNA, 15 bp, Homo sapiens
ctcatcttttctatt

SEQ ID NO: 1250944 - DNA, 15 bp, Homo sapiens
tctcatcttttctat

SEQ ID NO: 1250945 - DNA, 15 bp, Homo sapiens
ctctcatcttttcta

SEQ ID NO: 1250946 - DNA, 15 bp, Homo sapiens
cctctcatcttttct

SEQ ID NO: 1250947 - DNA, 15 bp, Homo sapiens
gcctctcatcttttc

SEQ ID NO: 1250948 - DNA, 15 bp, Homo sapiens
tgcctctcatctttt

SEQ ID NO: 1250949 - DNA, 15 bp, Homo sapiens
ctgcctctcatcttt

SEQ ID NO: 1250950 - DNA, 15 bp, Homo sapiens
tctgcctctcatctt

SEQ ID NO: 1250951 - DNA, 15 bp, Homo sapiens
ctctgcctctcatct

SEQ ID NO: 1250952 - DNA, 15 bp, Homo sapiens
cctctgcctctcatc

SEQ ID NO: 1250953 - DNA, 15 bp, Homo sapiens
gcctctgcctctcat

SEQ ID NO: 1250954 - DNA, 15 bp, Homo sapiens
tgcctctgcctctca

SEQ ID NO: 1250955 - DNA, 15 bp, Homo sapiens
ctgcctctgcctctc

SEQ ID NO: 1250956 - DNA, 15 bp, Homo sapiens
tctgcctctgcctct

SEQ ID NO: 1250957 - DNA, 15 bp, Homo sapiens
gtctgcctctgcctc

SEQ ID NO: 1250958 - DNA, 15 bp, Homo sapiens
tgtctgcctctgcct

SEQ ID NO: 1250959 - DNA, 15 bp, Homo sapiens
ctgtctgcctctgcc

SEQ ID NO: 1250960 - DNA, 15 bp, Homo sapiens
cctgtctgcctctgc

SEQ ID NO: 1250961 - DNA, 15 bp, Homo sapiens
gcctgtctgcctctg

SEQ ID NO: 1250962 - DNA, 15 bp, Homo sapiens
cgcctgtctgcctct

SEQ ID NO: 1250963 - DNA, 15 bp, Homo sapiens
gcgcctgtctgcctc

SEQ ID NO: 1250964 - DNA, 15 bp, Homo sapiens
agcgcctgtctgcct

SEQ ID NO: 1250965 - DNA, 15 bp, Homo sapiens
cagcgcctgtctgcc

SEQ ID NO: 1250966 - DNA, 15 bp, Homo sapiens
ccagcgcctgtctgc

SEQ ID NO: 1250967 - DNA, 15 bp, Homo sapiens
tccagcgcctgtctg

SEQ ID NO: 1250968 - DNA, 15 bp, Homo sapiens
gtccagcgcctgtct

SEQ ID NO: 1250969 - DNA, 15 bp, Homo sapiens
tgtccagcgcctgtc

SEQ ID NO: 1250970 - DNA, 15 bp, Homo sapiens
ctgtccagcgcctgt

SEQ ID NO: 1250971 - DNA, 15 bp, Homo sapiens
tctgtccagcgcctg

SEQ ID NO: 1250972 - DNA, 15 bp, Homo sapiens
ctctgtccagcgcct

SEQ ID NO: 1250973 - DNA, 15 bp, Homo sapiens
cctctgtccagcgcc

SEQ ID NO: 1250974 - DNA, 15 bp, Homo sapiens
ccctctgtccagcgc

SEQ ID NO: 1250975 - DNA, 15 bp, Homo sapiens
cccctctgtccagcg

SEQ ID NO: 1250976 - DNA, 15 bp, Homo sapiens
gcccctctgtccagc

SEQ ID NO: 1250977 - DNA, 15 bp, Homo sapiens
tgcccctctgtccag

SEQ ID NO: 1250978 - DNA, 15 bp, Homo sapiens
ctgcccctctgtcca

SEQ ID NO: 1250979 - DNA, 15 bp, Homo sapiens
cctgcccctctgtcc

SEQ ID NO: 1250980 - DNA, 15 bp, Homo sapiens
ccctgcccctctgtc

SEQ ID NO: 1250981 - DNA, 15 bp, Homo sapiens
cccctgcccctctgt

SEQ ID NO: 1250982 - DNA, 15 bp, Homo sapiens
tcccctgcccctctg

SEQ ID NO: 1250983 - DNA, 15 bp, Homo sapiens
ctcccctgcccctct

SEQ ID NO: 1250984 - DNA, 15 bp, Homo sapiens
actcccctgcccctc

SEQ ID NO: 1250985 - DNA, 15 bp, Homo sapiens
cactcccctgcccct

SEQ ID NO: 1250986 - DNA, 15 bp, Homo sapiens
gcactcccctgcccc

SEQ ID NO: 1250987 - DNA, 15 bp, Homo sapiens
ggcactcccctgccc

SEQ ID NO: 1250988 - DNA, 15 bp, Homo sapiens
tggcactcccctgcc

SEQ ID NO: 1250989 - DNA, 15 bp, Homo sapiens
ttggcactcccctgc

SEQ ID NO: 1250990 - DNA, 15 bp, Homo sapiens
cttggcactcccctg

SEQ ID NO: 1250991 - DNA, 15 bp, Homo sapiens
ccttggcactcccct

SEQ ID NO: 1250992 - DNA, 15 bp, Homo sapiens
accttggcactcccc

SEQ ID NO: 1250993 - DNA, 15 bp, Homo sapiens
aaccttggcactccc

SEQ ID NO: 1250994 - DNA, 15 bp, Homo sapiens
caaccttggcactcc

SEQ ID NO: 1250995 - DNA, 15 bp, Homo sapiens
acaaccttggcactc

SEQ ID NO: 1250996 - DNA, 15 bp, Homo sapiens
gacaaccttggcact

SEQ ID NO: 1250997 - DNA, 15 bp, Homo sapiens
ggacaaccttggcac

SEQ ID NO: 1250998 - DNA, 15 bp, Homo sapiens
aggacaaccttggca

SEQ ID NO: 1250999 - DNA, 15 bp, Homo sapiens
caggacaaccttggc

SEQ ID NO: 1251000 - DNA, 15 bp, Homo sapiens
ccaggacaaccttgg

SEQ ID NO: 1251001 - DNA, 15 bp, Homo sapiens
tccaggacaaccttg

SEQ ID NO: 1251002 - DNA, 15 bp, Homo sapiens
ctccaggacaacctt

SEQ ID NO: 1251003 - DNA, 15 bp, Homo sapiens
cctccaggacaacct

SEQ ID NO: 1251004 - DNA, 15 bp, Homo sapiens
gcctccaggacaacc

SEQ ID NO: 1251005 - DNA, 15 bp, Homo sapiens
tgcctccaggacaac

SEQ ID NO: 1251006 - DNA, 15 bp, Homo sapiens
ctgcctccaggacaa

SEQ ID NO: 1251007 - DNA, 15 bp, Homo sapiens
tctgcctccaggaca

SEQ ID NO: 1251008 - DNA, 15 bp, Homo sapiens
gtctgcctccaggac

SEQ ID NO: 1251009 - DNA, 15 bp, Homo sapiens
tgtctgcctccagga

SEQ ID NO: 1251010 - DNA, 15 bp, Homo sapiens
ctgtctgcctccagg

SEQ ID NO: 1251011 - DNA, 15 bp, Homo sapiens
gctgtctgcctccag

SEQ ID NO: 1251012 - DNA, 15 bp, Homo sapiens
ggctgtctgcctcca

SEQ ID NO: 1251013 - DNA, 15 bp, Homo sapiens
gggctgtctgcctcc

SEQ ID NO: 1251014 - DNA, 15 bp, Homo sapiens
tgggctgtctgcctc

SEQ ID NO: 1251015 - DNA, 15 bp, Homo sapiens
ctgggctgtctgcct

SEQ ID NO: 1251016 - DNA, 15 bp, Homo sapiens
gctgggctgtctgcc

SEQ ID NO: 1251017 - DNA, 15 bp, Homo sapiens
agctgggctgtctgc

SEQ ID NO: 1251018 - DNA, 15 bp, Homo sapiens
cagctgggctgtctg

SEQ ID NO: 1251019 - DNA, 15 bp, Homo sapiens
tcagctgggctgtct

SEQ ID NO: 1251020 - DNA, 15 bp, Homo sapiens
ctcagctgggctgtc

SEQ ID NO: 1251021 - DNA, 15 bp, Homo sapiens
gctcagctgggctgt

SEQ ID NO: 1251022 - DNA, 15 bp, Homo sapiens
ggctcagctgggctg

SEQ ID NO: 1251023 - DNA, 15 bp, Homo sapiens
aggctcagctgggct

SEQ ID NO: 1251024 - DNA, 15 bp, Homo sapiens
gaggctcagctgggc

SEQ ID NO: 1251025 - DNA, 15 bp, Homo sapiens
ggaggctcagctggg

SEQ ID NO: 1251026 - DNA, 15 bp, Homo sapiens
aggaggctcagctgg

SEQ ID NO: 1251027 - DNA, 15 bp, Homo sapiens
aaggaggctcagctg

SEQ ID NO: 1251028 - DNA, 15 bp, Homo sapiens
taaggaggctcagct

SEQ ID NO: 1251029 - DNA, 15 bp, Homo sapiens
gtaaggaggctcagc

SEQ ID NO: 1251030 - DNA, 15 bp, Homo sapiens
ggtaaggaggctcag

SEQ ID NO: 1251031 - DNA, 15 bp, Homo sapiens
aggtaaggaggctca

SEQ ID NO: 1251032 - DNA, 15 bp, Homo sapiens
gaggtaaggaggctc

SEQ ID NO: 1251033 - DNA, 15 bp, Homo sapiens
ggaggtaaggaggct

SEQ ID NO: 1251034 - DNA, 15 bp, Homo sapiens
gggaggtaaggaggc

SEQ ID NO: 1251035 - DNA, 15 bp, Homo sapiens
agggaggtaaggagg

SEQ ID NO: 1251036 - DNA, 15 bp, Homo sapiens
aagggaggtaaggag

SEQ ID NO: 1251037 - DNA, 15 bp, Homo sapiens
gaagggaggtaagga

SEQ ID NO: 1251038 - DNA, 15 bp, Homo sapiens
tgaagggaggtaagg

SEQ ID NO: 1251039 - DNA, 15 bp, Homo sapiens
ctgaagggaggtaag

SEQ ID NO: 1251040 - DNA, 15 bp, Homo sapiens
gctgaagggaggtaa

SEQ ID NO: 1251041 - DNA, 15 bp, Homo sapiens
ggctgaagggaggta

SEQ ID NO: 1251042 - DNA, 15 bp, Homo sapiens
tggctgaagggaggt

SEQ ID NO: 1251043 - DNA, 15 bp, Homo sapiens
ttggctgaagggagg

SEQ ID NO: 1251044 - DNA, 15 bp, Homo sapiens
cttggctgaagggag

SEQ ID NO: 1251045 - DNA, 15 bp, Homo sapiens
gcttggctgaaggga

SEQ ID NO: 1251046 - DNA, 15 bp, Homo sapiens
ggcttggctgaaggg

SEQ ID NO: 1251047 - DNA, 15 bp, Homo sapiens
gggcttggctgaagg

SEQ ID NO: 1251048 - DNA, 15 bp, Homo sapiens
tgggcttggctgaag

SEQ ID NO: 1251049 - DNA, 15 bp, Homo sapiens
gtgggcttggctgaa

SEQ ID NO: 1251050 - DNA, 15 bp, Homo sapiens
ggtgggcttggctga

SEQ ID NO: 1251051 - DNA, 15 bp, Homo sapiens
aggtgggcttggctg

SEQ ID NO: 1251052 - DNA, 15 bp, Homo sapiens
caggtgggcttggct

SEQ ID NO: 1251053 - DNA, 15 bp, Homo sapiens
gcaggtgggcttggc

SEQ ID NO: 1251054 - DNA, 15 bp, Homo sapiens
tgcaggtgggcttgg

SEQ ID NO: 1251055 - DNA, 15 bp, Homo sapiens
gtgcaggtgggcttg

SEQ ID NO: 1251056 - DNA, 15 bp, Homo sapiens
cgtgcaggtgggctt

SEQ ID NO: 1251057 - DNA, 15 bp, Homo sapiens
acgtgcaggtgggct

SEQ ID NO: 1251058 - DNA, 15 bp, Homo sapiens
cacgtgcaggtgggc

SEQ ID NO: 1251059 - DNA, 15 bp, Homo sapiens
tcacgtgcaggtggg

SEQ ID NO: 1251060 - DNA, 15 bp, Homo sapiens
atcacgtgcaggtgg

SEQ ID NO: 1251061 - DNA, 15 bp, Homo sapiens
gatcacgtgcaggtg

SEQ ID NO: 1251062 - DNA, 15 bp, Homo sapiens
agatcacgtgcaggt

SEQ ID NO: 1251063 - DNA, 15 bp, Homo sapiens
cagatcacgtgcagg

SEQ ID NO: 1251064 - DNA, 15 bp, Homo sapiens
gcagatcacgtgcag

SEQ ID NO: 1251065 - DNA, 15 bp, Homo sapiens
agcagatcacgtgca

SEQ ID NO: 1251066 - DNA, 15 bp, Homo sapiens
cagcagatcacgtgc

SEQ ID NO: 1251067 - DNA, 15 bp, Homo sapiens
ccagcagatcacgtg

SEQ ID NO: 1251068 - DNA, 15 bp, Homo sapiens
gccagcagatcacgt

SEQ ID NO: 1251069 - DNA, 15 bp, Homo sapiens
ggccagcagatcacg

SEQ ID NO: 1251070 - DNA, 15 bp, Homo sapiens
aggccagcagatcac

SEQ ID NO: 1251071 - DNA, 15 bp, Homo sapiens
gaggccagcagatca

SEQ ID NO: 1251072 - DNA, 15 bp, Homo sapiens
tgaggccagcagatc

SEQ ID NO: 1251073 - DNA, 15 bp, Homo sapiens
ctgaggccagcagat

SEQ ID NO: 1251074 - DNA, 15 bp, Homo sapiens
cctgaggccagcaga

SEQ ID NO: 1251075 - DNA, 15 bp, Homo sapiens
gcctgaggccagcag

SEQ ID NO: 1251076 - DNA, 15 bp, Homo sapiens
agcctgaggccagca

SEQ ID NO: 1251077 - DNA, 15 bp, Homo sapiens
cagcctgaggccagc

SEQ ID NO: 1251078 - DNA, 15 bp, Homo sapiens
gcagcctgaggccag

SEQ ID NO: 1251079 - DNA, 15 bp, Homo sapiens
agcagcctgaggcca

SEQ ID NO: 1251080 - DNA, 15 bp, Homo sapiens
cagcagcctgaggcc

SEQ ID NO: 1251081 - DNA, 15 bp, Homo sapiens
gcagcagcctgaggc

SEQ ID NO: 1251082 - DNA, 15 bp, Homo sapiens
agcagcagcctgagg

SEQ ID NO: 1251083 - DNA, 15 bp, Homo sapiens
gagcagcagcctgag

SEQ ID NO: 1251084 - DNA, 15 bp, Homo sapiens
agagcagcagcctga

SEQ ID NO: 1251085 - DNA, 15 bp, Homo sapiens
cagagcagcagcctg

SEQ ID NO: 1251086 - DNA, 15 bp, Homo sapiens
gcagagcagcagcct

SEQ ID NO: 1251087 - DNA, 15 bp, Homo sapiens
ggcagagcagcagcc

SEQ ID NO: 1251088 - DNA, 15 bp, Homo sapiens
aggcagagcagcagc

SEQ ID NO: 1251089 - DNA, 15 bp, Homo sapiens
aaggcagagcagcag

SEQ ID NO: 1251090 - DNA, 15 bp, Homo sapiens
gaaggcagagcagca

SEQ ID NO: 1251091 - DNA, 15 bp, Homo sapiens
tgaaggcagagcagc

SEQ ID NO: 1251092 - DNA, 15 bp, Homo sapiens
atgaaggcagagcag

SEQ ID NO: 1251093 - DNA, 15 bp, Homo sapiens
aatgaaggcagagca

SEQ ID NO: 1251094 - DNA, 15 bp, Homo sapiens
caatgaaggcagagc

SEQ ID NO: 1251095 - DNA, 15 bp, Homo sapiens
gcaatgaaggcagag

SEQ ID NO: 1251096 - DNA, 15 bp, Homo sapiens
agcaatgaaggcaga

SEQ ID NO: 1251097 - DNA, 15 bp, Homo sapiens
cagcaatgaaggcag

SEQ ID NO: 1251098 - DNA, 15 bp, Homo sapiens
ccagcaatgaaggca

SEQ ID NO: 1251099 - DNA, 15 bp, Homo sapiens
tccagcaatgaaggc

SEQ ID NO: 1251100 - DNA, 15 bp, Homo sapiens
ctccagcaatgaagg

SEQ ID NO: 1251101 - DNA, 15 bp, Homo sapiens
tctccagcaatgaag

SEQ ID NO: 1251102 - DNA, 15 bp, Homo sapiens
gtctccagcaatgaa

SEQ ID NO: 1251103 - DNA, 15 bp, Homo sapiens
tgtctccagcaatga

SEQ ID NO: 1251104 - DNA, 15 bp, Homo sapiens
ctgtctccagcaatg

SEQ ID NO: 1251105 - DNA, 15 bp, Homo sapiens
actgtctccagcaat

SEQ ID NO: 1251106 - DNA, 15 bp, Homo sapiens
tactgtctccagcaa

SEQ ID NO: 1251107 - DNA, 15 bp, Homo sapiens
ctactgtctccagca

SEQ ID NO: 1251108 - DNA, 15 bp, Homo sapiens
tctactgtctccagc

SEQ ID NO: 1251109 - DNA, 15 bp, Homo sapiens
ctctactgtctccag

SEQ ID NO: 1251110 - DNA, 15 bp, Homo sapiens
cctctactgtctcca

SEQ ID NO: 1251111 - DNA, 15 bp, Homo sapiens
gcctctactgtctcc

SEQ ID NO: 1251112 - DNA, 15 bp, Homo sapiens
tgcctctactgtctc

SEQ ID NO: 1251113 - DNA, 15 bp, Homo sapiens
atgcctctactgtct

SEQ ID NO: 1251114 - DNA, 15 bp, Homo sapiens
catgcctctactgtc

SEQ ID NO: 1251115 - DNA, 15 bp, Homo sapiens
tcatgcctctactgt

SEQ ID NO: 1251116 - DNA, 15 bp, Homo sapiens
ttcatgcctctactg

SEQ ID NO: 1251117 - DNA, 15 bp, Homo sapiens
gttcatgcctctact

SEQ ID NO: 1251118 - DNA, 15 bp, Homo sapiens
tgttcatgcctctac

SEQ ID NO: 1251119 - DNA, 15 bp, Homo sapiens
gtgttcatgcctcta

SEQ ID NO: 1251120 - DNA, 15 bp, Homo sapiens
tgtgttcatgcctct

SEQ ID NO: 1251121 - DNA, 15 bp, Homo sapiens
gtgtgttcatgcctc

SEQ ID NO: 1251122 - DNA, 15 bp, Homo sapiens
tgtgtgttcatgcct

SEQ ID NO: 1251123 - DNA, 15 bp, Homo sapiens
atgtgtgttcatgcc

SEQ ID NO: 1251124 - DNA, 15 bp, Homo sapiens
catgtgtgttcatgc

SEQ ID NO: 1251125 - DNA, 15 bp, Homo sapiens
ccatgtgtgttcatg

SEQ ID NO: 1251126 - DNA, 15 bp, Homo sapiens
tccatgtgtgttcat

SEQ ID NO: 1251127 - DNA, 15 bp, Homo sapiens
atccatgtgtgttca

SEQ ID NO: 1251128 - DNA, 15 bp, Homo sapiens
catccatgtgtgttc

SEQ ID NO: 1251129 - DNA, 15 bp, Homo sapiens
gcatccatgtgtgtt

SEQ ID NO: 1251130 - DNA, 15 bp, Homo sapiens
tgcatccatgtgtgt

SEQ ID NO: 1251131 - DNA, 15 bp, Homo sapiens
gtgcatccatgtgtg

SEQ ID NO: 1251132 - DNA, 15 bp, Homo sapiens
tgtgcatccatgtgt

SEQ ID NO: 1251133 - DNA, 15 bp, Homo sapiens
gtgtgcatccatgtg

SEQ ID NO: 1251134 - DNA, 15 bp, Homo sapiens
tgtgtgcatccatgt

SEQ ID NO: 1251135 - DNA, 15 bp, Homo sapiens
gtgtgtgcatccatg

SEQ ID NO: 1251136 - DNA, 15 bp, Homo sapiens
tgtgtgtgcatccat

SEQ ID NO: 1251137 - DNA, 15 bp, Homo sapiens
gtgtgtgtgcatcca

SEQ ID NO: 1251138 - DNA, 15 bp, Homo sapiens
tgtgtgtgtgcatcc

SEQ ID NO: 1251139 - DNA, 15 bp, Homo sapiens
gtgtgtgtgtgcatc

SEQ ID NO: 1251140 - DNA, 15 bp, Homo sapiens
tgtgtgtgtgtgcat

SEQ ID NO: 1251141 - DNA, 15 bp, Homo sapiens
cgtgtgtgtgtgtgc

SEQ ID NO: 1251142 - DNA, 15 bp, Homo sapiens
gcgtgtgtgtgtgtg

SEQ ID NO: 1251143 - DNA, 15 bp, Homo sapiens
ggcgtgtgtgtgtgt

SEQ ID NO: 1251144 - DNA, 15 bp, Homo sapiens
tggcgtgtgtgtgtg

SEQ ID NO: 1251145 - DNA, 15 bp, Homo sapiens
ttggcgtgtgtgtgt

SEQ ID NO: 1251146 - DNA, 15 bp, Homo sapiens
attggcgtgtgtgtg

SEQ ID NO: 1251147 - DNA, 15 bp, Homo sapiens
cattggcgtgtgtgt

SEQ ID NO: 1251148 - DNA, 15 bp, Homo sapiens
gcattggcgtgtgtg

SEQ ID NO: 1251149 - DNA, 15 bp, Homo sapiens
tgcattggcgtgtgt

SEQ ID NO: 1251150 - DNA, 15 bp, Homo sapiens
gtgcattggcgtgtg

SEQ ID NO: 1251151 - DNA, 15 bp, Homo sapiens
tgtgcattggcgtgt

SEQ ID NO: 1251152 - DNA, 15 bp, Homo sapiens
gtgtgcattggcgtg

SEQ ID NO: 1251153 - DNA, 15 bp, Homo sapiens
tgtgtgcattggcgt

SEQ ID NO: 1251154 - DNA, 15 bp, Homo sapiens
gtgtgtgcattggcg

SEQ ID NO: 1251155 - DNA, 15 bp, Homo sapiens
tgtgtgtgcattggc

SEQ ID NO: 1251156 - DNA, 15 bp, Homo sapiens
gtgtgtgtgcattgg

SEQ ID NO: 1251157 - DNA, 15 bp, Homo sapiens
tgtgtgtgtgcattg

SEQ ID NO: 1251158 - DNA, 15 bp, Homo sapiens
ctgtgtgtgtgcatt

SEQ ID NO: 1251159 - DNA, 15 bp, Homo sapiens
tctgtgtgtgtgcat

SEQ ID NO: 1251160 - DNA, 15 bp, Homo sapiens
ctctgtgtgtgtgca

SEQ ID NO: 1251161 - DNA, 15 bp, Homo sapiens
tctctgtgtgtgtgc

SEQ ID NO: 1251162 - DNA, 15 bp, Homo sapiens
atctctgtgtgtgtg

SEQ ID NO: 1251163 - DNA, 15 bp, Homo sapiens
tatctctgtgtgtgt

SEQ ID NO: 1251164 - DNA, 15 bp, Homo sapiens
atatctctgtgtgtg

SEQ ID NO: 1251165 - DNA, 15 bp, Homo sapiens
catatctctgtgtgt

SEQ ID NO: 1251166 - DNA, 15 bp, Homo sapiens
gcatatctctgtgtg

SEQ ID NO: 1251167 - DNA, 15 bp, Homo sapiens
tgcatatctctgtgt

SEQ ID NO: 1251168 - DNA, 15 bp, Homo sapiens
gtgcatatctctgtg

SEQ ID NO: 1251169 - DNA, 15 bp, Homo sapiens
tgtgcatatctctgt

SEQ ID NO: 1251170 - DNA, 15 bp, Homo sapiens
gtgtgcatatctctg

SEQ ID NO: 1251171 - DNA, 15 bp, Homo sapiens
tgtgtgcatatctct

SEQ ID NO: 1251172 - DNA, 15 bp, Homo sapiens
gtgtgtgcatatctc

SEQ ID NO: 1251173 - DNA, 15 bp, Homo sapiens
tgtgtgtgcatatct

SEQ ID NO: 1251174 - DNA, 15 bp, Homo sapiens
gtgtgtgtgcatatc

SEQ ID NO: 1251175 - DNA, 15 bp, Homo sapiens
cgtgtgtgtgcatat

SEQ ID NO: 1251176 - DNA, 15 bp, Homo sapiens
ccgtgtgtgtgcata

SEQ ID NO: 1251177 - DNA, 15 bp, Homo sapiens
tccgtgtgtgtgcat

SEQ ID NO: 1251178 - DNA, 15 bp, Homo sapiens
atccgtgtgtgtgca

SEQ ID NO: 1251179 - DNA, 15 bp, Homo sapiens
catccgtgtgtgtgc

SEQ ID NO: 1251180 - DNA, 15 bp, Homo sapiens
gcatccgtgtgtgtg

SEQ ID NO: 1251181 - DNA, 15 bp, Homo sapiens
tgcatccgtgtgtgt

SEQ ID NO: 1251182 - DNA, 15 bp, Homo sapiens
gtgcatccgtgtgtg

SEQ ID NO: 1251183 - DNA, 15 bp, Homo sapiens
tgtgcatccgtgtgt

SEQ ID NO: 1251184 - DNA, 15 bp, Homo sapiens
gtgtgcatccgtgtg

SEQ ID NO: 1251185 - DNA, 15 bp, Homo sapiens
tgtgtgcatccgtgt

SEQ ID NO: 1251186 - DNA, 15 bp, Homo sapiens
gtgtgtgcatccgtg

SEQ ID NO: 1251187 - DNA, 15 bp, Homo sapiens
tgtgtgtgcatccgt

SEQ ID NO: 1251188 - DNA, 15 bp, Homo sapiens
ctgtgtgtgcatccg

SEQ ID NO: 1251189 - DNA, 15 bp, Homo sapiens
tctgtgtgtgcatcc

SEQ ID NO: 1251190 - DNA, 15 bp, Homo sapiens
atctgtgtgtgcatc

SEQ ID NO: 1251191 - DNA, 15 bp, Homo sapiens
catctgtgtgtgcat

SEQ ID NO: 1251192 - DNA, 15 bp, Homo sapiens
ccatctgtgtgtgca

SEQ ID NO: 1251193 - DNA, 15 bp, Homo sapiens
accatctgtgtgtgc

SEQ ID NO: 1251194 - DNA, 15 bp, Homo sapiens
gaccatctgtgtgtg

SEQ ID NO: 1251195 - DNA, 15 bp, Homo sapiens
tgaccatctgtgtgt

SEQ ID NO: 1251196 - DNA, 15 bp, Homo sapiens
gtgaccatctgtgtg

SEQ ID NO: 1251197 - DNA, 15 bp, Homo sapiens
tgtgaccatctgtgt

SEQ ID NO: 1251198 - DNA, 15 bp, Homo sapiens
gtgtgaccatctgtg

SEQ ID NO: 1251199 - DNA, 15 bp, Homo sapiens
tgtgtgaccatctgt

SEQ ID NO: 1251200 - DNA, 15 bp, Homo sapiens
ctgtgtgaccatctg

SEQ ID NO: 1251201 - DNA, 15 bp, Homo sapiens
tctgtgtgaccatct

SEQ ID NO: 1251202 - DNA, 15 bp, Homo sapiens
ctctgtgtgaccatc

SEQ ID NO: 1251203 - DNA, 15 bp, Homo sapiens
tctctgtgtgaccat

SEQ ID NO: 1251204 - DNA, 15 bp, Homo sapiens
atctctgtgtgacca

SEQ ID NO: 1251205 - DNA, 15 bp, Homo sapiens
tatctctgtgtgacc

SEQ ID NO: 1251206 - DNA, 15 bp, Homo sapiens
gtatctctgtgtgac

SEQ ID NO: 1251207 - DNA, 15 bp, Homo sapiens
cgtatctctgtgtga

SEQ ID NO: 1251208 - DNA, 15 bp, Homo sapiens
gcgtatctctgtgtg

SEQ ID NO: 1251209 - DNA, 15 bp, Homo sapiens
tgcgtatctctgtgt

SEQ ID NO: 1251210 - DNA, 15 bp, Homo sapiens
ttgcgtatctctgtg

SEQ ID NO: 1251211 - DNA, 15 bp, Homo sapiens
tttgcgtatctctgt

SEQ ID NO: 1251212 - DNA, 15 bp, Homo sapiens
gtttgcgtatctctg

SEQ ID NO: 1251213 - DNA, 15 bp, Homo sapiens
tgtttgcgtatctct

SEQ ID NO: 1251214 - DNA, 15 bp, Homo sapiens
gtgtttgcgtatctc

SEQ ID NO: 1251215 - DNA, 15 bp, Homo sapiens
tgtgtttgcgtatct

SEQ ID NO: 1251216 - DNA, 15 bp, Homo sapiens
gtgtgtttgcgtatc

SEQ ID NO: 1251217 - DNA, 15 bp, Homo sapiens
ggtgtgtttgcgtat

SEQ ID NO: 1251218 - DNA, 15 bp, Homo sapiens
cggtgtgtttgcgta

SEQ ID NO: 1251219 - DNA, 15 bp, Homo sapiens
tcggtgtgtttgcgt

SEQ ID NO: 1251220 - DNA, 15 bp, Homo sapiens
atcggtgtgtttgcg

SEQ ID NO: 1251221 - DNA, 15 bp, Homo sapiens
catcggtgtgtttgc

SEQ ID NO: 1251222 - DNA, 15 bp, Homo sapiens
gcatcggtgtgtttg

SEQ ID NO: 1251223 - DNA, 15 bp, Homo sapiens
tgcatcggtgtgttt

SEQ ID NO: 1251224 - DNA, 15 bp, Homo sapiens
gtgcatcggtgtgtt

SEQ ID NO: 1251225 - DNA, 15 bp, Homo sapiens
tgtgcatcggtgtgt

SEQ ID NO: 1251226 - DNA, 15 bp, Homo sapiens
gtgtgcatcggtgtg

SEQ ID NO: 1251227 - DNA, 15 bp, Homo sapiens
cgtgtgcatcggtgt

SEQ ID NO: 1251228 - DNA, 15 bp, Homo sapiens
gcgtgtgcatcggtg

SEQ ID NO: 1251229 - DNA, 15 bp, Homo sapiens
tgcgtgtgcatcggt

SEQ ID NO: 1251230 - DNA, 15 bp, Homo sapiens
gtgcgtgtgcatcgg

SEQ ID NO: 1251231 - DNA, 15 bp, Homo sapiens
tgtgcgtgtgcatcg

SEQ ID NO: 1251232 - DNA, 15 bp, Homo sapiens
atgtgcgtgtgcatc

SEQ ID NO: 1251233 - DNA, 15 bp, Homo sapiens
tatgtgcgtgtgcat

SEQ ID NO: 1251234 - DNA, 15 bp, Homo sapiens
ctatgtgcgtgtgca

SEQ ID NO: 1251235 - DNA, 15 bp, Homo sapiens
tctatgtgcgtgtgc

SEQ ID NO: 1251236 - DNA, 15 bp, Homo sapiens
ctctatgtgcgtgtg

SEQ ID NO: 1251237 - DNA, 15 bp, Homo sapiens
tctctatgtgcgtgt

SEQ ID NO: 1251238 - DNA, 15 bp, Homo sapiens
atctctatgtgcgtg

SEQ ID NO: 1251239 - DNA, 15 bp, Homo sapiens
tatctctatgtgcgt

SEQ ID NO: 1251240 - DNA, 15 bp, Homo sapiens
atatctctatgtgcg

SEQ ID NO: 1251241 - DNA, 15 bp, Homo sapiens
catatctctatgtgc

SEQ ID NO: 1251242 - DNA, 15 bp, Homo sapiens
gcatatctctatgtg

SEQ ID NO: 1251243 - DNA, 15 bp, Homo sapiens
tgcatatctctatgt

SEQ ID NO: 1251244 - DNA, 15 bp, Homo sapiens
gtgcatatctctatg

SEQ ID NO: 1251245 - DNA, 15 bp, Homo sapiens
tgtgcatatctctat

SEQ ID NO: 1251246 - DNA, 15 bp, Homo sapiens
gtgtgcatatctcta

SEQ ID NO: 1251247 - DNA, 15 bp, Homo sapiens
ctgtgtgtgcatatc

SEQ ID NO: 1251248 - DNA, 15 bp, Homo sapiens
tctgtgtgtgcatat

SEQ ID NO: 1251249 - DNA, 15 bp, Homo sapiens
atctgtgtgtgcata

SEQ ID NO: 1251250 - DNA, 15 bp, Homo sapiens
gcatctgtgtgtgca

SEQ ID NO: 1251251 - DNA, 15 bp, Homo sapiens
tgcatctgtgtgtgc

SEQ ID NO: 1251252 - DNA, 15 bp, Homo sapiens
gtgcatctgtgtgtg

SEQ ID NO: 1251253 - DNA, 15 bp, Homo sapiens
tgtgcatctgtgtgt

SEQ ID NO: 1251254 - DNA, 15 bp, Homo sapiens
gtgtgcatctgtgtg

SEQ ID NO: 1251255 - DNA, 15 bp, Homo sapiens
tgtgtgcatctgtgt

SEQ ID NO: 1251256 - DNA, 15 bp, Homo sapiens
gtgtgtgcatctgtg

SEQ ID NO: 1251257 - DNA, 15 bp, Homo sapiens
tgtgtgtgcatctgt

SEQ ID NO: 1251258 - DNA, 15 bp, Homo sapiens
ctgtgtgtgcatctg

SEQ ID NO: 1251259 - DNA, 15 bp, Homo sapiens
tctgtgtgtgcatct

SEQ ID NO: 1251260 - DNA, 15 bp, Homo sapiens
tatctgtgtgtgcat

SEQ ID NO: 1251261 - DNA, 15 bp, Homo sapiens
atatctgtgtgtgca

SEQ ID NO: 1251262 - DNA, 15 bp, Homo sapiens
tatatctgtgtgtgc

SEQ ID NO: 1251263 - DNA, 15 bp, Homo sapiens
gtatatctgtgtgtg

SEQ ID NO: 1251264 - DNA, 15 bp, Homo sapiens
tgtatatctgtgtgt

SEQ ID NO: 1251265 - DNA, 15 bp, Homo sapiens
gtgtatatctgtgtg

SEQ ID NO: 1251266 - DNA, 15 bp, Homo sapiens
tgtgtatatctgtgt

SEQ ID NO: 1251267 - DNA, 15 bp, Homo sapiens
atgtgtatatctgtg

SEQ ID NO: 1251268 - DNA, 15 bp, Homo sapiens
catgtgtatatctgt

SEQ ID NO: 1251269 - DNA, 15 bp, Homo sapiens
ccatgtgtatatctg

SEQ ID NO: 1251270 - DNA, 15 bp, Homo sapiens
tccatgtgtatatct

SEQ ID NO: 1251271 - DNA, 15 bp, Homo sapiens
atccatgtgtatatc

SEQ ID NO: 1251272 - DNA, 15 bp, Homo sapiens
catccatgtgtatat

SEQ ID NO: 1251273 - DNA, 15 bp, Homo sapiens
gcatccatgtgtata

SEQ ID NO: 1251274 - DNA, 15 bp, Homo sapiens
tgcatccatgtgtat

SEQ ID NO: 1251275 - DNA, 15 bp, Homo sapiens
gtgcatccatgtgta

SEQ ID NO: 1251276 - DNA, 15 bp, Homo sapiens
cgtgcatccatgtgt

SEQ ID NO: 1251277 - DNA, 15 bp, Homo sapiens
gcgtgcatccatgtg

SEQ ID NO: 1251278 - DNA, 15 bp, Homo sapiens
tgcgtgcatccatgt

SEQ ID NO: 1251279 - DNA, 15 bp, Homo sapiens
gtgcgtgcatccatg

SEQ ID NO: 1251280 - DNA, 15 bp, Homo sapiens
tgtgcgtgcatccat

SEQ ID NO: 1251281 - DNA, 15 bp, Homo sapiens
atgtgcgtgcatcca

SEQ ID NO: 1251282 - DNA, 15 bp, Homo sapiens
catgtgcgtgcatcc

SEQ ID NO: 1251283 - DNA, 15 bp, Homo sapiens
gcatgtgcgtgcatc

SEQ ID NO: 1251284 - DNA, 15 bp, Homo sapiens
ggcatgtgcgtgcat

SEQ ID NO: 1251285 - DNA, 15 bp, Homo sapiens
tggcatgtgcgtgca

SEQ ID NO: 1251286 - DNA, 15 bp, Homo sapiens
ttggcatgtgcgtgc

SEQ ID NO: 1251287 - DNA, 15 bp, Homo sapiens
attggcatgtgcgtg

SEQ ID NO: 1251288 - DNA, 15 bp, Homo sapiens
cattggcatgtgcgt

SEQ ID NO: 1251289 - DNA, 15 bp, Homo sapiens
gcattggcatgtgcg

SEQ ID NO: 1251290 - DNA, 15 bp, Homo sapiens
tgcattggcatgtgc

SEQ ID NO: 1251291 - DNA, 15 bp, Homo sapiens
gtgcattggcatgtg

SEQ ID NO: 1251292 - DNA, 15 bp, Homo sapiens
cgtgcattggcatgt

SEQ ID NO: 1251293 - DNA, 15 bp, Homo sapiens
gcgtgcattggcatg

SEQ ID NO: 1251294 - DNA, 15 bp, Homo sapiens
tgcgtgcattggcat

SEQ ID NO: 1251295 - DNA, 15 bp, Homo sapiens
gtgcgtgcattggca

SEQ ID NO: 1251296 - DNA, 15 bp, Homo sapiens
tgtgcgtgcattggc

SEQ ID NO: 1251297 - DNA, 15 bp, Homo sapiens
gtgtgcgtgcattgg

SEQ ID NO: 1251298 - DNA, 15 bp, Homo sapiens
tgtgtgcgtgcattg

SEQ ID NO: 1251299 - DNA, 15 bp, Homo sapiens
atgtgtgcgtgcatt

SEQ ID NO: 1251300 - DNA, 15 bp, Homo sapiens
gatgtgtgcgtgcat

SEQ ID NO: 1251301 - DNA, 15 bp, Homo sapiens
tgatgtgtgcgtgca

SEQ ID NO: 1251302 - DNA, 15 bp, Homo sapiens
ctgatgtgtgcgtgc

SEQ ID NO: 1251303 - DNA, 15 bp, Homo sapiens
actgatgtgtgcgtg

SEQ ID NO: 1251304 - DNA, 15 bp, Homo sapiens
cactgatgtgtgcgt

SEQ ID NO: 1251305 - DNA, 15 bp, Homo sapiens
gcactgatgtgtgcg

SEQ ID NO: 1251306 - DNA, 15 bp, Homo sapiens
tgcactgatgtgtgc

SEQ ID NO: 1251307 - DNA, 15 bp, Homo sapiens
gtgcactgatgtgtg

SEQ ID NO: 1251308 - DNA, 15 bp, Homo sapiens
tgtgcactgatgtgt

SEQ ID NO: 1251309 - DNA, 15 bp, Homo sapiens
gtgtgcactgatgtg

SEQ ID NO: 1251310 - DNA, 15 bp, Homo sapiens
cgtgtgcactgatgt

SEQ ID NO: 1251311 - DNA, 15 bp, Homo sapiens
ccgtgtgcactgatg

SEQ ID NO: 1251312 - DNA, 15 bp, Homo sapiens
tccgtgtgcactgat

SEQ ID NO: 1251313 - DNA, 15 bp, Homo sapiens
atccgtgtgcactga

SEQ ID NO: 1251314 - DNA, 15 bp, Homo sapiens
catccgtgtgcactg

SEQ ID NO: 1251315 - DNA, 15 bp, Homo sapiens
gcatccgtgtgcact

SEQ ID NO: 1251316 - DNA, 15 bp, Homo sapiens
tgcatccgtgtgcac

SEQ ID NO: 1251317 - DNA, 15 bp, Homo sapiens
gtgcatccgtgtgca

SEQ ID NO: 1251318 - DNA, 15 bp, Homo sapiens
tgtgcatccgtgtgc

SEQ ID NO: 1251319 - DNA, 15 bp, Homo sapiens
ctgtgcatccgtgtg

SEQ ID NO: 1251320 - DNA, 15 bp, Homo sapiens
tctgtgcatccgtgt

SEQ ID NO: 1251321 - DNA, 15 bp, Homo sapiens
ctctgtgcatccgtg

SEQ ID NO: 1251322 - DNA, 15 bp, Homo sapiens
tctctgtgcatccgt

SEQ ID NO: 1251323 - DNA, 15 bp, Homo sapiens
atctctgtgcatccg

SEQ ID NO: 1251324 - DNA, 15 bp, Homo sapiens
tatctctgtgcatcc

SEQ ID NO: 1251325 - DNA, 15 bp, Homo sapiens
atatctctgtgcatc

SEQ ID NO: 1251326 - DNA, 15 bp, Homo sapiens
catatctctgtgcat

SEQ ID NO: 1251327 - DNA, 15 bp, Homo sapiens
gcatatctctgtgca

SEQ ID NO: 1251328 - DNA, 15 bp, Homo sapiens
tgcatatctctgtgc

SEQ ID NO: 1251329 - DNA, 15 bp, Homo sapiens
ggtgtgtgcatatct

SEQ ID NO: 1251330 - DNA, 15 bp, Homo sapiens
cggtgtgtgcatatc

SEQ ID NO: 1251331 - DNA, 15 bp, Homo sapiens
tcggtgtgtgcatat

SEQ ID NO: 1251332 - DNA, 15 bp, Homo sapiens
atcggtgtgtgcata

SEQ ID NO: 1251333 - DNA, 15 bp, Homo sapiens
catcggtgtgtgcat

SEQ ID NO: 1251334 - DNA, 15 bp, Homo sapiens
acatcggtgtgtgca

SEQ ID NO: 1251335 - DNA, 15 bp, Homo sapiens
cacatcggtgtgtgc

SEQ ID NO: 1251336 - DNA, 15 bp, Homo sapiens
gcacatcggtgtgtg

SEQ ID NO: 1251337 - DNA, 15 bp, Homo sapiens
cgcacatcggtgtgt

SEQ ID NO: 1251338 - DNA, 15 bp, Homo sapiens
gcgcacatcggtgtg

SEQ ID NO: 1251339 - DNA, 15 bp, Homo sapiens
tgcgcacatcggtgt

SEQ ID NO: 1251340 - DNA, 15 bp, Homo sapiens
gtgcgcacatcggtg

SEQ ID NO: 1251341 - DNA, 15 bp, Homo sapiens
tgtgcgcacatcggt

SEQ ID NO: 1251342 - DNA, 15 bp, Homo sapiens
gtgtgcgcacatcgg

SEQ ID NO: 1251343 - DNA, 15 bp, Homo sapiens
tgtgtgcgcacatcg

SEQ ID NO: 1251344 - DNA, 15 bp, Homo sapiens
gtgtgtgcgcacatc

SEQ ID NO: 1251345 - DNA, 15 bp, Homo sapiens
tgtgtgtgcgcacat

SEQ ID NO: 1251346 - DNA, 15 bp, Homo sapiens
ctgtgtgtgcgcaca

SEQ ID NO: 1251347 - DNA, 15 bp, Homo sapiens
tctgtgtgtgcgcac

SEQ ID NO: 1251348 - DNA, 15 bp, Homo sapiens
atctgtgtgtgcgca

SEQ ID NO: 1251349 - DNA, 15 bp, Homo sapiens
tatctgtgtgtgcgc

SEQ ID NO: 1251350 - DNA, 15 bp, Homo sapiens
atatctgtgtgtgcg

SEQ ID NO: 1251351 - DNA, 15 bp, Homo sapiens
catatctgtgtgtgc

SEQ ID NO: 1251352 - DNA, 15 bp, Homo sapiens
gcatatctgtgtgtg

SEQ ID NO: 1251353 - DNA, 15 bp, Homo sapiens
tgcatatctgtgtgt

SEQ ID NO: 1251354 - DNA, 15 bp, Homo sapiens
gtgcatatctgtgtg

SEQ ID NO: 1251355 - DNA, 15 bp, Homo sapiens
tgtgcatatctgtgt

SEQ ID NO: 1251356 - DNA, 15 bp, Homo sapiens
gtgtgcatatctgtg

SEQ ID NO: 1251357 - DNA, 15 bp, Homo sapiens
tgtgtgcatatctgt

SEQ ID NO: 1251358 - DNA, 15 bp, Homo sapiens
gtgtgtgcatatctg

SEQ ID NO: 1251359 - DNA, 15 bp, Homo sapiens
atgtgtgtgcatatc

SEQ ID NO: 1251360 - DNA, 15 bp, Homo sapiens
catgtgtgtgcatat

SEQ ID NO: 1251361 - DNA, 15 bp, Homo sapiens
ccatgtgtgtgcata

SEQ ID NO: 1251362 - DNA, 15 bp, Homo sapiens
tccatgtgtgtgcat

SEQ ID NO: 1251363 - DNA, 15 bp, Homo sapiens
atccatgtgtgtgca

SEQ ID NO: 1251364 - DNA, 15 bp, Homo sapiens
catccatgtgtgtgc

SEQ ID NO: 1251365 - DNA, 15 bp, Homo sapiens
tcatccatgtgtgtg

SEQ ID NO: 1251366 - DNA, 15 bp, Homo sapiens
ctcatccatgtgtgt

SEQ ID NO: 1251367 - DNA, 15 bp, Homo sapiens
gctcatccatgtgtg

SEQ ID NO: 1251368 - DNA, 15 bp, Homo sapiens
tgctcatccatgtgt

SEQ ID NO: 1251369 - DNA, 15 bp, Homo sapiens
gtgctcatccatgtg

SEQ ID NO: 1251370 - DNA, 15 bp, Homo sapiens
tgtgctcatccatgt

SEQ ID NO: 1251371 - DNA, 15 bp, Homo sapiens
gtgtgctcatccatg

SEQ ID NO: 1251372 - DNA, 15 bp, Homo sapiens
tgtgtgctcatccat

SEQ ID NO: 1251373 - DNA, 15 bp, Homo sapiens
gtgtgtgctcatcca

SEQ ID NO: 1251374 - DNA, 15 bp, Homo sapiens
tgtgtgtgctcatcc

SEQ ID NO: 1251375 - DNA, 15 bp, Homo sapiens
gtgtgtgtgctcatc

SEQ ID NO: 1251376 - DNA, 15 bp, Homo sapiens
tgtgtgtgtgctcat

SEQ ID NO: 1251377 - DNA, 15 bp, Homo sapiens
gtgtgtgtgtgctca

SEQ ID NO: 1251378 - DNA, 15 bp, Homo sapiens
ggtgtgtgtgtgctc

SEQ ID NO: 1251379 - DNA, 15 bp, Homo sapiens
tggtgtgtgtgtgct

SEQ ID NO: 1251380 - DNA, 15 bp, Homo sapiens
ttggtgtgtgtgtgc

SEQ ID NO: 1251381 - DNA, 15 bp, Homo sapiens
attggtgtgtgtgtg

SEQ ID NO: 1251382 - DNA, 15 bp, Homo sapiens
cattggtgtgtgtgt

SEQ ID NO: 1251383 - DNA, 15 bp, Homo sapiens
gcattggtgtgtgtg

SEQ ID NO: 1251384 - DNA, 15 bp, Homo sapiens
cgcattggtgtgtgt

SEQ ID NO: 1251385 - DNA, 15 bp, Homo sapiens
gcgcattggtgtgtg

SEQ ID NO: 1251386 - DNA, 15 bp, Homo sapiens
tgcgcattggtgtgt

SEQ ID NO: 1251387 - DNA, 15 bp, Homo sapiens
gtgcgcattggtgtg

SEQ ID NO: 1251388 - DNA, 15 bp, Homo sapiens
tgtgcgcattggtgt

SEQ ID NO: 1251389 - DNA, 15 bp, Homo sapiens
gtgtgcgcattggtg

SEQ ID NO: 1251390 - DNA, 15 bp, Homo sapiens
tgtgtgcgcattggt

SEQ ID NO: 1251391 - DNA, 15 bp, Homo sapiens
gtgtgtgcgcattgg

SEQ ID NO: 1251392 - DNA, 15 bp, Homo sapiens
tgtgtgtgcgcattg

SEQ ID NO: 1251393 - DNA, 15 bp, Homo sapiens
gtgtgtgtgcgcatt

SEQ ID NO: 1251394 - DNA, 15 bp, Homo sapiens
ggtgtgtgtgcgcat

SEQ ID NO: 1251395 - DNA, 15 bp, Homo sapiens
cggtgtgtgtgcgca

SEQ ID NO: 1251396 - DNA, 15 bp, Homo sapiens
tcggtgtgtgtgcgc

SEQ ID NO: 1251397 - DNA, 15 bp, Homo sapiens
atcggtgtgtgtgcg

SEQ ID NO: 1251398 - DNA, 15 bp, Homo sapiens
catcggtgtgtgtgc

SEQ ID NO: 1251399 - DNA, 15 bp, Homo sapiens
acatcggtgtgtgtg

SEQ ID NO: 1251400 - DNA, 15 bp, Homo sapiens
tacatcggtgtgtgt

SEQ ID NO: 1251401 - DNA, 15 bp, Homo sapiens
gtacatcggtgtgtg

SEQ ID NO: 1251402 - DNA, 15 bp, Homo sapiens
tgtacatcggtgtgt

SEQ ID NO: 1251403 - DNA, 15 bp, Homo sapiens
gtgtacatcggtgtg

SEQ ID NO: 1251404 - DNA, 15 bp, Homo sapiens
tgtgtacatcggtgt

SEQ ID NO: 1251405 - DNA, 15 bp, Homo sapiens
gtgtgtacatcggtg

SEQ ID NO: 1251406 - DNA, 15 bp, Homo sapiens
tgtgtgtacatcggt

SEQ ID NO: 1251407 - DNA, 15 bp, Homo sapiens
gtgtgtgtacatcgg

SEQ ID NO: 1251408 - DNA, 15 bp, Homo sapiens
tgtgtgtgtacatcg

SEQ ID NO: 1251409 - DNA, 15 bp, Homo sapiens
ctgtgtgtgtacatc

SEQ ID NO: 1251410 - DNA, 15 bp, Homo sapiens
tctgtgtgtgtacat

SEQ ID NO: 1251411 - DNA, 15 bp, Homo sapiens
atctgtgtgtgtaca

SEQ ID NO: 1251412 - DNA, 15 bp, Homo sapiens
catctgtgtgtgtac

SEQ ID NO: 1251413 - DNA, 15 bp, Homo sapiens
gcatctgtgtgtgta

SEQ ID NO: 1251414 - DNA, 15 bp, Homo sapiens
tgcatctgtgtgtgt

SEQ ID NO: 1251415 - DNA, 15 bp, Homo sapiens
gtgtgtgtgcatctg

SEQ ID NO: 1251416 - DNA, 15 bp, Homo sapiens
ggtgtgtgtgcatct

SEQ ID NO: 1251417 - DNA, 15 bp, Homo sapiens
cggtgtgtgtgcatc

SEQ ID NO: 1251418 - DNA, 15 bp, Homo sapiens
tcggtgtgtgtgcat

SEQ ID NO: 1251419 - DNA, 15 bp, Homo sapiens
atcggtgtgtgtgca

SEQ ID NO: 1251420 - DNA, 15 bp, Homo sapiens
gcatcggtgtgtgtg

SEQ ID NO: 1251421 - DNA, 15 bp, Homo sapiens
agcatcggtgtgtgt

SEQ ID NO: 1251422 - DNA, 15 bp, Homo sapiens
cagcatcggtgtgtg

SEQ ID NO: 1251423 - DNA, 15 bp, Homo sapiens
tcagcatcggtgtgt

SEQ ID NO: 1251424 - DNA, 15 bp, Homo sapiens
gtcagcatcggtgtg

SEQ ID NO: 1251425 - DNA, 15 bp, Homo sapiens
agtcagcatcggtgt

SEQ ID NO: 1251426 - DNA, 15 bp, Homo sapiens
gagtcagcatcggtg

SEQ ID NO: 1251427 - DNA, 15 bp, Homo sapiens
ggagtcagcatcggt

SEQ ID NO: 1251428 - DNA, 15 bp, Homo sapiens
tggagtcagcatcgg

SEQ ID NO: 1251429 - DNA, 15 bp, Homo sapiens
atggagtcagcatcg

SEQ ID NO: 1251430 - DNA, 15 bp, Homo sapiens
catggagtcagcatc

SEQ ID NO: 1251431 - DNA, 15 bp, Homo sapiens
acatggagtcagcat

SEQ ID NO: 1251432 - DNA, 15 bp, Homo sapiens
cacatggagtcagca

SEQ ID NO: 1251433 - DNA, 15 bp, Homo sapiens
acacatggagtcagc

SEQ ID NO: 1251434 - DNA, 15 bp, Homo sapiens
cacacatggagtcag

SEQ ID NO: 1251435 - DNA, 15 bp, Homo sapiens
gcacacatggagtca

SEQ ID NO: 1251436 - DNA, 15 bp, Homo sapiens
agcacacatggagtc

SEQ ID NO: 1251437 - DNA, 15 bp, Homo sapiens
cagcacacatggagt

SEQ ID NO: 1251438 - DNA, 15 bp, Homo sapiens
acagcacacatggag

SEQ ID NO: 1251439 - DNA, 15 bp, Homo sapiens
gacagcacacatgga

SEQ ID NO: 1251440 - DNA, 15 bp, Homo sapiens
ggacagcacacatgg

SEQ ID NO: 1251441 - DNA, 15 bp, Homo sapiens
aggacagcacacatg

SEQ ID NO: 1251442 - DNA, 15 bp, Homo sapiens
gaggacagcacacat

SEQ ID NO: 1251443 - DNA, 15 bp, Homo sapiens
agaggacagcacaca

SEQ ID NO: 1251444 - DNA, 15 bp, Homo sapiens
cagaggacagcacac

SEQ ID NO: 1251445 - DNA, 15 bp, Homo sapiens
tcagaggacagcaca

SEQ ID NO: 1251446 - DNA, 15 bp, Homo sapiens
ttcagaggacagcac

SEQ ID NO: 1251447 - DNA, 15 bp, Homo sapiens
cttcagaggacagca

SEQ ID NO: 1251448 - DNA, 15 bp, Homo sapiens
ccttcagaggacagc

SEQ ID NO: 1251449 - DNA, 15 bp, Homo sapiens
gccttcagaggacag

SEQ ID NO: 1251450 - DNA, 15 bp, Homo sapiens
cgccttcagaggaca

SEQ ID NO: 1251451 - DNA, 15 bp, Homo sapiens
ccgccttcagaggac

SEQ ID NO: 1251452 - DNA, 15 bp, Homo sapiens
accgccttcagagga

SEQ ID NO: 1251453 - DNA, 15 bp, Homo sapiens
aaccgccttcagagg

SEQ ID NO: 1251454 - DNA, 15 bp, Homo sapiens
caaccgccttcagag

SEQ ID NO: 1251455 - DNA, 15 bp, Homo sapiens
acaaccgccttcaga

SEQ ID NO: 1251456 - DNA, 15 bp, Homo sapiens
aacaaccgccttcag

SEQ ID NO: 1251457 - DNA, 15 bp, Homo sapiens
aaacaaccgccttca

SEQ ID NO: 1251458 - DNA, 15 bp, Homo sapiens
taaacaaccgccttc

SEQ ID NO: 1251459 - DNA, 15 bp, Homo sapiens
ctaaacaaccgcctt

SEQ ID NO: 1251460 - DNA, 15 bp, Homo sapiens
gctaaacaaccgcct

SEQ ID NO: 1251461 - DNA, 15 bp, Homo sapiens
agctaaacaaccgcc

SEQ ID NO: 1251462 - DNA, 15 bp, Homo sapiens
gagctaaacaaccgc

SEQ ID NO: 1251463 - DNA, 15 bp, Homo sapiens
agagctaaacaaccg

SEQ ID NO: 1251464 - DNA, 15 bp, Homo sapiens
gagagctaaacaacc

SEQ ID NO: 1251465 - DNA, 15 bp, Homo sapiens
tgagagctaaacaac

SEQ ID NO: 1251466 - DNA, 15 bp, Homo sapiens
gtgagagctaaacaa

SEQ ID NO: 1251467 - DNA, 15 bp, Homo sapiens
agtgagagctaaaca

SEQ ID NO: 1251468 - DNA, 15 bp, Homo sapiens
aagtgagagctaaac

SEQ ID NO: 1251469 - DNA, 15 bp, Homo sapiens
aaagtgagagctaaa

SEQ ID NO: 1251470 - DNA, 15 bp, Homo sapiens
aaaagtgagagctaa

SEQ ID NO: 1251471 - DNA, 15 bp, Homo sapiens
gaaaagtgagagcta

SEQ ID NO: 1251472 - DNA, 15 bp, Homo sapiens
agaaaagtgagagct

SEQ ID NO: 1251473 - DNA, 15 bp, Homo sapiens
cagaaaagtgagagc

SEQ ID NO: 1251474 - DNA, 15 bp, Homo sapiens
ccagaaaagtgagag

SEQ ID NO: 1251475 - DNA, 15 bp, Homo sapiens
accagaaaagtgaga

SEQ ID NO: 1251476 - DNA, 15 bp, Homo sapiens
aaccagaaaagtgag

SEQ ID NO: 1251477 - DNA, 15 bp, Homo sapiens
gaaccagaaaagtga

SEQ ID NO: 1251478 - DNA, 15 bp, Homo sapiens
agaaccagaaaagtg

SEQ ID NO: 1251479 - DNA, 15 bp, Homo sapiens
aagaaccagaaaagt

SEQ ID NO: 1251480 - DNA, 15 bp, Homo sapiens
taagaaccagaaaag

SEQ ID NO: 1251481 - DNA, 15 bp, Homo sapiens
ataagaaccagaaaa

SEQ ID NO: 1251482 - DNA, 15 bp, Homo sapiens
gataagaaccagaaa

SEQ ID NO: 1251483 - DNA, 15 bp, Homo sapiens
ggataagaaccagaa

SEQ ID NO: 1251484 - DNA, 15 bp, Homo sapiens
tggataagaaccaga

SEQ ID NO: 1251485 - DNA, 15 bp, Homo sapiens
atggataagaaccag

SEQ ID NO: 1251486 - DNA, 15 bp, Homo sapiens
aatggataagaacca

SEQ ID NO: 1251487 - DNA, 15 bp, Homo sapiens
taatggataagaacc

SEQ ID NO: 1251488 - DNA, 15 bp, Homo sapiens
ataatggataagaac

SEQ ID NO: 1251489 - DNA, 15 bp, Homo sapiens
gataatggataagaa

SEQ ID NO: 1251490 - DNA, 15 bp, Homo sapiens
tgataatggataaga

SEQ ID NO: 1251491 - DNA, 15 bp, Homo sapiens
atgataatggataag

SEQ ID NO: 1251492 - DNA, 15 bp, Homo sapiens
gatgataatggataa

SEQ ID NO: 1251493 - DNA, 15 bp, Homo sapiens
agatgataatggata

SEQ ID NO: 1251494 - DNA, 15 bp, Homo sapiens
aagatgataatggat

SEQ ID NO: 1251495 - DNA, 15 bp, Homo sapiens
gaagatgataatgga

SEQ ID NO: 1251496 - DNA, 15 bp, Homo sapiens
tgaagatgataatgg

SEQ ID NO: 1251497 - DNA, 15 bp, Homo sapiens
gtgaagatgataatg

SEQ ID NO: 1251498 - DNA, 15 bp, Homo sapiens
agtgaagatgataat

SEQ ID NO: 1251499 - DNA, 15 bp, Homo sapiens
aagtgaagatgataa

SEQ ID NO: 1251500 - DNA, 15 bp, Homo sapiens
gaagtgaagatgata

SEQ ID NO: 1251501 - DNA, 15 bp, Homo sapiens
tgaagtgaagatgat

SEQ ID NO: 1251502 - DNA, 15 bp, Homo sapiens
ctgaagtgaagatga

SEQ ID NO: 1251503 - DNA, 15 bp, Homo sapiens
tctgaagtgaagatg

SEQ ID NO: 1251504 - DNA, 15 bp, Homo sapiens
gtctgaagtgaagat

SEQ ID NO: 1251505 - DNA, 15 bp, Homo sapiens
tgtctgaagtgaaga

SEQ ID NO: 1251506 - DNA, 15 bp, Homo sapiens
ttgtctgaagtgaag

SEQ ID NO: 1251507 - DNA, 15 bp, Homo sapiens
attgtctgaagtgaa

SEQ ID NO: 1251508 - DNA, 15 bp, Homo sapiens
aattgtctgaagtga

SEQ ID NO: 1251509 - DNA, 15 bp, Homo sapiens
gaattgtctgaagtg

SEQ ID NO: 1251510 - DNA, 15 bp, Homo sapiens
tgaattgtctgaagt

SEQ ID NO: 1251511 - DNA, 15 bp, Homo sapiens
ctgaattgtctgaag

SEQ ID NO: 1251512 - DNA, 15 bp, Homo sapiens
tctgaattgtctgaa

SEQ ID NO: 1251513 - DNA, 15 bp, Homo sapiens
ttctgaattgtctga

SEQ ID NO: 1251514 - DNA, 15 bp, Homo sapiens
cttctgaattgtctg

SEQ ID NO: 1251515 - DNA, 15 bp, Homo sapiens
gcttctgaattgtct

SEQ ID NO: 1251516 - DNA, 15 bp, Homo sapiens
tgcttctgaattgtc

SEQ ID NO: 1251517 - DNA, 15 bp, Homo sapiens
atgcttctgaattgt

SEQ ID NO: 1251518 - DNA, 15 bp, Homo sapiens
gatgcttctgaattg

SEQ ID NO: 1251519 - DNA, 15 bp, Homo sapiens
tgatgcttctgaatt

SEQ ID NO: 1251520 - DNA, 15 bp, Homo sapiens
gtgatgcttctgaat

SEQ ID NO: 1251521 - DNA, 15 bp, Homo sapiens
ggtgatgcttctgaa

SEQ ID NO: 1251522 - DNA, 15 bp, Homo sapiens
tggtgatgcttctga

SEQ ID NO: 1251523 - DNA, 15 bp, Homo sapiens
atggtgatgcttctg

SEQ ID NO: 1251524 - DNA, 15 bp, Homo sapiens
catggtgatgcttct

SEQ ID NO: 1251525 - DNA, 15 bp, Homo sapiens
gcatggtgatgcttc

SEQ ID NO: 1251526 - DNA, 15 bp, Homo sapiens
tgcatggtgatgctt

SEQ ID NO: 1251527 - DNA, 15 bp, Homo sapiens
atgcatggtgatgct

SEQ ID NO: 1251528 - DNA, 15 bp, Homo sapiens
catgcatggtgatgc

SEQ ID NO: 1251529 - DNA, 15 bp, Homo sapiens
ccatgcatggtgatg

SEQ ID NO: 1251530 - DNA, 15 bp, Homo sapiens
accatgcatggtgat

SEQ ID NO: 1251531 - DNA, 15 bp, Homo sapiens
caccatgcatggtga

SEQ ID NO: 1251532 - DNA, 15 bp, Homo sapiens
ccaccatgcatggtg

SEQ ID NO: 1251533 - DNA, 15 bp, Homo sapiens
gccaccatgcatggt

SEQ ID NO: 1251534 - DNA, 15 bp, Homo sapiens
cgccaccatgcatgg

SEQ ID NO: 1251535 - DNA, 15 bp, Homo sapiens
tcgccaccatgcatg

SEQ ID NO: 1251536 - DNA, 15 bp, Homo sapiens
ttcgccaccatgcat

SEQ ID NO: 1251537 - DNA, 15 bp, Homo sapiens
attcgccaccatgca

SEQ ID NO: 1251538 - DNA, 15 bp, Homo sapiens
cattcgccaccatgc

SEQ ID NO: 1251539 - DNA, 15 bp, Homo sapiens
gcattcgccaccatg

SEQ ID NO: 1251540 - DNA, 15 bp, Homo sapiens
ggcattcgccaccat

SEQ ID NO: 1251541 - DNA, 15 bp, Homo sapiens
gggcattcgccacca

SEQ ID NO: 1251542 - DNA, 15 bp, Homo sapiens
ggggcattcgccacc

SEQ ID NO: 1251543 - DNA, 15 bp, Homo sapiens
gggggcattcgccac

SEQ ID NO: 1251544 - DNA, 15 bp, Homo sapiens
tgggggcattcgcca

SEQ ID NO: 1251545 - DNA, 15 bp, Homo sapiens
ttgggggcattcgcc

SEQ ID NO: 1251546 - DNA, 15 bp, Homo sapiens
tttgggggcattcgc

SEQ ID NO: 1251547 - DNA, 15 bp, Homo sapiens
gtttgggggcattcg

SEQ ID NO: 1251548 - DNA, 15 bp, Homo sapiens
agtttgggggcattc

SEQ ID NO: 1251549 - DNA, 15 bp, Homo sapiens
gagtttgggggcatt

SEQ ID NO: 1251550 - DNA, 15 bp, Homo sapiens
agagtttgggggcat

SEQ ID NO: 1251551 - DNA, 15 bp, Homo sapiens
gagagtttgggggca

SEQ ID NO: 1251552 - DNA, 15 bp, Homo sapiens
ggagagtttgggggc

SEQ ID NO: 1251553 - DNA, 15 bp, Homo sapiens
gggagagtttggggg

SEQ ID NO: 1251554 - DNA, 15 bp, Homo sapiens
ggggagagtttgggg

SEQ ID NO: 1251555 - DNA, 15 bp, Homo sapiens
gggggagagtttggg

SEQ ID NO: 1251556 - DNA, 15 bp, Homo sapiens
tgggggagagtttgg

SEQ ID NO: 1251557 - DNA, 15 bp, Homo sapiens
ttgggggagagtttg

SEQ ID NO: 1251558 - DNA, 15 bp, Homo sapiens
tttgggggagagttt

SEQ ID NO: 1251559 - DNA, 15 bp, Homo sapiens
atttgggggagagtt

SEQ ID NO: 1251560 - DNA, 15 bp, Homo sapiens
catttgggggagagt

SEQ ID NO: 1251561 - DNA, 15 bp, Homo sapiens
acatttgggggagag

SEQ ID NO: 1251562 - DNA, 15 bp, Homo sapiens
tacatttgggggaga

SEQ ID NO: 1251563 - DNA, 15 bp, Homo sapiens
atacatttgggggag

SEQ ID NO: 1251564 - DNA, 15 bp, Homo sapiens
aatacatttggggga

SEQ ID NO: 1251565 - DNA, 15 bp, Homo sapiens
aaatacatttggggg

SEQ ID NO: 1251566 - DNA, 15 bp, Homo sapiens
gaaatacatttgggg

SEQ ID NO: 1251567 - DNA, 15 bp, Homo sapiens
agaaatacatttggg

SEQ ID NO: 1251568 - DNA, 15 bp, Homo sapiens
gagaaatacatttgg

SEQ ID NO: 1251569 - DNA, 15 bp, Homo sapiens
ggagaaatacatttg

SEQ ID NO: 1251570 - DNA, 15 bp, Homo sapiens
gggagaaatacattt

SEQ ID NO: 1251571 - DNA, 15 bp, Homo sapiens
agggagaaatacatt

SEQ ID NO: 1251572 - DNA, 15 bp, Homo sapiens
aagggagaaatacat

SEQ ID NO: 1251573 - DNA, 15 bp, Homo sapiens
gaagggagaaataca

SEQ ID NO: 1251574 - DNA, 15 bp, Homo sapiens
cgaagggagaaatac

SEQ ID NO: 1251575 - DNA, 15 bp, Homo sapiens
gcgaagggagaaata

SEQ ID NO: 1251576 - DNA, 15 bp, Homo sapiens
agcgaagggagaaat

SEQ ID NO: 1251577 - DNA, 15 bp, Homo sapiens
cagcgaagggagaaa

SEQ ID NO: 1251578 - DNA, 15 bp, Homo sapiens
ccagcgaagggagaa

SEQ ID NO: 1251579 - DNA, 15 bp, Homo sapiens
cccagcgaagggaga

SEQ ID NO: 1251580 - DNA, 15 bp, Homo sapiens
acccagcgaagggag

SEQ ID NO: 1251581 - DNA, 15 bp, Homo sapiens
cacccagcgaaggga

SEQ ID NO: 1251582 - DNA, 15 bp, Homo sapiens
gcacccagcgaaggg

SEQ ID NO: 1251583 - DNA, 15 bp, Homo sapiens
ggcacccagcgaagg

SEQ ID NO: 1251584 - DNA, 15 bp, Homo sapiens
cggcacccagcgaag

SEQ ID NO: 1251585 - DNA, 15 bp, Homo sapiens
ccggcacccagcgaa

SEQ ID NO: 1251586 - DNA, 15 bp, Homo sapiens
cccggcacccagcga

SEQ ID NO: 1251587 - DNA, 15 bp, Homo sapiens
gcccggcacccagcg

SEQ ID NO: 1251588 - DNA, 15 bp, Homo sapiens
agcccggcacccagc

SEQ ID NO: 1251589 - DNA, 15 bp, Homo sapiens
cagcccggcacccag

SEQ ID NO: 1251590 - DNA, 15 bp, Homo sapiens
gcagcccggcaccca

SEQ ID NO: 1251591 - DNA, 15 bp, Homo sapiens
tgcagcccggcaccc

SEQ ID NO: 1251592 - DNA, 15 bp, Homo sapiens
gtgcagcccggcacc

SEQ ID NO: 1251593 - DNA, 15 bp, Homo sapiens
tgtgcagcccggcac

SEQ ID NO: 1251594 - DNA, 15 bp, Homo sapiens
ctgtgcagcccggca

SEQ ID NO: 1251595 - DNA, 15 bp, Homo sapiens
tctgtgcagcccggc

SEQ ID NO: 1251596 - DNA, 15 bp, Homo sapiens
gtctgtgcagcccgg

SEQ ID NO: 1251597 - DNA, 15 bp, Homo sapiens
agtctgtgcagcccg

SEQ ID NO: 1251598 - DNA, 15 bp, Homo sapiens
tagtctgtgcagccc

SEQ ID NO: 1251599 - DNA, 15 bp, Homo sapiens
atagtctgtgcagcc

SEQ ID NO: 1251600 - DNA, 15 bp, Homo sapiens
aatagtctgtgcagc

SEQ ID NO: 1251601 - DNA, 15 bp, Homo sapiens
gaatagtctgtgcag

SEQ ID NO: 1251602 - DNA, 15 bp, Homo sapiens
ggaatagtctgtgca

SEQ ID NO: 1251603 - DNA, 15 bp, Homo sapiens
gggaatagtctgtgc

SEQ ID NO: 1251604 - DNA, 15 bp, Homo sapiens
ggggaatagtctgtg

SEQ ID NO: 1251605 - DNA, 15 bp, Homo sapiens
tggggaatagtctgt

SEQ ID NO: 1251606 - DNA, 15 bp, Homo sapiens
gtggggaatagtctg

SEQ ID NO: 1251607 - DNA, 15 bp, Homo sapiens
ggtggggaatagtct

SEQ ID NO: 1251608 - DNA, 15 bp, Homo sapiens
aggtggggaatagtc

SEQ ID NO: 1251609 - DNA, 15 bp, Homo sapiens
caggtggggaatagt

SEQ ID NO: 1251610 - DNA, 15 bp, Homo sapiens
gcaggtggggaatag

SEQ ID NO: 1251611 - DNA, 15 bp, Homo sapiens
agcaggtggggaata

SEQ ID NO: 1251612 - DNA, 15 bp, Homo sapiens
aagcaggtggggaat

SEQ ID NO: 1251613 - DNA, 15 bp, Homo sapiens
gaagcaggtggggaa

SEQ ID NO: 1251614 - DNA, 15 bp, Homo sapiens
ggaagcaggtgggga

SEQ ID NO: 1251615 - DNA, 15 bp, Homo sapiens
gggaagcaggtgggg

SEQ ID NO: 1251616 - DNA, 15 bp, Homo sapiens
tgggaagcaggtggg

SEQ ID NO: 1251617 - DNA, 15 bp, Homo sapiens
ctgggaagcaggtgg

SEQ ID NO: 1251618 - DNA, 15 bp, Homo sapiens
gctgggaagcaggtg

SEQ ID NO: 1251619 - DNA, 15 bp, Homo sapiens
agctgggaagcaggt

SEQ ID NO: 1251620 - DNA, 15 bp, Homo sapiens
aagctgggaagcagg

SEQ ID NO: 1251621 - DNA, 15 bp, Homo sapiens
gaagctgggaagcag

SEQ ID NO: 1251622 - DNA, 15 bp, Homo sapiens
tgaagctgggaagca

SEQ ID NO: 1251623 - DNA, 15 bp, Homo sapiens
gtgaagctgggaagc

SEQ ID NO: 1251624 - DNA, 15 bp, Homo sapiens
tgtgaagctgggaag

SEQ ID NO: 1251625 - DNA, 15 bp, Homo sapiens
ttgtgaagctgggaa

SEQ ID NO: 1251626 - DNA, 15 bp, Homo sapiens
attgtgaagctggga

SEQ ID NO: 1251627 - DNA, 15 bp, Homo sapiens
tattgtgaagctggg

SEQ ID NO: 1251628 - DNA, 15 bp, Homo sapiens
ttattgtgaagctgg

SEQ ID NO: 1251629 - DNA, 15 bp, Homo sapiens
tttattgtgaagctg

SEQ ID NO: 1251630 - DNA, 15 bp, Homo sapiens
gtttattgtgaagct

SEQ ID NO: 1251631 - DNA, 15 bp, Homo sapiens
cgtttattgtgaagc

SEQ ID NO: 1251632 - DNA, 15 bp, Homo sapiens
ccgtttattgtgaag

SEQ ID NO: 1251633 - DNA, 15 bp, Homo sapiens
gccgtttattgtgaa

SEQ ID NO: 1251634 - DNA, 15 bp, Homo sapiens
agccgtttattgtga

SEQ ID NO: 1251635 - DNA, 15 bp, Homo sapiens
cagccgtttattgtg

SEQ ID NO: 1251636 - DNA, 15 bp, Homo sapiens
gcagccgtttattgt

SEQ ID NO: 1251637 - DNA, 15 bp, Homo sapiens
cgcagccgtttattg

SEQ ID NO: 1251638 - DNA, 15 bp, Homo sapiens
acgcagccgtttatt

SEQ ID NO: 1251639 - DNA, 15 bp, Homo sapiens
gacgcagccgtttat

SEQ ID NO: 1251640 - DNA, 15 bp, Homo sapiens
agacgcagccgttta

SEQ ID NO: 1251641 - DNA, 15 bp, Homo sapiens
gagacgcagccgttt

SEQ ID NO: 1251642 - DNA, 15 bp, Homo sapiens
ggagacgcagccgtt

SEQ ID NO: 1251643 - DNA, 15 bp, Homo sapiens
aggagacgcagccgt

SEQ ID NO: 1251644 - DNA, 15 bp, Homo sapiens
gaggagacgcagccg

SEQ ID NO: 1251645 - DNA, 15 bp, Homo sapiens
ggaggagacgcagcc

SEQ ID NO: 1251646 - DNA, 15 bp, Homo sapiens
cggaggagacgcagc

SEQ ID NO: 1251647 - DNA, 15 bp, Homo sapiens
gcggaggagacgcag

SEQ ID NO: 1251648 - DNA, 15 bp, Homo sapiens
tgcggaggagacgca

SEQ ID NO: 1251649 - DNA, 15 bp, Homo sapiens
gtgcggaggagacgc

SEQ ID NO: 1251650 - DNA, 15 bp, Homo sapiens
tgtgcggaggagacg

SEQ ID NO: 1251651 - DNA, 15 bp, Homo sapiens
gtgtgcggaggagac

SEQ ID NO: 1251652 - DNA, 15 bp, Homo sapiens
ggtgtgcggaggaga

SEQ ID NO: 1251653 - DNA, 15 bp, Homo sapiens
aggtgtgcggaggag

SEQ ID NO: 1251654 - DNA, 15 bp, Homo sapiens
caggtgtgcggagga

SEQ ID NO: 1251655 - DNA, 15 bp, Homo sapiens
acaggtgtgcggagg

SEQ ID NO: 1251656 - DNA, 15 bp, Homo sapiens
cacaggtgtgcggag

SEQ ID NO: 1251657 - DNA, 15 bp, Homo sapiens
ccacaggtgtgcgga

SEQ ID NO: 1251658 - DNA, 15 bp, Homo sapiens
accacaggtgtgcgg

SEQ ID NO: 1251659 - DNA, 15 bp, Homo sapiens
caccacaggtgtgcg

SEQ ID NO: 1251660 - DNA, 15 bp, Homo sapiens
gcaccacaggtgtgc

SEQ ID NO: 1251661 - DNA, 15 bp, Homo sapiens
ggcaccacaggtgtg

SEQ ID NO: 1251662 - DNA, 15 bp, Homo sapiens
aggcaccacaggtgt

SEQ ID NO: 1251663 - DNA, 15 bp, Homo sapiens
caggcaccacaggtg

SEQ ID NO: 1251664 - DNA, 15 bp, Homo sapiens
gcaggcaccacaggt

SEQ ID NO: 1251665 - DNA, 15 bp, Homo sapiens
ggcaggcaccacagg

SEQ ID NO: 1251666 - DNA, 15 bp, Homo sapiens
tggcaggcaccacag

SEQ ID NO: 1251667 - DNA, 15 bp, Homo sapiens
gtggcaggcaccaca

SEQ ID NO: 1251668 - DNA, 15 bp, Homo sapiens
ggtggcaggcaccac

SEQ ID NO: 1251669 - DNA, 15 bp, Homo sapiens
gggtggcaggcacca

SEQ ID NO: 1251670 - DNA, 15 bp, Homo sapiens
tgggtggcaggcacc

SEQ ID NO: 1251671 - DNA, 15 bp, Homo sapiens
gtgggtggcaggcac

SEQ ID NO: 1251672 - DNA, 15 bp, Homo sapiens
agtgggtggcaggca

SEQ ID NO: 1251673 - DNA, 15 bp, Homo sapiens
cagtgggtggcaggc

SEQ ID NO: 1251674 - DNA, 15 bp, Homo sapiens
ccagtgggtggcagg

SEQ ID NO: 1251675 - DNA, 15 bp, Homo sapiens
cccagtgggtggcag

SEQ ID NO: 1251676 - DNA, 15 bp, Homo sapiens
acccagtgggtggca

SEQ ID NO: 1251677 - DNA, 15 bp, Homo sapiens
aacccagtgggtggc

SEQ ID NO: 1251678 - DNA, 15 bp, Homo sapiens
caacccagtgggtgg

SEQ ID NO: 1251679 - DNA, 15 bp, Homo sapiens
gcaacccagtgggtg

SEQ ID NO: 1251680 - DNA, 15 bp, Homo sapiens
ggcaacccagtgggt

SEQ ID NO: 1251681 - DNA, 15 bp, Homo sapiens
gggcaacccagtggg

SEQ ID NO: 1251682 - DNA, 15 bp, Homo sapiens
tgggcaacccagtgg

SEQ ID NO: 1251683 - DNA, 15 bp, Homo sapiens
atgggcaacccagtg

SEQ ID NO: 1251684 - DNA, 15 bp, Homo sapiens
catgggcaacccagt

SEQ ID NO: 1251685 - DNA, 15 bp, Homo sapiens
tcatgggcaacccag

SEQ ID NO: 1251686 - DNA, 15 bp, Homo sapiens
atcatgggcaaccca

SEQ ID NO: 1251687 - DNA, 15 bp, Homo sapiens
aatcatgggcaaccc

SEQ ID NO: 1251688 - DNA, 15 bp, Homo sapiens
gaatcatgggcaacc

SEQ ID NO: 1251689 - DNA, 15 bp, Homo sapiens
tgaatcatgggcaac

SEQ ID NO: 1251690 - DNA, 15 bp, Homo sapiens
atgaatcatgggcaa

SEQ ID NO: 1251691 - DNA, 15 bp, Homo sapiens
aatgaatcatgggca

SEQ ID NO: 1251692 - DNA, 15 bp, Homo sapiens
aaatgaatcatgggc

SEQ ID NO: 1251693 - DNA, 15 bp, Homo sapiens
aaaatgaatcatggg

SEQ ID NO: 1251694 - DNA, 15 bp, Homo sapiens
aaaaatgaatcatgg

SEQ ID NO: 1251695 - DNA, 15 bp, Homo sapiens
caaaaatgaatcatg

SEQ ID NO: 1251696 - DNA, 15 bp, Homo sapiens
ccaaaaatgaatcat

SEQ ID NO: 1251697 - DNA, 15 bp, Homo sapiens
tccaaaaatgaatca

SEQ ID NO: 1251698 - DNA, 15 bp, Homo sapiens
ctccaaaaatgaatc

SEQ ID NO: 1251699 - DNA, 15 bp, Homo sapiens
gctccaaaaatgaat

SEQ ID NO: 1251700 - DNA, 15 bp, Homo sapiens
ggctccaaaaatgaa

SEQ ID NO: 1251701 - DNA, 15 bp, Homo sapiens
gggctccaaaaatga

SEQ ID NO: 1251702 - DNA, 15 bp, Homo sapiens
ggggctccaaaaatg

SEQ ID NO: 1251703 - DNA, 15 bp, Homo sapiens
gggggctccaaaaat

SEQ ID NO: 1251704 - DNA, 15 bp, Homo sapiens
cgggggctccaaaaa

SEQ ID NO: 1251705 - DNA, 15 bp, Homo sapiens
ccgggggctccaaaa

SEQ ID NO: 1251706 - DNA, 15 bp, Homo sapiens
accgggggctccaaa

SEQ ID NO: 1251707 - DNA, 15 bp, Homo sapiens
caccgggggctccaa

SEQ ID NO: 1251708 - DNA, 15 bp, Homo sapiens
gcaccgggggctcca

SEQ ID NO: 1251709 - DNA, 15 bp, Homo sapiens
agcaccgggggctcc

SEQ ID NO: 1251710 - DNA, 15 bp, Homo sapiens
gagcaccgggggctc

SEQ ID NO: 1251711 - DNA, 15 bp, Homo sapiens
tgagcaccgggggct

SEQ ID NO: 1251712 - DNA, 15 bp, Homo sapiens
atgagcaccgggggc

SEQ ID NO: 1251713 - DNA, 15 bp, Homo sapiens
gatgagcaccggggg

SEQ ID NO: 1251714 - DNA, 15 bp, Homo sapiens
ggatgagcaccgggg

SEQ ID NO: 1251715 - DNA, 15 bp, Homo sapiens
aggatgagcaccggg

SEQ ID NO: 1251716 - DNA, 15 bp, Homo sapiens
gaggatgagcaccgg

SEQ ID NO: 1251717 - DNA, 15 bp, Homo sapiens
agaggatgagcaccg

SEQ ID NO: 1251718 - DNA, 15 bp, Homo sapiens
cagaggatgagcacc

SEQ ID NO: 1251719 - DNA, 15 bp, Homo sapiens
tcagaggatgagcac

SEQ ID NO: 1251720 - DNA, 15 bp, Homo sapiens
ctcagaggatgagca

SEQ ID NO: 1251721 - DNA, 15 bp, Homo sapiens
tctcagaggatgagc

SEQ ID NO: 1251722 - DNA, 15 bp, Homo sapiens
atctcagaggatgag

SEQ ID NO: 1251723 - DNA, 15 bp, Homo sapiens
catctcagaggatga

SEQ ID NO: 1251724 - DNA, 15 bp, Homo sapiens
gcatctcagaggatg

SEQ ID NO: 1251725 - DNA, 15 bp, Homo sapiens
agcatctcagaggat

SEQ ID NO: 1251726 - DNA, 15 bp, Homo sapiens
gagcatctcagagga

SEQ ID NO: 1251727 - DNA, 15 bp, Homo sapiens
agagcatctcagagg

SEQ ID NO: 1251728 - DNA, 15 bp, Homo sapiens
aagagcatctcagag

SEQ ID NO: 1251729 - DNA, 15 bp, Homo sapiens
aaagagcatctcaga

SEQ ID NO: 1251730 - DNA, 15 bp, Homo sapiens
aaaagagcatctcag

SEQ ID NO: 1251731 - DNA, 15 bp, Homo sapiens
gaaaagagcatctca

SEQ ID NO: 1251732 - DNA, 15 bp, Homo sapiens
agaaaagagcatctc

SEQ ID NO: 1251733 - DNA, 15 bp, Homo sapiens
aagaaaagagcatct

SEQ ID NO: 1251734 - DNA, 15 bp, Homo sapiens
aaagaaaagagcatc

SEQ ID NO: 1251735 - DNA, 15 bp, Homo sapiens
gaaagaaaagagcat

SEQ ID NO: 1251736 - DNA, 15 bp, Homo sapiens
tgaaagaaaagagca

SEQ ID NO: 1251737 - DNA, 15 bp, Homo sapiens
gtgaaagaaaagagc

SEQ ID NO: 1251738 - DNA, 15 bp, Homo sapiens
tgtgaaagaaaagag

SEQ ID NO: 1251739 - DNA, 15 bp, Homo sapiens
ttgtgaaagaaaaga

SEQ ID NO: 1251740 - DNA, 15 bp, Homo sapiens
attgtgaaagaaaag

SEQ ID NO: 1251741 - DNA, 15 bp, Homo sapiens
aattgtgaaagaaaa

SEQ ID NO: 1251742 - DNA, 15 bp, Homo sapiens
aaattgtgaaagaaa

SEQ ID NO: 1251743 - DNA, 15 bp, Homo sapiens
aaaattgtgaaagaa

SEQ ID NO: 1251744 - DNA, 15 bp, Homo sapiens
gaaaattgtgaaaga

SEQ ID NO: 1251745 - DNA, 15 bp, Homo sapiens
tgaaaattgtgaaag

SEQ ID NO: 1251746 - DNA, 15 bp, Homo sapiens
ttgaaaattgtgaaa

SEQ ID NO: 1251747 - DNA, 15 bp, Homo sapiens
gttgaaaattgtgaa

SEQ ID NO: 1251748 - DNA, 15 bp, Homo sapiens
tgttgaaaattgtga

SEQ ID NO: 1251749 - DNA, 15 bp, Homo sapiens
atgttgaaaattgtg

SEQ ID NO: 1251750 - DNA, 15 bp, Homo sapiens
gatgttgaaaattgt

SEQ ID NO: 1251751 - DNA, 15 bp, Homo sapiens
tgatgttgaaaattg

SEQ ID NO: 1251752 - DNA, 15 bp, Homo sapiens
gtgatgttgaaaatt

SEQ ID NO: 1251753 - DNA, 15 bp, Homo sapiens
agtgatgttgaaaat

SEQ ID NO: 1251754 - DNA, 15 bp, Homo sapiens
cagtgatgttgaaaa

SEQ ID NO: 1251755 - DNA, 15 bp, Homo sapiens
tcagtgatgttgaaa

SEQ ID NO: 1251756 - DNA, 15 bp, Homo sapiens
ttcagtgatgttgaa

SEQ ID NO: 1251757 - DNA, 15 bp, Homo sapiens
tttcagtgatgttga

SEQ ID NO: 1251758 - DNA, 15 bp, Homo sapiens
atttcagtgatgttg

SEQ ID NO: 1251759 - DNA, 15 bp, Homo sapiens
catttcagtgatgtt

SEQ ID NO: 1251760 - DNA, 15 bp, Homo sapiens
tcatttcagtgatgt

SEQ ID NO: 1251761 - DNA, 15 bp, Homo sapiens
ttcatttcagtgatg

SEQ ID NO: 1251762 - DNA, 15 bp, Homo sapiens
gttcatttcagtgat

SEQ ID NO: 1251763 - DNA, 15 bp, Homo sapiens
ggttcatttcagtga

SEQ ID NO: 1251764 - DNA, 15 bp, Homo sapiens
gggttcatttcagtg

SEQ ID NO: 1251765 - DNA, 15 bp, Homo sapiens
agggttcatttcagt

SEQ ID NO: 1251766 - DNA, 15 bp, Homo sapiens
gagggttcatttcag

SEQ ID NO: 1251767 - DNA, 15 bp, Homo sapiens
tgagggttcatttca

SEQ ID NO: 1251768 - DNA, 15 bp, Homo sapiens
gtgagggttcatttc

SEQ ID NO: 1251769 - DNA, 15 bp, Homo sapiens
tgtgagggttcattt

SEQ ID NO: 1251770 - DNA, 15 bp, Homo sapiens
atgtgagggttcatt

SEQ ID NO: 1251771 - DNA, 15 bp, Homo sapiens
catgtgagggttcat

SEQ ID NO: 1251772 - DNA, 15 bp, Homo sapiens
ccatgtgagggttca

SEQ ID NO: 1251773 - DNA, 15 bp, Homo sapiens
tccatgtgagggttc

SEQ ID NO: 1251774 - DNA, 15 bp, Homo sapiens
ttccatgtgagggtt

SEQ ID NO: 1251775 - DNA, 15 bp, Homo sapiens
cttccatgtgagggt

SEQ ID NO: 1251776 - DNA, 15 bp, Homo sapiens
gcttccatgtgaggg

SEQ ID NO: 1251777 - DNA, 15 bp, Homo sapiens
agcttccatgtgagg

SEQ ID NO: 1251778 - DNA, 15 bp, Homo sapiens
tagcttccatgtgag

SEQ ID NO: 1251779 - DNA, 15 bp, Homo sapiens
atagcttccatgtga

SEQ ID NO: 1251780 - DNA, 15 bp, Homo sapiens
aatagcttccatgtg

SEQ ID NO: 1251781 - DNA, 15 bp, Homo sapiens
aaatagcttccatgt

SEQ ID NO: 1251782 - DNA, 15 bp, Homo sapiens
aaaatagcttccatg

SEQ ID NO: 1251783 - DNA, 15 bp, Homo sapiens
aaaaatagcttccat

SEQ ID NO: 1251784 - DNA, 15 bp, Homo sapiens
aaaaaatagcttcca

SEQ ID NO: 1251785 - DNA, 15 bp, Homo sapiens
taaaaaatagcttcc

SEQ ID NO: 1251786 - DNA, 15 bp, Homo sapiens
ttaaaaaatagcttc

SEQ ID NO: 1251787 - DNA, 15 bp, Homo sapiens
gtttttaaaaaatag

SEQ ID NO: 1251788 - DNA, 15 bp, Homo sapiens
tgtttttaaaaaata

SEQ ID NO: 1251789 - DNA, 15 bp, Homo sapiens
ttgtttttaaaaaat

SEQ ID NO: 1251790 - DNA, 15 bp, Homo sapiens
tttgtttttaaaaaa

SEQ ID NO: 1251791 - DNA, 15 bp, Homo sapiens
ttttgtttttaaaaa

SEQ ID NO: 1251792 - DNA, 15 bp, Homo sapiens
cttttgtttttaaaa

SEQ ID NO: 1251793 - DNA, 15 bp, Homo sapiens
gcttttgtttttaaa

SEQ ID NO: 1251794 - DNA, 15 bp, Homo sapiens
agcttttgtttttaa

SEQ ID NO: 1251795 - DNA, 15 bp, Homo sapiens
cagcttttgttttta

SEQ ID NO: 1251796 - DNA, 15 bp, Homo sapiens
acagcttttgttttt

SEQ ID NO: 1251797 - DNA, 15 bp, Homo sapiens
aacagcttttgtttt

SEQ ID NO: 1251798 - DNA, 15 bp, Homo sapiens
aaacagcttttgttt

SEQ ID NO: 1251799 - DNA, 15 bp, Homo sapiens
caaacagcttttgtt

SEQ ID NO: 1251800 - DNA, 15 bp, Homo sapiens
tcaaacagcttttgt

SEQ ID NO: 1251801 - DNA, 15 bp, Homo sapiens
atcaaacagcttttg

SEQ ID NO: 1251802 - DNA, 15 bp, Homo sapiens
tatcaaacagctttt

SEQ ID NO: 1251803 - DNA, 15 bp, Homo sapiens
ctatcaaacagcttt

SEQ ID NO: 1251804 - DNA, 15 bp, Homo sapiens
tctatcaaacagctt

SEQ ID NO: 1251805 - DNA, 15 bp, Homo sapiens
atctatcaaacagct

SEQ ID NO: 1251806 - DNA, 15 bp, Homo sapiens
catctatcaaacagc

SEQ ID NO: 1251807 - DNA, 15 bp, Homo sapiens
acatctatcaaacag

SEQ ID NO: 1251808 - DNA, 15 bp, Homo sapiens
aacatctatcaaaca

SEQ ID NO: 1251809 - DNA, 15 bp, Homo sapiens
aaacatctatcaaac

SEQ ID NO: 1251810 - DNA, 15 bp, Homo sapiens
caaacatctatcaaa

SEQ ID NO: 1251811 - DNA, 15 bp, Homo sapiens
tcaaacatctatcaa

SEQ ID NO: 1251812 - DNA, 15 bp, Homo sapiens
ctcaaacatctatca

SEQ ID NO: 1251813 - DNA, 15 bp, Homo sapiens
cctcaaacatctatc

SEQ ID NO: 1251814 - DNA, 15 bp, Homo sapiens
gcctcaaacatctat

SEQ ID NO: 1251815 - DNA, 15 bp, Homo sapiens
agcctcaaacatcta

SEQ ID NO: 1251816 - DNA, 15 bp, Homo sapiens
cagcctcaaacatct

SEQ ID NO: 1251817 - DNA, 15 bp, Homo sapiens
acagcctcaaacatc

SEQ ID NO: 1251818 - DNA, 15 bp, Homo sapiens
tacagcctcaaacat

SEQ ID NO: 1251819 - DNA, 15 bp, Homo sapiens
ctacagcctcaaaca

SEQ ID NO: 1251820 - DNA, 15 bp, Homo sapiens
gctacagcctcaaac

SEQ ID NO: 1251821 - DNA, 15 bp, Homo sapiens
agctacagcctcaaa

SEQ ID NO: 1251822 - DNA, 15 bp, Homo sapiens
gagctacagcctcaa

SEQ ID NO: 1251823 - DNA, 15 bp, Homo sapiens
ggagctacagcctca

SEQ ID NO: 1251824 - DNA, 15 bp, Homo sapiens
gggagctacagcctc

SEQ ID NO: 1251825 - DNA, 15 bp, Homo sapiens
tgggagctacagcct

SEQ ID NO: 1251826 - DNA, 15 bp, Homo sapiens
ctgggagctacagcc

SEQ ID NO: 1251827 - DNA, 15 bp, Homo sapiens
cctgggagctacagc

SEQ ID NO: 1251828 - DNA, 15 bp, Homo sapiens
tcctgggagctacag

SEQ ID NO: 1251829 - DNA, 15 bp, Homo sapiens
atcctgggagctaca

SEQ ID NO: 1251830 - DNA, 15 bp, Homo sapiens
gatcctgggagctac

SEQ ID NO: 1251831 - DNA, 15 bp, Homo sapiens
ggatcctgggagcta

SEQ ID NO: 1251832 - DNA, 15 bp, Homo sapiens
aggatcctgggagct

SEQ ID NO: 1251833 - DNA, 15 bp, Homo sapiens
caggatcctgggagc

SEQ ID NO: 1251834 - DNA, 15 bp, Homo sapiens
acaggatcctgggag

SEQ ID NO: 1251835 - DNA, 15 bp, Homo sapiens
cacaggatcctggga

SEQ ID NO: 1251836 - DNA, 15 bp, Homo sapiens
ccacaggatcctggg

SEQ ID NO: 1251837 - DNA, 15 bp, Homo sapiens
tccacaggatcctgg

SEQ ID NO: 1251838 - DNA, 15 bp, Homo sapiens
ttccacaggatcctg

SEQ ID NO: 1251839 - DNA, 15 bp, Homo sapiens
attccacaggatcct

SEQ ID NO: 1251840 - DNA, 15 bp, Homo sapiens
aattccacaggatcc

SEQ ID NO: 1251841 - DNA, 15 bp, Homo sapiens
caattccacaggatc

SEQ ID NO: 1251842 - DNA, 15 bp, Homo sapiens
ccaattccacaggat

SEQ ID NO: 1251843 - DNA, 15 bp, Homo sapiens
tccaattccacagga

SEQ ID NO: 1251844 - DNA, 15 bp, Homo sapiens
atccaattccacagg

SEQ ID NO: 1251845 - DNA, 15 bp, Homo sapiens
catccaattccacag

SEQ ID NO: 1251846 - DNA, 15 bp, Homo sapiens
acatccaattccaca

SEQ ID NO: 1251847 - DNA, 15 bp, Homo sapiens
aacatccaattccac

SEQ ID NO: 1251848 - DNA, 15 bp, Homo sapiens
gaacatccaattcca

SEQ ID NO: 1251849 - DNA, 15 bp, Homo sapiens
agaacatccaattcc

SEQ ID NO: 1251850 - DNA, 15 bp, Homo sapiens
gagaacatccaattc

SEQ ID NO: 1251851 - DNA, 15 bp, Homo sapiens
agagaacatccaatt

SEQ ID NO: 1251852 - DNA, 15 bp, Homo sapiens
gagagaacatccaat

SEQ ID NO: 1251853 - DNA, 15 bp, Homo sapiens
ggagagaacatccaa

SEQ ID NO: 1251854 - DNA, 15 bp, Homo sapiens
gggagagaacatcca

SEQ ID NO: 1251855 - DNA, 15 bp, Homo sapiens
agggagagaacatcc

SEQ ID NO: 1251856 - DNA, 15 bp, Homo sapiens
cagggagagaacatc

SEQ ID NO: 1251857 - DNA, 15 bp, Homo sapiens
gcagggagagaacat

SEQ ID NO: 1251858 - DNA, 15 bp, Homo sapiens
ggcagggagagaaca

SEQ ID NO: 1251859 - DNA, 15 bp, Homo sapiens
tggcagggagagaac

SEQ ID NO: 1251860 - DNA, 15 bp, Homo sapiens
gtggcagggagagaa

SEQ ID NO: 1251861 - DNA, 15 bp, Homo sapiens
tgtggcagggagaga

SEQ ID NO: 1251862 - DNA, 15 bp, Homo sapiens
ctgtggcagggagag

SEQ ID NO: 1251863 - DNA, 15 bp, Homo sapiens
gctgtggcagggaga

SEQ ID NO: 1251864 - DNA, 15 bp, Homo sapiens
ggctgtggcagggag

SEQ ID NO: 1251865 - DNA, 15 bp, Homo sapiens
gggctgtggcaggga

SEQ ID NO: 1251866 - DNA, 15 bp, Homo sapiens
agggctgtggcaggg

SEQ ID NO: 1251867 - DNA, 15 bp, Homo sapiens
aagggctgtggcagg

SEQ ID NO: 1251868 - DNA, 15 bp, Homo sapiens
caagggctgtggcag

SEQ ID NO: 1251869 - DNA, 15 bp, Homo sapiens
acaagggctgtggca

SEQ ID NO: 1251870 - DNA, 15 bp, Homo sapiens
gacaagggctgtggc

SEQ ID NO: 1251871 - DNA, 15 bp, Homo sapiens
tgacaagggctgtgg

SEQ ID NO: 1251872 - DNA, 15 bp, Homo sapiens
ttgacaagggctgtg

SEQ ID NO: 1251873 - DNA, 15 bp, Homo sapiens
attgacaagggctgt

SEQ ID NO: 1251874 - DNA, 15 bp, Homo sapiens
cattgacaagggctg

SEQ ID NO: 1251875 - DNA, 15 bp, Homo sapiens
tcattgacaagggct

SEQ ID NO: 1251876 - DNA, 15 bp, Homo sapiens
atcattgacaagggc

SEQ ID NO: 1251877 - DNA, 15 bp, Homo sapiens
tatcattgacaaggg

SEQ ID NO: 1251878 - DNA, 15 bp, Homo sapiens
atatcattgacaagg

SEQ ID NO: 1251879 - DNA, 15 bp, Homo sapiens
aatatcattgacaag

SEQ ID NO: 1251880 - DNA, 15 bp, Homo sapiens
aaatatcattgacaa

SEQ ID NO: 1251881 - DNA, 15 bp, Homo sapiens
gaaatatcattgaca

SEQ ID NO: 1251882 - DNA, 15 bp, Homo sapiens
tgaaatatcattgac

SEQ ID NO: 1251883 - DNA, 15 bp, Homo sapiens
gtgaaatatcattga

SEQ ID NO: 1251884 - DNA, 15 bp, Homo sapiens
tgtgaaatatcattg

SEQ ID NO: 1251885 - DNA, 15 bp, Homo sapiens
ctgtgaaatatcatt

SEQ ID NO: 1251886 - DNA, 15 bp, Homo sapiens
tctgtgaaatatcat

SEQ ID NO: 1251887 - DNA, 15 bp, Homo sapiens
ctctgtgaaatatca

SEQ ID NO: 1251888 - DNA, 15 bp, Homo sapiens
tctctgtgaaatatc

SEQ ID NO: 1251889 - DNA, 15 bp, Homo sapiens
gtctctgtgaaatat

SEQ ID NO: 1251890 - DNA, 15 bp, Homo sapiens
ggtctctgtgaaata

SEQ ID NO: 1251891 - DNA, 15 bp, Homo sapiens
gggtctctgtgaaat

SEQ ID NO: 1251892 - DNA, 15 bp, Homo sapiens
agggtctctgtgaaa

SEQ ID NO: 1251893 - DNA, 15 bp, Homo sapiens
cagggtctctgtgaa

SEQ ID NO: 1251894 - DNA, 15 bp, Homo sapiens
ccagggtctctgtga

SEQ ID NO: 1251895 - DNA, 15 bp, Homo sapiens
cccagggtctctgtg

SEQ ID NO: 1251896 - DNA, 15 bp, Homo sapiens
tcccagggtctctgt

SEQ ID NO: 1251897 - DNA, 15 bp, Homo sapiens
ctcccagggtctctg

SEQ ID NO: 1251898 - DNA, 15 bp, Homo sapiens
gctcccagggtctct

SEQ ID NO: 1251899 - DNA, 15 bp, Homo sapiens
tgctcccagggtctc

SEQ ID NO: 1251900 - DNA, 15 bp, Homo sapiens
gtgctcccagggtct

SEQ ID NO: 1251901 - DNA, 15 bp, Homo sapiens
ggtgctcccagggtc

SEQ ID NO: 1251902 - DNA, 15 bp, Homo sapiens
aggtgctcccagggt

SEQ ID NO: 1251903 - DNA, 15 bp, Homo sapiens
caggtgctcccaggg

SEQ ID NO: 1251904 - DNA, 15 bp, Homo sapiens
gcaggtgctcccagg

SEQ ID NO: 1251905 - DNA, 15 bp, Homo sapiens
agcaggtgctcccag

SEQ ID NO: 1251906 - DNA, 15 bp, Homo sapiens
gagcaggtgctccca

SEQ ID NO: 1251907 - DNA, 15 bp, Homo sapiens
tgagcaggtgctccc

SEQ ID NO: 1251908 - DNA, 15 bp, Homo sapiens
ttgagcaggtgctcc

SEQ ID NO: 1251909 - DNA, 15 bp, Homo sapiens
cttgagcaggtgctc

SEQ ID NO: 1251910 - DNA, 15 bp, Homo sapiens
tcttgagcaggtgct

SEQ ID NO: 1251911 - DNA, 15 bp, Homo sapiens
ctcttgagcaggtgc

SEQ ID NO: 1251912 - DNA, 15 bp, Homo sapiens
actcttgagcaggtg

SEQ ID NO: 1251913 - DNA, 15 bp, Homo sapiens
gactcttgagcaggt

SEQ ID NO: 1251914 - DNA, 15 bp, Homo sapiens
tgactcttgagcagg

SEQ ID NO: 1251915 - DNA, 15 bp, Homo sapiens
ctgactcttgagcag

SEQ ID NO: 1251916 - DNA, 15 bp, Homo sapiens
cctgactcttgagca

SEQ ID NO: 1251917 - DNA, 15 bp, Homo sapiens
ccctgactcttgagc

SEQ ID NO: 1251918 - DNA, 15 bp, Homo sapiens
tccctgactcttgag

SEQ ID NO: 1251919 - DNA, 15 bp, Homo sapiens
gtccctgactcttga

SEQ ID NO: 1251920 - DNA, 15 bp, Homo sapiens
tgtccctgactcttg

SEQ ID NO: 1251921 - DNA, 15 bp, Homo sapiens
gtgtccctgactctt

SEQ ID NO: 1251922 - DNA, 15 bp, Homo sapiens
tgtgtccctgactct

SEQ ID NO: 1251923 - DNA, 15 bp, Homo sapiens
gtgtgtccctgactc

SEQ ID NO: 1251924 - DNA, 15 bp, Homo sapiens
cgtgtgtccctgact

SEQ ID NO: 1251925 - DNA, 15 bp, Homo sapiens
gcgtgtgtccctgac

SEQ ID NO: 1251926 - DNA, 15 bp, Homo sapiens
tgcgtgtgtccctga

SEQ ID NO: 1251927 - DNA, 15 bp, Homo sapiens
atgcgtgtgtccctg

SEQ ID NO: 1251928 - DNA, 15 bp, Homo sapiens
gatgcgtgtgtccct

SEQ ID NO: 1251929 - DNA, 15 bp, Homo sapiens
tgatgcgtgtgtccc

SEQ ID NO: 1251930 - DNA, 15 bp, Homo sapiens
gtgatgcgtgtgtcc

SEQ ID NO: 1251931 - DNA, 15 bp, Homo sapiens
agtgatgcgtgtgtc

SEQ ID NO: 1251932 - DNA, 15 bp, Homo sapiens
tagtgatgcgtgtgt

SEQ ID NO: 1251933 - DNA, 15 bp, Homo sapiens
ttagtgatgcgtgtg

SEQ ID NO: 1251934 - DNA, 15 bp, Homo sapiens
tttagtgatgcgtgt

SEQ ID NO: 1251935 - DNA, 15 bp, Homo sapiens
atttagtgatgcgtg

SEQ ID NO: 1251936 - DNA, 15 bp, Homo sapiens
catttagtgatgcgt

SEQ ID NO: 1251937 - DNA, 15 bp, Homo sapiens
gcatttagtgatgcg

SEQ ID NO: 1251938 - DNA, 15 bp, Homo sapiens
tgcatttagtgatgc

SEQ ID NO: 1251939 - DNA, 15 bp, Homo sapiens
ttgcatttagtgatg

SEQ ID NO: 1251940 - DNA, 15 bp, Homo sapiens
cttgcatttagtgat

SEQ ID NO: 1251941 - DNA, 15 bp, Homo sapiens
acttgcatttagtga

SEQ ID NO: 1251942 - DNA, 15 bp, Homo sapiens
aacttgcatttagtg

SEQ ID NO: 1251943 - DNA, 15 bp, Homo sapiens
gaacttgcatttagt

SEQ ID NO: 1251944 - DNA, 15 bp, Homo sapiens
ggaacttgcatttag

SEQ ID NO: 1251945 - DNA, 15 bp, Homo sapiens
gggaacttgcattta

SEQ ID NO: 1251946 - DNA, 15 bp, Homo sapiens
tgggaacttgcattt

SEQ ID NO: 1251947 - DNA, 15 bp, Homo sapiens
ctgggaacttgcatt

SEQ ID NO: 1251948 - DNA, 15 bp, Homo sapiens
cctgggaacttgcat

SEQ ID NO: 1251949 - DNA, 15 bp, Homo sapiens
gcctgggaacttgca

SEQ ID NO: 1251950 - DNA, 15 bp, Homo sapiens
ggcctgggaacttgc

SEQ ID NO: 1251951 - DNA, 15 bp, Homo sapiens
gggcctgggaacttg

SEQ ID NO: 1251952 - DNA, 15 bp, Homo sapiens
agggcctgggaactt

SEQ ID NO: 1251953 - DNA, 15 bp, Homo sapiens
cagggcctgggaact

SEQ ID NO: 1251954 - DNA, 15 bp, Homo sapiens
ccagggcctgggaac

SEQ ID NO: 1251955 - DNA, 15 bp, Homo sapiens
gccagggcctgggaa

SEQ ID NO: 1251956 - DNA, 15 bp, Homo sapiens
agccagggcctggga

SEQ ID NO: 1251957 - DNA, 15 bp, Homo sapiens
cagccagggcctggg

SEQ ID NO: 1251958 - DNA, 15 bp, Homo sapiens
gcagccagggcctgg

SEQ ID NO: 1251959 - DNA, 15 bp, Homo sapiens
tgcagccagggcctg

SEQ ID NO: 1251960 - DNA, 15 bp, Homo sapiens
ctgcagccagggcct

SEQ ID NO: 1251961 - DNA, 15 bp, Homo sapiens
actgcagccagggcc

SEQ ID NO: 1251962 - DNA, 15 bp, Homo sapiens
cactgcagccagggc

SEQ ID NO: 1251963 - DNA, 15 bp, Homo sapiens
ccactgcagccaggg

SEQ ID NO: 1251964 - DNA, 15 bp, Homo sapiens
cccactgcagccagg

SEQ ID NO: 1251965 - DNA, 15 bp, Homo sapiens
tcccactgcagccag

SEQ ID NO: 1251966 - DNA, 15 bp, Homo sapiens
ctcccactgcagcca

SEQ ID NO: 1251967 - DNA, 15 bp, Homo sapiens
cctcccactgcagcc

SEQ ID NO: 1251968 - DNA, 15 bp, Homo sapiens
tcctcccactgcagc

SEQ ID NO: 1251969 - DNA, 15 bp, Homo sapiens
gtcctcccactgcag

SEQ ID NO: 1251970 - DNA, 15 bp, Homo sapiens
ggtcctcccactgca

SEQ ID NO: 1251971 - DNA, 15 bp, Homo sapiens
aggtcctcccactgc

SEQ ID NO: 1251972 - DNA, 15 bp, Homo sapiens
caggtcctcccactg

SEQ ID NO: 1251973 - DNA, 15 bp, Homo sapiens
ccaggtcctcccact

SEQ ID NO: 1251974 - DNA, 15 bp, Homo sapiens
gccaggtcctcccac

SEQ ID NO: 1251975 - DNA, 15 bp, Homo sapiens
tgccaggtcctccca

SEQ ID NO: 1251976 - DNA, 15 bp, Homo sapiens
ttgccaggtcctccc

SEQ ID NO: 1251977 - DNA, 15 bp, Homo sapiens
cttgccaggtcctcc

SEQ ID NO: 1251978 - DNA, 15 bp, Homo sapiens
gcttgccaggtcctc

SEQ ID NO: 1251979 - DNA, 15 bp, Homo sapiens
agcttgccaggtcct

SEQ ID NO: 1251980 - DNA, 15 bp, Homo sapiens
cagcttgccaggtcc

SEQ ID NO: 1251981 - DNA, 15 bp, Homo sapiens
gcagcttgccaggtc

SEQ ID NO: 1251982 - DNA, 15 bp, Homo sapiens
tgcagcttgccaggt

SEQ ID NO: 1251983 - DNA, 15 bp, Homo sapiens
gtgcagcttgccagg

SEQ ID NO: 1251984 - DNA, 15 bp, Homo sapiens
agtgcagcttgccag

SEQ ID NO: 1251985 - DNA, 15 bp, Homo sapiens
gagtgcagcttgcca

SEQ ID NO: 1251986 - DNA, 15 bp, Homo sapiens
agagtgcagcttgcc

SEQ ID NO: 1251987 - DNA, 15 bp, Homo sapiens
aagagtgcagcttgc

SEQ ID NO: 1251988 - DNA, 15 bp, Homo sapiens
caagagtgcagcttg

SEQ ID NO: 1251989 - DNA, 15 bp, Homo sapiens
gcaagagtgcagctt

SEQ ID NO: 1251990 - DNA, 15 bp, Homo sapiens
agcaagagtgcagct

SEQ ID NO: 1251991 - DNA, 15 bp, Homo sapiens
cagcaagagtgcagc

SEQ ID NO: 1251992 - DNA, 15 bp, Homo sapiens
tcagcaagagtgcag

SEQ ID NO: 1251993 - DNA, 15 bp, Homo sapiens
ctcagcaagagtgca

SEQ ID NO: 1251994 - DNA, 15 bp, Homo sapiens
actcagcaagagtgc

SEQ ID NO: 1251995 - DNA, 15 bp, Homo sapiens
gactcagcaagagtg

SEQ ID NO: 1251996 - DNA, 15 bp, Homo sapiens
ggactcagcaagagt

SEQ ID NO: 1251997 - DNA, 15 bp, Homo sapiens
gggactcagcaagag

SEQ ID NO: 1251998 - DNA, 15 bp, Homo sapiens
ggggactcagcaaga

SEQ ID NO: 1251999 - DNA, 15 bp, Homo sapiens
tggggactcagcaag

SEQ ID NO: 1252000 - DNA, 15 bp, Homo sapiens
ctggggactcagcaa

SEQ ID NO: 1252001 - DNA, 15 bp, Homo sapiens
cctggggactcagca

SEQ ID NO: 1252002 - DNA, 15 bp, Homo sapiens
ccctggggactcagc

SEQ ID NO: 1252003 - DNA, 15 bp, Homo sapiens
accctggggactcag

SEQ ID NO: 1252004 - DNA, 15 bp, Homo sapiens
caccctggggactca

SEQ ID NO: 1252005 - DNA, 15 bp, Homo sapiens
ccaccctggggactc

SEQ ID NO: 1252006 - DNA, 15 bp, Homo sapiens
accaccctggggact

SEQ ID NO: 1252007 - DNA, 15 bp, Homo sapiens
caccaccctggggac

SEQ ID NO: 1252008 - DNA, 15 bp, Homo sapiens
ccaccaccctgggga

SEQ ID NO: 1252009 - DNA, 15 bp, Homo sapiens
tccaccaccctgggg

SEQ ID NO: 1252010 - DNA, 15 bp, Homo sapiens
ttccaccaccctggg

SEQ ID NO: 1252011 - DNA, 15 bp, Homo sapiens
cttccaccaccctgg

SEQ ID NO: 1252012 - DNA, 15 bp, Homo sapiens
tcttccaccaccctg

SEQ ID NO: 1252013 - DNA, 15 bp, Homo sapiens
ttcttccaccaccct

SEQ ID NO: 1252014 - DNA, 15 bp, Homo sapiens
cttcttccaccaccc

SEQ ID NO: 1252015 - DNA, 15 bp, Homo sapiens
tcttcttccaccacc

SEQ ID NO: 1252016 - DNA, 15 bp, Homo sapiens
ttcttcttccaccac

SEQ ID NO: 1252017 - DNA, 15 bp, Homo sapiens
attcttcttccacca

SEQ ID NO: 1252018 - DNA, 15 bp, Homo sapiens
cattcttcttccacc

SEQ ID NO: 1252019 - DNA, 15 bp, Homo sapiens
tcattcttcttccac

SEQ ID NO: 1252020 - DNA, 15 bp, Homo sapiens
ctcattcttcttcca

SEQ ID NO: 1252021 - DNA, 15 bp, Homo sapiens
tctcattcttcttcc

SEQ ID NO: 1252022 - DNA, 15 bp, Homo sapiens
ttctcattcttcttc

SEQ ID NO: 1252023 - DNA, 15 bp, Homo sapiens
tttctcattcttctt

SEQ ID NO: 1252024 - DNA, 15 bp, Homo sapiens
gtttctcattcttct

SEQ ID NO: 1252025 - DNA, 15 bp, Homo sapiens
tgtttctcattcttc

SEQ ID NO: 1252026 - DNA, 15 bp, Homo sapiens
gtgtttctcattctt

SEQ ID NO: 1252027 - DNA, 15 bp, Homo sapiens
tgtgtttctcattct

SEQ ID NO: 1252028 - DNA, 15 bp, Homo sapiens
atgtgtttctcattc

SEQ ID NO: 1252029 - DNA, 15 bp, Homo sapiens
catgtgtttctcatt

SEQ ID NO: 1252030 - DNA, 15 bp, Homo sapiens
tcatgtgtttctcat

SEQ ID NO: 1252031 - DNA, 15 bp, Homo sapiens
ttcatgtgtttctca

SEQ ID NO: 1252032 - DNA, 15 bp, Homo sapiens
gttcatgtgtttctc

SEQ ID NO: 1252033 - DNA, 15 bp, Homo sapiens
tgttcatgtgtttct

SEQ ID NO: 1252034 - DNA, 15 bp, Homo sapiens
ctgttcatgtgtttc

SEQ ID NO: 1252035 - DNA, 15 bp, Homo sapiens
tctgttcatgtgttt

SEQ ID NO: 1252036 - DNA, 15 bp, Homo sapiens
ctctgttcatgtgtt

SEQ ID NO: 1252037 - DNA, 15 bp, Homo sapiens
tctctgttcatgtgt

SEQ ID NO: 1252038 - DNA, 15 bp, Homo sapiens
ttctctgttcatgtg

SEQ ID NO: 1252039 - DNA, 15 bp, Homo sapiens
tttctctgttcatgt

SEQ ID NO: 1252040 - DNA, 15 bp, Homo sapiens
atttctctgttcatg

SEQ ID NO: 1252041 - DNA, 15 bp, Homo sapiens
catttctctgttcat

SEQ ID NO: 1252042 - DNA, 15 bp, Homo sapiens
ccatttctctgttca

SEQ ID NO: 1252043 - DNA, 15 bp, Homo sapiens
cccatttctctgttc

SEQ ID NO: 1252044 - DNA, 15 bp, Homo sapiens
ccccatttctctgtt

SEQ ID NO: 1252045 - DNA, 15 bp, Homo sapiens
tccccatttctctgt

SEQ ID NO: 1252046 - DNA, 15 bp, Homo sapiens
ctccccatttctctg

SEQ ID NO: 1252047 - DNA, 15 bp, Homo sapiens
cctccccatttctct

SEQ ID NO: 1252048 - DNA, 15 bp, Homo sapiens
acctccccatttctc

SEQ ID NO: 1252049 - DNA, 15 bp, Homo sapiens
cacctccccatttct

SEQ ID NO: 1252050 - DNA, 15 bp, Homo sapiens
tcacctccccatttc

SEQ ID NO: 1252051 - DNA, 15 bp, Homo sapiens
gtcacctccccattt

SEQ ID NO: 1252052 - DNA, 15 bp, Homo sapiens
tgtcacctccccatt

SEQ ID NO: 1252053 - DNA, 15 bp, Homo sapiens
ttgtcacctccccat

SEQ ID NO: 1252054 - DNA, 15 bp, Homo sapiens
tttgtcacctcccca

SEQ ID NO: 1252055 - DNA, 15 bp, Homo sapiens
gtttgtcacctcccc

SEQ ID NO: 1252056 - DNA, 15 bp, Homo sapiens
tgtttgtcacctccc

SEQ ID NO: 1252057 - DNA, 15 bp, Homo sapiens
ctgtttgtcacctcc

SEQ ID NO: 1252058 - DNA, 15 bp, Homo sapiens
actgtttgtcacctc

SEQ ID NO: 1252059 - DNA, 15 bp, Homo sapiens
cactgtttgtcacct

SEQ ID NO: 1252060 - DNA, 15 bp, Homo sapiens
gcactgtttgtcacc

SEQ ID NO: 1252061 - DNA, 15 bp, Homo sapiens
ggcactgtttgtcac

SEQ ID NO: 1252062 - DNA, 15 bp, Homo sapiens
gggcactgtttgtca

SEQ ID NO: 1252063 - DNA, 15 bp, Homo sapiens
ggggcactgtttgtc

SEQ ID NO: 1252064 - DNA, 15 bp, Homo sapiens
gggggcactgtttgt

SEQ ID NO: 1252065 - DNA, 15 bp, Homo sapiens
tgggggcactgtttg

SEQ ID NO: 1252066 - DNA, 15 bp, Homo sapiens
gtgggggcactgttt

SEQ ID NO: 1252067 - DNA, 15 bp, Homo sapiens
agtgggggcactgtt

SEQ ID NO: 1252068 - DNA, 15 bp, Homo sapiens
gagtgggggcactgt

SEQ ID NO: 1252069 - DNA, 15 bp, Homo sapiens
tgagtgggggcactg

SEQ ID NO: 1252070 - DNA, 15 bp, Homo sapiens
ctgagtgggggcact

SEQ ID NO: 1252071 - DNA, 15 bp, Homo sapiens
tctgagtgggggcac

SEQ ID NO: 1252072 - DNA, 15 bp, Homo sapiens
gtctgagtgggggca

SEQ ID NO: 1252073 - DNA, 15 bp, Homo sapiens
agtctgagtgggggc

SEQ ID NO: 1252074 - DNA, 15 bp, Homo sapiens
gagtctgagtggggg

SEQ ID NO: 1252075 - DNA, 15 bp, Homo sapiens
ggagtctgagtgggg

SEQ ID NO: 1252076 - DNA, 15 bp, Homo sapiens
cggagtctgagtggg

SEQ ID NO: 1252077 - DNA, 15 bp, Homo sapiens
ccggagtctgagtgg

SEQ ID NO: 1252078 - DNA, 15 bp, Homo sapiens
gccggagtctgagtg

SEQ ID NO: 1252079 - DNA, 15 bp, Homo sapiens
tgccggagtctgagt

SEQ ID NO: 1252080 - DNA, 15 bp, Homo sapiens
ttgccggagtctgag

SEQ ID NO: 1252081 - DNA, 15 bp, Homo sapiens
cttgccggagtctga

SEQ ID NO: 1252082 - DNA, 15 bp, Homo sapiens
gcttgccggagtctg

SEQ ID NO: 1252083 - DNA, 15 bp, Homo sapiens
tgcttgccggagtct

SEQ ID NO: 1252084 - DNA, 15 bp, Homo sapiens
gtgcttgccggagtc

SEQ ID NO: 1252085 - DNA, 15 bp, Homo sapiens
cgtgcttgccggagt

SEQ ID NO: 1252086 - DNA, 15 bp, Homo sapiens
ccgtgcttgccggag

SEQ ID NO: 1252087 - DNA, 15 bp, Homo sapiens
gccgtgcttgccgga

SEQ ID NO: 1252088 - DNA, 15 bp, Homo sapiens
agccgtgcttgccgg

SEQ ID NO: 1252089 - DNA, 15 bp, Homo sapiens
gagccgtgcttgccg

SEQ ID NO: 1252090 - DNA, 15 bp, Homo sapiens
tgagccgtgcttgcc

SEQ ID NO: 1252091 - DNA, 15 bp, Homo sapiens
ctgagccgtgcttgc

SEQ ID NO: 1252092 - DNA, 15 bp, Homo sapiens
tctgagccgtgcttg

SEQ ID NO: 1252093 - DNA, 15 bp, Homo sapiens
ctctgagccgtgctt

SEQ ID NO: 1252094 - DNA, 15 bp, Homo sapiens
tctctgagccgtgct

SEQ ID NO: 1252095 - DNA, 15 bp, Homo sapiens
ctctctgagccgtgc

SEQ ID NO: 1252096 - DNA, 15 bp, Homo sapiens
actctctgagccgtg

SEQ ID NO: 1252097 - DNA, 15 bp, Homo sapiens
cactctctgagccgt

SEQ ID NO: 1252098 - DNA, 15 bp, Homo sapiens
ccactctctgagccg

SEQ ID NO: 1252099 - DNA, 15 bp, Homo sapiens
tccactctctgagcc

SEQ ID NO: 1252100 - DNA, 15 bp, Homo sapiens
gtccactctctgagc

SEQ ID NO: 1252101 - DNA, 15 bp, Homo sapiens
agtccactctctgag

SEQ ID NO: 1252102 - DNA, 15 bp, Homo sapiens
gagtccactctctga

SEQ ID NO: 1252103 - DNA, 15 bp, Homo sapiens
cgagtccactctctg

SEQ ID NO: 1252104 - DNA, 15 bp, Homo sapiens
tcgagtccactctct

SEQ ID NO: 1252105 - DNA, 15 bp, Homo sapiens
atcgagtccactctc

SEQ ID NO: 1252106 - DNA, 15 bp, Homo sapiens
catcgagtccactct

SEQ ID NO: 1252107 - DNA, 15 bp, Homo sapiens
gcatcgagtccactc

SEQ ID NO: 1252108 - DNA, 15 bp, Homo sapiens
ggcatcgagtccact

SEQ ID NO: 1252109 - DNA, 15 bp, Homo sapiens
tggcatcgagtccac

SEQ ID NO: 1252110 - DNA, 15 bp, Homo sapiens
atggcatcgagtcca

SEQ ID NO: 1252111 - DNA, 15 bp, Homo sapiens
gatggcatcgagtcc

SEQ ID NO: 1252112 - DNA, 15 bp, Homo sapiens
ggatggcatcgagtc

SEQ ID NO: 1252113 - DNA, 15 bp, Homo sapiens
gggatggcatcgagt

SEQ ID NO: 1252114 - DNA, 15 bp, Homo sapiens
agggatggcatcgag

SEQ ID NO: 1252115 - DNA, 15 bp, Homo sapiens
cagggatggcatcga

SEQ ID NO: 1252116 - DNA, 15 bp, Homo sapiens
gcagggatggcatcg

SEQ ID NO: 1252117 - DNA, 15 bp, Homo sapiens
tgcagggatggcatc

SEQ ID NO: 1252118 - DNA, 15 bp, Homo sapiens
ctgcagggatggcat

SEQ ID NO: 1252119 - DNA, 15 bp, Homo sapiens
cctgcagggatggca

SEQ ID NO: 1252120 - DNA, 15 bp, Homo sapiens
ccctgcagggatggc

SEQ ID NO: 1252121 - DNA, 15 bp, Homo sapiens
gccctgcagggatgg

SEQ ID NO: 1252122 - DNA, 15 bp, Homo sapiens
ggccctgcagggatg

SEQ ID NO: 1252123 - DNA, 15 bp, Homo sapiens
cggccctgcagggat

SEQ ID NO: 1252124 - DNA, 15 bp, Homo sapiens
acggccctgcaggga

SEQ ID NO: 1252125 - DNA, 15 bp, Homo sapiens
gacggccctgcaggg

SEQ ID NO: 1252126 - DNA, 15 bp, Homo sapiens
ggacggccctgcagg

SEQ ID NO: 1252127 - DNA, 15 bp, Homo sapiens
aggacggccctgcag

SEQ ID NO: 1252128 - DNA, 15 bp, Homo sapiens
caggacggccctgca

SEQ ID NO: 1252129 - DNA, 15 bp, Homo sapiens
ccaggacggccctgc

SEQ ID NO: 1252130 - DNA, 15 bp, Homo sapiens
cccaggacggccctg

SEQ ID NO: 1252131 - DNA, 15 bp, Homo sapiens
gcccaggacggccct

SEQ ID NO: 1252132 - DNA, 15 bp, Homo sapiens
tgcccaggacggccc

SEQ ID NO: 1252133 - DNA, 15 bp, Homo sapiens
gtgcccaggacggcc

SEQ ID NO: 1252134 - DNA, 15 bp, Homo sapiens
ggtgcccaggacggc

SEQ ID NO: 1252135 - DNA, 15 bp, Homo sapiens
tggtgcccaggacgg

SEQ ID NO: 1252136 - DNA, 15 bp, Homo sapiens
gtggtgcccaggacg

SEQ ID NO: 1252137 - DNA, 15 bp, Homo sapiens
agtggtgcccaggac

SEQ ID NO: 1252138 - DNA, 15 bp, Homo sapiens
cagtggtgcccagga

SEQ ID NO: 1252139 - DNA, 15 bp, Homo sapiens
ccagtggtgcccagg

SEQ ID NO: 1252140 - DNA, 15 bp, Homo sapiens
gccagtggtgcccag

SEQ ID NO: 1252141 - DNA, 15 bp, Homo sapiens
tgccagtggtgccca

SEQ ID NO: 1252142 - DNA, 15 bp, Homo sapiens
gtgccagtggtgccc

SEQ ID NO: 1252143 - DNA, 15 bp, Homo sapiens
agtgccagtggtgcc

SEQ ID NO: 1252144 - DNA, 15 bp, Homo sapiens
gagtgccagtggtgc

SEQ ID NO: 1252145 - DNA, 15 bp, Homo sapiens
tgagtgccagtggtg

SEQ ID NO: 1252146 - DNA, 15 bp, Homo sapiens
gtgagtgccagtggt

SEQ ID NO: 1252147 - DNA, 15 bp, Homo sapiens
tgtgagtgccagtgg

SEQ ID NO: 1252148 - DNA, 15 bp, Homo sapiens
ctgtgagtgccagtg

SEQ ID NO: 1252149 - DNA, 15 bp, Homo sapiens
gctgtgagtgccagt

SEQ ID NO: 1252150 - DNA, 15 bp, Homo sapiens
tgctgtgagtgccag

SEQ ID NO: 1252151 - DNA, 15 bp, Homo sapiens
ctgctgtgagtgcca

SEQ ID NO: 1252152 - DNA, 15 bp, Homo sapiens
gctgctgtgagtgcc

SEQ ID NO: 1252153 - DNA, 15 bp, Homo sapiens
tgctgctgtgagtgc

SEQ ID NO: 1252154 - DNA, 15 bp, Homo sapiens
ttgctgctgtgagtg

SEQ ID NO: 1252155 - DNA, 15 bp, Homo sapiens
cttgctgctgtgagt

SEQ ID NO: 1252156 - DNA, 15 bp, Homo sapiens
ccttgctgctgtgag

SEQ ID NO: 1252157 - DNA, 15 bp, Homo sapiens
accttgctgctgtga

SEQ ID NO: 1252158 - DNA, 15 bp, Homo sapiens
caccttgctgctgtg

SEQ ID NO: 1252159 - DNA, 15 bp, Homo sapiens
ccaccttgctgctgt

SEQ ID NO: 1252160 - DNA, 15 bp, Homo sapiens
cccaccttgctgctg

SEQ ID NO: 1252161 - DNA, 15 bp, Homo sapiens
gcccaccttgctgct

SEQ ID NO: 1252162 - DNA, 15 bp, Homo sapiens
tgcccaccttgctgc

SEQ ID NO: 1252163 - DNA, 15 bp, Homo sapiens
gtgcccaccttgctg

SEQ ID NO: 1252164 - DNA, 15 bp, Homo sapiens
ggtgcccaccttgct

SEQ ID NO: 1252165 - DNA, 15 bp, Homo sapiens
tggtgcccaccttgc

SEQ ID NO: 1252166 - DNA, 15 bp, Homo sapiens
atggtgcccaccttg

SEQ ID NO: 1252167 - DNA, 15 bp, Homo sapiens
aatggtgcccacctt

SEQ ID NO: 1252168 - DNA, 15 bp, Homo sapiens
caatggtgcccacct

SEQ ID NO: 1252169 - DNA, 15 bp, Homo sapiens
ccaatggtgcccacc

SEQ ID NO: 1252170 - DNA, 15 bp, Homo sapiens
gccaatggtgcccac

SEQ ID NO: 1252171 - DNA, 15 bp, Homo sapiens
tgccaatggtgccca

SEQ ID NO: 1252172 - DNA, 15 bp, Homo sapiens
gtgccaatggtgccc

SEQ ID NO: 1252173 - DNA, 15 bp, Homo sapiens
agtgccaatggtgcc

SEQ ID NO: 1252174 - DNA, 15 bp, Homo sapiens
gagtgccaatggtgc

SEQ ID NO: 1252175 - DNA, 15 bp, Homo sapiens
tgagtgccaatggtg

SEQ ID NO: 1252176 - DNA, 15 bp, Homo sapiens
gtgagtgccaatggt

SEQ ID NO: 1252177 - DNA, 15 bp, Homo sapiens
tgtgagtgccaatgg

SEQ ID NO: 1252178 - DNA, 15 bp, Homo sapiens
ctgtgagtgccaatg

SEQ ID NO: 1252179 - DNA, 15 bp, Homo sapiens
gctgtgagtgccaat

SEQ ID NO: 1252180 - DNA, 15 bp, Homo sapiens
tgctgtgagtgccaa

SEQ ID NO: 1252181 - DNA, 15 bp, Homo sapiens
gccttgctgctgtga

SEQ ID NO: 1252182 - DNA, 15 bp, Homo sapiens
tgccttgctgctgtg

SEQ ID NO: 1252183 - DNA, 15 bp, Homo sapiens
ctgccttgctgctgt

SEQ ID NO: 1252184 - DNA, 15 bp, Homo sapiens
cctgccttgctgctg

SEQ ID NO: 1252185 - DNA, 15 bp, Homo sapiens
gcctgccttgctgct

SEQ ID NO: 1252186 - DNA, 15 bp, Homo sapiens
tgcctgccttgctgc

SEQ ID NO: 1252187 - DNA, 15 bp, Homo sapiens
gtgcctgccttgctg

SEQ ID NO: 1252188 - DNA, 15 bp, Homo sapiens
ggtgcctgccttgct

SEQ ID NO: 1252189 - DNA, 15 bp, Homo sapiens
tggtgcctgccttgc

SEQ ID NO: 1252190 - DNA, 15 bp, Homo sapiens
ctggtgcctgccttg

SEQ ID NO: 1252191 - DNA, 15 bp, Homo sapiens
gctggtgcctgcctt

SEQ ID NO: 1252192 - DNA, 15 bp, Homo sapiens
tgctggtgcctgcct

SEQ ID NO: 1252193 - DNA, 15 bp, Homo sapiens
ttgctggtgcctgcc

SEQ ID NO: 1252194 - DNA, 15 bp, Homo sapiens
gttgctggtgcctgc

SEQ ID NO: 1252195 - DNA, 15 bp, Homo sapiens
ggttgctggtgcctg

SEQ ID NO: 1252196 - DNA, 15 bp, Homo sapiens
gggttgctggtgcct

SEQ ID NO: 1252197 - DNA, 15 bp, Homo sapiens
tgggttgctggtgcc

SEQ ID NO: 1252198 - DNA, 15 bp, Homo sapiens
gtgggttgctggtgc

SEQ ID NO: 1252199 - DNA, 15 bp, Homo sapiens
ggtgggttgctggtg

SEQ ID NO: 1252200 - DNA, 15 bp, Homo sapiens
aggtgggttgctggt

SEQ ID NO: 1252201 - DNA, 15 bp, Homo sapiens
gaggtgggttgctgg

SEQ ID NO: 1252202 - DNA, 15 bp, Homo sapiens
cgaggtgggttgctg

SEQ ID NO: 1252203 - DNA, 15 bp, Homo sapiens
ccgaggtgggttgct

SEQ ID NO: 1252204 - DNA, 15 bp, Homo sapiens
cccgaggtgggttgc

SEQ ID NO: 1252205 - DNA, 15 bp, Homo sapiens
ccccgaggtgggttg

SEQ ID NO: 1252206 - DNA, 15 bp, Homo sapiens
cccccgaggtgggtt

SEQ ID NO: 1252207 - DNA, 15 bp, Homo sapiens
gcccccgaggtgggt

SEQ ID NO: 1252208 - DNA, 15 bp, Homo sapiens
tgcccccgaggtggg

SEQ ID NO: 1252209 - DNA, 15 bp, Homo sapiens
gtgcccccgaggtgg

SEQ ID NO: 1252210 - DNA, 15 bp, Homo sapiens
agtgcccccgaggtg

SEQ ID NO: 1252211 - DNA, 15 bp, Homo sapiens
gagtgcccccgaggt

SEQ ID NO: 1252212 - DNA, 15 bp, Homo sapiens
tgagtgcccccgagg

SEQ ID NO: 1252213 - DNA, 15 bp, Homo sapiens
ctgagtgcccccgag

SEQ ID NO: 1252214 - DNA, 15 bp, Homo sapiens
cctgagtgcccccga

SEQ ID NO: 1252215 - DNA, 15 bp, Homo sapiens
gcctgagtgcccccg

SEQ ID NO: 1252216 - DNA, 15 bp, Homo sapiens
tgcctgagtgccccc

SEQ ID NO: 1252217 - DNA, 15 bp, Homo sapiens
atgcctgagtgcccc

SEQ ID NO: 1252218 - DNA, 15 bp, Homo sapiens
gatgcctgagtgccc

SEQ ID NO: 1252219 - DNA, 15 bp, Homo sapiens
tgatgcctgagtgcc

SEQ ID NO: 1252220 - DNA, 15 bp, Homo sapiens
atgatgcctgagtgc

SEQ ID NO: 1252221 - DNA, 15 bp, Homo sapiens
gatgatgcctgagtg

SEQ ID NO: 1252222 - DNA, 15 bp, Homo sapiens
agatgatgcctgagt

SEQ ID NO: 1252223 - DNA, 15 bp, Homo sapiens
tagatgatgcctgag

SEQ ID NO: 1252224 - DNA, 15 bp, Homo sapiens
gtagatgatgcctga

SEQ ID NO: 1252225 - DNA, 15 bp, Homo sapiens
agtagatgatgcctg

SEQ ID NO: 1252226 - DNA, 15 bp, Homo sapiens
aagtagatgatgcct

SEQ ID NO: 1252227 - DNA, 15 bp, Homo sapiens
gaagtagatgatgcc

SEQ ID NO: 1252228 - DNA, 15 bp, Homo sapiens
tgaagtagatgatgc

SEQ ID NO: 1252229 - DNA, 15 bp, Homo sapiens
ctgaagtagatgatg

SEQ ID NO: 1252230 - DNA, 15 bp, Homo sapiens
tctgaagtagatgat

SEQ ID NO: 1252231 - DNA, 15 bp, Homo sapiens
ctctgaagtagatga

SEQ ID NO: 1252232 - DNA, 15 bp, Homo sapiens
gctctgaagtagatg

SEQ ID NO: 1252233 - DNA, 15 bp, Homo sapiens
tgctctgaagtagat

SEQ ID NO: 1252234 - DNA, 15 bp, Homo sapiens
ctgctctgaagtaga

SEQ ID NO: 1252235 - DNA, 15 bp, Homo sapiens
tctgctctgaagtag

SEQ ID NO: 1252236 - DNA, 15 bp, Homo sapiens
gtctgctctgaagta

SEQ ID NO: 1252237 - DNA, 15 bp, Homo sapiens
tgtctgctctgaagt

SEQ ID NO: 1252238 - DNA, 15 bp, Homo sapiens
ctgtctgctctgaag

SEQ ID NO: 1252239 - DNA, 15 bp, Homo sapiens
cctgtctgctctgaa

SEQ ID NO: 1252240 - DNA, 15 bp, Homo sapiens
ccctgtctgctctga

SEQ ID NO: 1252241 - DNA, 15 bp, Homo sapiens
accctgtctgctctg

SEQ ID NO: 1252242 - DNA, 15 bp, Homo sapiens
gaccctgtctgctct

SEQ ID NO: 1252243 - DNA, 15 bp, Homo sapiens
agaccctgtctgctc

SEQ ID NO: 1252244 - DNA, 15 bp, Homo sapiens
tagaccctgtctgct

SEQ ID NO: 1252245 - DNA, 15 bp, Homo sapiens
atagaccctgtctgc

SEQ ID NO: 1252246 - DNA, 15 bp, Homo sapiens
catagaccctgtctg

SEQ ID NO: 1252247 - DNA, 15 bp, Homo sapiens
tcatagaccctgtct

SEQ ID NO: 1252248 - DNA, 15 bp, Homo sapiens
ttcatagaccctgtc

SEQ ID NO: 1252249 - DNA, 15 bp, Homo sapiens
gttcatagaccctgt

SEQ ID NO: 1252250 - DNA, 15 bp, Homo sapiens
agttcatagaccctg

SEQ ID NO: 1252251 - DNA, 15 bp, Homo sapiens
tagttcatagaccct

SEQ ID NO: 1252252 - DNA, 15 bp, Homo sapiens
gtagttcatagaccc

SEQ ID NO: 1252253 - DNA, 15 bp, Homo sapiens
tgtagttcatagacc

SEQ ID NO: 1252254 - DNA, 15 bp, Homo sapiens
ctgtagttcatagac

SEQ ID NO: 1252255 - DNA, 15 bp, Homo sapiens
gctgtagttcataga

SEQ ID NO: 1252256 - DNA, 15 bp, Homo sapiens
ggctgtagttcatag

SEQ ID NO: 1252257 - DNA, 15 bp, Homo sapiens
cggctgtagttcata

SEQ ID NO: 1252258 - DNA, 15 bp, Homo sapiens
acggctgtagttcat

SEQ ID NO: 1252259 - DNA, 15 bp, Homo sapiens
cacggctgtagttca

SEQ ID NO: 1252260 - DNA, 15 bp, Homo sapiens
ccacggctgtagttc

SEQ ID NO: 1252261 - DNA, 15 bp, Homo sapiens
cccacggctgtagtt

SEQ ID NO: 1252262 - DNA, 15 bp, Homo sapiens
gcccacggctgtagt

SEQ ID NO: 1252263 - DNA, 15 bp, Homo sapiens
agcccacggctgtag

SEQ ID NO: 1252264 - DNA, 15 bp, Homo sapiens
cagcccacggctgta

SEQ ID NO: 1252265 - DNA, 15 bp, Homo sapiens
gcagcccacggctgt

SEQ ID NO: 1252266 - DNA, 15 bp, Homo sapiens
agcagcccacggctg

SEQ ID NO: 1252267 - DNA, 15 bp, Homo sapiens
aagcagcccacggct

SEQ ID NO: 1252268 - DNA, 15 bp, Homo sapiens
gaagcagcccacggc

SEQ ID NO: 1252269 - DNA, 15 bp, Homo sapiens
ggaagcagcccacgg

SEQ ID NO: 1252270 - DNA, 15 bp, Homo sapiens
tggaagcagcccacg

SEQ ID NO: 1252271 - DNA, 15 bp, Homo sapiens
ttggaagcagcccac

SEQ ID NO: 1252272 - DNA, 15 bp, Homo sapiens
cttggaagcagccca

SEQ ID NO: 1252273 - DNA, 15 bp, Homo sapiens
ccttggaagcagccc

SEQ ID NO: 1252274 - DNA, 15 bp, Homo sapiens
gccttggaagcagcc

SEQ ID NO: 1252275 - DNA, 15 bp, Homo sapiens
tgccttggaagcagc

SEQ ID NO: 1252276 - DNA, 15 bp, Homo sapiens
gtgccttggaagcag

SEQ ID NO: 1252277 - DNA, 15 bp, Homo sapiens
ggtgccttggaagca

SEQ ID NO: 1252278 - DNA, 15 bp, Homo sapiens
gggtgccttggaagc

SEQ ID NO: 1252279 - DNA, 15 bp, Homo sapiens
agggtgccttggaag

SEQ ID NO: 1252280 - DNA, 15 bp, Homo sapiens
cagggtgccttggaa

SEQ ID NO: 1252281 - DNA, 15 bp, Homo sapiens
gcagggtgccttgga

SEQ ID NO: 1252282 - DNA, 15 bp, Homo sapiens
agcagggtgccttgg

SEQ ID NO: 1252283 - DNA, 15 bp, Homo sapiens
gagcagggtgccttg

SEQ ID NO: 1252284 - DNA, 15 bp, Homo sapiens
agagcagggtgcctt

SEQ ID NO: 1252285 - DNA, 15 bp, Homo sapiens
aagagcagggtgcct

SEQ ID NO: 1252286 - DNA, 15 bp, Homo sapiens
caagagcagggtgcc

SEQ ID NO: 1252287 - DNA, 15 bp, Homo sapiens
acaagagcagggtgc

SEQ ID NO: 1252288 - DNA, 15 bp, Homo sapiens
tacaagagcagggtg

SEQ ID NO: 1252289 - DNA, 15 bp, Homo sapiens
ttacaagagcagggt

SEQ ID NO: 1252290 - DNA, 15 bp, Homo sapiens
tttacaagagcaggg

SEQ ID NO: 1252291 - DNA, 15 bp, Homo sapiens
atttacaagagcagg

SEQ ID NO: 1252292 - DNA, 15 bp, Homo sapiens
tatttacaagagcag

SEQ ID NO: 1252293 - DNA, 15 bp, Homo sapiens
ttatttacaagagca

SEQ ID NO: 1252294 - DNA, 15 bp, Homo sapiens
tttatttacaagagc

SEQ ID NO: 1252295 - DNA, 15 bp, Homo sapiens
ctttatttacaagag

SEQ ID NO: 1252296 - DNA, 15 bp, Homo sapiens
actttatttacaaga

SEQ ID NO: 1252297 - DNA, 15 bp, Homo sapiens
aactttatttacaag

SEQ ID NO: 1252298 - DNA, 15 bp, Homo sapiens
aaactttatttacaa

SEQ ID NO: 1252299 - DNA, 15 bp, Homo sapiens
aaaactttatttaca

SEQ ID NO: 1252300 - DNA, 15 bp, Homo sapiens
taaaactttatttac

SEQ ID NO: 1252301 - DNA, 15 bp, Homo sapiens
ataaaactttattta

SEQ ID NO: 1252302 - DNA, 15 bp, Homo sapiens
cataaaactttattt

SEQ ID NO: 1252303 - DNA, 15 bp, Homo sapiens
ccataaaactttatt

SEQ ID NO: 1252304 - DNA, 15 bp, Homo sapiens
cccataaaactttat

SEQ ID NO: 1252305 - DNA, 15 bp, Homo sapiens
tcccataaaacttta

SEQ ID NO: 1252306 - DNA, 15 bp, Homo sapiens
ttcccataaaacttt

SEQ ID NO: 1252307 - DNA, 15 bp, Homo sapiens
gttcccataaaactt

SEQ ID NO: 1252308 - DNA, 15 bp, Homo sapiens
tgttcccataaaact

SEQ ID NO: 1252309 - DNA, 15 bp, Homo sapiens
gtgttcccataaaac

SEQ ID NO: 1252310 - DNA, 15 bp, Homo sapiens
tgtgttcccataaaa

SEQ ID NO: 1252311 - DNA, 15 bp, Homo sapiens
gtgtgttcccataaa

SEQ ID NO: 1252312 - DNA, 15 bp, Homo sapiens
ggtgtgttcccataa

SEQ ID NO: 1252313 - DNA, 15 bp, Homo sapiens
gggtgtgttcccata

SEQ ID NO: 1252314 - DNA, 15 bp, Homo sapiens
tgggtgtgttcccat

SEQ ID NO: 1252315 - DNA, 15 bp, Homo sapiens
atgggtgtgttccca

SEQ ID NO: 1252316 - DNA, 15 bp, Homo sapiens
tatgggtgtgttccc

SEQ ID NO: 1252317 - DNA, 15 bp, Homo sapiens
atatgggtgtgttcc

SEQ ID NO: 1252318 - DNA, 15 bp, Homo sapiens
aatatgggtgtgttc

SEQ ID NO: 1252319 - DNA, 15 bp, Homo sapiens
taatatgggtgtgtt

SEQ ID NO: 1252320 - DNA, 15 bp, Homo sapiens
ctaatatgggtgtgt

SEQ ID NO: 1252321 - DNA, 15 bp, Homo sapiens
actaatatgggtgtg

SEQ ID NO: 1252322 - DNA, 15 bp, Homo sapiens
cactaatatgggtgt

SEQ ID NO: 1252323 - DNA, 15 bp, Homo sapiens
acactaatatgggtg

SEQ ID NO: 1252324 - DNA, 15 bp, Homo sapiens
gacactaatatgggt

SEQ ID NO: 1252325 - DNA, 15 bp, Homo sapiens
ggacactaatatggg

SEQ ID NO: 1252326 - DNA, 15 bp, Homo sapiens
tggacactaatatgg

SEQ ID NO: 1252327 - DNA, 15 bp, Homo sapiens
atggacactaatatg

SEQ ID NO: 1252328 - DNA, 15 bp, Homo sapiens
catggacactaatat

SEQ ID NO: 1252329 - DNA, 15 bp, Homo sapiens
ccatggacactaata

SEQ ID NO: 1252330 - DNA, 15 bp, Homo sapiens
tccatggacactaat

SEQ ID NO: 1252331 - DNA, 15 bp, Homo sapiens
ctccatggacactaa

SEQ ID NO: 1252332 - DNA, 15 bp, Homo sapiens
actccatggacacta

SEQ ID NO: 1252333 - DNA, 15 bp, Homo sapiens
cactccatggacact

SEQ ID NO: 1252334 - DNA, 15 bp, Homo sapiens
ccactccatggacac

SEQ ID NO: 1252335 - DNA, 15 bp, Homo sapiens
gccactccatggaca

SEQ ID NO: 1252336 - DNA, 15 bp, Homo sapiens
ggccactccatggac

SEQ ID NO: 1252337 - DNA, 15 bp, Homo sapiens
cggccactccatgga

SEQ ID NO: 1252338 - DNA, 15 bp, Homo sapiens
acggccactccatgg

SEQ ID NO: 1252339 - DNA, 15 bp, Homo sapiens
cacggccactccatg

SEQ ID NO: 1252340 - DNA, 15 bp, Homo sapiens
ccacggccactccat

SEQ ID NO: 1252341 - DNA, 15 bp, Homo sapiens
gccacggccactcca

SEQ ID NO: 1252342 - DNA, 15 bp, Homo sapiens
tgccacggccactcc

SEQ ID NO: 1252343 - DNA, 15 bp, Homo sapiens
ctgccacggccactc

SEQ ID NO: 1252344 - DNA, 15 bp, Homo sapiens
tctgccacggccact

SEQ ID NO: 1252345 - DNA, 15 bp, Homo sapiens
ctctgccacggccac

SEQ ID NO: 1252346 - DNA, 15 bp, Homo sapiens
tctctgccacggcca

SEQ ID NO: 1252347 - DNA, 15 bp, Homo sapiens
gtctctgccacggcc

SEQ ID NO: 1252348 - DNA, 15 bp, Homo sapiens
cgtctctgccacggc

SEQ ID NO: 1252349 - DNA, 15 bp, Homo sapiens
acgtctctgccacgg

SEQ ID NO: 1252350 - DNA, 15 bp, Homo sapiens
gacgtctctgccacg

SEQ ID NO: 1252351 - DNA, 15 bp, Homo sapiens
ggacgtctctgccac

SEQ ID NO: 1252352 - DNA, 15 bp, Homo sapiens
tggacgtctctgcca

SEQ ID NO: 1252353 - DNA, 15 bp, Homo sapiens
ctggacgtctctgcc

SEQ ID NO: 1252354 - DNA, 15 bp, Homo sapiens
gctggacgtctctgc

SEQ ID NO: 1252355 - DNA, 15 bp, Homo sapiens
ggctggacgtctctg

SEQ ID NO: 1252356 - DNA, 15 bp, Homo sapiens
cggctggacgtctct

SEQ ID NO: 1252357 - DNA, 15 bp, Homo sapiens
ccggctggacgtctc

SEQ ID NO: 1252358 - DNA, 15 bp, Homo sapiens
tccggctggacgtct

SEQ ID NO: 1252359 - DNA, 15 bp, Homo sapiens
gtccggctggacgtc

SEQ ID NO: 1252360 - DNA, 15 bp, Homo sapiens
tgtccggctggacgt

SEQ ID NO: 1252361 - DNA, 15 bp, Homo sapiens
ctgtccggctggacg

SEQ ID NO: 1252362 - DNA, 15 bp, Homo sapiens
tctgtccggctggac

SEQ ID NO: 1252363 - DNA, 15 bp, Homo sapiens
gtctgtccggctgga

SEQ ID NO: 1252364 - DNA, 15 bp, Homo sapiens
ggtctgtccggctgg

SEQ ID NO: 1252365 - DNA, 15 bp, Homo sapiens
tggtctgtccggctg

SEQ ID NO: 1252366 - DNA, 15 bp, Homo sapiens
ctggtctgtccggct

SEQ ID NO: 1252367 - DNA, 15 bp, Homo sapiens
gctggtctgtccggc

SEQ ID NO: 1252368 - DNA, 15 bp, Homo sapiens
agctggtctgtccgg

SEQ ID NO: 1252369 - DNA, 15 bp, Homo sapiens
cagctggtctgtccg

SEQ ID NO: 1252370 - DNA, 15 bp, Homo sapiens
tcagctggtctgtcc

SEQ ID NO: 1252371 - DNA, 15 bp, Homo sapiens
gtcagctggtctgtc

SEQ ID NO: 1252372 - DNA, 15 bp, Homo sapiens
ggtcagctggtctgt

SEQ ID NO: 1252373 - DNA, 15 bp, Homo sapiens
gggtcagctggtctg

SEQ ID NO: 1252374 - DNA, 15 bp, Homo sapiens
cgggtcagctggtct

SEQ ID NO: 1252375 - DNA, 15 bp, Homo sapiens
gcgggtcagctggtc

SEQ ID NO: 1252376 - DNA, 15 bp, Homo sapiens
ggcgggtcagctggt

SEQ ID NO: 1252377 - DNA, 15 bp, Homo sapiens
tggcgggtcagctgg

SEQ ID NO: 1252378 - DNA, 15 bp, Homo sapiens
ttggcgggtcagctg

SEQ ID NO: 1252379 - DNA, 15 bp, Homo sapiens
cttggcgggtcagct

SEQ ID NO: 1252380 - DNA, 15 bp, Homo sapiens
gcttggcgggtcagc

SEQ ID NO: 1252381 - DNA, 15 bp, Homo sapiens
ggcttggcgggtcag

SEQ ID NO: 1252382 - DNA, 15 bp, Homo sapiens
gggcttggcgggtca

SEQ ID NO: 1252383 - DNA, 15 bp, Homo sapiens
tgggcttggcgggtc

SEQ ID NO: 1252384 - DNA, 15 bp, Homo sapiens
ctgggcttggcgggt

SEQ ID NO: 1252385 - DNA, 15 bp, Homo sapiens
gctgggcttggcggg

SEQ ID NO: 1252386 - DNA, 15 bp, Homo sapiens
tgctgggcttggcgg

SEQ ID NO: 1252387 - DNA, 15 bp, Homo sapiens
atgctgggcttggcg

SEQ ID NO: 1252388 - DNA, 15 bp, Homo sapiens
catgctgggcttggc

SEQ ID NO: 1252389 - DNA, 15 bp, Homo sapiens
ccatgctgggcttgg

SEQ ID NO: 1252390 - DNA, 15 bp, Homo sapiens
accatgctgggcttg

SEQ ID NO: 1252391 - DNA, 15 bp, Homo sapiens
aaccatgctgggctt

SEQ ID NO: 1252392 - DNA, 15 bp, Homo sapiens
taaccatgctgggct

SEQ ID NO: 1252393 - DNA, 15 bp, Homo sapiens
ctaaccatgctgggc

SEQ ID NO: 1252394 - DNA, 15 bp, Homo sapiens
actaaccatgctggg

SEQ ID NO: 1252395 - DNA, 15 bp, Homo sapiens
cactaaccatgctgg

SEQ ID NO: 1252396 - DNA, 15 bp, Homo sapiens
acactaaccatgctg

SEQ ID NO: 1252397 - DNA, 15 bp, Homo sapiens
gacactaaccatgct

SEQ ID NO: 1252398 - DNA, 15 bp, Homo sapiens
tgacactaaccatgc

SEQ ID NO: 1252399 - DNA, 15 bp, Homo sapiens
ctgacactaaccatg

SEQ ID NO: 1252400 - DNA, 15 bp, Homo sapiens
cctgacactaaccat

SEQ ID NO: 1252401 - DNA, 15 bp, Homo sapiens
tcctgacactaacca

SEQ ID NO: 1252402 - DNA, 15 bp, Homo sapiens
gtcctgacactaacc

SEQ ID NO: 1252403 - DNA, 15 bp, Homo sapiens
ggtcctgacactaac

SEQ ID NO: 1252404 - DNA, 15 bp, Homo sapiens
aggtcctgacactaa

SEQ ID NO: 1252405 - DNA, 15 bp, Homo sapiens
gaggtcctgacacta

SEQ ID NO: 1252406 - DNA, 15 bp, Homo sapiens
agaggtcctgacact

SEQ ID NO: 1252407 - DNA, 15 bp, Homo sapiens
cagaggtcctgacac

SEQ ID NO: 1252408 - DNA, 15 bp, Homo sapiens
gcagaggtcctgaca

SEQ ID NO: 1252409 - DNA, 15 bp, Homo sapiens
agcagaggtcctgac

SEQ ID NO: 1252410 - DNA, 15 bp, Homo sapiens
cagcagaggtcctga

SEQ ID NO: 1252411 - DNA, 15 bp, Homo sapiens
tcagcagaggtcctg

SEQ ID NO: 1252412 - DNA, 15 bp, Homo sapiens
ttcagcagaggtcct

SEQ ID NO: 1252413 - DNA, 15 bp, Homo sapiens
cttcagcagaggtcc

SEQ ID NO: 1252414 - DNA, 15 bp, Homo sapiens
tcttcagcagaggtc

SEQ ID NO: 1252415 - DNA, 15 bp, Homo sapiens
atcttcagcagaggt

SEQ ID NO: 1252416 - DNA, 15 bp, Homo sapiens
catcttcagcagagg

SEQ ID NO: 1252417 - DNA, 15 bp, Homo sapiens
gcatcttcagcagag

SEQ ID NO: 1252418 - DNA, 15 bp, Homo sapiens
agcatcttcagcaga

SEQ ID NO: 1252419 - DNA, 15 bp, Homo sapiens
aagcatcttcagcag

SEQ ID NO: 1252420 - DNA, 15 bp, Homo sapiens
caagcatcttcagca

SEQ ID NO: 1252421 - DNA, 15 bp, Homo sapiens
gcaagcatcttcagc

SEQ ID NO: 1252422 - DNA, 15 bp, Homo sapiens
agcaagcatcttcag

SEQ ID NO: 1252423 - DNA, 15 bp, Homo sapiens
cagcaagcatcttca

SEQ ID NO: 1252424 - DNA, 15 bp, Homo sapiens
tcagcaagcatcttc

SEQ ID NO: 1252425 - DNA, 15 bp, Homo sapiens
gtcagcaagcatctt

SEQ ID NO: 1252426 - DNA, 15 bp, Homo sapiens
ggtcagcaagcatct

SEQ ID NO: 1252427 - DNA, 15 bp, Homo sapiens
gggtcagcaagcatc

SEQ ID NO: 1252428 - DNA, 15 bp, Homo sapiens
agggtcagcaagcat

SEQ ID NO: 1252429 - DNA, 15 bp, Homo sapiens
cagggtcagcaagca

SEQ ID NO: 1252430 - DNA, 15 bp, Homo sapiens
ccagggtcagcaagc

SEQ ID NO: 1252431 - DNA, 15 bp, Homo sapiens
gccagggtcagcaag

SEQ ID NO: 1252432 - DNA, 15 bp, Homo sapiens
ggccagggtcagcaa

SEQ ID NO: 1252433 - DNA, 15 bp, Homo sapiens
tggccagggtcagca

SEQ ID NO: 1252434 - DNA, 15 bp, Homo sapiens
ctggccagggtcagc

SEQ ID NO: 1252435 - DNA, 15 bp, Homo sapiens
tctggccagggtcag

SEQ ID NO: 1252436 - DNA, 15 bp, Homo sapiens
gtctggccagggtca

SEQ ID NO: 1252437 - DNA, 15 bp, Homo sapiens
ggtctggccagggtc

SEQ ID NO: 1252438 - DNA, 15 bp, Homo sapiens
gggtctggccagggt

SEQ ID NO: 1252439 - DNA, 15 bp, Homo sapiens
ggggtctggccaggg

SEQ ID NO: 1252440 - DNA, 15 bp, Homo sapiens
cggggtctggccagg

SEQ ID NO: 1252441 - DNA, 15 bp, Homo sapiens
ccggggtctggccag

SEQ ID NO: 1252442 - DNA, 15 bp, Homo sapiens
accggggtctggcca

SEQ ID NO: 1252443 - DNA, 15 bp, Homo sapiens
aaccggggtctggcc

SEQ ID NO: 1252444 - DNA, 15 bp, Homo sapiens
gaaccggggtctggc

SEQ ID NO: 1252445 - DNA, 15 bp, Homo sapiens
ggaaccggggtctgg

SEQ ID NO: 1252446 - DNA, 15 bp, Homo sapiens
aggaaccggggtctg

SEQ ID NO: 1252447 - DNA, 15 bp, Homo sapiens
taggaaccggggtct

SEQ ID NO: 1252448 - DNA, 15 bp, Homo sapiens
ttaggaaccggggtc

SEQ ID NO: 1252449 - DNA, 15 bp, Homo sapiens
attaggaaccggggt

SEQ ID NO: 1252450 - DNA, 15 bp, Homo sapiens
cattaggaaccgggg

SEQ ID NO: 1252451 - DNA, 15 bp, Homo sapiens
gcattaggaaccggg

SEQ ID NO: 1252452 - DNA, 15 bp, Homo sapiens
ggcattaggaaccgg

SEQ ID NO: 1252453 - DNA, 15 bp, Homo sapiens
gggcattaggaaccg

SEQ ID NO: 1252454 - DNA, 15 bp, Homo sapiens
ggggcattaggaacc

SEQ ID NO: 1252455 - DNA, 15 bp, Homo sapiens
gggggcattaggaac

SEQ ID NO: 1252456 - DNA, 15 bp, Homo sapiens
agggggcattaggaa

SEQ ID NO: 1252457 - DNA, 15 bp, Homo sapiens
tagggggcattagga

SEQ ID NO: 1252458 - DNA, 15 bp, Homo sapiens
ttagggggcattagg

SEQ ID NO: 1252459 - DNA, 15 bp, Homo sapiens
tttagggggcattag

SEQ ID NO: 1252460 - DNA, 15 bp, Homo sapiens
gtttagggggcatta

SEQ ID NO: 1252461 - DNA, 15 bp, Homo sapiens
cgtttagggggcatt

SEQ ID NO: 1252462 - DNA, 15 bp, Homo sapiens
ccgtttagggggcat

SEQ ID NO: 1252463 - DNA, 15 bp, Homo sapiens
cccgtttagggggca

SEQ ID NO: 1252464 - DNA, 15 bp, Homo sapiens
tcccgtttagggggc

SEQ ID NO: 1252465 - DNA, 15 bp, Homo sapiens
gtcccgtttaggggg

SEQ ID NO: 1252466 - DNA, 15 bp, Homo sapiens
cgtcccgtttagggg

SEQ ID NO: 1252467 - DNA, 15 bp, Homo sapiens
ccgtcccgtttaggg

SEQ ID NO: 1252468 - DNA, 15 bp, Homo sapiens
cccgtcccgtttagg

SEQ ID NO: 1252469 - DNA, 15 bp, Homo sapiens
tcccgtcccgtttag

SEQ ID NO: 1252470 - DNA, 15 bp, Homo sapiens
ctcccgtcccgttta

SEQ ID NO: 1252471 - DNA, 15 bp, Homo sapiens
gctcccgtcccgttt

SEQ ID NO: 1252472 - DNA, 15 bp, Homo sapiens
ggctcccgtcccgtt

SEQ ID NO: 1252473 - DNA, 15 bp, Homo sapiens
tggctcccgtcccgt

SEQ ID NO: 1252474 - DNA, 15 bp, Homo sapiens
ctggctcccgtcccg

SEQ ID NO: 1252475 - DNA, 15 bp, Homo sapiens
actggctcccgtccc

SEQ ID NO: 1252476 - DNA, 15 bp, Homo sapiens
cactggctcccgtcc

SEQ ID NO: 1252477 - DNA, 15 bp, Homo sapiens
ccactggctcccgtc

SEQ ID NO: 1252478 - DNA, 15 bp, Homo sapiens
gccactggctcccgt

SEQ ID NO: 1252479 - DNA, 15 bp, Homo sapiens
cgccactggctcccg

SEQ ID NO: 1252480 - DNA, 15 bp, Homo sapiens
ccgccactggctccc

SEQ ID NO: 1252481 - DNA, 15 bp, Homo sapiens
cccgccactggctcc

SEQ ID NO: 1252482 - DNA, 15 bp, Homo sapiens
gcccgccactggctc

SEQ ID NO: 1252483 - DNA, 15 bp, Homo sapiens
ggcccgccactggct

SEQ ID NO: 1252484 - DNA, 15 bp, Homo sapiens
gggcccgccactggc

SEQ ID NO: 1252485 - DNA, 15 bp, Homo sapiens
agggcccgccactgg

SEQ ID NO: 1252486 - DNA, 15 bp, Homo sapiens
cagggcccgccactg

SEQ ID NO: 1252487 - DNA, 15 bp, Homo sapiens
tcagggcccgccact

SEQ ID NO: 1252488 - DNA, 15 bp, Homo sapiens
atcagggcccgccac

SEQ ID NO: 1252489 - DNA, 15 bp, Homo sapiens
gatcagggcccgcca

SEQ ID NO: 1252490 - DNA, 15 bp, Homo sapiens
ggatcagggcccgcc

SEQ ID NO: 1252491 - DNA, 15 bp, Homo sapiens
tggatcagggcccgc

SEQ ID NO: 1252492 - DNA, 15 bp, Homo sapiens
ctggatcagggcccg

SEQ ID NO: 1252493 - DNA, 15 bp, Homo sapiens
cctggatcagggccc

SEQ ID NO: 1252494 - DNA, 15 bp, Homo sapiens
acctggatcagggcc

SEQ ID NO: 1252495 - DNA, 15 bp, Homo sapiens
gacctggatcagggc

SEQ ID NO: 1252496 - DNA, 15 bp, Homo sapiens
tgacctggatcaggg

SEQ ID NO: 1252497 - DNA, 15 bp, Homo sapiens
ctgacctggatcagg

SEQ ID NO: 1252498 - DNA, 15 bp, Homo sapiens
tctgacctggatcag

SEQ ID NO: 1252499 - DNA, 15 bp, Homo sapiens
ctctgacctggatca

SEQ ID NO: 1252500 - DNA, 15 bp, Homo sapiens
gctctgacctggatc

SEQ ID NO: 1252501 - DNA, 15 bp, Homo sapiens
agctctgacctggat

SEQ ID NO: 1252502 - DNA, 15 bp, Homo sapiens
cagctctgacctgga

SEQ ID NO: 1252503 - DNA, 15 bp, Homo sapiens
ccagctctgacctgg

SEQ ID NO: 1252504 - DNA, 15 bp, Homo sapiens
gccagctctgacctg

SEQ ID NO: 1252505 - DNA, 15 bp, Homo sapiens
agccagctctgacct

SEQ ID NO: 1252506 - DNA, 15 bp, Homo sapiens
gagccagctctgacc

SEQ ID NO: 1252507 - DNA, 15 bp, Homo sapiens
agagccagctctgac

SEQ ID NO: 1252508 - DNA, 15 bp, Homo sapiens
cagagccagctctga

SEQ ID NO: 1252509 - DNA, 15 bp, Homo sapiens
gcagagccagctctg

SEQ ID NO: 1252510 - DNA, 15 bp, Homo sapiens
agcagagccagctct

SEQ ID NO: 1252511 - DNA, 15 bp, Homo sapiens
aagcagagccagctc

SEQ ID NO: 1252512 - DNA, 15 bp, Homo sapiens
aaagcagagccagct

SEQ ID NO: 1252513 - DNA, 15 bp, Homo sapiens
gaaagcagagccagc

SEQ ID NO: 1252514 - DNA, 15 bp, Homo sapiens
agaaagcagagccag

SEQ ID NO: 1252515 - DNA, 15 bp, Homo sapiens
gagaaagcagagcca

SEQ ID NO: 1252516 - DNA, 15 bp, Homo sapiens
agagaaagcagagcc

SEQ ID NO: 1252517 - DNA, 15 bp, Homo sapiens
aagagaaagcagagc

SEQ ID NO: 1252518 - DNA, 15 bp, Homo sapiens
aaagagaaagcagag

SEQ ID NO: 1252519 - DNA, 15 bp, Homo sapiens
aaaagagaaagcaga

SEQ ID NO: 1252520 - DNA, 15 bp, Homo sapiens
caaaagagaaagcag

SEQ ID NO: 1252521 - DNA, 15 bp, Homo sapiens
acaaaagagaaagca

SEQ ID NO: 1252522 - DNA, 15 bp, Homo sapiens
gacaaaagagaaagc

SEQ ID NO: 1252523 - DNA, 15 bp, Homo sapiens
ggacaaaagagaaag

SEQ ID NO: 1252524 - DNA, 15 bp, Homo sapiens
cggacaaaagagaaa

SEQ ID NO: 1252525 - DNA, 15 bp, Homo sapiens
tcggacaaaagagaa

SEQ ID NO: 1252526 - DNA, 15 bp, Homo sapiens
ctcggacaaaagaga

SEQ ID NO: 1252527 - DNA, 15 bp, Homo sapiens
actcggacaaaagag

SEQ ID NO: 1252528 - DNA, 15 bp, Homo sapiens
cactcggacaaaaga

SEQ ID NO: 1252529 - DNA, 15 bp, Homo sapiens
tcactcggacaaaag

SEQ ID NO: 1252530 - DNA, 15 bp, Homo sapiens
gtcactcggacaaaa

SEQ ID NO: 1252531 - DNA, 15 bp, Homo sapiens
ggtcactcggacaaa

SEQ ID NO: 1252532 - DNA, 15 bp, Homo sapiens
tggtcactcggacaa

SEQ ID NO: 1252533 - DNA, 15 bp, Homo sapiens
atggtcactcggaca

SEQ ID NO: 1252534 - DNA, 15 bp, Homo sapiens
catggtcactcggac

SEQ ID NO: 1252535 - DNA, 15 bp, Homo sapiens
gcatggtcactcgga

SEQ ID NO: 1252536 - DNA, 15 bp, Homo sapiens
ggcatggtcactcgg

SEQ ID NO: 1252537 - DNA, 15 bp, Homo sapiens
aggcatggtcactcg

SEQ ID NO: 1252538 - DNA, 15 bp, Homo sapiens
gaggcatggtcactc

SEQ ID NO: 1252539 - DNA, 15 bp, Homo sapiens
tgaggcatggtcact

SEQ ID NO: 1252540 - DNA, 15 bp, Homo sapiens
ctgaggcatggtcac

SEQ ID NO: 1252541 - DNA, 15 bp, Homo sapiens
actgaggcatggtca

SEQ ID NO: 1252542 - DNA, 15 bp, Homo sapiens
aactgaggcatggtc

SEQ ID NO: 1252543 - DNA, 15 bp, Homo sapiens
aaactgaggcatggt

SEQ ID NO: 1252544 - DNA, 15 bp, Homo sapiens
gaaactgaggcatgg

SEQ ID NO: 1252545 - DNA, 15 bp, Homo sapiens
aggaaactgaggcat

SEQ ID NO: 1252546 - DNA, 15 bp, Homo sapiens
gaggaaactgaggca

SEQ ID NO: 1252547 - DNA, 15 bp, Homo sapiens
tgaggaaactgaggc

SEQ ID NO: 1252548 - DNA, 15 bp, Homo sapiens
catgaggaaactgag

SEQ ID NO: 1252549 - DNA, 15 bp, Homo sapiens
acatgaggaaactga

SEQ ID NO: 1252550 - DNA, 15 bp, Homo sapiens
cacatgaggaaactg

SEQ ID NO: 1252551 - DNA, 15 bp, Homo sapiens
acacatgaggaaact

SEQ ID NO: 1252552 - DNA, 15 bp, Homo sapiens
tacacatgaggaaac

SEQ ID NO: 1252553 - DNA, 15 bp, Homo sapiens
ttacacatgaggaaa

SEQ ID NO: 1252554 - DNA, 15 bp, Homo sapiens
tttacacatgaggaa

SEQ ID NO: 1252555 - DNA, 15 bp, Homo sapiens
ttttacacatgagga

SEQ ID NO: 1252556 - DNA, 15 bp, Homo sapiens
gttttacacatgagg

SEQ ID NO: 1252557 - DNA, 15 bp, Homo sapiens
tgttttacacatgag

SEQ ID NO: 1252558 - DNA, 15 bp, Homo sapiens
ctgttttacacatga

SEQ ID NO: 1252559 - DNA, 15 bp, Homo sapiens
cctgttttacacatg

SEQ ID NO: 1252560 - DNA, 15 bp, Homo sapiens
tcctgttttacacat

SEQ ID NO: 1252561 - DNA, 15 bp, Homo sapiens
ctcctgttttacaca

SEQ ID NO: 1252562 - DNA, 15 bp, Homo sapiens
gctcctgttttacac

SEQ ID NO: 1252563 - DNA, 15 bp, Homo sapiens
ggctcctgttttaca

SEQ ID NO: 1252564 - DNA, 15 bp, Homo sapiens
gggctcctgttttac

SEQ ID NO: 1252565 - DNA, 15 bp, Homo sapiens
tgggctcctgtttta

SEQ ID NO: 1252566 - DNA, 15 bp, Homo sapiens
gtgggctcctgtttt

SEQ ID NO: 1252567 - DNA, 15 bp, Homo sapiens
ggtgggctcctgttt

SEQ ID NO: 1252568 - DNA, 15 bp, Homo sapiens
cggtgggctcctgtt

SEQ ID NO: 1252569 - DNA, 15 bp, Homo sapiens
acggtgggctcctgt

SEQ ID NO: 1252570 - DNA, 15 bp, Homo sapiens
cacggtgggctcctg

SEQ ID NO: 1252571 - DNA, 15 bp, Homo sapiens
tcacggtgggctcct

SEQ ID NO: 1252572 - DNA, 15 bp, Homo sapiens
atcacggtgggctcc

SEQ ID NO: 1252573 - DNA, 15 bp, Homo sapiens
catcacggtgggctc

SEQ ID NO: 1252574 - DNA, 15 bp, Homo sapiens
gcatcacggtgggct

SEQ ID NO: 1252575 - DNA, 15 bp, Homo sapiens
agcatcacggtgggc

SEQ ID NO: 1252576 - DNA, 15 bp, Homo sapiens
aagcatcacggtggg

SEQ ID NO: 1252577 - DNA, 15 bp, Homo sapiens
taagcatcacggtgg

SEQ ID NO: 1252578 - DNA, 15 bp, Homo sapiens
ataagcatcacggtg

SEQ ID NO: 1252579 - DNA, 15 bp, Homo sapiens
cataagcatcacggt

SEQ ID NO: 1252580 - DNA, 15 bp, Homo sapiens
ccataagcatcacgg

SEQ ID NO: 1252581 - DNA, 15 bp, Homo sapiens
accataagcatcacg

SEQ ID NO: 1252582 - DNA, 15 bp, Homo sapiens
caccataagcatcac

SEQ ID NO: 1252583 - DNA, 15 bp, Homo sapiens
ccaccataagcatca

SEQ ID NO: 1252584 - DNA, 15 bp, Homo sapiens
cccaccataagcatc

SEQ ID NO: 1252585 - DNA, 15 bp, Homo sapiens
tcccaccataagcat

SEQ ID NO: 1252586 - DNA, 15 bp, Homo sapiens
atcccaccataagca

SEQ ID NO: 1252587 - DNA, 15 bp, Homo sapiens
catcccaccataagc

SEQ ID NO: 1252588 - DNA, 15 bp, Homo sapiens
tcatcccaccataag

SEQ ID NO: 1252589 - DNA, 15 bp, Homo sapiens
ctcatcccaccataa

SEQ ID NO: 1252590 - DNA, 15 bp, Homo sapiens
tctcatcccaccata

SEQ ID NO: 1252591 - DNA, 15 bp, Homo sapiens
atctcatcccaccat

SEQ ID NO: 1252592 - DNA, 15 bp, Homo sapiens
gatctcatcccacca

SEQ ID NO: 1252593 - DNA, 15 bp, Homo sapiens
tgatctcatcccacc

SEQ ID NO: 1252594 - DNA, 15 bp, Homo sapiens
ctgatctcatcccac

SEQ ID NO: 1252595 - DNA, 15 bp, Homo sapiens
gctgatctcatccca

SEQ ID NO: 1252596 - DNA, 15 bp, Homo sapiens
tgctgatctcatccc

SEQ ID NO: 1252597 - DNA, 15 bp, Homo sapiens
atgctgatctcatcc

SEQ ID NO: 1252598 - DNA, 15 bp, Homo sapiens
catgctgatctcatc

SEQ ID NO: 1252599 - DNA, 15 bp, Homo sapiens
ccatgctgatctcat

SEQ ID NO: 1252600 - DNA, 15 bp, Homo sapiens
tccatgctgatctca

SEQ ID NO: 1252601 - DNA, 15 bp, Homo sapiens
atccatgctgatctc

SEQ ID NO: 1252602 - DNA, 15 bp, Homo sapiens
catccatgctgatct

SEQ ID NO: 1252603 - DNA, 15 bp, Homo sapiens
ccatccatgctgatc

SEQ ID NO: 1252604 - DNA, 15 bp, Homo sapiens
tccatccatgctgat

SEQ ID NO: 1252605 - DNA, 15 bp, Homo sapiens
ttccatccatgctga

SEQ ID NO: 1252606 - DNA, 15 bp, Homo sapiens
gttccatccatgctg

SEQ ID NO: 1252607 - DNA, 15 bp, Homo sapiens
tgttccatccatgct

SEQ ID NO: 1252608 - DNA, 15 bp, Homo sapiens
ttgttccatccatgc

SEQ ID NO: 1252609 - DNA, 15 bp, Homo sapiens
cttgttccatccatg

SEQ ID NO: 1252610 - DNA, 15 bp, Homo sapiens
ccttgttccatccat

SEQ ID NO: 1252611 - DNA, 15 bp, Homo sapiens
gccttgttccatcca

SEQ ID NO: 1252612 - DNA, 15 bp, Homo sapiens
ggccttgttccatcc

SEQ ID NO: 1252613 - DNA, 15 bp, Homo sapiens
gggccttgttccatc

SEQ ID NO: 1252614 - DNA, 15 bp, Homo sapiens
agggccttgttccat

SEQ ID NO: 1252615 - DNA, 15 bp, Homo sapiens
cagggccttgttcca

SEQ ID NO: 1252616 - DNA, 15 bp, Homo sapiens
ccagggccttgttcc

SEQ ID NO: 1252617 - DNA, 15 bp, Homo sapiens
tccagggccttgttc

SEQ ID NO: 1252618 - DNA, 15 bp, Homo sapiens
ttccagggccttgtt

SEQ ID NO: 1252619 - DNA, 15 bp, Homo sapiens
cttccagggccttgt

SEQ ID NO: 1252620 - DNA, 15 bp, Homo sapiens
ccttccagggccttg

SEQ ID NO: 1252621 - DNA, 15 bp, Homo sapiens
cccttccagggcctt

SEQ ID NO: 1252622 - DNA, 15 bp, Homo sapiens
gcccttccagggcct

SEQ ID NO: 1252623 - DNA, 15 bp, Homo sapiens
ggcccttccagggcc

SEQ ID NO: 1252624 - DNA, 15 bp, Homo sapiens
gggcccttccagggc

SEQ ID NO: 1252625 - DNA, 15 bp, Homo sapiens
tgggcccttccaggg

SEQ ID NO: 1252626 - DNA, 15 bp, Homo sapiens
atgggcccttccagg

SEQ ID NO: 1252627 - DNA, 15 bp, Homo sapiens
catgggcccttccag

SEQ ID NO: 1252628 - DNA, 15 bp, Homo sapiens
gcatgggcccttcca

SEQ ID NO: 1252629 - DNA, 15 bp, Homo sapiens
ggcatgggcccttcc

SEQ ID NO: 1252630 - DNA, 15 bp, Homo sapiens
tggcatgggcccttc

SEQ ID NO: 1252631 - DNA, 15 bp, Homo sapiens
atggcatgggccctt

SEQ ID NO: 1252632 - DNA, 15 bp, Homo sapiens
catggcatgggccct

SEQ ID NO: 1252633 - DNA, 15 bp, Homo sapiens
ccatggcatgggccc

SEQ ID NO: 1252634 - DNA, 15 bp, Homo sapiens
accatggcatgggcc

SEQ ID NO: 1252635 - DNA, 15 bp, Homo sapiens
gaccatggcatgggc

SEQ ID NO: 1252636 - DNA, 15 bp, Homo sapiens
tgaccatggcatggg

SEQ ID NO: 1252637 - DNA, 15 bp, Homo sapiens
atgaccatggcatgg

SEQ ID NO: 1252638 - DNA, 15 bp, Homo sapiens
gatgaccatggcatg

SEQ ID NO: 1252639 - DNA, 15 bp, Homo sapiens
cgatgaccatggcat

SEQ ID NO: 1252640 - DNA, 15 bp, Homo sapiens
tcgatgaccatggca

SEQ ID NO: 1252641 - DNA, 15 bp, Homo sapiens
gtcgatgaccatggc

SEQ ID NO: 1252642 - DNA, 15 bp, Homo sapiens
tgtcgatgaccatgg

SEQ ID NO: 1252643 - DNA, 15 bp, Homo sapiens
ctgtcgatgaccatg

SEQ ID NO: 1252644 - DNA, 15 bp, Homo sapiens
gctgtcgatgaccat

SEQ ID NO: 1252645 - DNA, 15 bp, Homo sapiens
tgctgtcgatgacca

SEQ ID NO: 1252646 - DNA, 15 bp, Homo sapiens
ttgctgtcgatgacc

SEQ ID NO: 1252647 - DNA, 15 bp, Homo sapiens
tttgctgtcgatgac

SEQ ID NO: 1252648 - DNA, 15 bp, Homo sapiens
ctttgctgtcgatga

SEQ ID NO: 1252649 - DNA, 15 bp, Homo sapiens
gctttgctgtcgatg

SEQ ID NO: 1252650 - DNA, 15 bp, Homo sapiens
ggctttgctgtcgat

SEQ ID NO: 1252651 - DNA, 15 bp, Homo sapiens
tggctttgctgtcga

SEQ ID NO: 1252652 - DNA, 15 bp, Homo sapiens
gtggctttgctgtcg

SEQ ID NO: 1252653 - DNA, 15 bp, Homo sapiens
agtggctttgctgtc

SEQ ID NO: 1252654 - DNA, 15 bp, Homo sapiens
gagtggctttgctgt

SEQ ID NO: 1252655 - DNA, 15 bp, Homo sapiens
agagtggctttgctg

SEQ ID NO: 1252656 - DNA, 15 bp, Homo sapiens
cagagtggctttgct

SEQ ID NO: 1252657 - DNA, 15 bp, Homo sapiens
gcagagtggctttgc

SEQ ID NO: 1252658 - DNA, 15 bp, Homo sapiens
tgcagagtggctttg

SEQ ID NO: 1252659 - DNA, 15 bp, Homo sapiens
ctgcagagtggcttt

SEQ ID NO: 1252660 - DNA, 15 bp, Homo sapiens
tctgcagagtggctt

SEQ ID NO: 1252661 - DNA, 15 bp, Homo sapiens
gtctgcagagtggct

SEQ ID NO: 1252662 - DNA, 15 bp, Homo sapiens
tgtctgcagagtggc

SEQ ID NO: 1252663 - DNA, 15 bp, Homo sapiens
ctgtctgcagagtgg

SEQ ID NO: 1252664 - DNA, 15 bp, Homo sapiens
tctgtctgcagagtg

SEQ ID NO: 1252665 - DNA, 15 bp, Homo sapiens
atctgtctgcagagt

SEQ ID NO: 1252666 - DNA, 15 bp, Homo sapiens
catctgtctgcagag

SEQ ID NO: 1252667 - DNA, 15 bp, Homo sapiens
gcatctgtctgcaga

SEQ ID NO: 1252668 - DNA, 15 bp, Homo sapiens
agcatctgtctgcag

SEQ ID NO: 1252669 - DNA, 15 bp, Homo sapiens
aagcatctgtctgca

SEQ ID NO: 1252670 - DNA, 15 bp, Homo sapiens
gaagcatctgtctgc

SEQ ID NO: 1252671 - DNA, 15 bp, Homo sapiens
tgaagcatctgtctg

SEQ ID NO: 1252672 - DNA, 15 bp, Homo sapiens
ctgaagcatctgtct

SEQ ID NO: 1252673 - DNA, 15 bp, Homo sapiens
actgaagcatctgtc

SEQ ID NO: 1252674 - DNA, 15 bp, Homo sapiens
cactgaagcatctgt

SEQ ID NO: 1252675 - DNA, 15 bp, Homo sapiens
tcactgaagcatctg

SEQ ID NO: 1252676 - DNA, 15 bp, Homo sapiens
ttcactgaagcatct

SEQ ID NO: 1252677 - DNA, 15 bp, Homo sapiens
attcactgaagcatc

SEQ ID NO: 1252678 - DNA, 15 bp, Homo sapiens
aattcactgaagcat

SEQ ID NO: 1252679 - DNA, 15 bp, Homo sapiens
caattcactgaagca

SEQ ID NO: 1252680 - DNA, 15 bp, Homo sapiens
ccaattcactgaagc

SEQ ID NO: 1252681 - DNA, 15 bp, Homo sapiens
accaattcactgaag

SEQ ID NO: 1252682 - DNA, 15 bp, Homo sapiens
taccaattcactgaa

SEQ ID NO: 1252683 - DNA, 15 bp, Homo sapiens
ctaccaattcactga

SEQ ID NO: 1252684 - DNA, 15 bp, Homo sapiens
tctaccaattcactg

SEQ ID NO: 1252685 - DNA, 15 bp, Homo sapiens
ttctaccaattcact

SEQ ID NO: 1252686 - DNA, 15 bp, Homo sapiens
tttctaccaattcac

SEQ ID NO: 1252687 - DNA, 15 bp, Homo sapiens
ttttctaccaattca

SEQ ID NO: 1252688 - DNA, 15 bp, Homo sapiens
attttctaccaattc

SEQ ID NO: 1252689 - DNA, 15 bp, Homo sapiens
aattttctaccaatt

SEQ ID NO: 1252690 - DNA, 15 bp, Homo sapiens
gaattttctaccaat

SEQ ID NO: 1252691 - DNA, 15 bp, Homo sapiens
agaattttctaccaa

SEQ ID NO: 1252692 - DNA, 15 bp, Homo sapiens
cagaattttctacca

SEQ ID NO: 1252693 - DNA, 15 bp, Homo sapiens
gcagaattttctacc

SEQ ID NO: 1252694 - DNA, 15 bp, Homo sapiens
tgcagaattttctac

SEQ ID NO: 1252695 - DNA, 15 bp, Homo sapiens
ttgcagaattttcta

SEQ ID NO: 1252696 - DNA, 15 bp, Homo sapiens
gttgcagaattttct

SEQ ID NO: 1252697 - DNA, 15 bp, Homo sapiens
ggttgcagaattttc

SEQ ID NO: 1252698 - DNA, 15 bp, Homo sapiens
tggttgcagaatttt

SEQ ID NO: 1252699 - DNA, 15 bp, Homo sapiens
ctggttgcagaattt

SEQ ID NO: 1252700 - DNA, 15 bp, Homo sapiens
tctggttgcagaatt

SEQ ID NO: 1252701 - DNA, 15 bp, Homo sapiens
ttctggttgcagaat

SEQ ID NO: 1252702 - DNA, 15 bp, Homo sapiens
attctggttgcagaa

SEQ ID NO: 1252703 - DNA, 15 bp, Homo sapiens
cattctggttgcaga

SEQ ID NO: 1252704 - DNA, 15 bp, Homo sapiens
gcattctggttgcag

SEQ ID NO: 1252705 - DNA, 15 bp, Homo sapiens
ggcattctggttgca

SEQ ID NO: 1252706 - DNA, 15 bp, Homo sapiens
gggcattctggttgc

SEQ ID NO: 1252707 - DNA, 15 bp, Homo sapiens
cgggcattctggttg

SEQ ID NO: 1252708 - DNA, 15 bp, Homo sapiens
ccgggcattctggtt

SEQ ID NO: 1252709 - DNA, 15 bp, Homo sapiens
cccgggcattctggt

SEQ ID NO: 1252710 - DNA, 15 bp, Homo sapiens
ccccgggcattctgg

SEQ ID NO: 1252711 - DNA, 15 bp, Homo sapiens
gccccgggcattctg

SEQ ID NO: 1252712 - DNA, 15 bp, Homo sapiens
agccccgggcattct

SEQ ID NO: 1252713 - DNA, 15 bp, Homo sapiens
gagccccgggcattc

SEQ ID NO: 1252714 - DNA, 15 bp, Homo sapiens
ggagccccgggcatt

SEQ ID NO: 1252715 - DNA, 15 bp, Homo sapiens
aggagccccgggcat

SEQ ID NO: 1252716 - DNA, 15 bp, Homo sapiens
caggagccccgggca

SEQ ID NO: 1252717 - DNA, 15 bp, Homo sapiens
tcaggagccccgggc

SEQ ID NO: 1252718 - DNA, 15 bp, Homo sapiens
ctcaggagccccggg

SEQ ID NO: 1252719 - DNA, 15 bp, Homo sapiens
cctcaggagccccgg

SEQ ID NO: 1252720 - DNA, 15 bp, Homo sapiens
ccctcaggagccccg

SEQ ID NO: 1252721 - DNA, 15 bp, Homo sapiens
gccctcaggagcccc

SEQ ID NO: 1252722 - DNA, 15 bp, Homo sapiens
ggccctcaggagccc

SEQ ID NO: 1252723 - DNA, 15 bp, Homo sapiens
aggccctcaggagcc

SEQ ID NO: 1252724 - DNA, 15 bp, Homo sapiens
taggccctcaggagc

SEQ ID NO: 1252725 - DNA, 15 bp, Homo sapiens
ttaggccctcaggag

SEQ ID NO: 1252726 - DNA, 15 bp, Homo sapiens
cttaggccctcagga

SEQ ID NO: 1252727 - DNA, 15 bp, Homo sapiens
gcttaggccctcagg

SEQ ID NO: 1252728 - DNA, 15 bp, Homo sapiens
ggcttaggccctcag

SEQ ID NO: 1252729 - DNA, 15 bp, Homo sapiens
gggcttaggccctca

SEQ ID NO: 1252730 - DNA, 15 bp, Homo sapiens
tgggcttaggccctc

SEQ ID NO: 1252731 - DNA, 15 bp, Homo sapiens
ctgggcttaggccct

SEQ ID NO: 1252732 - DNA, 15 bp, Homo sapiens
gctgggcttaggccc

SEQ ID NO: 1252733 - DNA, 15 bp, Homo sapiens
ggctgggcttaggcc

SEQ ID NO: 1252734 - DNA, 15 bp, Homo sapiens
gggctgggcttaggc

SEQ ID NO: 1252735 - DNA, 15 bp, Homo sapiens
tgggctgggcttagg

SEQ ID NO: 1252736 - DNA, 15 bp, Homo sapiens
ctgggctgggcttag

SEQ ID NO: 1252737 - DNA, 15 bp, Homo sapiens
cctgggctgggctta

SEQ ID NO: 1252738 - DNA, 15 bp, Homo sapiens
ccctgggctgggctt

SEQ ID NO: 1252739 - DNA, 15 bp, Homo sapiens
accctgggctgggct

SEQ ID NO: 1252740 - DNA, 15 bp, Homo sapiens
aaccctgggctgggc

SEQ ID NO: 1252741 - DNA, 15 bp, Homo sapiens
gaaccctgggctggg

SEQ ID NO: 1252742 - DNA, 15 bp, Homo sapiens
agaaccctgggctgg

SEQ ID NO: 1252743 - DNA, 15 bp, Homo sapiens
cagaaccctgggctg

SEQ ID NO: 1252744 - DNA, 15 bp, Homo sapiens
ccagaaccctgggct

SEQ ID NO: 1252745 - DNA, 15 bp, Homo sapiens
tccagaaccctgggc

SEQ ID NO: 1252746 - DNA, 15 bp, Homo sapiens
ttccagaaccctggg

SEQ ID NO: 1252747 - DNA, 15 bp, Homo sapiens
cttccagaaccctgg

SEQ ID NO: 1252748 - DNA, 15 bp, Homo sapiens
gcttccagaaccctg

SEQ ID NO: 1252749 - DNA, 15 bp, Homo sapiens
ggcttccagaaccct

SEQ ID NO: 1252750 - DNA, 15 bp, Homo sapiens
tggcttccagaaccc

SEQ ID NO: 1252751 - DNA, 15 bp, Homo sapiens
gtggcttccagaacc

SEQ ID NO: 1252752 - DNA, 15 bp, Homo sapiens
agtggcttccagaac

SEQ ID NO: 1252753 - DNA, 15 bp, Homo sapiens
gagtggcttccagaa

SEQ ID NO: 1252754 - DNA, 15 bp, Homo sapiens
agagtggcttccaga

SEQ ID NO: 1252755 - DNA, 15 bp, Homo sapiens
cagagtggcttccag

SEQ ID NO: 1252756 - DNA, 15 bp, Homo sapiens
tcagagtggcttcca

SEQ ID NO: 1252757 - DNA, 15 bp, Homo sapiens
gtcagagtggcttcc

SEQ ID NO: 1252758 - DNA, 15 bp, Homo sapiens
agtcagagtggcttc

SEQ ID NO: 1252759 - DNA, 15 bp, Homo sapiens
aagtcagagtggctt

SEQ ID NO: 1252760 - DNA, 15 bp, Homo sapiens
gaagtcagagtggct

SEQ ID NO: 1252761 - DNA, 15 bp, Homo sapiens
agaagtcagagtggc

SEQ ID NO: 1252762 - DNA, 15 bp, Homo sapiens
aagaagtcagagtgg

SEQ ID NO: 1252763 - DNA, 15 bp, Homo sapiens
caagaagtcagagtg

SEQ ID NO: 1252764 - DNA, 15 bp, Homo sapiens
ccaagaagtcagagt

SEQ ID NO: 1252765 - DNA, 15 bp, Homo sapiens
cccaagaagtcagag

SEQ ID NO: 1252766 - DNA, 15 bp, Homo sapiens
tcccaagaagtcaga

SEQ ID NO: 1252767 - DNA, 15 bp, Homo sapiens
ctcccaagaagtcag

SEQ ID NO: 1252768 - DNA, 15 bp, Homo sapiens
actcccaagaagtca

SEQ ID NO: 1252769 - DNA, 15 bp, Homo sapiens
cactcccaagaagtc

SEQ ID NO: 1252770 - DNA, 15 bp, Homo sapiens
ccactcccaagaagt

SEQ ID NO: 1252771 - DNA, 15 bp, Homo sapiens
tccactcccaagaag

SEQ ID NO: 1252772 - DNA, 15 bp, Homo sapiens
ttccactcccaagaa

SEQ ID NO: 1252773 - DNA, 15 bp, Homo sapiens
cttccactcccaaga

SEQ ID NO: 1252774 - DNA, 15 bp, Homo sapiens
acttccactcccaag

SEQ ID NO: 1252775 - DNA, 15 bp, Homo sapiens
aacttccactcccaa

SEQ ID NO: 1252776 - DNA, 15 bp, Homo sapiens
caacttccactccca

SEQ ID NO: 1252777 - DNA, 15 bp, Homo sapiens
ccaacttccactccc

SEQ ID NO: 1252778 - DNA, 15 bp, Homo sapiens
gccaacttccactcc

SEQ ID NO: 1252779 - DNA, 15 bp, Homo sapiens
tgccaacttccactc

SEQ ID NO: 1252780 - DNA, 15 bp, Homo sapiens
ctgccaacttccact

SEQ ID NO: 1252781 - DNA, 15 bp, Homo sapiens
cctgccaacttccac

SEQ ID NO: 1252782 - DNA, 15 bp, Homo sapiens
tcctgccaacttcca

SEQ ID NO: 1252783 - DNA, 15 bp, Homo sapiens
gtcctgccaacttcc

SEQ ID NO: 1252784 - DNA, 15 bp, Homo sapiens
agtcctgccaacttc

SEQ ID NO: 1252785 - DNA, 15 bp, Homo sapiens
gagtcctgccaactt

SEQ ID NO: 1252786 - DNA, 15 bp, Homo sapiens
agagtcctgccaact

SEQ ID NO: 1252787 - DNA, 15 bp, Homo sapiens
aagagtcctgccaac

SEQ ID NO: 1252788 - DNA, 15 bp, Homo sapiens
gaagagtcctgccaa

SEQ ID NO: 1252789 - DNA, 15 bp, Homo sapiens
ggaagagtcctgcca

SEQ ID NO: 1252790 - DNA, 15 bp, Homo sapiens
aggaagagtcctgcc

SEQ ID NO: 1252791 - DNA, 15 bp, Homo sapiens
caggaagagtcctgc

SEQ ID NO: 1252792 - DNA, 15 bp, Homo sapiens
ccaggaagagtcctg

SEQ ID NO: 1252793 - DNA, 15 bp, Homo sapiens
cccaggaagagtcct

SEQ ID NO: 1252794 - DNA, 15 bp, Homo sapiens
tcccaggaagagtcc

SEQ ID NO: 1252795 - DNA, 15 bp, Homo sapiens
ttcccaggaagagtc

SEQ ID NO: 1252796 - DNA, 15 bp, Homo sapiens
cttcccaggaagagt

SEQ ID NO: 1252797 - DNA, 15 bp, Homo sapiens
tcttcccaggaagag

SEQ ID NO: 1252798 - DNA, 15 bp, Homo sapiens
ttcttcccaggaaga

SEQ ID NO: 1252799 - DNA, 15 bp, Homo sapiens
cttcttcccaggaag

SEQ ID NO: 1252800 - DNA, 15 bp, Homo sapiens
gcttcttcccaggaa

SEQ ID NO: 1252801 - DNA, 15 bp, Homo sapiens
cgcttcttcccagga

SEQ ID NO: 1252802 - DNA, 15 bp, Homo sapiens
ccgcttcttcccagg

SEQ ID NO: 1252803 - DNA, 15 bp, Homo sapiens
tccgcttcttcccag

SEQ ID NO: 1252804 - DNA, 15 bp, Homo sapiens
ctccgcttcttccca

SEQ ID NO: 1252805 - DNA, 15 bp, Homo sapiens
cctccgcttcttccc

SEQ ID NO: 1252806 - DNA, 15 bp, Homo sapiens
ccctccgcttcttcc

SEQ ID NO: 1252807 - DNA, 15 bp, Homo sapiens
accctccgcttcttc

SEQ ID NO: 1252808 - DNA, 15 bp, Homo sapiens
caccctccgcttctt

SEQ ID NO: 1252809 - DNA, 15 bp, Homo sapiens
ccaccctccgcttct

SEQ ID NO: 1252810 - DNA, 15 bp, Homo sapiens
cccaccctccgcttc

SEQ ID NO: 1252811 - DNA, 15 bp, Homo sapiens
ccccaccctccgctt

SEQ ID NO: 1252812 - DNA, 15 bp, Homo sapiens
tccccaccctccgct

SEQ ID NO: 1252813 - DNA, 15 bp, Homo sapiens
atccccaccctccgc

SEQ ID NO: 1252814 - DNA, 15 bp, Homo sapiens
catccccaccctccg

SEQ ID NO: 1252815 - DNA, 15 bp, Homo sapiens
tcatccccaccctcc

SEQ ID NO: 1252816 - DNA, 15 bp, Homo sapiens
ctcatccccaccctc

SEQ ID NO: 1252817 - DNA, 15 bp, Homo sapiens
tctcatccccaccct

SEQ ID NO: 1252818 - DNA, 15 bp, Homo sapiens
ctctcatccccaccc

SEQ ID NO: 1252819 - DNA, 15 bp, Homo sapiens
cctctcatccccacc

SEQ ID NO: 1252820 - DNA, 15 bp, Homo sapiens
tcctctcatccccac

SEQ ID NO: 1252821 - DNA, 15 bp, Homo sapiens
gtcctctcatcccca

SEQ ID NO: 1252822 - DNA, 15 bp, Homo sapiens
tgtcctctcatcccc

SEQ ID NO: 1252823 - DNA, 15 bp, Homo sapiens
ctgtcctctcatccc

SEQ ID NO: 1252824 - DNA, 15 bp, Homo sapiens
actgtcctctcatcc

SEQ ID NO: 1252825 - DNA, 15 bp, Homo sapiens
aactgtcctctcatc

SEQ ID NO: 1252826 - DNA, 15 bp, Homo sapiens
gaactgtcctctcat

SEQ ID NO: 1252827 - DNA, 15 bp, Homo sapiens
tgaactgtcctctca

SEQ ID NO: 1252828 - DNA, 15 bp, Homo sapiens
ctgaactgtcctctc

SEQ ID NO: 1252829 - DNA, 15 bp, Homo sapiens
cctgaactgtcctct

SEQ ID NO: 1252830 - DNA, 15 bp, Homo sapiens
tcctgaactgtcctc

SEQ ID NO: 1252831 - DNA, 15 bp, Homo sapiens
ctcctgaactgtcct

SEQ ID NO: 1252832 - DNA, 15 bp, Homo sapiens
gctcctgaactgtcc

SEQ ID NO: 1252833 - DNA, 15 bp, Homo sapiens
ggctcctgaactgtc

SEQ ID NO: 1252834 - DNA, 15 bp, Homo sapiens
gggctcctgaactgt

SEQ ID NO: 1252835 - DNA, 15 bp, Homo sapiens
tgggctcctgaactg

SEQ ID NO: 1252836 - DNA, 15 bp, Homo sapiens
gtgggctcctgaact

SEQ ID NO: 1252837 - DNA, 15 bp, Homo sapiens
ggtgggctcctgaac

SEQ ID NO: 1252838 - DNA, 15 bp, Homo sapiens
gggtgggctcctgaa

SEQ ID NO: 1252839 - DNA, 15 bp, Homo sapiens
tgggtgggctcctga

SEQ ID NO: 1252840 - DNA, 15 bp, Homo sapiens
ctgggtgggctcctg

SEQ ID NO: 1252841 - DNA, 15 bp, Homo sapiens
tctgggtgggctcct

SEQ ID NO: 1252842 - DNA, 15 bp, Homo sapiens
gtctgggtgggctcc

SEQ ID NO: 1252843 - DNA, 15 bp, Homo sapiens
ggtctgggtgggctc

SEQ ID NO: 1252844 - DNA, 15 bp, Homo sapiens
gggtctgggtgggct

SEQ ID NO: 1252845 - DNA, 15 bp, Homo sapiens
tgggtctgggtgggc

SEQ ID NO: 1252846 - DNA, 15 bp, Homo sapiens
gtgggtctgggtggg

SEQ ID NO: 1252847 - DNA, 15 bp, Homo sapiens
tgtgggtctgggtgg

SEQ ID NO: 1252848 - DNA, 15 bp, Homo sapiens
ctgtgggtctgggtg

SEQ ID NO: 1252849 - DNA, 15 bp, Homo sapiens
cctgtgggtctgggt

SEQ ID NO: 1252850 - DNA, 15 bp, Homo sapiens
tcctgtgggtctggg

SEQ ID NO: 1252851 - DNA, 15 bp, Homo sapiens
ctcctgtgggtctgg

SEQ ID NO: 1252852 - DNA, 15 bp, Homo sapiens
cctcctgtgggtctg

SEQ ID NO: 1252853 - DNA, 15 bp, Homo sapiens
tcctcctgtgggtct

SEQ ID NO: 1252854 - DNA, 15 bp, Homo sapiens
ttcctcctgtgggtc

SEQ ID NO: 1252855 - DNA, 15 bp, Homo sapiens
tttcctcctgtgggt

SEQ ID NO: 1252856 - DNA, 15 bp, Homo sapiens
gtttcctcctgtggg

SEQ ID NO: 1252857 - DNA, 15 bp, Homo sapiens
agtttcctcctgtgg

SEQ ID NO: 1252858 - DNA, 15 bp, Homo sapiens
tagtttcctcctgtg

SEQ ID NO: 1252859 - DNA, 15 bp, Homo sapiens
ctagtttcctcctgt

SEQ ID NO: 1252860 - DNA, 15 bp, Homo sapiens
cctagtttcctcctg

SEQ ID NO: 1252861 - DNA, 15 bp, Homo sapiens
ccctagtttcctcct

SEQ ID NO: 1252862 - DNA, 15 bp, Homo sapiens
cccctagtttcctcc

SEQ ID NO: 1252863 - DNA, 15 bp, Homo sapiens
tcccctagtttcctc

SEQ ID NO: 1252864 - DNA, 15 bp, Homo sapiens
ctcccctagtttcct

SEQ ID NO: 1252865 - DNA, 15 bp, Homo sapiens
actcccctagtttcc

SEQ ID NO: 1252866 - DNA, 15 bp, Homo sapiens
gactcccctagtttc

SEQ ID NO: 1252867 - DNA, 15 bp, Homo sapiens
tgactcccctagttt

SEQ ID NO: 1252868 - DNA, 15 bp, Homo sapiens
atgactcccctagtt

SEQ ID NO: 1252869 - DNA, 15 bp, Homo sapiens
catgactcccctagt

SEQ ID NO: 1252870 - DNA, 15 bp, Homo sapiens
gcatgactcccctag

SEQ ID NO: 1252871 - DNA, 15 bp, Homo sapiens
cgcatgactccccta

SEQ ID NO: 1252872 - DNA, 15 bp, Homo sapiens
ccgcatgactcccct

SEQ ID NO: 1252873 - DNA, 15 bp, Homo sapiens
cccgcatgactcccc

SEQ ID NO: 1252874 - DNA, 15 bp, Homo sapiens
ccccgcatgactccc

SEQ ID NO: 1252875 - DNA, 15 bp, Homo sapiens
accccgcatgactcc

SEQ ID NO: 1252876 - DNA, 15 bp, Homo sapiens
gaccccgcatgactc

SEQ ID NO: 1252877 - DNA, 15 bp, Homo sapiens
cttagaggaactcgc

SEQ ID NO: 1252878 - DNA, 15 bp, Homo sapiens
tcttagaggaactcg

SEQ ID NO: 1252879 - DNA, 15 bp, Homo sapiens
ctcttagaggaactc

SEQ ID NO: 1252880 - DNA, 15 bp, Homo sapiens
cctcttagaggaact

SEQ ID NO: 1252881 - DNA, 15 bp, Homo sapiens
acctcttagaggaac

SEQ ID NO: 1252882 - DNA, 15 bp, Homo sapiens
gacctcttagaggaa

SEQ ID NO: 1252883 - DNA, 15 bp, Homo sapiens
tgacctcttagagga

SEQ ID NO: 1252884 - DNA, 15 bp, Homo sapiens
ctgacctcttagagg

SEQ ID NO: 1252885 - DNA, 15 bp, Homo sapiens
tctgacctcttagag

SEQ ID NO: 1252886 - DNA, 15 bp, Homo sapiens
ctctgacctcttaga

SEQ ID NO: 1252887 - DNA, 15 bp, Homo sapiens
cctctgacctcttag

SEQ ID NO: 1252888 - DNA, 15 bp, Homo sapiens
tcctctgacctctta

SEQ ID NO: 1252889 - DNA, 15 bp, Homo sapiens
ctcctctgacctctt

SEQ ID NO: 1252890 - DNA, 15 bp, Homo sapiens
cctcctctgacctct

SEQ ID NO: 1252891 - DNA, 15 bp, Homo sapiens
gcctcctctgacctc

SEQ ID NO: 1252892 - DNA, 15 bp, Homo sapiens
cgcctcctctgacct

SEQ ID NO: 1252893 - DNA, 15 bp, Homo sapiens
gcgcctcctctgacc

SEQ ID NO: 1252894 - DNA, 15 bp, Homo sapiens
tgcgcctcctctgac

SEQ ID NO: 1252895 - DNA, 15 bp, Homo sapiens
ttgcgcctcctctga

SEQ ID NO: 1252896 - DNA, 15 bp, Homo sapiens
cttgcgcctcctctg

SEQ ID NO: 1252897 - DNA, 15 bp, Homo sapiens
ccttgcgcctcctct

SEQ ID NO: 1252898 - DNA, 15 bp, Homo sapiens
cccttgcgcctcctc

SEQ ID NO: 1252899 - DNA, 15 bp, Homo sapiens
tcccttgcgcctcct

SEQ ID NO: 1252900 - DNA, 15 bp, Homo sapiens
atcccttgcgcctcc

SEQ ID NO: 1252901 - DNA, 15 bp, Homo sapiens
gatcccttgcgcctc

SEQ ID NO: 1252902 - DNA, 15 bp, Homo sapiens
cgatcccttgcgcct

SEQ ID NO: 1252903 - DNA, 15 bp, Homo sapiens
tcgatcccttgcgcc

SEQ ID NO: 1252904 - DNA, 15 bp, Homo sapiens
gtcgatcccttgcgc

SEQ ID NO: 1252905 - DNA, 15 bp, Homo sapiens
ggtcgatcccttgcg

SEQ ID NO: 1252906 - DNA, 15 bp, Homo sapiens
tggtcgatcccttgc

SEQ ID NO: 1252907 - DNA, 15 bp, Homo sapiens
ctggtcgatcccttg

SEQ ID NO: 1252908 - DNA, 15 bp, Homo sapiens
tctggtcgatccctt

SEQ ID NO: 1252909 - DNA, 15 bp, Homo sapiens
ctctggtcgatccct

SEQ ID NO: 1252910 - DNA, 15 bp, Homo sapiens
tctctggtcgatccc

SEQ ID NO: 1252911 - DNA, 15 bp, Homo sapiens
gtctctggtcgatcc

SEQ ID NO: 1252912 - DNA, 15 bp, Homo sapiens
tgtctctggtcgatc

SEQ ID NO: 1252913 - DNA, 15 bp, Homo sapiens
ctgtctctggtcgat

SEQ ID NO: 1252914 - DNA, 15 bp, Homo sapiens
actgtctctggtcga

SEQ ID NO: 1252915 - DNA, 15 bp, Homo sapiens
cactgtctctggtcg

SEQ ID NO: 1252916 - DNA, 15 bp, Homo sapiens
tcactgtctctggtc

SEQ ID NO: 1252917 - DNA, 15 bp, Homo sapiens
ctcactgtctctggt

SEQ ID NO: 1252918 - DNA, 15 bp, Homo sapiens
cctcactgtctctgg

SEQ ID NO: 1252919 - DNA, 15 bp, Homo sapiens
ccctcactgtctctg

SEQ ID NO: 1252920 - DNA, 15 bp, Homo sapiens
gccctcactgtctct

SEQ ID NO: 1252921 - DNA, 15 bp, Homo sapiens
cgccctcactgtctc

SEQ ID NO: 1252922 - DNA, 15 bp, Homo sapiens
acgccctcactgtct

SEQ ID NO: 1252923 - DNA, 15 bp, Homo sapiens
gacgccctcactgtc

SEQ ID NO: 1252924 - DNA, 15 bp, Homo sapiens
tgacgccctcactgt

SEQ ID NO: 1252925 - DNA, 15 bp, Homo sapiens
ctgacgccctcactg

SEQ ID NO: 1252926 - DNA, 15 bp, Homo sapiens
cctgacgccctcact

SEQ ID NO: 1252927 - DNA, 15 bp, Homo sapiens
gcctgacgccctcac

SEQ ID NO: 1252928 - DNA, 15 bp, Homo sapiens
agcctgacgccctca

SEQ ID NO: 1252929 - DNA, 15 bp, Homo sapiens
gagcctgacgccctc

SEQ ID NO: 1252930 - DNA, 15 bp, Homo sapiens
ggagcctgacgccct

SEQ ID NO: 1252931 - DNA, 15 bp, Homo sapiens
tggagcctgacgccc

SEQ ID NO: 1252932 - DNA, 15 bp, Homo sapiens
ctggagcctgacgcc

SEQ ID NO: 1252933 - DNA, 15 bp, Homo sapiens
actggagcctgacgc

SEQ ID NO: 1252934 - DNA, 15 bp, Homo sapiens
aactggagcctgacg

SEQ ID NO: 1252935 - DNA, 15 bp, Homo sapiens
caactggagcctgac

SEQ ID NO: 1252936 - DNA, 15 bp, Homo sapiens
tcaactggagcctga

SEQ ID NO: 1252937 - DNA, 15 bp, Homo sapiens
ctcaactggagcctg

SEQ ID NO: 1252938 - DNA, 15 bp, Homo sapiens
actcaactggagcct

SEQ ID NO: 1252939 - DNA, 15 bp, Homo sapiens
cactcaactggagcc

SEQ ID NO: 1252940 - DNA, 15 bp, Homo sapiens
ccactcaactggagc

SEQ ID NO: 1252941 - DNA, 15 bp, Homo sapiens
cccactcaactggag

SEQ ID NO: 1252942 - DNA, 15 bp, Homo sapiens
ccccactcaactgga

SEQ ID NO: 1252943 - DNA, 15 bp, Homo sapiens
tccccactcaactgg

SEQ ID NO: 1252944 - DNA, 15 bp, Homo sapiens
ggtccccactcaact

SEQ ID NO: 1252945 - DNA, 15 bp, Homo sapiens
tggtccccactcaac

SEQ ID NO: 1252946 - DNA, 15 bp, Homo sapiens
ttggtccccactcaa

SEQ ID NO: 1252947 - DNA, 15 bp, Homo sapiens
attggtccccactca

SEQ ID NO: 1252948 - DNA, 15 bp, Homo sapiens
gattggtccccactc

SEQ ID NO: 1252949 - DNA, 15 bp, Homo sapiens
ggattggtccccact

SEQ ID NO: 1252950 - DNA, 15 bp, Homo sapiens
aggattggtccccac

SEQ ID NO: 1252951 - DNA, 15 bp, Homo sapiens
aaggattggtcccca

SEQ ID NO: 1252952 - DNA, 15 bp, Homo sapiens
caaggattggtcccc

SEQ ID NO: 1252953 - DNA, 15 bp, Homo sapiens
acaaggattggtccc

SEQ ID NO: 1252954 - DNA, 15 bp, Homo sapiens
cacaaggattggtcc

SEQ ID NO: 1252955 - DNA, 15 bp, Homo sapiens
ccacaaggattggtc

SEQ ID NO: 1252956 - DNA, 15 bp, Homo sapiens
gccacaaggattggt

SEQ ID NO: 1252957 - DNA, 15 bp, Homo sapiens
tgccacaaggattgg

SEQ ID NO: 1252958 - DNA, 15 bp, Homo sapiens
ttgccacaaggattg

SEQ ID NO: 1252959 - DNA, 15 bp, Homo sapiens
cttgccacaaggatt

SEQ ID NO: 1252960 - DNA, 15 bp, Homo sapiens
acttgccacaaggat

SEQ ID NO: 1252961 - DNA, 15 bp, Homo sapiens
gacttgccacaagga

SEQ ID NO: 1252962 - DNA, 15 bp, Homo sapiens
agacttgccacaagg

SEQ ID NO: 1252963 - DNA, 15 bp, Homo sapiens
cagacttgccacaag

SEQ ID NO: 1252964 - DNA, 15 bp, Homo sapiens
acagacttgccacaa

SEQ ID NO: 1252965 - DNA, 15 bp, Homo sapiens
cacagacttgccaca

SEQ ID NO: 1252966 - DNA, 15 bp, Homo sapiens
tcacagacttgccac

SEQ ID NO: 1252967 - DNA, 15 bp, Homo sapiens
ttcacagacttgcca

SEQ ID NO: 1252968 - DNA, 15 bp, Homo sapiens
gttcacagacttgcc

SEQ ID NO: 1252969 - DNA, 15 bp, Homo sapiens
ggttcacagacttgc

SEQ ID NO: 1252970 - DNA, 15 bp, Homo sapiens
tggttcacagacttg

SEQ ID NO: 1252971 - DNA, 15 bp, Homo sapiens
atggttcacagactt

SEQ ID NO: 1252972 - DNA, 15 bp, Homo sapiens
gatggttcacagact

SEQ ID NO: 1252973 - DNA, 15 bp, Homo sapiens
tgatggttcacagac

SEQ ID NO: 1252974 - DNA, 15 bp, Homo sapiens
gtgatggttcacaga

SEQ ID NO: 1252975 - DNA, 15 bp, Homo sapiens
agtgatggttcacag

SEQ ID NO: 1252976 - DNA, 15 bp, Homo sapiens
cagtgatggttcaca

SEQ ID NO: 1252977 - DNA, 15 bp, Homo sapiens
acagtgatggttcac

SEQ ID NO: 1252978 - DNA, 15 bp, Homo sapiens
cacagtgatggttca

SEQ ID NO: 1252979 - DNA, 15 bp, Homo sapiens
ccacagtgatggttc

SEQ ID NO: 1252980 - DNA, 15 bp, Homo sapiens
gccacagtgatggtt

SEQ ID NO: 1252981 - DNA, 15 bp, Homo sapiens
agccacagtgatggt

SEQ ID NO: 1252982 - DNA, 15 bp, Homo sapiens
gagccacagtgatgg

SEQ ID NO: 1252983 - DNA, 15 bp, Homo sapiens
agagccacagtgatg

SEQ ID NO: 1252984 - DNA, 15 bp, Homo sapiens
tagagccacagtgat

SEQ ID NO: 1252985 - DNA, 15 bp, Homo sapiens
ctagagccacagtga

SEQ ID NO: 1252986 - DNA, 15 bp, Homo sapiens
cctagagccacagtg

SEQ ID NO: 1252987 - DNA, 15 bp, Homo sapiens
ccctagagccacagt

SEQ ID NO: 1252988 - DNA, 15 bp, Homo sapiens
accctagagccacag

SEQ ID NO: 1252989 - DNA, 15 bp, Homo sapiens
taccctagagccaca

SEQ ID NO: 1252990 - DNA, 15 bp, Homo sapiens
ctaccctagagccac

SEQ ID NO: 1252991 - DNA, 15 bp, Homo sapiens
gctaccctagagcca

SEQ ID NO: 1252992 - DNA, 15 bp, Homo sapiens
tgctaccctagagcc

SEQ ID NO: 1252993 - DNA, 15 bp, Homo sapiens
ctgctaccctagagc

SEQ ID NO: 1252994 - DNA, 15 bp, Homo sapiens
tctgctaccctagag

SEQ ID NO: 1252995 - DNA, 15 bp, Homo sapiens
ctctgctaccctaga

SEQ ID NO: 1252996 - DNA, 15 bp, Homo sapiens
tctctgctaccctag

SEQ ID NO: 1252997 - DNA, 15 bp, Homo sapiens
ttctctgctacccta

SEQ ID NO: 1252998 - DNA, 15 bp, Homo sapiens
tttctctgctaccct

SEQ ID NO: 1252999 - DNA, 15 bp, Homo sapiens
ttttctctgctaccc

SEQ ID NO: 1253000 - DNA, 15 bp, Homo sapiens
tttttctctgctacc

SEQ ID NO: 1253001 - DNA, 15 bp, Homo sapiens
ttttttctctgctac

SEQ ID NO: 1253002 - DNA, 15 bp, Homo sapiens
cttttttctctgcta

SEQ ID NO: 1253003 - DNA, 15 bp, Homo sapiens
gcttttttctctgct

SEQ ID NO: 1253004 - DNA, 15 bp, Homo sapiens
tgcttttttctctgc

SEQ ID NO: 1253005 - DNA, 15 bp, Homo sapiens
ctgcttttttctctg

SEQ ID NO: 1253006 - DNA, 15 bp, Homo sapiens
cctgcttttttctct

SEQ ID NO: 1253007 - DNA, 15 bp, Homo sapiens
gcctgcttttttctc

SEQ ID NO: 1253008 - DNA, 15 bp, Homo sapiens
tgcctgcttttttct

SEQ ID NO: 1253009 - DNA, 15 bp, Homo sapiens
atgcctgcttttttc

SEQ ID NO: 1253010 - DNA, 15 bp, Homo sapiens
tatgcctgctttttt

SEQ ID NO: 1253011 - DNA, 15 bp, Homo sapiens
atatgcctgcttttt

SEQ ID NO: 1253012 - DNA, 15 bp, Homo sapiens
catatgcctgctttt

SEQ ID NO: 1253013 - DNA, 15 bp, Homo sapiens
acatatgcctgcttt

SEQ ID NO: 1253014 - DNA, 15 bp, Homo sapiens
gacatatgcctgctt

SEQ ID NO: 1253015 - DNA, 15 bp, Homo sapiens
ggacatatgcctgct

SEQ ID NO: 1253016 - DNA, 15 bp, Homo sapiens
tggacatatgcctgc

SEQ ID NO: 1253017 - DNA, 15 bp, Homo sapiens
atggacatatgcctg

SEQ ID NO: 1253018 - DNA, 15 bp, Homo sapiens
gatggacatatgcct

SEQ ID NO: 1253019 - DNA, 15 bp, Homo sapiens
agatggacatatgcc

SEQ ID NO: 1253020 - DNA, 15 bp, Homo sapiens
cagatggacatatgc

SEQ ID NO: 1253021 - DNA, 15 bp, Homo sapiens
ccagatggacatatg

SEQ ID NO: 1253022 - DNA, 15 bp, Homo sapiens
gccagatggacatat

SEQ ID NO: 1253023 - DNA, 15 bp, Homo sapiens
ggccagatggacata

SEQ ID NO: 1253024 - DNA, 15 bp, Homo sapiens
tggccagatggacat

SEQ ID NO: 1253025 - DNA, 15 bp, Homo sapiens
gtggccagatggaca

SEQ ID NO: 1253026 - DNA, 15 bp, Homo sapiens
tgtggccagatggac

SEQ ID NO: 1253027 - DNA, 15 bp, Homo sapiens
ttgtggccagatgga

SEQ ID NO: 1253028 - DNA, 15 bp, Homo sapiens
cttgtggccagatgg

SEQ ID NO: 1253029 - DNA, 15 bp, Homo sapiens
ccttgtggccagatg

SEQ ID NO: 1253030 - DNA, 15 bp, Homo sapiens
tccttgtggccagat

SEQ ID NO: 1253031 - DNA, 15 bp, Homo sapiens
ttccttgtggccaga

SEQ ID NO: 1253032 - DNA, 15 bp, Homo sapiens
cttccttgtggccag

SEQ ID NO: 1253033 - DNA, 15 bp, Homo sapiens
ccttccttgtggcca

SEQ ID NO: 1253034 - DNA, 15 bp, Homo sapiens
tccttccttgtggcc

SEQ ID NO: 1253035 - DNA, 15 bp, Homo sapiens
ctccttccttgtggc

SEQ ID NO: 1253036 - DNA, 15 bp, Homo sapiens
tctccttccttgtgg

SEQ ID NO: 1253037 - DNA, 15 bp, Homo sapiens
gtctccttccttgtg

SEQ ID NO: 1253038 - DNA, 15 bp, Homo sapiens
ggtctccttccttgt

SEQ ID NO: 1253039 - DNA, 15 bp, Homo sapiens
tggtctccttccttg

SEQ ID NO: 1253040 - DNA, 15 bp, Homo sapiens
ttggtctccttcctt

SEQ ID NO: 1253041 - DNA, 15 bp, Homo sapiens
cttggtctccttcct

SEQ ID NO: 1253042 - DNA, 15 bp, Homo sapiens
ccttggtctccttcc

SEQ ID NO: 1253043 - DNA, 15 bp, Homo sapiens
cccttggtctccttc

SEQ ID NO: 1253044 - DNA, 15 bp, Homo sapiens
ccccttggtctcctt

SEQ ID NO: 1253045 - DNA, 15 bp, Homo sapiens
tccccttggtctcct

SEQ ID NO: 1253046 - DNA, 15 bp, Homo sapiens
ttccccttggtctcc

SEQ ID NO: 1253047 - DNA, 15 bp, Homo sapiens
cttccccttggtctc

SEQ ID NO: 1253048 - DNA, 15 bp, Homo sapiens
tcttccccttggtct

SEQ ID NO: 1253049 - DNA, 15 bp, Homo sapiens
ctcttccccttggtc

SEQ ID NO: 1253050 - DNA, 15 bp, Homo sapiens
tctcttccccttggt

SEQ ID NO: 1253051 - DNA, 15 bp, Homo sapiens
ctctcttccccttgg

SEQ ID NO: 1253052 - DNA, 15 bp, Homo sapiens
tctctcttccccttg

SEQ ID NO: 1253053 - DNA, 15 bp, Homo sapiens
ttctctcttcccctt

SEQ ID NO: 1253054 - DNA, 15 bp, Homo sapiens
cttctctcttcccct

SEQ ID NO: 1253055 - DNA, 15 bp, Homo sapiens
ccttctctcttcccc

SEQ ID NO: 1253056 - DNA, 15 bp, Homo sapiens
accttctctcttccc

SEQ ID NO: 1253057 - DNA, 15 bp, Homo sapiens
taccttctctcttcc

SEQ ID NO: 1253058 - DNA, 15 bp, Homo sapiens
gtaccttctctcttc

SEQ ID NO: 1253059 - DNA, 15 bp, Homo sapiens
ggtaccttctctctt

SEQ ID NO: 1253060 - DNA, 15 bp, Homo sapiens
tggtaccttctctct

SEQ ID NO: 1253061 - DNA, 15 bp, Homo sapiens
ttggtaccttctctc

SEQ ID NO: 1253062 - DNA, 15 bp, Homo sapiens
cttggtaccttctct

SEQ ID NO: 1253063 - DNA, 15 bp, Homo sapiens
tcttggtaccttctc

SEQ ID NO: 1253064 - DNA, 15 bp, Homo sapiens
ctcttggtaccttct

SEQ ID NO: 1253065 - DNA, 15 bp, Homo sapiens
tctcttggtaccttc

SEQ ID NO: 1253066 - DNA, 15 bp, Homo sapiens
ctctcttggtacctt

SEQ ID NO: 1253067 - DNA, 15 bp, Homo sapiens
cctctcttggtacct

SEQ ID NO: 1253068 - DNA, 15 bp, Homo sapiens
acctctcttggtacc

SEQ ID NO: 1253069 - DNA, 15 bp, Homo sapiens
cacctctcttggtac

SEQ ID NO: 1253070 - DNA, 15 bp, Homo sapiens
acacctctcttggta

SEQ ID NO: 1253071 - DNA, 15 bp, Homo sapiens
aacacctctcttggt

SEQ ID NO: 1253072 - DNA, 15 bp, Homo sapiens
gaacacctctcttgg

SEQ ID NO: 1253073 - DNA, 15 bp, Homo sapiens
tgaacacctctcttg

SEQ ID NO: 1253074 - DNA, 15 bp, Homo sapiens
gtgaacacctctctt

SEQ ID NO: 1253075 - DNA, 15 bp, Homo sapiens
tgtgaacacctctct

SEQ ID NO: 1253076 - DNA, 15 bp, Homo sapiens
atgtgaacacctctc

SEQ ID NO: 1253077 - DNA, 15 bp, Homo sapiens
catgtgaacacctct

SEQ ID NO: 1253078 - DNA, 15 bp, Homo sapiens
ccatgtgaacacctc

SEQ ID NO: 1253079 - DNA, 15 bp, Homo sapiens
tccatgtgaacacct

SEQ ID NO: 1253080 - DNA, 15 bp, Homo sapiens
ctccatgtgaacacc

SEQ ID NO: 1253081 - DNA, 15 bp, Homo sapiens
cctccatgtgaacac

SEQ ID NO: 1253082 - DNA, 15 bp, Homo sapiens
acctccatgtgaaca

SEQ ID NO: 1253083 - DNA, 15 bp, Homo sapiens
cacctccatgtgaac

SEQ ID NO: 1253084 - DNA, 15 bp, Homo sapiens
gcacctccatgtgaa

SEQ ID NO: 1253085 - DNA, 15 bp, Homo sapiens
cgcacctccatgtga

SEQ ID NO: 1253086 - DNA, 15 bp, Homo sapiens
acgcacctccatgtg

SEQ ID NO: 1253087 - DNA, 15 bp, Homo sapiens
gacgcacctccatgt

SEQ ID NO: 1253088 - DNA, 15 bp, Homo sapiens
tgacgcacctccatg

SEQ ID NO: 1253089 - DNA, 15 bp, Homo sapiens
ctgacgcacctccat

SEQ ID NO: 1253090 - DNA, 15 bp, Homo sapiens
tctgacgcacctcca

SEQ ID NO: 1253091 - DNA, 15 bp, Homo sapiens
ttctgacgcacctcc

SEQ ID NO: 1253092 - DNA, 15 bp, Homo sapiens
gttctgacgcacctc

SEQ ID NO: 1253093 - DNA, 15 bp, Homo sapiens
tgttctgacgcacct

SEQ ID NO: 1253094 - DNA, 15 bp, Homo sapiens
gtgttctgacgcacc

SEQ ID NO: 1253095 - DNA, 15 bp, Homo sapiens
ggtgttctgacgcac

SEQ ID NO: 1253096 - DNA, 15 bp, Homo sapiens
cggtgttctgacgca

SEQ ID NO: 1253097 - DNA, 15 bp, Homo sapiens
tcggtgttctgacgc

SEQ ID NO: 1253098 - DNA, 15 bp, Homo sapiens
ctcggtgttctgacg

SEQ ID NO: 1253099 - DNA, 15 bp, Homo sapiens
cctcggtgttctgac

SEQ ID NO: 1253100 - DNA, 15 bp, Homo sapiens
ccctcggtgttctga

SEQ ID NO: 1253101 - DNA, 15 bp, Homo sapiens
gccctcggtgttctg

SEQ ID NO: 1253102 - DNA, 15 bp, Homo sapiens
tgccctcggtgttct

SEQ ID NO: 1253103 - DNA, 15 bp, Homo sapiens
ttgccctcggtgttc

SEQ ID NO: 1253104 - DNA, 15 bp, Homo sapiens
cttgccctcggtgtt

SEQ ID NO: 1253105 - DNA, 15 bp, Homo sapiens
ccttgccctcggtgt

SEQ ID NO: 1253106 - DNA, 15 bp, Homo sapiens
gccttgccctcggtg

SEQ ID NO: 1253107 - DNA, 15 bp, Homo sapiens
tgccttgccctcggt

SEQ ID NO: 1253108 - DNA, 15 bp, Homo sapiens
ctgccttgccctcgg

SEQ ID NO: 1253109 - DNA, 15 bp, Homo sapiens
tctgccttgccctcg

SEQ ID NO: 1253110 - DNA, 15 bp, Homo sapiens
ttctgccttgccctc

SEQ ID NO: 1253111 - DNA, 15 bp, Homo sapiens
gttctgccttgccct

SEQ ID NO: 1253112 - DNA, 15 bp, Homo sapiens
cgttctgccttgccc

SEQ ID NO: 1253113 - DNA, 15 bp, Homo sapiens
gcgttctgccttgcc

SEQ ID NO: 1253114 - DNA, 15 bp, Homo sapiens
cgcgttctgccttgc

SEQ ID NO: 1253115 - DNA, 15 bp, Homo sapiens
ccgcgttctgccttg

SEQ ID NO: 1253116 - DNA, 15 bp, Homo sapiens
accgcgttctgcctt

SEQ ID NO: 1253117 - DNA, 15 bp, Homo sapiens
gaccgcgttctgcct

SEQ ID NO: 1253118 - DNA, 15 bp, Homo sapiens
agaccgcgttctgcc

SEQ ID NO: 1253119 - DNA, 15 bp, Homo sapiens
aagaccgcgttctgc

SEQ ID NO: 1253120 - DNA, 15 bp, Homo sapiens
gaagaccgcgttctg

SEQ ID NO: 1253121 - DNA, 15 bp, Homo sapiens
tgaagaccgcgttct

SEQ ID NO: 1253122 - DNA, 15 bp, Homo sapiens
ctgaagaccgcgttc

SEQ ID NO: 1253123 - DNA, 15 bp, Homo sapiens
tctgaagaccgcgtt

SEQ ID NO: 1253124 - DNA, 15 bp, Homo sapiens
gtctgaagaccgcgt

SEQ ID NO: 1253125 - DNA, 15 bp, Homo sapiens
ggtctgaagaccgcg

SEQ ID NO: 1253126 - DNA, 15 bp, Homo sapiens
gggtctgaagaccgc

SEQ ID NO: 1253127 - DNA, 15 bp, Homo sapiens
ggggtctgaagaccg

SEQ ID NO: 1253128 - DNA, 15 bp, Homo sapiens
ttggggtctgaagac

SEQ ID NO: 1253129 - DNA, 15 bp, Homo sapiens
gttggggtctgaaga

SEQ ID NO: 1253130 - DNA, 15 bp, Homo sapiens
agttggggtctgaag

SEQ ID NO: 1253131 - DNA, 15 bp, Homo sapiens
cagttggggtctgaa

SEQ ID NO: 1253132 - DNA, 15 bp, Homo sapiens
ccagttggggtctga

SEQ ID NO: 1253133 - DNA, 15 bp, Homo sapiens
tccagttggggtctg

SEQ ID NO: 1253134 - DNA, 15 bp, Homo sapiens
ctccagttggggtct

SEQ ID NO: 1253135 - DNA, 15 bp, Homo sapiens
gctccagttggggtc

SEQ ID NO: 1253136 - DNA, 15 bp, Homo sapiens
ggctccagttggggt

SEQ ID NO: 1253137 - DNA, 15 bp, Homo sapiens
gggctccagttgggg

SEQ ID NO: 1253138 - DNA, 15 bp, Homo sapiens
tgggctccagttggg

SEQ ID NO: 1253139 - DNA, 15 bp, Homo sapiens
ctgggctccagttgg

SEQ ID NO: 1253140 - DNA, 15 bp, Homo sapiens
cctgggctccagttg

SEQ ID NO: 1253141 - DNA, 15 bp, Homo sapiens
tcctgggctccagtt

SEQ ID NO: 1253142 - DNA, 15 bp, Homo sapiens
ctcctgggctccagt

SEQ ID NO: 1253143 - DNA, 15 bp, Homo sapiens
gcctcctgggctcca

SEQ ID NO: 1253144 - DNA, 15 bp, Homo sapiens
ggcctcctgggctcc

SEQ ID NO: 1253145 - DNA, 15 bp, Homo sapiens
gggcctcctgggctc

SEQ ID NO: 1253146 - DNA, 15 bp, Homo sapiens
cgggcctcctgggct

SEQ ID NO: 1253147 - DNA, 15 bp, Homo sapiens
gcgggcctcctgggc

SEQ ID NO: 1253148 - DNA, 15 bp, Homo sapiens
cgcgggcctcctggg

SEQ ID NO: 1253149 - DNA, 15 bp, Homo sapiens
tcgcgggcctcctgg

SEQ ID NO: 1253150 - DNA, 15 bp, Homo sapiens
ctcgcgggcctcctg

SEQ ID NO: 1253151 - DNA, 15 bp, Homo sapiens
actcgcgggcctcct

SEQ ID NO: 1253152 - DNA, 15 bp, Homo sapiens
gactcgcgggcctcc

SEQ ID NO: 1253153 - DNA, 15 bp, Homo sapiens
ggactcgcgggcctc

SEQ ID NO: 1253154 - DNA, 15 bp, Homo sapiens
gggactcgcgggcct

SEQ ID NO: 1253155 - DNA, 15 bp, Homo sapiens
tgggactcgcgggcc

SEQ ID NO: 1253156 - DNA, 15 bp, Homo sapiens
ctgggactcgcgggc

SEQ ID NO: 1253157 - DNA, 15 bp, Homo sapiens
actgggactcgcggg

SEQ ID NO: 1253158 - DNA, 15 bp, Homo sapiens
aactgggactcgcgg

SEQ ID NO: 1253159 - DNA, 15 bp, Homo sapiens
aaactgggactcgcg

SEQ ID NO: 1253160 - DNA, 15 bp, Homo sapiens
caaactgggactcgc

SEQ ID NO: 1253161 - DNA, 15 bp, Homo sapiens
ccaaactgggactcg

SEQ ID NO: 1253162 - DNA, 15 bp, Homo sapiens
cccaaactgggactc

SEQ ID NO: 1253163 - DNA, 15 bp, Homo sapiens
tcccaaactgggact

SEQ ID NO: 1253164 - DNA, 15 bp, Homo sapiens
ttcccaaactgggac

SEQ ID NO: 1253165 - DNA, 15 bp, Homo sapiens
tttcccaaactggga

SEQ ID NO: 1253166 - DNA, 15 bp, Homo sapiens
gtttcccaaactggg

SEQ ID NO: 1253167 - DNA, 15 bp, Homo sapiens
tgtttcccaaactgg

SEQ ID NO: 1253168 - DNA, 15 bp, Homo sapiens
gtgtttcccaaactg

SEQ ID NO: 1253169 - DNA, 15 bp, Homo sapiens
agtgtttcccaaact

SEQ ID NO: 1253170 - DNA, 15 bp, Homo sapiens
tagtgtttcccaaac

SEQ ID NO: 1253171 - DNA, 15 bp, Homo sapiens
ttagtgtttcccaaa

SEQ ID NO: 1253172 - DNA, 15 bp, Homo sapiens
cttagtgtttcccaa

SEQ ID NO: 1253173 - DNA, 15 bp, Homo sapiens
gcttagtgtttccca

SEQ ID NO: 1253174 - DNA, 15 bp, Homo sapiens
ggcttagtgtttccc

SEQ ID NO: 1253175 - DNA, 15 bp, Homo sapiens
tggcttagtgtttcc

SEQ ID NO: 1253176 - DNA, 15 bp, Homo sapiens
ctggcttagtgtttc

SEQ ID NO: 1253177 - DNA, 15 bp, Homo sapiens
cctggcttagtgttt

SEQ ID NO: 1253178 - DNA, 15 bp, Homo sapiens
gcctggcttagtgtt

SEQ ID NO: 1253179 - DNA, 15 bp, Homo sapiens
agcctggcttagtgt

SEQ ID NO: 1253180 - DNA, 15 bp, Homo sapiens
aagcctggcttagtg

SEQ ID NO: 1253181 - DNA, 15 bp, Homo sapiens
caagcctggcttagt

SEQ ID NO: 1253182 - DNA, 15 bp, Homo sapiens
ccaagcctggcttag

SEQ ID NO: 1253183 - DNA, 15 bp, Homo sapiens
tccaagcctggctta

SEQ ID NO: 1253184 - DNA, 15 bp, Homo sapiens
atccaagcctggctt

SEQ ID NO: 1253185 - DNA, 15 bp, Homo sapiens
tatccaagcctggct

SEQ ID NO: 1253186 - DNA, 15 bp, Homo sapiens
ttatccaagcctggc

SEQ ID NO: 1253187 - DNA, 15 bp, Homo sapiens
gttatccaagcctgg

SEQ ID NO: 1253188 - DNA, 15 bp, Homo sapiens
agttatccaagcctg

SEQ ID NO: 1253189 - DNA, 15 bp, Homo sapiens
aagttatccaagcct

SEQ ID NO: 1253190 - DNA, 15 bp, Homo sapiens
caagttatccaagcc

SEQ ID NO: 1253191 - DNA, 15 bp, Homo sapiens
acaagttatccaagc

SEQ ID NO: 1253192 - DNA, 15 bp, Homo sapiens
gacaagttatccaag

SEQ ID NO: 1253193 - DNA, 15 bp, Homo sapiens
agacaagttatccaa

SEQ ID NO: 1253194 - DNA, 15 bp, Homo sapiens
cagacaagttatcca

SEQ ID NO: 1253195 - DNA, 15 bp, Homo sapiens
tcagacaagttatcc

SEQ ID NO: 1253196 - DNA, 15 bp, Homo sapiens
ctcagacaagttatc

SEQ ID NO: 1253197 - DNA, 15 bp, Homo sapiens
cctcagacaagttat

SEQ ID NO: 1253198 - DNA, 15 bp, Homo sapiens
gcctcagacaagtta

SEQ ID NO: 1253199 - DNA, 15 bp, Homo sapiens
agcctcagacaagtt

SEQ ID NO: 1253200 - DNA, 15 bp, Homo sapiens
cagcctcagacaagt

SEQ ID NO: 1253201 - DNA, 15 bp, Homo sapiens
acagcctcagacaag

SEQ ID NO: 1253202 - DNA, 15 bp, Homo sapiens
cacagcctcagacaa

SEQ ID NO: 1253203 - DNA, 15 bp, Homo sapiens
ccacagcctcagaca

SEQ ID NO: 1253204 - DNA, 15 bp, Homo sapiens
accacagcctcagac

SEQ ID NO: 1253205 - DNA, 15 bp, Homo sapiens
gaccacagcctcaga

SEQ ID NO: 1253206 - DNA, 15 bp, Homo sapiens
tgaccacagcctcag

SEQ ID NO: 1253207 - DNA, 15 bp, Homo sapiens
atgaccacagcctca

SEQ ID NO: 1253208 - DNA, 15 bp, Homo sapiens
gatgaccacagcctc

SEQ ID NO: 1253209 - DNA, 15 bp, Homo sapiens
ggatgaccacagcct

SEQ ID NO: 1253210 - DNA, 15 bp, Homo sapiens
gggatgaccacagcc

SEQ ID NO: 1253211 - DNA, 15 bp, Homo sapiens
tgggatgaccacagc

SEQ ID NO: 1253212 - DNA, 15 bp, Homo sapiens
ttgggatgaccacag

SEQ ID NO: 1253213 - DNA, 15 bp, Homo sapiens
gttgggatgaccaca

SEQ ID NO: 1253214 - DNA, 15 bp, Homo sapiens
tgttgggatgaccac

SEQ ID NO: 1253215 - DNA, 15 bp, Homo sapiens
atgttgggatgacca

SEQ ID NO: 1253216 - DNA, 15 bp, Homo sapiens
catgttgggatgacc

SEQ ID NO: 1253217 - DNA, 15 bp, Homo sapiens
tcatgttgggatgac

SEQ ID NO: 1253218 - DNA, 15 bp, Homo sapiens
ctcatgttgggatga

SEQ ID NO: 1253219 - DNA, 15 bp, Homo sapiens
tctcatgttgggatg

SEQ ID NO: 1253220 - DNA, 15 bp, Homo sapiens
ctctcatgttgggat

SEQ ID NO: 1253221 - DNA, 15 bp, Homo sapiens
gctctcatgttggga

SEQ ID NO: 1253222 - DNA, 15 bp, Homo sapiens
ggctctcatgttggg

SEQ ID NO: 1253223 - DNA, 15 bp, Homo sapiens
tggctctcatgttgg

SEQ ID NO: 1253224 - DNA, 15 bp, Homo sapiens
ctggctctcatgttg

SEQ ID NO: 1253225 - DNA, 15 bp, Homo sapiens
tctggctctcatgtt

SEQ ID NO: 1253226 - DNA, 15 bp, Homo sapiens
ctctggctctcatgt

SEQ ID NO: 1253227 - DNA, 15 bp, Homo sapiens
gggcctctggctctc

SEQ ID NO: 1253228 - DNA, 15 bp, Homo sapiens
ggggcctctggctct

SEQ ID NO: 1253229 - DNA, 15 bp, Homo sapiens
tggggcctctggctc

SEQ ID NO: 1253230 - DNA, 15 bp, Homo sapiens
ttggggcctctggct

SEQ ID NO: 1253231 - DNA, 15 bp, Homo sapiens
cttggggcctctggc

SEQ ID NO: 1253232 - DNA, 15 bp, Homo sapiens
ccttggggcctctgg

SEQ ID NO: 1253233 - DNA, 15 bp, Homo sapiens
cccttggggcctctg

SEQ ID NO: 1253234 - DNA, 15 bp, Homo sapiens
tcccttggggcctct

SEQ ID NO: 1253235 - DNA, 15 bp, Homo sapiens
ctcccttggggcctc

SEQ ID NO: 1253236 - DNA, 15 bp, Homo sapiens
tctcccttggggcct

SEQ ID NO: 1253237 - DNA, 15 bp, Homo sapiens
atctcccttggggcc

SEQ ID NO: 1253238 - DNA, 15 bp, Homo sapiens
catctcccttggggc

SEQ ID NO: 1253239 - DNA, 15 bp, Homo sapiens
ccatctcccttgggg

SEQ ID NO: 1253240 - DNA, 15 bp, Homo sapiens
cccatctcccttggg

SEQ ID NO: 1253241 - DNA, 15 bp, Homo sapiens
gcccatctcccttgg

SEQ ID NO: 1253242 - DNA, 15 bp, Homo sapiens
tgcccatctcccttg

SEQ ID NO: 1253243 - DNA, 15 bp, Homo sapiens
atgcccatctccctt

SEQ ID NO: 1253244 - DNA, 15 bp, Homo sapiens
aatgcccatctccct

SEQ ID NO: 1253245 - DNA, 15 bp, Homo sapiens
gaatgcccatctccc

SEQ ID NO: 1253246 - DNA, 15 bp, Homo sapiens
ggaatgcccatctcc

SEQ ID NO: 1253247 - DNA, 15 bp, Homo sapiens
gggaatgcccatctc

SEQ ID NO: 1253248 - DNA, 15 bp, Homo sapiens
ggggaatgcccatct

SEQ ID NO: 1253249 - DNA, 15 bp, Homo sapiens
tggggaatgcccatc

SEQ ID NO: 1253250 - DNA, 15 bp, Homo sapiens
gtggggaatgcccat

SEQ ID NO: 1253251 - DNA, 15 bp, Homo sapiens
ggtggggaatgccca

SEQ ID NO: 1253252 - DNA, 15 bp, Homo sapiens
gggtggggaatgccc

SEQ ID NO: 1253253 - DNA, 15 bp, Homo sapiens
ggggtggggaatgcc

SEQ ID NO: 1253254 - DNA, 15 bp, Homo sapiens
aggggtggggaatgc

SEQ ID NO: 1253255 - DNA, 15 bp, Homo sapiens
gaggggtggggaatg

SEQ ID NO: 1253256 - DNA, 15 bp, Homo sapiens
tgaggggtggggaat

SEQ ID NO: 1253257 - DNA, 15 bp, Homo sapiens
ctgaggggtggggaa

SEQ ID NO: 1253258 - DNA, 15 bp, Homo sapiens
gctgaggggtgggga

SEQ ID NO: 1253259 - DNA, 15 bp, Homo sapiens
agctgaggggtgggg

SEQ ID NO: 1253260 - DNA, 15 bp, Homo sapiens
aagctgaggggtggg

SEQ ID NO: 1253261 - DNA, 15 bp, Homo sapiens
gaagctgaggggtgg

SEQ ID NO: 1253262 - DNA, 15 bp, Homo sapiens
ggaagctgaggggtg

SEQ ID NO: 1253263 - DNA, 15 bp, Homo sapiens
aggaagctgaggggt

SEQ ID NO: 1253264 - DNA, 15 bp, Homo sapiens
gaggaagctgagggg

SEQ ID NO: 1253265 - DNA, 15 bp, Homo sapiens
tgaggaagctgaggg

SEQ ID NO: 1253266 - DNA, 15 bp, Homo sapiens
ctgaggaagctgagg

SEQ ID NO: 1253267 - DNA, 15 bp, Homo sapiens
actgaggaagctgag

SEQ ID NO: 1253268 - DNA, 15 bp, Homo sapiens
cactgaggaagctga

SEQ ID NO: 1253269 - DNA, 15 bp, Homo sapiens
gcactgaggaagctg

SEQ ID NO: 1253270 - DNA, 15 bp, Homo sapiens
ggcactgaggaagct

SEQ ID NO: 1253271 - DNA, 15 bp, Homo sapiens
aggcactgaggaagc

SEQ ID NO: 1253272 - DNA, 15 bp, Homo sapiens
aaggcactgaggaag

SEQ ID NO: 1253273 - DNA, 15 bp, Homo sapiens
aaaggcactgaggaa

SEQ ID NO: 1253274 - DNA, 15 bp, Homo sapiens
aaaaggcactgagga

SEQ ID NO: 1253275 - DNA, 15 bp, Homo sapiens
caaaaggcactgagg

SEQ ID NO: 1253276 - DNA, 15 bp, Homo sapiens
acaaaaggcactgag

SEQ ID NO: 1253277 - DNA, 15 bp, Homo sapiens
cacaaaaggcactga

SEQ ID NO: 1253278 - DNA, 15 bp, Homo sapiens
ccacaaaaggcactg

SEQ ID NO: 1253279 - DNA, 15 bp, Homo sapiens
tccacaaaaggcact

SEQ ID NO: 1253280 - DNA, 15 bp, Homo sapiens
ctccacaaaaggcac

SEQ ID NO: 1253281 - DNA, 15 bp, Homo sapiens
actccacaaaaggca

SEQ ID NO: 1253282 - DNA, 15 bp, Homo sapiens
cactccacaaaaggc

SEQ ID NO: 1253283 - DNA, 15 bp, Homo sapiens
ccactccacaaaagg

SEQ ID NO: 1253284 - DNA, 15 bp, Homo sapiens
tccactccacaaaag

SEQ ID NO: 1253285 - DNA, 15 bp, Homo sapiens
ctccactccacaaaa

SEQ ID NO: 1253286 - DNA, 15 bp, Homo sapiens
cctccactccacaaa

SEQ ID NO: 1253287 - DNA, 15 bp, Homo sapiens
acctccactccacaa

SEQ ID NO: 1253288 - DNA, 15 bp, Homo sapiens
cacctccactccaca

SEQ ID NO: 1253289 - DNA, 15 bp, Homo sapiens
tcacctccactccac

SEQ ID NO: 1253290 - DNA, 15 bp, Homo sapiens
gtcacctccactcca

SEQ ID NO: 1253291 - DNA, 15 bp, Homo sapiens
tgtcacctccactcc

SEQ ID NO: 1253292 - DNA, 15 bp, Homo sapiens
atgtcacctccactc

SEQ ID NO: 1253293 - DNA, 15 bp, Homo sapiens
catgtcacctccact

SEQ ID NO: 1253294 - DNA, 15 bp, Homo sapiens
tcatgtcacctccac

SEQ ID NO: 1253295 - DNA, 15 bp, Homo sapiens
ctcatgtcacctcca

SEQ ID NO: 1253296 - DNA, 15 bp, Homo sapiens
cctcatgtcacctcc

SEQ ID NO: 1253297 - DNA, 15 bp, Homo sapiens
gcctcatgtcacctc

SEQ ID NO: 1253298 - DNA, 15 bp, Homo sapiens
agcctcatgtcacct

SEQ ID NO: 1253299 - DNA, 15 bp, Homo sapiens
cagcctcatgtcacc

SEQ ID NO: 1253300 - DNA, 15 bp, Homo sapiens
gcagcctcatgtcac

SEQ ID NO: 1253301 - DNA, 15 bp, Homo sapiens
tgcagcctcatgtca

SEQ ID NO: 1253302 - DNA, 15 bp, Homo sapiens
ctgcagcctcatgtc

SEQ ID NO: 1253303 - DNA, 15 bp, Homo sapiens
cctgcagcctcatgt

SEQ ID NO: 1253304 - DNA, 15 bp, Homo sapiens
acctgcagcctcatg

SEQ ID NO: 1253305 - DNA, 15 bp, Homo sapiens
aacctgcagcctcat

SEQ ID NO: 1253306 - DNA, 15 bp, Homo sapiens
caacctgcagcctca

SEQ ID NO: 1253307 - DNA, 15 bp, Homo sapiens
gcaacctgcagcctc

SEQ ID NO: 1253308 - DNA, 15 bp, Homo sapiens
tgcaacctgcagcct

SEQ ID NO: 1253309 - DNA, 15 bp, Homo sapiens
ctgcaacctgcagcc

SEQ ID NO: 1253310 - DNA, 15 bp, Homo sapiens
cctgcaacctgcagc

SEQ ID NO: 1253311 - DNA, 15 bp, Homo sapiens
ccctgcaacctgcag

SEQ ID NO: 1253312 - DNA, 15 bp, Homo sapiens
tccctgcaacctgca

SEQ ID NO: 1253313 - DNA, 15 bp, Homo sapiens
ctccctgcaacctgc

SEQ ID NO: 1253314 - DNA, 15 bp, Homo sapiens
gctccctgcaacctg

SEQ ID NO: 1253315 - DNA, 15 bp, Homo sapiens
acgtggctccctgca

SEQ ID NO: 1253316 - DNA, 15 bp, Homo sapiens
cacgtggctccctgc

SEQ ID NO: 1253317 - DNA, 15 bp, Homo sapiens
acacgtggctccctg

SEQ ID NO: 1253318 - DNA, 15 bp, Homo sapiens
cacacgtggctccct

SEQ ID NO: 1253319 - DNA, 15 bp, Homo sapiens
ccacacgtggctccc

SEQ ID NO: 1253320 - DNA, 15 bp, Homo sapiens
cccacacgtggctcc

SEQ ID NO: 1253321 - DNA, 15 bp, Homo sapiens
gcccacacgtggctc

SEQ ID NO: 1253322 - DNA, 15 bp, Homo sapiens
agcccacacgtggct

SEQ ID NO: 1253323 - DNA, 15 bp, Homo sapiens
cagcccacacgtggc

SEQ ID NO: 1253324 - DNA, 15 bp, Homo sapiens
gcagcccacacgtgg

SEQ ID NO: 1253325 - DNA, 15 bp, Homo sapiens
tgcagcccacacgtg

SEQ ID NO: 1253326 - DNA, 15 bp, Homo sapiens
atgcagcccacacgt

SEQ ID NO: 1253327 - DNA, 15 bp, Homo sapiens
aatgcagcccacacg

SEQ ID NO: 1253328 - DNA, 15 bp, Homo sapiens
aaatgcagcccacac

SEQ ID NO: 1253329 - DNA, 15 bp, Homo sapiens
gaaatgcagcccaca

SEQ ID NO: 1253330 - DNA, 15 bp, Homo sapiens
tgaaatgcagcccac

SEQ ID NO: 1253331 - DNA, 15 bp, Homo sapiens
ctgaaatgcagccca

SEQ ID NO: 1253332 - DNA, 15 bp, Homo sapiens
tctgaaatgcagccc

SEQ ID NO: 1253333 - DNA, 15 bp, Homo sapiens
ctctgaaatgcagcc

SEQ ID NO: 1253334 - DNA, 15 bp, Homo sapiens
gctctgaaatgcagc

SEQ ID NO: 1253335 - DNA, 15 bp, Homo sapiens
tgctctgaaatgcag

SEQ ID NO: 1253336 - DNA, 15 bp, Homo sapiens
ttgctctgaaatgca

SEQ ID NO: 1253337 - DNA, 15 bp, Homo sapiens
cttgctctgaaatgc

SEQ ID NO: 1253338 - DNA, 15 bp, Homo sapiens
acttgctctgaaatg

SEQ ID NO: 1253339 - DNA, 15 bp, Homo sapiens
cacttgctctgaaat

SEQ ID NO: 1253340 - DNA, 15 bp, Homo sapiens
acacttgctctgaaa

SEQ ID NO: 1253341 - DNA, 15 bp, Homo sapiens
cacacttgctctgaa

SEQ ID NO: 1253342 - DNA, 15 bp, Homo sapiens
acacacttgctctga

SEQ ID NO: 1253343 - DNA, 15 bp, Homo sapiens
cacacacttgctctg

SEQ ID NO: 1253344 - DNA, 15 bp, Homo sapiens
ccacacacttgctct

SEQ ID NO: 1253345 - DNA, 15 bp, Homo sapiens
cccacacacttgctc

SEQ ID NO: 1253346 - DNA, 15 bp, Homo sapiens
tcccacacacttgct

SEQ ID NO: 1253347 - DNA, 15 bp, Homo sapiens
ctcccacacacttgc

SEQ ID NO: 1253348 - DNA, 15 bp, Homo sapiens
actcccacacacttg

SEQ ID NO: 1253349 - DNA, 15 bp, Homo sapiens
cactcccacacactt

SEQ ID NO: 1253350 - DNA, 15 bp, Homo sapiens
ccactcccacacact

SEQ ID NO: 1253351 - DNA, 15 bp, Homo sapiens
tccactcccacacac

SEQ ID NO: 1253352 - DNA, 15 bp, Homo sapiens
ctccactcccacaca

SEQ ID NO: 1253353 - DNA, 15 bp, Homo sapiens
gctccactcccacac

SEQ ID NO: 1253354 - DNA, 15 bp, Homo sapiens
tgctccactcccaca

SEQ ID NO: 1253355 - DNA, 15 bp, Homo sapiens
ctgctccactcccac

SEQ ID NO: 1253356 - DNA, 15 bp, Homo sapiens
tctgctccactccca

SEQ ID NO: 1253357 - DNA, 15 bp, Homo sapiens
gtctgctccactccc

SEQ ID NO: 1253358 - DNA, 15 bp, Homo sapiens
tgtctgctccactcc

SEQ ID NO: 1253359 - DNA, 15 bp, Homo sapiens
gtgtctgctccactc

SEQ ID NO: 1253360 - DNA, 15 bp, Homo sapiens
cgtgtctgctccact

SEQ ID NO: 1253361 - DNA, 15 bp, Homo sapiens
gcgtgtctgctccac

SEQ ID NO: 1253362 - DNA, 15 bp, Homo sapiens
tgcgtgtctgctcca

SEQ ID NO: 1253363 - DNA, 15 bp, Homo sapiens
ctgcgtgtctgctcc

SEQ ID NO: 1253364 - DNA, 15 bp, Homo sapiens
tctgcgtgtctgctc

SEQ ID NO: 1253365 - DNA, 15 bp, Homo sapiens
ctctgcgtgtctgct

SEQ ID NO: 1253366 - DNA, 15 bp, Homo sapiens
actctgcgtgtctgc

SEQ ID NO: 1253367 - DNA, 15 bp, Homo sapiens
tactctgcgtgtctg

SEQ ID NO: 1253368 - DNA, 15 bp, Homo sapiens
ttactctgcgtgtct

SEQ ID NO: 1253369 - DNA, 15 bp, Homo sapiens
attactctgcgtgtc

SEQ ID NO: 1253370 - DNA, 15 bp, Homo sapiens
cattactctgcgtgt

SEQ ID NO: 1253371 - DNA, 15 bp, Homo sapiens
ccattactctgcgtg

SEQ ID NO: 1253372 - DNA, 15 bp, Homo sapiens
cccattactctgcgt

SEQ ID NO: 1253373 - DNA, 15 bp, Homo sapiens
ccccattactctgcg

SEQ ID NO: 1253374 - DNA, 15 bp, Homo sapiens
gccccattactctgc

SEQ ID NO: 1253375 - DNA, 15 bp, Homo sapiens
tgccccattactctg

SEQ ID NO: 1253376 - DNA, 15 bp, Homo sapiens
ctgccccattactct

SEQ ID NO: 1253377 - DNA, 15 bp, Homo sapiens
cctgccccattactc

SEQ ID NO: 1253378 - DNA, 15 bp, Homo sapiens
ccctgccccattact

SEQ ID NO: 1253379 - DNA, 15 bp, Homo sapiens
accctgccccattac

SEQ ID NO: 1253380 - DNA, 15 bp, Homo sapiens
gaccctgccccatta

SEQ ID NO: 1253381 - DNA, 15 bp, Homo sapiens
tgaccctgccccatt

SEQ ID NO: 1253382 - DNA, 15 bp, Homo sapiens
ttgaccctgccccat

SEQ ID NO: 1253383 - DNA, 15 bp, Homo sapiens
cttgaccctgcccca

SEQ ID NO: 1253384 - DNA, 15 bp, Homo sapiens
tcttgaccctgcccc

SEQ ID NO: 1253385 - DNA, 15 bp, Homo sapiens
ttcttgaccctgccc

SEQ ID NO: 1253386 - DNA, 15 bp, Homo sapiens
tttcttgaccctgcc

SEQ ID NO: 1253387 - DNA, 15 bp, Homo sapiens
atttcttgaccctgc

SEQ ID NO: 1253388 - DNA, 15 bp, Homo sapiens
tatttcttgaccctg

SEQ ID NO: 1253389 - DNA, 15 bp, Homo sapiens
ttatttcttgaccct

SEQ ID NO: 1253390 - DNA, 15 bp, Homo sapiens
attatttcttgaccc

SEQ ID NO: 1253391 - DNA, 15 bp, Homo sapiens
tattatttcttgacc

SEQ ID NO: 1253392 - DNA, 15 bp, Homo sapiens
ttattatttcttgac

SEQ ID NO: 1253393 - DNA, 15 bp, Homo sapiens
tttattatttcttga

SEQ ID NO: 1253394 - DNA, 15 bp, Homo sapiens
atttattatttcttg

SEQ ID NO: 1253395 - DNA, 15 bp, Homo sapiens
gatttattatttctt

SEQ ID NO: 1253396 - DNA, 15 bp, Homo sapiens
agatttattatttct

SEQ ID NO: 1253397 - DNA, 15 bp, Homo sapiens
tagatttattatttc

SEQ ID NO: 1253398 - DNA, 15 bp, Homo sapiens
ttagatttattattt

SEQ ID NO: 1253399 - DNA, 15 bp, Homo sapiens
cttagatttattatt

SEQ ID NO: 1253400 - DNA, 15 bp, Homo sapiens
acttagatttattat

SEQ ID NO: 1253401 - DNA, 15 bp, Homo sapiens
gacttagatttatta

SEQ ID NO: 1253402 - DNA, 15 bp, Homo sapiens
agacttagatttatt

SEQ ID NO: 1253403 - DNA, 15 bp, Homo sapiens
tagacttagatttat

SEQ ID NO: 1253404 - DNA, 15 bp, Homo sapiens
ctagacttagattta

SEQ ID NO: 1253405 - DNA, 15 bp, Homo sapiens
gctagacttagattt

SEQ ID NO: 1253406 - DNA, 15 bp, Homo sapiens
cgctagacttagatt

SEQ ID NO: 1253407 - DNA, 15 bp, Homo sapiens
acgctagacttagat

SEQ ID NO: 1253408 - DNA, 15 bp, Homo sapiens
aacgctagacttaga

SEQ ID NO: 1253409 - DNA, 15 bp, Homo sapiens
caacgctagacttag

SEQ ID NO: 1253410 - DNA, 15 bp, Homo sapiens
ccaacgctagactta

SEQ ID NO: 1253411 - DNA, 15 bp, Homo sapiens
accaacgctagactt

SEQ ID NO: 1253412 - DNA, 15 bp, Homo sapiens
caccaacgctagact

SEQ ID NO: 1253413 - DNA, 15 bp, Homo sapiens
ccaccaacgctagac

SEQ ID NO: 1253414 - DNA, 15 bp, Homo sapiens
cccaccaacgctaga

SEQ ID NO: 1253415 - DNA, 15 bp, Homo sapiens
tcccaccaacgctag

SEQ ID NO: 1253416 - DNA, 15 bp, Homo sapiens
atcccaccaacgcta

SEQ ID NO: 1253417 - DNA, 15 bp, Homo sapiens
tatcccaccaacgct

SEQ ID NO: 1253418 - DNA, 15 bp, Homo sapiens
ttatcccaccaacgc

SEQ ID NO: 1253419 - DNA, 15 bp, Homo sapiens
attatcccaccaacg

SEQ ID NO: 1253420 - DNA, 15 bp, Homo sapiens
cattatcccaccaac

SEQ ID NO: 1253421 - DNA, 15 bp, Homo sapiens
acattatcccaccaa

SEQ ID NO: 1253422 - DNA, 15 bp, Homo sapiens
gacattatcccacca

SEQ ID NO: 1253423 - DNA, 15 bp, Homo sapiens
cgacattatcccacc

SEQ ID NO: 1253424 - DNA, 15 bp, Homo sapiens
ccgacattatcccac

SEQ ID NO: 1253425 - DNA, 15 bp, Homo sapiens
accgacattatccca

SEQ ID NO: 1253426 - DNA, 15 bp, Homo sapiens
caccgacattatccc

SEQ ID NO: 1253427 - DNA, 15 bp, Homo sapiens
acaccgacattatcc

SEQ ID NO: 1253428 - DNA, 15 bp, Homo sapiens
gacaccgacattatc

SEQ ID NO: 1253429 - DNA, 15 bp, Homo sapiens
tgacaccgacattat

SEQ ID NO: 1253430 - DNA, 15 bp, Homo sapiens
gtgacaccgacatta

SEQ ID NO: 1253431 - DNA, 15 bp, Homo sapiens
agtgacaccgacatt

SEQ ID NO: 1253432 - DNA, 15 bp, Homo sapiens
tagtgacaccgacat

SEQ ID NO: 1253433 - DNA, 15 bp, Homo sapiens
ttagtgacaccgaca

SEQ ID NO: 1253434 - DNA, 15 bp, Homo sapiens
tttagtgacaccgac

SEQ ID NO: 1253435 - DNA, 15 bp, Homo sapiens
ttttagtgacaccga

SEQ ID NO: 1253436 - DNA, 15 bp, Homo sapiens
cttttagtgacaccg

SEQ ID NO: 1253437 - DNA, 15 bp, Homo sapiens
tcttttagtgacacc

SEQ ID NO: 1253438 - DNA, 15 bp, Homo sapiens
ttcttttagtgacac

SEQ ID NO: 1253439 - DNA, 15 bp, Homo sapiens
tttcttttagtgaca

SEQ ID NO: 1253440 - DNA, 15 bp, Homo sapiens
atttcttttagtgac

SEQ ID NO: 1253441 - DNA, 15 bp, Homo sapiens
catttcttttagtga

SEQ ID NO: 1253442 - DNA, 15 bp, Homo sapiens
ccatttcttttagtg

SEQ ID NO: 1253443 - DNA, 15 bp, Homo sapiens
cccatttcttttagt

SEQ ID NO: 1253444 - DNA, 15 bp, Homo sapiens
ccccatttcttttag

SEQ ID NO: 1253445 - DNA, 15 bp, Homo sapiens
tccccatttctttta

SEQ ID NO: 1253446 - DNA, 15 bp, Homo sapiens
ttccccatttctttt

SEQ ID NO: 1253447 - DNA, 15 bp, Homo sapiens
attccccatttcttt

SEQ ID NO: 1253448 - DNA, 15 bp, Homo sapiens
aattccccatttctt

SEQ ID NO: 1253449 - DNA, 15 bp, Homo sapiens
aaattccccatttct

SEQ ID NO: 1253450 - DNA, 15 bp, Homo sapiens
caaattccccatttc

SEQ ID NO: 1253451 - DNA, 15 bp, Homo sapiens
ccaaattccccattt

SEQ ID NO: 1253452 - DNA, 15 bp, Homo sapiens
tccaaattccccatt

SEQ ID NO: 1253453 - DNA, 15 bp, Homo sapiens
ttccaaattccccat

SEQ ID NO: 1253454 - DNA, 15 bp, Homo sapiens
cttccaaattcccca

SEQ ID NO: 1253455 - DNA, 15 bp, Homo sapiens
ccttccaaattcccc

SEQ ID NO: 1253456 - DNA, 15 bp, Homo sapiens
accttccaaattccc

SEQ ID NO: 1253457 - DNA, 15 bp, Homo sapiens
taccttccaaattcc

SEQ ID NO: 1253458 - DNA, 15 bp, Homo sapiens
ttaccttccaaattc

SEQ ID NO: 1253459 - DNA, 15 bp, Homo sapiens
tttaccttccaaatt

SEQ ID NO: 1253460 - DNA, 15 bp, Homo sapiens
ctttaccttccaaat

SEQ ID NO: 1253461 - DNA, 15 bp, Homo sapiens
actttaccttccaaa

SEQ ID NO: 1253462 - DNA, 15 bp, Homo sapiens
tactttaccttccaa

SEQ ID NO: 1253463 - DNA, 15 bp, Homo sapiens
ttactttaccttcca

SEQ ID NO: 1253464 - DNA, 15 bp, Homo sapiens
gttactttaccttcc

SEQ ID NO: 1253465 - DNA, 15 bp, Homo sapiens
agttactttaccttc

SEQ ID NO: 1253466 - DNA, 15 bp, Homo sapiens
cagttactttacctt

SEQ ID NO: 1253467 - DNA, 15 bp, Homo sapiens
ccagttactttacct

SEQ ID NO: 1253468 - DNA, 15 bp, Homo sapiens
tccagttactttacc

SEQ ID NO: 1253469 - DNA, 15 bp, Homo sapiens
ctccagttactttac

SEQ ID NO: 1253470 - DNA, 15 bp, Homo sapiens
cctccagttacttta

SEQ ID NO: 1253471 - DNA, 15 bp, Homo sapiens
acctccagttacttt

SEQ ID NO: 1253472 - DNA, 15 bp, Homo sapiens
tacctccagttactt

SEQ ID NO: 1253473 - DNA, 15 bp, Homo sapiens
ctacctccagttact

SEQ ID NO: 1253474 - DNA, 15 bp, Homo sapiens
cctacctccagttac

SEQ ID NO: 1253475 - DNA, 15 bp, Homo sapiens
tcctacctccagtta

SEQ ID NO: 1253476 - DNA, 15 bp, Homo sapiens
ttcctacctccagtt

SEQ ID NO: 1253477 - DNA, 15 bp, Homo sapiens
attcctacctccagt

SEQ ID NO: 1253478 - DNA, 15 bp, Homo sapiens
cattcctacctccag

SEQ ID NO: 1253479 - DNA, 15 bp, Homo sapiens
tcattcctacctcca

SEQ ID NO: 1253480 - DNA, 15 bp, Homo sapiens
ttcattcctacctcc

SEQ ID NO: 1253481 - DNA, 15 bp, Homo sapiens
gttcattcctacctc

SEQ ID NO: 1253482 - DNA, 15 bp, Homo sapiens
ggttcattcctacct

SEQ ID NO: 1253483 - DNA, 15 bp, Homo sapiens
gggttcattcctacc

SEQ ID NO: 1253484 - DNA, 15 bp, Homo sapiens
tgggttcattcctac

SEQ ID NO: 1253485 - DNA, 15 bp, Homo sapiens
ttgggttcattccta

SEQ ID NO: 1253486 - DNA, 15 bp, Homo sapiens
cttgggttcattcct

SEQ ID NO: 1253487 - DNA, 15 bp, Homo sapiens
tcttgggttcattcc

SEQ ID NO: 1253488 - DNA, 15 bp, Homo sapiens
atcttgggttcattc

SEQ ID NO: 1253489 - DNA, 15 bp, Homo sapiens
aatcttgggttcatt

SEQ ID NO: 1253490 - DNA, 15 bp, Homo sapiens
aaatcttgggttcat

SEQ ID NO: 1253491 - DNA, 15 bp, Homo sapiens
taaatcttgggttca

SEQ ID NO: 1253492 - DNA, 15 bp, Homo sapiens
gtaaatcttgggttc

SEQ ID NO: 1253493 - DNA, 15 bp, Homo sapiens
agtaaatcttgggtt

SEQ ID NO: 1253494 - DNA, 15 bp, Homo sapiens
tagtaaatcttgggt

SEQ ID NO: 1253495 - DNA, 15 bp, Homo sapiens
ttagtaaatcttggg

SEQ ID NO: 1253496 - DNA, 15 bp, Homo sapiens
cttagtaaatcttgg

SEQ ID NO: 1253497 - DNA, 15 bp, Homo sapiens
gcttagtaaatcttg

SEQ ID NO: 1253498 - DNA, 15 bp, Homo sapiens
tgcttagtaaatctt

SEQ ID NO: 1253499 - DNA, 15 bp, Homo sapiens
gtgcttagtaaatct

SEQ ID NO: 1253500 - DNA, 15 bp, Homo sapiens
ggtgcttagtaaatc

SEQ ID NO: 1253501 - DNA, 15 bp, Homo sapiens
aggtgcttagtaaat

SEQ ID NO: 1253502 - DNA, 15 bp, Homo sapiens
aaggtgcttagtaaa

SEQ ID NO: 1253503 - DNA, 15 bp, Homo sapiens
gaaggtgcttagtaa

SEQ ID NO: 1253504 - DNA, 15 bp, Homo sapiens
agaaggtgcttagta

SEQ ID NO: 1253505 - DNA, 15 bp, Homo sapiens
cagaaggtgcttagt

SEQ ID NO: 1253506 - DNA, 15 bp, Homo sapiens
acagaaggtgcttag

SEQ ID NO: 1253507 - DNA, 15 bp, Homo sapiens
tacagaaggtgctta

SEQ ID NO: 1253508 - DNA, 15 bp, Homo sapiens
atacagaaggtgctt

SEQ ID NO: 1253509 - DNA, 15 bp, Homo sapiens
tatacagaaggtgct

SEQ ID NO: 1253510 - DNA, 15 bp, Homo sapiens
gtatacagaaggtgc

SEQ ID NO: 1253511 - DNA, 15 bp, Homo sapiens
ggtatacagaaggtg

SEQ ID NO: 1253512 - DNA, 15 bp, Homo sapiens
tggtatacagaaggt

SEQ ID NO: 1253513 - DNA, 15 bp, Homo sapiens
ttggtatacagaagg

SEQ ID NO: 1253514 - DNA, 15 bp, Homo sapiens
tttggtatacagaag

SEQ ID NO: 1253515 - DNA, 15 bp, Homo sapiens
gtttggtatacagaa

SEQ ID NO: 1253516 - DNA, 15 bp, Homo sapiens
agtttggtatacaga

SEQ ID NO: 1253517 - DNA, 15 bp, Homo sapiens
gagtttggtatacag

SEQ ID NO: 1253518 - DNA, 15 bp, Homo sapiens
tgagtttggtataca

SEQ ID NO: 1253519 - DNA, 15 bp, Homo sapiens
ttgagtttggtatac

SEQ ID NO: 1253520 - DNA, 15 bp, Homo sapiens
gttgagtttggtata

SEQ ID NO: 1253521 - DNA, 15 bp, Homo sapiens
tgttgagtttggtat

SEQ ID NO: 1253522 - DNA, 15 bp, Homo sapiens
gtgttgagtttggta

SEQ ID NO: 1253523 - DNA, 15 bp, Homo sapiens
agtgttgagtttggt

SEQ ID NO: 1253524 - DNA, 15 bp, Homo sapiens
tagtgttgagtttgg

SEQ ID NO: 1253525 - DNA, 15 bp, Homo sapiens
ctagtgttgagtttg

SEQ ID NO: 1253526 - DNA, 15 bp, Homo sapiens
cctagtgttgagttt

SEQ ID NO: 1253527 - DNA, 15 bp, Homo sapiens
tcctagtgttgagtt

SEQ ID NO: 1253528 - DNA, 15 bp, Homo sapiens
ctcctagtgttgagt

SEQ ID NO: 1253529 - DNA, 15 bp, Homo sapiens
actcctagtgttgag

SEQ ID NO: 1253530 - DNA, 15 bp, Homo sapiens
aactcctagtgttga

SEQ ID NO: 1253531 - DNA, 15 bp, Homo sapiens
aaactcctagtgttg

SEQ ID NO: 1253532 - DNA, 15 bp, Homo sapiens
taaactcctagtgtt

SEQ ID NO: 1253533 - DNA, 15 bp, Homo sapiens
ataaactcctagtgt

SEQ ID NO: 1253534 - DNA, 15 bp, Homo sapiens
tataaactcctagtg

SEQ ID NO: 1253535 - DNA, 15 bp, Homo sapiens
gtataaactcctagt

SEQ ID NO: 1253536 - DNA, 15 bp, Homo sapiens
tgtataaactcctag

SEQ ID NO: 1253537 - DNA, 15 bp, Homo sapiens
ttgtataaactccta

SEQ ID NO: 1253538 - DNA, 15 bp, Homo sapiens
attgtataaactcct

SEQ ID NO: 1253539 - DNA, 15 bp, Homo sapiens
gattgtataaactcc

SEQ ID NO: 1253540 - DNA, 15 bp, Homo sapiens
agattgtataaactc

SEQ ID NO: 1253541 - DNA, 15 bp, Homo sapiens
aagattgtataaact

SEQ ID NO: 1253542 - DNA, 15 bp, Homo sapiens
aaagattgtataaac

SEQ ID NO: 1253543 - DNA, 15 bp, Homo sapiens
taaagattgtataaa

SEQ ID NO: 1253544 - DNA, 15 bp, Homo sapiens
ttaaagattgtataa

SEQ ID NO: 1253545 - DNA, 15 bp, Homo sapiens
tttaaagattgtata

SEQ ID NO: 1253546 - DNA, 15 bp, Homo sapiens
ttttaaagattgtat

SEQ ID NO: 1253547 - DNA, 15 bp, Homo sapiens
gttttaaagattgta

SEQ ID NO: 1253548 - DNA, 15 bp, Homo sapiens
tgttttaaagattgt

SEQ ID NO: 1253549 - DNA, 15 bp, Homo sapiens
ctgttttaaagattg

SEQ ID NO: 1253550 - DNA, 15 bp, Homo sapiens
gctgttttaaagatt

SEQ ID NO: 1253551 - DNA, 15 bp, Homo sapiens
agctgttttaaagat

SEQ ID NO: 1253552 - DNA, 15 bp, Homo sapiens
gagctgttttaaaga

SEQ ID NO: 1253553 - DNA, 15 bp, Homo sapiens
agagctgttttaaag

SEQ ID NO: 1253554 - DNA, 15 bp, Homo sapiens
tagagctgttttaaa

SEQ ID NO: 1253555 - DNA, 15 bp, Homo sapiens
ttagagctgttttaa

SEQ ID NO: 1253556 - DNA, 15 bp, Homo sapiens
cttagagctgtttta

SEQ ID NO: 1253557 - DNA, 15 bp, Homo sapiens
tcttagagctgtttt

SEQ ID NO: 1253558 - DNA, 15 bp, Homo sapiens
ctcttagagctgttt

SEQ ID NO: 1253559 - DNA, 15 bp, Homo sapiens
actcttagagctgtt

SEQ ID NO: 1253560 - DNA, 15 bp, Homo sapiens
tactcttagagctgt

SEQ ID NO: 1253561 - DNA, 15 bp, Homo sapiens
ctactcttagagctg

SEQ ID NO: 1253562 - DNA, 15 bp, Homo sapiens
tctactcttagagct

SEQ ID NO: 1253563 - DNA, 15 bp, Homo sapiens
atctactcttagagc

SEQ ID NO: 1253564 - DNA, 15 bp, Homo sapiens
tatctactcttagag

SEQ ID NO: 1253565 - DNA, 15 bp, Homo sapiens
atatctactcttaga

SEQ ID NO: 1253566 - DNA, 15 bp, Homo sapiens
aatatctactcttag

SEQ ID NO: 1253567 - DNA, 15 bp, Homo sapiens
taatatctactctta

SEQ ID NO: 1253568 - DNA, 15 bp, Homo sapiens
ataatatctactctt

SEQ ID NO: 1253569 - DNA, 15 bp, Homo sapiens
tataatatctactct

SEQ ID NO: 1253570 - DNA, 15 bp, Homo sapiens
ttataatatctactc

SEQ ID NO: 1253571 - DNA, 15 bp, Homo sapiens
attataatatctact

SEQ ID NO: 1253572 - DNA, 15 bp, Homo sapiens
aattataatatctac

SEQ ID NO: 1253573 - DNA, 15 bp, Homo sapiens
gaattataatatcta

SEQ ID NO: 1253574 - DNA, 15 bp, Homo sapiens
ggaattataatatct

SEQ ID NO: 1253575 - DNA, 15 bp, Homo sapiens
gggaattataatatc

SEQ ID NO: 1253576 - DNA, 15 bp, Homo sapiens
agggaattataatat

SEQ ID NO: 1253577 - DNA, 15 bp, Homo sapiens
aagggaattataata

SEQ ID NO: 1253578 - DNA, 15 bp, Homo sapiens
gaagggaattataat

SEQ ID NO: 1253579 - DNA, 15 bp, Homo sapiens
agaagggaattataa

SEQ ID NO: 1253580 - DNA, 15 bp, Homo sapiens
cagaagggaattata

SEQ ID NO: 1253581 - DNA, 15 bp, Homo sapiens
gcagaagggaattat

SEQ ID NO: 1253582 - DNA, 15 bp, Homo sapiens
ggcagaagggaatta

SEQ ID NO: 1253583 - DNA, 15 bp, Homo sapiens
tggcagaagggaatt

SEQ ID NO: 1253584 - DNA, 15 bp, Homo sapiens
ttggcagaagggaat

SEQ ID NO: 1253585 - DNA, 15 bp, Homo sapiens
attggcagaagggaa

SEQ ID NO: 1253586 - DNA, 15 bp, Homo sapiens
tattggcagaaggga

SEQ ID NO: 1253587 - DNA, 15 bp, Homo sapiens
ttattggcagaaggg

SEQ ID NO: 1253588 - DNA, 15 bp, Homo sapiens
attattggcagaagg

SEQ ID NO: 1253589 - DNA, 15 bp, Homo sapiens
tattattggcagaag

SEQ ID NO: 1253590 - DNA, 15 bp, Homo sapiens
ttattattggcagaa

SEQ ID NO: 1253591 - DNA, 15 bp, Homo sapiens
tttattattggcaga

SEQ ID NO: 1253592 - DNA, 15 bp, Homo sapiens
atttattattggcag

SEQ ID NO: 1253593 - DNA, 15 bp, Homo sapiens
tatttattattggca

SEQ ID NO: 1253594 - DNA, 15 bp, Homo sapiens
ttatttattattggc

SEQ ID NO: 1253595 - DNA, 15 bp, Homo sapiens
attatttattattgg

SEQ ID NO: 1253596 - DNA, 15 bp, Homo sapiens
tattatttattattg

SEQ ID NO: 1253597 - DNA, 15 bp, Homo sapiens
ttattatttattatt

SEQ ID NO: 1253598 - DNA, 15 bp, Homo sapiens
cttattatttattat

SEQ ID NO: 1253599 - DNA, 15 bp, Homo sapiens
acttattatttatta

SEQ ID NO: 1253600 - DNA, 15 bp, Homo sapiens
cacttattatttatt

SEQ ID NO: 1253601 - DNA, 15 bp, Homo sapiens
tcacttattatttat

SEQ ID NO: 1253602 - DNA, 15 bp, Homo sapiens
gtcacttattattta

SEQ ID NO: 1253603 - DNA, 15 bp, Homo sapiens
agtcacttattattt

SEQ ID NO: 1253604 - DNA, 15 bp, Homo sapiens
tagtcacttattatt

SEQ ID NO: 1253605 - DNA, 15 bp, Homo sapiens
ttagtcacttattat

SEQ ID NO: 1253606 - DNA, 15 bp, Homo sapiens
cttagtcacttatta

SEQ ID NO: 1253607 - DNA, 15 bp, Homo sapiens
ccttagtcacttatt

SEQ ID NO: 1253608 - DNA, 15 bp, Homo sapiens
accttagtcacttat

SEQ ID NO: 1253609 - DNA, 15 bp, Homo sapiens
caccttagtcactta

SEQ ID NO: 1253610 - DNA, 15 bp, Homo sapiens
acaccttagtcactt

SEQ ID NO: 1253611 - DNA, 15 bp, Homo sapiens
aacaccttagtcact

SEQ ID NO: 1253612 - DNA, 15 bp, Homo sapiens
aaacaccttagtcac

SEQ ID NO: 1253613 - DNA, 15 bp, Homo sapiens
aaaacaccttagtca

SEQ ID NO: 1253614 - DNA, 15 bp, Homo sapiens
aaaaacaccttagtc

SEQ ID NO: 1253615 - DNA, 15 bp, Homo sapiens
caaaaacaccttagt

SEQ ID NO: 1253616 - DNA, 15 bp, Homo sapiens
tcaaaaacaccttag

SEQ ID NO: 1253617 - DNA, 15 bp, Homo sapiens
ttcaaaaacacctta

SEQ ID NO: 1253618 - DNA, 15 bp, Homo sapiens
cttcaaaaacacctt

SEQ ID NO: 1253619 - DNA, 15 bp, Homo sapiens
gcttcaaaaacacct

SEQ ID NO: 1253620 - DNA, 15 bp, Homo sapiens
agcttcaaaaacacc

SEQ ID NO: 1253621 - DNA, 15 bp, Homo sapiens
gagcttcaaaaacac

SEQ ID NO: 1253622 - DNA, 15 bp, Homo sapiens
tgagcttcaaaaaca

SEQ ID NO: 1253623 - DNA, 15 bp, Homo sapiens
ttgagcttcaaaaac

SEQ ID NO: 1253624 - DNA, 15 bp, Homo sapiens
cttgagcttcaaaaa

SEQ ID NO: 1253625 - DNA, 15 bp, Homo sapiens
tcttgagcttcaaaa

SEQ ID NO: 1253626 - DNA, 15 bp, Homo sapiens
atcttgagcttcaaa

SEQ ID NO: 1253627 - DNA, 15 bp, Homo sapiens
aatcttgagcttcaa

SEQ ID NO: 1253628 - DNA, 15 bp, Homo sapiens
caatcttgagcttca

SEQ ID NO: 1253629 - DNA, 15 bp, Homo sapiens
gcaatcttgagcttc

SEQ ID NO: 1253630 - DNA, 15 bp, Homo sapiens
agcaatcttgagctt

SEQ ID NO: 1253631 - DNA, 15 bp, Homo sapiens
aagcaatcttgagct

SEQ ID NO: 1253632 - DNA, 15 bp, Homo sapiens
caagcaatcttgagc

SEQ ID NO: 1253633 - DNA, 15 bp, Homo sapiens
tcaagcaatcttgag

SEQ ID NO: 1253634 - DNA, 15 bp, Homo sapiens
atcaagcaatcttga

SEQ ID NO: 1253635 - DNA, 15 bp, Homo sapiens
aatcaagcaatcttg

SEQ ID NO: 1253636 - DNA, 15 bp, Homo sapiens
gaatcaagcaatctt

SEQ ID NO: 1253637 - DNA, 15 bp, Homo sapiens
agaatcaagcaatct

SEQ ID NO: 1253638 - DNA, 15 bp, Homo sapiens
cagaatcaagcaatc

SEQ ID NO: 1253639 - DNA, 15 bp, Homo sapiens
gcagaatcaagcaat

SEQ ID NO: 1253640 - DNA, 15 bp, Homo sapiens
tgcagaatcaagcaa

SEQ ID NO: 1253641 - DNA, 15 bp, Homo sapiens
ctgcagaatcaagca

SEQ ID NO: 1253642 - DNA, 15 bp, Homo sapiens
actgcagaatcaagc

SEQ ID NO: 1253643 - DNA, 15 bp, Homo sapiens
gactgcagaatcaag

SEQ ID NO: 1253644 - DNA, 15 bp, Homo sapiens
agactgcagaatcaa

SEQ ID NO: 1253645 - DNA, 15 bp, Homo sapiens
aagactgcagaatca

SEQ ID NO: 1253646 - DNA, 15 bp, Homo sapiens
caagactgcagaatc

SEQ ID NO: 1253647 - DNA, 15 bp, Homo sapiens
acaagactgcagaat

SEQ ID NO: 1253648 - DNA, 15 bp, Homo sapiens
aacaagactgcagaa

SEQ ID NO: 1253649 - DNA, 15 bp, Homo sapiens
aaacaagactgcaga

SEQ ID NO: 1253650 - DNA, 15 bp, Homo sapiens
aaaacaagactgcag

SEQ ID NO: 1253651 - DNA, 15 bp, Homo sapiens
taaaacaagactgca

SEQ ID NO: 1253652 - DNA, 15 bp, Homo sapiens
ttaaaacaagactgc

SEQ ID NO: 1253653 - DNA, 15 bp, Homo sapiens
tttaaaacaagactg

SEQ ID NO: 1253654 - DNA, 15 bp, Homo sapiens
atttaaaacaagact

SEQ ID NO: 1253655 - DNA, 15 bp, Homo sapiens
aatttaaaacaagac

SEQ ID NO: 1253656 - DNA, 15 bp, Homo sapiens
aaatttaaaacaaga

SEQ ID NO: 1253657 - DNA, 15 bp, Homo sapiens
aaaatttaaaacaag

SEQ ID NO: 1253658 - DNA, 15 bp, Homo sapiens
caaaatttaaaacaa

SEQ ID NO: 1253659 - DNA, 15 bp, Homo sapiens
ccaaaatttaaaaca

SEQ ID NO: 1253660 - DNA, 15 bp, Homo sapiens
tccaaaatttaaaac

SEQ ID NO: 1253661 - DNA, 15 bp, Homo sapiens
gtccaaaatttaaaa

SEQ ID NO: 1253662 - DNA, 15 bp, Homo sapiens
tgtccaaaatttaaa

SEQ ID NO: 1253663 - DNA, 15 bp, Homo sapiens
atgtccaaaatttaa

SEQ ID NO: 1253664 - DNA, 15 bp, Homo sapiens
catgtccaaaattta

SEQ ID NO: 1253665 - DNA, 15 bp, Homo sapiens
ccatgtccaaaattt

SEQ ID NO: 1253666 - DNA, 15 bp, Homo sapiens
tccatgtccaaaatt

SEQ ID NO: 1253667 - DNA, 15 bp, Homo sapiens
ctccatgtccaaaat

SEQ ID NO: 1253668 - DNA, 15 bp, Homo sapiens
tctccatgtccaaaa

SEQ ID NO: 1253669 - DNA, 15 bp, Homo sapiens
ctctccatgtccaaa

SEQ ID NO: 1253670 - DNA, 15 bp, Homo sapiens
actctccatgtccaa

SEQ ID NO: 1253671 - DNA, 15 bp, Homo sapiens
aactctccatgtcca

SEQ ID NO: 1253672 - DNA, 15 bp, Homo sapiens
aaactctccatgtcc

SEQ ID NO: 1253673 - DNA, 15 bp, Homo sapiens
caaactctccatgtc

SEQ ID NO: 1253674 - DNA, 15 bp, Homo sapiens
ccaaactctccatgt

SEQ ID NO: 1253675 - DNA, 15 bp, Homo sapiens
tccaaactctccatg

SEQ ID NO: 1253676 - DNA, 15 bp, Homo sapiens
ctccaaactctccat

SEQ ID NO: 1253677 - DNA, 15 bp, Homo sapiens
actccaaactctcca

SEQ ID NO: 1253678 - DNA, 15 bp, Homo sapiens
aactccaaactctcc

SEQ ID NO: 1253679 - DNA, 15 bp, Homo sapiens
gaactccaaactctc

SEQ ID NO: 1253680 - DNA, 15 bp, Homo sapiens
agaactccaaactct

SEQ ID NO: 1253681 - DNA, 15 bp, Homo sapiens
cagaactccaaactc

SEQ ID NO: 1253682 - DNA, 15 bp, Homo sapiens
tcagaactccaaact

SEQ ID NO: 1253683 - DNA, 15 bp, Homo sapiens
ctcagaactccaaac

SEQ ID NO: 1253684 - DNA, 15 bp, Homo sapiens
tctcagaactccaaa

SEQ ID NO: 1253685 - DNA, 15 bp, Homo sapiens
atctcagaactccaa

SEQ ID NO: 1253686 - DNA, 15 bp, Homo sapiens
catctcagaactcca

SEQ ID NO: 1253687 - DNA, 15 bp, Homo sapiens
tcatctcagaactcc

SEQ ID NO: 1253688 - DNA, 15 bp, Homo sapiens
ctcatctcagaactc

SEQ ID NO: 1253689 - DNA, 15 bp, Homo sapiens
cctcatctcagaact

SEQ ID NO: 1253690 - DNA, 15 bp, Homo sapiens
ccctcatctcagaac

SEQ ID NO: 1253691 - DNA, 15 bp, Homo sapiens
tccctcatctcagaa

SEQ ID NO: 1253692 - DNA, 15 bp, Homo sapiens
ttccctcatctcaga

SEQ ID NO: 1253693 - DNA, 15 bp, Homo sapiens
cttccctcatctcag

SEQ ID NO: 1253694 - DNA, 15 bp, Homo sapiens
ccttccctcatctca

SEQ ID NO: 1253695 - DNA, 15 bp, Homo sapiens
gccttccctcatctc

SEQ ID NO: 1253696 - DNA, 15 bp, Homo sapiens
tgccttccctcatct

SEQ ID NO: 1253697 - DNA, 15 bp, Homo sapiens
atgccttccctcatc

SEQ ID NO: 1253698 - DNA, 15 bp, Homo sapiens
gatgccttccctcat

SEQ ID NO: 1253699 - DNA, 15 bp, Homo sapiens
agatgccttccctca

SEQ ID NO: 1253700 - DNA, 15 bp, Homo sapiens
cagatgccttccctc

SEQ ID NO: 1253701 - DNA, 15 bp, Homo sapiens
acagatgccttccct

SEQ ID NO: 1253702 - DNA, 15 bp, Homo sapiens
gacagatgccttccc

SEQ ID NO: 1253703 - DNA, 15 bp, Homo sapiens
tgacagatgccttcc

SEQ ID NO: 1253704 - DNA, 15 bp, Homo sapiens
atgacagatgccttc

SEQ ID NO: 1253705 - DNA, 15 bp, Homo sapiens
tatgacagatgcctt

SEQ ID NO: 1253706 - DNA, 15 bp, Homo sapiens
ctatgacagatgcct

SEQ ID NO: 1253707 - DNA, 15 bp, Homo sapiens
actatgacagatgcc

SEQ ID NO: 1253708 - DNA, 15 bp, Homo sapiens
cactatgacagatgc

SEQ ID NO: 1253709 - DNA, 15 bp, Homo sapiens
tcactatgacagatg

SEQ ID NO: 1253710 - DNA, 15 bp, Homo sapiens
ctcactatgacagat

SEQ ID NO: 1253711 - DNA, 15 bp, Homo sapiens
tctcactatgacaga

SEQ ID NO: 1253712 - DNA, 15 bp, Homo sapiens
ctctcactatgacag

SEQ ID NO: 1253713 - DNA, 15 bp, Homo sapiens
tctctcactatgaca

SEQ ID NO: 1253714 - DNA, 15 bp, Homo sapiens
ctctctcactatgac

SEQ ID NO: 1253715 - DNA, 15 bp, Homo sapiens
gctctctcactatga

SEQ ID NO: 1253716 - DNA, 15 bp, Homo sapiens
agctctctcactatg

SEQ ID NO: 1253717 - DNA, 15 bp, Homo sapiens
cagctctctcactat

SEQ ID NO: 1253718 - DNA, 15 bp, Homo sapiens
tcagctctctcacta

SEQ ID NO: 1253719 - DNA, 15 bp, Homo sapiens
ttcagctctctcact

SEQ ID NO: 1253720 - DNA, 15 bp, Homo sapiens
tttcagctctctcac

SEQ ID NO: 1253721 - DNA, 15 bp, Homo sapiens
ttttcagctctctca

SEQ ID NO: 1253722 - DNA, 15 bp, Homo sapiens
gttttcagctctctc

SEQ ID NO: 1253723 - DNA, 15 bp, Homo sapiens
tgttttcagctctct

SEQ ID NO: 1253724 - DNA, 15 bp, Homo sapiens
atgttttcagctctc

SEQ ID NO: 1253725 - DNA, 15 bp, Homo sapiens
catgttttcagctct

SEQ ID NO: 1253726 - DNA, 15 bp, Homo sapiens
ccatgttttcagctc

SEQ ID NO: 1253727 - DNA, 15 bp, Homo sapiens
tccatgttttcagct

SEQ ID NO: 1253728 - DNA, 15 bp, Homo sapiens
ctccatgttttcagc

SEQ ID NO: 1253729 - DNA, 15 bp, Homo sapiens
gctccatgttttcag

SEQ ID NO: 1253730 - DNA, 15 bp, Homo sapiens
agctccatgttttca

SEQ ID NO: 1253731 - DNA, 15 bp, Homo sapiens
gagctccatgttttc

SEQ ID NO: 1253732 - DNA, 15 bp, Homo sapiens
tgagctccatgtttt

SEQ ID NO: 1253733 - DNA, 15 bp, Homo sapiens
ctgagctccatgttt

SEQ ID NO: 1253734 - DNA, 15 bp, Homo sapiens
cctgagctccatgtt

SEQ ID NO: 1253735 - DNA, 15 bp, Homo sapiens
tcctgagctccatgt

SEQ ID NO: 1253736 - DNA, 15 bp, Homo sapiens
gtcctgagctccatg

SEQ ID NO: 1253737 - DNA, 15 bp, Homo sapiens
tgtcctgagctccat

SEQ ID NO: 1253738 - DNA, 15 bp, Homo sapiens
ttgtcctgagctcca

SEQ ID NO: 1253739 - DNA, 15 bp, Homo sapiens
tttgtcctgagctcc

SEQ ID NO: 1253740 - DNA, 15 bp, Homo sapiens
ttttgtcctgagctc

SEQ ID NO: 1253741 - DNA, 15 bp, Homo sapiens
cttttgtcctgagct

SEQ ID NO: 1253742 - DNA, 15 bp, Homo sapiens
acttttgtcctgagc

SEQ ID NO: 1253743 - DNA, 15 bp, Homo sapiens
gacttttgtcctgag

SEQ ID NO: 1253744 - DNA, 15 bp, Homo sapiens
tgacttttgtcctga

SEQ ID NO: 1253745 - DNA, 15 bp, Homo sapiens
ctgacttttgtcctg

SEQ ID NO: 1253746 - DNA, 15 bp, Homo sapiens
actgacttttgtcct

SEQ ID NO: 1253747 - DNA, 15 bp, Homo sapiens
cactgacttttgtcc

SEQ ID NO: 1253748 - DNA, 15 bp, Homo sapiens
gcactgacttttgtc

SEQ ID NO: 1253749 - DNA, 15 bp, Homo sapiens
agcactgacttttgt

SEQ ID NO: 1253750 - DNA, 15 bp, Homo sapiens
tagcactgacttttg

SEQ ID NO: 1253751 - DNA, 15 bp, Homo sapiens
ctagcactgactttt

SEQ ID NO: 1253752 - DNA, 15 bp, Homo sapiens
tctagcactgacttt

SEQ ID NO: 1253753 - DNA, 15 bp, Homo sapiens
ctctagcactgactt

SEQ ID NO: 1253754 - DNA, 15 bp, Homo sapiens
tctctagcactgact

SEQ ID NO: 1253755 - DNA, 15 bp, Homo sapiens
ctctctagcactgac

SEQ ID NO: 1253756 - DNA, 15 bp, Homo sapiens
tctctctagcactga

SEQ ID NO: 1253757 - DNA, 15 bp, Homo sapiens
atctctctagcactg

SEQ ID NO: 1253758 - DNA, 15 bp, Homo sapiens
gatctctctagcact

SEQ ID NO: 1253759 - DNA, 15 bp, Homo sapiens
tgatctctctagcac

SEQ ID NO: 1253760 - DNA, 15 bp, Homo sapiens
ctgatctctctagca

SEQ ID NO: 1253761 - DNA, 15 bp, Homo sapiens
actgatctctctagc

SEQ ID NO: 1253762 - DNA, 15 bp, Homo sapiens
aactgatctctctag

SEQ ID NO: 1253763 - DNA, 15 bp, Homo sapiens
caactgatctctcta

SEQ ID NO: 1253764 - DNA, 15 bp, Homo sapiens
ccaactgatctctct

SEQ ID NO: 1253765 - DNA, 15 bp, Homo sapiens
tccaactgatctctc

SEQ ID NO: 1253766 - DNA, 15 bp, Homo sapiens
ttccaactgatctct

SEQ ID NO: 1253767 - DNA, 15 bp, Homo sapiens
cttccaactgatctc

SEQ ID NO: 1253768 - DNA, 15 bp, Homo sapiens
tcttccaactgatct

SEQ ID NO: 1253769 - DNA, 15 bp, Homo sapiens
ctcttccaactgatc

SEQ ID NO: 1253770 - DNA, 15 bp, Homo sapiens
actcttccaactgat

SEQ ID NO: 1253771 - DNA, 15 bp, Homo sapiens
aactcttccaactga

SEQ ID NO: 1253772 - DNA, 15 bp, Homo sapiens
taactcttccaactg

SEQ ID NO: 1253773 - DNA, 15 bp, Homo sapiens
ataactcttccaact

SEQ ID NO: 1253774 - DNA, 15 bp, Homo sapiens
gataactcttccaac

SEQ ID NO: 1253775 - DNA, 15 bp, Homo sapiens
agataactcttccaa

SEQ ID NO: 1253776 - DNA, 15 bp, Homo sapiens
aagataactcttcca

SEQ ID NO: 1253777 - DNA, 15 bp, Homo sapiens
aaagataactcttcc

SEQ ID NO: 1253778 - DNA, 15 bp, Homo sapiens
taaagataactcttc

SEQ ID NO: 1253779 - DNA, 15 bp, Homo sapiens
ataaagataactctt

SEQ ID NO: 1253780 - DNA, 15 bp, Homo sapiens
aataaagataactct

SEQ ID NO: 1253781 - DNA, 15 bp, Homo sapiens
caataaagataactc

SEQ ID NO: 1253782 - DNA, 15 bp, Homo sapiens
acaataaagataact

SEQ ID NO: 1253783 - DNA, 15 bp, Homo sapiens
tacaataaagataac

SEQ ID NO: 1253784 - DNA, 15 bp, Homo sapiens
ctacaataaagataa

SEQ ID NO: 1253785 - DNA, 15 bp, Homo sapiens
actacaataaagata

SEQ ID NO: 1253786 - DNA, 15 bp, Homo sapiens
cactacaataaagat

SEQ ID NO: 1253787 - DNA, 15 bp, Homo sapiens
tcactacaataaaga

SEQ ID NO: 1253788 - DNA, 15 bp, Homo sapiens
ctcactacaataaag

SEQ ID NO: 1253789 - DNA, 15 bp, Homo sapiens
tctcactacaataaa

SEQ ID NO: 1253790 - DNA, 15 bp, Homo sapiens
gtctcactacaataa

SEQ ID NO: 1253791 - DNA, 15 bp, Homo sapiens
tgtctcactacaata

SEQ ID NO: 1253792 - DNA, 15 bp, Homo sapiens
atgtctcactacaat

SEQ ID NO: 1253793 - DNA, 15 bp, Homo sapiens
aatgtctcactacaa

SEQ ID NO: 1253794 - DNA, 15 bp, Homo sapiens
caatgtctcactaca

SEQ ID NO: 1253795 - DNA, 15 bp, Homo sapiens
tcaatgtctcactac

SEQ ID NO: 1253796 - DNA, 15 bp, Homo sapiens
ttcaatgtctcacta

SEQ ID NO: 1253797 - DNA, 15 bp, Homo sapiens
attcaatgtctcact

SEQ ID NO: 1253798 - DNA, 15 bp, Homo sapiens
aattcaatgtctcac

SEQ ID NO: 1253799 - DNA, 15 bp, Homo sapiens
aaattcaatgtctca

SEQ ID NO: 1253800 - DNA, 15 bp, Homo sapiens
aaaattcaatgtctc

SEQ ID NO: 1253801 - DNA, 15 bp, Homo sapiens
aaaaattcaatgtct

SEQ ID NO: 1253802 - DNA, 15 bp, Homo sapiens
gaaaaattcaatgtc

SEQ ID NO: 1253803 - DNA, 15 bp, Homo sapiens
tgaaaaattcaatgt

SEQ ID NO: 1253804 - DNA, 15 bp, Homo sapiens
ctgaaaaattcaatg

SEQ ID NO: 1253805 - DNA, 15 bp, Homo sapiens
actgaaaaattcaat

SEQ ID NO: 1253806 - DNA, 15 bp, Homo sapiens
cactgaaaaattcaa

SEQ ID NO: 1253807 - DNA, 15 bp, Homo sapiens
ccactgaaaaattca

SEQ ID NO: 1253808 - DNA, 15 bp, Homo sapiens
tccactgaaaaattc

SEQ ID NO: 1253809 - DNA, 15 bp, Homo sapiens
ttccactgaaaaatt

SEQ ID NO: 1253810 - DNA, 15 bp, Homo sapiens
tttccactgaaaaat

SEQ ID NO: 1253811 - DNA, 15 bp, Homo sapiens
ttttccactgaaaaa

SEQ ID NO: 1253812 - DNA, 15 bp, Homo sapiens
tttttccactgaaaa

SEQ ID NO: 1253813 - DNA, 15 bp, Homo sapiens
ttttttccactgaaa

SEQ ID NO: 1253814 - DNA, 15 bp, Homo sapiens
tttttttccactgaa

SEQ ID NO: 1253815 - DNA, 15 bp, Homo sapiens
ctttttttccactga

SEQ ID NO: 1253816 - DNA, 15 bp, Homo sapiens
gctttttttccactg

SEQ ID NO: 1253817 - DNA, 15 bp, Homo sapiens
tgctttttttccact

SEQ ID NO: 1253818 - DNA, 15 bp, Homo sapiens
gtgctttttttccac

SEQ ID NO: 1253819 - DNA, 15 bp, Homo sapiens
tgtgctttttttcca

SEQ ID NO: 1253820 - DNA, 15 bp, Homo sapiens
ctgtgctttttttcc

SEQ ID NO: 1253821 - DNA, 15 bp, Homo sapiens
tctgtgctttttttc

SEQ ID NO: 1253822 - DNA, 15 bp, Homo sapiens
ttctgtgcttttttt

SEQ ID NO: 1253823 - DNA, 15 bp, Homo sapiens
tttctgtgctttttt

SEQ ID NO: 1253824 - DNA, 15 bp, Homo sapiens
ttttctgtgcttttt

SEQ ID NO: 1253825 - DNA, 15 bp, Homo sapiens
tttttctgtgctttt

SEQ ID NO: 1253826 - DNA, 15 bp, Homo sapiens
ctttttctgtgcttt

SEQ ID NO: 1253827 - DNA, 15 bp, Homo sapiens
tctttttctgtgctt

SEQ ID NO: 1253828 - DNA, 15 bp, Homo sapiens
gtctttttctgtgct

SEQ ID NO: 1253829 - DNA, 15 bp, Homo sapiens
agtctttttctgtgc

SEQ ID NO: 1253830 - DNA, 15 bp, Homo sapiens
tagtctttttctgtg

SEQ ID NO: 1253831 - DNA, 15 bp, Homo sapiens
gtagtctttttctgt

SEQ ID NO: 1253832 - DNA, 15 bp, Homo sapiens
tgtagtctttttctg

SEQ ID NO: 1253833 - DNA, 15 bp, Homo sapiens
ctgtagtctttttct

SEQ ID NO: 1253834 - DNA, 15 bp, Homo sapiens
tctgtagtctttttc

SEQ ID NO: 1253835 - DNA, 15 bp, Homo sapiens
ctctgtagtcttttt

SEQ ID NO: 1253836 - DNA, 15 bp, Homo sapiens
cctctgtagtctttt

SEQ ID NO: 1253837 - DNA, 15 bp, Homo sapiens
ccctctgtagtcttt

SEQ ID NO: 1253838 - DNA, 15 bp, Homo sapiens
gccctctgtagtctt

SEQ ID NO: 1253839 - DNA, 15 bp, Homo sapiens
ggccctctgtagtct

SEQ ID NO: 1253840 - DNA, 15 bp, Homo sapiens
tggccctctgtagtc

SEQ ID NO: 1253841 - DNA, 15 bp, Homo sapiens
ttggccctctgtagt

SEQ ID NO: 1253842 - DNA, 15 bp, Homo sapiens
cttggccctctgtag

SEQ ID NO: 1253843 - DNA, 15 bp, Homo sapiens
tcttggccctctgta

SEQ ID NO: 1253844 - DNA, 15 bp, Homo sapiens
ttcttggccctctgt

SEQ ID NO: 1253845 - DNA, 15 bp, Homo sapiens
tttcttggccctctg

SEQ ID NO: 1253846 - DNA, 15 bp, Homo sapiens
ttttcttggccctct

SEQ ID NO: 1253847 - DNA, 15 bp, Homo sapiens
cttttcttggccctc

SEQ ID NO: 1253848 - DNA, 15 bp, Homo sapiens
tcttttcttggccct

SEQ ID NO: 1253849 - DNA, 15 bp, Homo sapiens
ttcttttcttggccc

SEQ ID NO: 1253850 - DNA, 15 bp, Homo sapiens
tttcttttcttggcc

SEQ ID NO: 1253851 - DNA, 15 bp, Homo sapiens
gtttcttttcttggc

SEQ ID NO: 1253852 - DNA, 15 bp, Homo sapiens
agtttcttttcttgg

SEQ ID NO: 1253853 - DNA, 15 bp, Homo sapiens
cagtttcttttcttg

SEQ ID NO: 1253854 - DNA, 15 bp, Homo sapiens
tcagtttcttttctt

SEQ ID NO: 1253855 - DNA, 15 bp, Homo sapiens
ctcagtttcttttct

SEQ ID NO: 1253856 - DNA, 15 bp, Homo sapiens
cctcagtttcttttc

SEQ ID NO: 1253857 - DNA, 15 bp, Homo sapiens
gcctcagtttctttt

SEQ ID NO: 1253858 - DNA, 15 bp, Homo sapiens
agcctcagtttcttt

SEQ ID NO: 1253859 - DNA, 15 bp, Homo sapiens
cagcctcagtttctt

SEQ ID NO: 1253860 - DNA, 15 bp, Homo sapiens
acagcctcagtttct

SEQ ID NO: 1253861 - DNA, 15 bp, Homo sapiens
gacagcctcagtttc

SEQ ID NO: 1253862 - DNA, 15 bp, Homo sapiens
tgacagcctcagttt

SEQ ID NO: 1253863 - DNA, 15 bp, Homo sapiens
ttgacagcctcagtt

SEQ ID NO: 1253864 - DNA, 15 bp, Homo sapiens
tttgacagcctcagt

SEQ ID NO: 1253865 - DNA, 15 bp, Homo sapiens
ttttgacagcctcag

SEQ ID NO: 1253866 - DNA, 15 bp, Homo sapiens
attttgacagcctca

SEQ ID NO: 1253867 - DNA, 15 bp, Homo sapiens
cattttgacagcctc

SEQ ID NO: 1253868 - DNA, 15 bp, Homo sapiens
tcattttgacagcct

SEQ ID NO: 1253869 - DNA, 15 bp, Homo sapiens
ttcattttgacagcc

SEQ ID NO: 1253870 - DNA, 15 bp, Homo sapiens
tttcattttgacagc

SEQ ID NO: 1253871 - DNA, 15 bp, Homo sapiens
ttttcattttgacag

SEQ ID NO: 1253872 - DNA, 15 bp, Homo sapiens
cttttcattttgaca

SEQ ID NO: 1253873 - DNA, 15 bp, Homo sapiens
tcttttcattttgac

SEQ ID NO: 1253874 - DNA, 15 bp, Homo sapiens
ctcttttcattttga

SEQ ID NO: 1253875 - DNA, 15 bp, Homo sapiens
cctcttttcattttg

SEQ ID NO: 1253876 - DNA, 15 bp, Homo sapiens
tcctcttttcatttt

SEQ ID NO: 1253877 - DNA, 15 bp, Homo sapiens
ctcctcttttcattt

SEQ ID NO: 1253878 - DNA, 15 bp, Homo sapiens
cctcctcttttcatt

SEQ ID NO: 1253879 - DNA, 15 bp, Homo sapiens
tcctcctcttttcat

SEQ ID NO: 1253880 - DNA, 15 bp, Homo sapiens
ctcctcctcttttca

SEQ ID NO: 1253881 - DNA, 15 bp, Homo sapiens
cctcctcctcttttc

SEQ ID NO: 1253882 - DNA, 15 bp, Homo sapiens
tcctcctcctctttt

SEQ ID NO: 1253883 - DNA, 15 bp, Homo sapiens
actcctcctcctctt

SEQ ID NO: 1253884 - DNA, 15 bp, Homo sapiens
cactcctcctcctct

SEQ ID NO: 1253885 - DNA, 15 bp, Homo sapiens
ccactcctcctcctc

SEQ ID NO: 1253886 - DNA, 15 bp, Homo sapiens
cccactcctcctcct

SEQ ID NO: 1253887 - DNA, 15 bp, Homo sapiens
acccactcctcctcc

SEQ ID NO: 1253888 - DNA, 15 bp, Homo sapiens
cacccactcctcctc

SEQ ID NO: 1253889 - DNA, 15 bp, Homo sapiens
tcacccactcctcct

SEQ ID NO: 1253890 - DNA, 15 bp, Homo sapiens
ctcacccactcctcc

SEQ ID NO: 1253891 - DNA, 15 bp, Homo sapiens
tctcacccactcctc

SEQ ID NO: 1253892 - DNA, 15 bp, Homo sapiens
ctctcacccactcct

SEQ ID NO: 1253893 - DNA, 15 bp, Homo sapiens
tctctcacccactcc

SEQ ID NO: 1253894 - DNA, 15 bp, Homo sapiens
gtctctcacccactc

SEQ ID NO: 1253895 - DNA, 15 bp, Homo sapiens
tgtctctcacccact

SEQ ID NO: 1253896 - DNA, 15 bp, Homo sapiens
ttgtctctcacccac

SEQ ID NO: 1253897 - DNA, 15 bp, Homo sapiens
tttgtctctcaccca

SEQ ID NO: 1253898 - DNA, 15 bp, Homo sapiens
ctttgtctctcaccc

SEQ ID NO: 1253899 - DNA, 15 bp, Homo sapiens
cctttgtctctcacc

SEQ ID NO: 1253900 - DNA, 15 bp, Homo sapiens
tcctttgtctctcac

SEQ ID NO: 1253901 - DNA, 15 bp, Homo sapiens
ctcctttgtctctca

SEQ ID NO: 1253902 - DNA, 15 bp, Homo sapiens
tctcctttgtctctc

SEQ ID NO: 1253903 - DNA, 15 bp, Homo sapiens
gtctcctttgtctct

SEQ ID NO: 1253904 - DNA, 15 bp, Homo sapiens
tgtctcctttgtctc

SEQ ID NO: 1253905 - DNA, 15 bp, Homo sapiens
gtgtctcctttgtct

SEQ ID NO: 1253906 - DNA, 15 bp, Homo sapiens
tgtgtctcctttgtc

SEQ ID NO: 1253907 - DNA, 15 bp, Homo sapiens
ctgtgtctcctttgt

SEQ ID NO: 1253908 - DNA, 15 bp, Homo sapiens
cctgtgtctcctttg

SEQ ID NO: 1253909 - DNA, 15 bp, Homo sapiens
gcctgtgtctccttt

SEQ ID NO: 1253910 - DNA, 15 bp, Homo sapiens
tgcctgtgtctcctt

SEQ ID NO: 1253911 - DNA, 15 bp, Homo sapiens
ctgcctgtgtctcct

SEQ ID NO: 1253912 - DNA, 15 bp, Homo sapiens
tctgcctgtgtctcc

SEQ ID NO: 1253913 - DNA, 15 bp, Homo sapiens
ctctgcctgtgtctc

SEQ ID NO: 1253914 - DNA, 15 bp, Homo sapiens
tctctgcctgtgtct

SEQ ID NO: 1253915 - DNA, 15 bp, Homo sapiens
ctctctgcctgtgtc

SEQ ID NO: 1253916 - DNA, 15 bp, Homo sapiens
tctctctgcctgtgt

SEQ ID NO: 1253917 - DNA, 15 bp, Homo sapiens
atctctctgcctgtg

SEQ ID NO: 1253918 - DNA, 15 bp, Homo sapiens
catctctctgcctgt

SEQ ID NO: 1253919 - DNA, 15 bp, Homo sapiens
acatctctctgcctg

SEQ ID NO: 1253920 - DNA, 15 bp, Homo sapiens
cacatctctctgcct

SEQ ID NO: 1253921 - DNA, 15 bp, Homo sapiens
ccacatctctctgcc

SEQ ID NO: 1253922 - DNA, 15 bp, Homo sapiens
tccacatctctctgc

SEQ ID NO: 1253923 - DNA, 15 bp, Homo sapiens
gtccacatctctctg

SEQ ID NO: 1253924 - DNA, 15 bp, Homo sapiens
tgtccacatctctct

SEQ ID NO: 1253925 - DNA, 15 bp, Homo sapiens
ctgtccacatctctc

SEQ ID NO: 1253926 - DNA, 15 bp, Homo sapiens
gctgtccacatctct

SEQ ID NO: 1253927 - DNA, 15 bp, Homo sapiens
tgctgtccacatctc

SEQ ID NO: 1253928 - DNA, 15 bp, Homo sapiens
gtgctgtccacatct

SEQ ID NO: 1253929 - DNA, 15 bp, Homo sapiens
tgtgctgtccacatc

SEQ ID NO: 1253930 - DNA, 15 bp, Homo sapiens
ctgtgctgtccacat

SEQ ID NO: 1253931 - DNA, 15 bp, Homo sapiens
gctgtgctgtccaca

SEQ ID NO: 1253932 - DNA, 15 bp, Homo sapiens
ggctgtgctgtccac

SEQ ID NO: 1253933 - DNA, 15 bp, Homo sapiens
gggctgtgctgtcca

SEQ ID NO: 1253934 - DNA, 15 bp, Homo sapiens
tgggctgtgctgtcc

SEQ ID NO: 1253935 - DNA, 15 bp, Homo sapiens
gtgggctgtgctgtc

SEQ ID NO: 1253936 - DNA, 15 bp, Homo sapiens
tgtgggctgtgctgt

SEQ ID NO: 1253937 - DNA, 15 bp, Homo sapiens
ctgtgggctgtgctg

SEQ ID NO: 1253938 - DNA, 15 bp, Homo sapiens
tctgtgggctgtgct

SEQ ID NO: 1253939 - DNA, 15 bp, Homo sapiens
gtctgtgggctgtgc

SEQ ID NO: 1253940 - DNA, 15 bp, Homo sapiens
tgtctgtgggctgtg

SEQ ID NO: 1253941 - DNA, 15 bp, Homo sapiens
gtgtctgtgggctgt

SEQ ID NO: 1253942 - DNA, 15 bp, Homo sapiens
tgtgtctgtgggctg

SEQ ID NO: 1253943 - DNA, 15 bp, Homo sapiens
gtgtgtctgtgggct

SEQ ID NO: 1253944 - DNA, 15 bp, Homo sapiens
tgtgtgtctgtgggc

SEQ ID NO: 1253945 - DNA, 15 bp, Homo sapiens
gtgtgtgtctgtggg

SEQ ID NO: 1253946 - DNA, 15 bp, Homo sapiens
agtgtgtgtctgtgg

SEQ ID NO: 1253947 - DNA, 15 bp, Homo sapiens
gagtgtgtgtctgtg

SEQ ID NO: 1253948 - DNA, 15 bp, Homo sapiens
agagtgtgtgtctgt

SEQ ID NO: 1253949 - DNA, 15 bp, Homo sapiens
tagagtgtgtgtctg

SEQ ID NO: 1253950 - DNA, 15 bp, Homo sapiens
gtagagtgtgtgtct

SEQ ID NO: 1253951 - DNA, 15 bp, Homo sapiens
tgtagagtgtgtgtc

SEQ ID NO: 1253952 - DNA, 15 bp, Homo sapiens
ttgtagagtgtgtgt

SEQ ID NO: 1253953 - DNA, 15 bp, Homo sapiens
cttgtagagtgtgtg

SEQ ID NO: 1253954 - DNA, 15 bp, Homo sapiens
ccttgtagagtgtgt

SEQ ID NO: 1253955 - DNA, 15 bp, Homo sapiens
cccttgtagagtgtg

SEQ ID NO: 1253956 - DNA, 15 bp, Homo sapiens
tcccttgtagagtgt

SEQ ID NO: 1253957 - DNA, 15 bp, Homo sapiens
gtcccttgtagagtg

SEQ ID NO: 1253958 - DNA, 15 bp, Homo sapiens
tgtcccttgtagagt

SEQ ID NO: 1253959 - DNA, 15 bp, Homo sapiens
gtgtcccttgtagag

SEQ ID NO: 1253960 - DNA, 15 bp, Homo sapiens
tgtgtcccttgtaga

SEQ ID NO: 1253961 - DNA, 15 bp, Homo sapiens
ctgtgtcccttgtag

SEQ ID NO: 1253962 - DNA, 15 bp, Homo sapiens
tctgtgtcccttgta

SEQ ID NO: 1253963 - DNA, 15 bp, Homo sapiens
gtctgtgtcccttgt

SEQ ID NO: 1253964 - DNA, 15 bp, Homo sapiens
agtctgtgtcccttg

SEQ ID NO: 1253965 - DNA, 15 bp, Homo sapiens
gagtctgtgtccctt

SEQ ID NO: 1253966 - DNA, 15 bp, Homo sapiens
agagtctgtgtccct

SEQ ID NO: 1253967 - DNA, 15 bp, Homo sapiens
gagagtctgtgtccc

SEQ ID NO: 1253968 - DNA, 15 bp, Homo sapiens
cgagagtctgtgtcc

SEQ ID NO: 1253969 - DNA, 15 bp, Homo sapiens
ccgagagtctgtgtc

SEQ ID NO: 1253970 - DNA, 15 bp, Homo sapiens
tccgagagtctgtgt

SEQ ID NO: 1253971 - DNA, 15 bp, Homo sapiens
atccgagagtctgtg

SEQ ID NO: 1253972 - DNA, 15 bp, Homo sapiens
gatccgagagtctgt

SEQ ID NO: 1253973 - DNA, 15 bp, Homo sapiens
ggatccgagagtctg

SEQ ID NO: 1253974 - DNA, 15 bp, Homo sapiens
tggatccgagagtct

SEQ ID NO: 1253975 - DNA, 15 bp, Homo sapiens
ctggatccgagagtc

SEQ ID NO: 1253976 - DNA, 15 bp, Homo sapiens
cctggatccgagagt

SEQ ID NO: 1253977 - DNA, 15 bp, Homo sapiens
ccctggatccgagag

SEQ ID NO: 1253978 - DNA, 15 bp, Homo sapiens
gccctggatccgaga

SEQ ID NO: 1253979 - DNA, 15 bp, Homo sapiens
tgccctggatccgag

SEQ ID NO: 1253980 - DNA, 15 bp, Homo sapiens
atgccctggatccga

SEQ ID NO: 1253981 - DNA, 15 bp, Homo sapiens
aatgccctggatccg

SEQ ID NO: 1253982 - DNA, 15 bp, Homo sapiens
aaatgccctggatcc

SEQ ID NO: 1253983 - DNA, 15 bp, Homo sapiens
aaaatgccctggatc

SEQ ID NO: 1253984 - DNA, 15 bp, Homo sapiens
taaaatgccctggat

SEQ ID NO: 1253985 - DNA, 15 bp, Homo sapiens
ttaaaatgccctgga

SEQ ID NO: 1253986 - DNA, 15 bp, Homo sapiens
gttaaaatgccctgg

SEQ ID NO: 1253987 - DNA, 15 bp, Homo sapiens
ggttaaaatgccctg

SEQ ID NO: 1253988 - DNA, 15 bp, Homo sapiens
ctggttaaaatgccc

SEQ ID NO: 1253989 - DNA, 15 bp, Homo sapiens
gctggttaaaatgcc

SEQ ID NO: 1253990 - DNA, 15 bp, Homo sapiens
tgctggttaaaatgc

SEQ ID NO: 1253991 - DNA, 15 bp, Homo sapiens
ctgctggttaaaatg

SEQ ID NO: 1253992 - DNA, 15 bp, Homo sapiens
tctgctggttaaaat

SEQ ID NO: 1253993 - DNA, 15 bp, Homo sapiens
atctgctggttaaaa

SEQ ID NO: 1253994 - DNA, 15 bp, Homo sapiens
gatctgctggttaaa

SEQ ID NO: 1253995 - DNA, 15 bp, Homo sapiens
tgatctgctggttaa

SEQ ID NO: 1253996 - DNA, 15 bp, Homo sapiens
ttgatctgctggtta

SEQ ID NO: 1253997 - DNA, 15 bp, Homo sapiens
cttgatctgctggtt

SEQ ID NO: 1253998 - DNA, 15 bp, Homo sapiens
tcttgatctgctggt

SEQ ID NO: 1253999 - DNA, 15 bp, Homo sapiens
gtcttgatctgctgg

SEQ ID NO: 1254000 - DNA, 15 bp, Homo sapiens
agtcttgatctgctg

SEQ ID NO: 1254001 - DNA, 15 bp, Homo sapiens
gagtcttgatctgct

SEQ ID NO: 1254002 - DNA, 15 bp, Homo sapiens
tgagtcttgatctgc

SEQ ID NO: 1254003 - DNA, 15 bp, Homo sapiens
atgagtcttgatctg

SEQ ID NO: 1254004 - DNA, 15 bp, Homo sapiens
aatgagtcttgatct

SEQ ID NO: 1254005 - DNA, 15 bp, Homo sapiens
aaatgagtcttgatc

SEQ ID NO: 1254006 - DNA, 15 bp, Homo sapiens
caaatgagtcttgat

SEQ ID NO: 1254007 - DNA, 15 bp, Homo sapiens
gcaaatgagtcttga

SEQ ID NO: 1254008 - DNA, 15 bp, Homo sapiens
ggcaaatgagtcttg

SEQ ID NO: 1254009 - DNA, 15 bp, Homo sapiens
tggcaaatgagtctt

SEQ ID NO: 1254010 - DNA, 15 bp, Homo sapiens
ctggcaaatgagtct

SEQ ID NO: 1254011 - DNA, 15 bp, Homo sapiens
actggcaaatgagtc

SEQ ID NO: 1254012 - DNA, 15 bp, Homo sapiens
gactggcaaatgagt

SEQ ID NO: 1254013 - DNA, 15 bp, Homo sapiens
tgactggcaaatgag

SEQ ID NO: 1254014 - DNA, 15 bp, Homo sapiens
atgactggcaaatga

SEQ ID NO: 1254015 - DNA, 15 bp, Homo sapiens
catgactggcaaatg

SEQ ID NO: 1254016 - DNA, 15 bp, Homo sapiens
tcatgactggcaaat

SEQ ID NO: 1254017 - DNA, 15 bp, Homo sapiens
ttcatgactggcaaa

SEQ ID NO: 1254018 - DNA, 15 bp, Homo sapiens
tttcatgactggcaa

SEQ ID NO: 1254019 - DNA, 15 bp, Homo sapiens
atttcatgactggca

SEQ ID NO: 1254020 - DNA, 15 bp, Homo sapiens
gatttcatgactggc

SEQ ID NO: 1254021 - DNA, 15 bp, Homo sapiens
tgatttcatgactgg

SEQ ID NO: 1254022 - DNA, 15 bp, Homo sapiens
ttgatttcatgactg

SEQ ID NO: 1254023 - DNA, 15 bp, Homo sapiens
gttgatttcatgact

SEQ ID NO: 1254024 - DNA, 15 bp, Homo sapiens
agttgatttcatgac

SEQ ID NO: 1254025 - DNA, 15 bp, Homo sapiens
gagttgatttcatga

SEQ ID NO: 1254026 - DNA, 15 bp, Homo sapiens
tgagttgatttcatg

SEQ ID NO: 1254027 - DNA, 15 bp, Homo sapiens
ctgagttgatttcat

SEQ ID NO: 1254028 - DNA, 15 bp, Homo sapiens
actgagttgatttca

SEQ ID NO: 1254029 - DNA, 15 bp, Homo sapiens
tactgagttgatttc

SEQ ID NO: 1254030 - DNA, 15 bp, Homo sapiens
atactgagttgattt

SEQ ID NO: 1254031 - DNA, 15 bp, Homo sapiens
aatactgagttgatt

SEQ ID NO: 1254032 - DNA, 15 bp, Homo sapiens
aaatactgagttgat

SEQ ID NO: 1254033 - DNA, 15 bp, Homo sapiens
aaaatactgagttga

SEQ ID NO: 1254034 - DNA, 15 bp, Homo sapiens
aaaaatactgagttg

SEQ ID NO: 1254035 - DNA, 15 bp, Homo sapiens
aaaaaatactgagtt

SEQ ID NO: 1254036 - DNA, 15 bp, Homo sapiens
aaaaaaatactgagt

SEQ ID NO: 1254037 - DNA, 15 bp, Homo sapiens
aaaaaaaatactgag

SEQ ID NO: 1254038 - DNA, 15 bp, Homo sapiens
aaaaaaaaatactga

SEQ ID NO: 1254039 - DNA, 15 bp, Homo sapiens
taaaaaaaaatactg

SEQ ID NO: 1254040 - DNA, 15 bp, Homo sapiens
ttaaaaaaaaatact

SEQ ID NO: 1254041 - DNA, 15 bp, Homo sapiens
tttaaaaaaaaatac

SEQ ID NO: 1254042 - DNA, 15 bp, Homo sapiens
ttttaaaaaaaaata

SEQ ID NO: 1254043 - DNA, 15 bp, Homo sapiens
cttttaaaaaaaaat

SEQ ID NO: 1254044 - DNA, 15 bp, Homo sapiens
tcttttaaaaaaaaa

SEQ ID NO: 1254045 - DNA, 15 bp, Homo sapiens
ctcttttaaaaaaaa

SEQ ID NO: 1254046 - DNA, 15 bp, Homo sapiens
actcttttaaaaaaa

SEQ ID NO: 1254047 - DNA, 15 bp, Homo sapiens
tactcttttaaaaaa

SEQ ID NO: 1254048 - DNA, 15 bp, Homo sapiens
ctactcttttaaaaa

SEQ ID NO: 1254049 - DNA, 15 bp, Homo sapiens
tctactcttttaaaa

SEQ ID NO: 1254050 - DNA, 15 bp, Homo sapiens
ttctactcttttaaa

SEQ ID NO: 1254051 - DNA, 15 bp, Homo sapiens
attctactcttttaa

SEQ ID NO: 1254052 - DNA, 15 bp, Homo sapiens
gattctactctttta

SEQ ID NO: 1254053 - DNA, 15 bp, Homo sapiens
tgattctactctttt

SEQ ID NO: 1254054 - DNA, 15 bp, Homo sapiens
ttgattctactcttt

SEQ ID NO: 1254055 - DNA, 15 bp, Homo sapiens
tttgattctactctt

SEQ ID NO: 1254056 - DNA, 15 bp, Homo sapiens
atttgattctactct

SEQ ID NO: 1254057 - DNA, 15 bp, Homo sapiens
tatttgattctactc

SEQ ID NO: 1254058 - DNA, 15 bp, Homo sapiens
ctatttgattctact

SEQ ID NO: 1254059 - DNA, 15 bp, Homo sapiens
tctatttgattctac

SEQ ID NO: 1254060 - DNA, 15 bp, Homo sapiens
ttctatttgattcta

SEQ ID NO: 1254061 - DNA, 15 bp, Homo sapiens
tttctatttgattct

SEQ ID NO: 1254062 - DNA, 15 bp, Homo sapiens
ttttctatttgattc

SEQ ID NO: 1254063 - DNA, 15 bp, Homo sapiens
gttttctatttgatt

SEQ ID NO: 1254064 - DNA, 15 bp, Homo sapiens
agttttctatttgat

SEQ ID NO: 1254065 - DNA, 15 bp, Homo sapiens
aagttttctatttga

SEQ ID NO: 1254066 - DNA, 15 bp, Homo sapiens
aaagttttctatttg

SEQ ID NO: 1254067 - DNA, 15 bp, Homo sapiens
caaagttttctattt

SEQ ID NO: 1254068 - DNA, 15 bp, Homo sapiens
acaaagttttctatt

SEQ ID NO: 1254069 - DNA, 15 bp, Homo sapiens
tacaaagttttctat

SEQ ID NO: 1254070 - DNA, 15 bp, Homo sapiens
gtacaaagttttcta

SEQ ID NO: 1254071 - DNA, 15 bp, Homo sapiens
agtacaaagttttct

SEQ ID NO: 1254072 - DNA, 15 bp, Homo sapiens
tagtacaaagttttc

SEQ ID NO: 1254073 - DNA, 15 bp, Homo sapiens
ttagtacaaagtttt

SEQ ID NO: 1254074 - DNA, 15 bp, Homo sapiens
cttagtacaaagttt

SEQ ID NO: 1254075 - DNA, 15 bp, Homo sapiens
acttagtacaaagtt

SEQ ID NO: 1254076 - DNA, 15 bp, Homo sapiens
tacttagtacaaagt

SEQ ID NO: 1254077 - DNA, 15 bp, Homo sapiens
gtacttagtacaaag

SEQ ID NO: 1254078 - DNA, 15 bp, Homo sapiens
agtacttagtacaaa

SEQ ID NO: 1254079 - DNA, 15 bp, Homo sapiens
cagtacttagtacaa

SEQ ID NO: 1254080 - DNA, 15 bp, Homo sapiens
acagtacttagtaca

SEQ ID NO: 1254081 - DNA, 15 bp, Homo sapiens
tacagtacttagtac

SEQ ID NO: 1254082 - DNA, 15 bp, Homo sapiens
atacagtacttagta

SEQ ID NO: 1254083 - DNA, 15 bp, Homo sapiens
aatacagtacttagt

SEQ ID NO: 1254084 - DNA, 15 bp, Homo sapiens
aaatacagtacttag

SEQ ID NO: 1254085 - DNA, 15 bp, Homo sapiens
aaaatacagtactta

SEQ ID NO: 1254086 - DNA, 15 bp, Homo sapiens
taaaatacagtactt

SEQ ID NO: 1254087 - DNA, 15 bp, Homo sapiens
ctaaaatacagtact

SEQ ID NO: 1254088 - DNA, 15 bp, Homo sapiens
cctaaaatacagtac

SEQ ID NO: 1254089 - DNA, 15 bp, Homo sapiens
tcctaaaatacagta

SEQ ID NO: 1254090 - DNA, 15 bp, Homo sapiens
ttcctaaaatacagt

SEQ ID NO: 1254091 - DNA, 15 bp, Homo sapiens
tttcctaaaatacag

SEQ ID NO: 1254092 - DNA, 15 bp, Homo sapiens
atttcctaaaataca

SEQ ID NO: 1254093 - DNA, 15 bp, Homo sapiens
tatttcctaaaatac

SEQ ID NO: 1254094 - DNA, 15 bp, Homo sapiens
gtatttcctaaaata

SEQ ID NO: 1254095 - DNA, 15 bp, Homo sapiens
agtatttcctaaaat

SEQ ID NO: 1254096 - DNA, 15 bp, Homo sapiens
tagtatttcctaaaa

SEQ ID NO: 1254097 - DNA, 15 bp, Homo sapiens
ttagtatttcctaaa

SEQ ID NO: 1254098 - DNA, 15 bp, Homo sapiens
attagtatttcctaa

SEQ ID NO: 1254099 - DNA, 15 bp, Homo sapiens
tattagtatttccta

SEQ ID NO: 1254100 - DNA, 15 bp, Homo sapiens
ttattagtatttcct

SEQ ID NO: 1254101 - DNA, 15 bp, Homo sapiens
tttattagtatttcc

SEQ ID NO: 1254102 - DNA, 15 bp, Homo sapiens
atttattagtatttc

SEQ ID NO: 1254103 - DNA, 15 bp, Homo sapiens
tatttattagtattt

SEQ ID NO: 1254104 - DNA, 15 bp, Homo sapiens
gtatttattagtatt

SEQ ID NO: 1254105 - DNA, 15 bp, Homo sapiens
agtatttattagtat

SEQ ID NO: 1254106 - DNA, 15 bp, Homo sapiens
tagtatttattagta

SEQ ID NO: 1254107 - DNA, 15 bp, Homo sapiens
atagtatttattagt

SEQ ID NO: 1254108 - DNA, 15 bp, Homo sapiens
aatagtatttattag

SEQ ID NO: 1254109 - DNA, 15 bp, Homo sapiens
aaatagtatttatta

SEQ ID NO: 1254110 - DNA, 15 bp, Homo sapiens
gaaatagtatttatt

SEQ ID NO: 1254111 - DNA, 15 bp, Homo sapiens
agaaatagtatttat

SEQ ID NO: 1254112 - DNA, 15 bp, Homo sapiens
aagaaatagtattta

SEQ ID NO: 1254113 - DNA, 15 bp, Homo sapiens
caagaaatagtattt

SEQ ID NO: 1254114 - DNA, 15 bp, Homo sapiens
tcaagaaatagtatt

SEQ ID NO: 1254115 - DNA, 15 bp, Homo sapiens
ttcaagaaatagtat

SEQ ID NO: 1254116 - DNA, 15 bp, Homo sapiens
tttcaagaaatagta

SEQ ID NO: 1254117 - DNA, 15 bp, Homo sapiens
ctttcaagaaatagt

SEQ ID NO: 1254118 - DNA, 15 bp, Homo sapiens
actttcaagaaatag

SEQ ID NO: 1254119 - DNA, 15 bp, Homo sapiens
aactttcaagaaata

SEQ ID NO: 1254120 - DNA, 15 bp, Homo sapiens
caactttcaagaaat

SEQ ID NO: 1254121 - DNA, 15 bp, Homo sapiens
ccaactttcaagaaa

SEQ ID NO: 1254122 - DNA, 15 bp, Homo sapiens
gccaactttcaagaa

SEQ ID NO: 1254123 - DNA, 15 bp, Homo sapiens
tgccaactttcaaga

SEQ ID NO: 1254124 - DNA, 15 bp, Homo sapiens
atgccaactttcaag

SEQ ID NO: 1254125 - DNA, 15 bp, Homo sapiens
catgccaactttcaa

SEQ ID NO: 1254126 - DNA, 15 bp, Homo sapiens
acatgccaactttca

SEQ ID NO: 1254127 - DNA, 15 bp, Homo sapiens
tacatgccaactttc

SEQ ID NO: 1254128 - DNA, 15 bp, Homo sapiens
atacatgccaacttt

SEQ ID NO: 1254129 - DNA, 15 bp, Homo sapiens
catacatgccaactt

SEQ ID NO: 1254130 - DNA, 15 bp, Homo sapiens
acatacatgccaact

SEQ ID NO: 1254131 - DNA, 15 bp, Homo sapiens
cacatacatgccaac

SEQ ID NO: 1254132 - DNA, 15 bp, Homo sapiens
acacatacatgccaa

SEQ ID NO: 1254133 - DNA, 15 bp, Homo sapiens
cacacatacatgcca

SEQ ID NO: 1254134 - DNA, 15 bp, Homo sapiens
acacacatacatgcc

SEQ ID NO: 1254135 - DNA, 15 bp, Homo sapiens
gacacacatacatgc

SEQ ID NO: 1254136 - DNA, 15 bp, Homo sapiens
ggacacacatacatg

SEQ ID NO: 1254137 - DNA, 15 bp, Homo sapiens
aggacacacatacat

SEQ ID NO: 1254138 - DNA, 15 bp, Homo sapiens
caggacacacataca

SEQ ID NO: 1254139 - DNA, 15 bp, Homo sapiens
ccaggacacacatac

SEQ ID NO: 1254140 - DNA, 15 bp, Homo sapiens
gccaggacacacata

SEQ ID NO: 1254141 - DNA, 15 bp, Homo sapiens
tgccaggacacacat

SEQ ID NO: 1254142 - DNA, 15 bp, Homo sapiens
gtgccaggacacaca

SEQ ID NO: 1254143 - DNA, 15 bp, Homo sapiens
agtgccaggacacac

SEQ ID NO: 1254144 - DNA, 15 bp, Homo sapiens
aagtgccaggacaca

SEQ ID NO: 1254145 - DNA, 15 bp, Homo sapiens
gaagtgccaggacac

SEQ ID NO: 1254146 - DNA, 15 bp, Homo sapiens
tgaagtgccaggaca

SEQ ID NO: 1254147 - DNA, 15 bp, Homo sapiens
atgaagtgccaggac

SEQ ID NO: 1254148 - DNA, 15 bp, Homo sapiens
tatgaagtgccagga

SEQ ID NO: 1254149 - DNA, 15 bp, Homo sapiens
ttatgaagtgccagg

SEQ ID NO: 1254150 - DNA, 15 bp, Homo sapiens
tttatgaagtgccag

SEQ ID NO: 1254151 - DNA, 15 bp, Homo sapiens
atttatgaagtgcca

SEQ ID NO: 1254152 - DNA, 15 bp, Homo sapiens
aatttatgaagtgcc

SEQ ID NO: 1254153 - DNA, 15 bp, Homo sapiens
caatttatgaagtgc

SEQ ID NO: 1254154 - DNA, 15 bp, Homo sapiens
acaatttatgaagtg

SEQ ID NO: 1254155 - DNA, 15 bp, Homo sapiens
tacaatttatgaagt

SEQ ID NO: 1254156 - DNA, 15 bp, Homo sapiens
gtacaatttatgaag

SEQ ID NO: 1254157 - DNA, 15 bp, Homo sapiens
agtacaatttatgaa

SEQ ID NO: 1254158 - DNA, 15 bp, Homo sapiens
tagtacaatttatga

SEQ ID NO: 1254159 - DNA, 15 bp, Homo sapiens
atagtacaatttatg

SEQ ID NO: 1254160 - DNA, 15 bp, Homo sapiens
aatagtacaatttat

SEQ ID NO: 1254161 - DNA, 15 bp, Homo sapiens
taatagtacaattta

SEQ ID NO: 1254162 - DNA, 15 bp, Homo sapiens
ataatagtacaattt

SEQ ID NO: 1254163 - DNA, 15 bp, Homo sapiens
tataatagtacaatt

SEQ ID NO: 1254164 - DNA, 15 bp, Homo sapiens
ctataatagtacaat

SEQ ID NO: 1254165 - DNA, 15 bp, Homo sapiens
actataatagtacaa

SEQ ID NO: 1254166 - DNA, 15 bp, Homo sapiens
aactataatagtaca

SEQ ID NO: 1254167 - DNA, 15 bp, Homo sapiens
aaactataatagtac

SEQ ID NO: 1254168 - DNA, 15 bp, Homo sapiens
caaactataatagta

SEQ ID NO: 1254169 - DNA, 15 bp, Homo sapiens
acaaactataatagt

SEQ ID NO: 1254170 - DNA, 15 bp, Homo sapiens
tacaaactataatag

SEQ ID NO: 1254171 - DNA, 15 bp, Homo sapiens
ttacaaactataata

SEQ ID NO: 1254172 - DNA, 15 bp, Homo sapiens
attacaaactataat

SEQ ID NO: 1254173 - DNA, 15 bp, Homo sapiens
aattacaaactataa

SEQ ID NO: 1254174 - DNA, 15 bp, Homo sapiens
caattacaaactata

SEQ ID NO: 1254175 - DNA, 15 bp, Homo sapiens
tcaattacaaactat

SEQ ID NO: 1254176 - DNA, 15 bp, Homo sapiens
ttcaattacaaacta

SEQ ID NO: 1254177 - DNA, 15 bp, Homo sapiens
tttcaattacaaact

SEQ ID NO: 1254178 - DNA, 15 bp, Homo sapiens
gtttcaattacaaac

SEQ ID NO: 1254179 - DNA, 15 bp, Homo sapiens
tgtttcaattacaaa

SEQ ID NO: 1254180 - DNA, 15 bp, Homo sapiens
ctgtttcaattacaa

SEQ ID NO: 1254181 - DNA, 15 bp, Homo sapiens
gctgtttcaattaca

SEQ ID NO: 1254182 - DNA, 15 bp, Homo sapiens
tgctgtttcaattac

SEQ ID NO: 1254183 - DNA, 15 bp, Homo sapiens
atgctgtttcaatta

SEQ ID NO: 1254184 - DNA, 15 bp, Homo sapiens
gatgctgtttcaatt

SEQ ID NO: 1254185 - DNA, 15 bp, Homo sapiens
tgatgctgtttcaat

SEQ ID NO: 1254186 - DNA, 15 bp, Homo sapiens
gtgatgctgtttcaa

SEQ ID NO: 1254187 - DNA, 15 bp, Homo sapiens
ggtgatgctgtttca

SEQ ID NO: 1254188 - DNA, 15 bp, Homo sapiens
tggtgatgctgtttc

SEQ ID NO: 1254189 - DNA, 15 bp, Homo sapiens
ttggtgatgctgttt

SEQ ID NO: 1254190 - DNA, 15 bp, Homo sapiens
attggtgatgctgtt

SEQ ID NO: 1254191 - DNA, 15 bp, Homo sapiens
gattggtgatgctgt

SEQ ID NO: 1254192 - DNA, 15 bp, Homo sapiens
ggattggtgatgctg

SEQ ID NO: 1254193 - DNA, 15 bp, Homo sapiens
gggattggtgatgct

SEQ ID NO: 1254194 - DNA, 15 bp, Homo sapiens
ggggattggtgatgc

SEQ ID NO: 1254195 - DNA, 15 bp, Homo sapiens
tggggattggtgatg

SEQ ID NO: 1254196 - DNA, 15 bp, Homo sapiens
gtggggattggtgat

SEQ ID NO: 1254197 - DNA, 15 bp, Homo sapiens
tgtggggattggtga

SEQ ID NO: 1254198 - DNA, 15 bp, Homo sapiens
atgtggggattggtg

SEQ ID NO: 1254199 - DNA, 15 bp, Homo sapiens
tatgtggggattggt

SEQ ID NO: 1254200 - DNA, 15 bp, Homo sapiens
ttatgtggggattgg

SEQ ID NO: 1254201 - DNA, 15 bp, Homo sapiens
gttatgtggggattg

SEQ ID NO: 1254202 - DNA, 15 bp, Homo sapiens
tgttatgtggggatt

SEQ ID NO: 1254203 - DNA, 15 bp, Homo sapiens
ttgttatgtggggat

SEQ ID NO: 1254204 - DNA, 15 bp, Homo sapiens
tttgttatgtgggga

SEQ ID NO: 1254205 - DNA, 15 bp, Homo sapiens
ctttgttatgtgggg

SEQ ID NO: 1254206 - DNA, 15 bp, Homo sapiens
tctttgttatgtggg

SEQ ID NO: 1254207 - DNA, 15 bp, Homo sapiens
ctctttgttatgtgg

SEQ ID NO: 1254208 - DNA, 15 bp, Homo sapiens
gctctttgttatgtg

SEQ ID NO: 1254209 - DNA, 15 bp, Homo sapiens
tgctctttgttatgt

SEQ ID NO: 1254210 - DNA, 15 bp, Homo sapiens
ctgctctttgttatg

SEQ ID NO: 1254211 - DNA, 15 bp, Homo sapiens
tctgctctttgttat

SEQ ID NO: 1254212 - DNA, 15 bp, Homo sapiens
ctctgctctttgtta

SEQ ID NO: 1254213 - DNA, 15 bp, Homo sapiens
tctctgctctttgtt

SEQ ID NO: 1254214 - DNA, 15 bp, Homo sapiens
gtctctgctctttgt

SEQ ID NO: 1254215 - DNA, 15 bp, Homo sapiens
ggtctctgctctttg

SEQ ID NO: 1254216 - DNA, 15 bp, Homo sapiens
aggtctctgctcttt

SEQ ID NO: 1254217 - DNA, 15 bp, Homo sapiens
aaggtctctgctctt

SEQ ID NO: 1254218 - DNA, 15 bp, Homo sapiens
taaggtctctgctct

SEQ ID NO: 1254219 - DNA, 15 bp, Homo sapiens
ttaaggtctctgctc

SEQ ID NO: 1254220 - DNA, 15 bp, Homo sapiens
tttaaggtctctgct

SEQ ID NO: 1254221 - DNA, 15 bp, Homo sapiens
ctttaaggtctctgc

SEQ ID NO: 1254222 - DNA, 15 bp, Homo sapiens
tctttaaggtctctg

SEQ ID NO: 1254223 - DNA, 15 bp, Homo sapiens
gtctttaaggtctct

SEQ ID NO: 1254224 - DNA, 15 bp, Homo sapiens
cgtctttaaggtctc

SEQ ID NO: 1254225 - DNA, 15 bp, Homo sapiens
tcgtctttaaggtct

SEQ ID NO: 1254226 - DNA, 15 bp, Homo sapiens
ctcgtctttaaggtc

SEQ ID NO: 1254227 - DNA, 15 bp, Homo sapiens
actcgtctttaaggt

SEQ ID NO: 1254228 - DNA, 15 bp, Homo sapiens
cactcgtctttaagg

SEQ ID NO: 1254229 - DNA, 15 bp, Homo sapiens
ccactcgtctttaag

SEQ ID NO: 1254230 - DNA, 15 bp, Homo sapiens
cccactcgtctttaa

SEQ ID NO: 1254231 - DNA, 15 bp, Homo sapiens
ccccactcgtcttta

SEQ ID NO: 1254232 - DNA, 15 bp, Homo sapiens
gccccactcgtcttt

SEQ ID NO: 1254233 - DNA, 15 bp, Homo sapiens
ggccccactcgtctt

SEQ ID NO: 1254234 - DNA, 15 bp, Homo sapiens
tggccccactcgtct

SEQ ID NO: 1254235 - DNA, 15 bp, Homo sapiens
ctggccccactcgtc

SEQ ID NO: 1254236 - DNA, 15 bp, Homo sapiens
cctggccccactcgt

SEQ ID NO: 1254237 - DNA, 15 bp, Homo sapiens
gcctggccccactcg

SEQ ID NO: 1254238 - DNA, 15 bp, Homo sapiens
agcctggccccactc

SEQ ID NO: 1254239 - DNA, 15 bp, Homo sapiens
cagcctggccccact

SEQ ID NO: 1254240 - DNA, 15 bp, Homo sapiens
tcagcctggccccac

SEQ ID NO: 1254241 - DNA, 15 bp, Homo sapiens
ttcagcctggcccca

SEQ ID NO: 1254242 - DNA, 15 bp, Homo sapiens
cttcagcctggcccc

SEQ ID NO: 1254243 - DNA, 15 bp, Homo sapiens
ccttcagcctggccc

SEQ ID NO: 1254244 - DNA, 15 bp, Homo sapiens
cccttcagcctggcc

SEQ ID NO: 1254245 - DNA, 15 bp, Homo sapiens
ccccttcagcctggc

SEQ ID NO: 1254246 - DNA, 15 bp, Homo sapiens
gccccttcagcctgg

SEQ ID NO: 1254247 - DNA, 15 bp, Homo sapiens
tgccccttcagcctg

SEQ ID NO: 1254248 - DNA, 15 bp, Homo sapiens
gtgccccttcagcct

SEQ ID NO: 1254249 - DNA, 15 bp, Homo sapiens
tgtgccccttcagcc

SEQ ID NO: 1254250 - DNA, 15 bp, Homo sapiens
ctgtgccccttcagc

SEQ ID NO: 1254251 - DNA, 15 bp, Homo sapiens
gctgtgccccttcag

SEQ ID NO: 1254252 - DNA, 15 bp, Homo sapiens
agctgtgccccttca

SEQ ID NO: 1254253 - DNA, 15 bp, Homo sapiens
aagctgtgccccttc

SEQ ID NO: 1254254 - DNA, 15 bp, Homo sapiens
caagctgtgcccctt

SEQ ID NO: 1254255 - DNA, 15 bp, Homo sapiens
tcaagctgtgcccct

SEQ ID NO: 1254256 - DNA, 15 bp, Homo sapiens
ctcaagctgtgcccc

SEQ ID NO: 1254257 - DNA, 15 bp, Homo sapiens
gctcaagctgtgccc

SEQ ID NO: 1254258 - DNA, 15 bp, Homo sapiens
ggctcaagctgtgcc

SEQ ID NO: 1254259 - DNA, 15 bp, Homo sapiens
tggctcaagctgtgc

SEQ ID NO: 1254260 - DNA, 15 bp, Homo sapiens
ttggctcaagctgtg

SEQ ID NO: 1254261 - DNA, 15 bp, Homo sapiens
tttggctcaagctgt

SEQ ID NO: 1254262 - DNA, 15 bp, Homo sapiens
ctttggctcaagctg

SEQ ID NO: 1254263 - DNA, 15 bp, Homo sapiens
gctttggctcaagct

SEQ ID NO: 1254264 - DNA, 15 bp, Homo sapiens
tgctttggctcaagc

SEQ ID NO: 1254265 - DNA, 15 bp, Homo sapiens
gtgctttggctcaag

SEQ ID NO: 1254266 - DNA, 15 bp, Homo sapiens
tgtgctttggctcaa

SEQ ID NO: 1254267 - DNA, 15 bp, Homo sapiens
ctgtgctttggctca

SEQ ID NO: 1254268 - DNA, 15 bp, Homo sapiens
tctgtgctttggctc

SEQ ID NO: 1254269 - DNA, 15 bp, Homo sapiens
ttctgtgctttggct

SEQ ID NO: 1254270 - DNA, 15 bp, Homo sapiens
gttctgtgctttggc

SEQ ID NO: 1254271 - DNA, 15 bp, Homo sapiens
tgttctgtgctttgg

SEQ ID NO: 1254272 - DNA, 15 bp, Homo sapiens
ctgttctgtgctttg

SEQ ID NO: 1254273 - DNA, 15 bp, Homo sapiens
actgttctgtgcttt

SEQ ID NO: 1254274 - DNA, 15 bp, Homo sapiens
cactgttctgtgctt

SEQ ID NO: 1254275 - DNA, 15 bp, Homo sapiens
ccactgttctgtgct

SEQ ID NO: 1254276 - DNA, 15 bp, Homo sapiens
cccactgttctgtgc

SEQ ID NO: 1254277 - DNA, 15 bp, Homo sapiens
gcccactgttctgtg

SEQ ID NO: 1254278 - DNA, 15 bp, Homo sapiens
agcccactgttctgt

SEQ ID NO: 1254279 - DNA, 15 bp, Homo sapiens
cagcccactgttctg

SEQ ID NO: 1254280 - DNA, 15 bp, Homo sapiens
tcagcccactgttct

SEQ ID NO: 1254281 - DNA, 15 bp, Homo sapiens
ttcagcccactgttc

SEQ ID NO: 1254282 - DNA, 15 bp, Homo sapiens
tttcagcccactgtt

SEQ ID NO: 1254283 - DNA, 15 bp, Homo sapiens
ctttcagcccactgt

SEQ ID NO: 1254284 - DNA, 15 bp, Homo sapiens
gctttcagcccactg

SEQ ID NO: 1254285 - DNA, 15 bp, Homo sapiens
tgctttcagcccact

SEQ ID NO: 1254286 - DNA, 15 bp, Homo sapiens
gtgctttcagcccac

SEQ ID NO: 1254287 - DNA, 15 bp, Homo sapiens
ggtgctttcagccca

SEQ ID NO: 1254288 - DNA, 15 bp, Homo sapiens
gggtgctttcagccc

SEQ ID NO: 1254289 - DNA, 15 bp, Homo sapiens
agggtgctttcagcc

SEQ ID NO: 1254290 - DNA, 15 bp, Homo sapiens
tagggtgctttcagc

SEQ ID NO: 1254291 - DNA, 15 bp, Homo sapiens
ctagggtgctttcag

SEQ ID NO: 1254292 - DNA, 15 bp, Homo sapiens
cctagggtgctttca

SEQ ID NO: 1254293 - DNA, 15 bp, Homo sapiens
ccctagggtgctttc

SEQ ID NO: 1254294 - DNA, 15 bp, Homo sapiens
tccctagggtgcttt

SEQ ID NO: 1254295 - DNA, 15 bp, Homo sapiens
ctccctagggtgctt

SEQ ID NO: 1254296 - DNA, 15 bp, Homo sapiens
cctccctagggtgct

SEQ ID NO: 1254297 - DNA, 15 bp, Homo sapiens
ccctccctagggtgc

SEQ ID NO: 1254298 - DNA, 15 bp, Homo sapiens
tccctccctagggtg

SEQ ID NO: 1254299 - DNA, 15 bp, Homo sapiens
ctccctccctagggt

SEQ ID NO: 1254300 - DNA, 15 bp, Homo sapiens
tctccctccctaggg

SEQ ID NO: 1254301 - DNA, 15 bp, Homo sapiens
ttctccctccctagg

SEQ ID NO: 1254302 - DNA, 15 bp, Homo sapiens
attctccctccctag

SEQ ID NO: 1254303 - DNA, 15 bp, Homo sapiens
aattctccctcccta

SEQ ID NO: 1254304 - DNA, 15 bp, Homo sapiens
gaattctccctccct

SEQ ID NO: 1254305 - DNA, 15 bp, Homo sapiens
tgaattctccctccc

SEQ ID NO: 1254306 - DNA, 15 bp, Homo sapiens
ttgaattctccctcc

SEQ ID NO: 1254307 - DNA, 15 bp, Homo sapiens
cttgaattctccctc

SEQ ID NO: 1254308 - DNA, 15 bp, Homo sapiens
ccttgaattctccct

SEQ ID NO: 1254309 - DNA, 15 bp, Homo sapiens
tccttgaattctccc

SEQ ID NO: 1254310 - DNA, 15 bp, Homo sapiens
ttccttgaattctcc

SEQ ID NO: 1254311 - DNA, 15 bp, Homo sapiens
cttccttgaattctc

SEQ ID NO: 1254312 - DNA, 15 bp, Homo sapiens
ccttccttgaattct

SEQ ID NO: 1254313 - DNA, 15 bp, Homo sapiens
cccttccttgaattc

SEQ ID NO: 1254314 - DNA, 15 bp, Homo sapiens
ccccttccttgaatt

SEQ ID NO: 1254315 - DNA, 15 bp, Homo sapiens
cccccttccttgaat

SEQ ID NO: 1254316 - DNA, 15 bp, Homo sapiens
gcccccttccttgaa

SEQ ID NO: 1254317 - DNA, 15 bp, Homo sapiens
agcccccttccttga

SEQ ID NO: 1254318 - DNA, 15 bp, Homo sapiens
aagcccccttccttg

SEQ ID NO: 1254319 - DNA, 15 bp, Homo sapiens
caagcccccttcctt

SEQ ID NO: 1254320 - DNA, 15 bp, Homo sapiens
ccaagcccccttcct

SEQ ID NO: 1254321 - DNA, 15 bp, Homo sapiens
cccaagcccccttcc

SEQ ID NO: 1254322 - DNA, 15 bp, Homo sapiens
acccaagcccccttc

SEQ ID NO: 1254323 - DNA, 15 bp, Homo sapiens
cacccaagccccctt

SEQ ID NO: 1254324 - DNA, 15 bp, Homo sapiens
ccacccaagccccct

SEQ ID NO: 1254325 - DNA, 15 bp, Homo sapiens
gccacccaagccccc

SEQ ID NO: 1254326 - DNA, 15 bp, Homo sapiens
ggccacccaagcccc

SEQ ID NO: 1254327 - DNA, 15 bp, Homo sapiens
tggccacccaagccc

SEQ ID NO: 1254328 - DNA, 15 bp, Homo sapiens
ctggccacccaagcc

SEQ ID NO: 1254329 - DNA, 15 bp, Homo sapiens
cctggccacccaagc

SEQ ID NO: 1254330 - DNA, 15 bp, Homo sapiens
gcctggccacccaag

SEQ ID NO: 1254331 - DNA, 15 bp, Homo sapiens
agcctggccacccaa

SEQ ID NO: 1254332 - DNA, 15 bp, Homo sapiens
cagcctggccaccca

SEQ ID NO: 1254333 - DNA, 15 bp, Homo sapiens
tcagcctggccaccc

SEQ ID NO: 1254334 - DNA, 15 bp, Homo sapiens
ctcagcctggccacc

SEQ ID NO: 1254335 - DNA, 15 bp, Homo sapiens
gctcagcctggccac

SEQ ID NO: 1254336 - DNA, 15 bp, Homo sapiens
ggctcagcctggcca

SEQ ID NO: 1254337 - DNA, 15 bp, Homo sapiens
tggctcagcctggcc

SEQ ID NO: 1254338 - DNA, 15 bp, Homo sapiens
ctggctcagcctggc

SEQ ID NO: 1254339 - DNA, 15 bp, Homo sapiens
gctggctcagcctgg

SEQ ID NO: 1254340 - DNA, 15 bp, Homo sapiens
cgctggctcagcctg

SEQ ID NO: 1254341 - DNA, 15 bp, Homo sapiens
acgctggctcagcct

SEQ ID NO: 1254342 - DNA, 15 bp, Homo sapiens
cacgctggctcagcc

SEQ ID NO: 1254343 - DNA, 15 bp, Homo sapiens
tcacgctggctcagc

SEQ ID NO: 1254344 - DNA, 15 bp, Homo sapiens
ctcacgctggctcag

SEQ ID NO: 1254345 - DNA, 15 bp, Homo sapiens
gctcacgctggctca

SEQ ID NO: 1254346 - DNA, 15 bp, Homo sapiens
tgctcacgctggctc

SEQ ID NO: 1254347 - DNA, 15 bp, Homo sapiens
atgctcacgctggct

SEQ ID NO: 1254348 - DNA, 15 bp, Homo sapiens
catgctcacgctggc

SEQ ID NO: 1254349 - DNA, 15 bp, Homo sapiens
acatgctcacgctgg

SEQ ID NO: 1254350 - DNA, 15 bp, Homo sapiens
cacatgctcacgctg

SEQ ID NO: 1254351 - DNA, 15 bp, Homo sapiens
tcacatgctcacgct

SEQ ID NO: 1254352 - DNA, 15 bp, Homo sapiens
ctcacatgctcacgc

SEQ ID NO: 1254353 - DNA, 15 bp, Homo sapiens
cctcacatgctcacg

SEQ ID NO: 1254354 - DNA, 15 bp, Homo sapiens
tcctcacatgctcac

SEQ ID NO: 1254355 - DNA, 15 bp, Homo sapiens
ctcctcacatgctca

SEQ ID NO: 1254356 - DNA, 15 bp, Homo sapiens
cctcctcacatgctc

SEQ ID NO: 1254357 - DNA, 15 bp, Homo sapiens
gcctcctcacatgct

SEQ ID NO: 1254358 - DNA, 15 bp, Homo sapiens
agcctcctcacatgc

SEQ ID NO: 1254359 - DNA, 15 bp, Homo sapiens
cagcctcctcacatg

SEQ ID NO: 1254360 - DNA, 15 bp, Homo sapiens
ccagcctcctcacat

SEQ ID NO: 1254361 - DNA, 15 bp, Homo sapiens
accagcctcctcaca

SEQ ID NO: 1254362 - DNA, 15 bp, Homo sapiens
caccagcctcctcac

SEQ ID NO: 1254363 - DNA, 15 bp, Homo sapiens
tcaccagcctcctca

SEQ ID NO: 1254364 - DNA, 15 bp, Homo sapiens
ctcaccagcctcctc

SEQ ID NO: 1254365 - DNA, 15 bp, Homo sapiens
gctcaccagcctcct

SEQ ID NO: 1254366 - DNA, 15 bp, Homo sapiens
agctcaccagcctcc

SEQ ID NO: 1254367 - DNA, 15 bp, Homo sapiens
cagctcaccagcctc

SEQ ID NO: 1254368 - DNA, 15 bp, Homo sapiens
tcagctcaccagcct

SEQ ID NO: 1254369 - DNA, 15 bp, Homo sapiens
atcagctcaccagcc

SEQ ID NO: 1254370 - DNA, 15 bp, Homo sapiens
aatcagctcaccagc

SEQ ID NO: 1254371 - DNA, 15 bp, Homo sapiens
caatcagctcaccag

SEQ ID NO: 1254372 - DNA, 15 bp, Homo sapiens
ccaatcagctcacca

SEQ ID NO: 1254373 - DNA, 15 bp, Homo sapiens
cccaatcagctcacc

SEQ ID NO: 1254374 - DNA, 15 bp, Homo sapiens
acccaatcagctcac

SEQ ID NO: 1254375 - DNA, 15 bp, Homo sapiens
cacccaatcagctca

SEQ ID NO: 1254376 - DNA, 15 bp, Homo sapiens
ccacccaatcagctc

SEQ ID NO: 1254377 - DNA, 15 bp, Homo sapiens
cccacccaatcagct

SEQ ID NO: 1254378 - DNA, 15 bp, Homo sapiens
tcccacccaatcagc

SEQ ID NO: 1254379 - DNA, 15 bp, Homo sapiens
atcccacccaatcag

SEQ ID NO: 1254380 - DNA, 15 bp, Homo sapiens
catcccacccaatca

SEQ ID NO: 1254381 - DNA, 15 bp, Homo sapiens
acatcccacccaatc

SEQ ID NO: 1254382 - DNA, 15 bp, Homo sapiens
cacatcccacccaat

SEQ ID NO: 1254383 - DNA, 15 bp, Homo sapiens
acacatcccacccaa

SEQ ID NO: 1254384 - DNA, 15 bp, Homo sapiens
gacacatcccaccca

SEQ ID NO: 1254385 - DNA, 15 bp, Homo sapiens
agacacatcccaccc

SEQ ID NO: 1254386 - DNA, 15 bp, Homo sapiens
tagacacatcccacc

SEQ ID NO: 1254387 - DNA, 15 bp, Homo sapiens
gtagacacatcccac

SEQ ID NO: 1254388 - DNA, 15 bp, Homo sapiens
agtagacacatccca

SEQ ID NO: 1254389 - DNA, 15 bp, Homo sapiens
aagtagacacatccc

SEQ ID NO: 1254390 - DNA, 15 bp, Homo sapiens
gaagtagacacatcc

SEQ ID NO: 1254391 - DNA, 15 bp, Homo sapiens
agaagtagacacatc

SEQ ID NO: 1254392 - DNA, 15 bp, Homo sapiens
gagaagtagacacat

SEQ ID NO: 1254393 - DNA, 15 bp, Homo sapiens
ggagaagtagacaca

SEQ ID NO: 1254394 - DNA, 15 bp, Homo sapiens
tggagaagtagacac

SEQ ID NO: 1254395 - DNA, 15 bp, Homo sapiens
ctggagaagtagaca

SEQ ID NO: 1254396 - DNA, 15 bp, Homo sapiens
tctggagaagtagac

SEQ ID NO: 1254397 - DNA, 15 bp, Homo sapiens
ctctggagaagtaga

SEQ ID NO: 1254398 - DNA, 15 bp, Homo sapiens
tctctggagaagtag

SEQ ID NO: 1254399 - DNA, 15 bp, Homo sapiens
ttctctggagaagta

SEQ ID NO: 1254400 - DNA, 15 bp, Homo sapiens
cttctctggagaagt

SEQ ID NO: 1254401 - DNA, 15 bp, Homo sapiens
ccttctctggagaag

SEQ ID NO: 1254402 - DNA, 15 bp, Homo sapiens
cccttctctggagaa

SEQ ID NO: 1254403 - DNA, 15 bp, Homo sapiens
acccttctctggaga

SEQ ID NO: 1254404 - DNA, 15 bp, Homo sapiens
cacccttctctggag

SEQ ID NO: 1254405 - DNA, 15 bp, Homo sapiens
gcacccttctctgga

SEQ ID NO: 1254406 - DNA, 15 bp, Homo sapiens
tgcacccttctctgg

SEQ ID NO: 1254407 - DNA, 15 bp, Homo sapiens
atgcacccttctctg

SEQ ID NO: 1254408 - DNA, 15 bp, Homo sapiens
catgcacccttctct

SEQ ID NO: 1254409 - DNA, 15 bp, Homo sapiens
ccatgcacccttctc

SEQ ID NO: 1254410 - DNA, 15 bp, Homo sapiens
cccatgcacccttct

SEQ ID NO: 1254411 - DNA, 15 bp, Homo sapiens
acccatgcacccttc

SEQ ID NO: 1254412 - DNA, 15 bp, Homo sapiens
gacccatgcaccctt

SEQ ID NO: 1254413 - DNA, 15 bp, Homo sapiens
agacccatgcaccct

SEQ ID NO: 1254414 - DNA, 15 bp, Homo sapiens
tagacccatgcaccc

SEQ ID NO: 1254415 - DNA, 15 bp, Homo sapiens
ctagacccatgcacc

SEQ ID NO: 1254416 - DNA, 15 bp, Homo sapiens
tctagacccatgcac

SEQ ID NO: 1254417 - DNA, 15 bp, Homo sapiens
ctctagacccatgca

SEQ ID NO: 1254418 - DNA, 15 bp, Homo sapiens
gctctagacccatgc

SEQ ID NO: 1254419 - DNA, 15 bp, Homo sapiens
tgctctagacccatg

SEQ ID NO: 1254420 - DNA, 15 bp, Homo sapiens
ctgctctagacccat

SEQ ID NO: 1254421 - DNA, 15 bp, Homo sapiens
cctgctctagaccca

SEQ ID NO: 1254422 - DNA, 15 bp, Homo sapiens
acctgctctagaccc

SEQ ID NO: 1254423 - DNA, 15 bp, Homo sapiens
cacctgctctagacc

SEQ ID NO: 1254424 - DNA, 15 bp, Homo sapiens
gcacctgctctagac

SEQ ID NO: 1254425 - DNA, 15 bp, Homo sapiens
ggcacctgctctaga

SEQ ID NO: 1254426 - DNA, 15 bp, Homo sapiens
aggcacctgctctag

SEQ ID NO: 1254427 - DNA, 15 bp, Homo sapiens
gaggcacctgctcta

SEQ ID NO: 1254428 - DNA, 15 bp, Homo sapiens
tgaggcacctgctct

SEQ ID NO: 1254429 - DNA, 15 bp, Homo sapiens
atgaggcacctgctc

SEQ ID NO: 1254430 - DNA, 15 bp, Homo sapiens
catgaggcacctgct

SEQ ID NO: 1254431 - DNA, 15 bp, Homo sapiens
gcatgaggcacctgc

SEQ ID NO: 1254432 - DNA, 15 bp, Homo sapiens
agcatgaggcacctg

SEQ ID NO: 1254433 - DNA, 15 bp, Homo sapiens
cagcatgaggcacct

SEQ ID NO: 1254434 - DNA, 15 bp, Homo sapiens
acagcatgaggcacc

SEQ ID NO: 1254435 - DNA, 15 bp, Homo sapiens
tacagcatgaggcac

SEQ ID NO: 1254436 - DNA, 15 bp, Homo sapiens
gtacagcatgaggca

SEQ ID NO: 1254437 - DNA, 15 bp, Homo sapiens
ggtacagcatgaggc

SEQ ID NO: 1254438 - DNA, 15 bp, Homo sapiens
aggtacagcatgagg

SEQ ID NO: 1254439 - DNA, 15 bp, Homo sapiens
gaggtacagcatgag

SEQ ID NO: 1254440 - DNA, 15 bp, Homo sapiens
tgaggtacagcatga

SEQ ID NO: 1254441 - DNA, 15 bp, Homo sapiens
atgaggtacagcatg

SEQ ID NO: 1254442 - DNA, 15 bp, Homo sapiens
tatgaggtacagcat

SEQ ID NO: 1254443 - DNA, 15 bp, Homo sapiens
ctatgaggtacagca

SEQ ID NO: 1254444 - DNA, 15 bp, Homo sapiens
tctatgaggtacagc

SEQ ID NO: 1254445 - DNA, 15 bp, Homo sapiens
ctctatgaggtacag

SEQ ID NO: 1254446 - DNA, 15 bp, Homo sapiens
tctctatgaggtaca

SEQ ID NO: 1254447 - DNA, 15 bp, Homo sapiens
ttctctatgaggtac

SEQ ID NO: 1254448 - DNA, 15 bp, Homo sapiens
gttctctatgaggta

SEQ ID NO: 1254449 - DNA, 15 bp, Homo sapiens
agttctctatgaggt

SEQ ID NO: 1254450 - DNA, 15 bp, Homo sapiens
cagttctctatgagg

SEQ ID NO: 1254451 - DNA, 15 bp, Homo sapiens
ccagttctctatgag

SEQ ID NO: 1254452 - DNA, 15 bp, Homo sapiens
cccagttctctatga

SEQ ID NO: 1254453 - DNA, 15 bp, Homo sapiens
ccccagttctctatg

SEQ ID NO: 1254454 - DNA, 15 bp, Homo sapiens
cccccagttctctat

SEQ ID NO: 1254455 - DNA, 15 bp, Homo sapiens
ccccccagttctcta

SEQ ID NO: 1254456 - DNA, 15 bp, Homo sapiens
tccccccagttctct

SEQ ID NO: 1254457 - DNA, 15 bp, Homo sapiens
ctccccccagttctc

SEQ ID NO: 1254458 - DNA, 15 bp, Homo sapiens
cctccccccagttct

SEQ ID NO: 1254459 - DNA, 15 bp, Homo sapiens
ccctccccccagttc

SEQ ID NO: 1254460 - DNA, 15 bp, Homo sapiens
cccctccccccagtt

SEQ ID NO: 1254461 - DNA, 15 bp, Homo sapiens
ccccctccccccagt

SEQ ID NO: 1254462 - DNA, 15 bp, Homo sapiens
cccccctccccccag

SEQ ID NO: 1254463 - DNA, 15 bp, Homo sapiens
tcccccctcccccca

SEQ ID NO: 1254464 - DNA, 15 bp, Homo sapiens
ttcccccctcccccc

SEQ ID NO: 1254465 - DNA, 15 bp, Homo sapiens
tttcccccctccccc

SEQ ID NO: 1254466 - DNA, 15 bp, Homo sapiens
atttcccccctcccc

SEQ ID NO: 1254467 - DNA, 15 bp, Homo sapiens
catttcccccctccc

SEQ ID NO: 1254468 - DNA, 15 bp, Homo sapiens
ccatttcccccctcc

SEQ ID NO: 1254469 - DNA, 15 bp, Homo sapiens
cccatttcccccctc

SEQ ID NO: 1254470 - DNA, 15 bp, Homo sapiens
gcccatttcccccct

SEQ ID NO: 1254471 - DNA, 15 bp, Homo sapiens
tgcccatttcccccc

SEQ ID NO: 1254472 - DNA, 15 bp, Homo sapiens
atgcccatttccccc

SEQ ID NO: 1254473 - DNA, 15 bp, Homo sapiens
aatgcccatttcccc

SEQ ID NO: 1254474 - DNA, 15 bp, Homo sapiens
aaatgcccatttccc

SEQ ID NO: 1254475 - DNA, 15 bp, Homo sapiens
gaaatgcccatttcc

SEQ ID NO: 1254476 - DNA, 15 bp, Homo sapiens
ggaaatgcccatttc

SEQ ID NO: 1254477 - DNA, 15 bp, Homo sapiens
gggaaatgcccattt

SEQ ID NO: 1254478 - DNA, 15 bp, Homo sapiens
agggaaatgcccatt

SEQ ID NO: 1254479 - DNA, 15 bp, Homo sapiens
gagggaaatgcccat

SEQ ID NO: 1254480 - DNA, 15 bp, Homo sapiens
ggagggaaatgccca

SEQ ID NO: 1254481 - DNA, 15 bp, Homo sapiens
tggagggaaatgccc

SEQ ID NO: 1254482 - DNA, 15 bp, Homo sapiens
gtggagggaaatgcc

SEQ ID NO: 1254483 - DNA, 15 bp, Homo sapiens
tgtggagggaaatgc

SEQ ID NO: 1254484 - DNA, 15 bp, Homo sapiens
ctgtggagggaaatg

SEQ ID NO: 1254485 - DNA, 15 bp, Homo sapiens
gctgtggagggaaat

SEQ ID NO: 1254486 - DNA, 15 bp, Homo sapiens
ggctgtggagggaaa

SEQ ID NO: 1254487 - DNA, 15 bp, Homo sapiens
gggctgtggagggaa

SEQ ID NO: 1254488 - DNA, 15 bp, Homo sapiens
ggggctgtggaggga

SEQ ID NO: 1254489 - DNA, 15 bp, Homo sapiens
gggggctgtggaggg

SEQ ID NO: 1254490 - DNA, 15 bp, Homo sapiens
tgggggctgtggagg

SEQ ID NO: 1254491 - DNA, 15 bp, Homo sapiens
ttgggggctgtggag

SEQ ID NO: 1254492 - DNA, 15 bp, Homo sapiens
tttgggggctgtgga

SEQ ID NO: 1254493 - DNA, 15 bp, Homo sapiens
ctttgggggctgtgg

SEQ ID NO: 1254494 - DNA, 15 bp, Homo sapiens
actttgggggctgtg

SEQ ID NO: 1254495 - DNA, 15 bp, Homo sapiens
cactttgggggctgt

SEQ ID NO: 1254496 - DNA, 15 bp, Homo sapiens
gcactttgggggctg

SEQ ID NO: 1254497 - DNA, 15 bp, Homo sapiens
ggcactttgggggct

SEQ ID NO: 1254498 - DNA, 15 bp, Homo sapiens
aggcactttgggggc

SEQ ID NO: 1254499 - DNA, 15 bp, Homo sapiens
caggcactttggggg

SEQ ID NO: 1254500 - DNA, 15 bp, Homo sapiens
tcaggcactttgggg

SEQ ID NO: 1254501 - DNA, 15 bp, Homo sapiens
ctcaggcactttggg

SEQ ID NO: 1254502 - DNA, 15 bp, Homo sapiens
cctcaggcactttgg

SEQ ID NO: 1254503 - DNA, 15 bp, Homo sapiens
tcctcaggcactttg

SEQ ID NO: 1254504 - DNA, 15 bp, Homo sapiens
ttcctcaggcacttt

SEQ ID NO: 1254505 - DNA, 15 bp, Homo sapiens
tttcctcaggcactt

SEQ ID NO: 1254506 - DNA, 15 bp, Homo sapiens
ctttcctcaggcact

SEQ ID NO: 1254507 - DNA, 15 bp, Homo sapiens
actttcctcaggcac

SEQ ID NO: 1254508 - DNA, 15 bp, Homo sapiens
cactttcctcaggca

SEQ ID NO: 1254509 - DNA, 15 bp, Homo sapiens
acactttcctcaggc

SEQ ID NO: 1254510 - DNA, 15 bp, Homo sapiens
aacactttcctcagg

SEQ ID NO: 1254511 - DNA, 15 bp, Homo sapiens
caacactttcctcag

SEQ ID NO: 1254512 - DNA, 15 bp, Homo sapiens
tcaacactttcctca

SEQ ID NO: 1254513 - DNA, 15 bp, Homo sapiens
atcaacactttcctc

SEQ ID NO: 1254514 - DNA, 15 bp, Homo sapiens
tatcaacactttcct

SEQ ID NO: 1254515 - DNA, 15 bp, Homo sapiens
ttatcaacactttcc

SEQ ID NO: 1254516 - DNA, 15 bp, Homo sapiens
tttatcaacactttc

SEQ ID NO: 1254517 - DNA, 15 bp, Homo sapiens
ctttatcaacacttt

SEQ ID NO: 1254518 - DNA, 15 bp, Homo sapiens
tctttatcaacactt

SEQ ID NO: 1254519 - DNA, 15 bp, Homo sapiens
ttctttatcaacact

SEQ ID NO: 1254520 - DNA, 15 bp, Homo sapiens
cttctttatcaacac

SEQ ID NO: 1254521 - DNA, 15 bp, Homo sapiens
gcttctttatcaaca

SEQ ID NO: 1254522 - DNA, 15 bp, Homo sapiens
ggcttctttatcaac

SEQ ID NO: 1254523 - DNA, 15 bp, Homo sapiens
tggcttctttatcaa

SEQ ID NO: 1254524 - DNA, 15 bp, Homo sapiens
ttggcttctttatca

SEQ ID NO: 1254525 - DNA, 15 bp, Homo sapiens
tttggcttctttatc

SEQ ID NO: 1254526 - DNA, 15 bp, Homo sapiens
gtttggcttctttat

SEQ ID NO: 1254527 - DNA, 15 bp, Homo sapiens
agtttggcttcttta

SEQ ID NO: 1254528 - DNA, 15 bp, Homo sapiens
gagtttggcttcttt

SEQ ID NO: 1254529 - DNA, 15 bp, Homo sapiens
agagtttggcttctt

SEQ ID NO: 1254530 - DNA, 15 bp, Homo sapiens
cagagtttggcttct

SEQ ID NO: 1254531 - DNA, 15 bp, Homo sapiens
acagagtttggcttc

SEQ ID NO: 1254532 - DNA, 15 bp, Homo sapiens
tacagagtttggctt

SEQ ID NO: 1254533 - DNA, 15 bp, Homo sapiens
ttacagagtttggct

SEQ ID NO: 1254534 - DNA, 15 bp, Homo sapiens
tttacagagtttggc

SEQ ID NO: 1254535 - DNA, 15 bp, Homo sapiens
ttttacagagtttgg

SEQ ID NO: 1254536 - DNA, 15 bp, Homo sapiens
attttacagagtttg

SEQ ID NO: 1254537 - DNA, 15 bp, Homo sapiens
tattttacagagttt

SEQ ID NO: 1254538 - DNA, 15 bp, Homo sapiens
atattttacagagtt

SEQ ID NO: 1254539 - DNA, 15 bp, Homo sapiens
aatattttacagagt

SEQ ID NO: 1254540 - DNA, 15 bp, Homo sapiens
aaatattttacagag

SEQ ID NO: 1254541 - DNA, 15 bp, Homo sapiens
caaatattttacaga

SEQ ID NO: 1254542 - DNA, 15 bp, Homo sapiens
tcaaatattttacag

SEQ ID NO: 1254543 - DNA, 15 bp, Homo sapiens
ttcaaatattttaca

SEQ ID NO: 1254544 - DNA, 15 bp, Homo sapiens
cttcaaatattttac

SEQ ID NO: 1254545 - DNA, 15 bp, Homo sapiens
tcttcaaatatttta

SEQ ID NO: 1254546 - DNA, 15 bp, Homo sapiens
ctcttcaaatatttt

SEQ ID NO: 1254547 - DNA, 15 bp, Homo sapiens
atctcttcaaatatt

SEQ ID NO: 1254548 - DNA, 15 bp, Homo sapiens
aatctcttcaaatat

SEQ ID NO: 1254549 - DNA, 15 bp, Homo sapiens
aaatctcttcaaata

SEQ ID NO: 1254550 - DNA, 15 bp, Homo sapiens
taaatctcttcaaat

SEQ ID NO: 1254551 - DNA, 15 bp, Homo sapiens
ataaatctcttcaaa

SEQ ID NO: 1254552 - DNA, 15 bp, Homo sapiens
aataaatctcttcaa

SEQ ID NO: 1254553 - DNA, 15 bp, Homo sapiens
gaataaatctcttca

SEQ ID NO: 1254554 - DNA, 15 bp, Homo sapiens
agaataaatctcttc

SEQ ID NO: 1254555 - DNA, 15 bp, Homo sapiens
cagaataaatctctt

SEQ ID NO: 1254556 - DNA, 15 bp, Homo sapiens
tcagaataaatctct

SEQ ID NO: 1254557 - DNA, 15 bp, Homo sapiens
ctcagaataaatctc

SEQ ID NO: 1254558 - DNA, 15 bp, Homo sapiens
gctcagaataaatct

SEQ ID NO: 1254559 - DNA, 15 bp, Homo sapiens
ggctcagaataaatc

SEQ ID NO: 1254560 - DNA, 15 bp, Homo sapiens
tggctcagaataaat

SEQ ID NO: 1254561 - DNA, 15 bp, Homo sapiens
ttggctcagaataaa

SEQ ID NO: 1254562 - DNA, 15 bp, Homo sapiens
tttggctcagaataa

SEQ ID NO: 1254563 - DNA, 15 bp, Homo sapiens
atttggctcagaata

SEQ ID NO: 1254564 - DNA, 15 bp, Homo sapiens
catttggctcagaat

SEQ ID NO: 1254565 - DNA, 15 bp, Homo sapiens
acatttggctcagaa

SEQ ID NO: 1254566 - DNA, 15 bp, Homo sapiens
cacatttggctcaga

SEQ ID NO: 1254567 - DNA, 15 bp, Homo sapiens
tcacatttggctcag

SEQ ID NO: 1254568 - DNA, 15 bp, Homo sapiens
ctcacatttggctca

SEQ ID NO: 1254569 - DNA, 15 bp, Homo sapiens
cctcacatttggctc

SEQ ID NO: 1254570 - DNA, 15 bp, Homo sapiens
tcctcacatttggct

SEQ ID NO: 1254571 - DNA, 15 bp, Homo sapiens
gtcctcacatttggc

SEQ ID NO: 1254572 - DNA, 15 bp, Homo sapiens
ggtcctcacatttgg

SEQ ID NO: 1254573 - DNA, 15 bp, Homo sapiens
tggtcctcacatttg

SEQ ID NO: 1254574 - DNA, 15 bp, Homo sapiens
gtggtcctcacattt

SEQ ID NO: 1254575 - DNA, 15 bp, Homo sapiens
cgtggtcctcacatt

SEQ ID NO: 1254576 - DNA, 15 bp, Homo sapiens
tcgtggtcctcacat

SEQ ID NO: 1254577 - DNA, 15 bp, Homo sapiens
gtcgtggtcctcaca

SEQ ID NO: 1254578 - DNA, 15 bp, Homo sapiens
ggtcgtggtcctcac

SEQ ID NO: 1254579 - DNA, 15 bp, Homo sapiens
gggtcgtggtcctca

SEQ ID NO: 1254580 - DNA, 15 bp, Homo sapiens
tgggtcgtggtcctc

SEQ ID NO: 1254581 - DNA, 15 bp, Homo sapiens
atgggtcgtggtcct

SEQ ID NO: 1254582 - DNA, 15 bp, Homo sapiens
catgggtcgtggtcc

SEQ ID NO: 1254583 - DNA, 15 bp, Homo sapiens
tcatgggtcgtggtc

SEQ ID NO: 1254584 - DNA, 15 bp, Homo sapiens
gtcatgggtcgtggt

SEQ ID NO: 1254585 - DNA, 15 bp, Homo sapiens
tgtcatgggtcgtgg

SEQ ID NO: 1254586 - DNA, 15 bp, Homo sapiens
gtgtcatgggtcgtg

SEQ ID NO: 1254587 - DNA, 15 bp, Homo sapiens
tgtgtcatgggtcgt

SEQ ID NO: 1254588 - DNA, 15 bp, Homo sapiens
ctgtgtcatgggtcg

SEQ ID NO: 1254589 - DNA, 15 bp, Homo sapiens
gctgtgtcatgggtc

SEQ ID NO: 1254590 - DNA, 15 bp, Homo sapiens
ggctgtgtcatgggt

SEQ ID NO: 1254591 - DNA, 15 bp, Homo sapiens
aggctgtgtcatggg

SEQ ID NO: 1254592 - DNA, 15 bp, Homo sapiens
aaggctgtgtcatgg

SEQ ID NO: 1254593 - DNA, 15 bp, Homo sapiens
caaggctgtgtcatg

SEQ ID NO: 1254594 - DNA, 15 bp, Homo sapiens
ccaaggctgtgtcat

SEQ ID NO: 1254595 - DNA, 15 bp, Homo sapiens
tccaaggctgtgtca

SEQ ID NO: 1254596 - DNA, 15 bp, Homo sapiens
ttccaaggctgtgtc

SEQ ID NO: 1254597 - DNA, 15 bp, Homo sapiens
cttccaaggctgtgt

SEQ ID NO: 1254598 - DNA, 15 bp, Homo sapiens
ccttccaaggctgtg

SEQ ID NO: 1254599 - DNA, 15 bp, Homo sapiens
accttccaaggctgt

SEQ ID NO: 1254600 - DNA, 15 bp, Homo sapiens
gaccttccaaggctg

SEQ ID NO: 1254601 - DNA, 15 bp, Homo sapiens
ggaccttccaaggct

SEQ ID NO: 1254602 - DNA, 15 bp, Homo sapiens
aggaccttccaaggc

SEQ ID NO: 1254603 - DNA, 15 bp, Homo sapiens
caggaccttccaagg

SEQ ID NO: 1254604 - DNA, 15 bp, Homo sapiens
tcaggaccttccaag

SEQ ID NO: 1254605 - DNA, 15 bp, Homo sapiens
ctcaggaccttccaa

SEQ ID NO: 1254606 - DNA, 15 bp, Homo sapiens
tctcaggaccttcca

SEQ ID NO: 1254607 - DNA, 15 bp, Homo sapiens
ttctcaggaccttcc

SEQ ID NO: 1254608 - DNA, 15 bp, Homo sapiens
gttctcaggaccttc

SEQ ID NO: 1254609 - DNA, 15 bp, Homo sapiens
tgttctcaggacctt

SEQ ID NO: 1254610 - DNA, 15 bp, Homo sapiens
atgttctcaggacct

SEQ ID NO: 1254611 - DNA, 15 bp, Homo sapiens
catgttctcaggacc

SEQ ID NO: 1254612 - DNA, 15 bp, Homo sapiens
acatgttctcaggac

SEQ ID NO: 1254613 - DNA, 15 bp, Homo sapiens
cacatgttctcagga

SEQ ID NO: 1254614 - DNA, 15 bp, Homo sapiens
acacatgttctcagg

SEQ ID NO: 1254615 - DNA, 15 bp, Homo sapiens
gacacatgttctcag

SEQ ID NO: 1254616 - DNA, 15 bp, Homo sapiens
ggacacatgttctca

SEQ ID NO: 1254617 - DNA, 15 bp, Homo sapiens
tggacacatgttctc

SEQ ID NO: 1254618 - DNA, 15 bp, Homo sapiens
ttggacacatgttct

SEQ ID NO: 1254619 - DNA, 15 bp, Homo sapiens
cttggacacatgttc

SEQ ID NO: 1254620 - DNA, 15 bp, Homo sapiens
ccttggacacatgtt

SEQ ID NO: 1254621 - DNA, 15 bp, Homo sapiens
accttggacacatgt

SEQ ID NO: 1254622 - DNA, 15 bp, Homo sapiens
taccttggacacatg

SEQ ID NO: 1254623 - DNA, 15 bp, Homo sapiens
ctaccttggacacat

SEQ ID NO: 1254624 - DNA, 15 bp, Homo sapiens
actaccttggacaca

SEQ ID NO: 1254625 - DNA, 15 bp, Homo sapiens
aactaccttggacac

SEQ ID NO: 1254626 - DNA, 15 bp, Homo sapiens
caactaccttggaca

SEQ ID NO: 1254627 - DNA, 15 bp, Homo sapiens
ccaactaccttggac

SEQ ID NO: 1254628 - DNA, 15 bp, Homo sapiens
cccaactaccttgga

SEQ ID NO: 1254629 - DNA, 15 bp, Homo sapiens
acccaactaccttgg

SEQ ID NO: 1254630 - DNA, 15 bp, Homo sapiens
gacccaactaccttg

SEQ ID NO: 1254631 - DNA, 15 bp, Homo sapiens
tgacccaactacctt

SEQ ID NO: 1254632 - DNA, 15 bp, Homo sapiens
gtgacccaactacct

SEQ ID NO: 1254633 - DNA, 15 bp, Homo sapiens
tgtgacccaactacc

SEQ ID NO: 1254634 - DNA, 15 bp, Homo sapiens
ctgtgacccaactac

SEQ ID NO: 1254635 - DNA, 15 bp, Homo sapiens
gctgtgacccaacta

SEQ ID NO: 1254636 - DNA, 15 bp, Homo sapiens
agctgtgacccaact

SEQ ID NO: 1254637 - DNA, 15 bp, Homo sapiens
aagctgtgacccaac

SEQ ID NO: 1254638 - DNA, 15 bp, Homo sapiens
caagctgtgacccaa

SEQ ID NO: 1254639 - DNA, 15 bp, Homo sapiens
tcaagctgtgaccca

SEQ ID NO: 1254640 - DNA, 15 bp, Homo sapiens
atcaagctgtgaccc

SEQ ID NO: 1254641 - DNA, 15 bp, Homo sapiens
aatcaagctgtgacc

SEQ ID NO: 1254642 - DNA, 15 bp, Homo sapiens
aaatcaagctgtgac

SEQ ID NO: 1254643 - DNA, 15 bp, Homo sapiens
aaaatcaagctgtga

SEQ ID NO: 1254644 - DNA, 15 bp, Homo sapiens
taaaatcaagctgtg

SEQ ID NO: 1254645 - DNA, 15 bp, Homo sapiens
ataaaatcaagctgt

SEQ ID NO: 1254646 - DNA, 15 bp, Homo sapiens
cataaaatcaagctg

SEQ ID NO: 1254647 - DNA, 15 bp, Homo sapiens
acataaaatcaagct

SEQ ID NO: 1254648 - DNA, 15 bp, Homo sapiens
tacataaaatcaagc

SEQ ID NO: 1254649 - DNA, 15 bp, Homo sapiens
atacataaaatcaag

SEQ ID NO: 1254650 - DNA, 15 bp, Homo sapiens
aatacataaaatcaa

SEQ ID NO: 1254651 - DNA, 15 bp, Homo sapiens
aaatacataaaatca

SEQ ID NO: 1254652 - DNA, 15 bp, Homo sapiens
aaaatacataaaatc

SEQ ID NO: 1254653 - DNA, 15 bp, Homo sapiens
taaaatacataaaat

SEQ ID NO: 1254654 - DNA, 15 bp, Homo sapiens
ctaaaatacataaaa

SEQ ID NO: 1254655 - DNA, 15 bp, Homo sapiens
cctaaaatacataaa

SEQ ID NO: 1254656 - DNA, 15 bp, Homo sapiens
ccctaaaatacataa

SEQ ID NO: 1254657 - DNA, 15 bp, Homo sapiens
cccctaaaatacata

SEQ ID NO: 1254658 - DNA, 15 bp, Homo sapiens
ccccctaaaatacat

SEQ ID NO: 1254659 - DNA, 15 bp, Homo sapiens
tccccctaaaataca

SEQ ID NO: 1254660 - DNA, 15 bp, Homo sapiens
gtccccctaaaatac

SEQ ID NO: 1254661 - DNA, 15 bp, Homo sapiens
tgtccccctaaaata

SEQ ID NO: 1254662 - DNA, 15 bp, Homo sapiens
ctgtccccctaaaat

SEQ ID NO: 1254663 - DNA, 15 bp, Homo sapiens
tctgtccccctaaaa

SEQ ID NO: 1254664 - DNA, 15 bp, Homo sapiens
ttctgtccccctaaa

SEQ ID NO: 1254665 - DNA, 15 bp, Homo sapiens
cttctgtccccctaa

SEQ ID NO: 1254666 - DNA, 15 bp, Homo sapiens
acttctgtcccccta

SEQ ID NO: 1254667 - DNA, 15 bp, Homo sapiens
aacttctgtccccct

SEQ ID NO: 1254668 - DNA, 15 bp, Homo sapiens
taacttctgtccccc

SEQ ID NO: 1254669 - DNA, 15 bp, Homo sapiens
gtaacttctgtcccc

SEQ ID NO: 1254670 - DNA, 15 bp, Homo sapiens
tgtaacttctgtccc

SEQ ID NO: 1254671 - DNA, 15 bp, Homo sapiens
atgtaacttctgtcc

SEQ ID NO: 1254672 - DNA, 15 bp, Homo sapiens
tatgtaacttctgtc

SEQ ID NO: 1254673 - DNA, 15 bp, Homo sapiens
gtatgtaacttctgt

SEQ ID NO: 1254674 - DNA, 15 bp, Homo sapiens
tgtatgtaacttctg

SEQ ID NO: 1254675 - DNA, 15 bp, Homo sapiens
ctgtatgtaacttct

SEQ ID NO: 1254676 - DNA, 15 bp, Homo sapiens
tctgtatgtaacttc

SEQ ID NO: 1254677 - DNA, 15 bp, Homo sapiens
gtctgtatgtaactt

SEQ ID NO: 1254678 - DNA, 15 bp, Homo sapiens
tgtctgtatgtaact

SEQ ID NO: 1254679 - DNA, 15 bp, Homo sapiens
gtgtctgtatgtaac

SEQ ID NO: 1254680 - DNA, 15 bp, Homo sapiens
ggtgtctgtatgtaa

SEQ ID NO: 1254681 - DNA, 15 bp, Homo sapiens
tggtgtctgtatgta

SEQ ID NO: 1254682 - DNA, 15 bp, Homo sapiens
ttggtgtctgtatgt

SEQ ID NO: 1254683 - DNA, 15 bp, Homo sapiens
attggtgtctgtatg

SEQ ID NO: 1254684 - DNA, 15 bp, Homo sapiens
gattggtgtctgtat

SEQ ID NO: 1254685 - DNA, 15 bp, Homo sapiens
tgattggtgtctgta

SEQ ID NO: 1254686 - DNA, 15 bp, Homo sapiens
ttgattggtgtctgt

SEQ ID NO: 1254687 - DNA, 15 bp, Homo sapiens
attgattggtgtctg

SEQ ID NO: 1254688 - DNA, 15 bp, Homo sapiens
tattgattggtgtct

SEQ ID NO: 1254689 - DNA, 15 bp, Homo sapiens
ttattgattggtgtc

SEQ ID NO: 1254690 - DNA, 15 bp, Homo sapiens
cttattgattggtgt

SEQ ID NO: 1254691 - DNA, 15 bp, Homo sapiens
gcttattgattggtg

SEQ ID NO: 1254692 - DNA, 15 bp, Homo sapiens
tgcttattgattggt

SEQ ID NO: 1254693 - DNA, 15 bp, Homo sapiens
atgcttattgattgg

SEQ ID NO: 1254694 - DNA, 15 bp, Homo sapiens
tatgcttattgattg

SEQ ID NO: 1254695 - DNA, 15 bp, Homo sapiens
ttatgcttattgatt

SEQ ID NO: 1254696 - DNA, 15 bp, Homo sapiens
cttatgcttattgat

SEQ ID NO: 1254697 - DNA, 15 bp, Homo sapiens
acttatgcttattga

SEQ ID NO: 1254698 - DNA, 15 bp, Homo sapiens
aacttatgcttattg

SEQ ID NO: 1254699 - DNA, 15 bp, Homo sapiens
caacttatgcttatt

SEQ ID NO: 1254700 - DNA, 15 bp, Homo sapiens
acaacttatgcttat

SEQ ID NO: 1254701 - DNA, 15 bp, Homo sapiens
tacaacttatgctta

SEQ ID NO: 1254702 - DNA, 15 bp, Homo sapiens
gtacaacttatgctt

SEQ ID NO: 1254703 - DNA, 15 bp, Homo sapiens
tgtacaacttatgct

SEQ ID NO: 1254704 - DNA, 15 bp, Homo sapiens
gtgtacaacttatgc

SEQ ID NO: 1254705 - DNA, 15 bp, Homo sapiens
agtgtacaacttatg

SEQ ID NO: 1254706 - DNA, 15 bp, Homo sapiens
cagtgtacaacttat

SEQ ID NO: 1254707 - DNA, 15 bp, Homo sapiens
ccagtgtacaactta

SEQ ID NO: 1254708 - DNA, 15 bp, Homo sapiens
accagtgtacaactt

SEQ ID NO: 1254709 - DNA, 15 bp, Homo sapiens
aaccagtgtacaact

SEQ ID NO: 1254710 - DNA, 15 bp, Homo sapiens
gaaccagtgtacaac

SEQ ID NO: 1254711 - DNA, 15 bp, Homo sapiens
cgaaccagtgtacaa

SEQ ID NO: 1254712 - DNA, 15 bp, Homo sapiens
acgaaccagtgtaca

SEQ ID NO: 1254713 - DNA, 15 bp, Homo sapiens
aacgaaccagtgtac

SEQ ID NO: 1254714 - DNA, 15 bp, Homo sapiens
gaacgaaccagtgta

SEQ ID NO: 1254715 - DNA, 15 bp, Homo sapiens
ggaacgaaccagtgt

SEQ ID NO: 1254716 - DNA, 15 bp, Homo sapiens
tggaacgaaccagtg

SEQ ID NO: 1254717 - DNA, 15 bp, Homo sapiens
ctggaacgaaccagt

SEQ ID NO: 1254718 - DNA, 15 bp, Homo sapiens
tctggaacgaaccag

SEQ ID NO: 1254719 - DNA, 15 bp, Homo sapiens
ttctggaacgaacca

SEQ ID NO: 1254720 - DNA, 15 bp, Homo sapiens
tttctggaacgaacc

SEQ ID NO: 1254721 - DNA, 15 bp, Homo sapiens
ttttctggaacgaac

SEQ ID NO: 1254722 - DNA, 15 bp, Homo sapiens
cttttctggaacgaa

SEQ ID NO: 1254723 - DNA, 15 bp, Homo sapiens
ccttttctggaacga

SEQ ID NO: 1254724 - DNA, 15 bp, Homo sapiens
cccttttctggaacg

SEQ ID NO: 1254725 - DNA, 15 bp, Homo sapiens
ccccttttctggaac

SEQ ID NO: 1254726 - DNA, 15 bp, Homo sapiens
tccccttttctggaa

SEQ ID NO: 1254727 - DNA, 15 bp, Homo sapiens
ttccccttttctgga

SEQ ID NO: 1254728 - DNA, 15 bp, Homo sapiens
cttccccttttctgg

SEQ ID NO: 1254729 - DNA, 15 bp, Homo sapiens
ccttccccttttctg

SEQ ID NO: 1254730 - DNA, 15 bp, Homo sapiens
accttccccttttct

SEQ ID NO: 1254731 - DNA, 15 bp, Homo sapiens
caccttccccttttc

SEQ ID NO: 1254732 - DNA, 15 bp, Homo sapiens
ccaccttcccctttt

SEQ ID NO: 1254733 - DNA, 15 bp, Homo sapiens
cccaccttccccttt

SEQ ID NO: 1254734 - DNA, 15 bp, Homo sapiens
ccccaccttcccctt

SEQ ID NO: 1254735 - DNA, 15 bp, Homo sapiens
cccccaccttcccct

SEQ ID NO: 1254736 - DNA, 15 bp, Homo sapiens
gcccccaccttcccc

SEQ ID NO: 1254737 - DNA, 15 bp, Homo sapiens
agcccccaccttccc

SEQ ID NO: 1254738 - DNA, 15 bp, Homo sapiens
aagcccccaccttcc

SEQ ID NO: 1254739 - DNA, 15 bp, Homo sapiens
gaagcccccaccttc

SEQ ID NO: 1254740 - DNA, 15 bp, Homo sapiens
ggaagcccccacctt

SEQ ID NO: 1254741 - DNA, 15 bp, Homo sapiens
tggaagcccccacct

SEQ ID NO: 1254742 - DNA, 15 bp, Homo sapiens
ctggaagcccccacc

SEQ ID NO: 1254743 - DNA, 15 bp, Homo sapiens
cctggaagcccccac

SEQ ID NO: 1254744 - DNA, 15 bp, Homo sapiens
acctggaagccccca

SEQ ID NO: 1254745 - DNA, 15 bp, Homo sapiens
gacctggaagccccc

SEQ ID NO: 1254746 - DNA, 15 bp, Homo sapiens
tgacctggaagcccc

SEQ ID NO: 1254747 - DNA, 15 bp, Homo sapiens
atgacctggaagccc

SEQ ID NO: 1254748 - DNA, 15 bp, Homo sapiens
tatgacctggaagcc

SEQ ID NO: 1254749 - DNA, 15 bp, Homo sapiens
ctatgacctggaagc

SEQ ID NO: 1254750 - DNA, 15 bp, Homo sapiens
cctatgacctggaag

SEQ ID NO: 1254751 - DNA, 15 bp, Homo sapiens
acctatgacctggaa

SEQ ID NO: 1254752 - DNA, 15 bp, Homo sapiens
cacctatgacctgga

SEQ ID NO: 1254753 - DNA, 15 bp, Homo sapiens
ccacctatgacctgg

SEQ ID NO: 1254754 - DNA, 15 bp, Homo sapiens
gccacctatgacctg

SEQ ID NO: 1254755 - DNA, 15 bp, Homo sapiens
agccacctatgacct

SEQ ID NO: 1254756 - DNA, 15 bp, Homo sapiens
aagccacctatgacc

SEQ ID NO: 1254757 - DNA, 15 bp, Homo sapiens
gaagccacctatgac

SEQ ID NO: 1254758 - DNA, 15 bp, Homo sapiens
tgaagccacctatga

SEQ ID NO: 1254759 - DNA, 15 bp, Homo sapiens
ttgaagccacctatg

SEQ ID NO: 1254760 - DNA, 15 bp, Homo sapiens
tttgaagccacctat

SEQ ID NO: 1254761 - DNA, 15 bp, Homo sapiens
ctttgaagccaccta

SEQ ID NO: 1254762 - DNA, 15 bp, Homo sapiens
tctttgaagccacct

SEQ ID NO: 1254763 - DNA, 15 bp, Homo sapiens
atctttgaagccacc

SEQ ID NO: 1254764 - DNA, 15 bp, Homo sapiens
tatctttgaagccac

SEQ ID NO: 1254765 - DNA, 15 bp, Homo sapiens
atatctttgaagcca

SEQ ID NO: 1254766 - DNA, 15 bp, Homo sapiens
aatatctttgaagcc

SEQ ID NO: 1254767 - DNA, 15 bp, Homo sapiens
gaatatctttgaagc

SEQ ID NO: 1254768 - DNA, 15 bp, Homo sapiens
agaatatctttgaag

SEQ ID NO: 1254769 - DNA, 15 bp, Homo sapiens
cagaatatctttgaa

SEQ ID NO: 1254770 - DNA, 15 bp, Homo sapiens
tcagaatatctttga

SEQ ID NO: 1254771 - DNA, 15 bp, Homo sapiens
atcagaatatctttg

SEQ ID NO: 1254772 - DNA, 15 bp, Homo sapiens
aatcagaatatcttt

SEQ ID NO: 1254773 - DNA, 15 bp, Homo sapiens
caatcagaatatctt

SEQ ID NO: 1254774 - DNA, 15 bp, Homo sapiens
ccaatcagaatatct

SEQ ID NO: 1254775 - DNA, 15 bp, Homo sapiens
gccaatcagaatatc

SEQ ID NO: 1254776 - DNA, 15 bp, Homo sapiens
tgccaatcagaatat

SEQ ID NO: 1254777 - DNA, 15 bp, Homo sapiens
ttgccaatcagaata

SEQ ID NO: 1254778 - DNA, 15 bp, Homo sapiens
attgccaatcagaat

SEQ ID NO: 1254779 - DNA, 15 bp, Homo sapiens
gattgccaatcagaa

SEQ ID NO: 1254780 - DNA, 15 bp, Homo sapiens
tgattgccaatcaga

SEQ ID NO: 1254781 - DNA, 15 bp, Homo sapiens
ctgattgccaatcag

SEQ ID NO: 1254782 - DNA, 15 bp, Homo sapiens
actgattgccaatca

SEQ ID NO: 1254783 - DNA, 15 bp, Homo sapiens
aactgattgccaatc

SEQ ID NO: 1254784 - DNA, 15 bp, Homo sapiens
caactgattgccaat

SEQ ID NO: 1254785 - DNA, 15 bp, Homo sapiens
tcaactgattgccaa

SEQ ID NO: 1254786 - DNA, 15 bp, Homo sapiens
ttcaactgattgcca

SEQ ID NO: 1254787 - DNA, 15 bp, Homo sapiens
tttcaactgattgcc

SEQ ID NO: 1254788 - DNA, 15 bp, Homo sapiens
ctttcaactgattgc

SEQ ID NO: 1254789 - DNA, 15 bp, Homo sapiens
tctttcaactgattg

SEQ ID NO: 1254790 - DNA, 15 bp, Homo sapiens
ctctttcaactgatt

SEQ ID NO: 1254791 - DNA, 15 bp, Homo sapiens
actctttcaactgat

SEQ ID NO: 1254792 - DNA, 15 bp, Homo sapiens
aactctttcaactga

SEQ ID NO: 1254793 - DNA, 15 bp, Homo sapiens
taactctttcaactg

SEQ ID NO: 1254794 - DNA, 15 bp, Homo sapiens
ataactctttcaact

SEQ ID NO: 1254795 - DNA, 15 bp, Homo sapiens
aataactctttcaac

SEQ ID NO: 1254796 - DNA, 15 bp, Homo sapiens
taataactctttcaa

SEQ ID NO: 1254797 - DNA, 15 bp, Homo sapiens
ataataactctttca

SEQ ID NO: 1254798 - DNA, 15 bp, Homo sapiens
gataataactctttc

SEQ ID NO: 1254799 - DNA, 15 bp, Homo sapiens
agataataactcttt

SEQ ID NO: 1254800 - DNA, 15 bp, Homo sapiens
tagataataactctt

SEQ ID NO: 1254801 - DNA, 15 bp, Homo sapiens
ttagataataactct

SEQ ID NO: 1254802 - DNA, 15 bp, Homo sapiens
tttagataataactc

SEQ ID NO: 1254803 - DNA, 15 bp, Homo sapiens
ctttagataataact

SEQ ID NO: 1254804 - DNA, 15 bp, Homo sapiens
tctttagataataac

SEQ ID NO: 1254805 - DNA, 15 bp, Homo sapiens
gtctttagataataa

SEQ ID NO: 1254806 - DNA, 15 bp, Homo sapiens
ggtctttagataata

SEQ ID NO: 1254807 - DNA, 15 bp, Homo sapiens
aggtctttagataat

SEQ ID NO: 1254808 - DNA, 15 bp, Homo sapiens
caggtctttagataa

SEQ ID NO: 1254809 - DNA, 15 bp, Homo sapiens
ccaggtctttagata

SEQ ID NO: 1254810 - DNA, 15 bp, Homo sapiens
tccaggtctttagat

SEQ ID NO: 1254811 - DNA, 15 bp, Homo sapiens
ttccaggtctttaga

SEQ ID NO: 1254812 - DNA, 15 bp, Homo sapiens
attccaggtctttag

SEQ ID NO: 1254813 - DNA, 15 bp, Homo sapiens
tattccaggtcttta

SEQ ID NO: 1254814 - DNA, 15 bp, Homo sapiens
ttattccaggtcttt

SEQ ID NO: 1254815 - DNA, 15 bp, Homo sapiens
tttattccaggtctt

SEQ ID NO: 1254816 - DNA, 15 bp, Homo sapiens
atttattccaggtct

SEQ ID NO: 1254817 - DNA, 15 bp, Homo sapiens
catttattccaggtc

SEQ ID NO: 1254818 - DNA, 15 bp, Homo sapiens
ccatttattccaggt

SEQ ID NO: 1254819 - DNA, 15 bp, Homo sapiens
tccatttattccagg

SEQ ID NO: 1254820 - DNA, 15 bp, Homo sapiens
ttccatttattccag

SEQ ID NO: 1254821 - DNA, 15 bp, Homo sapiens
tttccatttattcca

SEQ ID NO: 1254822 - DNA, 15 bp, Homo sapiens
ctttccatttattcc

SEQ ID NO: 1254823 - DNA, 15 bp, Homo sapiens
cctttccatttattc

SEQ ID NO: 1254824 - DNA, 15 bp, Homo sapiens
tcctttccatttatt

SEQ ID NO: 1254825 - DNA, 15 bp, Homo sapiens
ctcctttccatttat

SEQ ID NO: 1254826 - DNA, 15 bp, Homo sapiens
actcctttccattta

SEQ ID NO: 1254827 - DNA, 15 bp, Homo sapiens
tactcctttccattt

SEQ ID NO: 1254828 - DNA, 15 bp, Homo sapiens
atactcctttccatt

SEQ ID NO: 1254829 - DNA, 15 bp, Homo sapiens
gatactcctttccat

SEQ ID NO: 1254830 - DNA, 15 bp, Homo sapiens
agatactcctttcca

SEQ ID NO: 1254831 - DNA, 15 bp, Homo sapiens
cagatactcctttcc

SEQ ID NO: 1254832 - DNA, 15 bp, Homo sapiens
ccagatactcctttc

SEQ ID NO: 1254833 - DNA, 15 bp, Homo sapiens
cccagatactccttt

SEQ ID NO: 1254834 - DNA, 15 bp, Homo sapiens
acccagatactcctt

SEQ ID NO: 1254835 - DNA, 15 bp, Homo sapiens
aacccagatactcct

SEQ ID NO: 1254836 - DNA, 15 bp, Homo sapiens
taacccagatactcc

SEQ ID NO: 1254837 - DNA, 15 bp, Homo sapiens
ttaacccagatactc

SEQ ID NO: 1254838 - DNA, 15 bp, Homo sapiens
cttaacccagatact

SEQ ID NO: 1254839 - DNA, 15 bp, Homo sapiens
tcttaacccagatac

SEQ ID NO: 1254840 - DNA, 15 bp, Homo sapiens
atcttaacccagata

SEQ ID NO: 1254841 - DNA, 15 bp, Homo sapiens
tatcttaacccagat

SEQ ID NO: 1254842 - DNA, 15 bp, Homo sapiens
ttatcttaacccaga

SEQ ID NO: 1254843 - DNA, 15 bp, Homo sapiens
cttatcttaacccag

SEQ ID NO: 1254844 - DNA, 15 bp, Homo sapiens
tcttatcttaaccca

SEQ ID NO: 1254845 - DNA, 15 bp, Homo sapiens
ctcttatcttaaccc

SEQ ID NO: 1254846 - DNA, 15 bp, Homo sapiens
cctcttatcttaacc

SEQ ID NO: 1254847 - DNA, 15 bp, Homo sapiens
acctcttatcttaac

SEQ ID NO: 1254848 - DNA, 15 bp, Homo sapiens
aacctcttatcttaa

SEQ ID NO: 1254849 - DNA, 15 bp, Homo sapiens
caacctcttatctta

SEQ ID NO: 1254850 - DNA, 15 bp, Homo sapiens
acaacctcttatctt

SEQ ID NO: 1254851 - DNA, 15 bp, Homo sapiens
cacaacctcttatct

SEQ ID NO: 1254852 - DNA, 15 bp, Homo sapiens
ccacaacctcttatc

SEQ ID NO: 1254853 - DNA, 15 bp, Homo sapiens
tccacaacctcttat

SEQ ID NO: 1254854 - DNA, 15 bp, Homo sapiens
ctccacaacctctta

SEQ ID NO: 1254855 - DNA, 15 bp, Homo sapiens
tctccacaacctctt

SEQ ID NO: 1254856 - DNA, 15 bp, Homo sapiens
gtctccacaacctct

SEQ ID NO: 1254857 - DNA, 15 bp, Homo sapiens
ggtctccacaacctc

SEQ ID NO: 1254858 - DNA, 15 bp, Homo sapiens
tggtctccacaacct

SEQ ID NO: 1254859 - DNA, 15 bp, Homo sapiens
ttggtctccacaacc

SEQ ID NO: 1254860 - DNA, 15 bp, Homo sapiens
cttggtctccacaac

SEQ ID NO: 1254861 - DNA, 15 bp, Homo sapiens
ccttggtctccacaa

SEQ ID NO: 1254862 - DNA, 15 bp, Homo sapiens
accttggtctccaca

SEQ ID NO: 1254863 - DNA, 15 bp, Homo sapiens
aaccttggtctccac

SEQ ID NO: 1254864 - DNA, 15 bp, Homo sapiens
gaaccttggtctcca

SEQ ID NO: 1254865 - DNA, 15 bp, Homo sapiens
agaaccttggtctcc

SEQ ID NO: 1254866 - DNA, 15 bp, Homo sapiens
aagaaccttggtctc

SEQ ID NO: 1254867 - DNA, 15 bp, Homo sapiens
caagaaccttggtct

SEQ ID NO: 1254868 - DNA, 15 bp, Homo sapiens
acaagaaccttggtc

SEQ ID NO: 1254869 - DNA, 15 bp, Homo sapiens
aacaagaaccttggt

SEQ ID NO: 1254870 - DNA, 15 bp, Homo sapiens
taacaagaaccttgg

SEQ ID NO: 1254871 - DNA, 15 bp, Homo sapiens
ataacaagaaccttg

SEQ ID NO: 1254872 - DNA, 15 bp, Homo sapiens
cataacaagaacctt

SEQ ID NO: 1254873 - DNA, 15 bp, Homo sapiens
acataacaagaacct

SEQ ID NO: 1254874 - DNA, 15 bp, Homo sapiens
tacataacaagaacc

SEQ ID NO: 1254875 - DNA, 15 bp, Homo sapiens
ctacataacaagaac

SEQ ID NO: 1254876 - DNA, 15 bp, Homo sapiens
tctacataacaagaa

SEQ ID NO: 1254877 - DNA, 15 bp, Homo sapiens
atctacataacaaga

SEQ ID NO: 1254878 - DNA, 15 bp, Homo sapiens
catctacataacaag

SEQ ID NO: 1254879 - DNA, 15 bp, Homo sapiens
tcatctacataacaa

SEQ ID NO: 1254880 - DNA, 15 bp, Homo sapiens
ttcatctacataaca

SEQ ID NO: 1254881 - DNA, 15 bp, Homo sapiens
cttcatctacataac

SEQ ID NO: 1254882 - DNA, 15 bp, Homo sapiens
tcttcatctacataa

SEQ ID NO: 1254883 - DNA, 15 bp, Homo sapiens
gtcttcatctacata

SEQ ID NO: 1254884 - DNA, 15 bp, Homo sapiens
agtcttcatctacat

SEQ ID NO: 1254885 - DNA, 15 bp, Homo sapiens
gagtcttcatctaca

SEQ ID NO: 1254886 - DNA, 15 bp, Homo sapiens
tgagtcttcatctac

SEQ ID NO: 1254887 - DNA, 15 bp, Homo sapiens
atgagtcttcatcta

SEQ ID NO: 1254888 - DNA, 15 bp, Homo sapiens
tatgagtcttcatct

SEQ ID NO: 1254889 - DNA, 15 bp, Homo sapiens
ctatgagtcttcatc

SEQ ID NO: 1254890 - DNA, 15 bp, Homo sapiens
cctatgagtcttcat

SEQ ID NO: 1254891 - DNA, 15 bp, Homo sapiens
acctatgagtcttca

SEQ ID NO: 1254892 - DNA, 15 bp, Homo sapiens
cacctatgagtcttc

SEQ ID NO: 1254893 - DNA, 15 bp, Homo sapiens
ccacctatgagtctt

SEQ ID NO: 1254894 - DNA, 15 bp, Homo sapiens
gccacctatgagtct

SEQ ID NO: 1254895 - DNA, 15 bp, Homo sapiens
ggccacctatgagtc

SEQ ID NO: 1254896 - DNA, 15 bp, Homo sapiens
tggccacctatgagt

SEQ ID NO: 1254897 - DNA, 15 bp, Homo sapiens
gtggccacctatgag

SEQ ID NO: 1254898 - DNA, 15 bp, Homo sapiens
ggtggccacctatga

SEQ ID NO: 1254899 - DNA, 15 bp, Homo sapiens
gggtggccacctatg

SEQ ID NO: 1254900 - DNA, 15 bp, Homo sapiens
agggtggccacctat

SEQ ID NO: 1254901 - DNA, 15 bp, Homo sapiens
aagggtggccaccta

SEQ ID NO: 1254902 - DNA, 15 bp, Homo sapiens
taagggtggccacct

SEQ ID NO: 1254903 - DNA, 15 bp, Homo sapiens
ctaagggtggccacc

SEQ ID NO: 1254904 - DNA, 15 bp, Homo sapiens
tctaagggtggccac

SEQ ID NO: 1254905 - DNA, 15 bp, Homo sapiens
ctctaagggtggcca

SEQ ID NO: 1254906 - DNA, 15 bp, Homo sapiens
cctctaagggtggcc

SEQ ID NO: 1254907 - DNA, 15 bp, Homo sapiens
ccctctaagggtggc

SEQ ID NO: 1254908 - DNA, 15 bp, Homo sapiens
tccctctaagggtgg

SEQ ID NO: 1254909 - DNA, 15 bp, Homo sapiens
ttccctctaagggtg

SEQ ID NO: 1254910 - DNA, 15 bp, Homo sapiens
attccctctaagggt

SEQ ID NO: 1254911 - DNA, 15 bp, Homo sapiens
tattccctctaaggg

SEQ ID NO: 1254912 - DNA, 15 bp, Homo sapiens
ctattccctctaagg

SEQ ID NO: 1254913 - DNA, 15 bp, Homo sapiens
tctattccctctaag

SEQ ID NO: 1254914 - DNA, 15 bp, Homo sapiens
atctattccctctaa

SEQ ID NO: 1254915 - DNA, 15 bp, Homo sapiens
catctattccctcta

SEQ ID NO: 1254916 - DNA, 15 bp, Homo sapiens
ccatctattccctct

SEQ ID NO: 1254917 - DNA, 15 bp, Homo sapiens
gccatctattccctc

SEQ ID NO: 1254918 - DNA, 15 bp, Homo sapiens
tgccatctattccct

SEQ ID NO: 1254919 - DNA, 15 bp, Homo sapiens
ttgccatctattccc

SEQ ID NO: 1254920 - DNA, 15 bp, Homo sapiens
gttgccatctattcc

SEQ ID NO: 1254921 - DNA, 15 bp, Homo sapiens
agttgccatctattc

SEQ ID NO: 1254922 - DNA, 15 bp, Homo sapiens
cagttgccatctatt

SEQ ID NO: 1254923 - DNA, 15 bp, Homo sapiens
acagttgccatctat

SEQ ID NO: 1254924 - DNA, 15 bp, Homo sapiens
aacagttgccatcta

SEQ ID NO: 1254925 - DNA, 15 bp, Homo sapiens
aaacagttgccatct

SEQ ID NO: 1254926 - DNA, 15 bp, Homo sapiens
gaaacagttgccatc

SEQ ID NO: 1254927 - DNA, 15 bp, Homo sapiens
ggaaacagttgccat

SEQ ID NO: 1254928 - DNA, 15 bp, Homo sapiens
aggaaacagttgcca

SEQ ID NO: 1254929 - DNA, 15 bp, Homo sapiens
gaggaaacagttgcc

SEQ ID NO: 1254930 - DNA, 15 bp, Homo sapiens
agaggaaacagttgc

SEQ ID NO: 1254931 - DNA, 15 bp, Homo sapiens
aagaggaaacagttg

SEQ ID NO: 1254932 - DNA, 15 bp, Homo sapiens
gaagaggaaacagtt

SEQ ID NO: 1254933 - DNA, 15 bp, Homo sapiens
tgaagaggaaacagt

SEQ ID NO: 1254934 - DNA, 15 bp, Homo sapiens
ctgaagaggaaacag

SEQ ID NO: 1254935 - DNA, 15 bp, Homo sapiens
tctgaagaggaaaca

SEQ ID NO: 1254936 - DNA, 15 bp, Homo sapiens
gtctgaagaggaaac

SEQ ID NO: 1254937 - DNA, 15 bp, Homo sapiens
ggtctgaagaggaaa

SEQ ID NO: 1254938 - DNA, 15 bp, Homo sapiens
aggtctgaagaggaa

SEQ ID NO: 1254939 - DNA, 15 bp, Homo sapiens
aaggtctgaagagga

SEQ ID NO: 1254940 - DNA, 15 bp, Homo sapiens
aaaggtctgaagagg

SEQ ID NO: 1254941 - DNA, 15 bp, Homo sapiens
taaaggtctgaagag

SEQ ID NO: 1254942 - DNA, 15 bp, Homo sapiens
ttaaaggtctgaaga

SEQ ID NO: 1254943 - DNA, 15 bp, Homo sapiens
tttaaaggtctgaag

SEQ ID NO: 1254944 - DNA, 15 bp, Homo sapiens
ttttaaaggtctgaa

SEQ ID NO: 1254945 - DNA, 15 bp, Homo sapiens
cttttaaaggtctga

SEQ ID NO: 1254946 - DNA, 15 bp, Homo sapiens
ccttttaaaggtctg

SEQ ID NO: 1254947 - DNA, 15 bp, Homo sapiens
accttttaaaggtct

SEQ ID NO: 1254948 - DNA, 15 bp, Homo sapiens
caccttttaaaggtc

SEQ ID NO: 1254949 - DNA, 15 bp, Homo sapiens
gcaccttttaaaggt

SEQ ID NO: 1254950 - DNA, 15 bp, Homo sapiens
agcaccttttaaagg

SEQ ID NO: 1254951 - DNA, 15 bp, Homo sapiens
tagcaccttttaaag

SEQ ID NO: 1254952 - DNA, 15 bp, Homo sapiens
gtagcaccttttaaa

SEQ ID NO: 1254953 - DNA, 15 bp, Homo sapiens
tgtagcaccttttaa

SEQ ID NO: 1254954 - DNA, 15 bp, Homo sapiens
gtgtagcacctttta

SEQ ID NO: 1254955 - DNA, 15 bp, Homo sapiens
tgtgtagcacctttt

SEQ ID NO: 1254956 - DNA, 15 bp, Homo sapiens
gtgtgtagcaccttt

SEQ ID NO: 1254957 - DNA, 15 bp, Homo sapiens
tgtgtgtagcacctt

SEQ ID NO: 1254958 - DNA, 15 bp, Homo sapiens
atgtgtgtagcacct

SEQ ID NO: 1254959 - DNA, 15 bp, Homo sapiens
catgtgtgtagcacc

SEQ ID NO: 1254960 - DNA, 15 bp, Homo sapiens
ccatgtgtgtagcac

SEQ ID NO: 1254961 - DNA, 15 bp, Homo sapiens
gccatgtgtgtagca

SEQ ID NO: 1254962 - DNA, 15 bp, Homo sapiens
ggccatgtgtgtagc

SEQ ID NO: 1254963 - DNA, 15 bp, Homo sapiens
tggccatgtgtgtag

SEQ ID NO: 1254964 - DNA, 15 bp, Homo sapiens
ctggccatgtgtgta

SEQ ID NO: 1254965 - DNA, 15 bp, Homo sapiens
cctggccatgtgtgt

SEQ ID NO: 1254966 - DNA, 15 bp, Homo sapiens
gcctggccatgtgtg

SEQ ID NO: 1254967 - DNA, 15 bp, Homo sapiens
cgcctggccatgtgt

SEQ ID NO: 1254968 - DNA, 15 bp, Homo sapiens
gcgcctggccatgtg

SEQ ID NO: 1254969 - DNA, 15 bp, Homo sapiens
ggcgcctggccatgt

SEQ ID NO: 1254970 - DNA, 15 bp, Homo sapiens
aggcgcctggccatg

SEQ ID NO: 1254971 - DNA, 15 bp, Homo sapiens
aaggcgcctggccat

SEQ ID NO: 1254972 - DNA, 15 bp, Homo sapiens
caaggcgcctggcca

SEQ ID NO: 1254973 - DNA, 15 bp, Homo sapiens
ccaaggcgcctggcc

SEQ ID NO: 1254974 - DNA, 15 bp, Homo sapiens
gccaaggcgcctggc

SEQ ID NO: 1254975 - DNA, 15 bp, Homo sapiens
agccaaggcgcctgg

SEQ ID NO: 1254976 - DNA, 15 bp, Homo sapiens
gagccaaggcgcctg

SEQ ID NO: 1254977 - DNA, 15 bp, Homo sapiens
tgagccaaggcgcct

SEQ ID NO: 1254978 - DNA, 15 bp, Homo sapiens
atgagccaaggcgcc

SEQ ID NO: 1254979 - DNA, 15 bp, Homo sapiens
gatgagccaaggcgc

SEQ ID NO: 1254980 - DNA, 15 bp, Homo sapiens
ggatgagccaaggcg

SEQ ID NO: 1254981 - DNA, 15 bp, Homo sapiens
aggatgagccaaggc

SEQ ID NO: 1254982 - DNA, 15 bp, Homo sapiens
caggatgagccaagg

SEQ ID NO: 1254983 - DNA, 15 bp, Homo sapiens
acaggatgagccaag

SEQ ID NO: 1254984 - DNA, 15 bp, Homo sapiens
tacaggatgagccaa

SEQ ID NO: 1254985 - DNA, 15 bp, Homo sapiens
ttacaggatgagcca

SEQ ID NO: 1254986 - DNA, 15 bp, Homo sapiens
attacaggatgagcc

SEQ ID NO: 1254987 - DNA, 15 bp, Homo sapiens
gattacaggatgagc

SEQ ID NO: 1254988 - DNA, 15 bp, Homo sapiens
ggattacaggatgag

SEQ ID NO: 1254989 - DNA, 15 bp, Homo sapiens
gggattacaggatga

SEQ ID NO: 1254990 - DNA, 15 bp, Homo sapiens
tgggattacaggatg

SEQ ID NO: 1254991 - DNA, 15 bp, Homo sapiens
ctgggattacaggat

SEQ ID NO: 1254992 - DNA, 15 bp, Homo sapiens
acctgcctcagcctc

SEQ ID NO: 1254993 - DNA, 15 bp, Homo sapiens
cacctgcctcagcct

SEQ ID NO: 1254994 - DNA, 15 bp, Homo sapiens
ccacctgcctcagcc

SEQ ID NO: 1254995 - DNA, 15 bp, Homo sapiens
tccacctgcctcagc

SEQ ID NO: 1254996 - DNA, 15 bp, Homo sapiens
atccacctgcctcag

SEQ ID NO: 1254997 - DNA, 15 bp, Homo sapiens
gatccacctgcctca

SEQ ID NO: 1254998 - DNA, 15 bp, Homo sapiens
cttaagtgatccacc

SEQ ID NO: 1254999 - DNA, 15 bp, Homo sapiens
ccttaagtgatccac

SEQ ID NO: 1255000 - DNA, 15 bp, Homo sapiens
accttaagtgatcca

SEQ ID NO: 1255001 - DNA, 15 bp, Homo sapiens
gaccttaagtgatcc

SEQ ID NO: 1255002 - DNA, 15 bp, Homo sapiens
tgaccttaagtgatc

SEQ ID NO: 1255003 - DNA, 15 bp, Homo sapiens
gaactcctgacctta

SEQ ID NO: 1255004 - DNA, 15 bp, Homo sapiens
gcaccaccacacccg

SEQ ID NO: 1255005 - DNA, 15 bp, Homo sapiens
agcaccaccacaccc

SEQ ID NO: 1255006 - DNA, 15 bp, Homo sapiens
aagcaccaccacacc

SEQ ID NO: 1255007 - DNA, 15 bp, Homo sapiens
caagcaccaccacac

SEQ ID NO: 1255008 - DNA, 15 bp, Homo sapiens
gcaagcaccaccaca

SEQ ID NO: 1255009 - DNA, 15 bp, Homo sapiens
ggcaagcaccaccac

SEQ ID NO: 1255010 - DNA, 15 bp, Homo sapiens
aggcaagcaccacca

SEQ ID NO: 1255011 - DNA, 15 bp, Homo sapiens
caggcaagcaccacc

SEQ ID NO: 1255012 - DNA, 15 bp, Homo sapiens
acaggcaagcaccac

SEQ ID NO: 1255013 - DNA, 15 bp, Homo sapiens
tacaggcaagcacca

SEQ ID NO: 1255014 - DNA, 15 bp, Homo sapiens
ctacaggcaagcacc

SEQ ID NO: 1255015 - DNA, 15 bp, Homo sapiens
actacaggcaagcac

SEQ ID NO: 1255016 - DNA, 15 bp, Homo sapiens
aactacaggcaagca

SEQ ID NO: 1255017 - DNA, 15 bp, Homo sapiens
aaactacaggcaagc

SEQ ID NO: 1255018 - DNA, 15 bp, Homo sapiens
gaaactacaggcaag

SEQ ID NO: 1255019 - DNA, 15 bp, Homo sapiens
tgaaactacaggcaa

SEQ ID NO: 1255020 - DNA, 15 bp, Homo sapiens
ctgaaactacaggca

SEQ ID NO: 1255021 - DNA, 15 bp, Homo sapiens
gctgaaactacaggc

SEQ ID NO: 1255022 - DNA, 15 bp, Homo sapiens
agctgaaactacagg

SEQ ID NO: 1255023 - DNA, 15 bp, Homo sapiens
tagctgaaactacag

SEQ ID NO: 1255024 - DNA, 15 bp, Homo sapiens
gtagctgaaactaca

SEQ ID NO: 1255025 - DNA, 15 bp, Homo sapiens
agtagctgaaactac

SEQ ID NO: 1255026 - DNA, 15 bp, Homo sapiens
gagtagctgaaacta

SEQ ID NO: 1255027 - DNA, 15 bp, Homo sapiens
cgagtagctgaaact

SEQ ID NO: 1255028 - DNA, 15 bp, Homo sapiens
ccgagtagctgaaac

SEQ ID NO: 1255029 - DNA, 15 bp, Homo sapiens
cccgagtagctgaaa

SEQ ID NO: 1255030 - DNA, 15 bp, Homo sapiens
tcccgagtagctgaa

SEQ ID NO: 1255031 - DNA, 15 bp, Homo sapiens
tgtctcagcctcccg

SEQ ID NO: 1255032 - DNA, 15 bp, Homo sapiens
ctgtctcagcctccc

SEQ ID NO: 1255033 - DNA, 15 bp, Homo sapiens
actgtctcagcctcc

SEQ ID NO: 1255034 - DNA, 15 bp, Homo sapiens
tactgtctcagcctc

SEQ ID NO: 1255035 - DNA, 15 bp, Homo sapiens
ctactgtctcagcct

SEQ ID NO: 1255036 - DNA, 15 bp, Homo sapiens
tctactgtctcagcc

SEQ ID NO: 1255037 - DNA, 15 bp, Homo sapiens
ttctactgtctcagc

SEQ ID NO: 1255038 - DNA, 15 bp, Homo sapiens
attctactgtctcag

SEQ ID NO: 1255039 - DNA, 15 bp, Homo sapiens
gattctactgtctca

SEQ ID NO: 1255040 - DNA, 15 bp, Homo sapiens
agattctactgtctc

SEQ ID NO: 1255041 - DNA, 15 bp, Homo sapiens
gagattctactgtct

SEQ ID NO: 1255042 - DNA, 15 bp, Homo sapiens
ggagattctactgtc

SEQ ID NO: 1255043 - DNA, 15 bp, Homo sapiens
aggagattctactgt

SEQ ID NO: 1255044 - DNA, 15 bp, Homo sapiens
gaggagattctactg

SEQ ID NO: 1255045 - DNA, 15 bp, Homo sapiens
ggaggagattctact

SEQ ID NO: 1255046 - DNA, 15 bp, Homo sapiens
aggaggagattctac

SEQ ID NO: 1255047 - DNA, 15 bp, Homo sapiens
caggaggagattcta

SEQ ID NO: 1255048 - DNA, 15 bp, Homo sapiens
tcaggaggagattct

SEQ ID NO: 1255049 - DNA, 15 bp, Homo sapiens
ctcaggaggagattc

SEQ ID NO: 1255050 - DNA, 15 bp, Homo sapiens
cctcaggaggagatt

SEQ ID NO: 1255051 - DNA, 15 bp, Homo sapiens
gcctcaggaggagat

SEQ ID NO: 1255052 - DNA, 15 bp, Homo sapiens
tgcctcaggaggaga

SEQ ID NO: 1255053 - DNA, 15 bp, Homo sapiens
ctgcctcaggaggag

SEQ ID NO: 1255054 - DNA, 15 bp, Homo sapiens
cctgcctcaggagga

SEQ ID NO: 1255055 - DNA, 15 bp, Homo sapiens
tcctgcctcaggagg

SEQ ID NO: 1255056 - DNA, 15 bp, Homo sapiens
gtcctgcctcaggag

SEQ ID NO: 1255057 - DNA, 15 bp, Homo sapiens
tgtcctgcctcagga

SEQ ID NO: 1255058 - DNA, 15 bp, Homo sapiens
ttgtcctgcctcagg

SEQ ID NO: 1255059 - DNA, 15 bp, Homo sapiens
cattgtcctgcctca

SEQ ID NO: 1255060 - DNA, 15 bp, Homo sapiens
ccattgtcctgcctc

SEQ ID NO: 1255061 - DNA, 15 bp, Homo sapiens
gccattgtcctgcct

SEQ ID NO: 1255062 - DNA, 15 bp, Homo sapiens
agccattgtcctgcc

SEQ ID NO: 1255063 - DNA, 15 bp, Homo sapiens
aagccattgtcctgc

SEQ ID NO: 1255064 - DNA, 15 bp, Homo sapiens
caagccattgtcctg

SEQ ID NO: 1255065 - DNA, 15 bp, Homo sapiens
tcaagccattgtcct

SEQ ID NO: 1255066 - DNA, 15 bp, Homo sapiens
ttcaagccattgtcc

SEQ ID NO: 1255067 - DNA, 15 bp, Homo sapiens
gttcaagccattgtc

SEQ ID NO: 1255068 - DNA, 15 bp, Homo sapiens
ggttcaagccattgt

SEQ ID NO: 1255069 - DNA, 15 bp, Homo sapiens
aggttcaagccattg

SEQ ID NO: 1255070 - DNA, 15 bp, Homo sapiens
atctgcctcccaggt

SEQ ID NO: 1255071 - DNA, 15 bp, Homo sapiens
catctgcctcccagg

SEQ ID NO: 1255072 - DNA, 15 bp, Homo sapiens
acatctgcctcccag

SEQ ID NO: 1255073 - DNA, 15 bp, Homo sapiens
aacatctgcctccca

SEQ ID NO: 1255074 - DNA, 15 bp, Homo sapiens
caacatctgcctccc

SEQ ID NO: 1255075 - DNA, 15 bp, Homo sapiens
gcaacatctgcctcc

SEQ ID NO: 1255076 - DNA, 15 bp, Homo sapiens
tgcaacatctgcctc

SEQ ID NO: 1255077 - DNA, 15 bp, Homo sapiens
ctgcaacatctgcct

SEQ ID NO: 1255078 - DNA, 15 bp, Homo sapiens
actgcaacatctgcc

SEQ ID NO: 1255079 - DNA, 15 bp, Homo sapiens
cactgcaacatctgc

SEQ ID NO: 1255080 - DNA, 15 bp, Homo sapiens
tcactgcaacatctg

SEQ ID NO: 1255081 - DNA, 15 bp, Homo sapiens
ctcactgcaacatct

SEQ ID NO: 1255082 - DNA, 15 bp, Homo sapiens
gctcactgcaacatc

SEQ ID NO: 1255083 - DNA, 15 bp, Homo sapiens
agctcactgcaacat

SEQ ID NO: 1255084 - DNA, 15 bp, Homo sapiens
cagctcactgcaaca

SEQ ID NO: 1255085 - DNA, 15 bp, Homo sapiens
acaatctcagctcac

SEQ ID NO: 1255086 - DNA, 15 bp, Homo sapiens
cacaatctcagctca

SEQ ID NO: 1255087 - DNA, 15 bp, Homo sapiens
gcacaatctcagctc

SEQ ID NO: 1255088 - DNA, 15 bp, Homo sapiens
ggcacaatctcagct

SEQ ID NO: 1255089 - DNA, 15 bp, Homo sapiens
tggcacaatctcagc

SEQ ID NO: 1255090 - DNA, 15 bp, Homo sapiens
atggcacaatctcag

SEQ ID NO: 1255091 - DNA, 15 bp, Homo sapiens
aatggcacaatctca

SEQ ID NO: 1255092 - DNA, 15 bp, Homo sapiens
caatggcacaatctc

SEQ ID NO: 1255093 - DNA, 15 bp, Homo sapiens
gctctgtcatccagg

SEQ ID NO: 1255094 - DNA, 15 bp, Homo sapiens
tgctctgtcatccag

SEQ ID NO: 1255095 - DNA, 15 bp, Homo sapiens
ttgctctgtcatcca

SEQ ID NO: 1255096 - DNA, 15 bp, Homo sapiens
tttgctctgtcatcc

SEQ ID NO: 1255097 - DNA, 15 bp, Homo sapiens
ttttgctctgtcatc

SEQ ID NO: 1255098 - DNA, 15 bp, Homo sapiens
gttttgctctgtcat

SEQ ID NO: 1255099 - DNA, 15 bp, Homo sapiens
tgttttgctctgtca

SEQ ID NO: 1255100 - DNA, 15 bp, Homo sapiens
gtgttttgctctgtc

SEQ ID NO: 1255101 - DNA, 15 bp, Homo sapiens
ggtgttttgctctgt

SEQ ID NO: 1255102 - DNA, 15 bp, Homo sapiens
tggtgttttgctctg

SEQ ID NO: 1255103 - DNA, 15 bp, Homo sapiens
atggtgttttgctct

SEQ ID NO: 1255104 - DNA, 15 bp, Homo sapiens
gatggtgttttgctc

SEQ ID NO: 1255105 - DNA, 15 bp, Homo sapiens
agatggtgttttgct

SEQ ID NO: 1255106 - DNA, 15 bp, Homo sapiens
aagatggtgttttgc

SEQ ID NO: 1255107 - DNA, 15 bp, Homo sapiens
taagatggtgttttg

SEQ ID NO: 1255108 - DNA, 15 bp, Homo sapiens
ttaagatggtgtttt

SEQ ID NO: 1255109 - DNA, 15 bp, Homo sapiens
tttaagatggtgttt

SEQ ID NO: 1255110 - DNA, 15 bp, Homo sapiens
ctttaagatggtgtt

SEQ ID NO: 1255111 - DNA, 15 bp, Homo sapiens
tctttaagatggtgt

SEQ ID NO: 1255112 - DNA, 15 bp, Homo sapiens
ctctttaagatggtg

SEQ ID NO: 1255113 - DNA, 15 bp, Homo sapiens
tctctttaagatggt

SEQ ID NO: 1255114 - DNA, 15 bp, Homo sapiens
ttctctttaagatgg

SEQ ID NO: 1255115 - DNA, 15 bp, Homo sapiens
tttctctttaagatg

SEQ ID NO: 1255116 - DNA, 15 bp, Homo sapiens
ttttctctttaagat

SEQ ID NO: 1255117 - DNA, 15 bp, Homo sapiens
tttttctctttaaga

SEQ ID NO: 1255118 - DNA, 15 bp, Homo sapiens
ttttttctctttaag

SEQ ID NO: 1255119 - DNA, 15 bp, Homo sapiens
tttttttctctttaa

SEQ ID NO: 1255120 - DNA, 15 bp, Homo sapiens
ttttttttctcttta

SEQ ID NO: 1255121 - DNA, 15 bp, Homo sapiens
tttttttttctcttt

SEQ ID NO: 1255122 - DNA, 15 bp, Homo sapiens
caccttttttttttt

SEQ ID NO: 1255123 - DNA, 15 bp, Homo sapiens
gcacctttttttttt

SEQ ID NO: 1255124 - DNA, 15 bp, Homo sapiens
agcaccttttttttt

SEQ ID NO: 1255125 - DNA, 15 bp, Homo sapiens
tagcacctttttttt

SEQ ID NO: 1255126 - DNA, 15 bp, Homo sapiens
ctagcaccttttttt

SEQ ID NO: 1255127 - DNA, 15 bp, Homo sapiens
tctagcacctttttt

SEQ ID NO: 1255128 - DNA, 15 bp, Homo sapiens
gtctagcaccttttt

SEQ ID NO: 1255129 - DNA, 15 bp, Homo sapiens
agtctagcacctttt

SEQ ID NO: 1255130 - DNA, 15 bp, Homo sapiens
gagtctagcaccttt

SEQ ID NO: 1255131 - DNA, 15 bp, Homo sapiens
agagtctagcacctt

SEQ ID NO: 1255132 - DNA, 15 bp, Homo sapiens
gagagtctagcacct

SEQ ID NO: 1255133 - DNA, 15 bp, Homo sapiens
tgagagtctagcacc

SEQ ID NO: 1255134 - DNA, 15 bp, Homo sapiens
ctgagagtctagcac

SEQ ID NO: 1255135 - DNA, 15 bp, Homo sapiens
gctgagagtctagca

SEQ ID NO: 1255136 - DNA, 15 bp, Homo sapiens
agctgagagtctagc

SEQ ID NO: 1255137 - DNA, 15 bp, Homo sapiens
gagctgagagtctag

SEQ ID NO: 1255138 - DNA, 15 bp, Homo sapiens
tgagctgagagtcta

SEQ ID NO: 1255139 - DNA, 15 bp, Homo sapiens
ctgagctgagagtct

SEQ ID NO: 1255140 - DNA, 15 bp, Homo sapiens
tctgagctgagagtc

SEQ ID NO: 1255141 - DNA, 15 bp, Homo sapiens
ttctgagctgagagt

SEQ ID NO: 1255142 - DNA, 15 bp, Homo sapiens
tttctgagctgagag

SEQ ID NO: 1255143 - DNA, 15 bp, Homo sapiens
ttttctgagctgaga

SEQ ID NO: 1255144 - DNA, 15 bp, Homo sapiens
tttttctgagctgag

SEQ ID NO: 1255145 - DNA, 15 bp, Homo sapiens
ctttttctgagctga

SEQ ID NO: 1255146 - DNA, 15 bp, Homo sapiens
tctttttctgagctg

SEQ ID NO: 1255147 - DNA, 15 bp, Homo sapiens
gtctttttctgagct

SEQ ID NO: 1255148 - DNA, 15 bp, Homo sapiens
ggtctttttctgagc

SEQ ID NO: 1255149 - DNA, 15 bp, Homo sapiens
aggtctttttctgag

SEQ ID NO: 1255150 - DNA, 15 bp, Homo sapiens
caggtctttttctga

SEQ ID NO: 1255151 - DNA, 15 bp, Homo sapiens
ccaggtctttttctg

SEQ ID NO: 1255152 - DNA, 15 bp, Homo sapiens
tccaggtctttttct

SEQ ID NO: 1255153 - DNA, 15 bp, Homo sapiens
ttccaggtctttttc

SEQ ID NO: 1255154 - DNA, 15 bp, Homo sapiens
attccaggtcttttt

SEQ ID NO: 1255155 - DNA, 15 bp, Homo sapiens
cattccaggtctttt

SEQ ID NO: 1255156 - DNA, 15 bp, Homo sapiens
ccattccaggtcttt

SEQ ID NO: 1255157 - DNA, 15 bp, Homo sapiens
accattccaggtctt

SEQ ID NO: 1255158 - DNA, 15 bp, Homo sapiens
taccattccaggtct

SEQ ID NO: 1255159 - DNA, 15 bp, Homo sapiens
ttaccattccaggtc

SEQ ID NO: 1255160 - DNA, 15 bp, Homo sapiens
cttaccattccaggt

SEQ ID NO: 1255161 - DNA, 15 bp, Homo sapiens
ccttaccattccagg

SEQ ID NO: 1255162 - DNA, 15 bp, Homo sapiens
cccttaccattccag

SEQ ID NO: 1255163 - DNA, 15 bp, Homo sapiens
ccccttaccattcca

SEQ ID NO: 1255164 - DNA, 15 bp, Homo sapiens
cccccttaccattcc

SEQ ID NO: 1255165 - DNA, 15 bp, Homo sapiens
acccccttaccattc

SEQ ID NO: 1255166 - DNA, 15 bp, Homo sapiens
aacccccttaccatt

SEQ ID NO: 1255167 - DNA, 15 bp, Homo sapiens
gaacccccttaccat

SEQ ID NO: 1255168 - DNA, 15 bp, Homo sapiens
agaacccccttacca

SEQ ID NO: 1255169 - DNA, 15 bp, Homo sapiens
gagaacccccttacc

SEQ ID NO: 1255170 - DNA, 15 bp, Homo sapiens
agagaacccccttac

SEQ ID NO: 1255171 - DNA, 15 bp, Homo sapiens
tagagaaccccctta

SEQ ID NO: 1255172 - DNA, 15 bp, Homo sapiens
gtagagaaccccctt

SEQ ID NO: 1255173 - DNA, 15 bp, Homo sapiens
tgtagagaaccccct

SEQ ID NO: 1255174 - DNA, 15 bp, Homo sapiens
ctgtagagaaccccc

SEQ ID NO: 1255175 - DNA, 15 bp, Homo sapiens
tctgtagagaacccc

SEQ ID NO: 1255176 - DNA, 15 bp, Homo sapiens
ttctgtagagaaccc

SEQ ID NO: 1255177 - DNA, 15 bp, Homo sapiens
attctgtagagaacc

SEQ ID NO: 1255178 - DNA, 15 bp, Homo sapiens
cattctgtagagaac

SEQ ID NO: 1255179 - DNA, 15 bp, Homo sapiens
acattctgtagagaa

SEQ ID NO: 1255180 - DNA, 15 bp, Homo sapiens
cacattctgtagaga

SEQ ID NO: 1255181 - DNA, 15 bp, Homo sapiens
ccacattctgtagag

SEQ ID NO: 1255182 - DNA, 15 bp, Homo sapiens
tccacattctgtaga

SEQ ID NO: 1255183 - DNA, 15 bp, Homo sapiens
atccacattctgtag

SEQ ID NO: 1255184 - DNA, 15 bp, Homo sapiens
aatccacattctgta

SEQ ID NO: 1255185 - DNA, 15 bp, Homo sapiens
aaatccacattctgt

SEQ ID NO: 1255186 - DNA, 15 bp, Homo sapiens
gaaatccacattctg

SEQ ID NO: 1255187 - DNA, 15 bp, Homo sapiens
ggaaatccacattct

SEQ ID NO: 1255188 - DNA, 15 bp, Homo sapiens
gggaaatccacattc

SEQ ID NO: 1255189 - DNA, 15 bp, Homo sapiens
agggaaatccacatt

SEQ ID NO: 1255190 - DNA, 15 bp, Homo sapiens
cagggaaatccacat

SEQ ID NO: 1255191 - DNA, 15 bp, Homo sapiens
tcagggaaatccaca

SEQ ID NO: 1255192 - DNA, 15 bp, Homo sapiens
ctcagggaaatccac

SEQ ID NO: 1255193 - DNA, 15 bp, Homo sapiens
tctcagggaaatcca

SEQ ID NO: 1255194 - DNA, 15 bp, Homo sapiens
atctcagggaaatcc

SEQ ID NO: 1255195 - DNA, 15 bp, Homo sapiens
tatctcagggaaatc

SEQ ID NO: 1255196 - DNA, 15 bp, Homo sapiens
ctatctcagggaaat

SEQ ID NO: 1255197 - DNA, 15 bp, Homo sapiens
gctatctcagggaaa

SEQ ID NO: 1255198 - DNA, 15 bp, Homo sapiens
agctatctcagggaa

SEQ ID NO: 1255199 - DNA, 15 bp, Homo sapiens
aagctatctcaggga

SEQ ID NO: 1255200 - DNA, 15 bp, Homo sapiens
aaagctatctcaggg

SEQ ID NO: 1255201 - DNA, 15 bp, Homo sapiens
caaagctatctcagg

SEQ ID NO: 1255202 - DNA, 15 bp, Homo sapiens
gcaaagctatctcag

SEQ ID NO: 1255203 - DNA, 15 bp, Homo sapiens
tgcaaagctatctca

SEQ ID NO: 1255204 - DNA, 15 bp, Homo sapiens
ctgcaaagctatctc

SEQ ID NO: 1255205 - DNA, 15 bp, Homo sapiens
cctgcaaagctatct

SEQ ID NO: 1255206 - DNA, 15 bp, Homo sapiens
ccctgcaaagctatc

SEQ ID NO: 1255207 - DNA, 15 bp, Homo sapiens
gccctgcaaagctat

SEQ ID NO: 1255208 - DNA, 15 bp, Homo sapiens
ggccctgcaaagcta

SEQ ID NO: 1255209 - DNA, 15 bp, Homo sapiens
tggccctgcaaagct

SEQ ID NO: 1255210 - DNA, 15 bp, Homo sapiens
atggccctgcaaagc

SEQ ID NO: 1255211 - DNA, 15 bp, Homo sapiens
aatggccctgcaaag

SEQ ID NO: 1255212 - DNA, 15 bp, Homo sapiens
aaatggccctgcaaa

SEQ ID NO: 1255213 - DNA, 15 bp, Homo sapiens
gaaatggccctgcaa

SEQ ID NO: 1255214 - DNA, 15 bp, Homo sapiens
tgaaatggccctgca

SEQ ID NO: 1255215 - DNA, 15 bp, Homo sapiens
ttgaaatggccctgc

SEQ ID NO: 1255216 - DNA, 15 bp, Homo sapiens
tttgaaatggccctg

SEQ ID NO: 1255217 - DNA, 15 bp, Homo sapiens
ttttgaaatggccct

SEQ ID NO: 1255218 - DNA, 15 bp, Homo sapiens
attttgaaatggccc

SEQ ID NO: 1255219 - DNA, 15 bp, Homo sapiens
tattttgaaatggcc

SEQ ID NO: 1255220 - DNA, 15 bp, Homo sapiens
atattttgaaatggc

SEQ ID NO: 1255221 - DNA, 15 bp, Homo sapiens
catattttgaaatgg

SEQ ID NO: 1255222 - DNA, 15 bp, Homo sapiens
acatattttgaaatg

SEQ ID NO: 1255223 - DNA, 15 bp, Homo sapiens
gacatattttgaaat

SEQ ID NO: 1255224 - DNA, 15 bp, Homo sapiens
tgacatattttgaaa

SEQ ID NO: 1255225 - DNA, 15 bp, Homo sapiens
ttgacatattttgaa

SEQ ID NO: 1255226 - DNA, 15 bp, Homo sapiens
tttgacatattttga

SEQ ID NO: 1255227 - DNA, 15 bp, Homo sapiens
gtttgacatattttg

SEQ ID NO: 1255228 - DNA, 15 bp, Homo sapiens
tgtttgacatatttt

SEQ ID NO: 1255229 - DNA, 15 bp, Homo sapiens
ttgtttgacatattt

SEQ ID NO: 1255230 - DNA, 15 bp, Homo sapiens
tttgtttgacatatt

SEQ ID NO: 1255231 - DNA, 15 bp, Homo sapiens
atttgtttgacatat

SEQ ID NO: 1255232 - DNA, 15 bp, Homo sapiens
tatttgtttgacata

SEQ ID NO: 1255233 - DNA, 15 bp, Homo sapiens
gtatttgtttgacat

SEQ ID NO: 1255234 - DNA, 15 bp, Homo sapiens
tgtatttgtttgaca

SEQ ID NO: 1255235 - DNA, 15 bp, Homo sapiens
ttgtatttgtttgac

SEQ ID NO: 1255236 - DNA, 15 bp, Homo sapiens
attgtatttgtttga

SEQ ID NO: 1255237 - DNA, 15 bp, Homo sapiens
aattgtatttgtttg

SEQ ID NO: 1255238 - DNA, 15 bp, Homo sapiens
aaattgtatttgttt

SEQ ID NO: 1255239 - DNA, 15 bp, Homo sapiens
caaattgtatttgtt

SEQ ID NO: 1255240 - DNA, 15 bp, Homo sapiens
ccaaattgtatttgt

SEQ ID NO: 1255241 - DNA, 15 bp, Homo sapiens
tccaaattgtatttg

SEQ ID NO: 1255242 - DNA, 15 bp, Homo sapiens
ctccaaattgtattt

SEQ ID NO: 1255243 - DNA, 15 bp, Homo sapiens
actccaaattgtatt

SEQ ID NO: 1255244 - DNA, 15 bp, Homo sapiens
tactccaaattgtat

SEQ ID NO: 1255245 - DNA, 15 bp, Homo sapiens
ttactccaaattgta

SEQ ID NO: 1255246 - DNA, 15 bp, Homo sapiens
tttactccaaattgt

SEQ ID NO: 1255247 - DNA, 15 bp, Homo sapiens
ttttactccaaattg

SEQ ID NO: 1255248 - DNA, 15 bp, Homo sapiens
attttactccaaatt

SEQ ID NO: 1255249 - DNA, 15 bp, Homo sapiens
gattttactccaaat

SEQ ID NO: 1255250 - DNA, 15 bp, Homo sapiens
tgattttactccaaa

SEQ ID NO: 1255251 - DNA, 15 bp, Homo sapiens
atgattttactccaa

SEQ ID NO: 1255252 - DNA, 15 bp, Homo sapiens
aatgattttactcca

SEQ ID NO: 1255253 - DNA, 15 bp, Homo sapiens
aaatgattttactcc

SEQ ID NO: 1255254 - DNA, 15 bp, Homo sapiens
taaatgattttactc

SEQ ID NO: 1255255 - DNA, 15 bp, Homo sapiens
ataaatgattttact

SEQ ID NO: 1255256 - DNA, 15 bp, Homo sapiens
aataaatgattttac

SEQ ID NO: 1255257 - DNA, 15 bp, Homo sapiens
aaataaatgatttta

SEQ ID NO: 1255258 - DNA, 15 bp, Homo sapiens
aaaataaatgatttt

SEQ ID NO: 1255259 - DNA, 15 bp, Homo sapiens
taaaataaatgattt

SEQ ID NO: 1255260 - DNA, 15 bp, Homo sapiens
ctaaaataaatgatt

SEQ ID NO: 1255261 - DNA, 15 bp, Homo sapiens
cctaaaataaatgat

SEQ ID NO: 1255262 - DNA, 15 bp, Homo sapiens
ccctaaaataaatga

SEQ ID NO: 1255263 - DNA, 15 bp, Homo sapiens
gccctaaaataaatg

SEQ ID NO: 1255264 - DNA, 15 bp, Homo sapiens
ggccctaaaataaat

SEQ ID NO: 1255265 - DNA, 15 bp, Homo sapiens
aggccctaaaataaa

SEQ ID NO: 1255266 - DNA, 15 bp, Homo sapiens
caggccctaaaataa

SEQ ID NO: 1255267 - DNA, 15 bp, Homo sapiens
gcaggccctaaaata

SEQ ID NO: 1255268 - DNA, 15 bp, Homo sapiens
agcaggccctaaaat

SEQ ID NO: 1255269 - DNA, 15 bp, Homo sapiens
tagcaggccctaaaa

SEQ ID NO: 1255270 - DNA, 15 bp, Homo sapiens
atagcaggccctaaa

SEQ ID NO: 1255271 - DNA, 15 bp, Homo sapiens
tatagcaggccctaa

SEQ ID NO: 1255272 - DNA, 15 bp, Homo sapiens
atatagcaggcccta

SEQ ID NO: 1255273 - DNA, 15 bp, Homo sapiens
catatagcaggccct

SEQ ID NO: 1255274 - DNA, 15 bp, Homo sapiens
acatatagcaggccc

SEQ ID NO: 1255275 - DNA, 15 bp, Homo sapiens
gacatatagcaggcc

SEQ ID NO: 1255276 - DNA, 15 bp, Homo sapiens
tgacatatagcaggc

SEQ ID NO: 1255277 - DNA, 15 bp, Homo sapiens
atgacatatagcagg

SEQ ID NO: 1255278 - DNA, 15 bp, Homo sapiens
catgacatatagcag

SEQ ID NO: 1255279 - DNA, 15 bp, Homo sapiens
acatgacatatagca

SEQ ID NO: 1255280 - DNA, 15 bp, Homo sapiens
cacatgacatatagc

SEQ ID NO: 1255281 - DNA, 15 bp, Homo sapiens
tcacatgacatatag

SEQ ID NO: 1255282 - DNA, 15 bp, Homo sapiens
atcacatgacatata

SEQ ID NO: 1255283 - DNA, 15 bp, Homo sapiens
gatcacatgacatat

SEQ ID NO: 1255284 - DNA, 15 bp, Homo sapiens
ggatcacatgacata

SEQ ID NO: 1255285 - DNA, 15 bp, Homo sapiens
aggatcacatgacat

SEQ ID NO: 1255286 - DNA, 15 bp, Homo sapiens
taggatcacatgaca

SEQ ID NO: 1255287 - DNA, 15 bp, Homo sapiens
ataggatcacatgac

SEQ ID NO: 1255288 - DNA, 15 bp, Homo sapiens
tataggatcacatga

SEQ ID NO: 1255289 - DNA, 15 bp, Homo sapiens
gtataggatcacatg

SEQ ID NO: 1255290 - DNA, 15 bp, Homo sapiens
agtataggatcacat

SEQ ID NO: 1255291 - DNA, 15 bp, Homo sapiens
tagtataggatcaca

SEQ ID NO: 1255292 - DNA, 15 bp, Homo sapiens
ctagtataggatcac

SEQ ID NO: 1255293 - DNA, 15 bp, Homo sapiens
tctagtataggatca

SEQ ID NO: 1255294 - DNA, 15 bp, Homo sapiens
ctctagtataggatc

SEQ ID NO: 1255295 - DNA, 15 bp, Homo sapiens
tctctagtataggat

SEQ ID NO: 1255296 - DNA, 15 bp, Homo sapiens
ttctctagtatagga

SEQ ID NO: 1255297 - DNA, 15 bp, Homo sapiens
cttctctagtatagg

SEQ ID NO: 1255298 - DNA, 15 bp, Homo sapiens
acttctctagtatag

SEQ ID NO: 1255299 - DNA, 15 bp, Homo sapiens
gacttctctagtata

SEQ ID NO: 1255300 - DNA, 15 bp, Homo sapiens
tgacttctctagtat

SEQ ID NO: 1255301 - DNA, 15 bp, Homo sapiens
ctgacttctctagta

SEQ ID NO: 1255302 - DNA, 15 bp, Homo sapiens
cctgacttctctagt

SEQ ID NO: 1255303 - DNA, 15 bp, Homo sapiens
acctgacttctctag

SEQ ID NO: 1255304 - DNA, 15 bp, Homo sapiens
aacctgacttctcta

SEQ ID NO: 1255305 - DNA, 15 bp, Homo sapiens
caacctgacttctct

SEQ ID NO: 1255306 - DNA, 15 bp, Homo sapiens
ccaacctgacttctc

SEQ ID NO: 1255307 - DNA, 15 bp, Homo sapiens
tccaacctgacttct

SEQ ID NO: 1255308 - DNA, 15 bp, Homo sapiens
ttccaacctgacttc

SEQ ID NO: 1255309 - DNA, 15 bp, Homo sapiens
tttccaacctgactt

SEQ ID NO: 1255310 - DNA, 15 bp, Homo sapiens
gtttccaacctgact

SEQ ID NO: 1255311 - DNA, 15 bp, Homo sapiens
agtttccaacctgac

SEQ ID NO: 1255312 - DNA, 15 bp, Homo sapiens
cagtttccaacctga

SEQ ID NO: 1255313 - DNA, 15 bp, Homo sapiens
ccagtttccaacctg

SEQ ID NO: 1255314 - DNA, 15 bp, Homo sapiens
accagtttccaacct

SEQ ID NO: 1255315 - DNA, 15 bp, Homo sapiens
taccagtttccaacc

SEQ ID NO: 1255316 - DNA, 15 bp, Homo sapiens
ataccagtttccaac

SEQ ID NO: 1255317 - DNA, 15 bp, Homo sapiens
gataccagtttccaa

SEQ ID NO: 1255318 - DNA, 15 bp, Homo sapiens
agataccagtttcca

SEQ ID NO: 1255319 - DNA, 15 bp, Homo sapiens
aagataccagtttcc

SEQ ID NO: 1255320 - DNA, 15 bp, Homo sapiens
taagataccagtttc

SEQ ID NO: 1255321 - DNA, 15 bp, Homo sapiens
ataagataccagttt

SEQ ID NO: 1255322 - DNA, 15 bp, Homo sapiens
aataagataccagtt

SEQ ID NO: 1255323 - DNA, 15 bp, Homo sapiens
caataagataccagt

SEQ ID NO: 1255324 - DNA, 15 bp, Homo sapiens
gcaataagataccag

SEQ ID NO: 1255325 - DNA, 15 bp, Homo sapiens
agcaataagatacca

SEQ ID NO: 1255326 - DNA, 15 bp, Homo sapiens
tagcaataagatacc

SEQ ID NO: 1255327 - DNA, 15 bp, Homo sapiens
gtagcaataagatac

SEQ ID NO: 1255328 - DNA, 15 bp, Homo sapiens
tgtagcaataagata

SEQ ID NO: 1255329 - DNA, 15 bp, Homo sapiens
ttgtagcaataagat

SEQ ID NO: 1255330 - DNA, 15 bp, Homo sapiens
tttgtagcaataaga

SEQ ID NO: 1255331 - DNA, 15 bp, Homo sapiens
ctttgtagcaataag

SEQ ID NO: 1255332 - DNA, 15 bp, Homo sapiens
tctttgtagcaataa

SEQ ID NO: 1255333 - DNA, 15 bp, Homo sapiens
gtctttgtagcaata

SEQ ID NO: 1255334 - DNA, 15 bp, Homo sapiens
agtctttgtagcaat

SEQ ID NO: 1255335 - DNA, 15 bp, Homo sapiens
gagtctttgtagcaa

SEQ ID NO: 1255336 - DNA, 15 bp, Homo sapiens
agagtctttgtagca

SEQ ID NO: 1255337 - DNA, 15 bp, Homo sapiens
cagagtctttgtagc

SEQ ID NO: 1255338 - DNA, 15 bp, Homo sapiens
acagagtctttgtag

SEQ ID NO: 1255339 - DNA, 15 bp, Homo sapiens
aacagagtctttgta

SEQ ID NO: 1255340 - DNA, 15 bp, Homo sapiens
aaacagagtctttgt

SEQ ID NO: 1255341 - DNA, 15 bp, Homo sapiens
caaacagagtctttg

SEQ ID NO: 1255342 - DNA, 15 bp, Homo sapiens
ccaaacagagtcttt

SEQ ID NO: 1255343 - DNA, 15 bp, Homo sapiens
accaaacagagtctt

SEQ ID NO: 1255344 - DNA, 15 bp, Homo sapiens
gaccaaacagagtct

SEQ ID NO: 1255345 - DNA, 15 bp, Homo sapiens
tgaccaaacagagtc

SEQ ID NO: 1255346 - DNA, 15 bp, Homo sapiens
ctgaccaaacagagt

SEQ ID NO: 1255347 - DNA, 15 bp, Homo sapiens
gctgaccaaacagag

SEQ ID NO: 1255348 - DNA, 15 bp, Homo sapiens
ggctgaccaaacaga

SEQ ID NO: 1255349 - DNA, 15 bp, Homo sapiens
aggctgaccaaacag

SEQ ID NO: 1255350 - DNA, 15 bp, Homo sapiens
gaggctgaccaaaca

SEQ ID NO: 1255351 - DNA, 15 bp, Homo sapiens
tgaggctgaccaaac

SEQ ID NO: 1255352 - DNA, 15 bp, Homo sapiens
ttgaggctgaccaaa

SEQ ID NO: 1255353 - DNA, 15 bp, Homo sapiens
cttgaggctgaccaa

SEQ ID NO: 1255354 - DNA, 15 bp, Homo sapiens
ccttgaggctgacca

SEQ ID NO: 1255355 - DNA, 15 bp, Homo sapiens
accttgaggctgacc

SEQ ID NO: 1255356 - DNA, 15 bp, Homo sapiens
gaccttgaggctgac

SEQ ID NO: 1255357 - DNA, 15 bp, Homo sapiens
agaccttgaggctga

SEQ ID NO: 1255358 - DNA, 15 bp, Homo sapiens
gagaccttgaggctg

SEQ ID NO: 1255359 - DNA, 15 bp, Homo sapiens
agagaccttgaggct

SEQ ID NO: 1255360 - DNA, 15 bp, Homo sapiens
aagagaccttgaggc

SEQ ID NO: 1255361 - DNA, 15 bp, Homo sapiens
taagagaccttgagg

SEQ ID NO: 1255362 - DNA, 15 bp, Homo sapiens
ttaagagaccttgag

SEQ ID NO: 1255363 - DNA, 15 bp, Homo sapiens
gttaagagaccttga

SEQ ID NO: 1255364 - DNA, 15 bp, Homo sapiens
cgttaagagaccttg

SEQ ID NO: 1255365 - DNA, 15 bp, Homo sapiens
acgttaagagacctt

SEQ ID NO: 1255366 - DNA, 15 bp, Homo sapiens
cacgttaagagacct

SEQ ID NO: 1255367 - DNA, 15 bp, Homo sapiens
tcacgttaagagacc

SEQ ID NO: 1255368 - DNA, 15 bp, Homo sapiens
ttcacgttaagagac

SEQ ID NO: 1255369 - DNA, 15 bp, Homo sapiens
attcacgttaagaga

SEQ ID NO: 1255370 - DNA, 15 bp, Homo sapiens
cattcacgttaagag

SEQ ID NO: 1255371 - DNA, 15 bp, Homo sapiens
gcattcacgttaaga

SEQ ID NO: 1255372 - DNA, 15 bp, Homo sapiens
agcattcacgttaag

SEQ ID NO: 1255373 - DNA, 15 bp, Homo sapiens
cagcattcacgttaa

SEQ ID NO: 1255374 - DNA, 15 bp, Homo sapiens
ccagcattcacgtta

SEQ ID NO: 1255375 - DNA, 15 bp, Homo sapiens
accagcattcacgtt

SEQ ID NO: 1255376 - DNA, 15 bp, Homo sapiens
gaccagcattcacgt

SEQ ID NO: 1255377 - DNA, 15 bp, Homo sapiens
tgaccagcattcacg

SEQ ID NO: 1255378 - DNA, 15 bp, Homo sapiens
ctgaccagcattcac

SEQ ID NO: 1255379 - DNA, 15 bp, Homo sapiens
gctgaccagcattca

SEQ ID NO: 1255380 - DNA, 15 bp, Homo sapiens
agctgaccagcattc

SEQ ID NO: 1255381 - DNA, 15 bp, Homo sapiens
cagctgaccagcatt

SEQ ID NO: 1255382 - DNA, 15 bp, Homo sapiens
acagctgaccagcat

SEQ ID NO: 1255383 - DNA, 15 bp, Homo sapiens
cacagctgaccagca

SEQ ID NO: 1255384 - DNA, 15 bp, Homo sapiens
gcacagctgaccagc

SEQ ID NO: 1255385 - DNA, 15 bp, Homo sapiens
ggcacagctgaccag

SEQ ID NO: 1255386 - DNA, 15 bp, Homo sapiens
gggcacagctgacca

SEQ ID NO: 1255387 - DNA, 15 bp, Homo sapiens
cgggcacagctgacc

SEQ ID NO: 1255388 - DNA, 15 bp, Homo sapiens
tcgggcacagctgac

SEQ ID NO: 1255389 - DNA, 15 bp, Homo sapiens
ttcgggcacagctga

SEQ ID NO: 1255390 - DNA, 15 bp, Homo sapiens
attcgggcacagctg

SEQ ID NO: 1255391 - DNA, 15 bp, Homo sapiens
aattcgggcacagct

SEQ ID NO: 1255392 - DNA, 15 bp, Homo sapiens
gaattcgggcacagc

SEQ ID NO: 1255393 - DNA, 15 bp, Homo sapiens
ggaattcgggcacag

SEQ ID NO: 1255394 - DNA, 15 bp, Homo sapiens
tggaattcgggcaca

SEQ ID NO: 1255395 - DNA, 15 bp, Homo sapiens
ttggaattcgggcac

SEQ ID NO: 1255396 - DNA, 15 bp, Homo sapiens
tttggaattcgggca

SEQ ID NO: 1255397 - DNA, 15 bp, Homo sapiens
ctttggaattcgggc

SEQ ID NO: 1255398 - DNA, 15 bp, Homo sapiens
cctttggaattcggg

SEQ ID NO: 1255399 - DNA, 15 bp, Homo sapiens
tcctttggaattcgg

SEQ ID NO: 1255400 - DNA, 15 bp, Homo sapiens
ttcctttggaattcg

SEQ ID NO: 1255401 - DNA, 15 bp, Homo sapiens
cttcctttggaattc

SEQ ID NO: 1255402 - DNA, 15 bp, Homo sapiens
tcttcctttggaatt

SEQ ID NO: 1255403 - DNA, 15 bp, Homo sapiens
ttcttcctttggaat

SEQ ID NO: 1255404 - DNA, 15 bp, Homo sapiens
tttcttcctttggaa

SEQ ID NO: 1255405 - DNA, 15 bp, Homo sapiens
atttcttcctttgga

SEQ ID NO: 1255406 - DNA, 15 bp, Homo sapiens
tatttcttcctttgg

SEQ ID NO: 1255407 - DNA, 15 bp, Homo sapiens
ttatttcttcctttg

SEQ ID NO: 1255408 - DNA, 15 bp, Homo sapiens
attatttcttccttt

SEQ ID NO: 1255409 - DNA, 15 bp, Homo sapiens
tcattatttcttcct

SEQ ID NO: 1255410 - DNA, 15 bp, Homo sapiens
ctcattatttcttcc

SEQ ID NO: 1255411 - DNA, 15 bp, Homo sapiens
cctcattatttcttc

SEQ ID NO: 1255412 - DNA, 15 bp, Homo sapiens
gcctcattatttctt

SEQ ID NO: 1255413 - DNA, 15 bp, Homo sapiens
cgcctcattatttct

SEQ ID NO: 1255414 - DNA, 15 bp, Homo sapiens
acgcctcattatttc

SEQ ID NO: 1255415 - DNA, 15 bp, Homo sapiens
cacgcctcattattt

SEQ ID NO: 1255416 - DNA, 15 bp, Homo sapiens
acacgcctcattatt

SEQ ID NO: 1255417 - DNA, 15 bp, Homo sapiens
cacacgcctcattat

SEQ ID NO: 1255418 - DNA, 15 bp, Homo sapiens
ccacacgcctcatta

SEQ ID NO: 1255419 - DNA, 15 bp, Homo sapiens
cccacacgcctcatt

SEQ ID NO: 1255420 - DNA, 15 bp, Homo sapiens
tcccacacgcctcat

SEQ ID NO: 1255421 - DNA, 15 bp, Homo sapiens
gtcccacacgcctca

SEQ ID NO: 1255422 - DNA, 15 bp, Homo sapiens
ggtcccacacgcctc

SEQ ID NO: 1255423 - DNA, 15 bp, Homo sapiens
aggtcccacacgcct

SEQ ID NO: 1255424 - DNA, 15 bp, Homo sapiens
caggtcccacacgcc

SEQ ID NO: 1255425 - DNA, 15 bp, Homo sapiens
gcaggtcccacacgc

SEQ ID NO: 1255426 - DNA, 15 bp, Homo sapiens
agcaggtcccacacg

SEQ ID NO: 1255427 - DNA, 15 bp, Homo sapiens
aagcaggtcccacac

SEQ ID NO: 1255428 - DNA, 15 bp, Homo sapiens
gaagcaggtcccaca

SEQ ID NO: 1255429 - DNA, 15 bp, Homo sapiens
ggaagcaggtcccac

SEQ ID NO: 1255430 - DNA, 15 bp, Homo sapiens
gggaagcaggtccca

SEQ ID NO: 1255431 - DNA, 15 bp, Homo sapiens
ggggaagcaggtccc

SEQ ID NO: 1255432 - DNA, 15 bp, Homo sapiens
aggggaagcaggtcc

SEQ ID NO: 1255433 - DNA, 15 bp, Homo sapiens
gaggggaagcaggtc

SEQ ID NO: 1255434 - DNA, 15 bp, Homo sapiens
tgaggggaagcaggt

SEQ ID NO: 1255435 - DNA, 15 bp, Homo sapiens
atgaggggaagcagg

SEQ ID NO: 1255436 - DNA, 15 bp, Homo sapiens
catgaggggaagcag

SEQ ID NO: 1255437 - DNA, 15 bp, Homo sapiens
ccatgaggggaagca

SEQ ID NO: 1255438 - DNA, 15 bp, Homo sapiens
gccatgaggggaagc

SEQ ID NO: 1255439 - DNA, 15 bp, Homo sapiens
ggccatgaggggaag

SEQ ID NO: 1255440 - DNA, 15 bp, Homo sapiens
aggccatgaggggaa

SEQ ID NO: 1255441 - DNA, 15 bp, Homo sapiens
gaggccatgagggga

SEQ ID NO: 1255442 - DNA, 15 bp, Homo sapiens
tgaggccatgagggg

SEQ ID NO: 1255443 - DNA, 15 bp, Homo sapiens
ttgaggccatgaggg

SEQ ID NO: 1255444 - DNA, 15 bp, Homo sapiens
gttgaggccatgagg

SEQ ID NO: 1255445 - DNA, 15 bp, Homo sapiens
agttgaggccatgag

SEQ ID NO: 1255446 - DNA, 15 bp, Homo sapiens
tagttgaggccatga

SEQ ID NO: 1255447 - DNA, 15 bp, Homo sapiens
ctagttgaggccatg

SEQ ID NO: 1255448 - DNA, 15 bp, Homo sapiens
actagttgaggccat

SEQ ID NO: 1255449 - DNA, 15 bp, Homo sapiens
gactagttgaggcca

SEQ ID NO: 1255450 - DNA, 15 bp, Homo sapiens
agactagttgaggcc

SEQ ID NO: 1255451 - DNA, 15 bp, Homo sapiens
aagactagttgaggc

SEQ ID NO: 1255452 - DNA, 15 bp, Homo sapiens
aaagactagttgagg

SEQ ID NO: 1255453 - DNA, 15 bp, Homo sapiens
gaaagactagttgag

SEQ ID NO: 1255454 - DNA, 15 bp, Homo sapiens
tgaaagactagttga

SEQ ID NO: 1255455 - DNA, 15 bp, Homo sapiens
ctgaaagactagttg

SEQ ID NO: 1255456 - DNA, 15 bp, Homo sapiens
cctgaaagactagtt

SEQ ID NO: 1255457 - DNA, 15 bp, Homo sapiens
acctgaaagactagt

SEQ ID NO: 1255458 - DNA, 15 bp, Homo sapiens
aacctgaaagactag

SEQ ID NO: 1255459 - DNA, 15 bp, Homo sapiens
gaacctgaaagacta

SEQ ID NO: 1255460 - DNA, 15 bp, Homo sapiens
ggaacctgaaagact

SEQ ID NO: 1255461 - DNA, 15 bp, Homo sapiens
aggaacctgaaagac

SEQ ID NO: 1255462 - DNA, 15 bp, Homo sapiens
taggaacctgaaaga

SEQ ID NO: 1255463 - DNA, 15 bp, Homo sapiens
ataggaacctgaaag

SEQ ID NO: 1255464 - DNA, 15 bp, Homo sapiens
cataggaacctgaaa

SEQ ID NO: 1255465 - DNA, 15 bp, Homo sapiens
ccataggaacctgaa

SEQ ID NO: 1255466 - DNA, 15 bp, Homo sapiens
tccataggaacctga

SEQ ID NO: 1255467 - DNA, 15 bp, Homo sapiens
ttccataggaacctg

SEQ ID NO: 1255468 - DNA, 15 bp, Homo sapiens
attccataggaacct

SEQ ID NO: 1255469 - DNA, 15 bp, Homo sapiens
aattccataggaacc

SEQ ID NO: 1255470 - DNA, 15 bp, Homo sapiens
gaattccataggaac

SEQ ID NO: 1255471 - DNA, 15 bp, Homo sapiens
ggaattccataggaa

SEQ ID NO: 1255472 - DNA, 15 bp, Homo sapiens
gggaattccatagga

SEQ ID NO: 1255473 - DNA, 15 bp, Homo sapiens
agggaattccatagg

SEQ ID NO: 1255474 - DNA, 15 bp, Homo sapiens
aagggaattccatag

SEQ ID NO: 1255475 - DNA, 15 bp, Homo sapiens
caagggaattccata

SEQ ID NO: 1255476 - DNA, 15 bp, Homo sapiens
ccaagggaattccat

SEQ ID NO: 1255477 - DNA, 15 bp, Homo sapiens
gccaagggaattcca

SEQ ID NO: 1255478 - DNA, 15 bp, Homo sapiens
tgccaagggaattcc

SEQ ID NO: 1255479 - DNA, 15 bp, Homo sapiens
ctgccaagggaattc

SEQ ID NO: 1255480 - DNA, 15 bp, Homo sapiens
tctgccaagggaatt

SEQ ID NO: 1255481 - DNA, 15 bp, Homo sapiens
ctctgccaagggaat

SEQ ID NO: 1255482 - DNA, 15 bp, Homo sapiens
tctctgccaagggaa

SEQ ID NO: 1255483 - DNA, 15 bp, Homo sapiens
ctctctgccaaggga

SEQ ID NO: 1255484 - DNA, 15 bp, Homo sapiens
cctctctgccaaggg

SEQ ID NO: 1255485 - DNA, 15 bp, Homo sapiens
tcctctctgccaagg

SEQ ID NO: 1255486 - DNA, 15 bp, Homo sapiens
gtcctctctgccaag

SEQ ID NO: 1255487 - DNA, 15 bp, Homo sapiens
cgtcctctctgccaa

SEQ ID NO: 1255488 - DNA, 15 bp, Homo sapiens
ccgtcctctctgcca

SEQ ID NO: 1255489 - DNA, 15 bp, Homo sapiens
cccgtcctctctgcc

SEQ ID NO: 1255490 - DNA, 15 bp, Homo sapiens
acccgtcctctctgc

SEQ ID NO: 1255491 - DNA, 15 bp, Homo sapiens
gacccgtcctctctg

SEQ ID NO: 1255492 - DNA, 15 bp, Homo sapiens
ggacccgtcctctct

SEQ ID NO: 1255493 - DNA, 15 bp, Homo sapiens
tggacccgtcctctc

SEQ ID NO: 1255494 - DNA, 15 bp, Homo sapiens
gtggacccgtcctct

SEQ ID NO: 1255495 - DNA, 15 bp, Homo sapiens
agtggacccgtcctc

SEQ ID NO: 1255496 - DNA, 15 bp, Homo sapiens
gagtggacccgtcct

SEQ ID NO: 1255497 - DNA, 15 bp, Homo sapiens
tgagtggacccgtcc

SEQ ID NO: 1255498 - DNA, 15 bp, Homo sapiens
ctgagtggacccgtc

SEQ ID NO: 1255499 - DNA, 15 bp, Homo sapiens
actgagtggacccgt

SEQ ID NO: 1255500 - DNA, 15 bp, Homo sapiens
cactgagtggacccg

SEQ ID NO: 1255501 - DNA, 15 bp, Homo sapiens
tcactgagtggaccc

SEQ ID NO: 1255502 - DNA, 15 bp, Homo sapiens
ctcactgagtggacc

SEQ ID NO: 1255503 - DNA, 15 bp, Homo sapiens
actcactgagtggac

SEQ ID NO: 1255504 - DNA, 15 bp, Homo sapiens
aactcactgagtgga

SEQ ID NO: 1255505 - DNA, 15 bp, Homo sapiens
caactcactgagtgg

SEQ ID NO: 1255506 - DNA, 15 bp, Homo sapiens
ccaactcactgagtg

SEQ ID NO: 1255507 - DNA, 15 bp, Homo sapiens
cccaactcactgagt

SEQ ID NO: 1255508 - DNA, 15 bp, Homo sapiens
ccccaactcactgag

SEQ ID NO: 1255509 - DNA, 15 bp, Homo sapiens
cccccaactcactga

SEQ ID NO: 1255510 - DNA, 15 bp, Homo sapiens
gcccccaactcactg

SEQ ID NO: 1255511 - DNA, 15 bp, Homo sapiens
agcccccaactcact

SEQ ID NO: 1255512 - DNA, 15 bp, Homo sapiens
aagcccccaactcac

SEQ ID NO: 1255513 - DNA, 15 bp, Homo sapiens
taagcccccaactca

SEQ ID NO: 1255514 - DNA, 15 bp, Homo sapiens
ctaagcccccaactc

SEQ ID NO: 1255515 - DNA, 15 bp, Homo sapiens
tctaagcccccaact

SEQ ID NO: 1255516 - DNA, 15 bp, Homo sapiens
ttctaagcccccaac

SEQ ID NO: 1255517 - DNA, 15 bp, Homo sapiens
attctaagcccccaa

SEQ ID NO: 1255518 - DNA, 15 bp, Homo sapiens
aattctaagccccca

SEQ ID NO: 1255519 - DNA, 15 bp, Homo sapiens
aaattctaagccccc

SEQ ID NO: 1255520 - DNA, 15 bp, Homo sapiens
aaaattctaagcccc

SEQ ID NO: 1255521 - DNA, 15 bp, Homo sapiens
taaaattctaagccc

SEQ ID NO: 1255522 - DNA, 15 bp, Homo sapiens
ataaaattctaagcc

SEQ ID NO: 1255523 - DNA, 15 bp, Homo sapiens
aataaaattctaagc

SEQ ID NO: 1255524 - DNA, 15 bp, Homo sapiens
aaataaaattctaag

SEQ ID NO: 1255525 - DNA, 15 bp, Homo sapiens
aaaataaaattctaa

SEQ ID NO: 1255526 - DNA, 15 bp, Homo sapiens
aaaaataaaattcta

SEQ ID NO: 1255527 - DNA, 15 bp, Homo sapiens
caaaaataaaattct

SEQ ID NO: 1255528 - DNA, 15 bp, Homo sapiens
ccaaaaataaaattc

SEQ ID NO: 1255529 - DNA, 15 bp, Homo sapiens
accaaaaataaaatt

SEQ ID NO: 1255530 - DNA, 15 bp, Homo sapiens
aaccaaaaataaaat

SEQ ID NO: 1255531 - DNA, 15 bp, Homo sapiens
aaaccaaaaataaaa

SEQ ID NO: 1255532 - DNA, 15 bp, Homo sapiens
taaaccaaaaataaa

SEQ ID NO: 1255533 - DNA, 15 bp, Homo sapiens
gtaaaccaaaaataa

SEQ ID NO: 1255534 - DNA, 15 bp, Homo sapiens
tgtaaaccaaaaata

SEQ ID NO: 1255535 - DNA, 15 bp, Homo sapiens
ttgtaaaccaaaaat

SEQ ID NO: 1255536 - DNA, 15 bp, Homo sapiens
cttgtaaaccaaaaa

SEQ ID NO: 1255537 - DNA, 15 bp, Homo sapiens
tcttgtaaaccaaaa

SEQ ID NO: 1255538 - DNA, 15 bp, Homo sapiens
ctcttgtaaaccaaa

SEQ ID NO: 1255539 - DNA, 15 bp, Homo sapiens
tctcttgtaaaccaa

SEQ ID NO: 1255540 - DNA, 15 bp, Homo sapiens
ctctcttgtaaacca

SEQ ID NO: 1255541 - DNA, 15 bp, Homo sapiens
actctcttgtaaacc

SEQ ID NO: 1255542 - DNA, 15 bp, Homo sapiens
cactctcttgtaaac

SEQ ID NO: 1255543 - DNA, 15 bp, Homo sapiens
tcactctcttgtaaa

SEQ ID NO: 1255544 - DNA, 15 bp, Homo sapiens
atcactctcttgtaa

SEQ ID NO: 1255545 - DNA, 15 bp, Homo sapiens
gatcactctcttgta

SEQ ID NO: 1255546 - DNA, 15 bp, Homo sapiens
ggatcactctcttgt

SEQ ID NO: 1255547 - DNA, 15 bp, Homo sapiens
cggatcactctcttg

SEQ ID NO: 1255548 - DNA, 15 bp, Homo sapiens
gcggatcactctctt

SEQ ID NO: 1255549 - DNA, 15 bp, Homo sapiens
ggcggatcactctct

SEQ ID NO: 1255550 - DNA, 15 bp, Homo sapiens
aggcggatcactctc

SEQ ID NO: 1255551 - DNA, 15 bp, Homo sapiens
aaggcggatcactct

SEQ ID NO: 1255552 - DNA, 15 bp, Homo sapiens
aaaggcggatcactc

SEQ ID NO: 1255553 - DNA, 15 bp, Homo sapiens
aaaaggcggatcact

SEQ ID NO: 1255554 - DNA, 15 bp, Homo sapiens
caaaaggcggatcac

SEQ ID NO: 1255555 - DNA, 15 bp, Homo sapiens
acaaaaggcggatca

SEQ ID NO: 1255556 - DNA, 15 bp, Homo sapiens
cacaaaaggcggatc

SEQ ID NO: 1255557 - DNA, 15 bp, Homo sapiens
tcacaaaaggcggat

SEQ ID NO: 1255558 - DNA, 15 bp, Homo sapiens
atcacaaaaggcgga

SEQ ID NO: 1255559 - DNA, 15 bp, Homo sapiens
gatcacaaaaggcgg

SEQ ID NO: 1255560 - DNA, 15 bp, Homo sapiens
agatcacaaaaggcg

SEQ ID NO: 1255561 - DNA, 15 bp, Homo sapiens
tccagatcacaaaag

SEQ ID NO: 1255562 - DNA, 15 bp, Homo sapiens
atccagatcacaaaa

SEQ ID NO: 1255563 - DNA, 15 bp, Homo sapiens
tatccagatcacaaa

SEQ ID NO: 1255564 - DNA, 15 bp, Homo sapiens
atatccagatcacaa

SEQ ID NO: 1255565 - DNA, 15 bp, Homo sapiens
catatccagatcaca

SEQ ID NO: 1255566 - DNA, 15 bp, Homo sapiens
ccatatccagatcac

SEQ ID NO: 1255567 - DNA, 15 bp, Homo sapiens
gccatatccagatca

SEQ ID NO: 1255568 - DNA, 15 bp, Homo sapiens
tgccatatccagatc

SEQ ID NO: 1255569 - DNA, 15 bp, Homo sapiens
ttgccatatccagat

SEQ ID NO: 1255570 - DNA, 15 bp, Homo sapiens
cttgccatatccaga

SEQ ID NO: 1255571 - DNA, 15 bp, Homo sapiens
ccttgccatatccag

SEQ ID NO: 1255572 - DNA, 15 bp, Homo sapiens
cccttgccatatcca

SEQ ID NO: 1255573 - DNA, 15 bp, Homo sapiens
tcccttgccatatcc

SEQ ID NO: 1255574 - DNA, 15 bp, Homo sapiens
gtcccttgccatatc

SEQ ID NO: 1255575 - DNA, 15 bp, Homo sapiens
tgtcccttgccatat

SEQ ID NO: 1255576 - DNA, 15 bp, Homo sapiens
atgtcccttgccata

SEQ ID NO: 1255577 - DNA, 15 bp, Homo sapiens
catgtcccttgccat

SEQ ID NO: 1255578 - DNA, 15 bp, Homo sapiens
ccatgtcccttgcca

SEQ ID NO: 1255579 - DNA, 15 bp, Homo sapiens
gccatgtcccttgcc

SEQ ID NO: 1255580 - DNA, 15 bp, Homo sapiens
tgccatgtcccttgc

SEQ ID NO: 1255581 - DNA, 15 bp, Homo sapiens
ctgccatgtcccttg

SEQ ID NO: 1255582 - DNA, 15 bp, Homo sapiens
actgccatgtccctt

SEQ ID NO: 1255583 - DNA, 15 bp, Homo sapiens
gactgccatgtccct

SEQ ID NO: 1255584 - DNA, 15 bp, Homo sapiens
tgactgccatgtccc

SEQ ID NO: 1255585 - DNA, 15 bp, Homo sapiens
ctgactgccatgtcc

SEQ ID NO: 1255586 - DNA, 15 bp, Homo sapiens
cctgactgccatgtc

SEQ ID NO: 1255587 - DNA, 15 bp, Homo sapiens
ccctgactgccatgt

SEQ ID NO: 1255588 - DNA, 15 bp, Homo sapiens
tccctgactgccatg

SEQ ID NO: 1255589 - DNA, 15 bp, Homo sapiens
ctccctgactgccat

SEQ ID NO: 1255590 - DNA, 15 bp, Homo sapiens
gctccctgactgcca

SEQ ID NO: 1255591 - DNA, 15 bp, Homo sapiens
tgctccctgactgcc

SEQ ID NO: 1255592 - DNA, 15 bp, Homo sapiens
atgctccctgactgc

SEQ ID NO: 1255593 - DNA, 15 bp, Homo sapiens
tatgctccctgactg

SEQ ID NO: 1255594 - DNA, 15 bp, Homo sapiens
ctatgctccctgact

SEQ ID NO: 1255595 - DNA, 15 bp, Homo sapiens
cctatgctccctgac

SEQ ID NO: 1255596 - DNA, 15 bp, Homo sapiens
acctatgctccctga

SEQ ID NO: 1255597 - DNA, 15 bp, Homo sapiens
cacctatgctccctg

SEQ ID NO: 1255598 - DNA, 15 bp, Homo sapiens
tcacctatgctccct

SEQ ID NO: 1255599 - DNA, 15 bp, Homo sapiens
ctcacctatgctccc

SEQ ID NO: 1255600 - DNA, 15 bp, Homo sapiens
cctcacctatgctcc

SEQ ID NO: 1255601 - DNA, 15 bp, Homo sapiens
ccctcacctatgctc

SEQ ID NO: 1255602 - DNA, 15 bp, Homo sapiens
cccctcacctatgct

SEQ ID NO: 1255603 - DNA, 15 bp, Homo sapiens
ccccctcacctatgc

SEQ ID NO: 1255604 - DNA, 15 bp, Homo sapiens
tccccctcacctatg

SEQ ID NO: 1255605 - DNA, 15 bp, Homo sapiens
ctccccctcacctat

SEQ ID NO: 1255606 - DNA, 15 bp, Homo sapiens
gctccccctcaccta

SEQ ID NO: 1255607 - DNA, 15 bp, Homo sapiens
ggctccccctcacct

SEQ ID NO: 1255608 - DNA, 15 bp, Homo sapiens
aggctccccctcacc

SEQ ID NO: 1255609 - DNA, 15 bp, Homo sapiens
caggctccccctcac

SEQ ID NO: 1255610 - DNA, 15 bp, Homo sapiens
ccaggctccccctca

SEQ ID NO: 1255611 - DNA, 15 bp, Homo sapiens
cccaggctccccctc

SEQ ID NO: 1255612 - DNA, 15 bp, Homo sapiens
acccaggctccccct

SEQ ID NO: 1255613 - DNA, 15 bp, Homo sapiens
cacccaggctccccc

SEQ ID NO: 1255614 - DNA, 15 bp, Homo sapiens
tcacccaggctcccc

SEQ ID NO: 1255615 - DNA, 15 bp, Homo sapiens
ctcacccaggctccc

SEQ ID NO: 1255616 - DNA, 15 bp, Homo sapiens
cctcacccaggctcc

SEQ ID NO: 1255617 - DNA, 15 bp, Homo sapiens
ccctcacccaggctc

SEQ ID NO: 1255618 - DNA, 15 bp, Homo sapiens
accctcacccaggct

SEQ ID NO: 1255619 - DNA, 15 bp, Homo sapiens
caccctcacccaggc

SEQ ID NO: 1255620 - DNA, 15 bp, Homo sapiens
tcaccctcacccagg

SEQ ID NO: 1255621 - DNA, 15 bp, Homo sapiens
gtcaccctcacccag

SEQ ID NO: 1255622 - DNA, 15 bp, Homo sapiens
ggtcaccctcaccca

SEQ ID NO: 1255623 - DNA, 15 bp, Homo sapiens
tggtcaccctcaccc

SEQ ID NO: 1255624 - DNA, 15 bp, Homo sapiens
ctggtcaccctcacc

SEQ ID NO: 1255625 - DNA, 15 bp, Homo sapiens
tctggtcaccctcac

SEQ ID NO: 1255626 - DNA, 15 bp, Homo sapiens
ctctggtcaccctca

SEQ ID NO: 1255627 - DNA, 15 bp, Homo sapiens
gctctggtcaccctc

SEQ ID NO: 1255628 - DNA, 15 bp, Homo sapiens
agctctggtcaccct

SEQ ID NO: 1255629 - DNA, 15 bp, Homo sapiens
aagctctggtcaccc

SEQ ID NO: 1255630 - DNA, 15 bp, Homo sapiens
aaagctctggtcacc

SEQ ID NO: 1255631 - DNA, 15 bp, Homo sapiens
aaaagctctggtcac

SEQ ID NO: 1255632 - DNA, 15 bp, Homo sapiens
taaaagctctggtca

SEQ ID NO: 1255633 - DNA, 15 bp, Homo sapiens
ttaaaagctctggtc

SEQ ID NO: 1255634 - DNA, 15 bp, Homo sapiens
gttaaaagctctggt

SEQ ID NO: 1255635 - DNA, 15 bp, Homo sapiens
ggttaaaagctctgg

SEQ ID NO: 1255636 - DNA, 15 bp, Homo sapiens
gggttaaaagctctg

SEQ ID NO: 1255637 - DNA, 15 bp, Homo sapiens
agggttaaaagctct

SEQ ID NO: 1255638 - DNA, 15 bp, Homo sapiens
cagggttaaaagctc

SEQ ID NO: 1255639 - DNA, 15 bp, Homo sapiens
acagggttaaaagct

SEQ ID NO: 1255640 - DNA, 15 bp, Homo sapiens
gacagggttaaaagc

SEQ ID NO: 1255641 - DNA, 15 bp, Homo sapiens
ggacagggttaaaag

SEQ ID NO: 1255642 - DNA, 15 bp, Homo sapiens
aggacagggttaaaa

SEQ ID NO: 1255643 - DNA, 15 bp, Homo sapiens
gaggacagggttaaa

SEQ ID NO: 1255644 - DNA, 15 bp, Homo sapiens
ggaggacagggttaa

SEQ ID NO: 1255645 - DNA, 15 bp, Homo sapiens
gggaggacagggtta

SEQ ID NO: 1255646 - DNA, 15 bp, Homo sapiens
agggaggacagggtt

SEQ ID NO: 1255647 - DNA, 15 bp, Homo sapiens
cagggaggacagggt

SEQ ID NO: 1255648 - DNA, 15 bp, Homo sapiens
gcagggaggacaggg

SEQ ID NO: 1255649 - DNA, 15 bp, Homo sapiens
ggcagggaggacagg

SEQ ID NO: 1255650 - DNA, 15 bp, Homo sapiens
aggcagggaggacag

SEQ ID NO: 1255651 - DNA, 15 bp, Homo sapiens
aaggcagggaggaca

SEQ ID NO: 1255652 - DNA, 15 bp, Homo sapiens
gaaggcagggaggac

SEQ ID NO: 1255653 - DNA, 15 bp, Homo sapiens
ggaaggcagggagga

SEQ ID NO: 1255654 - DNA, 15 bp, Homo sapiens
tggaaggcagggagg

SEQ ID NO: 1255655 - DNA, 15 bp, Homo sapiens
ctggaaggcagggag

SEQ ID NO: 1255656 - DNA, 15 bp, Homo sapiens
actggaaggcaggga

SEQ ID NO: 1255657 - DNA, 15 bp, Homo sapiens
cactggaaggcaggg

SEQ ID NO: 1255658 - DNA, 15 bp, Homo sapiens
acactggaaggcagg

SEQ ID NO: 1255659 - DNA, 15 bp, Homo sapiens
aacactggaaggcag

SEQ ID NO: 1255660 - DNA, 15 bp, Homo sapiens
gaacactggaaggca

SEQ ID NO: 1255661 - DNA, 15 bp, Homo sapiens
tgaacactggaaggc

SEQ ID NO: 1255662 - DNA, 15 bp, Homo sapiens
atgaacactggaagg

SEQ ID NO: 1255663 - DNA, 15 bp, Homo sapiens
gatgaacactggaag

SEQ ID NO: 1255664 - DNA, 15 bp, Homo sapiens
ggatgaacactggaa

SEQ ID NO: 1255665 - DNA, 15 bp, Homo sapiens
cggatgaacactgga

SEQ ID NO: 1255666 - DNA, 15 bp, Homo sapiens
gcggatgaacactgg

SEQ ID NO: 1255667 - DNA, 15 bp, Homo sapiens
tgcggatgaacactg

SEQ ID NO: 1255668 - DNA, 15 bp, Homo sapiens
ctgcggatgaacact

SEQ ID NO: 1255669 - DNA, 15 bp, Homo sapiens
cctgcggatgaacac

SEQ ID NO: 1255670 - DNA, 15 bp, Homo sapiens
ccctgcggatgaaca

SEQ ID NO: 1255671 - DNA, 15 bp, Homo sapiens
tccctgcggatgaac

SEQ ID NO: 1255672 - DNA, 15 bp, Homo sapiens
ctccctgcggatgaa

SEQ ID NO: 1255673 - DNA, 15 bp, Homo sapiens
gctccctgcggatga

SEQ ID NO: 1255674 - DNA, 15 bp, Homo sapiens
tgctccctgcggatg

SEQ ID NO: 1255675 - DNA, 15 bp, Homo sapiens
ctgctccctgcggat

SEQ ID NO: 1255676 - DNA, 15 bp, Homo sapiens
cctgctccctgcgga

SEQ ID NO: 1255677 - DNA, 15 bp, Homo sapiens
gcctgctccctgcgg

SEQ ID NO: 1255678 - DNA, 15 bp, Homo sapiens
ggcctgctccctgcg

SEQ ID NO: 1255679 - DNA, 15 bp, Homo sapiens
tggcctgctccctgc

SEQ ID NO: 1255680 - DNA, 15 bp, Homo sapiens
ttggcctgctccctg

SEQ ID NO: 1255681 - DNA, 15 bp, Homo sapiens
gttggcctgctccct

SEQ ID NO: 1255682 - DNA, 15 bp, Homo sapiens
tgttggcctgctccc

SEQ ID NO: 1255683 - DNA, 15 bp, Homo sapiens
ttgttggcctgctcc

SEQ ID NO: 1255684 - DNA, 15 bp, Homo sapiens
gttgttggcctgctc

SEQ ID NO: 1255685 - DNA, 15 bp, Homo sapiens
tgttgttggcctgct

SEQ ID NO: 1255686 - DNA, 15 bp, Homo sapiens
atgttgttggcctgc

SEQ ID NO: 1255687 - DNA, 15 bp, Homo sapiens
gatgttgttggcctg

SEQ ID NO: 1255688 - DNA, 15 bp, Homo sapiens
ggatgttgttggcct

SEQ ID NO: 1255689 - DNA, 15 bp, Homo sapiens
aggatgttgttggcc

SEQ ID NO: 1255690 - DNA, 15 bp, Homo sapiens
caggatgttgttggc

SEQ ID NO: 1255691 - DNA, 15 bp, Homo sapiens
ccaggatgttgttgg

SEQ ID NO: 1255692 - DNA, 15 bp, Homo sapiens
gccaggatgttgttg

SEQ ID NO: 1255693 - DNA, 15 bp, Homo sapiens
cgccaggatgttgtt

SEQ ID NO: 1255694 - DNA, 15 bp, Homo sapiens
tcgccaggatgttgt

SEQ ID NO: 1255695 - DNA, 15 bp, Homo sapiens
ctcgccaggatgttg

SEQ ID NO: 1255696 - DNA, 15 bp, Homo sapiens
cctcgccaggatgtt

SEQ ID NO: 1255697 - DNA, 15 bp, Homo sapiens
ccctcgccaggatgt

SEQ ID NO: 1255698 - DNA, 15 bp, Homo sapiens
accctcgccaggatg

SEQ ID NO: 1255699 - DNA, 15 bp, Homo sapiens
gaccctcgccaggat

SEQ ID NO: 1255700 - DNA, 15 bp, Homo sapiens
tgaccctcgccagga

SEQ ID NO: 1255701 - DNA, 15 bp, Homo sapiens
gtgaccctcgccagg

SEQ ID NO: 1255702 - DNA, 15 bp, Homo sapiens
cgtgaccctcgccag

SEQ ID NO: 1255703 - DNA, 15 bp, Homo sapiens
tcgtgaccctcgcca

SEQ ID NO: 1255704 - DNA, 15 bp, Homo sapiens
ctcgtgaccctcgcc

SEQ ID NO: 1255705 - DNA, 15 bp, Homo sapiens
cctcgtgaccctcgc

SEQ ID NO: 1255706 - DNA, 15 bp, Homo sapiens
ccctcgtgaccctcg

SEQ ID NO: 1255707 - DNA, 15 bp, Homo sapiens
gccctcgtgaccctc

SEQ ID NO: 1255708 - DNA, 15 bp, Homo sapiens
ggccctcgtgaccct

SEQ ID NO: 1255709 - DNA, 15 bp, Homo sapiens
tggccctcgtgaccc

SEQ ID NO: 1255710 - DNA, 15 bp, Homo sapiens
ttggccctcgtgacc

SEQ ID NO: 1255711 - DNA, 15 bp, Homo sapiens
attggccctcgtgac

SEQ ID NO: 1255712 - DNA, 15 bp, Homo sapiens
aattggccctcgtga

SEQ ID NO: 1255713 - DNA, 15 bp, Homo sapiens
gaattggccctcgtg

SEQ ID NO: 1255714 - DNA, 15 bp, Homo sapiens
ggaattggccctcgt

SEQ ID NO: 1255715 - DNA, 15 bp, Homo sapiens
aggaattggccctcg

SEQ ID NO: 1255716 - DNA, 15 bp, Homo sapiens
aaggaattggccctc

SEQ ID NO: 1255717 - DNA, 15 bp, Homo sapiens
aaaggaattggccct

SEQ ID NO: 1255718 - DNA, 15 bp, Homo sapiens
gaaaggaattggccc

SEQ ID NO: 1255719 - DNA, 15 bp, Homo sapiens
agaaaggaattggcc

SEQ ID NO: 1255720 - DNA, 15 bp, Homo sapiens
aagaaaggaattggc

SEQ ID NO: 1255721 - DNA, 15 bp, Homo sapiens
caagaaaggaattgg

SEQ ID NO: 1255722 - DNA, 15 bp, Homo sapiens
tcaagaaaggaattg

SEQ ID NO: 1255723 - DNA, 15 bp, Homo sapiens
ttcaagaaaggaatt

SEQ ID NO: 1255724 - DNA, 15 bp, Homo sapiens
cttcaagaaaggaat

SEQ ID NO: 1255725 - DNA, 15 bp, Homo sapiens
tcttcaagaaaggaa

SEQ ID NO: 1255726 - DNA, 15 bp, Homo sapiens
ctcttcaagaaagga

SEQ ID NO: 1255727 - DNA, 15 bp, Homo sapiens
tctcttcaagaaagg

SEQ ID NO: 1255728 - DNA, 15 bp, Homo sapiens
atctcttcaagaaag

SEQ ID NO: 1255729 - DNA, 15 bp, Homo sapiens
catctcttcaagaaa

SEQ ID NO: 1255730 - DNA, 15 bp, Homo sapiens
tcatctcttcaagaa

SEQ ID NO: 1255731 - DNA, 15 bp, Homo sapiens
ttcatctcttcaaga

SEQ ID NO: 1255732 - DNA, 15 bp, Homo sapiens
cttcatctcttcaag

SEQ ID NO: 1255733 - DNA, 15 bp, Homo sapiens
tcttcatctcttcaa

SEQ ID NO: 1255734 - DNA, 15 bp, Homo sapiens
ttcttcatctcttca

SEQ ID NO: 1255735 - DNA, 15 bp, Homo sapiens
tttcttcatctcttc

SEQ ID NO: 1255736 - DNA, 15 bp, Homo sapiens
ctttcttcatctctt

SEQ ID NO: 1255737 - DNA, 15 bp, Homo sapiens
cctttcttcatctct

SEQ ID NO: 1255738 - DNA, 15 bp, Homo sapiens
tcctttcttcatctc

SEQ ID NO: 1255739 - DNA, 15 bp, Homo sapiens
gtcctttcttcatct

SEQ ID NO: 1255740 - DNA, 15 bp, Homo sapiens
tgtcctttcttcatc

SEQ ID NO: 1255741 - DNA, 15 bp, Homo sapiens
gtgtcctttcttcat

SEQ ID NO: 1255742 - DNA, 15 bp, Homo sapiens
ggtgtcctttcttca

SEQ ID NO: 1255743 - DNA, 15 bp, Homo sapiens
aggtgtcctttcttc

SEQ ID NO: 1255744 - DNA, 15 bp, Homo sapiens
gaggtgtcctttctt

SEQ ID NO: 1255745 - DNA, 15 bp, Homo sapiens
cgaggtgtcctttct

SEQ ID NO: 1255746 - DNA, 15 bp, Homo sapiens
tcgaggtgtcctttc

SEQ ID NO: 1255747 - DNA, 15 bp, Homo sapiens
ttcgaggtgtccttt

SEQ ID NO: 1255748 - DNA, 15 bp, Homo sapiens
tttcgaggtgtcctt

SEQ ID NO: 1255749 - DNA, 15 bp, Homo sapiens
ctttcgaggtgtcct

SEQ ID NO: 1255750 - DNA, 15 bp, Homo sapiens
tctttcgaggtgtcc

SEQ ID NO: 1255751 - DNA, 15 bp, Homo sapiens
ctctttcgaggtgtc

SEQ ID NO: 1255752 - DNA, 15 bp, Homo sapiens
tctctttcgaggtgt

SEQ ID NO: 1255753 - DNA, 15 bp, Homo sapiens
ctctctttcgaggtg

SEQ ID NO: 1255754 - DNA, 15 bp, Homo sapiens
actctctttcgaggt

SEQ ID NO: 1255755 - DNA, 15 bp, Homo sapiens
cactctctttcgagg

SEQ ID NO: 1255756 - DNA, 15 bp, Homo sapiens
gcactctctttcgag

SEQ ID NO: 1255757 - DNA, 15 bp, Homo sapiens
tgcactctctttcga

SEQ ID NO: 1255758 - DNA, 15 bp, Homo sapiens
atgcactctctttcg

SEQ ID NO: 1255759 - DNA, 15 bp, Homo sapiens
catgcactctctttc

SEQ ID NO: 1255760 - DNA, 15 bp, Homo sapiens
ccatgcactctcttt

SEQ ID NO: 1255761 - DNA, 15 bp, Homo sapiens
tccatgcactctctt

SEQ ID NO: 1255762 - DNA, 15 bp, Homo sapiens
ttccatgcactctct

SEQ ID NO: 1255763 - DNA, 15 bp, Homo sapiens
cttccatgcactctc

SEQ ID NO: 1255764 - DNA, 15 bp, Homo sapiens
tcttccatgcactct

SEQ ID NO: 1255765 - DNA, 15 bp, Homo sapiens
ctcttccatgcactc

SEQ ID NO: 1255766 - DNA, 15 bp, Homo sapiens
tctcttccatgcact

SEQ ID NO: 1255767 - DNA, 15 bp, Homo sapiens
gtctcttccatgcac

SEQ ID NO: 1255768 - DNA, 15 bp, Homo sapiens
ggtctcttccatgca

SEQ ID NO: 1255769 - DNA, 15 bp, Homo sapiens
aggtctcttccatgc

SEQ ID NO: 1255770 - DNA, 15 bp, Homo sapiens
caggtctcttccatg

SEQ ID NO: 1255771 - DNA, 15 bp, Homo sapiens
gcaggtctcttccat

SEQ ID NO: 1255772 - DNA, 15 bp, Homo sapiens
agcaggtctcttcca

SEQ ID NO: 1255773 - DNA, 15 bp, Homo sapiens
gagcaggtctcttcc

SEQ ID NO: 1255774 - DNA, 15 bp, Homo sapiens
tgagcaggtctcttc

SEQ ID NO: 1255775 - DNA, 15 bp, Homo sapiens
atgagcaggtctctt

SEQ ID NO: 1255776 - DNA, 15 bp, Homo sapiens
tatgagcaggtctct

SEQ ID NO: 1255777 - DNA, 15 bp, Homo sapiens
gtatgagcaggtctc

SEQ ID NO: 1255778 - DNA, 15 bp, Homo sapiens
cgtatgagcaggtct

SEQ ID NO: 1255779 - DNA, 15 bp, Homo sapiens
tcgtatgagcaggtc

SEQ ID NO: 1255780 - DNA, 15 bp, Homo sapiens
ttcgtatgagcaggt

SEQ ID NO: 1255781 - DNA, 15 bp, Homo sapiens
cttcgtatgagcagg

SEQ ID NO: 1255782 - DNA, 15 bp, Homo sapiens
tcttcgtatgagcag

SEQ ID NO: 1255783 - DNA, 15 bp, Homo sapiens
ctcttcgtatgagca

SEQ ID NO: 1255784 - DNA, 15 bp, Homo sapiens
cctcttcgtatgagc

SEQ ID NO: 1255785 - DNA, 15 bp, Homo sapiens
gcctcttcgtatgag

SEQ ID NO: 1255786 - DNA, 15 bp, Homo sapiens
ggcctcttcgtatga

SEQ ID NO: 1255787 - DNA, 15 bp, Homo sapiens
gggcctcttcgtatg

SEQ ID NO: 1255788 - DNA, 15 bp, Homo sapiens
cgggcctcttcgtat

SEQ ID NO: 1255789 - DNA, 15 bp, Homo sapiens
gcgggcctcttcgta

SEQ ID NO: 1255790 - DNA, 15 bp, Homo sapiens
cgcgggcctcttcgt

SEQ ID NO: 1255791 - DNA, 15 bp, Homo sapiens
tcgcgggcctcttcg

SEQ ID NO: 1255792 - DNA, 15 bp, Homo sapiens
ctcgcgggcctcttc

SEQ ID NO: 1255793 - DNA, 15 bp, Homo sapiens
cctcgcgggcctctt

SEQ ID NO: 1255794 - DNA, 15 bp, Homo sapiens
acctcgcgggcctct

SEQ ID NO: 1255795 - DNA, 15 bp, Homo sapiens
gacctcgcgggcctc

SEQ ID NO: 1255796 - DNA, 15 bp, Homo sapiens
agacctcgcgggcct

SEQ ID NO: 1255797 - DNA, 15 bp, Homo sapiens
aagacctcgcgggcc

SEQ ID NO: 1255798 - DNA, 15 bp, Homo sapiens
aaagacctcgcgggc

SEQ ID NO: 1255799 - DNA, 15 bp, Homo sapiens
caaagacctcgcggg

SEQ ID NO: 1255800 - DNA, 15 bp, Homo sapiens
tcaaagacctcgcgg

SEQ ID NO: 1255801 - DNA, 15 bp, Homo sapiens
ctcaaagacctcgcg

SEQ ID NO: 1255802 - DNA, 15 bp, Homo sapiens
cctcaaagacctcgc

SEQ ID NO: 1255803 - DNA, 15 bp, Homo sapiens
tcctcaaagacctcg

SEQ ID NO: 1255804 - DNA, 15 bp, Homo sapiens
gtcctcaaagacctc

SEQ ID NO: 1255805 - DNA, 15 bp, Homo sapiens
tgtcctcaaagacct

SEQ ID NO: 1255806 - DNA, 15 bp, Homo sapiens
ctgtcctcaaagacc

SEQ ID NO: 1255807 - DNA, 15 bp, Homo sapiens
gctgtcctcaaagac

SEQ ID NO: 1255808 - DNA, 15 bp, Homo sapiens
cgctgtcctcaaaga

SEQ ID NO: 1255809 - DNA, 15 bp, Homo sapiens
tcgctgtcctcaaag

SEQ ID NO: 1255810 - DNA, 15 bp, Homo sapiens
gtcgctgtcctcaaa

SEQ ID NO: 1255811 - DNA, 15 bp, Homo sapiens
tgtcgctgtcctcaa

SEQ ID NO: 1255812 - DNA, 15 bp, Homo sapiens
ttgtcgctgtcctca

SEQ ID NO: 1255813 - DNA, 15 bp, Homo sapiens
cttgtcgctgtcctc

SEQ ID NO: 1255814 - DNA, 15 bp, Homo sapiens
tcttgtcgctgtcct

SEQ ID NO: 1255815 - DNA, 15 bp, Homo sapiens
gtcttgtcgctgtcc

SEQ ID NO: 1255816 - DNA, 15 bp, Homo sapiens
cgtcttgtcgctgtc

SEQ ID NO: 1255817 - DNA, 15 bp, Homo sapiens
ccgtcttgtcgctgt

SEQ ID NO: 1255818 - DNA, 15 bp, Homo sapiens
accgtcttgtcgctg

SEQ ID NO: 1255819 - DNA, 15 bp, Homo sapiens
taccgtcttgtcgct

SEQ ID NO: 1255820 - DNA, 15 bp, Homo sapiens
ttaccgtcttgtcgc

SEQ ID NO: 1255821 - DNA, 15 bp, Homo sapiens
cttaccgtcttgtcg

SEQ ID NO: 1255822 - DNA, 15 bp, Homo sapiens
ccttaccgtcttgtc

SEQ ID NO: 1255823 - DNA, 15 bp, Homo sapiens
cccttaccgtcttgt

SEQ ID NO: 1255824 - DNA, 15 bp, Homo sapiens
gcccttaccgtcttg

SEQ ID NO: 1255825 - DNA, 15 bp, Homo sapiens
agcccttaccgtctt

SEQ ID NO: 1255826 - DNA, 15 bp, Homo sapiens
cagcccttaccgtct

SEQ ID NO: 1255827 - DNA, 15 bp, Homo sapiens
ccagcccttaccgtc

SEQ ID NO: 1255828 - DNA, 15 bp, Homo sapiens
cccagcccttaccgt

SEQ ID NO: 1255829 - DNA, 15 bp, Homo sapiens
ccccagcccttaccg

SEQ ID NO: 1255830 - DNA, 15 bp, Homo sapiens
tccccagcccttacc

SEQ ID NO: 1255831 - DNA, 15 bp, Homo sapiens
atccccagcccttac

SEQ ID NO: 1255832 - DNA, 15 bp, Homo sapiens
tatccccagccctta

SEQ ID NO: 1255833 - DNA, 15 bp, Homo sapiens
ctatccccagccctt

SEQ ID NO: 1255834 - DNA, 15 bp, Homo sapiens
gctatccccagccct

SEQ ID NO: 1255835 - DNA, 15 bp, Homo sapiens
ggctatccccagccc

SEQ ID NO: 1255836 - DNA, 15 bp, Homo sapiens
aggctatccccagcc

SEQ ID NO: 1255837 - DNA, 15 bp, Homo sapiens
caggctatccccagc

SEQ ID NO: 1255838 - DNA, 15 bp, Homo sapiens
ccaggctatccccag

SEQ ID NO: 1255839 - DNA, 15 bp, Homo sapiens
gccaggctatcccca

SEQ ID NO: 1255840 - DNA, 15 bp, Homo sapiens
agccaggctatcccc

SEQ ID NO: 1255841 - DNA, 15 bp, Homo sapiens
cagccaggctatccc

SEQ ID NO: 1255842 - DNA, 15 bp, Homo sapiens
acagccaggctatcc

SEQ ID NO: 1255843 - DNA, 15 bp, Homo sapiens
aacagccaggctatc

SEQ ID NO: 1255844 - DNA, 15 bp, Homo sapiens
caacagccaggctat

SEQ ID NO: 1255845 - DNA, 15 bp, Homo sapiens
ccaacagccaggcta

SEQ ID NO: 1255846 - DNA, 15 bp, Homo sapiens
accaacagccaggct

SEQ ID NO: 1255847 - DNA, 15 bp, Homo sapiens
taccaacagccaggc

SEQ ID NO: 1255848 - DNA, 15 bp, Homo sapiens
ttaccaacagccagg

SEQ ID NO: 1255849 - DNA, 15 bp, Homo sapiens
cttaccaacagccag

SEQ ID NO: 1255850 - DNA, 15 bp, Homo sapiens
ccttaccaacagcca

SEQ ID NO: 1255851 - DNA, 15 bp, Homo sapiens
tccttaccaacagcc

SEQ ID NO: 1255852 - DNA, 15 bp, Homo sapiens
ctccttaccaacagc

SEQ ID NO: 1255853 - DNA, 15 bp, Homo sapiens
gctccttaccaacag

SEQ ID NO: 1255854 - DNA, 15 bp, Homo sapiens
agctccttaccaaca

SEQ ID NO: 1255855 - DNA, 15 bp, Homo sapiens
gagctccttaccaac

SEQ ID NO: 1255856 - DNA, 15 bp, Homo sapiens
tgagctccttaccaa

SEQ ID NO: 1255857 - DNA, 15 bp, Homo sapiens
ctgagctccttacca

SEQ ID NO: 1255858 - DNA, 15 bp, Homo sapiens
cctgagctccttacc

SEQ ID NO: 1255859 - DNA, 15 bp, Homo sapiens
gcctgagctccttac

SEQ ID NO: 1255860 - DNA, 15 bp, Homo sapiens
ggcctgagctcctta

SEQ ID NO: 1255861 - DNA, 15 bp, Homo sapiens
tggcctgagctcctt

SEQ ID NO: 1255862 - DNA, 15 bp, Homo sapiens
gtggcctgagctcct

SEQ ID NO: 1255863 - DNA, 15 bp, Homo sapiens
tgtggcctgagctcc

SEQ ID NO: 1255864 - DNA, 15 bp, Homo sapiens
ctgtggcctgagctc

SEQ ID NO: 1255865 - DNA, 15 bp, Homo sapiens
gctgtggcctgagct

SEQ ID NO: 1255866 - DNA, 15 bp, Homo sapiens
cgctgtggcctgagc

SEQ ID NO: 1255867 - DNA, 15 bp, Homo sapiens
gcgctgtggcctgag

SEQ ID NO: 1255868 - DNA, 15 bp, Homo sapiens
ggcgctgtggcctga

SEQ ID NO: 1255869 - DNA, 15 bp, Homo sapiens
gggcgctgtggcctg

SEQ ID NO: 1255870 - DNA, 15 bp, Homo sapiens
agggcgctgtggcct

SEQ ID NO: 1255871 - DNA, 15 bp, Homo sapiens
gagggcgctgtggcc

SEQ ID NO: 1255872 - DNA, 15 bp, Homo sapiens
cgagggcgctgtggc

SEQ ID NO: 1255873 - DNA, 15 bp, Homo sapiens
gcgagggcgctgtgg

SEQ ID NO: 1255874 - DNA, 15 bp, Homo sapiens
agcgagggcgctgtg

SEQ ID NO: 1255875 - DNA, 15 bp, Homo sapiens
cagcgagggcgctgt

SEQ ID NO: 1255876 - DNA, 15 bp, Homo sapiens
ccagcgagggcgctg

SEQ ID NO: 1255877 - DNA, 15 bp, Homo sapiens
gccagcgagggcgct

SEQ ID NO: 1255878 - DNA, 15 bp, Homo sapiens
ggccagcgagggcgc

SEQ ID NO: 1255879 - DNA, 15 bp, Homo sapiens
gggccagcgagggcg

SEQ ID NO: 1255880 - DNA, 15 bp, Homo sapiens
ggggccagcgagggc

SEQ ID NO: 1255881 - DNA, 15 bp, Homo sapiens
cggggccagcgaggg

SEQ ID NO: 1255882 - DNA, 15 bp, Homo sapiens
gcggggccagcgagg

SEQ ID NO: 1255883 - DNA, 15 bp, Homo sapiens
agcggggccagcgag

SEQ ID NO: 1255884 - DNA, 15 bp, Homo sapiens
cagcggggccagcga

SEQ ID NO: 1255885 - DNA, 15 bp, Homo sapiens
gcagcggggccagcg

SEQ ID NO: 1255886 - DNA, 15 bp, Homo sapiens
agcagcggggccagc

SEQ ID NO: 1255887 - DNA, 15 bp, Homo sapiens
gagcagcggggccag

SEQ ID NO: 1255888 - DNA, 15 bp, Homo sapiens
ggagcagcggggcca

SEQ ID NO: 1255889 - DNA, 15 bp, Homo sapiens
cggagcagcggggcc

SEQ ID NO: 1255890 - DNA, 15 bp, Homo sapiens
acggagcagcggggc

SEQ ID NO: 1255891 - DNA, 15 bp, Homo sapiens
gacggagcagcgggg

SEQ ID NO: 1255892 - DNA, 15 bp, Homo sapiens
ggacggagcagcggg

SEQ ID NO: 1255893 - DNA, 15 bp, Homo sapiens
tggacggagcagcgg

SEQ ID NO: 1255894 - DNA, 15 bp, Homo sapiens
atggacggagcagcg

SEQ ID NO: 1255895 - DNA, 15 bp, Homo sapiens
gatggacggagcagc

SEQ ID NO: 1255896 - DNA, 15 bp, Homo sapiens
ggatggacggagcag

SEQ ID NO: 1255897 - DNA, 15 bp, Homo sapiens
tggatggacggagca

SEQ ID NO: 1255898 - DNA, 15 bp, Homo sapiens
ctggatggacggagc

SEQ ID NO: 1255899 - DNA, 15 bp, Homo sapiens
cctggatggacggag

SEQ ID NO: 1255900 - DNA, 15 bp, Homo sapiens
ccctggatggacgga

SEQ ID NO: 1255901 - DNA, 15 bp, Homo sapiens
cccctggatggacgg

SEQ ID NO: 1255902 - DNA, 15 bp, Homo sapiens
ccccctggatggacg

SEQ ID NO: 1255903 - DNA, 15 bp, Homo sapiens
cccccctggatggac

SEQ ID NO: 1255904 - DNA, 15 bp, Homo sapiens
gcccccctggatgga

SEQ ID NO: 1255905 - DNA, 15 bp, Homo sapiens
cgcccccctggatgg

SEQ ID NO: 1255906 - DNA, 15 bp, Homo sapiens
ccgcccccctggatg

SEQ ID NO: 1255907 - DNA, 15 bp, Homo sapiens
gccgcccccctggat

SEQ ID NO: 1255908 - DNA, 15 bp, Homo sapiens
ggccgcccccctgga

SEQ ID NO: 1255909 - DNA, 15 bp, Homo sapiens
aggccgcccccctgg

SEQ ID NO: 1255910 - DNA, 15 bp, Homo sapiens
caggccgcccccctg

SEQ ID NO: 1255911 - DNA, 15 bp, Homo sapiens
ccaggccgcccccct

SEQ ID NO: 1255912 - DNA, 15 bp, Homo sapiens
tccaggccgcccccc

SEQ ID NO: 1255913 - DNA, 15 bp, Homo sapiens
ctccaggccgccccc

SEQ ID NO: 1255914 - DNA, 15 bp, Homo sapiens
cctccaggccgcccc

SEQ ID NO: 1255915 - DNA, 15 bp, Homo sapiens
tcctccaggccgccc

SEQ ID NO: 1255916 - DNA, 15 bp, Homo sapiens
ttcctccaggccgcc

SEQ ID NO: 1255917 - DNA, 15 bp, Homo sapiens
ccttcctccaggccg

SEQ ID NO: 1255918 - DNA, 15 bp, Homo sapiens
cccttcctccaggcc

SEQ ID NO: 1255919 - DNA, 15 bp, Homo sapiens
ccccttcctccaggc

SEQ ID NO: 1255920 - DNA, 15 bp, Homo sapiens
gccccttcctccagg

SEQ ID NO: 1255921 - DNA, 15 bp, Homo sapiens
tgccccttcctccag

SEQ ID NO: 1255922 - DNA, 15 bp, Homo sapiens
ctgccccttcctcca

SEQ ID NO: 1255923 - DNA, 15 bp, Homo sapiens
gctgccccttcctcc

SEQ ID NO: 1255924 - DNA, 15 bp, Homo sapiens
cgctgccccttcctc

SEQ ID NO: 1255925 - DNA, 15 bp, Homo sapiens
acgctgccccttcct

SEQ ID NO: 1255926 - DNA, 15 bp, Homo sapiens
cacgctgccccttcc

SEQ ID NO: 1255927 - DNA, 15 bp, Homo sapiens
gcacgctgccccttc

SEQ ID NO: 1255928 - DNA, 15 bp, Homo sapiens
cgcacgctgcccctt

SEQ ID NO: 1255929 - DNA, 15 bp, Homo sapiens
gcgcacgctgcccct

SEQ ID NO: 1255930 - DNA, 15 bp, Homo sapiens
cgcgcacgctgcccc

SEQ ID NO: 1255931 - DNA, 15 bp, Homo sapiens
tcgcgcacgctgccc

SEQ ID NO: 1255932 - DNA, 15 bp, Homo sapiens
ttcgcgcacgctgcc

SEQ ID NO: 1255933 - DNA, 15 bp, Homo sapiens
cttcgcgcacgctgc

SEQ ID NO: 1255934 - DNA, 15 bp, Homo sapiens
ccttcgcgcacgctg

SEQ ID NO: 1255935 - DNA, 15 bp, Homo sapiens
gccttcgcgcacgct

SEQ ID NO: 1255936 - DNA, 15 bp, Homo sapiens
agccttcgcgcacgc

SEQ ID NO: 1255937 - DNA, 15 bp, Homo sapiens
aagccttcgcgcacg

SEQ ID NO: 1255938 - DNA, 15 bp, Homo sapiens
aaagccttcgcgcac

SEQ ID NO: 1255939 - DNA, 15 bp, Homo sapiens
gaaagccttcgcgca

SEQ ID NO: 1255940 - DNA, 15 bp, Homo sapiens
tgaaagccttcgcgc

SEQ ID NO: 1255941 - DNA, 15 bp, Homo sapiens
ctgaaagccttcgcg

SEQ ID NO: 1255942 - DNA, 15 bp, Homo sapiens
cctgaaagccttcgc

SEQ ID NO: 1255943 - DNA, 15 bp, Homo sapiens
ccctgaaagccttcg

SEQ ID NO: 1255944 - DNA, 15 bp, Homo sapiens
cccctgaaagccttc

SEQ ID NO: 1255945 - DNA, 15 bp, Homo sapiens
gcccctgaaagcctt

SEQ ID NO: 1255946 - DNA, 15 bp, Homo sapiens
cgcccctgaaagcct

SEQ ID NO: 1255947 - DNA, 15 bp, Homo sapiens
ccgcccctgaaagcc

SEQ ID NO: 1255948 - DNA, 15 bp, Homo sapiens
cccgcccctgaaagc

SEQ ID NO: 1255949 - DNA, 15 bp, Homo sapiens
ccccgcccctgaaag

SEQ ID NO: 1255950 - DNA, 15 bp, Homo sapiens
gccccgcccctgaaa

SEQ ID NO: 1255951 - DNA, 15 bp, Homo sapiens
ggccccgcccctgaa

SEQ ID NO: 1255952 - DNA, 15 bp, Homo sapiens
gggccccgcccctga

SEQ ID NO: 1255953 - DNA, 15 bp, Homo sapiens
tgggccccgcccctg

SEQ ID NO: 1255954 - DNA, 15 bp, Homo sapiens
ctgggccccgcccct

SEQ ID NO: 1255955 - DNA, 15 bp, Homo sapiens
gctgggccccgcccc

SEQ ID NO: 1255956 - DNA, 15 bp, Homo sapiens
tgctgggccccgccc

SEQ ID NO: 1255957 - DNA, 15 bp, Homo sapiens
ttgctgggccccgcc

SEQ ID NO: 1255958 - DNA, 15 bp, Homo sapiens
tttgctgggccccgc

SEQ ID NO: 1255959 - DNA, 15 bp, Homo sapiens
atttgctgggccccg

SEQ ID NO: 1255960 - DNA, 15 bp, Homo sapiens
gatttgctgggcccc

SEQ ID NO: 1255961 - DNA, 15 bp, Homo sapiens
cgatttgctgggccc

SEQ ID NO: 1255962 - DNA, 15 bp, Homo sapiens
tcgatttgctgggcc

SEQ ID NO: 1255963 - DNA, 15 bp, Homo sapiens
ctcgatttgctgggc

SEQ ID NO: 1255964 - DNA, 15 bp, Homo sapiens
cctcgatttgctggg

SEQ ID NO: 1255965 - DNA, 15 bp, Homo sapiens
gcctcgatttgctgg

SEQ ID NO: 1255966 - DNA, 15 bp, Homo sapiens
ggcctcgatttgctg

SEQ ID NO: 1255967 - DNA, 15 bp, Homo sapiens
aggcctcgatttgct

SEQ ID NO: 1255968 - DNA, 15 bp, Homo sapiens
gaggcctcgatttgc

SEQ ID NO: 1255969 - DNA, 15 bp, Homo sapiens
cgaggcctcgatttg

SEQ ID NO: 1255970 - DNA, 15 bp, Homo sapiens
ccgaggcctcgattt

SEQ ID NO: 1255971 - DNA, 15 bp, Homo sapiens
gccgaggcctcgatt

SEQ ID NO: 1255972 - DNA, 15 bp, Homo sapiens
cgccgaggcctcgat

SEQ ID NO: 1255973 - DNA, 15 bp, Homo sapiens
ccgccgaggcctcga

SEQ ID NO: 1255974 - DNA, 15 bp, Homo sapiens
tccgccgaggcctcg

SEQ ID NO: 1255975 - DNA, 15 bp, Homo sapiens
ctccgccgaggcctc

SEQ ID NO: 1255976 - DNA, 15 bp, Homo sapiens
actccgccgaggcct

SEQ ID NO: 1255977 - DNA, 15 bp, Homo sapiens
gactccgccgaggcc

SEQ ID NO: 1255978 - DNA, 15 bp, Homo sapiens
ggactccgccgaggc

SEQ ID NO: 1255979 - DNA, 15 bp, Homo sapiens
aggactccgccgagg

SEQ ID NO: 1255980 - DNA, 15 bp, Homo sapiens
caggactccgccgag

SEQ ID NO: 1255981 - DNA, 15 bp, Homo sapiens
gcaggactccgccga

SEQ ID NO: 1255982 - DNA, 15 bp, Homo sapiens
ggcaggactccgccg

SEQ ID NO: 1255983 - DNA, 15 bp, Homo sapiens
gggcaggactccgcc

SEQ ID NO: 1255984 - DNA, 15 bp, Homo sapiens
tgggcaggactccgc

SEQ ID NO: 1255985 - DNA, 15 bp, Homo sapiens
gtgggcaggactccg

SEQ ID NO: 1255986 - DNA, 15 bp, Homo sapiens
tgtgggcaggactcc

SEQ ID NO: 1255987 - DNA, 15 bp, Homo sapiens
ctgtgggcaggactc

SEQ ID NO: 1255988 - DNA, 15 bp, Homo sapiens
cctgtgggcaggact

SEQ ID NO: 1255989 - DNA, 15 bp, Homo sapiens
ccctgtgggcaggac

SEQ ID NO: 1255990 - DNA, 15 bp, Homo sapiens
tccctgtgggcagga

SEQ ID NO: 1255991 - DNA, 15 bp, Homo sapiens
gtccctgtgggcagg

SEQ ID NO: 1255992 - DNA, 15 bp, Homo sapiens
tgtccctgtgggcag

SEQ ID NO: 1255993 - DNA, 15 bp, Homo sapiens
atgtccctgtgggca

SEQ ID NO: 1255994 - DNA, 15 bp, Homo sapiens
gatgtccctgtgggc

SEQ ID NO: 1255995 - DNA, 15 bp, Homo sapiens
tgatgtccctgtggg

SEQ ID NO: 1255996 - DNA, 15 bp, Homo sapiens
ctgatgtccctgtgg

SEQ ID NO: 1255997 - DNA, 15 bp, Homo sapiens
actgatgtccctgtg

SEQ ID NO: 1255998 - DNA, 15 bp, Homo sapiens
cactgatgtccctgt

SEQ ID NO: 1255999 - DNA, 15 bp, Homo sapiens
gcactgatgtccctg

SEQ ID NO: 1256000 - DNA, 15 bp, Homo sapiens
ggcactgatgtccct

SEQ ID NO: 1256001 - DNA, 15 bp, Homo sapiens
cggcactgatgtccc

SEQ ID NO: 1256002 - DNA, 15 bp, Homo sapiens
gcggcactgatgtcc

SEQ ID NO: 1256003 - DNA, 15 bp, Homo sapiens
ggcggcactgatgtc

SEQ ID NO: 1256004 - DNA, 15 bp, Homo sapiens
gggcggcactgatgt

SEQ ID NO: 1256005 - DNA, 15 bp, Homo sapiens
ggggcggcactgatg

SEQ ID NO: 1256006 - DNA, 15 bp, Homo sapiens
gggggcggcactgat

SEQ ID NO: 1256007 - DNA, 15 bp, Homo sapiens
cgggggcggcactga

SEQ ID NO: 1256008 - DNA, 15 bp, Homo sapiens
gcgggggcggcactg

SEQ ID NO: 1256009 - DNA, 15 bp, Homo sapiens
cgcgggggcggcact

SEQ ID NO: 1256010 - DNA, 15 bp, Homo sapiens
gcgcgggggcggcac

SEQ ID NO: 1256011 - DNA, 15 bp, Homo sapiens
agcgcgggggcggca

SEQ ID NO: 1256012 - DNA, 15 bp, Homo sapiens
cagcgcgggggcggc

SEQ ID NO: 1256013 - DNA, 15 bp, Homo sapiens
tcagcgcgggggcgg

SEQ ID NO: 1256014 - DNA, 15 bp, Homo sapiens
gtcagcgcgggggcg

SEQ ID NO: 1256015 - DNA, 15 bp, Homo sapiens
agtcagcgcgggggc

SEQ ID NO: 1256016 - DNA, 15 bp, Homo sapiens
gagtcagcgcggggg

SEQ ID NO: 1256017 - DNA, 15 bp, Homo sapiens
ggagtcagcgcgggg

SEQ ID NO: 1256018 - DNA, 15 bp, Homo sapiens
aggagtcagcgcggg

SEQ ID NO: 1256019 - DNA, 15 bp, Homo sapiens
aaggagtcagcgcgg

SEQ ID NO: 1256020 - DNA, 15 bp, Homo sapiens
gaaggagtcagcgcg

SEQ ID NO: 1256021 - DNA, 15 bp, Homo sapiens
ggaaggagtcagcgc

SEQ ID NO: 1256022 - DNA, 15 bp, Homo sapiens
gggaaggagtcagcg

SEQ ID NO: 1256023 - DNA, 15 bp, Homo sapiens
cgggaaggagtcagc

SEQ ID NO: 1256024 - DNA, 15 bp, Homo sapiens
ccgggaaggagtcag

SEQ ID NO: 1256025 - DNA, 15 bp, Homo sapiens
gccgggaaggagtca

SEQ ID NO: 1256026 - DNA, 15 bp, Homo sapiens
cgccgggaaggagtc

SEQ ID NO: 1256027 - DNA, 15 bp, Homo sapiens
tcgccgggaaggagt

SEQ ID NO: 1256028 - DNA, 15 bp, Homo sapiens
ctcgccgggaaggag

SEQ ID NO: 1256029 - DNA, 15 bp, Homo sapiens
cctcgccgggaagga

SEQ ID NO: 1256030 - DNA, 15 bp, Homo sapiens
tcctcgccgggaagg

SEQ ID NO: 1256031 - DNA, 15 bp, Homo sapiens
gtcctcgccgggaag

SEQ ID NO: 1256032 - DNA, 15 bp, Homo sapiens
agtcctcgccgggaa

SEQ ID NO: 1256033 - DNA, 15 bp, Homo sapiens
gagtcctcgccggga

SEQ ID NO: 1256034 - DNA, 15 bp, Homo sapiens
tgagtcctcgccggg

SEQ ID NO: 1256035 - DNA, 15 bp, Homo sapiens
ctgagtcctcgccgg

SEQ ID NO: 1256036 - DNA, 15 bp, Homo sapiens
gctgagtcctcgccg

SEQ ID NO: 1256037 - DNA, 15 bp, Homo sapiens
cgctgagtcctcgcc

SEQ ID NO: 1256038 - DNA, 15 bp, Homo sapiens
ccgctgagtcctcgc

SEQ ID NO: 1256039 - DNA, 15 bp, Homo sapiens
cccgctgagtcctcg

SEQ ID NO: 1256040 - DNA, 15 bp, Homo sapiens
ccccgctgagtcctc

SEQ ID NO: 1256041 - DNA, 15 bp, Homo sapiens
tccccgctgagtcct

SEQ ID NO: 1256042 - DNA, 15 bp, Homo sapiens
ctccccgctgagtcc

SEQ ID NO: 1256043 - DNA, 15 bp, Homo sapiens
cctccccgctgagtc

SEQ ID NO: 1256044 - DNA, 15 bp, Homo sapiens
ccctccccgctgagt

SEQ ID NO: 1256045 - DNA, 15 bp, Homo sapiens
tccctccccgctgag

SEQ ID NO: 1256046 - DNA, 15 bp, Homo sapiens
atccctccccgctga

SEQ ID NO: 1256047 - DNA, 15 bp, Homo sapiens
catccctccccgctg

SEQ ID NO: 1256048 - DNA, 15 bp, Homo sapiens
gcatccctccccgct

SEQ ID NO: 1256049 - DNA, 15 bp, Homo sapiens
cgcatccctccccgc

SEQ ID NO: 1256050 - DNA, 15 bp, Homo sapiens
gcgcatccctccccg

SEQ ID NO: 1256051 - DNA, 15 bp, Homo sapiens
ggcgcatccctcccc

SEQ ID NO: 1256052 - DNA, 15 bp, Homo sapiens
gggcgcatccctccc

SEQ ID NO: 1256053 - DNA, 15 bp, Homo sapiens
tgggcgcatccctcc

SEQ ID NO: 1256054 - DNA, 15 bp, Homo sapiens
ttgggcgcatccctc

SEQ ID NO: 1256055 - DNA, 15 bp, Homo sapiens
cttgggcgcatccct

SEQ ID NO: 1256056 - DNA, 15 bp, Homo sapiens
acttgggcgcatccc

SEQ ID NO: 1256057 - DNA, 15 bp, Homo sapiens
gacttgggcgcatcc

SEQ ID NO: 1256058 - DNA, 15 bp, Homo sapiens
ggacttgggcgcatc

SEQ ID NO: 1256059 - DNA, 15 bp, Homo sapiens
gggacttgggcgcat

SEQ ID NO: 1256060 - DNA, 15 bp, Homo sapiens
agggacttgggcgca

SEQ ID NO: 1256061 - DNA, 15 bp, Homo sapiens
aagggacttgggcgc

SEQ ID NO: 1256062 - DNA, 15 bp, Homo sapiens
caagggacttgggcg

SEQ ID NO: 1256063 - DNA, 15 bp, Homo sapiens
cctcaagggacttgg

SEQ ID NO: 1256064 - DNA, 15 bp, Homo sapiens
ccctcaagggacttg

SEQ ID NO: 1256065 - DNA, 15 bp, Homo sapiens
accctcaagggactt

SEQ ID NO: 1256066 - DNA, 15 bp, Homo sapiens
gaccctcaagggact

SEQ ID NO: 1256067 - DNA, 15 bp, Homo sapiens
tgaccctcaagggac

SEQ ID NO: 1256068 - DNA, 15 bp, Homo sapiens
gtgaccctcaaggga

SEQ ID NO: 1256069 - DNA, 15 bp, Homo sapiens
tgtgaccctcaaggg

SEQ ID NO: 1256070 - DNA, 15 bp, Homo sapiens
ctgtgaccctcaagg

SEQ ID NO: 1256071 - DNA, 15 bp, Homo sapiens
cctgtgaccctcaag

SEQ ID NO: 1256072 - DNA, 15 bp, Homo sapiens
ccctgtgaccctcaa

SEQ ID NO: 1256073 - DNA, 15 bp, Homo sapiens
gccctgtgaccctca

SEQ ID NO: 1256074 - DNA, 15 bp, Homo sapiens
agccctgtgaccctc

SEQ ID NO: 1256075 - DNA, 15 bp, Homo sapiens
aagccctgtgaccct

SEQ ID NO: 1256076 - DNA, 15 bp, Homo sapiens
gaagccctgtgaccc

SEQ ID NO: 1256077 - DNA, 15 bp, Homo sapiens
agaagccctgtgacc

SEQ ID NO: 1256078 - DNA, 15 bp, Homo sapiens
cagaagccctgtgac

SEQ ID NO: 1256079 - DNA, 15 bp, Homo sapiens
gcagaagccctgtga

SEQ ID NO: 1256080 - DNA, 15 bp, Homo sapiens
ggcagaagccctgtg

SEQ ID NO: 1256081 - DNA, 15 bp, Homo sapiens
tggcagaagccctgt

SEQ ID NO: 1256082 - DNA, 15 bp, Homo sapiens
ctggcagaagccctg

SEQ ID NO: 1256083 - DNA, 15 bp, Homo sapiens
tctggcagaagccct

SEQ ID NO: 1256084 - DNA, 15 bp, Homo sapiens
ctctggcagaagccc

SEQ ID NO: 1256085 - DNA, 15 bp, Homo sapiens
actctggcagaagcc

SEQ ID NO: 1256086 - DNA, 15 bp, Homo sapiens
aactctggcagaagc

SEQ ID NO: 1256087 - DNA, 15 bp, Homo sapiens
taactctggcagaag

SEQ ID NO: 1256088 - DNA, 15 bp, Homo sapiens
ttaactctggcagaa

SEQ ID NO: 1256089 - DNA, 15 bp, Homo sapiens
cttaactctggcaga

SEQ ID NO: 1256090 - DNA, 15 bp, Homo sapiens
acttaactctggcag

SEQ ID NO: 1256091 - DNA, 15 bp, Homo sapiens
aacttaactctggca

SEQ ID NO: 1256092 - DNA, 15 bp, Homo sapiens
gaacttaactctggc

SEQ ID NO: 1256093 - DNA, 15 bp, Homo sapiens
agaacttaactctgg

SEQ ID NO: 1256094 - DNA, 15 bp, Homo sapiens
tagaacttaactctg

SEQ ID NO: 1256095 - DNA, 15 bp, Homo sapiens
atagaacttaactct

SEQ ID NO: 1256096 - DNA, 15 bp, Homo sapiens
aatagaacttaactc

SEQ ID NO: 1256097 - DNA, 15 bp, Homo sapiens
aaatagaacttaact

SEQ ID NO: 1256098 - DNA, 15 bp, Homo sapiens
taaatagaacttaac

SEQ ID NO: 1256099 - DNA, 15 bp, Homo sapiens
ttaaatagaacttaa

SEQ ID NO: 1256100 - DNA, 15 bp, Homo sapiens
tttaaatagaactta

SEQ ID NO: 1256101 - DNA, 15 bp, Homo sapiens
ttttaaatagaactt

SEQ ID NO: 1256102 - DNA, 15 bp, Homo sapiens
tttttaaatagaact

SEQ ID NO: 1256103 - DNA, 15 bp, Homo sapiens
atttttaaatagaac

SEQ ID NO: 1256104 - DNA, 15 bp, Homo sapiens
tatttttaaatagaa

SEQ ID NO: 1256105 - DNA, 15 bp, Homo sapiens
ttatttttaaataga

SEQ ID NO: 1256106 - DNA, 15 bp, Homo sapiens
tttatttttaaatag

SEQ ID NO: 1256107 - DNA, 15 bp, Homo sapiens
ttttatttttaaata

SEQ ID NO: 1256108 - DNA, 15 bp, Homo sapiens
attttatttttaaat

SEQ ID NO: 1256109 - DNA, 15 bp, Homo sapiens
cattttatttttaaa

SEQ ID NO: 1256110 - DNA, 15 bp, Homo sapiens
acattttatttttaa

SEQ ID NO: 1256111 - DNA, 15 bp, Homo sapiens
aacattttattttta

SEQ ID NO: 1256112 - DNA, 15 bp, Homo sapiens
taacattttattttt

SEQ ID NO: 1256113 - DNA, 15 bp, Homo sapiens
ttaacattttatttt

SEQ ID NO: 1256114 - DNA, 15 bp, Homo sapiens
gttaacattttattt

SEQ ID NO: 1256115 - DNA, 15 bp, Homo sapiens
ggttaacattttatt

SEQ ID NO: 1256116 - DNA, 15 bp, Homo sapiens
aggttaacattttat

SEQ ID NO: 1256117 - DNA, 15 bp, Homo sapiens
taggttaacatttta

SEQ ID NO: 1256118 - DNA, 15 bp, Homo sapiens
ttaggttaacatttt

SEQ ID NO: 1256119 - DNA, 15 bp, Homo sapiens
tttaggttaacattt

SEQ ID NO: 1256120 - DNA, 15 bp, Homo sapiens
ttttaggttaacatt

SEQ ID NO: 1256121 - DNA, 15 bp, Homo sapiens
tttttaggttaacat

SEQ ID NO: 1256122 - DNA, 15 bp, Homo sapiens
gtttttaggttaaca

SEQ ID NO: 1256123 - DNA, 15 bp, Homo sapiens
ggtttttaggttaac

SEQ ID NO: 1256124 - DNA, 15 bp, Homo sapiens
tggtttttaggttaa

SEQ ID NO: 1256125 - DNA, 15 bp, Homo sapiens
ttggtttttaggtta

SEQ ID NO: 1256126 - DNA, 15 bp, Homo sapiens
attggtttttaggtt

SEQ ID NO: 1256127 - DNA, 15 bp, Homo sapiens
tattggtttttaggt

SEQ ID NO: 1256128 - DNA, 15 bp, Homo sapiens
ctattggtttttagg

SEQ ID NO: 1256129 - DNA, 15 bp, Homo sapiens
actattggtttttag

SEQ ID NO: 1256130 - DNA, 15 bp, Homo sapiens
gactattggttttta

SEQ ID NO: 1256131 - DNA, 15 bp, Homo sapiens
tgactattggttttt

SEQ ID NO: 1256132 - DNA, 15 bp, Homo sapiens
atgactattggtttt

SEQ ID NO: 1256133 - DNA, 15 bp, Homo sapiens
catgactattggttt

SEQ ID NO: 1256134 - DNA, 15 bp, Homo sapiens
ccatgactattggtt

SEQ ID NO: 1256135 - DNA, 15 bp, Homo sapiens
accatgactattggt

SEQ ID NO: 1256136 - DNA, 15 bp, Homo sapiens
gaccatgactattgg

SEQ ID NO: 1256137 - DNA, 15 bp, Homo sapiens
agaccatgactattg

SEQ ID NO: 1256138 - DNA, 15 bp, Homo sapiens
gagaccatgactatt

SEQ ID NO: 1256139 - DNA, 15 bp, Homo sapiens
cgagaccatgactat

SEQ ID NO: 1256140 - DNA, 15 bp, Homo sapiens
ccgagaccatgacta

SEQ ID NO: 1256141 - DNA, 15 bp, Homo sapiens
gccgagaccatgact

SEQ ID NO: 1256142 - DNA, 15 bp, Homo sapiens
ggccgagaccatgac

SEQ ID NO: 1256143 - DNA, 15 bp, Homo sapiens
tggccgagaccatga

SEQ ID NO: 1256144 - DNA, 15 bp, Homo sapiens
ctggccgagaccatg

SEQ ID NO: 1256145 - DNA, 15 bp, Homo sapiens
gctggccgagaccat

SEQ ID NO: 1256146 - DNA, 15 bp, Homo sapiens
cgctggccgagacca

SEQ ID NO: 1256147 - DNA, 15 bp, Homo sapiens
gcgctggccgagacc

SEQ ID NO: 1256148 - DNA, 15 bp, Homo sapiens
ggcgctggccgagac

SEQ ID NO: 1256149 - DNA, 15 bp, Homo sapiens
aggcgctggccgaga

SEQ ID NO: 1256150 - DNA, 15 bp, Homo sapiens
gaggcgctggccgag

SEQ ID NO: 1256151 - DNA, 15 bp, Homo sapiens
cgaggcgctggccga

SEQ ID NO: 1256152 - DNA, 15 bp, Homo sapiens
gcgaggcgctggccg

SEQ ID NO: 1256153 - DNA, 15 bp, Homo sapiens
ggcgaggcgctggcc

SEQ ID NO: 1256154 - DNA, 15 bp, Homo sapiens
cggcgaggcgctggc

SEQ ID NO: 1256155 - DNA, 15 bp, Homo sapiens
tcggcgaggcgctgg

SEQ ID NO: 1256156 - DNA, 15 bp, Homo sapiens
ctcggcgaggcgctg

SEQ ID NO: 1256157 - DNA, 15 bp, Homo sapiens
actcggcgaggcgct

SEQ ID NO: 1256158 - DNA, 15 bp, Homo sapiens
aactcggcgaggcgc

SEQ ID NO: 1256159 - DNA, 15 bp, Homo sapiens
caactcggcgaggcg

SEQ ID NO: 1256160 - DNA, 15 bp, Homo sapiens
gcaactcggcgaggc

SEQ ID NO: 1256161 - DNA, 15 bp, Homo sapiens
tgcaactcggcgagg

SEQ ID NO: 1256162 - DNA, 15 bp, Homo sapiens
ctgcaactcggcgag

SEQ ID NO: 1256163 - DNA, 15 bp, Homo sapiens
actgcaactcggcga

SEQ ID NO: 1256164 - DNA, 15 bp, Homo sapiens
cactgcaactcggcg

SEQ ID NO: 1256165 - DNA, 15 bp, Homo sapiens
tcactgcaactcggc

SEQ ID NO: 1256166 - DNA, 15 bp, Homo sapiens
ctcactgcaactcgg

SEQ ID NO: 1256167 - DNA, 15 bp, Homo sapiens
gctcactgcaactcg

SEQ ID NO: 1256168 - DNA, 15 bp, Homo sapiens
agctcactgcaactc

SEQ ID NO: 1256169 - DNA, 15 bp, Homo sapiens
cagctcactgcaact

SEQ ID NO: 1256170 - DNA, 15 bp, Homo sapiens
acgatctcagctcac

SEQ ID NO: 1256171 - DNA, 15 bp, Homo sapiens
cacgatctcagctca

SEQ ID NO: 1256172 - DNA, 15 bp, Homo sapiens
gcacgatctcagctc

SEQ ID NO: 1256173 - DNA, 15 bp, Homo sapiens
ggcacgatctcagct

SEQ ID NO: 1256174 - DNA, 15 bp, Homo sapiens
gggcacgatctcagc

SEQ ID NO: 1256175 - DNA, 15 bp, Homo sapiens
agggcacgatctcag

SEQ ID NO: 1256176 - DNA, 15 bp, Homo sapiens
gagggcacgatctca

SEQ ID NO: 1256177 - DNA, 15 bp, Homo sapiens
ggagggcacgatctc

SEQ ID NO: 1256178 - DNA, 15 bp, Homo sapiens
gggagggcacgatct

SEQ ID NO: 1256179 - DNA, 15 bp, Homo sapiens
tgggagggcacgatc

SEQ ID NO: 1256180 - DNA, 15 bp, Homo sapiens
gtgggagggcacgat

SEQ ID NO: 1256181 - DNA, 15 bp, Homo sapiens
cgtgggagggcacga

SEQ ID NO: 1256182 - DNA, 15 bp, Homo sapiens
gcgtgggagggcacg

SEQ ID NO: 1256183 - DNA, 15 bp, Homo sapiens
ggcgtgggagggcac

SEQ ID NO: 1256184 - DNA, 15 bp, Homo sapiens
gggcgtgggagggca

SEQ ID NO: 1256185 - DNA, 15 bp, Homo sapiens
cgggcgtgggagggc

SEQ ID NO: 1256186 - DNA, 15 bp, Homo sapiens
gcgggcgtgggaggg

SEQ ID NO: 1256187 - DNA, 15 bp, Homo sapiens
tgcgggcgtgggagg

SEQ ID NO: 1256188 - DNA, 15 bp, Homo sapiens
ctgcgggcgtgggag

SEQ ID NO: 1256189 - DNA, 15 bp, Homo sapiens
gctgcgggcgtggga

SEQ ID NO: 1256190 - DNA, 15 bp, Homo sapiens
ggctgcgggcgtggg

SEQ ID NO: 1256191 - DNA, 15 bp, Homo sapiens
gggctgcgggcgtgg

SEQ ID NO: 1256192 - DNA, 15 bp, Homo sapiens
cgggctgcgggcgtg

SEQ ID NO: 1256193 - DNA, 15 bp, Homo sapiens
gcgggctgcgggcgt

SEQ ID NO: 1256194 - DNA, 15 bp, Homo sapiens
cgcgggctgcgggcg

SEQ ID NO: 1256195 - DNA, 15 bp, Homo sapiens
acgcgggctgcgggc

SEQ ID NO: 1256196 - DNA, 15 bp, Homo sapiens
gacgcgggctgcggg

SEQ ID NO: 1256197 - DNA, 15 bp, Homo sapiens
ggacgcgggctgcgg

SEQ ID NO: 1256198 - DNA, 15 bp, Homo sapiens
aggacgcgggctgcg

SEQ ID NO: 1256199 - DNA, 15 bp, Homo sapiens
caggacgcgggctgc

SEQ ID NO: 1256200 - DNA, 15 bp, Homo sapiens
gcaggacgcgggctg

SEQ ID NO: 1256201 - DNA, 15 bp, Homo sapiens
ggcaggacgcgggct

SEQ ID NO: 1256202 - DNA, 15 bp, Homo sapiens
aggcaggacgcgggc

SEQ ID NO: 1256203 - DNA, 15 bp, Homo sapiens
aaggcaggacgcggg

SEQ ID NO: 1256204 - DNA, 15 bp, Homo sapiens
caaggcaggacgcgg

SEQ ID NO: 1256205 - DNA, 15 bp, Homo sapiens
ccaaggcaggacgcg

SEQ ID NO: 1256206 - DNA, 15 bp, Homo sapiens
gccaaggcaggacgc

SEQ ID NO: 1256207 - DNA, 15 bp, Homo sapiens
ggccaaggcaggacg

SEQ ID NO: 1256208 - DNA, 15 bp, Homo sapiens
aggccaaggcaggac

SEQ ID NO: 1256209 - DNA, 15 bp, Homo sapiens
cggaggccaaggcag

SEQ ID NO: 1256210 - DNA, 15 bp, Homo sapiens
acggaggccaaggca

SEQ ID NO: 1256211 - DNA, 15 bp, Homo sapiens
tacggaggccaaggc

SEQ ID NO: 1256212 - DNA, 15 bp, Homo sapiens
ctacggaggccaagg

SEQ ID NO: 1256213 - DNA, 15 bp, Homo sapiens
actacggaggccaag

SEQ ID NO: 1256214 - DNA, 15 bp, Homo sapiens
gactacggaggccaa

SEQ ID NO: 1256215 - DNA, 15 bp, Homo sapiens
cgactacggaggcca

SEQ ID NO: 1256216 - DNA, 15 bp, Homo sapiens
gcgactacggaggcc

SEQ ID NO: 1256217 - DNA, 15 bp, Homo sapiens
agcgactacggaggc

SEQ ID NO: 1256218 - DNA, 15 bp, Homo sapiens
cagcgactacggagg

SEQ ID NO: 1256219 - DNA, 15 bp, Homo sapiens
tcagcgactacggag

SEQ ID NO: 1256220 - DNA, 15 bp, Homo sapiens
ctcagcgactacgga

SEQ ID NO: 1256221 - DNA, 15 bp, Homo sapiens
tctcagcgactacgg

SEQ ID NO: 1256222 - DNA, 15 bp, Homo sapiens
ctctcagcgactacg

SEQ ID NO: 1256223 - DNA, 15 bp, Homo sapiens
gctctcagcgactac

SEQ ID NO: 1256224 - DNA, 15 bp, Homo sapiens
ggctctcagcgacta

SEQ ID NO: 1256225 - DNA, 15 bp, Homo sapiens
tggctctcagcgact

SEQ ID NO: 1256226 - DNA, 15 bp, Homo sapiens
gtggctctcagcgac

SEQ ID NO: 1256227 - DNA, 15 bp, Homo sapiens
tgtggctctcagcga

SEQ ID NO: 1256228 - DNA, 15 bp, Homo sapiens
ctgtggctctcagcg

SEQ ID NO: 1256229 - DNA, 15 bp, Homo sapiens
gctgtggctctcagc

SEQ ID NO: 1256230 - DNA, 15 bp, Homo sapiens
ggctgtggctctcag

SEQ ID NO: 1256231 - DNA, 15 bp, Homo sapiens
aggctgtggctctca

SEQ ID NO: 1256232 - DNA, 15 bp, Homo sapiens
taggctgtggctctc

SEQ ID NO: 1256233 - DNA, 15 bp, Homo sapiens
ctaggctgtggctct

SEQ ID NO: 1256234 - DNA, 15 bp, Homo sapiens
tctaggctgtggctc

SEQ ID NO: 1256235 - DNA, 15 bp, Homo sapiens
ctctaggctgtggct

SEQ ID NO: 1256236 - DNA, 15 bp, Homo sapiens
gctctaggctgtggc

SEQ ID NO: 1256237 - DNA, 15 bp, Homo sapiens
cgctctaggctgtgg

SEQ ID NO: 1256238 - DNA, 15 bp, Homo sapiens
gcgctctaggctgtg

SEQ ID NO: 1256239 - DNA, 15 bp, Homo sapiens
ggcgctctaggctgt

SEQ ID NO: 1256240 - DNA, 15 bp, Homo sapiens
tggcgctctaggctg

SEQ ID NO: 1256241 - DNA, 15 bp, Homo sapiens
ctggcgctctaggct

SEQ ID NO: 1256242 - DNA, 15 bp, Homo sapiens
gctggcgctctaggc

SEQ ID NO: 1256243 - DNA, 15 bp, Homo sapiens
cgctggcgctctagg

SEQ ID NO: 1256244 - DNA, 15 bp, Homo sapiens
gcgctggcgctctag

SEQ ID NO: 1256245 - DNA, 15 bp, Homo sapiens
cgcgctggcgctcta

SEQ ID NO: 1256246 - DNA, 15 bp, Homo sapiens
gcgcgctggcgctct

SEQ ID NO: 1256247 - DNA, 15 bp, Homo sapiens
tgcgcgctggcgctc

SEQ ID NO: 1256248 - DNA, 15 bp, Homo sapiens
ctgcgcgctggcgct

SEQ ID NO: 1256249 - DNA, 15 bp, Homo sapiens
cctgcgcgctggcgc

SEQ ID NO: 1256250 - DNA, 15 bp, Homo sapiens
gcctgcgcgctggcg

SEQ ID NO: 1256251 - DNA, 15 bp, Homo sapiens
cgcctgcgcgctggc

SEQ ID NO: 1256252 - DNA, 15 bp, Homo sapiens
gcgcctgcgcgctgg

SEQ ID NO: 1256253 - DNA, 15 bp, Homo sapiens
tgcgcctgcgcgctg

SEQ ID NO: 1256254 - DNA, 15 bp, Homo sapiens
gtgcgcctgcgcgct

SEQ ID NO: 1256255 - DNA, 15 bp, Homo sapiens
tgtgcgcctgcgcgc

SEQ ID NO: 1256256 - DNA, 15 bp, Homo sapiens
ttgtgcgcctgcgcg

SEQ ID NO: 1256257 - DNA, 15 bp, Homo sapiens
gttgtgcgcctgcgc

SEQ ID NO: 1256258 - DNA, 15 bp, Homo sapiens
agttgtgcgcctgcg

SEQ ID NO: 1256259 - DNA, 15 bp, Homo sapiens
cagttgtgcgcctgc

SEQ ID NO: 1256260 - DNA, 15 bp, Homo sapiens
tcagttgtgcgcctg

SEQ ID NO: 1256261 - DNA, 15 bp, Homo sapiens
gtcagttgtgcgcct

SEQ ID NO: 1256262 - DNA, 15 bp, Homo sapiens
cgtcagttgtgcgcc

SEQ ID NO: 1256263 - DNA, 15 bp, Homo sapiens
gcgtcagttgtgcgc

SEQ ID NO: 1256264 - DNA, 15 bp, Homo sapiens
ggcgtcagttgtgcg

SEQ ID NO: 1256265 - DNA, 15 bp, Homo sapiens
tggcgtcagttgtgc

SEQ ID NO: 1256266 - DNA, 15 bp, Homo sapiens
ctggcgtcagttgtg

SEQ ID NO: 1256267 - DNA, 15 bp, Homo sapiens
cctggcgtcagttgt

SEQ ID NO: 1256268 - DNA, 15 bp, Homo sapiens
gcctggcgtcagttg

SEQ ID NO: 1256269 - DNA, 15 bp, Homo sapiens
ggcctggcgtcagtt

SEQ ID NO: 1256270 - DNA, 15 bp, Homo sapiens
tggcctggcgtcagt

SEQ ID NO: 1256271 - DNA, 15 bp, Homo sapiens
gtggcctggcgtcag

SEQ ID NO: 1256272 - DNA, 15 bp, Homo sapiens
cgtggcctggcgtca

SEQ ID NO: 1256273 - DNA, 15 bp, Homo sapiens
tcgtggcctggcgtc

SEQ ID NO: 1256274 - DNA, 15 bp, Homo sapiens
ttcgtggcctggcgt

SEQ ID NO: 1256275 - DNA, 15 bp, Homo sapiens
gttcgtggcctggcg

SEQ ID NO: 1256276 - DNA, 15 bp, Homo sapiens
ggttcgtggcctggc

SEQ ID NO: 1256277 - DNA, 15 bp, Homo sapiens
gggttcgtggcctgg

SEQ ID NO: 1256278 - DNA, 15 bp, Homo sapiens
tgggttcgtggcctg

SEQ ID NO: 1256279 - DNA, 15 bp, Homo sapiens
ctgggttcgtggcct

SEQ ID NO: 1256280 - DNA, 15 bp, Homo sapiens
actgggttcgtggcc

SEQ ID NO: 1256281 - DNA, 15 bp, Homo sapiens
tactgggttcgtggc

SEQ ID NO: 1256282 - DNA, 15 bp, Homo sapiens
gtactgggttcgtgg

SEQ ID NO: 1256283 - DNA, 15 bp, Homo sapiens
agtactgggttcgtg

SEQ ID NO: 1256284 - DNA, 15 bp, Homo sapiens
cagtactgggttcgt

SEQ ID NO: 1256285 - DNA, 15 bp, Homo sapiens
gcagtactgggttcg

SEQ ID NO: 1256286 - DNA, 15 bp, Homo sapiens
agcagtactgggttc

SEQ ID NO: 1256287 - DNA, 15 bp, Homo sapiens
gagcagtactgggtt

SEQ ID NO: 1256288 - DNA, 15 bp, Homo sapiens
ggagcagtactgggt

SEQ ID NO: 1256289 - DNA, 15 bp, Homo sapiens
aggagcagtactggg

SEQ ID NO: 1256290 - DNA, 15 bp, Homo sapiens
caggagcagtactgg

SEQ ID NO: 1256291 - DNA, 15 bp, Homo sapiens
gcaggagcagtactg

SEQ ID NO: 1256292 - DNA, 15 bp, Homo sapiens
tgcaggagcagtact

SEQ ID NO: 1256293 - DNA, 15 bp, Homo sapiens
gtgcaggagcagtac

SEQ ID NO: 1256294 - DNA, 15 bp, Homo sapiens
tgtgcaggagcagta

SEQ ID NO: 1256295 - DNA, 15 bp, Homo sapiens
ctgtgcaggagcagt

SEQ ID NO: 1256296 - DNA, 15 bp, Homo sapiens
gctgtgcaggagcag

SEQ ID NO: 1256297 - DNA, 15 bp, Homo sapiens
tgctgtgcaggagca

SEQ ID NO: 1256298 - DNA, 15 bp, Homo sapiens
ctgctgtgcaggagc

SEQ ID NO: 1256299 - DNA, 15 bp, Homo sapiens
tctgctgtgcaggag

SEQ ID NO: 1256300 - DNA, 15 bp, Homo sapiens
ttctgctgtgcagga

SEQ ID NO: 1256301 - DNA, 15 bp, Homo sapiens
cttctgctgtgcagg

SEQ ID NO: 1256302 - DNA, 15 bp, Homo sapiens
gcttctgctgtgcag

SEQ ID NO: 1256303 - DNA, 15 bp, Homo sapiens
tgcttctgctgtgca

SEQ ID NO: 1256304 - DNA, 15 bp, Homo sapiens
gtgcttctgctgtgc

SEQ ID NO: 1256305 - DNA, 15 bp, Homo sapiens
agtgcttctgctgtg

SEQ ID NO: 1256306 - DNA, 15 bp, Homo sapiens
tagtgcttctgctgt

SEQ ID NO: 1256307 - DNA, 15 bp, Homo sapiens
ctagtgcttctgctg

SEQ ID NO: 1256308 - DNA, 15 bp, Homo sapiens
gctagtgcttctgct

SEQ ID NO: 1256309 - DNA, 15 bp, Homo sapiens
tgctagtgcttctgc

SEQ ID NO: 1256310 - DNA, 15 bp, Homo sapiens
gtgctagtgcttctg

SEQ ID NO: 1256311 - DNA, 15 bp, Homo sapiens
agtgctagtgcttct

SEQ ID NO: 1256312 - DNA, 15 bp, Homo sapiens
cagtgctagtgcttc

SEQ ID NO: 1256313 - DNA, 15 bp, Homo sapiens
tcagtgctagtgctt

SEQ ID NO: 1256314 - DNA, 15 bp, Homo sapiens
ctcagtgctagtgct

SEQ ID NO: 1256315 - DNA, 15 bp, Homo sapiens
cctcagtgctagtgc

SEQ ID NO: 1256316 - DNA, 15 bp, Homo sapiens
gcctcagtgctagtg

SEQ ID NO: 1256317 - DNA, 15 bp, Homo sapiens
ggcctcagtgctagt

SEQ ID NO: 1256318 - DNA, 15 bp, Homo sapiens
cggcctcagtgctag

SEQ ID NO: 1256319 - DNA, 15 bp, Homo sapiens
ccggcctcagtgcta

SEQ ID NO: 1256320 - DNA, 15 bp, Homo sapiens
cccggcctcagtgct

SEQ ID NO: 1256321 - DNA, 15 bp, Homo sapiens
gcccggcctcagtgc

SEQ ID NO: 1256322 - DNA, 15 bp, Homo sapiens
cgcccggcctcagtg

SEQ ID NO: 1256323 - DNA, 15 bp, Homo sapiens
ccgcccggcctcagt

SEQ ID NO: 1256324 - DNA, 15 bp, Homo sapiens
gccgcccggcctcag

SEQ ID NO: 1256325 - DNA, 15 bp, Homo sapiens
cgccgcccggcctca

SEQ ID NO: 1256326 - DNA, 15 bp, Homo sapiens
tcgccgcccggcctc

SEQ ID NO: 1256327 - DNA, 15 bp, Homo sapiens
ttcgccgcccggcct

SEQ ID NO: 1256328 - DNA, 15 bp, Homo sapiens
gttcgccgcccggcc

SEQ ID NO: 1256329 - DNA, 15 bp, Homo sapiens
ggttcgccgcccggc

SEQ ID NO: 1256330 - DNA, 15 bp, Homo sapiens
gggttcgccgcccgg

SEQ ID NO: 1256331 - DNA, 15 bp, Homo sapiens
cgggttcgccgcccg

SEQ ID NO: 1256332 - DNA, 15 bp, Homo sapiens
ccgggttcgccgccc

SEQ ID NO: 1256333 - DNA, 15 bp, Homo sapiens
gccgggttcgccgcc

SEQ ID NO: 1256334 - DNA, 15 bp, Homo sapiens
tgccgggttcgccgc

SEQ ID NO: 1256335 - DNA, 15 bp, Homo sapiens
gtgccgggttcgccg

SEQ ID NO: 1256336 - DNA, 15 bp, Homo sapiens
agtgccgggttcgcc

SEQ ID NO: 1256337 - DNA, 15 bp, Homo sapiens
cagtgccgggttcgc

SEQ ID NO: 1256338 - DNA, 15 bp, Homo sapiens
gcagtgccgggttcg

SEQ ID NO: 1256339 - DNA, 15 bp, Homo sapiens
cgcagtgccgggttc

SEQ ID NO: 1256340 - DNA, 15 bp, Homo sapiens
gcgcagtgccgggtt

SEQ ID NO: 1256341 - DNA, 15 bp, Homo sapiens
ggcgcagtgccgggt

SEQ ID NO: 1256342 - DNA, 15 bp, Homo sapiens
aggcgcagtgccggg

SEQ ID NO: 1256343 - DNA, 15 bp, Homo sapiens
caggcgcagtgccgg

SEQ ID NO: 1256344 - DNA, 15 bp, Homo sapiens
gcaggcgcagtgccg

SEQ ID NO: 1256345 - DNA, 15 bp, Homo sapiens
cgcaggcgcagtgcc

SEQ ID NO: 1256346 - DNA, 15 bp, Homo sapiens
gcgcaggcgcagtgc

SEQ ID NO: 1256347 - DNA, 15 bp, Homo sapiens
tgcgcaggcgcagtg

SEQ ID NO: 1256348 - DNA, 15 bp, Homo sapiens
ctgcgcaggcgcagt

SEQ ID NO: 1256349 - DNA, 15 bp, Homo sapiens
gctgcgcaggcgcag

SEQ ID NO: 1256350 - DNA, 15 bp, Homo sapiens
tgctgcgcaggcgca

SEQ ID NO: 1256351 - DNA, 15 bp, Homo sapiens
ttgctgcgcaggcgc

SEQ ID NO: 1256352 - DNA, 15 bp, Homo sapiens
tttgctgcgcaggcg

SEQ ID NO: 1256353 - DNA, 15 bp, Homo sapiens
ttttgctgcgcaggc

SEQ ID NO: 1256354 - DNA, 15 bp, Homo sapiens
cttttgctgcgcagg

SEQ ID NO: 1256355 - DNA, 15 bp, Homo sapiens
ccttttgctgcgcag

SEQ ID NO: 1256356 - DNA, 15 bp, Homo sapiens
tccttttgctgcgca

SEQ ID NO: 1256357 - DNA, 15 bp, Homo sapiens
gtccttttgctgcgc

SEQ ID NO: 1256358 - DNA, 15 bp, Homo sapiens
tgtccttttgctgcg

SEQ ID NO: 1256359 - DNA, 15 bp, Homo sapiens
gtgtccttttgctgc

SEQ ID NO: 1256360 - DNA, 15 bp, Homo sapiens
cgtgtccttttgctg

SEQ ID NO: 1256361 - DNA, 15 bp, Homo sapiens
gcgtgtccttttgct

SEQ ID NO: 1256362 - DNA, 15 bp, Homo sapiens
tgcgtgtccttttgc

SEQ ID NO: 1256363 - DNA, 15 bp, Homo sapiens
gtgcgtgtccttttg

SEQ ID NO: 1256364 - DNA, 15 bp, Homo sapiens
agtgcgtgtcctttt

SEQ ID NO: 1256365 - DNA, 15 bp, Homo sapiens
cagtgcgtgtccttt

SEQ ID NO: 1256366 - DNA, 15 bp, Homo sapiens
tcagtgcgtgtcctt

SEQ ID NO: 1256367 - DNA, 15 bp, Homo sapiens
ctcagtgcgtgtcct

SEQ ID NO: 1256368 - DNA, 15 bp, Homo sapiens
cctcagtgcgtgtcc

SEQ ID NO: 1256369 - DNA, 15 bp, Homo sapiens
gcctcagtgcgtgtc

SEQ ID NO: 1256370 - DNA, 15 bp, Homo sapiens
ggcctcagtgcgtgt

SEQ ID NO: 1256371 - DNA, 15 bp, Homo sapiens
tggcctcagtgcgtg

SEQ ID NO: 1256372 - DNA, 15 bp, Homo sapiens
ctggcctcagtgcgt

SEQ ID NO: 1256373 - DNA, 15 bp, Homo sapiens
cctggcctcagtgcg

SEQ ID NO: 1256374 - DNA, 15 bp, Homo sapiens
gcctggcctcagtgc

SEQ ID NO: 1256375 - DNA, 15 bp, Homo sapiens
ggcctggcctcagtg

SEQ ID NO: 1256376 - DNA, 15 bp, Homo sapiens
cggcctggcctcagt

SEQ ID NO: 1256377 - DNA, 15 bp, Homo sapiens
gcggcctggcctcag

SEQ ID NO: 1256378 - DNA, 15 bp, Homo sapiens
cgcggcctggcctca

SEQ ID NO: 1256379 - DNA, 15 bp, Homo sapiens
tcgcggcctggcctc

SEQ ID NO: 1256380 - DNA, 15 bp, Homo sapiens
ttcgcggcctggcct

SEQ ID NO: 1256381 - DNA, 15 bp, Homo sapiens
gttcgcggcctggcc

SEQ ID NO: 1256382 - DNA, 15 bp, Homo sapiens
ggttcgcggcctggc

SEQ ID NO: 1256383 - DNA, 15 bp, Homo sapiens
gggttcgcggcctgg

SEQ ID NO: 1256384 - DNA, 15 bp, Homo sapiens
tgggttcgcggcctg

SEQ ID NO: 1256385 - DNA, 15 bp, Homo sapiens
ctgggttcgcggcct

SEQ ID NO: 1256386 - DNA, 15 bp, Homo sapiens
gctgggttcgcggcc

SEQ ID NO: 1256387 - DNA, 15 bp, Homo sapiens
tgctgggttcgcggc

SEQ ID NO: 1256388 - DNA, 15 bp, Homo sapiens
gtgctgggttcgcgg

SEQ ID NO: 1256389 - DNA, 15 bp, Homo sapiens
cgtgctgggttcgcg

SEQ ID NO: 1256390 - DNA, 15 bp, Homo sapiens
ccgtgctgggttcgc

SEQ ID NO: 1256391 - DNA, 15 bp, Homo sapiens
accgtgctgggttcg

SEQ ID NO: 1256392 - DNA, 15 bp, Homo sapiens
caccgtgctgggttc

SEQ ID NO: 1256393 - DNA, 15 bp, Homo sapiens
gcaccgtgctgggtt

SEQ ID NO: 1256394 - DNA, 15 bp, Homo sapiens
ggcaccgtgctgggt

SEQ ID NO: 1256395 - DNA, 15 bp, Homo sapiens
aggcaccgtgctggg

SEQ ID NO: 1256396 - DNA, 15 bp, Homo sapiens
caggcaccgtgctgg

SEQ ID NO: 1256397 - DNA, 15 bp, Homo sapiens
gcaggcaccgtgctg

SEQ ID NO: 1256398 - DNA, 15 bp, Homo sapiens
cgcaggcaccgtgct

SEQ ID NO: 1256399 - DNA, 15 bp, Homo sapiens
gcgcaggcaccgtgc

SEQ ID NO: 1256400 - DNA, 15 bp, Homo sapiens
tgcgcaggcaccgtg

SEQ ID NO: 1256401 - DNA, 15 bp, Homo sapiens
ctgcgcaggcaccgt

SEQ ID NO: 1256402 - DNA, 15 bp, Homo sapiens
gctgcgcaggcaccg

SEQ ID NO: 1256403 - DNA, 15 bp, Homo sapiens
tgctgcgcaggcacc

SEQ ID NO: 1256404 - DNA, 15 bp, Homo sapiens
ctgctgcgcaggcac

SEQ ID NO: 1256405 - DNA, 15 bp, Homo sapiens
cctgctgcgcaggca

SEQ ID NO: 1256406 - DNA, 15 bp, Homo sapiens
tcctgctgcgcaggc

SEQ ID NO: 1256407 - DNA, 15 bp, Homo sapiens
ttcctgctgcgcagg

SEQ ID NO: 1256408 - DNA, 15 bp, Homo sapiens
cttcctgctgcgcag

SEQ ID NO: 1256409 - DNA, 15 bp, Homo sapiens
tcttcctgctgcgca

SEQ ID NO: 1256410 - DNA, 15 bp, Homo sapiens
gtcttcctgctgcgc

SEQ ID NO: 1256411 - DNA, 15 bp, Homo sapiens
ggtcttcctgctgcg

SEQ ID NO: 1256412 - DNA, 15 bp, Homo sapiens
cggtcttcctgctgc

SEQ ID NO: 1256413 - DNA, 15 bp, Homo sapiens
ccggtcttcctgctg

SEQ ID NO: 1256414 - DNA, 15 bp, Homo sapiens
gccggtcttcctgct

SEQ ID NO: 1256415 - DNA, 15 bp, Homo sapiens
tgccggtcttcctgc

SEQ ID NO: 1256416 - DNA, 15 bp, Homo sapiens
atgccggtcttcctg

SEQ ID NO: 1256417 - DNA, 15 bp, Homo sapiens
gatgccggtcttcct

SEQ ID NO: 1256418 - DNA, 15 bp, Homo sapiens
ggatgccggtcttcc

SEQ ID NO: 1256419 - DNA, 15 bp, Homo sapiens
tggatgccggtcttc

SEQ ID NO: 1256420 - DNA, 15 bp, Homo sapiens
gtggatgccggtctt

SEQ ID NO: 1256421 - DNA, 15 bp, Homo sapiens
tgtggatgccggtct

SEQ ID NO: 1256422 - DNA, 15 bp, Homo sapiens
gtgtggatgccggtc

SEQ ID NO: 1256423 - DNA, 15 bp, Homo sapiens
ggtgtggatgccggt

SEQ ID NO: 1256424 - DNA, 15 bp, Homo sapiens
cggtgtggatgccgg

SEQ ID NO: 1256425 - DNA, 15 bp, Homo sapiens
ccggtgtggatgccg

SEQ ID NO: 1256426 - DNA, 15 bp, Homo sapiens
tccggtgtggatgcc

SEQ ID NO: 1256427 - DNA, 15 bp, Homo sapiens
gtccggtgtggatgc

SEQ ID NO: 1256428 - DNA, 15 bp, Homo sapiens
cgtccggtgtggatg

SEQ ID NO: 1256429 - DNA, 15 bp, Homo sapiens
tcgtccggtgtggat

SEQ ID NO: 1256430 - DNA, 15 bp, Homo sapiens
gtcgtccggtgtgga

SEQ ID NO: 1256431 - DNA, 15 bp, Homo sapiens
cgtcgtccggtgtgg

SEQ ID NO: 1256432 - DNA, 15 bp, Homo sapiens
tcgtcgtccggtgtg

SEQ ID NO: 1256433 - DNA, 15 bp, Homo sapiens
ttcgtcgtccggtgt

SEQ ID NO: 1256434 - DNA, 15 bp, Homo sapiens
gttcgtcgtccggtg

SEQ ID NO: 1256435 - DNA, 15 bp, Homo sapiens
ggttcgtcgtccggt

SEQ ID NO: 1256436 - DNA, 15 bp, Homo sapiens
gggttcgtcgtccgg

SEQ ID NO: 1256437 - DNA, 15 bp, Homo sapiens
tgggttcgtcgtccg

SEQ ID NO: 1256438 - DNA, 15 bp, Homo sapiens
ctgggttcgtcgtcc

SEQ ID NO: 1256439 - DNA, 15 bp, Homo sapiens
gctgggttcgtcgtc

SEQ ID NO: 1256440 - DNA, 15 bp, Homo sapiens
tgctgggttcgtcgt

SEQ ID NO: 1256441 - DNA, 15 bp, Homo sapiens
atgctgggttcgtcg

SEQ ID NO: 1256442 - DNA, 15 bp, Homo sapiens
gatgctgggttcgtc

SEQ ID NO: 1256443 - DNA, 15 bp, Homo sapiens
cgatgctgggttcgt

SEQ ID NO: 1256444 - DNA, 15 bp, Homo sapiens
gcgatgctgggttcg

SEQ ID NO: 1256445 - DNA, 15 bp, Homo sapiens
cgcgatgctgggttc

SEQ ID NO: 1256446 - DNA, 15 bp, Homo sapiens
gcgcgatgctgggtt

SEQ ID NO: 1256447 - DNA, 15 bp, Homo sapiens
ggcgcgatgctgggt

SEQ ID NO: 1256448 - DNA, 15 bp, Homo sapiens
aggcgcgatgctggg

SEQ ID NO: 1256449 - DNA, 15 bp, Homo sapiens
caggcgcgatgctgg

SEQ ID NO: 1256450 - DNA, 15 bp, Homo sapiens
gcaggcgcgatgctg

SEQ ID NO: 1256451 - DNA, 15 bp, Homo sapiens
cgcaggcgcgatgct

SEQ ID NO: 1256452 - DNA, 15 bp, Homo sapiens
gcgcaggcgcgatgc

SEQ ID NO: 1256453 - DNA, 15 bp, Homo sapiens
tgcgcaggcgcgatg

SEQ ID NO: 1256454 - DNA, 15 bp, Homo sapiens
ctgcgcaggcgcgat

SEQ ID NO: 1256455 - DNA, 15 bp, Homo sapiens
actgcgcaggcgcga

SEQ ID NO: 1256456 - DNA, 15 bp, Homo sapiens
tactgcgcaggcgcg

SEQ ID NO: 1256457 - DNA, 15 bp, Homo sapiens
ctactgcgcaggcgc

SEQ ID NO: 1256458 - DNA, 15 bp, Homo sapiens
cctactgcgcaggcg

SEQ ID NO: 1256459 - DNA, 15 bp, Homo sapiens
tcctactgcgcaggc

SEQ ID NO: 1256460 - DNA, 15 bp, Homo sapiens
ctcctactgcgcagg

SEQ ID NO: 1256461 - DNA, 15 bp, Homo sapiens
cctcctactgcgcag

SEQ ID NO: 1256462 - DNA, 15 bp, Homo sapiens
tcctcctactgcgca

SEQ ID NO: 1256463 - DNA, 15 bp, Homo sapiens
ctcctcctactgcgc

SEQ ID NO: 1256464 - DNA, 15 bp, Homo sapiens
tctcctcctactgcg

SEQ ID NO: 1256465 - DNA, 15 bp, Homo sapiens
ctctcctcctactgc

SEQ ID NO: 1256466 - DNA, 15 bp, Homo sapiens
gctctcctcctactg

SEQ ID NO: 1256467 - DNA, 15 bp, Homo sapiens
tgctctcctcctact

SEQ ID NO: 1256468 - DNA, 15 bp, Homo sapiens
ttgctctcctcctac

SEQ ID NO: 1256469 - DNA, 15 bp, Homo sapiens
attgctctcctccta

SEQ ID NO: 1256470 - DNA, 15 bp, Homo sapiens
cattgctctcctcct

SEQ ID NO: 1256471 - DNA, 15 bp, Homo sapiens
gcattgctctcctcc

SEQ ID NO: 1256472 - DNA, 15 bp, Homo sapiens
ggcattgctctcctc

SEQ ID NO: 1256473 - DNA, 15 bp, Homo sapiens
tggcattgctctcct

SEQ ID NO: 1256474 - DNA, 15 bp, Homo sapiens
gtggcattgctctcc

SEQ ID NO: 1256475 - DNA, 15 bp, Homo sapiens
ggtggcattgctctc

SEQ ID NO: 1256476 - DNA, 15 bp, Homo sapiens
tggtggcattgctct

SEQ ID NO: 1256477 - DNA, 15 bp, Homo sapiens
ctggtggcattgctc

SEQ ID NO: 1256478 - DNA, 15 bp, Homo sapiens
cctggtggcattgct

SEQ ID NO: 1256479 - DNA, 15 bp, Homo sapiens
gcctggtggcattgc

SEQ ID NO: 1256480 - DNA, 15 bp, Homo sapiens
ggcctggtggcattg

SEQ ID NO: 1256481 - DNA, 15 bp, Homo sapiens
cggcctggtggcatt

SEQ ID NO: 1256482 - DNA, 15 bp, Homo sapiens
gcggcctggtggcat

SEQ ID NO: 1256483 - DNA, 15 bp, Homo sapiens
cgcggcctggtggca

SEQ ID NO: 1256484 - DNA, 15 bp, Homo sapiens
tcgcggcctggtggc

SEQ ID NO: 1256485 - DNA, 15 bp, Homo sapiens
atcgcggcctggtgg

SEQ ID NO: 1256486 - DNA, 15 bp, Homo sapiens
aatcgcggcctggtg

SEQ ID NO: 1256487 - DNA, 15 bp, Homo sapiens
caatcgcggcctggt

SEQ ID NO: 1256488 - DNA, 15 bp, Homo sapiens
gcaatcgcggcctgg

SEQ ID NO: 1256489 - DNA, 15 bp, Homo sapiens
cgcaatcgcggcctg

SEQ ID NO: 1256490 - DNA, 15 bp, Homo sapiens
gcgcaatcgcggcct

SEQ ID NO: 1256491 - DNA, 15 bp, Homo sapiens
tgcgcaatcgcggcc

SEQ ID NO: 1256492 - DNA, 15 bp, Homo sapiens
ctgcgcaatcgcggc

SEQ ID NO: 1256493 - DNA, 15 bp, Homo sapiens
gctgcgcaatcgcgg

SEQ ID NO: 1256494 - DNA, 15 bp, Homo sapiens
ggctgcgcaatcgcg

SEQ ID NO: 1256495 - DNA, 15 bp, Homo sapiens
cggctgcgcaatcgc

SEQ ID NO: 1256496 - DNA, 15 bp, Homo sapiens
gcggctgcgcaatcg

SEQ ID NO: 1256497 - DNA, 15 bp, Homo sapiens
tgcggctgcgcaatc

SEQ ID NO: 1256498 - DNA, 15 bp, Homo sapiens
ctgcggctgcgcaat

SEQ ID NO: 1256499 - DNA, 15 bp, Homo sapiens
gctgcggctgcgcaa

SEQ ID NO: 1256500 - DNA, 15 bp, Homo sapiens
tgctgcggctgcgca

SEQ ID NO: 1256501 - DNA, 15 bp, Homo sapiens
ctgctgcggctgcgc

SEQ ID NO: 1256502 - DNA, 15 bp, Homo sapiens
gctgctgcggctgcg

SEQ ID NO: 1256503 - DNA, 15 bp, Homo sapiens
ggctgctgcggctgc

SEQ ID NO: 1256504 - DNA, 15 bp, Homo sapiens
gggctgctgcggctg

SEQ ID NO: 1256505 - DNA, 15 bp, Homo sapiens
ggggctgctgcggct

SEQ ID NO: 1256506 - DNA, 15 bp, Homo sapiens
cggggctgctgcggc

SEQ ID NO: 1256507 - DNA, 15 bp, Homo sapiens
gcggggctgctgcgg

SEQ ID NO: 1256508 - DNA, 15 bp, Homo sapiens
cgcggggctgctgcg

SEQ ID NO: 1256509 - DNA, 15 bp, Homo sapiens
gcgcggggctgctgc

SEQ ID NO: 1256510 - DNA, 15 bp, Homo sapiens
cgcgcggggctgctg

SEQ ID NO: 1256511 - DNA, 15 bp, Homo sapiens
ccgcgcggggctgct

SEQ ID NO: 1256512 - DNA, 15 bp, Homo sapiens
tccgcgcggggctgc

SEQ ID NO: 1256513 - DNA, 15 bp, Homo sapiens
ttccgcgcggggctg

SEQ ID NO: 1256514 - DNA, 15 bp, Homo sapiens
cttccgcgcggggct

SEQ ID NO: 1256515 - DNA, 15 bp, Homo sapiens
tcttccgcgcggggc

SEQ ID NO: 1256516 - DNA, 15 bp, Homo sapiens
gtcttccgcgcgggg

SEQ ID NO: 1256517 - DNA, 15 bp, Homo sapiens
cgtcttccgcgcggg

SEQ ID NO: 1256518 - DNA, 15 bp, Homo sapiens
gcgtcttccgcgcgg

SEQ ID NO: 1256519 - DNA, 15 bp, Homo sapiens
agcgtcttccgcgcg

SEQ ID NO: 1256520 - DNA, 15 bp, Homo sapiens
tagcgtcttccgcgc

SEQ ID NO: 1256521 - DNA, 15 bp, Homo sapiens
gtagcgtcttccgcg

SEQ ID NO: 1256522 - DNA, 15 bp, Homo sapiens
ggtagcgtcttccgc

SEQ ID NO: 1256523 - DNA, 15 bp, Homo sapiens
gggtagcgtcttccg

SEQ ID NO: 1256524 - DNA, 15 bp, Homo sapiens
agggtagcgtcttcc

SEQ ID NO: 1256525 - DNA, 15 bp, Homo sapiens
gagggtagcgtcttc

SEQ ID NO: 1256526 - DNA, 15 bp, Homo sapiens
ggagggtagcgtctt

SEQ ID NO: 1256527 - DNA, 15 bp, Homo sapiens
aggagggtagcgtct

SEQ ID NO: 1256528 - DNA, 15 bp, Homo sapiens
gaggagggtagcgtc

SEQ ID NO: 1256529 - DNA, 15 bp, Homo sapiens
agaggagggtagcgt

SEQ ID NO: 1256530 - DNA, 15 bp, Homo sapiens
gagaggagggtagcg

SEQ ID NO: 1256531 - DNA, 15 bp, Homo sapiens
ggagaggagggtagc

SEQ ID NO: 1256532 - DNA, 15 bp, Homo sapiens
gggagaggagggtag

SEQ ID NO: 1256533 - DNA, 15 bp, Homo sapiens
ggggagaggagggta

SEQ ID NO: 1256534 - DNA, 15 bp, Homo sapiens
gggggagaggagggt

SEQ ID NO: 1256535 - DNA, 15 bp, Homo sapiens
cgggggagaggaggg

SEQ ID NO: 1256536 - DNA, 15 bp, Homo sapiens
tcgggggagaggagg

SEQ ID NO: 1256537 - DNA, 15 bp, Homo sapiens
ttcgggggagaggag

SEQ ID NO: 1256538 - DNA, 15 bp, Homo sapiens
cttcgggggagagga

SEQ ID NO: 1256539 - DNA, 15 bp, Homo sapiens
tcttcgggggagagg

SEQ ID NO: 1256540 - DNA, 15 bp, Homo sapiens
ctcttcgggggagag

SEQ ID NO: 1256541 - DNA, 15 bp, Homo sapiens
cctcttcgggggaga

SEQ ID NO: 1256542 - DNA, 15 bp, Homo sapiens
gcctcttcgggggag

SEQ ID NO: 1256543 - DNA, 15 bp, Homo sapiens
cgcctcttcggggga

SEQ ID NO: 1256544 - DNA, 15 bp, Homo sapiens
ccgcctcttcggggg

SEQ ID NO: 1256545 - DNA, 15 bp, Homo sapiens
cccgcctcttcgggg

SEQ ID NO: 1256546 - DNA, 15 bp, Homo sapiens
ccccgcctcttcggg

SEQ ID NO: 1256547 - DNA, 15 bp, Homo sapiens
gccccgcctcttcgg

SEQ ID NO: 1256548 - DNA, 15 bp, Homo sapiens
agccccgcctcttcg

SEQ ID NO: 1256549 - DNA, 15 bp, Homo sapiens
aagccccgcctcttc

SEQ ID NO: 1256550 - DNA, 15 bp, Homo sapiens
gaagccccgcctctt

SEQ ID NO: 1256551 - DNA, 15 bp, Homo sapiens
cgaagccccgcctct

SEQ ID NO: 1256552 - DNA, 15 bp, Homo sapiens
tcgaagccccgcctc

SEQ ID NO: 1256553 - DNA, 15 bp, Homo sapiens
ttcgaagccccgcct

SEQ ID NO: 1256554 - DNA, 15 bp, Homo sapiens
gttcgaagccccgcc

SEQ ID NO: 1256555 - DNA, 15 bp, Homo sapiens
cgttcgaagccccgc

SEQ ID NO: 1256556 - DNA, 15 bp, Homo sapiens
tcgttcgaagccccg

SEQ ID NO: 1256557 - DNA, 15 bp, Homo sapiens
ttcgttcgaagcccc

SEQ ID NO: 1256558 - DNA, 15 bp, Homo sapiens
gttcgttcgaagccc

SEQ ID NO: 1256559 - DNA, 15 bp, Homo sapiens
ggttcgttcgaagcc

SEQ ID NO: 1256560 - DNA, 15 bp, Homo sapiens
aggttcgttcgaagc

SEQ ID NO: 1256561 - DNA, 15 bp, Homo sapiens
caggttcgttcgaag

SEQ ID NO: 1256562 - DNA, 15 bp, Homo sapiens
ccaggttcgttcgaa

SEQ ID NO: 1256563 - DNA, 15 bp, Homo sapiens
tccaggttcgttcga

SEQ ID NO: 1256564 - DNA, 15 bp, Homo sapiens
ttccaggttcgttcg

SEQ ID NO: 1256565 - DNA, 15 bp, Homo sapiens
tttccaggttcgttc

SEQ ID NO: 1256566 - DNA, 15 bp, Homo sapiens
atttccaggttcgtt

SEQ ID NO: 1256567 - DNA, 15 bp, Homo sapiens
catttccaggttcgt

SEQ ID NO: 1256568 - DNA, 15 bp, Homo sapiens
ccatttccaggttcg

SEQ ID NO: 1256569 - DNA, 15 bp, Homo sapiens
gccatttccaggttc

SEQ ID NO: 1256570 - DNA, 15 bp, Homo sapiens
ggccatttccaggtt

SEQ ID NO: 1256571 - DNA, 15 bp, Homo sapiens
cggccatttccaggt

SEQ ID NO: 1256572 - DNA, 15 bp, Homo sapiens
tcggccatttccagg

SEQ ID NO: 1256573 - DNA, 15 bp, Homo sapiens
ctcggccatttccag

SEQ ID NO: 1256574 - DNA, 15 bp, Homo sapiens
cctcggccatttcca

SEQ ID NO: 1256575 - DNA, 15 bp, Homo sapiens
ccctcggccatttcc

SEQ ID NO: 1256576 - DNA, 15 bp, Homo sapiens
cccctcggccatttc

SEQ ID NO: 1256577 - DNA, 15 bp, Homo sapiens
acccctcggccattt

SEQ ID NO: 1256578 - DNA, 15 bp, Homo sapiens
gacccctcggccatt

SEQ ID NO: 1256579 - DNA, 15 bp, Homo sapiens
agacccctcggccat

SEQ ID NO: 1256580 - DNA, 15 bp, Homo sapiens
gagacccctcggcca

SEQ ID NO: 1256581 - DNA, 15 bp, Homo sapiens
cgagacccctcggcc

SEQ ID NO: 1256582 - DNA, 15 bp, Homo sapiens
tcgagacccctcggc

SEQ ID NO: 1256583 - DNA, 15 bp, Homo sapiens
gtcgagacccctcgg

SEQ ID NO: 1256584 - DNA, 15 bp, Homo sapiens
agtcgagacccctcg

SEQ ID NO: 1256585 - DNA, 15 bp, Homo sapiens
aagtcgagacccctc

SEQ ID NO: 1256586 - DNA, 15 bp, Homo sapiens
gaagtcgagacccct

SEQ ID NO: 1256587 - DNA, 15 bp, Homo sapiens
ggaagtcgagacccc

SEQ ID NO: 1256588 - DNA, 15 bp, Homo sapiens
aggaagtcgagaccc

SEQ ID NO: 1256589 - DNA, 15 bp, Homo sapiens
gaggaagtcgagacc

SEQ ID NO: 1256590 - DNA, 15 bp, Homo sapiens
tgaggaagtcgagac

SEQ ID NO: 1256591 - DNA, 15 bp, Homo sapiens
gtgaggaagtcgaga

SEQ ID NO: 1256592 - DNA, 15 bp, Homo sapiens
ggtgaggaagtcgag

SEQ ID NO: 1256593 - DNA, 15 bp, Homo sapiens
gggtgaggaagtcga

SEQ ID NO: 1256594 - DNA, 15 bp, Homo sapiens
ggggtgaggaagtcg

SEQ ID NO: 1256595 - DNA, 15 bp, Homo sapiens
tggggtgaggaagtc

SEQ ID NO: 1256596 - DNA, 15 bp, Homo sapiens
ctggggtgaggaagt

SEQ ID NO: 1256597 - DNA, 15 bp, Homo sapiens
cctggggtgaggaag

SEQ ID NO: 1256598 - DNA, 15 bp, Homo sapiens
gcctggggtgaggaa

SEQ ID NO: 1256599 - DNA, 15 bp, Homo sapiens
tgcctggggtgagga

SEQ ID NO: 1256600 - DNA, 15 bp, Homo sapiens
atgcctggggtgagg

SEQ ID NO: 1256601 - DNA, 15 bp, Homo sapiens
gatgcctggggtgag

SEQ ID NO: 1256602 - DNA, 15 bp, Homo sapiens
tgatgcctggggtga

SEQ ID NO: 1256603 - DNA, 15 bp, Homo sapiens
ctgatgcctggggtg

SEQ ID NO: 1256604 - DNA, 15 bp, Homo sapiens
cctgatgcctggggt

SEQ ID NO: 1256605 - DNA, 15 bp, Homo sapiens
tcctgatgcctgggg

SEQ ID NO: 1256606 - DNA, 15 bp, Homo sapiens
ttcctgatgcctggg

SEQ ID NO: 1256607 - DNA, 15 bp, Homo sapiens
tttcctgatgcctgg

SEQ ID NO: 1256608 - DNA, 15 bp, Homo sapiens
ctttcctgatgcctg

SEQ ID NO: 1256609 - DNA, 15 bp, Homo sapiens
cctttcctgatgcct

SEQ ID NO: 1256610 - DNA, 15 bp, Homo sapiens
acctttcctgatgcc

SEQ ID NO: 1256611 - DNA, 15 bp, Homo sapiens
cacctttcctgatgc

SEQ ID NO: 1256612 - DNA, 15 bp, Homo sapiens
gcacctttcctgatg

SEQ ID NO: 1256613 - DNA, 15 bp, Homo sapiens
ggcacctttcctgat

SEQ ID NO: 1256614 - DNA, 15 bp, Homo sapiens
aggcacctttcctga

SEQ ID NO: 1256615 - DNA, 15 bp, Homo sapiens
caggcacctttcctg

SEQ ID NO: 1256616 - DNA, 15 bp, Homo sapiens
gcaggcacctttcct

SEQ ID NO: 1256617 - DNA, 15 bp, Homo sapiens
tgcaggcacctttcc

SEQ ID NO: 1256618 - DNA, 15 bp, Homo sapiens
ctgcaggcacctttc

SEQ ID NO: 1256619 - DNA, 15 bp, Homo sapiens
cctgcaggcaccttt

SEQ ID NO: 1256620 - DNA, 15 bp, Homo sapiens
tcctgcaggcacctt

SEQ ID NO: 1256621 - DNA, 15 bp, Homo sapiens
gtcctgcaggcacct

SEQ ID NO: 1256622 - DNA, 15 bp, Homo sapiens
tgtcctgcaggcacc

SEQ ID NO: 1256623 - DNA, 15 bp, Homo sapiens
ctgtcctgcaggcac

SEQ ID NO: 1256624 - DNA, 15 bp, Homo sapiens
cctgtcctgcaggca

SEQ ID NO: 1256625 - DNA, 15 bp, Homo sapiens
ccctgtcctgcaggc

SEQ ID NO: 1256626 - DNA, 15 bp, Homo sapiens
gccctgtcctgcagg

SEQ ID NO: 1256627 - DNA, 15 bp, Homo sapiens
agccctgtcctgcag

SEQ ID NO: 1256628 - DNA, 15 bp, Homo sapiens
gagccctgtcctgca

SEQ ID NO: 1256629 - DNA, 15 bp, Homo sapiens
agagccctgtcctgc

SEQ ID NO: 1256630 - DNA, 15 bp, Homo sapiens
cagagccctgtcctg

SEQ ID NO: 1256631 - DNA, 15 bp, Homo sapiens
tcagagccctgtcct

SEQ ID NO: 1256632 - DNA, 15 bp, Homo sapiens
ttcagagccctgtcc

SEQ ID NO: 1256633 - DNA, 15 bp, Homo sapiens
cttcagagccctgtc

SEQ ID NO: 1256634 - DNA, 15 bp, Homo sapiens
acttcagagccctgt

SEQ ID NO: 1256635 - DNA, 15 bp, Homo sapiens
cacttcagagccctg

SEQ ID NO: 1256636 - DNA, 15 bp, Homo sapiens
ccacttcagagccct

SEQ ID NO: 1256637 - DNA, 15 bp, Homo sapiens
tccacttcagagccc

SEQ ID NO: 1256638 - DNA, 15 bp, Homo sapiens
ttccacttcagagcc

SEQ ID NO: 1256639 - DNA, 15 bp, Homo sapiens
cttccacttcagagc

SEQ ID NO: 1256640 - DNA, 15 bp, Homo sapiens
acttccacttcagag

SEQ ID NO: 1256641 - DNA, 15 bp, Homo sapiens
cacttccacttcaga

SEQ ID NO: 1256642 - DNA, 15 bp, Homo sapiens
ccacttccacttcag

SEQ ID NO: 1256643 - DNA, 15 bp, Homo sapiens
cccacttccacttca

SEQ ID NO: 1256644 - DNA, 15 bp, Homo sapiens
gcccacttccacttc

SEQ ID NO: 1256645 - DNA, 15 bp, Homo sapiens
cgcccacttccactt

SEQ ID NO: 1256646 - DNA, 15 bp, Homo sapiens
ccgcccacttccact

SEQ ID NO: 1256647 - DNA, 15 bp, Homo sapiens
accgcccacttccac

SEQ ID NO: 1256648 - DNA, 15 bp, Homo sapiens
caccgcccacttcca

SEQ ID NO: 1256649 - DNA, 15 bp, Homo sapiens
ccaccgcccacttcc

SEQ ID NO: 1256650 - DNA, 15 bp, Homo sapiens
accaccgcccacttc

SEQ ID NO: 1256651 - DNA, 15 bp, Homo sapiens
caccaccgcccactt

SEQ ID NO: 1256652 - DNA, 15 bp, Homo sapiens
tcaccaccgcccact

SEQ ID NO: 1256653 - DNA, 15 bp, Homo sapiens
atcaccaccgcccac

SEQ ID NO: 1256654 - DNA, 15 bp, Homo sapiens
catcaccaccgccca

SEQ ID NO: 1256655 - DNA, 15 bp, Homo sapiens
gcatcaccaccgccc

SEQ ID NO: 1256656 - DNA, 15 bp, Homo sapiens
ggcatcaccaccgcc

SEQ ID NO: 1256657 - DNA, 15 bp, Homo sapiens
cggcatcaccaccgc

SEQ ID NO: 1256658 - DNA, 15 bp, Homo sapiens
tcggcatcaccaccg

SEQ ID NO: 1256659 - DNA, 15 bp, Homo sapiens
ttcggcatcaccacc

SEQ ID NO: 1256660 - DNA, 15 bp, Homo sapiens
gttcggcatcaccac

SEQ ID NO: 1256661 - DNA, 15 bp, Homo sapiens
agttcggcatcacca

SEQ ID NO: 1256662 - DNA, 15 bp, Homo sapiens
cagttcggcatcacc

SEQ ID NO: 1256663 - DNA, 15 bp, Homo sapiens
tcagttcggcatcac

SEQ ID NO: 1256664 - DNA, 15 bp, Homo sapiens
gtcagttcggcatca

SEQ ID NO: 1256665 - DNA, 15 bp, Homo sapiens
tgtcagttcggcatc

SEQ ID NO: 1256666 - DNA, 15 bp, Homo sapiens
ttgtcagttcggcat

SEQ ID NO: 1256667 - DNA, 15 bp, Homo sapiens
cttgtcagttcggca

SEQ ID NO: 1256668 - DNA, 15 bp, Homo sapiens
tcttgtcagttcggc

SEQ ID NO: 1256669 - DNA, 15 bp, Homo sapiens
ttcttgtcagttcgg

SEQ ID NO: 1256670 - DNA, 15 bp, Homo sapiens
attcttgtcagttcg

SEQ ID NO: 1256671 - DNA, 15 bp, Homo sapiens
cattcttgtcagttc

SEQ ID NO: 1256672 - DNA, 15 bp, Homo sapiens
tcattcttgtcagtt

SEQ ID NO: 1256673 - DNA, 15 bp, Homo sapiens
ctcattcttgtcagt

SEQ ID NO: 1256674 - DNA, 15 bp, Homo sapiens
gctcattcttgtcag

SEQ ID NO: 1256675 - DNA, 15 bp, Homo sapiens
agctcattcttgtca

SEQ ID NO: 1256676 - DNA, 15 bp, Homo sapiens
cagctcattcttgtc

SEQ ID NO: 1256677 - DNA, 15 bp, Homo sapiens
tcagctcattcttgt

SEQ ID NO: 1256678 - DNA, 15 bp, Homo sapiens
ttcagctcattcttg

SEQ ID NO: 1256679 - DNA, 15 bp, Homo sapiens
cttcagctcattctt

SEQ ID NO: 1256680 - DNA, 15 bp, Homo sapiens
tcttcagctcattct

SEQ ID NO: 1256681 - DNA, 15 bp, Homo sapiens
ctcttcagctcattc

SEQ ID NO: 1256682 - DNA, 15 bp, Homo sapiens
tctcttcagctcatt

SEQ ID NO: 1256683 - DNA, 15 bp, Homo sapiens
ttctcttcagctcat

SEQ ID NO: 1256684 - DNA, 15 bp, Homo sapiens
cttctcttcagctca

SEQ ID NO: 1256685 - DNA, 15 bp, Homo sapiens
tcttctcttcagctc

SEQ ID NO: 1256686 - DNA, 15 bp, Homo sapiens
ttcttctcttcagct

SEQ ID NO: 1256687 - DNA, 15 bp, Homo sapiens
tttcttctcttcagc

SEQ ID NO: 1256688 - DNA, 15 bp, Homo sapiens
ctttcttctcttcag

SEQ ID NO: 1256689 - DNA, 15 bp, Homo sapiens
actttcttctcttca

SEQ ID NO: 1256690 - DNA, 15 bp, Homo sapiens
tactttcttctcttc

SEQ ID NO: 1256691 - DNA, 15 bp, Homo sapiens
ctactttcttctctt

SEQ ID NO: 1256692 - DNA, 15 bp, Homo sapiens
gctactttcttctct

SEQ ID NO: 1256693 - DNA, 15 bp, Homo sapiens
ggctactttcttctc

SEQ ID NO: 1256694 - DNA, 15 bp, Homo sapiens
cggctactttcttct

SEQ ID NO: 1256695 - DNA, 15 bp, Homo sapiens
tcggctactttcttc

SEQ ID NO: 1256696 - DNA, 15 bp, Homo sapiens
ctcggctactttctt

SEQ ID NO: 1256697 - DNA, 15 bp, Homo sapiens
tctcggctactttct

SEQ ID NO: 1256698 - DNA, 15 bp, Homo sapiens
ttctcggctactttc

SEQ ID NO: 1256699 - DNA, 15 bp, Homo sapiens
cttctcggctacttt

SEQ ID NO: 1256700 - DNA, 15 bp, Homo sapiens
ccttctcggctactt

SEQ ID NO: 1256701 - DNA, 15 bp, Homo sapiens
cccttctcggctact

SEQ ID NO: 1256702 - DNA, 15 bp, Homo sapiens
ccccttctcggctac

SEQ ID NO: 1256703 - DNA, 15 bp, Homo sapiens
cccccttctcggcta

SEQ ID NO: 1256704 - DNA, 15 bp, Homo sapiens
gcccccttctcggct

SEQ ID NO: 1256705 - DNA, 15 bp, Homo sapiens
ggcccccttctcggc

SEQ ID NO: 1256706 - DNA, 15 bp, Homo sapiens
tggcccccttctcgg

SEQ ID NO: 1256707 - DNA, 15 bp, Homo sapiens
ttggcccccttctcg

SEQ ID NO: 1256708 - DNA, 15 bp, Homo sapiens
cttggcccccttctc

SEQ ID NO: 1256709 - DNA, 15 bp, Homo sapiens
gcttggcccccttct

SEQ ID NO: 1256710 - DNA, 15 bp, Homo sapiens
ggcttggcccccttc

SEQ ID NO: 1256711 - DNA, 15 bp, Homo sapiens
cggcttggccccctt

SEQ ID NO: 1256712 - DNA, 15 bp, Homo sapiens
ccggcttggccccct

SEQ ID NO: 1256713 - DNA, 15 bp, Homo sapiens
tccggcttggccccc

SEQ ID NO: 1256714 - DNA, 15 bp, Homo sapiens
ctccggcttggcccc

SEQ ID NO: 1256715 - DNA, 15 bp, Homo sapiens
gctccggcttggccc

SEQ ID NO: 1256716 - DNA, 15 bp, Homo sapiens
agctccggcttggcc

SEQ ID NO: 1256717 - DNA, 15 bp, Homo sapiens
gagctccggcttggc

SEQ ID NO: 1256718 - DNA, 15 bp, Homo sapiens
tgagctccggcttgg

SEQ ID NO: 1256719 - DNA, 15 bp, Homo sapiens
ctgagctccggcttg

SEQ ID NO: 1256720 - DNA, 15 bp, Homo sapiens
actgagctccggctt

SEQ ID NO: 1256721 - DNA, 15 bp, Homo sapiens
cactgagctccggct

SEQ ID NO: 1256722 - DNA, 15 bp, Homo sapiens
tcactgagctccggc

SEQ ID NO: 1256723 - DNA, 15 bp, Homo sapiens
ctcactgagctccgg

SEQ ID NO: 1256724 - DNA, 15 bp, Homo sapiens
gctcactgagctccg

SEQ ID NO: 1256725 - DNA, 15 bp, Homo sapiens
tgctcactgagctcc

SEQ ID NO: 1256726 - DNA, 15 bp, Homo sapiens
ttgctcactgagctc

SEQ ID NO: 1256727 - DNA, 15 bp, Homo sapiens
gttgctcactgagct

SEQ ID NO: 1256728 - DNA, 15 bp, Homo sapiens
tgttgctcactgagc

SEQ ID NO: 1256729 - DNA, 15 bp, Homo sapiens
ctgttgctcactgag

SEQ ID NO: 1256730 - DNA, 15 bp, Homo sapiens
gctgttgctcactga

SEQ ID NO: 1256731 - DNA, 15 bp, Homo sapiens
agctgttgctcactg

SEQ ID NO: 1256732 - DNA, 15 bp, Homo sapiens
tagctgttgctcact

SEQ ID NO: 1256733 - DNA, 15 bp, Homo sapiens
ctagctgttgctcac

SEQ ID NO: 1256734 - DNA, 15 bp, Homo sapiens
cctagctgttgctca

SEQ ID NO: 1256735 - DNA, 15 bp, Homo sapiens
gcctagctgttgctc

SEQ ID NO: 1256736 - DNA, 15 bp, Homo sapiens
ggcctagctgttgct

SEQ ID NO: 1256737 - DNA, 15 bp, Homo sapiens
tggcctagctgttgc

SEQ ID NO: 1256738 - DNA, 15 bp, Homo sapiens
ctggcctagctgttg

SEQ ID NO: 1256739 - DNA, 15 bp, Homo sapiens
gctggcctagctgtt

SEQ ID NO: 1256740 - DNA, 15 bp, Homo sapiens
aaatctaattgcctt

SEQ ID NO: 1256741 - DNA, 15 bp, Homo sapiens
taaatctaattgcct

SEQ ID NO: 1256742 - DNA, 15 bp, Homo sapiens
ataaatctaattgcc

SEQ ID NO: 1256743 - DNA, 15 bp, Homo sapiens
aataaatctaattgc

SEQ ID NO: 1256744 - DNA, 15 bp, Homo sapiens
aaataaatctaattg

SEQ ID NO: 1256745 - DNA, 15 bp, Homo sapiens
aaaataaatctaatt

SEQ ID NO: 1256746 - DNA, 15 bp, Homo sapiens
taaaataaatctaat

SEQ ID NO: 1256747 - DNA, 15 bp, Homo sapiens
ttaaaataaatctaa

SEQ ID NO: 1256748 - DNA, 15 bp, Homo sapiens
tttaaaataaatcta

SEQ ID NO: 1256749 - DNA, 15 bp, Homo sapiens
gtttaaaataaatct

SEQ ID NO: 1256750 - DNA, 15 bp, Homo sapiens
agtttaaaataaatc

SEQ ID NO: 1256751 - DNA, 15 bp, Homo sapiens
aagtttaaaataaat

SEQ ID NO: 1256752 - DNA, 15 bp, Homo sapiens
aaagtttaaaataaa

SEQ ID NO: 1256753 - DNA, 15 bp, Homo sapiens
aaaagtttaaaataa

SEQ ID NO: 1256754 - DNA, 15 bp, Homo sapiens
taaaagtttaaaata

SEQ ID NO: 1256755 - DNA, 15 bp, Homo sapiens
ttaaaagtttaaaat

SEQ ID NO: 1256756 - DNA, 15 bp, Homo sapiens
tttaaaagtttaaaa

SEQ ID NO: 1256757 - DNA, 15 bp, Homo sapiens
ttttaaaagtttaaa

SEQ ID NO: 1256758 - DNA, 15 bp, Homo sapiens
cttttaaaagtttaa

SEQ ID NO: 1256759 - DNA, 15 bp, Homo sapiens
tcttttaaaagttta

SEQ ID NO: 1256760 - DNA, 15 bp, Homo sapiens
atcttttaaaagttt

SEQ ID NO: 1256761 - DNA, 15 bp, Homo sapiens
gatcttttaaaagtt

SEQ ID NO: 1256762 - DNA, 15 bp, Homo sapiens
tgatcttttaaaagt

SEQ ID NO: 1256763 - DNA, 15 bp, Homo sapiens
ttgatcttttaaaag

SEQ ID NO: 1256764 - DNA, 15 bp, Homo sapiens
attgatcttttaaaa

SEQ ID NO: 1256765 - DNA, 15 bp, Homo sapiens
tattgatcttttaaa

SEQ ID NO: 1256766 - DNA, 15 bp, Homo sapiens
atattgatcttttaa

SEQ ID NO: 1256767 - DNA, 15 bp, Homo sapiens
aatattgatctttta

SEQ ID NO: 1256768 - DNA, 15 bp, Homo sapiens
taatattgatctttt

SEQ ID NO: 1256769 - DNA, 15 bp, Homo sapiens
ttaatattgatcttt

SEQ ID NO: 1256770 - DNA, 15 bp, Homo sapiens
attaatattgatctt

SEQ ID NO: 1256771 - DNA, 15 bp, Homo sapiens
cattaatattgatct

SEQ ID NO: 1256772 - DNA, 15 bp, Homo sapiens
ccattaatattgatc

SEQ ID NO: 1256773 - DNA, 15 bp, Homo sapiens
gccattaatattgat

SEQ ID NO: 1256774 - DNA, 15 bp, Homo sapiens
tgccattaatattga

SEQ ID NO: 1256775 - DNA, 15 bp, Homo sapiens
atgccattaatattg

SEQ ID NO: 1256776 - DNA, 15 bp, Homo sapiens
aatgccattaatatt

SEQ ID NO: 1256777 - DNA, 15 bp, Homo sapiens
taatgccattaatat

SEQ ID NO: 1256778 - DNA, 15 bp, Homo sapiens
ctaatgccattaata

SEQ ID NO: 1256779 - DNA, 15 bp, Homo sapiens
cctaatgccattaat

SEQ ID NO: 1256780 - DNA, 15 bp, Homo sapiens
ccctaatgccattaa

SEQ ID NO: 1256781 - DNA, 15 bp, Homo sapiens
gccctaatgccatta

SEQ ID NO: 1256782 - DNA, 15 bp, Homo sapiens
ggccctaatgccatt

SEQ ID NO: 1256783 - DNA, 15 bp, Homo sapiens
tggccctaatgccat

SEQ ID NO: 1256784 - DNA, 15 bp, Homo sapiens
ctggccctaatgcca

SEQ ID NO: 1256785 - DNA, 15 bp, Homo sapiens
gctggccctaatgcc

SEQ ID NO: 1256786 - DNA, 15 bp, Homo sapiens
agctggccctaatgc

SEQ ID NO: 1256787 - DNA, 15 bp, Homo sapiens
gagctggccctaatg

SEQ ID NO: 1256788 - DNA, 15 bp, Homo sapiens
ggagctggccctaat

SEQ ID NO: 1256789 - DNA, 15 bp, Homo sapiens
aggagctggccctaa

SEQ ID NO: 1256790 - DNA, 15 bp, Homo sapiens
aaggagctggcccta

SEQ ID NO: 1256791 - DNA, 15 bp, Homo sapiens
aaaggagctggccct

SEQ ID NO: 1256792 - DNA, 15 bp, Homo sapiens
taaaggagctggccc

SEQ ID NO: 1256793 - DNA, 15 bp, Homo sapiens
ataaaggagctggcc

SEQ ID NO: 1256794 - DNA, 15 bp, Homo sapiens
gataaaggagctggc

SEQ ID NO: 1256795 - DNA, 15 bp, Homo sapiens
agataaaggagctgg

SEQ ID NO: 1256796 - DNA, 15 bp, Homo sapiens
cagataaaggagctg

SEQ ID NO: 1256797 - DNA, 15 bp, Homo sapiens
tcagataaaggagct

SEQ ID NO: 1256798 - DNA, 15 bp, Homo sapiens
atcagataaaggagc

SEQ ID NO: 1256799 - DNA, 15 bp, Homo sapiens
catcagataaaggag

SEQ ID NO: 1256800 - DNA, 15 bp, Homo sapiens
acatcagataaagga

SEQ ID NO: 1256801 - DNA, 15 bp, Homo sapiens
gacatcagataaagg

SEQ ID NO: 1256802 - DNA, 15 bp, Homo sapiens
agacatcagataaag

SEQ ID NO: 1256803 - DNA, 15 bp, Homo sapiens
aagacatcagataaa

SEQ ID NO: 1256804 - DNA, 15 bp, Homo sapiens
aaagacatcagataa

SEQ ID NO: 1256805 - DNA, 15 bp, Homo sapiens
taaagacatcagata

SEQ ID NO: 1256806 - DNA, 15 bp, Homo sapiens
ttaaagacatcagat

SEQ ID NO: 1256807 - DNA, 15 bp, Homo sapiens
tttaaagacatcaga

SEQ ID NO: 1256808 - DNA, 15 bp, Homo sapiens
ctttaaagacatcag

SEQ ID NO: 1256809 - DNA, 15 bp, Homo sapiens
actttaaagacatca

SEQ ID NO: 1256810 - DNA, 15 bp, Homo sapiens
aactttaaagacatc

SEQ ID NO: 1256811 - DNA, 15 bp, Homo sapiens
gaactttaaagacat

SEQ ID NO: 1256812 - DNA, 15 bp, Homo sapiens
tgaactttaaagaca

SEQ ID NO: 1256813 - DNA, 15 bp, Homo sapiens
atgaactttaaagac

SEQ ID NO: 1256814 - DNA, 15 bp, Homo sapiens
aatgaactttaaaga

SEQ ID NO: 1256815 - DNA, 15 bp, Homo sapiens
gaatgaactttaaag

SEQ ID NO: 1256816 - DNA, 15 bp, Homo sapiens
agaatgaactttaaa

SEQ ID NO: 1256817 - DNA, 15 bp, Homo sapiens
cagaatgaactttaa

SEQ ID NO: 1256818 - DNA, 15 bp, Homo sapiens
ccagaatgaacttta

SEQ ID NO: 1256819 - DNA, 15 bp, Homo sapiens
gccagaatgaacttt

SEQ ID NO: 1256820 - DNA, 15 bp, Homo sapiens
ggccagaatgaactt

SEQ ID NO: 1256821 - DNA, 15 bp, Homo sapiens
tggccagaatgaact

SEQ ID NO: 1256822 - DNA, 15 bp, Homo sapiens
atggccagaatgaac

SEQ ID NO: 1256823 - DNA, 15 bp, Homo sapiens
tatggccagaatgaa

SEQ ID NO: 1256824 - DNA, 15 bp, Homo sapiens
ctatggccagaatga

SEQ ID NO: 1256825 - DNA, 15 bp, Homo sapiens
actatggccagaatg

SEQ ID NO: 1256826 - DNA, 15 bp, Homo sapiens
gactatggccagaat

SEQ ID NO: 1256827 - DNA, 15 bp, Homo sapiens
tgactatggccagaa

SEQ ID NO: 1256828 - DNA, 15 bp, Homo sapiens
ttgactatggccaga

SEQ ID NO: 1256829 - DNA, 15 bp, Homo sapiens
gttgactatggccag

SEQ ID NO: 1256830 - DNA, 15 bp, Homo sapiens
ggttgactatggcca

SEQ ID NO: 1256831 - DNA, 15 bp, Homo sapiens
gggttgactatggcc

SEQ ID NO: 1256832 - DNA, 15 bp, Homo sapiens
agggttgactatggc

SEQ ID NO: 1256833 - DNA, 15 bp, Homo sapiens
aagggttgactatgg

SEQ ID NO: 1256834 - DNA, 15 bp, Homo sapiens
caagggttgactatg

SEQ ID NO: 1256835 - DNA, 15 bp, Homo sapiens
acaagggttgactat

SEQ ID NO: 1256836 - DNA, 15 bp, Homo sapiens
tacaagggttgacta

SEQ ID NO: 1256837 - DNA, 15 bp, Homo sapiens
ttacaagggttgact

SEQ ID NO: 1256838 - DNA, 15 bp, Homo sapiens
attacaagggttgac

SEQ ID NO: 1256839 - DNA, 15 bp, Homo sapiens
cattacaagggttga

SEQ ID NO: 1256840 - DNA, 15 bp, Homo sapiens
tcattacaagggttg

SEQ ID NO: 1256841 - DNA, 15 bp, Homo sapiens
ttcattacaagggtt

SEQ ID NO: 1256842 - DNA, 15 bp, Homo sapiens
attcattacaagggt

SEQ ID NO: 1256843 - DNA, 15 bp, Homo sapiens
aattcattacaaggg

SEQ ID NO: 1256844 - DNA, 15 bp, Homo sapiens
aaattcattacaagg

SEQ ID NO: 1256845 - DNA, 15 bp, Homo sapiens
aaaattcattacaag

SEQ ID NO: 1256846 - DNA, 15 bp, Homo sapiens
taaaattcattacaa

SEQ ID NO: 1256847 - DNA, 15 bp, Homo sapiens
ttaaaattcattaca

SEQ ID NO: 1256848 - DNA, 15 bp, Homo sapiens
gttaaaattcattac

SEQ ID NO: 1256849 - DNA, 15 bp, Homo sapiens
ggttaaaattcatta

SEQ ID NO: 1256850 - DNA, 15 bp, Homo sapiens
aggttaaaattcatt

SEQ ID NO: 1256851 - DNA, 15 bp, Homo sapiens
caggttaaaattcat

SEQ ID NO: 1256852 - DNA, 15 bp, Homo sapiens
tcaggttaaaattca

SEQ ID NO: 1256853 - DNA, 15 bp, Homo sapiens
gtcaggttaaaattc

SEQ ID NO: 1256854 - DNA, 15 bp, Homo sapiens
tgtcaggttaaaatt

SEQ ID NO: 1256855 - DNA, 15 bp, Homo sapiens
gtgtcaggttaaaat

SEQ ID NO: 1256856 - DNA, 15 bp, Homo sapiens
tgtgtcaggttaaaa

SEQ ID NO: 1256857 - DNA, 15 bp, Homo sapiens
atgtgtcaggttaaa

SEQ ID NO: 1256858 - DNA, 15 bp, Homo sapiens
catgtgtcaggttaa

SEQ ID NO: 1256859 - DNA, 15 bp, Homo sapiens
acatgtgtcaggtta

SEQ ID NO: 1256860 - DNA, 15 bp, Homo sapiens
aacatgtgtcaggtt

SEQ ID NO: 1256861 - DNA, 15 bp, Homo sapiens
caacatgtgtcaggt

SEQ ID NO: 1256862 - DNA, 15 bp, Homo sapiens
gcaacatgtgtcagg

SEQ ID NO: 1256863 - DNA, 15 bp, Homo sapiens
agcaacatgtgtcag

SEQ ID NO: 1256864 - DNA, 15 bp, Homo sapiens
tagcaacatgtgtca

SEQ ID NO: 1256865 - DNA, 15 bp, Homo sapiens
gtagcaacatgtgtc

SEQ ID NO: 1256866 - DNA, 15 bp, Homo sapiens
agtagcaacatgtgt

SEQ ID NO: 1256867 - DNA, 15 bp, Homo sapiens
aagtagcaacatgtg

SEQ ID NO: 1256868 - DNA, 15 bp, Homo sapiens
gaagtagcaacatgt

SEQ ID NO: 1256869 - DNA, 15 bp, Homo sapiens
tgaagtagcaacatg

SEQ ID NO: 1256870 - DNA, 15 bp, Homo sapiens
atgaagtagcaacat

SEQ ID NO: 1256871 - DNA, 15 bp, Homo sapiens
gatgaagtagcaaca

SEQ ID NO: 1256872 - DNA, 15 bp, Homo sapiens
agatgaagtagcaac

SEQ ID NO: 1256873 - DNA, 15 bp, Homo sapiens
tagatgaagtagcaa

SEQ ID NO: 1256874 - DNA, 15 bp, Homo sapiens
ctagatgaagtagca

SEQ ID NO: 1256875 - DNA, 15 bp, Homo sapiens
actagatgaagtagc

SEQ ID NO: 1256876 - DNA, 15 bp, Homo sapiens
gactagatgaagtag

SEQ ID NO: 1256877 - DNA, 15 bp, Homo sapiens
agactagatgaagta

SEQ ID NO: 1256878 - DNA, 15 bp, Homo sapiens
aagactagatgaagt

SEQ ID NO: 1256879 - DNA, 15 bp, Homo sapiens
aaagactagatgaag

SEQ ID NO: 1256880 - DNA, 15 bp, Homo sapiens
caaagactagatgaa

SEQ ID NO: 1256881 - DNA, 15 bp, Homo sapiens
acaaagactagatga

SEQ ID NO: 1256882 - DNA, 15 bp, Homo sapiens
tacaaagactagatg

SEQ ID NO: 1256883 - DNA, 15 bp, Homo sapiens
ttacaaagactagat

SEQ ID NO: 1256884 - DNA, 15 bp, Homo sapiens
gttacaaagactaga

SEQ ID NO: 1256885 - DNA, 15 bp, Homo sapiens
ggttacaaagactag

SEQ ID NO: 1256886 - DNA, 15 bp, Homo sapiens
aggttacaaagacta

SEQ ID NO: 1256887 - DNA, 15 bp, Homo sapiens
caggttacaaagact

SEQ ID NO: 1256888 - DNA, 15 bp, Homo sapiens
ccaggttacaaagac

SEQ ID NO: 1256889 - DNA, 15 bp, Homo sapiens
accaggttacaaaga

SEQ ID NO: 1256890 - DNA, 15 bp, Homo sapiens
aaccaggttacaaag

SEQ ID NO: 1256891 - DNA, 15 bp, Homo sapiens
taaccaggttacaaa

SEQ ID NO: 1256892 - DNA, 15 bp, Homo sapiens
ataaccaggttacaa

SEQ ID NO: 1256893 - DNA, 15 bp, Homo sapiens
aataaccaggttaca

SEQ ID NO: 1256894 - DNA, 15 bp, Homo sapiens
aaataaccaggttac

SEQ ID NO: 1256895 - DNA, 15 bp, Homo sapiens
taaataaccaggtta

SEQ ID NO: 1256896 - DNA, 15 bp, Homo sapiens
ataaataaccaggtt

SEQ ID NO: 1256897 - DNA, 15 bp, Homo sapiens
aataaataaccaggt

SEQ ID NO: 1256898 - DNA, 15 bp, Homo sapiens
aaataaataaccagg

SEQ ID NO: 1256899 - DNA, 15 bp, Homo sapiens
taaataaataaccag

SEQ ID NO: 1256900 - DNA, 15 bp, Homo sapiens
ataaataaataacca

SEQ ID NO: 1256901 - DNA, 15 bp, Homo sapiens
aataaataaataacc

SEQ ID NO: 1256902 - DNA, 15 bp, Homo sapiens
aaataaataaataac

SEQ ID NO: 1256903 - DNA, 15 bp, Homo sapiens
acaagagcaaaactc

SEQ ID NO: 1256904 - DNA, 15 bp, Homo sapiens
aacaagagcaaaact

SEQ ID NO: 1256905 - DNA, 15 bp, Homo sapiens
caacaagagcaaaac

SEQ ID NO: 1256906 - DNA, 15 bp, Homo sapiens
gcaacaagagcaaaa

SEQ ID NO: 1256907 - DNA, 15 bp, Homo sapiens
ggcaacaagagcaaa

SEQ ID NO: 1256908 - DNA, 15 bp, Homo sapiens
gggcaacaagagcaa

SEQ ID NO: 1256909 - DNA, 15 bp, Homo sapiens
tgggcaacaagagca

SEQ ID NO: 1256910 - DNA, 15 bp, Homo sapiens
gccattgcactccag

SEQ ID NO: 1256911 - DNA, 15 bp, Homo sapiens
cgccattgcactcca

SEQ ID NO: 1256912 - DNA, 15 bp, Homo sapiens
gcgccattgcactcc

SEQ ID NO: 1256913 - DNA, 15 bp, Homo sapiens
cgcgccattgcactc

SEQ ID NO: 1256914 - DNA, 15 bp, Homo sapiens
tcgcgccattgcact

SEQ ID NO: 1256915 - DNA, 15 bp, Homo sapiens
atcgcgccattgcac

SEQ ID NO: 1256916 - DNA, 15 bp, Homo sapiens
gatcgcgccattgca

SEQ ID NO: 1256917 - DNA, 15 bp, Homo sapiens
agatcgcgccattgc

SEQ ID NO: 1256918 - DNA, 15 bp, Homo sapiens
gagatcgcgccattg

SEQ ID NO: 1256919 - DNA, 15 bp, Homo sapiens
cgagatcgcgccatt

SEQ ID NO: 1256920 - DNA, 15 bp, Homo sapiens
acgagatcgcgccat

SEQ ID NO: 1256921 - DNA, 15 bp, Homo sapiens
gacgagatcgcgcca

SEQ ID NO: 1256922 - DNA, 15 bp, Homo sapiens
agacgagatcgcgcc

SEQ ID NO: 1256923 - DNA, 15 bp, Homo sapiens
gagacgagatcgcgc

SEQ ID NO: 1256924 - DNA, 15 bp, Homo sapiens
tgagacgagatcgcg

SEQ ID NO: 1256925 - DNA, 15 bp, Homo sapiens
gtgagacgagatcgc

SEQ ID NO: 1256926 - DNA, 15 bp, Homo sapiens
ggtgagacgagatcg

SEQ ID NO: 1256927 - DNA, 15 bp, Homo sapiens
cggtgagacgagatc

SEQ ID NO: 1256928 - DNA, 15 bp, Homo sapiens
gcggtgagacgagat

SEQ ID NO: 1256929 - DNA, 15 bp, Homo sapiens
tgcggtgagacgaga

SEQ ID NO: 1256930 - DNA, 15 bp, Homo sapiens
ttgcggtgagacgag

SEQ ID NO: 1256931 - DNA, 15 bp, Homo sapiens
gttgcggtgagacga

SEQ ID NO: 1256932 - DNA, 15 bp, Homo sapiens
ggttgcggtgagacg

SEQ ID NO: 1256933 - DNA, 15 bp, Homo sapiens
aggttgcggtgagac

SEQ ID NO: 1256934 - DNA, 15 bp, Homo sapiens
gaggttgcggtgaga

SEQ ID NO: 1256935 - DNA, 15 bp, Homo sapiens
cgcttgaacctggga

SEQ ID NO: 1256936 - DNA, 15 bp, Homo sapiens
tcgcttgaacctggg

SEQ ID NO: 1256937 - DNA, 15 bp, Homo sapiens
atcgcttgaacctgg

SEQ ID NO: 1256938 - DNA, 15 bp, Homo sapiens
aatcgcttgaacctg

SEQ ID NO: 1256939 - DNA, 15 bp, Homo sapiens
gaatcgcttgaacct

SEQ ID NO: 1256940 - DNA, 15 bp, Homo sapiens
aaggctgaggcagga

SEQ ID NO: 1256941 - DNA, 15 bp, Homo sapiens
gggaaggctgaggca

SEQ ID NO: 1256942 - DNA, 15 bp, Homo sapiens
tgggaaggctgaggc

SEQ ID NO: 1256943 - DNA, 15 bp, Homo sapiens
ttgggaaggctgagg

SEQ ID NO: 1256944 - DNA, 15 bp, Homo sapiens
cttgggaaggctgag

SEQ ID NO: 1256945 - DNA, 15 bp, Homo sapiens
acttgggaaggctga

SEQ ID NO: 1256946 - DNA, 15 bp, Homo sapiens
tacttgggaaggctg

SEQ ID NO: 1256947 - DNA, 15 bp, Homo sapiens
ctacttgggaaggct

SEQ ID NO: 1256948 - DNA, 15 bp, Homo sapiens
gctacttgggaaggc

SEQ ID NO: 1256949 - DNA, 15 bp, Homo sapiens
agctacttgggaagg

SEQ ID NO: 1256950 - DNA, 15 bp, Homo sapiens
cagctacttgggaag

SEQ ID NO: 1256951 - DNA, 15 bp, Homo sapiens
ccagctacttgggaa

SEQ ID NO: 1256952 - DNA, 15 bp, Homo sapiens
gcatgcctataatcc

SEQ ID NO: 1256953 - DNA, 15 bp, Homo sapiens
cgcatgcctataatc

SEQ ID NO: 1256954 - DNA, 15 bp, Homo sapiens
gcgcatgcctataat

SEQ ID NO: 1256955 - DNA, 15 bp, Homo sapiens
ggcgcatgcctataa

SEQ ID NO: 1256956 - DNA, 15 bp, Homo sapiens
tggcgcatgcctata

SEQ ID NO: 1256957 - DNA, 15 bp, Homo sapiens
gtggcgcatgcctat

SEQ ID NO: 1256958 - DNA, 15 bp, Homo sapiens
ggtggcgcatgccta

SEQ ID NO: 1256959 - DNA, 15 bp, Homo sapiens
ttggtggcgcatgcc

SEQ ID NO: 1256960 - DNA, 15 bp, Homo sapiens
cttggtggcgcatgc

SEQ ID NO: 1256961 - DNA, 15 bp, Homo sapiens
gcttggtggcgcatg

SEQ ID NO: 1256962 - DNA, 15 bp, Homo sapiens
ggcttggtggcgcat

SEQ ID NO: 1256963 - DNA, 15 bp, Homo sapiens
aggcttggtggcgca

SEQ ID NO: 1256964 - DNA, 15 bp, Homo sapiens
caggcttggtggcgc

SEQ ID NO: 1256965 - DNA, 15 bp, Homo sapiens
ccaggcttggtggcg

SEQ ID NO: 1256966 - DNA, 15 bp, Homo sapiens
gccaggcttggtggc

SEQ ID NO: 1256967 - DNA, 15 bp, Homo sapiens
agccaggcttggtgg

SEQ ID NO: 1256968 - DNA, 15 bp, Homo sapiens
tagccaggcttggtg

SEQ ID NO: 1256969 - DNA, 15 bp, Homo sapiens
ttagccaggcttggt

SEQ ID NO: 1256970 - DNA, 15 bp, Homo sapiens
attagccaggcttgg

SEQ ID NO: 1256971 - DNA, 15 bp, Homo sapiens
aattagccaggcttg

SEQ ID NO: 1256972 - DNA, 15 bp, Homo sapiens
aaattagccaggctt

SEQ ID NO: 1256973 - DNA, 15 bp, Homo sapiens
aaaattagccaggct

SEQ ID NO: 1256974 - DNA, 15 bp, Homo sapiens
caaaattagccaggc

SEQ ID NO: 1256975 - DNA, 15 bp, Homo sapiens
acaaaattagccagg

SEQ ID NO: 1256976 - DNA, 15 bp, Homo sapiens
cacaaaattagccag

SEQ ID NO: 1256977 - DNA, 15 bp, Homo sapiens
acacaaaattagcca

SEQ ID NO: 1256978 - DNA, 15 bp, Homo sapiens
aacacaaaattagcc

SEQ ID NO: 1256979 - DNA, 15 bp, Homo sapiens
aaacacaaaattagc

SEQ ID NO: 1256980 - DNA, 15 bp, Homo sapiens
aaaacacaaaattag

SEQ ID NO: 1256981 - DNA, 15 bp, Homo sapiens
aaaaacacaaaatta

SEQ ID NO: 1256982 - DNA, 15 bp, Homo sapiens
taaaaacacaaaatt

SEQ ID NO: 1256983 - DNA, 15 bp, Homo sapiens
ttaaaaacacaaaat

SEQ ID NO: 1256984 - DNA, 15 bp, Homo sapiens
attaaaaacacaaaa

SEQ ID NO: 1256985 - DNA, 15 bp, Homo sapiens
tattaaaaacacaaa

SEQ ID NO: 1256986 - DNA, 15 bp, Homo sapiens
ctattaaaaacacaa

SEQ ID NO: 1256987 - DNA, 15 bp, Homo sapiens
tctattaaaaacaca

SEQ ID NO: 1256988 - DNA, 15 bp, Homo sapiens
ctctattaaaaacac

SEQ ID NO: 1256989 - DNA, 15 bp, Homo sapiens
tctctattaaaaaca

SEQ ID NO: 1256990 - DNA, 15 bp, Homo sapiens
atctctattaaaaac

SEQ ID NO: 1256991 - DNA, 15 bp, Homo sapiens
catctctattaaaaa

SEQ ID NO: 1256992 - DNA, 15 bp, Homo sapiens
ccatctctattaaaa

SEQ ID NO: 1256993 - DNA, 15 bp, Homo sapiens
cccatctctattaaa

SEQ ID NO: 1256994 - DNA, 15 bp, Homo sapiens
ccccatctctattaa

SEQ ID NO: 1256995 - DNA, 15 bp, Homo sapiens
accccatctctatta

SEQ ID NO: 1256996 - DNA, 15 bp, Homo sapiens
aaccccatctctatt

SEQ ID NO: 1256997 - DNA, 15 bp, Homo sapiens
aaaccccatctctat

SEQ ID NO: 1256998 - DNA, 15 bp, Homo sapiens
cggagaaaccccatc

SEQ ID NO: 1256999 - DNA, 15 bp, Homo sapiens
acggagaaaccccat

SEQ ID NO: 1257000 - DNA, 15 bp, Homo sapiens
cacggagaaacccca

SEQ ID NO: 1257001 - DNA, 15 bp, Homo sapiens
acacggagaaacccc

SEQ ID NO: 1257002 - DNA, 15 bp, Homo sapiens
cacacggagaaaccc

SEQ ID NO: 1257003 - DNA, 15 bp, Homo sapiens
ccacacggagaaacc

SEQ ID NO: 1257004 - DNA, 15 bp, Homo sapiens
cccacacggagaaac

SEQ ID NO: 1257005 - DNA, 15 bp, Homo sapiens
acccacacggagaaa

SEQ ID NO: 1257006 - DNA, 15 bp, Homo sapiens
gacccacacggagaa

SEQ ID NO: 1257007 - DNA, 15 bp, Homo sapiens
tgacccacacggaga

SEQ ID NO: 1257008 - DNA, 15 bp, Homo sapiens
ctgacccacacggag

SEQ ID NO: 1257009 - DNA, 15 bp, Homo sapiens
cctgacccacacgga

SEQ ID NO: 1257010 - DNA, 15 bp, Homo sapiens
gcctgacccacacgg

SEQ ID NO: 1257011 - DNA, 15 bp, Homo sapiens
agcctgacccacacg

SEQ ID NO: 1257012 - DNA, 15 bp, Homo sapiens
cagcctgacccacac

SEQ ID NO: 1257013 - DNA, 15 bp, Homo sapiens
ccagcctgacccaca

SEQ ID NO: 1257014 - DNA, 15 bp, Homo sapiens
accagcctgacccac

SEQ ID NO: 1257015 - DNA, 15 bp, Homo sapiens
gaccagcctgaccca

SEQ ID NO: 1257016 - DNA, 15 bp, Homo sapiens
agaccagcctgaccc

SEQ ID NO: 1257017 - DNA, 15 bp, Homo sapiens
cgaggtgggcggatc

SEQ ID NO: 1257018 - DNA, 15 bp, Homo sapiens
ccgaggtgggcggat

SEQ ID NO: 1257019 - DNA, 15 bp, Homo sapiens
gccgaggtgggcgga

SEQ ID NO: 1257020 - DNA, 15 bp, Homo sapiens
ggccgaggtgggcgg

SEQ ID NO: 1257021 - DNA, 15 bp, Homo sapiens
aggccgaggtgggcg

SEQ ID NO: 1257022 - DNA, 15 bp, Homo sapiens
gtggcttacgcctgt

SEQ ID NO: 1257023 - DNA, 15 bp, Homo sapiens
ggtggcttacgcctg

SEQ ID NO: 1257024 - DNA, 15 bp, Homo sapiens
cggtggcttacgcct

SEQ ID NO: 1257025 - DNA, 15 bp, Homo sapiens
gcggtggcttacgcc

SEQ ID NO: 1257026 - DNA, 15 bp, Homo sapiens
agcggtggcttacgc

SEQ ID NO: 1257027 - DNA, 15 bp, Homo sapiens
gagcggtggcttacg

SEQ ID NO: 1257028 - DNA, 15 bp, Homo sapiens
ggagcggtggcttac

SEQ ID NO: 1257029 - DNA, 15 bp, Homo sapiens
gggagcggtggctta

SEQ ID NO: 1257030 - DNA, 15 bp, Homo sapiens
cgggagcggtggctt

SEQ ID NO: 1257031 - DNA, 15 bp, Homo sapiens
aggccgggagcggtg

SEQ ID NO: 1257032 - DNA, 15 bp, Homo sapiens
caggccgggagcggt

SEQ ID NO: 1257033 - DNA, 15 bp, Homo sapiens
ccaggccgggagcgg

SEQ ID NO: 1257034 - DNA, 15 bp, Homo sapiens
accaggccgggagcg

SEQ ID NO: 1257035 - DNA, 15 bp, Homo sapiens
aaccaggccgggagc

SEQ ID NO: 1257036 - DNA, 15 bp, Homo sapiens
taaccaggccgggag

SEQ ID NO: 1257037 - DNA, 15 bp, Homo sapiens
ataaccaggccggga

SEQ ID NO: 1257038 - DNA, 15 bp, Homo sapiens
aataaccaggccggg

SEQ ID NO: 1257039 - DNA, 15 bp, Homo sapiens
aaataaccaggccgg

SEQ ID NO: 1257040 - DNA, 15 bp, Homo sapiens
caaataaccaggccg

SEQ ID NO: 1257041 - DNA, 15 bp, Homo sapiens
acaaataaccaggcc

SEQ ID NO: 1257042 - DNA, 15 bp, Homo sapiens
aacaaataaccaggc

SEQ ID NO: 1257043 - DNA, 15 bp, Homo sapiens
aaacaaataaccagg

SEQ ID NO: 1257044 - DNA, 15 bp, Homo sapiens
aaaacaaataaccag

SEQ ID NO: 1257045 - DNA, 15 bp, Homo sapiens
taaaacaaataacca

SEQ ID NO: 1257046 - DNA, 15 bp, Homo sapiens
ataaaacaaataacc

SEQ ID NO: 1257047 - DNA, 15 bp, Homo sapiens
gataaaacaaataac

SEQ ID NO: 1257048 - DNA, 15 bp, Homo sapiens
agataaaacaaataa

SEQ ID NO: 1257049 - DNA, 15 bp, Homo sapiens
cagataaaacaaata

SEQ ID NO: 1257050 - DNA, 15 bp, Homo sapiens
gcagataaaacaaat

SEQ ID NO: 1257051 - DNA, 15 bp, Homo sapiens
tgcagataaaacaaa

SEQ ID NO: 1257052 - DNA, 15 bp, Homo sapiens
ttgcagataaaacaa

SEQ ID NO: 1257053 - DNA, 15 bp, Homo sapiens
attgcagataaaaca

SEQ ID NO: 1257054 - DNA, 15 bp, Homo sapiens
aattgcagataaaac

SEQ ID NO: 1257055 - DNA, 15 bp, Homo sapiens
taattgcagataaaa

SEQ ID NO: 1257056 - DNA, 15 bp, Homo sapiens
ataattgcagataaa

SEQ ID NO: 1257057 - DNA, 15 bp, Homo sapiens
aataattgcagataa

SEQ ID NO: 1257058 - DNA, 15 bp, Homo sapiens
gaataattgcagata

SEQ ID NO: 1257059 - DNA, 15 bp, Homo sapiens
agaataattgcagat

SEQ ID NO: 1257060 - DNA, 15 bp, Homo sapiens
aagaataattgcaga

SEQ ID NO: 1257061 - DNA, 15 bp, Homo sapiens
aaagaataattgcag

SEQ ID NO: 1257062 - DNA, 15 bp, Homo sapiens
gaaagaataattgca

SEQ ID NO: 1257063 - DNA, 15 bp, Homo sapiens
agaaagaataattgc

SEQ ID NO: 1257064 - DNA, 15 bp, Homo sapiens
gagaaagaataattg

SEQ ID NO: 1257065 - DNA, 15 bp, Homo sapiens
cgagaaagaataatt

SEQ ID NO: 1257066 - DNA, 15 bp, Homo sapiens
acgagaaagaataat

SEQ ID NO: 1257067 - DNA, 15 bp, Homo sapiens
cacgagaaagaataa

SEQ ID NO: 1257068 - DNA, 15 bp, Homo sapiens
tcacgagaaagaata

SEQ ID NO: 1257069 - DNA, 15 bp, Homo sapiens
ttcacgagaaagaat

SEQ ID NO: 1257070 - DNA, 15 bp, Homo sapiens
attcacgagaaagaa

SEQ ID NO: 1257071 - DNA, 15 bp, Homo sapiens
gattcacgagaaaga

SEQ ID NO: 1257072 - DNA, 15 bp, Homo sapiens
ggattcacgagaaag

SEQ ID NO: 1257073 - DNA, 15 bp, Homo sapiens
gggattcacgagaaa

SEQ ID NO: 1257074 - DNA, 15 bp, Homo sapiens
ggggattcacgagaa

SEQ ID NO: 1257075 - DNA, 15 bp, Homo sapiens
aggggattcacgaga

SEQ ID NO: 1257076 - DNA, 15 bp, Homo sapiens
aaggggattcacgag

SEQ ID NO: 1257077 - DNA, 15 bp, Homo sapiens
caaggggattcacga

SEQ ID NO: 1257078 - DNA, 15 bp, Homo sapiens
ccaaggggattcacg

SEQ ID NO: 1257079 - DNA, 15 bp, Homo sapiens
gccaaggggattcac

SEQ ID NO: 1257080 - DNA, 15 bp, Homo sapiens
agccaaggggattca

SEQ ID NO: 1257081 - DNA, 15 bp, Homo sapiens
tagccaaggggattc

SEQ ID NO: 1257082 - DNA, 15 bp, Homo sapiens
ttagccaaggggatt

SEQ ID NO: 1257083 - DNA, 15 bp, Homo sapiens
attagccaaggggat

SEQ ID NO: 1257084 - DNA, 15 bp, Homo sapiens
gattagccaagggga

SEQ ID NO: 1257085 - DNA, 15 bp, Homo sapiens
tgattagccaagggg

SEQ ID NO: 1257086 - DNA, 15 bp, Homo sapiens
atgattagccaaggg

SEQ ID NO: 1257087 - DNA, 15 bp, Homo sapiens
catgattagccaagg

SEQ ID NO: 1257088 - DNA, 15 bp, Homo sapiens
gcatgattagccaag

SEQ ID NO: 1257089 - DNA, 15 bp, Homo sapiens
agcatgattagccaa

SEQ ID NO: 1257090 - DNA, 15 bp, Homo sapiens
gagcatgattagcca

SEQ ID NO: 1257091 - DNA, 15 bp, Homo sapiens
tgagcatgattagcc

SEQ ID NO: 1257092 - DNA, 15 bp, Homo sapiens
gtgagcatgattagc

SEQ ID NO: 1257093 - DNA, 15 bp, Homo sapiens
tgtgagcatgattag

SEQ ID NO: 1257094 - DNA, 15 bp, Homo sapiens
ttgtgagcatgatta

SEQ ID NO: 1257095 - DNA, 15 bp, Homo sapiens
tttgtgagcatgatt

SEQ ID NO: 1257096 - DNA, 15 bp, Homo sapiens
ctttgtgagcatgat

SEQ ID NO: 1257097 - DNA, 15 bp, Homo sapiens
actttgtgagcatga

SEQ ID NO: 1257098 - DNA, 15 bp, Homo sapiens
aactttgtgagcatg

SEQ ID NO: 1257099 - DNA, 15 bp, Homo sapiens
gaactttgtgagcat

SEQ ID NO: 1257100 - DNA, 15 bp, Homo sapiens
agaactttgtgagca

SEQ ID NO: 1257101 - DNA, 15 bp, Homo sapiens
cagaactttgtgagc

SEQ ID NO: 1257102 - DNA, 15 bp, Homo sapiens
tcagaactttgtgag

SEQ ID NO: 1257103 - DNA, 15 bp, Homo sapiens
gtcagaactttgtga

SEQ ID NO: 1257104 - DNA, 15 bp, Homo sapiens
tgtcagaactttgtg

SEQ ID NO: 1257105 - DNA, 15 bp, Homo sapiens
gtgtcagaactttgt

SEQ ID NO: 1257106 - DNA, 15 bp, Homo sapiens
tgtgtcagaactttg

SEQ ID NO: 1257107 - DNA, 15 bp, Homo sapiens
atgtgtcagaacttt

SEQ ID NO: 1257108 - DNA, 15 bp, Homo sapiens
tatgtgtcagaactt

SEQ ID NO: 1257109 - DNA, 15 bp, Homo sapiens
atatgtgtcagaact

SEQ ID NO: 1257110 - DNA, 15 bp, Homo sapiens
tatatgtgtcagaac

SEQ ID NO: 1257111 - DNA, 15 bp, Homo sapiens
gtatatgtgtcagaa

SEQ ID NO: 1257112 - DNA, 15 bp, Homo sapiens
ggtatatgtgtcaga

SEQ ID NO: 1257113 - DNA, 15 bp, Homo sapiens
tggtatatgtgtcag

SEQ ID NO: 1257114 - DNA, 15 bp, Homo sapiens
gtggtatatgtgtca

SEQ ID NO: 1257115 - DNA, 15 bp, Homo sapiens
ggtggtatatgtgtc

SEQ ID NO: 1257116 - DNA, 15 bp, Homo sapiens
aggtggtatatgtgt

SEQ ID NO: 1257117 - DNA, 15 bp, Homo sapiens
caggtggtatatgtg

SEQ ID NO: 1257118 - DNA, 15 bp, Homo sapiens
tcaggtggtatatgt

SEQ ID NO: 1257119 - DNA, 15 bp, Homo sapiens
ttcaggtggtatatg

SEQ ID NO: 1257120 - DNA, 15 bp, Homo sapiens
attcaggtggtatat

SEQ ID NO: 1257121 - DNA, 15 bp, Homo sapiens
tattcaggtggtata

SEQ ID NO: 1257122 - DNA, 15 bp, Homo sapiens
atattcaggtggtat

SEQ ID NO: 1257123 - DNA, 15 bp, Homo sapiens
aatattcaggtggta

SEQ ID NO: 1257124 - DNA, 15 bp, Homo sapiens
aaatattcaggtggt

SEQ ID NO: 1257125 - DNA, 15 bp, Homo sapiens
gaaatattcaggtgg

SEQ ID NO: 1257126 - DNA, 15 bp, Homo sapiens
agaaatattcaggtg

SEQ ID NO: 1257127 - DNA, 15 bp, Homo sapiens
tagaaatattcaggt

SEQ ID NO: 1257128 - DNA, 15 bp, Homo sapiens
ctagaaatattcagg

SEQ ID NO: 1257129 - DNA, 15 bp, Homo sapiens
tctagaaatattcag

SEQ ID NO: 1257130 - DNA, 15 bp, Homo sapiens
ttctagaaatattca

SEQ ID NO: 1257131 - DNA, 15 bp, Homo sapiens
attctagaaatattc

SEQ ID NO: 1257132 - DNA, 15 bp, Homo sapiens
gattctagaaatatt

SEQ ID NO: 1257133 - DNA, 15 bp, Homo sapiens
agattctagaaatat

SEQ ID NO: 1257134 - DNA, 15 bp, Homo sapiens
cagattctagaaata

SEQ ID NO: 1257135 - DNA, 15 bp, Homo sapiens
tcagattctagaaat

SEQ ID NO: 1257136 - DNA, 15 bp, Homo sapiens
ctcagattctagaaa

SEQ ID NO: 1257137 - DNA, 15 bp, Homo sapiens
actcagattctagaa

SEQ ID NO: 1257138 - DNA, 15 bp, Homo sapiens
gactcagattctaga

SEQ ID NO: 1257139 - DNA, 15 bp, Homo sapiens
tgactcagattctag

SEQ ID NO: 1257140 - DNA, 15 bp, Homo sapiens
atgactcagattcta

SEQ ID NO: 1257141 - DNA, 15 bp, Homo sapiens
gatgactcagattct

SEQ ID NO: 1257142 - DNA, 15 bp, Homo sapiens
agatgactcagattc

SEQ ID NO: 1257143 - DNA, 15 bp, Homo sapiens
aagatgactcagatt

SEQ ID NO: 1257144 - DNA, 15 bp, Homo sapiens
aaagatgactcagat

SEQ ID NO: 1257145 - DNA, 15 bp, Homo sapiens
gaaagatgactcaga

SEQ ID NO: 1257146 - DNA, 15 bp, Homo sapiens
tgaaagatgactcag

SEQ ID NO: 1257147 - DNA, 15 bp, Homo sapiens
gtgaaagatgactca

SEQ ID NO: 1257148 - DNA, 15 bp, Homo sapiens
agtgaaagatgactc

SEQ ID NO: 1257149 - DNA, 15 bp, Homo sapiens
aagtgaaagatgact

SEQ ID NO: 1257150 - DNA, 15 bp, Homo sapiens
taagtgaaagatgac

SEQ ID NO: 1257151 - DNA, 15 bp, Homo sapiens
ttaagtgaaagatga

SEQ ID NO: 1257152 - DNA, 15 bp, Homo sapiens
tttaagtgaaagatg

SEQ ID NO: 1257153 - DNA, 15 bp, Homo sapiens
atttaagtgaaagat

SEQ ID NO: 1257154 - DNA, 15 bp, Homo sapiens
aatttaagtgaaaga

SEQ ID NO: 1257155 - DNA, 15 bp, Homo sapiens
taatttaagtgaaag

SEQ ID NO: 1257156 - DNA, 15 bp, Homo sapiens
gtaatttaagtgaaa

SEQ ID NO: 1257157 - DNA, 15 bp, Homo sapiens
tgtaatttaagtgaa

SEQ ID NO: 1257158 - DNA, 15 bp, Homo sapiens
ttgtaatttaagtga

SEQ ID NO: 1257159 - DNA, 15 bp, Homo sapiens
attgtaatttaagtg

SEQ ID NO: 1257160 - DNA, 15 bp, Homo sapiens
tattgtaatttaagt

SEQ ID NO: 1257161 - DNA, 15 bp, Homo sapiens
ttattgtaatttaag

SEQ ID NO: 1257162 - DNA, 15 bp, Homo sapiens
gttattgtaatttaa

SEQ ID NO: 1257163 - DNA, 15 bp, Homo sapiens
ggttattgtaattta

SEQ ID NO: 1257164 - DNA, 15 bp, Homo sapiens
aggttattgtaattt

SEQ ID NO: 1257165 - DNA, 15 bp, Homo sapiens
gaggttattgtaatt

SEQ ID NO: 1257166 - DNA, 15 bp, Homo sapiens
agaggttattgtaat

SEQ ID NO: 1257167 - DNA, 15 bp, Homo sapiens
aagaggttattgtaa

SEQ ID NO: 1257168 - DNA, 15 bp, Homo sapiens
taagaggttattgta

SEQ ID NO: 1257169 - DNA, 15 bp, Homo sapiens
ttaagaggttattgt

SEQ ID NO: 1257170 - DNA, 15 bp, Homo sapiens
gttaagaggttattg

SEQ ID NO: 1257171 - DNA, 15 bp, Homo sapiens
agttaagaggttatt

SEQ ID NO: 1257172 - DNA, 15 bp, Homo sapiens
cagttaagaggttat

SEQ ID NO: 1257173 - DNA, 15 bp, Homo sapiens
ccagttaagaggtta

SEQ ID NO: 1257174 - DNA, 15 bp, Homo sapiens
gccagttaagaggtt

SEQ ID NO: 1257175 - DNA, 15 bp, Homo sapiens
ggccagttaagaggt

SEQ ID NO: 1257176 - DNA, 15 bp, Homo sapiens
aggccagttaagagg

SEQ ID NO: 1257177 - DNA, 15 bp, Homo sapiens
aaggccagttaagag

SEQ ID NO: 1257178 - DNA, 15 bp, Homo sapiens
gaaggccagttaaga

SEQ ID NO: 1257179 - DNA, 15 bp, Homo sapiens
agaaggccagttaag

SEQ ID NO: 1257180 - DNA, 15 bp, Homo sapiens
aagaaggccagttaa

SEQ ID NO: 1257181 - DNA, 15 bp, Homo sapiens
caagaaggccagtta

SEQ ID NO: 1257182 - DNA, 15 bp, Homo sapiens
gcaagaaggccagtt

SEQ ID NO: 1257183 - DNA, 15 bp, Homo sapiens
ggcaagaaggccagt

SEQ ID NO: 1257184 - DNA, 15 bp, Homo sapiens
aggcaagaaggccag

SEQ ID NO: 1257185 - DNA, 15 bp, Homo sapiens
gaggcaagaaggcca

SEQ ID NO: 1257186 - DNA, 15 bp, Homo sapiens
ggaggcaagaaggcc

SEQ ID NO: 1257187 - DNA, 15 bp, Homo sapiens
aggaggcaagaaggc

SEQ ID NO: 1257188 - DNA, 15 bp, Homo sapiens
taggaggcaagaagg

SEQ ID NO: 1257189 - DNA, 15 bp, Homo sapiens
ctaggaggcaagaag

SEQ ID NO: 1257190 - DNA, 15 bp, Homo sapiens
gctaggaggcaagaa

SEQ ID NO: 1257191 - DNA, 15 bp, Homo sapiens
agctaggaggcaaga

SEQ ID NO: 1257192 - DNA, 15 bp, Homo sapiens
aagctaggaggcaag

SEQ ID NO: 1257193 - DNA, 15 bp, Homo sapiens
caagctaggaggcaa

SEQ ID NO: 1257194 - DNA, 15 bp, Homo sapiens
acaagctaggaggca

SEQ ID NO: 1257195 - DNA, 15 bp, Homo sapiens
gacaagctaggaggc

SEQ ID NO: 1257196 - DNA, 15 bp, Homo sapiens
ggacaagctaggagg

SEQ ID NO: 1257197 - DNA, 15 bp, Homo sapiens
aggacaagctaggag

SEQ ID NO: 1257198 - DNA, 15 bp, Homo sapiens
caggacaagctagga

SEQ ID NO: 1257199 - DNA, 15 bp, Homo sapiens
gcaggacaagctagg

SEQ ID NO: 1257200 - DNA, 15 bp, Homo sapiens
agcaggacaagctag

SEQ ID NO: 1257201 - DNA, 15 bp, Homo sapiens
gagcaggacaagcta

SEQ ID NO: 1257202 - DNA, 15 bp, Homo sapiens
agagcaggacaagct

SEQ ID NO: 1257203 - DNA, 15 bp, Homo sapiens
cagagcaggacaagc

SEQ ID NO: 1257204 - DNA, 15 bp, Homo sapiens
tcagagcaggacaag

SEQ ID NO: 1257205 - DNA, 15 bp, Homo sapiens
atcagagcaggacaa

SEQ ID NO: 1257206 - DNA, 15 bp, Homo sapiens
gatcagagcaggaca

SEQ ID NO: 1257207 - DNA, 15 bp, Homo sapiens
ggatcagagcaggac

SEQ ID NO: 1257208 - DNA, 15 bp, Homo sapiens
tggatcagagcagga

SEQ ID NO: 1257209 - DNA, 15 bp, Homo sapiens
atggatcagagcagg

SEQ ID NO: 1257210 - DNA, 15 bp, Homo sapiens
aatggatcagagcag

SEQ ID NO: 1257211 - DNA, 15 bp, Homo sapiens
gaatggatcagagca

SEQ ID NO: 1257212 - DNA, 15 bp, Homo sapiens
tgaatggatcagagc

SEQ ID NO: 1257213 - DNA, 15 bp, Homo sapiens
atgaatggatcagag

SEQ ID NO: 1257214 - DNA, 15 bp, Homo sapiens
catgaatggatcaga

SEQ ID NO: 1257215 - DNA, 15 bp, Homo sapiens
gcatgaatggatcag

SEQ ID NO: 1257216 - DNA, 15 bp, Homo sapiens
ggcatgaatggatca

SEQ ID NO: 1257217 - DNA, 15 bp, Homo sapiens
tggcatgaatggatc

SEQ ID NO: 1257218 - DNA, 15 bp, Homo sapiens
ttggcatgaatggat

SEQ ID NO: 1257219 - DNA, 15 bp, Homo sapiens
tttggcatgaatgga

SEQ ID NO: 1257220 - DNA, 15 bp, Homo sapiens
ctttggcatgaatgg

SEQ ID NO: 1257221 - DNA, 15 bp, Homo sapiens
actttggcatgaatg

SEQ ID NO: 1257222 - DNA, 15 bp, Homo sapiens
cactttggcatgaat

SEQ ID NO: 1257223 - DNA, 15 bp, Homo sapiens
tcactttggcatgaa

SEQ ID NO: 1257224 - DNA, 15 bp, Homo sapiens
atcactttggcatga

SEQ ID NO: 1257225 - DNA, 15 bp, Homo sapiens
aatcactttggcatg

SEQ ID NO: 1257226 - DNA, 15 bp, Homo sapiens
aaatcactttggcat

SEQ ID NO: 1257227 - DNA, 15 bp, Homo sapiens
aaaatcactttggca

SEQ ID NO: 1257228 - DNA, 15 bp, Homo sapiens
aaaaatcactttggc

SEQ ID NO: 1257229 - DNA, 15 bp, Homo sapiens
gaaaaatcactttgg

SEQ ID NO: 1257230 - DNA, 15 bp, Homo sapiens
agaaaaatcactttg

SEQ ID NO: 1257231 - DNA, 15 bp, Homo sapiens
tagaaaaatcacttt

SEQ ID NO: 1257232 - DNA, 15 bp, Homo sapiens
ttagaaaaatcactt

SEQ ID NO: 1257233 - DNA, 15 bp, Homo sapiens
tttagaaaaatcact

SEQ ID NO: 1257234 - DNA, 15 bp, Homo sapiens
ttttagaaaaatcac

SEQ ID NO: 1257235 - DNA, 15 bp, Homo sapiens
attttagaaaaatca

SEQ ID NO: 1257236 - DNA, 15 bp, Homo sapiens
aattttagaaaaatc

SEQ ID NO: 1257237 - DNA, 15 bp, Homo sapiens
caattttagaaaaat

SEQ ID NO: 1257238 - DNA, 15 bp, Homo sapiens
tcaattttagaaaaa

SEQ ID NO: 1257239 - DNA, 15 bp, Homo sapiens
ttcaattttagaaaa

SEQ ID NO: 1257240 - DNA, 15 bp, Homo sapiens
attcaattttagaaa

SEQ ID NO: 1257241 - DNA, 15 bp, Homo sapiens
tattcaattttagaa

SEQ ID NO: 1257242 - DNA, 15 bp, Homo sapiens
ttattcaattttaga

SEQ ID NO: 1257243 - DNA, 15 bp, Homo sapiens
cttattcaattttag

SEQ ID NO: 1257244 - DNA, 15 bp, Homo sapiens
acttattcaatttta

SEQ ID NO: 1257245 - DNA, 15 bp, Homo sapiens
aacttattcaatttt

SEQ ID NO: 1257246 - DNA, 15 bp, Homo sapiens
aaacttattcaattt

SEQ ID NO: 1257247 - DNA, 15 bp, Homo sapiens
aaaacttattcaatt

SEQ ID NO: 1257248 - DNA, 15 bp, Homo sapiens
aaaaacttattcaat

SEQ ID NO: 1257249 - DNA, 15 bp, Homo sapiens
aaaaaacttattcaa

SEQ ID NO: 1257250 - DNA, 15 bp, Homo sapiens
gaaaaaacttattca

SEQ ID NO: 1257251 - DNA, 15 bp, Homo sapiens
ggaaaaaacttattc

SEQ ID NO: 1257252 - DNA, 15 bp, Homo sapiens
aggaaaaaacttatt

SEQ ID NO: 1257253 - DNA, 15 bp, Homo sapiens
aaggaaaaaacttat

SEQ ID NO: 1257254 - DNA, 15 bp, Homo sapiens
caaggaaaaaactta

SEQ ID NO: 1257255 - DNA, 15 bp, Homo sapiens
gcaaggaaaaaactt

SEQ ID NO: 1257256 - DNA, 15 bp, Homo sapiens
tgcaaggaaaaaact

SEQ ID NO: 1257257 - DNA, 15 bp, Homo sapiens
ttgcaaggaaaaaac

SEQ ID NO: 1257258 - DNA, 15 bp, Homo sapiens
tttgcaaggaaaaaa

SEQ ID NO: 1257259 - DNA, 15 bp, Homo sapiens
ttttgcaaggaaaaa

SEQ ID NO: 1257260 - DNA, 15 bp, Homo sapiens
tttttgcaaggaaaa

SEQ ID NO: 1257261 - DNA, 15 bp, Homo sapiens
ttttttgcaaggaaa

SEQ ID NO: 1257262 - DNA, 15 bp, Homo sapiens
gttttttgcaaggaa

SEQ ID NO: 1257263 - DNA, 15 bp, Homo sapiens
tgttttttgcaagga

SEQ ID NO: 1257264 - DNA, 15 bp, Homo sapiens
gtgttttttgcaagg

SEQ ID NO: 1257265 - DNA, 15 bp, Homo sapiens
agtgttttttgcaag

SEQ ID NO: 1257266 - DNA, 15 bp, Homo sapiens
aagtgttttttgcaa

SEQ ID NO: 1257267 - DNA, 15 bp, Homo sapiens
caagtgttttttgca

SEQ ID NO: 1257268 - DNA, 15 bp, Homo sapiens
tcaagtgttttttgc

SEQ ID NO: 1257269 - DNA, 15 bp, Homo sapiens
atcaagtgttttttg

SEQ ID NO: 1257270 - DNA, 15 bp, Homo sapiens
aatcaagtgtttttt

SEQ ID NO: 1257271 - DNA, 15 bp, Homo sapiens
caatcaagtgttttt

SEQ ID NO: 1257272 - DNA, 15 bp, Homo sapiens
tcaatcaagtgtttt

SEQ ID NO: 1257273 - DNA, 15 bp, Homo sapiens
atcaatcaagtgttt

SEQ ID NO: 1257274 - DNA, 15 bp, Homo sapiens
aatcaatcaagtgtt

SEQ ID NO: 1257275 - DNA, 15 bp, Homo sapiens
aaatcaatcaagtgt

SEQ ID NO: 1257276 - DNA, 15 bp, Homo sapiens
aaaatcaatcaagtg

SEQ ID NO: 1257277 - DNA, 15 bp, Homo sapiens
gaaaatcaatcaagt

SEQ ID NO: 1257278 - DNA, 15 bp, Homo sapiens
agaaaatcaatcaag

SEQ ID NO: 1257279 - DNA, 15 bp, Homo sapiens
cagaaaatcaatcaa

SEQ ID NO: 1257280 - DNA, 15 bp, Homo sapiens
acagaaaatcaatca

SEQ ID NO: 1257281 - DNA, 15 bp, Homo sapiens
aacagaaaatcaatc

SEQ ID NO: 1257282 - DNA, 15 bp, Homo sapiens
caacagaaaatcaat

SEQ ID NO: 1257283 - DNA, 15 bp, Homo sapiens
acaacagaaaatcaa

SEQ ID NO: 1257284 - DNA, 15 bp, Homo sapiens
gacaacagaaaatca

SEQ ID NO: 1257285 - DNA, 15 bp, Homo sapiens
agacaacagaaaatc

SEQ ID NO: 1257286 - DNA, 15 bp, Homo sapiens
aagacaacagaaaat

SEQ ID NO: 1257287 - DNA, 15 bp, Homo sapiens
aaagacaacagaaaa

SEQ ID NO: 1257288 - DNA, 15 bp, Homo sapiens
gaaagacaacagaaa

SEQ ID NO: 1257289 - DNA, 15 bp, Homo sapiens
ggaaagacaacagaa

SEQ ID NO: 1257290 - DNA, 15 bp, Homo sapiens
aggaaagacaacaga

SEQ ID NO: 1257291 - DNA, 15 bp, Homo sapiens
gaggaaagacaacag

SEQ ID NO: 1257292 - DNA, 15 bp, Homo sapiens
tgaggaaagacaaca

SEQ ID NO: 1257293 - DNA, 15 bp, Homo sapiens
gtgaggaaagacaac

SEQ ID NO: 1257294 - DNA, 15 bp, Homo sapiens
ggtgaggaaagacaa

SEQ ID NO: 1257295 - DNA, 15 bp, Homo sapiens
tggtgaggaaagaca

SEQ ID NO: 1257296 - DNA, 15 bp, Homo sapiens
atggtgaggaaagac

SEQ ID NO: 1257297 - DNA, 15 bp, Homo sapiens
aatggtgaggaaaga

SEQ ID NO: 1257298 - DNA, 15 bp, Homo sapiens
caatggtgaggaaag

SEQ ID NO: 1257299 - DNA, 15 bp, Homo sapiens
gcaatggtgaggaaa

SEQ ID NO: 1257300 - DNA, 15 bp, Homo sapiens
agcaatggtgaggaa

SEQ ID NO: 1257301 - DNA, 15 bp, Homo sapiens
cagcaatggtgagga

SEQ ID NO: 1257302 - DNA, 15 bp, Homo sapiens
acagcaatggtgagg

SEQ ID NO: 1257303 - DNA, 15 bp, Homo sapiens
cacagcaatggtgag

SEQ ID NO: 1257304 - DNA, 15 bp, Homo sapiens
tcacagcaatggtga

SEQ ID NO: 1257305 - DNA, 15 bp, Homo sapiens
ctcacagcaatggtg

SEQ ID NO: 1257306 - DNA, 15 bp, Homo sapiens
cctcacagcaatggt

SEQ ID NO: 1257307 - DNA, 15 bp, Homo sapiens
acctcacagcaatgg

SEQ ID NO: 1257308 - DNA, 15 bp, Homo sapiens
aacctcacagcaatg

SEQ ID NO: 1257309 - DNA, 15 bp, Homo sapiens
aaacctcacagcaat

SEQ ID NO: 1257310 - DNA, 15 bp, Homo sapiens
aaaacctcacagcaa

SEQ ID NO: 1257311 - DNA, 15 bp, Homo sapiens
caaaacctcacagca

SEQ ID NO: 1257312 - DNA, 15 bp, Homo sapiens
acaaaacctcacagc

SEQ ID NO: 1257313 - DNA, 15 bp, Homo sapiens
aacaaaacctcacag

SEQ ID NO: 1257314 - DNA, 15 bp, Homo sapiens
gaacaaaacctcaca

SEQ ID NO: 1257315 - DNA, 15 bp, Homo sapiens
agaacaaaacctcac

SEQ ID NO: 1257316 - DNA, 15 bp, Homo sapiens
cagaacaaaacctca

SEQ ID NO: 1257317 - DNA, 15 bp, Homo sapiens
acagaacaaaacctc

SEQ ID NO: 1257318 - DNA, 15 bp, Homo sapiens
aacagaacaaaacct

SEQ ID NO: 1257319 - DNA, 15 bp, Homo sapiens
caacagaacaaaacc

SEQ ID NO: 1257320 - DNA, 15 bp, Homo sapiens
acaacagaacaaaac

SEQ ID NO: 1257321 - DNA, 15 bp, Homo sapiens
tacaacagaacaaaa

SEQ ID NO: 1257322 - DNA, 15 bp, Homo sapiens
ctacaacagaacaaa

SEQ ID NO: 1257323 - DNA, 15 bp, Homo sapiens
gctacaacagaacaa

SEQ ID NO: 1257324 - DNA, 15 bp, Homo sapiens
ggctacaacagaaca

SEQ ID NO: 1257325 - DNA, 15 bp, Homo sapiens
aggctacaacagaac

SEQ ID NO: 1257326 - DNA, 15 bp, Homo sapiens
gaggctacaacagaa

SEQ ID NO: 1257327 - DNA, 15 bp, Homo sapiens
agaggctacaacaga

SEQ ID NO: 1257328 - DNA, 15 bp, Homo sapiens
aagaggctacaacag

SEQ ID NO: 1257329 - DNA, 15 bp, Homo sapiens
caagaggctacaaca

SEQ ID NO: 1257330 - DNA, 15 bp, Homo sapiens
gcaagaggctacaac

SEQ ID NO: 1257331 - DNA, 15 bp, Homo sapiens
agcaagaggctacaa

SEQ ID NO: 1257332 - DNA, 15 bp, Homo sapiens
tagcaagaggctaca

SEQ ID NO: 1257333 - DNA, 15 bp, Homo sapiens
gtagcaagaggctac

SEQ ID NO: 1257334 - DNA, 15 bp, Homo sapiens
tgtagcaagaggcta

SEQ ID NO: 1257335 - DNA, 15 bp, Homo sapiens
aatgtagcaagaggc

SEQ ID NO: 1257336 - DNA, 15 bp, Homo sapiens
aaatgtagcaagagg

SEQ ID NO: 1257337 - DNA, 15 bp, Homo sapiens
aaaatgtagcaagag

SEQ ID NO: 1257338 - DNA, 15 bp, Homo sapiens
aaaaatgtagcaaga

SEQ ID NO: 1257339 - DNA, 15 bp, Homo sapiens
aaaaaatgtagcaag

SEQ ID NO: 1257340 - DNA, 15 bp, Homo sapiens
caaaaaatgtagcaa

SEQ ID NO: 1257341 - DNA, 15 bp, Homo sapiens
ccaaaaaatgtagca

SEQ ID NO: 1257342 - DNA, 15 bp, Homo sapiens
gccaaaaaatgtagc

SEQ ID NO: 1257343 - DNA, 15 bp, Homo sapiens
tgccaaaaaatgtag

SEQ ID NO: 1257344 - DNA, 15 bp, Homo sapiens
atgccaaaaaatgta

SEQ ID NO: 1257345 - DNA, 15 bp, Homo sapiens
aatgccaaaaaatgt

SEQ ID NO: 1257346 - DNA, 15 bp, Homo sapiens
aaatgccaaaaaatg

SEQ ID NO: 1257347 - DNA, 15 bp, Homo sapiens
aaaatgccaaaaaat

SEQ ID NO: 1257348 - DNA, 15 bp, Homo sapiens
aaaaatgccaaaaaa

SEQ ID NO: 1257349 - DNA, 15 bp, Homo sapiens
aaaaaatgccaaaaa

SEQ ID NO: 1257350 - DNA, 15 bp, Homo sapiens
aagaaaaaaatgcca

SEQ ID NO: 1257351 - DNA, 15 bp, Homo sapiens
taagaaaaaaatgcc

SEQ ID NO: 1257352 - DNA, 15 bp, Homo sapiens
ataagaaaaaaatgc

SEQ ID NO: 1257353 - DNA, 15 bp, Homo sapiens
gataagaaaaaaatg

SEQ ID NO: 1257354 - DNA, 15 bp, Homo sapiens
agataagaaaaaaat

SEQ ID NO: 1257355 - DNA, 15 bp, Homo sapiens
aagataagaaaaaaa

SEQ ID NO: 1257356 - DNA, 15 bp, Homo sapiens
gaagataagaaaaaa

SEQ ID NO: 1257357 - DNA, 15 bp, Homo sapiens
ggaagataagaaaaa

SEQ ID NO: 1257358 - DNA, 15 bp, Homo sapiens
tggaagataagaaaa

SEQ ID NO: 1257359 - DNA, 15 bp, Homo sapiens
atggaagataagaaa

SEQ ID NO: 1257360 - DNA, 15 bp, Homo sapiens
gatggaagataagaa

SEQ ID NO: 1257361 - DNA, 15 bp, Homo sapiens
cgatggaagataaga

SEQ ID NO: 1257362 - DNA, 15 bp, Homo sapiens
gcgatggaagataag

SEQ ID NO: 1257363 - DNA, 15 bp, Homo sapiens
tgcgatggaagataa

SEQ ID NO: 1257364 - DNA, 15 bp, Homo sapiens
atgcgatggaagata

SEQ ID NO: 1257365 - DNA, 15 bp, Homo sapiens
aatgcgatggaagat

SEQ ID NO: 1257366 - DNA, 15 bp, Homo sapiens
aaatgcgatggaaga

SEQ ID NO: 1257367 - DNA, 15 bp, Homo sapiens
gaaatgcgatggaag

SEQ ID NO: 1257368 - DNA, 15 bp, Homo sapiens
ggaaatgcgatggaa

SEQ ID NO: 1257369 - DNA, 15 bp, Homo sapiens
aggaaatgcgatgga

SEQ ID NO: 1257370 - DNA, 15 bp, Homo sapiens
gaggaaatgcgatgg

SEQ ID NO: 1257371 - DNA, 15 bp, Homo sapiens
tgaggaaatgcgatg

SEQ ID NO: 1257372 - DNA, 15 bp, Homo sapiens
atgaggaaatgcgat

SEQ ID NO: 1257373 - DNA, 15 bp, Homo sapiens
tatgaggaaatgcga

SEQ ID NO: 1257374 - DNA, 15 bp, Homo sapiens
atatgaggaaatgcg

SEQ ID NO: 1257375 - DNA, 15 bp, Homo sapiens
tatatgaggaaatgc

SEQ ID NO: 1257376 - DNA, 15 bp, Homo sapiens
ctatatgaggaaatg

SEQ ID NO: 1257377 - DNA, 15 bp, Homo sapiens
cctatatgaggaaat

SEQ ID NO: 1257378 - DNA, 15 bp, Homo sapiens
ccctatatgaggaaa

SEQ ID NO: 1257379 - DNA, 15 bp, Homo sapiens
gccctatatgaggaa

SEQ ID NO: 1257380 - DNA, 15 bp, Homo sapiens
tgccctatatgagga

SEQ ID NO: 1257381 - DNA, 15 bp, Homo sapiens
ttgccctatatgagg

SEQ ID NO: 1257382 - DNA, 15 bp, Homo sapiens
attgccctatatgag

SEQ ID NO: 1257383 - DNA, 15 bp, Homo sapiens
aattgccctatatga

SEQ ID NO: 1257384 - DNA, 15 bp, Homo sapiens
aaattgccctatatg

SEQ ID NO: 1257385 - DNA, 15 bp, Homo sapiens
taaattgccctatat

SEQ ID NO: 1257386 - DNA, 15 bp, Homo sapiens
ctaaattgccctata

SEQ ID NO: 1257387 - DNA, 15 bp, Homo sapiens
actaaattgccctat

SEQ ID NO: 1257388 - DNA, 15 bp, Homo sapiens
tactaaattgcccta

SEQ ID NO: 1257389 - DNA, 15 bp, Homo sapiens
atactaaattgccct

SEQ ID NO: 1257390 - DNA, 15 bp, Homo sapiens
aatactaaattgccc

SEQ ID NO: 1257391 - DNA, 15 bp, Homo sapiens
aaatactaaattgcc

SEQ ID NO: 1257392 - DNA, 15 bp, Homo sapiens
aaaatactaaattgc

SEQ ID NO: 1257393 - DNA, 15 bp, Homo sapiens
taaaatactaaattg

SEQ ID NO: 1257394 - DNA, 15 bp, Homo sapiens
ctaaaatactaaatt

SEQ ID NO: 1257395 - DNA, 15 bp, Homo sapiens
actaaaatactaaat

SEQ ID NO: 1257396 - DNA, 15 bp, Homo sapiens
aactaaaatactaaa

SEQ ID NO: 1257397 - DNA, 15 bp, Homo sapiens
aaactaaaatactaa

SEQ ID NO: 1257398 - DNA, 15 bp, Homo sapiens
taaactaaaatacta

SEQ ID NO: 1257399 - DNA, 15 bp, Homo sapiens
ctaaactaaaatact

SEQ ID NO: 1257400 - DNA, 15 bp, Homo sapiens
actaaactaaaatac

SEQ ID NO: 1257401 - DNA, 15 bp, Homo sapiens
cactaaactaaaata

SEQ ID NO: 1257402 - DNA, 15 bp, Homo sapiens
gcactaaactaaaat

SEQ ID NO: 1257403 - DNA, 15 bp, Homo sapiens
tgcactaaactaaaa

SEQ ID NO: 1257404 - DNA, 15 bp, Homo sapiens
atgcactaaactaaa

SEQ ID NO: 1257405 - DNA, 15 bp, Homo sapiens
tatgcactaaactaa

SEQ ID NO: 1257406 - DNA, 15 bp, Homo sapiens
ctatgcactaaacta

SEQ ID NO: 1257407 - DNA, 15 bp, Homo sapiens
actatgcactaaact

SEQ ID NO: 1257408 - DNA, 15 bp, Homo sapiens
aactatgcactaaac

SEQ ID NO: 1257409 - DNA, 15 bp, Homo sapiens
aaactatgcactaaa

SEQ ID NO: 1257410 - DNA, 15 bp, Homo sapiens
taaactatgcactaa

SEQ ID NO: 1257411 - DNA, 15 bp, Homo sapiens
ctaaactatgcacta

SEQ ID NO: 1257412 - DNA, 15 bp, Homo sapiens
actaaactatgcact

SEQ ID NO: 1257413 - DNA, 15 bp, Homo sapiens
cactaaactatgcac

SEQ ID NO: 1257414 - DNA, 15 bp, Homo sapiens
gcactaaactatgca

SEQ ID NO: 1257415 - DNA, 15 bp, Homo sapiens
tgcactaaactatgc

SEQ ID NO: 1257416 - DNA, 15 bp, Homo sapiens
gtgcactaaactatg

SEQ ID NO: 1257417 - DNA, 15 bp, Homo sapiens
tgtgcactaaactat

SEQ ID NO: 1257418 - DNA, 15 bp, Homo sapiens
ctgtgcactaaacta

SEQ ID NO: 1257419 - DNA, 15 bp, Homo sapiens
actgtgcactaaact

SEQ ID NO: 1257420 - DNA, 15 bp, Homo sapiens
aactgtgcactaaac

SEQ ID NO: 1257421 - DNA, 15 bp, Homo sapiens
taactgtgcactaaa

SEQ ID NO: 1257422 - DNA, 15 bp, Homo sapiens
ttaactgtgcactaa

SEQ ID NO: 1257423 - DNA, 15 bp, Homo sapiens
attaactgtgcacta

SEQ ID NO: 1257424 - DNA, 15 bp, Homo sapiens
gattaactgtgcact

SEQ ID NO: 1257425 - DNA, 15 bp, Homo sapiens
agattaactgtgcac

SEQ ID NO: 1257426 - DNA, 15 bp, Homo sapiens
cagattaactgtgca

SEQ ID NO: 1257427 - DNA, 15 bp, Homo sapiens
tcagattaactgtgc

SEQ ID NO: 1257428 - DNA, 15 bp, Homo sapiens
ctcagattaactgtg

SEQ ID NO: 1257429 - DNA, 15 bp, Homo sapiens
tctcagattaactgt

SEQ ID NO: 1257430 - DNA, 15 bp, Homo sapiens
ttctcagattaactg

SEQ ID NO: 1257431 - DNA, 15 bp, Homo sapiens
tttctcagattaact

SEQ ID NO: 1257432 - DNA, 15 bp, Homo sapiens
gtttctcagattaac

SEQ ID NO: 1257433 - DNA, 15 bp, Homo sapiens
ggtttctcagattaa

SEQ ID NO: 1257434 - DNA, 15 bp, Homo sapiens
tggtttctcagatta

SEQ ID NO: 1257435 - DNA, 15 bp, Homo sapiens
gtggtttctcagatt

SEQ ID NO: 1257436 - DNA, 15 bp, Homo sapiens
agtggtttctcagat

SEQ ID NO: 1257437 - DNA, 15 bp, Homo sapiens
gagtggtttctcaga

SEQ ID NO: 1257438 - DNA, 15 bp, Homo sapiens
agagtggtttctcag

SEQ ID NO: 1257439 - DNA, 15 bp, Homo sapiens
cagagtggtttctca

SEQ ID NO: 1257440 - DNA, 15 bp, Homo sapiens
acagagtggtttctc

SEQ ID NO: 1257441 - DNA, 15 bp, Homo sapiens
gacagagtggtttct

SEQ ID NO: 1257442 - DNA, 15 bp, Homo sapiens
agacagagtggtttc

SEQ ID NO: 1257443 - DNA, 15 bp, Homo sapiens
gagacagagtggttt

SEQ ID NO: 1257444 - DNA, 15 bp, Homo sapiens
tgagacagagtggtt

SEQ ID NO: 1257445 - DNA, 15 bp, Homo sapiens
atgagacagagtggt

SEQ ID NO: 1257446 - DNA, 15 bp, Homo sapiens
aatgagacagagtgg

SEQ ID NO: 1257447 - DNA, 15 bp, Homo sapiens
aaatgagacagagtg

SEQ ID NO: 1257448 - DNA, 15 bp, Homo sapiens
gaaatgagacagagt

SEQ ID NO: 1257449 - DNA, 15 bp, Homo sapiens
ggaaatgagacagag

SEQ ID NO: 1257450 - DNA, 15 bp, Homo sapiens
aggaaatgagacaga

SEQ ID NO: 1257451 - DNA, 15 bp, Homo sapiens
aaggaaatgagacag

SEQ ID NO: 1257452 - DNA, 15 bp, Homo sapiens
caaggaaatgagaca

SEQ ID NO: 1257453 - DNA, 15 bp, Homo sapiens
gcaaggaaatgagac

SEQ ID NO: 1257454 - DNA, 15 bp, Homo sapiens
agcaaggaaatgaga

SEQ ID NO: 1257455 - DNA, 15 bp, Homo sapiens
cagcaaggaaatgag

SEQ ID NO: 1257456 - DNA, 15 bp, Homo sapiens
ccagcaaggaaatga

SEQ ID NO: 1257457 - DNA, 15 bp, Homo sapiens
tccagcaaggaaatg

SEQ ID NO: 1257458 - DNA, 15 bp, Homo sapiens
ctccagcaaggaaat

SEQ ID NO: 1257459 - DNA, 15 bp, Homo sapiens
gctccagcaaggaaa

SEQ ID NO: 1257460 - DNA, 15 bp, Homo sapiens
agctccagcaaggaa

SEQ ID NO: 1257461 - DNA, 15 bp, Homo sapiens
cagctccagcaagga

SEQ ID NO: 1257462 - DNA, 15 bp, Homo sapiens
ccagctccagcaagg

SEQ ID NO: 1257463 - DNA, 15 bp, Homo sapiens
tccagctccagcaag

SEQ ID NO: 1257464 - DNA, 15 bp, Homo sapiens
ctccagctccagcaa

SEQ ID NO: 1257465 - DNA, 15 bp, Homo sapiens
tctccagctccagca

SEQ ID NO: 1257466 - DNA, 15 bp, Homo sapiens
gtctccagctccagc

SEQ ID NO: 1257467 - DNA, 15 bp, Homo sapiens
ggtctccagctccag

SEQ ID NO: 1257468 - DNA, 15 bp, Homo sapiens
gggtctccagctcca

SEQ ID NO: 1257469 - DNA, 15 bp, Homo sapiens
tgggtctccagctcc

SEQ ID NO: 1257470 - DNA, 15 bp, Homo sapiens
ctgggtctccagctc

SEQ ID NO: 1257471 - DNA, 15 bp, Homo sapiens
cctgggtctccagct

SEQ ID NO: 1257472 - DNA, 15 bp, Homo sapiens
acctgggtctccagc

SEQ ID NO: 1257473 - DNA, 15 bp, Homo sapiens
cacctgggtctccag

SEQ ID NO: 1257474 - DNA, 15 bp, Homo sapiens
tcacctgggtctcca

SEQ ID NO: 1257475 - DNA, 15 bp, Homo sapiens
ttcacctgggtctcc

SEQ ID NO: 1257476 - DNA, 15 bp, Homo sapiens
cttcacctgggtctc

SEQ ID NO: 1257477 - DNA, 15 bp, Homo sapiens
tcttcacctgggtct

SEQ ID NO: 1257478 - DNA, 15 bp, Homo sapiens
atcttcacctgggtc

SEQ ID NO: 1257479 - DNA, 15 bp, Homo sapiens
gatcttcacctgggt

SEQ ID NO: 1257480 - DNA, 15 bp, Homo sapiens
ggatcttcacctggg

SEQ ID NO: 1257481 - DNA, 15 bp, Homo sapiens
aggatcttcacctgg

SEQ ID NO: 1257482 - DNA, 15 bp, Homo sapiens
caggatcttcacctg

SEQ ID NO: 1257483 - DNA, 15 bp, Homo sapiens
tcaggatcttcacct

SEQ ID NO: 1257484 - DNA, 15 bp, Homo sapiens
ctcaggatcttcacc

SEQ ID NO: 1257485 - DNA, 15 bp, Homo sapiens
cctcaggatcttcac

SEQ ID NO: 1257486 - DNA, 15 bp, Homo sapiens
aaacctcaggatctt

SEQ ID NO: 1257487 - DNA, 15 bp, Homo sapiens
caaacctcaggatct

SEQ ID NO: 1257488 - DNA, 15 bp, Homo sapiens
acaaacctcaggatc

SEQ ID NO: 1257489 - DNA, 15 bp, Homo sapiens
aacaaacctcaggat

SEQ ID NO: 1257490 - DNA, 15 bp, Homo sapiens
gaacaaacctcagga

SEQ ID NO: 1257491 - DNA, 15 bp, Homo sapiens
agaacaaacctcagg

SEQ ID NO: 1257492 - DNA, 15 bp, Homo sapiens
aagaacaaacctcag

SEQ ID NO: 1257493 - DNA, 15 bp, Homo sapiens
aaagaacaaacctca

SEQ ID NO: 1257494 - DNA, 15 bp, Homo sapiens
aaaagaacaaacctc

SEQ ID NO: 1257495 - DNA, 15 bp, Homo sapiens
caaaagaacaaacct

SEQ ID NO: 1257496 - DNA, 15 bp, Homo sapiens
gcaaaagaacaaacc

SEQ ID NO: 1257497 - DNA, 15 bp, Homo sapiens
tgcaaaagaacaaac

SEQ ID NO: 1257498 - DNA, 15 bp, Homo sapiens
ttgcaaaagaacaaa

SEQ ID NO: 1257499 - DNA, 15 bp, Homo sapiens
attgcaaaagaacaa

SEQ ID NO: 1257500 - DNA, 15 bp, Homo sapiens
cattgcaaaagaaca

SEQ ID NO: 1257501 - DNA, 15 bp, Homo sapiens
acattgcaaaagaac

SEQ ID NO: 1257502 - DNA, 15 bp, Homo sapiens
aacattgcaaaagaa

SEQ ID NO: 1257503 - DNA, 15 bp, Homo sapiens
aaacattgcaaaaga

SEQ ID NO: 1257504 - DNA, 15 bp, Homo sapiens
caaacattgcaaaag

SEQ ID NO: 1257505 - DNA, 15 bp, Homo sapiens
ccaaacattgcaaaa

SEQ ID NO: 1257506 - DNA, 15 bp, Homo sapiens
gccaaacattgcaaa

SEQ ID NO: 1257507 - DNA, 15 bp, Homo sapiens
ggccaaacattgcaa

SEQ ID NO: 1257508 - DNA, 15 bp, Homo sapiens
aggccaaacattgca

SEQ ID NO: 1257509 - DNA, 15 bp, Homo sapiens
aaggccaaacattgc

SEQ ID NO: 1257510 - DNA, 15 bp, Homo sapiens
aaaggccaaacattg

SEQ ID NO: 1257511 - DNA, 15 bp, Homo sapiens
taaaggccaaacatt

SEQ ID NO: 1257512 - DNA, 15 bp, Homo sapiens
ataaaggccaaacat

SEQ ID NO: 1257513 - DNA, 15 bp, Homo sapiens
aataaaggccaaaca

SEQ ID NO: 1257514 - DNA, 15 bp, Homo sapiens
taataaaggccaaac

SEQ ID NO: 1257515 - DNA, 15 bp, Homo sapiens
ataataaaggccaaa

SEQ ID NO: 1257516 - DNA, 15 bp, Homo sapiens
gataataaaggccaa

SEQ ID NO: 1257517 - DNA, 15 bp, Homo sapiens
agataataaaggcca

SEQ ID NO: 1257518 - DNA, 15 bp, Homo sapiens
cagataataaaggcc

SEQ ID NO: 1257519 - DNA, 15 bp, Homo sapiens
gcagataataaaggc

SEQ ID NO: 1257520 - DNA, 15 bp, Homo sapiens
ggcagataataaagg

SEQ ID NO: 1257521 - DNA, 15 bp, Homo sapiens
gggcagataataaag

SEQ ID NO: 1257522 - DNA, 15 bp, Homo sapiens
agggcagataataaa

SEQ ID NO: 1257523 - DNA, 15 bp, Homo sapiens
gagggcagataataa

SEQ ID NO: 1257524 - DNA, 15 bp, Homo sapiens
ggagggcagataata

SEQ ID NO: 1257525 - DNA, 15 bp, Homo sapiens
aggagggcagataat

SEQ ID NO: 1257526 - DNA, 15 bp, Homo sapiens
gaggagggcagataa

SEQ ID NO: 1257527 - DNA, 15 bp, Homo sapiens
ggaggagggcagata

SEQ ID NO: 1257528 - DNA, 15 bp, Homo sapiens
aggaggagggcagat

SEQ ID NO: 1257529 - DNA, 15 bp, Homo sapiens
caggaggagggcaga

SEQ ID NO: 1257530 - DNA, 15 bp, Homo sapiens
acaggaggagggcag

SEQ ID NO: 1257531 - DNA, 15 bp, Homo sapiens
tacaggaggagggca

SEQ ID NO: 1257532 - DNA, 15 bp, Homo sapiens
ttacaggaggagggc

SEQ ID NO: 1257533 - DNA, 15 bp, Homo sapiens
attacaggaggaggg

SEQ ID NO: 1257534 - DNA, 15 bp, Homo sapiens
aattacaggaggagg

SEQ ID NO: 1257535 - DNA, 15 bp, Homo sapiens
aaattacaggaggag

SEQ ID NO: 1257536 - DNA, 15 bp, Homo sapiens
taaattacaggagga

SEQ ID NO: 1257537 - DNA, 15 bp, Homo sapiens
ataaattacaggagg

SEQ ID NO: 1257538 - DNA, 15 bp, Homo sapiens
aataaattacaggag

SEQ ID NO: 1257539 - DNA, 15 bp, Homo sapiens
aaataaattacagga

SEQ ID NO: 1257540 - DNA, 15 bp, Homo sapiens
aaaataaattacagg

SEQ ID NO: 1257541 - DNA, 15 bp, Homo sapiens
taaaataaattacag

SEQ ID NO: 1257542 - DNA, 15 bp, Homo sapiens
gtaaaataaattaca

SEQ ID NO: 1257543 - DNA, 15 bp, Homo sapiens
agtaaaataaattac

SEQ ID NO: 1257544 - DNA, 15 bp, Homo sapiens
cagtaaaataaatta

SEQ ID NO: 1257545 - DNA, 15 bp, Homo sapiens
acagtaaaataaatt

SEQ ID NO: 1257546 - DNA, 15 bp, Homo sapiens
gacagtaaaataaat

SEQ ID NO: 1257547 - DNA, 15 bp, Homo sapiens
ggacagtaaaataaa

SEQ ID NO: 1257548 - DNA, 15 bp, Homo sapiens
aggacagtaaaataa

SEQ ID NO: 1257549 - DNA, 15 bp, Homo sapiens
aaggacagtaaaata

SEQ ID NO: 1257550 - DNA, 15 bp, Homo sapiens
aaaggacagtaaaat

SEQ ID NO: 1257551 - DNA, 15 bp, Homo sapiens
aaaaggacagtaaaa

SEQ ID NO: 1257552 - DNA, 15 bp, Homo sapiens
aaaaaggacagtaaa

SEQ ID NO: 1257553 - DNA, 15 bp, Homo sapiens
caaaaaggacagtaa

SEQ ID NO: 1257554 - DNA, 15 bp, Homo sapiens
acaaaaaggacagta

SEQ ID NO: 1257555 - DNA, 15 bp, Homo sapiens
aacaaaaaggacagt

SEQ ID NO: 1257556 - DNA, 15 bp, Homo sapiens
aaacaaaaaggacag

SEQ ID NO: 1257557 - DNA, 15 bp, Homo sapiens
aaaacaaaaaggaca

SEQ ID NO: 1257558 - DNA, 15 bp, Homo sapiens
aaaaacaaaaaggac

SEQ ID NO: 1257559 - DNA, 15 bp, Homo sapiens
caaaaacaaaaagga

SEQ ID NO: 1257560 - DNA, 15 bp, Homo sapiens
ccaaaaacaaaaagg

SEQ ID NO: 1257561 - DNA, 15 bp, Homo sapiens
accaaaaacaaaaag

SEQ ID NO: 1257562 - DNA, 15 bp, Homo sapiens
aaccaaaaacaaaaa

SEQ ID NO: 1257563 - DNA, 15 bp, Homo sapiens
caaccaaaaacaaaa

SEQ ID NO: 1257564 - DNA, 15 bp, Homo sapiens
ccaaccaaaaacaaa

SEQ ID NO: 1257565 - DNA, 15 bp, Homo sapiens
gccaaccaaaaacaa

SEQ ID NO: 1257566 - DNA, 15 bp, Homo sapiens
tgccaaccaaaaaca

SEQ ID NO: 1257567 - DNA, 15 bp, Homo sapiens
ttgccaaccaaaaac

SEQ ID NO: 1257568 - DNA, 15 bp, Homo sapiens
gttgccaaccaaaaa

SEQ ID NO: 1257569 - DNA, 15 bp, Homo sapiens
ggttgccaaccaaaa

SEQ ID NO: 1257570 - DNA, 15 bp, Homo sapiens
tggttgccaaccaaa

SEQ ID NO: 1257571 - DNA, 15 bp, Homo sapiens
atggttgccaaccaa

SEQ ID NO: 1257572 - DNA, 15 bp, Homo sapiens
catggttgccaacca

SEQ ID NO: 1257573 - DNA, 15 bp, Homo sapiens
ccatggttgccaacc

SEQ ID NO: 1257574 - DNA, 15 bp, Homo sapiens
cccatggttgccaac

SEQ ID NO: 1257575 - DNA, 15 bp, Homo sapiens
ccccatggttgccaa

SEQ ID NO: 1257576 - DNA, 15 bp, Homo sapiens
tccccatggttgcca

SEQ ID NO: 1257577 - DNA, 15 bp, Homo sapiens
ctccccatggttgcc

SEQ ID NO: 1257578 - DNA, 15 bp, Homo sapiens
cctccccatggttgc

SEQ ID NO: 1257579 - DNA, 15 bp, Homo sapiens
acctccccatggttg

SEQ ID NO: 1257580 - DNA, 15 bp, Homo sapiens
cacctccccatggtt

SEQ ID NO: 1257581 - DNA, 15 bp, Homo sapiens
ccacctccccatggt

SEQ ID NO: 1257582 - DNA, 15 bp, Homo sapiens
gccacctccccatgg

SEQ ID NO: 1257583 - DNA, 15 bp, Homo sapiens
agccacctccccatg

SEQ ID NO: 1257584 - DNA, 15 bp, Homo sapiens
cagccacctccccat

SEQ ID NO: 1257585 - DNA, 15 bp, Homo sapiens
gcagccacctcccca

SEQ ID NO: 1257586 - DNA, 15 bp, Homo sapiens
agcagccacctcccc

SEQ ID NO: 1257587 - DNA, 15 bp, Homo sapiens
cagcagccacctccc

SEQ ID NO: 1257588 - DNA, 15 bp, Homo sapiens
gcagcagccacctcc

SEQ ID NO: 1257589 - DNA, 15 bp, Homo sapiens
ggcagcagccacctc

SEQ ID NO: 1257590 - DNA, 15 bp, Homo sapiens
aggcagcagccacct

SEQ ID NO: 1257591 - DNA, 15 bp, Homo sapiens
gaggcagcagccacc

SEQ ID NO: 1257592 - DNA, 15 bp, Homo sapiens
agaggcagcagccac

SEQ ID NO: 1257593 - DNA, 15 bp, Homo sapiens
aagaggcagcagcca

SEQ ID NO: 1257594 - DNA, 15 bp, Homo sapiens
caagaggcagcagcc

SEQ ID NO: 1257595 - DNA, 15 bp, Homo sapiens
gcaagaggcagcagc

SEQ ID NO: 1257596 - DNA, 15 bp, Homo sapiens
agcaagaggcagcag

SEQ ID NO: 1257597 - DNA, 15 bp, Homo sapiens
aagcaagaggcagca

SEQ ID NO: 1257598 - DNA, 15 bp, Homo sapiens
taagcaagaggcagc

SEQ ID NO: 1257599 - DNA, 15 bp, Homo sapiens
ataagcaagaggcag

SEQ ID NO: 1257600 - DNA, 15 bp, Homo sapiens
gataagcaagaggca

SEQ ID NO: 1257601 - DNA, 15 bp, Homo sapiens
tgataagcaagaggc

SEQ ID NO: 1257602 - DNA, 15 bp, Homo sapiens
ttgataagcaagagg

SEQ ID NO: 1257603 - DNA, 15 bp, Homo sapiens
gttgataagcaagag

SEQ ID NO: 1257604 - DNA, 15 bp, Homo sapiens
tgttgataagcaaga

SEQ ID NO: 1257605 - DNA, 15 bp, Homo sapiens
ttgttgataagcaag

SEQ ID NO: 1257606 - DNA, 15 bp, Homo sapiens
gttgttgataagcaa

SEQ ID NO: 1257607 - DNA, 15 bp, Homo sapiens
agttgttgataagca

SEQ ID NO: 1257608 - DNA, 15 bp, Homo sapiens
cagttgttgataagc

SEQ ID NO: 1257609 - DNA, 15 bp, Homo sapiens
acagttgttgataag

SEQ ID NO: 1257610 - DNA, 15 bp, Homo sapiens
aacagttgttgataa

SEQ ID NO: 1257611 - DNA, 15 bp, Homo sapiens
caacagttgttgata

SEQ ID NO: 1257612 - DNA, 15 bp, Homo sapiens
gcaacagttgttgat

SEQ ID NO: 1257613 - DNA, 15 bp, Homo sapiens
agcaacagttgttga

SEQ ID NO: 1257614 - DNA, 15 bp, Homo sapiens
aagcaacagttgttg

SEQ ID NO: 1257615 - DNA, 15 bp, Homo sapiens
taagcaacagttgtt

SEQ ID NO: 1257616 - DNA, 15 bp, Homo sapiens
ataagcaacagttgt

SEQ ID NO: 1257617 - DNA, 15 bp, Homo sapiens
cataagcaacagttg

SEQ ID NO: 1257618 - DNA, 15 bp, Homo sapiens
ccataagcaacagtt

SEQ ID NO: 1257619 - DNA, 15 bp, Homo sapiens
tccataagcaacagt

SEQ ID NO: 1257620 - DNA, 15 bp, Homo sapiens
ctccataagcaacag

SEQ ID NO: 1257621 - DNA, 15 bp, Homo sapiens
tctccataagcaaca

SEQ ID NO: 1257622 - DNA, 15 bp, Homo sapiens
gtctccataagcaac

SEQ ID NO: 1257623 - DNA, 15 bp, Homo sapiens
agtctccataagcaa

SEQ ID NO: 1257624 - DNA, 15 bp, Homo sapiens
aagtctccataagca

SEQ ID NO: 1257625 - DNA, 15 bp, Homo sapiens
gaagtctccataagc

SEQ ID NO: 1257626 - DNA, 15 bp, Homo sapiens
agaagtctccataag

SEQ ID NO: 1257627 - DNA, 15 bp, Homo sapiens
cagaagtctccataa

SEQ ID NO: 1257628 - DNA, 15 bp, Homo sapiens
acagaagtctccata

SEQ ID NO: 1257629 - DNA, 15 bp, Homo sapiens
cacagaagtctccat

SEQ ID NO: 1257630 - DNA, 15 bp, Homo sapiens
tcacagaagtctcca

SEQ ID NO: 1257631 - DNA, 15 bp, Homo sapiens
ttcacagaagtctcc

SEQ ID NO: 1257632 - DNA, 15 bp, Homo sapiens
gttcacagaagtctc

SEQ ID NO: 1257633 - DNA, 15 bp, Homo sapiens
tgttcacagaagtct

SEQ ID NO: 1257634 - DNA, 15 bp, Homo sapiens
ttgttcacagaagtc

SEQ ID NO: 1257635 - DNA, 15 bp, Homo sapiens
cttgttcacagaagt

SEQ ID NO: 1257636 - DNA, 15 bp, Homo sapiens
gcttgttcacagaag

SEQ ID NO: 1257637 - DNA, 15 bp, Homo sapiens
tgcttgttcacagaa

SEQ ID NO: 1257638 - DNA, 15 bp, Homo sapiens
ctgcttgttcacaga

SEQ ID NO: 1257639 - DNA, 15 bp, Homo sapiens
gctgcttgttcacag

SEQ ID NO: 1257640 - DNA, 15 bp, Homo sapiens
ggctgcttgttcaca

SEQ ID NO: 1257641 - DNA, 15 bp, Homo sapiens
tggctgcttgttcac

SEQ ID NO: 1257642 - DNA, 15 bp, Homo sapiens
ctggctgcttgttca

SEQ ID NO: 1257643 - DNA, 15 bp, Homo sapiens
cctggctgcttgttc

SEQ ID NO: 1257644 - DNA, 15 bp, Homo sapiens
acctggctgcttgtt

SEQ ID NO: 1257645 - DNA, 15 bp, Homo sapiens
aacctggctgcttgt

SEQ ID NO: 1257646 - DNA, 15 bp, Homo sapiens
aaacctggctgcttg

SEQ ID NO: 1257647 - DNA, 15 bp, Homo sapiens
taaacctggctgctt

SEQ ID NO: 1257648 - DNA, 15 bp, Homo sapiens
ctaaacctggctgct

SEQ ID NO: 1257649 - DNA, 15 bp, Homo sapiens
cctaaacctggctgc

SEQ ID NO: 1257650 - DNA, 15 bp, Homo sapiens
acctaaacctggctg

SEQ ID NO: 1257651 - DNA, 15 bp, Homo sapiens
cacctaaacctggct

SEQ ID NO: 1257652 - DNA, 15 bp, Homo sapiens
tcacctaaacctggc

SEQ ID NO: 1257653 - DNA, 15 bp, Homo sapiens
ctcacctaaacctgg

SEQ ID NO: 1257654 - DNA, 15 bp, Homo sapiens
cctcacctaaacctg

SEQ ID NO: 1257655 - DNA, 15 bp, Homo sapiens
tcctcacctaaacct

SEQ ID NO: 1257656 - DNA, 15 bp, Homo sapiens
ttcctcacctaaacc

SEQ ID NO: 1257657 - DNA, 15 bp, Homo sapiens
tttcctcacctaaac

SEQ ID NO: 1257658 - DNA, 15 bp, Homo sapiens
atttcctcacctaaa

SEQ ID NO: 1257659 - DNA, 15 bp, Homo sapiens
aatttcctcacctaa

SEQ ID NO: 1257660 - DNA, 15 bp, Homo sapiens
caatttcctcaccta

SEQ ID NO: 1257661 - DNA, 15 bp, Homo sapiens
ccaatttcctcacct

SEQ ID NO: 1257662 - DNA, 15 bp, Homo sapiens
gccaatttcctcacc

SEQ ID NO: 1257663 - DNA, 15 bp, Homo sapiens
ggccaatttcctcac

SEQ ID NO: 1257664 - DNA, 15 bp, Homo sapiens
cggccaatttcctca

SEQ ID NO: 1257665 - DNA, 15 bp, Homo sapiens
acggccaatttcctc

SEQ ID NO: 1257666 - DNA, 15 bp, Homo sapiens
cacggccaatttcct

SEQ ID NO: 1257667 - DNA, 15 bp, Homo sapiens
tcacggccaatttcc

SEQ ID NO: 1257668 - DNA, 15 bp, Homo sapiens
gtcacggccaatttc

SEQ ID NO: 1257669 - DNA, 15 bp, Homo sapiens
agtcacggccaattt

SEQ ID NO: 1257670 - DNA, 15 bp, Homo sapiens
cagtcacggccaatt

SEQ ID NO: 1257671 - DNA, 15 bp, Homo sapiens
tcagtcacggccaat

SEQ ID NO: 1257672 - DNA, 15 bp, Homo sapiens
ttcagtcacggccaa

SEQ ID NO: 1257673 - DNA, 15 bp, Homo sapiens
attcagtcacggcca

SEQ ID NO: 1257674 - DNA, 15 bp, Homo sapiens
aattcagtcacggcc

SEQ ID NO: 1257675 - DNA, 15 bp, Homo sapiens
gaattcagtcacggc

SEQ ID NO: 1257676 - DNA, 15 bp, Homo sapiens
agaattcagtcacgg

SEQ ID NO: 1257677 - DNA, 15 bp, Homo sapiens
cagaattcagtcacg

SEQ ID NO: 1257678 - DNA, 15 bp, Homo sapiens
acccagaattcagtc

SEQ ID NO: 1257679 - DNA, 15 bp, Homo sapiens
cacccagaattcagt

SEQ ID NO: 1257680 - DNA, 15 bp, Homo sapiens
tcacccagaattcag

SEQ ID NO: 1257681 - DNA, 15 bp, Homo sapiens
ttcacccagaattca

SEQ ID NO: 1257682 - DNA, 15 bp, Homo sapiens
attcacccagaattc

SEQ ID NO: 1257683 - DNA, 15 bp, Homo sapiens
aattcacccagaatt

SEQ ID NO: 1257684 - DNA, 15 bp, Homo sapiens
aaattcacccagaat

SEQ ID NO: 1257685 - DNA, 15 bp, Homo sapiens
aaaattcacccagaa

SEQ ID NO: 1257686 - DNA, 15 bp, Homo sapiens
aaaaattcacccaga

SEQ ID NO: 1257687 - DNA, 15 bp, Homo sapiens
gaaaaattcacccag

SEQ ID NO: 1257688 - DNA, 15 bp, Homo sapiens
cgaaaaattcaccca

SEQ ID NO: 1257689 - DNA, 15 bp, Homo sapiens
tcgaaaaattcaccc

SEQ ID NO: 1257690 - DNA, 15 bp, Homo sapiens
ctcgaaaaattcacc

SEQ ID NO: 1257691 - DNA, 15 bp, Homo sapiens
cctcgaaaaattcac

SEQ ID NO: 1257692 - DNA, 15 bp, Homo sapiens
acctcgaaaaattca

SEQ ID NO: 1257693 - DNA, 15 bp, Homo sapiens
gacctcgaaaaattc

SEQ ID NO: 1257694 - DNA, 15 bp, Homo sapiens
ggacctcgaaaaatt

SEQ ID NO: 1257695 - DNA, 15 bp, Homo sapiens
tggacctcgaaaaat

SEQ ID NO: 1257696 - DNA, 15 bp, Homo sapiens
ctggacctcgaaaaa

SEQ ID NO: 1257697 - DNA, 15 bp, Homo sapiens
actggacctcgaaaa

SEQ ID NO: 1257698 - DNA, 15 bp, Homo sapiens
aactggacctcgaaa

SEQ ID NO: 1257699 - DNA, 15 bp, Homo sapiens
caactggacctcgaa

SEQ ID NO: 1257700 - DNA, 15 bp, Homo sapiens
ccaactggacctcga

SEQ ID NO: 1257701 - DNA, 15 bp, Homo sapiens
accaactggacctcg

SEQ ID NO: 1257702 - DNA, 15 bp, Homo sapiens
gaccaactggacctc

SEQ ID NO: 1257703 - DNA, 15 bp, Homo sapiens
ggaccaactggacct

SEQ ID NO: 1257704 - DNA, 15 bp, Homo sapiens
tggaccaactggacc

SEQ ID NO: 1257705 - DNA, 15 bp, Homo sapiens
ttggaccaactggac

SEQ ID NO: 1257706 - DNA, 15 bp, Homo sapiens
tttggaccaactgga

SEQ ID NO: 1257707 - DNA, 15 bp, Homo sapiens
atttggaccaactgg

SEQ ID NO: 1257708 - DNA, 15 bp, Homo sapiens
catttggaccaactg

SEQ ID NO: 1257709 - DNA, 15 bp, Homo sapiens
acatttggaccaact

SEQ ID NO: 1257710 - DNA, 15 bp, Homo sapiens
aacatttggaccaac

SEQ ID NO: 1257711 - DNA, 15 bp, Homo sapiens
aaacatttggaccaa

SEQ ID NO: 1257712 - DNA, 15 bp, Homo sapiens
caaacatttggacca

SEQ ID NO: 1257713 - DNA, 15 bp, Homo sapiens
acaaacatttggacc

SEQ ID NO: 1257714 - DNA, 15 bp, Homo sapiens
cacaaacatttggac

SEQ ID NO: 1257715 - DNA, 15 bp, Homo sapiens
tcacaaacatttgga

SEQ ID NO: 1257716 - DNA, 15 bp, Homo sapiens
atcacaaacatttgg

SEQ ID NO: 1257717 - DNA, 15 bp, Homo sapiens
catcacaaacatttg

SEQ ID NO: 1257718 - DNA, 15 bp, Homo sapiens
acatcacaaacattt

SEQ ID NO: 1257719 - DNA, 15 bp, Homo sapiens
cacatcacaaacatt

SEQ ID NO: 1257720 - DNA, 15 bp, Homo sapiens
gcacatcacaaacat

SEQ ID NO: 1257721 - DNA, 15 bp, Homo sapiens
tgcacatcacaaaca

SEQ ID NO: 1257722 - DNA, 15 bp, Homo sapiens
ctgcacatcacaaac

SEQ ID NO: 1257723 - DNA, 15 bp, Homo sapiens
actgcacatcacaaa

SEQ ID NO: 1257724 - DNA, 15 bp, Homo sapiens
gactgcacatcacaa

SEQ ID NO: 1257725 - DNA, 15 bp, Homo sapiens
ggactgcacatcaca

SEQ ID NO: 1257726 - DNA, 15 bp, Homo sapiens
aggactgcacatcac

SEQ ID NO: 1257727 - DNA, 15 bp, Homo sapiens
taggactgcacatca

SEQ ID NO: 1257728 - DNA, 15 bp, Homo sapiens
ttaggactgcacatc

SEQ ID NO: 1257729 - DNA, 15 bp, Homo sapiens
cttaggactgcacat

SEQ ID NO: 1257730 - DNA, 15 bp, Homo sapiens
tcttaggactgcaca

SEQ ID NO: 1257731 - DNA, 15 bp, Homo sapiens
ctcttaggactgcac

SEQ ID NO: 1257732 - DNA, 15 bp, Homo sapiens
cctcttaggactgca

SEQ ID NO: 1257733 - DNA, 15 bp, Homo sapiens
gcctcttaggactgc

SEQ ID NO: 1257734 - DNA, 15 bp, Homo sapiens
ggcctcttaggactg

SEQ ID NO: 1257735 - DNA, 15 bp, Homo sapiens
tggcctcttaggact

SEQ ID NO: 1257736 - DNA, 15 bp, Homo sapiens
atggcctcttaggac

SEQ ID NO: 1257737 - DNA, 15 bp, Homo sapiens
catggcctcttagga

SEQ ID NO: 1257738 - DNA, 15 bp, Homo sapiens
ccatggcctcttagg

SEQ ID NO: 1257739 - DNA, 15 bp, Homo sapiens
gccatggcctcttag

SEQ ID NO: 1257740 - DNA, 15 bp, Homo sapiens
agccatggcctctta

SEQ ID NO: 1257741 - DNA, 15 bp, Homo sapiens
gagccatggcctctt

SEQ ID NO: 1257742 - DNA, 15 bp, Homo sapiens
agagccatggcctct

SEQ ID NO: 1257743 - DNA, 15 bp, Homo sapiens
aagagccatggcctc

SEQ ID NO: 1257744 - DNA, 15 bp, Homo sapiens
gaagagccatggcct

SEQ ID NO: 1257745 - DNA, 15 bp, Homo sapiens
ggaagagccatggcc

SEQ ID NO: 1257746 - DNA, 15 bp, Homo sapiens
aggaagagccatggc

SEQ ID NO: 1257747 - DNA, 15 bp, Homo sapiens
caggaagagccatgg

SEQ ID NO: 1257748 - DNA, 15 bp, Homo sapiens
acaggaagagccatg

SEQ ID NO: 1257749 - DNA, 15 bp, Homo sapiens
cacaggaagagccat

SEQ ID NO: 1257750 - DNA, 15 bp, Homo sapiens
tcacaggaagagcca

SEQ ID NO: 1257751 - DNA, 15 bp, Homo sapiens
ttcacaggaagagcc

SEQ ID NO: 1257752 - DNA, 15 bp, Homo sapiens
cttcacaggaagagc

SEQ ID NO: 1257753 - DNA, 15 bp, Homo sapiens
acttcacaggaagag

SEQ ID NO: 1257754 - DNA, 15 bp, Homo sapiens
cacttcacaggaaga

SEQ ID NO: 1257755 - DNA, 15 bp, Homo sapiens
acacttcacaggaag

SEQ ID NO: 1257756 - DNA, 15 bp, Homo sapiens
cacacttcacaggaa

SEQ ID NO: 1257757 - DNA, 15 bp, Homo sapiens
tcacacttcacagga

SEQ ID NO: 1257758 - DNA, 15 bp, Homo sapiens
atcacacttcacagg

SEQ ID NO: 1257759 - DNA, 15 bp, Homo sapiens
catcacacttcacag

SEQ ID NO: 1257760 - DNA, 15 bp, Homo sapiens
acatcacacttcaca

SEQ ID NO: 1257761 - DNA, 15 bp, Homo sapiens
cacatcacacttcac

SEQ ID NO: 1257762 - DNA, 15 bp, Homo sapiens
acacatcacacttca

SEQ ID NO: 1257763 - DNA, 15 bp, Homo sapiens
aacacatcacacttc

SEQ ID NO: 1257764 - DNA, 15 bp, Homo sapiens
aaacacatcacactt

SEQ ID NO: 1257765 - DNA, 15 bp, Homo sapiens
aaaacacatcacact

SEQ ID NO: 1257766 - DNA, 15 bp, Homo sapiens
taaaacacatcacac

SEQ ID NO: 1257767 - DNA, 15 bp, Homo sapiens
ataaaacacatcaca

SEQ ID NO: 1257768 - DNA, 15 bp, Homo sapiens
cataaaacacatcac

SEQ ID NO: 1257769 - DNA, 15 bp, Homo sapiens
acataaaacacatca

SEQ ID NO: 1257770 - DNA, 15 bp, Homo sapiens
tacataaaacacatc

SEQ ID NO: 1257771 - DNA, 15 bp, Homo sapiens
atacataaaacacat

SEQ ID NO: 1257772 - DNA, 15 bp, Homo sapiens
gatacataaaacaca

SEQ ID NO: 1257773 - DNA, 15 bp, Homo sapiens
tgatacataaaacac

SEQ ID NO: 1257774 - DNA, 15 bp, Homo sapiens
gtgatacataaaaca

SEQ ID NO: 1257775 - DNA, 15 bp, Homo sapiens
tgtgatacataaaac

SEQ ID NO: 1257776 - DNA, 15 bp, Homo sapiens
gtgtgatacataaaa

SEQ ID NO: 1257777 - DNA, 15 bp, Homo sapiens
tgtgtgatacataaa

SEQ ID NO: 1257778 - DNA, 15 bp, Homo sapiens
atgtgtgatacataa

SEQ ID NO: 1257779 - DNA, 15 bp, Homo sapiens
aatgtgtgatacata

SEQ ID NO: 1257780 - DNA, 15 bp, Homo sapiens
taatgtgtgatacat

SEQ ID NO: 1257781 - DNA, 15 bp, Homo sapiens
ctaatgtgtgataca

SEQ ID NO: 1257782 - DNA, 15 bp, Homo sapiens
actaatgtgtgatac

SEQ ID NO: 1257783 - DNA, 15 bp, Homo sapiens
aactaatgtgtgata

SEQ ID NO: 1257784 - DNA, 15 bp, Homo sapiens
aaactaatgtgtgat

SEQ ID NO: 1257785 - DNA, 15 bp, Homo sapiens
aaaactaatgtgtga

SEQ ID NO: 1257786 - DNA, 15 bp, Homo sapiens
aaaaactaatgtgtg

SEQ ID NO: 1257787 - DNA, 15 bp, Homo sapiens
taaaaactaatgtgt

SEQ ID NO: 1257788 - DNA, 15 bp, Homo sapiens
ataaaaactaatgtg

SEQ ID NO: 1257789 - DNA, 15 bp, Homo sapiens
aataaaaactaatgt

SEQ ID NO: 1257790 - DNA, 15 bp, Homo sapiens
caaataaaaactaat

SEQ ID NO: 1257791 - DNA, 15 bp, Homo sapiens
acaaataaaaactaa

SEQ ID NO: 1257792 - DNA, 15 bp, Homo sapiens
gacaaataaaaacta

SEQ ID NO: 1257793 - DNA, 15 bp, Homo sapiens
ggacaaataaaaact

SEQ ID NO: 1257794 - DNA, 15 bp, Homo sapiens
aggacaaataaaaac

SEQ ID NO: 1257795 - DNA, 15 bp, Homo sapiens
taggacaaataaaaa

SEQ ID NO: 1257796 - DNA, 15 bp, Homo sapiens
ttaggacaaataaaa

SEQ ID NO: 1257797 - DNA, 15 bp, Homo sapiens
cttaggacaaataaa

SEQ ID NO: 1257798 - DNA, 15 bp, Homo sapiens
gcttaggacaaataa

SEQ ID NO: 1257799 - DNA, 15 bp, Homo sapiens
tgcttaggacaaata

SEQ ID NO: 1257800 - DNA, 15 bp, Homo sapiens
ctgcttaggacaaat

SEQ ID NO: 1257801 - DNA, 15 bp, Homo sapiens
cctgcttaggacaaa

SEQ ID NO: 1257802 - DNA, 15 bp, Homo sapiens
tcctgcttaggacaa

SEQ ID NO: 1257803 - DNA, 15 bp, Homo sapiens
ttcctgcttaggaca

SEQ ID NO: 1257804 - DNA, 15 bp, Homo sapiens
attcctgcttaggac

SEQ ID NO: 1257805 - DNA, 15 bp, Homo sapiens
gattcctgcttagga

SEQ ID NO: 1257806 - DNA, 15 bp, Homo sapiens
tgattcctgcttagg

SEQ ID NO: 1257807 - DNA, 15 bp, Homo sapiens
ctgattcctgcttag

SEQ ID NO: 1257808 - DNA, 15 bp, Homo sapiens
tctgattcctgctta

SEQ ID NO: 1257809 - DNA, 15 bp, Homo sapiens
ttctgattcctgctt

SEQ ID NO: 1257810 - DNA, 15 bp, Homo sapiens
gttctgattcctgct

SEQ ID NO: 1257811 - DNA, 15 bp, Homo sapiens
agttctgattcctgc

SEQ ID NO: 1257812 - DNA, 15 bp, Homo sapiens
gagttctgattcctg

SEQ ID NO: 1257813 - DNA, 15 bp, Homo sapiens
tgagttctgattcct

SEQ ID NO: 1257814 - DNA, 15 bp, Homo sapiens
ctgagttctgattcc

SEQ ID NO: 1257815 - DNA, 15 bp, Homo sapiens
actgagttctgattc

SEQ ID NO: 1257816 - DNA, 15 bp, Homo sapiens
aactgagttctgatt

SEQ ID NO: 1257817 - DNA, 15 bp, Homo sapiens
gaactgagttctgat

SEQ ID NO: 1257818 - DNA, 15 bp, Homo sapiens
tgaactgagttctga

SEQ ID NO: 1257819 - DNA, 15 bp, Homo sapiens
ttgaactgagttctg

SEQ ID NO: 1257820 - DNA, 15 bp, Homo sapiens
attgaactgagttct

SEQ ID NO: 1257821 - DNA, 15 bp, Homo sapiens
tattgaactgagttc

SEQ ID NO: 1257822 - DNA, 15 bp, Homo sapiens
ctattgaactgagtt

SEQ ID NO: 1257823 - DNA, 15 bp, Homo sapiens
tctattgaactgagt

SEQ ID NO: 1257824 - DNA, 15 bp, Homo sapiens
ctctattgaactgag

SEQ ID NO: 1257825 - DNA, 15 bp, Homo sapiens
cctctattgaactga

SEQ ID NO: 1257826 - DNA, 15 bp, Homo sapiens
gcctctattgaactg

SEQ ID NO: 1257827 - DNA, 15 bp, Homo sapiens
ggcctctattgaact

SEQ ID NO: 1257828 - DNA, 15 bp, Homo sapiens
tggcctctattgaac

SEQ ID NO: 1257829 - DNA, 15 bp, Homo sapiens
atggcctctattgaa

SEQ ID NO: 1257830 - DNA, 15 bp, Homo sapiens
aatggcctctattga

SEQ ID NO: 1257831 - DNA, 15 bp, Homo sapiens
caatggcctctattg

SEQ ID NO: 1257832 - DNA, 15 bp, Homo sapiens
ccaatggcctctatt

SEQ ID NO: 1257833 - DNA, 15 bp, Homo sapiens
gccaatggcctctat

SEQ ID NO: 1257834 - DNA, 15 bp, Homo sapiens
tgccaatggcctcta

SEQ ID NO: 1257835 - DNA, 15 bp, Homo sapiens
ttgccaatggcctct

SEQ ID NO: 1257836 - DNA, 15 bp, Homo sapiens
tttgccaatggcctc

SEQ ID NO: 1257837 - DNA, 15 bp, Homo sapiens
gtttgccaatggcct

SEQ ID NO: 1257838 - DNA, 15 bp, Homo sapiens
tgtttgccaatggcc

SEQ ID NO: 1257839 - DNA, 15 bp, Homo sapiens
atgtttgccaatggc

SEQ ID NO: 1257840 - DNA, 15 bp, Homo sapiens
gatgtttgccaatgg

SEQ ID NO: 1257841 - DNA, 15 bp, Homo sapiens
ggatgtttgccaatg

SEQ ID NO: 1257842 - DNA, 15 bp, Homo sapiens
gggatgtttgccaat

SEQ ID NO: 1257843 - DNA, 15 bp, Homo sapiens
tgggatgtttgccaa

SEQ ID NO: 1257844 - DNA, 15 bp, Homo sapiens
ttgggatgtttgcca

SEQ ID NO: 1257845 - DNA, 15 bp, Homo sapiens
tttgggatgtttgcc

SEQ ID NO: 1257846 - DNA, 15 bp, Homo sapiens
gtttgggatgtttgc

SEQ ID NO: 1257847 - DNA, 15 bp, Homo sapiens
tgtttgggatgtttg

SEQ ID NO: 1257848 - DNA, 15 bp, Homo sapiens
ttgtttgggatgttt

SEQ ID NO: 1257849 - DNA, 15 bp, Homo sapiens
cttgtttgggatgtt

SEQ ID NO: 1257850 - DNA, 15 bp, Homo sapiens
ccttgtttgggatgt

SEQ ID NO: 1257851 - DNA, 15 bp, Homo sapiens
tccttgtttgggatg

SEQ ID NO: 1257852 - DNA, 15 bp, Homo sapiens
ttccttgtttgggat

SEQ ID NO: 1257853 - DNA, 15 bp, Homo sapiens
attccttgtttggga

SEQ ID NO: 1257854 - DNA, 15 bp, Homo sapiens
gattccttgtttggg

SEQ ID NO: 1257855 - DNA, 15 bp, Homo sapiens
agattccttgtttgg

SEQ ID NO: 1257856 - DNA, 15 bp, Homo sapiens
gagattccttgtttg

SEQ ID NO: 1257857 - DNA, 15 bp, Homo sapiens
agagattccttgttt

SEQ ID NO: 1257858 - DNA, 15 bp, Homo sapiens
gagagattccttgtt

SEQ ID NO: 1257859 - DNA, 15 bp, Homo sapiens
tgagagattccttgt

SEQ ID NO: 1257860 - DNA, 15 bp, Homo sapiens
gtgagagattccttg

SEQ ID NO: 1257861 - DNA, 15 bp, Homo sapiens
agtgagagattcctt

SEQ ID NO: 1257862 - DNA, 15 bp, Homo sapiens
tagtgagagattcct

SEQ ID NO: 1257863 - DNA, 15 bp, Homo sapiens
ttagtgagagattcc

SEQ ID NO: 1257864 - DNA, 15 bp, Homo sapiens
tttagtgagagattc

SEQ ID NO: 1257865 - DNA, 15 bp, Homo sapiens
ttttagtgagagatt

SEQ ID NO: 1257866 - DNA, 15 bp, Homo sapiens
attttagtgagagat

SEQ ID NO: 1257867 - DNA, 15 bp, Homo sapiens
tattttagtgagaga

SEQ ID NO: 1257868 - DNA, 15 bp, Homo sapiens
ctattttagtgagag

SEQ ID NO: 1257869 - DNA, 15 bp, Homo sapiens
gctattttagtgaga

SEQ ID NO: 1257870 - DNA, 15 bp, Homo sapiens
agctattttagtgag

SEQ ID NO: 1257871 - DNA, 15 bp, Homo sapiens
aagctattttagtga

SEQ ID NO: 1257872 - DNA, 15 bp, Homo sapiens
taagctattttagtg

SEQ ID NO: 1257873 - DNA, 15 bp, Homo sapiens
ttaagctattttagt

SEQ ID NO: 1257874 - DNA, 15 bp, Homo sapiens
tttaagctattttag

SEQ ID NO: 1257875 - DNA, 15 bp, Homo sapiens
ttttaagctatttta

SEQ ID NO: 1257876 - DNA, 15 bp, Homo sapiens
attttaagctatttt

SEQ ID NO: 1257877 - DNA, 15 bp, Homo sapiens
tattttaagctattt

SEQ ID NO: 1257878 - DNA, 15 bp, Homo sapiens
atattttaagctatt

SEQ ID NO: 1257879 - DNA, 15 bp, Homo sapiens
tatattttaagctat

SEQ ID NO: 1257880 - DNA, 15 bp, Homo sapiens
ttatattttaagcta

SEQ ID NO: 1257881 - DNA, 15 bp, Homo sapiens
attatattttaagct

SEQ ID NO: 1257882 - DNA, 15 bp, Homo sapiens
aattatattttaagc

SEQ ID NO: 1257883 - DNA, 15 bp, Homo sapiens
aaattatattttaag

SEQ ID NO: 1257884 - DNA, 15 bp, Homo sapiens
aaaattatattttaa

SEQ ID NO: 1257885 - DNA, 15 bp, Homo sapiens
taaaattatatttta

SEQ ID NO: 1257886 - DNA, 15 bp, Homo sapiens
gtaaaattatatttt

SEQ ID NO: 1257887 - DNA, 15 bp, Homo sapiens
ggtaaaattatattt

SEQ ID NO: 1257888 - DNA, 15 bp, Homo sapiens
aggtaaaattatatt

SEQ ID NO: 1257889 - DNA, 15 bp, Homo sapiens
caggtaaaattatat

SEQ ID NO: 1257890 - DNA, 15 bp, Homo sapiens
acaggtaaaattata

SEQ ID NO: 1257891 - DNA, 15 bp, Homo sapiens
cacaggtaaaattat

SEQ ID NO: 1257892 - DNA, 15 bp, Homo sapiens
acacaggtaaaatta

SEQ ID NO: 1257893 - DNA, 15 bp, Homo sapiens
cacacaggtaaaatt

SEQ ID NO: 1257894 - DNA, 15 bp, Homo sapiens
ccacacaggtaaaat

SEQ ID NO: 1257895 - DNA, 15 bp, Homo sapiens
accacacaggtaaaa

SEQ ID NO: 1257896 - DNA, 15 bp, Homo sapiens
gaccacacaggtaaa

SEQ ID NO: 1257897 - DNA, 15 bp, Homo sapiens
agaccacacaggtaa

SEQ ID NO: 1257898 - DNA, 15 bp, Homo sapiens
tagaccacacaggta

SEQ ID NO: 1257899 - DNA, 15 bp, Homo sapiens
ctagaccacacaggt

SEQ ID NO: 1257900 - DNA, 15 bp, Homo sapiens
cctagaccacacagg

SEQ ID NO: 1257901 - DNA, 15 bp, Homo sapiens
gcctagaccacacag

SEQ ID NO: 1257902 - DNA, 15 bp, Homo sapiens
tgcctagaccacaca

SEQ ID NO: 1257903 - DNA, 15 bp, Homo sapiens
atgcctagaccacac

SEQ ID NO: 1257904 - DNA, 15 bp, Homo sapiens
aatgcctagaccaca

SEQ ID NO: 1257905 - DNA, 15 bp, Homo sapiens
aaatgcctagaccac

SEQ ID NO: 1257906 - DNA, 15 bp, Homo sapiens
caaatgcctagacca

SEQ ID NO: 1257907 - DNA, 15 bp, Homo sapiens
acaaatgcctagacc

SEQ ID NO: 1257908 - DNA, 15 bp, Homo sapiens
cacaaatgcctagac

SEQ ID NO: 1257909 - DNA, 15 bp, Homo sapiens
ccacaaatgcctaga

SEQ ID NO: 1257910 - DNA, 15 bp, Homo sapiens
accacaaatgcctag

SEQ ID NO: 1257911 - DNA, 15 bp, Homo sapiens
taccacaaatgccta

SEQ ID NO: 1257912 - DNA, 15 bp, Homo sapiens
gtaccacaaatgcct

SEQ ID NO: 1257913 - DNA, 15 bp, Homo sapiens
tgtaccacaaatgcc

SEQ ID NO: 1257914 - DNA, 15 bp, Homo sapiens
ctgtaccacaaatgc

SEQ ID NO: 1257915 - DNA, 15 bp, Homo sapiens
actgtaccacaaatg

SEQ ID NO: 1257916 - DNA, 15 bp, Homo sapiens
cactgtaccacaaat

SEQ ID NO: 1257917 - DNA, 15 bp, Homo sapiens
acactgtaccacaaa

SEQ ID NO: 1257918 - DNA, 15 bp, Homo sapiens
aacactgtaccacaa

SEQ ID NO: 1257919 - DNA, 15 bp, Homo sapiens
gaacactgtaccaca

SEQ ID NO: 1257920 - DNA, 15 bp, Homo sapiens
cgaacactgtaccac

SEQ ID NO: 1257921 - DNA, 15 bp, Homo sapiens
acgaacactgtacca

SEQ ID NO: 1257922 - DNA, 15 bp, Homo sapiens
aacgaacactgtacc

SEQ ID NO: 1257923 - DNA, 15 bp, Homo sapiens
taacgaacactgtac

SEQ ID NO: 1257924 - DNA, 15 bp, Homo sapiens
ctaacgaacactgta

SEQ ID NO: 1257925 - DNA, 15 bp, Homo sapiens
gctaacgaacactgt

SEQ ID NO: 1257926 - DNA, 15 bp, Homo sapiens
tgctaacgaacactg

SEQ ID NO: 1257927 - DNA, 15 bp, Homo sapiens
ctgctaacgaacact

SEQ ID NO: 1257928 - DNA, 15 bp, Homo sapiens
actgctaacgaacac

SEQ ID NO: 1257929 - DNA, 15 bp, Homo sapiens
cactgctaacgaaca

SEQ ID NO: 1257930 - DNA, 15 bp, Homo sapiens
tcactgctaacgaac

SEQ ID NO: 1257931 - DNA, 15 bp, Homo sapiens
ctcactgctaacgaa

SEQ ID NO: 1257932 - DNA, 15 bp, Homo sapiens
cctcactgctaacga

SEQ ID NO: 1257933 - DNA, 15 bp, Homo sapiens
tcctcactgctaacg

SEQ ID NO: 1257934 - DNA, 15 bp, Homo sapiens
ttcctcactgctaac

SEQ ID NO: 1257935 - DNA, 15 bp, Homo sapiens
cttcctcactgctaa

SEQ ID NO: 1257936 - DNA, 15 bp, Homo sapiens
ccttcctcactgcta

SEQ ID NO: 1257937 - DNA, 15 bp, Homo sapiens
cccttcctcactgct

SEQ ID NO: 1257938 - DNA, 15 bp, Homo sapiens
gcccttcctcactgc

SEQ ID NO: 1257939 - DNA, 15 bp, Homo sapiens
agcccttcctcactg

SEQ ID NO: 1257940 - DNA, 15 bp, Homo sapiens
tagcccttcctcact

SEQ ID NO: 1257941 - DNA, 15 bp, Homo sapiens
atagcccttcctcac

SEQ ID NO: 1257942 - DNA, 15 bp, Homo sapiens
catagcccttcctca

SEQ ID NO: 1257943 - DNA, 15 bp, Homo sapiens
gcatagcccttcctc

SEQ ID NO: 1257944 - DNA, 15 bp, Homo sapiens
cgcatagcccttcct

SEQ ID NO: 1257945 - DNA, 15 bp, Homo sapiens
acgcatagcccttcc

SEQ ID NO: 1257946 - DNA, 15 bp, Homo sapiens
cacgcatagcccttc

SEQ ID NO: 1257947 - DNA, 15 bp, Homo sapiens
gcacgcatagccctt

SEQ ID NO: 1257948 - DNA, 15 bp, Homo sapiens
ggcacgcatagccct

SEQ ID NO: 1257949 - DNA, 15 bp, Homo sapiens
aggcacgcatagccc

SEQ ID NO: 1257950 - DNA, 15 bp, Homo sapiens
caggcacgcatagcc

SEQ ID NO: 1257951 - DNA, 15 bp, Homo sapiens
ccaggcacgcatagc

SEQ ID NO: 1257952 - DNA, 15 bp, Homo sapiens
tccaggcacgcatag

SEQ ID NO: 1257953 - DNA, 15 bp, Homo sapiens
ctccaggcacgcata

SEQ ID NO: 1257954 - DNA, 15 bp, Homo sapiens
tctccaggcacgcat

SEQ ID NO: 1257955 - DNA, 15 bp, Homo sapiens
atctccaggcacgca

SEQ ID NO: 1257956 - DNA, 15 bp, Homo sapiens
gatctccaggcacgc

SEQ ID NO: 1257957 - DNA, 15 bp, Homo sapiens
tgatctccaggcacg

SEQ ID NO: 1257958 - DNA, 15 bp, Homo sapiens
ctgatctccaggcac

SEQ ID NO: 1257959 - DNA, 15 bp, Homo sapiens
tctgatctccaggca

SEQ ID NO: 1257960 - DNA, 15 bp, Homo sapiens
atctgatctccaggc

SEQ ID NO: 1257961 - DNA, 15 bp, Homo sapiens
catctgatctccagg

SEQ ID NO: 1257962 - DNA, 15 bp, Homo sapiens
tcatctgatctccag

SEQ ID NO: 1257963 - DNA, 15 bp, Homo sapiens
ctcatctgatctcca

SEQ ID NO: 1257964 - DNA, 15 bp, Homo sapiens
tctcatctgatctcc

SEQ ID NO: 1257965 - DNA, 15 bp, Homo sapiens
ctctcatctgatctc

SEQ ID NO: 1257966 - DNA, 15 bp, Homo sapiens
cctctcatctgatct

SEQ ID NO: 1257967 - DNA, 15 bp, Homo sapiens
gcctctcatctgatc

SEQ ID NO: 1257968 - DNA, 15 bp, Homo sapiens
ggcctctcatctgat

SEQ ID NO: 1257969 - DNA, 15 bp, Homo sapiens
aggcctctcatctga

SEQ ID NO: 1257970 - DNA, 15 bp, Homo sapiens
aaggcctctcatctg

SEQ ID NO: 1257971 - DNA, 15 bp, Homo sapiens
taaggcctctcatct

SEQ ID NO: 1257972 - DNA, 15 bp, Homo sapiens
ttaaggcctctcatc

SEQ ID NO: 1257973 - DNA, 15 bp, Homo sapiens
gttaaggcctctcat

SEQ ID NO: 1257974 - DNA, 15 bp, Homo sapiens
agttaaggcctctca

SEQ ID NO: 1257975 - DNA, 15 bp, Homo sapiens
gagttaaggcctctc

SEQ ID NO: 1257976 - DNA, 15 bp, Homo sapiens
tgagttaaggcctct

SEQ ID NO: 1257977 - DNA, 15 bp, Homo sapiens
ctgagttaaggcctc

SEQ ID NO: 1257978 - DNA, 15 bp, Homo sapiens
actgagttaaggcct

SEQ ID NO: 1257979 - DNA, 15 bp, Homo sapiens
cactgagttaaggcc

SEQ ID NO: 1257980 - DNA, 15 bp, Homo sapiens
tcactgagttaaggc

SEQ ID NO: 1257981 - DNA, 15 bp, Homo sapiens
ctcactgagttaagg

SEQ ID NO: 1257982 - DNA, 15 bp, Homo sapiens
cctcactgagttaag

SEQ ID NO: 1257983 - DNA, 15 bp, Homo sapiens
acctcactgagttaa

SEQ ID NO: 1257984 - DNA, 15 bp, Homo sapiens
gacctcactgagtta

SEQ ID NO: 1257985 - DNA, 15 bp, Homo sapiens
cgacctcactgagtt

SEQ ID NO: 1257986 - DNA, 15 bp, Homo sapiens
gcgacctcactgagt

SEQ ID NO: 1257987 - DNA, 15 bp, Homo sapiens
agcgacctcactgag

SEQ ID NO: 1257988 - DNA, 15 bp, Homo sapiens
cagcgacctcactga

SEQ ID NO: 1257989 - DNA, 15 bp, Homo sapiens
tcagcgacctcactg

SEQ ID NO: 1257990 - DNA, 15 bp, Homo sapiens
gtcagcgacctcact

SEQ ID NO: 1257991 - DNA, 15 bp, Homo sapiens
agtcagcgacctcac

SEQ ID NO: 1257992 - DNA, 15 bp, Homo sapiens
tagtcagcgacctca

SEQ ID NO: 1257993 - DNA, 15 bp, Homo sapiens
ctagtcagcgacctc

SEQ ID NO: 1257994 - DNA, 15 bp, Homo sapiens
actagtcagcgacct

SEQ ID NO: 1257995 - DNA, 15 bp, Homo sapiens
aactagtcagcgacc

SEQ ID NO: 1257996 - DNA, 15 bp, Homo sapiens
caactagtcagcgac

SEQ ID NO: 1257997 - DNA, 15 bp, Homo sapiens
tcaactagtcagcga

SEQ ID NO: 1257998 - DNA, 15 bp, Homo sapiens
gtcaactagtcagcg

SEQ ID NO: 1257999 - DNA, 15 bp, Homo sapiens
agtcaactagtcagc

SEQ ID NO: 1258000 - DNA, 15 bp, Homo sapiens
aagtcaactagtcag

SEQ ID NO: 1258001 - DNA, 15 bp, Homo sapiens
aaagtcaactagtca

SEQ ID NO: 1258002 - DNA, 15 bp, Homo sapiens
taaagtcaactagtc

SEQ ID NO: 1258003 - DNA, 15 bp, Homo sapiens
ttaaagtcaactagt

SEQ ID NO: 1258004 - DNA, 15 bp, Homo sapiens
cttaaagtcaactag

SEQ ID NO: 1258005 - DNA, 15 bp, Homo sapiens
ccttaaagtcaacta

SEQ ID NO: 1258006 - DNA, 15 bp, Homo sapiens
gccttaaagtcaact

SEQ ID NO: 1258007 - DNA, 15 bp, Homo sapiens
tgccttaaagtcaac

SEQ ID NO: 1258008 - DNA, 15 bp, Homo sapiens
atgccttaaagtcaa

SEQ ID NO: 1258009 - DNA, 15 bp, Homo sapiens
tatgccttaaagtca

SEQ ID NO: 1258010 - DNA, 15 bp, Homo sapiens
ctatgccttaaagtc

SEQ ID NO: 1258011 - DNA, 15 bp, Homo sapiens
gctatgccttaaagt

SEQ ID NO: 1258012 - DNA, 15 bp, Homo sapiens
agctatgccttaaag

SEQ ID NO: 1258013 - DNA, 15 bp, Homo sapiens
cagctatgccttaaa

SEQ ID NO: 1258014 - DNA, 15 bp, Homo sapiens
gcagctatgccttaa

SEQ ID NO: 1258015 - DNA, 15 bp, Homo sapiens
agcagctatgcctta

SEQ ID NO: 1258016 - DNA, 15 bp, Homo sapiens
cagcagctatgcctt

SEQ ID NO: 1258017 - DNA, 15 bp, Homo sapiens
acagcagctatgcct

SEQ ID NO: 1258018 - DNA, 15 bp, Homo sapiens
tacagcagctatgcc

SEQ ID NO: 1258019 - DNA, 15 bp, Homo sapiens
ctacagcagctatgc

SEQ ID NO: 1258020 - DNA, 15 bp, Homo sapiens
tctacagcagctatg

SEQ ID NO: 1258021 - DNA, 15 bp, Homo sapiens
atctacagcagctat

SEQ ID NO: 1258022 - DNA, 15 bp, Homo sapiens
gatctacagcagcta

SEQ ID NO: 1258023 - DNA, 15 bp, Homo sapiens
tgatctacagcagct

SEQ ID NO: 1258024 - DNA, 15 bp, Homo sapiens
atgatctacagcagc

SEQ ID NO: 1258025 - DNA, 15 bp, Homo sapiens
tatgatctacagcag

SEQ ID NO: 1258026 - DNA, 15 bp, Homo sapiens
gtatgatctacagca

SEQ ID NO: 1258027 - DNA, 15 bp, Homo sapiens
ggtatgatctacagc

SEQ ID NO: 1258028 - DNA, 15 bp, Homo sapiens
gggtatgatctacag

SEQ ID NO: 1258029 - DNA, 15 bp, Homo sapiens
ggggtatgatctaca

SEQ ID NO: 1258030 - DNA, 15 bp, Homo sapiens
aggggtatgatctac

SEQ ID NO: 1258031 - DNA, 15 bp, Homo sapiens
gaggggtatgatcta

SEQ ID NO: 1258032 - DNA, 15 bp, Homo sapiens
agaggggtatgatct

SEQ ID NO: 1258033 - DNA, 15 bp, Homo sapiens
tagaggggtatgatc

SEQ ID NO: 1258034 - DNA, 15 bp, Homo sapiens
ttagaggggtatgat

SEQ ID NO: 1258035 - DNA, 15 bp, Homo sapiens
attagaggggtatga

SEQ ID NO: 1258036 - DNA, 15 bp, Homo sapiens
aattagaggggtatg

SEQ ID NO: 1258037 - DNA, 15 bp, Homo sapiens
caattagaggggtat

SEQ ID NO: 1258038 - DNA, 15 bp, Homo sapiens
tcaattagaggggta

SEQ ID NO: 1258039 - DNA, 15 bp, Homo sapiens
gtcaattagaggggt

SEQ ID NO: 1258040 - DNA, 15 bp, Homo sapiens
ggtcaattagagggg

SEQ ID NO: 1258041 - DNA, 15 bp, Homo sapiens
gggtcaattagaggg

SEQ ID NO: 1258042 - DNA, 15 bp, Homo sapiens
ggggtcaattagagg

SEQ ID NO: 1258043 - DNA, 15 bp, Homo sapiens
tggggtcaattagag

SEQ ID NO: 1258044 - DNA, 15 bp, Homo sapiens
gtggggtcaattaga

SEQ ID NO: 1258045 - DNA, 15 bp, Homo sapiens
ggtggggtcaattag

SEQ ID NO: 1258046 - DNA, 15 bp, Homo sapiens
tggtggggtcaatta

SEQ ID NO: 1258047 - DNA, 15 bp, Homo sapiens
atggtggggtcaatt

SEQ ID NO: 1258048 - DNA, 15 bp, Homo sapiens
aatggtggggtcaat

SEQ ID NO: 1258049 - DNA, 15 bp, Homo sapiens
aaatggtggggtcaa

SEQ ID NO: 1258050 - DNA, 15 bp, Homo sapiens
taaatggtggggtca

SEQ ID NO: 1258051 - DNA, 15 bp, Homo sapiens
ataaatggtggggtc

SEQ ID NO: 1258052 - DNA, 15 bp, Homo sapiens
gataaatggtggggt

SEQ ID NO: 1258053 - DNA, 15 bp, Homo sapiens
cgataaatggtgggg

SEQ ID NO: 1258054 - DNA, 15 bp, Homo sapiens
acgataaatggtggg

SEQ ID NO: 1258055 - DNA, 15 bp, Homo sapiens
aacgataaatggtgg

SEQ ID NO: 1258056 - DNA, 15 bp, Homo sapiens
aaacgataaatggtg

SEQ ID NO: 1258057 - DNA, 15 bp, Homo sapiens
taaacgataaatggt

SEQ ID NO: 1258058 - DNA, 15 bp, Homo sapiens
ataaacgataaatgg

SEQ ID NO: 1258059 - DNA, 15 bp, Homo sapiens
gataaacgataaatg

SEQ ID NO: 1258060 - DNA, 15 bp, Homo sapiens
tgataaacgataaat

SEQ ID NO: 1258061 - DNA, 15 bp, Homo sapiens
gtgataaacgataaa

SEQ ID NO: 1258062 - DNA, 15 bp, Homo sapiens
tgtgataaacgataa

SEQ ID NO: 1258063 - DNA, 15 bp, Homo sapiens
atgtgataaacgata

SEQ ID NO: 1258064 - DNA, 15 bp, Homo sapiens
catgtgataaacgat

SEQ ID NO: 1258065 - DNA, 15 bp, Homo sapiens
ccatgtgataaacga

SEQ ID NO: 1258066 - DNA, 15 bp, Homo sapiens
cccatgtgataaacg

SEQ ID NO: 1258067 - DNA, 15 bp, Homo sapiens
gcccatgtgataaac

SEQ ID NO: 1258068 - DNA, 15 bp, Homo sapiens
tgcccatgtgataaa

SEQ ID NO: 1258069 - DNA, 15 bp, Homo sapiens
ctgcccatgtgataa

SEQ ID NO: 1258070 - DNA, 15 bp, Homo sapiens
gctgcccatgtgata

SEQ ID NO: 1258071 - DNA, 15 bp, Homo sapiens
ggctgcccatgtgat

SEQ ID NO: 1258072 - DNA, 15 bp, Homo sapiens
gggctgcccatgtga

SEQ ID NO: 1258073 - DNA, 15 bp, Homo sapiens
agggctgcccatgtg

SEQ ID NO: 1258074 - DNA, 15 bp, Homo sapiens
cagggctgcccatgt

SEQ ID NO: 1258075 - DNA, 15 bp, Homo sapiens
ccagggctgcccatg

SEQ ID NO: 1258076 - DNA, 15 bp, Homo sapiens
tccagggctgcccat

SEQ ID NO: 1258077 - DNA, 15 bp, Homo sapiens
ctccagggctgccca

SEQ ID NO: 1258078 - DNA, 15 bp, Homo sapiens
cctccagggctgccc

SEQ ID NO: 1258079 - DNA, 15 bp, Homo sapiens
acctccagggctgcc

SEQ ID NO: 1258080 - DNA, 15 bp, Homo sapiens
tacctccagggctgc

SEQ ID NO: 1258081 - DNA, 15 bp, Homo sapiens
atacctccagggctg

SEQ ID NO: 1258082 - DNA, 15 bp, Homo sapiens
catacctccagggct

SEQ ID NO: 1258083 - DNA, 15 bp, Homo sapiens
gcatacctccagggc

SEQ ID NO: 1258084 - DNA, 15 bp, Homo sapiens
ggcatacctccaggg

SEQ ID NO: 1258085 - DNA, 15 bp, Homo sapiens
aggcatacctccagg

SEQ ID NO: 1258086 - DNA, 15 bp, Homo sapiens
gaggcatacctccag

SEQ ID NO: 1258087 - DNA, 15 bp, Homo sapiens
agaggcatacctcca

SEQ ID NO: 1258088 - DNA, 15 bp, Homo sapiens
gagaggcatacctcc

SEQ ID NO: 1258089 - DNA, 15 bp, Homo sapiens
agagaggcatacctc

SEQ ID NO: 1258090 - DNA, 15 bp, Homo sapiens
cagagaggcatacct

SEQ ID NO: 1258091 - DNA, 15 bp, Homo sapiens
tcagagaggcatacc

SEQ ID NO: 1258092 - DNA, 15 bp, Homo sapiens
atcagagaggcatac

SEQ ID NO: 1258093 - DNA, 15 bp, Homo sapiens
catcagagaggcata

SEQ ID NO: 1258094 - DNA, 15 bp, Homo sapiens
ccatcagagaggcat

SEQ ID NO: 1258095 - DNA, 15 bp, Homo sapiens
gccatcagagaggca

SEQ ID NO: 1258096 - DNA, 15 bp, Homo sapiens
ggccatcagagaggc

SEQ ID NO: 1258097 - DNA, 15 bp, Homo sapiens
aggccatcagagagg

SEQ ID NO: 1258098 - DNA, 15 bp, Homo sapiens
taggccatcagagag

SEQ ID NO: 1258099 - DNA, 15 bp, Homo sapiens
ataggccatcagaga

SEQ ID NO: 1258100 - DNA, 15 bp, Homo sapiens
gataggccatcagag

SEQ ID NO: 1258101 - DNA, 15 bp, Homo sapiens
tgataggccatcaga

SEQ ID NO: 1258102 - DNA, 15 bp, Homo sapiens
ttgataggccatcag

SEQ ID NO: 1258103 - DNA, 15 bp, Homo sapiens
tttgataggccatca

SEQ ID NO: 1258104 - DNA, 15 bp, Homo sapiens
ttttgataggccatc

SEQ ID NO: 1258105 - DNA, 15 bp, Homo sapiens
tttttgataggccat

SEQ ID NO: 1258106 - DNA, 15 bp, Homo sapiens
ctttttgataggcca

SEQ ID NO: 1258107 - DNA, 15 bp, Homo sapiens
tctttttgataggcc

SEQ ID NO: 1258108 - DNA, 15 bp, Homo sapiens
ttctttttgataggc

SEQ ID NO: 1258109 - DNA, 15 bp, Homo sapiens
attctttttgatagg

SEQ ID NO: 1258110 - DNA, 15 bp, Homo sapiens
gattctttttgatag

SEQ ID NO: 1258111 - DNA, 15 bp, Homo sapiens
agattctttttgata

SEQ ID NO: 1258112 - DNA, 15 bp, Homo sapiens
cagattctttttgat

SEQ ID NO: 1258113 - DNA, 15 bp, Homo sapiens
gcagattctttttga

SEQ ID NO: 1258114 - DNA, 15 bp, Homo sapiens
ggcagattctttttg

SEQ ID NO: 1258115 - DNA, 15 bp, Homo sapiens
gggcagattcttttt

SEQ ID NO: 1258116 - DNA, 15 bp, Homo sapiens
agggcagattctttt

SEQ ID NO: 1258117 - DNA, 15 bp, Homo sapiens
aagggcagattcttt

SEQ ID NO: 1258118 - DNA, 15 bp, Homo sapiens
gaagggcagattctt

SEQ ID NO: 1258119 - DNA, 15 bp, Homo sapiens
tgaagggcagattct

SEQ ID NO: 1258120 - DNA, 15 bp, Homo sapiens
ctgaagggcagattc

SEQ ID NO: 1258121 - DNA, 15 bp, Homo sapiens
gctgaagggcagatt

SEQ ID NO: 1258122 - DNA, 15 bp, Homo sapiens
agctgaagggcagat

SEQ ID NO: 1258123 - DNA, 15 bp, Homo sapiens
aagctgaagggcaga

SEQ ID NO: 1258124 - DNA, 15 bp, Homo sapiens
gaagctgaagggcag

SEQ ID NO: 1258125 - DNA, 15 bp, Homo sapiens
tgaagctgaagggca

SEQ ID NO: 1258126 - DNA, 15 bp, Homo sapiens
ttgaagctgaagggc

SEQ ID NO: 1258127 - DNA, 15 bp, Homo sapiens
cttgaagctgaaggg

SEQ ID NO: 1258128 - DNA, 15 bp, Homo sapiens
ccttgaagctgaagg

SEQ ID NO: 1258129 - DNA, 15 bp, Homo sapiens
tccttgaagctgaag

SEQ ID NO: 1258130 - DNA, 15 bp, Homo sapiens
ttccttgaagctgaa

SEQ ID NO: 1258131 - DNA, 15 bp, Homo sapiens
gttccttgaagctga

SEQ ID NO: 1258132 - DNA, 15 bp, Homo sapiens
tgttccttgaagctg

SEQ ID NO: 1258133 - DNA, 15 bp, Homo sapiens
ctgttccttgaagct

SEQ ID NO: 1258134 - DNA, 15 bp, Homo sapiens
actgttccttgaagc

SEQ ID NO: 1258135 - DNA, 15 bp, Homo sapiens
aactgttccttgaag

SEQ ID NO: 1258136 - DNA, 15 bp, Homo sapiens
aaactgttccttgaa

SEQ ID NO: 1258137 - DNA, 15 bp, Homo sapiens
caaactgttccttga

SEQ ID NO: 1258138 - DNA, 15 bp, Homo sapiens
gcaaactgttccttg

SEQ ID NO: 1258139 - DNA, 15 bp, Homo sapiens
agcaaactgttcctt

SEQ ID NO: 1258140 - DNA, 15 bp, Homo sapiens
cagcaaactgttcct

SEQ ID NO: 1258141 - DNA, 15 bp, Homo sapiens
tcagcaaactgttcc

SEQ ID NO: 1258142 - DNA, 15 bp, Homo sapiens
gtcagcaaactgttc

SEQ ID NO: 1258143 - DNA, 15 bp, Homo sapiens
tgtcagcaaactgtt

SEQ ID NO: 1258144 - DNA, 15 bp, Homo sapiens
ctgtcagcaaactgt

SEQ ID NO: 1258145 - DNA, 15 bp, Homo sapiens
gctgtcagcaaactg

SEQ ID NO: 1258146 - DNA, 15 bp, Homo sapiens
ggctgtcagcaaact

SEQ ID NO: 1258147 - DNA, 15 bp, Homo sapiens
aggctgtcagcaaac

SEQ ID NO: 1258148 - DNA, 15 bp, Homo sapiens
gaggctgtcagcaaa

SEQ ID NO: 1258149 - DNA, 15 bp, Homo sapiens
ggaggctgtcagcaa

SEQ ID NO: 1258150 - DNA, 15 bp, Homo sapiens
tggaggctgtcagca

SEQ ID NO: 1258151 - DNA, 15 bp, Homo sapiens
ctggaggctgtcagc

SEQ ID NO: 1258152 - DNA, 15 bp, Homo sapiens
gctggaggctgtcag

SEQ ID NO: 1258153 - DNA, 15 bp, Homo sapiens
agctggaggctgtca

SEQ ID NO: 1258154 - DNA, 15 bp, Homo sapiens
cagctggaggctgtc

SEQ ID NO: 1258155 - DNA, 15 bp, Homo sapiens
acagctggaggctgt

SEQ ID NO: 1258156 - DNA, 15 bp, Homo sapiens
aacagctggaggctg

SEQ ID NO: 1258157 - DNA, 15 bp, Homo sapiens
taacagctggaggct

SEQ ID NO: 1258158 - DNA, 15 bp, Homo sapiens
ctaacagctggaggc

SEQ ID NO: 1258159 - DNA, 15 bp, Homo sapiens
actaacagctggagg

SEQ ID NO: 1258160 - DNA, 15 bp, Homo sapiens
cactaacagctggag

SEQ ID NO: 1258161 - DNA, 15 bp, Homo sapiens
gcactaacagctgga

SEQ ID NO: 1258162 - DNA, 15 bp, Homo sapiens
agcactaacagctgg

SEQ ID NO: 1258163 - DNA, 15 bp, Homo sapiens
cagcactaacagctg

SEQ ID NO: 1258164 - DNA, 15 bp, Homo sapiens
acagcactaacagct

SEQ ID NO: 1258165 - DNA, 15 bp, Homo sapiens
gacagcactaacagc

SEQ ID NO: 1258166 - DNA, 15 bp, Homo sapiens
tgacagcactaacag

SEQ ID NO: 1258167 - DNA, 15 bp, Homo sapiens
ctgacagcactaaca

SEQ ID NO: 1258168 - DNA, 15 bp, Homo sapiens
cctgacagcactaac

SEQ ID NO: 1258169 - DNA, 15 bp, Homo sapiens
gcctgacagcactaa

SEQ ID NO: 1258170 - DNA, 15 bp, Homo sapiens
agcctgacagcacta

SEQ ID NO: 1258171 - DNA, 15 bp, Homo sapiens
aagcctgacagcact

SEQ ID NO: 1258172 - DNA, 15 bp, Homo sapiens
aaagcctgacagcac

SEQ ID NO: 1258173 - DNA, 15 bp, Homo sapiens
caaagcctgacagca

SEQ ID NO: 1258174 - DNA, 15 bp, Homo sapiens
gcaaagcctgacagc

SEQ ID NO: 1258175 - DNA, 15 bp, Homo sapiens
ggcaaagcctgacag

SEQ ID NO: 1258176 - DNA, 15 bp, Homo sapiens
aggcaaagcctgaca

SEQ ID NO: 1258177 - DNA, 15 bp, Homo sapiens
gaggcaaagcctgac

SEQ ID NO: 1258178 - DNA, 15 bp, Homo sapiens
ggaggcaaagcctga

SEQ ID NO: 1258179 - DNA, 15 bp, Homo sapiens
tggaggcaaagcctg

SEQ ID NO: 1258180 - DNA, 15 bp, Homo sapiens
gtggaggcaaagcct

SEQ ID NO: 1258181 - DNA, 15 bp, Homo sapiens
cgtggaggcaaagcc

SEQ ID NO: 1258182 - DNA, 15 bp, Homo sapiens
ccgtggaggcaaagc

SEQ ID NO: 1258183 - DNA, 15 bp, Homo sapiens
tccgtggaggcaaag

SEQ ID NO: 1258184 - DNA, 15 bp, Homo sapiens
ctccgtggaggcaaa

SEQ ID NO: 1258185 - DNA, 15 bp, Homo sapiens
cctccgtggaggcaa

SEQ ID NO: 1258186 - DNA, 15 bp, Homo sapiens
gcctccgtggaggca

SEQ ID NO: 1258187 - DNA, 15 bp, Homo sapiens
ggcctccgtggaggc

SEQ ID NO: 1258188 - DNA, 15 bp, Homo sapiens
tggcctccgtggagg

SEQ ID NO: 1258189 - DNA, 15 bp, Homo sapiens
atggcctccgtggag

SEQ ID NO: 1258190 - DNA, 15 bp, Homo sapiens
tatggcctccgtgga

SEQ ID NO: 1258191 - DNA, 15 bp, Homo sapiens
gtatggcctccgtgg

SEQ ID NO: 1258192 - DNA, 15 bp, Homo sapiens
agtatggcctccgtg

SEQ ID NO: 1258193 - DNA, 15 bp, Homo sapiens
aagtatggcctccgt

SEQ ID NO: 1258194 - DNA, 15 bp, Homo sapiens
taagtatggcctccg

SEQ ID NO: 1258195 - DNA, 15 bp, Homo sapiens
ataagtatggcctcc

SEQ ID NO: 1258196 - DNA, 15 bp, Homo sapiens
gataagtatggcctc

SEQ ID NO: 1258197 - DNA, 15 bp, Homo sapiens
ggataagtatggcct

SEQ ID NO: 1258198 - DNA, 15 bp, Homo sapiens
gggataagtatggcc

SEQ ID NO: 1258199 - DNA, 15 bp, Homo sapiens
tgggataagtatggc

SEQ ID NO: 1258200 - DNA, 15 bp, Homo sapiens
atgggataagtatgg

SEQ ID NO: 1258201 - DNA, 15 bp, Homo sapiens
catgggataagtatg

SEQ ID NO: 1258202 - DNA, 15 bp, Homo sapiens
gcatgggataagtat

SEQ ID NO: 1258203 - DNA, 15 bp, Homo sapiens
agcatgggataagta

SEQ ID NO: 1258204 - DNA, 15 bp, Homo sapiens
cagcatgggataagt

SEQ ID NO: 1258205 - DNA, 15 bp, Homo sapiens
gcagcatgggataag

SEQ ID NO: 1258206 - DNA, 15 bp, Homo sapiens
cgcagcatgggataa

SEQ ID NO: 1258207 - DNA, 15 bp, Homo sapiens
acgcagcatgggata

SEQ ID NO: 1258208 - DNA, 15 bp, Homo sapiens
cacgcagcatgggat

SEQ ID NO: 1258209 - DNA, 15 bp, Homo sapiens
acacgcagcatggga

SEQ ID NO: 1258210 - DNA, 15 bp, Homo sapiens
gacacgcagcatggg

SEQ ID NO: 1258211 - DNA, 15 bp, Homo sapiens
ggacacgcagcatgg

SEQ ID NO: 1258212 - DNA, 15 bp, Homo sapiens
aggacacgcagcatg

SEQ ID NO: 1258213 - DNA, 15 bp, Homo sapiens
aaggacacgcagcat

SEQ ID NO: 1258214 - DNA, 15 bp, Homo sapiens
aaaggacacgcagca

SEQ ID NO: 1258215 - DNA, 15 bp, Homo sapiens
gaaaggacacgcagc

SEQ ID NO: 1258216 - DNA, 15 bp, Homo sapiens
tgaaaggacacgcag

SEQ ID NO: 1258217 - DNA, 15 bp, Homo sapiens
atgaaaggacacgca

SEQ ID NO: 1258218 - DNA, 15 bp, Homo sapiens
aatgaaaggacacgc

SEQ ID NO: 1258219 - DNA, 15 bp, Homo sapiens
aaatgaaaggacacg

SEQ ID NO: 1258220 - DNA, 15 bp, Homo sapiens
aaaatgaaaggacac

SEQ ID NO: 1258221 - DNA, 15 bp, Homo sapiens
caaaatgaaaggaca

SEQ ID NO: 1258222 - DNA, 15 bp, Homo sapiens
ccaaaatgaaaggac

SEQ ID NO: 1258223 - DNA, 15 bp, Homo sapiens
accaaaatgaaagga

SEQ ID NO: 1258224 - DNA, 15 bp, Homo sapiens
caccaaaatgaaagg

SEQ ID NO: 1258225 - DNA, 15 bp, Homo sapiens
acaccaaaatgaaag

SEQ ID NO: 1258226 - DNA, 15 bp, Homo sapiens
gacaccaaaatgaaa

SEQ ID NO: 1258227 - DNA, 15 bp, Homo sapiens
tgacaccaaaatgaa

SEQ ID NO: 1258228 - DNA, 15 bp, Homo sapiens
atgacaccaaaatga

SEQ ID NO: 1258229 - DNA, 15 bp, Homo sapiens
gatgacaccaaaatg

SEQ ID NO: 1258230 - DNA, 15 bp, Homo sapiens
agatgacaccaaaat

SEQ ID NO: 1258231 - DNA, 15 bp, Homo sapiens
gagatgacaccaaaa

SEQ ID NO: 1258232 - DNA, 15 bp, Homo sapiens
agagatgacaccaaa

SEQ ID NO: 1258233 - DNA, 15 bp, Homo sapiens
aagagatgacaccaa

SEQ ID NO: 1258234 - DNA, 15 bp, Homo sapiens
aaagagatgacacca

SEQ ID NO: 1258235 - DNA, 15 bp, Homo sapiens
gaaagagatgacacc

SEQ ID NO: 1258236 - DNA, 15 bp, Homo sapiens
agaaagagatgacac

SEQ ID NO: 1258237 - DNA, 15 bp, Homo sapiens
gagaaagagatgaca

SEQ ID NO: 1258238 - DNA, 15 bp, Homo sapiens
ggagaaagagatgac

SEQ ID NO: 1258239 - DNA, 15 bp, Homo sapiens
gggagaaagagatga

SEQ ID NO: 1258240 - DNA, 15 bp, Homo sapiens
ggggagaaagagatg

SEQ ID NO: 1258241 - DNA, 15 bp, Homo sapiens
aggggagaaagagat

SEQ ID NO: 1258242 - DNA, 15 bp, Homo sapiens
aaggggagaaagaga

SEQ ID NO: 1258243 - DNA, 15 bp, Homo sapiens
gaaggggagaaagag

SEQ ID NO: 1258244 - DNA, 15 bp, Homo sapiens
agaaggggagaaaga

SEQ ID NO: 1258245 - DNA, 15 bp, Homo sapiens
tagaaggggagaaag

SEQ ID NO: 1258246 - DNA, 15 bp, Homo sapiens
gtagaaggggagaaa

SEQ ID NO: 1258247 - DNA, 15 bp, Homo sapiens
ggtagaaggggagaa

SEQ ID NO: 1258248 - DNA, 15 bp, Homo sapiens
gggtagaaggggaga

SEQ ID NO: 1258249 - DNA, 15 bp, Homo sapiens
ggggtagaaggggag

SEQ ID NO: 1258250 - DNA, 15 bp, Homo sapiens
aggggtagaagggga

SEQ ID NO: 1258251 - DNA, 15 bp, Homo sapiens
gaggggtagaagggg

SEQ ID NO: 1258252 - DNA, 15 bp, Homo sapiens
ggaggggtagaaggg

SEQ ID NO: 1258253 - DNA, 15 bp, Homo sapiens
aggaggggtagaagg

SEQ ID NO: 1258254 - DNA, 15 bp, Homo sapiens
gaggaggggtagaag

SEQ ID NO: 1258255 - DNA, 15 bp, Homo sapiens
ggaggaggggtagaa

SEQ ID NO: 1258256 - DNA, 15 bp, Homo sapiens
tggaggaggggtaga

SEQ ID NO: 1258257 - DNA, 15 bp, Homo sapiens
gtggaggaggggtag

SEQ ID NO: 1258258 - DNA, 15 bp, Homo sapiens
ggtggaggaggggta

SEQ ID NO: 1258259 - DNA, 15 bp, Homo sapiens
tggtggaggaggggt

SEQ ID NO: 1258260 - DNA, 15 bp, Homo sapiens
gtggtggaggagggg

SEQ ID NO: 1258261 - DNA, 15 bp, Homo sapiens
tgtggtggaggaggg

SEQ ID NO: 1258262 - DNA, 15 bp, Homo sapiens
ctgtggtggaggagg

SEQ ID NO: 1258263 - DNA, 15 bp, Homo sapiens
actgtggtggaggag

SEQ ID NO: 1258264 - DNA, 15 bp, Homo sapiens
tactgtggtggagga

SEQ ID NO: 1258265 - DNA, 15 bp, Homo sapiens
ttactgtggtggagg

SEQ ID NO: 1258266 - DNA, 15 bp, Homo sapiens
tttactgtggtggag

SEQ ID NO: 1258267 - DNA, 15 bp, Homo sapiens
gtttactgtggtgga

SEQ ID NO: 1258268 - DNA, 15 bp, Homo sapiens
tgtttactgtggtgg

SEQ ID NO: 1258269 - DNA, 15 bp, Homo sapiens
ctgtttactgtggtg

SEQ ID NO: 1258270 - DNA, 15 bp, Homo sapiens
gctgtttactgtggt

SEQ ID NO: 1258271 - DNA, 15 bp, Homo sapiens
agctgtttactgtgg

SEQ ID NO: 1258272 - DNA, 15 bp, Homo sapiens
aagctgtttactgtg

SEQ ID NO: 1258273 - DNA, 15 bp, Homo sapiens
aaagctgtttactgt

SEQ ID NO: 1258274 - DNA, 15 bp, Homo sapiens
aaaagctgtttactg

SEQ ID NO: 1258275 - DNA, 15 bp, Homo sapiens
aaaaagctgtttact

SEQ ID NO: 1258276 - DNA, 15 bp, Homo sapiens
caaaaagctgtttac

SEQ ID NO: 1258277 - DNA, 15 bp, Homo sapiens
tcaaaaagctgttta

SEQ ID NO: 1258278 - DNA, 15 bp, Homo sapiens
ctcaaaaagctgttt

SEQ ID NO: 1258279 - DNA, 15 bp, Homo sapiens
cctcaaaaagctgtt

SEQ ID NO: 1258280 - DNA, 15 bp, Homo sapiens
ccctcaaaaagctgt

SEQ ID NO: 1258281 - DNA, 15 bp, Homo sapiens
gccctcaaaaagctg

SEQ ID NO: 1258282 - DNA, 15 bp, Homo sapiens
agccctcaaaaagct

SEQ ID NO: 1258283 - DNA, 15 bp, Homo sapiens
cagccctcaaaaagc

SEQ ID NO: 1258284 - DNA, 15 bp, Homo sapiens
ccagccctcaaaaag

SEQ ID NO: 1258285 - DNA, 15 bp, Homo sapiens
cccagccctcaaaaa

SEQ ID NO: 1258286 - DNA, 15 bp, Homo sapiens
ccccagccctcaaaa

SEQ ID NO: 1258287 - DNA, 15 bp, Homo sapiens
gccccagccctcaaa

SEQ ID NO: 1258288 - DNA, 15 bp, Homo sapiens
agccccagccctcaa

SEQ ID NO: 1258289 - DNA, 15 bp, Homo sapiens
cagccccagccctca

SEQ ID NO: 1258290 - DNA, 15 bp, Homo sapiens
acagccccagccctc

SEQ ID NO: 1258291 - DNA, 15 bp, Homo sapiens
aacagccccagccct

SEQ ID NO: 1258292 - DNA, 15 bp, Homo sapiens
aaacagccccagccc

SEQ ID NO: 1258293 - DNA, 15 bp, Homo sapiens
taaacagccccagcc

SEQ ID NO: 1258294 - DNA, 15 bp, Homo sapiens
ataaacagccccagc

SEQ ID NO: 1258295 - DNA, 15 bp, Homo sapiens
tataaacagccccag

SEQ ID NO: 1258296 - DNA, 15 bp, Homo sapiens
ttataaacagcccca

SEQ ID NO: 1258297 - DNA, 15 bp, Homo sapiens
cttataaacagcccc

SEQ ID NO: 1258298 - DNA, 15 bp, Homo sapiens
acttataaacagccc

SEQ ID NO: 1258299 - DNA, 15 bp, Homo sapiens
cacttataaacagcc

SEQ ID NO: 1258300 - DNA, 15 bp, Homo sapiens
tcacttataaacagc

SEQ ID NO: 1258301 - DNA, 15 bp, Homo sapiens
ttcacttataaacag

SEQ ID NO: 1258302 - DNA, 15 bp, Homo sapiens
cttcacttataaaca

SEQ ID NO: 1258303 - DNA, 15 bp, Homo sapiens
acttcacttataaac

SEQ ID NO: 1258304 - DNA, 15 bp, Homo sapiens
tacttcacttataaa

SEQ ID NO: 1258305 - DNA, 15 bp, Homo sapiens
ctacttcacttataa

SEQ ID NO: 1258306 - DNA, 15 bp, Homo sapiens
actacttcacttata

SEQ ID NO: 1258307 - DNA, 15 bp, Homo sapiens
aactacttcacttat

SEQ ID NO: 1258308 - DNA, 15 bp, Homo sapiens
aaactacttcactta

SEQ ID NO: 1258309 - DNA, 15 bp, Homo sapiens
taaactacttcactt

SEQ ID NO: 1258310 - DNA, 15 bp, Homo sapiens
ataaactacttcact

SEQ ID NO: 1258311 - DNA, 15 bp, Homo sapiens
tataaactacttcac

SEQ ID NO: 1258312 - DNA, 15 bp, Homo sapiens
ttataaactacttca

SEQ ID NO: 1258313 - DNA, 15 bp, Homo sapiens
tttataaactacttc

SEQ ID NO: 1258314 - DNA, 15 bp, Homo sapiens
ttttataaactactt

SEQ ID NO: 1258315 - DNA, 15 bp, Homo sapiens
tttttataaactact

SEQ ID NO: 1258316 - DNA, 15 bp, Homo sapiens
ctttttataaactac

SEQ ID NO: 1258317 - DNA, 15 bp, Homo sapiens
actttttataaacta

SEQ ID NO: 1258318 - DNA, 15 bp, Homo sapiens
tactttttataaact

SEQ ID NO: 1258319 - DNA, 15 bp, Homo sapiens
ctactttttataaac

SEQ ID NO: 1258320 - DNA, 15 bp, Homo sapiens
tctactttttataaa

SEQ ID NO: 1258321 - DNA, 15 bp, Homo sapiens
atctactttttataa

SEQ ID NO: 1258322 - DNA, 15 bp, Homo sapiens
catctactttttata

SEQ ID NO: 1258323 - DNA, 15 bp, Homo sapiens
gcatctactttttat

SEQ ID NO: 1258324 - DNA, 15 bp, Homo sapiens
tgcatctacttttta

SEQ ID NO: 1258325 - DNA, 15 bp, Homo sapiens
gtgcatctacttttt

SEQ ID NO: 1258326 - DNA, 15 bp, Homo sapiens
tgtgcatctactttt

SEQ ID NO: 1258327 - DNA, 15 bp, Homo sapiens
atgtgcatctacttt

SEQ ID NO: 1258328 - DNA, 15 bp, Homo sapiens
gatgtgcatctactt

SEQ ID NO: 1258329 - DNA, 15 bp, Homo sapiens
agatgtgcatctact

SEQ ID NO: 1258330 - DNA, 15 bp, Homo sapiens
aagatgtgcatctac

SEQ ID NO: 1258331 - DNA, 15 bp, Homo sapiens
aaagatgtgcatcta

SEQ ID NO: 1258332 - DNA, 15 bp, Homo sapiens
gaaagatgtgcatct

SEQ ID NO: 1258333 - DNA, 15 bp, Homo sapiens
tgaaagatgtgcatc

SEQ ID NO: 1258334 - DNA, 15 bp, Homo sapiens
ctgaaagatgtgcat

SEQ ID NO: 1258335 - DNA, 15 bp, Homo sapiens
gctgaaagatgtgca

SEQ ID NO: 1258336 - DNA, 15 bp, Homo sapiens
agctgaaagatgtgc

SEQ ID NO: 1258337 - DNA, 15 bp, Homo sapiens
aagctgaaagatgtg

SEQ ID NO: 1258338 - DNA, 15 bp, Homo sapiens
gaagctgaaagatgt

SEQ ID NO: 1258339 - DNA, 15 bp, Homo sapiens
tgaagctgaaagatg

SEQ ID NO: 1258340 - DNA, 15 bp, Homo sapiens
atgaagctgaaagat

SEQ ID NO: 1258341 - DNA, 15 bp, Homo sapiens
tatgaagctgaaaga

SEQ ID NO: 1258342 - DNA, 15 bp, Homo sapiens
atatgaagctgaaag

SEQ ID NO: 1258343 - DNA, 15 bp, Homo sapiens
aatatgaagctgaaa

SEQ ID NO: 1258344 - DNA, 15 bp, Homo sapiens
aaatatgaagctgaa

SEQ ID NO: 1258345 - DNA, 15 bp, Homo sapiens
taaatatgaagctga

SEQ ID NO: 1258346 - DNA, 15 bp, Homo sapiens
ctaaatatgaagctg

SEQ ID NO: 1258347 - DNA, 15 bp, Homo sapiens
gctaaatatgaagct

SEQ ID NO: 1258348 - DNA, 15 bp, Homo sapiens
tgctaaatatgaagc

SEQ ID NO: 1258349 - DNA, 15 bp, Homo sapiens
atgctaaatatgaag

SEQ ID NO: 1258350 - DNA, 15 bp, Homo sapiens
catgctaaatatgaa

SEQ ID NO: 1258351 - DNA, 15 bp, Homo sapiens
acatgctaaatatga

SEQ ID NO: 1258352 - DNA, 15 bp, Homo sapiens
aacatgctaaatatg

SEQ ID NO: 1258353 - DNA, 15 bp, Homo sapiens
caacatgctaaatat

SEQ ID NO: 1258354 - DNA, 15 bp, Homo sapiens
ccaacatgctaaata

SEQ ID NO: 1258355 - DNA, 15 bp, Homo sapiens
tccaacatgctaaat

SEQ ID NO: 1258356 - DNA, 15 bp, Homo sapiens
ttccaacatgctaaa

SEQ ID NO: 1258357 - DNA, 15 bp, Homo sapiens
tttccaacatgctaa

SEQ ID NO: 1258358 - DNA, 15 bp, Homo sapiens
atttccaacatgcta

SEQ ID NO: 1258359 - DNA, 15 bp, Homo sapiens
aatttccaacatgct

SEQ ID NO: 1258360 - DNA, 15 bp, Homo sapiens
gaatttccaacatgc

SEQ ID NO: 1258361 - DNA, 15 bp, Homo sapiens
agaatttccaacatg

SEQ ID NO: 1258362 - DNA, 15 bp, Homo sapiens
cagaatttccaacat

SEQ ID NO: 1258363 - DNA, 15 bp, Homo sapiens
acagaatttccaaca

SEQ ID NO: 1258364 - DNA, 15 bp, Homo sapiens
aacagaatttccaac

SEQ ID NO: 1258365 - DNA, 15 bp, Homo sapiens
gaacagaatttccaa

SEQ ID NO: 1258366 - DNA, 15 bp, Homo sapiens
tgaacagaatttcca

SEQ ID NO: 1258367 - DNA, 15 bp, Homo sapiens
gtgaacagaatttcc

SEQ ID NO: 1258368 - DNA, 15 bp, Homo sapiens
agtgaacagaatttc

SEQ ID NO: 1258369 - DNA, 15 bp, Homo sapiens
cagtgaacagaattt

SEQ ID NO: 1258370 - DNA, 15 bp, Homo sapiens
tcagtgaacagaatt

SEQ ID NO: 1258371 - DNA, 15 bp, Homo sapiens
atcagtgaacagaat

SEQ ID NO: 1258372 - DNA, 15 bp, Homo sapiens
gatcagtgaacagaa

SEQ ID NO: 1258373 - DNA, 15 bp, Homo sapiens
agatcagtgaacaga

SEQ ID NO: 1258374 - DNA, 15 bp, Homo sapiens
tagatcagtgaacag

SEQ ID NO: 1258375 - DNA, 15 bp, Homo sapiens
ttagatcagtgaaca

SEQ ID NO: 1258376 - DNA, 15 bp, Homo sapiens
attagatcagtgaac

SEQ ID NO: 1258377 - DNA, 15 bp, Homo sapiens
aattagatcagtgaa

SEQ ID NO: 1258378 - DNA, 15 bp, Homo sapiens
gaattagatcagtga

SEQ ID NO: 1258379 - DNA, 15 bp, Homo sapiens
agaattagatcagtg

SEQ ID NO: 1258380 - DNA, 15 bp, Homo sapiens
cagaattagatcagt

SEQ ID NO: 1258381 - DNA, 15 bp, Homo sapiens
tcagaattagatcag

SEQ ID NO: 1258382 - DNA, 15 bp, Homo sapiens
ttcagaattagatca

SEQ ID NO: 1258383 - DNA, 15 bp, Homo sapiens
tttcagaattagatc

SEQ ID NO: 1258384 - DNA, 15 bp, Homo sapiens
atttcagaattagat

SEQ ID NO: 1258385 - DNA, 15 bp, Homo sapiens
gatttcagaattaga

SEQ ID NO: 1258386 - DNA, 15 bp, Homo sapiens
agatttcagaattag

SEQ ID NO: 1258387 - DNA, 15 bp, Homo sapiens
gagatttcagaatta

SEQ ID NO: 1258388 - DNA, 15 bp, Homo sapiens
ggagatttcagaatt

SEQ ID NO: 1258389 - DNA, 15 bp, Homo sapiens
aggagatttcagaat

SEQ ID NO: 1258390 - DNA, 15 bp, Homo sapiens
aaggagatttcagaa

SEQ ID NO: 1258391 - DNA, 15 bp, Homo sapiens
caaggagatttcaga

SEQ ID NO: 1258392 - DNA, 15 bp, Homo sapiens
ccaaggagatttcag

SEQ ID NO: 1258393 - DNA, 15 bp, Homo sapiens
accaaggagatttca

SEQ ID NO: 1258394 - DNA, 15 bp, Homo sapiens
taccaaggagatttc

SEQ ID NO: 1258395 - DNA, 15 bp, Homo sapiens
ataccaaggagattt

SEQ ID NO: 1258396 - DNA, 15 bp, Homo sapiens
aataccaaggagatt

SEQ ID NO: 1258397 - DNA, 15 bp, Homo sapiens
aaataccaaggagat

SEQ ID NO: 1258398 - DNA, 15 bp, Homo sapiens
gaaataccaaggaga

SEQ ID NO: 1258399 - DNA, 15 bp, Homo sapiens
agaaataccaaggag

SEQ ID NO: 1258400 - DNA, 15 bp, Homo sapiens
aagaaataccaagga

SEQ ID NO: 1258401 - DNA, 15 bp, Homo sapiens
taagaaataccaagg

SEQ ID NO: 1258402 - DNA, 15 bp, Homo sapiens
ttaagaaataccaag

SEQ ID NO: 1258403 - DNA, 15 bp, Homo sapiens
tttaagaaataccaa

SEQ ID NO: 1258404 - DNA, 15 bp, Homo sapiens
gtttaagaaatacca

SEQ ID NO: 1258405 - DNA, 15 bp, Homo sapiens
agtttaagaaatacc

SEQ ID NO: 1258406 - DNA, 15 bp, Homo sapiens
tagtttaagaaatac

SEQ ID NO: 1258407 - DNA, 15 bp, Homo sapiens
ctagtttaagaaata

SEQ ID NO: 1258408 - DNA, 15 bp, Homo sapiens
actagtttaagaaat

SEQ ID NO: 1258409 - DNA, 15 bp, Homo sapiens
aactagtttaagaaa

SEQ ID NO: 1258410 - DNA, 15 bp, Homo sapiens
caactagtttaagaa

SEQ ID NO: 1258411 - DNA, 15 bp, Homo sapiens
acaactagtttaaga

SEQ ID NO: 1258412 - DNA, 15 bp, Homo sapiens
tacaactagtttaag

SEQ ID NO: 1258413 - DNA, 15 bp, Homo sapiens
atacaactagtttaa

SEQ ID NO: 1258414 - DNA, 15 bp, Homo sapiens
tatacaactagttta

SEQ ID NO: 1258415 - DNA, 15 bp, Homo sapiens
ctatacaactagttt

SEQ ID NO: 1258416 - DNA, 15 bp, Homo sapiens
cctatacaactagtt

SEQ ID NO: 1258417 - DNA, 15 bp, Homo sapiens
gcctatacaactagt

SEQ ID NO: 1258418 - DNA, 15 bp, Homo sapiens
agcctatacaactag

SEQ ID NO: 1258419 - DNA, 15 bp, Homo sapiens
cagcctatacaacta

SEQ ID NO: 1258420 - DNA, 15 bp, Homo sapiens
ccagcctatacaact

SEQ ID NO: 1258421 - DNA, 15 bp, Homo sapiens
cccagcctatacaac

SEQ ID NO: 1258422 - DNA, 15 bp, Homo sapiens
acccagcctatacaa

SEQ ID NO: 1258423 - DNA, 15 bp, Homo sapiens
cacccagcctataca

SEQ ID NO: 1258424 - DNA, 15 bp, Homo sapiens
gcacccagcctatac

SEQ ID NO: 1258425 - DNA, 15 bp, Homo sapiens
tgcacccagcctata

SEQ ID NO: 1258426 - DNA, 15 bp, Homo sapiens
ctgcacccagcctat

SEQ ID NO: 1258427 - DNA, 15 bp, Homo sapiens
actgcacccagccta

SEQ ID NO: 1258428 - DNA, 15 bp, Homo sapiens
cactgcacccagcct

SEQ ID NO: 1258429 - DNA, 15 bp, Homo sapiens
tggtgatctgcccac

SEQ ID NO: 1258430 - DNA, 15 bp, Homo sapiens
ctggtgatctgccca

SEQ ID NO: 1258431 - DNA, 15 bp, Homo sapiens
cctggtgatctgccc

SEQ ID NO: 1258432 - DNA, 15 bp, Homo sapiens
acctggtgatctgcc

SEQ ID NO: 1258433 - DNA, 15 bp, Homo sapiens
gacctggtgatctgc

SEQ ID NO: 1258434 - DNA, 15 bp, Homo sapiens
tgacctggtgatctg

SEQ ID NO: 1258435 - DNA, 15 bp, Homo sapiens
ctgacctggtgatct

SEQ ID NO: 1258436 - DNA, 15 bp, Homo sapiens
agatggtctcgatct

SEQ ID NO: 1258437 - DNA, 15 bp, Homo sapiens
aagatggtctcgatc

SEQ ID NO: 1258438 - DNA, 15 bp, Homo sapiens
caagatggtctcgat

SEQ ID NO: 1258439 - DNA, 15 bp, Homo sapiens
ccaagatggtctcga

SEQ ID NO: 1258440 - DNA, 15 bp, Homo sapiens
gccaagatggtctcg

SEQ ID NO: 1258441 - DNA, 15 bp, Homo sapiens
agccaagatggtctc

SEQ ID NO: 1258442 - DNA, 15 bp, Homo sapiens
tagccaagatggtct

SEQ ID NO: 1258443 - DNA, 15 bp, Homo sapiens
ttagccaagatggtc

SEQ ID NO: 1258444 - DNA, 15 bp, Homo sapiens
gttagccaagatggt

SEQ ID NO: 1258445 - DNA, 15 bp, Homo sapiens
tgttagccaagatgg

SEQ ID NO: 1258446 - DNA, 15 bp, Homo sapiens
gtgttagccaagatg

SEQ ID NO: 1258447 - DNA, 15 bp, Homo sapiens
cgtgttagccaagat

SEQ ID NO: 1258448 - DNA, 15 bp, Homo sapiens
gcgtgttagccaaga

SEQ ID NO: 1258449 - DNA, 15 bp, Homo sapiens
agcgtgttagccaag

SEQ ID NO: 1258450 - DNA, 15 bp, Homo sapiens
cagcgtgttagccaa

SEQ ID NO: 1258451 - DNA, 15 bp, Homo sapiens
tcagcgtgttagcca

SEQ ID NO: 1258452 - DNA, 15 bp, Homo sapiens
ttcagcgtgttagcc

SEQ ID NO: 1258453 - DNA, 15 bp, Homo sapiens
tttcagcgtgttagc

SEQ ID NO: 1258454 - DNA, 15 bp, Homo sapiens
gtttcagcgtgttag

SEQ ID NO: 1258455 - DNA, 15 bp, Homo sapiens
ggtttcagcgtgtta

SEQ ID NO: 1258456 - DNA, 15 bp, Homo sapiens
gggtttcagcgtgtt

SEQ ID NO: 1258457 - DNA, 15 bp, Homo sapiens
agggtttcagcgtgt

SEQ ID NO: 1258458 - DNA, 15 bp, Homo sapiens
cagggtttcagcgtg

SEQ ID NO: 1258459 - DNA, 15 bp, Homo sapiens
acagggtttcagcgt

SEQ ID NO: 1258460 - DNA, 15 bp, Homo sapiens
gacagggtttcagcg

SEQ ID NO: 1258461 - DNA, 15 bp, Homo sapiens
agacagggtttcagc

SEQ ID NO: 1258462 - DNA, 15 bp, Homo sapiens
gagacagggtttcag

SEQ ID NO: 1258463 - DNA, 15 bp, Homo sapiens
ctaattttttttttt

SEQ ID NO: 1258464 - DNA, 15 bp, Homo sapiens
gctaatttttttttt

SEQ ID NO: 1258465 - DNA, 15 bp, Homo sapiens
ggctaattttttttt

SEQ ID NO: 1258466 - DNA, 15 bp, Homo sapiens
cggctaatttttttt

SEQ ID NO: 1258467 - DNA, 15 bp, Homo sapiens
aaccacgcccggcta

SEQ ID NO: 1258468 - DNA, 15 bp, Homo sapiens
caaccacgcccggct

SEQ ID NO: 1258469 - DNA, 15 bp, Homo sapiens
acaaccacgcccggc

SEQ ID NO: 1258470 - DNA, 15 bp, Homo sapiens
cacaaccacgcccgg

SEQ ID NO: 1258471 - DNA, 15 bp, Homo sapiens
ccacaaccacgcccg

SEQ ID NO: 1258472 - DNA, 15 bp, Homo sapiens
cccacaaccacgccc

SEQ ID NO: 1258473 - DNA, 15 bp, Homo sapiens
gcccacaaccacgcc

SEQ ID NO: 1258474 - DNA, 15 bp, Homo sapiens
cgcccacaaccacgc

SEQ ID NO: 1258475 - DNA, 15 bp, Homo sapiens
gcgcccacaaccacg

SEQ ID NO: 1258476 - DNA, 15 bp, Homo sapiens
ggcgcccacaaccac

SEQ ID NO: 1258477 - DNA, 15 bp, Homo sapiens
aggcgcccacaacca

SEQ ID NO: 1258478 - DNA, 15 bp, Homo sapiens
caggcgcccacaacc

SEQ ID NO: 1258479 - DNA, 15 bp, Homo sapiens
acaggcgcccacaac

SEQ ID NO: 1258480 - DNA, 15 bp, Homo sapiens
tacaggcgcccacaa

SEQ ID NO: 1258481 - DNA, 15 bp, Homo sapiens
ctacaggcgcccaca

SEQ ID NO: 1258482 - DNA, 15 bp, Homo sapiens
actacaggcgcccac

SEQ ID NO: 1258483 - DNA, 15 bp, Homo sapiens
gactacaggcgccca

SEQ ID NO: 1258484 - DNA, 15 bp, Homo sapiens
acctgcctcagcctc

SEQ ID NO: 1258485 - DNA, 15 bp, Homo sapiens
cacctgcctcagcct

SEQ ID NO: 1258486 - DNA, 15 bp, Homo sapiens
tcacctgcctcagcc

SEQ ID NO: 1258487 - DNA, 15 bp, Homo sapiens
ttcacctgcctcagc

SEQ ID NO: 1258488 - DNA, 15 bp, Homo sapiens
attcacctgcctcag

SEQ ID NO: 1258489 - DNA, 15 bp, Homo sapiens
cattcacctgcctca

SEQ ID NO: 1258490 - DNA, 15 bp, Homo sapiens
ccattcacctgcctc

SEQ ID NO: 1258491 - DNA, 15 bp, Homo sapiens
accattcacctgcct

SEQ ID NO: 1258492 - DNA, 15 bp, Homo sapiens
caccattcacctgcc

SEQ ID NO: 1258493 - DNA, 15 bp, Homo sapiens
acaccattcacctgc

SEQ ID NO: 1258494 - DNA, 15 bp, Homo sapiens
cacaccattcacctg

SEQ ID NO: 1258495 - DNA, 15 bp, Homo sapiens
tcacaccattcacct

SEQ ID NO: 1258496 - DNA, 15 bp, Homo sapiens
ttcacaccattcacc

SEQ ID NO: 1258497 - DNA, 15 bp, Homo sapiens
gttcacaccattcac

SEQ ID NO: 1258498 - DNA, 15 bp, Homo sapiens
ggttcacaccattca

SEQ ID NO: 1258499 - DNA, 15 bp, Homo sapiens
cgggttcacaccatt

SEQ ID NO: 1258500 - DNA, 15 bp, Homo sapiens
ccgggttcacaccat

SEQ ID NO: 1258501 - DNA, 15 bp, Homo sapiens
cccgggttcacacca

SEQ ID NO: 1258502 - DNA, 15 bp, Homo sapiens
tcccgggttcacacc

SEQ ID NO: 1258503 - DNA, 15 bp, Homo sapiens
ctcccgggttcacac

SEQ ID NO: 1258504 - DNA, 15 bp, Homo sapiens
cctcccgggttcaca

SEQ ID NO: 1258505 - DNA, 15 bp, Homo sapiens
gcctcccgggttcac

SEQ ID NO: 1258506 - DNA, 15 bp, Homo sapiens
cgctcactgcaagct

SEQ ID NO: 1258507 - DNA, 15 bp, Homo sapiens
ccgctcactgcaagc

SEQ ID NO: 1258508 - DNA, 15 bp, Homo sapiens
tccgctcactgcaag

SEQ ID NO: 1258509 - DNA, 15 bp, Homo sapiens
ctccgctcactgcaa

SEQ ID NO: 1258510 - DNA, 15 bp, Homo sapiens
tctccgctcactgca

SEQ ID NO: 1258511 - DNA, 15 bp, Homo sapiens
atctccgctcactgc

SEQ ID NO: 1258512 - DNA, 15 bp, Homo sapiens
gatctccgctcactg

SEQ ID NO: 1258513 - DNA, 15 bp, Homo sapiens
tgatctccgctcact

SEQ ID NO: 1258514 - DNA, 15 bp, Homo sapiens
atgatctccgctcac

SEQ ID NO: 1258515 - DNA, 15 bp, Homo sapiens
catgatctccgctca

SEQ ID NO: 1258516 - DNA, 15 bp, Homo sapiens
gcatgatctccgctc

SEQ ID NO: 1258517 - DNA, 15 bp, Homo sapiens
ggcatgatctccgct

SEQ ID NO: 1258518 - DNA, 15 bp, Homo sapiens
tggcatgatctccgc

SEQ ID NO: 1258519 - DNA, 15 bp, Homo sapiens
gtggcatgatctccg

SEQ ID NO: 1258520 - DNA, 15 bp, Homo sapiens
agtggcatgatctcc

SEQ ID NO: 1258521 - DNA, 15 bp, Homo sapiens
agttttttttttttt

SEQ ID NO: 1258522 - DNA, 15 bp, Homo sapiens
actagtttttttttt

SEQ ID NO: 1258523 - DNA, 15 bp, Homo sapiens
tactagttttttttt

SEQ ID NO: 1258524 - DNA, 15 bp, Homo sapiens
atactagtttttttt

SEQ ID NO: 1258525 - DNA, 15 bp, Homo sapiens
catactagttttttt

SEQ ID NO: 1258526 - DNA, 15 bp, Homo sapiens
acatactagtttttt

SEQ ID NO: 1258527 - DNA, 15 bp, Homo sapiens
gacatactagttttt

SEQ ID NO: 1258528 - DNA, 15 bp, Homo sapiens
tgacatactagtttt

SEQ ID NO: 1258529 - DNA, 15 bp, Homo sapiens
ttgacatactagttt

SEQ ID NO: 1258530 - DNA, 15 bp, Homo sapiens
gttgacatactagtt

SEQ ID NO: 1258531 - DNA, 15 bp, Homo sapiens
tgttgacatactagt

SEQ ID NO: 1258532 - DNA, 15 bp, Homo sapiens
ttgttgacatactag

SEQ ID NO: 1258533 - DNA, 15 bp, Homo sapiens
tttgttgacatacta

SEQ ID NO: 1258534 - DNA, 15 bp, Homo sapiens
ctttgttgacatact

SEQ ID NO: 1258535 - DNA, 15 bp, Homo sapiens
gctttgttgacatac

SEQ ID NO: 1258536 - DNA, 15 bp, Homo sapiens
agctttgttgacata

SEQ ID NO: 1258537 - DNA, 15 bp, Homo sapiens
aagctttgttgacat

SEQ ID NO: 1258538 - DNA, 15 bp, Homo sapiens
aaagctttgttgaca

SEQ ID NO: 1258539 - DNA, 15 bp, Homo sapiens
caaagctttgttgac

SEQ ID NO: 1258540 - DNA, 15 bp, Homo sapiens
acaaagctttgttga

SEQ ID NO: 1258541 - DNA, 15 bp, Homo sapiens
cacaaagctttgttg

SEQ ID NO: 1258542 - DNA, 15 bp, Homo sapiens
gcacaaagctttgtt

SEQ ID NO: 1258543 - DNA, 15 bp, Homo sapiens
agcacaaagctttgt

SEQ ID NO: 1258544 - DNA, 15 bp, Homo sapiens
cagcacaaagctttg

SEQ ID NO: 1258545 - DNA, 15 bp, Homo sapiens
gcagcacaaagcttt

SEQ ID NO: 1258546 - DNA, 15 bp, Homo sapiens
agcagcacaaagctt

SEQ ID NO: 1258547 - DNA, 15 bp, Homo sapiens
cagcagcacaaagct

SEQ ID NO: 1258548 - DNA, 15 bp, Homo sapiens
acagcagcacaaagc

SEQ ID NO: 1258549 - DNA, 15 bp, Homo sapiens
tacagcagcacaaag

SEQ ID NO: 1258550 - DNA, 15 bp, Homo sapiens
ttacagcagcacaaa

SEQ ID NO: 1258551 - DNA, 15 bp, Homo sapiens
attacagcagcacaa

SEQ ID NO: 1258552 - DNA, 15 bp, Homo sapiens
cattacagcagcaca

SEQ ID NO: 1258553 - DNA, 15 bp, Homo sapiens
ccattacagcagcac

SEQ ID NO: 1258554 - DNA, 15 bp, Homo sapiens
cccattacagcagca

SEQ ID NO: 1258555 - DNA, 15 bp, Homo sapiens
tcccattacagcagc

SEQ ID NO: 1258556 - DNA, 15 bp, Homo sapiens
ttcccattacagcag

SEQ ID NO: 1258557 - DNA, 15 bp, Homo sapiens
cttcccattacagca

SEQ ID NO: 1258558 - DNA, 15 bp, Homo sapiens
tcttcccattacagc

SEQ ID NO: 1258559 - DNA, 15 bp, Homo sapiens
ttcttcccattacag

SEQ ID NO: 1258560 - DNA, 15 bp, Homo sapiens
gttcttcccattaca

SEQ ID NO: 1258561 - DNA, 15 bp, Homo sapiens
tgttcttcccattac

SEQ ID NO: 1258562 - DNA, 15 bp, Homo sapiens
ctgttcttcccatta

SEQ ID NO: 1258563 - DNA, 15 bp, Homo sapiens
gctgttcttcccatt

SEQ ID NO: 1258564 - DNA, 15 bp, Homo sapiens
agctgttcttcccat

SEQ ID NO: 1258565 - DNA, 15 bp, Homo sapiens
tagctgttcttccca

SEQ ID NO: 1258566 - DNA, 15 bp, Homo sapiens
ctagctgttcttccc

SEQ ID NO: 1258567 - DNA, 15 bp, Homo sapiens
gctagctgttcttcc

SEQ ID NO: 1258568 - DNA, 15 bp, Homo sapiens
ggctagctgttcttc

SEQ ID NO: 1258569 - DNA, 15 bp, Homo sapiens
aggctagctgttctt

SEQ ID NO: 1258570 - DNA, 15 bp, Homo sapiens
caggctagctgttct

SEQ ID NO: 1258571 - DNA, 15 bp, Homo sapiens
ccaggctagctgttc

SEQ ID NO: 1258572 - DNA, 15 bp, Homo sapiens
cccaggctagctgtt

SEQ ID NO: 1258573 - DNA, 15 bp, Homo sapiens
gcccaggctagctgt

SEQ ID NO: 1258574 - DNA, 15 bp, Homo sapiens
agcccaggctagctg

SEQ ID NO: 1258575 - DNA, 15 bp, Homo sapiens
tagcccaggctagct

SEQ ID NO: 1258576 - DNA, 15 bp, Homo sapiens
ctagcccaggctagc

SEQ ID NO: 1258577 - DNA, 15 bp, Homo sapiens
actagcccaggctag

SEQ ID NO: 1258578 - DNA, 15 bp, Homo sapiens
tactagcccaggcta

SEQ ID NO: 1258579 - DNA, 15 bp, Homo sapiens
ttactagcccaggct

SEQ ID NO: 1258580 - DNA, 15 bp, Homo sapiens
attactagcccaggc

SEQ ID NO: 1258581 - DNA, 15 bp, Homo sapiens
tattactagcccagg

SEQ ID NO: 1258582 - DNA, 15 bp, Homo sapiens
atattactagcccag

SEQ ID NO: 1258583 - DNA, 15 bp, Homo sapiens
catattactagccca

SEQ ID NO: 1258584 - DNA, 15 bp, Homo sapiens
gcatattactagccc

SEQ ID NO: 1258585 - DNA, 15 bp, Homo sapiens
agcatattactagcc

SEQ ID NO: 1258586 - DNA, 15 bp, Homo sapiens
tagcatattactagc

SEQ ID NO: 1258587 - DNA, 15 bp, Homo sapiens
ttagcatattactag

SEQ ID NO: 1258588 - DNA, 15 bp, Homo sapiens
gttagcatattacta

SEQ ID NO: 1258589 - DNA, 15 bp, Homo sapiens
agttagcatattact

SEQ ID NO: 1258590 - DNA, 15 bp, Homo sapiens
cagttagcatattac

SEQ ID NO: 1258591 - DNA, 15 bp, Homo sapiens
ccagttagcatatta

SEQ ID NO: 1258592 - DNA, 15 bp, Homo sapiens
accagttagcatatt

SEQ ID NO: 1258593 - DNA, 15 bp, Homo sapiens
aaccagttagcatat

SEQ ID NO: 1258594 - DNA, 15 bp, Homo sapiens
aaaccagttagcata

SEQ ID NO: 1258595 - DNA, 15 bp, Homo sapiens
taaaccagttagcat

SEQ ID NO: 1258596 - DNA, 15 bp, Homo sapiens
ataaaccagttagca

SEQ ID NO: 1258597 - DNA, 15 bp, Homo sapiens
cataaaccagttagc

SEQ ID NO: 1258598 - DNA, 15 bp, Homo sapiens
tcataaaccagttag

SEQ ID NO: 1258599 - DNA, 15 bp, Homo sapiens
ttcataaaccagtta

SEQ ID NO: 1258600 - DNA, 15 bp, Homo sapiens
gttcataaaccagtt

SEQ ID NO: 1258601 - DNA, 15 bp, Homo sapiens
agttcataaaccagt

SEQ ID NO: 1258602 - DNA, 15 bp, Homo sapiens
aagttcataaaccag

SEQ ID NO: 1258603 - DNA, 15 bp, Homo sapiens
taagttcataaacca

SEQ ID NO: 1258604 - DNA, 15 bp, Homo sapiens
ctaagttcataaacc

SEQ ID NO: 1258605 - DNA, 15 bp, Homo sapiens
cctaagttcataaac

SEQ ID NO: 1258606 - DNA, 15 bp, Homo sapiens
acctaagttcataaa

SEQ ID NO: 1258607 - DNA, 15 bp, Homo sapiens
tacctaagttcataa

SEQ ID NO: 1258608 - DNA, 15 bp, Homo sapiens
ctacctaagttcata

SEQ ID NO: 1258609 - DNA, 15 bp, Homo sapiens
cctacctaagttcat

SEQ ID NO: 1258610 - DNA, 15 bp, Homo sapiens
acctacctaagttca

SEQ ID NO: 1258611 - DNA, 15 bp, Homo sapiens
cacctacctaagttc

SEQ ID NO: 1258612 - DNA, 15 bp, Homo sapiens
tcacctacctaagtt

SEQ ID NO: 1258613 - DNA, 15 bp, Homo sapiens
ctcacctacctaagt

SEQ ID NO: 1258614 - DNA, 15 bp, Homo sapiens
actcacctacctaag

SEQ ID NO: 1258615 - DNA, 15 bp, Homo sapiens
gactcacctacctaa

SEQ ID NO: 1258616 - DNA, 15 bp, Homo sapiens
tgactcacctaccta

SEQ ID NO: 1258617 - DNA, 15 bp, Homo sapiens
gtgactcacctacct

SEQ ID NO: 1258618 - DNA, 15 bp, Homo sapiens
agtgactcacctacc

SEQ ID NO: 1258619 - DNA, 15 bp, Homo sapiens
aagtgactcacctac

SEQ ID NO: 1258620 - DNA, 15 bp, Homo sapiens
caagtgactcaccta

SEQ ID NO: 1258621 - DNA, 15 bp, Homo sapiens
tcaagtgactcacct

SEQ ID NO: 1258622 - DNA, 15 bp, Homo sapiens
gtcaagtgactcacc

SEQ ID NO: 1258623 - DNA, 15 bp, Homo sapiens
agtcaagtgactcac

SEQ ID NO: 1258624 - DNA, 15 bp, Homo sapiens
tagtcaagtgactca

SEQ ID NO: 1258625 - DNA, 15 bp, Homo sapiens
atagtcaagtgactc

SEQ ID NO: 1258626 - DNA, 15 bp, Homo sapiens
aatagtcaagtgact

SEQ ID NO: 1258627 - DNA, 15 bp, Homo sapiens
gaatagtcaagtgac

SEQ ID NO: 1258628 - DNA, 15 bp, Homo sapiens
agaatagtcaagtga

SEQ ID NO: 1258629 - DNA, 15 bp, Homo sapiens
cagaatagtcaagtg

SEQ ID NO: 1258630 - DNA, 15 bp, Homo sapiens
ccagaatagtcaagt

SEQ ID NO: 1258631 - DNA, 15 bp, Homo sapiens
cccagaatagtcaag

SEQ ID NO: 1258632 - DNA, 15 bp, Homo sapiens
acccagaatagtcaa

SEQ ID NO: 1258633 - DNA, 15 bp, Homo sapiens
gacccagaatagtca

SEQ ID NO: 1258634 - DNA, 15 bp, Homo sapiens
agacccagaatagtc

SEQ ID NO: 1258635 - DNA, 15 bp, Homo sapiens
cagacccagaatagt

SEQ ID NO: 1258636 - DNA, 15 bp, Homo sapiens
acagacccagaatag

SEQ ID NO: 1258637 - DNA, 15 bp, Homo sapiens
aacagacccagaata

SEQ ID NO: 1258638 - DNA, 15 bp, Homo sapiens
gaacagacccagaat

SEQ ID NO: 1258639 - DNA, 15 bp, Homo sapiens
agaacagacccagaa

SEQ ID NO: 1258640 - DNA, 15 bp, Homo sapiens
cagaacagacccaga

SEQ ID NO: 1258641 - DNA, 15 bp, Homo sapiens
tcagaacagacccag

SEQ ID NO: 1258642 - DNA, 15 bp, Homo sapiens
ttcagaacagaccca

SEQ ID NO: 1258643 - DNA, 15 bp, Homo sapiens
cttcagaacagaccc

SEQ ID NO: 1258644 - DNA, 15 bp, Homo sapiens
ccttcagaacagacc

SEQ ID NO: 1258645 - DNA, 15 bp, Homo sapiens
cccttcagaacagac

SEQ ID NO: 1258646 - DNA, 15 bp, Homo sapiens
tcccttcagaacaga

SEQ ID NO: 1258647 - DNA, 15 bp, Homo sapiens
ctcccttcagaacag

SEQ ID NO: 1258648 - DNA, 15 bp, Homo sapiens
tctcccttcagaaca

SEQ ID NO: 1258649 - DNA, 15 bp, Homo sapiens
ctctcccttcagaac

SEQ ID NO: 1258650 - DNA, 15 bp, Homo sapiens
cctctcccttcagaa

SEQ ID NO: 1258651 - DNA, 15 bp, Homo sapiens
gcctctcccttcaga

SEQ ID NO: 1258652 - DNA, 15 bp, Homo sapiens
tgcctctcccttcag

SEQ ID NO: 1258653 - DNA, 15 bp, Homo sapiens
ctgcctctcccttca

SEQ ID NO: 1258654 - DNA, 15 bp, Homo sapiens
actgcctctcccttc

SEQ ID NO: 1258655 - DNA, 15 bp, Homo sapiens
tactgcctctccctt

SEQ ID NO: 1258656 - DNA, 15 bp, Homo sapiens
ctactgcctctccct

SEQ ID NO: 1258657 - DNA, 15 bp, Homo sapiens
cctactgcctctccc

SEQ ID NO: 1258658 - DNA, 15 bp, Homo sapiens
tcctactgcctctcc

SEQ ID NO: 1258659 - DNA, 15 bp, Homo sapiens
gtcctactgcctctc

SEQ ID NO: 1258660 - DNA, 15 bp, Homo sapiens
agtcctactgcctct

SEQ ID NO: 1258661 - DNA, 15 bp, Homo sapiens
tagtcctactgcctc

SEQ ID NO: 1258662 - DNA, 15 bp, Homo sapiens
ctagtcctactgcct

SEQ ID NO: 1258663 - DNA, 15 bp, Homo sapiens
cctagtcctactgcc

SEQ ID NO: 1258664 - DNA, 15 bp, Homo sapiens
tcctagtcctactgc

SEQ ID NO: 1258665 - DNA, 15 bp, Homo sapiens
ctcctagtcctactg

SEQ ID NO: 1258666 - DNA, 15 bp, Homo sapiens
actcctagtcctact

SEQ ID NO: 1258667 - DNA, 15 bp, Homo sapiens
aactcctagtcctac

SEQ ID NO: 1258668 - DNA, 15 bp, Homo sapiens
taactcctagtccta

SEQ ID NO: 1258669 - DNA, 15 bp, Homo sapiens
ttaactcctagtcct

SEQ ID NO: 1258670 - DNA, 15 bp, Homo sapiens
tttaactcctagtcc

SEQ ID NO: 1258671 - DNA, 15 bp, Homo sapiens
atttaactcctagtc

SEQ ID NO: 1258672 - DNA, 15 bp, Homo sapiens
aatttaactcctagt

SEQ ID NO: 1258673 - DNA, 15 bp, Homo sapiens
caatttaactcctag

SEQ ID NO: 1258674 - DNA, 15 bp, Homo sapiens
acaatttaactccta

SEQ ID NO: 1258675 - DNA, 15 bp, Homo sapiens
gacaatttaactcct

SEQ ID NO: 1258676 - DNA, 15 bp, Homo sapiens
tgacaatttaactcc

SEQ ID NO: 1258677 - DNA, 15 bp, Homo sapiens
atgacaatttaactc

SEQ ID NO: 1258678 - DNA, 15 bp, Homo sapiens
catgacaatttaact

SEQ ID NO: 1258679 - DNA, 15 bp, Homo sapiens
gcatgacaatttaac

SEQ ID NO: 1258680 - DNA, 15 bp, Homo sapiens
ggcatgacaatttaa

SEQ ID NO: 1258681 - DNA, 15 bp, Homo sapiens
cggcatgacaattta

SEQ ID NO: 1258682 - DNA, 15 bp, Homo sapiens
tcggcatgacaattt

SEQ ID NO: 1258683 - DNA, 15 bp, Homo sapiens
ctcggcatgacaatt

SEQ ID NO: 1258684 - DNA, 15 bp, Homo sapiens
cctcggcatgacaat

SEQ ID NO: 1258685 - DNA, 15 bp, Homo sapiens
acctcggcatgacaa

SEQ ID NO: 1258686 - DNA, 15 bp, Homo sapiens
gacctcggcatgaca

SEQ ID NO: 1258687 - DNA, 15 bp, Homo sapiens
agacctcggcatgac

SEQ ID NO: 1258688 - DNA, 15 bp, Homo sapiens
gagacctcggcatga

SEQ ID NO: 1258689 - DNA, 15 bp, Homo sapiens
agagacctcggcatg

SEQ ID NO: 1258690 - DNA, 15 bp, Homo sapiens
cagagacctcggcat

SEQ ID NO: 1258691 - DNA, 15 bp, Homo sapiens
tcagagacctcggca

SEQ ID NO: 1258692 - DNA, 15 bp, Homo sapiens
ctcagagacctcggc

SEQ ID NO: 1258693 - DNA, 15 bp, Homo sapiens
gctcagagacctcgg

SEQ ID NO: 1258694 - DNA, 15 bp, Homo sapiens
tgctcagagacctcg

SEQ ID NO: 1258695 - DNA, 15 bp, Homo sapiens
atgctcagagacctc

SEQ ID NO: 1258696 - DNA, 15 bp, Homo sapiens
catgctcagagacct

SEQ ID NO: 1258697 - DNA, 15 bp, Homo sapiens
ccatgctcagagacc

SEQ ID NO: 1258698 - DNA, 15 bp, Homo sapiens
cccatgctcagagac

SEQ ID NO: 1258699 - DNA, 15 bp, Homo sapiens
acccatgctcagaga

SEQ ID NO: 1258700 - DNA, 15 bp, Homo sapiens
cacccatgctcagag

SEQ ID NO: 1258701 - DNA, 15 bp, Homo sapiens
ccacccatgctcaga

SEQ ID NO: 1258702 - DNA, 15 bp, Homo sapiens
cccacccatgctcag

SEQ ID NO: 1258703 - DNA, 15 bp, Homo sapiens
gcccacccatgctca

SEQ ID NO: 1258704 - DNA, 15 bp, Homo sapiens
ggcccacccatgctc

SEQ ID NO: 1258705 - DNA, 15 bp, Homo sapiens
aggcccacccatgct

SEQ ID NO: 1258706 - DNA, 15 bp, Homo sapiens
caggcccacccatgc

SEQ ID NO: 1258707 - DNA, 15 bp, Homo sapiens
acaggcccacccatg

SEQ ID NO: 1258708 - DNA, 15 bp, Homo sapiens
gacaggcccacccat

SEQ ID NO: 1258709 - DNA, 15 bp, Homo sapiens
tgacaggcccaccca

SEQ ID NO: 1258710 - DNA, 15 bp, Homo sapiens
ctgacaggcccaccc

SEQ ID NO: 1258711 - DNA, 15 bp, Homo sapiens
tctgacaggcccacc

SEQ ID NO: 1258712 - DNA, 15 bp, Homo sapiens
ttctgacaggcccac

SEQ ID NO: 1258713 - DNA, 15 bp, Homo sapiens
attctgacaggccca

SEQ ID NO: 1258714 - DNA, 15 bp, Homo sapiens
aattctgacaggccc

SEQ ID NO: 1258715 - DNA, 15 bp, Homo sapiens
caattctgacaggcc

SEQ ID NO: 1258716 - DNA, 15 bp, Homo sapiens
acaattctgacaggc

SEQ ID NO: 1258717 - DNA, 15 bp, Homo sapiens
gacaattctgacagg

SEQ ID NO: 1258718 - DNA, 15 bp, Homo sapiens
tgacaattctgacag

SEQ ID NO: 1258719 - DNA, 15 bp, Homo sapiens
atgacaattctgaca

SEQ ID NO: 1258720 - DNA, 15 bp, Homo sapiens
gatgacaattctgac

SEQ ID NO: 1258721 - DNA, 15 bp, Homo sapiens
cgatgacaattctga

SEQ ID NO: 1258722 - DNA, 15 bp, Homo sapiens
gcgatgacaattctg

SEQ ID NO: 1258723 - DNA, 15 bp, Homo sapiens
agcgatgacaattct

SEQ ID NO: 1258724 - DNA, 15 bp, Homo sapiens
gagcgatgacaattc

SEQ ID NO: 1258725 - DNA, 15 bp, Homo sapiens
tgagcgatgacaatt

SEQ ID NO: 1258726 - DNA, 15 bp, Homo sapiens
gtgagcgatgacaat

SEQ ID NO: 1258727 - DNA, 15 bp, Homo sapiens
agtgagcgatgacaa

SEQ ID NO: 1258728 - DNA, 15 bp, Homo sapiens
gagtgagcgatgaca

SEQ ID NO: 1258729 - DNA, 15 bp, Homo sapiens
agagtgagcgatgac

SEQ ID NO: 1258730 - DNA, 15 bp, Homo sapiens
cagagtgagcgatga

SEQ ID NO: 1258731 - DNA, 15 bp, Homo sapiens
acagagtgagcgatg

SEQ ID NO: 1258732 - DNA, 15 bp, Homo sapiens
aacagagtgagcgat

SEQ ID NO: 1258733 - DNA, 15 bp, Homo sapiens
caacagagtgagcga

SEQ ID NO: 1258734 - DNA, 15 bp, Homo sapiens
tcaacagagtgagcg

SEQ ID NO: 1258735 - DNA, 15 bp, Homo sapiens
gtcaacagagtgagc

SEQ ID NO: 1258736 - DNA, 15 bp, Homo sapiens
agtcaacagagtgag

SEQ ID NO: 1258737 - DNA, 15 bp, Homo sapiens
aagtcaacagagtga

SEQ ID NO: 1258738 - DNA, 15 bp, Homo sapiens
gaagtcaacagagtg

SEQ ID NO: 1258739 - DNA, 15 bp, Homo sapiens
ggaagtcaacagagt

SEQ ID NO: 1258740 - DNA, 15 bp, Homo sapiens
tggaagtcaacagag

SEQ ID NO: 1258741 - DNA, 15 bp, Homo sapiens
ctggaagtcaacaga

SEQ ID NO: 1258742 - DNA, 15 bp, Homo sapiens
gctggaagtcaacag

SEQ ID NO: 1258743 - DNA, 15 bp, Homo sapiens
tgctggaagtcaaca

SEQ ID NO: 1258744 - DNA, 15 bp, Homo sapiens
ctgctggaagtcaac

SEQ ID NO: 1258745 - DNA, 15 bp, Homo sapiens
gctgctggaagtcaa

SEQ ID NO: 1258746 - DNA, 15 bp, Homo sapiens
agctgctggaagtca

SEQ ID NO: 1258747 - DNA, 15 bp, Homo sapiens
cagctgctggaagtc

SEQ ID NO: 1258748 - DNA, 15 bp, Homo sapiens
tcagctgctggaagt

SEQ ID NO: 1258749 - DNA, 15 bp, Homo sapiens
gtcagctgctggaag

SEQ ID NO: 1258750 - DNA, 15 bp, Homo sapiens
cctgtcagctgctgg

SEQ ID NO: 1258751 - DNA, 15 bp, Homo sapiens
gcctgtcagctgctg

SEQ ID NO: 1258752 - DNA, 15 bp, Homo sapiens
tgcctgtcagctgct

SEQ ID NO: 1258753 - DNA, 15 bp, Homo sapiens
ttgcctgtcagctgc

SEQ ID NO: 1258754 - DNA, 15 bp, Homo sapiens
cttgcctgtcagctg

SEQ ID NO: 1258755 - DNA, 15 bp, Homo sapiens
ccttgcctgtcagct

SEQ ID NO: 1258756 - DNA, 15 bp, Homo sapiens
gccttgcctgtcagc

SEQ ID NO: 1258757 - DNA, 15 bp, Homo sapiens
ggccttgcctgtcag

SEQ ID NO: 1258758 - DNA, 15 bp, Homo sapiens
gggccttgcctgtca

SEQ ID NO: 1258759 - DNA, 15 bp, Homo sapiens
agggccttgcctgtc

SEQ ID NO: 1258760 - DNA, 15 bp, Homo sapiens
tagggccttgcctgt

SEQ ID NO: 1258761 - DNA, 15 bp, Homo sapiens
ctagggccttgcctg

SEQ ID NO: 1258762 - DNA, 15 bp, Homo sapiens
cctagggccttgcct

SEQ ID NO: 1258763 - DNA, 15 bp, Homo sapiens
tcctagggccttgcc

SEQ ID NO: 1258764 - DNA, 15 bp, Homo sapiens
ttcctagggccttgc

SEQ ID NO: 1258765 - DNA, 15 bp, Homo sapiens
cttcctagggccttg

SEQ ID NO: 1258766 - DNA, 15 bp, Homo sapiens
gcttcctagggcctt

SEQ ID NO: 1258767 - DNA, 15 bp, Homo sapiens
agcttcctagggcct

SEQ ID NO: 1258768 - DNA, 15 bp, Homo sapiens
gagcttcctagggcc

SEQ ID NO: 1258769 - DNA, 15 bp, Homo sapiens
agagcttcctagggc

SEQ ID NO: 1258770 - DNA, 15 bp, Homo sapiens
aagagcttcctaggg

SEQ ID NO: 1258771 - DNA, 15 bp, Homo sapiens
gaagagcttcctagg

SEQ ID NO: 1258772 - DNA, 15 bp, Homo sapiens
tgaagagcttcctag

SEQ ID NO: 1258773 - DNA, 15 bp, Homo sapiens
ctgaagagcttccta

SEQ ID NO: 1258774 - DNA, 15 bp, Homo sapiens
gctgaagagcttcct

SEQ ID NO: 1258775 - DNA, 15 bp, Homo sapiens
ggctgaagagcttcc

SEQ ID NO: 1258776 - DNA, 15 bp, Homo sapiens
aggctgaagagcttc

SEQ ID NO: 1258777 - DNA, 15 bp, Homo sapiens
gaggctgaagagctt

SEQ ID NO: 1258778 - DNA, 15 bp, Homo sapiens
ggaggctgaagagct

SEQ ID NO: 1258779 - DNA, 15 bp, Homo sapiens
aggaggctgaagagc

SEQ ID NO: 1258780 - DNA, 15 bp, Homo sapiens
aaggaggctgaagag

SEQ ID NO: 1258781 - DNA, 15 bp, Homo sapiens
aaaggaggctgaaga

SEQ ID NO: 1258782 - DNA, 15 bp, Homo sapiens
gaaaggaggctgaag

SEQ ID NO: 1258783 - DNA, 15 bp, Homo sapiens
ggaaaggaggctgaa

SEQ ID NO: 1258784 - DNA, 15 bp, Homo sapiens
aggaaaggaggctga

SEQ ID NO: 1258785 - DNA, 15 bp, Homo sapiens
aaggaaaggaggctg

SEQ ID NO: 1258786 - DNA, 15 bp, Homo sapiens
caaggaaaggaggct

SEQ ID NO: 1258787 - DNA, 15 bp, Homo sapiens
gcaaggaaaggaggc

SEQ ID NO: 1258788 - DNA, 15 bp, Homo sapiens
agcaaggaaaggagg

SEQ ID NO: 1258789 - DNA, 15 bp, Homo sapiens
tagcaaggaaaggag

SEQ ID NO: 1258790 - DNA, 15 bp, Homo sapiens
ctagcaaggaaagga

SEQ ID NO: 1258791 - DNA, 15 bp, Homo sapiens
tctagcaaggaaagg

SEQ ID NO: 1258792 - DNA, 15 bp, Homo sapiens
ctctagcaaggaaag

SEQ ID NO: 1258793 - DNA, 15 bp, Homo sapiens
cctctagcaaggaaa

SEQ ID NO: 1258794 - DNA, 15 bp, Homo sapiens
acctctagcaaggaa

SEQ ID NO: 1258795 - DNA, 15 bp, Homo sapiens
cacctctagcaagga

SEQ ID NO: 1258796 - DNA, 15 bp, Homo sapiens
gcacctctagcaagg

SEQ ID NO: 1258797 - DNA, 15 bp, Homo sapiens
agcacctctagcaag

SEQ ID NO: 1258798 - DNA, 15 bp, Homo sapiens
cagcacctctagcaa

SEQ ID NO: 1258799 - DNA, 15 bp, Homo sapiens
acagcacctctagca

SEQ ID NO: 1258800 - DNA, 15 bp, Homo sapiens
aacagcacctctagc

SEQ ID NO: 1258801 - DNA, 15 bp, Homo sapiens
aaacagcacctctag

SEQ ID NO: 1258802 - DNA, 15 bp, Homo sapiens
aaaacagcacctcta

SEQ ID NO: 1258803 - DNA, 15 bp, Homo sapiens
gaaaacagcacctct

SEQ ID NO: 1258804 - DNA, 15 bp, Homo sapiens
ggaaaacagcacctc

SEQ ID NO: 1258805 - DNA, 15 bp, Homo sapiens
gggaaaacagcacct

SEQ ID NO: 1258806 - DNA, 15 bp, Homo sapiens
agggaaaacagcacc

SEQ ID NO: 1258807 - DNA, 15 bp, Homo sapiens
cagggaaaacagcac

SEQ ID NO: 1258808 - DNA, 15 bp, Homo sapiens
ccagggaaaacagca

SEQ ID NO: 1258809 - DNA, 15 bp, Homo sapiens
tccagggaaaacagc

SEQ ID NO: 1258810 - DNA, 15 bp, Homo sapiens
ttccagggaaaacag

SEQ ID NO: 1258811 - DNA, 15 bp, Homo sapiens
tttccagggaaaaca

SEQ ID NO: 1258812 - DNA, 15 bp, Homo sapiens
atttccagggaaaac

SEQ ID NO: 1258813 - DNA, 15 bp, Homo sapiens
catttccagggaaaa

SEQ ID NO: 1258814 - DNA, 15 bp, Homo sapiens
acatttccagggaaa

SEQ ID NO: 1258815 - DNA, 15 bp, Homo sapiens
aacatttccagggaa

SEQ ID NO: 1258816 - DNA, 15 bp, Homo sapiens
gaacatttccaggga

SEQ ID NO: 1258817 - DNA, 15 bp, Homo sapiens
tgaacatttccaggg

SEQ ID NO: 1258818 - DNA, 15 bp, Homo sapiens
ttgaacatttccagg

SEQ ID NO: 1258819 - DNA, 15 bp, Homo sapiens
cttgaacatttccag

SEQ ID NO: 1258820 - DNA, 15 bp, Homo sapiens
gcttgaacatttcca

SEQ ID NO: 1258821 - DNA, 15 bp, Homo sapiens
ggcttgaacatttcc

SEQ ID NO: 1258822 - DNA, 15 bp, Homo sapiens
gggcttgaacatttc

SEQ ID NO: 1258823 - DNA, 15 bp, Homo sapiens
agggcttgaacattt

SEQ ID NO: 1258824 - DNA, 15 bp, Homo sapiens
cagggcttgaacatt

SEQ ID NO: 1258825 - DNA, 15 bp, Homo sapiens
gcagggcttgaacat

SEQ ID NO: 1258826 - DNA, 15 bp, Homo sapiens
tgcagggcttgaaca

SEQ ID NO: 1258827 - DNA, 15 bp, Homo sapiens
ttgcagggcttgaac

SEQ ID NO: 1258828 - DNA, 15 bp, Homo sapiens
tttgcagggcttgaa

SEQ ID NO: 1258829 - DNA, 15 bp, Homo sapiens
atttgcagggcttga

SEQ ID NO: 1258830 - DNA, 15 bp, Homo sapiens
gatttgcagggcttg

SEQ ID NO: 1258831 - DNA, 15 bp, Homo sapiens
cgatttgcagggctt

SEQ ID NO: 1258832 - DNA, 15 bp, Homo sapiens
acgatttgcagggct

SEQ ID NO: 1258833 - DNA, 15 bp, Homo sapiens
aacgatttgcagggc

SEQ ID NO: 1258834 - DNA, 15 bp, Homo sapiens
aaacgatttgcaggg

SEQ ID NO: 1258835 - DNA, 15 bp, Homo sapiens
gaaacgatttgcagg

SEQ ID NO: 1258836 - DNA, 15 bp, Homo sapiens
agaaacgatttgcag

SEQ ID NO: 1258837 - DNA, 15 bp, Homo sapiens
tagaaacgatttgca

SEQ ID NO: 1258838 - DNA, 15 bp, Homo sapiens
atagaaacgatttgc

SEQ ID NO: 1258839 - DNA, 15 bp, Homo sapiens
tatagaaacgatttg

SEQ ID NO: 1258840 - DNA, 15 bp, Homo sapiens
ctatagaaacgattt

SEQ ID NO: 1258841 - DNA, 15 bp, Homo sapiens
actatagaaacgatt

SEQ ID NO: 1258842 - DNA, 15 bp, Homo sapiens
tactatagaaacgat

SEQ ID NO: 1258843 - DNA, 15 bp, Homo sapiens
ttactatagaaacga

SEQ ID NO: 1258844 - DNA, 15 bp, Homo sapiens
gttactatagaaacg

SEQ ID NO: 1258845 - DNA, 15 bp, Homo sapiens
tgttactatagaaac

SEQ ID NO: 1258846 - DNA, 15 bp, Homo sapiens
ctgttactatagaaa

SEQ ID NO: 1258847 - DNA, 15 bp, Homo sapiens
cctgttactatagaa

SEQ ID NO: 1258848 - DNA, 15 bp, Homo sapiens
acctgttactataga

SEQ ID NO: 1258849 - DNA, 15 bp, Homo sapiens
gacctgttactatag

SEQ ID NO: 1258850 - DNA, 15 bp, Homo sapiens
agacctgttactata

SEQ ID NO: 1258851 - DNA, 15 bp, Homo sapiens
gagacctgttactat

SEQ ID NO: 1258852 - DNA, 15 bp, Homo sapiens
agagacctgttacta

SEQ ID NO: 1258853 - DNA, 15 bp, Homo sapiens
cagagacctgttact

SEQ ID NO: 1258854 - DNA, 15 bp, Homo sapiens
acagagacctgttac

SEQ ID NO: 1258855 - DNA, 15 bp, Homo sapiens
gacagagacctgtta

SEQ ID NO: 1258856 - DNA, 15 bp, Homo sapiens
agacagagacctgtt

SEQ ID NO: 1258857 - DNA, 15 bp, Homo sapiens
aagacagagacctgt

SEQ ID NO: 1258858 - DNA, 15 bp, Homo sapiens
aaagacagagacctg

SEQ ID NO: 1258859 - DNA, 15 bp, Homo sapiens
aaaagacagagacct

SEQ ID NO: 1258860 - DNA, 15 bp, Homo sapiens
aaaaagacagagacc

SEQ ID NO: 1258861 - DNA, 15 bp, Homo sapiens
aaaaaagacagagac

SEQ ID NO: 1258862 - DNA, 15 bp, Homo sapiens
gaaaaaagacagaga

SEQ ID NO: 1258863 - DNA, 15 bp, Homo sapiens
agaaaaaagacagag

SEQ ID NO: 1258864 - DNA, 15 bp, Homo sapiens
aagaaaaaagacaga

SEQ ID NO: 1258865 - DNA, 15 bp, Homo sapiens
taagaaaaaagacag

SEQ ID NO: 1258866 - DNA, 15 bp, Homo sapiens
ataagaaaaaagaca

SEQ ID NO: 1258867 - DNA, 15 bp, Homo sapiens
cataagaaaaaagac

SEQ ID NO: 1258868 - DNA, 15 bp, Homo sapiens
tcataagaaaaaaga

SEQ ID NO: 1258869 - DNA, 15 bp, Homo sapiens
atcataagaaaaaag

SEQ ID NO: 1258870 - DNA, 15 bp, Homo sapiens
catcataagaaaaaa

SEQ ID NO: 1258871 - DNA, 15 bp, Homo sapiens
gcatcataagaaaaa

SEQ ID NO: 1258872 - DNA, 15 bp, Homo sapiens
tgcatcataagaaaa

SEQ ID NO: 1258873 - DNA, 15 bp, Homo sapiens
ctgcatcataagaaa

SEQ ID NO: 1258874 - DNA, 15 bp, Homo sapiens
tctgcatcataagaa

SEQ ID NO: 1258875 - DNA, 15 bp, Homo sapiens
atctgcatcataaga

SEQ ID NO: 1258876 - DNA, 15 bp, Homo sapiens
aatctgcatcataag

SEQ ID NO: 1258877 - DNA, 15 bp, Homo sapiens
aaatctgcatcataa

SEQ ID NO: 1258878 - DNA, 15 bp, Homo sapiens
aaaatctgcatcata

SEQ ID NO: 1258879 - DNA, 15 bp, Homo sapiens
aaaaatctgcatcat

SEQ ID NO: 1258880 - DNA, 15 bp, Homo sapiens
caaaaatctgcatca

SEQ ID NO: 1258881 - DNA, 15 bp, Homo sapiens
tcaaaaatctgcatc

SEQ ID NO: 1258882 - DNA, 15 bp, Homo sapiens
ttcaaaaatctgcat

SEQ ID NO: 1258883 - DNA, 15 bp, Homo sapiens
tttcaaaaatctgca

SEQ ID NO: 1258884 - DNA, 15 bp, Homo sapiens
ttttcaaaaatctgc

SEQ ID NO: 1258885 - DNA, 15 bp, Homo sapiens
cttttcaaaaatctg

SEQ ID NO: 1258886 - DNA, 15 bp, Homo sapiens
ccttttcaaaaatct

SEQ ID NO: 1258887 - DNA, 15 bp, Homo sapiens
accttttcaaaaatc

SEQ ID NO: 1258888 - DNA, 15 bp, Homo sapiens
aaccttttcaaaaat

SEQ ID NO: 1258889 - DNA, 15 bp, Homo sapiens
aaaccttttcaaaaa

SEQ ID NO: 1258890 - DNA, 15 bp, Homo sapiens
gaaaccttttcaaaa

SEQ ID NO: 1258891 - DNA, 15 bp, Homo sapiens
agaaaccttttcaaa

SEQ ID NO: 1258892 - DNA, 15 bp, Homo sapiens
aagaaaccttttcaa

SEQ ID NO: 1258893 - DNA, 15 bp, Homo sapiens
taagaaaccttttca

SEQ ID NO: 1258894 - DNA, 15 bp, Homo sapiens
ataagaaaccttttc

SEQ ID NO: 1258895 - DNA, 15 bp, Homo sapiens
gataagaaacctttt

SEQ ID NO: 1258896 - DNA, 15 bp, Homo sapiens
agataagaaaccttt

SEQ ID NO: 1258897 - DNA, 15 bp, Homo sapiens
tagataagaaacctt

SEQ ID NO: 1258898 - DNA, 15 bp, Homo sapiens
ttagataagaaacct

SEQ ID NO: 1258899 - DNA, 15 bp, Homo sapiens
tttagataagaaacc

SEQ ID NO: 1258900 - DNA, 15 bp, Homo sapiens
atttagataagaaac

SEQ ID NO: 1258901 - DNA, 15 bp, Homo sapiens
catttagataagaaa

SEQ ID NO: 1258902 - DNA, 15 bp, Homo sapiens
acatttagataagaa

SEQ ID NO: 1258903 - DNA, 15 bp, Homo sapiens
aacatttagataaga

SEQ ID NO: 1258904 - DNA, 15 bp, Homo sapiens
gaacatttagataag

SEQ ID NO: 1258905 - DNA, 15 bp, Homo sapiens
agaacatttagataa

SEQ ID NO: 1258906 - DNA, 15 bp, Homo sapiens
aagaacatttagata

SEQ ID NO: 1258907 - DNA, 15 bp, Homo sapiens
caagaacatttagat

SEQ ID NO: 1258908 - DNA, 15 bp, Homo sapiens
ccaagaacatttaga

SEQ ID NO: 1258909 - DNA, 15 bp, Homo sapiens
cccaagaacatttag

SEQ ID NO: 1258910 - DNA, 15 bp, Homo sapiens
tcccaagaacattta

SEQ ID NO: 1258911 - DNA, 15 bp, Homo sapiens
atcccaagaacattt

SEQ ID NO: 1258912 - DNA, 15 bp, Homo sapiens
gatcccaagaacatt

SEQ ID NO: 1258913 - DNA, 15 bp, Homo sapiens
agatcccaagaacat

SEQ ID NO: 1258914 - DNA, 15 bp, Homo sapiens
tagatcccaagaaca

SEQ ID NO: 1258915 - DNA, 15 bp, Homo sapiens
atagatcccaagaac

SEQ ID NO: 1258916 - DNA, 15 bp, Homo sapiens
catagatcccaagaa

SEQ ID NO: 1258917 - DNA, 15 bp, Homo sapiens
ccatagatcccaaga

SEQ ID NO: 1258918 - DNA, 15 bp, Homo sapiens
accatagatcccaag

SEQ ID NO: 1258919 - DNA, 15 bp, Homo sapiens
gaccatagatcccaa

SEQ ID NO: 1258920 - DNA, 15 bp, Homo sapiens
agaccatagatccca

SEQ ID NO: 1258921 - DNA, 15 bp, Homo sapiens
aagaccatagatccc

SEQ ID NO: 1258922 - DNA, 15 bp, Homo sapiens
gaagaccatagatcc

SEQ ID NO: 1258923 - DNA, 15 bp, Homo sapiens
ggaagaccatagatc

SEQ ID NO: 1258924 - DNA, 15 bp, Homo sapiens
aggaagaccatagat

SEQ ID NO: 1258925 - DNA, 15 bp, Homo sapiens
taggaagaccataga

SEQ ID NO: 1258926 - DNA, 15 bp, Homo sapiens
gtaggaagaccatag

SEQ ID NO: 1258927 - DNA, 15 bp, Homo sapiens
ggtaggaagaccata

SEQ ID NO: 1258928 - DNA, 15 bp, Homo sapiens
aggtaggaagaccat

SEQ ID NO: 1258929 - DNA, 15 bp, Homo sapiens
caggtaggaagacca

SEQ ID NO: 1258930 - DNA, 15 bp, Homo sapiens
acaggtaggaagacc

SEQ ID NO: 1258931 - DNA, 15 bp, Homo sapiens
tacaggtaggaagac

SEQ ID NO: 1258932 - DNA, 15 bp, Homo sapiens
ctacaggtaggaaga

SEQ ID NO: 1258933 - DNA, 15 bp, Homo sapiens
gctacaggtaggaag

SEQ ID NO: 1258934 - DNA, 15 bp, Homo sapiens
agctacaggtaggaa

SEQ ID NO: 1258935 - DNA, 15 bp, Homo sapiens
gagctacaggtagga

SEQ ID NO: 1258936 - DNA, 15 bp, Homo sapiens
ggagctacaggtagg

SEQ ID NO: 1258937 - DNA, 15 bp, Homo sapiens
aggagctacaggtag

SEQ ID NO: 1258938 - DNA, 15 bp, Homo sapiens
aaggagctacaggta

SEQ ID NO: 1258939 - DNA, 15 bp, Homo sapiens
aaaggagctacaggt

SEQ ID NO: 1258940 - DNA, 15 bp, Homo sapiens
caaaggagctacagg

SEQ ID NO: 1258941 - DNA, 15 bp, Homo sapiens
tcaaaggagctacag

SEQ ID NO: 1258942 - DNA, 15 bp, Homo sapiens
atcaaaggagctaca

SEQ ID NO: 1258943 - DNA, 15 bp, Homo sapiens
aatcaaaggagctac

SEQ ID NO: 1258944 - DNA, 15 bp, Homo sapiens
taatcaaaggagcta

SEQ ID NO: 1258945 - DNA, 15 bp, Homo sapiens
ctaatcaaaggagct

SEQ ID NO: 1258946 - DNA, 15 bp, Homo sapiens
tctaatcaaaggagc

SEQ ID NO: 1258947 - DNA, 15 bp, Homo sapiens
gtctaatcaaaggag

SEQ ID NO: 1258948 - DNA, 15 bp, Homo sapiens
tgtctaatcaaagga

SEQ ID NO: 1258949 - DNA, 15 bp, Homo sapiens
ctgtctaatcaaagg

SEQ ID NO: 1258950 - DNA, 15 bp, Homo sapiens
tctgtctaatcaaag

SEQ ID NO: 1258951 - DNA, 15 bp, Homo sapiens
ctctgtctaatcaaa

SEQ ID NO: 1258952 - DNA, 15 bp, Homo sapiens
gctctgtctaatcaa

SEQ ID NO: 1258953 - DNA, 15 bp, Homo sapiens
ggctctgtctaatca

SEQ ID NO: 1258954 - DNA, 15 bp, Homo sapiens
aggctctgtctaatc

SEQ ID NO: 1258955 - DNA, 15 bp, Homo sapiens
aaggctctgtctaat

SEQ ID NO: 1258956 - DNA, 15 bp, Homo sapiens
aaaggctctgtctaa

SEQ ID NO: 1258957 - DNA, 15 bp, Homo sapiens
taaaggctctgtcta

SEQ ID NO: 1258958 - DNA, 15 bp, Homo sapiens
ataaaggctctgtct

SEQ ID NO: 1258959 - DNA, 15 bp, Homo sapiens
aataaaggctctgtc

SEQ ID NO: 1258960 - DNA, 15 bp, Homo sapiens
aaataaaggctctgt

SEQ ID NO: 1258961 - DNA, 15 bp, Homo sapiens
taaataaaggctctg

SEQ ID NO: 1258962 - DNA, 15 bp, Homo sapiens
ttaaataaaggctct

SEQ ID NO: 1258963 - DNA, 15 bp, Homo sapiens
tttaaataaaggctc

SEQ ID NO: 1258964 - DNA, 15 bp, Homo sapiens
ctttaaataaaggct

SEQ ID NO: 1258965 - DNA, 15 bp, Homo sapiens
tctttaaataaaggc

SEQ ID NO: 1258966 - DNA, 15 bp, Homo sapiens
gtctttaaataaagg

SEQ ID NO: 1258967 - DNA, 15 bp, Homo sapiens
agtctttaaataaag

SEQ ID NO: 1258968 - DNA, 15 bp, Homo sapiens
aagtctttaaataaa

SEQ ID NO: 1258969 - DNA, 15 bp, Homo sapiens
aaagtctttaaataa

SEQ ID NO: 1258970 - DNA, 15 bp, Homo sapiens
aaaagtctttaaata

SEQ ID NO: 1258971 - DNA, 15 bp, Homo sapiens
gaaaagtctttaaat

SEQ ID NO: 1258972 - DNA, 15 bp, Homo sapiens
ggaaaagtctttaaa

SEQ ID NO: 1258973 - DNA, 15 bp, Homo sapiens
gggaaaagtctttaa

SEQ ID NO: 1258974 - DNA, 15 bp, Homo sapiens
ggggaaaagtcttta

SEQ ID NO: 1258975 - DNA, 15 bp, Homo sapiens
gggggaaaagtcttt

SEQ ID NO: 1258976 - DNA, 15 bp, Homo sapiens
ggggggaaaagtctt

SEQ ID NO: 1258977 - DNA, 15 bp, Homo sapiens
tggggggaaaagtct

SEQ ID NO: 1258978 - DNA, 15 bp, Homo sapiens
ttggggggaaaagtc

SEQ ID NO: 1258979 - DNA, 15 bp, Homo sapiens
cttggggggaaaagt

SEQ ID NO: 1258980 - DNA, 15 bp, Homo sapiens
tcttggggggaaaag

SEQ ID NO: 1258981 - DNA, 15 bp, Homo sapiens
ttcttggggggaaaa

SEQ ID NO: 1258982 - DNA, 15 bp, Homo sapiens
attcttggggggaaa

SEQ ID NO: 1258983 - DNA, 15 bp, Homo sapiens
cattcttggggggaa

SEQ ID NO: 1258984 - DNA, 15 bp, Homo sapiens
acattcttgggggga

SEQ ID NO: 1258985 - DNA, 15 bp, Homo sapiens
aacattcttgggggg

SEQ ID NO: 1258986 - DNA, 15 bp, Homo sapiens
caacattcttggggg

SEQ ID NO: 1258987 - DNA, 15 bp, Homo sapiens
acaacattcttgggg

SEQ ID NO: 1258988 - DNA, 15 bp, Homo sapiens
aacaacattcttggg

SEQ ID NO: 1258989 - DNA, 15 bp, Homo sapiens
caacaacattcttgg

SEQ ID NO: 1258990 - DNA, 15 bp, Homo sapiens
acaacaacattcttg

SEQ ID NO: 1258991 - DNA, 15 bp, Homo sapiens
aacaacaacattctt

SEQ ID NO: 1258992 - DNA, 15 bp, Homo sapiens
caacaacaacattct

SEQ ID NO: 1258993 - DNA, 15 bp, Homo sapiens
gcaacaacaacattc

SEQ ID NO: 1258994 - DNA, 15 bp, Homo sapiens
agcaacaacaacatt

SEQ ID NO: 1258995 - DNA, 15 bp, Homo sapiens
aagcaacaacaacat

SEQ ID NO: 1258996 - DNA, 15 bp, Homo sapiens
gaagcaacaacaaca

SEQ ID NO: 1258997 - DNA, 15 bp, Homo sapiens
agaagcaacaacaac

SEQ ID NO: 1258998 - DNA, 15 bp, Homo sapiens
tagaagcaacaacaa

SEQ ID NO: 1258999 - DNA, 15 bp, Homo sapiens
gtagaagcaacaaca

SEQ ID NO: 1259000 - DNA, 15 bp, Homo sapiens
ggtagaagcaacaac

SEQ ID NO: 1259001 - DNA, 15 bp, Homo sapiens
tggtagaagcaacaa

SEQ ID NO: 1259002 - DNA, 15 bp, Homo sapiens
ttggtagaagcaaca

SEQ ID NO: 1259003 - DNA, 15 bp, Homo sapiens
tttggtagaagcaac

SEQ ID NO: 1259004 - DNA, 15 bp, Homo sapiens
ttttggtagaagcaa

SEQ ID NO: 1259005 - DNA, 15 bp, Homo sapiens
attttggtagaagca

SEQ ID NO: 1259006 - DNA, 15 bp, Homo sapiens
tattttggtagaagc

SEQ ID NO: 1259007 - DNA, 15 bp, Homo sapiens
ttattttggtagaag

SEQ ID NO: 1259008 - DNA, 15 bp, Homo sapiens
attattttggtagaa

SEQ ID NO: 1259009 - DNA, 15 bp, Homo sapiens
tattattttggtaga

SEQ ID NO: 1259010 - DNA, 15 bp, Homo sapiens
ttattattttggtag

SEQ ID NO: 1259011 - DNA, 15 bp, Homo sapiens
gttattattttggta

SEQ ID NO: 1259012 - DNA, 15 bp, Homo sapiens
ggttattattttggt

SEQ ID NO: 1259013 - DNA, 15 bp, Homo sapiens
tggttattattttgg

SEQ ID NO: 1259014 - DNA, 15 bp, Homo sapiens
ctggttattattttg

SEQ ID NO: 1259015 - DNA, 15 bp, Homo sapiens
actggttattatttt

SEQ ID NO: 1259016 - DNA, 15 bp, Homo sapiens
aactggttattattt

SEQ ID NO: 1259017 - DNA, 15 bp, Homo sapiens
caactggttattatt

SEQ ID NO: 1259018 - DNA, 15 bp, Homo sapiens
acaactggttattat

SEQ ID NO: 1259019 - DNA, 15 bp, Homo sapiens
aacaactggttatta

SEQ ID NO: 1259020 - DNA, 15 bp, Homo sapiens
taacaactggttatt

SEQ ID NO: 1259021 - DNA, 15 bp, Homo sapiens
ctaacaactggttat

SEQ ID NO: 1259022 - DNA, 15 bp, Homo sapiens
actaacaactggtta

SEQ ID NO: 1259023 - DNA, 15 bp, Homo sapiens
aactaacaactggtt

SEQ ID NO: 1259024 - DNA, 15 bp, Homo sapiens
aaactaacaactggt

SEQ ID NO: 1259025 - DNA, 15 bp, Homo sapiens
aaaactaacaactgg

SEQ ID NO: 1259026 - DNA, 15 bp, Homo sapiens
taaaactaacaactg

SEQ ID NO: 1259027 - DNA, 15 bp, Homo sapiens
gtaaaactaacaact

SEQ ID NO: 1259028 - DNA, 15 bp, Homo sapiens
agtaaaactaacaac

SEQ ID NO: 1259029 - DNA, 15 bp, Homo sapiens
tagtaaaactaacaa

SEQ ID NO: 1259030 - DNA, 15 bp, Homo sapiens
ctagtaaaactaaca

SEQ ID NO: 1259031 - DNA, 15 bp, Homo sapiens
actagtaaaactaac

SEQ ID NO: 1259032 - DNA, 15 bp, Homo sapiens
cactagtaaaactaa

SEQ ID NO: 1259033 - DNA, 15 bp, Homo sapiens
gcactagtaaaacta

SEQ ID NO: 1259034 - DNA, 15 bp, Homo sapiens
agcactagtaaaact

SEQ ID NO: 1259035 - DNA, 15 bp, Homo sapiens
aagcactagtaaaac

SEQ ID NO: 1259036 - DNA, 15 bp, Homo sapiens
caagcactagtaaaa

SEQ ID NO: 1259037 - DNA, 15 bp, Homo sapiens
tcaagcactagtaaa

SEQ ID NO: 1259038 - DNA, 15 bp, Homo sapiens
ttcaagcactagtaa

SEQ ID NO: 1259039 - DNA, 15 bp, Homo sapiens
cttcaagcactagta

SEQ ID NO: 1259040 - DNA, 15 bp, Homo sapiens
acttcaagcactagt

SEQ ID NO: 1259041 - DNA, 15 bp, Homo sapiens
aacttcaagcactag

SEQ ID NO: 1259042 - DNA, 15 bp, Homo sapiens
aaacttcaagcacta

SEQ ID NO: 1259043 - DNA, 15 bp, Homo sapiens
aaaacttcaagcact

SEQ ID NO: 1259044 - DNA, 15 bp, Homo sapiens
taaaacttcaagcac

SEQ ID NO: 1259045 - DNA, 15 bp, Homo sapiens
ctaaaacttcaagca

SEQ ID NO: 1259046 - DNA, 15 bp, Homo sapiens
actaaaacttcaagc

SEQ ID NO: 1259047 - DNA, 15 bp, Homo sapiens
aactaaaacttcaag

SEQ ID NO: 1259048 - DNA, 15 bp, Homo sapiens
aaactaaaacttcaa

SEQ ID NO: 1259049 - DNA, 15 bp, Homo sapiens
taaactaaaacttca

SEQ ID NO: 1259050 - DNA, 15 bp, Homo sapiens
ataaactaaaacttc

SEQ ID NO: 1259051 - DNA, 15 bp, Homo sapiens
aataaactaaaactt

SEQ ID NO: 1259052 - DNA, 15 bp, Homo sapiens
taataaactaaaact

SEQ ID NO: 1259053 - DNA, 15 bp, Homo sapiens
ttaataaactaaaac

SEQ ID NO: 1259054 - DNA, 15 bp, Homo sapiens
attaataaactaaaa

SEQ ID NO: 1259055 - DNA, 15 bp, Homo sapiens
tattaataaactaaa

SEQ ID NO: 1259056 - DNA, 15 bp, Homo sapiens
ttattaataaactaa

SEQ ID NO: 1259057 - DNA, 15 bp, Homo sapiens
tttattaataaacta

SEQ ID NO: 1259058 - DNA, 15 bp, Homo sapiens
ctttattaataaact

SEQ ID NO: 1259059 - DNA, 15 bp, Homo sapiens
gctttattaataaac

SEQ ID NO: 1259060 - DNA, 15 bp, Homo sapiens
agctttattaataaa

SEQ ID NO: 1259061 - DNA, 15 bp, Homo sapiens
aagctttattaataa

SEQ ID NO: 1259062 - DNA, 15 bp, Homo sapiens
gaagctttattaata

SEQ ID NO: 1259063 - DNA, 15 bp, Homo sapiens
tgaagctttattaat

SEQ ID NO: 1259064 - DNA, 15 bp, Homo sapiens
atgaagctttattaa

SEQ ID NO: 1259065 - DNA, 15 bp, Homo sapiens
tatgaagctttatta

SEQ ID NO: 1259066 - DNA, 15 bp, Homo sapiens
atatgaagctttatt

SEQ ID NO: 1259067 - DNA, 15 bp, Homo sapiens
tatatgaagctttat

SEQ ID NO: 1259068 - DNA, 15 bp, Homo sapiens
ttatatgaagcttta

SEQ ID NO: 1259069 - DNA, 15 bp, Homo sapiens
tttatatgaagcttt

SEQ ID NO: 1259070 - DNA, 15 bp, Homo sapiens
gtttatatgaagctt

SEQ ID NO: 1259071 - DNA, 15 bp, Homo sapiens
agtttatatgaagct

SEQ ID NO: 1259072 - DNA, 15 bp, Homo sapiens
tagtttatatgaagc

SEQ ID NO: 1259073 - DNA, 15 bp, Homo sapiens
ctagtttatatgaag

SEQ ID NO: 1259074 - DNA, 15 bp, Homo sapiens
tctagtttatatgaa

SEQ ID NO: 1259075 - DNA, 15 bp, Homo sapiens
ttctagtttatatga

SEQ ID NO: 1259076 - DNA, 15 bp, Homo sapiens
tttctagtttatatg

SEQ ID NO: 1259077 - DNA, 15 bp, Homo sapiens
ttttctagtttatat

SEQ ID NO: 1259078 - DNA, 15 bp, Homo sapiens
cttttctagtttata

SEQ ID NO: 1259079 - DNA, 15 bp, Homo sapiens
ccttttctagtttat

SEQ ID NO: 1259080 - DNA, 15 bp, Homo sapiens
tccttttctagttta

SEQ ID NO: 1259081 - DNA, 15 bp, Homo sapiens
ctccttttctagttt

SEQ ID NO: 1259082 - DNA, 15 bp, Homo sapiens
actccttttctagtt

SEQ ID NO: 1259083 - DNA, 15 bp, Homo sapiens
cactccttttctagt

SEQ ID NO: 1259084 - DNA, 15 bp, Homo sapiens
ccactccttttctag

SEQ ID NO: 1259085 - DNA, 15 bp, Homo sapiens
accactccttttcta

SEQ ID NO: 1259086 - DNA, 15 bp, Homo sapiens
aaccactccttttct

SEQ ID NO: 1259087 - DNA, 15 bp, Homo sapiens
caaccactccttttc

SEQ ID NO: 1259088 - DNA, 15 bp, Homo sapiens
ccaaccactcctttt

SEQ ID NO: 1259089 - DNA, 15 bp, Homo sapiens
cccaaccactccttt

SEQ ID NO: 1259090 - DNA, 15 bp, Homo sapiens
acccaaccactcctt

SEQ ID NO: 1259091 - DNA, 15 bp, Homo sapiens
tacccaaccactcct

SEQ ID NO: 1259092 - DNA, 15 bp, Homo sapiens
ctacccaaccactcc

SEQ ID NO: 1259093 - DNA, 15 bp, Homo sapiens
tctacccaaccactc

SEQ ID NO: 1259094 - DNA, 15 bp, Homo sapiens
ttctacccaaccact

SEQ ID NO: 1259095 - DNA, 15 bp, Homo sapiens
attctacccaaccac

SEQ ID NO: 1259096 - DNA, 15 bp, Homo sapiens
tattctacccaacca

SEQ ID NO: 1259097 - DNA, 15 bp, Homo sapiens
ctattctacccaacc

SEQ ID NO: 1259098 - DNA, 15 bp, Homo sapiens
actattctacccaac

SEQ ID NO: 1259099 - DNA, 15 bp, Homo sapiens
tactattctacccaa

SEQ ID NO: 1259100 - DNA, 15 bp, Homo sapiens
ttactattctaccca

SEQ ID NO: 1259101 - DNA, 15 bp, Homo sapiens
attactattctaccc

SEQ ID NO: 1259102 - DNA, 15 bp, Homo sapiens
tattactattctacc

SEQ ID NO: 1259103 - DNA, 15 bp, Homo sapiens
gtattactattctac

SEQ ID NO: 1259104 - DNA, 15 bp, Homo sapiens
ggtattactattcta

SEQ ID NO: 1259105 - DNA, 15 bp, Homo sapiens
cggtattactattct

SEQ ID NO: 1259106 - DNA, 15 bp, Homo sapiens
tcggtattactattc

SEQ ID NO: 1259107 - DNA, 15 bp, Homo sapiens
ttcggtattactatt

SEQ ID NO: 1259108 - DNA, 15 bp, Homo sapiens
tttcggtattactat

SEQ ID NO: 1259109 - DNA, 15 bp, Homo sapiens
ttttcggtattacta

SEQ ID NO: 1259110 - DNA, 15 bp, Homo sapiens
tttttcggtattact

SEQ ID NO: 1259111 - DNA, 15 bp, Homo sapiens
ttttttcggtattac

SEQ ID NO: 1259112 - DNA, 15 bp, Homo sapiens
gttttttcggtatta

SEQ ID NO: 1259113 - DNA, 15 bp, Homo sapiens
agttttttcggtatt

SEQ ID NO: 1259114 - DNA, 15 bp, Homo sapiens
tagttttttcggtat

SEQ ID NO: 1259115 - DNA, 15 bp, Homo sapiens
ttagttttttcggta

SEQ ID NO: 1259116 - DNA, 15 bp, Homo sapiens
attagttttttcggt

SEQ ID NO: 1259117 - DNA, 15 bp, Homo sapiens
tattagttttttcgg

SEQ ID NO: 1259118 - DNA, 15 bp, Homo sapiens
atattagttttttcg

SEQ ID NO: 1259119 - DNA, 15 bp, Homo sapiens
aatattagttttttc

SEQ ID NO: 1259120 - DNA, 15 bp, Homo sapiens
gaatattagtttttt

SEQ ID NO: 1259121 - DNA, 15 bp, Homo sapiens
tgaatattagttttt

SEQ ID NO: 1259122 - DNA, 15 bp, Homo sapiens
gtgaatattagtttt

SEQ ID NO: 1259123 - DNA, 15 bp, Homo sapiens
agtgaatattagttt

SEQ ID NO: 1259124 - DNA, 15 bp, Homo sapiens
cagtgaatattagtt

SEQ ID NO: 1259125 - DNA, 15 bp, Homo sapiens
acagtgaatattagt

SEQ ID NO: 1259126 - DNA, 15 bp, Homo sapiens
aacagtgaatattag

SEQ ID NO: 1259127 - DNA, 15 bp, Homo sapiens
taacagtgaatatta

SEQ ID NO: 1259128 - DNA, 15 bp, Homo sapiens
ctaacagtgaatatt

SEQ ID NO: 1259129 - DNA, 15 bp, Homo sapiens
actaacagtgaatat

SEQ ID NO: 1259130 - DNA, 15 bp, Homo sapiens
gactaacagtgaata

SEQ ID NO: 1259131 - DNA, 15 bp, Homo sapiens
agactaacagtgaat

SEQ ID NO: 1259132 - DNA, 15 bp, Homo sapiens
gagactaacagtgaa

SEQ ID NO: 1259133 - DNA, 15 bp, Homo sapiens
tgagactaacagtga

SEQ ID NO: 1259134 - DNA, 15 bp, Homo sapiens
atgagactaacagtg

SEQ ID NO: 1259135 - DNA, 15 bp, Homo sapiens
catgagactaacagt

SEQ ID NO: 1259136 - DNA, 15 bp, Homo sapiens
acatgagactaacag

SEQ ID NO: 1259137 - DNA, 15 bp, Homo sapiens
tacatgagactaaca

SEQ ID NO: 1259138 - DNA, 15 bp, Homo sapiens
atacatgagactaac

SEQ ID NO: 1259139 - DNA, 15 bp, Homo sapiens
aatacatgagactaa

SEQ ID NO: 1259140 - DNA, 15 bp, Homo sapiens
aaatacatgagacta

SEQ ID NO: 1259141 - DNA, 15 bp, Homo sapiens
caaatacatgagact

SEQ ID NO: 1259142 - DNA, 15 bp, Homo sapiens
acaaatacatgagac

SEQ ID NO: 1259143 - DNA, 15 bp, Homo sapiens
tacaaatacatgaga

SEQ ID NO: 1259144 - DNA, 15 bp, Homo sapiens
ttacaaatacatgag

SEQ ID NO: 1259145 - DNA, 15 bp, Homo sapiens
tttacaaatacatga

SEQ ID NO: 1259146 - DNA, 15 bp, Homo sapiens
gtttacaaatacatg

SEQ ID NO: 1259147 - DNA, 15 bp, Homo sapiens
agtttacaaatacat

SEQ ID NO: 1259148 - DNA, 15 bp, Homo sapiens
aagtttacaaataca

SEQ ID NO: 1259149 - DNA, 15 bp, Homo sapiens
aaagtttacaaatac

SEQ ID NO: 1259150 - DNA, 15 bp, Homo sapiens
taaagtttacaaata

SEQ ID NO: 1259151 - DNA, 15 bp, Homo sapiens
ttaaagtttacaaat

SEQ ID NO: 1259152 - DNA, 15 bp, Homo sapiens
attaaagtttacaaa

SEQ ID NO: 1259153 - DNA, 15 bp, Homo sapiens
aattaaagtttacaa

SEQ ID NO: 1259154 - DNA, 15 bp, Homo sapiens
aaattaaagtttaca

SEQ ID NO: 1259155 - DNA, 15 bp, Homo sapiens
aaaattaaagtttac

SEQ ID NO: 1259156 - DNA, 15 bp, Homo sapiens
aaaaattaaagttta

SEQ ID NO: 1259157 - DNA, 15 bp, Homo sapiens
aaaaaattaaagttt

SEQ ID NO: 1259158 - DNA, 15 bp, Homo sapiens
taaaaaattaaagtt

SEQ ID NO: 1259159 - DNA, 15 bp, Homo sapiens
ataaaaaattaaagt

SEQ ID NO: 1259160 - DNA, 15 bp, Homo sapiens
aataaaaaattaaag

SEQ ID NO: 1259161 - DNA, 15 bp, Homo sapiens
taataaaaaattaaa

SEQ ID NO: 1259162 - DNA, 15 bp, Homo sapiens
ataataaaaaattaa

SEQ ID NO: 1259163 - DNA, 15 bp, Homo sapiens
cataataaaaaatta

SEQ ID NO: 1259164 - DNA, 15 bp, Homo sapiens
acataataaaaaatt

SEQ ID NO: 1259165 - DNA, 15 bp, Homo sapiens
tacataataaaaaat

SEQ ID NO: 1259166 - DNA, 15 bp, Homo sapiens
ttacataataaaaaa

SEQ ID NO: 1259167 - DNA, 15 bp, Homo sapiens
tttacataataaaaa

SEQ ID NO: 1259168 - DNA, 15 bp, Homo sapiens
ttttacataataaaa

SEQ ID NO: 1259169 - DNA, 15 bp, Homo sapiens
gttttacataataaa

SEQ ID NO: 1259170 - DNA, 15 bp, Homo sapiens
ggttttacataataa

SEQ ID NO: 1259171 - DNA, 15 bp, Homo sapiens
aggttttacataata

SEQ ID NO: 1259172 - DNA, 15 bp, Homo sapiens
aaggttttacataat

SEQ ID NO: 1259173 - DNA, 15 bp, Homo sapiens
gaaggttttacataa

SEQ ID NO: 1259174 - DNA, 15 bp, Homo sapiens
tgaaggttttacata

SEQ ID NO: 1259175 - DNA, 15 bp, Homo sapiens
ttgaaggttttacat

SEQ ID NO: 1259176 - DNA, 15 bp, Homo sapiens
tttgaaggttttaca

SEQ ID NO: 1259177 - DNA, 15 bp, Homo sapiens
gtttgaaggttttac

SEQ ID NO: 1259178 - DNA, 15 bp, Homo sapiens
tgtttgaaggtttta

SEQ ID NO: 1259179 - DNA, 15 bp, Homo sapiens
atgtttgaaggtttt

SEQ ID NO: 1259180 - DNA, 15 bp, Homo sapiens
tatgtttgaaggttt

SEQ ID NO: 1259181 - DNA, 15 bp, Homo sapiens
ttatgtttgaaggtt

SEQ ID NO: 1259182 - DNA, 15 bp, Homo sapiens
tttatgtttgaaggt

SEQ ID NO: 1259183 - DNA, 15 bp, Homo sapiens
ttttatgtttgaagg

SEQ ID NO: 1259184 - DNA, 15 bp, Homo sapiens
cttttatgtttgaag

SEQ ID NO: 1259185 - DNA, 15 bp, Homo sapiens
acttttatgtttgaa

SEQ ID NO: 1259186 - DNA, 15 bp, Homo sapiens
tacttttatgtttga

SEQ ID NO: 1259187 - DNA, 15 bp, Homo sapiens
ctacttttatgtttg

SEQ ID NO: 1259188 - DNA, 15 bp, Homo sapiens
actacttttatgttt

SEQ ID NO: 1259189 - DNA, 15 bp, Homo sapiens
gactacttttatgtt

SEQ ID NO: 1259190 - DNA, 15 bp, Homo sapiens
tgactacttttatgt

SEQ ID NO: 1259191 - DNA, 15 bp, Homo sapiens
ttgactacttttatg

SEQ ID NO: 1259192 - DNA, 15 bp, Homo sapiens
tttgactacttttat

SEQ ID NO: 1259193 - DNA, 15 bp, Homo sapiens
ttttgactactttta

SEQ ID NO: 1259194 - DNA, 15 bp, Homo sapiens
attttgactactttt

SEQ ID NO: 1259195 - DNA, 15 bp, Homo sapiens
aattttgactacttt

SEQ ID NO: 1259196 - DNA, 15 bp, Homo sapiens
taattttgactactt

SEQ ID NO: 1259197 - DNA, 15 bp, Homo sapiens
ataattttgactact

SEQ ID NO: 1259198 - DNA, 15 bp, Homo sapiens
tataattttgactac

SEQ ID NO: 1259199 - DNA, 15 bp, Homo sapiens
atataattttgacta

SEQ ID NO: 1259200 - DNA, 15 bp, Homo sapiens
tatataattttgact

SEQ ID NO: 1259201 - DNA, 15 bp, Homo sapiens
ttatataattttgac

SEQ ID NO: 1259202 - DNA, 15 bp, Homo sapiens
attatataattttga

SEQ ID NO: 1259203 - DNA, 15 bp, Homo sapiens
tattatataattttg

SEQ ID NO: 1259204 - DNA, 15 bp, Homo sapiens
ctattatataatttt

SEQ ID NO: 1259205 - DNA, 15 bp, Homo sapiens
tctattatataattt

SEQ ID NO: 1259206 - DNA, 15 bp, Homo sapiens
gtctattatataatt

SEQ ID NO: 1259207 - DNA, 15 bp, Homo sapiens
tgtctattatataat

SEQ ID NO: 1259208 - DNA, 15 bp, Homo sapiens
gtgtctattatataa

SEQ ID NO: 1259209 - DNA, 15 bp, Homo sapiens
ggtgtctattatata

SEQ ID NO: 1259210 - DNA, 15 bp, Homo sapiens
aggtgtctattatat

SEQ ID NO: 1259211 - DNA, 15 bp, Homo sapiens
taggtgtctattata

SEQ ID NO: 1259212 - DNA, 15 bp, Homo sapiens
ataggtgtctattat

SEQ ID NO: 1259213 - DNA, 15 bp, Homo sapiens
tataggtgtctatta

SEQ ID NO: 1259214 - DNA, 15 bp, Homo sapiens
atataggtgtctatt

SEQ ID NO: 1259215 - DNA, 15 bp, Homo sapiens
tatataggtgtctat

SEQ ID NO: 1259216 - DNA, 15 bp, Homo sapiens
gtatataggtgtcta

SEQ ID NO: 1259217 - DNA, 15 bp, Homo sapiens
agtatataggtgtct

SEQ ID NO: 1259218 - DNA, 15 bp, Homo sapiens
aagtatataggtgtc

SEQ ID NO: 1259219 - DNA, 15 bp, Homo sapiens
taagtatataggtgt

SEQ ID NO: 1259220 - DNA, 15 bp, Homo sapiens
gtaagtatataggtg

SEQ ID NO: 1259221 - DNA, 15 bp, Homo sapiens
ggtaagtatataggt

SEQ ID NO: 1259222 - DNA, 15 bp, Homo sapiens
tggtaagtatatagg

SEQ ID NO: 1259223 - DNA, 15 bp, Homo sapiens
gtggtaagtatatag

SEQ ID NO: 1259224 - DNA, 15 bp, Homo sapiens
ggtggtaagtatata

SEQ ID NO: 1259225 - DNA, 15 bp, Homo sapiens
aggtggtaagtatat

SEQ ID NO: 1259226 - DNA, 15 bp, Homo sapiens
taggtggtaagtata

SEQ ID NO: 1259227 - DNA, 15 bp, Homo sapiens
ctaggtggtaagtat

SEQ ID NO: 1259228 - DNA, 15 bp, Homo sapiens
tctaggtggtaagta

SEQ ID NO: 1259229 - DNA, 15 bp, Homo sapiens
atctaggtggtaagt

SEQ ID NO: 1259230 - DNA, 15 bp, Homo sapiens
aatctaggtggtaag

SEQ ID NO: 1259231 - DNA, 15 bp, Homo sapiens
caatctaggtggtaa

SEQ ID NO: 1259232 - DNA, 15 bp, Homo sapiens
tcaatctaggtggta

SEQ ID NO: 1259233 - DNA, 15 bp, Homo sapiens
ttcaatctaggtggt

SEQ ID NO: 1259234 - DNA, 15 bp, Homo sapiens
tttcaatctaggtgg

SEQ ID NO: 1259235 - DNA, 15 bp, Homo sapiens
ttttcaatctaggtg

SEQ ID NO: 1259236 - DNA, 15 bp, Homo sapiens
gttttcaatctaggt

SEQ ID NO: 1259237 - DNA, 15 bp, Homo sapiens
agttttcaatctagg

SEQ ID NO: 1259238 - DNA, 15 bp, Homo sapiens
tagttttcaatctag

SEQ ID NO: 1259239 - DNA, 15 bp, Homo sapiens
ttagttttcaatcta

SEQ ID NO: 1259240 - DNA, 15 bp, Homo sapiens
gttagttttcaatct

SEQ ID NO: 1259241 - DNA, 15 bp, Homo sapiens
tgttagttttcaatc

SEQ ID NO: 1259242 - DNA, 15 bp, Homo sapiens
atgttagttttcaat

SEQ ID NO: 1259243 - DNA, 15 bp, Homo sapiens
aatgttagttttcaa

SEQ ID NO: 1259244 - DNA, 15 bp, Homo sapiens
gaatgttagttttca

SEQ ID NO: 1259245 - DNA, 15 bp, Homo sapiens
agaatgttagttttc

SEQ ID NO: 1259246 - DNA, 15 bp, Homo sapiens
cagaatgttagtttt

SEQ ID NO: 1259247 - DNA, 15 bp, Homo sapiens
gcagaatgttagttt

SEQ ID NO: 1259248 - DNA, 15 bp, Homo sapiens
ggcagaatgttagtt

SEQ ID NO: 1259249 - DNA, 15 bp, Homo sapiens
tggcagaatgttagt

SEQ ID NO: 1259250 - DNA, 15 bp, Homo sapiens
atggcagaatgttag

SEQ ID NO: 1259251 - DNA, 15 bp, Homo sapiens
tatggcagaatgtta

SEQ ID NO: 1259252 - DNA, 15 bp, Homo sapiens
atatggcagaatgtt

SEQ ID NO: 1259253 - DNA, 15 bp, Homo sapiens
aatatggcagaatgt

SEQ ID NO: 1259254 - DNA, 15 bp, Homo sapiens
caatatggcagaatg

SEQ ID NO: 1259255 - DNA, 15 bp, Homo sapiens
ccaatatggcagaat

SEQ ID NO: 1259256 - DNA, 15 bp, Homo sapiens
gccaatatggcagaa

SEQ ID NO: 1259257 - DNA, 15 bp, Homo sapiens
cgccaatatggcaga

SEQ ID NO: 1259258 - DNA, 15 bp, Homo sapiens
acgccaatatggcag

SEQ ID NO: 1259259 - DNA, 15 bp, Homo sapiens
tacgccaatatggca

SEQ ID NO: 1259260 - DNA, 15 bp, Homo sapiens
ctacgccaatatggc

SEQ ID NO: 1259261 - DNA, 15 bp, Homo sapiens
actacgccaatatgg

SEQ ID NO: 1259262 - DNA, 15 bp, Homo sapiens
aactacgccaatatg

SEQ ID NO: 1259263 - DNA, 15 bp, Homo sapiens
aaactacgccaatat

SEQ ID NO: 1259264 - DNA, 15 bp, Homo sapiens
taaactacgccaata

SEQ ID NO: 1259265 - DNA, 15 bp, Homo sapiens
ataaactacgccaat

SEQ ID NO: 1259266 - DNA, 15 bp, Homo sapiens
aataaactacgccaa

SEQ ID NO: 1259267 - DNA, 15 bp, Homo sapiens
gaataaactacgcca

SEQ ID NO: 1259268 - DNA, 15 bp, Homo sapiens
cgaataaactacgcc

SEQ ID NO: 1259269 - DNA, 15 bp, Homo sapiens
acgaataaactacgc

SEQ ID NO: 1259270 - DNA, 15 bp, Homo sapiens
aacgaataaactacg

SEQ ID NO: 1259271 - DNA, 15 bp, Homo sapiens
aaacgaataaactac

SEQ ID NO: 1259272 - DNA, 15 bp, Homo sapiens
taaacgaataaacta

SEQ ID NO: 1259273 - DNA, 15 bp, Homo sapiens
gtaaacgaataaact

SEQ ID NO: 1259274 - DNA, 15 bp, Homo sapiens
agtaaacgaataaac

SEQ ID NO: 1259275 - DNA, 15 bp, Homo sapiens
cagtaaacgaataaa

SEQ ID NO: 1259276 - DNA, 15 bp, Homo sapiens
tcagtaaacgaataa

SEQ ID NO: 1259277 - DNA, 15 bp, Homo sapiens
atcagtaaacgaata

SEQ ID NO: 1259278 - DNA, 15 bp, Homo sapiens
tatcagtaaacgaat

SEQ ID NO: 1259279 - DNA, 15 bp, Homo sapiens
ctatcagtaaacgaa

SEQ ID NO: 1259280 - DNA, 15 bp, Homo sapiens
actatcagtaaacga

SEQ ID NO: 1259281 - DNA, 15 bp, Homo sapiens
tactatcagtaaacg

SEQ ID NO: 1259282 - DNA, 15 bp, Homo sapiens
ttactatcagtaaac

SEQ ID NO: 1259283 - DNA, 15 bp, Homo sapiens
tttactatcagtaaa

SEQ ID NO: 1259284 - DNA, 15 bp, Homo sapiens
atttactatcagtaa

SEQ ID NO: 1259285 - DNA, 15 bp, Homo sapiens
gatttactatcagta

SEQ ID NO: 1259286 - DNA, 15 bp, Homo sapiens
tgatttactatcagt

SEQ ID NO: 1259287 - DNA, 15 bp, Homo sapiens
ctgatttactatcag

SEQ ID NO: 1259288 - DNA, 15 bp, Homo sapiens
tctgatttactatca

SEQ ID NO: 1259289 - DNA, 15 bp, Homo sapiens
ctctgatttactatc

SEQ ID NO: 1259290 - DNA, 15 bp, Homo sapiens
tctctgatttactat

SEQ ID NO: 1259291 - DNA, 15 bp, Homo sapiens
gtctctgatttacta

SEQ ID NO: 1259292 - DNA, 15 bp, Homo sapiens
tgtctctgatttact

SEQ ID NO: 1259293 - DNA, 15 bp, Homo sapiens
atgtctctgatttac

SEQ ID NO: 1259294 - DNA, 15 bp, Homo sapiens
catgtctctgattta

SEQ ID NO: 1259295 - DNA, 15 bp, Homo sapiens
acatgtctctgattt

SEQ ID NO: 1259296 - DNA, 15 bp, Homo sapiens
tacatgtctctgatt

SEQ ID NO: 1259297 - DNA, 15 bp, Homo sapiens
atacatgtctctgat

SEQ ID NO: 1259298 - DNA, 15 bp, Homo sapiens
aatacatgtctctga

SEQ ID NO: 1259299 - DNA, 15 bp, Homo sapiens
aaatacatgtctctg

SEQ ID NO: 1259300 - DNA, 15 bp, Homo sapiens
taaatacatgtctct

SEQ ID NO: 1259301 - DNA, 15 bp, Homo sapiens
ctaaatacatgtctc

SEQ ID NO: 1259302 - DNA, 15 bp, Homo sapiens
tctaaatacatgtct

SEQ ID NO: 1259303 - DNA, 15 bp, Homo sapiens
ctctaaatacatgtc

SEQ ID NO: 1259304 - DNA, 15 bp, Homo sapiens
cctctaaatacatgt

SEQ ID NO: 1259305 - DNA, 15 bp, Homo sapiens
acctctaaatacatg

SEQ ID NO: 1259306 - DNA, 15 bp, Homo sapiens
cacctctaaatacat

SEQ ID NO: 1259307 - DNA, 15 bp, Homo sapiens
tcacctctaaataca

SEQ ID NO: 1259308 - DNA, 15 bp, Homo sapiens
ttcacctctaaatac

SEQ ID NO: 1259309 - DNA, 15 bp, Homo sapiens
tttcacctctaaata

SEQ ID NO: 1259310 - DNA, 15 bp, Homo sapiens
atttcacctctaaat

SEQ ID NO: 1259311 - DNA, 15 bp, Homo sapiens
catttcacctctaaa

SEQ ID NO: 1259312 - DNA, 15 bp, Homo sapiens
acatttcacctctaa

SEQ ID NO: 1259313 - DNA, 15 bp, Homo sapiens
gacatttcacctcta

SEQ ID NO: 1259314 - DNA, 15 bp, Homo sapiens
tgacatttcacctct

SEQ ID NO: 1259315 - DNA, 15 bp, Homo sapiens
gtgacatttcacctc

SEQ ID NO: 1259316 - DNA, 15 bp, Homo sapiens
ggtgacatttcacct

SEQ ID NO: 1259317 - DNA, 15 bp, Homo sapiens
gggtgacatttcacc

SEQ ID NO: 1259318 - DNA, 15 bp, Homo sapiens
agggtgacatttcac

SEQ ID NO: 1259319 - DNA, 15 bp, Homo sapiens
tagggtgacatttca

SEQ ID NO: 1259320 - DNA, 15 bp, Homo sapiens
ttagggtgacatttc

SEQ ID NO: 1259321 - DNA, 15 bp, Homo sapiens
tttagggtgacattt

SEQ ID NO: 1259322 - DNA, 15 bp, Homo sapiens
ttttagggtgacatt

SEQ ID NO: 1259323 - DNA, 15 bp, Homo sapiens
tttttagggtgacat

SEQ ID NO: 1259324 - DNA, 15 bp, Homo sapiens
ctttttagggtgaca

SEQ ID NO: 1259325 - DNA, 15 bp, Homo sapiens
gctttttagggtgac

SEQ ID NO: 1259326 - DNA, 15 bp, Homo sapiens
cgctttttagggtga

SEQ ID NO: 1259327 - DNA, 15 bp, Homo sapiens
acgctttttagggtg

SEQ ID NO: 1259328 - DNA, 15 bp, Homo sapiens
aacgctttttagggt

SEQ ID NO: 1259329 - DNA, 15 bp, Homo sapiens
aaacgctttttaggg

SEQ ID NO: 1259330 - DNA, 15 bp, Homo sapiens
aaaacgctttttagg

SEQ ID NO: 1259331 - DNA, 15 bp, Homo sapiens
aaaaacgctttttag

SEQ ID NO: 1259332 - DNA, 15 bp, Homo sapiens
gaaaaacgcttttta

SEQ ID NO: 1259333 - DNA, 15 bp, Homo sapiens
agaaaaacgcttttt

SEQ ID NO: 1259334 - DNA, 15 bp, Homo sapiens
aagaaaaacgctttt

SEQ ID NO: 1259335 - DNA, 15 bp, Homo sapiens
taagaaaaacgcttt

SEQ ID NO: 1259336 - DNA, 15 bp, Homo sapiens
ttaagaaaaacgctt

SEQ ID NO: 1259337 - DNA, 15 bp, Homo sapiens
attaagaaaaacgct

SEQ ID NO: 1259338 - DNA, 15 bp, Homo sapiens
cattaagaaaaacgc

SEQ ID NO: 1259339 - DNA, 15 bp, Homo sapiens
tcattaagaaaaacg

SEQ ID NO: 1259340 - DNA, 15 bp, Homo sapiens
atcattaagaaaaac

SEQ ID NO: 1259341 - DNA, 15 bp, Homo sapiens
aatcattaagaaaaa

SEQ ID NO: 1259342 - DNA, 15 bp, Homo sapiens
aaatcattaagaaaa

SEQ ID NO: 1259343 - DNA, 15 bp, Homo sapiens
taaatcattaagaaa

SEQ ID NO: 1259344 - DNA, 15 bp, Homo sapiens
gtaaatcattaagaa

SEQ ID NO: 1259345 - DNA, 15 bp, Homo sapiens
tgtaaatcattaaga

SEQ ID NO: 1259346 - DNA, 15 bp, Homo sapiens
gtgtaaatcattaag

SEQ ID NO: 1259347 - DNA, 15 bp, Homo sapiens
ggtgtaaatcattaa

SEQ ID NO: 1259348 - DNA, 15 bp, Homo sapiens
tggtgtaaatcatta

SEQ ID NO: 1259349 - DNA, 15 bp, Homo sapiens
gtggtgtaaatcatt

SEQ ID NO: 1259350 - DNA, 15 bp, Homo sapiens
ggtggtgtaaatcat

SEQ ID NO: 1259351 - DNA, 15 bp, Homo sapiens
gggtggtgtaaatca

SEQ ID NO: 1259352 - DNA, 15 bp, Homo sapiens
agggtggtgtaaatc

SEQ ID NO: 1259353 - DNA, 15 bp, Homo sapiens
aagggtggtgtaaat

SEQ ID NO: 1259354 - DNA, 15 bp, Homo sapiens
taagggtggtgtaaa

SEQ ID NO: 1259355 - DNA, 15 bp, Homo sapiens
ctaagggtggtgtaa

SEQ ID NO: 1259356 - DNA, 15 bp, Homo sapiens
actaagggtggtgta

SEQ ID NO: 1259357 - DNA, 15 bp, Homo sapiens
tactaagggtggtgt

SEQ ID NO: 1259358 - DNA, 15 bp, Homo sapiens
ttactaagggtggtg

SEQ ID NO: 1259359 - DNA, 15 bp, Homo sapiens
tttactaagggtggt

SEQ ID NO: 1259360 - DNA, 15 bp, Homo sapiens
ttttactaagggtgg

SEQ ID NO: 1259361 - DNA, 15 bp, Homo sapiens
attttactaagggtg

SEQ ID NO: 1259362 - DNA, 15 bp, Homo sapiens
aattttactaagggt

SEQ ID NO: 1259363 - DNA, 15 bp, Homo sapiens
taattttactaaggg

SEQ ID NO: 1259364 - DNA, 15 bp, Homo sapiens
ctaattttactaagg

SEQ ID NO: 1259365 - DNA, 15 bp, Homo sapiens
gctaattttactaag

SEQ ID NO: 1259366 - DNA, 15 bp, Homo sapiens
agctaattttactaa

SEQ ID NO: 1259367 - DNA, 15 bp, Homo sapiens
tagctaattttacta

SEQ ID NO: 1259368 - DNA, 15 bp, Homo sapiens
atagctaattttact

SEQ ID NO: 1259369 - DNA, 15 bp, Homo sapiens
aatagctaattttac

SEQ ID NO: 1259370 - DNA, 15 bp, Homo sapiens
gaatagctaatttta

SEQ ID NO: 1259371 - DNA, 15 bp, Homo sapiens
tgaatagctaatttt

SEQ ID NO: 1259372 - DNA, 15 bp, Homo sapiens
atgaatagctaattt

SEQ ID NO: 1259373 - DNA, 15 bp, Homo sapiens
aatgaatagctaatt

SEQ ID NO: 1259374 - DNA, 15 bp, Homo sapiens
gaatgaatagctaat

SEQ ID NO: 1259375 - DNA, 15 bp, Homo sapiens
ggaatgaatagctaa

SEQ ID NO: 1259376 - DNA, 15 bp, Homo sapiens
aggaatgaatagcta

SEQ ID NO: 1259377 - DNA, 15 bp, Homo sapiens
aaggaatgaatagct

SEQ ID NO: 1259378 - DNA, 15 bp, Homo sapiens
gaaggaatgaatagc

SEQ ID NO: 1259379 - DNA, 15 bp, Homo sapiens
tgaaggaatgaatag

SEQ ID NO: 1259380 - DNA, 15 bp, Homo sapiens
atgaaggaatgaata

SEQ ID NO: 1259381 - DNA, 15 bp, Homo sapiens
tatgaaggaatgaat

SEQ ID NO: 1259382 - DNA, 15 bp, Homo sapiens
atatgaaggaatgaa

SEQ ID NO: 1259383 - DNA, 15 bp, Homo sapiens
gatatgaaggaatga

SEQ ID NO: 1259384 - DNA, 15 bp, Homo sapiens
tgatatgaaggaatg

SEQ ID NO: 1259385 - DNA, 15 bp, Homo sapiens
atgatatgaaggaat

SEQ ID NO: 1259386 - DNA, 15 bp, Homo sapiens
gatgatatgaaggaa

SEQ ID NO: 1259387 - DNA, 15 bp, Homo sapiens
agatgatatgaagga

SEQ ID NO: 1259388 - DNA, 15 bp, Homo sapiens
tagatgatatgaagg

SEQ ID NO: 1259389 - DNA, 15 bp, Homo sapiens
ttagatgatatgaag

SEQ ID NO: 1259390 - DNA, 15 bp, Homo sapiens
attagatgatatgaa

SEQ ID NO: 1259391 - DNA, 15 bp, Homo sapiens
tattagatgatatga

SEQ ID NO: 1259392 - DNA, 15 bp, Homo sapiens
gtattagatgatatg

SEQ ID NO: 1259393 - DNA, 15 bp, Homo sapiens
ggtattagatgatat

SEQ ID NO: 1259394 - DNA, 15 bp, Homo sapiens
aggtattagatgata

SEQ ID NO: 1259395 - DNA, 15 bp, Homo sapiens
taggtattagatgat

SEQ ID NO: 1259396 - DNA, 15 bp, Homo sapiens
ttaggtattagatga

SEQ ID NO: 1259397 - DNA, 15 bp, Homo sapiens
attaggtattagatg

SEQ ID NO: 1259398 - DNA, 15 bp, Homo sapiens
tattaggtattagat

SEQ ID NO: 1259399 - DNA, 15 bp, Homo sapiens
atattaggtattaga

SEQ ID NO: 1259400 - DNA, 15 bp, Homo sapiens
tatattaggtattag

SEQ ID NO: 1259401 - DNA, 15 bp, Homo sapiens
atatattaggtatta

SEQ ID NO: 1259402 - DNA, 15 bp, Homo sapiens
tatatattaggtatt

SEQ ID NO: 1259403 - DNA, 15 bp, Homo sapiens
atatatattaggtat

SEQ ID NO: 1259404 - DNA, 15 bp, Homo sapiens
aatatatattaggta

SEQ ID NO: 1259405 - DNA, 15 bp, Homo sapiens
gaatatatattaggt

SEQ ID NO: 1259406 - DNA, 15 bp, Homo sapiens
tgaatatatattagg

SEQ ID NO: 1259407 - DNA, 15 bp, Homo sapiens
gtgaatatatattag

SEQ ID NO: 1259408 - DNA, 15 bp, Homo sapiens
tgtgaatatatatta

SEQ ID NO: 1259409 - DNA, 15 bp, Homo sapiens
atgtgaatatatatt

SEQ ID NO: 1259410 - DNA, 15 bp, Homo sapiens
aatgtgaatatatat

SEQ ID NO: 1259411 - DNA, 15 bp, Homo sapiens
aaatgtgaatatata

SEQ ID NO: 1259412 - DNA, 15 bp, Homo sapiens
gaaatgtgaatatat

SEQ ID NO: 1259413 - DNA, 15 bp, Homo sapiens
ggaaatgtgaatata

SEQ ID NO: 1259414 - DNA, 15 bp, Homo sapiens
aggaaatgtgaatat

SEQ ID NO: 1259415 - DNA, 15 bp, Homo sapiens
gaggaaatgtgaata

SEQ ID NO: 1259416 - DNA, 15 bp, Homo sapiens
tgaggaaatgtgaat

SEQ ID NO: 1259417 - DNA, 15 bp, Homo sapiens
ctgaggaaatgtgaa

SEQ ID NO: 1259418 - DNA, 15 bp, Homo sapiens
cctgaggaaatgtga

SEQ ID NO: 1259419 - DNA, 15 bp, Homo sapiens
acctgaggaaatgtg

SEQ ID NO: 1259420 - DNA, 15 bp, Homo sapiens
cacctgaggaaatgt

SEQ ID NO: 1259421 - DNA, 15 bp, Homo sapiens
acacctgaggaaatg

SEQ ID NO: 1259422 - DNA, 15 bp, Homo sapiens
gacacctgaggaaat

SEQ ID NO: 1259423 - DNA, 15 bp, Homo sapiens
agacacctgaggaaa

SEQ ID NO: 1259424 - DNA, 15 bp, Homo sapiens
gagacacctgaggaa

SEQ ID NO: 1259425 - DNA, 15 bp, Homo sapiens
tgagacacctgagga

SEQ ID NO: 1259426 - DNA, 15 bp, Homo sapiens
ttgagacacctgagg

SEQ ID NO: 1259427 - DNA, 15 bp, Homo sapiens
tttgagacacctgag

SEQ ID NO: 1259428 - DNA, 15 bp, Homo sapiens
atttgagacacctga

SEQ ID NO: 1259429 - DNA, 15 bp, Homo sapiens
catttgagacacctg

SEQ ID NO: 1259430 - DNA, 15 bp, Homo sapiens
acatttgagacacct

SEQ ID NO: 1259431 - DNA, 15 bp, Homo sapiens
gacatttgagacacc

SEQ ID NO: 1259432 - DNA, 15 bp, Homo sapiens
agacatttgagacac

SEQ ID NO: 1259433 - DNA, 15 bp, Homo sapiens
aagacatttgagaca

SEQ ID NO: 1259434 - DNA, 15 bp, Homo sapiens
aaagacatttgagac

SEQ ID NO: 1259435 - DNA, 15 bp, Homo sapiens
aaaagacatttgaga

SEQ ID NO: 1259436 - DNA, 15 bp, Homo sapiens
taaaagacatttgag

SEQ ID NO: 1259437 - DNA, 15 bp, Homo sapiens
gtaaaagacatttga

SEQ ID NO: 1259438 - DNA, 15 bp, Homo sapiens
agtaaaagacatttg

SEQ ID NO: 1259439 - DNA, 15 bp, Homo sapiens
tagtaaaagacattt

SEQ ID NO: 1259440 - DNA, 15 bp, Homo sapiens
ttagtaaaagacatt

SEQ ID NO: 1259441 - DNA, 15 bp, Homo sapiens
attagtaaaagacat

SEQ ID NO: 1259442 - DNA, 15 bp, Homo sapiens
cattagtaaaagaca

SEQ ID NO: 1259443 - DNA, 15 bp, Homo sapiens
tcattagtaaaagac

SEQ ID NO: 1259444 - DNA, 15 bp, Homo sapiens
atcattagtaaaaga

SEQ ID NO: 1259445 - DNA, 15 bp, Homo sapiens
aatcattagtaaaag

SEQ ID NO: 1259446 - DNA, 15 bp, Homo sapiens
aaatcattagtaaaa

SEQ ID NO: 1259447 - DNA, 15 bp, Homo sapiens
aaaatcattagtaaa

SEQ ID NO: 1259448 - DNA, 15 bp, Homo sapiens
aaaaatcattagtaa

SEQ ID NO: 1259449 - DNA, 15 bp, Homo sapiens
aaaaaatcattagta

SEQ ID NO: 1259450 - DNA, 15 bp, Homo sapiens
gaaaaaatcattagt

SEQ ID NO: 1259451 - DNA, 15 bp, Homo sapiens
ggaaaaaatcattag

SEQ ID NO: 1259452 - DNA, 15 bp, Homo sapiens
tggaaaaaatcatta

SEQ ID NO: 1259453 - DNA, 15 bp, Homo sapiens
ttggaaaaaatcatt

SEQ ID NO: 1259454 - DNA, 15 bp, Homo sapiens
gttggaaaaaatcat

SEQ ID NO: 1259455 - DNA, 15 bp, Homo sapiens
tgttggaaaaaatca

SEQ ID NO: 1259456 - DNA, 15 bp, Homo sapiens
ttgttggaaaaaatc

SEQ ID NO: 1259457 - DNA, 15 bp, Homo sapiens
cttgttggaaaaaat

SEQ ID NO: 1259458 - DNA, 15 bp, Homo sapiens
ccttgttggaaaaaa

SEQ ID NO: 1259459 - DNA, 15 bp, Homo sapiens
tccttgttggaaaaa

SEQ ID NO: 1259460 - DNA, 15 bp, Homo sapiens
atccttgttggaaaa

SEQ ID NO: 1259461 - DNA, 15 bp, Homo sapiens
gatccttgttggaaa

SEQ ID NO: 1259462 - DNA, 15 bp, Homo sapiens
ggatccttgttggaa

SEQ ID NO: 1259463 - DNA, 15 bp, Homo sapiens
tggatccttgttgga

SEQ ID NO: 1259464 - DNA, 15 bp, Homo sapiens
gtggatccttgttgg

SEQ ID NO: 1259465 - DNA, 15 bp, Homo sapiens
agtggatccttgttg

SEQ ID NO: 1259466 - DNA, 15 bp, Homo sapiens
gagtggatccttgtt

SEQ ID NO: 1259467 - DNA, 15 bp, Homo sapiens
tgagtggatccttgt

SEQ ID NO: 1259468 - DNA, 15 bp, Homo sapiens
ttgagtggatccttg

SEQ ID NO: 1259469 - DNA, 15 bp, Homo sapiens
cttgagtggatcctt

SEQ ID NO: 1259470 - DNA, 15 bp, Homo sapiens
ccttgagtggatcct

SEQ ID NO: 1259471 - DNA, 15 bp, Homo sapiens
accttgagtggatcc

SEQ ID NO: 1259472 - DNA, 15 bp, Homo sapiens
gaccttgagtggatc

SEQ ID NO: 1259473 - DNA, 15 bp, Homo sapiens
ggaccttgagtggat

SEQ ID NO: 1259474 - DNA, 15 bp, Homo sapiens
tggaccttgagtgga

SEQ ID NO: 1259475 - DNA, 15 bp, Homo sapiens
atggaccttgagtgg

SEQ ID NO: 1259476 - DNA, 15 bp, Homo sapiens
tatggaccttgagtg

SEQ ID NO: 1259477 - DNA, 15 bp, Homo sapiens
gtatggaccttgagt

SEQ ID NO: 1259478 - DNA, 15 bp, Homo sapiens
tgtatggaccttgag

SEQ ID NO: 1259479 - DNA, 15 bp, Homo sapiens
atgtatggaccttga

SEQ ID NO: 1259480 - DNA, 15 bp, Homo sapiens
aatgtatggaccttg

SEQ ID NO: 1259481 - DNA, 15 bp, Homo sapiens
aaatgtatggacctt

SEQ ID NO: 1259482 - DNA, 15 bp, Homo sapiens
caaatgtatggacct

SEQ ID NO: 1259483 - DNA, 15 bp, Homo sapiens
gcaaatgtatggacc

SEQ ID NO: 1259484 - DNA, 15 bp, Homo sapiens
tgcaaatgtatggac

SEQ ID NO: 1259485 - DNA, 15 bp, Homo sapiens
atgcaaatgtatgga

SEQ ID NO: 1259486 - DNA, 15 bp, Homo sapiens
aatgcaaatgtatgg

SEQ ID NO: 1259487 - DNA, 15 bp, Homo sapiens
aaatgcaaatgtatg

SEQ ID NO: 1259488 - DNA, 15 bp, Homo sapiens
caaatgcaaatgtat

SEQ ID NO: 1259489 - DNA, 15 bp, Homo sapiens
tcaaatgcaaatgta

SEQ ID NO: 1259490 - DNA, 15 bp, Homo sapiens
atcaaatgcaaatgt

SEQ ID NO: 1259491 - DNA, 15 bp, Homo sapiens
aatcaaatgcaaatg

SEQ ID NO: 1259492 - DNA, 15 bp, Homo sapiens
taatcaaatgcaaat

SEQ ID NO: 1259493 - DNA, 15 bp, Homo sapiens
ataatcaaatgcaaa

SEQ ID NO: 1259494 - DNA, 15 bp, Homo sapiens
aataatcaaatgcaa

SEQ ID NO: 1259495 - DNA, 15 bp, Homo sapiens
taataatcaaatgca

SEQ ID NO: 1259496 - DNA, 15 bp, Homo sapiens
gtaataatcaaatgc

SEQ ID NO: 1259497 - DNA, 15 bp, Homo sapiens
cgtaataatcaaatg

SEQ ID NO: 1259498 - DNA, 15 bp, Homo sapiens
acgtaataatcaaat

SEQ ID NO: 1259499 - DNA, 15 bp, Homo sapiens
aacgtaataatcaaa

SEQ ID NO: 1259500 - DNA, 15 bp, Homo sapiens
aaacgtaataatcaa

SEQ ID NO: 1259501 - DNA, 15 bp, Homo sapiens
aaaacgtaataatca

SEQ ID NO: 1259502 - DNA, 15 bp, Homo sapiens
taaaacgtaataatc

SEQ ID NO: 1259503 - DNA, 15 bp, Homo sapiens
ttaaaacgtaataat

SEQ ID NO: 1259504 - DNA, 15 bp, Homo sapiens
attaaaacgtaataa

SEQ ID NO: 1259505 - DNA, 15 bp, Homo sapiens
gattaaaacgtaata

SEQ ID NO: 1259506 - DNA, 15 bp, Homo sapiens
agattaaaacgtaat

SEQ ID NO: 1259507 - DNA, 15 bp, Homo sapiens
cagattaaaacgtaa

SEQ ID NO: 1259508 - DNA, 15 bp, Homo sapiens
ccagattaaaacgta

SEQ ID NO: 1259509 - DNA, 15 bp, Homo sapiens
tccagattaaaacgt

SEQ ID NO: 1259510 - DNA, 15 bp, Homo sapiens
ttccagattaaaacg

SEQ ID NO: 1259511 - DNA, 15 bp, Homo sapiens
attccagattaaaac

SEQ ID NO: 1259512 - DNA, 15 bp, Homo sapiens
tattccagattaaaa

SEQ ID NO: 1259513 - DNA, 15 bp, Homo sapiens
ctattccagattaaa

SEQ ID NO: 1259514 - DNA, 15 bp, Homo sapiens
gctattccagattaa

SEQ ID NO: 1259515 - DNA, 15 bp, Homo sapiens
cgctattccagatta

SEQ ID NO: 1259516 - DNA, 15 bp, Homo sapiens
gcgctattccagatt

SEQ ID NO: 1259517 - DNA, 15 bp, Homo sapiens
ggcgctattccagat

SEQ ID NO: 1259518 - DNA, 15 bp, Homo sapiens
aggcgctattccaga

SEQ ID NO: 1259519 - DNA, 15 bp, Homo sapiens
taggcgctattccag

SEQ ID NO: 1259520 - DNA, 15 bp, Homo sapiens
gtaggcgctattcca

SEQ ID NO: 1259521 - DNA, 15 bp, Homo sapiens
ggtaggcgctattcc

SEQ ID NO: 1259522 - DNA, 15 bp, Homo sapiens
cggtaggcgctattc

SEQ ID NO: 1259523 - DNA, 15 bp, Homo sapiens
gcggtaggcgctatt

SEQ ID NO: 1259524 - DNA, 15 bp, Homo sapiens
ggcggtaggcgctat

SEQ ID NO: 1259525 - DNA, 15 bp, Homo sapiens
gggcggtaggcgcta

SEQ ID NO: 1259526 - DNA, 15 bp, Homo sapiens
ggggcggtaggcgct

SEQ ID NO: 1259527 - DNA, 15 bp, Homo sapiens
gggggcggtaggcgc

SEQ ID NO: 1259528 - DNA, 15 bp, Homo sapiens
tgggggcggtaggcg

SEQ ID NO: 1259529 - DNA, 15 bp, Homo sapiens
ttgggggcggtaggc

SEQ ID NO: 1259530 - DNA, 15 bp, Homo sapiens
gttgggggcggtagg

SEQ ID NO: 1259531 - DNA, 15 bp, Homo sapiens
ggttgggggcggtag

SEQ ID NO: 1259532 - DNA, 15 bp, Homo sapiens
gggttgggggcggta

SEQ ID NO: 1259533 - DNA, 15 bp, Homo sapiens
ggggttgggggcggt

SEQ ID NO: 1259534 - DNA, 15 bp, Homo sapiens
aggggttgggggcgg

SEQ ID NO: 1259535 - DNA, 15 bp, Homo sapiens
caggggttgggggcg

SEQ ID NO: 1259536 - DNA, 15 bp, Homo sapiens
gcaggggttgggggc

SEQ ID NO: 1259537 - DNA, 15 bp, Homo sapiens
ggcaggggttggggg

SEQ ID NO: 1259538 - DNA, 15 bp, Homo sapiens
tggcaggggttgggg

SEQ ID NO: 1259539 - DNA, 15 bp, Homo sapiens
gtggcaggggttggg

SEQ ID NO: 1259540 - DNA, 15 bp, Homo sapiens
agtggcaggggttgg

SEQ ID NO: 1259541 - DNA, 15 bp, Homo sapiens
cagtggcaggggttg

SEQ ID NO: 1259542 - DNA, 15 bp, Homo sapiens
gcagtggcaggggtt

SEQ ID NO: 1259543 - DNA, 15 bp, Homo sapiens
agcagtggcaggggt

SEQ ID NO: 1259544 - DNA, 15 bp, Homo sapiens
aagcagtggcagggg

SEQ ID NO: 1259545 - DNA, 15 bp, Homo sapiens
aaagcagtggcaggg

SEQ ID NO: 1259546 - DNA, 15 bp, Homo sapiens
taaagcagtggcagg

SEQ ID NO: 1259547 - DNA, 15 bp, Homo sapiens
ataaagcagtggcag

SEQ ID NO: 1259548 - DNA, 15 bp, Homo sapiens
gataaagcagtggca

SEQ ID NO: 1259549 - DNA, 15 bp, Homo sapiens
tgataaagcagtggc

SEQ ID NO: 1259550 - DNA, 15 bp, Homo sapiens
ctgataaagcagtgg

SEQ ID NO: 1259551 - DNA, 15 bp, Homo sapiens
tctgataaagcagtg

SEQ ID NO: 1259552 - DNA, 15 bp, Homo sapiens
ctctgataaagcagt

SEQ ID NO: 1259553 - DNA, 15 bp, Homo sapiens
tctctgataaagcag

SEQ ID NO: 1259554 - DNA, 15 bp, Homo sapiens
ctctctgataaagca

SEQ ID NO: 1259555 - DNA, 15 bp, Homo sapiens
cctctctgataaagc

SEQ ID NO: 1259556 - DNA, 15 bp, Homo sapiens
acctctctgataaag

SEQ ID NO: 1259557 - DNA, 15 bp, Homo sapiens
gacctctctgataaa

SEQ ID NO: 1259558 - DNA, 15 bp, Homo sapiens
tgacctctctgataa

SEQ ID NO: 1259559 - DNA, 15 bp, Homo sapiens
ctgacctctctgata

SEQ ID NO: 1259560 - DNA, 15 bp, Homo sapiens
actgacctctctgat

SEQ ID NO: 1259561 - DNA, 15 bp, Homo sapiens
aactgacctctctga

SEQ ID NO: 1259562 - DNA, 15 bp, Homo sapiens
caactgacctctctg

SEQ ID NO: 1259563 - DNA, 15 bp, Homo sapiens
acaactgacctctct

SEQ ID NO: 1259564 - DNA, 15 bp, Homo sapiens
gacaactgacctctc

SEQ ID NO: 1259565 - DNA, 15 bp, Homo sapiens
ggacaactgacctct

SEQ ID NO: 1259566 - DNA, 15 bp, Homo sapiens
aggacaactgacctc

SEQ ID NO: 1259567 - DNA, 15 bp, Homo sapiens
caggacaactgacct

SEQ ID NO: 1259568 - DNA, 15 bp, Homo sapiens
acaggacaactgacc

SEQ ID NO: 1259569 - DNA, 15 bp, Homo sapiens
tacaggacaactgac

SEQ ID NO: 1259570 - DNA, 15 bp, Homo sapiens
ttacaggacaactga

SEQ ID NO: 1259571 - DNA, 15 bp, Homo sapiens
cttacaggacaactg

SEQ ID NO: 1259572 - DNA, 15 bp, Homo sapiens
tcttacaggacaact

SEQ ID NO: 1259573 - DNA, 15 bp, Homo sapiens
atcttacaggacaac

SEQ ID NO: 1259574 - DNA, 15 bp, Homo sapiens
tatcttacaggacaa

SEQ ID NO: 1259575 - DNA, 15 bp, Homo sapiens
gtatcttacaggaca

SEQ ID NO: 1259576 - DNA, 15 bp, Homo sapiens
agtatcttacaggac

SEQ ID NO: 1259577 - DNA, 15 bp, Homo sapiens
gagtatcttacagga

SEQ ID NO: 1259578 - DNA, 15 bp, Homo sapiens
agagtatcttacagg

SEQ ID NO: 1259579 - DNA, 15 bp, Homo sapiens
tagagtatcttacag

SEQ ID NO: 1259580 - DNA, 15 bp, Homo sapiens
gtagagtatcttaca

SEQ ID NO: 1259581 - DNA, 15 bp, Homo sapiens
ggtagagtatcttac

SEQ ID NO: 1259582 - DNA, 15 bp, Homo sapiens
aggtagagtatctta

SEQ ID NO: 1259583 - DNA, 15 bp, Homo sapiens
aaggtagagtatctt

SEQ ID NO: 1259584 - DNA, 15 bp, Homo sapiens
aaaggtagagtatct

SEQ ID NO: 1259585 - DNA, 15 bp, Homo sapiens
taaaggtagagtatc

SEQ ID NO: 1259586 - DNA, 15 bp, Homo sapiens
ataaaggtagagtat

SEQ ID NO: 1259587 - DNA, 15 bp, Homo sapiens
cataaaggtagagta

SEQ ID NO: 1259588 - DNA, 15 bp, Homo sapiens
tcataaaggtagagt

SEQ ID NO: 1259589 - DNA, 15 bp, Homo sapiens
atcataaaggtagag

SEQ ID NO: 1259590 - DNA, 15 bp, Homo sapiens
aatcataaaggtaga

SEQ ID NO: 1259591 - DNA, 15 bp, Homo sapiens
aaatcataaaggtag

SEQ ID NO: 1259592 - DNA, 15 bp, Homo sapiens
caaatcataaaggta

SEQ ID NO: 1259593 - DNA, 15 bp, Homo sapiens
acaaatcataaaggt

SEQ ID NO: 1259594 - DNA, 15 bp, Homo sapiens
tacaaatcataaagg

SEQ ID NO: 1259595 - DNA, 15 bp, Homo sapiens
atacaaatcataaag

SEQ ID NO: 1259596 - DNA, 15 bp, Homo sapiens
catacaaatcataaa

SEQ ID NO: 1259597 - DNA, 15 bp, Homo sapiens
tcatacaaatcataa

SEQ ID NO: 1259598 - DNA, 15 bp, Homo sapiens
atcatacaaatcata

SEQ ID NO: 1259599 - DNA, 15 bp, Homo sapiens
aatcatacaaatcat

SEQ ID NO: 1259600 - DNA, 15 bp, Homo sapiens
aaatcatacaaatca

SEQ ID NO: 1259601 - DNA, 15 bp, Homo sapiens
aaaatcatacaaatc

SEQ ID NO: 1259602 - DNA, 15 bp, Homo sapiens
aaaaatcatacaaat

SEQ ID NO: 1259603 - DNA, 15 bp, Homo sapiens
caaaaatcatacaaa

SEQ ID NO: 1259604 - DNA, 15 bp, Homo sapiens
acaaaaatcatacaa

SEQ ID NO: 1259605 - DNA, 15 bp, Homo sapiens
aacaaaaatcataca

SEQ ID NO: 1259606 - DNA, 15 bp, Homo sapiens
aaacaaaaatcatac

SEQ ID NO: 1259607 - DNA, 15 bp, Homo sapiens
caaacaaaaatcata

SEQ ID NO: 1259608 - DNA, 15 bp, Homo sapiens
gaaaacaaacaaaca

SEQ ID NO: 1259609 - DNA, 15 bp, Homo sapiens
tgaaaacaaacaaac

SEQ ID NO: 1259610 - DNA, 15 bp, Homo sapiens
atgaaaacaaacaaa

SEQ ID NO: 1259611 - DNA, 15 bp, Homo sapiens
aatgaaaacaaacaa

SEQ ID NO: 1259612 - DNA, 15 bp, Homo sapiens
aaatgaaaacaaaca

SEQ ID NO: 1259613 - DNA, 15 bp, Homo sapiens
taaatgaaaacaaac

SEQ ID NO: 1259614 - DNA, 15 bp, Homo sapiens
ttaaatgaaaacaaa

SEQ ID NO: 1259615 - DNA, 15 bp, Homo sapiens
gttaaatgaaaacaa

SEQ ID NO: 1259616 - DNA, 15 bp, Homo sapiens
agttaaatgaaaaca

SEQ ID NO: 1259617 - DNA, 15 bp, Homo sapiens
aagttaaatgaaaac

SEQ ID NO: 1259618 - DNA, 15 bp, Homo sapiens
gaagttaaatgaaaa

SEQ ID NO: 1259619 - DNA, 15 bp, Homo sapiens
agaagttaaatgaaa

SEQ ID NO: 1259620 - DNA, 15 bp, Homo sapiens
tagaagttaaatgaa

SEQ ID NO: 1259621 - DNA, 15 bp, Homo sapiens
atagaagttaaatga

SEQ ID NO: 1259622 - DNA, 15 bp, Homo sapiens
tatagaagttaaatg

SEQ ID NO: 1259623 - DNA, 15 bp, Homo sapiens
atatagaagttaaat

SEQ ID NO: 1259624 - DNA, 15 bp, Homo sapiens
aatatagaagttaaa

SEQ ID NO: 1259625 - DNA, 15 bp, Homo sapiens
aaatatagaagttaa

SEQ ID NO: 1259626 - DNA, 15 bp, Homo sapiens
gaaatatagaagtta

SEQ ID NO: 1259627 - DNA, 15 bp, Homo sapiens
agaaatatagaagtt

SEQ ID NO: 1259628 - DNA, 15 bp, Homo sapiens
gagaaatatagaagt

SEQ ID NO: 1259629 - DNA, 15 bp, Homo sapiens
tgagaaatatagaag

SEQ ID NO: 1259630 - DNA, 15 bp, Homo sapiens
atgagaaatatagaa

SEQ ID NO: 1259631 - DNA, 15 bp, Homo sapiens
tatgagaaatataga

SEQ ID NO: 1259632 - DNA, 15 bp, Homo sapiens
atatgagaaatatag

SEQ ID NO: 1259633 - DNA, 15 bp, Homo sapiens
aatatgagaaatata

SEQ ID NO: 1259634 - DNA, 15 bp, Homo sapiens
gaatatgagaaatat

SEQ ID NO: 1259635 - DNA, 15 bp, Homo sapiens
ggaatatgagaaata

SEQ ID NO: 1259636 - DNA, 15 bp, Homo sapiens
aggaatatgagaaat

SEQ ID NO: 1259637 - DNA, 15 bp, Homo sapiens
caggaatatgagaaa

SEQ ID NO: 1259638 - DNA, 15 bp, Homo sapiens
ccaggaatatgagaa

SEQ ID NO: 1259639 - DNA, 15 bp, Homo sapiens
accaggaatatgaga

SEQ ID NO: 1259640 - DNA, 15 bp, Homo sapiens
taccaggaatatgag

SEQ ID NO: 1259641 - DNA, 15 bp, Homo sapiens
ttaccaggaatatga

SEQ ID NO: 1259642 - DNA, 15 bp, Homo sapiens
gttaccaggaatatg

SEQ ID NO: 1259643 - DNA, 15 bp, Homo sapiens
agttaccaggaatat

SEQ ID NO: 1259644 - DNA, 15 bp, Homo sapiens
cagttaccaggaata

SEQ ID NO: 1259645 - DNA, 15 bp, Homo sapiens
gcagttaccaggaat

SEQ ID NO: 1259646 - DNA, 15 bp, Homo sapiens
tgcagttaccaggaa

SEQ ID NO: 1259647 - DNA, 15 bp, Homo sapiens
ttgcagttaccagga

SEQ ID NO: 1259648 - DNA, 15 bp, Homo sapiens
cttgcagttaccagg

SEQ ID NO: 1259649 - DNA, 15 bp, Homo sapiens
acttgcagttaccag

SEQ ID NO: 1259650 - DNA, 15 bp, Homo sapiens
gacttgcagttacca

SEQ ID NO: 1259651 - DNA, 15 bp, Homo sapiens
tgacttgcagttacc

SEQ ID NO: 1259652 - DNA, 15 bp, Homo sapiens
ctgacttgcagttac

SEQ ID NO: 1259653 - DNA, 15 bp, Homo sapiens
cctgacttgcagtta

SEQ ID NO: 1259654 - DNA, 15 bp, Homo sapiens
acctgacttgcagtt

SEQ ID NO: 1259655 - DNA, 15 bp, Homo sapiens
gacctgacttgcagt

SEQ ID NO: 1259656 - DNA, 15 bp, Homo sapiens
agacctgacttgcag

SEQ ID NO: 1259657 - DNA, 15 bp, Homo sapiens
tagacctgacttgca

SEQ ID NO: 1259658 - DNA, 15 bp, Homo sapiens
ttagacctgacttgc

SEQ ID NO: 1259659 - DNA, 15 bp, Homo sapiens
tttagacctgacttg

SEQ ID NO: 1259660 - DNA, 15 bp, Homo sapiens
ctttagacctgactt

SEQ ID NO: 1259661 - DNA, 15 bp, Homo sapiens
tctttagacctgact

SEQ ID NO: 1259662 - DNA, 15 bp, Homo sapiens
gtctttagacctgac

SEQ ID NO: 1259663 - DNA, 15 bp, Homo sapiens
ggtctttagacctga

SEQ ID NO: 1259664 - DNA, 15 bp, Homo sapiens
aggtctttagacctg

SEQ ID NO: 1259665 - DNA, 15 bp, Homo sapiens
gaggtctttagacct

SEQ ID NO: 1259666 - DNA, 15 bp, Homo sapiens
tgaggtctttagacc

SEQ ID NO: 1259667 - DNA, 15 bp, Homo sapiens
gtgaggtctttagac

SEQ ID NO: 1259668 - DNA, 15 bp, Homo sapiens
agtgaggtctttaga

SEQ ID NO: 1259669 - DNA, 15 bp, Homo sapiens
tagtgaggtctttag

SEQ ID NO: 1259670 - DNA, 15 bp, Homo sapiens
ttagtgaggtcttta

SEQ ID NO: 1259671 - DNA, 15 bp, Homo sapiens
tttagtgaggtcttt

SEQ ID NO: 1259672 - DNA, 15 bp, Homo sapiens
atttagtgaggtctt

SEQ ID NO: 1259673 - DNA, 15 bp, Homo sapiens
aatttagtgaggtct

SEQ ID NO: 1259674 - DNA, 15 bp, Homo sapiens
gaatttagtgaggtc

SEQ ID NO: 1259675 - DNA, 15 bp, Homo sapiens
ggaatttagtgaggt

SEQ ID NO: 1259676 - DNA, 15 bp, Homo sapiens
aggaatttagtgagg

SEQ ID NO: 1259677 - DNA, 15 bp, Homo sapiens
caggaatttagtgag

SEQ ID NO: 1259678 - DNA, 15 bp, Homo sapiens
ccaggaatttagtga

SEQ ID NO: 1259679 - DNA, 15 bp, Homo sapiens
tccaggaatttagtg

SEQ ID NO: 1259680 - DNA, 15 bp, Homo sapiens
ttccaggaatttagt

SEQ ID NO: 1259681 - DNA, 15 bp, Homo sapiens
tttccaggaatttag

SEQ ID NO: 1259682 - DNA, 15 bp, Homo sapiens
ttttccaggaattta

SEQ ID NO: 1259683 - DNA, 15 bp, Homo sapiens
gttttccaggaattt

SEQ ID NO: 1259684 - DNA, 15 bp, Homo sapiens
tgttttccaggaatt

SEQ ID NO: 1259685 - DNA, 15 bp, Homo sapiens
atgttttccaggaat

SEQ ID NO: 1259686 - DNA, 15 bp, Homo sapiens
aatgttttccaggaa

SEQ ID NO: 1259687 - DNA, 15 bp, Homo sapiens
aaatgttttccagga

SEQ ID NO: 1259688 - DNA, 15 bp, Homo sapiens
aaaatgttttccagg

SEQ ID NO: 1259689 - DNA, 15 bp, Homo sapiens
aaaaatgttttccag

SEQ ID NO: 1259690 - DNA, 15 bp, Homo sapiens
taaaaatgttttcca

SEQ ID NO: 1259691 - DNA, 15 bp, Homo sapiens
tgctaaaaatgtttt

SEQ ID NO: 1259692 - DNA, 15 bp, Homo sapiens
ctgctaaaaatgttt

SEQ ID NO: 1259693 - DNA, 15 bp, Homo sapiens
cctgctaaaaatgtt

SEQ ID NO: 1259694 - DNA, 15 bp, Homo sapiens
tcctgctaaaaatgt

SEQ ID NO: 1259695 - DNA, 15 bp, Homo sapiens
ttcctgctaaaaatg

SEQ ID NO: 1259696 - DNA, 15 bp, Homo sapiens
attcctgctaaaaat

SEQ ID NO: 1259697 - DNA, 15 bp, Homo sapiens
cattcctgctaaaaa

SEQ ID NO: 1259698 - DNA, 15 bp, Homo sapiens
gcattcctgctaaaa

SEQ ID NO: 1259699 - DNA, 15 bp, Homo sapiens
agcattcctgctaaa

SEQ ID NO: 1259700 - DNA, 15 bp, Homo sapiens
gagcattcctgctaa

SEQ ID NO: 1259701 - DNA, 15 bp, Homo sapiens
agagcattcctgcta

SEQ ID NO: 1259702 - DNA, 15 bp, Homo sapiens
cagagcattcctgct

SEQ ID NO: 1259703 - DNA, 15 bp, Homo sapiens
acagagcattcctgc

SEQ ID NO: 1259704 - DNA, 15 bp, Homo sapiens
tacagagcattcctg

SEQ ID NO: 1259705 - DNA, 15 bp, Homo sapiens
gtacagagcattcct

SEQ ID NO: 1259706 - DNA, 15 bp, Homo sapiens
agtacagagcattcc

SEQ ID NO: 1259707 - DNA, 15 bp, Homo sapiens
aagtacagagcattc

SEQ ID NO: 1259708 - DNA, 15 bp, Homo sapiens
gaagtacagagcatt

SEQ ID NO: 1259709 - DNA, 15 bp, Homo sapiens
tgaagtacagagcat

SEQ ID NO: 1259710 - DNA, 15 bp, Homo sapiens
atgaagtacagagca

SEQ ID NO: 1259711 - DNA, 15 bp, Homo sapiens
catgaagtacagagc

SEQ ID NO: 1259712 - DNA, 15 bp, Homo sapiens
gcatgaagtacagag

SEQ ID NO: 1259713 - DNA, 15 bp, Homo sapiens
tgcatgaagtacaga

SEQ ID NO: 1259714 - DNA, 15 bp, Homo sapiens
gtgcatgaagtacag

SEQ ID NO: 1259715 - DNA, 15 bp, Homo sapiens
agtgcatgaagtaca

SEQ ID NO: 1259716 - DNA, 15 bp, Homo sapiens
cagtgcatgaagtac

SEQ ID NO: 1259717 - DNA, 15 bp, Homo sapiens
acagtgcatgaagta

SEQ ID NO: 1259718 - DNA, 15 bp, Homo sapiens
gacagtgcatgaagt

SEQ ID NO: 1259719 - DNA, 15 bp, Homo sapiens
tgacagtgcatgaag

SEQ ID NO: 1259720 - DNA, 15 bp, Homo sapiens
gtgacagtgcatgaa

SEQ ID NO: 1259721 - DNA, 15 bp, Homo sapiens
tgtgacagtgcatga

SEQ ID NO: 1259722 - DNA, 15 bp, Homo sapiens
ttgtgacagtgcatg

SEQ ID NO: 1259723 - DNA, 15 bp, Homo sapiens
gttgtgacagtgcat

SEQ ID NO: 1259724 - DNA, 15 bp, Homo sapiens
agttgtgacagtgca

SEQ ID NO: 1259725 - DNA, 15 bp, Homo sapiens
cagttgtgacagtgc

SEQ ID NO: 1259726 - DNA, 15 bp, Homo sapiens
ccagttgtgacagtg

SEQ ID NO: 1259727 - DNA, 15 bp, Homo sapiens
cccagttgtgacagt

SEQ ID NO: 1259728 - DNA, 15 bp, Homo sapiens
tcccagttgtgacag

SEQ ID NO: 1259729 - DNA, 15 bp, Homo sapiens
ctcccagttgtgaca

SEQ ID NO: 1259730 - DNA, 15 bp, Homo sapiens
tctcccagttgtgac

SEQ ID NO: 1259731 - DNA, 15 bp, Homo sapiens
gtctcccagttgtga

SEQ ID NO: 1259732 - DNA, 15 bp, Homo sapiens
tgtctcccagttgtg

SEQ ID NO: 1259733 - DNA, 15 bp, Homo sapiens
gtgtctcccagttgt

SEQ ID NO: 1259734 - DNA, 15 bp, Homo sapiens
agtgtctcccagttg

SEQ ID NO: 1259735 - DNA, 15 bp, Homo sapiens
tagtgtctcccagtt

SEQ ID NO: 1259736 - DNA, 15 bp, Homo sapiens
ttagtgtctcccagt

SEQ ID NO: 1259737 - DNA, 15 bp, Homo sapiens
cttagtgtctcccag

SEQ ID NO: 1259738 - DNA, 15 bp, Homo sapiens
acttagtgtctccca

SEQ ID NO: 1259739 - DNA, 15 bp, Homo sapiens
tacttagtgtctccc

SEQ ID NO: 1259740 - DNA, 15 bp, Homo sapiens
atacttagtgtctcc

SEQ ID NO: 1259741 - DNA, 15 bp, Homo sapiens
aatacttagtgtctc

SEQ ID NO: 1259742 - DNA, 15 bp, Homo sapiens
aaatacttagtgtct

SEQ ID NO: 1259743 - DNA, 15 bp, Homo sapiens
caaatacttagtgtc

SEQ ID NO: 1259744 - DNA, 15 bp, Homo sapiens
ccaaatacttagtgt

SEQ ID NO: 1259745 - DNA, 15 bp, Homo sapiens
tccaaatacttagtg

SEQ ID NO: 1259746 - DNA, 15 bp, Homo sapiens
atccaaatacttagt

SEQ ID NO: 1259747 - DNA, 15 bp, Homo sapiens
gatccaaatacttag

SEQ ID NO: 1259748 - DNA, 15 bp, Homo sapiens
agatccaaatactta

SEQ ID NO: 1259749 - DNA, 15 bp, Homo sapiens
aagatccaaatactt

SEQ ID NO: 1259750 - DNA, 15 bp, Homo sapiens
caagatccaaatact

SEQ ID NO: 1259751 - DNA, 15 bp, Homo sapiens
tcaagatccaaatac

SEQ ID NO: 1259752 - DNA, 15 bp, Homo sapiens
ttcaagatccaaata

SEQ ID NO: 1259753 - DNA, 15 bp, Homo sapiens
cttcaagatccaaat

SEQ ID NO: 1259754 - DNA, 15 bp, Homo sapiens
tcttcaagatccaaa

SEQ ID NO: 1259755 - DNA, 15 bp, Homo sapiens
atcttcaagatccaa

SEQ ID NO: 1259756 - DNA, 15 bp, Homo sapiens
aatcttcaagatcca

SEQ ID NO: 1259757 - DNA, 15 bp, Homo sapiens
aaatcttcaagatcc

SEQ ID NO: 1259758 - DNA, 15 bp, Homo sapiens
taaatcttcaagatc

SEQ ID NO: 1259759 - DNA, 15 bp, Homo sapiens
ttaaatcttcaagat

SEQ ID NO: 1259760 - DNA, 15 bp, Homo sapiens
tttaaatcttcaaga

SEQ ID NO: 1259761 - DNA, 15 bp, Homo sapiens
ctttaaatcttcaag

SEQ ID NO: 1259762 - DNA, 15 bp, Homo sapiens
tctttaaatcttcaa

SEQ ID NO: 1259763 - DNA, 15 bp, Homo sapiens
gtctttaaatcttca

SEQ ID NO: 1259764 - DNA, 15 bp, Homo sapiens
agtctttaaatcttc

SEQ ID NO: 1259765 - DNA, 15 bp, Homo sapiens
aagtctttaaatctt

SEQ ID NO: 1259766 - DNA, 15 bp, Homo sapiens
gaagtctttaaatct

SEQ ID NO: 1259767 - DNA, 15 bp, Homo sapiens
agaagtctttaaatc

SEQ ID NO: 1259768 - DNA, 15 bp, Homo sapiens
tagaagtctttaaat

SEQ ID NO: 1259769 - DNA, 15 bp, Homo sapiens
ttagaagtctttaaa

SEQ ID NO: 1259770 - DNA, 15 bp, Homo sapiens
attagaagtctttaa

SEQ ID NO: 1259771 - DNA, 15 bp, Homo sapiens
aattagaagtcttta

SEQ ID NO: 1259772 - DNA, 15 bp, Homo sapiens
caattagaagtcttt

SEQ ID NO: 1259773 - DNA, 15 bp, Homo sapiens
ccaattagaagtctt

SEQ ID NO: 1259774 - DNA, 15 bp, Homo sapiens
accaattagaagtct

SEQ ID NO: 1259775 - DNA, 15 bp, Homo sapiens
aaccaattagaagtc

SEQ ID NO: 1259776 - DNA, 15 bp, Homo sapiens
aaaccaattagaagt

SEQ ID NO: 1259777 - DNA, 15 bp, Homo sapiens
aaaaccaattagaag

SEQ ID NO: 1259778 - DNA, 15 bp, Homo sapiens
aaaaaccaattagaa

SEQ ID NO: 1259779 - DNA, 15 bp, Homo sapiens
taaaaaccaattaga

SEQ ID NO: 1259780 - DNA, 15 bp, Homo sapiens
ttaaaaaccaattag

SEQ ID NO: 1259781 - DNA, 15 bp, Homo sapiens
tttaaaaaccaatta

SEQ ID NO: 1259782 - DNA, 15 bp, Homo sapiens
ttttaaaaaccaatt

SEQ ID NO: 1259783 - DNA, 15 bp, Homo sapiens
cttttaaaaaccaat

SEQ ID NO: 1259784 - DNA, 15 bp, Homo sapiens
gcttttaaaaaccaa

SEQ ID NO: 1259785 - DNA, 15 bp, Homo sapiens
ggcttttaaaaacca

SEQ ID NO: 1259786 - DNA, 15 bp, Homo sapiens
gggcttttaaaaacc

SEQ ID NO: 1259787 - DNA, 15 bp, Homo sapiens
agggcttttaaaaac

SEQ ID NO: 1259788 - DNA, 15 bp, Homo sapiens
cagggcttttaaaaa

SEQ ID NO: 1259789 - DNA, 15 bp, Homo sapiens
acagggcttttaaaa

SEQ ID NO: 1259790 - DNA, 15 bp, Homo sapiens
aacagggcttttaaa

SEQ ID NO: 1259791 - DNA, 15 bp, Homo sapiens
aaacagggcttttaa

SEQ ID NO: 1259792 - DNA, 15 bp, Homo sapiens
gaaacagggctttta

SEQ ID NO: 1259793 - DNA, 15 bp, Homo sapiens
tgaaacagggctttt

SEQ ID NO: 1259794 - DNA, 15 bp, Homo sapiens
gtgaaacagggcttt

SEQ ID NO: 1259795 - DNA, 15 bp, Homo sapiens
agtgaaacagggctt

SEQ ID NO: 1259796 - DNA, 15 bp, Homo sapiens
cagtgaaacagggct

SEQ ID NO: 1259797 - DNA, 15 bp, Homo sapiens
ccagtgaaacagggc

SEQ ID NO: 1259798 - DNA, 15 bp, Homo sapiens
accagtgaaacaggg

SEQ ID NO: 1259799 - DNA, 15 bp, Homo sapiens
aaccagtgaaacagg

SEQ ID NO: 1259800 - DNA, 15 bp, Homo sapiens
aaaccagtgaaacag

SEQ ID NO: 1259801 - DNA, 15 bp, Homo sapiens
aaaaccagtgaaaca

SEQ ID NO: 1259802 - DNA, 15 bp, Homo sapiens
gaaaaccagtgaaac

SEQ ID NO: 1259803 - DNA, 15 bp, Homo sapiens
agaaaaccagtgaaa

SEQ ID NO: 1259804 - DNA, 15 bp, Homo sapiens
tagaaaaccagtgaa

SEQ ID NO: 1259805 - DNA, 15 bp, Homo sapiens
ctagaaaaccagtga

SEQ ID NO: 1259806 - DNA, 15 bp, Homo sapiens
cctagaaaaccagtg

SEQ ID NO: 1259807 - DNA, 15 bp, Homo sapiens
tcctagaaaaccagt

SEQ ID NO: 1259808 - DNA, 15 bp, Homo sapiens
atcctagaaaaccag

SEQ ID NO: 1259809 - DNA, 15 bp, Homo sapiens
tatcctagaaaacca

SEQ ID NO: 1259810 - DNA, 15 bp, Homo sapiens
ttatcctagaaaacc

SEQ ID NO: 1259811 - DNA, 15 bp, Homo sapiens
cttatcctagaaaac

SEQ ID NO: 1259812 - DNA, 15 bp, Homo sapiens
gcttatcctagaaaa

SEQ ID NO: 1259813 - DNA, 15 bp, Homo sapiens
agcttatcctagaaa

SEQ ID NO: 1259814 - DNA, 15 bp, Homo sapiens
aagcttatcctagaa

SEQ ID NO: 1259815 - DNA, 15 bp, Homo sapiens
gaagcttatcctaga

SEQ ID NO: 1259816 - DNA, 15 bp, Homo sapiens
agaagcttatcctag

SEQ ID NO: 1259817 - DNA, 15 bp, Homo sapiens
gagaagcttatccta

SEQ ID NO: 1259818 - DNA, 15 bp, Homo sapiens
agagaagcttatcct

SEQ ID NO: 1259819 - DNA, 15 bp, Homo sapiens
tagagaagcttatcc

SEQ ID NO: 1259820 - DNA, 15 bp, Homo sapiens
ctagagaagcttatc

SEQ ID NO: 1259821 - DNA, 15 bp, Homo sapiens
tctagagaagcttat

SEQ ID NO: 1259822 - DNA, 15 bp, Homo sapiens
ctctagagaagctta

SEQ ID NO: 1259823 - DNA, 15 bp, Homo sapiens
tctctagagaagctt

SEQ ID NO: 1259824 - DNA, 15 bp, Homo sapiens
ttctctagagaagct

SEQ ID NO: 1259825 - DNA, 15 bp, Homo sapiens
cttctctagagaagc

SEQ ID NO: 1259826 - DNA, 15 bp, Homo sapiens
acttctctagagaag

SEQ ID NO: 1259827 - DNA, 15 bp, Homo sapiens
aacttctctagagaa

SEQ ID NO: 1259828 - DNA, 15 bp, Homo sapiens
gaacttctctagaga

SEQ ID NO: 1259829 - DNA, 15 bp, Homo sapiens
ggaacttctctagag

SEQ ID NO: 1259830 - DNA, 15 bp, Homo sapiens
aggaacttctctaga

SEQ ID NO: 1259831 - DNA, 15 bp, Homo sapiens
aaggaacttctctag

SEQ ID NO: 1259832 - DNA, 15 bp, Homo sapiens
aaaggaacttctcta

SEQ ID NO: 1259833 - DNA, 15 bp, Homo sapiens
aaaaggaacttctct

SEQ ID NO: 1259834 - DNA, 15 bp, Homo sapiens
aaaaaggaacttctc

SEQ ID NO: 1259835 - DNA, 15 bp, Homo sapiens
taaaaaggaacttct

SEQ ID NO: 1259836 - DNA, 15 bp, Homo sapiens
ttaaaaaggaacttc

SEQ ID NO: 1259837 - DNA, 15 bp, Homo sapiens
tttaaaaaggaactt

SEQ ID NO: 1259838 - DNA, 15 bp, Homo sapiens
ttttaaaaaggaact

SEQ ID NO: 1259839 - DNA, 15 bp, Homo sapiens
tttttaaaaaggaac

SEQ ID NO: 1259840 - DNA, 15 bp, Homo sapiens
ttttttaaaaaggaa

SEQ ID NO: 1259841 - DNA, 15 bp, Homo sapiens
attttttaaaaagga

SEQ ID NO: 1259842 - DNA, 15 bp, Homo sapiens
cattttttaaaaagg

SEQ ID NO: 1259843 - DNA, 15 bp, Homo sapiens
acattttttaaaaag

SEQ ID NO: 1259844 - DNA, 15 bp, Homo sapiens
aacattttttaaaaa

SEQ ID NO: 1259845 - DNA, 15 bp, Homo sapiens
aaacattttttaaaa

SEQ ID NO: 1259846 - DNA, 15 bp, Homo sapiens
aaaacattttttaaa

SEQ ID NO: 1259847 - DNA, 15 bp, Homo sapiens
taaaacattttttaa

SEQ ID NO: 1259848 - DNA, 15 bp, Homo sapiens
ataaaacatttttta

SEQ ID NO: 1259849 - DNA, 15 bp, Homo sapiens
aataaaacatttttt

SEQ ID NO: 1259850 - DNA, 15 bp, Homo sapiens
taataaaacattttt

SEQ ID NO: 1259851 - DNA, 15 bp, Homo sapiens
ctaataaaacatttt

SEQ ID NO: 1259852 - DNA, 15 bp, Homo sapiens
actaataaaacattt

SEQ ID NO: 1259853 - DNA, 15 bp, Homo sapiens
aactaataaaacatt

SEQ ID NO: 1259854 - DNA, 15 bp, Homo sapiens
aaactaataaaacat

SEQ ID NO: 1259855 - DNA, 15 bp, Homo sapiens
caaactaataaaaca

SEQ ID NO: 1259856 - DNA, 15 bp, Homo sapiens
tcaaactaataaaac

SEQ ID NO: 1259857 - DNA, 15 bp, Homo sapiens
ttcaaactaataaaa

SEQ ID NO: 1259858 - DNA, 15 bp, Homo sapiens
cttcaaactaataaa

SEQ ID NO: 1259859 - DNA, 15 bp, Homo sapiens
tcttcaaactaataa

SEQ ID NO: 1259860 - DNA, 15 bp, Homo sapiens
atcttcaaactaata

SEQ ID NO: 1259861 - DNA, 15 bp, Homo sapiens
aatcttcaaactaat

SEQ ID NO: 1259862 - DNA, 15 bp, Homo sapiens
aaatcttcaaactaa

SEQ ID NO: 1259863 - DNA, 15 bp, Homo sapiens
taaatcttcaaacta

SEQ ID NO: 1259864 - DNA, 15 bp, Homo sapiens
ttaaatcttcaaact

SEQ ID NO: 1259865 - DNA, 15 bp, Homo sapiens
attaaatcttcaaac

SEQ ID NO: 1259866 - DNA, 15 bp, Homo sapiens
cattaaatcttcaaa

SEQ ID NO: 1259867 - DNA, 15 bp, Homo sapiens
ccattaaatcttcaa

SEQ ID NO: 1259868 - DNA, 15 bp, Homo sapiens
cccattaaatcttca

SEQ ID NO: 1259869 - DNA, 15 bp, Homo sapiens
tcccattaaatcttc

SEQ ID NO: 1259870 - DNA, 15 bp, Homo sapiens
atcccattaaatctt

SEQ ID NO: 1259871 - DNA, 15 bp, Homo sapiens
aatcccattaaatct

SEQ ID NO: 1259872 - DNA, 15 bp, Homo sapiens
aaatcccattaaatc

SEQ ID NO: 1259873 - DNA, 15 bp, Homo sapiens
aaaatcccattaaat

SEQ ID NO: 1259874 - DNA, 15 bp, Homo sapiens
gaaaatcccattaaa

SEQ ID NO: 1259875 - DNA, 15 bp, Homo sapiens
ggaaaatcccattaa

SEQ ID NO: 1259876 - DNA, 15 bp, Homo sapiens
aggaaaatcccatta

SEQ ID NO: 1259877 - DNA, 15 bp, Homo sapiens
aaggaaaatcccatt

SEQ ID NO: 1259878 - DNA, 15 bp, Homo sapiens
aaaggaaaatcccat

SEQ ID NO: 1259879 - DNA, 15 bp, Homo sapiens
gaaaggaaaatccca

SEQ ID NO: 1259880 - DNA, 15 bp, Homo sapiens
ggaaaggaaaatccc

SEQ ID NO: 1259881 - DNA, 15 bp, Homo sapiens
gggaaaggaaaatcc

SEQ ID NO: 1259882 - DNA, 15 bp, Homo sapiens
ggggaaaggaaaatc

SEQ ID NO: 1259883 - DNA, 15 bp, Homo sapiens
aggggaaaggaaaat

SEQ ID NO: 1259884 - DNA, 15 bp, Homo sapiens
caggggaaaggaaaa

SEQ ID NO: 1259885 - DNA, 15 bp, Homo sapiens
tcaggggaaaggaaa

SEQ ID NO: 1259886 - DNA, 15 bp, Homo sapiens
ttcaggggaaaggaa

SEQ ID NO: 1259887 - DNA, 15 bp, Homo sapiens
tttcaggggaaagga

SEQ ID NO: 1259888 - DNA, 15 bp, Homo sapiens
atttcaggggaaagg

SEQ ID NO: 1259889 - DNA, 15 bp, Homo sapiens
aatttcaggggaaag

SEQ ID NO: 1259890 - DNA, 15 bp, Homo sapiens
gaatttcaggggaaa

SEQ ID NO: 1259891 - DNA, 15 bp, Homo sapiens
agaatttcaggggaa

SEQ ID NO: 1259892 - DNA, 15 bp, Homo sapiens
aagaatttcagggga

SEQ ID NO: 1259893 - DNA, 15 bp, Homo sapiens
gaagaatttcagggg

SEQ ID NO: 1259894 - DNA, 15 bp, Homo sapiens
ggaagaatttcaggg

SEQ ID NO: 1259895 - DNA, 15 bp, Homo sapiens
tggaagaatttcagg

SEQ ID NO: 1259896 - DNA, 15 bp, Homo sapiens
ctggaagaatttcag

SEQ ID NO: 1259897 - DNA, 15 bp, Homo sapiens
actggaagaatttca

SEQ ID NO: 1259898 - DNA, 15 bp, Homo sapiens
aactggaagaatttc

SEQ ID NO: 1259899 - DNA, 15 bp, Homo sapiens
aaactggaagaattt

SEQ ID NO: 1259900 - DNA, 15 bp, Homo sapiens
caaactggaagaatt

SEQ ID NO: 1259901 - DNA, 15 bp, Homo sapiens
tcaaactggaagaat

SEQ ID NO: 1259902 - DNA, 15 bp, Homo sapiens
atcaaactggaagaa

SEQ ID NO: 1259903 - DNA, 15 bp, Homo sapiens
aatcaaactggaaga

SEQ ID NO: 1259904 - DNA, 15 bp, Homo sapiens
aaatcaaactggaag

SEQ ID NO: 1259905 - DNA, 15 bp, Homo sapiens
gaaatcaaactggaa

SEQ ID NO: 1259906 - DNA, 15 bp, Homo sapiens
tgaaatcaaactgga

SEQ ID NO: 1259907 - DNA, 15 bp, Homo sapiens
ttgaaatcaaactgg

SEQ ID NO: 1259908 - DNA, 15 bp, Homo sapiens
tttgaaatcaaactg

SEQ ID NO: 1259909 - DNA, 15 bp, Homo sapiens
ttttgaaatcaaact

SEQ ID NO: 1259910 - DNA, 15 bp, Homo sapiens
tttttgaaatcaaac

SEQ ID NO: 1259911 - DNA, 15 bp, Homo sapiens
ctttttgaaatcaaa

SEQ ID NO: 1259912 - DNA, 15 bp, Homo sapiens
tctttttgaaatcaa

SEQ ID NO: 1259913 - DNA, 15 bp, Homo sapiens
ttctttttgaaatca

SEQ ID NO: 1259914 - DNA, 15 bp, Homo sapiens
tttctttttgaaatc

SEQ ID NO: 1259915 - DNA, 15 bp, Homo sapiens
ttttctttttgaaat

SEQ ID NO: 1259916 - DNA, 15 bp, Homo sapiens
cttttctttttgaaa

SEQ ID NO: 1259917 - DNA, 15 bp, Homo sapiens
ccttttctttttgaa

SEQ ID NO: 1259918 - DNA, 15 bp, Homo sapiens
accttttctttttga

SEQ ID NO: 1259919 - DNA, 15 bp, Homo sapiens
gaccttttctttttg

SEQ ID NO: 1259920 - DNA, 15 bp, Homo sapiens
tgaccttttcttttt

SEQ ID NO: 1259921 - DNA, 15 bp, Homo sapiens
ttgaccttttctttt

SEQ ID NO: 1259922 - DNA, 15 bp, Homo sapiens
gttgaccttttcttt

SEQ ID NO: 1259923 - DNA, 15 bp, Homo sapiens
tgttgaccttttctt

SEQ ID NO: 1259924 - DNA, 15 bp, Homo sapiens
tatgttgaccttttc

SEQ ID NO: 1259925 - DNA, 15 bp, Homo sapiens
ctatgttgacctttt

SEQ ID NO: 1259926 - DNA, 15 bp, Homo sapiens
gctatgttgaccttt

SEQ ID NO: 1259927 - DNA, 15 bp, Homo sapiens
tgctatgttgacctt

SEQ ID NO: 1259928 - DNA, 15 bp, Homo sapiens
atgctatgttgacct

SEQ ID NO: 1259929 - DNA, 15 bp, Homo sapiens
aatgctatgttgacc

SEQ ID NO: 1259930 - DNA, 15 bp, Homo sapiens
taatgctatgttgac

SEQ ID NO: 1259931 - DNA, 15 bp, Homo sapiens
gtaatgctatgttga

SEQ ID NO: 1259932 - DNA, 15 bp, Homo sapiens
tgtaatgctatgttg

SEQ ID NO: 1259933 - DNA, 15 bp, Homo sapiens
atgtaatgctatgtt

SEQ ID NO: 1259934 - DNA, 15 bp, Homo sapiens
aatgtaatgctatgt

SEQ ID NO: 1259935 - DNA, 15 bp, Homo sapiens
aaatgtaatgctatg

SEQ ID NO: 1259936 - DNA, 15 bp, Homo sapiens
gaaatgtaatgctat

SEQ ID NO: 1259937 - DNA, 15 bp, Homo sapiens
agaaatgtaatgcta

SEQ ID NO: 1259938 - DNA, 15 bp, Homo sapiens
cagaaatgtaatgct

SEQ ID NO: 1259939 - DNA, 15 bp, Homo sapiens
tcagaaatgtaatgc

SEQ ID NO: 1259940 - DNA, 15 bp, Homo sapiens
ttcagaaatgtaatg

SEQ ID NO: 1259941 - DNA, 15 bp, Homo sapiens
attcagaaatgtaat

SEQ ID NO: 1259942 - DNA, 15 bp, Homo sapiens
aattcagaaatgtaa

SEQ ID NO: 1259943 - DNA, 15 bp, Homo sapiens
aaattcagaaatgta

SEQ ID NO: 1259944 - DNA, 15 bp, Homo sapiens
aaaattcagaaatgt

SEQ ID NO: 1259945 - DNA, 15 bp, Homo sapiens
gaaaattcagaaatg

SEQ ID NO: 1259946 - DNA, 15 bp, Homo sapiens
ggaaaattcagaaat

SEQ ID NO: 1259947 - DNA, 15 bp, Homo sapiens
gggaaaattcagaaa

SEQ ID NO: 1259948 - DNA, 15 bp, Homo sapiens
gagggaaaattcaga

SEQ ID NO: 1259949 - DNA, 15 bp, Homo sapiens
tgagggaaaattcag

SEQ ID NO: 1259950 - DNA, 15 bp, Homo sapiens
ttgagggaaaattca

SEQ ID NO: 1259951 - DNA, 15 bp, Homo sapiens
tttgagggaaaattc

SEQ ID NO: 1259952 - DNA, 15 bp, Homo sapiens
atttgagggaaaatt

SEQ ID NO: 1259953 - DNA, 15 bp, Homo sapiens
tatttgagggaaaat

SEQ ID NO: 1259954 - DNA, 15 bp, Homo sapiens
ttatttgagggaaaa

SEQ ID NO: 1259955 - DNA, 15 bp, Homo sapiens
cttatttgagggaaa

SEQ ID NO: 1259956 - DNA, 15 bp, Homo sapiens
gcttatttgagggaa

SEQ ID NO: 1259957 - DNA, 15 bp, Homo sapiens
ggcttatttgaggga

SEQ ID NO: 1259958 - DNA, 15 bp, Homo sapiens
tggcttatttgaggg

SEQ ID NO: 1259959 - DNA, 15 bp, Homo sapiens
ttggcttatttgagg

SEQ ID NO: 1259960 - DNA, 15 bp, Homo sapiens
tttggcttatttgag

SEQ ID NO: 1259961 - DNA, 15 bp, Homo sapiens
atttggcttatttga

SEQ ID NO: 1259962 - DNA, 15 bp, Homo sapiens
tatttggcttatttg

SEQ ID NO: 1259963 - DNA, 15 bp, Homo sapiens
ttatttggcttattt

SEQ ID NO: 1259964 - DNA, 15 bp, Homo sapiens
tttatttggcttatt

SEQ ID NO: 1259965 - DNA, 15 bp, Homo sapiens
atttatttggcttat

SEQ ID NO: 1259966 - DNA, 15 bp, Homo sapiens
tatttatttggctta

SEQ ID NO: 1259967 - DNA, 15 bp, Homo sapiens
ctatttatttggctt

SEQ ID NO: 1259968 - DNA, 15 bp, Homo sapiens
actatttatttggct

SEQ ID NO: 1259969 - DNA, 15 bp, Homo sapiens
aactatttatttggc

SEQ ID NO: 1259970 - DNA, 15 bp, Homo sapiens
caactatttatttgg

SEQ ID NO: 1259971 - DNA, 15 bp, Homo sapiens
ccaactatttatttg

SEQ ID NO: 1259972 - DNA, 15 bp, Homo sapiens
accaactatttattt

SEQ ID NO: 1259973 - DNA, 15 bp, Homo sapiens
caccaactatttatt

SEQ ID NO: 1259974 - DNA, 15 bp, Homo sapiens
tcaccaactatttat

SEQ ID NO: 1259975 - DNA, 15 bp, Homo sapiens
ttcaccaactattta

SEQ ID NO: 1259976 - DNA, 15 bp, Homo sapiens
tttcaccaactattt

SEQ ID NO: 1259977 - DNA, 15 bp, Homo sapiens
gtttcaccaactatt

SEQ ID NO: 1259978 - DNA, 15 bp, Homo sapiens
tgtttcaccaactat

SEQ ID NO: 1259979 - DNA, 15 bp, Homo sapiens
ctgtttcaccaacta

SEQ ID NO: 1259980 - DNA, 15 bp, Homo sapiens
actgtttcaccaact

SEQ ID NO: 1259981 - DNA, 15 bp, Homo sapiens
tactgtttcaccaac

SEQ ID NO: 1259982 - DNA, 15 bp, Homo sapiens
atactgtttcaccaa

SEQ ID NO: 1259983 - DNA, 15 bp, Homo sapiens
aatactgtttcacca

SEQ ID NO: 1259984 - DNA, 15 bp, Homo sapiens
aaatactgtttcacc

SEQ ID NO: 1259985 - DNA, 15 bp, Homo sapiens
aaaatactgtttcac

SEQ ID NO: 1259986 - DNA, 15 bp, Homo sapiens
caaaatactgtttca

SEQ ID NO: 1259987 - DNA, 15 bp, Homo sapiens
acaaaatactgtttc

SEQ ID NO: 1259988 - DNA, 15 bp, Homo sapiens
cacaaaatactgttt

SEQ ID NO: 1259989 - DNA, 15 bp, Homo sapiens
tcacaaaatactgtt

SEQ ID NO: 1259990 - DNA, 15 bp, Homo sapiens
gtcacaaaatactgt

SEQ ID NO: 1259991 - DNA, 15 bp, Homo sapiens
agtcacaaaatactg

SEQ ID NO: 1259992 - DNA, 15 bp, Homo sapiens
cagtcacaaaatact

SEQ ID NO: 1259993 - DNA, 15 bp, Homo sapiens
tcagtcacaaaatac

SEQ ID NO: 1259994 - DNA, 15 bp, Homo sapiens
atcagtcacaaaata

SEQ ID NO: 1259995 - DNA, 15 bp, Homo sapiens
catcagtcacaaaat

SEQ ID NO: 1259996 - DNA, 15 bp, Homo sapiens
gcatcagtcacaaaa

SEQ ID NO: 1259997 - DNA, 15 bp, Homo sapiens
cgcatcagtcacaaa

SEQ ID NO: 1259998 - DNA, 15 bp, Homo sapiens
gcgcatcagtcacaa

SEQ ID NO: 1259999 - DNA, 15 bp, Homo sapiens
tgcgcatcagtcaca

SEQ ID NO: 1260000 - DNA, 15 bp, Homo sapiens
gtgcgcatcagtcac

SEQ ID NO: 1260001 - DNA, 15 bp, Homo sapiens
ggtgcgcatcagtca

SEQ ID NO: 1260002 - DNA, 15 bp, Homo sapiens
tggtgcgcatcagtc

SEQ ID NO: 1260003 - DNA, 15 bp, Homo sapiens
gtggtgcgcatcagt

SEQ ID NO: 1260004 - DNA, 15 bp, Homo sapiens
agtggtgcgcatcag

SEQ ID NO: 1260005 - DNA, 15 bp, Homo sapiens
aagtggtgcgcatca

SEQ ID NO: 1260006 - DNA, 15 bp, Homo sapiens
aaagtggtgcgcatc

SEQ ID NO: 1260007 - DNA, 15 bp, Homo sapiens
caaagtggtgcgcat

SEQ ID NO: 1260008 - DNA, 15 bp, Homo sapiens
ccaaagtggtgcgca

SEQ ID NO: 1260009 - DNA, 15 bp, Homo sapiens
accaaagtggtgcgc

SEQ ID NO: 1260010 - DNA, 15 bp, Homo sapiens
aaccaaagtggtgcg

SEQ ID NO: 1260011 - DNA, 15 bp, Homo sapiens
gaaccaaagtggtgc

SEQ ID NO: 1260012 - DNA, 15 bp, Homo sapiens
agaaccaaagtggtg

SEQ ID NO: 1260013 - DNA, 15 bp, Homo sapiens
cagaaccaaagtggt

SEQ ID NO: 1260014 - DNA, 15 bp, Homo sapiens
ccagaaccaaagtgg

SEQ ID NO: 1260015 - DNA, 15 bp, Homo sapiens
gccagaaccaaagtg

SEQ ID NO: 1260016 - DNA, 15 bp, Homo sapiens
tgccagaaccaaagt

SEQ ID NO: 1260017 - DNA, 15 bp, Homo sapiens
ctgccagaaccaaag

SEQ ID NO: 1260018 - DNA, 15 bp, Homo sapiens
actgccagaaccaaa

SEQ ID NO: 1260019 - DNA, 15 bp, Homo sapiens
gactgccagaaccaa

SEQ ID NO: 1260020 - DNA, 15 bp, Homo sapiens
agactgccagaacca

SEQ ID NO: 1260021 - DNA, 15 bp, Homo sapiens
gagactgccagaacc

SEQ ID NO: 1260022 - DNA, 15 bp, Homo sapiens
agagactgccagaac

SEQ ID NO: 1260023 - DNA, 15 bp, Homo sapiens
cagagactgccagaa

SEQ ID NO: 1260024 - DNA, 15 bp, Homo sapiens
ccagagactgccaga

SEQ ID NO: 1260025 - DNA, 15 bp, Homo sapiens
cccagagactgccag

SEQ ID NO: 1260026 - DNA, 15 bp, Homo sapiens
gcccagagactgcca

SEQ ID NO: 1260027 - DNA, 15 bp, Homo sapiens
tgcccagagactgcc

SEQ ID NO: 1260028 - DNA, 15 bp, Homo sapiens
atgcccagagactgc

SEQ ID NO: 1260029 - DNA, 15 bp, Homo sapiens
aatgcccagagactg

SEQ ID NO: 1260030 - DNA, 15 bp, Homo sapiens
taatgcccagagact

SEQ ID NO: 1260031 - DNA, 15 bp, Homo sapiens
ctaatgcccagagac

SEQ ID NO: 1260032 - DNA, 15 bp, Homo sapiens
cctaatgcccagaga

SEQ ID NO: 1260033 - DNA, 15 bp, Homo sapiens
gcctaatgcccagag

SEQ ID NO: 1260034 - DNA, 15 bp, Homo sapiens
ggcctaatgcccaga

SEQ ID NO: 1260035 - DNA, 15 bp, Homo sapiens
tggcctaatgcccag

SEQ ID NO: 1260036 - DNA, 15 bp, Homo sapiens
gtggcctaatgccca

SEQ ID NO: 1260037 - DNA, 15 bp, Homo sapiens
agtggcctaatgccc

SEQ ID NO: 1260038 - DNA, 15 bp, Homo sapiens
gagtggcctaatgcc

SEQ ID NO: 1260039 - DNA, 15 bp, Homo sapiens
agagtggcctaatgc

SEQ ID NO: 1260040 - DNA, 15 bp, Homo sapiens
aagagtggcctaatg

SEQ ID NO: 1260041 - DNA, 15 bp, Homo sapiens
aaagagtggcctaat

SEQ ID NO: 1260042 - DNA, 15 bp, Homo sapiens
gaaagagtggcctaa

SEQ ID NO: 1260043 - DNA, 15 bp, Homo sapiens
agaaagagtggccta

SEQ ID NO: 1260044 - DNA, 15 bp, Homo sapiens
cagaaagagtggcct

SEQ ID NO: 1260045 - DNA, 15 bp, Homo sapiens
gcagaaagagtggcc

SEQ ID NO: 1260046 - DNA, 15 bp, Homo sapiens
agcagaaagagtggc

SEQ ID NO: 1260047 - DNA, 15 bp, Homo sapiens
gagcagaaagagtgg

SEQ ID NO: 1260048 - DNA, 15 bp, Homo sapiens
agagcagaaagagtg

SEQ ID NO: 1260049 - DNA, 15 bp, Homo sapiens
cagagcagaaagagt

SEQ ID NO: 1260050 - DNA, 15 bp, Homo sapiens
gcagagcagaaagag

SEQ ID NO: 1260051 - DNA, 15 bp, Homo sapiens
agcagagcagaaaga

SEQ ID NO: 1260052 - DNA, 15 bp, Homo sapiens
gagcagagcagaaag

SEQ ID NO: 1260053 - DNA, 15 bp, Homo sapiens
agagcagagcagaaa

SEQ ID NO: 1260054 - DNA, 15 bp, Homo sapiens
gagagcagagcagaa

SEQ ID NO: 1260055 - DNA, 15 bp, Homo sapiens
ggagagcagagcaga

SEQ ID NO: 1260056 - DNA, 15 bp, Homo sapiens
aggagagcagagcag

SEQ ID NO: 1260057 - DNA, 15 bp, Homo sapiens
caggagagcagagca

SEQ ID NO: 1260058 - DNA, 15 bp, Homo sapiens
ccaggagagcagagc

SEQ ID NO: 1260059 - DNA, 15 bp, Homo sapiens
gccaggagagcagag

SEQ ID NO: 1260060 - DNA, 15 bp, Homo sapiens
agccaggagagcaga

SEQ ID NO: 1260061 - DNA, 15 bp, Homo sapiens
cagccaggagagcag

SEQ ID NO: 1260062 - DNA, 15 bp, Homo sapiens
tcagccaggagagca

SEQ ID NO: 1260063 - DNA, 15 bp, Homo sapiens
gtcagccaggagagc

SEQ ID NO: 1260064 - DNA, 15 bp, Homo sapiens
tgtcagccaggagag

SEQ ID NO: 1260065 - DNA, 15 bp, Homo sapiens
ctgtcagccaggaga

SEQ ID NO: 1260066 - DNA, 15 bp, Homo sapiens
actgtcagccaggag

SEQ ID NO: 1260067 - DNA, 15 bp, Homo sapiens
aactgtcagccagga

SEQ ID NO: 1260068 - DNA, 15 bp, Homo sapiens
aaactgtcagccagg

SEQ ID NO: 1260069 - DNA, 15 bp, Homo sapiens
taaactgtcagccag

SEQ ID NO: 1260070 - DNA, 15 bp, Homo sapiens
ataaactgtcagcca

SEQ ID NO: 1260071 - DNA, 15 bp, Homo sapiens
tataaactgtcagcc

SEQ ID NO: 1260072 - DNA, 15 bp, Homo sapiens
ttataaactgtcagc

SEQ ID NO: 1260073 - DNA, 15 bp, Homo sapiens
attataaactgtcag

SEQ ID NO: 1260074 - DNA, 15 bp, Homo sapiens
cattataaactgtca

SEQ ID NO: 1260075 - DNA, 15 bp, Homo sapiens
ccattataaactgtc

SEQ ID NO: 1260076 - DNA, 15 bp, Homo sapiens
tccattataaactgt

SEQ ID NO: 1260077 - DNA, 15 bp, Homo sapiens
atccattataaactg

SEQ ID NO: 1260078 - DNA, 15 bp, Homo sapiens
aatccattataaact

SEQ ID NO: 1260079 - DNA, 15 bp, Homo sapiens
aaatccattataaac

SEQ ID NO: 1260080 - DNA, 15 bp, Homo sapiens
aaaatccattataaa

SEQ ID NO: 1260081 - DNA, 15 bp, Homo sapiens
taaaatccattataa

SEQ ID NO: 1260082 - DNA, 15 bp, Homo sapiens
gtaaaatccattata

SEQ ID NO: 1260083 - DNA, 15 bp, Homo sapiens
agtaaaatccattat

SEQ ID NO: 1260084 - DNA, 15 bp, Homo sapiens
aagtaaaatccatta

SEQ ID NO: 1260085 - DNA, 15 bp, Homo sapiens
aaagtaaaatccatt

SEQ ID NO: 1260086 - DNA, 15 bp, Homo sapiens
aaaagtaaaatccat

SEQ ID NO: 1260087 - DNA, 15 bp, Homo sapiens
gaaaagtaaaatcca

SEQ ID NO: 1260088 - DNA, 15 bp, Homo sapiens
agaaaagtaaaatcc

SEQ ID NO: 1260089 - DNA, 15 bp, Homo sapiens
aagaaaagtaaaatc

SEQ ID NO: 1260090 - DNA, 15 bp, Homo sapiens
aaagaaaagtaaaat

SEQ ID NO: 1260091 - DNA, 15 bp, Homo sapiens
aaaagaaaagtaaaa

SEQ ID NO: 1260092 - DNA, 15 bp, Homo sapiens
taaaagaaaagtaaa

SEQ ID NO: 1260093 - DNA, 15 bp, Homo sapiens
ttaaaagaaaagtaa

SEQ ID NO: 1260094 - DNA, 15 bp, Homo sapiens
tttaaaagaaaagta

SEQ ID NO: 1260095 - DNA, 15 bp, Homo sapiens
ttttaaaagaaaagt

SEQ ID NO: 1260096 - DNA, 15 bp, Homo sapiens
tttttaaaagaaaag

SEQ ID NO: 1260097 - DNA, 15 bp, Homo sapiens
ttttttaaaagaaaa

SEQ ID NO: 1260098 - DNA, 15 bp, Homo sapiens
attttttaaaagaaa

SEQ ID NO: 1260099 - DNA, 15 bp, Homo sapiens
gattttttaaaagaa

SEQ ID NO: 1260100 - DNA, 15 bp, Homo sapiens
tgattttttaaaaga

SEQ ID NO: 1260101 - DNA, 15 bp, Homo sapiens
ctgattttttaaaag

SEQ ID NO: 1260102 - DNA, 15 bp, Homo sapiens
tctgattttttaaaa

SEQ ID NO: 1260103 - DNA, 15 bp, Homo sapiens
atctgattttttaaa

SEQ ID NO: 1260104 - DNA, 15 bp, Homo sapiens
aatctgattttttaa

SEQ ID NO: 1260105 - DNA, 15 bp, Homo sapiens
aaatctgatttttta

SEQ ID NO: 1260106 - DNA, 15 bp, Homo sapiens
caaatctgatttttt

SEQ ID NO: 1260107 - DNA, 15 bp, Homo sapiens
gcaaatctgattttt

SEQ ID NO: 1260108 - DNA, 15 bp, Homo sapiens
agcaaatctgatttt

SEQ ID NO: 1260109 - DNA, 15 bp, Homo sapiens
cagcaaatctgattt

SEQ ID NO: 1260110 - DNA, 15 bp, Homo sapiens
acagcaaatctgatt

SEQ ID NO: 1260111 - DNA, 15 bp, Homo sapiens
gacagcaaatctgat

SEQ ID NO: 1260112 - DNA, 15 bp, Homo sapiens
agacagcaaatctga

SEQ ID NO: 1260113 - DNA, 15 bp, Homo sapiens
aagacagcaaatctg

SEQ ID NO: 1260114 - DNA, 15 bp, Homo sapiens
aaagacagcaaatct

SEQ ID NO: 1260115 - DNA, 15 bp, Homo sapiens
aaaagacagcaaatc

SEQ ID NO: 1260116 - DNA, 15 bp, Homo sapiens
caaaagacagcaaat

SEQ ID NO: 1260117 - DNA, 15 bp, Homo sapiens
gcaaaagacagcaaa

SEQ ID NO: 1260118 - DNA, 15 bp, Homo sapiens
agcaaaagacagcaa

SEQ ID NO: 1260119 - DNA, 15 bp, Homo sapiens
cagcaaaagacagca

SEQ ID NO: 1260120 - DNA, 15 bp, Homo sapiens
acagcaaaagacagc

SEQ ID NO: 1260121 - DNA, 15 bp, Homo sapiens
gacagcaaaagacag

SEQ ID NO: 1260122 - DNA, 15 bp, Homo sapiens
tgacagcaaaagaca

SEQ ID NO: 1260123 - DNA, 15 bp, Homo sapiens
atgacagcaaaagac

SEQ ID NO: 1260124 - DNA, 15 bp, Homo sapiens
gatgacagcaaaaga

SEQ ID NO: 1260125 - DNA, 15 bp, Homo sapiens
tgatgacagcaaaag

SEQ ID NO: 1260126 - DNA, 15 bp, Homo sapiens
ctgatgacagcaaaa

SEQ ID NO: 1260127 - DNA, 15 bp, Homo sapiens
gctgatgacagcaaa

SEQ ID NO: 1260128 - DNA, 15 bp, Homo sapiens
agctgatgacagcaa

SEQ ID NO: 1260129 - DNA, 15 bp, Homo sapiens
gagctgatgacagca

SEQ ID NO: 1260130 - DNA, 15 bp, Homo sapiens
agagctgatgacagc

SEQ ID NO: 1260131 - DNA, 15 bp, Homo sapiens
cagagctgatgacag

SEQ ID NO: 1260132 - DNA, 15 bp, Homo sapiens
ccagagctgatgaca

SEQ ID NO: 1260133 - DNA, 15 bp, Homo sapiens
cccagagctgatgac

SEQ ID NO: 1260134 - DNA, 15 bp, Homo sapiens
gcccagagctgatga

SEQ ID NO: 1260135 - DNA, 15 bp, Homo sapiens
ggcccagagctgatg

SEQ ID NO: 1260136 - DNA, 15 bp, Homo sapiens
aggcccagagctgat

SEQ ID NO: 1260137 - DNA, 15 bp, Homo sapiens
aaggcccagagctga

SEQ ID NO: 1260138 - DNA, 15 bp, Homo sapiens
caaggcccagagctg

SEQ ID NO: 1260139 - DNA, 15 bp, Homo sapiens
acaaggcccagagct

SEQ ID NO: 1260140 - DNA, 15 bp, Homo sapiens
gacaaggcccagagc

SEQ ID NO: 1260141 - DNA, 15 bp, Homo sapiens
tgacaaggcccagag

SEQ ID NO: 1260142 - DNA, 15 bp, Homo sapiens
gtgacaaggcccaga

SEQ ID NO: 1260143 - DNA, 15 bp, Homo sapiens
ggtgacaaggcccag

SEQ ID NO: 1260144 - DNA, 15 bp, Homo sapiens
tggtgacaaggccca

SEQ ID NO: 1260145 - DNA, 15 bp, Homo sapiens
gtggtgacaaggccc

SEQ ID NO: 1260146 - DNA, 15 bp, Homo sapiens
tgtggtgacaaggcc

SEQ ID NO: 1260147 - DNA, 15 bp, Homo sapiens
atgtggtgacaaggc

SEQ ID NO: 1260148 - DNA, 15 bp, Homo sapiens
catgtggtgacaagg

SEQ ID NO: 1260149 - DNA, 15 bp, Homo sapiens
ccatgtggtgacaag

SEQ ID NO: 1260150 - DNA, 15 bp, Homo sapiens
gccatgtggtgacaa

SEQ ID NO: 1260151 - DNA, 15 bp, Homo sapiens
tgccatgtggtgaca

SEQ ID NO: 1260152 - DNA, 15 bp, Homo sapiens
ctgccatgtggtgac

SEQ ID NO: 1260153 - DNA, 15 bp, Homo sapiens
tctgccatgtggtga

SEQ ID NO: 1260154 - DNA, 15 bp, Homo sapiens
gtctgccatgtggtg

SEQ ID NO: 1260155 - DNA, 15 bp, Homo sapiens
agtctgccatgtggt

SEQ ID NO: 1260156 - DNA, 15 bp, Homo sapiens
aagtctgccatgtgg

SEQ ID NO: 1260157 - DNA, 15 bp, Homo sapiens
gaagtctgccatgtg

SEQ ID NO: 1260158 - DNA, 15 bp, Homo sapiens
tgaagtctgccatgt

SEQ ID NO: 1260159 - DNA, 15 bp, Homo sapiens
ttgaagtctgccatg

SEQ ID NO: 1260160 - DNA, 15 bp, Homo sapiens
gttgaagtctgccat

SEQ ID NO: 1260161 - DNA, 15 bp, Homo sapiens
ggttgaagtctgcca

SEQ ID NO: 1260162 - DNA, 15 bp, Homo sapiens
aggttgaagtctgcc

SEQ ID NO: 1260163 - DNA, 15 bp, Homo sapiens
taggttgaagtctgc

SEQ ID NO: 1260164 - DNA, 15 bp, Homo sapiens
gtaggttgaagtctg

SEQ ID NO: 1260165 - DNA, 15 bp, Homo sapiens
tgtaggttgaagtct

SEQ ID NO: 1260166 - DNA, 15 bp, Homo sapiens
ttgtaggttgaagtc

SEQ ID NO: 1260167 - DNA, 15 bp, Homo sapiens
attgtaggttgaagt

SEQ ID NO: 1260168 - DNA, 15 bp, Homo sapiens
tattgtaggttgaag

SEQ ID NO: 1260169 - DNA, 15 bp, Homo sapiens
ttattgtaggttgaa

SEQ ID NO: 1260170 - DNA, 15 bp, Homo sapiens
gttattgtaggttga

SEQ ID NO: 1260171 - DNA, 15 bp, Homo sapiens
ggttattgtaggttg

SEQ ID NO: 1260172 - DNA, 15 bp, Homo sapiens
gggttattgtaggtt

SEQ ID NO: 1260173 - DNA, 15 bp, Homo sapiens
ggggttattgtaggt

SEQ ID NO: 1260174 - DNA, 15 bp, Homo sapiens
aggggttattgtagg

SEQ ID NO: 1260175 - DNA, 15 bp, Homo sapiens
caggggttattgtag

SEQ ID NO: 1260176 - DNA, 15 bp, Homo sapiens
tcaggggttattgta

SEQ ID NO: 1260177 - DNA, 15 bp, Homo sapiens
atcaggggttattgt

SEQ ID NO: 1260178 - DNA, 15 bp, Homo sapiens
catcaggggttattg

SEQ ID NO: 1260179 - DNA, 15 bp, Homo sapiens
gcatcaggggttatt

SEQ ID NO: 1260180 - DNA, 15 bp, Homo sapiens
cgcatcaggggttat

SEQ ID NO: 1260181 - DNA, 15 bp, Homo sapiens
acgcatcaggggtta

SEQ ID NO: 1260182 - DNA, 15 bp, Homo sapiens
cacgcatcaggggtt

SEQ ID NO: 1260183 - DNA, 15 bp, Homo sapiens
acacgcatcaggggt

SEQ ID NO: 1260184 - DNA, 15 bp, Homo sapiens
aacacgcatcagggg

SEQ ID NO: 1260185 - DNA, 15 bp, Homo sapiens
aaacacgcatcaggg

SEQ ID NO: 1260186 - DNA, 15 bp, Homo sapiens
gaaacacgcatcagg

SEQ ID NO: 1260187 - DNA, 15 bp, Homo sapiens
ggaaacacgcatcag

SEQ ID NO: 1260188 - DNA, 15 bp, Homo sapiens
aggaaacacgcatca

SEQ ID NO: 1260189 - DNA, 15 bp, Homo sapiens
caggaaacacgcatc

SEQ ID NO: 1260190 - DNA, 15 bp, Homo sapiens
tcaggaaacacgcat

SEQ ID NO: 1260191 - DNA, 15 bp, Homo sapiens
ttcaggaaacacgca

SEQ ID NO: 1260192 - DNA, 15 bp, Homo sapiens
cttcaggaaacacgc

SEQ ID NO: 1260193 - DNA, 15 bp, Homo sapiens
ccttcaggaaacacg

SEQ ID NO: 1260194 - DNA, 15 bp, Homo sapiens
cccttcaggaaacac

SEQ ID NO: 1260195 - DNA, 15 bp, Homo sapiens
ccccttcaggaaaca

SEQ ID NO: 1260196 - DNA, 15 bp, Homo sapiens
tccccttcaggaaac

SEQ ID NO: 1260197 - DNA, 15 bp, Homo sapiens
gtccccttcaggaaa

SEQ ID NO: 1260198 - DNA, 15 bp, Homo sapiens
ggtccccttcaggaa

SEQ ID NO: 1260199 - DNA, 15 bp, Homo sapiens
aggtccccttcagga

SEQ ID NO: 1260200 - DNA, 15 bp, Homo sapiens
gaggtccccttcagg

SEQ ID NO: 1260201 - DNA, 15 bp, Homo sapiens
agaggtccccttcag

SEQ ID NO: 1260202 - DNA, 15 bp, Homo sapiens
gagaggtccccttca

SEQ ID NO: 1260203 - DNA, 15 bp, Homo sapiens
ggagaggtccccttc

SEQ ID NO: 1260204 - DNA, 15 bp, Homo sapiens
gggagaggtcccctt

SEQ ID NO: 1260205 - DNA, 15 bp, Homo sapiens
ggggagaggtcccct

SEQ ID NO: 1260206 - DNA, 15 bp, Homo sapiens
aggggagaggtcccc

SEQ ID NO: 1260207 - DNA, 15 bp, Homo sapiens
aaggggagaggtccc

SEQ ID NO: 1260208 - DNA, 15 bp, Homo sapiens
gaaggggagaggtcc

SEQ ID NO: 1260209 - DNA, 15 bp, Homo sapiens
tgaaggggagaggtc

SEQ ID NO: 1260210 - DNA, 15 bp, Homo sapiens
ctgaaggggagaggt

SEQ ID NO: 1260211 - DNA, 15 bp, Homo sapiens
actgaaggggagagg

SEQ ID NO: 1260212 - DNA, 15 bp, Homo sapiens
gactgaaggggagag

SEQ ID NO: 1260213 - DNA, 15 bp, Homo sapiens
ggactgaaggggaga

SEQ ID NO: 1260214 - DNA, 15 bp, Homo sapiens
tggactgaaggggag

SEQ ID NO: 1260215 - DNA, 15 bp, Homo sapiens
gtggactgaagggga

SEQ ID NO: 1260216 - DNA, 15 bp, Homo sapiens
tgtggactgaagggg

SEQ ID NO: 1260217 - DNA, 15 bp, Homo sapiens
gtgtggactgaaggg

SEQ ID NO: 1260218 - DNA, 15 bp, Homo sapiens
agtgtggactgaagg

SEQ ID NO: 1260219 - DNA, 15 bp, Homo sapiens
aagtgtggactgaag

SEQ ID NO: 1260220 - DNA, 15 bp, Homo sapiens
gaagtgtggactgaa

SEQ ID NO: 1260221 - DNA, 15 bp, Homo sapiens
agaagtgtggactga

SEQ ID NO: 1260222 - DNA, 15 bp, Homo sapiens
tagaagtgtggactg

SEQ ID NO: 1260223 - DNA, 15 bp, Homo sapiens
ctagaagtgtggact

SEQ ID NO: 1260224 - DNA, 15 bp, Homo sapiens
tactagaagtgtgga

SEQ ID NO: 1260225 - DNA, 15 bp, Homo sapiens
ctactagaagtgtgg

SEQ ID NO: 1260226 - DNA, 15 bp, Homo sapiens
cctactagaagtgtg

SEQ ID NO: 1260227 - DNA, 15 bp, Homo sapiens
acctactagaagtgt

SEQ ID NO: 1260228 - DNA, 15 bp, Homo sapiens
aacctactagaagtg

SEQ ID NO: 1260229 - DNA, 15 bp, Homo sapiens
caacctactagaagt

SEQ ID NO: 1260230 - DNA, 15 bp, Homo sapiens
tcaacctactagaag

SEQ ID NO: 1260231 - DNA, 15 bp, Homo sapiens
ctcaacctactagaa

SEQ ID NO: 1260232 - DNA, 15 bp, Homo sapiens
actcaacctactaga

SEQ ID NO: 1260233 - DNA, 15 bp, Homo sapiens
aactcaacctactag

SEQ ID NO: 1260234 - DNA, 15 bp, Homo sapiens
gaactcaacctacta

SEQ ID NO: 1260235 - DNA, 15 bp, Homo sapiens
tgaactcaacctact

SEQ ID NO: 1260236 - DNA, 15 bp, Homo sapiens
ctgaactcaacctac

SEQ ID NO: 1260237 - DNA, 15 bp, Homo sapiens
gctgaactcaaccta

SEQ ID NO: 1260238 - DNA, 15 bp, Homo sapiens
ggctgaactcaacct

SEQ ID NO: 1260239 - DNA, 15 bp, Homo sapiens
gggctgaactcaacc

SEQ ID NO: 1260240 - DNA, 15 bp, Homo sapiens
tgggctgaactcaac

SEQ ID NO: 1260241 - DNA, 15 bp, Homo sapiens
ttgggctgaactcaa

SEQ ID NO: 1260242 - DNA, 15 bp, Homo sapiens
cttgggctgaactca

SEQ ID NO: 1260243 - DNA, 15 bp, Homo sapiens
tcttgggctgaactc

SEQ ID NO: 1260244 - DNA, 15 bp, Homo sapiens
atcttgggctgaact

SEQ ID NO: 1260245 - DNA, 15 bp, Homo sapiens
aatcttgggctgaac

SEQ ID NO: 1260246 - DNA, 15 bp, Homo sapiens
taatcttgggctgaa

SEQ ID NO: 1260247 - DNA, 15 bp, Homo sapiens
ttaatcttgggctga

SEQ ID NO: 1260248 - DNA, 15 bp, Homo sapiens
cttaatcttgggctg

SEQ ID NO: 1260249 - DNA, 15 bp, Homo sapiens
ccttaatcttgggct

SEQ ID NO: 1260250 - DNA, 15 bp, Homo sapiens
gccttaatcttgggc

SEQ ID NO: 1260251 - DNA, 15 bp, Homo sapiens
agccttaatcttggg

SEQ ID NO: 1260252 - DNA, 15 bp, Homo sapiens
gagccttaatcttgg

SEQ ID NO: 1260253 - DNA, 15 bp, Homo sapiens
agagccttaatcttg

SEQ ID NO: 1260254 - DNA, 15 bp, Homo sapiens
cagagccttaatctt

SEQ ID NO: 1260255 - DNA, 15 bp, Homo sapiens
ccagagccttaatct

SEQ ID NO: 1260256 - DNA, 15 bp, Homo sapiens
accagagccttaatc

SEQ ID NO: 1260257 - DNA, 15 bp, Homo sapiens
gaccagagccttaat

SEQ ID NO: 1260258 - DNA, 15 bp, Homo sapiens
agaccagagccttaa

SEQ ID NO: 1260259 - DNA, 15 bp, Homo sapiens
cagaccagagcctta

SEQ ID NO: 1260260 - DNA, 15 bp, Homo sapiens
ccagaccagagcctt

SEQ ID NO: 1260261 - DNA, 15 bp, Homo sapiens
tccagaccagagcct

SEQ ID NO: 1260262 - DNA, 15 bp, Homo sapiens
ctccagaccagagcc

SEQ ID NO: 1260263 - DNA, 15 bp, Homo sapiens
actccagaccagagc

SEQ ID NO: 1260264 - DNA, 15 bp, Homo sapiens
gactccagaccagag

SEQ ID NO: 1260265 - DNA, 15 bp, Homo sapiens
tgactccagaccaga

SEQ ID NO: 1260266 - DNA, 15 bp, Homo sapiens
ctgactccagaccag

SEQ ID NO: 1260267 - DNA, 15 bp, Homo sapiens
tctgactccagacca

SEQ ID NO: 1260268 - DNA, 15 bp, Homo sapiens
ttctgactccagacc

SEQ ID NO: 1260269 - DNA, 15 bp, Homo sapiens
cttctgactccagac

SEQ ID NO: 1260270 - DNA, 15 bp, Homo sapiens
tcttctgactccaga

SEQ ID NO: 1260271 - DNA, 15 bp, Homo sapiens
atcttctgactccag

SEQ ID NO: 1260272 - DNA, 15 bp, Homo sapiens
catcttctgactcca

SEQ ID NO: 1260273 - DNA, 15 bp, Homo sapiens
ccatcttctgactcc

SEQ ID NO: 1260274 - DNA, 15 bp, Homo sapiens
cccatcttctgactc

SEQ ID NO: 1260275 - DNA, 15 bp, Homo sapiens
acccatcttctgact

SEQ ID NO: 1260276 - DNA, 15 bp, Homo sapiens
gacccatcttctgac

SEQ ID NO: 1260277 - DNA, 15 bp, Homo sapiens
tgacccatcttctga

SEQ ID NO: 1260278 - DNA, 15 bp, Homo sapiens
ttgacccatcttctg

SEQ ID NO: 1260279 - DNA, 15 bp, Homo sapiens
tttgacccatcttct

SEQ ID NO: 1260280 - DNA, 15 bp, Homo sapiens
ttttgacccatcttc

SEQ ID NO: 1260281 - DNA, 15 bp, Homo sapiens
attttgacccatctt

SEQ ID NO: 1260282 - DNA, 15 bp, Homo sapiens
gattttgacccatct

SEQ ID NO: 1260283 - DNA, 15 bp, Homo sapiens
agattttgacccatc

SEQ ID NO: 1260284 - DNA, 15 bp, Homo sapiens
tagattttgacccat

SEQ ID NO: 1260285 - DNA, 15 bp, Homo sapiens
ctagattttgaccca

SEQ ID NO: 1260286 - DNA, 15 bp, Homo sapiens
gctagattttgaccc

SEQ ID NO: 1260287 - DNA, 15 bp, Homo sapiens
agctagattttgacc

SEQ ID NO: 1260288 - DNA, 15 bp, Homo sapiens
gagctagattttgac

SEQ ID NO: 1260289 - DNA, 15 bp, Homo sapiens
agagctagattttga

SEQ ID NO: 1260290 - DNA, 15 bp, Homo sapiens
gagagctagattttg

SEQ ID NO: 1260291 - DNA, 15 bp, Homo sapiens
ggagagctagatttt

SEQ ID NO: 1260292 - DNA, 15 bp, Homo sapiens
gggagagctagattt

SEQ ID NO: 1260293 - DNA, 15 bp, Homo sapiens
tgggagagctagatt

SEQ ID NO: 1260294 - DNA, 15 bp, Homo sapiens
gtgggagagctagat

SEQ ID NO: 1260295 - DNA, 15 bp, Homo sapiens
ggtgggagagctaga

SEQ ID NO: 1260296 - DNA, 15 bp, Homo sapiens
cggtgggagagctag

SEQ ID NO: 1260297 - DNA, 15 bp, Homo sapiens
ccggtgggagagcta

SEQ ID NO: 1260298 - DNA, 15 bp, Homo sapiens
gccggtgggagagct

SEQ ID NO: 1260299 - DNA, 15 bp, Homo sapiens
agccggtgggagagc

SEQ ID NO: 1260300 - DNA, 15 bp, Homo sapiens
cagccggtgggagag

SEQ ID NO: 1260301 - DNA, 15 bp, Homo sapiens
ccagccggtgggaga

SEQ ID NO: 1260302 - DNA, 15 bp, Homo sapiens
accagccggtgggag

SEQ ID NO: 1260303 - DNA, 15 bp, Homo sapiens
aaccagccggtggga

SEQ ID NO: 1260304 - DNA, 15 bp, Homo sapiens
caaccagccggtggg

SEQ ID NO: 1260305 - DNA, 15 bp, Homo sapiens
ccaaccagccggtgg

SEQ ID NO: 1260306 - DNA, 15 bp, Homo sapiens
gccaaccagccggtg

SEQ ID NO: 1260307 - DNA, 15 bp, Homo sapiens
agccaaccagccggt

SEQ ID NO: 1260308 - DNA, 15 bp, Homo sapiens
gagccaaccagccgg

SEQ ID NO: 1260309 - DNA, 15 bp, Homo sapiens
agagccaaccagccg

SEQ ID NO: 1260310 - DNA, 15 bp, Homo sapiens
aagagccaaccagcc

SEQ ID NO: 1260311 - DNA, 15 bp, Homo sapiens
gaagagccaaccagc

SEQ ID NO: 1260312 - DNA, 15 bp, Homo sapiens
agaagagccaaccag

SEQ ID NO: 1260313 - DNA, 15 bp, Homo sapiens
aagaagagccaacca

SEQ ID NO: 1260314 - DNA, 15 bp, Homo sapiens
gaagaagagccaacc

SEQ ID NO: 1260315 - DNA, 15 bp, Homo sapiens
tgaagaagagccaac

SEQ ID NO: 1260316 - DNA, 15 bp, Homo sapiens
ctgaagaagagccaa

SEQ ID NO: 1260317 - DNA, 15 bp, Homo sapiens
gctgaagaagagcca

SEQ ID NO: 1260318 - DNA, 15 bp, Homo sapiens
tgctgaagaagagcc

SEQ ID NO: 1260319 - DNA, 15 bp, Homo sapiens
ctgctgaagaagagc

SEQ ID NO: 1260320 - DNA, 15 bp, Homo sapiens
tgactgctgaagaag

SEQ ID NO: 1260321 - DNA, 15 bp, Homo sapiens
ctgactgctgaagaa

SEQ ID NO: 1260322 - DNA, 15 bp, Homo sapiens
gctgactgctgaaga

SEQ ID NO: 1260323 - DNA, 15 bp, Homo sapiens
agctgactgctgaag

SEQ ID NO: 1260324 - DNA, 15 bp, Homo sapiens
tagctgactgctgaa

SEQ ID NO: 1260325 - DNA, 15 bp, Homo sapiens
ctagctgactgctga

SEQ ID NO: 1260326 - DNA, 15 bp, Homo sapiens
actagctgactgctg

SEQ ID NO: 1260327 - DNA, 15 bp, Homo sapiens
cactagctgactgct

SEQ ID NO: 1260328 - DNA, 15 bp, Homo sapiens
acactagctgactgc

SEQ ID NO: 1260329 - DNA, 15 bp, Homo sapiens
aacactagctgactg

SEQ ID NO: 1260330 - DNA, 15 bp, Homo sapiens
aaacactagctgact

SEQ ID NO: 1260331 - DNA, 15 bp, Homo sapiens
gaaacactagctgac

SEQ ID NO: 1260332 - DNA, 15 bp, Homo sapiens
ggaaacactagctga

SEQ ID NO: 1260333 - DNA, 15 bp, Homo sapiens
tggaaacactagctg

SEQ ID NO: 1260334 - DNA, 15 bp, Homo sapiens
ttggaaacactagct

SEQ ID NO: 1260335 - DNA, 15 bp, Homo sapiens
tttggaaacactagc

SEQ ID NO: 1260336 - DNA, 15 bp, Homo sapiens
atttggaaacactag

SEQ ID NO: 1260337 - DNA, 15 bp, Homo sapiens
catttggaaacacta

SEQ ID NO: 1260338 - DNA, 15 bp, Homo sapiens
tcatttggaaacact

SEQ ID NO: 1260339 - DNA, 15 bp, Homo sapiens
gtcatttggaaacac

SEQ ID NO: 1260340 - DNA, 15 bp, Homo sapiens
tgtcatttggaaaca

SEQ ID NO: 1260341 - DNA, 15 bp, Homo sapiens
ctgtcatttggaaac

SEQ ID NO: 1260342 - DNA, 15 bp, Homo sapiens
actgtcatttggaaa

SEQ ID NO: 1260343 - DNA, 15 bp, Homo sapiens
tactgtcatttggaa

SEQ ID NO: 1260344 - DNA, 15 bp, Homo sapiens
atactgtcatttgga

SEQ ID NO: 1260345 - DNA, 15 bp, Homo sapiens
gatactgtcatttgg

SEQ ID NO: 1260346 - DNA, 15 bp, Homo sapiens
agatactgtcatttg

SEQ ID NO: 1260347 - DNA, 15 bp, Homo sapiens
cagatactgtcattt

SEQ ID NO: 1260348 - DNA, 15 bp, Homo sapiens
acagatactgtcatt

SEQ ID NO: 1260349 - DNA, 15 bp, Homo sapiens
cacagatactgtcat

SEQ ID NO: 1260350 - DNA, 15 bp, Homo sapiens
acacagatactgtca

SEQ ID NO: 1260351 - DNA, 15 bp, Homo sapiens
gacacagatactgtc

SEQ ID NO: 1260352 - DNA, 15 bp, Homo sapiens
ggacacagatactgt

SEQ ID NO: 1260353 - DNA, 15 bp, Homo sapiens
aggacacagatactg

SEQ ID NO: 1260354 - DNA, 15 bp, Homo sapiens
gaggacacagatact

SEQ ID NO: 1260355 - DNA, 15 bp, Homo sapiens
tgaggacacagatac

SEQ ID NO: 1260356 - DNA, 15 bp, Homo sapiens
atgaggacacagata

SEQ ID NO: 1260357 - DNA, 15 bp, Homo sapiens
gatgaggacacagat

SEQ ID NO: 1260358 - DNA, 15 bp, Homo sapiens
agatgaggacacaga

SEQ ID NO: 1260359 - DNA, 15 bp, Homo sapiens
cagatgaggacacag

SEQ ID NO: 1260360 - DNA, 15 bp, Homo sapiens
acagatgaggacaca

SEQ ID NO: 1260361 - DNA, 15 bp, Homo sapiens
tacagatgaggacac

SEQ ID NO: 1260362 - DNA, 15 bp, Homo sapiens
ttacagatgaggaca

SEQ ID NO: 1260363 - DNA, 15 bp, Homo sapiens
tttacagatgaggac

SEQ ID NO: 1260364 - DNA, 15 bp, Homo sapiens
actttacagatgagg

SEQ ID NO: 1260365 - DNA, 15 bp, Homo sapiens
gactttacagatgag

SEQ ID NO: 1260366 - DNA, 15 bp, Homo sapiens
cgactttacagatga

SEQ ID NO: 1260367 - DNA, 15 bp, Homo sapiens
ccgactttacagatg

SEQ ID NO: 1260368 - DNA, 15 bp, Homo sapiens
cccgactttacagat

SEQ ID NO: 1260369 - DNA, 15 bp, Homo sapiens
tcccgactttacaga

SEQ ID NO: 1260370 - DNA, 15 bp, Homo sapiens
gtcccgactttacag

SEQ ID NO: 1260371 - DNA, 15 bp, Homo sapiens
tgtcccgactttaca

SEQ ID NO: 1260372 - DNA, 15 bp, Homo sapiens
ttgtcccgactttac

SEQ ID NO: 1260373 - DNA, 15 bp, Homo sapiens
attgtcccgacttta

SEQ ID NO: 1260374 - DNA, 15 bp, Homo sapiens
tattgtcccgacttt

SEQ ID NO: 1260375 - DNA, 15 bp, Homo sapiens
ttattgtcccgactt

SEQ ID NO: 1260376 - DNA, 15 bp, Homo sapiens
gttattgtcccgact

SEQ ID NO: 1260377 - DNA, 15 bp, Homo sapiens
agttattgtcccgac

SEQ ID NO: 1260378 - DNA, 15 bp, Homo sapiens
cagttattgtcccga

SEQ ID NO: 1260379 - DNA, 15 bp, Homo sapiens
ccagttattgtcccg

SEQ ID NO: 1260380 - DNA, 15 bp, Homo sapiens
accagttattgtccc

SEQ ID NO: 1260381 - DNA, 15 bp, Homo sapiens
caccagttattgtcc

SEQ ID NO: 1260382 - DNA, 15 bp, Homo sapiens
acaccagttattgtc

SEQ ID NO: 1260383 - DNA, 15 bp, Homo sapiens
aacaccagttattgt

SEQ ID NO: 1260384 - DNA, 15 bp, Homo sapiens
aaacaccagttattg

SEQ ID NO: 1260385 - DNA, 15 bp, Homo sapiens
aaaacaccagttatt

SEQ ID NO: 1260386 - DNA, 15 bp, Homo sapiens
aaaaacaccagttat

SEQ ID NO: 1260387 - DNA, 15 bp, Homo sapiens
aaaaaacaccagtta

SEQ ID NO: 1260388 - DNA, 15 bp, Homo sapiens
aaaaaaacaccagtt

SEQ ID NO: 1260389 - DNA, 15 bp, Homo sapiens
aaaaaaaacaccagt

SEQ ID NO: 1260390 - DNA, 15 bp, Homo sapiens
caaaaaaaacaccag

SEQ ID NO: 1260391 - DNA, 15 bp, Homo sapiens
acaaaaaaaacacca

SEQ ID NO: 1260392 - DNA, 15 bp, Homo sapiens
aacaaaaaaaacacc

SEQ ID NO: 1260393 - DNA, 15 bp, Homo sapiens
aaacaaaaaaaacac

SEQ ID NO: 1260394 - DNA, 15 bp, Homo sapiens
caaaacaaaaaaaac

SEQ ID NO: 1260395 - DNA, 15 bp, Homo sapiens
acaaaacaaaaaaaa

SEQ ID NO: 1260396 - DNA, 15 bp, Homo sapiens
aacaaaacaaaaaaa

SEQ ID NO: 1260397 - DNA, 15 bp, Homo sapiens
aaaaaacaaaacaaa

SEQ ID NO: 1260398 - DNA, 15 bp, Homo sapiens
caaaaaacaaaacaa

SEQ ID NO: 1260399 - DNA, 15 bp, Homo sapiens
tcaaaaaacaaaaca

SEQ ID NO: 1260400 - DNA, 15 bp, Homo sapiens
ctcaaaaaacaaaac

SEQ ID NO: 1260401 - DNA, 15 bp, Homo sapiens
tgggcggcagagcta

SEQ ID NO: 1260402 - DNA, 15 bp, Homo sapiens
ctgggcggcagagct

SEQ ID NO: 1260403 - DNA, 15 bp, Homo sapiens
cctgggcggcagagc

SEQ ID NO: 1260404 - DNA, 15 bp, Homo sapiens
tcctgggcggcagag

SEQ ID NO: 1260405 - DNA, 15 bp, Homo sapiens
atcctgggcggcaga

SEQ ID NO: 1260406 - DNA, 15 bp, Homo sapiens
catcctgggcggcag

SEQ ID NO: 1260407 - DNA, 15 bp, Homo sapiens
ccatcctgggcggca

SEQ ID NO: 1260408 - DNA, 15 bp, Homo sapiens
tccatcctgggcggc

SEQ ID NO: 1260409 - DNA, 15 bp, Homo sapiens
ctccatcctgggcgg

SEQ ID NO: 1260410 - DNA, 15 bp, Homo sapiens
actccatcctgggcg

SEQ ID NO: 1260411 - DNA, 15 bp, Homo sapiens
cactccatcctgggc

SEQ ID NO: 1260412 - DNA, 15 bp, Homo sapiens
gcactccatcctggg

SEQ ID NO: 1260413 - DNA, 15 bp, Homo sapiens
tgcactccatcctgg

SEQ ID NO: 1260414 - DNA, 15 bp, Homo sapiens
ctgcactccatcctg

SEQ ID NO: 1260415 - DNA, 15 bp, Homo sapiens
actgcactccatcct

SEQ ID NO: 1260416 - DNA, 15 bp, Homo sapiens
cactgcactccatcc

SEQ ID NO: 1260417 - DNA, 15 bp, Homo sapiens
ccactgcactccatc

SEQ ID NO: 1260418 - DNA, 15 bp, Homo sapiens
gccactgcactccat

SEQ ID NO: 1260419 - DNA, 15 bp, Homo sapiens
atgagctgagattgt

SEQ ID NO: 1260420 - DNA, 15 bp, Homo sapiens
aatgagctgagattg

SEQ ID NO: 1260421 - DNA, 15 bp, Homo sapiens
caatgagctgagatt

SEQ ID NO: 1260422 - DNA, 15 bp, Homo sapiens
aagttgcaatgagct

SEQ ID NO: 1260423 - DNA, 15 bp, Homo sapiens
gaagttgcaatgagc

SEQ ID NO: 1260424 - DNA, 15 bp, Homo sapiens
ggaagttgcaatgag

SEQ ID NO: 1260425 - DNA, 15 bp, Homo sapiens
tggaagttgcaatga

SEQ ID NO: 1260426 - DNA, 15 bp, Homo sapiens
gtggaagttgcaatg

SEQ ID NO: 1260427 - DNA, 15 bp, Homo sapiens
ggtggaagttgcaat

SEQ ID NO: 1260428 - DNA, 15 bp, Homo sapiens
aggtggaagttgcaa

SEQ ID NO: 1260429 - DNA, 15 bp, Homo sapiens
gaggtggaagttgca

SEQ ID NO: 1260430 - DNA, 15 bp, Homo sapiens
ggaggtggaagttgc

SEQ ID NO: 1260431 - DNA, 15 bp, Homo sapiens
aggaggtggaagttg

SEQ ID NO: 1260432 - DNA, 15 bp, Homo sapiens
caggaggtggaagtt

SEQ ID NO: 1260433 - DNA, 15 bp, Homo sapiens
ccaggaggtggaagt

SEQ ID NO: 1260434 - DNA, 15 bp, Homo sapiens
cccaggaggtggaag

SEQ ID NO: 1260435 - DNA, 15 bp, Homo sapiens
acccaggaggtggaa

SEQ ID NO: 1260436 - DNA, 15 bp, Homo sapiens
tacttgaacccagga

SEQ ID NO: 1260437 - DNA, 15 bp, Homo sapiens
ttacttgaacccagg

SEQ ID NO: 1260438 - DNA, 15 bp, Homo sapiens
attacttgaacccag

SEQ ID NO: 1260439 - DNA, 15 bp, Homo sapiens
aattacttgaaccca

SEQ ID NO: 1260440 - DNA, 15 bp, Homo sapiens
agaattacttgaacc

SEQ ID NO: 1260441 - DNA, 15 bp, Homo sapiens
aagaattacttgaac

SEQ ID NO: 1260442 - DNA, 15 bp, Homo sapiens
caagaattacttgaa

SEQ ID NO: 1260443 - DNA, 15 bp, Homo sapiens
acaagaattacttga

SEQ ID NO: 1260444 - DNA, 15 bp, Homo sapiens
cacaagaattacttg

SEQ ID NO: 1260445 - DNA, 15 bp, Homo sapiens
gcacaagaattactt

SEQ ID NO: 1260446 - DNA, 15 bp, Homo sapiens
ggcacaagaattact

SEQ ID NO: 1260447 - DNA, 15 bp, Homo sapiens
aggcacaagaattac

SEQ ID NO: 1260448 - DNA, 15 bp, Homo sapiens
gaggcacaagaatta

SEQ ID NO: 1260449 - DNA, 15 bp, Homo sapiens
tgaggcacaagaatt

SEQ ID NO: 1260450 - DNA, 15 bp, Homo sapiens
gggctgaggcacaag

SEQ ID NO: 1260451 - DNA, 15 bp, Homo sapiens
ggggctgaggcacaa

SEQ ID NO: 1260452 - DNA, 15 bp, Homo sapiens
gggggctgaggcaca

SEQ ID NO: 1260453 - DNA, 15 bp, Homo sapiens
agggggctgaggcac

SEQ ID NO: 1260454 - DNA, 15 bp, Homo sapiens
cagggggctgaggca

SEQ ID NO: 1260455 - DNA, 15 bp, Homo sapiens
tcagggggctgaggc

SEQ ID NO: 1260456 - DNA, 15 bp, Homo sapiens
ctcagggggctgagg

SEQ ID NO: 1260457 - DNA, 15 bp, Homo sapiens
actcagggggctgag

SEQ ID NO: 1260458 - DNA, 15 bp, Homo sapiens
tactcagggggctga

SEQ ID NO: 1260459 - DNA, 15 bp, Homo sapiens
ctactcagggggctg

SEQ ID NO: 1260460 - DNA, 15 bp, Homo sapiens
gctactcagggggct

SEQ ID NO: 1260461 - DNA, 15 bp, Homo sapiens
ggctactcagggggc

SEQ ID NO: 1260462 - DNA, 15 bp, Homo sapiens
tggctactcaggggg

SEQ ID NO: 1260463 - DNA, 15 bp, Homo sapiens
ctggctactcagggg

SEQ ID NO: 1260464 - DNA, 15 bp, Homo sapiens
cctggctactcaggg

SEQ ID NO: 1260465 - DNA, 15 bp, Homo sapiens
tcctggctactcagg

SEQ ID NO: 1260466 - DNA, 15 bp, Homo sapiens
gtcctggctactcag

SEQ ID NO: 1260467 - DNA, 15 bp, Homo sapiens
agtcctggctactca

SEQ ID NO: 1260468 - DNA, 15 bp, Homo sapiens
tagtcctggctactc

SEQ ID NO: 1260469 - DNA, 15 bp, Homo sapiens
gtagtcctggctact

SEQ ID NO: 1260470 - DNA, 15 bp, Homo sapiens
tgtagtcctggctac

SEQ ID NO: 1260471 - DNA, 15 bp, Homo sapiens
ctgtagtcctggcta

SEQ ID NO: 1260472 - DNA, 15 bp, Homo sapiens
cctgtagtcctggct

SEQ ID NO: 1260473 - DNA, 15 bp, Homo sapiens
gcctgtagtcctggc

SEQ ID NO: 1260474 - DNA, 15 bp, Homo sapiens
cgcctgtagtcctgg

SEQ ID NO: 1260475 - DNA, 15 bp, Homo sapiens
gcgcctgtagtcctg

SEQ ID NO: 1260476 - DNA, 15 bp, Homo sapiens
tgcgcctgtagtcct

SEQ ID NO: 1260477 - DNA, 15 bp, Homo sapiens
atgcgcctgtagtcc

SEQ ID NO: 1260478 - DNA, 15 bp, Homo sapiens
aatgcgcctgtagtc

SEQ ID NO: 1260479 - DNA, 15 bp, Homo sapiens
gaatgcgcctgtagt

SEQ ID NO: 1260480 - DNA, 15 bp, Homo sapiens
ggaatgcgcctgtag

SEQ ID NO: 1260481 - DNA, 15 bp, Homo sapiens
tggaatgcgcctgta

SEQ ID NO: 1260482 - DNA, 15 bp, Homo sapiens
gtggaatgcgcctgt

SEQ ID NO: 1260483 - DNA, 15 bp, Homo sapiens
ggtggaatgcgcctg

SEQ ID NO: 1260484 - DNA, 15 bp, Homo sapiens
cggtggaatgcgcct

SEQ ID NO: 1260485 - DNA, 15 bp, Homo sapiens
gcggtggaatgcgcc

SEQ ID NO: 1260486 - DNA, 15 bp, Homo sapiens
tgcggtggaatgcgc

SEQ ID NO: 1260487 - DNA, 15 bp, Homo sapiens
gtgcggtggaatgcg

SEQ ID NO: 1260488 - DNA, 15 bp, Homo sapiens
ggtgcggtggaatgc

SEQ ID NO: 1260489 - DNA, 15 bp, Homo sapiens
gggtgcggtggaatg

SEQ ID NO: 1260490 - DNA, 15 bp, Homo sapiens
tgggtgcggtggaat

SEQ ID NO: 1260491 - DNA, 15 bp, Homo sapiens
ctgggtgcggtggaa

SEQ ID NO: 1260492 - DNA, 15 bp, Homo sapiens
gctgggtgcggtgga

SEQ ID NO: 1260493 - DNA, 15 bp, Homo sapiens
tagctgggtgcggtg

SEQ ID NO: 1260494 - DNA, 15 bp, Homo sapiens
ttagctgggtgcggt

SEQ ID NO: 1260495 - DNA, 15 bp, Homo sapiens
cttagctgggtgcgg

SEQ ID NO: 1260496 - DNA, 15 bp, Homo sapiens
acttagctgggtgcg

SEQ ID NO: 1260497 - DNA, 15 bp, Homo sapiens
aacttagctgggtgc

SEQ ID NO: 1260498 - DNA, 15 bp, Homo sapiens
caaaacttagctggg

SEQ ID NO: 1260499 - DNA, 15 bp, Homo sapiens
acaaaacttagctgg

SEQ ID NO: 1260500 - DNA, 15 bp, Homo sapiens
tacaaaacttagctg

SEQ ID NO: 1260501 - DNA, 15 bp, Homo sapiens
atacaaaacttagct

SEQ ID NO: 1260502 - DNA, 15 bp, Homo sapiens
aatacaaaacttagc

SEQ ID NO: 1260503 - DNA, 15 bp, Homo sapiens
aaatacaaaacttag

SEQ ID NO: 1260504 - DNA, 15 bp, Homo sapiens
aaaatacaaaactta

SEQ ID NO: 1260505 - DNA, 15 bp, Homo sapiens
caaaaatacaaaact

SEQ ID NO: 1260506 - DNA, 15 bp, Homo sapiens
ccaaaaatacaaaac

SEQ ID NO: 1260507 - DNA, 15 bp, Homo sapiens
caccaaaaatacaaa

SEQ ID NO: 1260508 - DNA, 15 bp, Homo sapiens
ccaccaaaaatacaa

SEQ ID NO: 1260509 - DNA, 15 bp, Homo sapiens
tccaccaaaaataca

SEQ ID NO: 1260510 - DNA, 15 bp, Homo sapiens
ctccaccaaaaatac

SEQ ID NO: 1260511 - DNA, 15 bp, Homo sapiens
tctccaccaaaaata

SEQ ID NO: 1260512 - DNA, 15 bp, Homo sapiens
gtctccaccaaaaat

SEQ ID NO: 1260513 - DNA, 15 bp, Homo sapiens
cgtctccaccaaaaa

SEQ ID NO: 1260514 - DNA, 15 bp, Homo sapiens
ccgtctccaccaaaa

SEQ ID NO: 1260515 - DNA, 15 bp, Homo sapiens
cccgtctccaccaaa

SEQ ID NO: 1260516 - DNA, 15 bp, Homo sapiens
ccccgtctccaccaa

SEQ ID NO: 1260517 - DNA, 15 bp, Homo sapiens
accccgtctccacca

SEQ ID NO: 1260518 - DNA, 15 bp, Homo sapiens
aaccccgtctccacc

SEQ ID NO: 1260519 - DNA, 15 bp, Homo sapiens
cgaaaccccgtctcc

SEQ ID NO: 1260520 - DNA, 15 bp, Homo sapiens
gcgaaaccccgtctc

SEQ ID NO: 1260521 - DNA, 15 bp, Homo sapiens
ggcgaaaccccgtct

SEQ ID NO: 1260522 - DNA, 15 bp, Homo sapiens
tggcgaaaccccgtc

SEQ ID NO: 1260523 - DNA, 15 bp, Homo sapiens
atggcgaaaccccgt

SEQ ID NO: 1260524 - DNA, 15 bp, Homo sapiens
catggcgaaaccccg

SEQ ID NO: 1260525 - DNA, 15 bp, Homo sapiens
gccagcctggccaac

SEQ ID NO: 1260526 - DNA, 15 bp, Homo sapiens
ggccagcctggccaa

SEQ ID NO: 1260527 - DNA, 15 bp, Homo sapiens
aggccagcctggcca

SEQ ID NO: 1260528 - DNA, 15 bp, Homo sapiens
gaggccagcctggcc

SEQ ID NO: 1260529 - DNA, 15 bp, Homo sapiens
cgaggccagcctggc

SEQ ID NO: 1260530 - DNA, 15 bp, Homo sapiens
tcgaggccagcctgg

SEQ ID NO: 1260531 - DNA, 15 bp, Homo sapiens
ttcgaggccagcctg

SEQ ID NO: 1260532 - DNA, 15 bp, Homo sapiens
gagttcgaggccagc

SEQ ID NO: 1260533 - DNA, 15 bp, Homo sapiens
ggagttcgaggccag

SEQ ID NO: 1260534 - DNA, 15 bp, Homo sapiens
aggagttcgaggcca

SEQ ID NO: 1260535 - DNA, 15 bp, Homo sapiens
caggagttcgaggcc

SEQ ID NO: 1260536 - DNA, 15 bp, Homo sapiens
tcaggagttcgaggc

SEQ ID NO: 1260537 - DNA, 15 bp, Homo sapiens
gtcaggagttcgagg

SEQ ID NO: 1260538 - DNA, 15 bp, Homo sapiens
tacctgaggtcagga

SEQ ID NO: 1260539 - DNA, 15 bp, Homo sapiens
ttacctgaggtcagg

SEQ ID NO: 1260540 - DNA, 15 bp, Homo sapiens
attacctgaggtcag

SEQ ID NO: 1260541 - DNA, 15 bp, Homo sapiens
gattacctgaggtca

SEQ ID NO: 1260542 - DNA, 15 bp, Homo sapiens
ggattacctgaggtc

SEQ ID NO: 1260543 - DNA, 15 bp, Homo sapiens
gggattacctgaggt

SEQ ID NO: 1260544 - DNA, 15 bp, Homo sapiens
ggggattacctgagg

SEQ ID NO: 1260545 - DNA, 15 bp, Homo sapiens
gggggattacctgag

SEQ ID NO: 1260546 - DNA, 15 bp, Homo sapiens
agggggattacctga

SEQ ID NO: 1260547 - DNA, 15 bp, Homo sapiens
cagggggattacctg

SEQ ID NO: 1260548 - DNA, 15 bp, Homo sapiens
gcagggggattacct

SEQ ID NO: 1260549 - DNA, 15 bp, Homo sapiens
ggcagggggattacc

SEQ ID NO: 1260550 - DNA, 15 bp, Homo sapiens
aggcagggggattac

SEQ ID NO: 1260551 - DNA, 15 bp, Homo sapiens
aaggcagggggatta

SEQ ID NO: 1260552 - DNA, 15 bp, Homo sapiens
caaggcagggggatt

SEQ ID NO: 1260553 - DNA, 15 bp, Homo sapiens
ccaaggcagggggat

SEQ ID NO: 1260554 - DNA, 15 bp, Homo sapiens
gccaaggcaggggga

SEQ ID NO: 1260555 - DNA, 15 bp, Homo sapiens
ggccaaggcaggggg

SEQ ID NO: 1260556 - DNA, 15 bp, Homo sapiens
aggccaaggcagggg

SEQ ID NO: 1260557 - DNA, 15 bp, Homo sapiens
gaggccaaggcaggg

SEQ ID NO: 1260558 - DNA, 15 bp, Homo sapiens
agcacaaggtgcagt

SEQ ID NO: 1260559 - DNA, 15 bp, Homo sapiens
cagcacaaggtgcag

SEQ ID NO: 1260560 - DNA, 15 bp, Homo sapiens
gcagcacaaggtgca

SEQ ID NO: 1260561 - DNA, 15 bp, Homo sapiens
tgcagcacaaggtgc

SEQ ID NO: 1260562 - DNA, 15 bp, Homo sapiens
ttgcagcacaaggtg

SEQ ID NO: 1260563 - DNA, 15 bp, Homo sapiens
cttgcagcacaaggt

SEQ ID NO: 1260564 - DNA, 15 bp, Homo sapiens
gcttgcagcacaagg

SEQ ID NO: 1260565 - DNA, 15 bp, Homo sapiens
agcttgcagcacaag

SEQ ID NO: 1260566 - DNA, 15 bp, Homo sapiens
aagcttgcagcacaa

SEQ ID NO: 1260567 - DNA, 15 bp, Homo sapiens
aaagcttgcagcaca

SEQ ID NO: 1260568 - DNA, 15 bp, Homo sapiens
gaaagcttgcagcac

SEQ ID NO: 1260569 - DNA, 15 bp, Homo sapiens
agaaagcttgcagca

SEQ ID NO: 1260570 - DNA, 15 bp, Homo sapiens
aagaaagcttgcagc

SEQ ID NO: 1260571 - DNA, 15 bp, Homo sapiens
gaagaaagcttgcag

SEQ ID NO: 1260572 - DNA, 15 bp, Homo sapiens
ggaagaaagcttgca

SEQ ID NO: 1260573 - DNA, 15 bp, Homo sapiens
aggaagaaagcttgc

SEQ ID NO: 1260574 - DNA, 15 bp, Homo sapiens
caggaagaaagcttg

SEQ ID NO: 1260575 - DNA, 15 bp, Homo sapiens
ccaggaagaaagctt

SEQ ID NO: 1260576 - DNA, 15 bp, Homo sapiens
accaggaagaaagct

SEQ ID NO: 1260577 - DNA, 15 bp, Homo sapiens
caccaggaagaaagc

SEQ ID NO: 1260578 - DNA, 15 bp, Homo sapiens
ccaccaggaagaaag

SEQ ID NO: 1260579 - DNA, 15 bp, Homo sapiens
gccaccaggaagaaa

SEQ ID NO: 1260580 - DNA, 15 bp, Homo sapiens
tgccaccaggaagaa

SEQ ID NO: 1260581 - DNA, 15 bp, Homo sapiens
ctgccaccaggaaga

SEQ ID NO: 1260582 - DNA, 15 bp, Homo sapiens
tctgccaccaggaag

SEQ ID NO: 1260583 - DNA, 15 bp, Homo sapiens
atctgccaccaggaa

SEQ ID NO: 1260584 - DNA, 15 bp, Homo sapiens
catctgccaccagga

SEQ ID NO: 1260585 - DNA, 15 bp, Homo sapiens
tcatctgccaccagg

SEQ ID NO: 1260586 - DNA, 15 bp, Homo sapiens
gtcatctgccaccag

SEQ ID NO: 1260587 - DNA, 15 bp, Homo sapiens
tgtcatctgccacca

SEQ ID NO: 1260588 - DNA, 15 bp, Homo sapiens
atgtcatctgccacc

SEQ ID NO: 1260589 - DNA, 15 bp, Homo sapiens
gatgtcatctgccac

SEQ ID NO: 1260590 - DNA, 15 bp, Homo sapiens
tgatgtcatctgcca

SEQ ID NO: 1260591 - DNA, 15 bp, Homo sapiens
ctgatgtcatctgcc

SEQ ID NO: 1260592 - DNA, 15 bp, Homo sapiens
cctgatgtcatctgc

SEQ ID NO: 1260593 - DNA, 15 bp, Homo sapiens
ccctgatgtcatctg

SEQ ID NO: 1260594 - DNA, 15 bp, Homo sapiens
tccctgatgtcatct

SEQ ID NO: 1260595 - DNA, 15 bp, Homo sapiens
atccctgatgtcatc

SEQ ID NO: 1260596 - DNA, 15 bp, Homo sapiens
aatccctgatgtcat

SEQ ID NO: 1260597 - DNA, 15 bp, Homo sapiens
gaatccctgatgtca

SEQ ID NO: 1260598 - DNA, 15 bp, Homo sapiens
tgaatccctgatgtc

SEQ ID NO: 1260599 - DNA, 15 bp, Homo sapiens
atgaatccctgatgt

SEQ ID NO: 1260600 - DNA, 15 bp, Homo sapiens
gatgaatccctgatg

SEQ ID NO: 1260601 - DNA, 15 bp, Homo sapiens
ggatgaatccctgat

SEQ ID NO: 1260602 - DNA, 15 bp, Homo sapiens
gggatgaatccctga

SEQ ID NO: 1260603 - DNA, 15 bp, Homo sapiens
agggatgaatccctg

SEQ ID NO: 1260604 - DNA, 15 bp, Homo sapiens
gagggatgaatccct

SEQ ID NO: 1260605 - DNA, 15 bp, Homo sapiens
tgagggatgaatccc

SEQ ID NO: 1260606 - DNA, 15 bp, Homo sapiens
gtgagggatgaatcc

SEQ ID NO: 1260607 - DNA, 15 bp, Homo sapiens
ggtgagggatgaatc

SEQ ID NO: 1260608 - DNA, 15 bp, Homo sapiens
aggtgagggatgaat

SEQ ID NO: 1260609 - DNA, 15 bp, Homo sapiens
aaggtgagggatgaa

SEQ ID NO: 1260610 - DNA, 15 bp, Homo sapiens
caaggtgagggatga

SEQ ID NO: 1260611 - DNA, 15 bp, Homo sapiens
gcaaggtgagggatg

SEQ ID NO: 1260612 - DNA, 15 bp, Homo sapiens
agcaaggtgagggat

SEQ ID NO: 1260613 - DNA, 15 bp, Homo sapiens
cagcaaggtgaggga

SEQ ID NO: 1260614 - DNA, 15 bp, Homo sapiens
ccagcaaggtgaggg

SEQ ID NO: 1260615 - DNA, 15 bp, Homo sapiens
cccagcaaggtgagg

SEQ ID NO: 1260616 - DNA, 15 bp, Homo sapiens
ccccagcaaggtgag

SEQ ID NO: 1260617 - DNA, 15 bp, Homo sapiens
cccccagcaaggtga

SEQ ID NO: 1260618 - DNA, 15 bp, Homo sapiens
gcccccagcaaggtg

SEQ ID NO: 1260619 - DNA, 15 bp, Homo sapiens
tgcccccagcaaggt

SEQ ID NO: 1260620 - DNA, 15 bp, Homo sapiens
ctgcccccagcaagg

SEQ ID NO: 1260621 - DNA, 15 bp, Homo sapiens
tctgcccccagcaag

SEQ ID NO: 1260622 - DNA, 15 bp, Homo sapiens
atctgcccccagcaa

SEQ ID NO: 1260623 - DNA, 15 bp, Homo sapiens
gatctgcccccagca

SEQ ID NO: 1260624 - DNA, 15 bp, Homo sapiens
agatctgcccccagc

SEQ ID NO: 1260625 - DNA, 15 bp, Homo sapiens
cagatctgcccccag

SEQ ID NO: 1260626 - DNA, 15 bp, Homo sapiens
gcagatctgccccca

SEQ ID NO: 1260627 - DNA, 15 bp, Homo sapiens
agcagatctgccccc

SEQ ID NO: 1260628 - DNA, 15 bp, Homo sapiens
aagcagatctgcccc

SEQ ID NO: 1260629 - DNA, 15 bp, Homo sapiens
caagcagatctgccc

SEQ ID NO: 1260630 - DNA, 15 bp, Homo sapiens
acaagcagatctgcc

SEQ ID NO: 1260631 - DNA, 15 bp, Homo sapiens
tacaagcagatctgc

SEQ ID NO: 1260632 - DNA, 15 bp, Homo sapiens
atacaagcagatctg

SEQ ID NO: 1260633 - DNA, 15 bp, Homo sapiens
gatacaagcagatct

SEQ ID NO: 1260634 - DNA, 15 bp, Homo sapiens
tgatacaagcagatc

SEQ ID NO: 1260635 - DNA, 15 bp, Homo sapiens
ctgatacaagcagat

SEQ ID NO: 1260636 - DNA, 15 bp, Homo sapiens
tctgatacaagcaga

SEQ ID NO: 1260637 - DNA, 15 bp, Homo sapiens
ttctgatacaagcag

SEQ ID NO: 1260638 - DNA, 15 bp, Homo sapiens
cttctgatacaagca

SEQ ID NO: 1260639 - DNA, 15 bp, Homo sapiens
gcttctgatacaagc

SEQ ID NO: 1260640 - DNA, 15 bp, Homo sapiens
ggcttctgatacaag

SEQ ID NO: 1260641 - DNA, 15 bp, Homo sapiens
tggcttctgatacaa

SEQ ID NO: 1260642 - DNA, 15 bp, Homo sapiens
ctggcttctgataca

SEQ ID NO: 1260643 - DNA, 15 bp, Homo sapiens
cctggcttctgatac

SEQ ID NO: 1260644 - DNA, 15 bp, Homo sapiens
acctggcttctgata

SEQ ID NO: 1260645 - DNA, 15 bp, Homo sapiens
cacctggcttctgat

SEQ ID NO: 1260646 - DNA, 15 bp, Homo sapiens
acacctggcttctga

SEQ ID NO: 1260647 - DNA, 15 bp, Homo sapiens
tacacctggcttctg

SEQ ID NO: 1260648 - DNA, 15 bp, Homo sapiens
ctacacctggcttct

SEQ ID NO: 1260649 - DNA, 15 bp, Homo sapiens
cctacacctggcttc

SEQ ID NO: 1260650 - DNA, 15 bp, Homo sapiens
acctacacctggctt

SEQ ID NO: 1260651 - DNA, 15 bp, Homo sapiens
aacctacacctggct

SEQ ID NO: 1260652 - DNA, 15 bp, Homo sapiens
aaacctacacctggc

SEQ ID NO: 1260653 - DNA, 15 bp, Homo sapiens
caaacctacacctgg

SEQ ID NO: 1260654 - DNA, 15 bp, Homo sapiens
ccaaacctacacctg

SEQ ID NO: 1260655 - DNA, 15 bp, Homo sapiens
tccaaacctacacct

SEQ ID NO: 1260656 - DNA, 15 bp, Homo sapiens
atccaaacctacacc

SEQ ID NO: 1260657 - DNA, 15 bp, Homo sapiens
catccaaacctacac

SEQ ID NO: 1260658 - DNA, 15 bp, Homo sapiens
gcatccaaacctaca

SEQ ID NO: 1260659 - DNA, 15 bp, Homo sapiens
ggcatccaaacctac

SEQ ID NO: 1260660 - DNA, 15 bp, Homo sapiens
tggcatccaaaccta

SEQ ID NO: 1260661 - DNA, 15 bp, Homo sapiens
atggcatccaaacct

SEQ ID NO: 1260662 - DNA, 15 bp, Homo sapiens
gatggcatccaaacc

SEQ ID NO: 1260663 - DNA, 15 bp, Homo sapiens
tgatggcatccaaac

SEQ ID NO: 1260664 - DNA, 15 bp, Homo sapiens
ttgatggcatccaaa

SEQ ID NO: 1260665 - DNA, 15 bp, Homo sapiens
attgatggcatccaa

SEQ ID NO: 1260666 - DNA, 15 bp, Homo sapiens
cattgatggcatcca

SEQ ID NO: 1260667 - DNA, 15 bp, Homo sapiens
tcattgatggcatcc

SEQ ID NO: 1260668 - DNA, 15 bp, Homo sapiens
atcattgatggcatc

SEQ ID NO: 1260669 - DNA, 15 bp, Homo sapiens
catcattgatggcat

SEQ ID NO: 1260670 - DNA, 15 bp, Homo sapiens
gcatcattgatggca

SEQ ID NO: 1260671 - DNA, 15 bp, Homo sapiens
agcatcattgatggc

SEQ ID NO: 1260672 - DNA, 15 bp, Homo sapiens
tagcatcattgatgg

SEQ ID NO: 1260673 - DNA, 15 bp, Homo sapiens
atagcatcattgatg

SEQ ID NO: 1260674 - DNA, 15 bp, Homo sapiens
catagcatcattgat

SEQ ID NO: 1260675 - DNA, 15 bp, Homo sapiens
gcatagcatcattga

SEQ ID NO: 1260676 - DNA, 15 bp, Homo sapiens
agcatagcatcattg

SEQ ID NO: 1260677 - DNA, 15 bp, Homo sapiens
aagcatagcatcatt

SEQ ID NO: 1260678 - DNA, 15 bp, Homo sapiens
gaagcatagcatcat

SEQ ID NO: 1260679 - DNA, 15 bp, Homo sapiens
agaagcatagcatca

SEQ ID NO: 1260680 - DNA, 15 bp, Homo sapiens
tagaagcatagcatc

SEQ ID NO: 1260681 - DNA, 15 bp, Homo sapiens
ctagaagcatagcat

SEQ ID NO: 1260682 - DNA, 15 bp, Homo sapiens
tctagaagcatagca

SEQ ID NO: 1260683 - DNA, 15 bp, Homo sapiens
ttctagaagcatagc

SEQ ID NO: 1260684 - DNA, 15 bp, Homo sapiens
cttctagaagcatag

SEQ ID NO: 1260685 - DNA, 15 bp, Homo sapiens
gcttctagaagcata

SEQ ID NO: 1260686 - DNA, 15 bp, Homo sapiens
tgcttctagaagcat

SEQ ID NO: 1260687 - DNA, 15 bp, Homo sapiens
atgcttctagaagca

SEQ ID NO: 1260688 - DNA, 15 bp, Homo sapiens
gatgcttctagaagc

SEQ ID NO: 1260689 - DNA, 15 bp, Homo sapiens
agatgcttctagaag

SEQ ID NO: 1260690 - DNA, 15 bp, Homo sapiens
tagatgcttctagaa

SEQ ID NO: 1260691 - DNA, 15 bp, Homo sapiens
atagatgcttctaga

SEQ ID NO: 1260692 - DNA, 15 bp, Homo sapiens
gatagatgcttctag

SEQ ID NO: 1260693 - DNA, 15 bp, Homo sapiens
agatagatgcttcta

SEQ ID NO: 1260694 - DNA, 15 bp, Homo sapiens
tagatagatgcttct

SEQ ID NO: 1260695 - DNA, 15 bp, Homo sapiens
atagatagatgcttc

SEQ ID NO: 1260696 - DNA, 15 bp, Homo sapiens
gatagatagatgctt

SEQ ID NO: 1260697 - DNA, 15 bp, Homo sapiens
tgatagatagatgct

SEQ ID NO: 1260698 - DNA, 15 bp, Homo sapiens
gtgatagatagatgc

SEQ ID NO: 1260699 - DNA, 15 bp, Homo sapiens
ggtgatagatagatg

SEQ ID NO: 1260700 - DNA, 15 bp, Homo sapiens
aggtgatagatagat

SEQ ID NO: 1260701 - DNA, 15 bp, Homo sapiens
caggtgatagataga

SEQ ID NO: 1260702 - DNA, 15 bp, Homo sapiens
acaggtgatagatag

SEQ ID NO: 1260703 - DNA, 15 bp, Homo sapiens
aacaggtgatagata

SEQ ID NO: 1260704 - DNA, 15 bp, Homo sapiens
caacaggtgatagat

SEQ ID NO: 1260705 - DNA, 15 bp, Homo sapiens
tcaacaggtgataga

SEQ ID NO: 1260706 - DNA, 15 bp, Homo sapiens
ttcaacaggtgatag

SEQ ID NO: 1260707 - DNA, 15 bp, Homo sapiens
cttcaacaggtgata

SEQ ID NO: 1260708 - DNA, 15 bp, Homo sapiens
gcttcaacaggtgat

SEQ ID NO: 1260709 - DNA, 15 bp, Homo sapiens
agcttcaacaggtga

SEQ ID NO: 1260710 - DNA, 15 bp, Homo sapiens
gagcttcaacaggtg

SEQ ID NO: 1260711 - DNA, 15 bp, Homo sapiens
agagcttcaacaggt

SEQ ID NO: 1260712 - DNA, 15 bp, Homo sapiens
cagagcttcaacagg

SEQ ID NO: 1260713 - DNA, 15 bp, Homo sapiens
acagagcttcaacag

SEQ ID NO: 1260714 - DNA, 15 bp, Homo sapiens
aacagagcttcaaca

SEQ ID NO: 1260715 - DNA, 15 bp, Homo sapiens
caacagagcttcaac

SEQ ID NO: 1260716 - DNA, 15 bp, Homo sapiens
gcaacagagcttcaa

SEQ ID NO: 1260717 - DNA, 15 bp, Homo sapiens
agcaacagagcttca

SEQ ID NO: 1260718 - DNA, 15 bp, Homo sapiens
cagcaacagagcttc

SEQ ID NO: 1260719 - DNA, 15 bp, Homo sapiens
tcagcaacagagctt

SEQ ID NO: 1260720 - DNA, 15 bp, Homo sapiens
ctcagcaacagagct

SEQ ID NO: 1260721 - DNA, 15 bp, Homo sapiens
tctcagcaacagagc

SEQ ID NO: 1260722 - DNA, 15 bp, Homo sapiens
ctctcagcaacagag

SEQ ID NO: 1260723 - DNA, 15 bp, Homo sapiens
gctctcagcaacaga

SEQ ID NO: 1260724 - DNA, 15 bp, Homo sapiens
tgctctcagcaacag

SEQ ID NO: 1260725 - DNA, 15 bp, Homo sapiens
ttgctctcagcaaca

SEQ ID NO: 1260726 - DNA, 15 bp, Homo sapiens
gttgctctcagcaac

SEQ ID NO: 1260727 - DNA, 15 bp, Homo sapiens
ggttgctctcagcaa

SEQ ID NO: 1260728 - DNA, 15 bp, Homo sapiens
gggttgctctcagca

SEQ ID NO: 1260729 - DNA, 15 bp, Homo sapiens
ggggttgctctcagc

SEQ ID NO: 1260730 - DNA, 15 bp, Homo sapiens
tggggttgctctcag

SEQ ID NO: 1260731 - DNA, 15 bp, Homo sapiens
atggggttgctctca

SEQ ID NO: 1260732 - DNA, 15 bp, Homo sapiens
aatggggttgctctc

SEQ ID NO: 1260733 - DNA, 15 bp, Homo sapiens
taatggggttgctct

SEQ ID NO: 1260734 - DNA, 15 bp, Homo sapiens
gtaatggggttgctc

SEQ ID NO: 1260735 - DNA, 15 bp, Homo sapiens
ggtaatggggttgct

SEQ ID NO: 1260736 - DNA, 15 bp, Homo sapiens
aggtaatggggttgc

SEQ ID NO: 1260737 - DNA, 15 bp, Homo sapiens
caggtaatggggttg

SEQ ID NO: 1260738 - DNA, 15 bp, Homo sapiens
tcaggtaatggggtt

SEQ ID NO: 1260739 - DNA, 15 bp, Homo sapiens
ttcaggtaatggggt

SEQ ID NO: 1260740 - DNA, 15 bp, Homo sapiens
gttcaggtaatgggg

SEQ ID NO: 1260741 - DNA, 15 bp, Homo sapiens
ggttcaggtaatggg

SEQ ID NO: 1260742 - DNA, 15 bp, Homo sapiens
aggttcaggtaatgg

SEQ ID NO: 1260743 - DNA, 15 bp, Homo sapiens
caggttcaggtaatg

SEQ ID NO: 1260744 - DNA, 15 bp, Homo sapiens
tcaggttcaggtaat

SEQ ID NO: 1260745 - DNA, 15 bp, Homo sapiens
ttcaggttcaggtaa

SEQ ID NO: 1260746 - DNA, 15 bp, Homo sapiens
tttcaggttcaggta

SEQ ID NO: 1260747 - DNA, 15 bp, Homo sapiens
ttttcaggttcaggt

SEQ ID NO: 1260748 - DNA, 15 bp, Homo sapiens
tttttcaggttcagg

SEQ ID NO: 1260749 - DNA, 15 bp, Homo sapiens
ctttttcaggttcag

SEQ ID NO: 1260750 - DNA, 15 bp, Homo sapiens
gctttttcaggttca

SEQ ID NO: 1260751 - DNA, 15 bp, Homo sapiens
tgctttttcaggttc

SEQ ID NO: 1260752 - DNA, 15 bp, Homo sapiens
gtgctttttcaggtt

SEQ ID NO: 1260753 - DNA, 15 bp, Homo sapiens
agtgctttttcaggt

SEQ ID NO: 1260754 - DNA, 15 bp, Homo sapiens
aagtgctttttcagg

SEQ ID NO: 1260755 - DNA, 15 bp, Homo sapiens
gaagtgctttttcag

SEQ ID NO: 1260756 - DNA, 15 bp, Homo sapiens
ggaagtgctttttca

SEQ ID NO: 1260757 - DNA, 15 bp, Homo sapiens
aggaagtgctttttc

SEQ ID NO: 1260758 - DNA, 15 bp, Homo sapiens
caggaagtgcttttt

SEQ ID NO: 1260759 - DNA, 15 bp, Homo sapiens
acaggaagtgctttt

SEQ ID NO: 1260760 - DNA, 15 bp, Homo sapiens
cacaggaagtgcttt

SEQ ID NO: 1260761 - DNA, 15 bp, Homo sapiens
ccacaggaagtgctt

SEQ ID NO: 1260762 - DNA, 15 bp, Homo sapiens
tccacaggaagtgct

SEQ ID NO: 1260763 - DNA, 15 bp, Homo sapiens
ctccacaggaagtgc

SEQ ID NO: 1260764 - DNA, 15 bp, Homo sapiens
actccacaggaagtg

SEQ ID NO: 1260765 - DNA, 15 bp, Homo sapiens
aactccacaggaagt

SEQ ID NO: 1260766 - DNA, 15 bp, Homo sapiens
gaactccacaggaag

SEQ ID NO: 1260767 - DNA, 15 bp, Homo sapiens
ggaactccacaggaa

SEQ ID NO: 1260768 - DNA, 15 bp, Homo sapiens
aggaactccacagga

SEQ ID NO: 1260769 - DNA, 15 bp, Homo sapiens
taggaactccacagg

SEQ ID NO: 1260770 - DNA, 15 bp, Homo sapiens
ataggaactccacag

SEQ ID NO: 1260771 - DNA, 15 bp, Homo sapiens
aataggaactccaca

SEQ ID NO: 1260772 - DNA, 15 bp, Homo sapiens
taataggaactccac

SEQ ID NO: 1260773 - DNA, 15 bp, Homo sapiens
ctaataggaactcca

SEQ ID NO: 1260774 - DNA, 15 bp, Homo sapiens
tctaataggaactcc

SEQ ID NO: 1260775 - DNA, 15 bp, Homo sapiens
gtctaataggaactc

SEQ ID NO: 1260776 - DNA, 15 bp, Homo sapiens
tgtctaataggaact

SEQ ID NO: 1260777 - DNA, 15 bp, Homo sapiens
ctgtctaataggaac

SEQ ID NO: 1260778 - DNA, 15 bp, Homo sapiens
tctgtctaataggaa

SEQ ID NO: 1260779 - DNA, 15 bp, Homo sapiens
ctctgtctaatagga

SEQ ID NO: 1260780 - DNA, 15 bp, Homo sapiens
tctctgtctaatagg

SEQ ID NO: 1260781 - DNA, 15 bp, Homo sapiens
atctctgtctaatag

SEQ ID NO: 1260782 - DNA, 15 bp, Homo sapiens
gatctctgtctaata

SEQ ID NO: 1260783 - DNA, 15 bp, Homo sapiens
tgatctctgtctaat

SEQ ID NO: 1260784 - DNA, 15 bp, Homo sapiens
ctgatctctgtctaa

SEQ ID NO: 1260785 - DNA, 15 bp, Homo sapiens
cctgatctctgtcta

SEQ ID NO: 1260786 - DNA, 15 bp, Homo sapiens
gcctgatctctgtct

SEQ ID NO: 1260787 - DNA, 15 bp, Homo sapiens
tgcctgatctctgtc

SEQ ID NO: 1260788 - DNA, 15 bp, Homo sapiens
ctgcctgatctctgt

SEQ ID NO: 1260789 - DNA, 15 bp, Homo sapiens
tctgcctgatctctg

SEQ ID NO: 1260790 - DNA, 15 bp, Homo sapiens
gtctgcctgatctct

SEQ ID NO: 1260791 - DNA, 15 bp, Homo sapiens
ggtctgcctgatctc

SEQ ID NO: 1260792 - DNA, 15 bp, Homo sapiens
gggtctgcctgatct

SEQ ID NO: 1260793 - DNA, 15 bp, Homo sapiens
agggtctgcctgatc

SEQ ID NO: 1260794 - DNA, 15 bp, Homo sapiens
cagggtctgcctgat

SEQ ID NO: 1260795 - DNA, 15 bp, Homo sapiens
tccagggtctgcctg

SEQ ID NO: 1260796 - DNA, 15 bp, Homo sapiens
gtccagggtctgcct

SEQ ID NO: 1260797 - DNA, 15 bp, Homo sapiens
ggtccagggtctgcc

SEQ ID NO: 1260798 - DNA, 15 bp, Homo sapiens
gggtccagggtctgc

SEQ ID NO: 1260799 - DNA, 15 bp, Homo sapiens
ggggtccagggtctg

SEQ ID NO: 1260800 - DNA, 15 bp, Homo sapiens
tggggtccagggtct

SEQ ID NO: 1260801 - DNA, 15 bp, Homo sapiens
atggggtccagggtc

SEQ ID NO: 1260802 - DNA, 15 bp, Homo sapiens
gatggggtccagggt

SEQ ID NO: 1260803 - DNA, 15 bp, Homo sapiens
tgatggggtccaggg

SEQ ID NO: 1260804 - DNA, 15 bp, Homo sapiens
gtgatggggtccagg

SEQ ID NO: 1260805 - DNA, 15 bp, Homo sapiens
tgtgatggggtccag

SEQ ID NO: 1260806 - DNA, 15 bp, Homo sapiens
ctgtgatggggtcca

SEQ ID NO: 1260807 - DNA, 15 bp, Homo sapiens
gctgtgatggggtcc

SEQ ID NO: 1260808 - DNA, 15 bp, Homo sapiens
ggctgtgatggggtc

SEQ ID NO: 1260809 - DNA, 15 bp, Homo sapiens
gggctgtgatggggt

SEQ ID NO: 1260810 - DNA, 15 bp, Homo sapiens
ggggctgtgatgggg

SEQ ID NO: 1260811 - DNA, 15 bp, Homo sapiens
gggggctgtgatggg

SEQ ID NO: 1260812 - DNA, 15 bp, Homo sapiens
ggggggctgtgatgg

SEQ ID NO: 1260813 - DNA, 15 bp, Homo sapiens
tggggggctgtgatg

SEQ ID NO: 1260814 - DNA, 15 bp, Homo sapiens
ctggggggctgtgat

SEQ ID NO: 1260815 - DNA, 15 bp, Homo sapiens
tctggggggctgtga

SEQ ID NO: 1260816 - DNA, 15 bp, Homo sapiens
ctctggggggctgtg

SEQ ID NO: 1260817 - DNA, 15 bp, Homo sapiens
gctctggggggctgt

SEQ ID NO: 1260818 - DNA, 15 bp, Homo sapiens
tgctctggggggctg

SEQ ID NO: 1260819 - DNA, 15 bp, Homo sapiens
ttgctctggggggct

SEQ ID NO: 1260820 - DNA, 15 bp, Homo sapiens
attgctctggggggc

SEQ ID NO: 1260821 - DNA, 15 bp, Homo sapiens
cattgctctgggggg

SEQ ID NO: 1260822 - DNA, 15 bp, Homo sapiens
acattgctctggggg

SEQ ID NO: 1260823 - DNA, 15 bp, Homo sapiens
cacattgctctgggg

SEQ ID NO: 1260824 - DNA, 15 bp, Homo sapiens
ccacattgctctggg

SEQ ID NO: 1260825 - DNA, 15 bp, Homo sapiens
tccacattgctctgg

SEQ ID NO: 1260826 - DNA, 15 bp, Homo sapiens
atccacattgctctg

SEQ ID NO: 1260827 - DNA, 15 bp, Homo sapiens
gatccacattgctct

SEQ ID NO: 1260828 - DNA, 15 bp, Homo sapiens
agatccacattgctc

SEQ ID NO: 1260829 - DNA, 15 bp, Homo sapiens
aagatccacattgct

SEQ ID NO: 1260830 - DNA, 15 bp, Homo sapiens
caagatccacattgc

SEQ ID NO: 1260831 - DNA, 15 bp, Homo sapiens
tcaagatccacattg

SEQ ID NO: 1260832 - DNA, 15 bp, Homo sapiens
gtcaagatccacatt

SEQ ID NO: 1260833 - DNA, 15 bp, Homo sapiens
agtcaagatccacat

SEQ ID NO: 1260834 - DNA, 15 bp, Homo sapiens
cagtcaagatccaca

SEQ ID NO: 1260835 - DNA, 15 bp, Homo sapiens
ccagtcaagatccac

SEQ ID NO: 1260836 - DNA, 15 bp, Homo sapiens
accagtcaagatcca

SEQ ID NO: 1260837 - DNA, 15 bp, Homo sapiens
aaccagtcaagatcc

SEQ ID NO: 1260838 - DNA, 15 bp, Homo sapiens
gaaccagtcaagatc

SEQ ID NO: 1260839 - DNA, 15 bp, Homo sapiens
tgaaccagtcaagat

SEQ ID NO: 1260840 - DNA, 15 bp, Homo sapiens
gtgaaccagtcaaga

SEQ ID NO: 1260841 - DNA, 15 bp, Homo sapiens
agtgaaccagtcaag

SEQ ID NO: 1260842 - DNA, 15 bp, Homo sapiens
cagtgaaccagtcaa

SEQ ID NO: 1260843 - DNA, 15 bp, Homo sapiens
tcagtgaaccagtca

SEQ ID NO: 1260844 - DNA, 15 bp, Homo sapiens
ttcagtgaaccagtc

SEQ ID NO: 1260845 - DNA, 15 bp, Homo sapiens
tttcagtgaaccagt

SEQ ID NO: 1260846 - DNA, 15 bp, Homo sapiens
ttttcagtgaaccag

SEQ ID NO: 1260847 - DNA, 15 bp, Homo sapiens
cttttcagtgaacca

SEQ ID NO: 1260848 - DNA, 15 bp, Homo sapiens
tcttttcagtgaacc

SEQ ID NO: 1260849 - DNA, 15 bp, Homo sapiens
ctcttttcagtgaac

SEQ ID NO: 1260850 - DNA, 15 bp, Homo sapiens
cctcttttcagtgaa

SEQ ID NO: 1260851 - DNA, 15 bp, Homo sapiens
acctcttttcagtga

SEQ ID NO: 1260852 - DNA, 15 bp, Homo sapiens
tacctcttttcagtg

SEQ ID NO: 1260853 - DNA, 15 bp, Homo sapiens
gtacctcttttcagt

SEQ ID NO: 1260854 - DNA, 15 bp, Homo sapiens
tgtacctcttttcag

SEQ ID NO: 1260855 - DNA, 15 bp, Homo sapiens
ttgtacctcttttca

SEQ ID NO: 1260856 - DNA, 15 bp, Homo sapiens
tttgtacctcttttc

SEQ ID NO: 1260857 - DNA, 15 bp, Homo sapiens
atttgtacctctttt

SEQ ID NO: 1260858 - DNA, 15 bp, Homo sapiens
gatttgtacctcttt

SEQ ID NO: 1260859 - DNA, 15 bp, Homo sapiens
tgatttgtacctctt

SEQ ID NO: 1260860 - DNA, 15 bp, Homo sapiens
gtgatttgtacctct

SEQ ID NO: 1260861 - DNA, 15 bp, Homo sapiens
agtgatttgtacctc

SEQ ID NO: 1260862 - DNA, 15 bp, Homo sapiens
cagtgatttgtacct

SEQ ID NO: 1260863 - DNA, 15 bp, Homo sapiens
acagtgatttgtacc

SEQ ID NO: 1260864 - DNA, 15 bp, Homo sapiens
gacagtgatttgtac

SEQ ID NO: 1260865 - DNA, 15 bp, Homo sapiens
tgacagtgatttgta

SEQ ID NO: 1260866 - DNA, 15 bp, Homo sapiens
ttgacagtgatttgt

SEQ ID NO: 1260867 - DNA, 15 bp, Homo sapiens
cttgacagtgatttg

SEQ ID NO: 1260868 - DNA, 15 bp, Homo sapiens
acttgacagtgattt

SEQ ID NO: 1260869 - DNA, 15 bp, Homo sapiens
tacttgacagtgatt

SEQ ID NO: 1260870 - DNA, 15 bp, Homo sapiens
atacttgacagtgat

SEQ ID NO: 1260871 - DNA, 15 bp, Homo sapiens
tatacttgacagtga

SEQ ID NO: 1260872 - DNA, 15 bp, Homo sapiens
ttatacttgacagtg

SEQ ID NO: 1260873 - DNA, 15 bp, Homo sapiens
cttatacttgacagt

SEQ ID NO: 1260874 - DNA, 15 bp, Homo sapiens
tcttatacttgacag

SEQ ID NO: 1260875 - DNA, 15 bp, Homo sapiens
gtcttatacttgaca

SEQ ID NO: 1260876 - DNA, 15 bp, Homo sapiens
tgtcttatacttgac

SEQ ID NO: 1260877 - DNA, 15 bp, Homo sapiens
ctgtcttatacttga

SEQ ID NO: 1260878 - DNA, 15 bp, Homo sapiens
gctgtcttatacttg

SEQ ID NO: 1260879 - DNA, 15 bp, Homo sapiens
agctgtcttatactt

SEQ ID NO: 1260880 - DNA, 15 bp, Homo sapiens
aagctgtcttatact

SEQ ID NO: 1260881 - DNA, 15 bp, Homo sapiens
aaagctgtcttatac

SEQ ID NO: 1260882 - DNA, 15 bp, Homo sapiens
gaaagctgtcttata

SEQ ID NO: 1260883 - DNA, 15 bp, Homo sapiens
agaaagctgtcttat

SEQ ID NO: 1260884 - DNA, 15 bp, Homo sapiens
tagaaagctgtctta

SEQ ID NO: 1260885 - DNA, 15 bp, Homo sapiens
gtagaaagctgtctt

SEQ ID NO: 1260886 - DNA, 15 bp, Homo sapiens
agtagaaagctgtct

SEQ ID NO: 1260887 - DNA, 15 bp, Homo sapiens
aagtagaaagctgtc

SEQ ID NO: 1260888 - DNA, 15 bp, Homo sapiens
gaagtagaaagctgt

SEQ ID NO: 1260889 - DNA, 15 bp, Homo sapiens
agaagtagaaagctg

SEQ ID NO: 1260890 - DNA, 15 bp, Homo sapiens
aagaagtagaaagct

SEQ ID NO: 1260891 - DNA, 15 bp, Homo sapiens
gaagaagtagaaagc

SEQ ID NO: 1260892 - DNA, 15 bp, Homo sapiens
agaagaagtagaaag

SEQ ID NO: 1260893 - DNA, 15 bp, Homo sapiens
tagaagaagtagaaa

SEQ ID NO: 1260894 - DNA, 15 bp, Homo sapiens
gtagaagaagtagaa

SEQ ID NO: 1260895 - DNA, 15 bp, Homo sapiens
ggtagaagaagtaga

SEQ ID NO: 1260896 - DNA, 15 bp, Homo sapiens
tggtagaagaagtag

SEQ ID NO: 1260897 - DNA, 15 bp, Homo sapiens
atggtagaagaagta

SEQ ID NO: 1260898 - DNA, 15 bp, Homo sapiens
gatggtagaagaagt

SEQ ID NO: 1260899 - DNA, 15 bp, Homo sapiens
ggatggtagaagaag

SEQ ID NO: 1260900 - DNA, 15 bp, Homo sapiens
aggatggtagaagaa

SEQ ID NO: 1260901 - DNA, 15 bp, Homo sapiens
caggatggtagaaga

SEQ ID NO: 1260902 - DNA, 15 bp, Homo sapiens
tcaggatggtagaag

SEQ ID NO: 1260903 - DNA, 15 bp, Homo sapiens
ttcaggatggtagaa

SEQ ID NO: 1260904 - DNA, 15 bp, Homo sapiens
cttcaggatggtaga

SEQ ID NO: 1260905 - DNA, 15 bp, Homo sapiens
gcttcaggatggtag

SEQ ID NO: 1260906 - DNA, 15 bp, Homo sapiens
agcttcaggatggta

SEQ ID NO: 1260907 - DNA, 15 bp, Homo sapiens
cagcttcaggatggt

SEQ ID NO: 1260908 - DNA, 15 bp, Homo sapiens
gcagcttcaggatgg

SEQ ID NO: 1260909 - DNA, 15 bp, Homo sapiens
tgcagcttcaggatg

SEQ ID NO: 1260910 - DNA, 15 bp, Homo sapiens
ctgcagcttcaggat

SEQ ID NO: 1260911 - DNA, 15 bp, Homo sapiens
gctgcagcttcagga

SEQ ID NO: 1260912 - DNA, 15 bp, Homo sapiens
ggctgcagcttcagg

SEQ ID NO: 1260913 - DNA, 15 bp, Homo sapiens
tggctgcagcttcag

SEQ ID NO: 1260914 - DNA, 15 bp, Homo sapiens
atggctgcagcttca

SEQ ID NO: 1260915 - DNA, 15 bp, Homo sapiens
catggctgcagcttc

SEQ ID NO: 1260916 - DNA, 15 bp, Homo sapiens
acatggctgcagctt

SEQ ID NO: 1260917 - DNA, 15 bp, Homo sapiens
gacatggctgcagct

SEQ ID NO: 1260918 - DNA, 15 bp, Homo sapiens
agacatggctgcagc

SEQ ID NO: 1260919 - DNA, 15 bp, Homo sapiens
tagacatggctgcag

SEQ ID NO: 1260920 - DNA, 15 bp, Homo sapiens
atagacatggctgca

SEQ ID NO: 1260921 - DNA, 15 bp, Homo sapiens
catagacatggctgc

SEQ ID NO: 1260922 - DNA, 15 bp, Homo sapiens
ccatagacatggctg

SEQ ID NO: 1260923 - DNA, 15 bp, Homo sapiens
gccatagacatggct

SEQ ID NO: 1260924 - DNA, 15 bp, Homo sapiens
tgccatagacatggc

SEQ ID NO: 1260925 - DNA, 15 bp, Homo sapiens
ctgccatagacatgg

SEQ ID NO: 1260926 - DNA, 15 bp, Homo sapiens
cctgccatagacatg

SEQ ID NO: 1260927 - DNA, 15 bp, Homo sapiens
gcctgccatagacat

SEQ ID NO: 1260928 - DNA, 15 bp, Homo sapiens
cgcctgccatagaca

SEQ ID NO: 1260929 - DNA, 15 bp, Homo sapiens
acgcctgccatagac

SEQ ID NO: 1260930 - DNA, 15 bp, Homo sapiens
gacgcctgccataga

SEQ ID NO: 1260931 - DNA, 15 bp, Homo sapiens
tgacgcctgccatag

SEQ ID NO: 1260932 - DNA, 15 bp, Homo sapiens
ctgacgcctgccata

SEQ ID NO: 1260933 - DNA, 15 bp, Homo sapiens
actgacgcctgccat

SEQ ID NO: 1260934 - DNA, 15 bp, Homo sapiens
cactgacgcctgcca

SEQ ID NO: 1260935 - DNA, 15 bp, Homo sapiens
acactgacgcctgcc

SEQ ID NO: 1260936 - DNA, 15 bp, Homo sapiens
cacactgacgcctgc

SEQ ID NO: 1260937 - DNA, 15 bp, Homo sapiens
ccacactgacgcctg

SEQ ID NO: 1260938 - DNA, 15 bp, Homo sapiens
cccacactgacgcct

SEQ ID NO: 1260939 - DNA, 15 bp, Homo sapiens
ccccacactgacgcc

SEQ ID NO: 1260940 - DNA, 15 bp, Homo sapiens
tccccacactgacgc

SEQ ID NO: 1260941 - DNA, 15 bp, Homo sapiens
ttccccacactgacg

SEQ ID NO: 1260942 - DNA, 15 bp, Homo sapiens
cttccccacactgac

SEQ ID NO: 1260943 - DNA, 15 bp, Homo sapiens
ccttccccacactga

SEQ ID NO: 1260944 - DNA, 15 bp, Homo sapiens
tccttccccacactg

SEQ ID NO: 1260945 - DNA, 15 bp, Homo sapiens
ttccttccccacact

SEQ ID NO: 1260946 - DNA, 15 bp, Homo sapiens
attccttccccacac

SEQ ID NO: 1260947 - DNA, 15 bp, Homo sapiens
cattccttccccaca

SEQ ID NO: 1260948 - DNA, 15 bp, Homo sapiens
ccattccttccccac

SEQ ID NO: 1260949 - DNA, 15 bp, Homo sapiens
cccattccttcccca

SEQ ID NO: 1260950 - DNA, 15 bp, Homo sapiens
gcccattccttcccc

SEQ ID NO: 1260951 - DNA, 15 bp, Homo sapiens
ggcccattccttccc

SEQ ID NO: 1260952 - DNA, 15 bp, Homo sapiens
tggcccattccttcc

SEQ ID NO: 1260953 - DNA, 15 bp, Homo sapiens
ttggcccattccttc

SEQ ID NO: 1260954 - DNA, 15 bp, Homo sapiens
attggcccattcctt

SEQ ID NO: 1260955 - DNA, 15 bp, Homo sapiens
cattggcccattcct

SEQ ID NO: 1260956 - DNA, 15 bp, Homo sapiens
tcattggcccattcc

SEQ ID NO: 1260957 - DNA, 15 bp, Homo sapiens
gtcattggcccattc

SEQ ID NO: 1260958 - DNA, 15 bp, Homo sapiens
tgtcattggcccatt

SEQ ID NO: 1260959 - DNA, 15 bp, Homo sapiens
ctgtcattggcccat

SEQ ID NO: 1260960 - DNA, 15 bp, Homo sapiens
cctgtcattggccca

SEQ ID NO: 1260961 - DNA, 15 bp, Homo sapiens
tcctgtcattggccc

SEQ ID NO: 1260962 - DNA, 15 bp, Homo sapiens
ttcctgtcattggcc

SEQ ID NO: 1260963 - DNA, 15 bp, Homo sapiens
cttcctgtcattggc

SEQ ID NO: 1260964 - DNA, 15 bp, Homo sapiens
tcttcctgtcattgg

SEQ ID NO: 1260965 - DNA, 15 bp, Homo sapiens
atcttcctgtcattg

SEQ ID NO: 1260966 - DNA, 15 bp, Homo sapiens
gatcttcctgtcatt

SEQ ID NO: 1260967 - DNA, 15 bp, Homo sapiens
ggatcttcctgtcat

SEQ ID NO: 1260968 - DNA, 15 bp, Homo sapiens
aggatcttcctgtca

SEQ ID NO: 1260969 - DNA, 15 bp, Homo sapiens
caggatcttcctgtc

SEQ ID NO: 1260970 - DNA, 15 bp, Homo sapiens
gcaggatcttcctgt

SEQ ID NO: 1260971 - DNA, 15 bp, Homo sapiens
agcaggatcttcctg

SEQ ID NO: 1260972 - DNA, 15 bp, Homo sapiens
cagcaggatcttcct

SEQ ID NO: 1260973 - DNA, 15 bp, Homo sapiens
ccagcaggatcttcc

SEQ ID NO: 1260974 - DNA, 15 bp, Homo sapiens
tccagcaggatcttc

SEQ ID NO: 1260975 - DNA, 15 bp, Homo sapiens
ctccagcaggatctt

SEQ ID NO: 1260976 - DNA, 15 bp, Homo sapiens
actccagcaggatct

SEQ ID NO: 1260977 - DNA, 15 bp, Homo sapiens
aactccagcaggatc

SEQ ID NO: 1260978 - DNA, 15 bp, Homo sapiens
taactccagcaggat

SEQ ID NO: 1260979 - DNA, 15 bp, Homo sapiens
ctaactccagcagga

SEQ ID NO: 1260980 - DNA, 15 bp, Homo sapiens
cctaactccagcagg

SEQ ID NO: 1260981 - DNA, 15 bp, Homo sapiens
tcctaactccagcag

SEQ ID NO: 1260982 - DNA, 15 bp, Homo sapiens
ctcctaactccagca

SEQ ID NO: 1260983 - DNA, 15 bp, Homo sapiens
actcctaactccagc

SEQ ID NO: 1260984 - DNA, 15 bp, Homo sapiens
aactcctaactccag

SEQ ID NO: 1260985 - DNA, 15 bp, Homo sapiens
gaactcctaactcca

SEQ ID NO: 1260986 - DNA, 15 bp, Homo sapiens
agaactcctaactcc

SEQ ID NO: 1260987 - DNA, 15 bp, Homo sapiens
aagaactcctaactc

SEQ ID NO: 1260988 - DNA, 15 bp, Homo sapiens
aaagaactcctaact

SEQ ID NO: 1260989 - DNA, 15 bp, Homo sapiens
gaaagaactcctaac

SEQ ID NO: 1260990 - DNA, 15 bp, Homo sapiens
tgaaagaactcctaa

SEQ ID NO: 1260991 - DNA, 15 bp, Homo sapiens
ctgaaagaactccta

SEQ ID NO: 1260992 - DNA, 15 bp, Homo sapiens
tctgaaagaactcct

SEQ ID NO: 1260993 - DNA, 15 bp, Homo sapiens
atctgaaagaactcc

SEQ ID NO: 1260994 - DNA, 15 bp, Homo sapiens
aatctgaaagaactc

SEQ ID NO: 1260995 - DNA, 15 bp, Homo sapiens
gaatctgaaagaact

SEQ ID NO: 1260996 - DNA, 15 bp, Homo sapiens
tgaatctgaaagaac

SEQ ID NO: 1260997 - DNA, 15 bp, Homo sapiens
ctgaatctgaaagaa

SEQ ID NO: 1260998 - DNA, 15 bp, Homo sapiens
cctgaatctgaaaga

SEQ ID NO: 1260999 - DNA, 15 bp, Homo sapiens
tcctgaatctgaaag

SEQ ID NO: 1261000 - DNA, 15 bp, Homo sapiens
atcctgaatctgaaa

SEQ ID NO: 1261001 - DNA, 15 bp, Homo sapiens
catcctgaatctgaa

SEQ ID NO: 1261002 - DNA, 15 bp, Homo sapiens
tcatcctgaatctga

SEQ ID NO: 1261003 - DNA, 15 bp, Homo sapiens
atcatcctgaatctg

SEQ ID NO: 1261004 - DNA, 15 bp, Homo sapiens
aatcatcctgaatct

SEQ ID NO: 1261005 - DNA, 15 bp, Homo sapiens
taatcatcctgaatc

SEQ ID NO: 1261006 - DNA, 15 bp, Homo sapiens
gtaatcatcctgaat

SEQ ID NO: 1261007 - DNA, 15 bp, Homo sapiens
ggtaatcatcctgaa

SEQ ID NO: 1261008 - DNA, 15 bp, Homo sapiens
aggtaatcatcctga

SEQ ID NO: 1261009 - DNA, 15 bp, Homo sapiens
aaggtaatcatcctg

SEQ ID NO: 1261010 - DNA, 15 bp, Homo sapiens
caaggtaatcatcct

SEQ ID NO: 1261011 - DNA, 15 bp, Homo sapiens
tcaaggtaatcatcc

SEQ ID NO: 1261012 - DNA, 15 bp, Homo sapiens
gtcaaggtaatcatc

SEQ ID NO: 1261013 - DNA, 15 bp, Homo sapiens
ggtcaaggtaatcat

SEQ ID NO: 1261014 - DNA, 15 bp, Homo sapiens
aggtcaaggtaatca

SEQ ID NO: 1261015 - DNA, 15 bp, Homo sapiens
gaggtcaaggtaatc

SEQ ID NO: 1261016 - DNA, 15 bp, Homo sapiens
agaggtcaaggtaat

SEQ ID NO: 1261017 - DNA, 15 bp, Homo sapiens
aagaggtcaaggtaa

SEQ ID NO: 1261018 - DNA, 15 bp, Homo sapiens
aaagaggtcaaggta

SEQ ID NO: 1261019 - DNA, 15 bp, Homo sapiens
cccaaagaggtcaag

SEQ ID NO: 1261020 - DNA, 15 bp, Homo sapiens
ccccaaagaggtcaa

SEQ ID NO: 1261021 - DNA, 15 bp, Homo sapiens
tccccaaagaggtca

SEQ ID NO: 1261022 - DNA, 15 bp, Homo sapiens
gtccccaaagaggtc

SEQ ID NO: 1261023 - DNA, 15 bp, Homo sapiens
ggtccccaaagaggt

SEQ ID NO: 1261024 - DNA, 15 bp, Homo sapiens
gggtccccaaagagg

SEQ ID NO: 1261025 - DNA, 15 bp, Homo sapiens
agggtccccaaagag

SEQ ID NO: 1261026 - DNA, 15 bp, Homo sapiens
tagggtccccaaaga

SEQ ID NO: 1261027 - DNA, 15 bp, Homo sapiens
gtagggtccccaaag

SEQ ID NO: 1261028 - DNA, 15 bp, Homo sapiens
agtagggtccccaaa

SEQ ID NO: 1261029 - DNA, 15 bp, Homo sapiens
cagtagggtccccaa

SEQ ID NO: 1261030 - DNA, 15 bp, Homo sapiens
acagtagggtcccca

SEQ ID NO: 1261031 - DNA, 15 bp, Homo sapiens
gacagtagggtcccc

SEQ ID NO: 1261032 - DNA, 15 bp, Homo sapiens
tgacagtagggtccc

SEQ ID NO: 1261033 - DNA, 15 bp, Homo sapiens
gtgacagtagggtcc

SEQ ID NO: 1261034 - DNA, 15 bp, Homo sapiens
ggtgacagtagggtc

SEQ ID NO: 1261035 - DNA, 15 bp, Homo sapiens
tggtgacagtagggt

SEQ ID NO: 1261036 - DNA, 15 bp, Homo sapiens
gtggtgacagtaggg

SEQ ID NO: 1261037 - DNA, 15 bp, Homo sapiens
agtggtgacagtagg

SEQ ID NO: 1261038 - DNA, 15 bp, Homo sapiens
cagtggtgacagtag

SEQ ID NO: 1261039 - DNA, 15 bp, Homo sapiens
ccagtggtgacagta

SEQ ID NO: 1261040 - DNA, 15 bp, Homo sapiens
gccagtggtgacagt

SEQ ID NO: 1261041 - DNA, 15 bp, Homo sapiens
tgccagtggtgacag

SEQ ID NO: 1261042 - DNA, 15 bp, Homo sapiens
ctgccagtggtgaca

SEQ ID NO: 1261043 - DNA, 15 bp, Homo sapiens
tctgccagtggtgac

SEQ ID NO: 1261044 - DNA, 15 bp, Homo sapiens
ctctgccagtggtga

SEQ ID NO: 1261045 - DNA, 15 bp, Homo sapiens
actctgccagtggtg

SEQ ID NO: 1261046 - DNA, 15 bp, Homo sapiens
aactctgccagtggt

SEQ ID NO: 1261047 - DNA, 15 bp, Homo sapiens
aaactctgccagtgg

SEQ ID NO: 1261048 - DNA, 15 bp, Homo sapiens
caaactctgccagtg

SEQ ID NO: 1261049 - DNA, 15 bp, Homo sapiens
acaaactctgccagt

SEQ ID NO: 1261050 - DNA, 15 bp, Homo sapiens
tacaaactctgccag

SEQ ID NO: 1261051 - DNA, 15 bp, Homo sapiens
gtacaaactctgcca

SEQ ID NO: 1261052 - DNA, 15 bp, Homo sapiens
agtacaaactctgcc

SEQ ID NO: 1261053 - DNA, 15 bp, Homo sapiens
cagtacaaactctgc

SEQ ID NO: 1261054 - DNA, 15 bp, Homo sapiens
tcagtacaaactctg

SEQ ID NO: 1261055 - DNA, 15 bp, Homo sapiens
gtcagtacaaactct

SEQ ID NO: 1261056 - DNA, 15 bp, Homo sapiens
tgtcagtacaaactc

SEQ ID NO: 1261057 - DNA, 15 bp, Homo sapiens
atgtcagtacaaact

SEQ ID NO: 1261058 - DNA, 15 bp, Homo sapiens
gatgtcagtacaaac

SEQ ID NO: 1261059 - DNA, 15 bp, Homo sapiens
ggatgtcagtacaaa

SEQ ID NO: 1261060 - DNA, 15 bp, Homo sapiens
tggatgtcagtacaa

SEQ ID NO: 1261061 - DNA, 15 bp, Homo sapiens
ctggatgtcagtaca

SEQ ID NO: 1261062 - DNA, 15 bp, Homo sapiens
cctggatgtcagtac

SEQ ID NO: 1261063 - DNA, 15 bp, Homo sapiens
tcctggatgtcagta

SEQ ID NO: 1261064 - DNA, 15 bp, Homo sapiens
gtcctggatgtcagt

SEQ ID NO: 1261065 - DNA, 15 bp, Homo sapiens
tgtcctggatgtcag

SEQ ID NO: 1261066 - DNA, 15 bp, Homo sapiens
ttgtcctggatgtca

SEQ ID NO: 1261067 - DNA, 15 bp, Homo sapiens
gttgtcctggatgtc

SEQ ID NO: 1261068 - DNA, 15 bp, Homo sapiens
tgttgtcctggatgt

SEQ ID NO: 1261069 - DNA, 15 bp, Homo sapiens
ctgttgtcctggatg

SEQ ID NO: 1261070 - DNA, 15 bp, Homo sapiens
tctgttgtcctggat

SEQ ID NO: 1261071 - DNA, 15 bp, Homo sapiens
atctgttgtcctgga

SEQ ID NO: 1261072 - DNA, 15 bp, Homo sapiens
catctgttgtcctgg

SEQ ID NO: 1261073 - DNA, 15 bp, Homo sapiens
tcatctgttgtcctg

SEQ ID NO: 1261074 - DNA, 15 bp, Homo sapiens
gtcatctgttgtcct

SEQ ID NO: 1261075 - DNA, 15 bp, Homo sapiens
tgtcatctgttgtcc

SEQ ID NO: 1261076 - DNA, 15 bp, Homo sapiens
ttgtcatctgttgtc

SEQ ID NO: 1261077 - DNA, 15 bp, Homo sapiens
gttgtcatctgttgt

SEQ ID NO: 1261078 - DNA, 15 bp, Homo sapiens
tgttgtcatctgttg

SEQ ID NO: 1261079 - DNA, 15 bp, Homo sapiens
ttgttgtcatctgtt

SEQ ID NO: 1261080 - DNA, 15 bp, Homo sapiens
tttgttgtcatctgt

SEQ ID NO: 1261081 - DNA, 15 bp, Homo sapiens
atttgttgtcatctg

SEQ ID NO: 1261082 - DNA, 15 bp, Homo sapiens
catttgttgtcatct

SEQ ID NO: 1261083 - DNA, 15 bp, Homo sapiens
gcatttgttgtcatc

SEQ ID NO: 1261084 - DNA, 15 bp, Homo sapiens
tgcatttgttgtcat

SEQ ID NO: 1261085 - DNA, 15 bp, Homo sapiens
ctgcatttgttgtca

SEQ ID NO: 1261086 - DNA, 15 bp, Homo sapiens
gctgcatttgttgtc

SEQ ID NO: 1261087 - DNA, 15 bp, Homo sapiens
agctgcatttgttgt

SEQ ID NO: 1261088 - DNA, 15 bp, Homo sapiens
cagctgcatttgttg

SEQ ID NO: 1261089 - DNA, 15 bp, Homo sapiens
tcagctgcatttgtt

SEQ ID NO: 1261090 - DNA, 15 bp, Homo sapiens
gtcagctgcatttgt

SEQ ID NO: 1261091 - DNA, 15 bp, Homo sapiens
agtcagctgcatttg

SEQ ID NO: 1261092 - DNA, 15 bp, Homo sapiens
cagtcagctgcattt

SEQ ID NO: 1261093 - DNA, 15 bp, Homo sapiens
ccagtcagctgcatt

SEQ ID NO: 1261094 - DNA, 15 bp, Homo sapiens
accagtcagctgcat

SEQ ID NO: 1261095 - DNA, 15 bp, Homo sapiens
caccagtcagctgca

SEQ ID NO: 1261096 - DNA, 15 bp, Homo sapiens
ccaccagtcagctgc

SEQ ID NO: 1261097 - DNA, 15 bp, Homo sapiens
accaccagtcagctg

SEQ ID NO: 1261098 - DNA, 15 bp, Homo sapiens
aaccaccagtcagct

SEQ ID NO: 1261099 - DNA, 15 bp, Homo sapiens
gaaccaccagtcagc

SEQ ID NO: 1261100 - DNA, 15 bp, Homo sapiens
tgaaccaccagtcag

SEQ ID NO: 1261101 - DNA, 15 bp, Homo sapiens
ctgaaccaccagtca

SEQ ID NO: 1261102 - DNA, 15 bp, Homo sapiens
actgaaccaccagtc

SEQ ID NO: 1261103 - DNA, 15 bp, Homo sapiens
cactgaaccaccagt

SEQ ID NO: 1261104 - DNA, 15 bp, Homo sapiens
acactgaaccaccag

SEQ ID NO: 1261105 - DNA, 15 bp, Homo sapiens
gacactgaaccacca

SEQ ID NO: 1261106 - DNA, 15 bp, Homo sapiens
agacactgaaccacc

SEQ ID NO: 1261107 - DNA, 15 bp, Homo sapiens
cagacactgaaccac

SEQ ID NO: 1261108 - DNA, 15 bp, Homo sapiens
gcagacactgaacca

SEQ ID NO: 1261109 - DNA, 15 bp, Homo sapiens
tgcagacactgaacc

SEQ ID NO: 1261110 - DNA, 15 bp, Homo sapiens
ttgcagacactgaac

SEQ ID NO: 1261111 - DNA, 15 bp, Homo sapiens
attgcagacactgaa

SEQ ID NO: 1261112 - DNA, 15 bp, Homo sapiens
cattgcagacactga

SEQ ID NO: 1261113 - DNA, 15 bp, Homo sapiens
ccattgcagacactg

SEQ ID NO: 1261114 - DNA, 15 bp, Homo sapiens
cccattgcagacact

SEQ ID NO: 1261115 - DNA, 15 bp, Homo sapiens
gcccattgcagacac

SEQ ID NO: 1261116 - DNA, 15 bp, Homo sapiens
ggcccattgcagaca

SEQ ID NO: 1261117 - DNA, 15 bp, Homo sapiens
tggcccattgcagac

SEQ ID NO: 1261118 - DNA, 15 bp, Homo sapiens
gtggcccattgcaga

SEQ ID NO: 1261119 - DNA, 15 bp, Homo sapiens
tgtggcccattgcag

SEQ ID NO: 1261120 - DNA, 15 bp, Homo sapiens
gtgtggcccattgca

SEQ ID NO: 1261121 - DNA, 15 bp, Homo sapiens
ggtgtggcccattgc

SEQ ID NO: 1261122 - DNA, 15 bp, Homo sapiens
cggtgtggcccattg

SEQ ID NO: 1261123 - DNA, 15 bp, Homo sapiens
ccggtgtggcccatt

SEQ ID NO: 1261124 - DNA, 15 bp, Homo sapiens
tccggtgtggcccat

SEQ ID NO: 1261125 - DNA, 15 bp, Homo sapiens
ttccggtgtggccca

SEQ ID NO: 1261126 - DNA, 15 bp, Homo sapiens
gttccggtgtggccc

SEQ ID NO: 1261127 - DNA, 15 bp, Homo sapiens
tgttccggtgtggcc

SEQ ID NO: 1261128 - DNA, 15 bp, Homo sapiens
ctgttccggtgtggc

SEQ ID NO: 1261129 - DNA, 15 bp, Homo sapiens
gctgttccggtgtgg

SEQ ID NO: 1261130 - DNA, 15 bp, Homo sapiens
tgctgttccggtgtg

SEQ ID NO: 1261131 - DNA, 15 bp, Homo sapiens
gtgctgttccggtgt

SEQ ID NO: 1261132 - DNA, 15 bp, Homo sapiens
ggtgctgttccggtg

SEQ ID NO: 1261133 - DNA, 15 bp, Homo sapiens
tggtgctgttccggt

SEQ ID NO: 1261134 - DNA, 15 bp, Homo sapiens
ctggtgctgttccgg

SEQ ID NO: 1261135 - DNA, 15 bp, Homo sapiens
tctggtgctgttccg

SEQ ID NO: 1261136 - DNA, 15 bp, Homo sapiens
atctggtgctgttcc

SEQ ID NO: 1261137 - DNA, 15 bp, Homo sapiens
gatctggtgctgttc

SEQ ID NO: 1261138 - DNA, 15 bp, Homo sapiens
tgatctggtgctgtt

SEQ ID NO: 1261139 - DNA, 15 bp, Homo sapiens
atgatctggtgctgt

SEQ ID NO: 1261140 - DNA, 15 bp, Homo sapiens
catgatctggtgctg

SEQ ID NO: 1261141 - DNA, 15 bp, Homo sapiens
gcatgatctggtgct

SEQ ID NO: 1261142 - DNA, 15 bp, Homo sapiens
tgcatgatctggtgc

SEQ ID NO: 1261143 - DNA, 15 bp, Homo sapiens
ctgcatgatctggtg

SEQ ID NO: 1261144 - DNA, 15 bp, Homo sapiens
tctgcatgatctggt

SEQ ID NO: 1261145 - DNA, 15 bp, Homo sapiens
ttctgcatgatctgg

SEQ ID NO: 1261146 - DNA, 15 bp, Homo sapiens
cttctgcatgatctg

SEQ ID NO: 1261147 - DNA, 15 bp, Homo sapiens
tcttctgcatgatct

SEQ ID NO: 1261148 - DNA, 15 bp, Homo sapiens
ttcttctgcatgatc

SEQ ID NO: 1261149 - DNA, 15 bp, Homo sapiens
attcttctgcatgat

SEQ ID NO: 1261150 - DNA, 15 bp, Homo sapiens
aattcttctgcatga

SEQ ID NO: 1261151 - DNA, 15 bp, Homo sapiens
taattcttctgcatg

SEQ ID NO: 1261152 - DNA, 15 bp, Homo sapiens
gtaattcttctgcat

SEQ ID NO: 1261153 - DNA, 15 bp, Homo sapiens
tgtaattcttctgca

SEQ ID NO: 1261154 - DNA, 15 bp, Homo sapiens
ctgtaattcttctgc

SEQ ID NO: 1261155 - DNA, 15 bp, Homo sapiens
cctgtaattcttctg

SEQ ID NO: 1261156 - DNA, 15 bp, Homo sapiens
ccctgtaattcttct

SEQ ID NO: 1261157 - DNA, 15 bp, Homo sapiens
tccctgtaattcttc

SEQ ID NO: 1261158 - DNA, 15 bp, Homo sapiens
ctccctgtaattctt

SEQ ID NO: 1261159 - DNA, 15 bp, Homo sapiens
cctccctgtaattct

SEQ ID NO: 1261160 - DNA, 15 bp, Homo sapiens
tcctccctgtaattc

SEQ ID NO: 1261161 - DNA, 15 bp, Homo sapiens
ctcctccctgtaatt

SEQ ID NO: 1261162 - DNA, 15 bp, Homo sapiens
cctcctccctgtaat

SEQ ID NO: 1261163 - DNA, 15 bp, Homo sapiens
gcctcctccctgtaa

SEQ ID NO: 1261164 - DNA, 15 bp, Homo sapiens
tgcctcctccctgta

SEQ ID NO: 1261165 - DNA, 15 bp, Homo sapiens
gtgcctcctccctgt

SEQ ID NO: 1261166 - DNA, 15 bp, Homo sapiens
agtgcctcctccctg

SEQ ID NO: 1261167 - DNA, 15 bp, Homo sapiens
tagtgcctcctccct

SEQ ID NO: 1261168 - DNA, 15 bp, Homo sapiens
atagtgcctcctccc

SEQ ID NO: 1261169 - DNA, 15 bp, Homo sapiens
tatagtgcctcctcc

SEQ ID NO: 1261170 - DNA, 15 bp, Homo sapiens
atatagtgcctcctc

SEQ ID NO: 1261171 - DNA, 15 bp, Homo sapiens
catatagtgcctcct

SEQ ID NO: 1261172 - DNA, 15 bp, Homo sapiens
tcatatagtgcctcc

SEQ ID NO: 1261173 - DNA, 15 bp, Homo sapiens
ctcatatagtgcctc

SEQ ID NO: 1261174 - DNA, 15 bp, Homo sapiens
cctcatatagtgcct

SEQ ID NO: 1261175 - DNA, 15 bp, Homo sapiens
tcctcatatagtgcc

SEQ ID NO: 1261176 - DNA, 15 bp, Homo sapiens
ctcctcatatagtgc

SEQ ID NO: 1261177 - DNA, 15 bp, Homo sapiens
gctcctcatatagtg

SEQ ID NO: 1261178 - DNA, 15 bp, Homo sapiens
agctcctcatatagt

SEQ ID NO: 1261179 - DNA, 15 bp, Homo sapiens
cagctcctcatatag

SEQ ID NO: 1261180 - DNA, 15 bp, Homo sapiens
ccagctcctcatata

SEQ ID NO: 1261181 - DNA, 15 bp, Homo sapiens
tccagctcctcatat

SEQ ID NO: 1261182 - DNA, 15 bp, Homo sapiens
atccagctcctcata

SEQ ID NO: 1261183 - DNA, 15 bp, Homo sapiens
gatccagctcctcat

SEQ ID NO: 1261184 - DNA, 15 bp, Homo sapiens
agatccagctcctca

SEQ ID NO: 1261185 - DNA, 15 bp, Homo sapiens
cagatccagctcctc

SEQ ID NO: 1261186 - DNA, 15 bp, Homo sapiens
gcagatccagctcct

SEQ ID NO: 1261187 - DNA, 15 bp, Homo sapiens
agcagatccagctcc

SEQ ID NO: 1261188 - DNA, 15 bp, Homo sapiens
cagcagatccagctc

SEQ ID NO: 1261189 - DNA, 15 bp, Homo sapiens
tcagcagatccagct

SEQ ID NO: 1261190 - DNA, 15 bp, Homo sapiens
gtcagcagatccagc

SEQ ID NO: 1261191 - DNA, 15 bp, Homo sapiens
ggtcagcagatccag

SEQ ID NO: 1261192 - DNA, 15 bp, Homo sapiens
tggtcagcagatcca

SEQ ID NO: 1261193 - DNA, 15 bp, Homo sapiens
atggtcagcagatcc

SEQ ID NO: 1261194 - DNA, 15 bp, Homo sapiens
catggtcagcagatc

SEQ ID NO: 1261195 - DNA, 15 bp, Homo sapiens
acatggtcagcagat

SEQ ID NO: 1261196 - DNA, 15 bp, Homo sapiens
aacatggtcagcaga

SEQ ID NO: 1261197 - DNA, 15 bp, Homo sapiens
gaacatggtcagcag

SEQ ID NO: 1261198 - DNA, 15 bp, Homo sapiens
agaacatggtcagca

SEQ ID NO: 1261199 - DNA, 15 bp, Homo sapiens
aagaacatggtcagc

SEQ ID NO: 1261200 - DNA, 15 bp, Homo sapiens
caagaacatggtcag

SEQ ID NO: 1261201 - DNA, 15 bp, Homo sapiens
ccaagaacatggtca

SEQ ID NO: 1261202 - DNA, 15 bp, Homo sapiens
accaagaacatggtc

SEQ ID NO: 1261203 - DNA, 15 bp, Homo sapiens
taccaagaacatggt

SEQ ID NO: 1261204 - DNA, 15 bp, Homo sapiens
ataccaagaacatgg

SEQ ID NO: 1261205 - DNA, 15 bp, Homo sapiens
cataccaagaacatg

SEQ ID NO: 1261206 - DNA, 15 bp, Homo sapiens
acataccaagaacat

SEQ ID NO: 1261207 - DNA, 15 bp, Homo sapiens
cacataccaagaaca

SEQ ID NO: 1261208 - DNA, 15 bp, Homo sapiens
ccacataccaagaac

SEQ ID NO: 1261209 - DNA, 15 bp, Homo sapiens
tccacataccaagaa

SEQ ID NO: 1261210 - DNA, 15 bp, Homo sapiens
ttccacataccaaga

SEQ ID NO: 1261211 - DNA, 15 bp, Homo sapiens
cttccacataccaag

SEQ ID NO: 1261212 - DNA, 15 bp, Homo sapiens
tcttccacataccaa

SEQ ID NO: 1261213 - DNA, 15 bp, Homo sapiens
atcttccacatacca

SEQ ID NO: 1261214 - DNA, 15 bp, Homo sapiens
catcttccacatacc

SEQ ID NO: 1261215 - DNA, 15 bp, Homo sapiens
ccatcttccacatac

SEQ ID NO: 1261216 - DNA, 15 bp, Homo sapiens
accatcttccacata

SEQ ID NO: 1261217 - DNA, 15 bp, Homo sapiens
aaccatcttccacat

SEQ ID NO: 1261218 - DNA, 15 bp, Homo sapiens
taaccatcttccaca

SEQ ID NO: 1261219 - DNA, 15 bp, Homo sapiens
gtaaccatcttccac

SEQ ID NO: 1261220 - DNA, 15 bp, Homo sapiens
tgtaaccatcttcca

SEQ ID NO: 1261221 - DNA, 15 bp, Homo sapiens
ctgtaaccatcttcc

SEQ ID NO: 1261222 - DNA, 15 bp, Homo sapiens
gctgtaaccatcttc

SEQ ID NO: 1261223 - DNA, 15 bp, Homo sapiens
ggctgtaaccatctt

SEQ ID NO: 1261224 - DNA, 15 bp, Homo sapiens
tggctgtaaccatct

SEQ ID NO: 1261225 - DNA, 15 bp, Homo sapiens
gtggctgtaaccatc

SEQ ID NO: 1261226 - DNA, 15 bp, Homo sapiens
ggtggctgtaaccat

SEQ ID NO: 1261227 - DNA, 15 bp, Homo sapiens
aggtggctgtaacca

SEQ ID NO: 1261228 - DNA, 15 bp, Homo sapiens
aaggtggctgtaacc

SEQ ID NO: 1261229 - DNA, 15 bp, Homo sapiens
taaggtggctgtaac

SEQ ID NO: 1261230 - DNA, 15 bp, Homo sapiens
ataaggtggctgtaa

SEQ ID NO: 1261231 - DNA, 15 bp, Homo sapiens
cataaggtggctgta

SEQ ID NO: 1261232 - DNA, 15 bp, Homo sapiens
ccataaggtggctgt

SEQ ID NO: 1261233 - DNA, 15 bp, Homo sapiens
cccataaggtggctg

SEQ ID NO: 1261234 - DNA, 15 bp, Homo sapiens
acccataaggtggct

SEQ ID NO: 1261235 - DNA, 15 bp, Homo sapiens
gacccataaggtggc

SEQ ID NO: 1261236 - DNA, 15 bp, Homo sapiens
agacccataaggtgg

SEQ ID NO: 1261237 - DNA, 15 bp, Homo sapiens
gagacccataaggtg

SEQ ID NO: 1261238 - DNA, 15 bp, Homo sapiens
tgagacccataaggt

SEQ ID NO: 1261239 - DNA, 15 bp, Homo sapiens
atgagacccataagg

SEQ ID NO: 1261240 - DNA, 15 bp, Homo sapiens
aatgagacccataag

SEQ ID NO: 1261241 - DNA, 15 bp, Homo sapiens
caatgagacccataa

SEQ ID NO: 1261242 - DNA, 15 bp, Homo sapiens
tcaatgagacccata

SEQ ID NO: 1261243 - DNA, 15 bp, Homo sapiens
ctcaatgagacccat

SEQ ID NO: 1261244 - DNA, 15 bp, Homo sapiens
gctcaatgagaccca

SEQ ID NO: 1261245 - DNA, 15 bp, Homo sapiens
tgctcaatgagaccc

SEQ ID NO: 1261246 - DNA, 15 bp, Homo sapiens
ctgctcaatgagacc

SEQ ID NO: 1261247 - DNA, 15 bp, Homo sapiens
actgctcaatgagac

SEQ ID NO: 1261248 - DNA, 15 bp, Homo sapiens
cactgctcaatgaga

SEQ ID NO: 1261249 - DNA, 15 bp, Homo sapiens
acactgctcaatgag

SEQ ID NO: 1261250 - DNA, 15 bp, Homo sapiens
cacactgctcaatga

SEQ ID NO: 1261251 - DNA, 15 bp, Homo sapiens
acacactgctcaatg

SEQ ID NO: 1261252 - DNA, 15 bp, Homo sapiens
aacacactgctcaat

SEQ ID NO: 1261253 - DNA, 15 bp, Homo sapiens
caacacactgctcaa

SEQ ID NO: 1261254 - DNA, 15 bp, Homo sapiens
gcaacacactgctca

SEQ ID NO: 1261255 - DNA, 15 bp, Homo sapiens
tgcaacacactgctc

SEQ ID NO: 1261256 - DNA, 15 bp, Homo sapiens
gtgcaacacactgct

SEQ ID NO: 1261257 - DNA, 15 bp, Homo sapiens
ggtgcaacacactgc

SEQ ID NO: 1261258 - DNA, 15 bp, Homo sapiens
tggtgcaacacactg

SEQ ID NO: 1261259 - DNA, 15 bp, Homo sapiens
gtggtgcaacacact

SEQ ID NO: 1261260 - DNA, 15 bp, Homo sapiens
agtggtgcaacacac

SEQ ID NO: 1261261 - DNA, 15 bp, Homo sapiens
cagtggtgcaacaca

SEQ ID NO: 1261262 - DNA, 15 bp, Homo sapiens
gcagtggtgcaacac

SEQ ID NO: 1261263 - DNA, 15 bp, Homo sapiens
ggcagtggtgcaaca

SEQ ID NO: 1261264 - DNA, 15 bp, Homo sapiens
gggcagtggtgcaac

SEQ ID NO: 1261265 - DNA, 15 bp, Homo sapiens
ggggcagtggtgcaa

SEQ ID NO: 1261266 - DNA, 15 bp, Homo sapiens
gggggcagtggtgca

SEQ ID NO: 1261267 - DNA, 15 bp, Homo sapiens
tgggggcagtggtgc

SEQ ID NO: 1261268 - DNA, 15 bp, Homo sapiens
ctgggggcagtggtg

SEQ ID NO: 1261269 - DNA, 15 bp, Homo sapiens
gctgggggcagtggt

SEQ ID NO: 1261270 - DNA, 15 bp, Homo sapiens
ggctgggggcagtgg

SEQ ID NO: 1261271 - DNA, 15 bp, Homo sapiens
tggctgggggcagtg

SEQ ID NO: 1261272 - DNA, 15 bp, Homo sapiens
gtggctgggggcagt

SEQ ID NO: 1261273 - DNA, 15 bp, Homo sapiens
aggtggctgggggca

SEQ ID NO: 1261274 - DNA, 15 bp, Homo sapiens
aaggtggctgggggc

SEQ ID NO: 1261275 - DNA, 15 bp, Homo sapiens
gaaggtggctggggg

SEQ ID NO: 1261276 - DNA, 15 bp, Homo sapiens
ggaaggtggctgggg

SEQ ID NO: 1261277 - DNA, 15 bp, Homo sapiens
aggaaggtggctggg

SEQ ID NO: 1261278 - DNA, 15 bp, Homo sapiens
caggaaggtggctgg

SEQ ID NO: 1261279 - DNA, 15 bp, Homo sapiens
ccaggaaggtggctg

SEQ ID NO: 1261280 - DNA, 15 bp, Homo sapiens
cccaggaaggtggct

SEQ ID NO: 1261281 - DNA, 15 bp, Homo sapiens
ccccaggaaggtggc

SEQ ID NO: 1261282 - DNA, 15 bp, Homo sapiens
gccccaggaaggtgg

SEQ ID NO: 1261283 - DNA, 15 bp, Homo sapiens
agccccaggaaggtg

SEQ ID NO: 1261284 - DNA, 15 bp, Homo sapiens
tagccccaggaaggt

SEQ ID NO: 1261285 - DNA, 15 bp, Homo sapiens
ctagccccaggaagg

SEQ ID NO: 1261286 - DNA, 15 bp, Homo sapiens
gctagccccaggaag

SEQ ID NO: 1261287 - DNA, 15 bp, Homo sapiens
cgctagccccaggaa

SEQ ID NO: 1261288 - DNA, 15 bp, Homo sapiens
acgctagccccagga

SEQ ID NO: 1261289 - DNA, 15 bp, Homo sapiens
tacgctagccccagg

SEQ ID NO: 1261290 - DNA, 15 bp, Homo sapiens
gtacgctagccccag

SEQ ID NO: 1261291 - DNA, 15 bp, Homo sapiens
tgtacgctagcccca

SEQ ID NO: 1261292 - DNA, 15 bp, Homo sapiens
ttgtacgctagcccc

SEQ ID NO: 1261293 - DNA, 15 bp, Homo sapiens
tttgtacgctagccc

SEQ ID NO: 1261294 - DNA, 15 bp, Homo sapiens
ttttgtacgctagcc

SEQ ID NO: 1261295 - DNA, 15 bp, Homo sapiens
attttgtacgctagc

SEQ ID NO: 1261296 - DNA, 15 bp, Homo sapiens
gattttgtacgctag

SEQ ID NO: 1261297 - DNA, 15 bp, Homo sapiens
agattttgtacgcta

SEQ ID NO: 1261298 - DNA, 15 bp, Homo sapiens
gagattttgtacgct

SEQ ID NO: 1261299 - DNA, 15 bp, Homo sapiens
ggagattttgtacgc

SEQ ID NO: 1261300 - DNA, 15 bp, Homo sapiens
tggagattttgtacg

SEQ ID NO: 1261301 - DNA, 15 bp, Homo sapiens
ttggagattttgtac

SEQ ID NO: 1261302 - DNA, 15 bp, Homo sapiens
cttggagattttgta

SEQ ID NO: 1261303 - DNA, 15 bp, Homo sapiens
gcttggagattttgt

SEQ ID NO: 1261304 - DNA, 15 bp, Homo sapiens
tgcttggagattttg

SEQ ID NO: 1261305 - DNA, 15 bp, Homo sapiens
ttgcttggagatttt

SEQ ID NO: 1261306 - DNA, 15 bp, Homo sapiens
gttgcttggagattt

SEQ ID NO: 1261307 - DNA, 15 bp, Homo sapiens
agttgcttggagatt

SEQ ID NO: 1261308 - DNA, 15 bp, Homo sapiens
cagttgcttggagat

SEQ ID NO: 1261309 - DNA, 15 bp, Homo sapiens
gcagttgcttggaga

SEQ ID NO: 1261310 - DNA, 15 bp, Homo sapiens
tgcagttgcttggag

SEQ ID NO: 1261311 - DNA, 15 bp, Homo sapiens
ttgcagttgcttgga

SEQ ID NO: 1261312 - DNA, 15 bp, Homo sapiens
cttgcagttgcttgg

SEQ ID NO: 1261313 - DNA, 15 bp, Homo sapiens
ccttgcagttgcttg

SEQ ID NO: 1261314 - DNA, 15 bp, Homo sapiens
gccttgcagttgctt

SEQ ID NO: 1261315 - DNA, 15 bp, Homo sapiens
tgccttgcagttgct

SEQ ID NO: 1261316 - DNA, 15 bp, Homo sapiens
ctgccttgcagttgc

SEQ ID NO: 1261317 - DNA, 15 bp, Homo sapiens
cctgccttgcagttg

SEQ ID NO: 1261318 - DNA, 15 bp, Homo sapiens
ccctgccttgcagtt

SEQ ID NO: 1261319 - DNA, 15 bp, Homo sapiens
tccctgccttgcagt

SEQ ID NO: 1261320 - DNA, 15 bp, Homo sapiens
ctccctgccttgcag

SEQ ID NO: 1261321 - DNA, 15 bp, Homo sapiens
tctccctgccttgca

SEQ ID NO: 1261322 - DNA, 15 bp, Homo sapiens
ctctccctgccttgc

SEQ ID NO: 1261323 - DNA, 15 bp, Homo sapiens
cctctccctgccttg

SEQ ID NO: 1261324 - DNA, 15 bp, Homo sapiens
tcctctccctgcctt

SEQ ID NO: 1261325 - DNA, 15 bp, Homo sapiens
ctcctctccctgcct

SEQ ID NO: 1261326 - DNA, 15 bp, Homo sapiens
cctcctctccctgcc

SEQ ID NO: 1261327 - DNA, 15 bp, Homo sapiens
gcctcctctccctgc

SEQ ID NO: 1261328 - DNA, 15 bp, Homo sapiens
agcctcctctccctg

SEQ ID NO: 1261329 - DNA, 15 bp, Homo sapiens
gagcctcctctccct

SEQ ID NO: 1261330 - DNA, 15 bp, Homo sapiens
agagcctcctctccc

SEQ ID NO: 1261331 - DNA, 15 bp, Homo sapiens
gagagcctcctctcc

SEQ ID NO: 1261332 - DNA, 15 bp, Homo sapiens
tgagagcctcctctc

SEQ ID NO: 1261333 - DNA, 15 bp, Homo sapiens
ttgagagcctcctct

SEQ ID NO: 1261334 - DNA, 15 bp, Homo sapiens
attgagagcctcctc

SEQ ID NO: 1261335 - DNA, 15 bp, Homo sapiens
tattgagagcctcct

SEQ ID NO: 1261336 - DNA, 15 bp, Homo sapiens
ttattgagagcctcc

SEQ ID NO: 1261337 - DNA, 15 bp, Homo sapiens
tttattgagagcctc

SEQ ID NO: 1261338 - DNA, 15 bp, Homo sapiens
atttattgagagcct

SEQ ID NO: 1261339 - DNA, 15 bp, Homo sapiens
aatttattgagagcc

SEQ ID NO: 1261340 - DNA, 15 bp, Homo sapiens
taatttattgagagc

SEQ ID NO: 1261341 - DNA, 15 bp, Homo sapiens
gtaatttattgagag

SEQ ID NO: 1261342 - DNA, 15 bp, Homo sapiens
agtaatttattgaga

SEQ ID NO: 1261343 - DNA, 15 bp, Homo sapiens
cagtaatttattgag

SEQ ID NO: 1261344 - DNA, 15 bp, Homo sapiens
acagtaatttattga

SEQ ID NO: 1261345 - DNA, 15 bp, Homo sapiens
cacagtaatttattg

SEQ ID NO: 1261346 - DNA, 15 bp, Homo sapiens
acacagtaatttatt

SEQ ID NO: 1261347 - DNA, 15 bp, Homo sapiens
tacacagtaatttat

SEQ ID NO: 1261348 - DNA, 15 bp, Homo sapiens
ttacacagtaattta

SEQ ID NO: 1261349 - DNA, 15 bp, Homo sapiens
attacacagtaattt

SEQ ID NO: 1261350 - DNA, 15 bp, Homo sapiens
gattacacagtaatt

SEQ ID NO: 1261351 - DNA, 15 bp, Homo sapiens
agattacacagtaat

SEQ ID NO: 1261352 - DNA, 15 bp, Homo sapiens
aagattacacagtaa

SEQ ID NO: 1261353 - DNA, 15 bp, Homo sapiens
aaagattacacagta

SEQ ID NO: 1261354 - DNA, 15 bp, Homo sapiens
aaaagattacacagt

SEQ ID NO: 1261355 - DNA, 15 bp, Homo sapiens
aaaaagattacacag

SEQ ID NO: 1261356 - DNA, 15 bp, Homo sapiens
aaaaaagattacaca

SEQ ID NO: 1261357 - DNA, 15 bp, Homo sapiens
aaaaaaagattacac

SEQ ID NO: 1261358 - DNA, 15 bp, Homo sapiens
aaaaaaaagattaca

SEQ ID NO: 1261359 - DNA, 15 bp, Homo sapiens
aaaaaaaaagattac

SEQ ID NO: 1261360 - DNA, 15 bp, Homo sapiens
caaaaaaaaagatta

SEQ ID NO: 1261361 - DNA, 15 bp, Homo sapiens
acaaaaaaaaagatt

SEQ ID NO: 1261362 - DNA, 15 bp, Homo sapiens
aacaaaaaaaaagat

SEQ ID NO: 1261363 - DNA, 15 bp, Homo sapiens
caacaaaaaaaaaga

SEQ ID NO: 1261364 - DNA, 15 bp, Homo sapiens
acaacaaaaaaaaag

SEQ ID NO: 1261365 - DNA, 15 bp, Homo sapiens
tcaaaacaacaacaa

SEQ ID NO: 1261366 - DNA, 15 bp, Homo sapiens
ctcaaaacaacaaca

SEQ ID NO: 1261367 - DNA, 15 bp, Homo sapiens
tctcaaaacaacaac

SEQ ID NO: 1261368 - DNA, 15 bp, Homo sapiens
gtctcaaaacaacaa

SEQ ID NO: 1261369 - DNA, 15 bp, Homo sapiens
tgtctcaaaacaaca

SEQ ID NO: 1261370 - DNA, 15 bp, Homo sapiens
ctgtctcaaaacaac

SEQ ID NO: 1261371 - DNA, 15 bp, Homo sapiens
tctgtctcaaaacaa

SEQ ID NO: 1261372 - DNA, 15 bp, Homo sapiens
ctctgtctcaaaaca

SEQ ID NO: 1261373 - DNA, 15 bp, Homo sapiens
actctgtctcaaaac

SEQ ID NO: 1261374 - DNA, 15 bp, Homo sapiens
tgaaactctgtctca

SEQ ID NO: 1261375 - DNA, 15 bp, Homo sapiens
gtgaaactctgtctc

SEQ ID NO: 1261376 - DNA, 15 bp, Homo sapiens
agtgaaactctgtct

SEQ ID NO: 1261377 - DNA, 15 bp, Homo sapiens
gagtgaaactctgtc

SEQ ID NO: 1261378 - DNA, 15 bp, Homo sapiens
agagtgaaactctgt

SEQ ID NO: 1261379 - DNA, 15 bp, Homo sapiens
aagagtgaaactctg

SEQ ID NO: 1261380 - DNA, 15 bp, Homo sapiens
caagagtgaaactct

SEQ ID NO: 1261381 - DNA, 15 bp, Homo sapiens
ccacaccattgcact

SEQ ID NO: 1261382 - DNA, 15 bp, Homo sapiens
accacaccattgcac

SEQ ID NO: 1261383 - DNA, 15 bp, Homo sapiens
gaccacaccattgca

SEQ ID NO: 1261384 - DNA, 15 bp, Homo sapiens
agaccacaccattgc

SEQ ID NO: 1261385 - DNA, 15 bp, Homo sapiens
aagaccacaccattg

SEQ ID NO: 1261386 - DNA, 15 bp, Homo sapiens
caagaccacaccatt

SEQ ID NO: 1261387 - DNA, 15 bp, Homo sapiens
ccaagaccacaccat

SEQ ID NO: 1261388 - DNA, 15 bp, Homo sapiens
gccaagaccacacca

SEQ ID NO: 1261389 - DNA, 15 bp, Homo sapiens
agccaagaccacacc

SEQ ID NO: 1261390 - DNA, 15 bp, Homo sapiens
gagccaagaccacac

SEQ ID NO: 1261391 - DNA, 15 bp, Homo sapiens
tgagccaagaccaca

SEQ ID NO: 1261392 - DNA, 15 bp, Homo sapiens
gtgagccaagaccac

SEQ ID NO: 1261393 - DNA, 15 bp, Homo sapiens
agtgagccaagacca

SEQ ID NO: 1261394 - DNA, 15 bp, Homo sapiens
cagtgagccaagacc

SEQ ID NO: 1261395 - DNA, 15 bp, Homo sapiens
agacagaggttgcag

SEQ ID NO: 1261396 - DNA, 15 bp, Homo sapiens
aagacagaggttgca

SEQ ID NO: 1261397 - DNA, 15 bp, Homo sapiens
gaagacagaggttgc

SEQ ID NO: 1261398 - DNA, 15 bp, Homo sapiens
agaagacagaggttg

SEQ ID NO: 1261399 - DNA, 15 bp, Homo sapiens
cagaagacagaggtt

SEQ ID NO: 1261400 - DNA, 15 bp, Homo sapiens
ccagaagacagaggt

SEQ ID NO: 1261401 - DNA, 15 bp, Homo sapiens
cccagaagacagagg

SEQ ID NO: 1261402 - DNA, 15 bp, Homo sapiens
acccagaagacagag

SEQ ID NO: 1261403 - DNA, 15 bp, Homo sapiens
aacccagaagacaga

SEQ ID NO: 1261404 - DNA, 15 bp, Homo sapiens
gaacccagaagacag

SEQ ID NO: 1261405 - DNA, 15 bp, Homo sapiens
tgaacccagaagaca

SEQ ID NO: 1261406 - DNA, 15 bp, Homo sapiens
ttgaacccagaagac

SEQ ID NO: 1261407 - DNA, 15 bp, Homo sapiens
cttgaacccagaaga

SEQ ID NO: 1261408 - DNA, 15 bp, Homo sapiens
gcttgaacccagaag

SEQ ID NO: 1261409 - DNA, 15 bp, Homo sapiens
cgcttgaacccagaa

SEQ ID NO: 1261410 - DNA, 15 bp, Homo sapiens
tcgcttgaacccaga

SEQ ID NO: 1261411 - DNA, 15 bp, Homo sapiens
gcctgaaatcccagc

SEQ ID NO: 1261412 - DNA, 15 bp, Homo sapiens
tgcctgaaatcccag

SEQ ID NO: 1261413 - DNA, 15 bp, Homo sapiens
gtgcctgaaatccca

SEQ ID NO: 1261414 - DNA, 15 bp, Homo sapiens
ggtgcctgaaatccc

SEQ ID NO: 1261415 - DNA, 15 bp, Homo sapiens
gggtgcctgaaatcc

SEQ ID NO: 1261416 - DNA, 15 bp, Homo sapiens
cgggtgcctgaaatc

SEQ ID NO: 1261417 - DNA, 15 bp, Homo sapiens
gcgggtgcctgaaat

SEQ ID NO: 1261418 - DNA, 15 bp, Homo sapiens
ggcgggtgcctgaaa

SEQ ID NO: 1261419 - DNA, 15 bp, Homo sapiens
tggcgggtgcctgaa

SEQ ID NO: 1261420 - DNA, 15 bp, Homo sapiens
gtggcgggtgcctga

SEQ ID NO: 1261421 - DNA, 15 bp, Homo sapiens
agtggcgggtgcctg

SEQ ID NO: 1261422 - DNA, 15 bp, Homo sapiens
tagtggcgggtgcct

SEQ ID NO: 1261423 - DNA, 15 bp, Homo sapiens
gtagtggcgggtgcc

SEQ ID NO: 1261424 - DNA, 15 bp, Homo sapiens
cgtagtggcgggtgc

SEQ ID NO: 1261425 - DNA, 15 bp, Homo sapiens
gcgtagtggcgggtg

SEQ ID NO: 1261426 - DNA, 15 bp, Homo sapiens
ggcgtagtggcgggt

SEQ ID NO: 1261427 - DNA, 15 bp, Homo sapiens
gggcgtagtggcggg

SEQ ID NO: 1261428 - DNA, 15 bp, Homo sapiens
cgggcgtagtggcgg

SEQ ID NO: 1261429 - DNA, 15 bp, Homo sapiens
ccgggcgtagtggcg

SEQ ID NO: 1261430 - DNA, 15 bp, Homo sapiens
gccgggcgtagtggc

SEQ ID NO: 1261431 - DNA, 15 bp, Homo sapiens
agccgggcgtagtgg

SEQ ID NO: 1261432 - DNA, 15 bp, Homo sapiens
tagccgggcgtagtg

SEQ ID NO: 1261433 - DNA, 15 bp, Homo sapiens
ttagccgggcgtagt

SEQ ID NO: 1261434 - DNA, 15 bp, Homo sapiens
attagccgggcgtag

SEQ ID NO: 1261435 - DNA, 15 bp, Homo sapiens
aattagccgggcgta

SEQ ID NO: 1261436 - DNA, 15 bp, Homo sapiens
tatcatttgaggtca

SEQ ID NO: 1261437 - DNA, 15 bp, Homo sapiens
gtatcatttgaggtc

SEQ ID NO: 1261438 - DNA, 15 bp, Homo sapiens
cgtatcatttgaggt

SEQ ID NO: 1261439 - DNA, 15 bp, Homo sapiens
gcgtatcatttgagg

SEQ ID NO: 1261440 - DNA, 15 bp, Homo sapiens
ggcgtatcatttgag

SEQ ID NO: 1261441 - DNA, 15 bp, Homo sapiens
aggcgtatcatttga

SEQ ID NO: 1261442 - DNA, 15 bp, Homo sapiens
caggcgtatcatttg

SEQ ID NO: 1261443 - DNA, 15 bp, Homo sapiens
gcaggcgtatcattt

SEQ ID NO: 1261444 - DNA, 15 bp, Homo sapiens
ggcaggcgtatcatt

SEQ ID NO: 1261445 - DNA, 15 bp, Homo sapiens
aggcaggcgtatcat

SEQ ID NO: 1261446 - DNA, 15 bp, Homo sapiens
aaggcaggcgtatca

SEQ ID NO: 1261447 - DNA, 15 bp, Homo sapiens
caaggcaggcgtatc

SEQ ID NO: 1261448 - DNA, 15 bp, Homo sapiens
ccaaggcaggcgtat

SEQ ID NO: 1261449 - DNA, 15 bp, Homo sapiens
gccaaggcaggcgta

SEQ ID NO: 1261450 - DNA, 15 bp, Homo sapiens
ggccaaggcaggcgt

SEQ ID NO: 1261451 - DNA, 15 bp, Homo sapiens
aggccaaggcaggcg

SEQ ID NO: 1261452 - DNA, 15 bp, Homo sapiens
gtggctcacgcctat

SEQ ID NO: 1261453 - DNA, 15 bp, Homo sapiens
agtggctcacgccta

SEQ ID NO: 1261454 - DNA, 15 bp, Homo sapiens
taggccgggcgcagt

SEQ ID NO: 1261455 - DNA, 15 bp, Homo sapiens
gtaggccgggcgcag

SEQ ID NO: 1261456 - DNA, 15 bp, Homo sapiens
agtaggccgggcgca

SEQ ID NO: 1261457 - DNA, 15 bp, Homo sapiens
cagtaggccgggcgc

SEQ ID NO: 1261458 - DNA, 15 bp, Homo sapiens
acagtaggccgggcg

SEQ ID NO: 1261459 - DNA, 15 bp, Homo sapiens
cacagtaggccgggc

SEQ ID NO: 1261460 - DNA, 15 bp, Homo sapiens
acacagtaggccggg

SEQ ID NO: 1261461 - DNA, 15 bp, Homo sapiens
tacacagtaggccgg

SEQ ID NO: 1261462 - DNA, 15 bp, Homo sapiens
ttacacagtaggccg

SEQ ID NO: 1261463 - DNA, 15 bp, Homo sapiens
attacacagtaggcc

SEQ ID NO: 1261464 - DNA, 15 bp, Homo sapiens
gattacacagtaggc

SEQ ID NO: 1261465 - DNA, 15 bp, Homo sapiens
agattacacagtagg

SEQ ID NO: 1261466 - DNA, 15 bp, Homo sapiens
aagattacacagtag

SEQ ID NO: 1261467 - DNA, 15 bp, Homo sapiens
taagattacacagta

SEQ ID NO: 1261468 - DNA, 15 bp, Homo sapiens
gtaagattacacagt

SEQ ID NO: 1261469 - DNA, 15 bp, Homo sapiens
tgtaagattacacag

SEQ ID NO: 1261470 - DNA, 15 bp, Homo sapiens
ttgtaagattacaca

SEQ ID NO: 1261471 - DNA, 15 bp, Homo sapiens
tttgtaagattacac

SEQ ID NO: 1261472 - DNA, 15 bp, Homo sapiens
ttttgtaagattaca

SEQ ID NO: 1261473 - DNA, 15 bp, Homo sapiens
tttttgtaagattac

SEQ ID NO: 1261474 - DNA, 15 bp, Homo sapiens
ttttttgtaagatta

SEQ ID NO: 1261475 - DNA, 15 bp, Homo sapiens
tttttttgtaagatt

SEQ ID NO: 1261476 - DNA, 15 bp, Homo sapiens
ctttttttgtaagat

SEQ ID NO: 1261477 - DNA, 15 bp, Homo sapiens
tctttttttgtaaga

SEQ ID NO: 1261478 - DNA, 15 bp, Homo sapiens
ttctttttttgtaag

SEQ ID NO: 1261479 - DNA, 15 bp, Homo sapiens
tttctttttttgtaa

SEQ ID NO: 1261480 - DNA, 15 bp, Homo sapiens
ttttctttttttgta

SEQ ID NO: 1261481 - DNA, 15 bp, Homo sapiens
tttttctttttttgt

SEQ ID NO: 1261482 - DNA, 15 bp, Homo sapiens
attgttttctttttt

SEQ ID NO: 1261483 - DNA, 15 bp, Homo sapiens
cattgttttcttttt

SEQ ID NO: 1261484 - DNA, 15 bp, Homo sapiens
gcattgttttctttt

SEQ ID NO: 1261485 - DNA, 15 bp, Homo sapiens
agcattgttttcttt

SEQ ID NO: 1261486 - DNA, 15 bp, Homo sapiens
gagcattgttttctt

SEQ ID NO: 1261487 - DNA, 15 bp, Homo sapiens
agagcattgttttct

SEQ ID NO: 1261488 - DNA, 15 bp, Homo sapiens
tagagcattgttttc

SEQ ID NO: 1261489 - DNA, 15 bp, Homo sapiens
ttagagcattgtttt

SEQ ID NO: 1261490 - DNA, 15 bp, Homo sapiens
tttagagcattgttt

SEQ ID NO: 1261491 - DNA, 15 bp, Homo sapiens
ttttagagcattgtt

SEQ ID NO: 1261492 - DNA, 15 bp, Homo sapiens
cttttagagcattgt

SEQ ID NO: 1261493 - DNA, 15 bp, Homo sapiens
tcttttagagcattg

SEQ ID NO: 1261494 - DNA, 15 bp, Homo sapiens
ctcttttagagcatt

SEQ ID NO: 1261495 - DNA, 15 bp, Homo sapiens
tctcttttagagcat

SEQ ID NO: 1261496 - DNA, 15 bp, Homo sapiens
ttctcttttagagca

SEQ ID NO: 1261497 - DNA, 15 bp, Homo sapiens
cttctcttttagagc

SEQ ID NO: 1261498 - DNA, 15 bp, Homo sapiens
ccttctcttttagag

SEQ ID NO: 1261499 - DNA, 15 bp, Homo sapiens
cccttctcttttaga

SEQ ID NO: 1261500 - DNA, 15 bp, Homo sapiens
tcccttctcttttag

SEQ ID NO: 1261501 - DNA, 15 bp, Homo sapiens
ttcccttctctttta

SEQ ID NO: 1261502 - DNA, 15 bp, Homo sapiens
attcccttctctttt

SEQ ID NO: 1261503 - DNA, 15 bp, Homo sapiens
aattcccttctcttt

SEQ ID NO: 1261504 - DNA, 15 bp, Homo sapiens
aaattcccttctctt

SEQ ID NO: 1261505 - DNA, 15 bp, Homo sapiens
aaaattcccttctct

SEQ ID NO: 1261506 - DNA, 15 bp, Homo sapiens
caaaattcccttctc

SEQ ID NO: 1261507 - DNA, 15 bp, Homo sapiens
acaaaattcccttct

SEQ ID NO: 1261508 - DNA, 15 bp, Homo sapiens
aacaaaattcccttc

SEQ ID NO: 1261509 - DNA, 15 bp, Homo sapiens
aaacaaaattccctt

SEQ ID NO: 1261510 - DNA, 15 bp, Homo sapiens
gaaacaaaattccct

SEQ ID NO: 1261511 - DNA, 15 bp, Homo sapiens
agaaacaaaattccc

SEQ ID NO: 1261512 - DNA, 15 bp, Homo sapiens
cagaaacaaaattcc

SEQ ID NO: 1261513 - DNA, 15 bp, Homo sapiens
acagaaacaaaattc

SEQ ID NO: 1261514 - DNA, 15 bp, Homo sapiens
aacagaaacaaaatt

SEQ ID NO: 1261515 - DNA, 15 bp, Homo sapiens
gaacagaaacaaaat

SEQ ID NO: 1261516 - DNA, 15 bp, Homo sapiens
ggaacagaaacaaaa

SEQ ID NO: 1261517 - DNA, 15 bp, Homo sapiens
tggaacagaaacaaa

SEQ ID NO: 1261518 - DNA, 15 bp, Homo sapiens
atggaacagaaacaa

SEQ ID NO: 1261519 - DNA, 15 bp, Homo sapiens
catggaacagaaaca

SEQ ID NO: 1261520 - DNA, 15 bp, Homo sapiens
gcatggaacagaaac

SEQ ID NO: 1261521 - DNA, 15 bp, Homo sapiens
tgcatggaacagaaa

SEQ ID NO: 1261522 - DNA, 15 bp, Homo sapiens
atgcatggaacagaa

SEQ ID NO: 1261523 - DNA, 15 bp, Homo sapiens
tatgcatggaacaga

SEQ ID NO: 1261524 - DNA, 15 bp, Homo sapiens
ctatgcatggaacag

SEQ ID NO: 1261525 - DNA, 15 bp, Homo sapiens
tctatgcatggaaca

SEQ ID NO: 1261526 - DNA, 15 bp, Homo sapiens
gtctatgcatggaac

SEQ ID NO: 1261527 - DNA, 15 bp, Homo sapiens
ggtctatgcatggaa

SEQ ID NO: 1261528 - DNA, 15 bp, Homo sapiens
aggtctatgcatgga

SEQ ID NO: 1261529 - DNA, 15 bp, Homo sapiens
taggtctatgcatgg

SEQ ID NO: 1261530 - DNA, 15 bp, Homo sapiens
gtaggtctatgcatg

SEQ ID NO: 1261531 - DNA, 15 bp, Homo sapiens
tgtaggtctatgcat

SEQ ID NO: 1261532 - DNA, 15 bp, Homo sapiens
gtgtaggtctatgca

SEQ ID NO: 1261533 - DNA, 15 bp, Homo sapiens
tgtgtaggtctatgc

SEQ ID NO: 1261534 - DNA, 15 bp, Homo sapiens
ctgtgtaggtctatg

SEQ ID NO: 1261535 - DNA, 15 bp, Homo sapiens
cctgtgtaggtctat

SEQ ID NO: 1261536 - DNA, 15 bp, Homo sapiens
gcctgtgtaggtcta

SEQ ID NO: 1261537 - DNA, 15 bp, Homo sapiens
agcctgtgtaggtct

SEQ ID NO: 1261538 - DNA, 15 bp, Homo sapiens
aagcctgtgtaggtc

SEQ ID NO: 1261539 - DNA, 15 bp, Homo sapiens
aaagcctgtgtaggt

SEQ ID NO: 1261540 - DNA, 15 bp, Homo sapiens
aaaagcctgtgtagg

SEQ ID NO: 1261541 - DNA, 15 bp, Homo sapiens
aaaaagcctgtgtag

SEQ ID NO: 1261542 - DNA, 15 bp, Homo sapiens
aaaaaagcctgtgta

SEQ ID NO: 1261543 - DNA, 15 bp, Homo sapiens
gaaaaaagcctgtgt

SEQ ID NO: 1261544 - DNA, 15 bp, Homo sapiens
ggaaaaaagcctgtg

SEQ ID NO: 1261545 - DNA, 15 bp, Homo sapiens
aggaaaaaagcctgt

SEQ ID NO: 1261546 - DNA, 15 bp, Homo sapiens
aaggaaaaaagcctg

SEQ ID NO: 1261547 - DNA, 15 bp, Homo sapiens
aaaggaaaaaagcct

SEQ ID NO: 1261548 - DNA, 15 bp, Homo sapiens
aaaaggaaaaaagcc

SEQ ID NO: 1261549 - DNA, 15 bp, Homo sapiens
caaaaggaaaaaagc

SEQ ID NO: 1261550 - DNA, 15 bp, Homo sapiens
gcaaaaggaaaaaag

SEQ ID NO: 1261551 - DNA, 15 bp, Homo sapiens
agcaaaaggaaaaaa

SEQ ID NO: 1261552 - DNA, 15 bp, Homo sapiens
cagcaaaaggaaaaa

SEQ ID NO: 1261553 - DNA, 15 bp, Homo sapiens
acagcaaaaggaaaa

SEQ ID NO: 1261554 - DNA, 15 bp, Homo sapiens
aacagcaaaaggaaa

SEQ ID NO: 1261555 - DNA, 15 bp, Homo sapiens
aaacagcaaaaggaa

SEQ ID NO: 1261556 - DNA, 15 bp, Homo sapiens
gaaacagcaaaagga

SEQ ID NO: 1261557 - DNA, 15 bp, Homo sapiens
ggaaacagcaaaagg

SEQ ID NO: 1261558 - DNA, 15 bp, Homo sapiens
gggaaacagcaaaag

SEQ ID NO: 1261559 - DNA, 15 bp, Homo sapiens
tgggaaacagcaaaa

SEQ ID NO: 1261560 - DNA, 15 bp, Homo sapiens
gtgggaaacagcaaa

SEQ ID NO: 1261561 - DNA, 15 bp, Homo sapiens
agtgggaaacagcaa

SEQ ID NO: 1261562 - DNA, 15 bp, Homo sapiens
aagtgggaaacagca

SEQ ID NO: 1261563 - DNA, 15 bp, Homo sapiens
gaagtgggaaacagc

SEQ ID NO: 1261564 - DNA, 15 bp, Homo sapiens
ggaagtgggaaacag

SEQ ID NO: 1261565 - DNA, 15 bp, Homo sapiens
tggaagtgggaaaca

SEQ ID NO: 1261566 - DNA, 15 bp, Homo sapiens
atggaagtgggaaac

SEQ ID NO: 1261567 - DNA, 15 bp, Homo sapiens
tatggaagtgggaaa

SEQ ID NO: 1261568 - DNA, 15 bp, Homo sapiens
atatggaagtgggaa

SEQ ID NO: 1261569 - DNA, 15 bp, Homo sapiens
gatatggaagtggga

SEQ ID NO: 1261570 - DNA, 15 bp, Homo sapiens
agatatggaagtggg

SEQ ID NO: 1261571 - DNA, 15 bp, Homo sapiens
aagatatggaagtgg

SEQ ID NO: 1261572 - DNA, 15 bp, Homo sapiens
taagatatggaagtg

SEQ ID NO: 1261573 - DNA, 15 bp, Homo sapiens
ataagatatggaagt

SEQ ID NO: 1261574 - DNA, 15 bp, Homo sapiens
aataagatatggaag

SEQ ID NO: 1261575 - DNA, 15 bp, Homo sapiens
aaataagatatggaa

SEQ ID NO: 1261576 - DNA, 15 bp, Homo sapiens
aaaataagatatgga

SEQ ID NO: 1261577 - DNA, 15 bp, Homo sapiens
taaaataagatatgg

SEQ ID NO: 1261578 - DNA, 15 bp, Homo sapiens
ataaaataagatatg

SEQ ID NO: 1261579 - DNA, 15 bp, Homo sapiens
atataaaataagata

SEQ ID NO: 1261580 - DNA, 15 bp, Homo sapiens
catataaaataagat

SEQ ID NO: 1261581 - DNA, 15 bp, Homo sapiens
ccatataaaataaga

SEQ ID NO: 1261582 - DNA, 15 bp, Homo sapiens
accatataaaataag

SEQ ID NO: 1261583 - DNA, 15 bp, Homo sapiens
taccatataaaataa

SEQ ID NO: 1261584 - DNA, 15 bp, Homo sapiens
gtaccatataaaata

SEQ ID NO: 1261585 - DNA, 15 bp, Homo sapiens
agtaccatataaaat

SEQ ID NO: 1261586 - DNA, 15 bp, Homo sapiens
aagtaccatataaaa

SEQ ID NO: 1261587 - DNA, 15 bp, Homo sapiens
aaagtaccatataaa

SEQ ID NO: 1261588 - DNA, 15 bp, Homo sapiens
aaaagtaccatataa

SEQ ID NO: 1261589 - DNA, 15 bp, Homo sapiens
gaaaagtaccatata

SEQ ID NO: 1261590 - DNA, 15 bp, Homo sapiens
agaaaagtaccatat

SEQ ID NO: 1261591 - DNA, 15 bp, Homo sapiens
aagaaaagtaccata

SEQ ID NO: 1261592 - DNA, 15 bp, Homo sapiens
gaagaaaagtaccat

SEQ ID NO: 1261593 - DNA, 15 bp, Homo sapiens
ggaagaaaagtacca

SEQ ID NO: 1261594 - DNA, 15 bp, Homo sapiens
aggaagaaaagtacc

SEQ ID NO: 1261595 - DNA, 15 bp, Homo sapiens
aaggaagaaaagtac

SEQ ID NO: 1261596 - DNA, 15 bp, Homo sapiens
aaaggaagaaaagta

SEQ ID NO: 1261597 - DNA, 15 bp, Homo sapiens
gaaaggaagaaaagt

SEQ ID NO: 1261598 - DNA, 15 bp, Homo sapiens
ggaaaggaagaaaag

SEQ ID NO: 1261599 - DNA, 15 bp, Homo sapiens
gggaaaggaagaaaa

SEQ ID NO: 1261600 - DNA, 15 bp, Homo sapiens
agggaaaggaagaaa

SEQ ID NO: 1261601 - DNA, 15 bp, Homo sapiens
aagggaaaggaagaa

SEQ ID NO: 1261602 - DNA, 15 bp, Homo sapiens
aaagggaaaggaaga

SEQ ID NO: 1261603 - DNA, 15 bp, Homo sapiens
gaaagggaaaggaag

SEQ ID NO: 1261604 - DNA, 15 bp, Homo sapiens
agaaagggaaaggaa

SEQ ID NO: 1261605 - DNA, 15 bp, Homo sapiens
tagaaagggaaagga

SEQ ID NO: 1261606 - DNA, 15 bp, Homo sapiens
ctagaaagggaaagg

SEQ ID NO: 1261607 - DNA, 15 bp, Homo sapiens
cctagaaagggaaag

SEQ ID NO: 1261608 - DNA, 15 bp, Homo sapiens
tcctagaaagggaaa

SEQ ID NO: 1261609 - DNA, 15 bp, Homo sapiens
ttcctagaaagggaa

SEQ ID NO: 1261610 - DNA, 15 bp, Homo sapiens
tttcctagaaaggga

SEQ ID NO: 1261611 - DNA, 15 bp, Homo sapiens
gtttcctagaaaggg

SEQ ID NO: 1261612 - DNA, 15 bp, Homo sapiens
ggtttcctagaaagg

SEQ ID NO: 1261613 - DNA, 15 bp, Homo sapiens
gggtttcctagaaag

SEQ ID NO: 1261614 - DNA, 15 bp, Homo sapiens
agggtttcctagaaa

SEQ ID NO: 1261615 - DNA, 15 bp, Homo sapiens
gagggtttcctagaa

SEQ ID NO: 1261616 - DNA, 15 bp, Homo sapiens
ggagggtttcctaga

SEQ ID NO: 1261617 - DNA, 15 bp, Homo sapiens
gggagggtttcctag

SEQ ID NO: 1261618 - DNA, 15 bp, Homo sapiens
agggagggtttccta

SEQ ID NO: 1261619 - DNA, 15 bp, Homo sapiens
gagggagggtttcct

SEQ ID NO: 1261620 - DNA, 15 bp, Homo sapiens
ggagggagggtttcc

SEQ ID NO: 1261621 - DNA, 15 bp, Homo sapiens
tggagggagggtttc

SEQ ID NO: 1261622 - DNA, 15 bp, Homo sapiens
gtggagggagggttt

SEQ ID NO: 1261623 - DNA, 15 bp, Homo sapiens
ggtggagggagggtt

SEQ ID NO: 1261624 - DNA, 15 bp, Homo sapiens
aggtggagggagggt

SEQ ID NO: 1261625 - DNA, 15 bp, Homo sapiens
aaggtggagggaggg

SEQ ID NO: 1261626 - DNA, 15 bp, Homo sapiens
aaaggtggagggagg

SEQ ID NO: 1261627 - DNA, 15 bp, Homo sapiens
gaaaggtggagggag

SEQ ID NO: 1261628 - DNA, 15 bp, Homo sapiens
ggaaaggtggaggga

SEQ ID NO: 1261629 - DNA, 15 bp, Homo sapiens
aggaaaggtggaggg

SEQ ID NO: 1261630 - DNA, 15 bp, Homo sapiens
gaggaaaggtggagg

SEQ ID NO: 1261631 - DNA, 15 bp, Homo sapiens
ggaggaaaggtggag

SEQ ID NO: 1261632 - DNA, 15 bp, Homo sapiens
aggaggaaaggtgga

SEQ ID NO: 1261633 - DNA, 15 bp, Homo sapiens
taggaggaaaggtgg

SEQ ID NO: 1261634 - DNA, 15 bp, Homo sapiens
gtaggaggaaaggtg

SEQ ID NO: 1261635 - DNA, 15 bp, Homo sapiens
agtaggaggaaaggt

SEQ ID NO: 1261636 - DNA, 15 bp, Homo sapiens
gagtaggaggaaagg

SEQ ID NO: 1261637 - DNA, 15 bp, Homo sapiens
cgagtaggaggaaag

SEQ ID NO: 1261638 - DNA, 15 bp, Homo sapiens
tcgagtaggaggaaa

SEQ ID NO: 1261639 - DNA, 15 bp, Homo sapiens
gtcgagtaggaggaa

SEQ ID NO: 1261640 - DNA, 15 bp, Homo sapiens
ggtcgagtaggagga

SEQ ID NO: 1261641 - DNA, 15 bp, Homo sapiens
aggtcgagtaggagg

SEQ ID NO: 1261642 - DNA, 15 bp, Homo sapiens
aaggtcgagtaggag

SEQ ID NO: 1261643 - DNA, 15 bp, Homo sapiens
aaaggtcgagtagga

SEQ ID NO: 1261644 - DNA, 15 bp, Homo sapiens
taaaggtcgagtagg

SEQ ID NO: 1261645 - DNA, 15 bp, Homo sapiens
ctaaaggtcgagtag

SEQ ID NO: 1261646 - DNA, 15 bp, Homo sapiens
cctaaaggtcgagta

SEQ ID NO: 1261647 - DNA, 15 bp, Homo sapiens
gcctaaaggtcgagt

SEQ ID NO: 1261648 - DNA, 15 bp, Homo sapiens
ggcctaaaggtcgag

SEQ ID NO: 1261649 - DNA, 15 bp, Homo sapiens
aggcctaaaggtcga

SEQ ID NO: 1261650 - DNA, 15 bp, Homo sapiens
caggcctaaaggtcg

SEQ ID NO: 1261651 - DNA, 15 bp, Homo sapiens
ccaggcctaaaggtc

SEQ ID NO: 1261652 - DNA, 15 bp, Homo sapiens
cccaggcctaaaggt

SEQ ID NO: 1261653 - DNA, 15 bp, Homo sapiens
acccaggcctaaagg

SEQ ID NO: 1261654 - DNA, 15 bp, Homo sapiens
tacccaggcctaaag

SEQ ID NO: 1261655 - DNA, 15 bp, Homo sapiens
ttacccaggcctaaa

SEQ ID NO: 1261656 - DNA, 15 bp, Homo sapiens
tttacccaggcctaa

SEQ ID NO: 1261657 - DNA, 15 bp, Homo sapiens
ttttacccaggccta

SEQ ID NO: 1261658 - DNA, 15 bp, Homo sapiens
attttacccaggcct

SEQ ID NO: 1261659 - DNA, 15 bp, Homo sapiens
aattttacccaggcc

SEQ ID NO: 1261660 - DNA, 15 bp, Homo sapiens
aaattttacccaggc

SEQ ID NO: 1261661 - DNA, 15 bp, Homo sapiens
aaaattttacccagg

SEQ ID NO: 1261662 - DNA, 15 bp, Homo sapiens
taaaattttacccag

SEQ ID NO: 1261663 - DNA, 15 bp, Homo sapiens
ttaaaattttaccca

SEQ ID NO: 1261664 - DNA, 15 bp, Homo sapiens
attaaaattttaccc

SEQ ID NO: 1261665 - DNA, 15 bp, Homo sapiens
gattaaaattttacc

SEQ ID NO: 1261666 - DNA, 15 bp, Homo sapiens
agattaaaattttac

SEQ ID NO: 1261667 - DNA, 15 bp, Homo sapiens
aagattaaaatttta

SEQ ID NO: 1261668 - DNA, 15 bp, Homo sapiens
gaagattaaaatttt

SEQ ID NO: 1261669 - DNA, 15 bp, Homo sapiens
tgaagattaaaattt

SEQ ID NO: 1261670 - DNA, 15 bp, Homo sapiens
ttgaagattaaaatt

SEQ ID NO: 1261671 - DNA, 15 bp, Homo sapiens
attgaagattaaaat

SEQ ID NO: 1261672 - DNA, 15 bp, Homo sapiens
tattgaagattaaaa

SEQ ID NO: 1261673 - DNA, 15 bp, Homo sapiens
gtattgaagattaaa

SEQ ID NO: 1261674 - DNA, 15 bp, Homo sapiens
tgtattgaagattaa

SEQ ID NO: 1261675 - DNA, 15 bp, Homo sapiens
ttgtattgaagatta

SEQ ID NO: 1261676 - DNA, 15 bp, Homo sapiens
attgtattgaagatt

SEQ ID NO: 1261677 - DNA, 15 bp, Homo sapiens
gattgtattgaagat

SEQ ID NO: 1261678 - DNA, 15 bp, Homo sapiens
tgattgtattgaaga

SEQ ID NO: 1261679 - DNA, 15 bp, Homo sapiens
atgattgtattgaag

SEQ ID NO: 1261680 - DNA, 15 bp, Homo sapiens
tatgattgtattgaa

SEQ ID NO: 1261681 - DNA, 15 bp, Homo sapiens
atatgattgtattga

SEQ ID NO: 1261682 - DNA, 15 bp, Homo sapiens
aatatgattgtattg

SEQ ID NO: 1261683 - DNA, 15 bp, Homo sapiens
caatatgattgtatt

SEQ ID NO: 1261684 - DNA, 15 bp, Homo sapiens
acaatatgattgtat

SEQ ID NO: 1261685 - DNA, 15 bp, Homo sapiens
aacaatatgattgta

SEQ ID NO: 1261686 - DNA, 15 bp, Homo sapiens
aaacaatatgattgt

SEQ ID NO: 1261687 - DNA, 15 bp, Homo sapiens
aaaacaatatgattg

SEQ ID NO: 1261688 - DNA, 15 bp, Homo sapiens
caaaacaatatgatt

SEQ ID NO: 1261689 - DNA, 15 bp, Homo sapiens
acaaaacaatatgat

SEQ ID NO: 1261690 - DNA, 15 bp, Homo sapiens
gacaaaacaatatga

SEQ ID NO: 1261691 - DNA, 15 bp, Homo sapiens
agacaaaacaatatg

SEQ ID NO: 1261692 - DNA, 15 bp, Homo sapiens
gagacaaaacaatat

SEQ ID NO: 1261693 - DNA, 15 bp, Homo sapiens
tgagacaaaacaata

SEQ ID NO: 1261694 - DNA, 15 bp, Homo sapiens
ctgagacaaaacaat

SEQ ID NO: 1261695 - DNA, 15 bp, Homo sapiens
gctgagacaaaacaa

SEQ ID NO: 1261696 - DNA, 15 bp, Homo sapiens
ggctgagacaaaaca

SEQ ID NO: 1261697 - DNA, 15 bp, Homo sapiens
gggctgagacaaaac

SEQ ID NO: 1261698 - DNA, 15 bp, Homo sapiens
tgggctgagacaaaa

SEQ ID NO: 1261699 - DNA, 15 bp, Homo sapiens
gtgggctgagacaaa

SEQ ID NO: 1261700 - DNA, 15 bp, Homo sapiens
tgtgggctgagacaa

SEQ ID NO: 1261701 - DNA, 15 bp, Homo sapiens
ttgtgggctgagaca

SEQ ID NO: 1261702 - DNA, 15 bp, Homo sapiens
cttgtgggctgagac

SEQ ID NO: 1261703 - DNA, 15 bp, Homo sapiens
acttgtgggctgaga

SEQ ID NO: 1261704 - DNA, 15 bp, Homo sapiens
aacttgtgggctgag

SEQ ID NO: 1261705 - DNA, 15 bp, Homo sapiens
aaacttgtgggctga

SEQ ID NO: 1261706 - DNA, 15 bp, Homo sapiens
aaaacttgtgggctg

SEQ ID NO: 1261707 - DNA, 15 bp, Homo sapiens
gaaaacttgtgggct

SEQ ID NO: 1261708 - DNA, 15 bp, Homo sapiens
tgaaaacttgtgggc

SEQ ID NO: 1261709 - DNA, 15 bp, Homo sapiens
atgaaaacttgtggg

SEQ ID NO: 1261710 - DNA, 15 bp, Homo sapiens
aatgaaaacttgtgg

SEQ ID NO: 1261711 - DNA, 15 bp, Homo sapiens
aaatgaaaacttgtg

SEQ ID NO: 1261712 - DNA, 15 bp, Homo sapiens
taaatgaaaacttgt

SEQ ID NO: 1261713 - DNA, 15 bp, Homo sapiens
ataaatgaaaacttg

SEQ ID NO: 1261714 - DNA, 15 bp, Homo sapiens
cataaatgaaaactt

SEQ ID NO: 1261715 - DNA, 15 bp, Homo sapiens
acataaatgaaaact

SEQ ID NO: 1261716 - DNA, 15 bp, Homo sapiens
cacataaatgaaaac

SEQ ID NO: 1261717 - DNA, 15 bp, Homo sapiens
tcacataaatgaaaa

SEQ ID NO: 1261718 - DNA, 15 bp, Homo sapiens
ttcacataaatgaaa

SEQ ID NO: 1261719 - DNA, 15 bp, Homo sapiens
gttcacataaatgaa

SEQ ID NO: 1261720 - DNA, 15 bp, Homo sapiens
agttcacataaatga

SEQ ID NO: 1261721 - DNA, 15 bp, Homo sapiens
tagttcacataaatg

SEQ ID NO: 1261722 - DNA, 15 bp, Homo sapiens
atagttcacataaat

SEQ ID NO: 1261723 - DNA, 15 bp, Homo sapiens
gatagttcacataaa

SEQ ID NO: 1261724 - DNA, 15 bp, Homo sapiens
tgatagttcacataa

SEQ ID NO: 1261725 - DNA, 15 bp, Homo sapiens
ctgatagttcacata

SEQ ID NO: 1261726 - DNA, 15 bp, Homo sapiens
actgatagttcacat

SEQ ID NO: 1261727 - DNA, 15 bp, Homo sapiens
aactgatagttcaca

SEQ ID NO: 1261728 - DNA, 15 bp, Homo sapiens
aaactgatagttcac

SEQ ID NO: 1261729 - DNA, 15 bp, Homo sapiens
aaaactgatagttca

SEQ ID NO: 1261730 - DNA, 15 bp, Homo sapiens
taaaactgatagttc

SEQ ID NO: 1261731 - DNA, 15 bp, Homo sapiens
gtaaaactgatagtt

SEQ ID NO: 1261732 - DNA, 15 bp, Homo sapiens
tgtaaaactgatagt

SEQ ID NO: 1261733 - DNA, 15 bp, Homo sapiens
ttgtaaaactgatag

SEQ ID NO: 1261734 - DNA, 15 bp, Homo sapiens
attgtaaaactgata

SEQ ID NO: 1261735 - DNA, 15 bp, Homo sapiens
aattgtaaaactgat

SEQ ID NO: 1261736 - DNA, 15 bp, Homo sapiens
aaattgtaaaactga

SEQ ID NO: 1261737 - DNA, 15 bp, Homo sapiens
taaattgtaaaactg

SEQ ID NO: 1261738 - DNA, 15 bp, Homo sapiens
ttaaattgtaaaact

SEQ ID NO: 1261739 - DNA, 15 bp, Homo sapiens
gttaaattgtaaaac

SEQ ID NO: 1261740 - DNA, 15 bp, Homo sapiens
ggttaaattgtaaaa

SEQ ID NO: 1261741 - DNA, 15 bp, Homo sapiens
aggttaaattgtaaa

SEQ ID NO: 1261742 - DNA, 15 bp, Homo sapiens
gaggttaaattgtaa

SEQ ID NO: 1261743 - DNA, 15 bp, Homo sapiens
agaggttaaattgta

SEQ ID NO: 1261744 - DNA, 15 bp, Homo sapiens
tagaggttaaattgt

SEQ ID NO: 1261745 - DNA, 15 bp, Homo sapiens
ctagaggttaaattg

SEQ ID NO: 1261746 - DNA, 15 bp, Homo sapiens
actagaggttaaatt

SEQ ID NO: 1261747 - DNA, 15 bp, Homo sapiens
gactagaggttaaat

SEQ ID NO: 1261748 - DNA, 15 bp, Homo sapiens
tgactagaggttaaa

SEQ ID NO: 1261749 - DNA, 15 bp, Homo sapiens
atgactagaggttaa

SEQ ID NO: 1261750 - DNA, 15 bp, Homo sapiens
aatgactagaggtta

SEQ ID NO: 1261751 - DNA, 15 bp, Homo sapiens
gaatgactagaggtt

SEQ ID NO: 1261752 - DNA, 15 bp, Homo sapiens
agaatgactagaggt

SEQ ID NO: 1261753 - DNA, 15 bp, Homo sapiens
gagaatgactagagg

SEQ ID NO: 1261754 - DNA, 15 bp, Homo sapiens
ggagaatgactagag

SEQ ID NO: 1261755 - DNA, 15 bp, Homo sapiens
tggagaatgactaga

SEQ ID NO: 1261756 - DNA, 15 bp, Homo sapiens
ttggagaatgactag

SEQ ID NO: 1261757 - DNA, 15 bp, Homo sapiens
tttggagaatgacta

SEQ ID NO: 1261758 - DNA, 15 bp, Homo sapiens
atttggagaatgact

SEQ ID NO: 1261759 - DNA, 15 bp, Homo sapiens
tatttggagaatgac

SEQ ID NO: 1261760 - DNA, 15 bp, Homo sapiens
atatttggagaatga

SEQ ID NO: 1261761 - DNA, 15 bp, Homo sapiens
aatatttggagaatg

SEQ ID NO: 1261762 - DNA, 15 bp, Homo sapiens
aaatatttggagaat

SEQ ID NO: 1261763 - DNA, 15 bp, Homo sapiens
aaaatatttggagaa

SEQ ID NO: 1261764 - DNA, 15 bp, Homo sapiens
aaaaatatttggaga

SEQ ID NO: 1261765 - DNA, 15 bp, Homo sapiens
taaaaatatttggag

SEQ ID NO: 1261766 - DNA, 15 bp, Homo sapiens
gtaaaaatatttgga

SEQ ID NO: 1261767 - DNA, 15 bp, Homo sapiens
tgtaaaaatatttgg

SEQ ID NO: 1261768 - DNA, 15 bp, Homo sapiens
gtgtaaaaatatttg

SEQ ID NO: 1261769 - DNA, 15 bp, Homo sapiens
ggtgtaaaaatattt

SEQ ID NO: 1261770 - DNA, 15 bp, Homo sapiens
aggtgtaaaaatatt

SEQ ID NO: 1261771 - DNA, 15 bp, Homo sapiens
taggtgtaaaaatat

SEQ ID NO: 1261772 - DNA, 15 bp, Homo sapiens
ctaggtgtaaaaata

SEQ ID NO: 1261773 - DNA, 15 bp, Homo sapiens
cctaggtgtaaaaat

SEQ ID NO: 1261774 - DNA, 15 bp, Homo sapiens
gcctaggtgtaaaaa

SEQ ID NO: 1261775 - DNA, 15 bp, Homo sapiens
ggcctaggtgtaaaa

SEQ ID NO: 1261776 - DNA, 15 bp, Homo sapiens
aggcctaggtgtaaa

SEQ ID NO: 1261777 - DNA, 15 bp, Homo sapiens
gaggcctaggtgtaa

SEQ ID NO: 1261778 - DNA, 15 bp, Homo sapiens
agaggcctaggtgta

SEQ ID NO: 1261779 - DNA, 15 bp, Homo sapiens
aagaggcctaggtgt

SEQ ID NO: 1261780 - DNA, 15 bp, Homo sapiens
taagaggcctaggtg

SEQ ID NO: 1261781 - DNA, 15 bp, Homo sapiens
ataagaggcctaggt

SEQ ID NO: 1261782 - DNA, 15 bp, Homo sapiens
aataagaggcctagg

SEQ ID NO: 1261783 - DNA, 15 bp, Homo sapiens
aaataagaggcctag

SEQ ID NO: 1261784 - DNA, 15 bp, Homo sapiens
gaaataagaggccta

SEQ ID NO: 1261785 - DNA, 15 bp, Homo sapiens
agaaataagaggcct

SEQ ID NO: 1261786 - DNA, 15 bp, Homo sapiens
cagaaataagaggcc

SEQ ID NO: 1261787 - DNA, 15 bp, Homo sapiens
gcagaaataagaggc

SEQ ID NO: 1261788 - DNA, 15 bp, Homo sapiens
tgcagaaataagagg

SEQ ID NO: 1261789 - DNA, 15 bp, Homo sapiens
ctgcagaaataagag

SEQ ID NO: 1261790 - DNA, 15 bp, Homo sapiens
tctgcagaaataaga

SEQ ID NO: 1261791 - DNA, 15 bp, Homo sapiens
atctgcagaaataag

SEQ ID NO: 1261792 - DNA, 15 bp, Homo sapiens
gatctgcagaaataa

SEQ ID NO: 1261793 - DNA, 15 bp, Homo sapiens
agatctgcagaaata

SEQ ID NO: 1261794 - DNA, 15 bp, Homo sapiens
gagatctgcagaaat

SEQ ID NO: 1261795 - DNA, 15 bp, Homo sapiens
tgagatctgcagaaa

SEQ ID NO: 1261796 - DNA, 15 bp, Homo sapiens
ttgagatctgcagaa

SEQ ID NO: 1261797 - DNA, 15 bp, Homo sapiens
cttgagatctgcaga

SEQ ID NO: 1261798 - DNA, 15 bp, Homo sapiens
acttgagatctgcag

SEQ ID NO: 1261799 - DNA, 15 bp, Homo sapiens
aacttgagatctgca

SEQ ID NO: 1261800 - DNA, 15 bp, Homo sapiens
caacttgagatctgc

SEQ ID NO: 1261801 - DNA, 15 bp, Homo sapiens
gcaacttgagatctg

SEQ ID NO: 1261802 - DNA, 15 bp, Homo sapiens
agcaacttgagatct

SEQ ID NO: 1261803 - DNA, 15 bp, Homo sapiens
aagcaacttgagatc

SEQ ID NO: 1261804 - DNA, 15 bp, Homo sapiens
caagcaacttgagat

SEQ ID NO: 1261805 - DNA, 15 bp, Homo sapiens
tcaagcaacttgaga

SEQ ID NO: 1261806 - DNA, 15 bp, Homo sapiens
ctcaagcaacttgag

SEQ ID NO: 1261807 - DNA, 15 bp, Homo sapiens
cctcaagcaacttga

SEQ ID NO: 1261808 - DNA, 15 bp, Homo sapiens
acctcaagcaacttg

SEQ ID NO: 1261809 - DNA, 15 bp, Homo sapiens
gacctcaagcaactt

SEQ ID NO: 1261810 - DNA, 15 bp, Homo sapiens
tgacctcaagcaact

SEQ ID NO: 1261811 - DNA, 15 bp, Homo sapiens
atgacctcaagcaac

SEQ ID NO: 1261812 - DNA, 15 bp, Homo sapiens
catgacctcaagcaa

SEQ ID NO: 1261813 - DNA, 15 bp, Homo sapiens
ccatgacctcaagca

SEQ ID NO: 1261814 - DNA, 15 bp, Homo sapiens
accatgacctcaagc

SEQ ID NO: 1261815 - DNA, 15 bp, Homo sapiens
aaccatgacctcaag

SEQ ID NO: 1261816 - DNA, 15 bp, Homo sapiens
aaaccatgacctcaa

SEQ ID NO: 1261817 - DNA, 15 bp, Homo sapiens
caaaccatgacctca

SEQ ID NO: 1261818 - DNA, 15 bp, Homo sapiens
tcaaaccatgacctc

SEQ ID NO: 1261819 - DNA, 15 bp, Homo sapiens
atcaaaccatgacct

SEQ ID NO: 1261820 - DNA, 15 bp, Homo sapiens
tatcaaaccatgacc

SEQ ID NO: 1261821 - DNA, 15 bp, Homo sapiens
ctatcaaaccatgac

SEQ ID NO: 1261822 - DNA, 15 bp, Homo sapiens
tctatcaaaccatga

SEQ ID NO: 1261823 - DNA, 15 bp, Homo sapiens
atctatcaaaccatg

SEQ ID NO: 1261824 - DNA, 15 bp, Homo sapiens
aatctatcaaaccat

SEQ ID NO: 1261825 - DNA, 15 bp, Homo sapiens
aaatctatcaaacca

SEQ ID NO: 1261826 - DNA, 15 bp, Homo sapiens
caaatctatcaaacc

SEQ ID NO: 1261827 - DNA, 15 bp, Homo sapiens
acaaatctatcaaac

SEQ ID NO: 1261828 - DNA, 15 bp, Homo sapiens
aacaaatctatcaaa

SEQ ID NO: 1261829 - DNA, 15 bp, Homo sapiens
aaacaaatctatcaa

SEQ ID NO: 1261830 - DNA, 15 bp, Homo sapiens
aaaacaaatctatca

SEQ ID NO: 1261831 - DNA, 15 bp, Homo sapiens
gaaaacaaatctatc

SEQ ID NO: 1261832 - DNA, 15 bp, Homo sapiens
tgaaaacaaatctat

SEQ ID NO: 1261833 - DNA, 15 bp, Homo sapiens
ctgaaaacaaatcta

SEQ ID NO: 1261834 - DNA, 15 bp, Homo sapiens
gctgaaaacaaatct

SEQ ID NO: 1261835 - DNA, 15 bp, Homo sapiens
agctgaaaacaaatc

SEQ ID NO: 1261836 - DNA, 15 bp, Homo sapiens
gagctgaaaacaaat

SEQ ID NO: 1261837 - DNA, 15 bp, Homo sapiens
tgagctgaaaacaaa

SEQ ID NO: 1261838 - DNA, 15 bp, Homo sapiens
ctgagctgaaaacaa

SEQ ID NO: 1261839 - DNA, 15 bp, Homo sapiens
tctgagctgaaaaca

SEQ ID NO: 1261840 - DNA, 15 bp, Homo sapiens
ttctgagctgaaaac

SEQ ID NO: 1261841 - DNA, 15 bp, Homo sapiens
gttctgagctgaaaa

SEQ ID NO: 1261842 - DNA, 15 bp, Homo sapiens
agttctgagctgaaa

SEQ ID NO: 1261843 - DNA, 15 bp, Homo sapiens
tagttctgagctgaa

SEQ ID NO: 1261844 - DNA, 15 bp, Homo sapiens
atagttctgagctga

SEQ ID NO: 1261845 - DNA, 15 bp, Homo sapiens
catagttctgagctg

SEQ ID NO: 1261846 - DNA, 15 bp, Homo sapiens
tcatagttctgagct

SEQ ID NO: 1261847 - DNA, 15 bp, Homo sapiens
ttcatagttctgagc

SEQ ID NO: 1261848 - DNA, 15 bp, Homo sapiens
tttcatagttctgag

SEQ ID NO: 1261849 - DNA, 15 bp, Homo sapiens
ttttcatagttctga

SEQ ID NO: 1261850 - DNA, 15 bp, Homo sapiens
gttttcatagttctg

SEQ ID NO: 1261851 - DNA, 15 bp, Homo sapiens
agttttcatagttct

SEQ ID NO: 1261852 - DNA, 15 bp, Homo sapiens
aagttttcatagttc

SEQ ID NO: 1261853 - DNA, 15 bp, Homo sapiens
aaagttttcatagtt

SEQ ID NO: 1261854 - DNA, 15 bp, Homo sapiens
taaagttttcatagt

SEQ ID NO: 1261855 - DNA, 15 bp, Homo sapiens
ataaagttttcatag

SEQ ID NO: 1261856 - DNA, 15 bp, Homo sapiens
aataaagttttcata

SEQ ID NO: 1261857 - DNA, 15 bp, Homo sapiens
caataaagttttcat

SEQ ID NO: 1261858 - DNA, 15 bp, Homo sapiens
acaataaagttttca

SEQ ID NO: 1261859 - DNA, 15 bp, Homo sapiens
tacaataaagttttc

SEQ ID NO: 1261860 - DNA, 15 bp, Homo sapiens
atacaataaagtttt

SEQ ID NO: 1261861 - DNA, 15 bp, Homo sapiens
aatacaataaagttt

SEQ ID NO: 1261862 - DNA, 15 bp, Homo sapiens
taatacaataaagtt

SEQ ID NO: 1261863 - DNA, 15 bp, Homo sapiens
gtaatacaataaagt

SEQ ID NO: 1261864 - DNA, 15 bp, Homo sapiens
ggtaatacaataaag

SEQ ID NO: 1261865 - DNA, 15 bp, Homo sapiens
gggtaatacaataaa

SEQ ID NO: 1261866 - DNA, 15 bp, Homo sapiens
agggtaatacaataa

SEQ ID NO: 1261867 - DNA, 15 bp, Homo sapiens
tagggtaatacaata

SEQ ID NO: 1261868 - DNA, 15 bp, Homo sapiens
ctagggtaatacaat

SEQ ID NO: 1261869 - DNA, 15 bp, Homo sapiens
tctagggtaatacaa

SEQ ID NO: 1261870 - DNA, 15 bp, Homo sapiens
gtctagggtaataca

SEQ ID NO: 1261871 - DNA, 15 bp, Homo sapiens
tgtctagggtaatac

SEQ ID NO: 1261872 - DNA, 15 bp, Homo sapiens
atgtctagggtaata

SEQ ID NO: 1261873 - DNA, 15 bp, Homo sapiens
aatgtctagggtaat

SEQ ID NO: 1261874 - DNA, 15 bp, Homo sapiens
caatgtctagggtaa

SEQ ID NO: 1261875 - DNA, 15 bp, Homo sapiens
tcaatgtctagggta

SEQ ID NO: 1261876 - DNA, 15 bp, Homo sapiens
atcaatgtctagggt

SEQ ID NO: 1261877 - DNA, 15 bp, Homo sapiens
aatcaatgtctaggg

SEQ ID NO: 1261878 - DNA, 15 bp, Homo sapiens
aaatcaatgtctagg

SEQ ID NO: 1261879 - DNA, 15 bp, Homo sapiens
gaaatcaatgtctag

SEQ ID NO: 1261880 - DNA, 15 bp, Homo sapiens
agaaatcaatgtcta

SEQ ID NO: 1261881 - DNA, 15 bp, Homo sapiens
tagaaatcaatgtct

SEQ ID NO: 1261882 - DNA, 15 bp, Homo sapiens
ttagaaatcaatgtc

SEQ ID NO: 1261883 - DNA, 15 bp, Homo sapiens
attagaaatcaatgt

SEQ ID NO: 1261884 - DNA, 15 bp, Homo sapiens
cattagaaatcaatg

SEQ ID NO: 1261885 - DNA, 15 bp, Homo sapiens
tcattagaaatcaat

SEQ ID NO: 1261886 - DNA, 15 bp, Homo sapiens
ctcattagaaatcaa

SEQ ID NO: 1261887 - DNA, 15 bp, Homo sapiens
actcattagaaatca

SEQ ID NO: 1261888 - DNA, 15 bp, Homo sapiens
aactcattagaaatc

SEQ ID NO: 1261889 - DNA, 15 bp, Homo sapiens
caactcattagaaat

SEQ ID NO: 1261890 - DNA, 15 bp, Homo sapiens
ccaactcattagaaa

SEQ ID NO: 1261891 - DNA, 15 bp, Homo sapiens
accaactcattagaa

SEQ ID NO: 1261892 - DNA, 15 bp, Homo sapiens
aaccaactcattaga

SEQ ID NO: 1261893 - DNA, 15 bp, Homo sapiens
caaccaactcattag

SEQ ID NO: 1261894 - DNA, 15 bp, Homo sapiens
acaaccaactcatta

SEQ ID NO: 1261895 - DNA, 15 bp, Homo sapiens
tacaaccaactcatt

SEQ ID NO: 1261896 - DNA, 15 bp, Homo sapiens
ctacaaccaactcat

SEQ ID NO: 1261897 - DNA, 15 bp, Homo sapiens
cctacaaccaactca

SEQ ID NO: 1261898 - DNA, 15 bp, Homo sapiens
tcctacaaccaactc

SEQ ID NO: 1261899 - DNA, 15 bp, Homo sapiens
atcctacaaccaact

SEQ ID NO: 1261900 - DNA, 15 bp, Homo sapiens
catcctacaaccaac

SEQ ID NO: 1261901 - DNA, 15 bp, Homo sapiens
gcatcctacaaccaa

SEQ ID NO: 1261902 - DNA, 15 bp, Homo sapiens
tgcatcctacaacca

SEQ ID NO: 1261903 - DNA, 15 bp, Homo sapiens
ttgcatcctacaacc

SEQ ID NO: 1261904 - DNA, 15 bp, Homo sapiens
gttgcatcctacaac

SEQ ID NO: 1261905 - DNA, 15 bp, Homo sapiens
agttgcatcctacaa

SEQ ID NO: 1261906 - DNA, 15 bp, Homo sapiens
cagttgcatcctaca

SEQ ID NO: 1261907 - DNA, 15 bp, Homo sapiens
ccagttgcatcctac

SEQ ID NO: 1261908 - DNA, 15 bp, Homo sapiens
accagttgcatccta

SEQ ID NO: 1261909 - DNA, 15 bp, Homo sapiens
aaccagttgcatcct

SEQ ID NO: 1261910 - DNA, 15 bp, Homo sapiens
aaaccagttgcatcc

SEQ ID NO: 1261911 - DNA, 15 bp, Homo sapiens
gaaaccagttgcatc

SEQ ID NO: 1261912 - DNA, 15 bp, Homo sapiens
agaaaccagttgcat

SEQ ID NO: 1261913 - DNA, 15 bp, Homo sapiens
aagaaaccagttgca

SEQ ID NO: 1261914 - DNA, 15 bp, Homo sapiens
taagaaaccagttgc

SEQ ID NO: 1261915 - DNA, 15 bp, Homo sapiens
ttaagaaaccagttg

SEQ ID NO: 1261916 - DNA, 15 bp, Homo sapiens
cttaagaaaccagtt

SEQ ID NO: 1261917 - DNA, 15 bp, Homo sapiens
acttaagaaaccagt

SEQ ID NO: 1261918 - DNA, 15 bp, Homo sapiens
cacttaagaaaccag

SEQ ID NO: 1261919 - DNA, 15 bp, Homo sapiens
ccacttaagaaacca

SEQ ID NO: 1261920 - DNA, 15 bp, Homo sapiens
cccacttaagaaacc

SEQ ID NO: 1261921 - DNA, 15 bp, Homo sapiens
ccccacttaagaaac

SEQ ID NO: 1261922 - DNA, 15 bp, Homo sapiens
cccccacttaagaaa

SEQ ID NO: 1261923 - DNA, 15 bp, Homo sapiens
tcccccacttaagaa

SEQ ID NO: 1261924 - DNA, 15 bp, Homo sapiens
atcccccacttaaga

SEQ ID NO: 1261925 - DNA, 15 bp, Homo sapiens
tatcccccacttaag

SEQ ID NO: 1261926 - DNA, 15 bp, Homo sapiens
atatcccccacttaa

SEQ ID NO: 1261927 - DNA, 15 bp, Homo sapiens
aatatcccccactta

SEQ ID NO: 1261928 - DNA, 15 bp, Homo sapiens
aaatatcccccactt

SEQ ID NO: 1261929 - DNA, 15 bp, Homo sapiens
aaaatatcccccact

SEQ ID NO: 1261930 - DNA, 15 bp, Homo sapiens
aaaaatatcccccac

SEQ ID NO: 1261931 - DNA, 15 bp, Homo sapiens
gaaaaatatccccca

SEQ ID NO: 1261932 - DNA, 15 bp, Homo sapiens
agaaaaatatccccc

SEQ ID NO: 1261933 - DNA, 15 bp, Homo sapiens
tagaaaaatatcccc

SEQ ID NO: 1261934 - DNA, 15 bp, Homo sapiens
ctagaaaaatatccc

SEQ ID NO: 1261935 - DNA, 15 bp, Homo sapiens
tctagaaaaatatcc

SEQ ID NO: 1261936 - DNA, 15 bp, Homo sapiens
ttctagaaaaatatc

SEQ ID NO: 1261937 - DNA, 15 bp, Homo sapiens
attctagaaaaatat

SEQ ID NO: 1261938 - DNA, 15 bp, Homo sapiens
cattctagaaaaata

SEQ ID NO: 1261939 - DNA, 15 bp, Homo sapiens
acattctagaaaaat

SEQ ID NO: 1261940 - DNA, 15 bp, Homo sapiens
cacattctagaaaaa

SEQ ID NO: 1261941 - DNA, 15 bp, Homo sapiens
ccacattctagaaaa

SEQ ID NO: 1261942 - DNA, 15 bp, Homo sapiens
cccacattctagaaa

SEQ ID NO: 1261943 - DNA, 15 bp, Homo sapiens
acccacattctagaa

SEQ ID NO: 1261944 - DNA, 15 bp, Homo sapiens
tacccacattctaga

SEQ ID NO: 1261945 - DNA, 15 bp, Homo sapiens
gtacccacattctag

SEQ ID NO: 1261946 - DNA, 15 bp, Homo sapiens
tgtacccacattcta

SEQ ID NO: 1261947 - DNA, 15 bp, Homo sapiens
ttgtacccacattct

SEQ ID NO: 1261948 - DNA, 15 bp, Homo sapiens
gttgtacccacattc

SEQ ID NO: 1261949 - DNA, 15 bp, Homo sapiens
agttgtacccacatt

SEQ ID NO: 1261950 - DNA, 15 bp, Homo sapiens
aagttgtacccacat

SEQ ID NO: 1261951 - DNA, 15 bp, Homo sapiens
aaagttgtacccaca

SEQ ID NO: 1261952 - DNA, 15 bp, Homo sapiens
gaaagttgtacccac

SEQ ID NO: 1261953 - DNA, 15 bp, Homo sapiens
agaaagttgtaccca

SEQ ID NO: 1261954 - DNA, 15 bp, Homo sapiens
cagaaagttgtaccc

SEQ ID NO: 1261955 - DNA, 15 bp, Homo sapiens
tcagaaagttgtacc

SEQ ID NO: 1261956 - DNA, 15 bp, Homo sapiens
atcagaaagttgtac

SEQ ID NO: 1261957 - DNA, 15 bp, Homo sapiens
catcagaaagttgta

SEQ ID NO: 1261958 - DNA, 15 bp, Homo sapiens
acatcagaaagttgt

SEQ ID NO: 1261959 - DNA, 15 bp, Homo sapiens
cacatcagaaagttg

SEQ ID NO: 1261960 - DNA, 15 bp, Homo sapiens
tcacatcagaaagtt

SEQ ID NO: 1261961 - DNA, 15 bp, Homo sapiens
ctcacatcagaaagt

SEQ ID NO: 1261962 - DNA, 15 bp, Homo sapiens
cctcacatcagaaag

SEQ ID NO: 1261963 - DNA, 15 bp, Homo sapiens
acctcacatcagaaa

SEQ ID NO: 1261964 - DNA, 15 bp, Homo sapiens
gacctcacatcagaa

SEQ ID NO: 1261965 - DNA, 15 bp, Homo sapiens
ggacctcacatcaga

SEQ ID NO: 1261966 - DNA, 15 bp, Homo sapiens
aggacctcacatcag

SEQ ID NO: 1261967 - DNA, 15 bp, Homo sapiens
gaggacctcacatca

SEQ ID NO: 1261968 - DNA, 15 bp, Homo sapiens
tgaggacctcacatc

SEQ ID NO: 1261969 - DNA, 15 bp, Homo sapiens
gtgaggacctcacat

SEQ ID NO: 1261970 - DNA, 15 bp, Homo sapiens
tgtgaggacctcaca

SEQ ID NO: 1261971 - DNA, 15 bp, Homo sapiens
ttgtgaggacctcac

SEQ ID NO: 1261972 - DNA, 15 bp, Homo sapiens
tttgtgaggacctca

SEQ ID NO: 1261973 - DNA, 15 bp, Homo sapiens
atttgtgaggacctc

SEQ ID NO: 1261974 - DNA, 15 bp, Homo sapiens
aatttgtgaggacct

SEQ ID NO: 1261975 - DNA, 15 bp, Homo sapiens
aaatttgtgaggacc

SEQ ID NO: 1261976 - DNA, 15 bp, Homo sapiens
aaaatttgtgaggac

SEQ ID NO: 1261977 - DNA, 15 bp, Homo sapiens
aaaaatttgtgagga

SEQ ID NO: 1261978 - DNA, 15 bp, Homo sapiens
taaaaatttgtgagg

SEQ ID NO: 1261979 - DNA, 15 bp, Homo sapiens
ttaaaaatttgtgag

SEQ ID NO: 1261980 - DNA, 15 bp, Homo sapiens
tttaaaaatttgtga

SEQ ID NO: 1261981 - DNA, 15 bp, Homo sapiens
gtttaaaaatttgtg

SEQ ID NO: 1261982 - DNA, 15 bp, Homo sapiens
agtttaaaaatttgt

SEQ ID NO: 1261983 - DNA, 15 bp, Homo sapiens
aagtttaaaaatttg

SEQ ID NO: 1261984 - DNA, 15 bp, Homo sapiens
aaagtttaaaaattt

SEQ ID NO: 1261985 - DNA, 15 bp, Homo sapiens
caaagtttaaaaatt

SEQ ID NO: 1261986 - DNA, 15 bp, Homo sapiens
gcaaagtttaaaaat

SEQ ID NO: 1261987 - DNA, 15 bp, Homo sapiens
agcaaagtttaaaaa

SEQ ID NO: 1261988 - DNA, 15 bp, Homo sapiens
gagcaaagtttaaaa

SEQ ID NO: 1261989 - DNA, 15 bp, Homo sapiens
ggagcaaagtttaaa

SEQ ID NO: 1261990 - DNA, 15 bp, Homo sapiens
tggagcaaagtttaa

SEQ ID NO: 1261991 - DNA, 15 bp, Homo sapiens
ctggagcaaagttta

SEQ ID NO: 1261992 - DNA, 15 bp, Homo sapiens
gctggagcaaagttt

SEQ ID NO: 1261993 - DNA, 15 bp, Homo sapiens
tgctggagcaaagtt

SEQ ID NO: 1261994 - DNA, 15 bp, Homo sapiens
ttgctggagcaaagt

SEQ ID NO: 1261995 - DNA, 15 bp, Homo sapiens
tttgctggagcaaag

SEQ ID NO: 1261996 - DNA, 15 bp, Homo sapiens
ttttgctggagcaaa

SEQ ID NO: 1261997 - DNA, 15 bp, Homo sapiens
tttttgctggagcaa

SEQ ID NO: 1261998 - DNA, 15 bp, Homo sapiens
ctttttgctggagca

SEQ ID NO: 1261999 - DNA, 15 bp, Homo sapiens
tctttttgctggagc

SEQ ID NO: 1262000 - DNA, 15 bp, Homo sapiens
ttctttttgctggag

SEQ ID NO: 1262001 - DNA, 15 bp, Homo sapiens
gttctttttgctgga

SEQ ID NO: 1262002 - DNA, 15 bp, Homo sapiens
ggttctttttgctgg

SEQ ID NO: 1262003 - DNA, 15 bp, Homo sapiens
tggttctttttgctg

SEQ ID NO: 1262004 - DNA, 15 bp, Homo sapiens
gtggttctttttgct

SEQ ID NO: 1262005 - DNA, 15 bp, Homo sapiens
cgtggttctttttgc

SEQ ID NO: 1262006 - DNA, 15 bp, Homo sapiens
acgtggttctttttg

SEQ ID NO: 1262007 - DNA, 15 bp, Homo sapiens
tacgtggttcttttt

SEQ ID NO: 1262008 - DNA, 15 bp, Homo sapiens
ctacgtggttctttt

SEQ ID NO: 1262009 - DNA, 15 bp, Homo sapiens
tctacgtggttcttt

SEQ ID NO: 1262010 - DNA, 15 bp, Homo sapiens
ctctacgtggttctt

SEQ ID NO: 1262011 - DNA, 15 bp, Homo sapiens
cctctacgtggttct

SEQ ID NO: 1262012 - DNA, 15 bp, Homo sapiens
acctctacgtggttc

SEQ ID NO: 1262013 - DNA, 15 bp, Homo sapiens
aacctctacgtggtt

SEQ ID NO: 1262014 - DNA, 15 bp, Homo sapiens
gaacctctacgtggt

SEQ ID NO: 1262015 - DNA, 15 bp, Homo sapiens
agaacctctacgtgg

SEQ ID NO: 1262016 - DNA, 15 bp, Homo sapiens
gagaacctctacgtg

SEQ ID NO: 1262017 - DNA, 15 bp, Homo sapiens
agagaacctctacgt

SEQ ID NO: 1262018 - DNA, 15 bp, Homo sapiens
tagagaacctctacg

SEQ ID NO: 1262019 - DNA, 15 bp, Homo sapiens
gtagagaacctctac

SEQ ID NO: 1262020 - DNA, 15 bp, Homo sapiens
ggtagagaacctcta

SEQ ID NO: 1262021 - DNA, 15 bp, Homo sapiens
aggtagagaacctct

SEQ ID NO: 1262022 - DNA, 15 bp, Homo sapiens
caggtagagaacctc

SEQ ID NO: 1262023 - DNA, 15 bp, Homo sapiens
ccaggtagagaacct

SEQ ID NO: 1262024 - DNA, 15 bp, Homo sapiens
cccaggtagagaacc

SEQ ID NO: 1262025 - DNA, 15 bp, Homo sapiens
acccaggtagagaac

SEQ ID NO: 1262026 - DNA, 15 bp, Homo sapiens
gacccaggtagagaa

SEQ ID NO: 1262027 - DNA, 15 bp, Homo sapiens
ggacccaggtagaga

SEQ ID NO: 1262028 - DNA, 15 bp, Homo sapiens
aggacccaggtagag

SEQ ID NO: 1262029 - DNA, 15 bp, Homo sapiens
aaggacccaggtaga

SEQ ID NO: 1262030 - DNA, 15 bp, Homo sapiens
gaaggacccaggtag

SEQ ID NO: 1262031 - DNA, 15 bp, Homo sapiens
ggaaggacccaggta

SEQ ID NO: 1262032 - DNA, 15 bp, Homo sapiens
aggaaggacccaggt

SEQ ID NO: 1262033 - DNA, 15 bp, Homo sapiens
caggaaggacccagg

SEQ ID NO: 1262034 - DNA, 15 bp, Homo sapiens
gcaggaaggacccag

SEQ ID NO: 1262035 - DNA, 15 bp, Homo sapiens
ggcaggaaggaccca

SEQ ID NO: 1262036 - DNA, 15 bp, Homo sapiens
aggcaggaaggaccc

SEQ ID NO: 1262037 - DNA, 15 bp, Homo sapiens
gaggcaggaaggacc

SEQ ID NO: 1262038 - DNA, 15 bp, Homo sapiens
tgaggcaggaaggac

SEQ ID NO: 1262039 - DNA, 15 bp, Homo sapiens
gtgaggcaggaagga

SEQ ID NO: 1262040 - DNA, 15 bp, Homo sapiens
ggtgaggcaggaagg

SEQ ID NO: 1262041 - DNA, 15 bp, Homo sapiens
aggtgaggcaggaag

SEQ ID NO: 1262042 - DNA, 15 bp, Homo sapiens
aaggtgaggcaggaa

SEQ ID NO: 1262043 - DNA, 15 bp, Homo sapiens
gaaggtgaggcagga

SEQ ID NO: 1262044 - DNA, 15 bp, Homo sapiens
agaaggtgaggcagg

SEQ ID NO: 1262045 - DNA, 15 bp, Homo sapiens
aagaaggtgaggcag

SEQ ID NO: 1262046 - DNA, 15 bp, Homo sapiens
aaagaaggtgaggca

SEQ ID NO: 1262047 - DNA, 15 bp, Homo sapiens
taaagaaggtgaggc

SEQ ID NO: 1262048 - DNA, 15 bp, Homo sapiens
ctaaagaaggtgagg

SEQ ID NO: 1262049 - DNA, 15 bp, Homo sapiens
cctaaagaaggtgag

SEQ ID NO: 1262050 - DNA, 15 bp, Homo sapiens
acctaaagaaggtga

SEQ ID NO: 1262051 - DNA, 15 bp, Homo sapiens
cacctaaagaaggtg

SEQ ID NO: 1262052 - DNA, 15 bp, Homo sapiens
ccacctaaagaaggt

SEQ ID NO: 1262053 - DNA, 15 bp, Homo sapiens
tccacctaaagaagg

SEQ ID NO: 1262054 - DNA, 15 bp, Homo sapiens
ctccacctaaagaag

SEQ ID NO: 1262055 - DNA, 15 bp, Homo sapiens
actccacctaaagaa

SEQ ID NO: 1262056 - DNA, 15 bp, Homo sapiens
aactccacctaaaga

SEQ ID NO: 1262057 - DNA, 15 bp, Homo sapiens
caactccacctaaag

SEQ ID NO: 1262058 - DNA, 15 bp, Homo sapiens
ccaactccacctaaa

SEQ ID NO: 1262059 - DNA, 15 bp, Homo sapiens
gccaactccacctaa

SEQ ID NO: 1262060 - DNA, 15 bp, Homo sapiens
agccaactccaccta

SEQ ID NO: 1262061 - DNA, 15 bp, Homo sapiens
gagccaactccacct

SEQ ID NO: 1262062 - DNA, 15 bp, Homo sapiens
ggagccaactccacc

SEQ ID NO: 1262063 - DNA, 15 bp, Homo sapiens
tggagccaactccac

SEQ ID NO: 1262064 - DNA, 15 bp, Homo sapiens
ctggagccaactcca

SEQ ID NO: 1262065 - DNA, 15 bp, Homo sapiens
actggagccaactcc

SEQ ID NO: 1262066 - DNA, 15 bp, Homo sapiens
aactggagccaactc

SEQ ID NO: 1262067 - DNA, 15 bp, Homo sapiens
aaactggagccaact

SEQ ID NO: 1262068 - DNA, 15 bp, Homo sapiens
gaaactggagccaac

SEQ ID NO: 1262069 - DNA, 15 bp, Homo sapiens
ggaaactggagccaa

SEQ ID NO: 1262070 - DNA, 15 bp, Homo sapiens
aggaaactggagcca

SEQ ID NO: 1262071 - DNA, 15 bp, Homo sapiens
gaggaaactggagcc

SEQ ID NO: 1262072 - DNA, 15 bp, Homo sapiens
ggaggaaactggagc

SEQ ID NO: 1262073 - DNA, 15 bp, Homo sapiens
aggaggaaactggag

SEQ ID NO: 1262074 - DNA, 15 bp, Homo sapiens
aaggaggaaactgga

SEQ ID NO: 1262075 - DNA, 15 bp, Homo sapiens
caaggaggaaactgg

SEQ ID NO: 1262076 - DNA, 15 bp, Homo sapiens
acaaggaggaaactg

SEQ ID NO: 1262077 - DNA, 15 bp, Homo sapiens
gacaaggaggaaact

SEQ ID NO: 1262078 - DNA, 15 bp, Homo sapiens
agacaaggaggaaac

SEQ ID NO: 1262079 - DNA, 15 bp, Homo sapiens
gagacaaggaggaaa

SEQ ID NO: 1262080 - DNA, 15 bp, Homo sapiens
agagacaaggaggaa

SEQ ID NO: 1262081 - DNA, 15 bp, Homo sapiens
cagagacaaggagga

SEQ ID NO: 1262082 - DNA, 15 bp, Homo sapiens
gcagagacaaggagg

SEQ ID NO: 1262083 - DNA, 15 bp, Homo sapiens
ggcagagacaaggag

SEQ ID NO: 1262084 - DNA, 15 bp, Homo sapiens
aggcagagacaagga

SEQ ID NO: 1262085 - DNA, 15 bp, Homo sapiens
gaggcagagacaagg

SEQ ID NO: 1262086 - DNA, 15 bp, Homo sapiens
ggaggcagagacaag

SEQ ID NO: 1262087 - DNA, 15 bp, Homo sapiens
tggaggcagagacaa

SEQ ID NO: 1262088 - DNA, 15 bp, Homo sapiens
gtggaggcagagaca

SEQ ID NO: 1262089 - DNA, 15 bp, Homo sapiens
ggtggaggcagagac

SEQ ID NO: 1262090 - DNA, 15 bp, Homo sapiens
gggtggaggcagaga

SEQ ID NO: 1262091 - DNA, 15 bp, Homo sapiens
ggggtggaggcagag

SEQ ID NO: 1262092 - DNA, 15 bp, Homo sapiens
tggggtggaggcaga

SEQ ID NO: 1262093 - DNA, 15 bp, Homo sapiens
gtggggtggaggcag

SEQ ID NO: 1262094 - DNA, 15 bp, Homo sapiens
ggtggggtggaggca

SEQ ID NO: 1262095 - DNA, 15 bp, Homo sapiens
gggtggggtggaggc

SEQ ID NO: 1262096 - DNA, 15 bp, Homo sapiens
ggggtggggtggagg

SEQ ID NO: 1262097 - DNA, 15 bp, Homo sapiens
aggggtggggtggag

SEQ ID NO: 1262098 - DNA, 15 bp, Homo sapiens
caggggtggggtgga

SEQ ID NO: 1262099 - DNA, 15 bp, Homo sapiens
gcaggggtggggtgg

SEQ ID NO: 1262100 - DNA, 15 bp, Homo sapiens
ggcaggggtggggtg

SEQ ID NO: 1262101 - DNA, 15 bp, Homo sapiens
gggcaggggtggggt

SEQ ID NO: 1262102 - DNA, 15 bp, Homo sapiens
ggggcaggggtgggg

SEQ ID NO: 1262103 - DNA, 15 bp, Homo sapiens
tggggcaggggtggg

SEQ ID NO: 1262104 - DNA, 15 bp, Homo sapiens
ctggggcaggggtgg

SEQ ID NO: 1262105 - DNA, 15 bp, Homo sapiens
cctggggcaggggtg

SEQ ID NO: 1262106 - DNA, 15 bp, Homo sapiens
aggcctggggcaggg

SEQ ID NO: 1262107 - DNA, 15 bp, Homo sapiens
gaggcctggggcagg

SEQ ID NO: 1262108 - DNA, 15 bp, Homo sapiens
tgaggcctggggcag

SEQ ID NO: 1262109 - DNA, 15 bp, Homo sapiens
atgaggcctggggca

SEQ ID NO: 1262110 - DNA, 15 bp, Homo sapiens
tatgaggcctggggc

SEQ ID NO: 1262111 - DNA, 15 bp, Homo sapiens
ctatgaggcctgggg

SEQ ID NO: 1262112 - DNA, 15 bp, Homo sapiens
actatgaggcctggg

SEQ ID NO: 1262113 - DNA, 15 bp, Homo sapiens
cactatgaggcctgg

SEQ ID NO: 1262114 - DNA, 15 bp, Homo sapiens
acactatgaggcctg

SEQ ID NO: 1262115 - DNA, 15 bp, Homo sapiens
aacactatgaggcct

SEQ ID NO: 1262116 - DNA, 15 bp, Homo sapiens
gaacactatgaggcc

SEQ ID NO: 1262117 - DNA, 15 bp, Homo sapiens
ggaacactatgaggc

SEQ ID NO: 1262118 - DNA, 15 bp, Homo sapiens
tggaacactatgagg

SEQ ID NO: 1262119 - DNA, 15 bp, Homo sapiens
gtggaacactatgag

SEQ ID NO: 1262120 - DNA, 15 bp, Homo sapiens
tgtggaacactatga

SEQ ID NO: 1262121 - DNA, 15 bp, Homo sapiens
ctgtggaacactatg

SEQ ID NO: 1262122 - DNA, 15 bp, Homo sapiens
cctgtggaacactat

SEQ ID NO: 1262123 - DNA, 15 bp, Homo sapiens
tcctgtggaacacta

SEQ ID NO: 1262124 - DNA, 15 bp, Homo sapiens
ttcctgtggaacact

SEQ ID NO: 1262125 - DNA, 15 bp, Homo sapiens
attcctgtggaacac

SEQ ID NO: 1262126 - DNA, 15 bp, Homo sapiens
cattcctgtggaaca

SEQ ID NO: 1262127 - DNA, 15 bp, Homo sapiens
tcattcctgtggaac

SEQ ID NO: 1262128 - DNA, 15 bp, Homo sapiens
gtcattcctgtggaa

SEQ ID NO: 1262129 - DNA, 15 bp, Homo sapiens
cgtcattcctgtgga

SEQ ID NO: 1262130 - DNA, 15 bp, Homo sapiens
acgtcattcctgtgg

SEQ ID NO: 1262131 - DNA, 15 bp, Homo sapiens
cacgtcattcctgtg

SEQ ID NO: 1262132 - DNA, 15 bp, Homo sapiens
ccacgtcattcctgt

SEQ ID NO: 1262133 - DNA, 15 bp, Homo sapiens
accacgtcattcctg

SEQ ID NO: 1262134 - DNA, 15 bp, Homo sapiens
caccacgtcattcct

SEQ ID NO: 1262135 - DNA, 15 bp, Homo sapiens
tcaccacgtcattcc

SEQ ID NO: 1262136 - DNA, 15 bp, Homo sapiens
gtcaccacgtcattc

SEQ ID NO: 1262137 - DNA, 15 bp, Homo sapiens
agtcaccacgtcatt

SEQ ID NO: 1262138 - DNA, 15 bp, Homo sapiens
cagtcaccacgtcat

SEQ ID NO: 1262139 - DNA, 15 bp, Homo sapiens
acagtcaccacgtca

SEQ ID NO: 1262140 - DNA, 15 bp, Homo sapiens
tacagtcaccacgtc

SEQ ID NO: 1262141 - DNA, 15 bp, Homo sapiens
ctacagtcaccacgt

SEQ ID NO: 1262142 - DNA, 15 bp, Homo sapiens
actacagtcaccacg

SEQ ID NO: 1262143 - DNA, 15 bp, Homo sapiens
cactacagtcaccac

SEQ ID NO: 1262144 - DNA, 15 bp, Homo sapiens
tcactacagtcacca

SEQ ID NO: 1262145 - DNA, 15 bp, Homo sapiens
ctcactacagtcacc

SEQ ID NO: 1262146 - DNA, 15 bp, Homo sapiens
cctcactacagtcac

SEQ ID NO: 1262147 - DNA, 15 bp, Homo sapiens
ccctcactacagtca

SEQ ID NO: 1262148 - DNA, 15 bp, Homo sapiens
accctcactacagtc

SEQ ID NO: 1262149 - DNA, 15 bp, Homo sapiens
aaccctcactacagt

SEQ ID NO: 1262150 - DNA, 15 bp, Homo sapiens
taaccctcactacag

SEQ ID NO: 1262151 - DNA, 15 bp, Homo sapiens
gtaaccctcactaca

SEQ ID NO: 1262152 - DNA, 15 bp, Homo sapiens
tgtaaccctcactac

SEQ ID NO: 1262153 - DNA, 15 bp, Homo sapiens
ctgtaaccctcacta

SEQ ID NO: 1262154 - DNA, 15 bp, Homo sapiens
actgtaaccctcact

SEQ ID NO: 1262155 - DNA, 15 bp, Homo sapiens
cactgtaaccctcac

SEQ ID NO: 1262156 - DNA, 15 bp, Homo sapiens
tcactgtaaccctca

SEQ ID NO: 1262157 - DNA, 15 bp, Homo sapiens
ttcactgtaaccctc

SEQ ID NO: 1262158 - DNA, 15 bp, Homo sapiens
cttcactgtaaccct

SEQ ID NO: 1262159 - DNA, 15 bp, Homo sapiens
tcttcactgtaaccc

SEQ ID NO: 1262160 - DNA, 15 bp, Homo sapiens
ttcttcactgtaacc

SEQ ID NO: 1262161 - DNA, 15 bp, Homo sapiens
attcttcactgtaac

SEQ ID NO: 1262162 - DNA, 15 bp, Homo sapiens
aattcttcactgtaa

SEQ ID NO: 1262163 - DNA, 15 bp, Homo sapiens
caattcttcactgta

SEQ ID NO: 1262164 - DNA, 15 bp, Homo sapiens
gcaattcttcactgt

SEQ ID NO: 1262165 - DNA, 15 bp, Homo sapiens
ggcaattcttcactg

SEQ ID NO: 1262166 - DNA, 15 bp, Homo sapiens
gggcaattcttcact

SEQ ID NO: 1262167 - DNA, 15 bp, Homo sapiens
tgggcaattcttcac

SEQ ID NO: 1262168 - DNA, 15 bp, Homo sapiens
gtgggcaattcttca

SEQ ID NO: 1262169 - DNA, 15 bp, Homo sapiens
agtgggcaattcttc

SEQ ID NO: 1262170 - DNA, 15 bp, Homo sapiens
cagtgggcaattctt

SEQ ID NO: 1262171 - DNA, 15 bp, Homo sapiens
acagtgggcaattct

SEQ ID NO: 1262172 - DNA, 15 bp, Homo sapiens
aacagtgggcaattc

SEQ ID NO: 1262173 - DNA, 15 bp, Homo sapiens
aaacagtgggcaatt

SEQ ID NO: 1262174 - DNA, 15 bp, Homo sapiens
caaacagtgggcaat

SEQ ID NO: 1262175 - DNA, 15 bp, Homo sapiens
ccaaacagtgggcaa

SEQ ID NO: 1262176 - DNA, 15 bp, Homo sapiens
gccaaacagtgggca

SEQ ID NO: 1262177 - DNA, 15 bp, Homo sapiens
ggccaaacagtgggc

SEQ ID NO: 1262178 - DNA, 15 bp, Homo sapiens
aggccaaacagtggg

SEQ ID NO: 1262179 - DNA, 15 bp, Homo sapiens
aaggccaaacagtgg

SEQ ID NO: 1262180 - DNA, 15 bp, Homo sapiens
caaggccaaacagtg

SEQ ID NO: 1262181 - DNA, 15 bp, Homo sapiens
gcaaggccaaacagt

SEQ ID NO: 1262182 - DNA, 15 bp, Homo sapiens
agcaaggccaaacag

SEQ ID NO: 1262183 - DNA, 15 bp, Homo sapiens
cagcaaggccaaaca

SEQ ID NO: 1262184 - DNA, 15 bp, Homo sapiens
tcagcaaggccaaac

SEQ ID NO: 1262185 - DNA, 15 bp, Homo sapiens
ttcagcaaggccaaa

SEQ ID NO: 1262186 - DNA, 15 bp, Homo sapiens
gttcagcaaggccaa

SEQ ID NO: 1262187 - DNA, 15 bp, Homo sapiens
tgttcagcaaggcca

SEQ ID NO: 1262188 - DNA, 15 bp, Homo sapiens
ctgttcagcaaggcc

SEQ ID NO: 1262189 - DNA, 15 bp, Homo sapiens
gctgttcagcaaggc

SEQ ID NO: 1262190 - DNA, 15 bp, Homo sapiens
tgctgttcagcaagg

SEQ ID NO: 1262191 - DNA, 15 bp, Homo sapiens
ttgctgttcagcaag

SEQ ID NO: 1262192 - DNA, 15 bp, Homo sapiens
tttgctgttcagcaa

SEQ ID NO: 1262193 - DNA, 15 bp, Homo sapiens
atttgctgttcagca

SEQ ID NO: 1262194 - DNA, 15 bp, Homo sapiens
aatttgctgttcagc

SEQ ID NO: 1262195 - DNA, 15 bp, Homo sapiens
aaatttgctgttcag

SEQ ID NO: 1262196 - DNA, 15 bp, Homo sapiens
caaatttgctgttca

SEQ ID NO: 1262197 - DNA, 15 bp, Homo sapiens
ccaaatttgctgttc

SEQ ID NO: 1262198 - DNA, 15 bp, Homo sapiens
cccaaatttgctgtt

SEQ ID NO: 1262199 - DNA, 15 bp, Homo sapiens
gcccaaatttgctgt

SEQ ID NO: 1262200 - DNA, 15 bp, Homo sapiens
ggcccaaatttgctg

SEQ ID NO: 1262201 - DNA, 15 bp, Homo sapiens
tggcccaaatttgct

SEQ ID NO: 1262202 - DNA, 15 bp, Homo sapiens
ctggcccaaatttgc

SEQ ID NO: 1262203 - DNA, 15 bp, Homo sapiens
gctggcccaaatttg

SEQ ID NO: 1262204 - DNA, 15 bp, Homo sapiens
tgctggcccaaattt

SEQ ID NO: 1262205 - DNA, 15 bp, Homo sapiens
ctgctggcccaaatt

SEQ ID NO: 1262206 - DNA, 15 bp, Homo sapiens
actgctggcccaaat

SEQ ID NO: 1262207 - DNA, 15 bp, Homo sapiens
cactgctggcccaaa

SEQ ID NO: 1262208 - DNA, 15 bp, Homo sapiens
ccactgctggcccaa

SEQ ID NO: 1262209 - DNA, 15 bp, Homo sapiens
cccactgctggccca

SEQ ID NO: 1262210 - DNA, 15 bp, Homo sapiens
acccactgctggccc

SEQ ID NO: 1262211 - DNA, 15 bp, Homo sapiens
gacccactgctggcc

SEQ ID NO: 1262212 - DNA, 15 bp, Homo sapiens
agacccactgctggc

SEQ ID NO: 1262213 - DNA, 15 bp, Homo sapiens
cagacccactgctgg

SEQ ID NO: 1262214 - DNA, 15 bp, Homo sapiens
acagacccactgctg

SEQ ID NO: 1262215 - DNA, 15 bp, Homo sapiens
aacagacccactgct

SEQ ID NO: 1262216 - DNA, 15 bp, Homo sapiens
aaacagacccactgc

SEQ ID NO: 1262217 - DNA, 15 bp, Homo sapiens
aaaacagacccactg

SEQ ID NO: 1262218 - DNA, 15 bp, Homo sapiens
gaaaacagacccact

SEQ ID NO: 1262219 - DNA, 15 bp, Homo sapiens
agaaaacagacccac

SEQ ID NO: 1262220 - DNA, 15 bp, Homo sapiens
gagaaaacagaccca

SEQ ID NO: 1262221 - DNA, 15 bp, Homo sapiens
agagaaaacagaccc

SEQ ID NO: 1262222 - DNA, 15 bp, Homo sapiens
gagagaaaacagacc

SEQ ID NO: 1262223 - DNA, 15 bp, Homo sapiens
agagagaaaacagac

SEQ ID NO: 1262224 - DNA, 15 bp, Homo sapiens
aagagagaaaacaga

SEQ ID NO: 1262225 - DNA, 15 bp, Homo sapiens
aaaagagagaaaaca

SEQ ID NO: 1262226 - DNA, 15 bp, Homo sapiens
gaaaagagagaaaac

SEQ ID NO: 1262227 - DNA, 15 bp, Homo sapiens
agaaaagagagaaaa

SEQ ID NO: 1262228 - DNA, 15 bp, Homo sapiens
aagaaaagagagaaa

SEQ ID NO: 1262229 - DNA, 15 bp, Homo sapiens
aaagaaaagagagaa

SEQ ID NO: 1262230 - DNA, 15 bp, Homo sapiens
aaaagaaaagagaga

SEQ ID NO: 1262231 - DNA, 15 bp, Homo sapiens
aaaaagaaaagagag

SEQ ID NO: 1262232 - DNA, 15 bp, Homo sapiens
taaaaagaaaagaga

SEQ ID NO: 1262233 - DNA, 15 bp, Homo sapiens
aataaaaagaaaaga

SEQ ID NO: 1262234 - DNA, 15 bp, Homo sapiens
aaataaaaagaaaag

SEQ ID NO: 1262235 - DNA, 15 bp, Homo sapiens
taaataaaaagaaaa

SEQ ID NO: 1262236 - DNA, 15 bp, Homo sapiens
ataaataaaaagaaa

SEQ ID NO: 1262237 - DNA, 15 bp, Homo sapiens
aataaataaaaagaa

SEQ ID NO: 1262238 - DNA, 15 bp, Homo sapiens
aaataaataaaaaga

SEQ ID NO: 1262239 - DNA, 15 bp, Homo sapiens
taaataaataaaaag

SEQ ID NO: 1262240 - DNA, 15 bp, Homo sapiens
caaaaaaataaataa

SEQ ID NO: 1262241 - DNA, 15 bp, Homo sapiens
tcaaaaaaataaata

SEQ ID NO: 1262242 - DNA, 15 bp, Homo sapiens
ctcaaaaaaataaat

SEQ ID NO: 1262243 - DNA, 15 bp, Homo sapiens
gtctcaaaaaaataa

SEQ ID NO: 1262244 - DNA, 15 bp, Homo sapiens
tgtctcaaaaaaata

SEQ ID NO: 1262245 - DNA, 15 bp, Homo sapiens
ctgtctcaaaaaaat

SEQ ID NO: 1262246 - DNA, 15 bp, Homo sapiens
ttctgtctcaaaaaa

SEQ ID NO: 1262247 - DNA, 15 bp, Homo sapiens
attctgtctcaaaaa

SEQ ID NO: 1262248 - DNA, 15 bp, Homo sapiens
gattctgtctcaaaa

SEQ ID NO: 1262249 - DNA, 15 bp, Homo sapiens
agattctgtctcaaa

SEQ ID NO: 1262250 - DNA, 15 bp, Homo sapiens
aagattctgtctcaa

SEQ ID NO: 1262251 - DNA, 15 bp, Homo sapiens
caagattctgtctca

SEQ ID NO: 1262252 - DNA, 15 bp, Homo sapiens
gcaagattctgtctc

SEQ ID NO: 1262253 - DNA, 15 bp, Homo sapiens
agcaagattctgtct

SEQ ID NO: 1262254 - DNA, 15 bp, Homo sapiens
gagcaagattctgtc

SEQ ID NO: 1262255 - DNA, 15 bp, Homo sapiens
agagcaagattctgt

SEQ ID NO: 1262256 - DNA, 15 bp, Homo sapiens
cagagcaagattctg

SEQ ID NO: 1262257 - DNA, 15 bp, Homo sapiens
acagagcaagattct

SEQ ID NO: 1262258 - DNA, 15 bp, Homo sapiens
gacagagcaagattc

SEQ ID NO: 1262259 - DNA, 15 bp, Homo sapiens
agacagagcaagatt

SEQ ID NO: 1262260 - DNA, 15 bp, Homo sapiens
gagacagagcaagat

SEQ ID NO: 1262261 - DNA, 15 bp, Homo sapiens
ggagacagagcaaga

SEQ ID NO: 1262262 - DNA, 15 bp, Homo sapiens
gggagacagagcaag

SEQ ID NO: 1262263 - DNA, 15 bp, Homo sapiens
tgggagacagagcaa

SEQ ID NO: 1262264 - DNA, 15 bp, Homo sapiens
ctgggagacagagca

SEQ ID NO: 1262265 - DNA, 15 bp, Homo sapiens
cctgggagacagagc

SEQ ID NO: 1262266 - DNA, 15 bp, Homo sapiens
gcctgggagacagag

SEQ ID NO: 1262267 - DNA, 15 bp, Homo sapiens
agcctgggagacaga

SEQ ID NO: 1262268 - DNA, 15 bp, Homo sapiens
cagcctgggagacag

SEQ ID NO: 1262269 - DNA, 15 bp, Homo sapiens
gaggtggagcttgca

SEQ ID NO: 1262270 - DNA, 15 bp, Homo sapiens
ggaggtggagcttgc

SEQ ID NO: 1262271 - DNA, 15 bp, Homo sapiens
aggaggtggagcttg

SEQ ID NO: 1262272 - DNA, 15 bp, Homo sapiens
caggaggtggagctt

SEQ ID NO: 1262273 - DNA, 15 bp, Homo sapiens
ccaggaggtggagct

SEQ ID NO: 1262274 - DNA, 15 bp, Homo sapiens
cccaggaggtggagc

SEQ ID NO: 1262275 - DNA, 15 bp, Homo sapiens
gtgaacccaggaggt

SEQ ID NO: 1262276 - DNA, 15 bp, Homo sapiens
agtgaacccaggagg

SEQ ID NO: 1262277 - DNA, 15 bp, Homo sapiens
gagtgaacccaggag

SEQ ID NO: 1262278 - DNA, 15 bp, Homo sapiens
ggagtgaacccagga

SEQ ID NO: 1262279 - DNA, 15 bp, Homo sapiens
tggagtgaacccagg

SEQ ID NO: 1262280 - DNA, 15 bp, Homo sapiens
atggagtgaacccag

SEQ ID NO: 1262281 - DNA, 15 bp, Homo sapiens
aatggagtgaaccca

SEQ ID NO: 1262282 - DNA, 15 bp, Homo sapiens
gaatggagtgaaccc

SEQ ID NO: 1262283 - DNA, 15 bp, Homo sapiens
agaatggagtgaacc

SEQ ID NO: 1262284 - DNA, 15 bp, Homo sapiens
gagaatggagtgaac

SEQ ID NO: 1262285 - DNA, 15 bp, Homo sapiens
ggagaatggagtgaa

SEQ ID NO: 1262286 - DNA, 15 bp, Homo sapiens
aggagaatggagtga

SEQ ID NO: 1262287 - DNA, 15 bp, Homo sapiens
caggagaatggagtg

SEQ ID NO: 1262288 - DNA, 15 bp, Homo sapiens
gcaggagaatggagt

SEQ ID NO: 1262289 - DNA, 15 bp, Homo sapiens
ggcaggagaatggag

SEQ ID NO: 1262290 - DNA, 15 bp, Homo sapiens
aggcaggagaatgga

SEQ ID NO: 1262291 - DNA, 15 bp, Homo sapiens
gtccgtctctactaa

SEQ ID NO: 1262292 - DNA, 15 bp, Homo sapiens
agtccgtctctacta

SEQ ID NO: 1262293 - DNA, 15 bp, Homo sapiens
aagtccgtctctact

SEQ ID NO: 1262294 - DNA, 15 bp, Homo sapiens
aaagtccgtctctac

SEQ ID NO: 1262295 - DNA, 15 bp, Homo sapiens
caaagtccgtctcta

SEQ ID NO: 1262296 - DNA, 15 bp, Homo sapiens
acaaagtccgtctct

SEQ ID NO: 1262297 - DNA, 15 bp, Homo sapiens
gacaaagtccgtctc

SEQ ID NO: 1262298 - DNA, 15 bp, Homo sapiens
ggacaaagtccgtct

SEQ ID NO: 1262299 - DNA, 15 bp, Homo sapiens
cggacaaagtccgtc

SEQ ID NO: 1262300 - DNA, 15 bp, Homo sapiens
acggacaaagtccgt

SEQ ID NO: 1262301 - DNA, 15 bp, Homo sapiens
gacggacaaagtccg

SEQ ID NO: 1262302 - DNA, 15 bp, Homo sapiens
agacggacaaagtcc

SEQ ID NO: 1262303 - DNA, 15 bp, Homo sapiens
aagacggacaaagtc

SEQ ID NO: 1262304 - DNA, 15 bp, Homo sapiens
taagacggacaaagt

SEQ ID NO: 1262305 - DNA, 15 bp, Homo sapiens
ctaagacggacaaag

SEQ ID NO: 1262306 - DNA, 15 bp, Homo sapiens
gctaagacggacaaa

SEQ ID NO: 1262307 - DNA, 15 bp, Homo sapiens
ggctaagacggacaa

SEQ ID NO: 1262308 - DNA, 15 bp, Homo sapiens
tggctaagacggaca

SEQ ID NO: 1262309 - DNA, 15 bp, Homo sapiens
ctggctaagacggac

SEQ ID NO: 1262310 - DNA, 15 bp, Homo sapiens
cctggctaagacgga

SEQ ID NO: 1262311 - DNA, 15 bp, Homo sapiens
tcctggctaagacgg

SEQ ID NO: 1262312 - DNA, 15 bp, Homo sapiens
atcctggctaagacg

SEQ ID NO: 1262313 - DNA, 15 bp, Homo sapiens
catcctggctaagac

SEQ ID NO: 1262314 - DNA, 15 bp, Homo sapiens
ccatcctggctaaga

SEQ ID NO: 1262315 - DNA, 15 bp, Homo sapiens
accatcctggctaag

SEQ ID NO: 1262316 - DNA, 15 bp, Homo sapiens
tgaccatcctggcta

SEQ ID NO: 1262317 - DNA, 15 bp, Homo sapiens
gtgaccatcctggct

SEQ ID NO: 1262318 - DNA, 15 bp, Homo sapiens
cgtgaccatcctggc

SEQ ID NO: 1262319 - DNA, 15 bp, Homo sapiens
tcgtgaccatcctgg

SEQ ID NO: 1262320 - DNA, 15 bp, Homo sapiens
atcgtgaccatcctg

SEQ ID NO: 1262321 - DNA, 15 bp, Homo sapiens
aatcgtgaccatcct

SEQ ID NO: 1262322 - DNA, 15 bp, Homo sapiens
aaatcgtgaccatcc

SEQ ID NO: 1262323 - DNA, 15 bp, Homo sapiens
gaaatcgtgaccatc

SEQ ID NO: 1262324 - DNA, 15 bp, Homo sapiens
ggaaatcgtgaccat

SEQ ID NO: 1262325 - DNA, 15 bp, Homo sapiens
aggaaatcgtgacca

SEQ ID NO: 1262326 - DNA, 15 bp, Homo sapiens
caggaaatcgtgacc

SEQ ID NO: 1262327 - DNA, 15 bp, Homo sapiens
tcaggaaatcgtgac

SEQ ID NO: 1262328 - DNA, 15 bp, Homo sapiens
gtcaggaaatcgtga

SEQ ID NO: 1262329 - DNA, 15 bp, Homo sapiens
ggtcaggaaatcgtg

SEQ ID NO: 1262330 - DNA, 15 bp, Homo sapiens
aggtcaggaaatcgt

SEQ ID NO: 1262331 - DNA, 15 bp, Homo sapiens
gaggtcaggaaatcg

SEQ ID NO: 1262332 - DNA, 15 bp, Homo sapiens
cgaggtcaggaaatc

SEQ ID NO: 1262333 - DNA, 15 bp, Homo sapiens
acgaggtcaggaaat

SEQ ID NO: 1262334 - DNA, 15 bp, Homo sapiens
cacgaggtcaggaaa

SEQ ID NO: 1262335 - DNA, 15 bp, Homo sapiens
tcacgaggtcaggaa

SEQ ID NO: 1262336 - DNA, 15 bp, Homo sapiens
gaggccgaggcaggt

SEQ ID NO: 1262337 - DNA, 15 bp, Homo sapiens
cggtgcggtggctca

SEQ ID NO: 1262338 - DNA, 15 bp, Homo sapiens
ccggtgcggtggctc

SEQ ID NO: 1262339 - DNA, 15 bp, Homo sapiens
cccggtgcggtggct

SEQ ID NO: 1262340 - DNA, 15 bp, Homo sapiens
gcccggtgcggtggc

SEQ ID NO: 1262341 - DNA, 15 bp, Homo sapiens
agcccggtgcggtgg

SEQ ID NO: 1262342 - DNA, 15 bp, Homo sapiens
aagcccggtgcggtg

SEQ ID NO: 1262343 - DNA, 15 bp, Homo sapiens
aaagcccggtgcggt

SEQ ID NO: 1262344 - DNA, 15 bp, Homo sapiens
aaaagcccggtgcgg

SEQ ID NO: 1262345 - DNA, 15 bp, Homo sapiens
aaaaagcccggtgcg

SEQ ID NO: 1262346 - DNA, 15 bp, Homo sapiens
aaaaaagcccggtgc

SEQ ID NO: 1262347 - DNA, 15 bp, Homo sapiens
actcaaaaaaaaaaa

SEQ ID NO: 1262348 - DNA, 15 bp, Homo sapiens
gactcaaaaaaaaaa

SEQ ID NO: 1262349 - DNA, 15 bp, Homo sapiens
cgactcaaaaaaaaa

SEQ ID NO: 1262350 - DNA, 15 bp, Homo sapiens
ccgactcaaaaaaaa

SEQ ID NO: 1262351 - DNA, 15 bp, Homo sapiens
tccgactcaaaaaaa

SEQ ID NO: 1262352 - DNA, 15 bp, Homo sapiens
ctccgactcaaaaaa

SEQ ID NO: 1262353 - DNA, 15 bp, Homo sapiens
actccgactcaaaaa

SEQ ID NO: 1262354 - DNA, 15 bp, Homo sapiens
gactccgactcaaaa

SEQ ID NO: 1262355 - DNA, 15 bp, Homo sapiens
agactccgactcaaa

SEQ ID NO: 1262356 - DNA, 15 bp, Homo sapiens
gagactccgactcaa

SEQ ID NO: 1262357 - DNA, 15 bp, Homo sapiens
tgagactccgactca

SEQ ID NO: 1262358 - DNA, 15 bp, Homo sapiens
gtgagactccgactc

SEQ ID NO: 1262359 - DNA, 15 bp, Homo sapiens
agtgagactccgact

SEQ ID NO: 1262360 - DNA, 15 bp, Homo sapiens
gagtgagactccgac

SEQ ID NO: 1262361 - DNA, 15 bp, Homo sapiens
agagtgagactccga

SEQ ID NO: 1262362 - DNA, 15 bp, Homo sapiens
tagcctgggcgacag

SEQ ID NO: 1262363 - DNA, 15 bp, Homo sapiens
ctagcctgggcgaca

SEQ ID NO: 1262364 - DNA, 15 bp, Homo sapiens
tctagcctgggcgac

SEQ ID NO: 1262365 - DNA, 15 bp, Homo sapiens
ctctagcctgggcga

SEQ ID NO: 1262366 - DNA, 15 bp, Homo sapiens
gctctagcctgggcg

SEQ ID NO: 1262367 - DNA, 15 bp, Homo sapiens
cgctctagcctgggc

SEQ ID NO: 1262368 - DNA, 15 bp, Homo sapiens
gcgctctagcctggg

SEQ ID NO: 1262369 - DNA, 15 bp, Homo sapiens
tgcgctctagcctgg

SEQ ID NO: 1262370 - DNA, 15 bp, Homo sapiens
ctgcgctctagcctg

SEQ ID NO: 1262371 - DNA, 15 bp, Homo sapiens
gctgcgctctagcct

SEQ ID NO: 1262372 - DNA, 15 bp, Homo sapiens
cgctgcgctctagcc

SEQ ID NO: 1262373 - DNA, 15 bp, Homo sapiens
ccgctgcgctctagc

SEQ ID NO: 1262374 - DNA, 15 bp, Homo sapiens
gccgctgcgctctag

SEQ ID NO: 1262375 - DNA, 15 bp, Homo sapiens
cgccgctgcgctcta

SEQ ID NO: 1262376 - DNA, 15 bp, Homo sapiens
gcgccgctgcgctct

SEQ ID NO: 1262377 - DNA, 15 bp, Homo sapiens
tgcgccgctgcgctc

SEQ ID NO: 1262378 - DNA, 15 bp, Homo sapiens
ttgcgccgctgcgct

SEQ ID NO: 1262379 - DNA, 15 bp, Homo sapiens
attgcgccgctgcgc

SEQ ID NO: 1262380 - DNA, 15 bp, Homo sapiens
gattgcgccgctgcg

SEQ ID NO: 1262381 - DNA, 15 bp, Homo sapiens
agattgcgccgctgc

SEQ ID NO: 1262382 - DNA, 15 bp, Homo sapiens
gagattgcgccgctg

SEQ ID NO: 1262383 - DNA, 15 bp, Homo sapiens
agagattgcgccgct

SEQ ID NO: 1262384 - DNA, 15 bp, Homo sapiens
cagagattgcgccgc

SEQ ID NO: 1262385 - DNA, 15 bp, Homo sapiens
gcagagattgcgccg

SEQ ID NO: 1262386 - DNA, 15 bp, Homo sapiens
agcagagattgcgcc

SEQ ID NO: 1262387 - DNA, 15 bp, Homo sapiens
gagcagagattgcgc

SEQ ID NO: 1262388 - DNA, 15 bp, Homo sapiens
tgagcagagattgcg

SEQ ID NO: 1262389 - DNA, 15 bp, Homo sapiens
atgagcagagattgc

SEQ ID NO: 1262390 - DNA, 15 bp, Homo sapiens
aatgagcagagattg

SEQ ID NO: 1262391 - DNA, 15 bp, Homo sapiens
caatgagcagagatt

SEQ ID NO: 1262392 - DNA, 15 bp, Homo sapiens
gcaatgagcagagat

SEQ ID NO: 1262393 - DNA, 15 bp, Homo sapiens
tgcaatgagcagaga

SEQ ID NO: 1262394 - DNA, 15 bp, Homo sapiens
ttgcaatgagcagag

SEQ ID NO: 1262395 - DNA, 15 bp, Homo sapiens
tttgcaatgagcaga

SEQ ID NO: 1262396 - DNA, 15 bp, Homo sapiens
gtttgcaatgagcag

SEQ ID NO: 1262397 - DNA, 15 bp, Homo sapiens
agtttgcaatgagca

SEQ ID NO: 1262398 - DNA, 15 bp, Homo sapiens
gagtttgcaatgagc

SEQ ID NO: 1262399 - DNA, 15 bp, Homo sapiens
ggagtttgcaatgag

SEQ ID NO: 1262400 - DNA, 15 bp, Homo sapiens
cggagtttgcaatga

SEQ ID NO: 1262401 - DNA, 15 bp, Homo sapiens
gcggagtttgcaatg

SEQ ID NO: 1262402 - DNA, 15 bp, Homo sapiens
agcggagtttgcaat

SEQ ID NO: 1262403 - DNA, 15 bp, Homo sapiens
aagcggagtttgcaa

SEQ ID NO: 1262404 - DNA, 15 bp, Homo sapiens
gaagcggagtttgca

SEQ ID NO: 1262405 - DNA, 15 bp, Homo sapiens
agaagcggagtttgc

SEQ ID NO: 1262406 - DNA, 15 bp, Homo sapiens
gagaagcggagtttg

SEQ ID NO: 1262407 - DNA, 15 bp, Homo sapiens
cgagaagcggagttt

SEQ ID NO: 1262408 - DNA, 15 bp, Homo sapiens
ccgagaagcggagtt

SEQ ID NO: 1262409 - DNA, 15 bp, Homo sapiens
cccgagaagcggagt

SEQ ID NO: 1262410 - DNA, 15 bp, Homo sapiens
acccgagaagcggag

SEQ ID NO: 1262411 - DNA, 15 bp, Homo sapiens
aacccgagaagcgga

SEQ ID NO: 1262412 - DNA, 15 bp, Homo sapiens
gaacccgagaagcgg

SEQ ID NO: 1262413 - DNA, 15 bp, Homo sapiens
tgaacccgagaagcg

SEQ ID NO: 1262414 - DNA, 15 bp, Homo sapiens
ttgaacccgagaagc

SEQ ID NO: 1262415 - DNA, 15 bp, Homo sapiens
cttgaacccgagaag

SEQ ID NO: 1262416 - DNA, 15 bp, Homo sapiens
gcttgaacccgagaa

SEQ ID NO: 1262417 - DNA, 15 bp, Homo sapiens
tgcttgaacccgaga

SEQ ID NO: 1262418 - DNA, 15 bp, Homo sapiens
ttgcttgaacccgag

SEQ ID NO: 1262419 - DNA, 15 bp, Homo sapiens
attgcttgaacccga

SEQ ID NO: 1262420 - DNA, 15 bp, Homo sapiens
tgaattgcttgaacc

SEQ ID NO: 1262421 - DNA, 15 bp, Homo sapiens
atgaattgcttgaac

SEQ ID NO: 1262422 - DNA, 15 bp, Homo sapiens
gatgaattgcttgaa

SEQ ID NO: 1262423 - DNA, 15 bp, Homo sapiens
agatgaattgcttga

SEQ ID NO: 1262424 - DNA, 15 bp, Homo sapiens
cagatgaattgcttg

SEQ ID NO: 1262425 - DNA, 15 bp, Homo sapiens
gcagatgaattgctt

SEQ ID NO: 1262426 - DNA, 15 bp, Homo sapiens
ggcagatgaattgct

SEQ ID NO: 1262427 - DNA, 15 bp, Homo sapiens
aggcagatgaattgc

SEQ ID NO: 1262428 - DNA, 15 bp, Homo sapiens
gaggcagatgaattg

SEQ ID NO: 1262429 - DNA, 15 bp, Homo sapiens
tgaggcagatgaatt

SEQ ID NO: 1262430 - DNA, 15 bp, Homo sapiens
ctgaggcagatgaat

SEQ ID NO: 1262431 - DNA, 15 bp, Homo sapiens
gctgaggcagatgaa

SEQ ID NO: 1262432 - DNA, 15 bp, Homo sapiens
ggctgaggcagatga

SEQ ID NO: 1262433 - DNA, 15 bp, Homo sapiens
aggctgaggcagatg

SEQ ID NO: 1262434 - DNA, 15 bp, Homo sapiens
taggctgaggcagat

SEQ ID NO: 1262435 - DNA, 15 bp, Homo sapiens
gtaggctgaggcaga

SEQ ID NO: 1262436 - DNA, 15 bp, Homo sapiens
ggtaggctgaggcag

SEQ ID NO: 1262437 - DNA, 15 bp, Homo sapiens
cggtaggctgaggca

SEQ ID NO: 1262438 - DNA, 15 bp, Homo sapiens
tcggtaggctgaggc

SEQ ID NO: 1262439 - DNA, 15 bp, Homo sapiens
ttcggtaggctgagg

SEQ ID NO: 1262440 - DNA, 15 bp, Homo sapiens
attcggtaggctgag

SEQ ID NO: 1262441 - DNA, 15 bp, Homo sapiens
tattcggtaggctga

SEQ ID NO: 1262442 - DNA, 15 bp, Homo sapiens
ctattcggtaggctg

SEQ ID NO: 1262443 - DNA, 15 bp, Homo sapiens
gctattcggtaggct

SEQ ID NO: 1262444 - DNA, 15 bp, Homo sapiens
agctattcggtaggc

SEQ ID NO: 1262445 - DNA, 15 bp, Homo sapiens
cagctattcggtagg

SEQ ID NO: 1262446 - DNA, 15 bp, Homo sapiens
ccagctattcggtag

SEQ ID NO: 1262447 - DNA, 15 bp, Homo sapiens
cccagctattcggta

SEQ ID NO: 1262448 - DNA, 15 bp, Homo sapiens
tcccagctattcggt

SEQ ID NO: 1262449 - DNA, 15 bp, Homo sapiens
atcccagctattcgg

SEQ ID NO: 1262450 - DNA, 15 bp, Homo sapiens
aatcccagctattcg

SEQ ID NO: 1262451 - DNA, 15 bp, Homo sapiens
cgtgcctgtaatccc

SEQ ID NO: 1262452 - DNA, 15 bp, Homo sapiens
gcgtgcctgtaatcc

SEQ ID NO: 1262453 - DNA, 15 bp, Homo sapiens
cgcgtgcctgtaatc

SEQ ID NO: 1262454 - DNA, 15 bp, Homo sapiens
gcgcgtgcctgtaat

SEQ ID NO: 1262455 - DNA, 15 bp, Homo sapiens
ggcgcgtgcctgtaa

SEQ ID NO: 1262456 - DNA, 15 bp, Homo sapiens
cggtggcgcgtgcct

SEQ ID NO: 1262457 - DNA, 15 bp, Homo sapiens
acggtggcgcgtgcc

SEQ ID NO: 1262458 - DNA, 15 bp, Homo sapiens
cacggtggcgcgtgc

SEQ ID NO: 1262459 - DNA, 15 bp, Homo sapiens
gcacggtggcgcgtg

SEQ ID NO: 1262460 - DNA, 15 bp, Homo sapiens
ggcacggtggcgcgt

SEQ ID NO: 1262461 - DNA, 15 bp, Homo sapiens
gggcacggtggcgcg

SEQ ID NO: 1262462 - DNA, 15 bp, Homo sapiens
cgggcacggtggcgc

SEQ ID NO: 1262463 - DNA, 15 bp, Homo sapiens
ccgggcacggtggcg

SEQ ID NO: 1262464 - DNA, 15 bp, Homo sapiens
gccgggcacggtggc

SEQ ID NO: 1262465 - DNA, 15 bp, Homo sapiens
tagccgggcacggtg

SEQ ID NO: 1262466 - DNA, 15 bp, Homo sapiens
ttagccgggcacggt

SEQ ID NO: 1262467 - DNA, 15 bp, Homo sapiens
attagccgggcacgg

SEQ ID NO: 1262468 - DNA, 15 bp, Homo sapiens
aattagccgggcacg

SEQ ID NO: 1262469 - DNA, 15 bp, Homo sapiens
aaattagccgggcac

SEQ ID NO: 1262470 - DNA, 15 bp, Homo sapiens
gtccaaaaattagcc

SEQ ID NO: 1262471 - DNA, 15 bp, Homo sapiens
agtccaaaaattagc

SEQ ID NO: 1262472 - DNA, 15 bp, Homo sapiens
aagtccaaaaattag

SEQ ID NO: 1262473 - DNA, 15 bp, Homo sapiens
aaagtccaaaaatta

SEQ ID NO: 1262474 - DNA, 15 bp, Homo sapiens
aaaagtccaaaaatt

SEQ ID NO: 1262475 - DNA, 15 bp, Homo sapiens
taaaagtccaaaaat

SEQ ID NO: 1262476 - DNA, 15 bp, Homo sapiens
ctaaaagtccaaaaa

SEQ ID NO: 1262477 - DNA, 15 bp, Homo sapiens
actaaaagtccaaaa

SEQ ID NO: 1262478 - DNA, 15 bp, Homo sapiens
tactaaaagtccaaa

SEQ ID NO: 1262479 - DNA, 15 bp, Homo sapiens
ctactaaaagtccaa

SEQ ID NO: 1262480 - DNA, 15 bp, Homo sapiens
tctactaaaagtcca

SEQ ID NO: 1262481 - DNA, 15 bp, Homo sapiens
ctctactaaaagtcc

SEQ ID NO: 1262482 - DNA, 15 bp, Homo sapiens
tctctactaaaagtc

SEQ ID NO: 1262483 - DNA, 15 bp, Homo sapiens
atctctactaaaagt

SEQ ID NO: 1262484 - DNA, 15 bp, Homo sapiens
catctctactaaaag

SEQ ID NO: 1262485 - DNA, 15 bp, Homo sapiens
gaggtcaggaattcg

SEQ ID NO: 1262486 - DNA, 15 bp, Homo sapiens
cgaggtcaggaattc

SEQ ID NO: 1262487 - DNA, 15 bp, Homo sapiens
acgaggtcaggaatt

SEQ ID NO: 1262488 - DNA, 15 bp, Homo sapiens
cacgaggtcaggaat

SEQ ID NO: 1262489 - DNA, 15 bp, Homo sapiens
atgaggcaggtggat

SEQ ID NO: 1262490 - DNA, 15 bp, Homo sapiens
gatgaggcaggtgga

SEQ ID NO: 1262491 - DNA, 15 bp, Homo sapiens
ggatgaggcaggtgg

SEQ ID NO: 1262492 - DNA, 15 bp, Homo sapiens
aggatgaggcaggtg

SEQ ID NO: 1262493 - DNA, 15 bp, Homo sapiens
gaggatgaggcaggt

SEQ ID NO: 1262494 - DNA, 15 bp, Homo sapiens
ggaggatgaggcagg

SEQ ID NO: 1262495 - DNA, 15 bp, Homo sapiens
gggaggatgaggcag

SEQ ID NO: 1262496 - DNA, 15 bp, Homo sapiens
tgggaggatgaggca

SEQ ID NO: 1262497 - DNA, 15 bp, Homo sapiens
ttgggaggatgaggc

SEQ ID NO: 1262498 - DNA, 15 bp, Homo sapiens
tttgggaggatgagg

SEQ ID NO: 1262499 - DNA, 15 bp, Homo sapiens
ctttgggaggatgag

SEQ ID NO: 1262500 - DNA, 15 bp, Homo sapiens
actttgggaggatga

SEQ ID NO: 1262501 - DNA, 15 bp, Homo sapiens
cactttgggaggatg

SEQ ID NO: 1262502 - DNA, 15 bp, Homo sapiens
gcactttgggaggat

SEQ ID NO: 1262503 - DNA, 15 bp, Homo sapiens
agcactttgggagga

SEQ ID NO: 1262504 - DNA, 15 bp, Homo sapiens
gctggccgggcgcgg

SEQ ID NO: 1262505 - DNA, 15 bp, Homo sapiens
tgctggccgggcgcg

SEQ ID NO: 1262506 - DNA, 15 bp, Homo sapiens
ctgctggccgggcgc

SEQ ID NO: 1262507 - DNA, 15 bp, Homo sapiens
actgctggccgggcg

SEQ ID NO: 1262508 - DNA, 15 bp, Homo sapiens
cactgctggccgggc

SEQ ID NO: 1262509 - DNA, 15 bp, Homo sapiens
ccactgctggccggg

SEQ ID NO: 1262510 - DNA, 15 bp, Homo sapiens
cccactgctggccgg

SEQ ID NO: 1262511 - DNA, 15 bp, Homo sapiens
acccactgctggccg

SEQ ID NO: 1262512 - DNA, 15 bp, Homo sapiens
tgaaaacagacccac

SEQ ID NO: 1262513 - DNA, 15 bp, Homo sapiens
ttgaaaacagaccca

SEQ ID NO: 1262514 - DNA, 15 bp, Homo sapiens
gttgaaaacagaccc

SEQ ID NO: 1262515 - DNA, 15 bp, Homo sapiens
ggttgaaaacagacc

SEQ ID NO: 1262516 - DNA, 15 bp, Homo sapiens
gggttgaaaacagac

SEQ ID NO: 1262517 - DNA, 15 bp, Homo sapiens
agggttgaaaacaga

SEQ ID NO: 1262518 - DNA, 15 bp, Homo sapiens
gagggttgaaaacag

SEQ ID NO: 1262519 - DNA, 15 bp, Homo sapiens
tgagggttgaaaaca

SEQ ID NO: 1262520 - DNA, 15 bp, Homo sapiens
atgagggttgaaaac

SEQ ID NO: 1262521 - DNA, 15 bp, Homo sapiens
catgagggttgaaaa

SEQ ID NO: 1262522 - DNA, 15 bp, Homo sapiens
acatgagggttgaaa

SEQ ID NO: 1262523 - DNA, 15 bp, Homo sapiens
tacatgagggttgaa

SEQ ID NO: 1262524 - DNA, 15 bp, Homo sapiens
gtacatgagggttga

SEQ ID NO: 1262525 - DNA, 15 bp, Homo sapiens
ggtacatgagggttg

SEQ ID NO: 1262526 - DNA, 15 bp, Homo sapiens
gggtacatgagggtt

SEQ ID NO: 1262527 - DNA, 15 bp, Homo sapiens
agggtacatgagggt

SEQ ID NO: 1262528 - DNA, 15 bp, Homo sapiens
gagggtacatgaggg

SEQ ID NO: 1262529 - DNA, 15 bp, Homo sapiens
tgagggtacatgagg

SEQ ID NO: 1262530 - DNA, 15 bp, Homo sapiens
ctgagggtacatgag

SEQ ID NO: 1262531 - DNA, 15 bp, Homo sapiens
gctgagggtacatga

SEQ ID NO: 1262532 - DNA, 15 bp, Homo sapiens
agctgagggtacatg

SEQ ID NO: 1262533 - DNA, 15 bp, Homo sapiens
gagctgagggtacat

SEQ ID NO: 1262534 - DNA, 15 bp, Homo sapiens
agagctgagggtaca

SEQ ID NO: 1262535 - DNA, 15 bp, Homo sapiens
gagagctgagggtac

SEQ ID NO: 1262536 - DNA, 15 bp, Homo sapiens
tgagagctgagggta

SEQ ID NO: 1262537 - DNA, 15 bp, Homo sapiens
ttgagagctgagggt

SEQ ID NO: 1262538 - DNA, 15 bp, Homo sapiens
cttgagagctgaggg

SEQ ID NO: 1262539 - DNA, 15 bp, Homo sapiens
gcttgagagctgagg

SEQ ID NO: 1262540 - DNA, 15 bp, Homo sapiens
ggcttgagagctgag

SEQ ID NO: 1262541 - DNA, 15 bp, Homo sapiens
aggcttgagagctga

SEQ ID NO: 1262542 - DNA, 15 bp, Homo sapiens
caggcttgagagctg

SEQ ID NO: 1262543 - DNA, 15 bp, Homo sapiens
acaggcttgagagct

SEQ ID NO: 1262544 - DNA, 15 bp, Homo sapiens
cacaggcttgagagc

SEQ ID NO: 1262545 - DNA, 15 bp, Homo sapiens
acacaggcttgagag

SEQ ID NO: 1262546 - DNA, 15 bp, Homo sapiens
cacacaggcttgaga

SEQ ID NO: 1262547 - DNA, 15 bp, Homo sapiens
gcacacaggcttgag

SEQ ID NO: 1262548 - DNA, 15 bp, Homo sapiens
agcacacaggcttga

SEQ ID NO: 1262549 - DNA, 15 bp, Homo sapiens
gagcacacaggcttg

SEQ ID NO: 1262550 - DNA, 15 bp, Homo sapiens
ggagcacacaggctt

SEQ ID NO: 1262551 - DNA, 15 bp, Homo sapiens
gggagcacacaggct

SEQ ID NO: 1262552 - DNA, 15 bp, Homo sapiens
tgggagcacacaggc

SEQ ID NO: 1262553 - DNA, 15 bp, Homo sapiens
gtgggagcacacagg

SEQ ID NO: 1262554 - DNA, 15 bp, Homo sapiens
ggtgggagcacacag

SEQ ID NO: 1262555 - DNA, 15 bp, Homo sapiens
gggtgggagcacaca

SEQ ID NO: 1262556 - DNA, 15 bp, Homo sapiens
ggggtgggagcacac

SEQ ID NO: 1262557 - DNA, 15 bp, Homo sapiens
tggggtgggagcaca

SEQ ID NO: 1262558 - DNA, 15 bp, Homo sapiens
ctggggtgggagcac

SEQ ID NO: 1262559 - DNA, 15 bp, Homo sapiens
gctggggtgggagca

SEQ ID NO: 1262560 - DNA, 15 bp, Homo sapiens
ggctggggtgggagc

SEQ ID NO: 1262561 - DNA, 15 bp, Homo sapiens
tggctggggtgggag

SEQ ID NO: 1262562 - DNA, 15 bp, Homo sapiens
ctggctggggtggga

SEQ ID NO: 1262563 - DNA, 15 bp, Homo sapiens
actggctggggtggg

SEQ ID NO: 1262564 - DNA, 15 bp, Homo sapiens
gactggctggggtgg

SEQ ID NO: 1262565 - DNA, 15 bp, Homo sapiens
tgactggctggggtg

SEQ ID NO: 1262566 - DNA, 15 bp, Homo sapiens
gtgactggctggggt

SEQ ID NO: 1262567 - DNA, 15 bp, Homo sapiens
ggtgactggctgggg

SEQ ID NO: 1262568 - DNA, 15 bp, Homo sapiens
tggtgactggctggg

SEQ ID NO: 1262569 - DNA, 15 bp, Homo sapiens
ctggtgactggctgg

SEQ ID NO: 1262570 - DNA, 15 bp, Homo sapiens
tctggtgactggctg

SEQ ID NO: 1262571 - DNA, 15 bp, Homo sapiens
ttctggtgactggct

SEQ ID NO: 1262572 - DNA, 15 bp, Homo sapiens
attctggtgactggc

SEQ ID NO: 1262573 - DNA, 15 bp, Homo sapiens
gattctggtgactgg

SEQ ID NO: 1262574 - DNA, 15 bp, Homo sapiens
tgattctggtgactg

SEQ ID NO: 1262575 - DNA, 15 bp, Homo sapiens
gtgattctggtgact

SEQ ID NO: 1262576 - DNA, 15 bp, Homo sapiens
tgtgattctggtgac

SEQ ID NO: 1262577 - DNA, 15 bp, Homo sapiens
atgtgattctggtga

SEQ ID NO: 1262578 - DNA, 15 bp, Homo sapiens
tatgtgattctggtg

SEQ ID NO: 1262579 - DNA, 15 bp, Homo sapiens
ctatgtgattctggt

SEQ ID NO: 1262580 - DNA, 15 bp, Homo sapiens
tctatgtgattctgg

SEQ ID NO: 1262581 - DNA, 15 bp, Homo sapiens
atctatgtgattctg

SEQ ID NO: 1262582 - DNA, 15 bp, Homo sapiens
aatctatgtgattct

SEQ ID NO: 1262583 - DNA, 15 bp, Homo sapiens
aaatctatgtgattc

SEQ ID NO: 1262584 - DNA, 15 bp, Homo sapiens
aaaatctatgtgatt

SEQ ID NO: 1262585 - DNA, 15 bp, Homo sapiens
taaaatctatgtgat

SEQ ID NO: 1262586 - DNA, 15 bp, Homo sapiens
ttaaaatctatgtga

SEQ ID NO: 1262587 - DNA, 15 bp, Homo sapiens
tttaaaatctatgtg

SEQ ID NO: 1262588 - DNA, 15 bp, Homo sapiens
ttttaaaatctatgt

SEQ ID NO: 1262589 - DNA, 15 bp, Homo sapiens
gttttaaaatctatg

SEQ ID NO: 1262590 - DNA, 15 bp, Homo sapiens
cgttttaaaatctat

SEQ ID NO: 1262591 - DNA, 15 bp, Homo sapiens
tcgttttaaaatcta

SEQ ID NO: 1262592 - DNA, 15 bp, Homo sapiens
gtcgttttaaaatct

SEQ ID NO: 1262593 - DNA, 15 bp, Homo sapiens
agtcgttttaaaatc

SEQ ID NO: 1262594 - DNA, 15 bp, Homo sapiens
aagtcgttttaaaat

SEQ ID NO: 1262595 - DNA, 15 bp, Homo sapiens
taagtcgttttaaaa

SEQ ID NO: 1262596 - DNA, 15 bp, Homo sapiens
ataagtcgttttaaa

SEQ ID NO: 1262597 - DNA, 15 bp, Homo sapiens
gataagtcgttttaa

SEQ ID NO: 1262598 - DNA, 15 bp, Homo sapiens
ggataagtcgtttta

SEQ ID NO: 1262599 - DNA, 15 bp, Homo sapiens
aggataagtcgtttt

SEQ ID NO: 1262600 - DNA, 15 bp, Homo sapiens
caggataagtcgttt

SEQ ID NO: 1262601 - DNA, 15 bp, Homo sapiens
ccaggataagtcgtt

SEQ ID NO: 1262602 - DNA, 15 bp, Homo sapiens
cccaggataagtcgt

SEQ ID NO: 1262603 - DNA, 15 bp, Homo sapiens
acccaggataagtcg

SEQ ID NO: 1262604 - DNA, 15 bp, Homo sapiens
gacccaggataagtc

SEQ ID NO: 1262605 - DNA, 15 bp, Homo sapiens
ggacccaggataagt

SEQ ID NO: 1262606 - DNA, 15 bp, Homo sapiens
tggacccaggataag

SEQ ID NO: 1262607 - DNA, 15 bp, Homo sapiens
atggacccaggataa

SEQ ID NO: 1262608 - DNA, 15 bp, Homo sapiens
gatggacccaggata

SEQ ID NO: 1262609 - DNA, 15 bp, Homo sapiens
ggatggacccaggat

SEQ ID NO: 1262610 - DNA, 15 bp, Homo sapiens
gggatggacccagga

SEQ ID NO: 1262611 - DNA, 15 bp, Homo sapiens
agggatggacccagg

SEQ ID NO: 1262612 - DNA, 15 bp, Homo sapiens
tagggatggacccag

SEQ ID NO: 1262613 - DNA, 15 bp, Homo sapiens
gtagggatggaccca

SEQ ID NO: 1262614 - DNA, 15 bp, Homo sapiens
tgtagggatggaccc

SEQ ID NO: 1262615 - DNA, 15 bp, Homo sapiens
gtgtagggatggacc

SEQ ID NO: 1262616 - DNA, 15 bp, Homo sapiens
tgtgtagggatggac

SEQ ID NO: 1262617 - DNA, 15 bp, Homo sapiens
atgtgtagggatgga

SEQ ID NO: 1262618 - DNA, 15 bp, Homo sapiens
tatgtgtagggatgg

SEQ ID NO: 1262619 - DNA, 15 bp, Homo sapiens
ctatgtgtagggatg

SEQ ID NO: 1262620 - DNA, 15 bp, Homo sapiens
actatgtgtagggat

SEQ ID NO: 1262621 - DNA, 15 bp, Homo sapiens
tactatgtgtaggga

SEQ ID NO: 1262622 - DNA, 15 bp, Homo sapiens
ttactatgtgtaggg

SEQ ID NO: 1262623 - DNA, 15 bp, Homo sapiens
tttactatgtgtagg

SEQ ID NO: 1262624 - DNA, 15 bp, Homo sapiens
atttactatgtgtag

SEQ ID NO: 1262625 - DNA, 15 bp, Homo sapiens
catttactatgtgta

SEQ ID NO: 1262626 - DNA, 15 bp, Homo sapiens
tcatttactatgtgt

SEQ ID NO: 1262627 - DNA, 15 bp, Homo sapiens
ctcatttactatgtg

SEQ ID NO: 1262628 - DNA, 15 bp, Homo sapiens
tctcatttactatgt

SEQ ID NO: 1262629 - DNA, 15 bp, Homo sapiens
atctcatttactatg

SEQ ID NO: 1262630 - DNA, 15 bp, Homo sapiens
aatctcatttactat

SEQ ID NO: 1262631 - DNA, 15 bp, Homo sapiens
aaatctcatttacta

SEQ ID NO: 1262632 - DNA, 15 bp, Homo sapiens
aaaatctcatttact

SEQ ID NO: 1262633 - DNA, 15 bp, Homo sapiens
aaaaatctcatttac

SEQ ID NO: 1262634 - DNA, 15 bp, Homo sapiens
caaaaatctcattta

SEQ ID NO: 1262635 - DNA, 15 bp, Homo sapiens
gcaaaaatctcattt

SEQ ID NO: 1262636 - DNA, 15 bp, Homo sapiens
agcaaaaatctcatt

SEQ ID NO: 1262637 - DNA, 15 bp, Homo sapiens
cagcaaaaatctcat

SEQ ID NO: 1262638 - DNA, 15 bp, Homo sapiens
ccagcaaaaatctca

SEQ ID NO: 1262639 - DNA, 15 bp, Homo sapiens
cccagcaaaaatctc

SEQ ID NO: 1262640 - DNA, 15 bp, Homo sapiens
acccagcaaaaatct

SEQ ID NO: 1262641 - DNA, 15 bp, Homo sapiens
tacccagcaaaaatc

SEQ ID NO: 1262642 - DNA, 15 bp, Homo sapiens
ctacccagcaaaaat

SEQ ID NO: 1262643 - DNA, 15 bp, Homo sapiens
gctacccagcaaaaa

SEQ ID NO: 1262644 - DNA, 15 bp, Homo sapiens
agctacccagcaaaa

SEQ ID NO: 1262645 - DNA, 15 bp, Homo sapiens
aagctacccagcaaa

SEQ ID NO: 1262646 - DNA, 15 bp, Homo sapiens
caagctacccagcaa

SEQ ID NO: 1262647 - DNA, 15 bp, Homo sapiens
ccaagctacccagca

SEQ ID NO: 1262648 - DNA, 15 bp, Homo sapiens
cccaagctacccagc

SEQ ID NO: 1262649 - DNA, 15 bp, Homo sapiens
tcccaagctacccag

SEQ ID NO: 1262650 - DNA, 15 bp, Homo sapiens
gtcccaagctaccca

SEQ ID NO: 1262651 - DNA, 15 bp, Homo sapiens
cgtcccaagctaccc

SEQ ID NO: 1262652 - DNA, 15 bp, Homo sapiens
gcgtcccaagctacc

SEQ ID NO: 1262653 - DNA, 15 bp, Homo sapiens
agcgtcccaagctac

SEQ ID NO: 1262654 - DNA, 15 bp, Homo sapiens
tagcgtcccaagcta

SEQ ID NO: 1262655 - DNA, 15 bp, Homo sapiens
atagcgtcccaagct

SEQ ID NO: 1262656 - DNA, 15 bp, Homo sapiens
tatagcgtcccaagc

SEQ ID NO: 1262657 - DNA, 15 bp, Homo sapiens
atatagcgtcccaag

SEQ ID NO: 1262658 - DNA, 15 bp, Homo sapiens
aatatagcgtcccaa

SEQ ID NO: 1262659 - DNA, 15 bp, Homo sapiens
aaatatagcgtccca

SEQ ID NO: 1262660 - DNA, 15 bp, Homo sapiens
aaaatatagcgtccc

SEQ ID NO: 1262661 - DNA, 15 bp, Homo sapiens
gaaaatatagcgtcc

SEQ ID NO: 1262662 - DNA, 15 bp, Homo sapiens
ggaaaatatagcgtc

SEQ ID NO: 1262663 - DNA, 15 bp, Homo sapiens
tggaaaatatagcgt

SEQ ID NO: 1262664 - DNA, 15 bp, Homo sapiens
ttggaaaatatagcg

SEQ ID NO: 1262665 - DNA, 15 bp, Homo sapiens
tttggaaaatatagc

SEQ ID NO: 1262666 - DNA, 15 bp, Homo sapiens
ttttggaaaatatag

SEQ ID NO: 1262667 - DNA, 15 bp, Homo sapiens
gttttggaaaatata

SEQ ID NO: 1262668 - DNA, 15 bp, Homo sapiens
agttttggaaaatat

SEQ ID NO: 1262669 - DNA, 15 bp, Homo sapiens
gagttttggaaaata

SEQ ID NO: 1262670 - DNA, 15 bp, Homo sapiens
ggagttttggaaaat

SEQ ID NO: 1262671 - DNA, 15 bp, Homo sapiens
gggagttttggaaaa

SEQ ID NO: 1262672 - DNA, 15 bp, Homo sapiens
agggagttttggaaa

SEQ ID NO: 1262673 - DNA, 15 bp, Homo sapiens
cagggagttttggaa

SEQ ID NO: 1262674 - DNA, 15 bp, Homo sapiens
acagggagttttgga

SEQ ID NO: 1262675 - DNA, 15 bp, Homo sapiens
aacagggagttttgg

SEQ ID NO: 1262676 - DNA, 15 bp, Homo sapiens
caacagggagttttg

SEQ ID NO: 1262677 - DNA, 15 bp, Homo sapiens
tcaacagggagtttt

SEQ ID NO: 1262678 - DNA, 15 bp, Homo sapiens
atcaacagggagttt

SEQ ID NO: 1262679 - DNA, 15 bp, Homo sapiens
aatcaacagggagtt

SEQ ID NO: 1262680 - DNA, 15 bp, Homo sapiens
caatcaacagggagt

SEQ ID NO: 1262681 - DNA, 15 bp, Homo sapiens
ccaatcaacagggag

SEQ ID NO: 1262682 - DNA, 15 bp, Homo sapiens
gccaatcaacaggga

SEQ ID NO: 1262683 - DNA, 15 bp, Homo sapiens
agccaatcaacaggg

SEQ ID NO: 1262684 - DNA, 15 bp, Homo sapiens
cagccaatcaacagg

SEQ ID NO: 1262685 - DNA, 15 bp, Homo sapiens
acagccaatcaacag

SEQ ID NO: 1262686 - DNA, 15 bp, Homo sapiens
tacagccaatcaaca

SEQ ID NO: 1262687 - DNA, 15 bp, Homo sapiens
atacagccaatcaac

SEQ ID NO: 1262688 - DNA, 15 bp, Homo sapiens
aatacagccaatcaa

SEQ ID NO: 1262689 - DNA, 15 bp, Homo sapiens
aaatacagccaatca

SEQ ID NO: 1262690 - DNA, 15 bp, Homo sapiens
caaatacagccaatc

SEQ ID NO: 1262691 - DNA, 15 bp, Homo sapiens
ccaaatacagccaat

SEQ ID NO: 1262692 - DNA, 15 bp, Homo sapiens
cccaaatacagccaa

SEQ ID NO: 1262693 - DNA, 15 bp, Homo sapiens
tcccaaatacagcca

SEQ ID NO: 1262694 - DNA, 15 bp, Homo sapiens
ttcccaaatacagcc

SEQ ID NO: 1262695 - DNA, 15 bp, Homo sapiens
gttcccaaatacagc

SEQ ID NO: 1262696 - DNA, 15 bp, Homo sapiens
ggttcccaaatacag

SEQ ID NO: 1262697 - DNA, 15 bp, Homo sapiens
gggttcccaaataca

SEQ ID NO: 1262698 - DNA, 15 bp, Homo sapiens
ggggttcccaaatac

SEQ ID NO: 1262699 - DNA, 15 bp, Homo sapiens
aggggttcccaaata

SEQ ID NO: 1262700 - DNA, 15 bp, Homo sapiens
caggggttcccaaat

SEQ ID NO: 1262701 - DNA, 15 bp, Homo sapiens
acaggggttcccaaa

SEQ ID NO: 1262702 - DNA, 15 bp, Homo sapiens
aacaggggttcccaa

SEQ ID NO: 1262703 - DNA, 15 bp, Homo sapiens
caacaggggttccca

SEQ ID NO: 1262704 - DNA, 15 bp, Homo sapiens
gcaacaggggttccc

SEQ ID NO: 1262705 - DNA, 15 bp, Homo sapiens
cgcaacaggggttcc

SEQ ID NO: 1262706 - DNA, 15 bp, Homo sapiens
tcgcaacaggggttc

SEQ ID NO: 1262707 - DNA, 15 bp, Homo sapiens
ttcgcaacaggggtt

SEQ ID NO: 1262708 - DNA, 15 bp, Homo sapiens
cttcgcaacaggggt

SEQ ID NO: 1262709 - DNA, 15 bp, Homo sapiens
ccttcgcaacagggg

SEQ ID NO: 1262710 - DNA, 15 bp, Homo sapiens
tccttcgcaacaggg

SEQ ID NO: 1262711 - DNA, 15 bp, Homo sapiens
ttccttcgcaacagg

SEQ ID NO: 1262712 - DNA, 15 bp, Homo sapiens
cttccttcgcaacag

SEQ ID NO: 1262713 - DNA, 15 bp, Homo sapiens
tcttccttcgcaaca

SEQ ID NO: 1262714 - DNA, 15 bp, Homo sapiens
atcttccttcgcaac

SEQ ID NO: 1262715 - DNA, 15 bp, Homo sapiens
gatcttccttcgcaa

SEQ ID NO: 1262716 - DNA, 15 bp, Homo sapiens
ggatcttccttcgca

SEQ ID NO: 1262717 - DNA, 15 bp, Homo sapiens
gggatcttccttcgc

SEQ ID NO: 1262718 - DNA, 15 bp, Homo sapiens
agggatcttccttcg

SEQ ID NO: 1262719 - DNA, 15 bp, Homo sapiens
aagggatcttccttc

SEQ ID NO: 1262720 - DNA, 15 bp, Homo sapiens
taagggatcttcctt

SEQ ID NO: 1262721 - DNA, 15 bp, Homo sapiens
ataagggatcttcct

SEQ ID NO: 1262722 - DNA, 15 bp, Homo sapiens
gataagggatcttcc

SEQ ID NO: 1262723 - DNA, 15 bp, Homo sapiens
agataagggatcttc

SEQ ID NO: 1262724 - DNA, 15 bp, Homo sapiens
gagataagggatctt

SEQ ID NO: 1262725 - DNA, 15 bp, Homo sapiens
agagataagggatct

SEQ ID NO: 1262726 - DNA, 15 bp, Homo sapiens
aagagataagggatc

SEQ ID NO: 1262727 - DNA, 15 bp, Homo sapiens
gaagagataagggat

SEQ ID NO: 1262728 - DNA, 15 bp, Homo sapiens
tgaagagataaggga

SEQ ID NO: 1262729 - DNA, 15 bp, Homo sapiens
atgaagagataaggg

SEQ ID NO: 1262730 - DNA, 15 bp, Homo sapiens
gatgaagagataagg

SEQ ID NO: 1262731 - DNA, 15 bp, Homo sapiens
agatgaagagataag

SEQ ID NO: 1262732 - DNA, 15 bp, Homo sapiens
cagatgaagagataa

SEQ ID NO: 1262733 - DNA, 15 bp, Homo sapiens
acagatgaagagata

SEQ ID NO: 1262734 - DNA, 15 bp, Homo sapiens
gacagatgaagagat

SEQ ID NO: 1262735 - DNA, 15 bp, Homo sapiens
tgacagatgaagaga

SEQ ID NO: 1262736 - DNA, 15 bp, Homo sapiens
gtgacagatgaagag

SEQ ID NO: 1262737 - DNA, 15 bp, Homo sapiens
agtgacagatgaaga

SEQ ID NO: 1262738 - DNA, 15 bp, Homo sapiens
tagtgacagatgaag

SEQ ID NO: 1262739 - DNA, 15 bp, Homo sapiens
ttagtgacagatgaa

SEQ ID NO: 1262740 - DNA, 15 bp, Homo sapiens
attagtgacagatga

SEQ ID NO: 1262741 - DNA, 15 bp, Homo sapiens
cattagtgacagatg

SEQ ID NO: 1262742 - DNA, 15 bp, Homo sapiens
tcattagtgacagat

SEQ ID NO: 1262743 - DNA, 15 bp, Homo sapiens
atcattagtgacaga

SEQ ID NO: 1262744 - DNA, 15 bp, Homo sapiens
catcattagtgacag

SEQ ID NO: 1262745 - DNA, 15 bp, Homo sapiens
ccatcattagtgaca

SEQ ID NO: 1262746 - DNA, 15 bp, Homo sapiens
accatcattagtgac

SEQ ID NO: 1262747 - DNA, 15 bp, Homo sapiens
caccatcattagtga

SEQ ID NO: 1262748 - DNA, 15 bp, Homo sapiens
ccaccatcattagtg

SEQ ID NO: 1262749 - DNA, 15 bp, Homo sapiens
gccaccatcattagt

SEQ ID NO: 1262750 - DNA, 15 bp, Homo sapiens
agccaccatcattag

SEQ ID NO: 1262751 - DNA, 15 bp, Homo sapiens
aagccaccatcatta

SEQ ID NO: 1262752 - DNA, 15 bp, Homo sapiens
caagccaccatcatt

SEQ ID NO: 1262753 - DNA, 15 bp, Homo sapiens
gcaagccaccatcat

SEQ ID NO: 1262754 - DNA, 15 bp, Homo sapiens
cgcaagccaccatca

SEQ ID NO: 1262755 - DNA, 15 bp, Homo sapiens
gcgcaagccaccatc

SEQ ID NO: 1262756 - DNA, 15 bp, Homo sapiens
tgcgcaagccaccat

SEQ ID NO: 1262757 - DNA, 15 bp, Homo sapiens
gtgcgcaagccacca

SEQ ID NO: 1262758 - DNA, 15 bp, Homo sapiens
agtgcgcaagccacc

SEQ ID NO: 1262759 - DNA, 15 bp, Homo sapiens
gagtgcgcaagccac

SEQ ID NO: 1262760 - DNA, 15 bp, Homo sapiens
agagtgcgcaagcca

SEQ ID NO: 1262761 - DNA, 15 bp, Homo sapiens
cagagtgcgcaagcc

SEQ ID NO: 1262762 - DNA, 15 bp, Homo sapiens
tcagagtgcgcaagc

SEQ ID NO: 1262763 - DNA, 15 bp, Homo sapiens
atcagagtgcgcaag

SEQ ID NO: 1262764 - DNA, 15 bp, Homo sapiens
catcagagtgcgcaa

SEQ ID NO: 1262765 - DNA, 15 bp, Homo sapiens
ccatcagagtgcgca

SEQ ID NO: 1262766 - DNA, 15 bp, Homo sapiens
accatcagagtgcgc

SEQ ID NO: 1262767 - DNA, 15 bp, Homo sapiens
taccatcagagtgcg

SEQ ID NO: 1262768 - DNA, 15 bp, Homo sapiens
gtaccatcagagtgc

SEQ ID NO: 1262769 - DNA, 15 bp, Homo sapiens
agtaccatcagagtg

SEQ ID NO: 1262770 - DNA, 15 bp, Homo sapiens
aagtaccatcagagt

SEQ ID NO: 1262771 - DNA, 15 bp, Homo sapiens
taagtaccatcagag

SEQ ID NO: 1262772 - DNA, 15 bp, Homo sapiens
gtaagtaccatcaga

SEQ ID NO: 1262773 - DNA, 15 bp, Homo sapiens
agtaagtaccatcag

SEQ ID NO: 1262774 - DNA, 15 bp, Homo sapiens
aagtaagtaccatca

SEQ ID NO: 1262775 - DNA, 15 bp, Homo sapiens
caagtaagtaccatc

SEQ ID NO: 1262776 - DNA, 15 bp, Homo sapiens
ccaagtaagtaccat

SEQ ID NO: 1262777 - DNA, 15 bp, Homo sapiens
tccaagtaagtacca

SEQ ID NO: 1262778 - DNA, 15 bp, Homo sapiens
atccaagtaagtacc

SEQ ID NO: 1262779 - DNA, 15 bp, Homo sapiens
catccaagtaagtac

SEQ ID NO: 1262780 - DNA, 15 bp, Homo sapiens
ccatccaagtaagta

SEQ ID NO: 1262781 - DNA, 15 bp, Homo sapiens
cccatccaagtaagt

SEQ ID NO: 1262782 - DNA, 15 bp, Homo sapiens
tcccatccaagtaag

SEQ ID NO: 1262783 - DNA, 15 bp, Homo sapiens
atcccatccaagtaa

SEQ ID NO: 1262784 - DNA, 15 bp, Homo sapiens
aatcccatccaagta

SEQ ID NO: 1262785 - DNA, 15 bp, Homo sapiens
taatcccatccaagt

SEQ ID NO: 1262786 - DNA, 15 bp, Homo sapiens
gtaatcccatccaag

SEQ ID NO: 1262787 - DNA, 15 bp, Homo sapiens
tgtaatcccatccaa

SEQ ID NO: 1262788 - DNA, 15 bp, Homo sapiens
ctgtaatcccatcca

SEQ ID NO: 1262789 - DNA, 15 bp, Homo sapiens
tctgtaatcccatcc

SEQ ID NO: 1262790 - DNA, 15 bp, Homo sapiens
atctgtaatcccatc

SEQ ID NO: 1262791 - DNA, 15 bp, Homo sapiens
catctgtaatcccat

SEQ ID NO: 1262792 - DNA, 15 bp, Homo sapiens
ccatctgtaatccca

SEQ ID NO: 1262793 - DNA, 15 bp, Homo sapiens
accatctgtaatccc

SEQ ID NO: 1262794 - DNA, 15 bp, Homo sapiens
aaccatctgtaatcc

SEQ ID NO: 1262795 - DNA, 15 bp, Homo sapiens
gaaccatctgtaatc

SEQ ID NO: 1262796 - DNA, 15 bp, Homo sapiens
ggaaccatctgtaat

SEQ ID NO: 1262797 - DNA, 15 bp, Homo sapiens
tggaaccatctgtaa

SEQ ID NO: 1262798 - DNA, 15 bp, Homo sapiens
atggaaccatctgta

SEQ ID NO: 1262799 - DNA, 15 bp, Homo sapiens
gatggaaccatctgt

SEQ ID NO: 1262800 - DNA, 15 bp, Homo sapiens
tgatggaaccatctg

SEQ ID NO: 1262801 - DNA, 15 bp, Homo sapiens
gtgatggaaccatct

SEQ ID NO: 1262802 - DNA, 15 bp, Homo sapiens
tgtgatggaaccatc

SEQ ID NO: 1262803 - DNA, 15 bp, Homo sapiens
gtgtgatggaaccat

SEQ ID NO: 1262804 - DNA, 15 bp, Homo sapiens
ggtgtgatggaacca

SEQ ID NO: 1262805 - DNA, 15 bp, Homo sapiens
gggtgtgatggaacc

SEQ ID NO: 1262806 - DNA, 15 bp, Homo sapiens
tgggtgtgatggaac

SEQ ID NO: 1262807 - DNA, 15 bp, Homo sapiens
atgggtgtgatggaa

SEQ ID NO: 1262808 - DNA, 15 bp, Homo sapiens
gatgggtgtgatgga

SEQ ID NO: 1262809 - DNA, 15 bp, Homo sapiens
agatgggtgtgatgg

SEQ ID NO: 1262810 - DNA, 15 bp, Homo sapiens
cagatgggtgtgatg

SEQ ID NO: 1262811 - DNA, 15 bp, Homo sapiens
acagatgggtgtgat

SEQ ID NO: 1262812 - DNA, 15 bp, Homo sapiens
tacagatgggtgtga

SEQ ID NO: 1262813 - DNA, 15 bp, Homo sapiens
atacagatgggtgtg

SEQ ID NO: 1262814 - DNA, 15 bp, Homo sapiens
catacagatgggtgt

SEQ ID NO: 1262815 - DNA, 15 bp, Homo sapiens
tcatacagatgggtg

SEQ ID NO: 1262816 - DNA, 15 bp, Homo sapiens
ttcatacagatgggt

SEQ ID NO: 1262817 - DNA, 15 bp, Homo sapiens
tttcatacagatggg

SEQ ID NO: 1262818 - DNA, 15 bp, Homo sapiens
atttcatacagatgg

SEQ ID NO: 1262819 - DNA, 15 bp, Homo sapiens
gatttcatacagatg

SEQ ID NO: 1262820 - DNA, 15 bp, Homo sapiens
agatttcatacagat

SEQ ID NO: 1262821 - DNA, 15 bp, Homo sapiens
gagatttcatacaga

SEQ ID NO: 1262822 - DNA, 15 bp, Homo sapiens
cgagatttcatacag

SEQ ID NO: 1262823 - DNA, 15 bp, Homo sapiens
acgagatttcataca

SEQ ID NO: 1262824 - DNA, 15 bp, Homo sapiens
cacgagatttcatac

SEQ ID NO: 1262825 - DNA, 15 bp, Homo sapiens
ccacgagatttcata

SEQ ID NO: 1262826 - DNA, 15 bp, Homo sapiens
accacgagatttcat

SEQ ID NO: 1262827 - DNA, 15 bp, Homo sapiens
taccacgagatttca

SEQ ID NO: 1262828 - DNA, 15 bp, Homo sapiens
ataccacgagatttc

SEQ ID NO: 1262829 - DNA, 15 bp, Homo sapiens
tataccacgagattt

SEQ ID NO: 1262830 - DNA, 15 bp, Homo sapiens
ttataccacgagatt

SEQ ID NO: 1262831 - DNA, 15 bp, Homo sapiens
cttataccacgagat

SEQ ID NO: 1262832 - DNA, 15 bp, Homo sapiens
acttataccacgaga

SEQ ID NO: 1262833 - DNA, 15 bp, Homo sapiens
cacttataccacgag

SEQ ID NO: 1262834 - DNA, 15 bp, Homo sapiens
tcacttataccacga

SEQ ID NO: 1262835 - DNA, 15 bp, Homo sapiens
ttcacttataccacg

SEQ ID NO: 1262836 - DNA, 15 bp, Homo sapiens
attcacttataccac

SEQ ID NO: 1262837 - DNA, 15 bp, Homo sapiens
cattcacttatacca

SEQ ID NO: 1262838 - DNA, 15 bp, Homo sapiens
acattcacttatacc

SEQ ID NO: 1262839 - DNA, 15 bp, Homo sapiens
tacattcacttatac

SEQ ID NO: 1262840 - DNA, 15 bp, Homo sapiens
ctacattcacttata

SEQ ID NO: 1262841 - DNA, 15 bp, Homo sapiens
cctacattcacttat

SEQ ID NO: 1262842 - DNA, 15 bp, Homo sapiens
tcctacattcactta

SEQ ID NO: 1262843 - DNA, 15 bp, Homo sapiens
atcctacattcactt

SEQ ID NO: 1262844 - DNA, 15 bp, Homo sapiens
catcctacattcact

SEQ ID NO: 1262845 - DNA, 15 bp, Homo sapiens
tcatcctacattcac

SEQ ID NO: 1262846 - DNA, 15 bp, Homo sapiens
atcatcctacattca

SEQ ID NO: 1262847 - DNA, 15 bp, Homo sapiens
tatcatcctacattc

SEQ ID NO: 1262848 - DNA, 15 bp, Homo sapiens
ttatcatcctacatt

SEQ ID NO: 1262849 - DNA, 15 bp, Homo sapiens
cttatcatcctacat

SEQ ID NO: 1262850 - DNA, 15 bp, Homo sapiens
ccttatcatcctaca

SEQ ID NO: 1262851 - DNA, 15 bp, Homo sapiens
cccttatcatcctac

SEQ ID NO: 1262852 - DNA, 15 bp, Homo sapiens
tcccttatcatccta

SEQ ID NO: 1262853 - DNA, 15 bp, Homo sapiens
gtcccttatcatcct

SEQ ID NO: 1262854 - DNA, 15 bp, Homo sapiens
cgtcccttatcatcc

SEQ ID NO: 1262855 - DNA, 15 bp, Homo sapiens
tcgtcccttatcatc

SEQ ID NO: 1262856 - DNA, 15 bp, Homo sapiens
ctcgtcccttatcat

SEQ ID NO: 1262857 - DNA, 15 bp, Homo sapiens
gctcgtcccttatca

SEQ ID NO: 1262858 - DNA, 15 bp, Homo sapiens
ggctcgtcccttatc

SEQ ID NO: 1262859 - DNA, 15 bp, Homo sapiens
aggctcgtcccttat

SEQ ID NO: 1262860 - DNA, 15 bp, Homo sapiens
taggctcgtccctta

SEQ ID NO: 1262861 - DNA, 15 bp, Homo sapiens
ataggctcgtccctt

SEQ ID NO: 1262862 - DNA, 15 bp, Homo sapiens
aataggctcgtccct

SEQ ID NO: 1262863 - DNA, 15 bp, Homo sapiens
taataggctcgtccc

SEQ ID NO: 1262864 - DNA, 15 bp, Homo sapiens
ctaataggctcgtcc

SEQ ID NO: 1262865 - DNA, 15 bp, Homo sapiens
tctaataggctcgtc

SEQ ID NO: 1262866 - DNA, 15 bp, Homo sapiens
ctctaataggctcgt

SEQ ID NO: 1262867 - DNA, 15 bp, Homo sapiens
cctctaataggctcg

SEQ ID NO: 1262868 - DNA, 15 bp, Homo sapiens
gcctctaataggctc

SEQ ID NO: 1262869 - DNA, 15 bp, Homo sapiens
agcctctaataggct

SEQ ID NO: 1262870 - DNA, 15 bp, Homo sapiens
aagcctctaataggc

SEQ ID NO: 1262871 - DNA, 15 bp, Homo sapiens
aaagcctctaatagg

SEQ ID NO: 1262872 - DNA, 15 bp, Homo sapiens
aaaagcctctaatag

SEQ ID NO: 1262873 - DNA, 15 bp, Homo sapiens
caaaagcctctaata

SEQ ID NO: 1262874 - DNA, 15 bp, Homo sapiens
tcaaaagcctctaat

SEQ ID NO: 1262875 - DNA, 15 bp, Homo sapiens
ttcaaaagcctctaa

SEQ ID NO: 1262876 - DNA, 15 bp, Homo sapiens
cttcaaaagcctcta

SEQ ID NO: 1262877 - DNA, 15 bp, Homo sapiens
gcttcaaaagcctct

SEQ ID NO: 1262878 - DNA, 15 bp, Homo sapiens
tgcttcaaaagcctc

SEQ ID NO: 1262879 - DNA, 15 bp, Homo sapiens
ttgcttcaaaagcct

SEQ ID NO: 1262880 - DNA, 15 bp, Homo sapiens
tttgcttcaaaagcc

SEQ ID NO: 1262881 - DNA, 15 bp, Homo sapiens
atttgcttcaaaagc

SEQ ID NO: 1262882 - DNA, 15 bp, Homo sapiens
catttgcttcaaaag

SEQ ID NO: 1262883 - DNA, 15 bp, Homo sapiens
ccatttgcttcaaaa

SEQ ID NO: 1262884 - DNA, 15 bp, Homo sapiens
tccatttgcttcaaa

SEQ ID NO: 1262885 - DNA, 15 bp, Homo sapiens
atccatttgcttcaa

SEQ ID NO: 1262886 - DNA, 15 bp, Homo sapiens
tatccatttgcttca

SEQ ID NO: 1262887 - DNA, 15 bp, Homo sapiens
ctatccatttgcttc

SEQ ID NO: 1262888 - DNA, 15 bp, Homo sapiens
actatccatttgctt

SEQ ID NO: 1262889 - DNA, 15 bp, Homo sapiens
aactatccatttgct

SEQ ID NO: 1262890 - DNA, 15 bp, Homo sapiens
aaactatccatttgc

SEQ ID NO: 1262891 - DNA, 15 bp, Homo sapiens
taaactatccatttg

SEQ ID NO: 1262892 - DNA, 15 bp, Homo sapiens
ttaaactatccattt

SEQ ID NO: 1262893 - DNA, 15 bp, Homo sapiens
attaaactatccatt

SEQ ID NO: 1262894 - DNA, 15 bp, Homo sapiens
gattaaactatccat

SEQ ID NO: 1262895 - DNA, 15 bp, Homo sapiens
tgattaaactatcca

SEQ ID NO: 1262896 - DNA, 15 bp, Homo sapiens
ctgattaaactatcc

SEQ ID NO: 1262897 - DNA, 15 bp, Homo sapiens
tctgattaaactatc

SEQ ID NO: 1262898 - DNA, 15 bp, Homo sapiens
atctgattaaactat

SEQ ID NO: 1262899 - DNA, 15 bp, Homo sapiens
aatctgattaaacta

SEQ ID NO: 1262900 - DNA, 15 bp, Homo sapiens
caatctgattaaact

SEQ ID NO: 1262901 - DNA, 15 bp, Homo sapiens
ccaatctgattaaac

SEQ ID NO: 1262902 - DNA, 15 bp, Homo sapiens
accaatctgattaaa

SEQ ID NO: 1262903 - DNA, 15 bp, Homo sapiens
caccaatctgattaa

SEQ ID NO: 1262904 - DNA, 15 bp, Homo sapiens
acaccaatctgatta

SEQ ID NO: 1262905 - DNA, 15 bp, Homo sapiens
cacaccaatctgatt

SEQ ID NO: 1262906 - DNA, 15 bp, Homo sapiens
acacaccaatctgat

SEQ ID NO: 1262907 - DNA, 15 bp, Homo sapiens
aacacaccaatctga

SEQ ID NO: 1262908 - DNA, 15 bp, Homo sapiens
aaacacaccaatctg

SEQ ID NO: 1262909 - DNA, 15 bp, Homo sapiens
aaaacacaccaatct

SEQ ID NO: 1262910 - DNA, 15 bp, Homo sapiens
aaaaacacaccaatc

SEQ ID NO: 1262911 - DNA, 15 bp, Homo sapiens
aaaaaacacaccaat

SEQ ID NO: 1262912 - DNA, 15 bp, Homo sapiens
aaaaaaacacaccaa

SEQ ID NO: 1262913 - DNA, 15 bp, Homo sapiens
aaaaaaaacacacca

SEQ ID NO: 1262914 - DNA, 15 bp, Homo sapiens
aaaaaaaaacacacc

SEQ ID NO: 1262915 - DNA, 15 bp, Homo sapiens
aaaaaaaaaacacac

SEQ ID NO: 1262916 - DNA, 15 bp, Homo sapiens
gaaaaaaaaaacaca

SEQ ID NO: 1262917 - DNA, 15 bp, Homo sapiens
agaaaaaaaaaacac

SEQ ID NO: 1262918 - DNA, 15 bp, Homo sapiens
cagaaaaaaaaaaca

SEQ ID NO: 1262919 - DNA, 15 bp, Homo sapiens
acagaaaaaaaaaac

SEQ ID NO: 1262920 - DNA, 15 bp, Homo sapiens
tacagaaaaaaaaaa

SEQ ID NO: 1262921 - DNA, 15 bp, Homo sapiens
ctacagaaaaaaaaa

SEQ ID NO: 1262922 - DNA, 15 bp, Homo sapiens
tctacagaaaaaaaa

SEQ ID NO: 1262923 - DNA, 15 bp, Homo sapiens
ttctacagaaaaaaa

SEQ ID NO: 1262924 - DNA, 15 bp, Homo sapiens
gttctacagaaaaaa

SEQ ID NO: 1262925 - DNA, 15 bp, Homo sapiens
agttctacagaaaaa

SEQ ID NO: 1262926 - DNA, 15 bp, Homo sapiens
cagttctacagaaaa

SEQ ID NO: 1262927 - DNA, 15 bp, Homo sapiens
gcagttctacagaaa

SEQ ID NO: 1262928 - DNA, 15 bp, Homo sapiens
agcagttctacagaa

SEQ ID NO: 1262929 - DNA, 15 bp, Homo sapiens
cagcagttctacaga

SEQ ID NO: 1262930 - DNA, 15 bp, Homo sapiens
acagcagttctacag

SEQ ID NO: 1262931 - DNA, 15 bp, Homo sapiens
cacagcagttctaca

SEQ ID NO: 1262932 - DNA, 15 bp, Homo sapiens
tcacagcagttctac

SEQ ID NO: 1262933 - DNA, 15 bp, Homo sapiens
ttcacagcagttcta

SEQ ID NO: 1262934 - DNA, 15 bp, Homo sapiens
gttcacagcagttct

SEQ ID NO: 1262935 - DNA, 15 bp, Homo sapiens
agttcacagcagttc

SEQ ID NO: 1262936 - DNA, 15 bp, Homo sapiens
tagttcacagcagtt

SEQ ID NO: 1262937 - DNA, 15 bp, Homo sapiens
ctagttcacagcagt

SEQ ID NO: 1262938 - DNA, 15 bp, Homo sapiens
tctagttcacagcag

SEQ ID NO: 1262939 - DNA, 15 bp, Homo sapiens
gtctagttcacagca

SEQ ID NO: 1262940 - DNA, 15 bp, Homo sapiens
ggtctagttcacagc

SEQ ID NO: 1262941 - DNA, 15 bp, Homo sapiens
aggtctagttcacag

SEQ ID NO: 1262942 - DNA, 15 bp, Homo sapiens
aaggtctagttcaca

SEQ ID NO: 1262943 - DNA, 15 bp, Homo sapiens
caaggtctagttcac

SEQ ID NO: 1262944 - DNA, 15 bp, Homo sapiens
acaaggtctagttca

SEQ ID NO: 1262945 - DNA, 15 bp, Homo sapiens
aacaaggtctagttc

SEQ ID NO: 1262946 - DNA, 15 bp, Homo sapiens
taacaaggtctagtt

SEQ ID NO: 1262947 - DNA, 15 bp, Homo sapiens
ataacaaggtctagt

SEQ ID NO: 1262948 - DNA, 15 bp, Homo sapiens
gataacaaggtctag

SEQ ID NO: 1262949 - DNA, 15 bp, Homo sapiens
tgataacaaggtcta

SEQ ID NO: 1262950 - DNA, 15 bp, Homo sapiens
gtgataacaaggtct

SEQ ID NO: 1262951 - DNA, 15 bp, Homo sapiens
ggtgataacaaggtc

SEQ ID NO: 1262952 - DNA, 15 bp, Homo sapiens
tggtgataacaaggt

SEQ ID NO: 1262953 - DNA, 15 bp, Homo sapiens
atggtgataacaagg

SEQ ID NO: 1262954 - DNA, 15 bp, Homo sapiens
gatggtgataacaag

SEQ ID NO: 1262955 - DNA, 15 bp, Homo sapiens
agatggtgataacaa

SEQ ID NO: 1262956 - DNA, 15 bp, Homo sapiens
cagatggtgataaca

SEQ ID NO: 1262957 - DNA, 15 bp, Homo sapiens
acagatggtgataac

SEQ ID NO: 1262958 - DNA, 15 bp, Homo sapiens
aacagatggtgataa

SEQ ID NO: 1262959 - DNA, 15 bp, Homo sapiens
aaacagatggtgata

SEQ ID NO: 1262960 - DNA, 15 bp, Homo sapiens
gaaacagatggtgat

SEQ ID NO: 1262961 - DNA, 15 bp, Homo sapiens
cgaaacagatggtga

SEQ ID NO: 1262962 - DNA, 15 bp, Homo sapiens
acgaaacagatggtg

SEQ ID NO: 1262963 - DNA, 15 bp, Homo sapiens
tacgaaacagatggt

SEQ ID NO: 1262964 - DNA, 15 bp, Homo sapiens
ttacgaaacagatgg

SEQ ID NO: 1262965 - DNA, 15 bp, Homo sapiens
tttacgaaacagatg

SEQ ID NO: 1262966 - DNA, 15 bp, Homo sapiens
atttacgaaacagat

SEQ ID NO: 1262967 - DNA, 15 bp, Homo sapiens
aatttacgaaacaga

SEQ ID NO: 1262968 - DNA, 15 bp, Homo sapiens
gaatttacgaaacag

SEQ ID NO: 1262969 - DNA, 15 bp, Homo sapiens
ggaatttacgaaaca

SEQ ID NO: 1262970 - DNA, 15 bp, Homo sapiens
tggaatttacgaaac

SEQ ID NO: 1262971 - DNA, 15 bp, Homo sapiens
atggaatttacgaaa

SEQ ID NO: 1262972 - DNA, 15 bp, Homo sapiens
aatggaatttacgaa

SEQ ID NO: 1262973 - DNA, 15 bp, Homo sapiens
aaatggaatttacga

SEQ ID NO: 1262974 - DNA, 15 bp, Homo sapiens
aaaatggaatttacg

SEQ ID NO: 1262975 - DNA, 15 bp, Homo sapiens
gaaaatggaatttac

SEQ ID NO: 1262976 - DNA, 15 bp, Homo sapiens
cgaaaatggaattta

SEQ ID NO: 1262977 - DNA, 15 bp, Homo sapiens
ccgaaaatggaattt

SEQ ID NO: 1262978 - DNA, 15 bp, Homo sapiens
accgaaaatggaatt

SEQ ID NO: 1262979 - DNA, 15 bp, Homo sapiens
aaccgaaaatggaat

SEQ ID NO: 1262980 - DNA, 15 bp, Homo sapiens
aaaccgaaaatggaa

SEQ ID NO: 1262981 - DNA, 15 bp, Homo sapiens
taaaccgaaaatgga

SEQ ID NO: 1262982 - DNA, 15 bp, Homo sapiens
ttaaaccgaaaatgg

SEQ ID NO: 1262983 - DNA, 15 bp, Homo sapiens
gttaaaccgaaaatg

SEQ ID NO: 1262984 - DNA, 15 bp, Homo sapiens
tgttaaaccgaaaat

SEQ ID NO: 1262985 - DNA, 15 bp, Homo sapiens
ctgttaaaccgaaaa

SEQ ID NO: 1262986 - DNA, 15 bp, Homo sapiens
gctgttaaaccgaaa

SEQ ID NO: 1262987 - DNA, 15 bp, Homo sapiens
agctgttaaaccgaa

SEQ ID NO: 1262988 - DNA, 15 bp, Homo sapiens
cagctgttaaaccga

SEQ ID NO: 1262989 - DNA, 15 bp, Homo sapiens
ccagctgttaaaccg

SEQ ID NO: 1262990 - DNA, 15 bp, Homo sapiens
tccagctgttaaacc

SEQ ID NO: 1262991 - DNA, 15 bp, Homo sapiens
atccagctgttaaac

SEQ ID NO: 1262992 - DNA, 15 bp, Homo sapiens
aatccagctgttaaa

SEQ ID NO: 1262993 - DNA, 15 bp, Homo sapiens
caatccagctgttaa

SEQ ID NO: 1262994 - DNA, 15 bp, Homo sapiens
acaatccagctgtta

SEQ ID NO: 1262995 - DNA, 15 bp, Homo sapiens
cacaatccagctgtt

SEQ ID NO: 1262996 - DNA, 15 bp, Homo sapiens
tcacaatccagctgt

SEQ ID NO: 1262997 - DNA, 15 bp, Homo sapiens
ttcacaatccagctg

SEQ ID NO: 1262998 - DNA, 15 bp, Homo sapiens
tttcacaatccagct

SEQ ID NO: 1262999 - DNA, 15 bp, Homo sapiens
ctttcacaatccagc

SEQ ID NO: 1263000 - DNA, 15 bp, Homo sapiens
tctttcacaatccag

SEQ ID NO: 1263001 - DNA, 15 bp, Homo sapiens
atctttcacaatcca

SEQ ID NO: 1263002 - DNA, 15 bp, Homo sapiens
tatctttcacaatcc

SEQ ID NO: 1263003 - DNA, 15 bp, Homo sapiens
atatctttcacaatc

SEQ ID NO: 1263004 - DNA, 15 bp, Homo sapiens
tatatctttcacaat

SEQ ID NO: 1263005 - DNA, 15 bp, Homo sapiens
gtatatctttcacaa

SEQ ID NO: 1263006 - DNA, 15 bp, Homo sapiens
tgtatatctttcaca

SEQ ID NO: 1263007 - DNA, 15 bp, Homo sapiens
ttgtatatctttcac

SEQ ID NO: 1263008 - DNA, 15 bp, Homo sapiens
tttgtatatctttca

SEQ ID NO: 1263009 - DNA, 15 bp, Homo sapiens
ttttgtatatctttc

SEQ ID NO: 1263010 - DNA, 15 bp, Homo sapiens
attttgtatatcttt

SEQ ID NO: 1263011 - DNA, 15 bp, Homo sapiens
aattttgtatatctt

SEQ ID NO: 1263012 - DNA, 15 bp, Homo sapiens
taattttgtatatct

SEQ ID NO: 1263013 - DNA, 15 bp, Homo sapiens
ataattttgtatatc

SEQ ID NO: 1263014 - DNA, 15 bp, Homo sapiens
gataattttgtatat

SEQ ID NO: 1263015 - DNA, 15 bp, Homo sapiens
ggataattttgtata

SEQ ID NO: 1263016 - DNA, 15 bp, Homo sapiens
tggataattttgtat

SEQ ID NO: 1263017 - DNA, 15 bp, Homo sapiens
ctggataattttgta

SEQ ID NO: 1263018 - DNA, 15 bp, Homo sapiens
actggataattttgt

SEQ ID NO: 1263019 - DNA, 15 bp, Homo sapiens
aactggataattttg

SEQ ID NO: 1263020 - DNA, 15 bp, Homo sapiens
taactggataatttt

SEQ ID NO: 1263021 - DNA, 15 bp, Homo sapiens
ttaactggataattt

SEQ ID NO: 1263022 - DNA, 15 bp, Homo sapiens
tttaactggataatt

SEQ ID NO: 1263023 - DNA, 15 bp, Homo sapiens
ttttaactggataat

SEQ ID NO: 1263024 - DNA, 15 bp, Homo sapiens
tttttaactggataa

SEQ ID NO: 1263025 - DNA, 15 bp, Homo sapiens
ttttttaactggata

SEQ ID NO: 1263026 - DNA, 15 bp, Homo sapiens
gttttttaactggat

SEQ ID NO: 1263027 - DNA, 15 bp, Homo sapiens
agttttttaactgga

SEQ ID NO: 1263028 - DNA, 15 bp, Homo sapiens
tagttttttaactgg

SEQ ID NO: 1263029 - DNA, 15 bp, Homo sapiens
ttagttttttaactg

SEQ ID NO: 1263030 - DNA, 15 bp, Homo sapiens
tttagttttttaact

SEQ ID NO: 1263031 - DNA, 15 bp, Homo sapiens
atttagttttttaac

SEQ ID NO: 1263032 - DNA, 15 bp, Homo sapiens
aatttagttttttaa

SEQ ID NO: 1263033 - DNA, 15 bp, Homo sapiens
aaatttagtttttta

SEQ ID NO: 1263034 - DNA, 15 bp, Homo sapiens
caaatttagtttttt

SEQ ID NO: 1263035 - DNA, 15 bp, Homo sapiens
ccaaatttagttttt

SEQ ID NO: 1263036 - DNA, 15 bp, Homo sapiens
gccaaatttagtttt

SEQ ID NO: 1263037 - DNA, 15 bp, Homo sapiens
tgccaaatttagttt

SEQ ID NO: 1263038 - DNA, 15 bp, Homo sapiens
ttgccaaatttagtt

SEQ ID NO: 1263039 - DNA, 15 bp, Homo sapiens
cttgccaaatttagt

SEQ ID NO: 1263040 - DNA, 15 bp, Homo sapiens
acttgccaaatttag

SEQ ID NO: 1263041 - DNA, 15 bp, Homo sapiens
cacttgccaaattta

SEQ ID NO: 1263042 - DNA, 15 bp, Homo sapiens
acacttgccaaattt

SEQ ID NO: 1263043 - DNA, 15 bp, Homo sapiens
cacacttgccaaatt

SEQ ID NO: 1263044 - DNA, 15 bp, Homo sapiens
acacacttgccaaat

SEQ ID NO: 1263045 - DNA, 15 bp, Homo sapiens
cacacacttgccaaa

SEQ ID NO: 1263046 - DNA, 15 bp, Homo sapiens
acacacacttgccaa

SEQ ID NO: 1263047 - DNA, 15 bp, Homo sapiens
cacacacacttgcca

SEQ ID NO: 1263048 - DNA, 15 bp, Homo sapiens
acacacacacttgcc

SEQ ID NO: 1263049 - DNA, 15 bp, Homo sapiens
cacacacacacttgc

SEQ ID NO: 1263050 - DNA, 15 bp, Homo sapiens
acacacacacacttg

SEQ ID NO: 1263051 - DNA, 15 bp, Homo sapiens
aacacacacacactt

SEQ ID NO: 1263052 - DNA, 15 bp, Homo sapiens
aaacacacacacact

SEQ ID NO: 1263053 - DNA, 15 bp, Homo sapiens
taaaaacacacacac

SEQ ID NO: 1263054 - DNA, 15 bp, Homo sapiens
ttaaaaacacacaca

SEQ ID NO: 1263055 - DNA, 15 bp, Homo sapiens
tttaaaaacacacac

SEQ ID NO: 1263056 - DNA, 15 bp, Homo sapiens
ttttaaaaacacaca

SEQ ID NO: 1263057 - DNA, 15 bp, Homo sapiens
tttttaaaaacacac

SEQ ID NO: 1263058 - DNA, 15 bp, Homo sapiens
atttttaaaaacaca

SEQ ID NO: 1263059 - DNA, 15 bp, Homo sapiens
catttttaaaaacac

SEQ ID NO: 1263060 - DNA, 15 bp, Homo sapiens
tcatttttaaaaaca

SEQ ID NO: 1263061 - DNA, 15 bp, Homo sapiens
gtcatttttaaaaac

SEQ ID NO: 1263062 - DNA, 15 bp, Homo sapiens
agtcatttttaaaaa

SEQ ID NO: 1263063 - DNA, 15 bp, Homo sapiens
gagtcatttttaaaa

SEQ ID NO: 1263064 - DNA, 15 bp, Homo sapiens
ggagtcatttttaaa

SEQ ID NO: 1263065 - DNA, 15 bp, Homo sapiens
aggagtcatttttaa

SEQ ID NO: 1263066 - DNA, 15 bp, Homo sapiens
aaggagtcattttta

SEQ ID NO: 1263067 - DNA, 15 bp, Homo sapiens
caaggagtcattttt

SEQ ID NO: 1263068 - DNA, 15 bp, Homo sapiens
tcaaggagtcatttt

SEQ ID NO: 1263069 - DNA, 15 bp, Homo sapiens
ttcaaggagtcattt

SEQ ID NO: 1263070 - DNA, 15 bp, Homo sapiens
attcaaggagtcatt

SEQ ID NO: 1263071 - DNA, 15 bp, Homo sapiens
tattcaaggagtcat

SEQ ID NO: 1263072 - DNA, 15 bp, Homo sapiens
gtattcaaggagtca

SEQ ID NO: 1263073 - DNA, 15 bp, Homo sapiens
tgtattcaaggagtc

SEQ ID NO: 1263074 - DNA, 15 bp, Homo sapiens
gtgtattcaaggagt

SEQ ID NO: 1263075 - DNA, 15 bp, Homo sapiens
agtgtattcaaggag

SEQ ID NO: 1263076 - DNA, 15 bp, Homo sapiens
cagtgtattcaagga

SEQ ID NO: 1263077 - DNA, 15 bp, Homo sapiens
acagtgtattcaagg

SEQ ID NO: 1263078 - DNA, 15 bp, Homo sapiens
aacagtgtattcaag

SEQ ID NO: 1263079 - DNA, 15 bp, Homo sapiens
aaacagtgtattcaa

SEQ ID NO: 1263080 - DNA, 15 bp, Homo sapiens
aaaacagtgtattca

SEQ ID NO: 1263081 - DNA, 15 bp, Homo sapiens
caaaacagtgtattc

SEQ ID NO: 1263082 - DNA, 15 bp, Homo sapiens
tcaaaacagtgtatt

SEQ ID NO: 1263083 - DNA, 15 bp, Homo sapiens
atcaaaacagtgtat

SEQ ID NO: 1263084 - DNA, 15 bp, Homo sapiens
aatcaaaacagtgta

SEQ ID NO: 1263085 - DNA, 15 bp, Homo sapiens
gaatcaaaacagtgt

SEQ ID NO: 1263086 - DNA, 15 bp, Homo sapiens
ggaatcaaaacagtg

SEQ ID NO: 1263087 - DNA, 15 bp, Homo sapiens
aggaatcaaaacagt

SEQ ID NO: 1263088 - DNA, 15 bp, Homo sapiens
aaggaatcaaaacag

SEQ ID NO: 1263089 - DNA, 15 bp, Homo sapiens
taaggaatcaaaaca

SEQ ID NO: 1263090 - DNA, 15 bp, Homo sapiens
ctaaggaatcaaaac

SEQ ID NO: 1263091 - DNA, 15 bp, Homo sapiens
tctaaggaatcaaaa

SEQ ID NO: 1263092 - DNA, 15 bp, Homo sapiens
gtctaaggaatcaaa

SEQ ID NO: 1263093 - DNA, 15 bp, Homo sapiens
tgtctaaggaatcaa

SEQ ID NO: 1263094 - DNA, 15 bp, Homo sapiens
ctgtctaaggaatca

SEQ ID NO: 1263095 - DNA, 15 bp, Homo sapiens
actgtctaaggaatc

SEQ ID NO: 1263096 - DNA, 15 bp, Homo sapiens
aactgtctaaggaat

SEQ ID NO: 1263097 - DNA, 15 bp, Homo sapiens
aaactgtctaaggaa

SEQ ID NO: 1263098 - DNA, 15 bp, Homo sapiens
gaaactgtctaagga

SEQ ID NO: 1263099 - DNA, 15 bp, Homo sapiens
agaaactgtctaagg

SEQ ID NO: 1263100 - DNA, 15 bp, Homo sapiens
tagaaactgtctaag

SEQ ID NO: 1263101 - DNA, 15 bp, Homo sapiens
ttagaaactgtctaa

SEQ ID NO: 1263102 - DNA, 15 bp, Homo sapiens
cttagaaactgtcta

SEQ ID NO: 1263103 - DNA, 15 bp, Homo sapiens
ccttagaaactgtct

SEQ ID NO: 1263104 - DNA, 15 bp, Homo sapiens
gccttagaaactgtc

SEQ ID NO: 1263105 - DNA, 15 bp, Homo sapiens
agccttagaaactgt

SEQ ID NO: 1263106 - DNA, 15 bp, Homo sapiens
gagccttagaaactg

SEQ ID NO: 1263107 - DNA, 15 bp, Homo sapiens
agagccttagaaact

SEQ ID NO: 1263108 - DNA, 15 bp, Homo sapiens
tagagccttagaaac

SEQ ID NO: 1263109 - DNA, 15 bp, Homo sapiens
ttagagccttagaaa

SEQ ID NO: 1263110 - DNA, 15 bp, Homo sapiens
attagagccttagaa

SEQ ID NO: 1263111 - DNA, 15 bp, Homo sapiens
aattagagccttaga

SEQ ID NO: 1263112 - DNA, 15 bp, Homo sapiens
aaattagagccttag

SEQ ID NO: 1263113 - DNA, 15 bp, Homo sapiens
aaaattagagcctta

SEQ ID NO: 1263114 - DNA, 15 bp, Homo sapiens
caaaattagagcctt

SEQ ID NO: 1263115 - DNA, 15 bp, Homo sapiens
ccaaaattagagcct

SEQ ID NO: 1263116 - DNA, 15 bp, Homo sapiens
accaaaattagagcc

SEQ ID NO: 1263117 - DNA, 15 bp, Homo sapiens
gaccaaaattagagc

SEQ ID NO: 1263118 - DNA, 15 bp, Homo sapiens
agaccaaaattagag

SEQ ID NO: 1263119 - DNA, 15 bp, Homo sapiens
tagaccaaaattaga

SEQ ID NO: 1263120 - DNA, 15 bp, Homo sapiens
gtagaccaaaattag

SEQ ID NO: 1263121 - DNA, 15 bp, Homo sapiens
ggtagaccaaaatta

SEQ ID NO: 1263122 - DNA, 15 bp, Homo sapiens
tggtagaccaaaatt

SEQ ID NO: 1263123 - DNA, 15 bp, Homo sapiens
ctggtagaccaaaat

SEQ ID NO: 1263124 - DNA, 15 bp, Homo sapiens
tctggtagaccaaaa

SEQ ID NO: 1263125 - DNA, 15 bp, Homo sapiens
ttctggtagaccaaa

SEQ ID NO: 1263126 - DNA, 15 bp, Homo sapiens
tttctggtagaccaa

SEQ ID NO: 1263127 - DNA, 15 bp, Homo sapiens
atttctggtagacca

SEQ ID NO: 1263128 - DNA, 15 bp, Homo sapiens
tatttctggtagacc

SEQ ID NO: 1263129 - DNA, 15 bp, Homo sapiens
atatttctggtagac

SEQ ID NO: 1263130 - DNA, 15 bp, Homo sapiens
aatatttctggtaga

SEQ ID NO: 1263131 - DNA, 15 bp, Homo sapiens
gaatatttctggtag

SEQ ID NO: 1263132 - DNA, 15 bp, Homo sapiens
tgaatatttctggta

SEQ ID NO: 1263133 - DNA, 15 bp, Homo sapiens
ctgaatatttctggt

SEQ ID NO: 1263134 - DNA, 15 bp, Homo sapiens
tctgaatatttctgg

SEQ ID NO: 1263135 - DNA, 15 bp, Homo sapiens
ctctgaatatttctg

SEQ ID NO: 1263136 - DNA, 15 bp, Homo sapiens
actctgaatatttct

SEQ ID NO: 1263137 - DNA, 15 bp, Homo sapiens
tactctgaatatttc

SEQ ID NO: 1263138 - DNA, 15 bp, Homo sapiens
ctactctgaatattt

SEQ ID NO: 1263139 - DNA, 15 bp, Homo sapiens
actactctgaatatt

SEQ ID NO: 1263140 - DNA, 15 bp, Homo sapiens
tactactctgaatat

SEQ ID NO: 1263141 - DNA, 15 bp, Homo sapiens
ttactactctgaata

SEQ ID NO: 1263142 - DNA, 15 bp, Homo sapiens
tttactactctgaat

SEQ ID NO: 1263143 - DNA, 15 bp, Homo sapiens
gtttactactctgaa

SEQ ID NO: 1263144 - DNA, 15 bp, Homo sapiens
agtttactactctga

SEQ ID NO: 1263145 - DNA, 15 bp, Homo sapiens
cagtttactactctg

SEQ ID NO: 1263146 - DNA, 15 bp, Homo sapiens
tcagtttactactct

SEQ ID NO: 1263147 - DNA, 15 bp, Homo sapiens
ctcagtttactactc

SEQ ID NO: 1263148 - DNA, 15 bp, Homo sapiens
tctcagtttactact

SEQ ID NO: 1263149 - DNA, 15 bp, Homo sapiens
gtctcagtttactac

SEQ ID NO: 1263150 - DNA, 15 bp, Homo sapiens
ggtctcagtttacta

SEQ ID NO: 1263151 - DNA, 15 bp, Homo sapiens
tggtctcagtttact

SEQ ID NO: 1263152 - DNA, 15 bp, Homo sapiens
ctggtctcagtttac

SEQ ID NO: 1263153 - DNA, 15 bp, Homo sapiens
tctggtctcagttta

SEQ ID NO: 1263154 - DNA, 15 bp, Homo sapiens
ttctggtctcagttt

SEQ ID NO: 1263155 - DNA, 15 bp, Homo sapiens
tttctggtctcagtt

SEQ ID NO: 1263156 - DNA, 15 bp, Homo sapiens
ctttctggtctcagt

SEQ ID NO: 1263157 - DNA, 15 bp, Homo sapiens
cctttctggtctcag

SEQ ID NO: 1263158 - DNA, 15 bp, Homo sapiens
gcctttctggtctca

SEQ ID NO: 1263159 - DNA, 15 bp, Homo sapiens
cgcctttctggtctc

SEQ ID NO: 1263160 - DNA, 15 bp, Homo sapiens
tcgcctttctggtct

SEQ ID NO: 1263161 - DNA, 15 bp, Homo sapiens
ctcgcctttctggtc

SEQ ID NO: 1263162 - DNA, 15 bp, Homo sapiens
actcgcctttctggt

SEQ ID NO: 1263163 - DNA, 15 bp, Homo sapiens
aactcgcctttctgg

SEQ ID NO: 1263164 - DNA, 15 bp, Homo sapiens
gaactcgcctttctg

SEQ ID NO: 1263165 - DNA, 15 bp, Homo sapiens
agaactcgcctttct

SEQ ID NO: 1263166 - DNA, 15 bp, Homo sapiens
aagaactcgcctttc

SEQ ID NO: 1263167 - DNA, 15 bp, Homo sapiens
aaagaactcgccttt

SEQ ID NO: 1263168 - DNA, 15 bp, Homo sapiens
caaagaactcgcctt

SEQ ID NO: 1263169 - DNA, 15 bp, Homo sapiens
ccaaagaactcgcct

SEQ ID NO: 1263170 - DNA, 15 bp, Homo sapiens
gccaaagaactcgcc

SEQ ID NO: 1263171 - DNA, 15 bp, Homo sapiens
agccaaagaactcgc

SEQ ID NO: 1263172 - DNA, 15 bp, Homo sapiens
aagccaaagaactcg

SEQ ID NO: 1263173 - DNA, 15 bp, Homo sapiens
caagccaaagaactc

SEQ ID NO: 1263174 - DNA, 15 bp, Homo sapiens
ccaagccaaagaact

SEQ ID NO: 1263175 - DNA, 15 bp, Homo sapiens
tccaagccaaagaac

SEQ ID NO: 1263176 - DNA, 15 bp, Homo sapiens
atccaagccaaagaa

SEQ ID NO: 1263177 - DNA, 15 bp, Homo sapiens
tatccaagccaaaga

SEQ ID NO: 1263178 - DNA, 15 bp, Homo sapiens
ttatccaagccaaag

SEQ ID NO: 1263179 - DNA, 15 bp, Homo sapiens
gttatccaagccaaa

SEQ ID NO: 1263180 - DNA, 15 bp, Homo sapiens
agttatccaagccaa

SEQ ID NO: 1263181 - DNA, 15 bp, Homo sapiens
aagttatccaagcca

SEQ ID NO: 1263182 - DNA, 15 bp, Homo sapiens
aaagttatccaagcc

SEQ ID NO: 1263183 - DNA, 15 bp, Homo sapiens
caaagttatccaagc

SEQ ID NO: 1263184 - DNA, 15 bp, Homo sapiens
tcaaagttatccaag

SEQ ID NO: 1263185 - DNA, 15 bp, Homo sapiens
ctcaaagttatccaa

SEQ ID NO: 1263186 - DNA, 15 bp, Homo sapiens
tctcaaagttatcca

SEQ ID NO: 1263187 - DNA, 15 bp, Homo sapiens
ctctcaaagttatcc

SEQ ID NO: 1263188 - DNA, 15 bp, Homo sapiens
actctcaaagttatc

SEQ ID NO: 1263189 - DNA, 15 bp, Homo sapiens
aactctcaaagttat

SEQ ID NO: 1263190 - DNA, 15 bp, Homo sapiens
taactctcaaagtta

SEQ ID NO: 1263191 - DNA, 15 bp, Homo sapiens
ttaactctcaaagtt

SEQ ID NO: 1263192 - DNA, 15 bp, Homo sapiens
attaactctcaaagt

SEQ ID NO: 1263193 - DNA, 15 bp, Homo sapiens
tattaactctcaaag

SEQ ID NO: 1263194 - DNA, 15 bp, Homo sapiens
ctattaactctcaaa

SEQ ID NO: 1263195 - DNA, 15 bp, Homo sapiens
actattaactctcaa

SEQ ID NO: 1263196 - DNA, 15 bp, Homo sapiens
tactattaactctca

SEQ ID NO: 1263197 - DNA, 15 bp, Homo sapiens
atactattaactctc

SEQ ID NO: 1263198 - DNA, 15 bp, Homo sapiens
tatactattaactct

SEQ ID NO: 1263199 - DNA, 15 bp, Homo sapiens
gtatactattaactc

SEQ ID NO: 1263200 - DNA, 15 bp, Homo sapiens
tgtatactattaact

SEQ ID NO: 1263201 - DNA, 15 bp, Homo sapiens
atgtatactattaac

SEQ ID NO: 1263202 - DNA, 15 bp, Homo sapiens
catgtatactattaa

SEQ ID NO: 1263203 - DNA, 15 bp, Homo sapiens
tcatgtatactatta

SEQ ID NO: 1263204 - DNA, 15 bp, Homo sapiens
atcatgtatactatt

SEQ ID NO: 1263205 - DNA, 15 bp, Homo sapiens
aatcatgtatactat

SEQ ID NO: 1263206 - DNA, 15 bp, Homo sapiens
caatcatgtatacta

SEQ ID NO: 1263207 - DNA, 15 bp, Homo sapiens
ccaatcatgtatact

SEQ ID NO: 1263208 - DNA, 15 bp, Homo sapiens
gccaatcatgtatac

SEQ ID NO: 1263209 - DNA, 15 bp, Homo sapiens
tgccaatcatgtata

SEQ ID NO: 1263210 - DNA, 15 bp, Homo sapiens
ctgccaatcatgtat

SEQ ID NO: 1263211 - DNA, 15 bp, Homo sapiens
gctgccaatcatgta

SEQ ID NO: 1263212 - DNA, 15 bp, Homo sapiens
ggctgccaatcatgt

SEQ ID NO: 1263213 - DNA, 15 bp, Homo sapiens
aggctgccaatcatg

SEQ ID NO: 1263214 - DNA, 15 bp, Homo sapiens
aaggctgccaatcat

SEQ ID NO: 1263215 - DNA, 15 bp, Homo sapiens
gaaggctgccaatca

SEQ ID NO: 1263216 - DNA, 15 bp, Homo sapiens
tgaaggctgccaatc

SEQ ID NO: 1263217 - DNA, 15 bp, Homo sapiens
ctgaaggctgccaat

SEQ ID NO: 1263218 - DNA, 15 bp, Homo sapiens
actgaaggctgccaa

SEQ ID NO: 1263219 - DNA, 15 bp, Homo sapiens
aactgaaggctgcca

SEQ ID NO: 1263220 - DNA, 15 bp, Homo sapiens
aaactgaaggctgcc

SEQ ID NO: 1263221 - DNA, 15 bp, Homo sapiens
aaaactgaaggctgc

SEQ ID NO: 1263222 - DNA, 15 bp, Homo sapiens
taaaactgaaggctg

SEQ ID NO: 1263223 - DNA, 15 bp, Homo sapiens
ataaaactgaaggct

SEQ ID NO: 1263224 - DNA, 15 bp, Homo sapiens
gataaaactgaaggc

SEQ ID NO: 1263225 - DNA, 15 bp, Homo sapiens
ggataaaactgaagg

SEQ ID NO: 1263226 - DNA, 15 bp, Homo sapiens
tggataaaactgaag

SEQ ID NO: 1263227 - DNA, 15 bp, Homo sapiens
ctggataaaactgaa

SEQ ID NO: 1263228 - DNA, 15 bp, Homo sapiens
gctggataaaactga

SEQ ID NO: 1263229 - DNA, 15 bp, Homo sapiens
tgctggataaaactg

SEQ ID NO: 1263230 - DNA, 15 bp, Homo sapiens
ttgctggataaaact

SEQ ID NO: 1263231 - DNA, 15 bp, Homo sapiens
attgctggataaaac

SEQ ID NO: 1263232 - DNA, 15 bp, Homo sapiens
tattgctggataaaa

SEQ ID NO: 1263233 - DNA, 15 bp, Homo sapiens
ttattgctggataaa

SEQ ID NO: 1263234 - DNA, 15 bp, Homo sapiens
tttattgctggataa

SEQ ID NO: 1263235 - DNA, 15 bp, Homo sapiens
atttattgctggata

SEQ ID NO: 1263236 - DNA, 15 bp, Homo sapiens
gatttattgctggat

SEQ ID NO: 1263237 - DNA, 15 bp, Homo sapiens
agatttattgctgga

SEQ ID NO: 1263238 - DNA, 15 bp, Homo sapiens
tagatttattgctgg

SEQ ID NO: 1263239 - DNA, 15 bp, Homo sapiens
ttagatttattgctg

SEQ ID NO: 1263240 - DNA, 15 bp, Homo sapiens
tttagatttattgct

SEQ ID NO: 1263241 - DNA, 15 bp, Homo sapiens
gtttagatttattgc

SEQ ID NO: 1263242 - DNA, 15 bp, Homo sapiens
tgtttagatttattg

SEQ ID NO: 1263243 - DNA, 15 bp, Homo sapiens
ctgtttagatttatt

SEQ ID NO: 1263244 - DNA, 15 bp, Homo sapiens
actgtttagatttat

SEQ ID NO: 1263245 - DNA, 15 bp, Homo sapiens
aactgtttagattta

SEQ ID NO: 1263246 - DNA, 15 bp, Homo sapiens
aaactgtttagattt

SEQ ID NO: 1263247 - DNA, 15 bp, Homo sapiens
taaactgtttagatt

SEQ ID NO: 1263248 - DNA, 15 bp, Homo sapiens
ttaaactgtttagat

SEQ ID NO: 1263249 - DNA, 15 bp, Homo sapiens
tttaaactgtttaga

SEQ ID NO: 1263250 - DNA, 15 bp, Homo sapiens
ttttaaactgtttag

SEQ ID NO: 1263251 - DNA, 15 bp, Homo sapiens
attttaaactgttta

SEQ ID NO: 1263252 - DNA, 15 bp, Homo sapiens
tattttaaactgttt

SEQ ID NO: 1263253 - DNA, 15 bp, Homo sapiens
ttattttaaactgtt

SEQ ID NO: 1263254 - DNA, 15 bp, Homo sapiens
cttattttaaactgt

SEQ ID NO: 1263255 - DNA, 15 bp, Homo sapiens
acttattttaaactg

SEQ ID NO: 1263256 - DNA, 15 bp, Homo sapiens
tacttattttaaact

SEQ ID NO: 1263257 - DNA, 15 bp, Homo sapiens
gtacttattttaaac

SEQ ID NO: 1263258 - DNA, 15 bp, Homo sapiens
agtacttattttaaa

SEQ ID NO: 1263259 - DNA, 15 bp, Homo sapiens
aagtacttattttaa

SEQ ID NO: 1263260 - DNA, 15 bp, Homo sapiens
aaagtacttatttta

SEQ ID NO: 1263261 - DNA, 15 bp, Homo sapiens
gaaagtacttatttt

SEQ ID NO: 1263262 - DNA, 15 bp, Homo sapiens
ggaaagtacttattt

SEQ ID NO: 1263263 - DNA, 15 bp, Homo sapiens
gggaaagtacttatt

SEQ ID NO: 1263264 - DNA, 15 bp, Homo sapiens
ggggaaagtacttat

SEQ ID NO: 1263265 - DNA, 15 bp, Homo sapiens
aggggaaagtactta

SEQ ID NO: 1263266 - DNA, 15 bp, Homo sapiens
aaggggaaagtactt

SEQ ID NO: 1263267 - DNA, 15 bp, Homo sapiens
taaggggaaagtact

SEQ ID NO: 1263268 - DNA, 15 bp, Homo sapiens
gtaaggggaaagtac

SEQ ID NO: 1263269 - DNA, 15 bp, Homo sapiens
ggtaaggggaaagta

SEQ ID NO: 1263270 - DNA, 15 bp, Homo sapiens
aggtaaggggaaagt

SEQ ID NO: 1263271 - DNA, 15 bp, Homo sapiens
gaggtaaggggaaag

SEQ ID NO: 1263272 - DNA, 15 bp, Homo sapiens
ctgaggtaaggggaa

SEQ ID NO: 1263273 - DNA, 15 bp, Homo sapiens
actgaggtaagggga

SEQ ID NO: 1263274 - DNA, 15 bp, Homo sapiens
tactgaggtaagggg

SEQ ID NO: 1263275 - DNA, 15 bp, Homo sapiens
gtactgaggtaaggg

SEQ ID NO: 1263276 - DNA, 15 bp, Homo sapiens
tgtactgaggtaagg

SEQ ID NO: 1263277 - DNA, 15 bp, Homo sapiens
ctgtactgaggtaag

SEQ ID NO: 1263278 - DNA, 15 bp, Homo sapiens
tctgtactgaggtaa

SEQ ID NO: 1263279 - DNA, 15 bp, Homo sapiens
ctctgtactgaggta

SEQ ID NO: 1263280 - DNA, 15 bp, Homo sapiens
tctctgtactgaggt

SEQ ID NO: 1263281 - DNA, 15 bp, Homo sapiens
ctctctgtactgagg

SEQ ID NO: 1263282 - DNA, 15 bp, Homo sapiens
cctctctgtactgag

SEQ ID NO: 1263283 - DNA, 15 bp, Homo sapiens
gcctctctgtactga

SEQ ID NO: 1263284 - DNA, 15 bp, Homo sapiens
ggcctctctgtactg

SEQ ID NO: 1263285 - DNA, 15 bp, Homo sapiens
gggcctctctgtact

SEQ ID NO: 1263286 - DNA, 15 bp, Homo sapiens
agggcctctctgtac

SEQ ID NO: 1263287 - DNA, 15 bp, Homo sapiens
cagggcctctctgta

SEQ ID NO: 1263288 - DNA, 15 bp, Homo sapiens
ccagggcctctctgt

SEQ ID NO: 1263289 - DNA, 15 bp, Homo sapiens
gccagggcctctctg

SEQ ID NO: 1263290 - DNA, 15 bp, Homo sapiens
ggccagggcctctct

SEQ ID NO: 1263291 - DNA, 15 bp, Homo sapiens
tggccagggcctctc

SEQ ID NO: 1263292 - DNA, 15 bp, Homo sapiens
gtggccagggcctct

SEQ ID NO: 1263293 - DNA, 15 bp, Homo sapiens
agtggccagggcctc

SEQ ID NO: 1263294 - DNA, 15 bp, Homo sapiens
cagtggccagggcct

SEQ ID NO: 1263295 - DNA, 15 bp, Homo sapiens
gcagtggccagggcc

SEQ ID NO: 1263296 - DNA, 15 bp, Homo sapiens
ggcagtggccagggc

SEQ ID NO: 1263297 - DNA, 15 bp, Homo sapiens
tggcagtggccaggg

SEQ ID NO: 1263298 - DNA, 15 bp, Homo sapiens
atggcagtggccagg

SEQ ID NO: 1263299 - DNA, 15 bp, Homo sapiens
catggcagtggccag

SEQ ID NO: 1263300 - DNA, 15 bp, Homo sapiens
gcatggcagtggcca

SEQ ID NO: 1263301 - DNA, 15 bp, Homo sapiens
tgcatggcagtggcc

SEQ ID NO: 1263302 - DNA, 15 bp, Homo sapiens
gtgcatggcagtggc

SEQ ID NO: 1263303 - DNA, 15 bp, Homo sapiens
tgtgcatggcagtgg

SEQ ID NO: 1263304 - DNA, 15 bp, Homo sapiens
atgtgcatggcagtg

SEQ ID NO: 1263305 - DNA, 15 bp, Homo sapiens
gatgtgcatggcagt

SEQ ID NO: 1263306 - DNA, 15 bp, Homo sapiens
agatgtgcatggcag

SEQ ID NO: 1263307 - DNA, 15 bp, Homo sapiens
gagatgtgcatggca

SEQ ID NO: 1263308 - DNA, 15 bp, Homo sapiens
tgagatgtgcatggc

SEQ ID NO: 1263309 - DNA, 15 bp, Homo sapiens
ctgagatgtgcatgg

SEQ ID NO: 1263310 - DNA, 15 bp, Homo sapiens
tctgagatgtgcatg

SEQ ID NO: 1263311 - DNA, 15 bp, Homo sapiens
ttctgagatgtgcat

SEQ ID NO: 1263312 - DNA, 15 bp, Homo sapiens
cttctgagatgtgca

SEQ ID NO: 1263313 - DNA, 15 bp, Homo sapiens
gcttctgagatgtgc

SEQ ID NO: 1263314 - DNA, 15 bp, Homo sapiens
agcttctgagatgtg

SEQ ID NO: 1263315 - DNA, 15 bp, Homo sapiens
cagcttctgagatgt

SEQ ID NO: 1263316 - DNA, 15 bp, Homo sapiens
tcagcttctgagatg

SEQ ID NO: 1263317 - DNA, 15 bp, Homo sapiens
ctcagcttctgagat

SEQ ID NO: 1263318 - DNA, 15 bp, Homo sapiens
gctcagcttctgaga

SEQ ID NO: 1263319 - DNA, 15 bp, Homo sapiens
tgctcagcttctgag

SEQ ID NO: 1263320 - DNA, 15 bp, Homo sapiens
ctgctcagcttctga

SEQ ID NO: 1263321 - DNA, 15 bp, Homo sapiens
actgctcagcttctg

SEQ ID NO: 1263322 - DNA, 15 bp, Homo sapiens
cactgctcagcttct

SEQ ID NO: 1263323 - DNA, 15 bp, Homo sapiens
ccactgctcagcttc

SEQ ID NO: 1263324 - DNA, 15 bp, Homo sapiens
cccactgctcagctt

SEQ ID NO: 1263325 - DNA, 15 bp, Homo sapiens
ccccactgctcagct

SEQ ID NO: 1263326 - DNA, 15 bp, Homo sapiens
gccccactgctcagc

SEQ ID NO: 1263327 - DNA, 15 bp, Homo sapiens
tgccccactgctcag

SEQ ID NO: 1263328 - DNA, 15 bp, Homo sapiens
ctgccccactgctca

SEQ ID NO: 1263329 - DNA, 15 bp, Homo sapiens
tctgccccactgctc

SEQ ID NO: 1263330 - DNA, 15 bp, Homo sapiens
ttctgccccactgct

SEQ ID NO: 1263331 - DNA, 15 bp, Homo sapiens
cttctgccccactgc

SEQ ID NO: 1263332 - DNA, 15 bp, Homo sapiens
ccttctgccccactg

SEQ ID NO: 1263333 - DNA, 15 bp, Homo sapiens
tccttctgccccact

SEQ ID NO: 1263334 - DNA, 15 bp, Homo sapiens
atccttctgccccac

SEQ ID NO: 1263335 - DNA, 15 bp, Homo sapiens
tatccttctgcccca

SEQ ID NO: 1263336 - DNA, 15 bp, Homo sapiens
ttatccttctgcccc

SEQ ID NO: 1263337 - DNA, 15 bp, Homo sapiens
gttatccttctgccc

SEQ ID NO: 1263338 - DNA, 15 bp, Homo sapiens
agttatccttctgcc

SEQ ID NO: 1263339 - DNA, 15 bp, Homo sapiens
aagttatccttctgc

SEQ ID NO: 1263340 - DNA, 15 bp, Homo sapiens
caagttatccttctg

SEQ ID NO: 1263341 - DNA, 15 bp, Homo sapiens
acaagttatccttct

SEQ ID NO: 1263342 - DNA, 15 bp, Homo sapiens
tacaagttatccttc

SEQ ID NO: 1263343 - DNA, 15 bp, Homo sapiens
ttacaagttatcctt

SEQ ID NO: 1263344 - DNA, 15 bp, Homo sapiens
attacaagttatcct

SEQ ID NO: 1263345 - DNA, 15 bp, Homo sapiens
aattacaagttatcc

SEQ ID NO: 1263346 - DNA, 15 bp, Homo sapiens
aaattacaagttatc

SEQ ID NO: 1263347 - DNA, 15 bp, Homo sapiens
caaattacaagttat

SEQ ID NO: 1263348 - DNA, 15 bp, Homo sapiens
ccaaattacaagtta

SEQ ID NO: 1263349 - DNA, 15 bp, Homo sapiens
gccaaattacaagtt

SEQ ID NO: 1263350 - DNA, 15 bp, Homo sapiens
tgccaaattacaagt

SEQ ID NO: 1263351 - DNA, 15 bp, Homo sapiens
atgccaaattacaag

SEQ ID NO: 1263352 - DNA, 15 bp, Homo sapiens
gatgccaaattacaa

SEQ ID NO: 1263353 - DNA, 15 bp, Homo sapiens
tgatgccaaattaca

SEQ ID NO: 1263354 - DNA, 15 bp, Homo sapiens
ttgatgccaaattac

SEQ ID NO: 1263355 - DNA, 15 bp, Homo sapiens
attgatgccaaatta

SEQ ID NO: 1263356 - DNA, 15 bp, Homo sapiens
cattgatgccaaatt

SEQ ID NO: 1263357 - DNA, 15 bp, Homo sapiens
acattgatgccaaat

SEQ ID NO: 1263358 - DNA, 15 bp, Homo sapiens
gacattgatgccaaa

SEQ ID NO: 1263359 - DNA, 15 bp, Homo sapiens
ggacattgatgccaa

SEQ ID NO: 1263360 - DNA, 15 bp, Homo sapiens
tggacattgatgcca

SEQ ID NO: 1263361 - DNA, 15 bp, Homo sapiens
ttggacattgatgcc

SEQ ID NO: 1263362 - DNA, 15 bp, Homo sapiens
gttggacattgatgc

SEQ ID NO: 1263363 - DNA, 15 bp, Homo sapiens
tgttggacattgatg

SEQ ID NO: 1263364 - DNA, 15 bp, Homo sapiens
gtgttggacattgat

SEQ ID NO: 1263365 - DNA, 15 bp, Homo sapiens
ggtgttggacattga

SEQ ID NO: 1263366 - DNA, 15 bp, Homo sapiens
gggtgttggacattg

SEQ ID NO: 1263367 - DNA, 15 bp, Homo sapiens
agggtgttggacatt

SEQ ID NO: 1263368 - DNA, 15 bp, Homo sapiens
aagggtgttggacat

SEQ ID NO: 1263369 - DNA, 15 bp, Homo sapiens
caagggtgttggaca

SEQ ID NO: 1263370 - DNA, 15 bp, Homo sapiens
tcaagggtgttggac

SEQ ID NO: 1263371 - DNA, 15 bp, Homo sapiens
ctcaagggtgttgga

SEQ ID NO: 1263372 - DNA, 15 bp, Homo sapiens
gctcaagggtgttgg

SEQ ID NO: 1263373 - DNA, 15 bp, Homo sapiens
agctcaagggtgttg

SEQ ID NO: 1263374 - DNA, 15 bp, Homo sapiens
gagctcaagggtgtt

SEQ ID NO: 1263375 - DNA, 15 bp, Homo sapiens
agagctcaagggtgt

SEQ ID NO: 1263376 - DNA, 15 bp, Homo sapiens
cagagctcaagggtg

SEQ ID NO: 1263377 - DNA, 15 bp, Homo sapiens
ccagagctcaagggt

SEQ ID NO: 1263378 - DNA, 15 bp, Homo sapiens
tccagagctcaaggg

SEQ ID NO: 1263379 - DNA, 15 bp, Homo sapiens
gtccagagctcaagg

SEQ ID NO: 1263380 - DNA, 15 bp, Homo sapiens
agtccagagctcaag

SEQ ID NO: 1263381 - DNA, 15 bp, Homo sapiens
gagtccagagctcaa

SEQ ID NO: 1263382 - DNA, 15 bp, Homo sapiens
agagtccagagctca

SEQ ID NO: 1263383 - DNA, 15 bp, Homo sapiens
aagagtccagagctc

SEQ ID NO: 1263384 - DNA, 15 bp, Homo sapiens
aaagagtccagagct

SEQ ID NO: 1263385 - DNA, 15 bp, Homo sapiens
aaaagagtccagagc

SEQ ID NO: 1263386 - DNA, 15 bp, Homo sapiens
taaaagagtccagag

SEQ ID NO: 1263387 - DNA, 15 bp, Homo sapiens
ataaaagagtccaga

SEQ ID NO: 1263388 - DNA, 15 bp, Homo sapiens
aataaaagagtccag

SEQ ID NO: 1263389 - DNA, 15 bp, Homo sapiens
gaataaaagagtcca

SEQ ID NO: 1263390 - DNA, 15 bp, Homo sapiens
tgaataaaagagtcc

SEQ ID NO: 1263391 - DNA, 15 bp, Homo sapiens
atgaataaaagagtc

SEQ ID NO: 1263392 - DNA, 15 bp, Homo sapiens
aatgaataaaagagt

SEQ ID NO: 1263393 - DNA, 15 bp, Homo sapiens
gaatgaataaaagag

SEQ ID NO: 1263394 - DNA, 15 bp, Homo sapiens
ggaatgaataaaaga

SEQ ID NO: 1263395 - DNA, 15 bp, Homo sapiens
aggaatgaataaaag

SEQ ID NO: 1263396 - DNA, 15 bp, Homo sapiens
aaggaatgaataaaa

SEQ ID NO: 1263397 - DNA, 15 bp, Homo sapiens
gaaggaatgaataaa

SEQ ID NO: 1263398 - DNA, 15 bp, Homo sapiens
agaaggaatgaataa

SEQ ID NO: 1263399 - DNA, 15 bp, Homo sapiens
tagaaggaatgaata

SEQ ID NO: 1263400 - DNA, 15 bp, Homo sapiens
gtagaaggaatgaat

SEQ ID NO: 1263401 - DNA, 15 bp, Homo sapiens
agtagaaggaatgaa

SEQ ID NO: 1263402 - DNA, 15 bp, Homo sapiens
aagtagaaggaatga

SEQ ID NO: 1263403 - DNA, 15 bp, Homo sapiens
aaagtagaaggaatg

SEQ ID NO: 1263404 - DNA, 15 bp, Homo sapiens
taaagtagaaggaat

SEQ ID NO: 1263405 - DNA, 15 bp, Homo sapiens
gtaaagtagaaggaa

SEQ ID NO: 1263406 - DNA, 15 bp, Homo sapiens
ggtaaagtagaagga

SEQ ID NO: 1263407 - DNA, 15 bp, Homo sapiens
tggtaaagtagaagg

SEQ ID NO: 1263408 - DNA, 15 bp, Homo sapiens
atggtaaagtagaag

SEQ ID NO: 1263409 - DNA, 15 bp, Homo sapiens
aatggtaaagtagaa

SEQ ID NO: 1263410 - DNA, 15 bp, Homo sapiens
gaatggtaaagtaga

SEQ ID NO: 1263411 - DNA, 15 bp, Homo sapiens
agaatggtaaagtag

SEQ ID NO: 1263412 - DNA, 15 bp, Homo sapiens
tagaatggtaaagta

SEQ ID NO: 1263413 - DNA, 15 bp, Homo sapiens
gtagaatggtaaagt

SEQ ID NO: 1263414 - DNA, 15 bp, Homo sapiens
tgtagaatggtaaag

SEQ ID NO: 1263415 - DNA, 15 bp, Homo sapiens
atgtagaatggtaaa

SEQ ID NO: 1263416 - DNA, 15 bp, Homo sapiens
gatgtagaatggtaa

SEQ ID NO: 1263417 - DNA, 15 bp, Homo sapiens
agatgtagaatggta

SEQ ID NO: 1263418 - DNA, 15 bp, Homo sapiens
aagatgtagaatggt

SEQ ID NO: 1263419 - DNA, 15 bp, Homo sapiens
caagatgtagaatgg

SEQ ID NO: 1263420 - DNA, 15 bp, Homo sapiens
tcaagatgtagaatg

SEQ ID NO: 1263421 - DNA, 15 bp, Homo sapiens
ttcaagatgtagaat

SEQ ID NO: 1263422 - DNA, 15 bp, Homo sapiens
gttcaagatgtagaa

SEQ ID NO: 1263423 - DNA, 15 bp, Homo sapiens
ggttcaagatgtaga

SEQ ID NO: 1263424 - DNA, 15 bp, Homo sapiens
tggttcaagatgtag

SEQ ID NO: 1263425 - DNA, 15 bp, Homo sapiens
gtggttcaagatgta

SEQ ID NO: 1263426 - DNA, 15 bp, Homo sapiens
agtggttcaagatgt

SEQ ID NO: 1263427 - DNA, 15 bp, Homo sapiens
cagtggttcaagatg

SEQ ID NO: 1263428 - DNA, 15 bp, Homo sapiens
acagtggttcaagat

SEQ ID NO: 1263429 - DNA, 15 bp, Homo sapiens
cacagtggttcaaga

SEQ ID NO: 1263430 - DNA, 15 bp, Homo sapiens
gcacagtggttcaag

SEQ ID NO: 1263431 - DNA, 15 bp, Homo sapiens
cgcacagtggttcaa

SEQ ID NO: 1263432 - DNA, 15 bp, Homo sapiens
acgcacagtggttca

SEQ ID NO: 1263433 - DNA, 15 bp, Homo sapiens
cacgcacagtggttc

SEQ ID NO: 1263434 - DNA, 15 bp, Homo sapiens
gcacgcacagtggtt

SEQ ID NO: 1263435 - DNA, 15 bp, Homo sapiens
cgcacgcacagtggt

SEQ ID NO: 1263436 - DNA, 15 bp, Homo sapiens
ccgcacgcacagtgg

SEQ ID NO: 1263437 - DNA, 15 bp, Homo sapiens
accgcacgcacagtg

SEQ ID NO: 1263438 - DNA, 15 bp, Homo sapiens
aaccgcacgcacagt

SEQ ID NO: 1263439 - DNA, 15 bp, Homo sapiens
gaaccgcacgcacag

SEQ ID NO: 1263440 - DNA, 15 bp, Homo sapiens
ggaaccgcacgcaca

SEQ ID NO: 1263441 - DNA, 15 bp, Homo sapiens
gggaaccgcacgcac

SEQ ID NO: 1263442 - DNA, 15 bp, Homo sapiens
ggggaaccgcacgca

SEQ ID NO: 1263443 - DNA, 15 bp, Homo sapiens
aggggaaccgcacgc

SEQ ID NO: 1263444 - DNA, 15 bp, Homo sapiens
taggggaaccgcacg

SEQ ID NO: 1263445 - DNA, 15 bp, Homo sapiens
ttaggggaaccgcac

SEQ ID NO: 1263446 - DNA, 15 bp, Homo sapiens
cttaggggaaccgca

SEQ ID NO: 1263447 - DNA, 15 bp, Homo sapiens
tcttaggggaaccgc

SEQ ID NO: 1263448 - DNA, 15 bp, Homo sapiens
ctcttaggggaaccg

SEQ ID NO: 1263449 - DNA, 15 bp, Homo sapiens
cctcttaggggaacc

SEQ ID NO: 1263450 - DNA, 15 bp, Homo sapiens
gcctcttaggggaac

SEQ ID NO: 1263451 - DNA, 15 bp, Homo sapiens
tgcctcttaggggaa

SEQ ID NO: 1263452 - DNA, 15 bp, Homo sapiens
ctgcctcttagggga

SEQ ID NO: 1263453 - DNA, 15 bp, Homo sapiens
actgcctcttagggg

SEQ ID NO: 1263454 - DNA, 15 bp, Homo sapiens
tactgcctcttaggg

SEQ ID NO: 1263455 - DNA, 15 bp, Homo sapiens
ttactgcctcttagg

SEQ ID NO: 1263456 - DNA, 15 bp, Homo sapiens
tttactgcctcttag

SEQ ID NO: 1263457 - DNA, 15 bp, Homo sapiens
ctttactgcctctta

SEQ ID NO: 1263458 - DNA, 15 bp, Homo sapiens
actttactgcctctt

SEQ ID NO: 1263459 - DNA, 15 bp, Homo sapiens
tactttactgcctct

SEQ ID NO: 1263460 - DNA, 15 bp, Homo sapiens
ttactttactgcctc

SEQ ID NO: 1263461 - DNA, 15 bp, Homo sapiens
attactttactgcct

SEQ ID NO: 1263462 - DNA, 15 bp, Homo sapiens
aattactttactgcc

SEQ ID NO: 1263463 - DNA, 15 bp, Homo sapiens
caattactttactgc

SEQ ID NO: 1263464 - DNA, 15 bp, Homo sapiens
gcaattactttactg

SEQ ID NO: 1263465 - DNA, 15 bp, Homo sapiens
tgcaattactttact

SEQ ID NO: 1263466 - DNA, 15 bp, Homo sapiens
atgcaattactttac

SEQ ID NO: 1263467 - DNA, 15 bp, Homo sapiens
gatgcaattacttta

SEQ ID NO: 1263468 - DNA, 15 bp, Homo sapiens
tgatgcaattacttt

SEQ ID NO: 1263469 - DNA, 15 bp, Homo sapiens
ctgatgcaattactt

SEQ ID NO: 1263470 - DNA, 15 bp, Homo sapiens
cctgatgcaattact

SEQ ID NO: 1263471 - DNA, 15 bp, Homo sapiens
ccctgatgcaattac

SEQ ID NO: 1263472 - DNA, 15 bp, Homo sapiens
accctgatgcaatta

SEQ ID NO: 1263473 - DNA, 15 bp, Homo sapiens
caccctgatgcaatt

SEQ ID NO: 1263474 - DNA, 15 bp, Homo sapiens
ccaccctgatgcaat

SEQ ID NO: 1263475 - DNA, 15 bp, Homo sapiens
tccaccctgatgcaa

SEQ ID NO: 1263476 - DNA, 15 bp, Homo sapiens
ctccaccctgatgca

SEQ ID NO: 1263477 - DNA, 15 bp, Homo sapiens
cctccaccctgatgc

SEQ ID NO: 1263478 - DNA, 15 bp, Homo sapiens
ccctccaccctgatg

SEQ ID NO: 1263479 - DNA, 15 bp, Homo sapiens
tccctccaccctgat

SEQ ID NO: 1263480 - DNA, 15 bp, Homo sapiens
atccctccaccctga

SEQ ID NO: 1263481 - DNA, 15 bp, Homo sapiens
aatccctccaccctg

SEQ ID NO: 1263482 - DNA, 15 bp, Homo sapiens
aaatccctccaccct

SEQ ID NO: 1263483 - DNA, 15 bp, Homo sapiens
aaaatccctccaccc

SEQ ID NO: 1263484 - DNA, 15 bp, Homo sapiens
taaaatccctccacc

SEQ ID NO: 1263485 - DNA, 15 bp, Homo sapiens
ataaaatccctccac

SEQ ID NO: 1263486 - DNA, 15 bp, Homo sapiens
cataaaatccctcca

SEQ ID NO: 1263487 - DNA, 15 bp, Homo sapiens
acataaaatccctcc

SEQ ID NO: 1263488 - DNA, 15 bp, Homo sapiens
cacataaaatccctc

SEQ ID NO: 1263489 - DNA, 15 bp, Homo sapiens
gcacataaaatccct

SEQ ID NO: 1263490 - DNA, 15 bp, Homo sapiens
agcacataaaatccc

SEQ ID NO: 1263491 - DNA, 15 bp, Homo sapiens
aagcacataaaatcc

SEQ ID NO: 1263492 - DNA, 15 bp, Homo sapiens
aaagcacataaaatc

SEQ ID NO: 1263493 - DNA, 15 bp, Homo sapiens
gaaagcacataaaat

SEQ ID NO: 1263494 - DNA, 15 bp, Homo sapiens
tgaaagcacataaaa

SEQ ID NO: 1263495 - DNA, 15 bp, Homo sapiens
gtgaaagcacataaa

SEQ ID NO: 1263496 - DNA, 15 bp, Homo sapiens
agtgaaagcacataa

SEQ ID NO: 1263497 - DNA, 15 bp, Homo sapiens
aagtgaaagcacata

SEQ ID NO: 1263498 - DNA, 15 bp, Homo sapiens
aaagtgaaagcacat

SEQ ID NO: 1263499 - DNA, 15 bp, Homo sapiens
gaaagtgaaagcaca

SEQ ID NO: 1263500 - DNA, 15 bp, Homo sapiens
agaaagtgaaagcac

SEQ ID NO: 1263501 - DNA, 15 bp, Homo sapiens
gagaaagtgaaagca

SEQ ID NO: 1263502 - DNA, 15 bp, Homo sapiens
tgagaaagtgaaagc

SEQ ID NO: 1263503 - DNA, 15 bp, Homo sapiens
atgagaaagtgaaag

SEQ ID NO: 1263504 - DNA, 15 bp, Homo sapiens
aatgagaaagtgaaa

SEQ ID NO: 1263505 - DNA, 15 bp, Homo sapiens
aaatgagaaagtgaa

SEQ ID NO: 1263506 - DNA, 15 bp, Homo sapiens
caaatgagaaagtga

SEQ ID NO: 1263507 - DNA, 15 bp, Homo sapiens
tcaaatgagaaagtg

SEQ ID NO: 1263508 - DNA, 15 bp, Homo sapiens
atcaaatgagaaagt

SEQ ID NO: 1263509 - DNA, 15 bp, Homo sapiens
aatcaaatgagaaag

SEQ ID NO: 1263510 - DNA, 15 bp, Homo sapiens
taatcaaatgagaaa

SEQ ID NO: 1263511 - DNA, 15 bp, Homo sapiens
ataatcaaatgagaa

SEQ ID NO: 1263512 - DNA, 15 bp, Homo sapiens
aataatcaaatgaga

SEQ ID NO: 1263513 - DNA, 15 bp, Homo sapiens
aaataatcaaatgag

SEQ ID NO: 1263514 - DNA, 15 bp, Homo sapiens
gaaataatcaaatga

SEQ ID NO: 1263515 - DNA, 15 bp, Homo sapiens
agaaataatcaaatg

SEQ ID NO: 1263516 - DNA, 15 bp, Homo sapiens
tagaaataatcaaat

SEQ ID NO: 1263517 - DNA, 15 bp, Homo sapiens
gtagaaataatcaaa

SEQ ID NO: 1263518 - DNA, 15 bp, Homo sapiens
tgtagaaataatcaa

SEQ ID NO: 1263519 - DNA, 15 bp, Homo sapiens
atgtagaaataatca

SEQ ID NO: 1263520 - DNA, 15 bp, Homo sapiens
gatgtagaaataatc

SEQ ID NO: 1263521 - DNA, 15 bp, Homo sapiens
agatgtagaaataat

SEQ ID NO: 1263522 - DNA, 15 bp, Homo sapiens
aagatgtagaaataa

SEQ ID NO: 1263523 - DNA, 15 bp, Homo sapiens
taagatgtagaaata

SEQ ID NO: 1263524 - DNA, 15 bp, Homo sapiens
gtaagatgtagaaat

SEQ ID NO: 1263525 - DNA, 15 bp, Homo sapiens
ggtaagatgtagaaa

SEQ ID NO: 1263526 - DNA, 15 bp, Homo sapiens
cggtaagatgtagaa

SEQ ID NO: 1263527 - DNA, 15 bp, Homo sapiens
tcggtaagatgtaga

SEQ ID NO: 1263528 - DNA, 15 bp, Homo sapiens
atcggtaagatgtag

SEQ ID NO: 1263529 - DNA, 15 bp, Homo sapiens
tatcggtaagatgta

SEQ ID NO: 1263530 - DNA, 15 bp, Homo sapiens
ttatcggtaagatgt

SEQ ID NO: 1263531 - DNA, 15 bp, Homo sapiens
tttatcggtaagatg

SEQ ID NO: 1263532 - DNA, 15 bp, Homo sapiens
gtttatcggtaagat

SEQ ID NO: 1263533 - DNA, 15 bp, Homo sapiens
agtttatcggtaaga

SEQ ID NO: 1263534 - DNA, 15 bp, Homo sapiens
aagtttatcggtaag

SEQ ID NO: 1263535 - DNA, 15 bp, Homo sapiens
gaagtttatcggtaa

SEQ ID NO: 1263536 - DNA, 15 bp, Homo sapiens
ggaagtttatcggta

SEQ ID NO: 1263537 - DNA, 15 bp, Homo sapiens
tggaagtttatcggt

SEQ ID NO: 1263538 - DNA, 15 bp, Homo sapiens
atggaagtttatcgg

SEQ ID NO: 1263539 - DNA, 15 bp, Homo sapiens
catggaagtttatcg

SEQ ID NO: 1263540 - DNA, 15 bp, Homo sapiens
tcatggaagtttatc

SEQ ID NO: 1263541 - DNA, 15 bp, Homo sapiens
ttcatggaagtttat

SEQ ID NO: 1263542 - DNA, 15 bp, Homo sapiens
attcatggaagttta

SEQ ID NO: 1263543 - DNA, 15 bp, Homo sapiens
tattcatggaagttt

SEQ ID NO: 1263544 - DNA, 15 bp, Homo sapiens
atattcatggaagtt

SEQ ID NO: 1263545 - DNA, 15 bp, Homo sapiens
aatattcatggaagt

SEQ ID NO: 1263546 - DNA, 15 bp, Homo sapiens
taatattcatggaag

SEQ ID NO: 1263547 - DNA, 15 bp, Homo sapiens
gtaatattcatggaa

SEQ ID NO: 1263548 - DNA, 15 bp, Homo sapiens
agtaatattcatgga

SEQ ID NO: 1263549 - DNA, 15 bp, Homo sapiens
cagtaatattcatgg

SEQ ID NO: 1263550 - DNA, 15 bp, Homo sapiens
acagtaatattcatg

SEQ ID NO: 1263551 - DNA, 15 bp, Homo sapiens
aacagtaatattcat

SEQ ID NO: 1263552 - DNA, 15 bp, Homo sapiens
caacagtaatattca

SEQ ID NO: 1263553 - DNA, 15 bp, Homo sapiens
acaacagtaatattc

SEQ ID NO: 1263554 - DNA, 15 bp, Homo sapiens
tacaacagtaatatt

SEQ ID NO: 1263555 - DNA, 15 bp, Homo sapiens
ttacaacagtaatat

SEQ ID NO: 1263556 - DNA, 15 bp, Homo sapiens
attacaacagtaata

SEQ ID NO: 1263557 - DNA, 15 bp, Homo sapiens
cattacaacagtaat

SEQ ID NO: 1263558 - DNA, 15 bp, Homo sapiens
tcattacaacagtaa

SEQ ID NO: 1263559 - DNA, 15 bp, Homo sapiens
ctcattacaacagta

SEQ ID NO: 1263560 - DNA, 15 bp, Homo sapiens
cctcattacaacagt

SEQ ID NO: 1263561 - DNA, 15 bp, Homo sapiens
tcctcattacaacag

SEQ ID NO: 1263562 - DNA, 15 bp, Homo sapiens
ctcctcattacaaca

SEQ ID NO: 1263563 - DNA, 15 bp, Homo sapiens
gctcctcattacaac

SEQ ID NO: 1263564 - DNA, 15 bp, Homo sapiens
tgctcctcattacaa

SEQ ID NO: 1263565 - DNA, 15 bp, Homo sapiens
ttgctcctcattaca

SEQ ID NO: 1263566 - DNA, 15 bp, Homo sapiens
tttgctcctcattac

SEQ ID NO: 1263567 - DNA, 15 bp, Homo sapiens
ttttgctcctcatta

SEQ ID NO: 1263568 - DNA, 15 bp, Homo sapiens
attttgctcctcatt

SEQ ID NO: 1263569 - DNA, 15 bp, Homo sapiens
cattttgctcctcat

SEQ ID NO: 1263570 - DNA, 15 bp, Homo sapiens
acattttgctcctca

SEQ ID NO: 1263571 - DNA, 15 bp, Homo sapiens
aacattttgctcctc

SEQ ID NO: 1263572 - DNA, 15 bp, Homo sapiens
taacattttgctcct

SEQ ID NO: 1263573 - DNA, 15 bp, Homo sapiens
ctaacattttgctcc

SEQ ID NO: 1263574 - DNA, 15 bp, Homo sapiens
actaacattttgctc

SEQ ID NO: 1263575 - DNA, 15 bp, Homo sapiens
tactaacattttgct

SEQ ID NO: 1263576 - DNA, 15 bp, Homo sapiens
ttactaacattttgc

SEQ ID NO: 1263577 - DNA, 15 bp, Homo sapiens
tttactaacattttg

SEQ ID NO: 1263578 - DNA, 15 bp, Homo sapiens
ctttactaacatttt

SEQ ID NO: 1263579 - DNA, 15 bp, Homo sapiens
tctttactaacattt

SEQ ID NO: 1263580 - DNA, 15 bp, Homo sapiens
atctttactaacatt

SEQ ID NO: 1263581 - DNA, 15 bp, Homo sapiens
tatctttactaacat

SEQ ID NO: 1263582 - DNA, 15 bp, Homo sapiens
ttatctttactaaca

SEQ ID NO: 1263583 - DNA, 15 bp, Homo sapiens
gttatctttactaac

SEQ ID NO: 1263584 - DNA, 15 bp, Homo sapiens
agttatctttactaa

SEQ ID NO: 1263585 - DNA, 15 bp, Homo sapiens
aagttatctttacta

SEQ ID NO: 1263586 - DNA, 15 bp, Homo sapiens
aaagttatctttact

SEQ ID NO: 1263587 - DNA, 15 bp, Homo sapiens
taaagttatctttac

SEQ ID NO: 1263588 - DNA, 15 bp, Homo sapiens
ataaagttatcttta

SEQ ID NO: 1263589 - DNA, 15 bp, Homo sapiens
tataaagttatcttt

SEQ ID NO: 1263590 - DNA, 15 bp, Homo sapiens
gtataaagttatctt

SEQ ID NO: 1263591 - DNA, 15 bp, Homo sapiens
cgtataaagttatct

SEQ ID NO: 1263592 - DNA, 15 bp, Homo sapiens
acgtataaagttatc

SEQ ID NO: 1263593 - DNA, 15 bp, Homo sapiens
cacgtataaagttat

SEQ ID NO: 1263594 - DNA, 15 bp, Homo sapiens
tcacgtataaagtta

SEQ ID NO: 1263595 - DNA, 15 bp, Homo sapiens
ttcacgtataaagtt

SEQ ID NO: 1263596 - DNA, 15 bp, Homo sapiens
tttcacgtataaagt

SEQ ID NO: 1263597 - DNA, 15 bp, Homo sapiens
ttttcacgtataaag

SEQ ID NO: 1263598 - DNA, 15 bp, Homo sapiens
gttttcacgtataaa

SEQ ID NO: 1263599 - DNA, 15 bp, Homo sapiens
agttttcacgtataa

SEQ ID NO: 1263600 - DNA, 15 bp, Homo sapiens
aagttttcacgtata

SEQ ID NO: 1263601 - DNA, 15 bp, Homo sapiens
caagttttcacgtat

SEQ ID NO: 1263602 - DNA, 15 bp, Homo sapiens
tcaagttttcacgta

SEQ ID NO: 1263603 - DNA, 15 bp, Homo sapiens
ttcaagttttcacgt

SEQ ID NO: 1263604 - DNA, 15 bp, Homo sapiens
gttcaagttttcacg

SEQ ID NO: 1263605 - DNA, 15 bp, Homo sapiens
agttcaagttttcac

SEQ ID NO: 1263606 - DNA, 15 bp, Homo sapiens
gagttcaagttttca

SEQ ID NO: 1263607 - DNA, 15 bp, Homo sapiens
agagttcaagttttc

SEQ ID NO: 1263608 - DNA, 15 bp, Homo sapiens
aagagttcaagtttt

SEQ ID NO: 1263609 - DNA, 15 bp, Homo sapiens
taagagttcaagttt

SEQ ID NO: 1263610 - DNA, 15 bp, Homo sapiens
gtaagagttcaagtt

SEQ ID NO: 1263611 - DNA, 15 bp, Homo sapiens
ggtaagagttcaagt

SEQ ID NO: 1263612 - DNA, 15 bp, Homo sapiens
tggtaagagttcaag

SEQ ID NO: 1263613 - DNA, 15 bp, Homo sapiens
ttggtaagagttcaa

SEQ ID NO: 1263614 - DNA, 15 bp, Homo sapiens
cttggtaagagttca

SEQ ID NO: 1263615 - DNA, 15 bp, Homo sapiens
tcttggtaagagttc

SEQ ID NO: 1263616 - DNA, 15 bp, Homo sapiens
ttcttggtaagagtt

SEQ ID NO: 1263617 - DNA, 15 bp, Homo sapiens
tttcttggtaagagt

SEQ ID NO: 1263618 - DNA, 15 bp, Homo sapiens
gtttcttggtaagag

SEQ ID NO: 1263619 - DNA, 15 bp, Homo sapiens
cgtttcttggtaaga

SEQ ID NO: 1263620 - DNA, 15 bp, Homo sapiens
acgtttcttggtaag

SEQ ID NO: 1263621 - DNA, 15 bp, Homo sapiens
tacgtttcttggtaa

SEQ ID NO: 1263622 - DNA, 15 bp, Homo sapiens
ctacgtttcttggta

SEQ ID NO: 1263623 - DNA, 15 bp, Homo sapiens
actacgtttcttggt

SEQ ID NO: 1263624 - DNA, 15 bp, Homo sapiens
cactacgtttcttgg

SEQ ID NO: 1263625 - DNA, 15 bp, Homo sapiens
acactacgtttcttg

SEQ ID NO: 1263626 - DNA, 15 bp, Homo sapiens
aacactacgtttctt

SEQ ID NO: 1263627 - DNA, 15 bp, Homo sapiens
aaacactacgtttct

SEQ ID NO: 1263628 - DNA, 15 bp, Homo sapiens
caaacactacgtttc

SEQ ID NO: 1263629 - DNA, 15 bp, Homo sapiens
acaaacactacgttt

SEQ ID NO: 1263630 - DNA, 15 bp, Homo sapiens
cacaaacactacgtt

SEQ ID NO: 1263631 - DNA, 15 bp, Homo sapiens
tcacaaacactacgt

SEQ ID NO: 1263632 - DNA, 15 bp, Homo sapiens
gtcacaaacactacg

SEQ ID NO: 1263633 - DNA, 15 bp, Homo sapiens
tgtcacaaacactac

SEQ ID NO: 1263634 - DNA, 15 bp, Homo sapiens
ttgtcacaaacacta

SEQ ID NO: 1263635 - DNA, 15 bp, Homo sapiens
cttgtcacaaacact

SEQ ID NO: 1263636 - DNA, 15 bp, Homo sapiens
ccttgtcacaaacac

SEQ ID NO: 1263637 - DNA, 15 bp, Homo sapiens
gccttgtcacaaaca

SEQ ID NO: 1263638 - DNA, 15 bp, Homo sapiens
agccttgtcacaaac

SEQ ID NO: 1263639 - DNA, 15 bp, Homo sapiens
cagccttgtcacaaa

SEQ ID NO: 1263640 - DNA, 15 bp, Homo sapiens
ccagccttgtcacaa

SEQ ID NO: 1263641 - DNA, 15 bp, Homo sapiens
gccagccttgtcaca

SEQ ID NO: 1263642 - DNA, 15 bp, Homo sapiens
agccagccttgtcac

SEQ ID NO: 1263643 - DNA, 15 bp, Homo sapiens
cagccagccttgtca

SEQ ID NO: 1263644 - DNA, 15 bp, Homo sapiens
tcagccagccttgtc

SEQ ID NO: 1263645 - DNA, 15 bp, Homo sapiens
ctcagccagccttgt

SEQ ID NO: 1263646 - DNA, 15 bp, Homo sapiens
tctcagccagccttg

SEQ ID NO: 1263647 - DNA, 15 bp, Homo sapiens
ctctcagccagcctt

SEQ ID NO: 1263648 - DNA, 15 bp, Homo sapiens
cctctcagccagcct

SEQ ID NO: 1263649 - DNA, 15 bp, Homo sapiens
tcctctcagccagcc

SEQ ID NO: 1263650 - DNA, 15 bp, Homo sapiens
atcctctcagccagc

SEQ ID NO: 1263651 - DNA, 15 bp, Homo sapiens
catcctctcagccag

SEQ ID NO: 1263652 - DNA, 15 bp, Homo sapiens
tcatcctctcagcca

SEQ ID NO: 1263653 - DNA, 15 bp, Homo sapiens
ctcatcctctcagcc

SEQ ID NO: 1263654 - DNA, 15 bp, Homo sapiens
tctcatcctctcagc

SEQ ID NO: 1263655 - DNA, 15 bp, Homo sapiens
ttctcatcctctcag

SEQ ID NO: 1263656 - DNA, 15 bp, Homo sapiens
attctcatcctctca

SEQ ID NO: 1263657 - DNA, 15 bp, Homo sapiens
tattctcatcctctc

SEQ ID NO: 1263658 - DNA, 15 bp, Homo sapiens
ctattctcatcctct

SEQ ID NO: 1263659 - DNA, 15 bp, Homo sapiens
gctattctcatcctc

SEQ ID NO: 1263660 - DNA, 15 bp, Homo sapiens
agctattctcatcct

SEQ ID NO: 1263661 - DNA, 15 bp, Homo sapiens
gagctattctcatcc

SEQ ID NO: 1263662 - DNA, 15 bp, Homo sapiens
tgagctattctcatc

SEQ ID NO: 1263663 - DNA, 15 bp, Homo sapiens
atgagctattctcat

SEQ ID NO: 1263664 - DNA, 15 bp, Homo sapiens
gatgagctattctca

SEQ ID NO: 1263665 - DNA, 15 bp, Homo sapiens
tgatgagctattctc

SEQ ID NO: 1263666 - DNA, 15 bp, Homo sapiens
ctgatgagctattct

SEQ ID NO: 1263667 - DNA, 15 bp, Homo sapiens
actgatgagctattc

SEQ ID NO: 1263668 - DNA, 15 bp, Homo sapiens
tactgatgagctatt

SEQ ID NO: 1263669 - DNA, 15 bp, Homo sapiens
gtactgatgagctat

SEQ ID NO: 1263670 - DNA, 15 bp, Homo sapiens
agtactgatgagcta

SEQ ID NO: 1263671 - DNA, 15 bp, Homo sapiens
cagtactgatgagct

SEQ ID NO: 1263672 - DNA, 15 bp, Homo sapiens
ccagtactgatgagc

SEQ ID NO: 1263673 - DNA, 15 bp, Homo sapiens
cccagtactgatgag

SEQ ID NO: 1263674 - DNA, 15 bp, Homo sapiens
acccagtactgatga

SEQ ID NO: 1263675 - DNA, 15 bp, Homo sapiens
aacccagtactgatg

SEQ ID NO: 1263676 - DNA, 15 bp, Homo sapiens
caacccagtactgat

SEQ ID NO: 1263677 - DNA, 15 bp, Homo sapiens
ccaacccagtactga

SEQ ID NO: 1263678 - DNA, 15 bp, Homo sapiens
gccaacccagtactg

SEQ ID NO: 1263679 - DNA, 15 bp, Homo sapiens
agccaacccagtact

SEQ ID NO: 1263680 - DNA, 15 bp, Homo sapiens
cagccaacccagtac

SEQ ID NO: 1263681 - DNA, 15 bp, Homo sapiens
tcagccaacccagta

SEQ ID NO: 1263682 - DNA, 15 bp, Homo sapiens
ttcagccaacccagt

SEQ ID NO: 1263683 - DNA, 15 bp, Homo sapiens
cttcagccaacccag

SEQ ID NO: 1263684 - DNA, 15 bp, Homo sapiens
ccttcagccaaccca

SEQ ID NO: 1263685 - DNA, 15 bp, Homo sapiens
tccttcagccaaccc

SEQ ID NO: 1263686 - DNA, 15 bp, Homo sapiens
ttccttcagccaacc

SEQ ID NO: 1263687 - DNA, 15 bp, Homo sapiens
tttccttcagccaac

SEQ ID NO: 1263688 - DNA, 15 bp, Homo sapiens
gtttccttcagccaa

SEQ ID NO: 1263689 - DNA, 15 bp, Homo sapiens
tgtttccttcagcca

SEQ ID NO: 1263690 - DNA, 15 bp, Homo sapiens
atgtttccttcagcc

SEQ ID NO: 1263691 - DNA, 15 bp, Homo sapiens
catgtttccttcagc

SEQ ID NO: 1263692 - DNA, 15 bp, Homo sapiens
gcatgtttccttcag

SEQ ID NO: 1263693 - DNA, 15 bp, Homo sapiens
tgcatgtttccttca

SEQ ID NO: 1263694 - DNA, 15 bp, Homo sapiens
atgcatgtttccttc

SEQ ID NO: 1263695 - DNA, 15 bp, Homo sapiens
catgcatgtttcctt

SEQ ID NO: 1263696 - DNA, 15 bp, Homo sapiens
acatgcatgtttcct

SEQ ID NO: 1263697 - DNA, 15 bp, Homo sapiens
gacatgcatgtttcc

SEQ ID NO: 1263698 - DNA, 15 bp, Homo sapiens
tgacatgcatgtttc

SEQ ID NO: 1263699 - DNA, 15 bp, Homo sapiens
ctgacatgcatgttt

SEQ ID NO: 1263700 - DNA, 15 bp, Homo sapiens
actgacatgcatgtt

SEQ ID NO: 1263701 - DNA, 15 bp, Homo sapiens
tactgacatgcatgt

SEQ ID NO: 1263702 - DNA, 15 bp, Homo sapiens
gtactgacatgcatg

SEQ ID NO: 1263703 - DNA, 15 bp, Homo sapiens
agtactgacatgcat

SEQ ID NO: 1263704 - DNA, 15 bp, Homo sapiens
tagtactgacatgca

SEQ ID NO: 1263705 - DNA, 15 bp, Homo sapiens
atagtactgacatgc

SEQ ID NO: 1263706 - DNA, 15 bp, Homo sapiens
aatagtactgacatg

SEQ ID NO: 1263707 - DNA, 15 bp, Homo sapiens
aaatagtactgacat

SEQ ID NO: 1263708 - DNA, 15 bp, Homo sapiens
aaaatagtactgaca

SEQ ID NO: 1263709 - DNA, 15 bp, Homo sapiens
caaaatagtactgac

SEQ ID NO: 1263710 - DNA, 15 bp, Homo sapiens
tcaaaatagtactga

SEQ ID NO: 1263711 - DNA, 15 bp, Homo sapiens
ctcaaaatagtactg

SEQ ID NO: 1263712 - DNA, 15 bp, Homo sapiens
cctcaaaatagtact

SEQ ID NO: 1263713 - DNA, 15 bp, Homo sapiens
ccctcaaaatagtac

SEQ ID NO: 1263714 - DNA, 15 bp, Homo sapiens
gccctcaaaatagta

SEQ ID NO: 1263715 - DNA, 15 bp, Homo sapiens
tgccctcaaaatagt

SEQ ID NO: 1263716 - DNA, 15 bp, Homo sapiens
ctgccctcaaaatag

SEQ ID NO: 1263717 - DNA, 15 bp, Homo sapiens
gctgccctcaaaata

SEQ ID NO: 1263718 - DNA, 15 bp, Homo sapiens
agctgccctcaaaat

SEQ ID NO: 1263719 - DNA, 15 bp, Homo sapiens
cagctgccctcaaaa

SEQ ID NO: 1263720 - DNA, 15 bp, Homo sapiens
tcagctgccctcaaa

SEQ ID NO: 1263721 - DNA, 15 bp, Homo sapiens
ctcagctgccctcaa

SEQ ID NO: 1263722 - DNA, 15 bp, Homo sapiens
tctcagctgccctca

SEQ ID NO: 1263723 - DNA, 15 bp, Homo sapiens
ttctcagctgccctc

SEQ ID NO: 1263724 - DNA, 15 bp, Homo sapiens
gttctcagctgccct

SEQ ID NO: 1263725 - DNA, 15 bp, Homo sapiens
tgttctcagctgccc

SEQ ID NO: 1263726 - DNA, 15 bp, Homo sapiens
atgttctcagctgcc

SEQ ID NO: 1263727 - DNA, 15 bp, Homo sapiens
gatgttctcagctgc

SEQ ID NO: 1263728 - DNA, 15 bp, Homo sapiens
agatgttctcagctg

SEQ ID NO: 1263729 - DNA, 15 bp, Homo sapiens
tagatgttctcagct

SEQ ID NO: 1263730 - DNA, 15 bp, Homo sapiens
atagatgttctcagc

SEQ ID NO: 1263731 - DNA, 15 bp, Homo sapiens
aatagatgttctcag

SEQ ID NO: 1263732 - DNA, 15 bp, Homo sapiens
aaatagatgttctca

SEQ ID NO: 1263733 - DNA, 15 bp, Homo sapiens
gaaatagatgttctc

SEQ ID NO: 1263734 - DNA, 15 bp, Homo sapiens
tgaaatagatgttct

SEQ ID NO: 1263735 - DNA, 15 bp, Homo sapiens
ttgaaatagatgttc

SEQ ID NO: 1263736 - DNA, 15 bp, Homo sapiens
attgaaatagatgtt

SEQ ID NO: 1263737 - DNA, 15 bp, Homo sapiens
tattgaaatagatgt

SEQ ID NO: 1263738 - DNA, 15 bp, Homo sapiens
ctattgaaatagatg

SEQ ID NO: 1263739 - DNA, 15 bp, Homo sapiens
gctattgaaatagat

SEQ ID NO: 1263740 - DNA, 15 bp, Homo sapiens
agctattgaaataga

SEQ ID NO: 1263741 - DNA, 15 bp, Homo sapiens
aagctattgaaatag

SEQ ID NO: 1263742 - DNA, 15 bp, Homo sapiens
caaagctattgaaat

SEQ ID NO: 1263743 - DNA, 15 bp, Homo sapiens
ccaaagctattgaaa

SEQ ID NO: 1263744 - DNA, 15 bp, Homo sapiens
gccaaagctattgaa

SEQ ID NO: 1263745 - DNA, 15 bp, Homo sapiens
agccaaagctattga

SEQ ID NO: 1263746 - DNA, 15 bp, Homo sapiens
tagccaaagctattg

SEQ ID NO: 1263747 - DNA, 15 bp, Homo sapiens
atagccaaagctatt

SEQ ID NO: 1263748 - DNA, 15 bp, Homo sapiens
tatagccaaagctat

SEQ ID NO: 1263749 - DNA, 15 bp, Homo sapiens
atatagccaaagcta

SEQ ID NO: 1263750 - DNA, 15 bp, Homo sapiens
aatatagccaaagct

SEQ ID NO: 1263751 - DNA, 15 bp, Homo sapiens
aaatatagccaaagc

SEQ ID NO: 1263752 - DNA, 15 bp, Homo sapiens
aaaatatagccaaag

SEQ ID NO: 1263753 - DNA, 15 bp, Homo sapiens
taaaatatagccaaa

SEQ ID NO: 1263754 - DNA, 15 bp, Homo sapiens
ttaaaatatagccaa

SEQ ID NO: 1263755 - DNA, 15 bp, Homo sapiens
attaaaatatagcca

SEQ ID NO: 1263756 - DNA, 15 bp, Homo sapiens
tattaaaatatagcc

SEQ ID NO: 1263757 - DNA, 15 bp, Homo sapiens
ctattaaaatatagc

SEQ ID NO: 1263758 - DNA, 15 bp, Homo sapiens
gctattaaaatatag

SEQ ID NO: 1263759 - DNA, 15 bp, Homo sapiens
agctattaaaatata

SEQ ID NO: 1263760 - DNA, 15 bp, Homo sapiens
tagctattaaaatat

SEQ ID NO: 1263761 - DNA, 15 bp, Homo sapiens
ttagctattaaaata

SEQ ID NO: 1263762 - DNA, 15 bp, Homo sapiens
cttagctattaaaat

SEQ ID NO: 1263763 - DNA, 15 bp, Homo sapiens
tcttagctattaaaa

SEQ ID NO: 1263764 - DNA, 15 bp, Homo sapiens
ctcttagctattaaa

SEQ ID NO: 1263765 - DNA, 15 bp, Homo sapiens
gctcttagctattaa

SEQ ID NO: 1263766 - DNA, 15 bp, Homo sapiens
tgctcttagctatta

SEQ ID NO: 1263767 - DNA, 15 bp, Homo sapiens
ttgctcttagctatt

SEQ ID NO: 1263768 - DNA, 15 bp, Homo sapiens
gttgctcttagctat

SEQ ID NO: 1263769 - DNA, 15 bp, Homo sapiens
tgttgctcttagcta

SEQ ID NO: 1263770 - DNA, 15 bp, Homo sapiens
atgttgctcttagct

SEQ ID NO: 1263771 - DNA, 15 bp, Homo sapiens
tatgttgctcttagc

SEQ ID NO: 1263772 - DNA, 15 bp, Homo sapiens
atatgttgctcttag

SEQ ID NO: 1263773 - DNA, 15 bp, Homo sapiens
catatgttgctctta

SEQ ID NO: 1263774 - DNA, 15 bp, Homo sapiens
tcatatgttgctctt

SEQ ID NO: 1263775 - DNA, 15 bp, Homo sapiens
ttcatatgttgctct

SEQ ID NO: 1263776 - DNA, 15 bp, Homo sapiens
attcatatgttgctc

SEQ ID NO: 1263777 - DNA, 15 bp, Homo sapiens
aattcatatgttgct

SEQ ID NO: 1263778 - DNA, 15 bp, Homo sapiens
aaattcatatgttgc

SEQ ID NO: 1263779 - DNA, 15 bp, Homo sapiens
caaattcatatgttg

SEQ ID NO: 1263780 - DNA, 15 bp, Homo sapiens
acaaattcatatgtt

SEQ ID NO: 1263781 - DNA, 15 bp, Homo sapiens
gacaaattcatatgt

SEQ ID NO: 1263782 - DNA, 15 bp, Homo sapiens
agacaaattcatatg

SEQ ID NO: 1263783 - DNA, 15 bp, Homo sapiens
gagacaaattcatat

SEQ ID NO: 1263784 - DNA, 15 bp, Homo sapiens
agagacaaattcata

SEQ ID NO: 1263785 - DNA, 15 bp, Homo sapiens
cagagacaaattcat

SEQ ID NO: 1263786 - DNA, 15 bp, Homo sapiens
gcagagacaaattca

SEQ ID NO: 1263787 - DNA, 15 bp, Homo sapiens
ggcagagacaaattc

SEQ ID NO: 1263788 - DNA, 15 bp, Homo sapiens
tggcagagacaaatt

SEQ ID NO: 1263789 - DNA, 15 bp, Homo sapiens
ttggcagagacaaat

SEQ ID NO: 1263790 - DNA, 15 bp, Homo sapiens
aggtgccaggagtta

SEQ ID NO: 1263791 - DNA, 15 bp, Homo sapiens
caggtgccaggagtt

SEQ ID NO: 1263792 - DNA, 15 bp, Homo sapiens
gcaggtgccaggagt

SEQ ID NO: 1263793 - DNA, 15 bp, Homo sapiens
tgcaggtgccaggag

SEQ ID NO: 1263794 - DNA, 15 bp, Homo sapiens
atgcaggtgccagga

SEQ ID NO: 1263795 - DNA, 15 bp, Homo sapiens
aatgcaggtgccagg

SEQ ID NO: 1263796 - DNA, 15 bp, Homo sapiens
taatgcaggtgccag

SEQ ID NO: 1263797 - DNA, 15 bp, Homo sapiens
gtaatgcaggtgcca

SEQ ID NO: 1263798 - DNA, 15 bp, Homo sapiens
tgtaatgcaggtgcc

SEQ ID NO: 1263799 - DNA, 15 bp, Homo sapiens
gtgtaatgcaggtgc

SEQ ID NO: 1263800 - DNA, 15 bp, Homo sapiens
tgtgtaatgcaggtg

SEQ ID NO: 1263801 - DNA, 15 bp, Homo sapiens
ctgtgtaatgcaggt

SEQ ID NO: 1263802 - DNA, 15 bp, Homo sapiens
gctgtgtaatgcagg

SEQ ID NO: 1263803 - DNA, 15 bp, Homo sapiens
ggctgtgtaatgcag

SEQ ID NO: 1263804 - DNA, 15 bp, Homo sapiens
gggctgtgtaatgca

SEQ ID NO: 1263805 - DNA, 15 bp, Homo sapiens
agggctgtgtaatgc

SEQ ID NO: 1263806 - DNA, 15 bp, Homo sapiens
tagggctgtgtaatg

SEQ ID NO: 1263807 - DNA, 15 bp, Homo sapiens
ttagggctgtgtaat

SEQ ID NO: 1263808 - DNA, 15 bp, Homo sapiens
attagggctgtgtaa

SEQ ID NO: 1263809 - DNA, 15 bp, Homo sapiens
cattagggctgtgta

SEQ ID NO: 1263810 - DNA, 15 bp, Homo sapiens
gcattagggctgtgt

SEQ ID NO: 1263811 - DNA, 15 bp, Homo sapiens
tgcattagggctgtg

SEQ ID NO: 1263812 - DNA, 15 bp, Homo sapiens
gtgcattagggctgt

SEQ ID NO: 1263813 - DNA, 15 bp, Homo sapiens
ggtgcattagggctg

SEQ ID NO: 1263814 - DNA, 15 bp, Homo sapiens
aggtgcattagggct

SEQ ID NO: 1263815 - DNA, 15 bp, Homo sapiens
taggtgcattagggc

SEQ ID NO: 1263816 - DNA, 15 bp, Homo sapiens
ataggtgcattaggg

SEQ ID NO: 1263817 - DNA, 15 bp, Homo sapiens
gataggtgcattagg

SEQ ID NO: 1263818 - DNA, 15 bp, Homo sapiens
ggataggtgcattag

SEQ ID NO: 1263819 - DNA, 15 bp, Homo sapiens
tggataggtgcatta

SEQ ID NO: 1263820 - DNA, 15 bp, Homo sapiens
gtggataggtgcatt

SEQ ID NO: 1263821 - DNA, 15 bp, Homo sapiens
agtggataggtgcat

SEQ ID NO: 1263822 - DNA, 15 bp, Homo sapiens
aagtggataggtgca

SEQ ID NO: 1263823 - DNA, 15 bp, Homo sapiens
aaagtggataggtgc

SEQ ID NO: 1263824 - DNA, 15 bp, Homo sapiens
aaaagtggataggtg

SEQ ID NO: 1263825 - DNA, 15 bp, Homo sapiens
gaaaagtggataggt

SEQ ID NO: 1263826 - DNA, 15 bp, Homo sapiens
ggaaaagtggatagg

SEQ ID NO: 1263827 - DNA, 15 bp, Homo sapiens
aggaaaagtggatag

SEQ ID NO: 1263828 - DNA, 15 bp, Homo sapiens
gaggaaaagtggata

SEQ ID NO: 1263829 - DNA, 15 bp, Homo sapiens
agaggaaaagtggat

SEQ ID NO: 1263830 - DNA, 15 bp, Homo sapiens
aagaggaaaagtgga

SEQ ID NO: 1263831 - DNA, 15 bp, Homo sapiens
taagaggaaaagtgg

SEQ ID NO: 1263832 - DNA, 15 bp, Homo sapiens
ataagaggaaaagtg

SEQ ID NO: 1263833 - DNA, 15 bp, Homo sapiens
aataagaggaaaagt

SEQ ID NO: 1263834 - DNA, 15 bp, Homo sapiens
aaataagaggaaaag

SEQ ID NO: 1263835 - DNA, 15 bp, Homo sapiens
gaaataagaggaaaa

SEQ ID NO: 1263836 - DNA, 15 bp, Homo sapiens
agaaataagaggaaa

SEQ ID NO: 1263837 - DNA, 15 bp, Homo sapiens
tagaaataagaggaa

SEQ ID NO: 1263838 - DNA, 15 bp, Homo sapiens
gtagaaataagagga

SEQ ID NO: 1263839 - DNA, 15 bp, Homo sapiens
tgtagaaataagagg

SEQ ID NO: 1263840 - DNA, 15 bp, Homo sapiens
atgtagaaataagag

SEQ ID NO: 1263841 - DNA, 15 bp, Homo sapiens
aatgtagaaataaga

SEQ ID NO: 1263842 - DNA, 15 bp, Homo sapiens
gaatgtagaaataag

SEQ ID NO: 1263843 - DNA, 15 bp, Homo sapiens
agaatgtagaaataa

SEQ ID NO: 1263844 - DNA, 15 bp, Homo sapiens
gagaatgtagaaata

SEQ ID NO: 1263845 - DNA, 15 bp, Homo sapiens
ggagaatgtagaaat

SEQ ID NO: 1263846 - DNA, 15 bp, Homo sapiens
aggagaatgtagaaa

SEQ ID NO: 1263847 - DNA, 15 bp, Homo sapiens
caggagaatgtagaa

SEQ ID NO: 1263848 - DNA, 15 bp, Homo sapiens
acaggagaatgtaga

SEQ ID NO: 1263849 - DNA, 15 bp, Homo sapiens
aacaggagaatgtag

SEQ ID NO: 1263850 - DNA, 15 bp, Homo sapiens
aaacaggagaatgta

SEQ ID NO: 1263851 - DNA, 15 bp, Homo sapiens
caaacaggagaatgt

SEQ ID NO: 1263852 - DNA, 15 bp, Homo sapiens
acaaacaggagaatg

SEQ ID NO: 1263853 - DNA, 15 bp, Homo sapiens
aacaaacaggagaat

SEQ ID NO: 1263854 - DNA, 15 bp, Homo sapiens
aaacaaacaggagaa

SEQ ID NO: 1263855 - DNA, 15 bp, Homo sapiens
aaaacaaacaggaga

SEQ ID NO: 1263856 - DNA, 15 bp, Homo sapiens
caaaacaaacaggag

SEQ ID NO: 1263857 - DNA, 15 bp, Homo sapiens
tcaaaacaaacagga

SEQ ID NO: 1263858 - DNA, 15 bp, Homo sapiens
ctcaaaacaaacagg

SEQ ID NO: 1263859 - DNA, 15 bp, Homo sapiens
gctcaaaacaaacag

SEQ ID NO: 1263860 - DNA, 15 bp, Homo sapiens
tgctcaaaacaaaca

SEQ ID NO: 1263861 - DNA, 15 bp, Homo sapiens
ttgctcaaaacaaac

SEQ ID NO: 1263862 - DNA, 15 bp, Homo sapiens
attgctcaaaacaaa

SEQ ID NO: 1263863 - DNA, 15 bp, Homo sapiens
tattgctcaaaacaa

SEQ ID NO: 1263864 - DNA, 15 bp, Homo sapiens
atattgctcaaaaca

SEQ ID NO: 1263865 - DNA, 15 bp, Homo sapiens
catattgctcaaaac

SEQ ID NO: 1263866 - DNA, 15 bp, Homo sapiens
acatattgctcaaaa

SEQ ID NO: 1263867 - DNA, 15 bp, Homo sapiens
gacatattgctcaaa

SEQ ID NO: 1263868 - DNA, 15 bp, Homo sapiens
ggacatattgctcaa

SEQ ID NO: 1263869 - DNA, 15 bp, Homo sapiens
tggacatattgctca

SEQ ID NO: 1263870 - DNA, 15 bp, Homo sapiens
gtggacatattgctc

SEQ ID NO: 1263871 - DNA, 15 bp, Homo sapiens
tgtggacatattgct

SEQ ID NO: 1263872 - DNA, 15 bp, Homo sapiens
ttgtggacatattgc

SEQ ID NO: 1263873 - DNA, 15 bp, Homo sapiens
gttgtggacatattg

SEQ ID NO: 1263874 - DNA, 15 bp, Homo sapiens
agttgtggacatatt

SEQ ID NO: 1263875 - DNA, 15 bp, Homo sapiens
gagttgtggacatat

SEQ ID NO: 1263876 - DNA, 15 bp, Homo sapiens
agagttgtggacata

SEQ ID NO: 1263877 - DNA, 15 bp, Homo sapiens
cagagttgtggacat

SEQ ID NO: 1263878 - DNA, 15 bp, Homo sapiens
tcagagttgtggaca

SEQ ID NO: 1263879 - DNA, 15 bp, Homo sapiens
gtcagagttgtggac

SEQ ID NO: 1263880 - DNA, 15 bp, Homo sapiens
ggtcagagttgtgga

SEQ ID NO: 1263881 - DNA, 15 bp, Homo sapiens
aggtcagagttgtgg

SEQ ID NO: 1263882 - DNA, 15 bp, Homo sapiens
aaggtcagagttgtg

SEQ ID NO: 1263883 - DNA, 15 bp, Homo sapiens
aaaggtcagagttgt

SEQ ID NO: 1263884 - DNA, 15 bp, Homo sapiens
aaaaggtcagagttg

SEQ ID NO: 1263885 - DNA, 15 bp, Homo sapiens
caaaaggtcagagtt

SEQ ID NO: 1263886 - DNA, 15 bp, Homo sapiens
tcaaaaggtcagagt

SEQ ID NO: 1263887 - DNA, 15 bp, Homo sapiens
ctcaaaaggtcagag

SEQ ID NO: 1263888 - DNA, 15 bp, Homo sapiens
tctcaaaaggtcaga

SEQ ID NO: 1263889 - DNA, 15 bp, Homo sapiens
ttctcaaaaggtcag

SEQ ID NO: 1263890 - DNA, 15 bp, Homo sapiens
tttctcaaaaggtca

SEQ ID NO: 1263891 - DNA, 15 bp, Homo sapiens
atttctcaaaaggtc

SEQ ID NO: 1263892 - DNA, 15 bp, Homo sapiens
gatttctcaaaaggt

SEQ ID NO: 1263893 - DNA, 15 bp, Homo sapiens
ggatttctcaaaagg

SEQ ID NO: 1263894 - DNA, 15 bp, Homo sapiens
aggatttctcaaaag

SEQ ID NO: 1263895 - DNA, 15 bp, Homo sapiens
aaggatttctcaaaa

SEQ ID NO: 1263896 - DNA, 15 bp, Homo sapiens
aaaggatttctcaaa

SEQ ID NO: 1263897 - DNA, 15 bp, Homo sapiens
gaaaggatttctcaa

SEQ ID NO: 1263898 - DNA, 15 bp, Homo sapiens
tgaaaggatttctca

SEQ ID NO: 1263899 - DNA, 15 bp, Homo sapiens
ttgaaaggatttctc

SEQ ID NO: 1263900 - DNA, 15 bp, Homo sapiens
attgaaaggatttct

SEQ ID NO: 1263901 - DNA, 15 bp, Homo sapiens
gattgaaaggatttc

SEQ ID NO: 1263902 - DNA, 15 bp, Homo sapiens
agattgaaaggattt

SEQ ID NO: 1263903 - DNA, 15 bp, Homo sapiens
cagattgaaaggatt

SEQ ID NO: 1263904 - DNA, 15 bp, Homo sapiens
ccagattgaaaggat

SEQ ID NO: 1263905 - DNA, 15 bp, Homo sapiens
tccagattgaaagga

SEQ ID NO: 1263906 - DNA, 15 bp, Homo sapiens
ttccagattgaaagg

SEQ ID NO: 1263907 - DNA, 15 bp, Homo sapiens
gttccagattgaaag

SEQ ID NO: 1263908 - DNA, 15 bp, Homo sapiens
agttccagattgaaa

SEQ ID NO: 1263909 - DNA, 15 bp, Homo sapiens
cagttccagattgaa

SEQ ID NO: 1263910 - DNA, 15 bp, Homo sapiens
tcagttccagattga

SEQ ID NO: 1263911 - DNA, 15 bp, Homo sapiens
gtcagttccagattg

SEQ ID NO: 1263912 - DNA, 15 bp, Homo sapiens
agtcagttccagatt

SEQ ID NO: 1263913 - DNA, 15 bp, Homo sapiens
cagtcagttccagat

SEQ ID NO: 1263914 - DNA, 15 bp, Homo sapiens
acagtcagttccaga

SEQ ID NO: 1263915 - DNA, 15 bp, Homo sapiens
cacagtcagttccag

SEQ ID NO: 1263916 - DNA, 15 bp, Homo sapiens
gcacagtcagttcca

SEQ ID NO: 1263917 - DNA, 15 bp, Homo sapiens
agcacagtcagttcc

SEQ ID NO: 1263918 - DNA, 15 bp, Homo sapiens
cagcacagtcagttc

SEQ ID NO: 1263919 - DNA, 15 bp, Homo sapiens
gcagcacagtcagtt

SEQ ID NO: 1263920 - DNA, 15 bp, Homo sapiens
ggcagcacagtcagt

SEQ ID NO: 1263921 - DNA, 15 bp, Homo sapiens
gggcagcacagtcag

SEQ ID NO: 1263922 - DNA, 15 bp, Homo sapiens
tgggcagcacagtca

SEQ ID NO: 1263923 - DNA, 15 bp, Homo sapiens
ctgggcagcacagtc

SEQ ID NO: 1263924 - DNA, 15 bp, Homo sapiens
tctgggcagcacagt

SEQ ID NO: 1263925 - DNA, 15 bp, Homo sapiens
ctctgggcagcacag

SEQ ID NO: 1263926 - DNA, 15 bp, Homo sapiens
tctctgggcagcaca

SEQ ID NO: 1263927 - DNA, 15 bp, Homo sapiens
ttctctgggcagcac

SEQ ID NO: 1263928 - DNA, 15 bp, Homo sapiens
tttctctgggcagca

SEQ ID NO: 1263929 - DNA, 15 bp, Homo sapiens
atttctctgggcagc

SEQ ID NO: 1263930 - DNA, 15 bp, Homo sapiens
catttctctgggcag

SEQ ID NO: 1263931 - DNA, 15 bp, Homo sapiens
acatttctctgggca

SEQ ID NO: 1263932 - DNA, 15 bp, Homo sapiens
cacatttctctgggc

SEQ ID NO: 1263933 - DNA, 15 bp, Homo sapiens
ccacatttctctggg

SEQ ID NO: 1263934 - DNA, 15 bp, Homo sapiens
accacatttctctgg

SEQ ID NO: 1263935 - DNA, 15 bp, Homo sapiens
aaccacatttctctg

SEQ ID NO: 1263936 - DNA, 15 bp, Homo sapiens
aaaccacatttctct

SEQ ID NO: 1263937 - DNA, 15 bp, Homo sapiens
caaaccacatttctc

SEQ ID NO: 1263938 - DNA, 15 bp, Homo sapiens
ccaaaccacatttct

SEQ ID NO: 1263939 - DNA, 15 bp, Homo sapiens
gccaaaccacatttc

SEQ ID NO: 1263940 - DNA, 15 bp, Homo sapiens
agccaaaccacattt

SEQ ID NO: 1263941 - DNA, 15 bp, Homo sapiens
cagccaaaccacatt

SEQ ID NO: 1263942 - DNA, 15 bp, Homo sapiens
gcagccaaaccacat

SEQ ID NO: 1263943 - DNA, 15 bp, Homo sapiens
ggcagccaaaccaca

SEQ ID NO: 1263944 - DNA, 15 bp, Homo sapiens
cggcagccaaaccac

SEQ ID NO: 1263945 - DNA, 15 bp, Homo sapiens
ccggcagccaaacca

SEQ ID NO: 1263946 - DNA, 15 bp, Homo sapiens
accggcagccaaacc

SEQ ID NO: 1263947 - DNA, 15 bp, Homo sapiens
caccggcagccaaac

SEQ ID NO: 1263948 - DNA, 15 bp, Homo sapiens
tcaccggcagccaaa

SEQ ID NO: 1263949 - DNA, 15 bp, Homo sapiens
ctcaccggcagccaa

SEQ ID NO: 1263950 - DNA, 15 bp, Homo sapiens
gctcaccggcagcca

SEQ ID NO: 1263951 - DNA, 15 bp, Homo sapiens
tgctcaccggcagcc

SEQ ID NO: 1263952 - DNA, 15 bp, Homo sapiens
atgctcaccggcagc

SEQ ID NO: 1263953 - DNA, 15 bp, Homo sapiens
aatgctcaccggcag

SEQ ID NO: 1263954 - DNA, 15 bp, Homo sapiens
caatgctcaccggca

SEQ ID NO: 1263955 - DNA, 15 bp, Homo sapiens
ccaatgctcaccggc

SEQ ID NO: 1263956 - DNA, 15 bp, Homo sapiens
cccaatgctcaccgg

SEQ ID NO: 1263957 - DNA, 15 bp, Homo sapiens
tcccaatgctcaccg

SEQ ID NO: 1263958 - DNA, 15 bp, Homo sapiens
ttcccaatgctcacc

SEQ ID NO: 1263959 - DNA, 15 bp, Homo sapiens
cttcccaatgctcac

SEQ ID NO: 1263960 - DNA, 15 bp, Homo sapiens
ccttcccaatgctca

SEQ ID NO: 1263961 - DNA, 15 bp, Homo sapiens
aaccttcccaatgct

SEQ ID NO: 1263962 - DNA, 15 bp, Homo sapiens
caaccttcccaatgc

SEQ ID NO: 1263963 - DNA, 15 bp, Homo sapiens
acaaccttcccaatg

SEQ ID NO: 1263964 - DNA, 15 bp, Homo sapiens
cacaaccttcccaat

SEQ ID NO: 1263965 - DNA, 15 bp, Homo sapiens
acacaaccttcccaa

SEQ ID NO: 1263966 - DNA, 15 bp, Homo sapiens
cacacaaccttccca

SEQ ID NO: 1263967 - DNA, 15 bp, Homo sapiens
ccacacaaccttccc

SEQ ID NO: 1263968 - DNA, 15 bp, Homo sapiens
tccacacaaccttcc

SEQ ID NO: 1263969 - DNA, 15 bp, Homo sapiens
ctccacacaaccttc

SEQ ID NO: 1263970 - DNA, 15 bp, Homo sapiens
cctccacacaacctt

SEQ ID NO: 1263971 - DNA, 15 bp, Homo sapiens
ccctccacacaacct

SEQ ID NO: 1263972 - DNA, 15 bp, Homo sapiens
tccctccacacaacc

SEQ ID NO: 1263973 - DNA, 15 bp, Homo sapiens
ctccctccacacaac

SEQ ID NO: 1263974 - DNA, 15 bp, Homo sapiens
actccctccacacaa

SEQ ID NO: 1263975 - DNA, 15 bp, Homo sapiens
gactccctccacaca

SEQ ID NO: 1263976 - DNA, 15 bp, Homo sapiens
ggactccctccacac

SEQ ID NO: 1263977 - DNA, 15 bp, Homo sapiens
aggactccctccaca

SEQ ID NO: 1263978 - DNA, 15 bp, Homo sapiens
caggactccctccac

SEQ ID NO: 1263979 - DNA, 15 bp, Homo sapiens
acaggactccctcca

SEQ ID NO: 1263980 - DNA, 15 bp, Homo sapiens
cacaggactccctcc

SEQ ID NO: 1263981 - DNA, 15 bp, Homo sapiens
tcacaggactccctc

SEQ ID NO: 1263982 - DNA, 15 bp, Homo sapiens
atcacaggactccct

SEQ ID NO: 1263983 - DNA, 15 bp, Homo sapiens
catcacaggactccc

SEQ ID NO: 1263984 - DNA, 15 bp, Homo sapiens
tcatcacaggactcc

SEQ ID NO: 1263985 - DNA, 15 bp, Homo sapiens
ttcatcacaggactc

SEQ ID NO: 1263986 - DNA, 15 bp, Homo sapiens
tttcatcacaggact

SEQ ID NO: 1263987 - DNA, 15 bp, Homo sapiens
atttcatcacaggac

SEQ ID NO: 1263988 - DNA, 15 bp, Homo sapiens
catttcatcacagga

SEQ ID NO: 1263989 - DNA, 15 bp, Homo sapiens
gcatttcatcacagg

SEQ ID NO: 1263990 - DNA, 15 bp, Homo sapiens
ggcatttcatcacag

SEQ ID NO: 1263991 - DNA, 15 bp, Homo sapiens
aggcatttcatcaca

SEQ ID NO: 1263992 - DNA, 15 bp, Homo sapiens
caggcatttcatcac

SEQ ID NO: 1263993 - DNA, 15 bp, Homo sapiens
ccaggcatttcatca

SEQ ID NO: 1263994 - DNA, 15 bp, Homo sapiens
cccaggcatttcatc

SEQ ID NO: 1263995 - DNA, 15 bp, Homo sapiens
acccaggcatttcat

SEQ ID NO: 1263996 - DNA, 15 bp, Homo sapiens
cacccaggcatttca

SEQ ID NO: 1263997 - DNA, 15 bp, Homo sapiens
acacccaggcatttc

SEQ ID NO: 1263998 - DNA, 15 bp, Homo sapiens
cacacccaggcattt

SEQ ID NO: 1263999 - DNA, 15 bp, Homo sapiens
acacacccaggcatt

SEQ ID NO: 1264000 - DNA, 15 bp, Homo sapiens
cacacacccaggcat

SEQ ID NO: 1264001 - DNA, 15 bp, Homo sapiens
acacacacccaggca

SEQ ID NO: 1264002 - DNA, 15 bp, Homo sapiens
tacacacacccaggc

SEQ ID NO: 1264003 - DNA, 15 bp, Homo sapiens
atacacacacccagg

SEQ ID NO: 1264004 - DNA, 15 bp, Homo sapiens
catacacacacccag

SEQ ID NO: 1264005 - DNA, 15 bp, Homo sapiens
acatacacacaccca

SEQ ID NO: 1264006 - DNA, 15 bp, Homo sapiens
tacatacacacaccc

SEQ ID NO: 1264007 - DNA, 15 bp, Homo sapiens
gtacatacacacacc

SEQ ID NO: 1264008 - DNA, 15 bp, Homo sapiens
tgtacatacacacac

SEQ ID NO: 1264009 - DNA, 15 bp, Homo sapiens
ttgtacatacacaca

SEQ ID NO: 1264010 - DNA, 15 bp, Homo sapiens
gttgtacatacacac

SEQ ID NO: 1264011 - DNA, 15 bp, Homo sapiens
agttgtacatacaca

SEQ ID NO: 1264012 - DNA, 15 bp, Homo sapiens
aagttgtacatacac

SEQ ID NO: 1264013 - DNA, 15 bp, Homo sapiens
gaagttgtacataca

SEQ ID NO: 1264014 - DNA, 15 bp, Homo sapiens
ggaagttgtacatac

SEQ ID NO: 1264015 - DNA, 15 bp, Homo sapiens
aggaagttgtacata

SEQ ID NO: 1264016 - DNA, 15 bp, Homo sapiens
gaggaagttgtacat

SEQ ID NO: 1264017 - DNA, 15 bp, Homo sapiens
agaggaagttgtaca

SEQ ID NO: 1264018 - DNA, 15 bp, Homo sapiens
gagaggaagttgtac

SEQ ID NO: 1264019 - DNA, 15 bp, Homo sapiens
tgagaggaagttgta

SEQ ID NO: 1264020 - DNA, 15 bp, Homo sapiens
ctgagaggaagttgt

SEQ ID NO: 1264021 - DNA, 15 bp, Homo sapiens
cctgagaggaagttg

SEQ ID NO: 1264022 - DNA, 15 bp, Homo sapiens
gcctgagaggaagtt

SEQ ID NO: 1264023 - DNA, 15 bp, Homo sapiens
agcctgagaggaagt

SEQ ID NO: 1264024 - DNA, 15 bp, Homo sapiens
tagcctgagaggaag

SEQ ID NO: 1264025 - DNA, 15 bp, Homo sapiens
atagcctgagaggaa

SEQ ID NO: 1264026 - DNA, 15 bp, Homo sapiens
aatagcctgagagga

SEQ ID NO: 1264027 - DNA, 15 bp, Homo sapiens
caatagcctgagagg

SEQ ID NO: 1264028 - DNA, 15 bp, Homo sapiens
tcaatagcctgagag

SEQ ID NO: 1264029 - DNA, 15 bp, Homo sapiens
atcaatagcctgaga

SEQ ID NO: 1264030 - DNA, 15 bp, Homo sapiens
aatcaatagcctgag

SEQ ID NO: 1264031 - DNA, 15 bp, Homo sapiens
aaatcaatagcctga

SEQ ID NO: 1264032 - DNA, 15 bp, Homo sapiens
aaaatcaatagcctg

SEQ ID NO: 1264033 - DNA, 15 bp, Homo sapiens
gaaaatcaatagcct

SEQ ID NO: 1264034 - DNA, 15 bp, Homo sapiens
ggaaaatcaatagcc

SEQ ID NO: 1264035 - DNA, 15 bp, Homo sapiens
gggaaaatcaatagc

SEQ ID NO: 1264036 - DNA, 15 bp, Homo sapiens
agggaaaatcaatag

SEQ ID NO: 1264037 - DNA, 15 bp, Homo sapiens
cagggaaaatcaata

SEQ ID NO: 1264038 - DNA, 15 bp, Homo sapiens
tcagggaaaatcaat

SEQ ID NO: 1264039 - DNA, 15 bp, Homo sapiens
atcagggaaaatcaa

SEQ ID NO: 1264040 - DNA, 15 bp, Homo sapiens
aatcagggaaaatca

SEQ ID NO: 1264041 - DNA, 15 bp, Homo sapiens
aaatcagggaaaatc

SEQ ID NO: 1264042 - DNA, 15 bp, Homo sapiens
aaaatcagggaaaat

SEQ ID NO: 1264043 - DNA, 15 bp, Homo sapiens
taaaatcagggaaaa

SEQ ID NO: 1264044 - DNA, 15 bp, Homo sapiens
ctaaaatcagggaaa

SEQ ID NO: 1264045 - DNA, 15 bp, Homo sapiens
tctaaaatcagggaa

SEQ ID NO: 1264046 - DNA, 15 bp, Homo sapiens
ttctaaaatcaggga

SEQ ID NO: 1264047 - DNA, 15 bp, Homo sapiens
attctaaaatcaggg

SEQ ID NO: 1264048 - DNA, 15 bp, Homo sapiens
cattctaaaatcagg

SEQ ID NO: 1264049 - DNA, 15 bp, Homo sapiens
gcattctaaaatcag

SEQ ID NO: 1264050 - DNA, 15 bp, Homo sapiens
tgcattctaaaatca

SEQ ID NO: 1264051 - DNA, 15 bp, Homo sapiens
atgcattctaaaatc

SEQ ID NO: 1264052 - DNA, 15 bp, Homo sapiens
aatgcattctaaaat

SEQ ID NO: 1264053 - DNA, 15 bp, Homo sapiens
aaatgcattctaaaa

SEQ ID NO: 1264054 - DNA, 15 bp, Homo sapiens
aaaatgcattctaaa

SEQ ID NO: 1264055 - DNA, 15 bp, Homo sapiens
aaaaatgcattctaa

SEQ ID NO: 1264056 - DNA, 15 bp, Homo sapiens
aaaaaatgcattcta

SEQ ID NO: 1264057 - DNA, 15 bp, Homo sapiens
taaaaaatgcattct

SEQ ID NO: 1264058 - DNA, 15 bp, Homo sapiens
ataaaaaatgcattc

SEQ ID NO: 1264059 - DNA, 15 bp, Homo sapiens
aataaaaaatgcatt

SEQ ID NO: 1264060 - DNA, 15 bp, Homo sapiens
gaataaaaaatgcat

SEQ ID NO: 1264061 - DNA, 15 bp, Homo sapiens
agaataaaaaatgca

SEQ ID NO: 1264062 - DNA, 15 bp, Homo sapiens
aagaataaaaaatgc

SEQ ID NO: 1264063 - DNA, 15 bp, Homo sapiens
gaagaataaaaaatg

SEQ ID NO: 1264064 - DNA, 15 bp, Homo sapiens
ggaagaataaaaaat

SEQ ID NO: 1264065 - DNA, 15 bp, Homo sapiens
aggaagaataaaaaa

SEQ ID NO: 1264066 - DNA, 15 bp, Homo sapiens
gaggaagaataaaaa

SEQ ID NO: 1264067 - DNA, 15 bp, Homo sapiens
ggaggaagaataaaa

SEQ ID NO: 1264068 - DNA, 15 bp, Homo sapiens
aggaggaagaataaa

SEQ ID NO: 1264069 - DNA, 15 bp, Homo sapiens
aaggaggaagaataa

SEQ ID NO: 1264070 - DNA, 15 bp, Homo sapiens
aaaggaggaagaata

SEQ ID NO: 1264071 - DNA, 15 bp, Homo sapiens
aaaaggaggaagaat

SEQ ID NO: 1264072 - DNA, 15 bp, Homo sapiens
gaaaaggaggaagaa

SEQ ID NO: 1264073 - DNA, 15 bp, Homo sapiens
ggaaaaggaggaaga

SEQ ID NO: 1264074 - DNA, 15 bp, Homo sapiens
aggaaaaggaggaag

SEQ ID NO: 1264075 - DNA, 15 bp, Homo sapiens
caggaaaaggaggaa

SEQ ID NO: 1264076 - DNA, 15 bp, Homo sapiens
ccaggaaaaggagga

SEQ ID NO: 1264077 - DNA, 15 bp, Homo sapiens
tccaggaaaaggagg

SEQ ID NO: 1264078 - DNA, 15 bp, Homo sapiens
atccaggaaaaggag

SEQ ID NO: 1264079 - DNA, 15 bp, Homo sapiens
gatccaggaaaagga

SEQ ID NO: 1264080 - DNA, 15 bp, Homo sapiens
ggatccaggaaaagg

SEQ ID NO: 1264081 - DNA, 15 bp, Homo sapiens
aggatccaggaaaag

SEQ ID NO: 1264082 - DNA, 15 bp, Homo sapiens
aaggatccaggaaaa

SEQ ID NO: 1264083 - DNA, 15 bp, Homo sapiens
aaaggatccaggaaa

SEQ ID NO: 1264084 - DNA, 15 bp, Homo sapiens
gaaaggatccaggaa

SEQ ID NO: 1264085 - DNA, 15 bp, Homo sapiens
tgaaaggatccagga

SEQ ID NO: 1264086 - DNA, 15 bp, Homo sapiens
gtgaaaggatccagg

SEQ ID NO: 1264087 - DNA, 15 bp, Homo sapiens
tgtgaaaggatccag

SEQ ID NO: 1264088 - DNA, 15 bp, Homo sapiens
atgtgaaaggatcca

SEQ ID NO: 1264089 - DNA, 15 bp, Homo sapiens
aatgtgaaaggatcc

SEQ ID NO: 1264090 - DNA, 15 bp, Homo sapiens
gaatgtgaaaggatc

SEQ ID NO: 1264091 - DNA, 15 bp, Homo sapiens
tgaatgtgaaaggat

SEQ ID NO: 1264092 - DNA, 15 bp, Homo sapiens
ttgaatgtgaaagga

SEQ ID NO: 1264093 - DNA, 15 bp, Homo sapiens
tttgaatgtgaaagg

SEQ ID NO: 1264094 - DNA, 15 bp, Homo sapiens
ttttgaatgtgaaag

SEQ ID NO: 1264095 - DNA, 15 bp, Homo sapiens
tttttgaatgtgaaa

SEQ ID NO: 1264096 - DNA, 15 bp, Homo sapiens
atttttgaatgtgaa

SEQ ID NO: 1264097 - DNA, 15 bp, Homo sapiens
catttttgaatgtga

SEQ ID NO: 1264098 - DNA, 15 bp, Homo sapiens
acatttttgaatgtg

SEQ ID NO: 1264099 - DNA, 15 bp, Homo sapiens
tacatttttgaatgt

SEQ ID NO: 1264100 - DNA, 15 bp, Homo sapiens
gtacatttttgaatg

SEQ ID NO: 1264101 - DNA, 15 bp, Homo sapiens
agtacatttttgaat

SEQ ID NO: 1264102 - DNA, 15 bp, Homo sapiens
cagtacatttttgaa

SEQ ID NO: 1264103 - DNA, 15 bp, Homo sapiens
tcagtacatttttga

SEQ ID NO: 1264104 - DNA, 15 bp, Homo sapiens
ttcagtacatttttg

SEQ ID NO: 1264105 - DNA, 15 bp, Homo sapiens
gttcagtacattttt

SEQ ID NO: 1264106 - DNA, 15 bp, Homo sapiens
tgttcagtacatttt

SEQ ID NO: 1264107 - DNA, 15 bp, Homo sapiens
ttgttcagtacattt

SEQ ID NO: 1264108 - DNA, 15 bp, Homo sapiens
tttgttcagtacatt

SEQ ID NO: 1264109 - DNA, 15 bp, Homo sapiens
atttgttcagtacat

SEQ ID NO: 1264110 - DNA, 15 bp, Homo sapiens
tatttgttcagtaca

SEQ ID NO: 1264111 - DNA, 15 bp, Homo sapiens
ttatttgttcagtac

SEQ ID NO: 1264112 - DNA, 15 bp, Homo sapiens
tttatttgttcagta

SEQ ID NO: 1264113 - DNA, 15 bp, Homo sapiens
atttatttgttcagt

SEQ ID NO: 1264114 - DNA, 15 bp, Homo sapiens
catttatttgttcag

SEQ ID NO: 1264115 - DNA, 15 bp, Homo sapiens
tcatttatttgttca

SEQ ID NO: 1264116 - DNA, 15 bp, Homo sapiens
ctcatttatttgttc

SEQ ID NO: 1264117 - DNA, 15 bp, Homo sapiens
tctcatttatttgtt

SEQ ID NO: 1264118 - DNA, 15 bp, Homo sapiens
atctcatttatttgt

SEQ ID NO: 1264119 - DNA, 15 bp, Homo sapiens
aatctcatttatttg

SEQ ID NO: 1264120 - DNA, 15 bp, Homo sapiens
aaatctcatttattt

SEQ ID NO: 1264121 - DNA, 15 bp, Homo sapiens
gaaatctcatttatt

SEQ ID NO: 1264122 - DNA, 15 bp, Homo sapiens
agaaatctcatttat

SEQ ID NO: 1264123 - DNA, 15 bp, Homo sapiens
aagaaatctcattta

SEQ ID NO: 1264124 - DNA, 15 bp, Homo sapiens
aaagaaatctcattt

SEQ ID NO: 1264125 - DNA, 15 bp, Homo sapiens
aaaagaaatctcatt

SEQ ID NO: 1264126 - DNA, 15 bp, Homo sapiens
aaaaagaaatctcat

SEQ ID NO: 1264127 - DNA, 15 bp, Homo sapiens
aaaaaagaaatctca

SEQ ID NO: 1264128 - DNA, 15 bp, Homo sapiens
aaaaaaagaaatctc

SEQ ID NO: 1264129 - DNA, 15 bp, Homo sapiens
gaaaaaaagaaatct

SEQ ID NO: 1264130 - DNA, 15 bp, Homo sapiens
agaaaaaaagaaatc

SEQ ID NO: 1264131 - DNA, 15 bp, Homo sapiens
tagaaaaaaagaaat

SEQ ID NO: 1264132 - DNA, 15 bp, Homo sapiens
ttagaaaaaaagaaa

SEQ ID NO: 1264133 - DNA, 15 bp, Homo sapiens
attagaaaaaaagaa

SEQ ID NO: 1264134 - DNA, 15 bp, Homo sapiens
aattagaaaaaaaga

SEQ ID NO: 1264135 - DNA, 15 bp, Homo sapiens
aaattagaaaaaaag

SEQ ID NO: 1264136 - DNA, 15 bp, Homo sapiens
caaattagaaaaaaa

SEQ ID NO: 1264137 - DNA, 15 bp, Homo sapiens
acaaattagaaaaaa

SEQ ID NO: 1264138 - DNA, 15 bp, Homo sapiens
aacaaattagaaaaa

SEQ ID NO: 1264139 - DNA, 15 bp, Homo sapiens
aaacaaattagaaaa

SEQ ID NO: 1264140 - DNA, 15 bp, Homo sapiens
aaaacaaattagaaa

SEQ ID NO: 1264141 - DNA, 15 bp, Homo sapiens
aaaaacaaattagaa

SEQ ID NO: 1264142 - DNA, 15 bp, Homo sapiens
aaaaaacaaattaga

SEQ ID NO: 1264143 - DNA, 15 bp, Homo sapiens
aaaaaaacaaattag

SEQ ID NO: 1264144 - DNA, 15 bp, Homo sapiens
caaaaaaacaaatta

SEQ ID NO: 1264145 - DNA, 15 bp, Homo sapiens
acaaaaaaacaaatt

SEQ ID NO: 1264146 - DNA, 15 bp, Homo sapiens
cacaaaaaaacaaat

SEQ ID NO: 1264147 - DNA, 15 bp, Homo sapiens
ccacaaaaaaacaaa

SEQ ID NO: 1264148 - DNA, 15 bp, Homo sapiens
tccacaaaaaaacaa

SEQ ID NO: 1264149 - DNA, 15 bp, Homo sapiens
ctccacaaaaaaaca

SEQ ID NO: 1264150 - DNA, 15 bp, Homo sapiens
actccacaaaaaaac

SEQ ID NO: 1264151 - DNA, 15 bp, Homo sapiens
aactccacaaaaaaa

SEQ ID NO: 1264152 - DNA, 15 bp, Homo sapiens
aaactccacaaaaaa

SEQ ID NO: 1264153 - DNA, 15 bp, Homo sapiens
gaaactccacaaaaa

SEQ ID NO: 1264154 - DNA, 15 bp, Homo sapiens
ggaaactccacaaaa

SEQ ID NO: 1264155 - DNA, 15 bp, Homo sapiens
gggaaactccacaaa

SEQ ID NO: 1264156 - DNA, 15 bp, Homo sapiens
tgggaaactccacaa

SEQ ID NO: 1264157 - DNA, 15 bp, Homo sapiens
atgggaaactccaca

SEQ ID NO: 1264158 - DNA, 15 bp, Homo sapiens
aatgggaaactccac

SEQ ID NO: 1264159 - DNA, 15 bp, Homo sapiens
taatgggaaactcca

SEQ ID NO: 1264160 - DNA, 15 bp, Homo sapiens
ataatgggaaactcc

SEQ ID NO: 1264161 - DNA, 15 bp, Homo sapiens
tataatgggaaactc

SEQ ID NO: 1264162 - DNA, 15 bp, Homo sapiens
atataatgggaaact

SEQ ID NO: 1264163 - DNA, 15 bp, Homo sapiens
catataatgggaaac

SEQ ID NO: 1264164 - DNA, 15 bp, Homo sapiens
acatataatgggaaa

SEQ ID NO: 1264165 - DNA, 15 bp, Homo sapiens
cacatataatgggaa

SEQ ID NO: 1264166 - DNA, 15 bp, Homo sapiens
acacatataatggga

SEQ ID NO: 1264167 - DNA, 15 bp, Homo sapiens
tacacatataatggg

SEQ ID NO: 1264168 - DNA, 15 bp, Homo sapiens
ctacacatataatgg

SEQ ID NO: 1264169 - DNA, 15 bp, Homo sapiens
actacacatataatg

SEQ ID NO: 1264170 - DNA, 15 bp, Homo sapiens
cactacacatataat

SEQ ID NO: 1264171 - DNA, 15 bp, Homo sapiens
tcactacacatataa

SEQ ID NO: 1264172 - DNA, 15 bp, Homo sapiens
atcactacacatata

SEQ ID NO: 1264173 - DNA, 15 bp, Homo sapiens
tatcactacacatat

SEQ ID NO: 1264174 - DNA, 15 bp, Homo sapiens
ttatcactacacata

SEQ ID NO: 1264175 - DNA, 15 bp, Homo sapiens
attatcactacacat

SEQ ID NO: 1264176 - DNA, 15 bp, Homo sapiens
aattatcactacaca

SEQ ID NO: 1264177 - DNA, 15 bp, Homo sapiens
aaattatcactacac

SEQ ID NO: 1264178 - DNA, 15 bp, Homo sapiens
aaaattatcactaca

SEQ ID NO: 1264179 - DNA, 15 bp, Homo sapiens
aaaaattatcactac

SEQ ID NO: 1264180 - DNA, 15 bp, Homo sapiens
taaaaattatcacta

SEQ ID NO: 1264181 - DNA, 15 bp, Homo sapiens
gtaaaaattatcact

SEQ ID NO: 1264182 - DNA, 15 bp, Homo sapiens
tgtaaaaattatcac

SEQ ID NO: 1264183 - DNA, 15 bp, Homo sapiens
ctgtaaaaattatca

SEQ ID NO: 1264184 - DNA, 15 bp, Homo sapiens
actgtaaaaattatc

SEQ ID NO: 1264185 - DNA, 15 bp, Homo sapiens
gactgtaaaaattat

SEQ ID NO: 1264186 - DNA, 15 bp, Homo sapiens
tgactgtaaaaatta

SEQ ID NO: 1264187 - DNA, 15 bp, Homo sapiens
atgactgtaaaaatt

SEQ ID NO: 1264188 - DNA, 15 bp, Homo sapiens
aatgactgtaaaaat

SEQ ID NO: 1264189 - DNA, 15 bp, Homo sapiens
gaatgactgtaaaaa

SEQ ID NO: 1264190 - DNA, 15 bp, Homo sapiens
agaatgactgtaaaa

SEQ ID NO: 1264191 - DNA, 15 bp, Homo sapiens
tagaatgactgtaaa

SEQ ID NO: 1264192 - DNA, 15 bp, Homo sapiens
atagaatgactgtaa

SEQ ID NO: 1264193 - DNA, 15 bp, Homo sapiens
gatagaatgactgta

SEQ ID NO: 1264194 - DNA, 15 bp, Homo sapiens
agatagaatgactgt

SEQ ID NO: 1264195 - DNA, 15 bp, Homo sapiens
tagatagaatgactg

SEQ ID NO: 1264196 - DNA, 15 bp, Homo sapiens
ctagatagaatgact

SEQ ID NO: 1264197 - DNA, 15 bp, Homo sapiens
tctagatagaatgac

SEQ ID NO: 1264198 - DNA, 15 bp, Homo sapiens
gtctagatagaatga

SEQ ID NO: 1264199 - DNA, 15 bp, Homo sapiens
agtctagatagaatg

SEQ ID NO: 1264200 - DNA, 15 bp, Homo sapiens
cagtctagatagaat

SEQ ID NO: 1264201 - DNA, 15 bp, Homo sapiens
tcagtctagatagaa

SEQ ID NO: 1264202 - DNA, 15 bp, Homo sapiens
gtcagtctagataga

SEQ ID NO: 1264203 - DNA, 15 bp, Homo sapiens
tgtcagtctagatag

SEQ ID NO: 1264204 - DNA, 15 bp, Homo sapiens
ttgtcagtctagata

SEQ ID NO: 1264205 - DNA, 15 bp, Homo sapiens
tttgtcagtctagat

SEQ ID NO: 1264206 - DNA, 15 bp, Homo sapiens
ttttgtcagtctaga

SEQ ID NO: 1264207 - DNA, 15 bp, Homo sapiens
attttgtcagtctag

SEQ ID NO: 1264208 - DNA, 15 bp, Homo sapiens
aattttgtcagtcta

SEQ ID NO: 1264209 - DNA, 15 bp, Homo sapiens
gaattttgtcagtct

SEQ ID NO: 1264210 - DNA, 15 bp, Homo sapiens
agaattttgtcagtc

SEQ ID NO: 1264211 - DNA, 15 bp, Homo sapiens
aagaattttgtcagt

SEQ ID NO: 1264212 - DNA, 15 bp, Homo sapiens
aaagaattttgtcag

SEQ ID NO: 1264213 - DNA, 15 bp, Homo sapiens
taaagaattttgtca

SEQ ID NO: 1264214 - DNA, 15 bp, Homo sapiens
ataaagaattttgtc

SEQ ID NO: 1264215 - DNA, 15 bp, Homo sapiens
cataaagaattttgt

SEQ ID NO: 1264216 - DNA, 15 bp, Homo sapiens
ccataaagaattttg

SEQ ID NO: 1264217 - DNA, 15 bp, Homo sapiens
tccataaagaatttt

SEQ ID NO: 1264218 - DNA, 15 bp, Homo sapiens
ttccataaagaattt

SEQ ID NO: 1264219 - DNA, 15 bp, Homo sapiens
tttccataaagaatt

SEQ ID NO: 1264220 - DNA, 15 bp, Homo sapiens
gtttccataaagaat

SEQ ID NO: 1264221 - DNA, 15 bp, Homo sapiens
agtttccataaagaa

SEQ ID NO: 1264222 - DNA, 15 bp, Homo sapiens
aagtttccataaaga

SEQ ID NO: 1264223 - DNA, 15 bp, Homo sapiens
aaagtttccataaag

SEQ ID NO: 1264224 - DNA, 15 bp, Homo sapiens
aaaagtttccataaa

SEQ ID NO: 1264225 - DNA, 15 bp, Homo sapiens
gaaaagtttccataa

SEQ ID NO: 1264226 - DNA, 15 bp, Homo sapiens
agaaaagtttccata

SEQ ID NO: 1264227 - DNA, 15 bp, Homo sapiens
gagaaaagtttccat

SEQ ID NO: 1264228 - DNA, 15 bp, Homo sapiens
agagaaaagtttcca

SEQ ID NO: 1264229 - DNA, 15 bp, Homo sapiens
aagagaaaagtttcc

SEQ ID NO: 1264230 - DNA, 15 bp, Homo sapiens
aaagagaaaagtttc

SEQ ID NO: 1264231 - DNA, 15 bp, Homo sapiens
caaagagaaaagttt

SEQ ID NO: 1264232 - DNA, 15 bp, Homo sapiens
gcaaagagaaaagtt

SEQ ID NO: 1264233 - DNA, 15 bp, Homo sapiens
tgcaaagagaaaagt

SEQ ID NO: 1264234 - DNA, 15 bp, Homo sapiens
ttgcaaagagaaaag

SEQ ID NO: 1264235 - DNA, 15 bp, Homo sapiens
cttgcaaagagaaaa

SEQ ID NO: 1264236 - DNA, 15 bp, Homo sapiens
ccttgcaaagagaaa

SEQ ID NO: 1264237 - DNA, 15 bp, Homo sapiens
tccttgcaaagagaa

SEQ ID NO: 1264238 - DNA, 15 bp, Homo sapiens
gtccttgcaaagaga

SEQ ID NO: 1264239 - DNA, 15 bp, Homo sapiens
tgtccttgcaaagag

SEQ ID NO: 1264240 - DNA, 15 bp, Homo sapiens
atgtccttgcaaaga

SEQ ID NO: 1264241 - DNA, 15 bp, Homo sapiens
aatgtccttgcaaag

SEQ ID NO: 1264242 - DNA, 15 bp, Homo sapiens
aaatgtccttgcaaa

SEQ ID NO: 1264243 - DNA, 15 bp, Homo sapiens
aaaatgtccttgcaa

SEQ ID NO: 1264244 - DNA, 15 bp, Homo sapiens
taaaatgtccttgca

SEQ ID NO: 1264245 - DNA, 15 bp, Homo sapiens
gtaaaatgtccttgc

SEQ ID NO: 1264246 - DNA, 15 bp, Homo sapiens
agtaaaatgtccttg

SEQ ID NO: 1264247 - DNA, 15 bp, Homo sapiens
aagtaaaatgtcctt

SEQ ID NO: 1264248 - DNA, 15 bp, Homo sapiens
gaagtaaaatgtcct

SEQ ID NO: 1264249 - DNA, 15 bp, Homo sapiens
agaagtaaaatgtcc

SEQ ID NO: 1264250 - DNA, 15 bp, Homo sapiens
tagaagtaaaatgtc

SEQ ID NO: 1264251 - DNA, 15 bp, Homo sapiens
ttagaagtaaaatgt

SEQ ID NO: 1264252 - DNA, 15 bp, Homo sapiens
tttagaagtaaaatg

SEQ ID NO: 1264253 - DNA, 15 bp, Homo sapiens
ttttagaagtaaaat

SEQ ID NO: 1264254 - DNA, 15 bp, Homo sapiens
gttttagaagtaaaa

SEQ ID NO: 1264255 - DNA, 15 bp, Homo sapiens
ggttttagaagtaaa

SEQ ID NO: 1264256 - DNA, 15 bp, Homo sapiens
tggttttagaagtaa

SEQ ID NO: 1264257 - DNA, 15 bp, Homo sapiens
ttggttttagaagta

SEQ ID NO: 1264258 - DNA, 15 bp, Homo sapiens
cttggttttagaagt

SEQ ID NO: 1264259 - DNA, 15 bp, Homo sapiens
ccttggttttagaag

SEQ ID NO: 1264260 - DNA, 15 bp, Homo sapiens
cccttggttttagaa

SEQ ID NO: 1264261 - DNA, 15 bp, Homo sapiens
ccccttggttttaga

SEQ ID NO: 1264262 - DNA, 15 bp, Homo sapiens
cccccttggttttag

SEQ ID NO: 1264263 - DNA, 15 bp, Homo sapiens
tcccccttggtttta

SEQ ID NO: 1264264 - DNA, 15 bp, Homo sapiens
atcccccttggtttt

SEQ ID NO: 1264265 - DNA, 15 bp, Homo sapiens
tatcccccttggttt

SEQ ID NO: 1264266 - DNA, 15 bp, Homo sapiens
ttatcccccttggtt

SEQ ID NO: 1264267 - DNA, 15 bp, Homo sapiens
tttatcccccttggt

SEQ ID NO: 1264268 - DNA, 15 bp, Homo sapiens
gtttatcccccttgg

SEQ ID NO: 1264269 - DNA, 15 bp, Homo sapiens
ggtttatcccccttg

SEQ ID NO: 1264270 - DNA, 15 bp, Homo sapiens
cggtttatccccctt

SEQ ID NO: 1264271 - DNA, 15 bp, Homo sapiens
tcggtttatccccct

SEQ ID NO: 1264272 - DNA, 15 bp, Homo sapiens
ttcggtttatccccc

SEQ ID NO: 1264273 - DNA, 15 bp, Homo sapiens
attcggtttatcccc

SEQ ID NO: 1264274 - DNA, 15 bp, Homo sapiens
aattcggtttatccc

SEQ ID NO: 1264275 - DNA, 15 bp, Homo sapiens
taattcggtttatcc

SEQ ID NO: 1264276 - DNA, 15 bp, Homo sapiens
ttaattcggtttatc

SEQ ID NO: 1264277 - DNA, 15 bp, Homo sapiens
tttaattcggtttat

SEQ ID NO: 1264278 - DNA, 15 bp, Homo sapiens
ttttaattcggttta

SEQ ID NO: 1264279 - DNA, 15 bp, Homo sapiens
tttttaattcggttt

SEQ ID NO: 1264280 - DNA, 15 bp, Homo sapiens
ttttttaattcggtt

SEQ ID NO: 1264281 - DNA, 15 bp, Homo sapiens
tttttttaattcggt

SEQ ID NO: 1264282 - DNA, 15 bp, Homo sapiens
ttttttttaattcgg

SEQ ID NO: 1264283 - DNA, 15 bp, Homo sapiens
tttttttttaattcg

SEQ ID NO: 1264284 - DNA, 15 bp, Homo sapiens
ttttttttttaattc

SEQ ID NO: 1264285 - DNA, 15 bp, Homo sapiens
cttttttttttaatt

SEQ ID NO: 1264286 - DNA, 15 bp, Homo sapiens
gcttttttttttaat

SEQ ID NO: 1264287 - DNA, 15 bp, Homo sapiens
agcttttttttttaa

SEQ ID NO: 1264288 - DNA, 15 bp, Homo sapiens
tagctttttttttta

SEQ ID NO: 1264289 - DNA, 15 bp, Homo sapiens
ctagctttttttttt

SEQ ID NO: 1264290 - DNA, 15 bp, Homo sapiens
actagcttttttttt

SEQ ID NO: 1264291 - DNA, 15 bp, Homo sapiens
tactagctttttttt

SEQ ID NO: 1264292 - DNA, 15 bp, Homo sapiens
ttactagcttttttt

SEQ ID NO: 1264293 - DNA, 15 bp, Homo sapiens
tttactagctttttt

SEQ ID NO: 1264294 - DNA, 15 bp, Homo sapiens
atttactagcttttt

SEQ ID NO: 1264295 - DNA, 15 bp, Homo sapiens
tatttactagctttt

SEQ ID NO: 1264296 - DNA, 15 bp, Homo sapiens
ttatttactagcttt

SEQ ID NO: 1264297 - DNA, 15 bp, Homo sapiens
tttatttactagctt

SEQ ID NO: 1264298 - DNA, 15 bp, Homo sapiens
ttttatttactagct

SEQ ID NO: 1264299 - DNA, 15 bp, Homo sapiens
tttttatttactagc

SEQ ID NO: 1264300 - DNA, 15 bp, Homo sapiens
atttttatttactag

SEQ ID NO: 1264301 - DNA, 15 bp, Homo sapiens
gatttttatttacta

SEQ ID NO: 1264302 - DNA, 15 bp, Homo sapiens
tgatttttatttact

SEQ ID NO: 1264303 - DNA, 15 bp, Homo sapiens
ctgatttttatttac

SEQ ID NO: 1264304 - DNA, 15 bp, Homo sapiens
gctgatttttattta

SEQ ID NO: 1264305 - DNA, 15 bp, Homo sapiens
agctgatttttattt

SEQ ID NO: 1264306 - DNA, 15 bp, Homo sapiens
aagctgatttttatt

SEQ ID NO: 1264307 - DNA, 15 bp, Homo sapiens
taagctgatttttat

SEQ ID NO: 1264308 - DNA, 15 bp, Homo sapiens
ttaagctgattttta

SEQ ID NO: 1264309 - DNA, 15 bp, Homo sapiens
tttaagctgattttt

SEQ ID NO: 1264310 - DNA, 15 bp, Homo sapiens
ttttaagctgatttt

SEQ ID NO: 1264311 - DNA, 15 bp, Homo sapiens
gttttaagctgattt

SEQ ID NO: 1264312 - DNA, 15 bp, Homo sapiens
ggttttaagctgatt

SEQ ID NO: 1264313 - DNA, 15 bp, Homo sapiens
tggttttaagctgat

SEQ ID NO: 1264314 - DNA, 15 bp, Homo sapiens
atggttttaagctga

SEQ ID NO: 1264315 - DNA, 15 bp, Homo sapiens
aatggttttaagctg

SEQ ID NO: 1264316 - DNA, 15 bp, Homo sapiens
gaatggttttaagct

SEQ ID NO: 1264317 - DNA, 15 bp, Homo sapiens
agaatggttttaagc

SEQ ID NO: 1264318 - DNA, 15 bp, Homo sapiens
cagaatggttttaag

SEQ ID NO: 1264319 - DNA, 15 bp, Homo sapiens
ccagaatggttttaa

SEQ ID NO: 1264320 - DNA, 15 bp, Homo sapiens
accagaatggtttta

SEQ ID NO: 1264321 - DNA, 15 bp, Homo sapiens
aaccagaatggtttt

SEQ ID NO: 1264322 - DNA, 15 bp, Homo sapiens
gaaccagaatggttt

SEQ ID NO: 1264323 - DNA, 15 bp, Homo sapiens
agaaccagaatggtt

SEQ ID NO: 1264324 - DNA, 15 bp, Homo sapiens
tagaaccagaatggt

SEQ ID NO: 1264325 - DNA, 15 bp, Homo sapiens
atagaaccagaatgg

SEQ ID NO: 1264326 - DNA, 15 bp, Homo sapiens
gatagaaccagaatg

SEQ ID NO: 1264327 - DNA, 15 bp, Homo sapiens
tgatagaaccagaat

SEQ ID NO: 1264328 - DNA, 15 bp, Homo sapiens
ctgatagaaccagaa

SEQ ID NO: 1264329 - DNA, 15 bp, Homo sapiens
cctgatagaaccaga

SEQ ID NO: 1264330 - DNA, 15 bp, Homo sapiens
ccctgatagaaccag

SEQ ID NO: 1264331 - DNA, 15 bp, Homo sapiens
tccctgatagaacca

SEQ ID NO: 1264332 - DNA, 15 bp, Homo sapiens
gtccctgatagaacc

SEQ ID NO: 1264333 - DNA, 15 bp, Homo sapiens
ggtccctgatagaac

SEQ ID NO: 1264334 - DNA, 15 bp, Homo sapiens
aggtccctgatagaa

SEQ ID NO: 1264335 - DNA, 15 bp, Homo sapiens
gaggtccctgataga

SEQ ID NO: 1264336 - DNA, 15 bp, Homo sapiens
tgaggtccctgatag

SEQ ID NO: 1264337 - DNA, 15 bp, Homo sapiens
ctgaggtccctgata

SEQ ID NO: 1264338 - DNA, 15 bp, Homo sapiens
tctgaggtccctgat

SEQ ID NO: 1264339 - DNA, 15 bp, Homo sapiens
ttctgaggtccctga

SEQ ID NO: 1264340 - DNA, 15 bp, Homo sapiens
attctgaggtccctg

SEQ ID NO: 1264341 - DNA, 15 bp, Homo sapiens
aattctgaggtccct

SEQ ID NO: 1264342 - DNA, 15 bp, Homo sapiens
taattctgaggtccc

SEQ ID NO: 1264343 - DNA, 15 bp, Homo sapiens
ataattctgaggtcc

SEQ ID NO: 1264344 - DNA, 15 bp, Homo sapiens
aataattctgaggtc

SEQ ID NO: 1264345 - DNA, 15 bp, Homo sapiens
caataattctgaggt

SEQ ID NO: 1264346 - DNA, 15 bp, Homo sapiens
ccaataattctgagg

SEQ ID NO: 1264347 - DNA, 15 bp, Homo sapiens
accaataattctgag

SEQ ID NO: 1264348 - DNA, 15 bp, Homo sapiens
gaccaataattctga

SEQ ID NO: 1264349 - DNA, 15 bp, Homo sapiens
ggaccaataattctg

SEQ ID NO: 1264350 - DNA, 15 bp, Homo sapiens
cggaccaataattct

SEQ ID NO: 1264351 - DNA, 15 bp, Homo sapiens
acggaccaataattc

SEQ ID NO: 1264352 - DNA, 15 bp, Homo sapiens
tacggaccaataatt

SEQ ID NO: 1264353 - DNA, 15 bp, Homo sapiens
atacggaccaataat

SEQ ID NO: 1264354 - DNA, 15 bp, Homo sapiens
aatacggaccaataa

SEQ ID NO: 1264355 - DNA, 15 bp, Homo sapiens
caatacggaccaata

SEQ ID NO: 1264356 - DNA, 15 bp, Homo sapiens
ccaatacggaccaat

SEQ ID NO: 1264357 - DNA, 15 bp, Homo sapiens
accaatacggaccaa

SEQ ID NO: 1264358 - DNA, 15 bp, Homo sapiens
gaccaatacggacca

SEQ ID NO: 1264359 - DNA, 15 bp, Homo sapiens
tgaccaatacggacc

SEQ ID NO: 1264360 - DNA, 15 bp, Homo sapiens
atgaccaatacggac

SEQ ID NO: 1264361 - DNA, 15 bp, Homo sapiens
gatgaccaatacgga

SEQ ID NO: 1264362 - DNA, 15 bp, Homo sapiens
agatgaccaatacgg

SEQ ID NO: 1264363 - DNA, 15 bp, Homo sapiens
cagatgaccaatacg

SEQ ID NO: 1264364 - DNA, 15 bp, Homo sapiens
ccagatgaccaatac

SEQ ID NO: 1264365 - DNA, 15 bp, Homo sapiens
accagatgaccaata

SEQ ID NO: 1264366 - DNA, 15 bp, Homo sapiens
gaccagatgaccaat

SEQ ID NO: 1264367 - DNA, 15 bp, Homo sapiens
tgaccagatgaccaa

SEQ ID NO: 1264368 - DNA, 15 bp, Homo sapiens
atgaccagatgacca

SEQ ID NO: 1264369 - DNA, 15 bp, Homo sapiens
aatgaccagatgacc

SEQ ID NO: 1264370 - DNA, 15 bp, Homo sapiens
caatgaccagatgac

SEQ ID NO: 1264371 - DNA, 15 bp, Homo sapiens
ccaatgaccagatga

SEQ ID NO: 1264372 - DNA, 15 bp, Homo sapiens
accaatgaccagatg

SEQ ID NO: 1264373 - DNA, 15 bp, Homo sapiens
gaccaatgaccagat

SEQ ID NO: 1264374 - DNA, 15 bp, Homo sapiens
agaccaatgaccaga

SEQ ID NO: 1264375 - DNA, 15 bp, Homo sapiens
gagaccaatgaccag

SEQ ID NO: 1264376 - DNA, 15 bp, Homo sapiens
ggagaccaatgacca

SEQ ID NO: 1264377 - DNA, 15 bp, Homo sapiens
aggagaccaatgacc

SEQ ID NO: 1264378 - DNA, 15 bp, Homo sapiens
taggagaccaatgac

SEQ ID NO: 1264379 - DNA, 15 bp, Homo sapiens
ctaggagaccaatga

SEQ ID NO: 1264380 - DNA, 15 bp, Homo sapiens
gctaggagaccaatg

SEQ ID NO: 1264381 - DNA, 15 bp, Homo sapiens
tgctaggagaccaat

SEQ ID NO: 1264382 - DNA, 15 bp, Homo sapiens
ctgctaggagaccaa

SEQ ID NO: 1264383 - DNA, 15 bp, Homo sapiens
gctgctaggagacca

SEQ ID NO: 1264384 - DNA, 15 bp, Homo sapiens
agctgctaggagacc

SEQ ID NO: 1264385 - DNA, 15 bp, Homo sapiens
cagctgctaggagac

SEQ ID NO: 1264386 - DNA, 15 bp, Homo sapiens
gcagctgctaggaga

SEQ ID NO: 1264387 - DNA, 15 bp, Homo sapiens
agcagctgctaggag

SEQ ID NO: 1264388 - DNA, 15 bp, Homo sapiens
gagcagctgctagga

SEQ ID NO: 1264389 - DNA, 15 bp, Homo sapiens
tgagcagctgctagg

SEQ ID NO: 1264390 - DNA, 15 bp, Homo sapiens
ttgagcagctgctag

SEQ ID NO: 1264391 - DNA, 15 bp, Homo sapiens
gttgagcagctgcta

SEQ ID NO: 1264392 - DNA, 15 bp, Homo sapiens
ggttgagcagctgct

SEQ ID NO: 1264393 - DNA, 15 bp, Homo sapiens
tggttgagcagctgc

SEQ ID NO: 1264394 - DNA, 15 bp, Homo sapiens
ctggttgagcagctg

SEQ ID NO: 1264395 - DNA, 15 bp, Homo sapiens
actggttgagcagct

SEQ ID NO: 1264396 - DNA, 15 bp, Homo sapiens
aactggttgagcagc

SEQ ID NO: 1264397 - DNA, 15 bp, Homo sapiens
aaactggttgagcag

SEQ ID NO: 1264398 - DNA, 15 bp, Homo sapiens
aaaactggttgagca

SEQ ID NO: 1264399 - DNA, 15 bp, Homo sapiens
caaaactggttgagc

SEQ ID NO: 1264400 - DNA, 15 bp, Homo sapiens
ccaaaactggttgag

SEQ ID NO: 1264401 - DNA, 15 bp, Homo sapiens
gccaaaactggttga

SEQ ID NO: 1264402 - DNA, 15 bp, Homo sapiens
agccaaaactggttg

SEQ ID NO: 1264403 - DNA, 15 bp, Homo sapiens
cagccaaaactggtt

SEQ ID NO: 1264404 - DNA, 15 bp, Homo sapiens
ccagccaaaactggt

SEQ ID NO: 1264405 - DNA, 15 bp, Homo sapiens
tccagccaaaactgg

SEQ ID NO: 1264406 - DNA, 15 bp, Homo sapiens
ctccagccaaaactg

SEQ ID NO: 1264407 - DNA, 15 bp, Homo sapiens
cctccagccaaaact

SEQ ID NO: 1264408 - DNA, 15 bp, Homo sapiens
acctccagccaaaac

SEQ ID NO: 1264409 - DNA, 15 bp, Homo sapiens
cacctccagccaaaa

SEQ ID NO: 1264410 - DNA, 15 bp, Homo sapiens
ccacctccagccaaa

SEQ ID NO: 1264411 - DNA, 15 bp, Homo sapiens
cccacctccagccaa

SEQ ID NO: 1264412 - DNA, 15 bp, Homo sapiens
acccacctccagcca

SEQ ID NO: 1264413 - DNA, 15 bp, Homo sapiens
aacccacctccagcc

SEQ ID NO: 1264414 - DNA, 15 bp, Homo sapiens
aaacccacctccagc

SEQ ID NO: 1264415 - DNA, 15 bp, Homo sapiens
aaaacccacctccag

SEQ ID NO: 1264416 - DNA, 15 bp, Homo sapiens
caaaacccacctcca

SEQ ID NO: 1264417 - DNA, 15 bp, Homo sapiens
ccaaaacccacctcc

SEQ ID NO: 1264418 - DNA, 15 bp, Homo sapiens
accaaaacccacctc

SEQ ID NO: 1264419 - DNA, 15 bp, Homo sapiens
gaccaaaacccacct

SEQ ID NO: 1264420 - DNA, 15 bp, Homo sapiens
agaccaaaacccacc

SEQ ID NO: 1264421 - DNA, 15 bp, Homo sapiens
gagaccaaaacccac

SEQ ID NO: 1264422 - DNA, 15 bp, Homo sapiens
agagaccaaaaccca

SEQ ID NO: 1264423 - DNA, 15 bp, Homo sapiens
cagagaccaaaaccc

SEQ ID NO: 1264424 - DNA, 15 bp, Homo sapiens
acagagaccaaaacc

SEQ ID NO: 1264425 - DNA, 15 bp, Homo sapiens
gacagagaccaaaac

SEQ ID NO: 1264426 - DNA, 15 bp, Homo sapiens
agacagagaccaaaa

SEQ ID NO: 1264427 - DNA, 15 bp, Homo sapiens
gagacagagaccaaa

SEQ ID NO: 1264428 - DNA, 15 bp, Homo sapiens
agagacagagaccaa

SEQ ID NO: 1264429 - DNA, 15 bp, Homo sapiens
gagagacagagacca

SEQ ID NO: 1264430 - DNA, 15 bp, Homo sapiens
agagagacagagacc

SEQ ID NO: 1264431 - DNA, 15 bp, Homo sapiens
aagagagacagagac

SEQ ID NO: 1264432 - DNA, 15 bp, Homo sapiens
aaagagagacagaga

SEQ ID NO: 1264433 - DNA, 15 bp, Homo sapiens
caaagagagacagag

SEQ ID NO: 1264434 - DNA, 15 bp, Homo sapiens
ccaaagagagacaga

SEQ ID NO: 1264435 - DNA, 15 bp, Homo sapiens
gccaaagagagacag

SEQ ID NO: 1264436 - DNA, 15 bp, Homo sapiens
agccaaagagagaca

SEQ ID NO: 1264437 - DNA, 15 bp, Homo sapiens
aagccaaagagagac

SEQ ID NO: 1264438 - DNA, 15 bp, Homo sapiens
gaagccaaagagaga

SEQ ID NO: 1264439 - DNA, 15 bp, Homo sapiens
tgaagccaaagagag

SEQ ID NO: 1264440 - DNA, 15 bp, Homo sapiens
gtgaagccaaagaga

SEQ ID NO: 1264441 - DNA, 15 bp, Homo sapiens
agtgaagccaaagag

SEQ ID NO: 1264442 - DNA, 15 bp, Homo sapiens
cagtgaagccaaaga

SEQ ID NO: 1264443 - DNA, 15 bp, Homo sapiens
gcagtgaagccaaag

SEQ ID NO: 1264444 - DNA, 15 bp, Homo sapiens
agcagtgaagccaaa

SEQ ID NO: 1264445 - DNA, 15 bp, Homo sapiens
cagcagtgaagccaa

SEQ ID NO: 1264446 - DNA, 15 bp, Homo sapiens
gcagcagtgaagcca

SEQ ID NO: 1264447 - DNA, 15 bp, Homo sapiens
ggcagcagtgaagcc

SEQ ID NO: 1264448 - DNA, 15 bp, Homo sapiens
tggcagcagtgaagc

SEQ ID NO: 1264449 - DNA, 15 bp, Homo sapiens
ctggcagcagtgaag

SEQ ID NO: 1264450 - DNA, 15 bp, Homo sapiens
gctggcagcagtgaa

SEQ ID NO: 1264451 - DNA, 15 bp, Homo sapiens
ggctggcagcagtga

SEQ ID NO: 1264452 - DNA, 15 bp, Homo sapiens
aggctggcagcagtg

SEQ ID NO: 1264453 - DNA, 15 bp, Homo sapiens
gaggctggcagcagt

SEQ ID NO: 1264454 - DNA, 15 bp, Homo sapiens
tgaggctggcagcag

SEQ ID NO: 1264455 - DNA, 15 bp, Homo sapiens
ttgaggctggcagca

SEQ ID NO: 1264456 - DNA, 15 bp, Homo sapiens
gttgaggctggcagc

SEQ ID NO: 1264457 - DNA, 15 bp, Homo sapiens
agttgaggctggcag

SEQ ID NO: 1264458 - DNA, 15 bp, Homo sapiens
cagttgaggctggca

SEQ ID NO: 1264459 - DNA, 15 bp, Homo sapiens
gcagttgaggctggc

SEQ ID NO: 1264460 - DNA, 15 bp, Homo sapiens
cgcagttgaggctgg

SEQ ID NO: 1264461 - DNA, 15 bp, Homo sapiens
acgcagttgaggctg

SEQ ID NO: 1264462 - DNA, 15 bp, Homo sapiens
aacgcagttgaggct

SEQ ID NO: 1264463 - DNA, 15 bp, Homo sapiens
gaacgcagttgaggc

SEQ ID NO: 1264464 - DNA, 15 bp, Homo sapiens
ggaacgcagttgagg

SEQ ID NO: 1264465 - DNA, 15 bp, Homo sapiens
aggaacgcagttgag

SEQ ID NO: 1264466 - DNA, 15 bp, Homo sapiens
caggaacgcagttga

SEQ ID NO: 1264467 - DNA, 15 bp, Homo sapiens
tcaggaacgcagttg

SEQ ID NO: 1264468 - DNA, 15 bp, Homo sapiens
atcaggaacgcagtt

SEQ ID NO: 1264469 - DNA, 15 bp, Homo sapiens
aatcaggaacgcagt

SEQ ID NO: 1264470 - DNA, 15 bp, Homo sapiens
caatcaggaacgcag

SEQ ID NO: 1264471 - DNA, 15 bp, Homo sapiens
gcaatcaggaacgca

SEQ ID NO: 1264472 - DNA, 15 bp, Homo sapiens
agcaatcaggaacgc

SEQ ID NO: 1264473 - DNA, 15 bp, Homo sapiens
aagcaatcaggaacg

SEQ ID NO: 1264474 - DNA, 15 bp, Homo sapiens
caagcaatcaggaac

SEQ ID NO: 1264475 - DNA, 15 bp, Homo sapiens
ccaagcaatcaggaa

SEQ ID NO: 1264476 - DNA, 15 bp, Homo sapiens
cccaagcaatcagga

SEQ ID NO: 1264477 - DNA, 15 bp, Homo sapiens
tcccaagcaatcagg

SEQ ID NO: 1264478 - DNA, 15 bp, Homo sapiens
ttcccaagcaatcag

SEQ ID NO: 1264479 - DNA, 15 bp, Homo sapiens
cttcccaagcaatca

SEQ ID NO: 1264480 - DNA, 15 bp, Homo sapiens
tcttcccaagcaatc

SEQ ID NO: 1264481 - DNA, 15 bp, Homo sapiens
ttcttcccaagcaat

SEQ ID NO: 1264482 - DNA, 15 bp, Homo sapiens
gttcttcccaagcaa

SEQ ID NO: 1264483 - DNA, 15 bp, Homo sapiens
cgttcttcccaagca

SEQ ID NO: 1264484 - DNA, 15 bp, Homo sapiens
ccgttcttcccaagc

SEQ ID NO: 1264485 - DNA, 15 bp, Homo sapiens
gccgttcttcccaag

SEQ ID NO: 1264486 - DNA, 15 bp, Homo sapiens
ggccgttcttcccaa

SEQ ID NO: 1264487 - DNA, 15 bp, Homo sapiens
aggccgttcttccca

SEQ ID NO: 1264488 - DNA, 15 bp, Homo sapiens
aaggccgttcttccc

SEQ ID NO: 1264489 - DNA, 15 bp, Homo sapiens
aaaggccgttcttcc

SEQ ID NO: 1264490 - DNA, 15 bp, Homo sapiens
caaaggccgttcttc

SEQ ID NO: 1264491 - DNA, 15 bp, Homo sapiens
tcaaaggccgttctt

SEQ ID NO: 1264492 - DNA, 15 bp, Homo sapiens
gtcaaaggccgttct

SEQ ID NO: 1264493 - DNA, 15 bp, Homo sapiens
cgtcaaaggccgttc

SEQ ID NO: 1264494 - DNA, 15 bp, Homo sapiens
acgtcaaaggccgtt

SEQ ID NO: 1264495 - DNA, 15 bp, Homo sapiens
gacgtcaaaggccgt

SEQ ID NO: 1264496 - DNA, 15 bp, Homo sapiens
agacgtcaaaggccg

SEQ ID NO: 1264497 - DNA, 15 bp, Homo sapiens
cagacgtcaaaggcc

SEQ ID NO: 1264498 - DNA, 15 bp, Homo sapiens
acagacgtcaaaggc

SEQ ID NO: 1264499 - DNA, 15 bp, Homo sapiens
tacagacgtcaaagg

SEQ ID NO: 1264500 - DNA, 15 bp, Homo sapiens
atacagacgtcaaag

SEQ ID NO: 1264501 - DNA, 15 bp, Homo sapiens
gatacagacgtcaaa

SEQ ID NO: 1264502 - DNA, 15 bp, Homo sapiens
agatacagacgtcaa

SEQ ID NO: 1264503 - DNA, 15 bp, Homo sapiens
cagatacagacgtca

SEQ ID NO: 1264504 - DNA, 15 bp, Homo sapiens
ccagatacagacgtc

SEQ ID NO: 1264505 - DNA, 15 bp, Homo sapiens
tccagatacagacgt

SEQ ID NO: 1264506 - DNA, 15 bp, Homo sapiens
gtccagatacagacg

SEQ ID NO: 1264507 - DNA, 15 bp, Homo sapiens
tgtccagatacagac

SEQ ID NO: 1264508 - DNA, 15 bp, Homo sapiens
ctgtccagatacaga

SEQ ID NO: 1264509 - DNA, 15 bp, Homo sapiens
tctgtccagatacag

SEQ ID NO: 1264510 - DNA, 15 bp, Homo sapiens
atctgtccagataca

SEQ ID NO: 1264511 - DNA, 15 bp, Homo sapiens
catctgtccagatac

SEQ ID NO: 1264512 - DNA, 15 bp, Homo sapiens
tcatctgtccagata

SEQ ID NO: 1264513 - DNA, 15 bp, Homo sapiens
gtcatctgtccagat

SEQ ID NO: 1264514 - DNA, 15 bp, Homo sapiens
tgtcatctgtccaga

SEQ ID NO: 1264515 - DNA, 15 bp, Homo sapiens
ctgtcatctgtccag

SEQ ID NO: 1264516 - DNA, 15 bp, Homo sapiens
actgtcatctgtcca

SEQ ID NO: 1264517 - DNA, 15 bp, Homo sapiens
gactgtcatctgtcc

SEQ ID NO: 1264518 - DNA, 15 bp, Homo sapiens
agactgtcatctgtc

SEQ ID NO: 1264519 - DNA, 15 bp, Homo sapiens
gagactgtcatctgt

SEQ ID NO: 1264520 - DNA, 15 bp, Homo sapiens
agagactgtcatctg

SEQ ID NO: 1264521 - DNA, 15 bp, Homo sapiens
aagagactgtcatct

SEQ ID NO: 1264522 - DNA, 15 bp, Homo sapiens
caagagactgtcatc

SEQ ID NO: 1264523 - DNA, 15 bp, Homo sapiens
acaagagactgtcat

SEQ ID NO: 1264524 - DNA, 15 bp, Homo sapiens
cacaagagactgtca

SEQ ID NO: 1264525 - DNA, 15 bp, Homo sapiens
ccacaagagactgtc

SEQ ID NO: 1264526 - DNA, 15 bp, Homo sapiens
cccacaagagactgt

SEQ ID NO: 1264527 - DNA, 15 bp, Homo sapiens
gcccacaagagactg

SEQ ID NO: 1264528 - DNA, 15 bp, Homo sapiens
ggcccacaagagact

SEQ ID NO: 1264529 - DNA, 15 bp, Homo sapiens
gggcccacaagagac

SEQ ID NO: 1264530 - DNA, 15 bp, Homo sapiens
tgggcccacaagaga

SEQ ID NO: 1264531 - DNA, 15 bp, Homo sapiens
gtgggcccacaagag

SEQ ID NO: 1264532 - DNA, 15 bp, Homo sapiens
tgtgggcccacaaga

SEQ ID NO: 1264533 - DNA, 15 bp, Homo sapiens
gtgtgggcccacaag

SEQ ID NO: 1264534 - DNA, 15 bp, Homo sapiens
tgtgtgggcccacaa

SEQ ID NO: 1264535 - DNA, 15 bp, Homo sapiens
ctgtgtgggcccaca

SEQ ID NO: 1264536 - DNA, 15 bp, Homo sapiens
actgtgtgggcccac

SEQ ID NO: 1264537 - DNA, 15 bp, Homo sapiens
cactgtgtgggccca

SEQ ID NO: 1264538 - DNA, 15 bp, Homo sapiens
ccactgtgtgggccc

SEQ ID NO: 1264539 - DNA, 15 bp, Homo sapiens
gccactgtgtgggcc

SEQ ID NO: 1264540 - DNA, 15 bp, Homo sapiens
agccactgtgtgggc

SEQ ID NO: 1264541 - DNA, 15 bp, Homo sapiens
aagccactgtgtggg

SEQ ID NO: 1264542 - DNA, 15 bp, Homo sapiens
gaagccactgtgtgg

SEQ ID NO: 1264543 - DNA, 15 bp, Homo sapiens
ggaagccactgtgtg

SEQ ID NO: 1264544 - DNA, 15 bp, Homo sapiens
cggaagccactgtgt

SEQ ID NO: 1264545 - DNA, 15 bp, Homo sapiens
gcggaagccactgtg

SEQ ID NO: 1264546 - DNA, 15 bp, Homo sapiens
agcggaagccactgt

SEQ ID NO: 1264547 - DNA, 15 bp, Homo sapiens
gagcggaagccactg

SEQ ID NO: 1264548 - DNA, 15 bp, Homo sapiens
ggagcggaagccact

SEQ ID NO: 1264549 - DNA, 15 bp, Homo sapiens
aggagcggaagccac

SEQ ID NO: 1264550 - DNA, 15 bp, Homo sapiens
gaggagcggaagcca

SEQ ID NO: 1264551 - DNA, 15 bp, Homo sapiens
agaggagcggaagcc

SEQ ID NO: 1264552 - DNA, 15 bp, Homo sapiens
gagaggagcggaagc

SEQ ID NO: 1264553 - DNA, 15 bp, Homo sapiens
tgagaggagcggaag

SEQ ID NO: 1264554 - DNA, 15 bp, Homo sapiens
ttgagaggagcggaa

SEQ ID NO: 1264555 - DNA, 15 bp, Homo sapiens
attgagaggagcgga

SEQ ID NO: 1264556 - DNA, 15 bp, Homo sapiens
aattgagaggagcgg

SEQ ID NO: 1264557 - DNA, 15 bp, Homo sapiens
aaattgagaggagcg

SEQ ID NO: 1264558 - DNA, 15 bp, Homo sapiens
caaattgagaggagc

SEQ ID NO: 1264559 - DNA, 15 bp, Homo sapiens
ccaaattgagaggag

SEQ ID NO: 1264560 - DNA, 15 bp, Homo sapiens
cccaaattgagagga

SEQ ID NO: 1264561 - DNA, 15 bp, Homo sapiens
tcccaaattgagagg

SEQ ID NO: 1264562 - DNA, 15 bp, Homo sapiens
ttcccaaattgagag

SEQ ID NO: 1264563 - DNA, 15 bp, Homo sapiens
tttcccaaattgaga

SEQ ID NO: 1264564 - DNA, 15 bp, Homo sapiens
atttcccaaattgag

SEQ ID NO: 1264565 - DNA, 15 bp, Homo sapiens
aatttcccaaattga

SEQ ID NO: 1264566 - DNA, 15 bp, Homo sapiens
aaatttcccaaattg

SEQ ID NO: 1264567 - DNA, 15 bp, Homo sapiens
aaaatttcccaaatt

SEQ ID NO: 1264568 - DNA, 15 bp, Homo sapiens
taaaatttcccaaat

SEQ ID NO: 1264569 - DNA, 15 bp, Homo sapiens
ttaaaatttcccaaa

SEQ ID NO: 1264570 - DNA, 15 bp, Homo sapiens
tttaaaatttcccaa

SEQ ID NO: 1264571 - DNA, 15 bp, Homo sapiens
ctttaaaatttccca

SEQ ID NO: 1264572 - DNA, 15 bp, Homo sapiens
cctttaaaatttccc

SEQ ID NO: 1264573 - DNA, 15 bp, Homo sapiens
tcctttaaaatttcc

SEQ ID NO: 1264574 - DNA, 15 bp, Homo sapiens
ttcctttaaaatttc

SEQ ID NO: 1264575 - DNA, 15 bp, Homo sapiens
attcctttaaaattt

SEQ ID NO: 1264576 - DNA, 15 bp, Homo sapiens
aattcctttaaaatt

SEQ ID NO: 1264577 - DNA, 15 bp, Homo sapiens
aaattcctttaaaat

SEQ ID NO: 1264578 - DNA, 15 bp, Homo sapiens
gaaattcctttaaaa

SEQ ID NO: 1264579 - DNA, 15 bp, Homo sapiens
ggaaattcctttaaa

SEQ ID NO: 1264580 - DNA, 15 bp, Homo sapiens
tggaaattcctttaa

SEQ ID NO: 1264581 - DNA, 15 bp, Homo sapiens
atggaaattccttta

SEQ ID NO: 1264582 - DNA, 15 bp, Homo sapiens
aatggaaattccttt

SEQ ID NO: 1264583 - DNA, 15 bp, Homo sapiens
aaatggaaattcctt

SEQ ID NO: 1264584 - DNA, 15 bp, Homo sapiens
caaatggaaattcct

SEQ ID NO: 1264585 - DNA, 15 bp, Homo sapiens
gcaaatggaaattcc

SEQ ID NO: 1264586 - DNA, 15 bp, Homo sapiens
tgcaaatggaaattc

SEQ ID NO: 1264587 - DNA, 15 bp, Homo sapiens
ctgcaaatggaaatt

SEQ ID NO: 1264588 - DNA, 15 bp, Homo sapiens
tctgcaaatggaaat

SEQ ID NO: 1264589 - DNA, 15 bp, Homo sapiens
atctgcaaatggaaa

SEQ ID NO: 1264590 - DNA, 15 bp, Homo sapiens
aatctgcaaatggaa

SEQ ID NO: 1264591 - DNA, 15 bp, Homo sapiens
caatctgcaaatgga

SEQ ID NO: 1264592 - DNA, 15 bp, Homo sapiens
tcaatctgcaaatgg

SEQ ID NO: 1264593 - DNA, 15 bp, Homo sapiens
ttcaatctgcaaatg

SEQ ID NO: 1264594 - DNA, 15 bp, Homo sapiens
gttcaatctgcaaat

SEQ ID NO: 1264595 - DNA, 15 bp, Homo sapiens
tgttcaatctgcaaa

SEQ ID NO: 1264596 - DNA, 15 bp, Homo sapiens
ttgttcaatctgcaa

SEQ ID NO: 1264597 - DNA, 15 bp, Homo sapiens
cttgttcaatctgca

SEQ ID NO: 1264598 - DNA, 15 bp, Homo sapiens
acttgttcaatctgc

SEQ ID NO: 1264599 - DNA, 15 bp, Homo sapiens
gacttgttcaatctg

SEQ ID NO: 1264600 - DNA, 15 bp, Homo sapiens
agacttgttcaatct

SEQ ID NO: 1264601 - DNA, 15 bp, Homo sapiens
tagacttgttcaatc

SEQ ID NO: 1264602 - DNA, 15 bp, Homo sapiens
ttagacttgttcaat

SEQ ID NO: 1264603 - DNA, 15 bp, Homo sapiens
gttagacttgttcaa

SEQ ID NO: 1264604 - DNA, 15 bp, Homo sapiens
ggttagacttgttca

SEQ ID NO: 1264605 - DNA, 15 bp, Homo sapiens
tggttagacttgttc

SEQ ID NO: 1264606 - DNA, 15 bp, Homo sapiens
ctggttagacttgtt

SEQ ID NO: 1264607 - DNA, 15 bp, Homo sapiens
tctggttagacttgt

SEQ ID NO: 1264608 - DNA, 15 bp, Homo sapiens
ctctggttagacttg

SEQ ID NO: 1264609 - DNA, 15 bp, Homo sapiens
tctctggttagactt

SEQ ID NO: 1264610 - DNA, 15 bp, Homo sapiens
ctctctggttagact

SEQ ID NO: 1264611 - DNA, 15 bp, Homo sapiens
tctctctggttagac

SEQ ID NO: 1264612 - DNA, 15 bp, Homo sapiens
ctctctctggttaga

SEQ ID NO: 1264613 - DNA, 15 bp, Homo sapiens
cctctctctggttag

SEQ ID NO: 1264614 - DNA, 15 bp, Homo sapiens
tcctctctctggtta

SEQ ID NO: 1264615 - DNA, 15 bp, Homo sapiens
ttcctctctctggtt

SEQ ID NO: 1264616 - DNA, 15 bp, Homo sapiens
cttcctctctctggt

SEQ ID NO: 1264617 - DNA, 15 bp, Homo sapiens
gcttcctctctctgg

SEQ ID NO: 1264618 - DNA, 15 bp, Homo sapiens
tgcttcctctctctg

SEQ ID NO: 1264619 - DNA, 15 bp, Homo sapiens
ttgcttcctctctct

SEQ ID NO: 1264620 - DNA, 15 bp, Homo sapiens
gttgcttcctctctc

SEQ ID NO: 1264621 - DNA, 15 bp, Homo sapiens
ggttgcttcctctct

SEQ ID NO: 1264622 - DNA, 15 bp, Homo sapiens
aggttgcttcctctc

SEQ ID NO: 1264623 - DNA, 15 bp, Homo sapiens
caggttgcttcctct

SEQ ID NO: 1264624 - DNA, 15 bp, Homo sapiens
tcaggttgcttcctc

SEQ ID NO: 1264625 - DNA, 15 bp, Homo sapiens
gtcaggttgcttcct

SEQ ID NO: 1264626 - DNA, 15 bp, Homo sapiens
agtcaggttgcttcc

SEQ ID NO: 1264627 - DNA, 15 bp, Homo sapiens
cagtcaggttgcttc

SEQ ID NO: 1264628 - DNA, 15 bp, Homo sapiens
acagtcaggttgctt

SEQ ID NO: 1264629 - DNA, 15 bp, Homo sapiens
aacagtcaggttgct

SEQ ID NO: 1264630 - DNA, 15 bp, Homo sapiens
aaacagtcaggttgc

SEQ ID NO: 1264631 - DNA, 15 bp, Homo sapiens
gaaacagtcaggttg

SEQ ID NO: 1264632 - DNA, 15 bp, Homo sapiens
tgaaacagtcaggtt

SEQ ID NO: 1264633 - DNA, 15 bp, Homo sapiens
ctgaaacagtcaggt

SEQ ID NO: 1264634 - DNA, 15 bp, Homo sapiens
actgaaacagtcagg

SEQ ID NO: 1264635 - DNA, 15 bp, Homo sapiens
aactgaaacagtcag

SEQ ID NO: 1264636 - DNA, 15 bp, Homo sapiens
aaactgaaacagtca

SEQ ID NO: 1264637 - DNA, 15 bp, Homo sapiens
caaactgaaacagtc

SEQ ID NO: 1264638 - DNA, 15 bp, Homo sapiens
acaaactgaaacagt

SEQ ID NO: 1264639 - DNA, 15 bp, Homo sapiens
tacaaactgaaacag

SEQ ID NO: 1264640 - DNA, 15 bp, Homo sapiens
gtacaaactgaaaca

SEQ ID NO: 1264641 - DNA, 15 bp, Homo sapiens
ggtacaaactgaaac

SEQ ID NO: 1264642 - DNA, 15 bp, Homo sapiens
aggtacaaactgaaa

SEQ ID NO: 1264643 - DNA, 15 bp, Homo sapiens
aaggtacaaactgaa

SEQ ID NO: 1264644 - DNA, 15 bp, Homo sapiens
aaaggtacaaactga

SEQ ID NO: 1264645 - DNA, 15 bp, Homo sapiens
caaaggtacaaactg

SEQ ID NO: 1264646 - DNA, 15 bp, Homo sapiens
tcaaaggtacaaact

SEQ ID NO: 1264647 - DNA, 15 bp, Homo sapiens
ttcaaaggtacaaac

SEQ ID NO: 1264648 - DNA, 15 bp, Homo sapiens
gttcaaaggtacaaa

SEQ ID NO: 1264649 - DNA, 15 bp, Homo sapiens
agttcaaaggtacaa

SEQ ID NO: 1264650 - DNA, 15 bp, Homo sapiens
aagttcaaaggtaca

SEQ ID NO: 1264651 - DNA, 15 bp, Homo sapiens
aaagttcaaaggtac

SEQ ID NO: 1264652 - DNA, 15 bp, Homo sapiens
gaaagttcaaaggta

SEQ ID NO: 1264653 - DNA, 15 bp, Homo sapiens
tgaaagttcaaaggt

SEQ ID NO: 1264654 - DNA, 15 bp, Homo sapiens
ttgaaagttcaaagg

SEQ ID NO: 1264655 - DNA, 15 bp, Homo sapiens
cttgaaagttcaaag

SEQ ID NO: 1264656 - DNA, 15 bp, Homo sapiens
acttgaaagttcaaa

SEQ ID NO: 1264657 - DNA, 15 bp, Homo sapiens
tacttgaaagttcaa

SEQ ID NO: 1264658 - DNA, 15 bp, Homo sapiens
gtacttgaaagttca

SEQ ID NO: 1264659 - DNA, 15 bp, Homo sapiens
ggtacttgaaagttc

SEQ ID NO: 1264660 - DNA, 15 bp, Homo sapiens
aggtacttgaaagtt

SEQ ID NO: 1264661 - DNA, 15 bp, Homo sapiens
aaggtacttgaaagt

SEQ ID NO: 1264662 - DNA, 15 bp, Homo sapiens
aaaggtacttgaaag

SEQ ID NO: 1264663 - DNA, 15 bp, Homo sapiens
taaaggtacttgaaa

SEQ ID NO: 1264664 - DNA, 15 bp, Homo sapiens
ttaaaggtacttgaa

SEQ ID NO: 1264665 - DNA, 15 bp, Homo sapiens
gttaaaggtacttga

SEQ ID NO: 1264666 - DNA, 15 bp, Homo sapiens
ggttaaaggtacttg

SEQ ID NO: 1264667 - DNA, 15 bp, Homo sapiens
tggttaaaggtactt

SEQ ID NO: 1264668 - DNA, 15 bp, Homo sapiens
ttggttaaaggtact

SEQ ID NO: 1264669 - DNA, 15 bp, Homo sapiens
attggttaaaggtac

SEQ ID NO: 1264670 - DNA, 15 bp, Homo sapiens
aattggttaaaggta

SEQ ID NO: 1264671 - DNA, 15 bp, Homo sapiens
taattggttaaaggt

SEQ ID NO: 1264672 - DNA, 15 bp, Homo sapiens
ctaattggttaaagg

SEQ ID NO: 1264673 - DNA, 15 bp, Homo sapiens
tctaattggttaaag

SEQ ID NO: 1264674 - DNA, 15 bp, Homo sapiens
ctctaattggttaaa

SEQ ID NO: 1264675 - DNA, 15 bp, Homo sapiens
tctctaattggttaa

SEQ ID NO: 1264676 - DNA, 15 bp, Homo sapiens
gtctctaattggtta

SEQ ID NO: 1264677 - DNA, 15 bp, Homo sapiens
tgtctctaattggtt

SEQ ID NO: 1264678 - DNA, 15 bp, Homo sapiens
ttgtctctaattggt

SEQ ID NO: 1264679 - DNA, 15 bp, Homo sapiens
gttgtctctaattgg

SEQ ID NO: 1264680 - DNA, 15 bp, Homo sapiens
agttgtctctaattg

SEQ ID NO: 1264681 - DNA, 15 bp, Homo sapiens
tagttgtctctaatt

SEQ ID NO: 1264682 - DNA, 15 bp, Homo sapiens
ttagttgtctctaat

SEQ ID NO: 1264683 - DNA, 15 bp, Homo sapiens
attagttgtctctaa

SEQ ID NO: 1264684 - DNA, 15 bp, Homo sapiens
gattagttgtctcta

SEQ ID NO: 1264685 - DNA, 15 bp, Homo sapiens
agattagttgtctct

SEQ ID NO: 1264686 - DNA, 15 bp, Homo sapiens
aagattagttgtctc

SEQ ID NO: 1264687 - DNA, 15 bp, Homo sapiens
aaagattagttgtct

SEQ ID NO: 1264688 - DNA, 15 bp, Homo sapiens
gaaagattagttgtc

SEQ ID NO: 1264689 - DNA, 15 bp, Homo sapiens
agaaagattagttgt

SEQ ID NO: 1264690 - DNA, 15 bp, Homo sapiens
aagaaagattagttg

SEQ ID NO: 1264691 - DNA, 15 bp, Homo sapiens
aaagaaagattagtt

SEQ ID NO: 1264692 - DNA, 15 bp, Homo sapiens
aaaagaaagattagt

SEQ ID NO: 1264693 - DNA, 15 bp, Homo sapiens
caaaagaaagattag

SEQ ID NO: 1264694 - DNA, 15 bp, Homo sapiens
gcaaaagaaagatta

SEQ ID NO: 1264695 - DNA, 15 bp, Homo sapiens
agcaaaagaaagatt

SEQ ID NO: 1264696 - DNA, 15 bp, Homo sapiens
gagcaaaagaaagat

SEQ ID NO: 1264697 - DNA, 15 bp, Homo sapiens
agagcaaaagaaaga

SEQ ID NO: 1264698 - DNA, 15 bp, Homo sapiens
gagagcaaaagaaag

SEQ ID NO: 1264699 - DNA, 15 bp, Homo sapiens
agagagcaaaagaaa

SEQ ID NO: 1264700 - DNA, 15 bp, Homo sapiens
gagagagcaaaagaa

SEQ ID NO: 1264701 - DNA, 15 bp, Homo sapiens
agagagagcaaaaga

SEQ ID NO: 1264702 - DNA, 15 bp, Homo sapiens
aagagagagcaaaag

SEQ ID NO: 1264703 - DNA, 15 bp, Homo sapiens
aaagagagagcaaaa

SEQ ID NO: 1264704 - DNA, 15 bp, Homo sapiens
aaaagagagagcaaa

SEQ ID NO: 1264705 - DNA, 15 bp, Homo sapiens
aaaaagagagagcaa

SEQ ID NO: 1264706 - DNA, 15 bp, Homo sapiens
aaaaaagagagagca

SEQ ID NO: 1264707 - DNA, 15 bp, Homo sapiens
aaaaaaagagagagc

SEQ ID NO: 1264708 - DNA, 15 bp, Homo sapiens
gtctccaaaaaaaaa

SEQ ID NO: 1264709 - DNA, 15 bp, Homo sapiens
tgtctccaaaaaaaa

SEQ ID NO: 1264710 - DNA, 15 bp, Homo sapiens
ctgtctccaaaaaaa

SEQ ID NO: 1264711 - DNA, 15 bp, Homo sapiens
tctgtctccaaaaaa

SEQ ID NO: 1264712 - DNA, 15 bp, Homo sapiens
ctctgtctccaaaaa

SEQ ID NO: 1264713 - DNA, 15 bp, Homo sapiens
actctgtctccaaaa

SEQ ID NO: 1264714 - DNA, 15 bp, Homo sapiens
gactctgtctccaaa

SEQ ID NO: 1264715 - DNA, 15 bp, Homo sapiens
agactctgtctccaa

SEQ ID NO: 1264716 - DNA, 15 bp, Homo sapiens
gagactctgtctcca

SEQ ID NO: 1264717 - DNA, 15 bp, Homo sapiens
cgagactctgtctcc

SEQ ID NO: 1264718 - DNA, 15 bp, Homo sapiens
cgtactccagcctgg

SEQ ID NO: 1264719 - DNA, 15 bp, Homo sapiens
ccgtactccagcctg

SEQ ID NO: 1264720 - DNA, 15 bp, Homo sapiens
accgtactccagcct

SEQ ID NO: 1264721 - DNA, 15 bp, Homo sapiens
caccgtactccagcc

SEQ ID NO: 1264722 - DNA, 15 bp, Homo sapiens
ccaccgtactccagc

SEQ ID NO: 1264723 - DNA, 15 bp, Homo sapiens
gccaccgtactccag

SEQ ID NO: 1264724 - DNA, 15 bp, Homo sapiens
tgccaccgtactcca

SEQ ID NO: 1264725 - DNA, 15 bp, Homo sapiens
atgccaccgtactcc

SEQ ID NO: 1264726 - DNA, 15 bp, Homo sapiens
catgccaccgtactc

SEQ ID NO: 1264727 - DNA, 15 bp, Homo sapiens
tcatgccaccgtact

SEQ ID NO: 1264728 - DNA, 15 bp, Homo sapiens
atcatgccaccgtac

SEQ ID NO: 1264729 - DNA, 15 bp, Homo sapiens
gatcatgccaccgta

SEQ ID NO: 1264730 - DNA, 15 bp, Homo sapiens
agatcatgccaccgt

SEQ ID NO: 1264731 - DNA, 15 bp, Homo sapiens
aagatcatgccaccg

SEQ ID NO: 1264732 - DNA, 15 bp, Homo sapiens
caagatcatgccacc

SEQ ID NO: 1264733 - DNA, 15 bp, Homo sapiens
aaggttgcagtgagc

SEQ ID NO: 1264734 - DNA, 15 bp, Homo sapiens
gaaggttgcagtgag

SEQ ID NO: 1264735 - DNA, 15 bp, Homo sapiens
tgaaggttgcagtga

SEQ ID NO: 1264736 - DNA, 15 bp, Homo sapiens
gtgaaggttgcagtg

SEQ ID NO: 1264737 - DNA, 15 bp, Homo sapiens
ggtgaaggttgcagt

SEQ ID NO: 1264738 - DNA, 15 bp, Homo sapiens
aggtgaaggttgcag

SEQ ID NO: 1264739 - DNA, 15 bp, Homo sapiens
gaggtgaaggttgca

SEQ ID NO: 1264740 - DNA, 15 bp, Homo sapiens
ggaggtgaaggttgc

SEQ ID NO: 1264741 - DNA, 15 bp, Homo sapiens
aggaggtgaaggttg

SEQ ID NO: 1264742 - DNA, 15 bp, Homo sapiens
caggaggtgaaggtt

SEQ ID NO: 1264743 - DNA, 15 bp, Homo sapiens
ccaggaggtgaaggt

SEQ ID NO: 1264744 - DNA, 15 bp, Homo sapiens
accaggaggtgaagg

SEQ ID NO: 1264745 - DNA, 15 bp, Homo sapiens
aaccaggaggtgaag

SEQ ID NO: 1264746 - DNA, 15 bp, Homo sapiens
gaaccaggaggtgaa

SEQ ID NO: 1264747 - DNA, 15 bp, Homo sapiens
tgaaccaggaggtga

SEQ ID NO: 1264748 - DNA, 15 bp, Homo sapiens
ttgaaccaggaggtg

SEQ ID NO: 1264749 - DNA, 15 bp, Homo sapiens
cttgaaccaggaggt

SEQ ID NO: 1264750 - DNA, 15 bp, Homo sapiens
tgcttgaaccaggag

SEQ ID NO: 1264751 - DNA, 15 bp, Homo sapiens
cactactcgggaggc

SEQ ID NO: 1264752 - DNA, 15 bp, Homo sapiens
ccactactcgggagg

SEQ ID NO: 1264753 - DNA, 15 bp, Homo sapiens
tccactactcgggag

SEQ ID NO: 1264754 - DNA, 15 bp, Homo sapiens
atccactactcggga

SEQ ID NO: 1264755 - DNA, 15 bp, Homo sapiens
aatccactactcggg

SEQ ID NO: 1264756 - DNA, 15 bp, Homo sapiens
taatccactactcgg

SEQ ID NO: 1264757 - DNA, 15 bp, Homo sapiens
ttaatccactactcg

SEQ ID NO: 1264758 - DNA, 15 bp, Homo sapiens
tttaatccactactc

SEQ ID NO: 1264759 - DNA, 15 bp, Homo sapiens
ctttaatccactact

SEQ ID NO: 1264760 - DNA, 15 bp, Homo sapiens
tctttaatccactac

SEQ ID NO: 1264761 - DNA, 15 bp, Homo sapiens
atctttaatccacta

SEQ ID NO: 1264762 - DNA, 15 bp, Homo sapiens
catctttaatccact

SEQ ID NO: 1264763 - DNA, 15 bp, Homo sapiens
gcatctttaatccac

SEQ ID NO: 1264764 - DNA, 15 bp, Homo sapiens
ggcatctttaatcca

SEQ ID NO: 1264765 - DNA, 15 bp, Homo sapiens
gggcatctttaatcc

SEQ ID NO: 1264766 - DNA, 15 bp, Homo sapiens
agggcatctttaatc

SEQ ID NO: 1264767 - DNA, 15 bp, Homo sapiens
gagggcatctttaat

SEQ ID NO: 1264768 - DNA, 15 bp, Homo sapiens
ggagggcatctttaa

SEQ ID NO: 1264769 - DNA, 15 bp, Homo sapiens
tggagggcatcttta

SEQ ID NO: 1264770 - DNA, 15 bp, Homo sapiens
gtggagggcatcttt

SEQ ID NO: 1264771 - DNA, 15 bp, Homo sapiens
ggtggagggcatctt

SEQ ID NO: 1264772 - DNA, 15 bp, Homo sapiens
tggtggagggcatct

SEQ ID NO: 1264773 - DNA, 15 bp, Homo sapiens
gtggtggagggcatc

SEQ ID NO: 1264774 - DNA, 15 bp, Homo sapiens
cgtggtggagggcat

SEQ ID NO: 1264775 - DNA, 15 bp, Homo sapiens
gcgtggtggagggca

SEQ ID NO: 1264776 - DNA, 15 bp, Homo sapiens
ggcgtggtggagggc

SEQ ID NO: 1264777 - DNA, 15 bp, Homo sapiens
gggcgtggtggaggg

SEQ ID NO: 1264778 - DNA, 15 bp, Homo sapiens
tgggcgtggtggagg

SEQ ID NO: 1264779 - DNA, 15 bp, Homo sapiens
ctgggcgtggtggag

SEQ ID NO: 1264780 - DNA, 15 bp, Homo sapiens
gctgggcgtggtgga

SEQ ID NO: 1264781 - DNA, 15 bp, Homo sapiens
gggtgaaaccctgtc

SEQ ID NO: 1264782 - DNA, 15 bp, Homo sapiens
agggtgaaaccctgt

SEQ ID NO: 1264783 - DNA, 15 bp, Homo sapiens
cagggtgaaaccctg

SEQ ID NO: 1264784 - DNA, 15 bp, Homo sapiens
acagggtgaaaccct

SEQ ID NO: 1264785 - DNA, 15 bp, Homo sapiens
aacagggtgaaaccc

SEQ ID NO: 1264786 - DNA, 15 bp, Homo sapiens
caacagggtgaaacc

SEQ ID NO: 1264787 - DNA, 15 bp, Homo sapiens
ccaacagggtgaaac

SEQ ID NO: 1264788 - DNA, 15 bp, Homo sapiens
accaacagggtgaaa

SEQ ID NO: 1264789 - DNA, 15 bp, Homo sapiens
gaccaacagggtgaa

SEQ ID NO: 1264790 - DNA, 15 bp, Homo sapiens
tgaccaacagggtga

SEQ ID NO: 1264791 - DNA, 15 bp, Homo sapiens
ctgaccaacagggtg

SEQ ID NO: 1264792 - DNA, 15 bp, Homo sapiens
cctgaccaacagggt

SEQ ID NO: 1264793 - DNA, 15 bp, Homo sapiens
gcctgaccaacaggg

SEQ ID NO: 1264794 - DNA, 15 bp, Homo sapiens
agcctgaccaacagg

SEQ ID NO: 1264795 - DNA, 15 bp, Homo sapiens
cagcctgaccaacag

SEQ ID NO: 1264796 - DNA, 15 bp, Homo sapiens
ttagcactttgggag

SEQ ID NO: 1264797 - DNA, 15 bp, Homo sapiens
cttagcactttggga

SEQ ID NO: 1264798 - DNA, 15 bp, Homo sapiens
tcttagcactttggg

SEQ ID NO: 1264799 - DNA, 15 bp, Homo sapiens
gtcttagcactttgg

SEQ ID NO: 1264800 - DNA, 15 bp, Homo sapiens
agtcttagcactttg

SEQ ID NO: 1264801 - DNA, 15 bp, Homo sapiens
tagtcttagcacttt

SEQ ID NO: 1264802 - DNA, 15 bp, Homo sapiens
gtagtcttagcactt

SEQ ID NO: 1264803 - DNA, 15 bp, Homo sapiens
tgtagtcttagcact

SEQ ID NO: 1264804 - DNA, 15 bp, Homo sapiens
gtgtagtcttagcac

SEQ ID NO: 1264805 - DNA, 15 bp, Homo sapiens
agtgtagtcttagca

SEQ ID NO: 1264806 - DNA, 15 bp, Homo sapiens
gagtgtagtcttagc

SEQ ID NO: 1264807 - DNA, 15 bp, Homo sapiens
tgagtgtagtcttag

SEQ ID NO: 1264808 - DNA, 15 bp, Homo sapiens
ctgagtgtagtctta

SEQ ID NO: 1264809 - DNA, 15 bp, Homo sapiens
gctgagtgtagtctt

SEQ ID NO: 1264810 - DNA, 15 bp, Homo sapiens
agctgagtgtagtct

SEQ ID NO: 1264811 - DNA, 15 bp, Homo sapiens
gagctgagtgtagtc

SEQ ID NO: 1264812 - DNA, 15 bp, Homo sapiens
tgagctgagtgtagt

SEQ ID NO: 1264813 - DNA, 15 bp, Homo sapiens
ttgagctgagtgtag

SEQ ID NO: 1264814 - DNA, 15 bp, Homo sapiens
tttgagctgagtgta

SEQ ID NO: 1264815 - DNA, 15 bp, Homo sapiens
ctttgagctgagtgt

SEQ ID NO: 1264816 - DNA, 15 bp, Homo sapiens
actttgagctgagtg

SEQ ID NO: 1264817 - DNA, 15 bp, Homo sapiens
cactttgagctgagt

SEQ ID NO: 1264818 - DNA, 15 bp, Homo sapiens
gcactttgagctgag

SEQ ID NO: 1264819 - DNA, 15 bp, Homo sapiens
agcactttgagctga

SEQ ID NO: 1264820 - DNA, 15 bp, Homo sapiens
cagcactttgagctg

SEQ ID NO: 1264821 - DNA, 15 bp, Homo sapiens
tcagcactttgagct

SEQ ID NO: 1264822 - DNA, 15 bp, Homo sapiens
ctcagcactttgagc

SEQ ID NO: 1264823 - DNA, 15 bp, Homo sapiens
gctcagcactttgag

SEQ ID NO: 1264824 - DNA, 15 bp, Homo sapiens
ggctcagcactttga

SEQ ID NO: 1264825 - DNA, 15 bp, Homo sapiens
tggctcagcactttg

SEQ ID NO: 1264826 - DNA, 15 bp, Homo sapiens
gtggctcagcacttt

SEQ ID NO: 1264827 - DNA, 15 bp, Homo sapiens
agtggctcagcactt

SEQ ID NO: 1264828 - DNA, 15 bp, Homo sapiens
cagtggctcagcact

SEQ ID NO: 1264829 - DNA, 15 bp, Homo sapiens
acagtggctcagcac

SEQ ID NO: 1264830 - DNA, 15 bp, Homo sapiens
cacagtggctcagca

SEQ ID NO: 1264831 - DNA, 15 bp, Homo sapiens
gcacagtggctcagc

SEQ ID NO: 1264832 - DNA, 15 bp, Homo sapiens
ggcacagtggctcag

SEQ ID NO: 1264833 - DNA, 15 bp, Homo sapiens
cttgggccgggcaca

SEQ ID NO: 1264834 - DNA, 15 bp, Homo sapiens
tcttgggccgggcac

SEQ ID NO: 1264835 - DNA, 15 bp, Homo sapiens
gtcttgggccgggca

SEQ ID NO: 1264836 - DNA, 15 bp, Homo sapiens
tgtcttgggccgggc

SEQ ID NO: 1264837 - DNA, 15 bp, Homo sapiens
ttgtcttgggccggg

SEQ ID NO: 1264838 - DNA, 15 bp, Homo sapiens
gttgtcttgggccgg

SEQ ID NO: 1264839 - DNA, 15 bp, Homo sapiens
agttgtcttgggccg

SEQ ID NO: 1264840 - DNA, 15 bp, Homo sapiens
tagttgtcttgggcc

SEQ ID NO: 1264841 - DNA, 15 bp, Homo sapiens
ttagttgtcttgggc

SEQ ID NO: 1264842 - DNA, 15 bp, Homo sapiens
attagttgtcttggg

SEQ ID NO: 1264843 - DNA, 15 bp, Homo sapiens
gattagttgtcttgg

SEQ ID NO: 1264844 - DNA, 15 bp, Homo sapiens
agattagttgtcttg

SEQ ID NO: 1264845 - DNA, 15 bp, Homo sapiens
gagattagttgtctt

SEQ ID NO: 1264846 - DNA, 15 bp, Homo sapiens
tgagattagttgtct

SEQ ID NO: 1264847 - DNA, 15 bp, Homo sapiens
ctgagattagttgtc

SEQ ID NO: 1264848 - DNA, 15 bp, Homo sapiens
tctgagattagttgt

SEQ ID NO: 1264849 - DNA, 15 bp, Homo sapiens
ctctgagattagttg

SEQ ID NO: 1264850 - DNA, 15 bp, Homo sapiens
gctctgagattagtt

SEQ ID NO: 1264851 - DNA, 15 bp, Homo sapiens
tgctctgagattagt

SEQ ID NO: 1264852 - DNA, 15 bp, Homo sapiens
ttgctctgagattag

SEQ ID NO: 1264853 - DNA, 15 bp, Homo sapiens
tttgctctgagatta

SEQ ID NO: 1264854 - DNA, 15 bp, Homo sapiens
ttttgctctgagatt

SEQ ID NO: 1264855 - DNA, 15 bp, Homo sapiens
attttgctctgagat

SEQ ID NO: 1264856 - DNA, 15 bp, Homo sapiens
aattttgctctgaga

SEQ ID NO: 1264857 - DNA, 15 bp, Homo sapiens
aaattttgctctgag

SEQ ID NO: 1264858 - DNA, 15 bp, Homo sapiens
gaaattttgctctga

SEQ ID NO: 1264859 - DNA, 15 bp, Homo sapiens
agaaattttgctctg

SEQ ID NO: 1264860 - DNA, 15 bp, Homo sapiens
aagaaattttgctct

SEQ ID NO: 1264861 - DNA, 15 bp, Homo sapiens
caagaaattttgctc

SEQ ID NO: 1264862 - DNA, 15 bp, Homo sapiens
gcaagaaattttgct

SEQ ID NO: 1264863 - DNA, 15 bp, Homo sapiens
ggcaagaaattttgc

SEQ ID NO: 1264864 - DNA, 15 bp, Homo sapiens
aggcaagaaattttg

SEQ ID NO: 1264865 - DNA, 15 bp, Homo sapiens
caggcaagaaatttt

SEQ ID NO: 1264866 - DNA, 15 bp, Homo sapiens
tcaggcaagaaattt

SEQ ID NO: 1264867 - DNA, 15 bp, Homo sapiens
ttcaggcaagaaatt

SEQ ID NO: 1264868 - DNA, 15 bp, Homo sapiens
cttcaggcaagaaat

SEQ ID NO: 1264869 - DNA, 15 bp, Homo sapiens
acttcaggcaagaaa

SEQ ID NO: 1264870 - DNA, 15 bp, Homo sapiens
gacttcaggcaagaa

SEQ ID NO: 1264871 - DNA, 15 bp, Homo sapiens
agacttcaggcaaga

SEQ ID NO: 1264872 - DNA, 15 bp, Homo sapiens
gagacttcaggcaag

SEQ ID NO: 1264873 - DNA, 15 bp, Homo sapiens
tgagacttcaggcaa

SEQ ID NO: 1264874 - DNA, 15 bp, Homo sapiens
atgagacttcaggca

SEQ ID NO: 1264875 - DNA, 15 bp, Homo sapiens
aatgagacttcaggc

SEQ ID NO: 1264876 - DNA, 15 bp, Homo sapiens
aaatgagacttcagg

SEQ ID NO: 1264877 - DNA, 15 bp, Homo sapiens
gaaatgagacttcag

SEQ ID NO: 1264878 - DNA, 15 bp, Homo sapiens
agaaatgagacttca

SEQ ID NO: 1264879 - DNA, 15 bp, Homo sapiens
cagaaatgagacttc

SEQ ID NO: 1264880 - DNA, 15 bp, Homo sapiens
tcagaaatgagactt

SEQ ID NO: 1264881 - DNA, 15 bp, Homo sapiens
ttcagaaatgagact

SEQ ID NO: 1264882 - DNA, 15 bp, Homo sapiens
tttcagaaatgagac

SEQ ID NO: 1264883 - DNA, 15 bp, Homo sapiens
ctttcagaaatgaga

SEQ ID NO: 1264884 - DNA, 15 bp, Homo sapiens
actttcagaaatgag

SEQ ID NO: 1264885 - DNA, 15 bp, Homo sapiens
aactttcagaaatga

SEQ ID NO: 1264886 - DNA, 15 bp, Homo sapiens
caactttcagaaatg

SEQ ID NO: 1264887 - DNA, 15 bp, Homo sapiens
tcaactttcagaaat

SEQ ID NO: 1264888 - DNA, 15 bp, Homo sapiens
atcaactttcagaaa

SEQ ID NO: 1264889 - DNA, 15 bp, Homo sapiens
aatcaactttcagaa

SEQ ID NO: 1264890 - DNA, 15 bp, Homo sapiens
aaatcaactttcaga

SEQ ID NO: 1264891 - DNA, 15 bp, Homo sapiens
caaatcaactttcag

SEQ ID NO: 1264892 - DNA, 15 bp, Homo sapiens
gcaaatcaactttca

SEQ ID NO: 1264893 - DNA, 15 bp, Homo sapiens
tgcaaatcaactttc

SEQ ID NO: 1264894 - DNA, 15 bp, Homo sapiens
atgcaaatcaacttt

SEQ ID NO: 1264895 - DNA, 15 bp, Homo sapiens
catgcaaatcaactt

SEQ ID NO: 1264896 - DNA, 15 bp, Homo sapiens
acatgcaaatcaact

SEQ ID NO: 1264897 - DNA, 15 bp, Homo sapiens
cacatgcaaatcaac

SEQ ID NO: 1264898 - DNA, 15 bp, Homo sapiens
tcacatgcaaatcaa

SEQ ID NO: 1264899 - DNA, 15 bp, Homo sapiens
atcacatgcaaatca

SEQ ID NO: 1264900 - DNA, 15 bp, Homo sapiens
gatcacatgcaaatc

SEQ ID NO: 1264901 - DNA, 15 bp, Homo sapiens
tgatcacatgcaaat

SEQ ID NO: 1264902 - DNA, 15 bp, Homo sapiens
ttgatcacatgcaaa

SEQ ID NO: 1264903 - DNA, 15 bp, Homo sapiens
cttgatcacatgcaa

SEQ ID NO: 1264904 - DNA, 15 bp, Homo sapiens
ccttgatcacatgca

SEQ ID NO: 1264905 - DNA, 15 bp, Homo sapiens
tccttgatcacatgc

SEQ ID NO: 1264906 - DNA, 15 bp, Homo sapiens
ctccttgatcacatg

SEQ ID NO: 1264907 - DNA, 15 bp, Homo sapiens
actccttgatcacat

SEQ ID NO: 1264908 - DNA, 15 bp, Homo sapiens
tactccttgatcaca

SEQ ID NO: 1264909 - DNA, 15 bp, Homo sapiens
atactccttgatcac

SEQ ID NO: 1264910 - DNA, 15 bp, Homo sapiens
aatactccttgatca

SEQ ID NO: 1264911 - DNA, 15 bp, Homo sapiens
aaatactccttgatc

SEQ ID NO: 1264912 - DNA, 15 bp, Homo sapiens
caaatactccttgat

SEQ ID NO: 1264913 - DNA, 15 bp, Homo sapiens
tcaaatactccttga

SEQ ID NO: 1264914 - DNA, 15 bp, Homo sapiens
ttcaaatactccttg

SEQ ID NO: 1264915 - DNA, 15 bp, Homo sapiens
cttcaaatactcctt

SEQ ID NO: 1264916 - DNA, 15 bp, Homo sapiens
acttcaaatactcct

SEQ ID NO: 1264917 - DNA, 15 bp, Homo sapiens
gacttcaaatactcc

SEQ ID NO: 1264918 - DNA, 15 bp, Homo sapiens
agacttcaaatactc

SEQ ID NO: 1264919 - DNA, 15 bp, Homo sapiens
aagacttcaaatact

SEQ ID NO: 1264920 - DNA, 15 bp, Homo sapiens
taagacttcaaatac

SEQ ID NO: 1264921 - DNA, 15 bp, Homo sapiens
ataagacttcaaata

SEQ ID NO: 1264922 - DNA, 15 bp, Homo sapiens
gataagacttcaaat

SEQ ID NO: 1264923 - DNA, 15 bp, Homo sapiens
ggataagacttcaaa

SEQ ID NO: 1264924 - DNA, 15 bp, Homo sapiens
tggataagacttcaa

SEQ ID NO: 1264925 - DNA, 15 bp, Homo sapiens
ttggataagacttca

SEQ ID NO: 1264926 - DNA, 15 bp, Homo sapiens
tttggataagacttc

SEQ ID NO: 1264927 - DNA, 15 bp, Homo sapiens
atttggataagactt

SEQ ID NO: 1264928 - DNA, 15 bp, Homo sapiens
gatttggataagact

SEQ ID NO: 1264929 - DNA, 15 bp, Homo sapiens
agatttggataagac

SEQ ID NO: 1264930 - DNA, 15 bp, Homo sapiens
aagatttggataaga

SEQ ID NO: 1264931 - DNA, 15 bp, Homo sapiens
taagatttggataag

SEQ ID NO: 1264932 - DNA, 15 bp, Homo sapiens
ctaagatttggataa

SEQ ID NO: 1264933 - DNA, 15 bp, Homo sapiens
gctaagatttggata

SEQ ID NO: 1264934 - DNA, 15 bp, Homo sapiens
agctaagatttggat

SEQ ID NO: 1264935 - DNA, 15 bp, Homo sapiens
cagctaagatttgga

SEQ ID NO: 1264936 - DNA, 15 bp, Homo sapiens
tcagctaagatttgg

SEQ ID NO: 1264937 - DNA, 15 bp, Homo sapiens
gtcagctaagatttg

SEQ ID NO: 1264938 - DNA, 15 bp, Homo sapiens
ggtcagctaagattt

SEQ ID NO: 1264939 - DNA, 15 bp, Homo sapiens
aggtcagctaagatt

SEQ ID NO: 1264940 - DNA, 15 bp, Homo sapiens
aaggtcagctaagat

SEQ ID NO: 1264941 - DNA, 15 bp, Homo sapiens
gaaggtcagctaaga

SEQ ID NO: 1264942 - DNA, 15 bp, Homo sapiens
agaaggtcagctaag

SEQ ID NO: 1264943 - DNA, 15 bp, Homo sapiens
gagaaggtcagctaa

SEQ ID NO: 1264944 - DNA, 15 bp, Homo sapiens
agagaaggtcagcta

SEQ ID NO: 1264945 - DNA, 15 bp, Homo sapiens
aagagaaggtcagct

SEQ ID NO: 1264946 - DNA, 15 bp, Homo sapiens
caagagaaggtcagc

SEQ ID NO: 1264947 - DNA, 15 bp, Homo sapiens
gcaagagaaggtcag

SEQ ID NO: 1264948 - DNA, 15 bp, Homo sapiens
agcaagagaaggtca

SEQ ID NO: 1264949 - DNA, 15 bp, Homo sapiens
aagcaagagaaggtc

SEQ ID NO: 1264950 - DNA, 15 bp, Homo sapiens
taagcaagagaaggt

SEQ ID NO: 1264951 - DNA, 15 bp, Homo sapiens
ttaagcaagagaagg

SEQ ID NO: 1264952 - DNA, 15 bp, Homo sapiens
gttaagcaagagaag

SEQ ID NO: 1264953 - DNA, 15 bp, Homo sapiens
tgttaagcaagagaa

SEQ ID NO: 1264954 - DNA, 15 bp, Homo sapiens
ctgttaagcaagaga

SEQ ID NO: 1264955 - DNA, 15 bp, Homo sapiens
actgttaagcaagag

SEQ ID NO: 1264956 - DNA, 15 bp, Homo sapiens
aactgttaagcaaga

SEQ ID NO: 1264957 - DNA, 15 bp, Homo sapiens
caactgttaagcaag

SEQ ID NO: 1264958 - DNA, 15 bp, Homo sapiens
acaactgttaagcaa

SEQ ID NO: 1264959 - DNA, 15 bp, Homo sapiens
gacaactgttaagca

SEQ ID NO: 1264960 - DNA, 15 bp, Homo sapiens
tgacaactgttaagc

SEQ ID NO: 1264961 - DNA, 15 bp, Homo sapiens
ctgacaactgttaag

SEQ ID NO: 1264962 - DNA, 15 bp, Homo sapiens
tctgacaactgttaa

SEQ ID NO: 1264963 - DNA, 15 bp, Homo sapiens
ttctgacaactgtta

SEQ ID NO: 1264964 - DNA, 15 bp, Homo sapiens
attctgacaactgtt

SEQ ID NO: 1264965 - DNA, 15 bp, Homo sapiens
gattctgacaactgt

SEQ ID NO: 1264966 - DNA, 15 bp, Homo sapiens
tgattctgacaactg

SEQ ID NO: 1264967 - DNA, 15 bp, Homo sapiens
gtgattctgacaact

SEQ ID NO: 1264968 - DNA, 15 bp, Homo sapiens
ggtgattctgacaac

SEQ ID NO: 1264969 - DNA, 15 bp, Homo sapiens
aggtgattctgacaa

SEQ ID NO: 1264970 - DNA, 15 bp, Homo sapiens
gaggtgattctgaca

SEQ ID NO: 1264971 - DNA, 15 bp, Homo sapiens
agaggtgattctgac

SEQ ID NO: 1264972 - DNA, 15 bp, Homo sapiens
aagaggtgattctga

SEQ ID NO: 1264973 - DNA, 15 bp, Homo sapiens
taagaggtgattctg

SEQ ID NO: 1264974 - DNA, 15 bp, Homo sapiens
ttaagaggtgattct

SEQ ID NO: 1264975 - DNA, 15 bp, Homo sapiens
attaagaggtgattc

SEQ ID NO: 1264976 - DNA, 15 bp, Homo sapiens
cattaagaggtgatt

SEQ ID NO: 1264977 - DNA, 15 bp, Homo sapiens
tcattaagaggtgat

SEQ ID NO: 1264978 - DNA, 15 bp, Homo sapiens
ttcattaagaggtga

SEQ ID NO: 1264979 - DNA, 15 bp, Homo sapiens
cttcattaagaggtg

SEQ ID NO: 1264980 - DNA, 15 bp, Homo sapiens
ccttcattaagaggt

SEQ ID NO: 1264981 - DNA, 15 bp, Homo sapiens
cccttcattaagagg

SEQ ID NO: 1264982 - DNA, 15 bp, Homo sapiens
ccccttcattaagag

SEQ ID NO: 1264983 - DNA, 15 bp, Homo sapiens
accccttcattaaga

SEQ ID NO: 1264984 - DNA, 15 bp, Homo sapiens
aaccccttcattaag

SEQ ID NO: 1264985 - DNA, 15 bp, Homo sapiens
caaccccttcattaa

SEQ ID NO: 1264986 - DNA, 15 bp, Homo sapiens
ccaaccccttcatta

SEQ ID NO: 1264987 - DNA, 15 bp, Homo sapiens
accaaccccttcatt

SEQ ID NO: 1264988 - DNA, 15 bp, Homo sapiens
caccaaccccttcat

SEQ ID NO: 1264989 - DNA, 15 bp, Homo sapiens
ccaccaaccccttca

SEQ ID NO: 1264990 - DNA, 15 bp, Homo sapiens
tccaccaaccccttc

SEQ ID NO: 1264991 - DNA, 15 bp, Homo sapiens
ctccaccaacccctt

SEQ ID NO: 1264992 - DNA, 15 bp, Homo sapiens
actccaccaacccct

SEQ ID NO: 1264993 - DNA, 15 bp, Homo sapiens
gactccaccaacccc

SEQ ID NO: 1264994 - DNA, 15 bp, Homo sapiens
tgactccaccaaccc

SEQ ID NO: 1264995 - DNA, 15 bp, Homo sapiens
ctgactccaccaacc

SEQ ID NO: 1264996 - DNA, 15 bp, Homo sapiens
gctgactccaccaac

SEQ ID NO: 1264997 - DNA, 15 bp, Homo sapiens
tgctgactccaccaa

SEQ ID NO: 1264998 - DNA, 15 bp, Homo sapiens
gtgctgactccacca

SEQ ID NO: 1264999 - DNA, 15 bp, Homo sapiens
agtgctgactccacc

SEQ ID NO: 1265000 - DNA, 15 bp, Homo sapiens
aagtgctgactccac

SEQ ID NO: 1265001 - DNA, 15 bp, Homo sapiens
caagtgctgactcca

SEQ ID NO: 1265002 - DNA, 15 bp, Homo sapiens
tcaagtgctgactcc

SEQ ID NO: 1265003 - DNA, 15 bp, Homo sapiens
gtcaagtgctgactc

SEQ ID NO: 1265004 - DNA, 15 bp, Homo sapiens
agtcaagtgctgact

SEQ ID NO: 1265005 - DNA, 15 bp, Homo sapiens
gagtcaagtgctgac

SEQ ID NO: 1265006 - DNA, 15 bp, Homo sapiens
agagtcaagtgctga

SEQ ID NO: 1265007 - DNA, 15 bp, Homo sapiens
tagagtcaagtgctg

SEQ ID NO: 1265008 - DNA, 15 bp, Homo sapiens
ttagagtcaagtgct

SEQ ID NO: 1265009 - DNA, 15 bp, Homo sapiens
gttagagtcaagtgc

SEQ ID NO: 1265010 - DNA, 15 bp, Homo sapiens
tgttagagtcaagtg

SEQ ID NO: 1265011 - DNA, 15 bp, Homo sapiens
ctgttagagtcaagt

SEQ ID NO: 1265012 - DNA, 15 bp, Homo sapiens
tctgttagagtcaag

SEQ ID NO: 1265013 - DNA, 15 bp, Homo sapiens
ttctgttagagtcaa

SEQ ID NO: 1265014 - DNA, 15 bp, Homo sapiens
attctgttagagtca

SEQ ID NO: 1265015 - DNA, 15 bp, Homo sapiens
aattctgttagagtc

SEQ ID NO: 1265016 - DNA, 15 bp, Homo sapiens
aaattctgttagagt

SEQ ID NO: 1265017 - DNA, 15 bp, Homo sapiens
gaaattctgttagag

SEQ ID NO: 1265018 - DNA, 15 bp, Homo sapiens
ggaaattctgttaga

SEQ ID NO: 1265019 - DNA, 15 bp, Homo sapiens
tggaaattctgttag

SEQ ID NO: 1265020 - DNA, 15 bp, Homo sapiens
atggaaattctgtta

SEQ ID NO: 1265021 - DNA, 15 bp, Homo sapiens
tatggaaattctgtt

SEQ ID NO: 1265022 - DNA, 15 bp, Homo sapiens
atatggaaattctgt

SEQ ID NO: 1265023 - DNA, 15 bp, Homo sapiens
tatatggaaattctg

SEQ ID NO: 1265024 - DNA, 15 bp, Homo sapiens
ttatatggaaattct

SEQ ID NO: 1265025 - DNA, 15 bp, Homo sapiens
tttatatggaaattc

SEQ ID NO: 1265026 - DNA, 15 bp, Homo sapiens
atttatatggaaatt

SEQ ID NO: 1265027 - DNA, 15 bp, Homo sapiens
aatttatatggaaat

SEQ ID NO: 1265028 - DNA, 15 bp, Homo sapiens
aaatttatatggaaa

SEQ ID NO: 1265029 - DNA, 15 bp, Homo sapiens
taaatttatatggaa

SEQ ID NO: 1265030 - DNA, 15 bp, Homo sapiens
ttaaatttatatgga

SEQ ID NO: 1265031 - DNA, 15 bp, Homo sapiens
attaaatttatatgg

SEQ ID NO: 1265032 - DNA, 15 bp, Homo sapiens
tattaaatttatatg

SEQ ID NO: 1265033 - DNA, 15 bp, Homo sapiens
atattaaatttatat

SEQ ID NO: 1265034 - DNA, 15 bp, Homo sapiens
tatattaaatttata

SEQ ID NO: 1265035 - DNA, 15 bp, Homo sapiens
atatattaaatttat

SEQ ID NO: 1265036 - DNA, 15 bp, Homo sapiens
aatatattaaattta

SEQ ID NO: 1265037 - DNA, 15 bp, Homo sapiens
aaatatattaaattt

SEQ ID NO: 1265038 - DNA, 15 bp, Homo sapiens
taaatatattaaatt

SEQ ID NO: 1265039 - DNA, 15 bp, Homo sapiens
ttaaatatattaaat

SEQ ID NO: 1265040 - DNA, 15 bp, Homo sapiens
tttaaatatattaaa

SEQ ID NO: 1265041 - DNA, 15 bp, Homo sapiens
ttttaaatatattaa

SEQ ID NO: 1265042 - DNA, 15 bp, Homo sapiens
tttttaaatatatta

SEQ ID NO: 1265043 - DNA, 15 bp, Homo sapiens
ttttttaaatatatt

SEQ ID NO: 1265044 - DNA, 15 bp, Homo sapiens
attttttaaatatat

SEQ ID NO: 1265045 - DNA, 15 bp, Homo sapiens
tattttttaaatata

SEQ ID NO: 1265046 - DNA, 15 bp, Homo sapiens
ttattttttaaatat

SEQ ID NO: 1265047 - DNA, 15 bp, Homo sapiens
attattttttaaata

SEQ ID NO: 1265048 - DNA, 15 bp, Homo sapiens
aattattttttaaat

SEQ ID NO: 1265049 - DNA, 15 bp, Homo sapiens
taattattttttaaa

SEQ ID NO: 1265050 - DNA, 15 bp, Homo sapiens
ataattattttttaa

SEQ ID NO: 1265051 - DNA, 15 bp, Homo sapiens
cataattatttttta

SEQ ID NO: 1265052 - DNA, 15 bp, Homo sapiens
tcataattatttttt

SEQ ID NO: 1265053 - DNA, 15 bp, Homo sapiens
ttcataattattttt

SEQ ID NO: 1265054 - DNA, 15 bp, Homo sapiens
attcataattatttt

SEQ ID NO: 1265055 - DNA, 15 bp, Homo sapiens
tattcataattattt

SEQ ID NO: 1265056 - DNA, 15 bp, Homo sapiens
ttattcataattatt

SEQ ID NO: 1265057 - DNA, 15 bp, Homo sapiens
tttattcataattat

SEQ ID NO: 1265058 - DNA, 15 bp, Homo sapiens
ttttattcataatta

SEQ ID NO: 1265059 - DNA, 15 bp, Homo sapiens
tttttattcataatt

SEQ ID NO: 1265060 - DNA, 15 bp, Homo sapiens
ctttttattcataat

SEQ ID NO: 1265061 - DNA, 15 bp, Homo sapiens
actttttattcataa

SEQ ID NO: 1265062 - DNA, 15 bp, Homo sapiens
tactttttattcata

SEQ ID NO: 1265063 - DNA, 15 bp, Homo sapiens
atactttttattcat

SEQ ID NO: 1265064 - DNA, 15 bp, Homo sapiens
gatactttttattca

SEQ ID NO: 1265065 - DNA, 15 bp, Homo sapiens
tgatactttttattc

SEQ ID NO: 1265066 - DNA, 15 bp, Homo sapiens
gtgatactttttatt

SEQ ID NO: 1265067 - DNA, 15 bp, Homo sapiens
cgtgatactttttat

SEQ ID NO: 1265068 - DNA, 15 bp, Homo sapiens
acgtgatacttttta

SEQ ID NO: 1265069 - DNA, 15 bp, Homo sapiens
cacgtgatacttttt

SEQ ID NO: 1265070 - DNA, 15 bp, Homo sapiens
gcacgtgatactttt

SEQ ID NO: 1265071 - DNA, 15 bp, Homo sapiens
tgcacgtgatacttt

SEQ ID NO: 1265072 - DNA, 15 bp, Homo sapiens
gtgcacgtgatactt

SEQ ID NO: 1265073 - DNA, 15 bp, Homo sapiens
agtgcacgtgatact

SEQ ID NO: 1265074 - DNA, 15 bp, Homo sapiens
aagtgcacgtgatac

SEQ ID NO: 1265075 - DNA, 15 bp, Homo sapiens
caagtgcacgtgata

SEQ ID NO: 1265076 - DNA, 15 bp, Homo sapiens
tcaagtgcacgtgat

SEQ ID NO: 1265077 - DNA, 15 bp, Homo sapiens
ttcaagtgcacgtga

SEQ ID NO: 1265078 - DNA, 15 bp, Homo sapiens
cttcaagtgcacgtg

SEQ ID NO: 1265079 - DNA, 15 bp, Homo sapiens
acttcaagtgcacgt

SEQ ID NO: 1265080 - DNA, 15 bp, Homo sapiens
tacttcaagtgcacg

SEQ ID NO: 1265081 - DNA, 15 bp, Homo sapiens
atacttcaagtgcac

SEQ ID NO: 1265082 - DNA, 15 bp, Homo sapiens
tatacttcaagtgca

SEQ ID NO: 1265083 - DNA, 15 bp, Homo sapiens
ctatacttcaagtgc

SEQ ID NO: 1265084 - DNA, 15 bp, Homo sapiens
tctatacttcaagtg

SEQ ID NO: 1265085 - DNA, 15 bp, Homo sapiens
gtctatacttcaagt

SEQ ID NO: 1265086 - DNA, 15 bp, Homo sapiens
tgtctatacttcaag

SEQ ID NO: 1265087 - DNA, 15 bp, Homo sapiens
ttgtctatacttcaa

SEQ ID NO: 1265088 - DNA, 15 bp, Homo sapiens
cttgtctatacttca

SEQ ID NO: 1265089 - DNA, 15 bp, Homo sapiens
gcttgtctatacttc

SEQ ID NO: 1265090 - DNA, 15 bp, Homo sapiens
ggcttgtctatactt

SEQ ID NO: 1265091 - DNA, 15 bp, Homo sapiens
tggcttgtctatact

SEQ ID NO: 1265092 - DNA, 15 bp, Homo sapiens
ttggcttgtctatac

SEQ ID NO: 1265093 - DNA, 15 bp, Homo sapiens
gttggcttgtctata

SEQ ID NO: 1265094 - DNA, 15 bp, Homo sapiens
tgttggcttgtctat

SEQ ID NO: 1265095 - DNA, 15 bp, Homo sapiens
ttgttggcttgtcta

SEQ ID NO: 1265096 - DNA, 15 bp, Homo sapiens
attgttggcttgtct

SEQ ID NO: 1265097 - DNA, 15 bp, Homo sapiens
cattgttggcttgtc

SEQ ID NO: 1265098 - DNA, 15 bp, Homo sapiens
tcattgttggcttgt

SEQ ID NO: 1265099 - DNA, 15 bp, Homo sapiens
ttcattgttggcttg

SEQ ID NO: 1265100 - DNA, 15 bp, Homo sapiens
attcattgttggctt

SEQ ID NO: 1265101 - DNA, 15 bp, Homo sapiens
aattcattgttggct

SEQ ID NO: 1265102 - DNA, 15 bp, Homo sapiens
gaattcattgttggc

SEQ ID NO: 1265103 - DNA, 15 bp, Homo sapiens
agaattcattgttgg

SEQ ID NO: 1265104 - DNA, 15 bp, Homo sapiens
gagaattcattgttg

SEQ ID NO: 1265105 - DNA, 15 bp, Homo sapiens
tgagaattcattgtt

SEQ ID NO: 1265106 - DNA, 15 bp, Homo sapiens
atgagaattcattgt

SEQ ID NO: 1265107 - DNA, 15 bp, Homo sapiens
aatgagaattcattg

SEQ ID NO: 1265108 - DNA, 15 bp, Homo sapiens
caatgagaattcatt

SEQ ID NO: 1265109 - DNA, 15 bp, Homo sapiens
acaatgagaattcat

SEQ ID NO: 1265110 - DNA, 15 bp, Homo sapiens
gacaatgagaattca

SEQ ID NO: 1265111 - DNA, 15 bp, Homo sapiens
agacaatgagaattc

SEQ ID NO: 1265112 - DNA, 15 bp, Homo sapiens
aagacaatgagaatt

SEQ ID NO: 1265113 - DNA, 15 bp, Homo sapiens
aaagacaatgagaat

SEQ ID NO: 1265114 - DNA, 15 bp, Homo sapiens
aaaagacaatgagaa

SEQ ID NO: 1265115 - DNA, 15 bp, Homo sapiens
aaaaagacaatgaga

SEQ ID NO: 1265116 - DNA, 15 bp, Homo sapiens
taaaaagacaatgag

SEQ ID NO: 1265117 - DNA, 15 bp, Homo sapiens
ttaaaaagacaatga

SEQ ID NO: 1265118 - DNA, 15 bp, Homo sapiens
gttaaaaagacaatg

SEQ ID NO: 1265119 - DNA, 15 bp, Homo sapiens
agttaaaaagacaat

SEQ ID NO: 1265120 - DNA, 15 bp, Homo sapiens
tagttaaaaagacaa

SEQ ID NO: 1265121 - DNA, 15 bp, Homo sapiens
ctagttaaaaagaca

SEQ ID NO: 1265122 - DNA, 15 bp, Homo sapiens
tctagttaaaaagac

SEQ ID NO: 1265123 - DNA, 15 bp, Homo sapiens
ttctagttaaaaaga

SEQ ID NO: 1265124 - DNA, 15 bp, Homo sapiens
gttctagttaaaaag

SEQ ID NO: 1265125 - DNA, 15 bp, Homo sapiens
tgttctagttaaaaa

SEQ ID NO: 1265126 - DNA, 15 bp, Homo sapiens
gtgttctagttaaaa

SEQ ID NO: 1265127 - DNA, 15 bp, Homo sapiens
tgtgttctagttaaa

SEQ ID NO: 1265128 - DNA, 15 bp, Homo sapiens
tgtgtgttctagtta

SEQ ID NO: 1265129 - DNA, 15 bp, Homo sapiens
gtgtgtgttctagtt

SEQ ID NO: 1265130 - DNA, 15 bp, Homo sapiens
tgtgtgtgttctagt

SEQ ID NO: 1265131 - DNA, 15 bp, Homo sapiens
ttgtgtgtgttctag

SEQ ID NO: 1265132 - DNA, 15 bp, Homo sapiens
tttgtgtgtgttcta

SEQ ID NO: 1265133 - DNA, 15 bp, Homo sapiens
ttttgtgtgtgttct

SEQ ID NO: 1265134 - DNA, 15 bp, Homo sapiens
gttttgtgtgtgttc

SEQ ID NO: 1265135 - DNA, 15 bp, Homo sapiens
tgttttgtgtgtgtt

SEQ ID NO: 1265136 - DNA, 15 bp, Homo sapiens
ctgttttgtgtgtgt

SEQ ID NO: 1265137 - DNA, 15 bp, Homo sapiens
cctgttttgtgtgtg

SEQ ID NO: 1265138 - DNA, 15 bp, Homo sapiens
tcctgttttgtgtgt

SEQ ID NO: 1265139 - DNA, 15 bp, Homo sapiens
gtcctgttttgtgtg

SEQ ID NO: 1265140 - DNA, 15 bp, Homo sapiens
tgtcctgttttgtgt

SEQ ID NO: 1265141 - DNA, 15 bp, Homo sapiens
atgtcctgttttgtg

SEQ ID NO: 1265142 - DNA, 15 bp, Homo sapiens
aatgtcctgttttgt

SEQ ID NO: 1265143 - DNA, 15 bp, Homo sapiens
taatgtcctgttttg

SEQ ID NO: 1265144 - DNA, 15 bp, Homo sapiens
ttaatgtcctgtttt

SEQ ID NO: 1265145 - DNA, 15 bp, Homo sapiens
tttaatgtcctgttt

SEQ ID NO: 1265146 - DNA, 15 bp, Homo sapiens
ttttaatgtcctgtt

SEQ ID NO: 1265147 - DNA, 15 bp, Homo sapiens
attttaatgtcctgt

SEQ ID NO: 1265148 - DNA, 15 bp, Homo sapiens
gattttaatgtcctg

SEQ ID NO: 1265149 - DNA, 15 bp, Homo sapiens
tgattttaatgtcct

SEQ ID NO: 1265150 - DNA, 15 bp, Homo sapiens
ttgattttaatgtcc

SEQ ID NO: 1265151 - DNA, 15 bp, Homo sapiens
gttgattttaatgtc

SEQ ID NO: 1265152 - DNA, 15 bp, Homo sapiens
tgttgattttaatgt

SEQ ID NO: 1265153 - DNA, 15 bp, Homo sapiens
atgttgattttaatg

SEQ ID NO: 1265154 - DNA, 15 bp, Homo sapiens
catgttgattttaat

SEQ ID NO: 1265155 - DNA, 15 bp, Homo sapiens
tcatgttgattttaa

SEQ ID NO: 1265156 - DNA, 15 bp, Homo sapiens
ttcatgttgatttta

SEQ ID NO: 1265157 - DNA, 15 bp, Homo sapiens
tttcatgttgatttt

SEQ ID NO: 1265158 - DNA, 15 bp, Homo sapiens
gtttcatgttgattt

SEQ ID NO: 1265159 - DNA, 15 bp, Homo sapiens
ggtttcatgttgatt

SEQ ID NO: 1265160 - DNA, 15 bp, Homo sapiens
gggtttcatgttgat

SEQ ID NO: 1265161 - DNA, 15 bp, Homo sapiens
agggtttcatgttga

SEQ ID NO: 1265162 - DNA, 15 bp, Homo sapiens
cagggtttcatgttg

SEQ ID NO: 1265163 - DNA, 15 bp, Homo sapiens
tcagggtttcatgtt

SEQ ID NO: 1265164 - DNA, 15 bp, Homo sapiens
ctcagggtttcatgt

SEQ ID NO: 1265165 - DNA, 15 bp, Homo sapiens
gctcagggtttcatg

SEQ ID NO: 1265166 - DNA, 15 bp, Homo sapiens
agctcagggtttcat

SEQ ID NO: 1265167 - DNA, 15 bp, Homo sapiens
gagctcagggtttca

SEQ ID NO: 1265168 - DNA, 15 bp, Homo sapiens
agagctcagggtttc

SEQ ID NO: 1265169 - DNA, 15 bp, Homo sapiens
cagagctcagggttt

SEQ ID NO: 1265170 - DNA, 15 bp, Homo sapiens
tcagagctcagggtt

SEQ ID NO: 1265171 - DNA, 15 bp, Homo sapiens
ctcagagctcagggt

SEQ ID NO: 1265172 - DNA, 15 bp, Homo sapiens
tctcagagctcaggg

SEQ ID NO: 1265173 - DNA, 15 bp, Homo sapiens
ttctcagagctcagg

SEQ ID NO: 1265174 - DNA, 15 bp, Homo sapiens
gttctcagagctcag

SEQ ID NO: 1265175 - DNA, 15 bp, Homo sapiens
agttctcagagctca

SEQ ID NO: 1265176 - DNA, 15 bp, Homo sapiens
gagttctcagagctc

SEQ ID NO: 1265177 - DNA, 15 bp, Homo sapiens
tgagttctcagagct

SEQ ID NO: 1265178 - DNA, 15 bp, Homo sapiens
atgagttctcagagc

SEQ ID NO: 1265179 - DNA, 15 bp, Homo sapiens
tatgagttctcagag

SEQ ID NO: 1265180 - DNA, 15 bp, Homo sapiens
ttatgagttctcaga

SEQ ID NO: 1265181 - DNA, 15 bp, Homo sapiens
attatgagttctcag

SEQ ID NO: 1265182 - DNA, 15 bp, Homo sapiens
aattatgagttctca

SEQ ID NO: 1265183 - DNA, 15 bp, Homo sapiens
aaattatgagttctc

SEQ ID NO: 1265184 - DNA, 15 bp, Homo sapiens
caaattatgagttct

SEQ ID NO: 1265185 - DNA, 15 bp, Homo sapiens
acaaattatgagttc

SEQ ID NO: 1265186 - DNA, 15 bp, Homo sapiens
aacaaattatgagtt

SEQ ID NO: 1265187 - DNA, 15 bp, Homo sapiens
aaacaaattatgagt

SEQ ID NO: 1265188 - DNA, 15 bp, Homo sapiens
gaaacaaattatgag

SEQ ID NO: 1265189 - DNA, 15 bp, Homo sapiens
ggaaacaaattatga

SEQ ID NO: 1265190 - DNA, 15 bp, Homo sapiens
aggaaacaaattatg

SEQ ID NO: 1265191 - DNA, 15 bp, Homo sapiens
caggaaacaaattat

SEQ ID NO: 1265192 - DNA, 15 bp, Homo sapiens
gcaggaaacaaatta

SEQ ID NO: 1265193 - DNA, 15 bp, Homo sapiens
tgcaggaaacaaatt

SEQ ID NO: 1265194 - DNA, 15 bp, Homo sapiens
atgcaggaaacaaat

SEQ ID NO: 1265195 - DNA, 15 bp, Homo sapiens
aatgcaggaaacaaa

SEQ ID NO: 1265196 - DNA, 15 bp, Homo sapiens
aaatgcaggaaacaa

SEQ ID NO: 1265197 - DNA, 15 bp, Homo sapiens
aaaatgcaggaaaca

SEQ ID NO: 1265198 - DNA, 15 bp, Homo sapiens
taaaatgcaggaaac

SEQ ID NO: 1265199 - DNA, 15 bp, Homo sapiens
ctaaaatgcaggaaa

SEQ ID NO: 1265200 - DNA, 15 bp, Homo sapiens
actaaaatgcaggaa

SEQ ID NO: 1265201 - DNA, 15 bp, Homo sapiens
cactaaaatgcagga

SEQ ID NO: 1265202 - DNA, 15 bp, Homo sapiens
acactaaaatgcagg

SEQ ID NO: 1265203 - DNA, 15 bp, Homo sapiens
aacactaaaatgcag

SEQ ID NO: 1265204 - DNA, 15 bp, Homo sapiens
aaacactaaaatgca

SEQ ID NO: 1265205 - DNA, 15 bp, Homo sapiens
caaacactaaaatgc

SEQ ID NO: 1265206 - DNA, 15 bp, Homo sapiens
ccaaacactaaaatg

SEQ ID NO: 1265207 - DNA, 15 bp, Homo sapiens
cccaaacactaaaat

SEQ ID NO: 1265208 - DNA, 15 bp, Homo sapiens
ccccaaacactaaaa

SEQ ID NO: 1265209 - DNA, 15 bp, Homo sapiens
cccccaaacactaaa

SEQ ID NO: 1265210 - DNA, 15 bp, Homo sapiens
tcccccaaacactaa

SEQ ID NO: 1265211 - DNA, 15 bp, Homo sapiens
atcccccaaacacta

SEQ ID NO: 1265212 - DNA, 15 bp, Homo sapiens
catcccccaaacact

SEQ ID NO: 1265213 - DNA, 15 bp, Homo sapiens
ccatcccccaaacac

SEQ ID NO: 1265214 - DNA, 15 bp, Homo sapiens
tccatcccccaaaca

SEQ ID NO: 1265215 - DNA, 15 bp, Homo sapiens
ttccatcccccaaac

SEQ ID NO: 1265216 - DNA, 15 bp, Homo sapiens
tttccatcccccaaa

SEQ ID NO: 1265217 - DNA, 15 bp, Homo sapiens
ttttccatcccccaa

SEQ ID NO: 1265218 - DNA, 15 bp, Homo sapiens
gttttccatccccca

SEQ ID NO: 1265219 - DNA, 15 bp, Homo sapiens
tgttttccatccccc

SEQ ID NO: 1265220 - DNA, 15 bp, Homo sapiens
ttgttttccatcccc

SEQ ID NO: 1265221 - DNA, 15 bp, Homo sapiens
tttgttttccatccc

SEQ ID NO: 1265222 - DNA, 15 bp, Homo sapiens
atttgttttccatcc

SEQ ID NO: 1265223 - DNA, 15 bp, Homo sapiens
gatttgttttccatc

SEQ ID NO: 1265224 - DNA, 15 bp, Homo sapiens
agatttgttttccat

SEQ ID NO: 1265225 - DNA, 15 bp, Homo sapiens
aagatttgttttcca

SEQ ID NO: 1265226 - DNA, 15 bp, Homo sapiens
gaagatttgttttcc

SEQ ID NO: 1265227 - DNA, 15 bp, Homo sapiens
ggaagatttgttttc

SEQ ID NO: 1265228 - DNA, 15 bp, Homo sapiens
tggaagatttgtttt

SEQ ID NO: 1265229 - DNA, 15 bp, Homo sapiens
ctggaagatttgttt

SEQ ID NO: 1265230 - DNA, 15 bp, Homo sapiens
tctggaagatttgtt

SEQ ID NO: 1265231 - DNA, 15 bp, Homo sapiens
atctggaagatttgt

SEQ ID NO: 1265232 - DNA, 15 bp, Homo sapiens
aatctggaagatttg

SEQ ID NO: 1265233 - DNA, 15 bp, Homo sapiens
aaatctggaagattt

SEQ ID NO: 1265234 - DNA, 15 bp, Homo sapiens
aaaatctggaagatt

SEQ ID NO: 1265235 - DNA, 15 bp, Homo sapiens
gaaaatctggaagat

SEQ ID NO: 1265236 - DNA, 15 bp, Homo sapiens
agaaaatctggaaga

SEQ ID NO: 1265237 - DNA, 15 bp, Homo sapiens
cagaaaatctggaag

SEQ ID NO: 1265238 - DNA, 15 bp, Homo sapiens
acagaaaatctggaa

SEQ ID NO: 1265239 - DNA, 15 bp, Homo sapiens
cacagaaaatctgga

SEQ ID NO: 1265240 - DNA, 15 bp, Homo sapiens
acacagaaaatctgg

SEQ ID NO: 1265241 - DNA, 15 bp, Homo sapiens
cacacagaaaatctg

SEQ ID NO: 1265242 - DNA, 15 bp, Homo sapiens
acacacagaaaatct

SEQ ID NO: 1265243 - DNA, 15 bp, Homo sapiens
acacacacagaaaat

SEQ ID NO: 1265244 - DNA, 15 bp, Homo sapiens
cacacacacagaaaa

SEQ ID NO: 1265245 - DNA, 15 bp, Homo sapiens
acacacacacagaaa

SEQ ID NO: 1265246 - DNA, 15 bp, Homo sapiens
cacacacacacagaa

SEQ ID NO: 1265247 - DNA, 15 bp, Homo sapiens
acacacacacacaga

SEQ ID NO: 1265248 - DNA, 15 bp, Homo sapiens
tacacacacacacag

SEQ ID NO: 1265249 - DNA, 15 bp, Homo sapiens
tacatacacacacac

SEQ ID NO: 1265250 - DNA, 15 bp, Homo sapiens
ggtacacacacacac

SEQ ID NO: 1265251 - DNA, 15 bp, Homo sapiens
gggtacacacacaca

SEQ ID NO: 1265252 - DNA, 15 bp, Homo sapiens
tgggtacacacacac

SEQ ID NO: 1265253 - DNA, 15 bp, Homo sapiens
ttgggtacacacaca

SEQ ID NO: 1265254 - DNA, 15 bp, Homo sapiens
gttgggtacacacac

SEQ ID NO: 1265255 - DNA, 15 bp, Homo sapiens
tgttgggtacacaca

SEQ ID NO: 1265256 - DNA, 15 bp, Homo sapiens
gtgttgggtacacac

SEQ ID NO: 1265257 - DNA, 15 bp, Homo sapiens
ggtgttgggtacaca

SEQ ID NO: 1265258 - DNA, 15 bp, Homo sapiens
cggtgttgggtacac

SEQ ID NO: 1265259 - DNA, 15 bp, Homo sapiens
tcggtgttgggtaca

SEQ ID NO: 1265260 - DNA, 15 bp, Homo sapiens
ttcggtgttgggtac

SEQ ID NO: 1265261 - DNA, 15 bp, Homo sapiens
attcggtgttgggta

SEQ ID NO: 1265262 - DNA, 15 bp, Homo sapiens
gattcggtgttgggt

SEQ ID NO: 1265263 - DNA, 15 bp, Homo sapiens
agattcggtgttggg

SEQ ID NO: 1265264 - DNA, 15 bp, Homo sapiens
cagattcggtgttgg

SEQ ID NO: 1265265 - DNA, 15 bp, Homo sapiens
ccagattcggtgttg

SEQ ID NO: 1265266 - DNA, 15 bp, Homo sapiens
tccagattcggtgtt

SEQ ID NO: 1265267 - DNA, 15 bp, Homo sapiens
ttccagattcggtgt

SEQ ID NO: 1265268 - DNA, 15 bp, Homo sapiens
cttccagattcggtg

SEQ ID NO: 1265269 - DNA, 15 bp, Homo sapiens
tcttccagattcggt

SEQ ID NO: 1265270 - DNA, 15 bp, Homo sapiens
gtcttccagattcgg

SEQ ID NO: 1265271 - DNA, 15 bp, Homo sapiens
agtcttccagattcg

SEQ ID NO: 1265272 - DNA, 15 bp, Homo sapiens
aagtcttccagattc

SEQ ID NO: 1265273 - DNA, 15 bp, Homo sapiens
caagtcttccagatt

SEQ ID NO: 1265274 - DNA, 15 bp, Homo sapiens
acaagtcttccagat

SEQ ID NO: 1265275 - DNA, 15 bp, Homo sapiens
aacaagtcttccaga

SEQ ID NO: 1265276 - DNA, 15 bp, Homo sapiens
taacaagtcttccag

SEQ ID NO: 1265277 - DNA, 15 bp, Homo sapiens
ataacaagtcttcca

SEQ ID NO: 1265278 - DNA, 15 bp, Homo sapiens
tataacaagtcttcc

SEQ ID NO: 1265279 - DNA, 15 bp, Homo sapiens
ttataacaagtcttc

SEQ ID NO: 1265280 - DNA, 15 bp, Homo sapiens
cttataacaagtctt

SEQ ID NO: 1265281 - DNA, 15 bp, Homo sapiens
ccttataacaagtct

SEQ ID NO: 1265282 - DNA, 15 bp, Homo sapiens
tccttataacaagtc

SEQ ID NO: 1265283 - DNA, 15 bp, Homo sapiens
ttccttataacaagt

SEQ ID NO: 1265284 - DNA, 15 bp, Homo sapiens
cttccttataacaag

SEQ ID NO: 1265285 - DNA, 15 bp, Homo sapiens
tcttccttataacaa

SEQ ID NO: 1265286 - DNA, 15 bp, Homo sapiens
ttcttccttataaca

SEQ ID NO: 1265287 - DNA, 15 bp, Homo sapiens
attcttccttataac

SEQ ID NO: 1265288 - DNA, 15 bp, Homo sapiens
tattcttccttataa

SEQ ID NO: 1265289 - DNA, 15 bp, Homo sapiens
atattcttccttata

SEQ ID NO: 1265290 - DNA, 15 bp, Homo sapiens
tatattcttccttat

SEQ ID NO: 1265291 - DNA, 15 bp, Homo sapiens
atatattcttcctta

SEQ ID NO: 1265292 - DNA, 15 bp, Homo sapiens
tatatattcttcctt

SEQ ID NO: 1265293 - DNA, 15 bp, Homo sapiens
atatatattcttcct

SEQ ID NO: 1265294 - DNA, 15 bp, Homo sapiens
aatatatattcttcc

SEQ ID NO: 1265295 - DNA, 15 bp, Homo sapiens
aaatatatattcttc

SEQ ID NO: 1265296 - DNA, 15 bp, Homo sapiens
aaaatatatattctt

SEQ ID NO: 1265297 - DNA, 15 bp, Homo sapiens
aaaaatatatattct

SEQ ID NO: 1265298 - DNA, 15 bp, Homo sapiens
aaaaaatatatattc

SEQ ID NO: 1265299 - DNA, 15 bp, Homo sapiens
gaaaaaatatatatt

SEQ ID NO: 1265300 - DNA, 15 bp, Homo sapiens
agaaaaaatatatat

SEQ ID NO: 1265301 - DNA, 15 bp, Homo sapiens
aagaaaaaatatata

SEQ ID NO: 1265302 - DNA, 15 bp, Homo sapiens
aaagaaaaaatatat

SEQ ID NO: 1265303 - DNA, 15 bp, Homo sapiens
gaaagaaaaaatata

SEQ ID NO: 1265304 - DNA, 15 bp, Homo sapiens
agaaagaaaaaatat

SEQ ID NO: 1265305 - DNA, 15 bp, Homo sapiens
aagaaagaaaaaata

SEQ ID NO: 1265306 - DNA, 15 bp, Homo sapiens
aaagaaagaaaaaat

SEQ ID NO: 1265307 - DNA, 15 bp, Homo sapiens
gaaagaaagaaaaaa

SEQ ID NO: 1265308 - DNA, 15 bp, Homo sapiens
tgcctcaaaaaaaaa

SEQ ID NO: 1265309 - DNA, 15 bp, Homo sapiens
ctgcctcaaaaaaaa

SEQ ID NO: 1265310 - DNA, 15 bp, Homo sapiens
tactgcctcaaaaaa

SEQ ID NO: 1265311 - DNA, 15 bp, Homo sapiens
atactgcctcaaaaa

SEQ ID NO: 1265312 - DNA, 15 bp, Homo sapiens
gatactgcctcaaaa

SEQ ID NO: 1265313 - DNA, 15 bp, Homo sapiens
agatactgcctcaaa

SEQ ID NO: 1265314 - DNA, 15 bp, Homo sapiens
aagatactgcctcaa

SEQ ID NO: 1265315 - DNA, 15 bp, Homo sapiens
caagatactgcctca

SEQ ID NO: 1265316 - DNA, 15 bp, Homo sapiens
gcaagatactgcctc

SEQ ID NO: 1265317 - DNA, 15 bp, Homo sapiens
agcaagatactgcct

SEQ ID NO: 1265318 - DNA, 15 bp, Homo sapiens
gagcaagatactgcc

SEQ ID NO: 1265319 - DNA, 15 bp, Homo sapiens
agagcaagatactgc

SEQ ID NO: 1265320 - DNA, 15 bp, Homo sapiens
cagagcaagatactg

SEQ ID NO: 1265321 - DNA, 15 bp, Homo sapiens
acagagcaagatact

SEQ ID NO: 1265322 - DNA, 15 bp, Homo sapiens
aacagagcaagatac

SEQ ID NO: 1265323 - DNA, 15 bp, Homo sapiens
caacagagcaagata

SEQ ID NO: 1265324 - DNA, 15 bp, Homo sapiens
acaacagagcaagat

SEQ ID NO: 1265325 - DNA, 15 bp, Homo sapiens
aacaacagagcaaga

SEQ ID NO: 1265326 - DNA, 15 bp, Homo sapiens
caacaacagagcaag

SEQ ID NO: 1265327 - DNA, 15 bp, Homo sapiens
gcaacaacagagcaa

SEQ ID NO: 1265328 - DNA, 15 bp, Homo sapiens
agcaacaacagagca

SEQ ID NO: 1265329 - DNA, 15 bp, Homo sapiens
gagcaacaacagagc

SEQ ID NO: 1265330 - DNA, 15 bp, Homo sapiens
tgagcaacaacagag

SEQ ID NO: 1265331 - DNA, 15 bp, Homo sapiens
ctgagcaacaacaga

SEQ ID NO: 1265332 - DNA, 15 bp, Homo sapiens
gctgagcaacaacag

SEQ ID NO: 1265333 - DNA, 15 bp, Homo sapiens
ggctgagcaacaaca

SEQ ID NO: 1265334 - DNA, 15 bp, Homo sapiens
aggctgagcaacaac

SEQ ID NO: 1265335 - DNA, 15 bp, Homo sapiens
caggctgagcaacaa

SEQ ID NO: 1265336 - DNA, 15 bp, Homo sapiens
ccaggctgagcaaca

SEQ ID NO: 1265337 - DNA, 15 bp, Homo sapiens
tccaggctgagcaac

SEQ ID NO: 1265338 - DNA, 15 bp, Homo sapiens
ctccaggctgagcaa

SEQ ID NO: 1265339 - DNA, 15 bp, Homo sapiens
actccaggctgagca

SEQ ID NO: 1265340 - DNA, 15 bp, Homo sapiens
cactccaggctgagc

SEQ ID NO: 1265341 - DNA, 15 bp, Homo sapiens
gcactccaggctgag

SEQ ID NO: 1265342 - DNA, 15 bp, Homo sapiens
tgcactccaggctga

SEQ ID NO: 1265343 - DNA, 15 bp, Homo sapiens
ttcatgccactgcac

SEQ ID NO: 1265344 - DNA, 15 bp, Homo sapiens
gttcatgccactgca

SEQ ID NO: 1265345 - DNA, 15 bp, Homo sapiens
tgttcatgccactgc

SEQ ID NO: 1265346 - DNA, 15 bp, Homo sapiens
gtgttcatgccactg

SEQ ID NO: 1265347 - DNA, 15 bp, Homo sapiens
tgtgttcatgccact

SEQ ID NO: 1265348 - DNA, 15 bp, Homo sapiens
ctgtgttcatgccac

SEQ ID NO: 1265349 - DNA, 15 bp, Homo sapiens
gctgtgttcatgcca

SEQ ID NO: 1265350 - DNA, 15 bp, Homo sapiens
agctgtgttcatgcc

SEQ ID NO: 1265351 - DNA, 15 bp, Homo sapiens
gagctgtgttcatgc

SEQ ID NO: 1265352 - DNA, 15 bp, Homo sapiens
tgagctgtgttcatg

SEQ ID NO: 1265353 - DNA, 15 bp, Homo sapiens
gtgagctgtgttcat

SEQ ID NO: 1265354 - DNA, 15 bp, Homo sapiens
agtgagctgtgttca

SEQ ID NO: 1265355 - DNA, 15 bp, Homo sapiens
cagtgagctgtgttc

SEQ ID NO: 1265356 - DNA, 15 bp, Homo sapiens
gcagtgagctgtgtt

SEQ ID NO: 1265357 - DNA, 15 bp, Homo sapiens
tgcagtgagctgtgt

SEQ ID NO: 1265358 - DNA, 15 bp, Homo sapiens
ttgcagtgagctgtg

SEQ ID NO: 1265359 - DNA, 15 bp, Homo sapiens
gttgcagtgagctgt

SEQ ID NO: 1265360 - DNA, 15 bp, Homo sapiens
tagaggttgcagtga

SEQ ID NO: 1265361 - DNA, 15 bp, Homo sapiens
gtagaggttgcagtg

SEQ ID NO: 1265362 - DNA, 15 bp, Homo sapiens
ggtagaggttgcagt

SEQ ID NO: 1265363 - DNA, 15 bp, Homo sapiens
aggtagaggttgcag

SEQ ID NO: 1265364 - DNA, 15 bp, Homo sapiens
gaggtagaggttgca

SEQ ID NO: 1265365 - DNA, 15 bp, Homo sapiens
ggaggtagaggttgc

SEQ ID NO: 1265366 - DNA, 15 bp, Homo sapiens
gggaggtagaggttg

SEQ ID NO: 1265367 - DNA, 15 bp, Homo sapiens
agggaggtagaggtt

SEQ ID NO: 1265368 - DNA, 15 bp, Homo sapiens
cagggaggtagaggt

SEQ ID NO: 1265369 - DNA, 15 bp, Homo sapiens
ccagggaggtagagg

SEQ ID NO: 1265370 - DNA, 15 bp, Homo sapiens
gccagggaggtagag

SEQ ID NO: 1265371 - DNA, 15 bp, Homo sapiens
agccagggaggtaga

SEQ ID NO: 1265372 - DNA, 15 bp, Homo sapiens
gagccagggaggtag

SEQ ID NO: 1265373 - DNA, 15 bp, Homo sapiens
tgagccagggaggta

SEQ ID NO: 1265374 - DNA, 15 bp, Homo sapiens
ttgagccagggaggt

SEQ ID NO: 1265375 - DNA, 15 bp, Homo sapiens
cttgagccagggagg

SEQ ID NO: 1265376 - DNA, 15 bp, Homo sapiens
gcttgagccagggag

SEQ ID NO: 1265377 - DNA, 15 bp, Homo sapiens
cgcttgagccaggga

SEQ ID NO: 1265378 - DNA, 15 bp, Homo sapiens
tcgcttgagccaggg

SEQ ID NO: 1265379 - DNA, 15 bp, Homo sapiens
atcgcttgagccagg

SEQ ID NO: 1265380 - DNA, 15 bp, Homo sapiens
gatcgcttgagccag

SEQ ID NO: 1265381 - DNA, 15 bp, Homo sapiens
ggatcgcttgagcca

SEQ ID NO: 1265382 - DNA, 15 bp, Homo sapiens
gaggcaggaggatcg

SEQ ID NO: 1265383 - DNA, 15 bp, Homo sapiens
tggggggctgaggca

SEQ ID NO: 1265384 - DNA, 15 bp, Homo sapiens
ttggggggctgaggc

SEQ ID NO: 1265385 - DNA, 15 bp, Homo sapiens
cttggggggctgagg

SEQ ID NO: 1265386 - DNA, 15 bp, Homo sapiens
acttggggggctgag

SEQ ID NO: 1265387 - DNA, 15 bp, Homo sapiens
tacttggggggctga

SEQ ID NO: 1265388 - DNA, 15 bp, Homo sapiens
ctacttggggggctg

SEQ ID NO: 1265389 - DNA, 15 bp, Homo sapiens
gctacttggggggct

SEQ ID NO: 1265390 - DNA, 15 bp, Homo sapiens
agctacttggggggc

SEQ ID NO: 1265391 - DNA, 15 bp, Homo sapiens
cagctacttgggggg

SEQ ID NO: 1265392 - DNA, 15 bp, Homo sapiens
ccagctacttggggg

SEQ ID NO: 1265393 - DNA, 15 bp, Homo sapiens
cccagctacttgggg

SEQ ID NO: 1265394 - DNA, 15 bp, Homo sapiens
tatagtcccagctac

SEQ ID NO: 1265395 - DNA, 15 bp, Homo sapiens
tctatagtcccagct

SEQ ID NO: 1265396 - DNA, 15 bp, Homo sapiens
gtctatagtcccagc

SEQ ID NO: 1265397 - DNA, 15 bp, Homo sapiens
tgtctatagtcccag

SEQ ID NO: 1265398 - DNA, 15 bp, Homo sapiens
gtgtctatagtccca

SEQ ID NO: 1265399 - DNA, 15 bp, Homo sapiens
tgtgtctatagtccc

SEQ ID NO: 1265400 - DNA, 15 bp, Homo sapiens
atgtgtctatagtcc

SEQ ID NO: 1265401 - DNA, 15 bp, Homo sapiens
catgtgtctatagtc

SEQ ID NO: 1265402 - DNA, 15 bp, Homo sapiens
gcatgtgtctatagt

SEQ ID NO: 1265403 - DNA, 15 bp, Homo sapiens
agcatgtgtctatag

SEQ ID NO: 1265404 - DNA, 15 bp, Homo sapiens
tagcatgtgtctata

SEQ ID NO: 1265405 - DNA, 15 bp, Homo sapiens
gtagcatgtgtctat

SEQ ID NO: 1265406 - DNA, 15 bp, Homo sapiens
tgtagcatgtgtcta

SEQ ID NO: 1265407 - DNA, 15 bp, Homo sapiens
ctgtagcatgtgtct

SEQ ID NO: 1265408 - DNA, 15 bp, Homo sapiens
actgtagcatgtgtc

SEQ ID NO: 1265409 - DNA, 15 bp, Homo sapiens
cactgtagcatgtgt

SEQ ID NO: 1265410 - DNA, 15 bp, Homo sapiens
gcactgtagcatgtg

SEQ ID NO: 1265411 - DNA, 15 bp, Homo sapiens
ggcactgtagcatgt

SEQ ID NO: 1265412 - DNA, 15 bp, Homo sapiens
gggcactgtagcatg

SEQ ID NO: 1265413 - DNA, 15 bp, Homo sapiens
tgggcactgtagcat

SEQ ID NO: 1265414 - DNA, 15 bp, Homo sapiens
ctgggcactgtagca

SEQ ID NO: 1265415 - DNA, 15 bp, Homo sapiens
gctgggcactgtagc

SEQ ID NO: 1265416 - DNA, 15 bp, Homo sapiens
agctgggcactgtag

SEQ ID NO: 1265417 - DNA, 15 bp, Homo sapiens
tagctgggcactgta

SEQ ID NO: 1265418 - DNA, 15 bp, Homo sapiens
ttagctgggcactgt

SEQ ID NO: 1265419 - DNA, 15 bp, Homo sapiens
attagctgggcactg

SEQ ID NO: 1265420 - DNA, 15 bp, Homo sapiens
aattagctgggcact

SEQ ID NO: 1265421 - DNA, 15 bp, Homo sapiens
caattagctgggcac

SEQ ID NO: 1265422 - DNA, 15 bp, Homo sapiens
tcaattagctgggca

SEQ ID NO: 1265423 - DNA, 15 bp, Homo sapiens
ctcaattagctgggc

SEQ ID NO: 1265424 - DNA, 15 bp, Homo sapiens
actcaattagctggg

SEQ ID NO: 1265425 - DNA, 15 bp, Homo sapiens
tactcaattagctgg

SEQ ID NO: 1265426 - DNA, 15 bp, Homo sapiens
atactcaattagctg

SEQ ID NO: 1265427 - DNA, 15 bp, Homo sapiens
aatactcaattagct

SEQ ID NO: 1265428 - DNA, 15 bp, Homo sapiens
aaatactcaattagc

SEQ ID NO: 1265429 - DNA, 15 bp, Homo sapiens
gaaatactcaattag

SEQ ID NO: 1265430 - DNA, 15 bp, Homo sapiens
ggaaatactcaatta

SEQ ID NO: 1265431 - DNA, 15 bp, Homo sapiens
tggaaatactcaatt

SEQ ID NO: 1265432 - DNA, 15 bp, Homo sapiens
atggaaatactcaat

SEQ ID NO: 1265433 - DNA, 15 bp, Homo sapiens
aatggaaatactcaa

SEQ ID NO: 1265434 - DNA, 15 bp, Homo sapiens
aaatggaaatactca

SEQ ID NO: 1265435 - DNA, 15 bp, Homo sapiens
aaaatggaaatactc

SEQ ID NO: 1265436 - DNA, 15 bp, Homo sapiens
taaaatggaaatact

SEQ ID NO: 1265437 - DNA, 15 bp, Homo sapiens
ataaaatggaaatac

SEQ ID NO: 1265438 - DNA, 15 bp, Homo sapiens
tataaaatggaaata

SEQ ID NO: 1265439 - DNA, 15 bp, Homo sapiens
ttataaaatggaaat

SEQ ID NO: 1265440 - DNA, 15 bp, Homo sapiens
cttataaaatggaaa

SEQ ID NO: 1265441 - DNA, 15 bp, Homo sapiens
acttataaaatggaa

SEQ ID NO: 1265442 - DNA, 15 bp, Homo sapiens
cacttataaaatgga

SEQ ID NO: 1265443 - DNA, 15 bp, Homo sapiens
tcacttataaaatgg

SEQ ID NO: 1265444 - DNA, 15 bp, Homo sapiens
ctcacttataaaatg

SEQ ID NO: 1265445 - DNA, 15 bp, Homo sapiens
actcacttataaaat

SEQ ID NO: 1265446 - DNA, 15 bp, Homo sapiens
aactcacttataaaa

SEQ ID NO: 1265447 - DNA, 15 bp, Homo sapiens
caactcacttataaa

SEQ ID NO: 1265448 - DNA, 15 bp, Homo sapiens
ccaactcacttataa

SEQ ID NO: 1265449 - DNA, 15 bp, Homo sapiens
cccaactcacttata

SEQ ID NO: 1265450 - DNA, 15 bp, Homo sapiens
acccaactcacttat

SEQ ID NO: 1265451 - DNA, 15 bp, Homo sapiens
cacccaactcactta

SEQ ID NO: 1265452 - DNA, 15 bp, Homo sapiens
acacccaactcactt

SEQ ID NO: 1265453 - DNA, 15 bp, Homo sapiens
gacacccaactcact

SEQ ID NO: 1265454 - DNA, 15 bp, Homo sapiens
tgacacccaactcac

SEQ ID NO: 1265455 - DNA, 15 bp, Homo sapiens
ctgacacccaactca

SEQ ID NO: 1265456 - DNA, 15 bp, Homo sapiens
cctgacacccaactc

SEQ ID NO: 1265457 - DNA, 15 bp, Homo sapiens
ccctgacacccaact

SEQ ID NO: 1265458 - DNA, 15 bp, Homo sapiens
tccctgacacccaac

SEQ ID NO: 1265459 - DNA, 15 bp, Homo sapiens
ctccctgacacccaa

SEQ ID NO: 1265460 - DNA, 15 bp, Homo sapiens
cctccctgacaccca

SEQ ID NO: 1265461 - DNA, 15 bp, Homo sapiens
ccctccctgacaccc

SEQ ID NO: 1265462 - DNA, 15 bp, Homo sapiens
accctccctgacacc

SEQ ID NO: 1265463 - DNA, 15 bp, Homo sapiens
gaccctccctgacac

SEQ ID NO: 1265464 - DNA, 15 bp, Homo sapiens
tgaccctccctgaca

SEQ ID NO: 1265465 - DNA, 15 bp, Homo sapiens
ttgaccctccctgac

SEQ ID NO: 1265466 - DNA, 15 bp, Homo sapiens
tttgaccctccctga

SEQ ID NO: 1265467 - DNA, 15 bp, Homo sapiens
atttgaccctccctg

SEQ ID NO: 1265468 - DNA, 15 bp, Homo sapiens
catttgaccctccct

SEQ ID NO: 1265469 - DNA, 15 bp, Homo sapiens
tcatttgaccctccc

SEQ ID NO: 1265470 - DNA, 15 bp, Homo sapiens
atcatttgaccctcc

SEQ ID NO: 1265471 - DNA, 15 bp, Homo sapiens
catcatttgaccctc

SEQ ID NO: 1265472 - DNA, 15 bp, Homo sapiens
acatcatttgaccct

SEQ ID NO: 1265473 - DNA, 15 bp, Homo sapiens
cacatcatttgaccc

SEQ ID NO: 1265474 - DNA, 15 bp, Homo sapiens
gcacatcatttgacc

SEQ ID NO: 1265475 - DNA, 15 bp, Homo sapiens
cgcacatcatttgac

SEQ ID NO: 1265476 - DNA, 15 bp, Homo sapiens
acgcacatcatttga

SEQ ID NO: 1265477 - DNA, 15 bp, Homo sapiens
gacgcacatcatttg

SEQ ID NO: 1265478 - DNA, 15 bp, Homo sapiens
tgacgcacatcattt

SEQ ID NO: 1265479 - DNA, 15 bp, Homo sapiens
gtgacgcacatcatt

SEQ ID NO: 1265480 - DNA, 15 bp, Homo sapiens
ggtgacgcacatcat

SEQ ID NO: 1265481 - DNA, 15 bp, Homo sapiens
gggtgacgcacatca

SEQ ID NO: 1265482 - DNA, 15 bp, Homo sapiens
tgggtgacgcacatc

SEQ ID NO: 1265483 - DNA, 15 bp, Homo sapiens
gtgggtgacgcacat

SEQ ID NO: 1265484 - DNA, 15 bp, Homo sapiens
tgtgggtgacgcaca

SEQ ID NO: 1265485 - DNA, 15 bp, Homo sapiens
gtgtgggtgacgcac

SEQ ID NO: 1265486 - DNA, 15 bp, Homo sapiens
agtgtgggtgacgca

SEQ ID NO: 1265487 - DNA, 15 bp, Homo sapiens
cagtgtgggtgacgc

SEQ ID NO: 1265488 - DNA, 15 bp, Homo sapiens
ccagtgtgggtgacg

SEQ ID NO: 1265489 - DNA, 15 bp, Homo sapiens
cccagtgtgggtgac

SEQ ID NO: 1265490 - DNA, 15 bp, Homo sapiens
acccagtgtgggtga

SEQ ID NO: 1265491 - DNA, 15 bp, Homo sapiens
aacccagtgtgggtg

SEQ ID NO: 1265492 - DNA, 15 bp, Homo sapiens
taacccagtgtgggt

SEQ ID NO: 1265493 - DNA, 15 bp, Homo sapiens
ttaacccagtgtggg

SEQ ID NO: 1265494 - DNA, 15 bp, Homo sapiens
tttaacccagtgtgg

SEQ ID NO: 1265495 - DNA, 15 bp, Homo sapiens
ctttaacccagtgtg

SEQ ID NO: 1265496 - DNA, 15 bp, Homo sapiens
tctttaacccagtgt

SEQ ID NO: 1265497 - DNA, 15 bp, Homo sapiens
ctctttaacccagtg

SEQ ID NO: 1265498 - DNA, 15 bp, Homo sapiens
cctctttaacccagt

SEQ ID NO: 1265499 - DNA, 15 bp, Homo sapiens
acctctttaacccag

SEQ ID NO: 1265500 - DNA, 15 bp, Homo sapiens
cacctctttaaccca

SEQ ID NO: 1265501 - DNA, 15 bp, Homo sapiens
tcacctctttaaccc

SEQ ID NO: 1265502 - DNA, 15 bp, Homo sapiens
atcacctctttaacc

SEQ ID NO: 1265503 - DNA, 15 bp, Homo sapiens
catcacctctttaac

SEQ ID NO: 1265504 - DNA, 15 bp, Homo sapiens
acatcacctctttaa

SEQ ID NO: 1265505 - DNA, 15 bp, Homo sapiens
aacatcacctcttta

SEQ ID NO: 1265506 - DNA, 15 bp, Homo sapiens
caacatcacctcttt

SEQ ID NO: 1265507 - DNA, 15 bp, Homo sapiens
gcaacatcacctctt

SEQ ID NO: 1265508 - DNA, 15 bp, Homo sapiens
agcaacatcacctct

SEQ ID NO: 1265509 - DNA, 15 bp, Homo sapiens
gagcaacatcacctc

SEQ ID NO: 1265510 - DNA, 15 bp, Homo sapiens
ggagcaacatcacct

SEQ ID NO: 1265511 - DNA, 15 bp, Homo sapiens
gggagcaacatcacc

SEQ ID NO: 1265512 - DNA, 15 bp, Homo sapiens
agggagcaacatcac

SEQ ID NO: 1265513 - DNA, 15 bp, Homo sapiens
cagggagcaacatca

SEQ ID NO: 1265514 - DNA, 15 bp, Homo sapiens
ccagggagcaacatc

SEQ ID NO: 1265515 - DNA, 15 bp, Homo sapiens
tccagggagcaacat

SEQ ID NO: 1265516 - DNA, 15 bp, Homo sapiens
gtccagggagcaaca

SEQ ID NO: 1265517 - DNA, 15 bp, Homo sapiens
agtccagggagcaac

SEQ ID NO: 1265518 - DNA, 15 bp, Homo sapiens
gagtccagggagcaa

SEQ ID NO: 1265519 - DNA, 15 bp, Homo sapiens
agagtccagggagca

SEQ ID NO: 1265520 - DNA, 15 bp, Homo sapiens
cagagtccagggagc

SEQ ID NO: 1265521 - DNA, 15 bp, Homo sapiens
gcagagtccagggag

SEQ ID NO: 1265522 - DNA, 15 bp, Homo sapiens
agcagagtccaggga

SEQ ID NO: 1265523 - DNA, 15 bp, Homo sapiens
aagcagagtccaggg

SEQ ID NO: 1265524 - DNA, 15 bp, Homo sapiens
gaagcagagtccagg

SEQ ID NO: 1265525 - DNA, 15 bp, Homo sapiens
agaagcagagtccag

SEQ ID NO: 1265526 - DNA, 15 bp, Homo sapiens
cagaagcagagtcca

SEQ ID NO: 1265527 - DNA, 15 bp, Homo sapiens
acagaagcagagtcc

SEQ ID NO: 1265528 - DNA, 15 bp, Homo sapiens
aacagaagcagagtc

SEQ ID NO: 1265529 - DNA, 15 bp, Homo sapiens
caacagaagcagagt

SEQ ID NO: 1265530 - DNA, 15 bp, Homo sapiens
tcaacagaagcagag

SEQ ID NO: 1265531 - DNA, 15 bp, Homo sapiens
gtcaacagaagcaga

SEQ ID NO: 1265532 - DNA, 15 bp, Homo sapiens
ggtcaacagaagcag

SEQ ID NO: 1265533 - DNA, 15 bp, Homo sapiens
aggtcaacagaagca

SEQ ID NO: 1265534 - DNA, 15 bp, Homo sapiens
aaggtcaacagaagc

SEQ ID NO: 1265535 - DNA, 15 bp, Homo sapiens
aaaggtcaacagaag

SEQ ID NO: 1265536 - DNA, 15 bp, Homo sapiens
gaaaggtcaacagaa

SEQ ID NO: 1265537 - DNA, 15 bp, Homo sapiens
agaaaggtcaacaga

SEQ ID NO: 1265538 - DNA, 15 bp, Homo sapiens
cagaaaggtcaacag

SEQ ID NO: 1265539 - DNA, 15 bp, Homo sapiens
acagaaaggtcaaca

SEQ ID NO: 1265540 - DNA, 15 bp, Homo sapiens
aacagaaaggtcaac

SEQ ID NO: 1265541 - DNA, 15 bp, Homo sapiens
taacagaaaggtcaa

SEQ ID NO: 1265542 - DNA, 15 bp, Homo sapiens
ttaacagaaaggtca

SEQ ID NO: 1265543 - DNA, 15 bp, Homo sapiens
gttaacagaaaggtc

SEQ ID NO: 1265544 - DNA, 15 bp, Homo sapiens
ggttaacagaaaggt

SEQ ID NO: 1265545 - DNA, 15 bp, Homo sapiens
tggttaacagaaagg

SEQ ID NO: 1265546 - DNA, 15 bp, Homo sapiens
ctggttaacagaaag

SEQ ID NO: 1265547 - DNA, 15 bp, Homo sapiens
actggttaacagaaa

SEQ ID NO: 1265548 - DNA, 15 bp, Homo sapiens
cactggttaacagaa

SEQ ID NO: 1265549 - DNA, 15 bp, Homo sapiens
ccactggttaacaga

SEQ ID NO: 1265550 - DNA, 15 bp, Homo sapiens
cccactggttaacag

SEQ ID NO: 1265551 - DNA, 15 bp, Homo sapiens
gcccactggttaaca

SEQ ID NO: 1265552 - DNA, 15 bp, Homo sapiens
ggcccactggttaac

SEQ ID NO: 1265553 - DNA, 15 bp, Homo sapiens
gggcccactggttaa

SEQ ID NO: 1265554 - DNA, 15 bp, Homo sapiens
tgggcccactggtta

SEQ ID NO: 1265555 - DNA, 15 bp, Homo sapiens
ctgggcccactggtt

SEQ ID NO: 1265556 - DNA, 15 bp, Homo sapiens
gctgggcccactggt

SEQ ID NO: 1265557 - DNA, 15 bp, Homo sapiens
ggctgggcccactgg

SEQ ID NO: 1265558 - DNA, 15 bp, Homo sapiens
gggctgggcccactg

SEQ ID NO: 1265559 - DNA, 15 bp, Homo sapiens
ggggctgggcccact

SEQ ID NO: 1265560 - DNA, 15 bp, Homo sapiens
aggggctgggcccac

SEQ ID NO: 1265561 - DNA, 15 bp, Homo sapiens
aaggggctgggccca

SEQ ID NO: 1265562 - DNA, 15 bp, Homo sapiens
taaggggctgggccc

SEQ ID NO: 1265563 - DNA, 15 bp, Homo sapiens
ctaaggggctgggcc

SEQ ID NO: 1265564 - DNA, 15 bp, Homo sapiens
cctaaggggctgggc

SEQ ID NO: 1265565 - DNA, 15 bp, Homo sapiens
acctaaggggctggg

SEQ ID NO: 1265566 - DNA, 15 bp, Homo sapiens
aacctaaggggctgg

SEQ ID NO: 1265567 - DNA, 15 bp, Homo sapiens
taacctaaggggctg

SEQ ID NO: 1265568 - DNA, 15 bp, Homo sapiens
gtaacctaaggggct

SEQ ID NO: 1265569 - DNA, 15 bp, Homo sapiens
ggtaacctaaggggc

SEQ ID NO: 1265570 - DNA, 15 bp, Homo sapiens
aggtaacctaagggg

SEQ ID NO: 1265571 - DNA, 15 bp, Homo sapiens
gaggtaacctaaggg

SEQ ID NO: 1265572 - DNA, 15 bp, Homo sapiens
agaggtaacctaagg

SEQ ID NO: 1265573 - DNA, 15 bp, Homo sapiens
cagaggtaacctaag

SEQ ID NO: 1265574 - DNA, 15 bp, Homo sapiens
ccagaggtaacctaa

SEQ ID NO: 1265575 - DNA, 15 bp, Homo sapiens
gccagaggtaaccta

SEQ ID NO: 1265576 - DNA, 15 bp, Homo sapiens
agccagaggtaacct

SEQ ID NO: 1265577 - DNA, 15 bp, Homo sapiens
gagccagaggtaacc

SEQ ID NO: 1265578 - DNA, 15 bp, Homo sapiens
ggagccagaggtaac

SEQ ID NO: 1265579 - DNA, 15 bp, Homo sapiens
gggagccagaggtaa

SEQ ID NO: 1265580 - DNA, 15 bp, Homo sapiens
tgggagccagaggta

SEQ ID NO: 1265581 - DNA, 15 bp, Homo sapiens
atgggagccagaggt

SEQ ID NO: 1265582 - DNA, 15 bp, Homo sapiens
aatgggagccagagg

SEQ ID NO: 1265583 - DNA, 15 bp, Homo sapiens
caatgggagccagag

SEQ ID NO: 1265584 - DNA, 15 bp, Homo sapiens
acaatgggagccaga

SEQ ID NO: 1265585 - DNA, 15 bp, Homo sapiens
tacaatgggagccag

SEQ ID NO: 1265586 - DNA, 15 bp, Homo sapiens
ctacaatgggagcca

SEQ ID NO: 1265587 - DNA, 15 bp, Homo sapiens
gctacaatgggagcc

SEQ ID NO: 1265588 - DNA, 15 bp, Homo sapiens
agctacaatgggagc

SEQ ID NO: 1265589 - DNA, 15 bp, Homo sapiens
cagctacaatgggag

SEQ ID NO: 1265590 - DNA, 15 bp, Homo sapiens
ccagctacaatggga

SEQ ID NO: 1265591 - DNA, 15 bp, Homo sapiens
accagctacaatggg

SEQ ID NO: 1265592 - DNA, 15 bp, Homo sapiens
aaccagctacaatgg

SEQ ID NO: 1265593 - DNA, 15 bp, Homo sapiens
taaccagctacaatg

SEQ ID NO: 1265594 - DNA, 15 bp, Homo sapiens
ttaaccagctacaat

SEQ ID NO: 1265595 - DNA, 15 bp, Homo sapiens
attaaccagctacaa

SEQ ID NO: 1265596 - DNA, 15 bp, Homo sapiens
gattaaccagctaca

SEQ ID NO: 1265597 - DNA, 15 bp, Homo sapiens
agattaaccagctac

SEQ ID NO: 1265598 - DNA, 15 bp, Homo sapiens
aagattaaccagcta

SEQ ID NO: 1265599 - DNA, 15 bp, Homo sapiens
aaagattaaccagct

SEQ ID NO: 1265600 - DNA, 15 bp, Homo sapiens
aaaagattaaccagc

SEQ ID NO: 1265601 - DNA, 15 bp, Homo sapiens
gaaaagattaaccag

SEQ ID NO: 1265602 - DNA, 15 bp, Homo sapiens
ggaaaagattaacca

SEQ ID NO: 1265603 - DNA, 15 bp, Homo sapiens
tggaaaagattaacc

SEQ ID NO: 1265604 - DNA, 15 bp, Homo sapiens
ctggaaaagattaac

SEQ ID NO: 1265605 - DNA, 15 bp, Homo sapiens
cctggaaaagattaa

SEQ ID NO: 1265606 - DNA, 15 bp, Homo sapiens
acctggaaaagatta

SEQ ID NO: 1265607 - DNA, 15 bp, Homo sapiens
cacctggaaaagatt

SEQ ID NO: 1265608 - DNA, 15 bp, Homo sapiens
gcacctggaaaagat

SEQ ID NO: 1265609 - DNA, 15 bp, Homo sapiens
ggcacctggaaaaga

SEQ ID NO: 1265610 - DNA, 15 bp, Homo sapiens
gggcacctggaaaag

SEQ ID NO: 1265611 - DNA, 15 bp, Homo sapiens
agggcacctggaaaa

SEQ ID NO: 1265612 - DNA, 15 bp, Homo sapiens
gagggcacctggaaa

SEQ ID NO: 1265613 - DNA, 15 bp, Homo sapiens
agagggcacctggaa

SEQ ID NO: 1265614 - DNA, 15 bp, Homo sapiens
cagagggcacctgga

SEQ ID NO: 1265615 - DNA, 15 bp, Homo sapiens
acagagggcacctgg

SEQ ID NO: 1265616 - DNA, 15 bp, Homo sapiens
gacagagggcacctg

SEQ ID NO: 1265617 - DNA, 15 bp, Homo sapiens
tgacagagggcacct

SEQ ID NO: 1265618 - DNA, 15 bp, Homo sapiens
gtgacagagggcacc

SEQ ID NO: 1265619 - DNA, 15 bp, Homo sapiens
agtgacagagggcac

SEQ ID NO: 1265620 - DNA, 15 bp, Homo sapiens
gagtgacagagggca

SEQ ID NO: 1265621 - DNA, 15 bp, Homo sapiens
agagtgacagagggc

SEQ ID NO: 1265622 - DNA, 15 bp, Homo sapiens
cagagtgacagaggg

SEQ ID NO: 1265623 - DNA, 15 bp, Homo sapiens
acagagtgacagagg

SEQ ID NO: 1265624 - DNA, 15 bp, Homo sapiens
cacagagtgacagag

SEQ ID NO: 1265625 - DNA, 15 bp, Homo sapiens
gcacagagtgacaga

SEQ ID NO: 1265626 - DNA, 15 bp, Homo sapiens
ggcacagagtgacag

SEQ ID NO: 1265627 - DNA, 15 bp, Homo sapiens
gggcacagagtgaca

SEQ ID NO: 1265628 - DNA, 15 bp, Homo sapiens
ggggcacagagtgac

SEQ ID NO: 1265629 - DNA, 15 bp, Homo sapiens
gggggcacagagtga

SEQ ID NO: 1265630 - DNA, 15 bp, Homo sapiens
tgggggcacagagtg

SEQ ID NO: 1265631 - DNA, 15 bp, Homo sapiens
gtgggggcacagagt

SEQ ID NO: 1265632 - DNA, 15 bp, Homo sapiens
tgtgggggcacagag

SEQ ID NO: 1265633 - DNA, 15 bp, Homo sapiens
atgtgggggcacaga

SEQ ID NO: 1265634 - DNA, 15 bp, Homo sapiens
tatgtgggggcacag

SEQ ID NO: 1265635 - DNA, 15 bp, Homo sapiens
atatgtgggggcaca

SEQ ID NO: 1265636 - DNA, 15 bp, Homo sapiens
aatatgtgggggcac

SEQ ID NO: 1265637 - DNA, 15 bp, Homo sapiens
aaatatgtgggggca

SEQ ID NO: 1265638 - DNA, 15 bp, Homo sapiens
caaatatgtgggggc

SEQ ID NO: 1265639 - DNA, 15 bp, Homo sapiens
tcaaatatgtggggg

SEQ ID NO: 1265640 - DNA, 15 bp, Homo sapiens
ttcaaatatgtgggg

SEQ ID NO: 1265641 - DNA, 15 bp, Homo sapiens
cttcaaatatgtggg

SEQ ID NO: 1265642 - DNA, 15 bp, Homo sapiens
tcttcaaatatgtgg

SEQ ID NO: 1265643 - DNA, 15 bp, Homo sapiens
atcttcaaatatgtg

SEQ ID NO: 1265644 - DNA, 15 bp, Homo sapiens
catcttcaaatatgt

SEQ ID NO: 1265645 - DNA, 15 bp, Homo sapiens
acatcttcaaatatg

SEQ ID NO: 1265646 - DNA, 15 bp, Homo sapiens
tacatcttcaaatat

SEQ ID NO: 1265647 - DNA, 15 bp, Homo sapiens
atacatcttcaaata

SEQ ID NO: 1265648 - DNA, 15 bp, Homo sapiens
tatacatcttcaaat

SEQ ID NO: 1265649 - DNA, 15 bp, Homo sapiens
gtatacatcttcaaa

SEQ ID NO: 1265650 - DNA, 15 bp, Homo sapiens
agtatacatcttcaa

SEQ ID NO: 1265651 - DNA, 15 bp, Homo sapiens
tagtatacatcttca

SEQ ID NO: 1265652 - DNA, 15 bp, Homo sapiens
atagtatacatcttc

SEQ ID NO: 1265653 - DNA, 15 bp, Homo sapiens
gatagtatacatctt

SEQ ID NO: 1265654 - DNA, 15 bp, Homo sapiens
tgatagtatacatct

SEQ ID NO: 1265655 - DNA, 15 bp, Homo sapiens
gtgatagtatacatc

SEQ ID NO: 1265656 - DNA, 15 bp, Homo sapiens
ggtgatagtatacat

SEQ ID NO: 1265657 - DNA, 15 bp, Homo sapiens
aggtgatagtataca

SEQ ID NO: 1265658 - DNA, 15 bp, Homo sapiens
aaggtgatagtatac

SEQ ID NO: 1265659 - DNA, 15 bp, Homo sapiens
aaaggtgatagtata

SEQ ID NO: 1265660 - DNA, 15 bp, Homo sapiens
caaaggtgatagtat

SEQ ID NO: 1265661 - DNA, 15 bp, Homo sapiens
gcaaaggtgatagta

SEQ ID NO: 1265662 - DNA, 15 bp, Homo sapiens
ggcaaaggtgatagt

SEQ ID NO: 1265663 - DNA, 15 bp, Homo sapiens
gggcaaaggtgatag

SEQ ID NO: 1265664 - DNA, 15 bp, Homo sapiens
agggcaaaggtgata

SEQ ID NO: 1265665 - DNA, 15 bp, Homo sapiens
aagggcaaaggtgat

SEQ ID NO: 1265666 - DNA, 15 bp, Homo sapiens
aaagggcaaaggtga

SEQ ID NO: 1265667 - DNA, 15 bp, Homo sapiens
caaagggcaaaggtg

SEQ ID NO: 1265668 - DNA, 15 bp, Homo sapiens
tcaaagggcaaaggt

SEQ ID NO: 1265669 - DNA, 15 bp, Homo sapiens
ttcaaagggcaaagg

SEQ ID NO: 1265670 - DNA, 15 bp, Homo sapiens
gttcaaagggcaaag

SEQ ID NO: 1265671 - DNA, 15 bp, Homo sapiens
agttcaaagggcaaa

SEQ ID NO: 1265672 - DNA, 15 bp, Homo sapiens
gagttcaaagggcaa

SEQ ID NO: 1265673 - DNA, 15 bp, Homo sapiens
tgagttcaaagggca

SEQ ID NO: 1265674 - DNA, 15 bp, Homo sapiens
ttgagttcaaagggc

SEQ ID NO: 1265675 - DNA, 15 bp, Homo sapiens
tttgagttcaaaggg

SEQ ID NO: 1265676 - DNA, 15 bp, Homo sapiens
ctttgagttcaaagg

SEQ ID NO: 1265677 - DNA, 15 bp, Homo sapiens
cctttgagttcaaag

SEQ ID NO: 1265678 - DNA, 15 bp, Homo sapiens
acctttgagttcaaa

SEQ ID NO: 1265679 - DNA, 15 bp, Homo sapiens
cacctttgagttcaa

SEQ ID NO: 1265680 - DNA, 15 bp, Homo sapiens
gcacctttgagttca

SEQ ID NO: 1265681 - DNA, 15 bp, Homo sapiens
agcacctttgagttc

SEQ ID NO: 1265682 - DNA, 15 bp, Homo sapiens
cagcacctttgagtt

SEQ ID NO: 1265683 - DNA, 15 bp, Homo sapiens
gcagcacctttgagt

SEQ ID NO: 1265684 - DNA, 15 bp, Homo sapiens
agcagcacctttgag

SEQ ID NO: 1265685 - DNA, 15 bp, Homo sapiens
cagcagcacctttga

SEQ ID NO: 1265686 - DNA, 15 bp, Homo sapiens
ccagcagcacctttg

SEQ ID NO: 1265687 - DNA, 15 bp, Homo sapiens
cccagcagcaccttt

SEQ ID NO: 1265688 - DNA, 15 bp, Homo sapiens
tcccagcagcacctt

SEQ ID NO: 1265689 - DNA, 15 bp, Homo sapiens
ctcccagcagcacct

SEQ ID NO: 1265690 - DNA, 15 bp, Homo sapiens
actcccagcagcacc

SEQ ID NO: 1265691 - DNA, 15 bp, Homo sapiens
cactcccagcagcac

SEQ ID NO: 1265692 - DNA, 15 bp, Homo sapiens
tcactcccagcagca

SEQ ID NO: 1265693 - DNA, 15 bp, Homo sapiens
atcactcccagcagc

SEQ ID NO: 1265694 - DNA, 15 bp, Homo sapiens
aatcactcccagcag

SEQ ID NO: 1265695 - DNA, 15 bp, Homo sapiens
taatcactcccagca

SEQ ID NO: 1265696 - DNA, 15 bp, Homo sapiens
ataatcactcccagc

SEQ ID NO: 1265697 - DNA, 15 bp, Homo sapiens
tataatcactcccag

SEQ ID NO: 1265698 - DNA, 15 bp, Homo sapiens
ctataatcactccca

SEQ ID NO: 1265699 - DNA, 15 bp, Homo sapiens
cctataatcactccc

SEQ ID NO: 1265700 - DNA, 15 bp, Homo sapiens
tcctataatcactcc

SEQ ID NO: 1265701 - DNA, 15 bp, Homo sapiens
ctcctataatcactc

SEQ ID NO: 1265702 - DNA, 15 bp, Homo sapiens
actcctataatcact

SEQ ID NO: 1265703 - DNA, 15 bp, Homo sapiens
cactcctataatcac

SEQ ID NO: 1265704 - DNA, 15 bp, Homo sapiens
acactcctataatca

SEQ ID NO: 1265705 - DNA, 15 bp, Homo sapiens
cacactcctataatc

SEQ ID NO: 1265706 - DNA, 15 bp, Homo sapiens
tcacactcctataat

SEQ ID NO: 1265707 - DNA, 15 bp, Homo sapiens
ctcacactcctataa

SEQ ID NO: 1265708 - DNA, 15 bp, Homo sapiens
tctcacactcctata

SEQ ID NO: 1265709 - DNA, 15 bp, Homo sapiens
atctcacactcctat

SEQ ID NO: 1265710 - DNA, 15 bp, Homo sapiens
catctcacactccta

SEQ ID NO: 1265711 - DNA, 15 bp, Homo sapiens
ccatctcacactcct

SEQ ID NO: 1265712 - DNA, 15 bp, Homo sapiens
accatctcacactcc

SEQ ID NO: 1265713 - DNA, 15 bp, Homo sapiens
gaccatctcacactc

SEQ ID NO: 1265714 - DNA, 15 bp, Homo sapiens
tgaccatctcacact

SEQ ID NO: 1265715 - DNA, 15 bp, Homo sapiens
gtgaccatctcacac

SEQ ID NO: 1265716 - DNA, 15 bp, Homo sapiens
ggtgaccatctcaca

SEQ ID NO: 1265717 - DNA, 15 bp, Homo sapiens
aggtgaccatctcac

SEQ ID NO: 1265718 - DNA, 15 bp, Homo sapiens
aaggtgaccatctca

SEQ ID NO: 1265719 - DNA, 15 bp, Homo sapiens
caaggtgaccatctc

SEQ ID NO: 1265720 - DNA, 15 bp, Homo sapiens
acaaggtgaccatct

SEQ ID NO: 1265721 - DNA, 15 bp, Homo sapiens
tacaaggtgaccatc

SEQ ID NO: 1265722 - DNA, 15 bp, Homo sapiens
ctacaaggtgaccat

SEQ ID NO: 1265723 - DNA, 15 bp, Homo sapiens
actacaaggtgacca

SEQ ID NO: 1265724 - DNA, 15 bp, Homo sapiens
aactacaaggtgacc

SEQ ID NO: 1265725 - DNA, 15 bp, Homo sapiens
gaactacaaggtgac

SEQ ID NO: 1265726 - DNA, 15 bp, Homo sapiens
ggaactacaaggtga

SEQ ID NO: 1265727 - DNA, 15 bp, Homo sapiens
tggaactacaaggtg

SEQ ID NO: 1265728 - DNA, 15 bp, Homo sapiens
atggaactacaaggt

SEQ ID NO: 1265729 - DNA, 15 bp, Homo sapiens
catggaactacaagg

SEQ ID NO: 1265730 - DNA, 15 bp, Homo sapiens
acatggaactacaag

SEQ ID NO: 1265731 - DNA, 15 bp, Homo sapiens
tacatggaactacaa

SEQ ID NO: 1265732 - DNA, 15 bp, Homo sapiens
ttacatggaactaca

SEQ ID NO: 1265733 - DNA, 15 bp, Homo sapiens
attacatggaactac

SEQ ID NO: 1265734 - DNA, 15 bp, Homo sapiens
gattacatggaacta

SEQ ID NO: 1265735 - DNA, 15 bp, Homo sapiens
tgattacatggaact

SEQ ID NO: 1265736 - DNA, 15 bp, Homo sapiens
gtgattacatggaac

SEQ ID NO: 1265737 - DNA, 15 bp, Homo sapiens
tgtgattacatggaa

SEQ ID NO: 1265738 - DNA, 15 bp, Homo sapiens
gtgtgattacatgga

SEQ ID NO: 1265739 - DNA, 15 bp, Homo sapiens
agtgtgattacatgg

SEQ ID NO: 1265740 - DNA, 15 bp, Homo sapiens
cagtgtgattacatg

SEQ ID NO: 1265741 - DNA, 15 bp, Homo sapiens
acagtgtgattacat

SEQ ID NO: 1265742 - DNA, 15 bp, Homo sapiens
gacagtgtgattaca

SEQ ID NO: 1265743 - DNA, 15 bp, Homo sapiens
agacagtgtgattac

SEQ ID NO: 1265744 - DNA, 15 bp, Homo sapiens
aagacagtgtgatta

SEQ ID NO: 1265745 - DNA, 15 bp, Homo sapiens
taagacagtgtgatt

SEQ ID NO: 1265746 - DNA, 15 bp, Homo sapiens
ttaagacagtgtgat

SEQ ID NO: 1265747 - DNA, 15 bp, Homo sapiens
tttaagacagtgtga

SEQ ID NO: 1265748 - DNA, 15 bp, Homo sapiens
atttaagacagtgtg

SEQ ID NO: 1265749 - DNA, 15 bp, Homo sapiens
catttaagacagtgt

SEQ ID NO: 1265750 - DNA, 15 bp, Homo sapiens
gcatttaagacagtg

SEQ ID NO: 1265751 - DNA, 15 bp, Homo sapiens
agcatttaagacagt

SEQ ID NO: 1265752 - DNA, 15 bp, Homo sapiens
gagcatttaagacag

SEQ ID NO: 1265753 - DNA, 15 bp, Homo sapiens
tgagcatttaagaca

SEQ ID NO: 1265754 - DNA, 15 bp, Homo sapiens
ttgagcatttaagac

SEQ ID NO: 1265755 - DNA, 15 bp, Homo sapiens
tttgagcatttaaga

SEQ ID NO: 1265756 - DNA, 15 bp, Homo sapiens
atttgagcatttaag

SEQ ID NO: 1265757 - DNA, 15 bp, Homo sapiens
aatttgagcatttaa

SEQ ID NO: 1265758 - DNA, 15 bp, Homo sapiens
taatttgagcattta

SEQ ID NO: 1265759 - DNA, 15 bp, Homo sapiens
ttaatttgagcattt

SEQ ID NO: 1265760 - DNA, 15 bp, Homo sapiens
tttaatttgagcatt

SEQ ID NO: 1265761 - DNA, 15 bp, Homo sapiens
ttttaatttgagcat

SEQ ID NO: 1265762 - DNA, 15 bp, Homo sapiens
tttttaatttgagca

SEQ ID NO: 1265763 - DNA, 15 bp, Homo sapiens
ttttttaatttgagc

SEQ ID NO: 1265764 - DNA, 15 bp, Homo sapiens
tttttttaatttgag

SEQ ID NO: 1265765 - DNA, 15 bp, Homo sapiens
ttttttttaatttga

SEQ ID NO: 1265766 - DNA, 15 bp, Homo sapiens
attttttttaatttg

SEQ ID NO: 1265767 - DNA, 15 bp, Homo sapiens
tattttttttaattt

SEQ ID NO: 1265768 - DNA, 15 bp, Homo sapiens
ttattttttttaatt

SEQ ID NO: 1265769 - DNA, 15 bp, Homo sapiens
tttattttttttaat

SEQ ID NO: 1265770 - DNA, 15 bp, Homo sapiens
atttattttttttaa

SEQ ID NO: 1265771 - DNA, 15 bp, Homo sapiens
tatttatttttttta

SEQ ID NO: 1265772 - DNA, 15 bp, Homo sapiens
ttatttatttttttt

SEQ ID NO: 1265773 - DNA, 15 bp, Homo sapiens
gtttttatttatttt

SEQ ID NO: 1265774 - DNA, 15 bp, Homo sapiens
agtttttatttattt

SEQ ID NO: 1265775 - DNA, 15 bp, Homo sapiens
cagtttttatttatt

SEQ ID NO: 1265776 - DNA, 15 bp, Homo sapiens
ccagtttttatttat

SEQ ID NO: 1265777 - DNA, 15 bp, Homo sapiens
accagtttttattta

SEQ ID NO: 1265778 - DNA, 15 bp, Homo sapiens
taccagtttttattt

SEQ ID NO: 1265779 - DNA, 15 bp, Homo sapiens
ttaccagtttttatt

SEQ ID NO: 1265780 - DNA, 15 bp, Homo sapiens
attaccagtttttat

SEQ ID NO: 1265781 - DNA, 15 bp, Homo sapiens
aattaccagttttta

SEQ ID NO: 1265782 - DNA, 15 bp, Homo sapiens
gaattaccagttttt

SEQ ID NO: 1265783 - DNA, 15 bp, Homo sapiens
agaattaccagtttt

SEQ ID NO: 1265784 - DNA, 15 bp, Homo sapiens
cagaattaccagttt

SEQ ID NO: 1265785 - DNA, 15 bp, Homo sapiens
acagaattaccagtt

SEQ ID NO: 1265786 - DNA, 15 bp, Homo sapiens
cacagaattaccagt

SEQ ID NO: 1265787 - DNA, 15 bp, Homo sapiens
ccacagaattaccag

SEQ ID NO: 1265788 - DNA, 15 bp, Homo sapiens
accacagaattacca

SEQ ID NO: 1265789 - DNA, 15 bp, Homo sapiens
aaccacagaattacc

SEQ ID NO: 1265790 - DNA, 15 bp, Homo sapiens
taaccacagaattac

SEQ ID NO: 1265791 - DNA, 15 bp, Homo sapiens
ctaaccacagaatta

SEQ ID NO: 1265792 - DNA, 15 bp, Homo sapiens
gctaaccacagaatt

SEQ ID NO: 1265793 - DNA, 15 bp, Homo sapiens
tgctaaccacagaat

SEQ ID NO: 1265794 - DNA, 15 bp, Homo sapiens
gtgctaaccacagaa

SEQ ID NO: 1265795 - DNA, 15 bp, Homo sapiens
tgtgctaaccacaga

SEQ ID NO: 1265796 - DNA, 15 bp, Homo sapiens
ttgtgctaaccacag

SEQ ID NO: 1265797 - DNA, 15 bp, Homo sapiens
tttgtgctaaccaca

SEQ ID NO: 1265798 - DNA, 15 bp, Homo sapiens
ttttgtgctaaccac

SEQ ID NO: 1265799 - DNA, 15 bp, Homo sapiens
attttgtgctaacca

SEQ ID NO: 1265800 - DNA, 15 bp, Homo sapiens
aattttgtgctaacc

SEQ ID NO: 1265801 - DNA, 15 bp, Homo sapiens
gaattttgtgctaac

SEQ ID NO: 1265802 - DNA, 15 bp, Homo sapiens
tgaattttgtgctaa

SEQ ID NO: 1265803 - DNA, 15 bp, Homo sapiens
ttgaattttgtgcta

SEQ ID NO: 1265804 - DNA, 15 bp, Homo sapiens
tttgaattttgtgct

SEQ ID NO: 1265805 - DNA, 15 bp, Homo sapiens
gtttgaattttgtgc

SEQ ID NO: 1265806 - DNA, 15 bp, Homo sapiens
tgtttgaattttgtg

SEQ ID NO: 1265807 - DNA, 15 bp, Homo sapiens
atgtttgaattttgt

SEQ ID NO: 1265808 - DNA, 15 bp, Homo sapiens
gatgtttgaattttg

SEQ ID NO: 1265809 - DNA, 15 bp, Homo sapiens
tgatgtttgaatttt

SEQ ID NO: 1265810 - DNA, 15 bp, Homo sapiens
gtgatgtttgaattt

SEQ ID NO: 1265811 - DNA, 15 bp, Homo sapiens
tgtgatgtttgaatt

SEQ ID NO: 1265812 - DNA, 15 bp, Homo sapiens
ttgtgatgtttgaat

SEQ ID NO: 1265813 - DNA, 15 bp, Homo sapiens
tttgtgatgtttgaa

SEQ ID NO: 1265814 - DNA, 15 bp, Homo sapiens
ttttgtgatgtttga

SEQ ID NO: 1265815 - DNA, 15 bp, Homo sapiens
attttgtgatgtttg

SEQ ID NO: 1265816 - DNA, 15 bp, Homo sapiens
tattttgtgatgttt

SEQ ID NO: 1265817 - DNA, 15 bp, Homo sapiens
ttattttgtgatgtt

SEQ ID NO: 1265818 - DNA, 15 bp, Homo sapiens
attattttgtgatgt

SEQ ID NO: 1265819 - DNA, 15 bp, Homo sapiens
aattattttgtgatg

SEQ ID NO: 1265820 - DNA, 15 bp, Homo sapiens
taattattttgtgat

SEQ ID NO: 1265821 - DNA, 15 bp, Homo sapiens
ttaattattttgtga

SEQ ID NO: 1265822 - DNA, 15 bp, Homo sapiens
cttaattattttgtg

SEQ ID NO: 1265823 - DNA, 15 bp, Homo sapiens
ccttaattattttgt

SEQ ID NO: 1265824 - DNA, 15 bp, Homo sapiens
tccttaattattttg

SEQ ID NO: 1265825 - DNA, 15 bp, Homo sapiens
ttccttaattatttt

SEQ ID NO: 1265826 - DNA, 15 bp, Homo sapiens
tttccttaattattt

SEQ ID NO: 1265827 - DNA, 15 bp, Homo sapiens
gtttccttaattatt

SEQ ID NO: 1265828 - DNA, 15 bp, Homo sapiens
tgtttccttaattat

SEQ ID NO: 1265829 - DNA, 15 bp, Homo sapiens
atgtttccttaatta

SEQ ID NO: 1265830 - DNA, 15 bp, Homo sapiens
aatgtttccttaatt

SEQ ID NO: 1265831 - DNA, 15 bp, Homo sapiens
aaatgtttccttaat

SEQ ID NO: 1265832 - DNA, 15 bp, Homo sapiens
taaatgtttccttaa

SEQ ID NO: 1265833 - DNA, 15 bp, Homo sapiens
gtaaatgtttcctta

SEQ ID NO: 1265834 - DNA, 15 bp, Homo sapiens
ggtaaatgtttcctt

SEQ ID NO: 1265835 - DNA, 15 bp, Homo sapiens
aggtaaatgtttcct

SEQ ID NO: 1265836 - DNA, 15 bp, Homo sapiens
aaggtaaatgtttcc

SEQ ID NO: 1265837 - DNA, 15 bp, Homo sapiens
gaaggtaaatgtttc

SEQ ID NO: 1265838 - DNA, 15 bp, Homo sapiens
tgaaggtaaatgttt

SEQ ID NO: 1265839 - DNA, 15 bp, Homo sapiens
gtgaaggtaaatgtt

SEQ ID NO: 1265840 - DNA, 15 bp, Homo sapiens
ggtgaaggtaaatgt

SEQ ID NO: 1265841 - DNA, 15 bp, Homo sapiens
aggtgaaggtaaatg

SEQ ID NO: 1265842 - DNA, 15 bp, Homo sapiens
gaggtgaaggtaaat

SEQ ID NO: 1265843 - DNA, 15 bp, Homo sapiens
agaggtgaaggtaaa

SEQ ID NO: 1265844 - DNA, 15 bp, Homo sapiens
cagaggtgaaggtaa

SEQ ID NO: 1265845 - DNA, 15 bp, Homo sapiens
gcagaggtgaaggta

SEQ ID NO: 1265846 - DNA, 15 bp, Homo sapiens
agcagaggtgaaggt

SEQ ID NO: 1265847 - DNA, 15 bp, Homo sapiens
gagcagaggtgaagg

SEQ ID NO: 1265848 - DNA, 15 bp, Homo sapiens
ggagcagaggtgaag

SEQ ID NO: 1265849 - DNA, 15 bp, Homo sapiens
gggagcagaggtgaa

SEQ ID NO: 1265850 - DNA, 15 bp, Homo sapiens
tgggagcagaggtga

SEQ ID NO: 1265851 - DNA, 15 bp, Homo sapiens
ttgggagcagaggtg

SEQ ID NO: 1265852 - DNA, 15 bp, Homo sapiens
cttgggagcagaggt

SEQ ID NO: 1265853 - DNA, 15 bp, Homo sapiens
acttgggagcagagg

SEQ ID NO: 1265854 - DNA, 15 bp, Homo sapiens
tacttgggagcagag

SEQ ID NO: 1265855 - DNA, 15 bp, Homo sapiens
ttacttgggagcaga

SEQ ID NO: 1265856 - DNA, 15 bp, Homo sapiens
cttacttgggagcag

SEQ ID NO: 1265857 - DNA, 15 bp, Homo sapiens
gcttacttgggagca

SEQ ID NO: 1265858 - DNA, 15 bp, Homo sapiens
ggcttacttgggagc

SEQ ID NO: 1265859 - DNA, 15 bp, Homo sapiens
tggcttacttgggag

SEQ ID NO: 1265860 - DNA, 15 bp, Homo sapiens
ctggcttacttggga

SEQ ID NO: 1265861 - DNA, 15 bp, Homo sapiens
cctggcttacttggg

SEQ ID NO: 1265862 - DNA, 15 bp, Homo sapiens
gcctggcttacttgg

SEQ ID NO: 1265863 - DNA, 15 bp, Homo sapiens
tgcctggcttacttg

SEQ ID NO: 1265864 - DNA, 15 bp, Homo sapiens
ctgcctggcttactt

SEQ ID NO: 1265865 - DNA, 15 bp, Homo sapiens
gctgcctggcttact

SEQ ID NO: 1265866 - DNA, 15 bp, Homo sapiens
agctgcctggcttac

SEQ ID NO: 1265867 - DNA, 15 bp, Homo sapiens
cagctgcctggctta

SEQ ID NO: 1265868 - DNA, 15 bp, Homo sapiens
gcagctgcctggctt

SEQ ID NO: 1265869 - DNA, 15 bp, Homo sapiens
agcagctgcctggct

SEQ ID NO: 1265870 - DNA, 15 bp, Homo sapiens
tagcagctgcctggc

SEQ ID NO: 1265871 - DNA, 15 bp, Homo sapiens
atagcagctgcctgg

SEQ ID NO: 1265872 - DNA, 15 bp, Homo sapiens
gatagcagctgcctg

SEQ ID NO: 1265873 - DNA, 15 bp, Homo sapiens
tgatagcagctgcct

SEQ ID NO: 1265874 - DNA, 15 bp, Homo sapiens
atgatagcagctgcc

SEQ ID NO: 1265875 - DNA, 15 bp, Homo sapiens
gatgatagcagctgc

SEQ ID NO: 1265876 - DNA, 15 bp, Homo sapiens
tgatgatagcagctg

SEQ ID NO: 1265877 - DNA, 15 bp, Homo sapiens
ctgatgatagcagct

SEQ ID NO: 1265878 - DNA, 15 bp, Homo sapiens
tctgatgatagcagc

SEQ ID NO: 1265879 - DNA, 15 bp, Homo sapiens
ctctgatgatagcag

SEQ ID NO: 1265880 - DNA, 15 bp, Homo sapiens
tctctgatgatagca

SEQ ID NO: 1265881 - DNA, 15 bp, Homo sapiens
atctctgatgatagc

SEQ ID NO: 1265882 - DNA, 15 bp, Homo sapiens
tatctctgatgatag

SEQ ID NO: 1265883 - DNA, 15 bp, Homo sapiens
atatctctgatgata

SEQ ID NO: 1265884 - DNA, 15 bp, Homo sapiens
aatatctctgatgat

SEQ ID NO: 1265885 - DNA, 15 bp, Homo sapiens
aaatatctctgatga

SEQ ID NO: 1265886 - DNA, 15 bp, Homo sapiens
taaatatctctgatg

SEQ ID NO: 1265887 - DNA, 15 bp, Homo sapiens
ttaaatatctctgat

SEQ ID NO: 1265888 - DNA, 15 bp, Homo sapiens
attaaatatctctga

SEQ ID NO: 1265889 - DNA, 15 bp, Homo sapiens
cattaaatatctctg

SEQ ID NO: 1265890 - DNA, 15 bp, Homo sapiens
tcattaaatatctct

SEQ ID NO: 1265891 - DNA, 15 bp, Homo sapiens
ttcattaaatatctc

SEQ ID NO: 1265892 - DNA, 15 bp, Homo sapiens
tttcattaaatatct

SEQ ID NO: 1265893 - DNA, 15 bp, Homo sapiens
atttcattaaatatc

SEQ ID NO: 1265894 - DNA, 15 bp, Homo sapiens
aatttcattaaatat

SEQ ID NO: 1265895 - DNA, 15 bp, Homo sapiens
gaatttcattaaata

SEQ ID NO: 1265896 - DNA, 15 bp, Homo sapiens
agaatttcattaaat

SEQ ID NO: 1265897 - DNA, 15 bp, Homo sapiens
aagaatttcattaaa

SEQ ID NO: 1265898 - DNA, 15 bp, Homo sapiens
aaagaatttcattaa

SEQ ID NO: 1265899 - DNA, 15 bp, Homo sapiens
taaagaatttcatta

SEQ ID NO: 1265900 - DNA, 15 bp, Homo sapiens
gtaaagaatttcatt

SEQ ID NO: 1265901 - DNA, 15 bp, Homo sapiens
agtaaagaatttcat

SEQ ID NO: 1265902 - DNA, 15 bp, Homo sapiens
aagtaaagaatttca

SEQ ID NO: 1265903 - DNA, 15 bp, Homo sapiens
aaagtaaagaatttc

SEQ ID NO: 1265904 - DNA, 15 bp, Homo sapiens
gaaagtaaagaattt

SEQ ID NO: 1265905 - DNA, 15 bp, Homo sapiens
tgaaagtaaagaatt

SEQ ID NO: 1265906 - DNA, 15 bp, Homo sapiens
atgaaagtaaagaat

SEQ ID NO: 1265907 - DNA, 15 bp, Homo sapiens
catgaaagtaaagaa

SEQ ID NO: 1265908 - DNA, 15 bp, Homo sapiens
ccatgaaagtaaaga

SEQ ID NO: 1265909 - DNA, 15 bp, Homo sapiens
gccatgaaagtaaag

SEQ ID NO: 1265910 - DNA, 15 bp, Homo sapiens
tgccatgaaagtaaa

SEQ ID NO: 1265911 - DNA, 15 bp, Homo sapiens
ctgccatgaaagtaa

SEQ ID NO: 1265912 - DNA, 15 bp, Homo sapiens
tctgccatgaaagta

SEQ ID NO: 1265913 - DNA, 15 bp, Homo sapiens
ttctgccatgaaagt

SEQ ID NO: 1265914 - DNA, 15 bp, Homo sapiens
attctgccatgaaag

SEQ ID NO: 1265915 - DNA, 15 bp, Homo sapiens
cattctgccatgaaa

SEQ ID NO: 1265916 - DNA, 15 bp, Homo sapiens
tcattctgccatgaa

SEQ ID NO: 1265917 - DNA, 15 bp, Homo sapiens
ttcattctgccatga

SEQ ID NO: 1265918 - DNA, 15 bp, Homo sapiens
tttcattctgccatg

SEQ ID NO: 1265919 - DNA, 15 bp, Homo sapiens
ttttcattctgccat

SEQ ID NO: 1265920 - DNA, 15 bp, Homo sapiens
attttcattctgcca

SEQ ID NO: 1265921 - DNA, 15 bp, Homo sapiens
gattttcattctgcc

SEQ ID NO: 1265922 - DNA, 15 bp, Homo sapiens
agattttcattctgc

SEQ ID NO: 1265923 - DNA, 15 bp, Homo sapiens
aagattttcattctg

SEQ ID NO: 1265924 - DNA, 15 bp, Homo sapiens
aaagattttcattct

SEQ ID NO: 1265925 - DNA, 15 bp, Homo sapiens
caaagattttcattc

SEQ ID NO: 1265926 - DNA, 15 bp, Homo sapiens
acaaagattttcatt

SEQ ID NO: 1265927 - DNA, 15 bp, Homo sapiens
gacaaagattttcat

SEQ ID NO: 1265928 - DNA, 15 bp, Homo sapiens
agacaaagattttca

SEQ ID NO: 1265929 - DNA, 15 bp, Homo sapiens
gagacaaagattttc

SEQ ID NO: 1265930 - DNA, 15 bp, Homo sapiens
ggagacaaagatttt

SEQ ID NO: 1265931 - DNA, 15 bp, Homo sapiens
aggagacaaagattt

SEQ ID NO: 1265932 - DNA, 15 bp, Homo sapiens
caggagacaaagatt

SEQ ID NO: 1265933 - DNA, 15 bp, Homo sapiens
gcaggagacaaagat

SEQ ID NO: 1265934 - DNA, 15 bp, Homo sapiens
tgcaggagacaaaga

SEQ ID NO: 1265935 - DNA, 15 bp, Homo sapiens
atgcaggagacaaag

SEQ ID NO: 1265936 - DNA, 15 bp, Homo sapiens
catgcaggagacaaa

SEQ ID NO: 1265937 - DNA, 15 bp, Homo sapiens
acatgcaggagacaa

SEQ ID NO: 1265938 - DNA, 15 bp, Homo sapiens
tacatgcaggagaca

SEQ ID NO: 1265939 - DNA, 15 bp, Homo sapiens
ctacatgcaggagac

SEQ ID NO: 1265940 - DNA, 15 bp, Homo sapiens
cctacatgcaggaga

SEQ ID NO: 1265941 - DNA, 15 bp, Homo sapiens
gcctacatgcaggag

SEQ ID NO: 1265942 - DNA, 15 bp, Homo sapiens
agcctacatgcagga

SEQ ID NO: 1265943 - DNA, 15 bp, Homo sapiens
cagcctacatgcagg

SEQ ID NO: 1265944 - DNA, 15 bp, Homo sapiens
tcagcctacatgcag

SEQ ID NO: 1265945 - DNA, 15 bp, Homo sapiens
gtcagcctacatgca

SEQ ID NO: 1265946 - DNA, 15 bp, Homo sapiens
agtcagcctacatgc

SEQ ID NO: 1265947 - DNA, 15 bp, Homo sapiens
aagtcagcctacatg

SEQ ID NO: 1265948 - DNA, 15 bp, Homo sapiens
aaagtcagcctacat

SEQ ID NO: 1265949 - DNA, 15 bp, Homo sapiens
taaagtcagcctaca

SEQ ID NO: 1265950 - DNA, 15 bp, Homo sapiens
ataaagtcagcctac

SEQ ID NO: 1265951 - DNA, 15 bp, Homo sapiens
cataaagtcagccta

SEQ ID NO: 1265952 - DNA, 15 bp, Homo sapiens
acataaagtcagcct

SEQ ID NO: 1265953 - DNA, 15 bp, Homo sapiens
tacataaagtcagcc

SEQ ID NO: 1265954 - DNA, 15 bp, Homo sapiens
gtacataaagtcagc

SEQ ID NO: 1265955 - DNA, 15 bp, Homo sapiens
agtacataaagtcag

SEQ ID NO: 1265956 - DNA, 15 bp, Homo sapiens
aagtacataaagtca

SEQ ID NO: 1265957 - DNA, 15 bp, Homo sapiens
gaagtacataaagtc

SEQ ID NO: 1265958 - DNA, 15 bp, Homo sapiens
ggaagtacataaagt

SEQ ID NO: 1265959 - DNA, 15 bp, Homo sapiens
aggaagtacataaag

SEQ ID NO: 1265960 - DNA, 15 bp, Homo sapiens
taggaagtacataaa

SEQ ID NO: 1265961 - DNA, 15 bp, Homo sapiens
ttaggaagtacataa

SEQ ID NO: 1265962 - DNA, 15 bp, Homo sapiens
attaggaagtacata

SEQ ID NO: 1265963 - DNA, 15 bp, Homo sapiens
cattaggaagtacat

SEQ ID NO: 1265964 - DNA, 15 bp, Homo sapiens
ccattaggaagtaca

SEQ ID NO: 1265965 - DNA, 15 bp, Homo sapiens
accattaggaagtac

SEQ ID NO: 1265966 - DNA, 15 bp, Homo sapiens
taccattaggaagta

SEQ ID NO: 1265967 - DNA, 15 bp, Homo sapiens
ctaccattaggaagt

SEQ ID NO: 1265968 - DNA, 15 bp, Homo sapiens
tctaccattaggaag

SEQ ID NO: 1265969 - DNA, 15 bp, Homo sapiens
ttctaccattaggaa

SEQ ID NO: 1265970 - DNA, 15 bp, Homo sapiens
cttctaccattagga

SEQ ID NO: 1265971 - DNA, 15 bp, Homo sapiens
ccttctaccattagg

SEQ ID NO: 1265972 - DNA, 15 bp, Homo sapiens
accttctaccattag

SEQ ID NO: 1265973 - DNA, 15 bp, Homo sapiens
caccttctaccatta

SEQ ID NO: 1265974 - DNA, 15 bp, Homo sapiens
acaccttctaccatt

SEQ ID NO: 1265975 - DNA, 15 bp, Homo sapiens
tacaccttctaccat

SEQ ID NO: 1265976 - DNA, 15 bp, Homo sapiens
ttacaccttctacca

SEQ ID NO: 1265977 - DNA, 15 bp, Homo sapiens
gttacaccttctacc

SEQ ID NO: 1265978 - DNA, 15 bp, Homo sapiens
agttacaccttctac

SEQ ID NO: 1265979 - DNA, 15 bp, Homo sapiens
gagttacaccttcta

SEQ ID NO: 1265980 - DNA, 15 bp, Homo sapiens
agagttacaccttct

SEQ ID NO: 1265981 - DNA, 15 bp, Homo sapiens
tagagttacaccttc

SEQ ID NO: 1265982 - DNA, 15 bp, Homo sapiens
ttagagttacacctt

SEQ ID NO: 1265983 - DNA, 15 bp, Homo sapiens
tttagagttacacct

SEQ ID NO: 1265984 - DNA, 15 bp, Homo sapiens
gtttagagttacacc

SEQ ID NO: 1265985 - DNA, 15 bp, Homo sapiens
agtttagagttacac

SEQ ID NO: 1265986 - DNA, 15 bp, Homo sapiens
cagtttagagttaca

SEQ ID NO: 1265987 - DNA, 15 bp, Homo sapiens
ccagtttagagttac

SEQ ID NO: 1265988 - DNA, 15 bp, Homo sapiens
accagtttagagtta

SEQ ID NO: 1265989 - DNA, 15 bp, Homo sapiens
caccagtttagagtt

SEQ ID NO: 1265990 - DNA, 15 bp, Homo sapiens
tcaccagtttagagt

SEQ ID NO: 1265991 - DNA, 15 bp, Homo sapiens
ctcaccagtttagag

SEQ ID NO: 1265992 - DNA, 15 bp, Homo sapiens
cctcaccagtttaga

SEQ ID NO: 1265993 - DNA, 15 bp, Homo sapiens
tcctcaccagtttag

SEQ ID NO: 1265994 - DNA, 15 bp, Homo sapiens
ctcctcaccagttta

SEQ ID NO: 1265995 - DNA, 15 bp, Homo sapiens
actcctcaccagttt

SEQ ID NO: 1265996 - DNA, 15 bp, Homo sapiens
aactcctcaccagtt

SEQ ID NO: 1265997 - DNA, 15 bp, Homo sapiens
aaactcctcaccagt

SEQ ID NO: 1265998 - DNA, 15 bp, Homo sapiens
caaactcctcaccag

SEQ ID NO: 1265999 - DNA, 15 bp, Homo sapiens
acaaactcctcacca

SEQ ID NO: 1266000 - DNA, 15 bp, Homo sapiens
cacaaactcctcacc

SEQ ID NO: 1266001 - DNA, 15 bp, Homo sapiens
acacaaactcctcac

SEQ ID NO: 1266002 - DNA, 15 bp, Homo sapiens
tacacaaactcctca

SEQ ID NO: 1266003 - DNA, 15 bp, Homo sapiens
ttacacaaactcctc

SEQ ID NO: 1266004 - DNA, 15 bp, Homo sapiens
gttacacaaactcct

SEQ ID NO: 1266005 - DNA, 15 bp, Homo sapiens
agttacacaaactcc

SEQ ID NO: 1266006 - DNA, 15 bp, Homo sapiens
tagttacacaaactc

SEQ ID NO: 1266007 - DNA, 15 bp, Homo sapiens
atagttacacaaact

SEQ ID NO: 1266008 - DNA, 15 bp, Homo sapiens
gatagttacacaaac

SEQ ID NO: 1266009 - DNA, 15 bp, Homo sapiens
tgatagttacacaaa

SEQ ID NO: 1266010 - DNA, 15 bp, Homo sapiens
ctgatagttacacaa

SEQ ID NO: 1266011 - DNA, 15 bp, Homo sapiens
tctgatagttacaca

SEQ ID NO: 1266012 - DNA, 15 bp, Homo sapiens
ttctgatagttacac

SEQ ID NO: 1266013 - DNA, 15 bp, Homo sapiens
attctgatagttaca

SEQ ID NO: 1266014 - DNA, 15 bp, Homo sapiens
cattctgatagttac

SEQ ID NO: 1266015 - DNA, 15 bp, Homo sapiens
acattctgatagtta

SEQ ID NO: 1266016 - DNA, 15 bp, Homo sapiens
tacattctgatagtt

SEQ ID NO: 1266017 - DNA, 15 bp, Homo sapiens
ttacattctgatagt

SEQ ID NO: 1266018 - DNA, 15 bp, Homo sapiens
tttacattctgatag

SEQ ID NO: 1266019 - DNA, 15 bp, Homo sapiens
ttttacattctgata

SEQ ID NO: 1266020 - DNA, 15 bp, Homo sapiens
attttacattctgat

SEQ ID NO: 1266021 - DNA, 15 bp, Homo sapiens
gattttacattctga

SEQ ID NO: 1266022 - DNA, 15 bp, Homo sapiens
ggattttacattctg

SEQ ID NO: 1266023 - DNA, 15 bp, Homo sapiens
tggattttacattct

SEQ ID NO: 1266024 - DNA, 15 bp, Homo sapiens
atggattttacattc

SEQ ID NO: 1266025 - DNA, 15 bp, Homo sapiens
aatggattttacatt

SEQ ID NO: 1266026 - DNA, 15 bp, Homo sapiens
taatggattttacat

SEQ ID NO: 1266027 - DNA, 15 bp, Homo sapiens
ataatggattttaca

SEQ ID NO: 1266028 - DNA, 15 bp, Homo sapiens
cataatggattttac

SEQ ID NO: 1266029 - DNA, 15 bp, Homo sapiens
acataatggatttta

SEQ ID NO: 1266030 - DNA, 15 bp, Homo sapiens
aacataatggatttt

SEQ ID NO: 1266031 - DNA, 15 bp, Homo sapiens
aaacataatggattt

SEQ ID NO: 1266032 - DNA, 15 bp, Homo sapiens
taaacataatggatt

SEQ ID NO: 1266033 - DNA, 15 bp, Homo sapiens
ataaacataatggat

SEQ ID NO: 1266034 - DNA, 15 bp, Homo sapiens
aataaacataatgga

SEQ ID NO: 1266035 - DNA, 15 bp, Homo sapiens
gaataaacataatgg

SEQ ID NO: 1266036 - DNA, 15 bp, Homo sapiens
agaataaacataatg

SEQ ID NO: 1266037 - DNA, 15 bp, Homo sapiens
cagaataaacataat

SEQ ID NO: 1266038 - DNA, 15 bp, Homo sapiens
ccagaataaacataa

SEQ ID NO: 1266039 - DNA, 15 bp, Homo sapiens
accagaataaacata

SEQ ID NO: 1266040 - DNA, 15 bp, Homo sapiens
caccagaataaacat

SEQ ID NO: 1266041 - DNA, 15 bp, Homo sapiens
acaccagaataaaca

SEQ ID NO: 1266042 - DNA, 15 bp, Homo sapiens
aacaccagaataaac

SEQ ID NO: 1266043 - DNA, 15 bp, Homo sapiens
gaacaccagaataaa

SEQ ID NO: 1266044 - DNA, 15 bp, Homo sapiens
agaacaccagaataa

SEQ ID NO: 1266045 - DNA, 15 bp, Homo sapiens
aagaacaccagaata

SEQ ID NO: 1266046 - DNA, 15 bp, Homo sapiens
aaagaacaccagaat

SEQ ID NO: 1266047 - DNA, 15 bp, Homo sapiens
gaaagaacaccagaa

SEQ ID NO: 1266048 - DNA, 15 bp, Homo sapiens
tgaaagaacaccaga

SEQ ID NO: 1266049 - DNA, 15 bp, Homo sapiens
ttgaaagaacaccag

SEQ ID NO: 1266050 - DNA, 15 bp, Homo sapiens
tttgaaagaacacca

SEQ ID NO: 1266051 - DNA, 15 bp, Homo sapiens
ctttgaaagaacacc

SEQ ID NO: 1266052 - DNA, 15 bp, Homo sapiens
actttgaaagaacac

SEQ ID NO: 1266053 - DNA, 15 bp, Homo sapiens
gactttgaaagaaca

SEQ ID NO: 1266054 - DNA, 15 bp, Homo sapiens
tgactttgaaagaac

SEQ ID NO: 1266055 - DNA, 15 bp, Homo sapiens
atgactttgaaagaa

SEQ ID NO: 1266056 - DNA, 15 bp, Homo sapiens
aatgactttgaaaga

SEQ ID NO: 1266057 - DNA, 15 bp, Homo sapiens
taatgactttgaaag

SEQ ID NO: 1266058 - DNA, 15 bp, Homo sapiens
ctaatgactttgaaa

SEQ ID NO: 1266059 - DNA, 15 bp, Homo sapiens
tctaatgactttgaa

SEQ ID NO: 1266060 - DNA, 15 bp, Homo sapiens
atctaatgactttga

SEQ ID NO: 1266061 - DNA, 15 bp, Homo sapiens
catctaatgactttg

SEQ ID NO: 1266062 - DNA, 15 bp, Homo sapiens
gcatctaatgacttt

SEQ ID NO: 1266063 - DNA, 15 bp, Homo sapiens
agcatctaatgactt

SEQ ID NO: 1266064 - DNA, 15 bp, Homo sapiens
aagcatctaatgact

SEQ ID NO: 1266065 - DNA, 15 bp, Homo sapiens
aaagcatctaatgac

SEQ ID NO: 1266066 - DNA, 15 bp, Homo sapiens
gaaagcatctaatga

SEQ ID NO: 1266067 - DNA, 15 bp, Homo sapiens
agaaagcatctaatg

SEQ ID NO: 1266068 - DNA, 15 bp, Homo sapiens
gagaaagcatctaat

SEQ ID NO: 1266069 - DNA, 15 bp, Homo sapiens
agagaaagcatctaa

SEQ ID NO: 1266070 - DNA, 15 bp, Homo sapiens
cagagaaagcatcta

SEQ ID NO: 1266071 - DNA, 15 bp, Homo sapiens
tcagagaaagcatct

SEQ ID NO: 1266072 - DNA, 15 bp, Homo sapiens
ttcagagaaagcatc

SEQ ID NO: 1266073 - DNA, 15 bp, Homo sapiens
attcagagaaagcat

SEQ ID NO: 1266074 - DNA, 15 bp, Homo sapiens
aattcagagaaagca

SEQ ID NO: 1266075 - DNA, 15 bp, Homo sapiens
aaattcagagaaagc

SEQ ID NO: 1266076 - DNA, 15 bp, Homo sapiens
aaaattcagagaaag

SEQ ID NO: 1266077 - DNA, 15 bp, Homo sapiens
aaaaattcagagaaa

SEQ ID NO: 1266078 - DNA, 15 bp, Homo sapiens
aaaaaattcagagaa

SEQ ID NO: 1266079 - DNA, 15 bp, Homo sapiens
aaaaaaattcagaga

SEQ ID NO: 1266080 - DNA, 15 bp, Homo sapiens
aaaaaaaattcagag

SEQ ID NO: 1266081 - DNA, 15 bp, Homo sapiens
aaaaaaaaattcaga

SEQ ID NO: 1266082 - DNA, 15 bp, Homo sapiens
aaaaaaaaaattcag

SEQ ID NO: 1266083 - DNA, 15 bp, Homo sapiens
gctaaaaaaaaaaaa

SEQ ID NO: 1266084 - DNA, 15 bp, Homo sapiens
tgctaaaaaaaaaaa

SEQ ID NO: 1266085 - DNA, 15 bp, Homo sapiens
ttgctaaaaaaaaaa

SEQ ID NO: 1266086 - DNA, 15 bp, Homo sapiens
tttgctaaaaaaaaa

SEQ ID NO: 1266087 - DNA, 15 bp, Homo sapiens
ttttgctaaaaaaaa

SEQ ID NO: 1266088 - DNA, 15 bp, Homo sapiens
attttgctaaaaaaa

SEQ ID NO: 1266089 - DNA, 15 bp, Homo sapiens
gattttgctaaaaaa

SEQ ID NO: 1266090 - DNA, 15 bp, Homo sapiens
tgattttgctaaaaa

SEQ ID NO: 1266091 - DNA, 15 bp, Homo sapiens
atgattttgctaaaa

SEQ ID NO: 1266092 - DNA, 15 bp, Homo sapiens
gatgattttgctaaa

SEQ ID NO: 1266093 - DNA, 15 bp, Homo sapiens
agatgattttgctaa

SEQ ID NO: 1266094 - DNA, 15 bp, Homo sapiens
cagatgattttgcta

SEQ ID NO: 1266095 - DNA, 15 bp, Homo sapiens
gcagatgattttgct

SEQ ID NO: 1266096 - DNA, 15 bp, Homo sapiens
tgcagatgattttgc

SEQ ID NO: 1266097 - DNA, 15 bp, Homo sapiens
ttgcagatgattttg

SEQ ID NO: 1266098 - DNA, 15 bp, Homo sapiens
tttgcagatgatttt

SEQ ID NO: 1266099 - DNA, 15 bp, Homo sapiens
ttttgcagatgattt

SEQ ID NO: 1266100 - DNA, 15 bp, Homo sapiens
cttttgcagatgatt

SEQ ID NO: 1266101 - DNA, 15 bp, Homo sapiens
tcttttgcagatgat

SEQ ID NO: 1266102 - DNA, 15 bp, Homo sapiens
ttcttttgcagatga

SEQ ID NO: 1266103 - DNA, 15 bp, Homo sapiens
tttcttttgcagatg

SEQ ID NO: 1266104 - DNA, 15 bp, Homo sapiens
ttttcttttgcagat

SEQ ID NO: 1266105 - DNA, 15 bp, Homo sapiens
tttttcttttgcaga

SEQ ID NO: 1266106 - DNA, 15 bp, Homo sapiens
atttttcttttgcag

SEQ ID NO: 1266107 - DNA, 15 bp, Homo sapiens
catttttcttttgca

SEQ ID NO: 1266108 - DNA, 15 bp, Homo sapiens
acatttttcttttgc

SEQ ID NO: 1266109 - DNA, 15 bp, Homo sapiens
cacatttttcttttg

SEQ ID NO: 1266110 - DNA, 15 bp, Homo sapiens
acacatttttctttt

SEQ ID NO: 1266111 - DNA, 15 bp, Homo sapiens
gacacatttttcttt

SEQ ID NO: 1266112 - DNA, 15 bp, Homo sapiens
ggacacatttttctt

SEQ ID NO: 1266113 - DNA, 15 bp, Homo sapiens
aggacacatttttct

SEQ ID NO: 1266114 - DNA, 15 bp, Homo sapiens
gaggacacatttttc

SEQ ID NO: 1266115 - DNA, 15 bp, Homo sapiens
ggaggacacattttt

SEQ ID NO: 1266116 - DNA, 15 bp, Homo sapiens
aggaggacacatttt

SEQ ID NO: 1266117 - DNA, 15 bp, Homo sapiens
aaggaggacacattt

SEQ ID NO: 1266118 - DNA, 15 bp, Homo sapiens
taaggaggacacatt

SEQ ID NO: 1266119 - DNA, 15 bp, Homo sapiens
gtaaggaggacacat

SEQ ID NO: 1266120 - DNA, 15 bp, Homo sapiens
tgtaaggaggacaca

SEQ ID NO: 1266121 - DNA, 15 bp, Homo sapiens
ctgtaaggaggacac

SEQ ID NO: 1266122 - DNA, 15 bp, Homo sapiens
tctgtaaggaggaca

SEQ ID NO: 1266123 - DNA, 15 bp, Homo sapiens
ttctgtaaggaggac

SEQ ID NO: 1266124 - DNA, 15 bp, Homo sapiens
gttctgtaaggagga

SEQ ID NO: 1266125 - DNA, 15 bp, Homo sapiens
agttctgtaaggagg

SEQ ID NO: 1266126 - DNA, 15 bp, Homo sapiens
aagttctgtaaggag

SEQ ID NO: 1266127 - DNA, 15 bp, Homo sapiens
aaagttctgtaagga

SEQ ID NO: 1266128 - DNA, 15 bp, Homo sapiens
caaagttctgtaagg

SEQ ID NO: 1266129 - DNA, 15 bp, Homo sapiens
tcaaagttctgtaag

SEQ ID NO: 1266130 - DNA, 15 bp, Homo sapiens
gtcaaagttctgtaa

SEQ ID NO: 1266131 - DNA, 15 bp, Homo sapiens
ggtcaaagttctgta

SEQ ID NO: 1266132 - DNA, 15 bp, Homo sapiens
tggtcaaagttctgt

SEQ ID NO: 1266133 - DNA, 15 bp, Homo sapiens
gtggtcaaagttctg

SEQ ID NO: 1266134 - DNA, 15 bp, Homo sapiens
ggtggtcaaagttct

SEQ ID NO: 1266135 - DNA, 15 bp, Homo sapiens
aggtggtcaaagttc

SEQ ID NO: 1266136 - DNA, 15 bp, Homo sapiens
aaggtggtcaaagtt

SEQ ID NO: 1266137 - DNA, 15 bp, Homo sapiens
taaggtggtcaaagt

SEQ ID NO: 1266138 - DNA, 15 bp, Homo sapiens
ctaaggtggtcaaag

SEQ ID NO: 1266139 - DNA, 15 bp, Homo sapiens
gctaaggtggtcaaa

SEQ ID NO: 1266140 - DNA, 15 bp, Homo sapiens
tgctaaggtggtcaa

SEQ ID NO: 1266141 - DNA, 15 bp, Homo sapiens
ttgctaaggtggtca

SEQ ID NO: 1266142 - DNA, 15 bp, Homo sapiens
tttgctaaggtggtc

SEQ ID NO: 1266143 - DNA, 15 bp, Homo sapiens
ttttgctaaggtggt

SEQ ID NO: 1266144 - DNA, 15 bp, Homo sapiens
cttttgctaaggtgg

SEQ ID NO: 1266145 - DNA, 15 bp, Homo sapiens
tcttttgctaaggtg

SEQ ID NO: 1266146 - DNA, 15 bp, Homo sapiens
ttcttttgctaaggt

SEQ ID NO: 1266147 - DNA, 15 bp, Homo sapiens
tttcttttgctaagg

SEQ ID NO: 1266148 - DNA, 15 bp, Homo sapiens
ttttcttttgctaag

SEQ ID NO: 1266149 - DNA, 15 bp, Homo sapiens
tattccctgggccct

SEQ ID NO: 1266150 - DNA, 15 bp, Homo sapiens
atattccctgggccc

SEQ ID NO: 1266151 - DNA, 15 bp, Homo sapiens
gatattccctgggcc

SEQ ID NO: 1266152 - DNA, 15 bp, Homo sapiens
ggatattccctgggc

SEQ ID NO: 1266153 - DNA, 15 bp, Homo sapiens
tggatattccctggg

SEQ ID NO: 1266154 - DNA, 15 bp, Homo sapiens
gtggatattccctgg

SEQ ID NO: 1266155 - DNA, 15 bp, Homo sapiens
ggtggatattccctg

SEQ ID NO: 1266156 - DNA, 15 bp, Homo sapiens
tggtggatattccct

SEQ ID NO: 1266157 - DNA, 15 bp, Homo sapiens
ctggtggatattccc

SEQ ID NO: 1266158 - DNA, 15 bp, Homo sapiens
tctggtggatattcc

SEQ ID NO: 1266159 - DNA, 15 bp, Homo sapiens
ttctggtggatattc

SEQ ID NO: 1266160 - DNA, 15 bp, Homo sapiens
cttctggtggatatt

SEQ ID NO: 1266161 - DNA, 15 bp, Homo sapiens
ccttctggtggatat

SEQ ID NO: 1266162 - DNA, 15 bp, Homo sapiens
tccttctggtggata

SEQ ID NO: 1266163 - DNA, 15 bp, Homo sapiens
ctccttctggtggat

SEQ ID NO: 1266164 - DNA, 15 bp, Homo sapiens
cctccttctggtgga

SEQ ID NO: 1266165 - DNA, 15 bp, Homo sapiens
tcctccttctggtgg

SEQ ID NO: 1266166 - DNA, 15 bp, Homo sapiens
ctcctccttctggtg

SEQ ID NO: 1266167 - DNA, 15 bp, Homo sapiens
tctcctccttctggt

SEQ ID NO: 1266168 - DNA, 15 bp, Homo sapiens
atctcctccttctgg

SEQ ID NO: 1266169 - DNA, 15 bp, Homo sapiens
catctcctccttctg

SEQ ID NO: 1266170 - DNA, 15 bp, Homo sapiens
gcatctcctccttct

SEQ ID NO: 1266171 - DNA, 15 bp, Homo sapiens
tgcatctcctccttc

SEQ ID NO: 1266172 - DNA, 15 bp, Homo sapiens
ctgcatctcctcctt

SEQ ID NO: 1266173 - DNA, 15 bp, Homo sapiens
cctgcatctcctcct

SEQ ID NO: 1266174 - DNA, 15 bp, Homo sapiens
ccctgcatctcctcc

SEQ ID NO: 1266175 - DNA, 15 bp, Homo sapiens
tccctgcatctcctc

SEQ ID NO: 1266176 - DNA, 15 bp, Homo sapiens
ctccctgcatctcct

SEQ ID NO: 1266177 - DNA, 15 bp, Homo sapiens
tctccctgcatctcc

SEQ ID NO: 1266178 - DNA, 15 bp, Homo sapiens
ctctccctgcatctc

SEQ ID NO: 1266179 - DNA, 15 bp, Homo sapiens
tctctccctgcatct

SEQ ID NO: 1266180 - DNA, 15 bp, Homo sapiens
ctctctccctgcatc

SEQ ID NO: 1266181 - DNA, 15 bp, Homo sapiens
cctctctccctgcat

SEQ ID NO: 1266182 - DNA, 15 bp, Homo sapiens
tcctctctccctgca

SEQ ID NO: 1266183 - DNA, 15 bp, Homo sapiens
ctcctctctccctgc

SEQ ID NO: 1266184 - DNA, 15 bp, Homo sapiens
cctcctctctccctg

SEQ ID NO: 1266185 - DNA, 15 bp, Homo sapiens
ccctcctctctccct

SEQ ID NO: 1266186 - DNA, 15 bp, Homo sapiens
tccctcctctctccc

SEQ ID NO: 1266187 - DNA, 15 bp, Homo sapiens
ctccctcctctctcc

SEQ ID NO: 1266188 - DNA, 15 bp, Homo sapiens
cctccctcctctctc

SEQ ID NO: 1266189 - DNA, 15 bp, Homo sapiens
gcctccctcctctct

SEQ ID NO: 1266190 - DNA, 15 bp, Homo sapiens
tgcctccctcctctc

SEQ ID NO: 1266191 - DNA, 15 bp, Homo sapiens
ctgcctccctcctct

SEQ ID NO: 1266192 - DNA, 15 bp, Homo sapiens
cctgcctccctcctc

SEQ ID NO: 1266193 - DNA, 15 bp, Homo sapiens
gcctgcctccctcct

SEQ ID NO: 1266194 - DNA, 15 bp, Homo sapiens
ggcctgcctccctcc

SEQ ID NO: 1266195 - DNA, 15 bp, Homo sapiens
tggcctgcctccctc

SEQ ID NO: 1266196 - DNA, 15 bp, Homo sapiens
ttggcctgcctccct

SEQ ID NO: 1266197 - DNA, 15 bp, Homo sapiens
cttggcctgcctccc

SEQ ID NO: 1266198 - DNA, 15 bp, Homo sapiens
gcttggcctgcctcc

SEQ ID NO: 1266199 - DNA, 15 bp, Homo sapiens
tgcttggcctgcctc

SEQ ID NO: 1266200 - DNA, 15 bp, Homo sapiens
ctgcttggcctgcct

SEQ ID NO: 1266201 - DNA, 15 bp, Homo sapiens
cctgcttggcctgcc

SEQ ID NO: 1266202 - DNA, 15 bp, Homo sapiens
tcctgcttggcctgc

SEQ ID NO: 1266203 - DNA, 15 bp, Homo sapiens
ttcctgcttggcctg

SEQ ID NO: 1266204 - DNA, 15 bp, Homo sapiens
cttcctgcttggcct

SEQ ID NO: 1266205 - DNA, 15 bp, Homo sapiens
ccttcctgcttggcc

SEQ ID NO: 1266206 - DNA, 15 bp, Homo sapiens
cccttcctgcttggc

SEQ ID NO: 1266207 - DNA, 15 bp, Homo sapiens
ccccttcctgcttgg

SEQ ID NO: 1266208 - DNA, 15 bp, Homo sapiens
accccttcctgcttg

SEQ ID NO: 1266209 - DNA, 15 bp, Homo sapiens
caccccttcctgctt

SEQ ID NO: 1266210 - DNA, 15 bp, Homo sapiens
ccaccccttcctgct

SEQ ID NO: 1266211 - DNA, 15 bp, Homo sapiens
accaccccttcctgc

SEQ ID NO: 1266212 - DNA, 15 bp, Homo sapiens
gaccaccccttcctg

SEQ ID NO: 1266213 - DNA, 15 bp, Homo sapiens
tgaccaccccttcct

SEQ ID NO: 1266214 - DNA, 15 bp, Homo sapiens
ctgaccaccccttcc

SEQ ID NO: 1266215 - DNA, 15 bp, Homo sapiens
actgaccaccccttc

SEQ ID NO: 1266216 - DNA, 15 bp, Homo sapiens
tactgaccacccctt

SEQ ID NO: 1266217 - DNA, 15 bp, Homo sapiens
ctactgaccacccct

SEQ ID NO: 1266218 - DNA, 15 bp, Homo sapiens
gctactgaccacccc

SEQ ID NO: 1266219 - DNA, 15 bp, Homo sapiens
agctactgaccaccc

SEQ ID NO: 1266220 - DNA, 15 bp, Homo sapiens
aagctactgaccacc

SEQ ID NO: 1266221 - DNA, 15 bp, Homo sapiens
gaagctactgaccac

SEQ ID NO: 1266222 - DNA, 15 bp, Homo sapiens
tgaagctactgacca

SEQ ID NO: 1266223 - DNA, 15 bp, Homo sapiens
ctgaagctactgacc

SEQ ID NO: 1266224 - DNA, 15 bp, Homo sapiens
tctgaagctactgac

SEQ ID NO: 1266225 - DNA, 15 bp, Homo sapiens
atctgaagctactga

SEQ ID NO: 1266226 - DNA, 15 bp, Homo sapiens
catctgaagctactg

SEQ ID NO: 1266227 - DNA, 15 bp, Homo sapiens
ccatctgaagctact

SEQ ID NO: 1266228 - DNA, 15 bp, Homo sapiens
cccatctgaagctac

SEQ ID NO: 1266229 - DNA, 15 bp, Homo sapiens
gcccatctgaagcta

SEQ ID NO: 1266230 - DNA, 15 bp, Homo sapiens
agcccatctgaagct

SEQ ID NO: 1266231 - DNA, 15 bp, Homo sapiens
tagcccatctgaagc

SEQ ID NO: 1266232 - DNA, 15 bp, Homo sapiens
gtagcccatctgaag

SEQ ID NO: 1266233 - DNA, 15 bp, Homo sapiens
tgtagcccatctgaa

SEQ ID NO: 1266234 - DNA, 15 bp, Homo sapiens
ctgtagcccatctga

SEQ ID NO: 1266235 - DNA, 15 bp, Homo sapiens
cctgtagcccatctg

SEQ ID NO: 1266236 - DNA, 15 bp, Homo sapiens
acctgtagcccatct

SEQ ID NO: 1266237 - DNA, 15 bp, Homo sapiens
tacctgtagcccatc

SEQ ID NO: 1266238 - DNA, 15 bp, Homo sapiens
ttacctgtagcccat

SEQ ID NO: 1266239 - DNA, 15 bp, Homo sapiens
cttacctgtagccca

SEQ ID NO: 1266240 - DNA, 15 bp, Homo sapiens
ccttacctgtagccc

SEQ ID NO: 1266241 - DNA, 15 bp, Homo sapiens
gccttacctgtagcc

SEQ ID NO: 1266242 - DNA, 15 bp, Homo sapiens
tgccttacctgtagc

SEQ ID NO: 1266243 - DNA, 15 bp, Homo sapiens
ttgccttacctgtag

SEQ ID NO: 1266244 - DNA, 15 bp, Homo sapiens
cttgccttacctgta

SEQ ID NO: 1266245 - DNA, 15 bp, Homo sapiens
gcttgccttacctgt

SEQ ID NO: 1266246 - DNA, 15 bp, Homo sapiens
agcttgccttacctg

SEQ ID NO: 1266247 - DNA, 15 bp, Homo sapiens
aagcttgccttacct

SEQ ID NO: 1266248 - DNA, 15 bp, Homo sapiens
taagcttgccttacc

SEQ ID NO: 1266249 - DNA, 15 bp, Homo sapiens
ctaagcttgccttac

SEQ ID NO: 1266250 - DNA, 15 bp, Homo sapiens
cctaagcttgcctta

SEQ ID NO: 1266251 - DNA, 15 bp, Homo sapiens
tcctaagcttgcctt

SEQ ID NO: 1266252 - DNA, 15 bp, Homo sapiens
gtcctaagcttgcct

SEQ ID NO: 1266253 - DNA, 15 bp, Homo sapiens
ggtcctaagcttgcc

SEQ ID NO: 1266254 - DNA, 15 bp, Homo sapiens
tggtcctaagcttgc

SEQ ID NO: 1266255 - DNA, 15 bp, Homo sapiens
ctggtcctaagcttg

SEQ ID NO: 1266256 - DNA, 15 bp, Homo sapiens
tctggtcctaagctt

SEQ ID NO: 1266257 - DNA, 15 bp, Homo sapiens
ttctggtcctaagct

SEQ ID NO: 1266258 - DNA, 15 bp, Homo sapiens
attctggtcctaagc

SEQ ID NO: 1266259 - DNA, 15 bp, Homo sapiens
cattctggtcctaag

SEQ ID NO: 1266260 - DNA, 15 bp, Homo sapiens
acattctggtcctaa

SEQ ID NO: 1266261 - DNA, 15 bp, Homo sapiens
aacattctggtccta

SEQ ID NO: 1266262 - DNA, 15 bp, Homo sapiens
aaacattctggtcct

SEQ ID NO: 1266263 - DNA, 15 bp, Homo sapiens
gaaacattctggtcc

SEQ ID NO: 1266264 - DNA, 15 bp, Homo sapiens
tgaaacattctggtc

SEQ ID NO: 1266265 - DNA, 15 bp, Homo sapiens
atgaaacattctggt

SEQ ID NO: 1266266 - DNA, 15 bp, Homo sapiens
aatgaaacattctgg

SEQ ID NO: 1266267 - DNA, 15 bp, Homo sapiens
caatgaaacattctg

SEQ ID NO: 1266268 - DNA, 15 bp, Homo sapiens
ccaatgaaacattct

SEQ ID NO: 1266269 - DNA, 15 bp, Homo sapiens
tccaatgaaacattc

SEQ ID NO: 1266270 - DNA, 15 bp, Homo sapiens
atccaatgaaacatt

SEQ ID NO: 1266271 - DNA, 15 bp, Homo sapiens
aatccaatgaaacat

SEQ ID NO: 1266272 - DNA, 15 bp, Homo sapiens
aaatccaatgaaaca

SEQ ID NO: 1266273 - DNA, 15 bp, Homo sapiens
taaatccaatgaaac

SEQ ID NO: 1266274 - DNA, 15 bp, Homo sapiens
ctaaatccaatgaaa

SEQ ID NO: 1266275 - DNA, 15 bp, Homo sapiens
gctaaatccaatgaa

SEQ ID NO: 1266276 - DNA, 15 bp, Homo sapiens
ggctaaatccaatga

SEQ ID NO: 1266277 - DNA, 15 bp, Homo sapiens
gtggctaaatccaat

SEQ ID NO: 1266278 - DNA, 15 bp, Homo sapiens
tgtggctaaatccaa

SEQ ID NO: 1266279 - DNA, 15 bp, Homo sapiens
ttgtggctaaatcca

SEQ ID NO: 1266280 - DNA, 15 bp, Homo sapiens
cttgtggctaaatcc

SEQ ID NO: 1266281 - DNA, 15 bp, Homo sapiens
tcttgtggctaaatc

SEQ ID NO: 1266282 - DNA, 15 bp, Homo sapiens
ctcttgtggctaaat

SEQ ID NO: 1266283 - DNA, 15 bp, Homo sapiens
cctcttgtggctaaa

SEQ ID NO: 1266284 - DNA, 15 bp, Homo sapiens
acctcttgtggctaa

SEQ ID NO: 1266285 - DNA, 15 bp, Homo sapiens
gacctcttgtggcta

SEQ ID NO: 1266286 - DNA, 15 bp, Homo sapiens
tgacctcttgtggct

SEQ ID NO: 1266287 - DNA, 15 bp, Homo sapiens
atgacctcttgtggc

SEQ ID NO: 1266288 - DNA, 15 bp, Homo sapiens
aatgacctcttgtgg

SEQ ID NO: 1266289 - DNA, 15 bp, Homo sapiens
aaatgacctcttgtg

SEQ ID NO: 1266290 - DNA, 15 bp, Homo sapiens
caaatgacctcttgt

SEQ ID NO: 1266291 - DNA, 15 bp, Homo sapiens
ccaaatgacctcttg

SEQ ID NO: 1266292 - DNA, 15 bp, Homo sapiens
tccaaatgacctctt

SEQ ID NO: 1266293 - DNA, 15 bp, Homo sapiens
ctccaaatgacctct

SEQ ID NO: 1266294 - DNA, 15 bp, Homo sapiens
actccaaatgacctc

SEQ ID NO: 1266295 - DNA, 15 bp, Homo sapiens
cactccaaatgacct

SEQ ID NO: 1266296 - DNA, 15 bp, Homo sapiens
ccactccaaatgacc

SEQ ID NO: 1266297 - DNA, 15 bp, Homo sapiens
cccactccaaatgac

SEQ ID NO: 1266298 - DNA, 15 bp, Homo sapiens
acccactccaaatga

SEQ ID NO: 1266299 - DNA, 15 bp, Homo sapiens
gacccactccaaatg

SEQ ID NO: 1266300 - DNA, 15 bp, Homo sapiens
tgacccactccaaat

SEQ ID NO: 1266301 - DNA, 15 bp, Homo sapiens
ttgacccactccaaa

SEQ ID NO: 1266302 - DNA, 15 bp, Homo sapiens
tttgacccactccaa

SEQ ID NO: 1266303 - DNA, 15 bp, Homo sapiens
ctttgacccactcca

SEQ ID NO: 1266304 - DNA, 15 bp, Homo sapiens
gctttgacccactcc

SEQ ID NO: 1266305 - DNA, 15 bp, Homo sapiens
agctttgacccactc

SEQ ID NO: 1266306 - DNA, 15 bp, Homo sapiens
tagctttgacccact

SEQ ID NO: 1266307 - DNA, 15 bp, Homo sapiens
atagctttgacccac

SEQ ID NO: 1266308 - DNA, 15 bp, Homo sapiens
aatagctttgaccca

SEQ ID NO: 1266309 - DNA, 15 bp, Homo sapiens
gaatagctttgaccc

SEQ ID NO: 1266310 - DNA, 15 bp, Homo sapiens
agaatagctttgacc

SEQ ID NO: 1266311 - DNA, 15 bp, Homo sapiens
cagaatagctttgac

SEQ ID NO: 1266312 - DNA, 15 bp, Homo sapiens
ccagaatagctttga

SEQ ID NO: 1266313 - DNA, 15 bp, Homo sapiens
cccagaatagctttg

SEQ ID NO: 1266314 - DNA, 15 bp, Homo sapiens
acccagaatagcttt

SEQ ID NO: 1266315 - DNA, 15 bp, Homo sapiens
tacccagaatagctt

SEQ ID NO: 1266316 - DNA, 15 bp, Homo sapiens
ctacccagaatagct

SEQ ID NO: 1266317 - DNA, 15 bp, Homo sapiens
tctacccagaatagc

SEQ ID NO: 1266318 - DNA, 15 bp, Homo sapiens
ttctacccagaatag

SEQ ID NO: 1266319 - DNA, 15 bp, Homo sapiens
cttctacccagaata

SEQ ID NO: 1266320 - DNA, 15 bp, Homo sapiens
gcttctacccagaat

SEQ ID NO: 1266321 - DNA, 15 bp, Homo sapiens
ggcttctacccagaa

SEQ ID NO: 1266322 - DNA, 15 bp, Homo sapiens
tggcttctacccaga

SEQ ID NO: 1266323 - DNA, 15 bp, Homo sapiens
ttggcttctacccag

SEQ ID NO: 1266324 - DNA, 15 bp, Homo sapiens
tttggcttctaccca

SEQ ID NO: 1266325 - DNA, 15 bp, Homo sapiens
gtttggcttctaccc

SEQ ID NO: 1266326 - DNA, 15 bp, Homo sapiens
tgtttggcttctacc

SEQ ID NO: 1266327 - DNA, 15 bp, Homo sapiens
ctgtttggcttctac

SEQ ID NO: 1266328 - DNA, 15 bp, Homo sapiens
actgtttggcttcta

SEQ ID NO: 1266329 - DNA, 15 bp, Homo sapiens
aactgtttggcttct

SEQ ID NO: 1266330 - DNA, 15 bp, Homo sapiens
aaactgtttggcttc

SEQ ID NO: 1266331 - DNA, 15 bp, Homo sapiens
gaaactgtttggctt

SEQ ID NO: 1266332 - DNA, 15 bp, Homo sapiens
ggaaactgtttggct

SEQ ID NO: 1266333 - DNA, 15 bp, Homo sapiens
tggaaactgtttggc

SEQ ID NO: 1266334 - DNA, 15 bp, Homo sapiens
ttggaaactgtttgg

SEQ ID NO: 1266335 - DNA, 15 bp, Homo sapiens
tttggaaactgtttg

SEQ ID NO: 1266336 - DNA, 15 bp, Homo sapiens
ctttggaaactgttt

SEQ ID NO: 1266337 - DNA, 15 bp, Homo sapiens
gctttggaaactgtt

SEQ ID NO: 1266338 - DNA, 15 bp, Homo sapiens
tgctttggaaactgt

SEQ ID NO: 1266339 - DNA, 15 bp, Homo sapiens
ttgctttggaaactg

SEQ ID NO: 1266340 - DNA, 15 bp, Homo sapiens
tttgctttggaaact

SEQ ID NO: 1266341 - DNA, 15 bp, Homo sapiens
ttttgctttggaaac

SEQ ID NO: 1266342 - DNA, 15 bp, Homo sapiens
gttttgctttggaaa

SEQ ID NO: 1266343 - DNA, 15 bp, Homo sapiens
tgttttgctttggaa

SEQ ID NO: 1266344 - DNA, 15 bp, Homo sapiens
ctgttttgctttgga

SEQ ID NO: 1266345 - DNA, 15 bp, Homo sapiens
cctgttttgctttgg

SEQ ID NO: 1266346 - DNA, 15 bp, Homo sapiens
gcctgttttgctttg

SEQ ID NO: 1266347 - DNA, 15 bp, Homo sapiens
cgcctgttttgcttt

SEQ ID NO: 1266348 - DNA, 15 bp, Homo sapiens
ccgcctgttttgctt

SEQ ID NO: 1266349 - DNA, 15 bp, Homo sapiens
gccgcctgttttgct

SEQ ID NO: 1266350 - DNA, 15 bp, Homo sapiens
tgccgcctgttttgc

SEQ ID NO: 1266351 - DNA, 15 bp, Homo sapiens
ttgccgcctgttttg

SEQ ID NO: 1266352 - DNA, 15 bp, Homo sapiens
gttgccgcctgtttt

SEQ ID NO: 1266353 - DNA, 15 bp, Homo sapiens
tgttgccgcctgttt

SEQ ID NO: 1266354 - DNA, 15 bp, Homo sapiens
gtgttgccgcctgtt

SEQ ID NO: 1266355 - DNA, 15 bp, Homo sapiens
agtgttgccgcctgt

SEQ ID NO: 1266356 - DNA, 15 bp, Homo sapiens
tagtgttgccgcctg

SEQ ID NO: 1266357 - DNA, 15 bp, Homo sapiens
ctagtgttgccgcct

SEQ ID NO: 1266358 - DNA, 15 bp, Homo sapiens
gctagtgttgccgcc

SEQ ID NO: 1266359 - DNA, 15 bp, Homo sapiens
tgctagtgttgccgc

SEQ ID NO: 1266360 - DNA, 15 bp, Homo sapiens
atgctagtgttgccg

SEQ ID NO: 1266361 - DNA, 15 bp, Homo sapiens
aatgctagtgttgcc

SEQ ID NO: 1266362 - DNA, 15 bp, Homo sapiens
gaatgctagtgttgc

SEQ ID NO: 1266363 - DNA, 15 bp, Homo sapiens
tgaatgctagtgttg

SEQ ID NO: 1266364 - DNA, 15 bp, Homo sapiens
ctgaatgctagtgtt

SEQ ID NO: 1266365 - DNA, 15 bp, Homo sapiens
tctgaatgctagtgt

SEQ ID NO: 1266366 - DNA, 15 bp, Homo sapiens
ctctgaatgctagtg

SEQ ID NO: 1266367 - DNA, 15 bp, Homo sapiens
tctctgaatgctagt

SEQ ID NO: 1266368 - DNA, 15 bp, Homo sapiens
ctctctgaatgctag

SEQ ID NO: 1266369 - DNA, 15 bp, Homo sapiens
tctctctgaatgcta

SEQ ID NO: 1266370 - DNA, 15 bp, Homo sapiens
atctctctgaatgct

SEQ ID NO: 1266371 - DNA, 15 bp, Homo sapiens
gatctctctgaatgc

SEQ ID NO: 1266372 - DNA, 15 bp, Homo sapiens
ggatctctctgaatg

SEQ ID NO: 1266373 - DNA, 15 bp, Homo sapiens
tggatctctctgaat

SEQ ID NO: 1266374 - DNA, 15 bp, Homo sapiens
ctggatctctctgaa

SEQ ID NO: 1266375 - DNA, 15 bp, Homo sapiens
cctggatctctctga

SEQ ID NO: 1266376 - DNA, 15 bp, Homo sapiens
ccctggatctctctg

SEQ ID NO: 1266377 - DNA, 15 bp, Homo sapiens
tccctggatctctct

SEQ ID NO: 1266378 - DNA, 15 bp, Homo sapiens
gtccctggatctctc

SEQ ID NO: 1266379 - DNA, 15 bp, Homo sapiens
ggtccctggatctct

SEQ ID NO: 1266380 - DNA, 15 bp, Homo sapiens
tggtccctggatctc

SEQ ID NO: 1266381 - DNA, 15 bp, Homo sapiens
ttggtccctggatct

SEQ ID NO: 1266382 - DNA, 15 bp, Homo sapiens
cttggtccctggatc

SEQ ID NO: 1266383 - DNA, 15 bp, Homo sapiens
tcttggtccctggat

SEQ ID NO: 1266384 - DNA, 15 bp, Homo sapiens
ttcttggtccctgga

SEQ ID NO: 1266385 - DNA, 15 bp, Homo sapiens
attcttggtccctgg

SEQ ID NO: 1266386 - DNA, 15 bp, Homo sapiens
gattcttggtccctg

SEQ ID NO: 1266387 - DNA, 15 bp, Homo sapiens
agattcttggtccct

SEQ ID NO: 1266388 - DNA, 15 bp, Homo sapiens
aagattcttggtccc

SEQ ID NO: 1266389 - DNA, 15 bp, Homo sapiens
taagattcttggtcc

SEQ ID NO: 1266390 - DNA, 15 bp, Homo sapiens
ttaagattcttggtc

SEQ ID NO: 1266391 - DNA, 15 bp, Homo sapiens
tttaagattcttggt

SEQ ID NO: 1266392 - DNA, 15 bp, Homo sapiens
ctttaagattcttgg

SEQ ID NO: 1266393 - DNA, 15 bp, Homo sapiens
tctttaagattcttg

SEQ ID NO: 1266394 - DNA, 15 bp, Homo sapiens
ttctttaagattctt

SEQ ID NO: 1266395 - DNA, 15 bp, Homo sapiens
tttctttaagattct

SEQ ID NO: 1266396 - DNA, 15 bp, Homo sapiens
ctttctttaagattc

SEQ ID NO: 1266397 - DNA, 15 bp, Homo sapiens
cctttctttaagatt

SEQ ID NO: 1266398 - DNA, 15 bp, Homo sapiens
acctttctttaagat

SEQ ID NO: 1266399 - DNA, 15 bp, Homo sapiens
aacctttctttaaga

SEQ ID NO: 1266400 - DNA, 15 bp, Homo sapiens
aaacctttctttaag

SEQ ID NO: 1266401 - DNA, 15 bp, Homo sapiens
taaacctttctttaa

SEQ ID NO: 1266402 - DNA, 15 bp, Homo sapiens
ttaaacctttcttta

SEQ ID NO: 1266403 - DNA, 15 bp, Homo sapiens
tttaaacctttcttt

SEQ ID NO: 1266404 - DNA, 15 bp, Homo sapiens
ttttaaacctttctt

SEQ ID NO: 1266405 - DNA, 15 bp, Homo sapiens
attttaaacctttct

SEQ ID NO: 1266406 - DNA, 15 bp, Homo sapiens
cattttaaacctttc

SEQ ID NO: 1266407 - DNA, 15 bp, Homo sapiens
ccattttaaaccttt

SEQ ID NO: 1266408 - DNA, 15 bp, Homo sapiens
accattttaaacctt

SEQ ID NO: 1266409 - DNA, 15 bp, Homo sapiens
gaccattttaaacct

SEQ ID NO: 1266410 - DNA, 15 bp, Homo sapiens
tgaccattttaaacc

SEQ ID NO: 1266411 - DNA, 15 bp, Homo sapiens
ttgaccattttaaac

SEQ ID NO: 1266412 - DNA, 15 bp, Homo sapiens
tttgaccattttaaa

SEQ ID NO: 1266413 - DNA, 15 bp, Homo sapiens
ttttgaccattttaa

SEQ ID NO: 1266414 - DNA, 15 bp, Homo sapiens
attttgaccatttta

SEQ ID NO: 1266415 - DNA, 15 bp, Homo sapiens
tattttgaccatttt

SEQ ID NO: 1266416 - DNA, 15 bp, Homo sapiens
ttattttgaccattt

SEQ ID NO: 1266417 - DNA, 15 bp, Homo sapiens
tttattttgaccatt

SEQ ID NO: 1266418 - DNA, 15 bp, Homo sapiens
gtttattttgaccat

SEQ ID NO: 1266419 - DNA, 15 bp, Homo sapiens
agtttattttgacca

SEQ ID NO: 1266420 - DNA, 15 bp, Homo sapiens
aagtttattttgacc

SEQ ID NO: 1266421 - DNA, 15 bp, Homo sapiens
caagtttattttgac

SEQ ID NO: 1266422 - DNA, 15 bp, Homo sapiens
gcaagtttattttga

SEQ ID NO: 1266423 - DNA, 15 bp, Homo sapiens
tgcaagtttattttg

SEQ ID NO: 1266424 - DNA, 15 bp, Homo sapiens
atgcaagtttatttt

SEQ ID NO: 1266425 - DNA, 15 bp, Homo sapiens
aatgcaagtttattt

SEQ ID NO: 1266426 - DNA, 15 bp, Homo sapiens
aaatgcaagtttatt

SEQ ID NO: 1266427 - DNA, 15 bp, Homo sapiens
taaatgcaagtttat

SEQ ID NO: 1266428 - DNA, 15 bp, Homo sapiens
ttaaatgcaagttta

SEQ ID NO: 1266429 - DNA, 15 bp, Homo sapiens
attaaatgcaagttt

SEQ ID NO: 1266430 - DNA, 15 bp, Homo sapiens
aattaaatgcaagtt

SEQ ID NO: 1266431 - DNA, 15 bp, Homo sapiens
taattaaatgcaagt

SEQ ID NO: 1266432 - DNA, 15 bp, Homo sapiens
ttaattaaatgcaag

SEQ ID NO: 1266433 - DNA, 15 bp, Homo sapiens
gttaattaaatgcaa

SEQ ID NO: 1266434 - DNA, 15 bp, Homo sapiens
tgttaattaaatgca

SEQ ID NO: 1266435 - DNA, 15 bp, Homo sapiens
atgttaattaaatgc

SEQ ID NO: 1266436 - DNA, 15 bp, Homo sapiens
aatgttaattaaatg

SEQ ID NO: 1266437 - DNA, 15 bp, Homo sapiens
aaatgttaattaaat

SEQ ID NO: 1266438 - DNA, 15 bp, Homo sapiens
aaaatgttaattaaa

SEQ ID NO: 1266439 - DNA, 15 bp, Homo sapiens
gaaaatgttaattaa

SEQ ID NO: 1266440 - DNA, 15 bp, Homo sapiens
tgaaaatgttaatta

SEQ ID NO: 1266441 - DNA, 15 bp, Homo sapiens
atgaaaatgttaatt

SEQ ID NO: 1266442 - DNA, 15 bp, Homo sapiens
catgaaaatgttaat

SEQ ID NO: 1266443 - DNA, 15 bp, Homo sapiens
tcatgaaaatgttaa

SEQ ID NO: 1266444 - DNA, 15 bp, Homo sapiens
ctcatgaaaatgtta

SEQ ID NO: 1266445 - DNA, 15 bp, Homo sapiens
actcatgaaaatgtt

SEQ ID NO: 1266446 - DNA, 15 bp, Homo sapiens
tactcatgaaaatgt

SEQ ID NO: 1266447 - DNA, 15 bp, Homo sapiens
gtactcatgaaaatg

SEQ ID NO: 1266448 - DNA, 15 bp, Homo sapiens
agtactcatgaaaat

SEQ ID NO: 1266449 - DNA, 15 bp, Homo sapiens
tagtactcatgaaaa

SEQ ID NO: 1266450 - DNA, 15 bp, Homo sapiens
gtagtactcatgaaa

SEQ ID NO: 1266451 - DNA, 15 bp, Homo sapiens
tgtagtactcatgaa

SEQ ID NO: 1266452 - DNA, 15 bp, Homo sapiens
ctgtagtactcatga

SEQ ID NO: 1266453 - DNA, 15 bp, Homo sapiens
actgtagtactcatg

SEQ ID NO: 1266454 - DNA, 15 bp, Homo sapiens
tactgtagtactcat

SEQ ID NO: 1266455 - DNA, 15 bp, Homo sapiens
ttactgtagtactca

SEQ ID NO: 1266456 - DNA, 15 bp, Homo sapiens
attactgtagtactc

SEQ ID NO: 1266457 - DNA, 15 bp, Homo sapiens
tattactgtagtact

SEQ ID NO: 1266458 - DNA, 15 bp, Homo sapiens
gtattactgtagtac

SEQ ID NO: 1266459 - DNA, 15 bp, Homo sapiens
tgtattactgtagta

SEQ ID NO: 1266460 - DNA, 15 bp, Homo sapiens
atgtattactgtagt

SEQ ID NO: 1266461 - DNA, 15 bp, Homo sapiens
tatgtattactgtag

SEQ ID NO: 1266462 - DNA, 15 bp, Homo sapiens
ttatgtattactgta

SEQ ID NO: 1266463 - DNA, 15 bp, Homo sapiens
attatgtattactgt

SEQ ID NO: 1266464 - DNA, 15 bp, Homo sapiens
gattatgtattactg

SEQ ID NO: 1266465 - DNA, 15 bp, Homo sapiens
tgattatgtattact

SEQ ID NO: 1266466 - DNA, 15 bp, Homo sapiens
ttgattatgtattac

SEQ ID NO: 1266467 - DNA, 15 bp, Homo sapiens
attgattatgtatta

SEQ ID NO: 1266468 - DNA, 15 bp, Homo sapiens
cattgattatgtatt

SEQ ID NO: 1266469 - DNA, 15 bp, Homo sapiens
gcattgattatgtat

SEQ ID NO: 1266470 - DNA, 15 bp, Homo sapiens
tgcattgattatgta

SEQ ID NO: 1266471 - DNA, 15 bp, Homo sapiens
ctgcattgattatgt

SEQ ID NO: 1266472 - DNA, 15 bp, Homo sapiens
tctgcattgattatg

SEQ ID NO: 1266473 - DNA, 15 bp, Homo sapiens
ttctgcattgattat

SEQ ID NO: 1266474 - DNA, 15 bp, Homo sapiens
tttctgcattgatta

SEQ ID NO: 1266475 - DNA, 15 bp, Homo sapiens
ttttctgcattgatt

SEQ ID NO: 1266476 - DNA, 15 bp, Homo sapiens
gttttctgcattgat

SEQ ID NO: 1266477 - DNA, 15 bp, Homo sapiens
ggttttctgcattga

SEQ ID NO: 1266478 - DNA, 15 bp, Homo sapiens
aggttttctgcattg

SEQ ID NO: 1266479 - DNA, 15 bp, Homo sapiens
caggttttctgcatt

SEQ ID NO: 1266480 - DNA, 15 bp, Homo sapiens
ccaggttttctgcat

SEQ ID NO: 1266481 - DNA, 15 bp, Homo sapiens
tccaggttttctgca

SEQ ID NO: 1266482 - DNA, 15 bp, Homo sapiens
ttccaggttttctgc

SEQ ID NO: 1266483 - DNA, 15 bp, Homo sapiens
tttccaggttttctg

SEQ ID NO: 1266484 - DNA, 15 bp, Homo sapiens
ttttccaggttttct

SEQ ID NO: 1266485 - DNA, 15 bp, Homo sapiens
gttttccaggttttc

SEQ ID NO: 1266486 - DNA, 15 bp, Homo sapiens
tgttttccaggtttt

SEQ ID NO: 1266487 - DNA, 15 bp, Homo sapiens
ttgttttccaggttt

SEQ ID NO: 1266488 - DNA, 15 bp, Homo sapiens
tttgttttccaggtt

SEQ ID NO: 1266489 - DNA, 15 bp, Homo sapiens
ctttgttttccaggt

SEQ ID NO: 1266490 - DNA, 15 bp, Homo sapiens
tctttgttttccagg

SEQ ID NO: 1266491 - DNA, 15 bp, Homo sapiens
ttctttgttttccag

SEQ ID NO: 1266492 - DNA, 15 bp, Homo sapiens
tttctttgttttcca

SEQ ID NO: 1266493 - DNA, 15 bp, Homo sapiens
ttttctttgttttcc

SEQ ID NO: 1266494 - DNA, 15 bp, Homo sapiens
gttttctttgttttc

SEQ ID NO: 1266495 - DNA, 15 bp, Homo sapiens
agttttctttgtttt

SEQ ID NO: 1266496 - DNA, 15 bp, Homo sapiens
tagttttctttgttt

SEQ ID NO: 1266497 - DNA, 15 bp, Homo sapiens
gtagttttctttgtt

SEQ ID NO: 1266498 - DNA, 15 bp, Homo sapiens
tgtagttttctttgt

SEQ ID NO: 1266499 - DNA, 15 bp, Homo sapiens
ttgtagttttctttg

SEQ ID NO: 1266500 - DNA, 15 bp, Homo sapiens
tttgtagttttcttt

SEQ ID NO: 1266501 - DNA, 15 bp, Homo sapiens
ctttgtagttttctt

SEQ ID NO: 1266502 - DNA, 15 bp, Homo sapiens
tctttgtagttttct

SEQ ID NO: 1266503 - DNA, 15 bp, Homo sapiens
ctctttgtagttttc

SEQ ID NO: 1266504 - DNA, 15 bp, Homo sapiens
cctctttgtagtttt

SEQ ID NO: 1266505 - DNA, 15 bp, Homo sapiens
tcctctttgtagttt

SEQ ID NO: 1266506 - DNA, 15 bp, Homo sapiens
ttcctctttgtagtt

SEQ ID NO: 1266507 - DNA, 15 bp, Homo sapiens
tttcctctttgtagt

SEQ ID NO: 1266508 - DNA, 15 bp, Homo sapiens
ttttcctctttgtag

SEQ ID NO: 1266509 - DNA, 15 bp, Homo sapiens
cttttcctctttgta

SEQ ID NO: 1266510 - DNA, 15 bp, Homo sapiens
tcttttcctctttgt

SEQ ID NO: 1266511 - DNA, 15 bp, Homo sapiens
ttcttttcctctttg

SEQ ID NO: 1266512 - DNA, 15 bp, Homo sapiens
cttcttttcctcttt

SEQ ID NO: 1266513 - DNA, 15 bp, Homo sapiens
acttcttttcctctt

SEQ ID NO: 1266514 - DNA, 15 bp, Homo sapiens
tacttcttttcctct

SEQ ID NO: 1266515 - DNA, 15 bp, Homo sapiens
atacttcttttcctc

SEQ ID NO: 1266516 - DNA, 15 bp, Homo sapiens
aatacttcttttcct

SEQ ID NO: 1266517 - DNA, 15 bp, Homo sapiens
aaatacttcttttcc

SEQ ID NO: 1266518 - DNA, 15 bp, Homo sapiens
gaaatacttcttttc

SEQ ID NO: 1266519 - DNA, 15 bp, Homo sapiens
agaaatacttctttt

SEQ ID NO: 1266520 - DNA, 15 bp, Homo sapiens
gagaaatacttcttt

SEQ ID NO: 1266521 - DNA, 15 bp, Homo sapiens
tgagaaatacttctt

SEQ ID NO: 1266522 - DNA, 15 bp, Homo sapiens
atgagaaatacttct

SEQ ID NO: 1266523 - DNA, 15 bp, Homo sapiens
aatgagaaatacttc

SEQ ID NO: 1266524 - DNA, 15 bp, Homo sapiens
gaatgagaaatactt

SEQ ID NO: 1266525 - DNA, 15 bp, Homo sapiens
agaatgagaaatact

SEQ ID NO: 1266526 - DNA, 15 bp, Homo sapiens
tagaatgagaaatac

SEQ ID NO: 1266527 - DNA, 15 bp, Homo sapiens
gtagaatgagaaata

SEQ ID NO: 1266528 - DNA, 15 bp, Homo sapiens
ggtagaatgagaaat

SEQ ID NO: 1266529 - DNA, 15 bp, Homo sapiens
aggtagaatgagaaa

SEQ ID NO: 1266530 - DNA, 15 bp, Homo sapiens
aaggtagaatgagaa

SEQ ID NO: 1266531 - DNA, 15 bp, Homo sapiens
gaaggtagaatgaga

SEQ ID NO: 1266532 - DNA, 15 bp, Homo sapiens
ggaaggtagaatgag

SEQ ID NO: 1266533 - DNA, 15 bp, Homo sapiens
tggaaggtagaatga

SEQ ID NO: 1266534 - DNA, 15 bp, Homo sapiens
ctggaaggtagaatg

SEQ ID NO: 1266535 - DNA, 15 bp, Homo sapiens
tctggaaggtagaat

SEQ ID NO: 1266536 - DNA, 15 bp, Homo sapiens
gtctggaaggtagaa

SEQ ID NO: 1266537 - DNA, 15 bp, Homo sapiens
tgtctggaaggtaga

SEQ ID NO: 1266538 - DNA, 15 bp, Homo sapiens
atgtctggaaggtag

SEQ ID NO: 1266539 - DNA, 15 bp, Homo sapiens
tatgtctggaaggta

SEQ ID NO: 1266540 - DNA, 15 bp, Homo sapiens
gtatgtctggaaggt

SEQ ID NO: 1266541 - DNA, 15 bp, Homo sapiens
ggtatgtctggaagg

SEQ ID NO: 1266542 - DNA, 15 bp, Homo sapiens
aggtatgtctggaag

SEQ ID NO: 1266543 - DNA, 15 bp, Homo sapiens
taggtatgtctggaa

SEQ ID NO: 1266544 - DNA, 15 bp, Homo sapiens
gtaggtatgtctgga

SEQ ID NO: 1266545 - DNA, 15 bp, Homo sapiens
tgtaggtatgtctgg

SEQ ID NO: 1266546 - DNA, 15 bp, Homo sapiens
atgtaggtatgtctg

SEQ ID NO: 1266547 - DNA, 15 bp, Homo sapiens
aatgtaggtatgtct

SEQ ID NO: 1266548 - DNA, 15 bp, Homo sapiens
aaatgtaggtatgtc

SEQ ID NO: 1266549 - DNA, 15 bp, Homo sapiens
gaaatgtaggtatgt

SEQ ID NO: 1266550 - DNA, 15 bp, Homo sapiens
agaaatgtaggtatg

SEQ ID NO: 1266551 - DNA, 15 bp, Homo sapiens
aagaaatgtaggtat

SEQ ID NO: 1266552 - DNA, 15 bp, Homo sapiens
gaagaaatgtaggta

SEQ ID NO: 1266553 - DNA, 15 bp, Homo sapiens
ggaagaaatgtaggt

SEQ ID NO: 1266554 - DNA, 15 bp, Homo sapiens
gggaagaaatgtagg

SEQ ID NO: 1266555 - DNA, 15 bp, Homo sapiens
cgggaagaaatgtag

SEQ ID NO: 1266556 - DNA, 15 bp, Homo sapiens
acgggaagaaatgta

SEQ ID NO: 1266557 - DNA, 15 bp, Homo sapiens
cacgggaagaaatgt

SEQ ID NO: 1266558 - DNA, 15 bp, Homo sapiens
acacgggaagaaatg

SEQ ID NO: 1266559 - DNA, 15 bp, Homo sapiens
tacacgggaagaaat

SEQ ID NO: 1266560 - DNA, 15 bp, Homo sapiens
atacacgggaagaaa

SEQ ID NO: 1266561 - DNA, 15 bp, Homo sapiens
catacacgggaagaa

SEQ ID NO: 1266562 - DNA, 15 bp, Homo sapiens
acatacacgggaaga

SEQ ID NO: 1266563 - DNA, 15 bp, Homo sapiens
cacatacacgggaag

SEQ ID NO: 1266564 - DNA, 15 bp, Homo sapiens
acacatacacgggaa

SEQ ID NO: 1266565 - DNA, 15 bp, Homo sapiens
tacacatacacggga

SEQ ID NO: 1266566 - DNA, 15 bp, Homo sapiens
atacacatacacggg

SEQ ID NO: 1266567 - DNA, 15 bp, Homo sapiens
aatacacatacacgg

SEQ ID NO: 1266568 - DNA, 15 bp, Homo sapiens
aaatacacatacacg

SEQ ID NO: 1266569 - DNA, 15 bp, Homo sapiens
taaatacacatacac

SEQ ID NO: 1266570 - DNA, 15 bp, Homo sapiens
ataaatacacataca

SEQ ID NO: 1266571 - DNA, 15 bp, Homo sapiens
tataaatacacatac

SEQ ID NO: 1266572 - DNA, 15 bp, Homo sapiens
atataaatacacata

SEQ ID NO: 1266573 - DNA, 15 bp, Homo sapiens
gatataaatacacat

SEQ ID NO: 1266574 - DNA, 15 bp, Homo sapiens
tgatataaatacaca

SEQ ID NO: 1266575 - DNA, 15 bp, Homo sapiens
ctgatataaatacac

SEQ ID NO: 1266576 - DNA, 15 bp, Homo sapiens
cctgatataaataca

SEQ ID NO: 1266577 - DNA, 15 bp, Homo sapiens
acctgatataaatac

SEQ ID NO: 1266578 - DNA, 15 bp, Homo sapiens
cacctgatataaata

SEQ ID NO: 1266579 - DNA, 15 bp, Homo sapiens
acacctgatataaat

SEQ ID NO: 1266580 - DNA, 15 bp, Homo sapiens
tacacctgatataaa

SEQ ID NO: 1266581 - DNA, 15 bp, Homo sapiens
ttacacctgatataa

SEQ ID NO: 1266582 - DNA, 15 bp, Homo sapiens
gttacacctgatata

SEQ ID NO: 1266583 - DNA, 15 bp, Homo sapiens
tgttacacctgatat

SEQ ID NO: 1266584 - DNA, 15 bp, Homo sapiens
ttgttacacctgata

SEQ ID NO: 1266585 - DNA, 15 bp, Homo sapiens
cttgttacacctgat

SEQ ID NO: 1266586 - DNA, 15 bp, Homo sapiens
gcttgttacacctga

SEQ ID NO: 1266587 - DNA, 15 bp, Homo sapiens
tgcttgttacacctg

SEQ ID NO: 1266588 - DNA, 15 bp, Homo sapiens
atgcttgttacacct

SEQ ID NO: 1266589 - DNA, 15 bp, Homo sapiens
tatgcttgttacacc

SEQ ID NO: 1266590 - DNA, 15 bp, Homo sapiens
ctatgcttgttacac

SEQ ID NO: 1266591 - DNA, 15 bp, Homo sapiens
actatgcttgttaca

SEQ ID NO: 1266592 - DNA, 15 bp, Homo sapiens
aactatgcttgttac

SEQ ID NO: 1266593 - DNA, 15 bp, Homo sapiens
gaactatgcttgtta

SEQ ID NO: 1266594 - DNA, 15 bp, Homo sapiens
tgaactatgcttgtt

SEQ ID NO: 1266595 - DNA, 15 bp, Homo sapiens
atgaactatgcttgt

SEQ ID NO: 1266596 - DNA, 15 bp, Homo sapiens
gatgaactatgcttg

SEQ ID NO: 1266597 - DNA, 15 bp, Homo sapiens
agatgaactatgctt

SEQ ID NO: 1266598 - DNA, 15 bp, Homo sapiens
aagatgaactatgct

SEQ ID NO: 1266599 - DNA, 15 bp, Homo sapiens
caagatgaactatgc

SEQ ID NO: 1266600 - DNA, 15 bp, Homo sapiens
acaagatgaactatg

SEQ ID NO: 1266601 - DNA, 15 bp, Homo sapiens
gacaagatgaactat

SEQ ID NO: 1266602 - DNA, 15 bp, Homo sapiens
cgacaagatgaacta

SEQ ID NO: 1266603 - DNA, 15 bp, Homo sapiens
acgacaagatgaact

SEQ ID NO: 1266604 - DNA, 15 bp, Homo sapiens
cacgacaagatgaac

SEQ ID NO: 1266605 - DNA, 15 bp, Homo sapiens
acacgacaagatgaa

SEQ ID NO: 1266606 - DNA, 15 bp, Homo sapiens
cacacgacaagatga

SEQ ID NO: 1266607 - DNA, 15 bp, Homo sapiens
tcacacgacaagatg

SEQ ID NO: 1266608 - DNA, 15 bp, Homo sapiens
gtcacacgacaagat

SEQ ID NO: 1266609 - DNA, 15 bp, Homo sapiens
tgtcacacgacaaga

SEQ ID NO: 1266610 - DNA, 15 bp, Homo sapiens
ttgtcacacgacaag

SEQ ID NO: 1266611 - DNA, 15 bp, Homo sapiens
cttgtcacacgacaa

SEQ ID NO: 1266612 - DNA, 15 bp, Homo sapiens
gcttgtcacacgaca

SEQ ID NO: 1266613 - DNA, 15 bp, Homo sapiens
tgcttgtcacacgac

SEQ ID NO: 1266614 - DNA, 15 bp, Homo sapiens
atgcttgtcacacga

SEQ ID NO: 1266615 - DNA, 15 bp, Homo sapiens
tatgcttgtcacacg

SEQ ID NO: 1266616 - DNA, 15 bp, Homo sapiens
ctatgcttgtcacac

SEQ ID NO: 1266617 - DNA, 15 bp, Homo sapiens
actatgcttgtcaca

SEQ ID NO: 1266618 - DNA, 15 bp, Homo sapiens
gactatgcttgtcac

SEQ ID NO: 1266619 - DNA, 15 bp, Homo sapiens
agactatgcttgtca

SEQ ID NO: 1266620 - DNA, 15 bp, Homo sapiens
cagactatgcttgtc

SEQ ID NO: 1266621 - DNA, 15 bp, Homo sapiens
tcagactatgcttgt

SEQ ID NO: 1266622 - DNA, 15 bp, Homo sapiens
ttcagactatgcttg

SEQ ID NO: 1266623 - DNA, 15 bp, Homo sapiens
attcagactatgctt

SEQ ID NO: 1266624 - DNA, 15 bp, Homo sapiens
aattcagactatgct

SEQ ID NO: 1266625 - DNA, 15 bp, Homo sapiens
aaattcagactatgc

SEQ ID NO: 1266626 - DNA, 15 bp, Homo sapiens
caaattcagactatg

SEQ ID NO: 1266627 - DNA, 15 bp, Homo sapiens
gcaaattcagactat

SEQ ID NO: 1266628 - DNA, 15 bp, Homo sapiens
ggcaaattcagacta

SEQ ID NO: 1266629 - DNA, 15 bp, Homo sapiens
gggcaaattcagact

SEQ ID NO: 1266630 - DNA, 15 bp, Homo sapiens
tgggcaaattcagac

SEQ ID NO: 1266631 - DNA, 15 bp, Homo sapiens
ttgggcaaattcaga

SEQ ID NO: 1266632 - DNA, 15 bp, Homo sapiens
attgggcaaattcag

SEQ ID NO: 1266633 - DNA, 15 bp, Homo sapiens
tattgggcaaattca

SEQ ID NO: 1266634 - DNA, 15 bp, Homo sapiens
atattgggcaaattc

SEQ ID NO: 1266635 - DNA, 15 bp, Homo sapiens
aatattgggcaaatt

SEQ ID NO: 1266636 - DNA, 15 bp, Homo sapiens
aaatattgggcaaat

SEQ ID NO: 1266637 - DNA, 15 bp, Homo sapiens
gaaatattgggcaaa

SEQ ID NO: 1266638 - DNA, 15 bp, Homo sapiens
tgaaatattgggcaa

SEQ ID NO: 1266639 - DNA, 15 bp, Homo sapiens
ttgaaatattgggca

SEQ ID NO: 1266640 - DNA, 15 bp, Homo sapiens
tttgaaatattgggc

SEQ ID NO: 1266641 - DNA, 15 bp, Homo sapiens
ttttgaaatattggg

SEQ ID NO: 1266642 - DNA, 15 bp, Homo sapiens
gttttgaaatattgg

SEQ ID NO: 1266643 - DNA, 15 bp, Homo sapiens
ggttttgaaatattg

SEQ ID NO: 1266644 - DNA, 15 bp, Homo sapiens
aggttttgaaatatt

SEQ ID NO: 1266645 - DNA, 15 bp, Homo sapiens
taggttttgaaatat

SEQ ID NO: 1266646 - DNA, 15 bp, Homo sapiens
ataggttttgaaata

SEQ ID NO: 1266647 - DNA, 15 bp, Homo sapiens
aataggttttgaaat

SEQ ID NO: 1266648 - DNA, 15 bp, Homo sapiens
taataggttttgaaa

SEQ ID NO: 1266649 - DNA, 15 bp, Homo sapiens
ataataggttttgaa

SEQ ID NO: 1266650 - DNA, 15 bp, Homo sapiens
aataataggttttga

SEQ ID NO: 1266651 - DNA, 15 bp, Homo sapiens
aaataataggttttg

SEQ ID NO: 1266652 - DNA, 15 bp, Homo sapiens
taaataataggtttt

SEQ ID NO: 1266653 - DNA, 15 bp, Homo sapiens
ttaaataataggttt

SEQ ID NO: 1266654 - DNA, 15 bp, Homo sapiens
tttaaataataggtt

SEQ ID NO: 1266655 - DNA, 15 bp, Homo sapiens
ctttaaataataggt

SEQ ID NO: 1266656 - DNA, 15 bp, Homo sapiens
tctttaaataatagg

SEQ ID NO: 1266657 - DNA, 15 bp, Homo sapiens
ttctttaaataatag

SEQ ID NO: 1266658 - DNA, 15 bp, Homo sapiens
tttctttaaataata

SEQ ID NO: 1266659 - DNA, 15 bp, Homo sapiens
gtttctttaaataat

SEQ ID NO: 1266660 - DNA, 15 bp, Homo sapiens
agtttctttaaataa

SEQ ID NO: 1266661 - DNA, 15 bp, Homo sapiens
aagtttctttaaata

SEQ ID NO: 1266662 - DNA, 15 bp, Homo sapiens
caagtttctttaaat

SEQ ID NO: 1266663 - DNA, 15 bp, Homo sapiens
tcaagtttctttaaa

SEQ ID NO: 1266664 - DNA, 15 bp, Homo sapiens
ttcaagtttctttaa

SEQ ID NO: 1266665 - DNA, 15 bp, Homo sapiens
cttcaagtttcttta

SEQ ID NO: 1266666 - DNA, 15 bp, Homo sapiens
tcttcaagtttcttt

SEQ ID NO: 1266667 - DNA, 15 bp, Homo sapiens
ttcttcaagtttctt

SEQ ID NO: 1266668 - DNA, 15 bp, Homo sapiens
tttcttcaagtttct

SEQ ID NO: 1266669 - DNA, 15 bp, Homo sapiens
ttttcttcaagtttc

SEQ ID NO: 1266670 - DNA, 15 bp, Homo sapiens
gttttcttcaagttt

SEQ ID NO: 1266671 - DNA, 15 bp, Homo sapiens
ggttttcttcaagtt

SEQ ID NO: 1266672 - DNA, 15 bp, Homo sapiens
aggttttcttcaagt

SEQ ID NO: 1266673 - DNA, 15 bp, Homo sapiens
caggttttcttcaag

SEQ ID NO: 1266674 - DNA, 15 bp, Homo sapiens
ccaggttttcttcaa

SEQ ID NO: 1266675 - DNA, 15 bp, Homo sapiens
tccaggttttcttca

SEQ ID NO: 1266676 - DNA, 15 bp, Homo sapiens
ttccaggttttcttc

SEQ ID NO: 1266677 - DNA, 15 bp, Homo sapiens
cttccaggttttctt

SEQ ID NO: 1266678 - DNA, 15 bp, Homo sapiens
tcttccaggttttct

SEQ ID NO: 1266679 - DNA, 15 bp, Homo sapiens
ttcttccaggttttc

SEQ ID NO: 1266680 - DNA, 15 bp, Homo sapiens
attcttccaggtttt

SEQ ID NO: 1266681 - DNA, 15 bp, Homo sapiens
tattcttccaggttt

SEQ ID NO: 1266682 - DNA, 15 bp, Homo sapiens
atattcttccaggtt

SEQ ID NO: 1266683 - DNA, 15 bp, Homo sapiens
aatattcttccaggt

SEQ ID NO: 1266684 - DNA, 15 bp, Homo sapiens
aaatattcttccagg

SEQ ID NO: 1266685 - DNA, 15 bp, Homo sapiens
aaaatattcttccag

SEQ ID NO: 1266686 - DNA, 15 bp, Homo sapiens
gaaaatattcttcca

SEQ ID NO: 1266687 - DNA, 15 bp, Homo sapiens
tgaaaatattcttcc

SEQ ID NO: 1266688 - DNA, 15 bp, Homo sapiens
atgaaaatattcttc

SEQ ID NO: 1266689 - DNA, 15 bp, Homo sapiens
aatgaaaatattctt

SEQ ID NO: 1266690 - DNA, 15 bp, Homo sapiens
caatgaaaatattct

SEQ ID NO: 1266691 - DNA, 15 bp, Homo sapiens
acaatgaaaatattc

SEQ ID NO: 1266692 - DNA, 15 bp, Homo sapiens
tacaatgaaaatatt

SEQ ID NO: 1266693 - DNA, 15 bp, Homo sapiens
atacaatgaaaatat

SEQ ID NO: 1266694 - DNA, 15 bp, Homo sapiens
gatacaatgaaaata

SEQ ID NO: 1266695 - DNA, 15 bp, Homo sapiens
tgatacaatgaaaat

SEQ ID NO: 1266696 - DNA, 15 bp, Homo sapiens
ttgatacaatgaaaa

SEQ ID NO: 1266697 - DNA, 15 bp, Homo sapiens
tttgatacaatgaaa

SEQ ID NO: 1266698 - DNA, 15 bp, Homo sapiens
ctttgatacaatgaa

SEQ ID NO: 1266699 - DNA, 15 bp, Homo sapiens
actttgatacaatga

SEQ ID NO: 1266700 - DNA, 15 bp, Homo sapiens
tactttgatacaatg

SEQ ID NO: 1266701 - DNA, 15 bp, Homo sapiens
ctactttgatacaat

SEQ ID NO: 1266702 - DNA, 15 bp, Homo sapiens
tctactttgatacaa

SEQ ID NO: 1266703 - DNA, 15 bp, Homo sapiens
gtctactttgataca

SEQ ID NO: 1266704 - DNA, 15 bp, Homo sapiens
agtctactttgatac

SEQ ID NO: 1266705 - DNA, 15 bp, Homo sapiens
tagtctactttgata

SEQ ID NO: 1266706 - DNA, 15 bp, Homo sapiens
ttagtctactttgat

SEQ ID NO: 1266707 - DNA, 15 bp, Homo sapiens
tttagtctactttga

SEQ ID NO: 1266708 - DNA, 15 bp, Homo sapiens
atttagtctactttg

SEQ ID NO: 1266709 - DNA, 15 bp, Homo sapiens
tatttagtctacttt

SEQ ID NO: 1266710 - DNA, 15 bp, Homo sapiens
ctatttagtctactt

SEQ ID NO: 1266711 - DNA, 15 bp, Homo sapiens
cctatttagtctact

SEQ ID NO: 1266712 - DNA, 15 bp, Homo sapiens
gcctatttagtctac

SEQ ID NO: 1266713 - DNA, 15 bp, Homo sapiens
ggcctatttagtcta

SEQ ID NO: 1266714 - DNA, 15 bp, Homo sapiens
tggcctatttagtct

SEQ ID NO: 1266715 - DNA, 15 bp, Homo sapiens
atggcctatttagtc

SEQ ID NO: 1266716 - DNA, 15 bp, Homo sapiens
aatggcctatttagt

SEQ ID NO: 1266717 - DNA, 15 bp, Homo sapiens
aaatggcctatttag

SEQ ID NO: 1266718 - DNA, 15 bp, Homo sapiens
aaaatggcctattta

SEQ ID NO: 1266719 - DNA, 15 bp, Homo sapiens
taaaatggcctattt

SEQ ID NO: 1266720 - DNA, 15 bp, Homo sapiens
ttaaaatggcctatt

SEQ ID NO: 1266721 - DNA, 15 bp, Homo sapiens
cttaaaatggcctat

SEQ ID NO: 1266722 - DNA, 15 bp, Homo sapiens
acttaaaatggccta

SEQ ID NO: 1266723 - DNA, 15 bp, Homo sapiens
tacttaaaatggcct

SEQ ID NO: 1266724 - DNA, 15 bp, Homo sapiens
atacttaaaatggcc

SEQ ID NO: 1266725 - DNA, 15 bp, Homo sapiens
catacttaaaatggc

SEQ ID NO: 1266726 - DNA, 15 bp, Homo sapiens
acatacttaaaatgg

SEQ ID NO: 1266727 - DNA, 15 bp, Homo sapiens
gacatacttaaaatg

SEQ ID NO: 1266728 - DNA, 15 bp, Homo sapiens
tgacatacttaaaat

SEQ ID NO: 1266729 - DNA, 15 bp, Homo sapiens
gtgacatacttaaaa

SEQ ID NO: 1266730 - DNA, 15 bp, Homo sapiens
tgtgacatacttaaa

SEQ ID NO: 1266731 - DNA, 15 bp, Homo sapiens
ttgtgacatacttaa

SEQ ID NO: 1266732 - DNA, 15 bp, Homo sapiens
tttgtgacatactta

SEQ ID NO: 1266733 - DNA, 15 bp, Homo sapiens
ttttgtgacatactt

SEQ ID NO: 1266734 - DNA, 15 bp, Homo sapiens
attttgtgacatact

SEQ ID NO: 1266735 - DNA, 15 bp, Homo sapiens
gattttgtgacatac

SEQ ID NO: 1266736 - DNA, 15 bp, Homo sapiens
agattttgtgacata

SEQ ID NO: 1266737 - DNA, 15 bp, Homo sapiens
tagattttgtgacat

SEQ ID NO: 1266738 - DNA, 15 bp, Homo sapiens
ctagattttgtgaca

SEQ ID NO: 1266739 - DNA, 15 bp, Homo sapiens
tctagattttgtgac

SEQ ID NO: 1266740 - DNA, 15 bp, Homo sapiens
ttctagattttgtga

SEQ ID NO: 1266741 - DNA, 15 bp, Homo sapiens
cttctagattttgtg

SEQ ID NO: 1266742 - DNA, 15 bp, Homo sapiens
gcttctagattttgt

SEQ ID NO: 1266743 - DNA, 15 bp, Homo sapiens
tgcttctagattttg

SEQ ID NO: 1266744 - DNA, 15 bp, Homo sapiens
atgcttctagatttt

SEQ ID NO: 1266745 - DNA, 15 bp, Homo sapiens
tatgcttctagattt

SEQ ID NO: 1266746 - DNA, 15 bp, Homo sapiens
ttatgcttctagatt

SEQ ID NO: 1266747 - DNA, 15 bp, Homo sapiens
tttatgcttctagat

SEQ ID NO: 1266748 - DNA, 15 bp, Homo sapiens
ttttatgcttctaga

SEQ ID NO: 1266749 - DNA, 15 bp, Homo sapiens
cttttatgcttctag

SEQ ID NO: 1266750 - DNA, 15 bp, Homo sapiens
tcttttatgcttcta

SEQ ID NO: 1266751 - DNA, 15 bp, Homo sapiens
ttcttttatgcttct

SEQ ID NO: 1266752 - DNA, 15 bp, Homo sapiens
tttcttttatgcttc

SEQ ID NO: 1266753 - DNA, 15 bp, Homo sapiens
ctttcttttatgctt

SEQ ID NO: 1266754 - DNA, 15 bp, Homo sapiens
cctttcttttatgct

SEQ ID NO: 1266755 - DNA, 15 bp, Homo sapiens
tcctttcttttatgc

SEQ ID NO: 1266756 - DNA, 15 bp, Homo sapiens
atcctttcttttatg

SEQ ID NO: 1266757 - DNA, 15 bp, Homo sapiens
tatcctttcttttat

SEQ ID NO: 1266758 - DNA, 15 bp, Homo sapiens
atatcctttctttta

SEQ ID NO: 1266759 - DNA, 15 bp, Homo sapiens
tatatcctttctttt

SEQ ID NO: 1266760 - DNA, 15 bp, Homo sapiens
atatatcctttcttt

SEQ ID NO: 1266761 - DNA, 15 bp, Homo sapiens
tatatatcctttctt

SEQ ID NO: 1266762 - DNA, 15 bp, Homo sapiens
ctatatatcctttct

SEQ ID NO: 1266763 - DNA, 15 bp, Homo sapiens
actatatatcctttc

SEQ ID NO: 1266764 - DNA, 15 bp, Homo sapiens
gactatatatccttt

SEQ ID NO: 1266765 - DNA, 15 bp, Homo sapiens
agactatatatcctt

SEQ ID NO: 1266766 - DNA, 15 bp, Homo sapiens
cagactatatatcct

SEQ ID NO: 1266767 - DNA, 15 bp, Homo sapiens
gcagactatatatcc

SEQ ID NO: 1266768 - DNA, 15 bp, Homo sapiens
agcagactatatatc

SEQ ID NO: 1266769 - DNA, 15 bp, Homo sapiens
aagcagactatatat

SEQ ID NO: 1266770 - DNA, 15 bp, Homo sapiens
gaagcagactatata

SEQ ID NO: 1266771 - DNA, 15 bp, Homo sapiens
tgaagcagactatat

SEQ ID NO: 1266772 - DNA, 15 bp, Homo sapiens
atgaagcagactata

SEQ ID NO: 1266773 - DNA, 15 bp, Homo sapiens
tatgaagcagactat

SEQ ID NO: 1266774 - DNA, 15 bp, Homo sapiens
atatgaagcagacta

SEQ ID NO: 1266775 - DNA, 15 bp, Homo sapiens
tatatgaagcagact

SEQ ID NO: 1266776 - DNA, 15 bp, Homo sapiens
ttatatgaagcagac

SEQ ID NO: 1266777 - DNA, 15 bp, Homo sapiens
tttatatgaagcaga

SEQ ID NO: 1266778 - DNA, 15 bp, Homo sapiens
atttatatgaagcag

SEQ ID NO: 1266779 - DNA, 15 bp, Homo sapiens
gatttatatgaagca

SEQ ID NO: 1266780 - DNA, 15 bp, Homo sapiens
tgatttatatgaagc

SEQ ID NO: 1266781 - DNA, 15 bp, Homo sapiens
ttgatttatatgaag

SEQ ID NO: 1266782 - DNA, 15 bp, Homo sapiens
tttgatttatatgaa

SEQ ID NO: 1266783 - DNA, 15 bp, Homo sapiens
ttttgatttatatga

SEQ ID NO: 1266784 - DNA, 15 bp, Homo sapiens
gttttgatttatatg

SEQ ID NO: 1266785 - DNA, 15 bp, Homo sapiens
agttttgatttatat

SEQ ID NO: 1266786 - DNA, 15 bp, Homo sapiens
aagttttgatttata

SEQ ID NO: 1266787 - DNA, 15 bp, Homo sapiens
aaagttttgatttat

SEQ ID NO: 1266788 - DNA, 15 bp, Homo sapiens
gaaagttttgattta

SEQ ID NO: 1266789 - DNA, 15 bp, Homo sapiens
agaaagttttgattt

SEQ ID NO: 1266790 - DNA, 15 bp, Homo sapiens
cagaaagttttgatt

SEQ ID NO: 1266791 - DNA, 15 bp, Homo sapiens
gcagaaagttttgat

SEQ ID NO: 1266792 - DNA, 15 bp, Homo sapiens
tgcagaaagttttga

SEQ ID NO: 1266793 - DNA, 15 bp, Homo sapiens
atgcagaaagttttg

SEQ ID NO: 1266794 - DNA, 15 bp, Homo sapiens
catgcagaaagtttt

SEQ ID NO: 1266795 - DNA, 15 bp, Homo sapiens
ccatgcagaaagttt

SEQ ID NO: 1266796 - DNA, 15 bp, Homo sapiens
gccatgcagaaagtt

SEQ ID NO: 1266797 - DNA, 15 bp, Homo sapiens
tgccatgcagaaagt

SEQ ID NO: 1266798 - DNA, 15 bp, Homo sapiens
ttgccatgcagaaag

SEQ ID NO: 1266799 - DNA, 15 bp, Homo sapiens
tttgccatgcagaaa

SEQ ID NO: 1266800 - DNA, 15 bp, Homo sapiens
ttttgccatgcagaa

SEQ ID NO: 1266801 - DNA, 15 bp, Homo sapiens
tttttgccatgcaga

SEQ ID NO: 1266802 - DNA, 15 bp, Homo sapiens
gtttttgccatgcag

SEQ ID NO: 1266803 - DNA, 15 bp, Homo sapiens
tgtttttgccatgca

SEQ ID NO: 1266804 - DNA, 15 bp, Homo sapiens
gtgtttttgccatgc

SEQ ID NO: 1266805 - DNA, 15 bp, Homo sapiens
agtgtttttgccatg

SEQ ID NO: 1266806 - DNA, 15 bp, Homo sapiens
tagtgtttttgccat

SEQ ID NO: 1266807 - DNA, 15 bp, Homo sapiens
atagtgtttttgcca

SEQ ID NO: 1266808 - DNA, 15 bp, Homo sapiens
tatagtgtttttgcc

SEQ ID NO: 1266809 - DNA, 15 bp, Homo sapiens
ttatagtgtttttgc

SEQ ID NO: 1266810 - DNA, 15 bp, Homo sapiens
tttatagtgtttttg

SEQ ID NO: 1266811 - DNA, 15 bp, Homo sapiens
atttatagtgttttt

SEQ ID NO: 1266812 - DNA, 15 bp, Homo sapiens
aatttatagtgtttt

SEQ ID NO: 1266813 - DNA, 15 bp, Homo sapiens
taatttatagtgttt

SEQ ID NO: 1266814 - DNA, 15 bp, Homo sapiens
ttaatttatagtgtt

SEQ ID NO: 1266815 - DNA, 15 bp, Homo sapiens
cttaatttatagtgt

SEQ ID NO: 1266816 - DNA, 15 bp, Homo sapiens
gcttaatttatagtg

SEQ ID NO: 1266817 - DNA, 15 bp, Homo sapiens
tgcttaatttatagt

SEQ ID NO: 1266818 - DNA, 15 bp, Homo sapiens
ctgcttaatttatag

SEQ ID NO: 1266819 - DNA, 15 bp, Homo sapiens
tctgcttaatttata

SEQ ID NO: 1266820 - DNA, 15 bp, Homo sapiens
ttctgcttaatttat

SEQ ID NO: 1266821 - DNA, 15 bp, Homo sapiens
tttctgcttaattta

SEQ ID NO: 1266822 - DNA, 15 bp, Homo sapiens
ctttctgcttaattt

SEQ ID NO: 1266823 - DNA, 15 bp, Homo sapiens
tctttctgcttaatt

SEQ ID NO: 1266824 - DNA, 15 bp, Homo sapiens
gtctttctgcttaat

SEQ ID NO: 1266825 - DNA, 15 bp, Homo sapiens
cgtctttctgcttaa

SEQ ID NO: 1266826 - DNA, 15 bp, Homo sapiens
tcgtctttctgctta

SEQ ID NO: 1266827 - DNA, 15 bp, Homo sapiens
ttcgtctttctgctt

SEQ ID NO: 1266828 - DNA, 15 bp, Homo sapiens
attcgtctttctgct

SEQ ID NO: 1266829 - DNA, 15 bp, Homo sapiens
cattcgtctttctgc

SEQ ID NO: 1266830 - DNA, 15 bp, Homo sapiens
tcattcgtctttctg

SEQ ID NO: 1266831 - DNA, 15 bp, Homo sapiens
atcattcgtctttct

SEQ ID NO: 1266832 - DNA, 15 bp, Homo sapiens
tatcattcgtctttc

SEQ ID NO: 1266833 - DNA, 15 bp, Homo sapiens
ttatcattcgtcttt

SEQ ID NO: 1266834 - DNA, 15 bp, Homo sapiens
tttatcattcgtctt

SEQ ID NO: 1266835 - DNA, 15 bp, Homo sapiens
atttatcattcgtct

SEQ ID NO: 1266836 - DNA, 15 bp, Homo sapiens
aatttatcattcgtc

SEQ ID NO: 1266837 - DNA, 15 bp, Homo sapiens
aaatttatcattcgt

SEQ ID NO: 1266838 - DNA, 15 bp, Homo sapiens
aaaatttatcattcg

SEQ ID NO: 1266839 - DNA, 15 bp, Homo sapiens
taaaatttatcattc

SEQ ID NO: 1266840 - DNA, 15 bp, Homo sapiens
ttaaaatttatcatt

SEQ ID NO: 1266841 - DNA, 15 bp, Homo sapiens
tttaaaatttatcat

SEQ ID NO: 1266842 - DNA, 15 bp, Homo sapiens
ttttaaaatttatca

SEQ ID NO: 1266843 - DNA, 15 bp, Homo sapiens
cttttaaaatttatc

SEQ ID NO: 1266844 - DNA, 15 bp, Homo sapiens
tcttttaaaatttat

SEQ ID NO: 1266845 - DNA, 15 bp, Homo sapiens
gtcttttaaaattta

SEQ ID NO: 1266846 - DNA, 15 bp, Homo sapiens
tgtcttttaaaattt

SEQ ID NO: 1266847 - DNA, 15 bp, Homo sapiens
atgtcttttaaaatt

SEQ ID NO: 1266848 - DNA, 15 bp, Homo sapiens
catgtcttttaaaat

SEQ ID NO: 1266849 - DNA, 15 bp, Homo sapiens
acatgtcttttaaaa

SEQ ID NO: 1266850 - DNA, 15 bp, Homo sapiens
cacatgtcttttaaa

SEQ ID NO: 1266851 - DNA, 15 bp, Homo sapiens
tcacatgtcttttaa

SEQ ID NO: 1266852 - DNA, 15 bp, Homo sapiens
ttcacatgtctttta

SEQ ID NO: 1266853 - DNA, 15 bp, Homo sapiens
tttcacatgtctttt

SEQ ID NO: 1266854 - DNA, 15 bp, Homo sapiens
ttttcacatgtcttt

SEQ ID NO: 1266855 - DNA, 15 bp, Homo sapiens
tttttcacatgtctt

SEQ ID NO: 1266856 - DNA, 15 bp, Homo sapiens
gtttttcacatgtct

SEQ ID NO: 1266857 - DNA, 15 bp, Homo sapiens
tgtttttcacatgtc

SEQ ID NO: 1266858 - DNA, 15 bp, Homo sapiens
ttgtttttcacatgt

SEQ ID NO: 1266859 - DNA, 15 bp, Homo sapiens
tttgtttttcacatg

SEQ ID NO: 1266860 - DNA, 15 bp, Homo sapiens
gtttgtttttcacat

SEQ ID NO: 1266861 - DNA, 15 bp, Homo sapiens
cgtttgtttttcaca

SEQ ID NO: 1266862 - DNA, 15 bp, Homo sapiens
acgtttgtttttcac

SEQ ID NO: 1266863 - DNA, 15 bp, Homo sapiens
aacgtttgtttttca

SEQ ID NO: 1266864 - DNA, 15 bp, Homo sapiens
aaacgtttgtttttc

SEQ ID NO: 1266865 - DNA, 15 bp, Homo sapiens
caaacgtttgttttt

SEQ ID NO: 1266866 - DNA, 15 bp, Homo sapiens
gcaaacgtttgtttt

SEQ ID NO: 1266867 - DNA, 15 bp, Homo sapiens
agcaaacgtttgttt

SEQ ID NO: 1266868 - DNA, 15 bp, Homo sapiens
gagcaaacgtttgtt

SEQ ID NO: 1266869 - DNA, 15 bp, Homo sapiens
ggagcaaacgtttgt

SEQ ID NO: 1266870 - DNA, 15 bp, Homo sapiens
aggagcaaacgtttg

SEQ ID NO: 1266871 - DNA, 15 bp, Homo sapiens
aaggagcaaacgttt

SEQ ID NO: 1266872 - DNA, 15 bp, Homo sapiens
caaggagcaaacgtt

SEQ ID NO: 1266873 - DNA, 15 bp, Homo sapiens
ccaaggagcaaacgt

SEQ ID NO: 1266874 - DNA, 15 bp, Homo sapiens
tccaaggagcaaacg

SEQ ID NO: 1266875 - DNA, 15 bp, Homo sapiens
ttccaaggagcaaac

SEQ ID NO: 1266876 - DNA, 15 bp, Homo sapiens
attccaaggagcaaa

SEQ ID NO: 1266877 - DNA, 15 bp, Homo sapiens
tattccaaggagcaa

SEQ ID NO: 1266878 - DNA, 15 bp, Homo sapiens
atattccaaggagca

SEQ ID NO: 1266879 - DNA, 15 bp, Homo sapiens
tatattccaaggagc

SEQ ID NO: 1266880 - DNA, 15 bp, Homo sapiens
atatattccaaggag

SEQ ID NO: 1266881 - DNA, 15 bp, Homo sapiens
gatatattccaagga

SEQ ID NO: 1266882 - DNA, 15 bp, Homo sapiens
tgatatattccaagg

SEQ ID NO: 1266883 - DNA, 15 bp, Homo sapiens
ttgatatattccaag

SEQ ID NO: 1266884 - DNA, 15 bp, Homo sapiens
cttgatatattccaa

SEQ ID NO: 1266885 - DNA, 15 bp, Homo sapiens
tcttgatatattcca

SEQ ID NO: 1266886 - DNA, 15 bp, Homo sapiens
ttcttgatatattcc

SEQ ID NO: 1266887 - DNA, 15 bp, Homo sapiens
cttcttgatatattc

SEQ ID NO: 1266888 - DNA, 15 bp, Homo sapiens
ccttcttgatatatt

SEQ ID NO: 1266889 - DNA, 15 bp, Homo sapiens
cccttcttgatatat

SEQ ID NO: 1266890 - DNA, 15 bp, Homo sapiens
gcccttcttgatata

SEQ ID NO: 1266891 - DNA, 15 bp, Homo sapiens
agcccttcttgatat

SEQ ID NO: 1266892 - DNA, 15 bp, Homo sapiens
aagcccttcttgata

SEQ ID NO: 1266893 - DNA, 15 bp, Homo sapiens
aaagcccttcttgat

SEQ ID NO: 1266894 - DNA, 15 bp, Homo sapiens
caaagcccttcttga

SEQ ID NO: 1266895 - DNA, 15 bp, Homo sapiens
tcaaagcccttcttg

SEQ ID NO: 1266896 - DNA, 15 bp, Homo sapiens
ttcaaagcccttctt

SEQ ID NO: 1266897 - DNA, 15 bp, Homo sapiens
attcaaagcccttct

SEQ ID NO: 1266898 - DNA, 15 bp, Homo sapiens
gattcaaagcccttc

SEQ ID NO: 1266899 - DNA, 15 bp, Homo sapiens
tgattcaaagccctt

SEQ ID NO: 1266900 - DNA, 15 bp, Homo sapiens
ttgattcaaagccct

SEQ ID NO: 1266901 - DNA, 15 bp, Homo sapiens
attgattcaaagccc

SEQ ID NO: 1266902 - DNA, 15 bp, Homo sapiens
cattgattcaaagcc

SEQ ID NO: 1266903 - DNA, 15 bp, Homo sapiens
ccattgattcaaagc

SEQ ID NO: 1266904 - DNA, 15 bp, Homo sapiens
tccattgattcaaag

SEQ ID NO: 1266905 - DNA, 15 bp, Homo sapiens
ttccattgattcaaa

SEQ ID NO: 1266906 - DNA, 15 bp, Homo sapiens
tttccattgattcaa

SEQ ID NO: 1266907 - DNA, 15 bp, Homo sapiens
ttttccattgattca

SEQ ID NO: 1266908 - DNA, 15 bp, Homo sapiens
cttttccattgattc

SEQ ID NO: 1266909 - DNA, 15 bp, Homo sapiens
ccttttccattgatt

SEQ ID NO: 1266910 - DNA, 15 bp, Homo sapiens
tccttttccattgat

SEQ ID NO: 1266911 - DNA, 15 bp, Homo sapiens
atccttttccattga

SEQ ID NO: 1266912 - DNA, 15 bp, Homo sapiens
gatccttttccattg

SEQ ID NO: 1266913 - DNA, 15 bp, Homo sapiens
tgatccttttccatt

SEQ ID NO: 1266914 - DNA, 15 bp, Homo sapiens
ttgatccttttccat

SEQ ID NO: 1266915 - DNA, 15 bp, Homo sapiens
attgatccttttcca

SEQ ID NO: 1266916 - DNA, 15 bp, Homo sapiens
tattgatccttttcc

SEQ ID NO: 1266917 - DNA, 15 bp, Homo sapiens
ttattgatccttttc

SEQ ID NO: 1266918 - DNA, 15 bp, Homo sapiens
gttattgatcctttt

SEQ ID NO: 1266919 - DNA, 15 bp, Homo sapiens
agttattgatccttt

SEQ ID NO: 1266920 - DNA, 15 bp, Homo sapiens
cagttattgatcctt

SEQ ID NO: 1266921 - DNA, 15 bp, Homo sapiens
tcagttattgatcct

SEQ ID NO: 1266922 - DNA, 15 bp, Homo sapiens
gtcagttattgatcc

SEQ ID NO: 1266923 - DNA, 15 bp, Homo sapiens
tgtcagttattgatc

SEQ ID NO: 1266924 - DNA, 15 bp, Homo sapiens
ctgtcagttattgat

SEQ ID NO: 1266925 - DNA, 15 bp, Homo sapiens
tctgtcagttattga

SEQ ID NO: 1266926 - DNA, 15 bp, Homo sapiens
ttctgtcagttattg

SEQ ID NO: 1266927 - DNA, 15 bp, Homo sapiens
tttctgtcagttatt

SEQ ID NO: 1266928 - DNA, 15 bp, Homo sapiens
ctttctgtcagttat

SEQ ID NO: 1266929 - DNA, 15 bp, Homo sapiens
tctttctgtcagtta

SEQ ID NO: 1266930 - DNA, 15 bp, Homo sapiens
atctttctgtcagtt

SEQ ID NO: 1266931 - DNA, 15 bp, Homo sapiens
tatctttctgtcagt

SEQ ID NO: 1266932 - DNA, 15 bp, Homo sapiens
ctatctttctgtcag

SEQ ID NO: 1266933 - DNA, 15 bp, Homo sapiens
tctatctttctgtca

SEQ ID NO: 1266934 - DNA, 15 bp, Homo sapiens
gtctatctttctgtc

SEQ ID NO: 1266935 - DNA, 15 bp, Homo sapiens
tgtctatctttctgt

SEQ ID NO: 1266936 - DNA, 15 bp, Homo sapiens
ttgtctatctttctg

SEQ ID NO: 1266937 - DNA, 15 bp, Homo sapiens
gttgtctatctttct

SEQ ID NO: 1266938 - DNA, 15 bp, Homo sapiens
cgttgtctatctttc

SEQ ID NO: 1266939 - DNA, 15 bp, Homo sapiens
ccgttgtctatcttt

SEQ ID NO: 1266940 - DNA, 15 bp, Homo sapiens
tccgttgtctatctt

SEQ ID NO: 1266941 - DNA, 15 bp, Homo sapiens
atccgttgtctatct

SEQ ID NO: 1266942 - DNA, 15 bp, Homo sapiens
tatccgttgtctatc

SEQ ID NO: 1266943 - DNA, 15 bp, Homo sapiens
atatccgttgtctat

SEQ ID NO: 1266944 - DNA, 15 bp, Homo sapiens
catatccgttgtcta

SEQ ID NO: 1266945 - DNA, 15 bp, Homo sapiens
tcatatccgttgtct

SEQ ID NO: 1266946 - DNA, 15 bp, Homo sapiens
ttcatatccgttgtc

SEQ ID NO: 1266947 - DNA, 15 bp, Homo sapiens
gttcatatccgttgt

SEQ ID NO: 1266948 - DNA, 15 bp, Homo sapiens
tgttcatatccgttg

SEQ ID NO: 1266949 - DNA, 15 bp, Homo sapiens
atgttcatatccgtt

SEQ ID NO: 1266950 - DNA, 15 bp, Homo sapiens
tatgttcatatccgt

SEQ ID NO: 1266951 - DNA, 15 bp, Homo sapiens
ctatgttcatatccg

SEQ ID NO: 1266952 - DNA, 15 bp, Homo sapiens
tctatgttcatatcc

SEQ ID NO: 1266953 - DNA, 15 bp, Homo sapiens
ttctatgttcatatc

SEQ ID NO: 1266954 - DNA, 15 bp, Homo sapiens
attctatgttcatat

SEQ ID NO: 1266955 - DNA, 15 bp, Homo sapiens
aattctatgttcata

SEQ ID NO: 1266956 - DNA, 15 bp, Homo sapiens
gaattctatgttcat

SEQ ID NO: 1266957 - DNA, 15 bp, Homo sapiens
tgaattctatgttca

SEQ ID NO: 1266958 - DNA, 15 bp, Homo sapiens
gtgaattctatgttc

SEQ ID NO: 1266959 - DNA, 15 bp, Homo sapiens
cgtgaattctatgtt

SEQ ID NO: 1266960 - DNA, 15 bp, Homo sapiens
ccgtgaattctatgt

SEQ ID NO: 1266961 - DNA, 15 bp, Homo sapiens
tccgtgaattctatg

SEQ ID NO: 1266962 - DNA, 15 bp, Homo sapiens
ttccgtgaattctat

SEQ ID NO: 1266963 - DNA, 15 bp, Homo sapiens
tttccgtgaattcta

SEQ ID NO: 1266964 - DNA, 15 bp, Homo sapiens
ttttccgtgaattct

SEQ ID NO: 1266965 - DNA, 15 bp, Homo sapiens
gttttccgtgaattc

SEQ ID NO: 1266966 - DNA, 15 bp, Homo sapiens
tgttttccgtgaatt

SEQ ID NO: 1266967 - DNA, 15 bp, Homo sapiens
ttgttttccgtgaat

SEQ ID NO: 1266968 - DNA, 15 bp, Homo sapiens
tttgttttccgtgaa

SEQ ID NO: 1266969 - DNA, 15 bp, Homo sapiens
ttttgttttccgtga

SEQ ID NO: 1266970 - DNA, 15 bp, Homo sapiens
attttgttttccgtg

SEQ ID NO: 1266971 - DNA, 15 bp, Homo sapiens
tattttgttttccgt

SEQ ID NO: 1266972 - DNA, 15 bp, Homo sapiens
ttattttgttttccg

SEQ ID NO: 1266973 - DNA, 15 bp, Homo sapiens
tttattttgttttcc

SEQ ID NO: 1266974 - DNA, 15 bp, Homo sapiens
tttttattttgtttt

SEQ ID NO: 1266975 - DNA, 15 bp, Homo sapiens
atttttattttgttt

SEQ ID NO: 1266976 - DNA, 15 bp, Homo sapiens
catttttattttgtt

SEQ ID NO: 1266977 - DNA, 15 bp, Homo sapiens
ccatttttattttgt

SEQ ID NO: 1266978 - DNA, 15 bp, Homo sapiens
accatttttattttg

SEQ ID NO: 1266979 - DNA, 15 bp, Homo sapiens
aaccatttttatttt

SEQ ID NO: 1266980 - DNA, 15 bp, Homo sapiens
gaaccatttttattt

SEQ ID NO: 1266981 - DNA, 15 bp, Homo sapiens
agaaccatttttatt

SEQ ID NO: 1266982 - DNA, 15 bp, Homo sapiens
aagaaccatttttat

SEQ ID NO: 1266983 - DNA, 15 bp, Homo sapiens
caagaaccattttta

SEQ ID NO: 1266984 - DNA, 15 bp, Homo sapiens
tcaagaaccattttt

SEQ ID NO: 1266985 - DNA, 15 bp, Homo sapiens
ttcaagaaccatttt

SEQ ID NO: 1266986 - DNA, 15 bp, Homo sapiens
attcaagaaccattt

SEQ ID NO: 1266987 - DNA, 15 bp, Homo sapiens
tattcaagaaccatt

SEQ ID NO: 1266988 - DNA, 15 bp, Homo sapiens
gtattcaagaaccat

SEQ ID NO: 1266989 - DNA, 15 bp, Homo sapiens
ggtattcaagaacca

SEQ ID NO: 1266990 - DNA, 15 bp, Homo sapiens
aggtattcaagaacc

SEQ ID NO: 1266991 - DNA, 15 bp, Homo sapiens
caggtattcaagaac

SEQ ID NO: 1266992 - DNA, 15 bp, Homo sapiens
tcaggtattcaagaa

SEQ ID NO: 1266993 - DNA, 15 bp, Homo sapiens
gtcaggtattcaaga

SEQ ID NO: 1266994 - DNA, 15 bp, Homo sapiens
ggtcaggtattcaag

SEQ ID NO: 1266995 - DNA, 15 bp, Homo sapiens
tggtcaggtattcaa

SEQ ID NO: 1266996 - DNA, 15 bp, Homo sapiens
ctggtcaggtattca

SEQ ID NO: 1266997 - DNA, 15 bp, Homo sapiens
cctggtcaggtattc

SEQ ID NO: 1266998 - DNA, 15 bp, Homo sapiens
acctggtcaggtatt

SEQ ID NO: 1266999 - DNA, 15 bp, Homo sapiens
cacctggtcaggtat

SEQ ID NO: 1267000 - DNA, 15 bp, Homo sapiens
gcacctggtcaggta

SEQ ID NO: 1267001 - DNA, 15 bp, Homo sapiens
agcacctggtcaggt

SEQ ID NO: 1267002 - DNA, 15 bp, Homo sapiens
gagcacctggtcagg

SEQ ID NO: 1267003 - DNA, 15 bp, Homo sapiens
tgagcacctggtcag

SEQ ID NO: 1267004 - DNA, 15 bp, Homo sapiens
ttgagcacctggtca

SEQ ID NO: 1267005 - DNA, 15 bp, Homo sapiens
attgagcacctggtc

SEQ ID NO: 1267006 - DNA, 15 bp, Homo sapiens
gattgagcacctggt

SEQ ID NO: 1267007 - DNA, 15 bp, Homo sapiens
ggattgagcacctgg

SEQ ID NO: 1267008 - DNA, 15 bp, Homo sapiens
aggattgagcacctg

SEQ ID NO: 1267009 - DNA, 15 bp, Homo sapiens
taggattgagcacct

SEQ ID NO: 1267010 - DNA, 15 bp, Homo sapiens
gtaggattgagcacc

SEQ ID NO: 1267011 - DNA, 15 bp, Homo sapiens
agtaggattgagcac

SEQ ID NO: 1267012 - DNA, 15 bp, Homo sapiens
aagtaggattgagca

SEQ ID NO: 1267013 - DNA, 15 bp, Homo sapiens
taagtaggattgagc

SEQ ID NO: 1267014 - DNA, 15 bp, Homo sapiens
ataagtaggattgag

SEQ ID NO: 1267015 - DNA, 15 bp, Homo sapiens
tataagtaggattga

SEQ ID NO: 1267016 - DNA, 15 bp, Homo sapiens
gtataagtaggattg

SEQ ID NO: 1267017 - DNA, 15 bp, Homo sapiens
tgtataagtaggatt

SEQ ID NO: 1267018 - DNA, 15 bp, Homo sapiens
ttgtataagtaggat

SEQ ID NO: 1267019 - DNA, 15 bp, Homo sapiens
cttgtataagtagga

SEQ ID NO: 1267020 - DNA, 15 bp, Homo sapiens
tcttgtataagtagg

SEQ ID NO: 1267021 - DNA, 15 bp, Homo sapiens
ctcttgtataagtag

SEQ ID NO: 1267022 - DNA, 15 bp, Homo sapiens
tctcttgtataagta

SEQ ID NO: 1267023 - DNA, 15 bp, Homo sapiens
ctctcttgtataagt

SEQ ID NO: 1267024 - DNA, 15 bp, Homo sapiens
tctctcttgtataag

SEQ ID NO: 1267025 - DNA, 15 bp, Homo sapiens
atctctcttgtataa

SEQ ID NO: 1267026 - DNA, 15 bp, Homo sapiens
catctctcttgtata

SEQ ID NO: 1267027 - DNA, 15 bp, Homo sapiens
gcatctctcttgtat

SEQ ID NO: 1267028 - DNA, 15 bp, Homo sapiens
tgcatctctcttgta

SEQ ID NO: 1267029 - DNA, 15 bp, Homo sapiens
ttgcatctctcttgt

SEQ ID NO: 1267030 - DNA, 15 bp, Homo sapiens
tttgcatctctcttg

SEQ ID NO: 1267031 - DNA, 15 bp, Homo sapiens
atttgcatctctctt

SEQ ID NO: 1267032 - DNA, 15 bp, Homo sapiens
aatttgcatctctct

SEQ ID NO: 1267033 - DNA, 15 bp, Homo sapiens
taatttgcatctctc

SEQ ID NO: 1267034 - DNA, 15 bp, Homo sapiens
ttaatttgcatctct

SEQ ID NO: 1267035 - DNA, 15 bp, Homo sapiens
tttaatttgcatctc

SEQ ID NO: 1267036 - DNA, 15 bp, Homo sapiens
ttttaatttgcatct

SEQ ID NO: 1267037 - DNA, 15 bp, Homo sapiens
gttttaatttgcatc

SEQ ID NO: 1267038 - DNA, 15 bp, Homo sapiens
cgtagttttaatttg

SEQ ID NO: 1267039 - DNA, 15 bp, Homo sapiens
gcgtagttttaattt

SEQ ID NO: 1267040 - DNA, 15 bp, Homo sapiens
agcgtagttttaatt

SEQ ID NO: 1267041 - DNA, 15 bp, Homo sapiens
cagcgtagttttaat

SEQ ID NO: 1267042 - DNA, 15 bp, Homo sapiens
tcagcgtagttttaa

SEQ ID NO: 1267043 - DNA, 15 bp, Homo sapiens
atcagcgtagtttta

SEQ ID NO: 1267044 - DNA, 15 bp, Homo sapiens
tatcagcgtagtttt

SEQ ID NO: 1267045 - DNA, 15 bp, Homo sapiens
atatcagcgtagttt

SEQ ID NO: 1267046 - DNA, 15 bp, Homo sapiens
tatatcagcgtagtt

SEQ ID NO: 1267047 - DNA, 15 bp, Homo sapiens
ttatatcagcgtagt

SEQ ID NO: 1267048 - DNA, 15 bp, Homo sapiens
cttatatcagcgtag

SEQ ID NO: 1267049 - DNA, 15 bp, Homo sapiens
acttatatcagcgta

SEQ ID NO: 1267050 - DNA, 15 bp, Homo sapiens
aacttatatcagcgt

SEQ ID NO: 1267051 - DNA, 15 bp, Homo sapiens
gaacttatatcagcg

SEQ ID NO: 1267052 - DNA, 15 bp, Homo sapiens
agaacttatatcagc

SEQ ID NO: 1267053 - DNA, 15 bp, Homo sapiens
aagaacttatatcag

SEQ ID NO: 1267054 - DNA, 15 bp, Homo sapiens
gaagaacttatatca

SEQ ID NO: 1267055 - DNA, 15 bp, Homo sapiens
ggaagaacttatatc

SEQ ID NO: 1267056 - DNA, 15 bp, Homo sapiens
gggaagaacttatat

SEQ ID NO: 1267057 - DNA, 15 bp, Homo sapiens
agggaagaacttata

SEQ ID NO: 1267058 - DNA, 15 bp, Homo sapiens
gagggaagaacttat

SEQ ID NO: 1267059 - DNA, 15 bp, Homo sapiens
agagggaagaactta

SEQ ID NO: 1267060 - DNA, 15 bp, Homo sapiens
cagagggaagaactt

SEQ ID NO: 1267061 - DNA, 15 bp, Homo sapiens
gcagagggaagaact

SEQ ID NO: 1267062 - DNA, 15 bp, Homo sapiens
tgcagagggaagaac

SEQ ID NO: 1267063 - DNA, 15 bp, Homo sapiens
ttgcagagggaagaa

SEQ ID NO: 1267064 - DNA, 15 bp, Homo sapiens
attgcagagggaaga

SEQ ID NO: 1267065 - DNA, 15 bp, Homo sapiens
gattgcagagggaag

SEQ ID NO: 1267066 - DNA, 15 bp, Homo sapiens
agattgcagagggaa

SEQ ID NO: 1267067 - DNA, 15 bp, Homo sapiens
cagattgcagaggga

SEQ ID NO: 1267068 - DNA, 15 bp, Homo sapiens
ccagattgcagaggg

SEQ ID NO: 1267069 - DNA, 15 bp, Homo sapiens
gccagattgcagagg

SEQ ID NO: 1267070 - DNA, 15 bp, Homo sapiens
tgccagattgcagag

SEQ ID NO: 1267071 - DNA, 15 bp, Homo sapiens
ttgccagattgcaga

SEQ ID NO: 1267072 - DNA, 15 bp, Homo sapiens
tttgccagattgcag

SEQ ID NO: 1267073 - DNA, 15 bp, Homo sapiens
ctttgccagattgca

SEQ ID NO: 1267074 - DNA, 15 bp, Homo sapiens
tctttgccagattgc

SEQ ID NO: 1267075 - DNA, 15 bp, Homo sapiens
atctttgccagattg

SEQ ID NO: 1267076 - DNA, 15 bp, Homo sapiens
gatctttgccagatt

SEQ ID NO: 1267077 - DNA, 15 bp, Homo sapiens
tgatctttgccagat

SEQ ID NO: 1267078 - DNA, 15 bp, Homo sapiens
ttgatctttgccaga

SEQ ID NO: 1267079 - DNA, 15 bp, Homo sapiens
cttgatctttgccag

SEQ ID NO: 1267080 - DNA, 15 bp, Homo sapiens
tcttgatctttgcca

SEQ ID NO: 1267081 - DNA, 15 bp, Homo sapiens
ttcttgatctttgcc

SEQ ID NO: 1267082 - DNA, 15 bp, Homo sapiens
tttcttgatctttgc

SEQ ID NO: 1267083 - DNA, 15 bp, Homo sapiens
ttttcttgatctttg

SEQ ID NO: 1267084 - DNA, 15 bp, Homo sapiens
gttttcttgatcttt

SEQ ID NO: 1267085 - DNA, 15 bp, Homo sapiens
agttttcttgatctt

SEQ ID NO: 1267086 - DNA, 15 bp, Homo sapiens
cagttttcttgatct

SEQ ID NO: 1267087 - DNA, 15 bp, Homo sapiens
tcagttttcttgatc

SEQ ID NO: 1267088 - DNA, 15 bp, Homo sapiens
gtcagttttcttgat

SEQ ID NO: 1267089 - DNA, 15 bp, Homo sapiens
tgtcagttttcttga

SEQ ID NO: 1267090 - DNA, 15 bp, Homo sapiens
ctgtcagttttcttg

SEQ ID NO: 1267091 - DNA, 15 bp, Homo sapiens
actgtcagttttctt

SEQ ID NO: 1267092 - DNA, 15 bp, Homo sapiens
tactgtcagttttct

SEQ ID NO: 1267093 - DNA, 15 bp, Homo sapiens
atactgtcagttttc

SEQ ID NO: 1267094 - DNA, 15 bp, Homo sapiens
gatactgtcagtttt

SEQ ID NO: 1267095 - DNA, 15 bp, Homo sapiens
tgatactgtcagttt

SEQ ID NO: 1267096 - DNA, 15 bp, Homo sapiens
atgatactgtcagtt

SEQ ID NO: 1267097 - DNA, 15 bp, Homo sapiens
catgatactgtcagt

SEQ ID NO: 1267098 - DNA, 15 bp, Homo sapiens
acatgatactgtcag

SEQ ID NO: 1267099 - DNA, 15 bp, Homo sapiens
cacatgatactgtca

SEQ ID NO: 1267100 - DNA, 15 bp, Homo sapiens
gcacatgatactgtc

SEQ ID NO: 1267101 - DNA, 15 bp, Homo sapiens
agcacatgatactgt

SEQ ID NO: 1267102 - DNA, 15 bp, Homo sapiens
cagcacatgatactg

SEQ ID NO: 1267103 - DNA, 15 bp, Homo sapiens
tcagcacatgatact

SEQ ID NO: 1267104 - DNA, 15 bp, Homo sapiens
gtcagcacatgatac

SEQ ID NO: 1267105 - DNA, 15 bp, Homo sapiens
tgtcagcacatgata

SEQ ID NO: 1267106 - DNA, 15 bp, Homo sapiens
ttgtcagcacatgat

SEQ ID NO: 1267107 - DNA, 15 bp, Homo sapiens
tttgtcagcacatga

SEQ ID NO: 1267108 - DNA, 15 bp, Homo sapiens
gtttgtcagcacatg

SEQ ID NO: 1267109 - DNA, 15 bp, Homo sapiens
tgtttgtcagcacat

SEQ ID NO: 1267110 - DNA, 15 bp, Homo sapiens
atgtttgtcagcaca

SEQ ID NO: 1267111 - DNA, 15 bp, Homo sapiens
tatgtttgtcagcac

SEQ ID NO: 1267112 - DNA, 15 bp, Homo sapiens
atatgtttgtcagca

SEQ ID NO: 1267113 - DNA, 15 bp, Homo sapiens
catatgtttgtcagc

SEQ ID NO: 1267114 - DNA, 15 bp, Homo sapiens
tcatatgtttgtcag

SEQ ID NO: 1267115 - DNA, 15 bp, Homo sapiens
ctcatatgtttgtca

SEQ ID NO: 1267116 - DNA, 15 bp, Homo sapiens
cctcatatgtttgtc

SEQ ID NO: 1267117 - DNA, 15 bp, Homo sapiens
tcctcatatgtttgt

SEQ ID NO: 1267118 - DNA, 15 bp, Homo sapiens
ttcctcatatgtttg

SEQ ID NO: 1267119 - DNA, 15 bp, Homo sapiens
gttcctcatatgttt

SEQ ID NO: 1267120 - DNA, 15 bp, Homo sapiens
tgttcctcatatgtt

SEQ ID NO: 1267121 - DNA, 15 bp, Homo sapiens
ctgttcctcatatgt

SEQ ID NO: 1267122 - DNA, 15 bp, Homo sapiens
gctgttcctcatatg

SEQ ID NO: 1267123 - DNA, 15 bp, Homo sapiens
agctgttcctcatat

SEQ ID NO: 1267124 - DNA, 15 bp, Homo sapiens
cagctgttcctcata

SEQ ID NO: 1267125 - DNA, 15 bp, Homo sapiens
acagctgttcctcat

SEQ ID NO: 1267126 - DNA, 15 bp, Homo sapiens
aacagctgttcctca

SEQ ID NO: 1267127 - DNA, 15 bp, Homo sapiens
gaacagctgttcctc

SEQ ID NO: 1267128 - DNA, 15 bp, Homo sapiens
ggaacagctgttcct

SEQ ID NO: 1267129 - DNA, 15 bp, Homo sapiens
gggaacagctgttcc

SEQ ID NO: 1267130 - DNA, 15 bp, Homo sapiens
tgggaacagctgttc

SEQ ID NO: 1267131 - DNA, 15 bp, Homo sapiens
atgggaacagctgtt

SEQ ID NO: 1267132 - DNA, 15 bp, Homo sapiens
tatgggaacagctgt

SEQ ID NO: 1267133 - DNA, 15 bp, Homo sapiens
gtatgggaacagctg

SEQ ID NO: 1267134 - DNA, 15 bp, Homo sapiens
tgtatgggaacagct

SEQ ID NO: 1267135 - DNA, 15 bp, Homo sapiens
atgtatgggaacagc

SEQ ID NO: 1267136 - DNA, 15 bp, Homo sapiens
gatgtatgggaacag

SEQ ID NO: 1267137 - DNA, 15 bp, Homo sapiens
tgatgtatgggaaca

SEQ ID NO: 1267138 - DNA, 15 bp, Homo sapiens
gtgatgtatgggaac

SEQ ID NO: 1267139 - DNA, 15 bp, Homo sapiens
agtgatgtatgggaa

SEQ ID NO: 1267140 - DNA, 15 bp, Homo sapiens
cagtgatgtatggga

SEQ ID NO: 1267141 - DNA, 15 bp, Homo sapiens
ccagtgatgtatggg

SEQ ID NO: 1267142 - DNA, 15 bp, Homo sapiens
tccagtgatgtatgg

SEQ ID NO: 1267143 - DNA, 15 bp, Homo sapiens
ctccagtgatgtatg

SEQ ID NO: 1267144 - DNA, 15 bp, Homo sapiens
cctccagtgatgtat

SEQ ID NO: 1267145 - DNA, 15 bp, Homo sapiens
ccctccagtgatgta

SEQ ID NO: 1267146 - DNA, 15 bp, Homo sapiens
tccctccagtgatgt

SEQ ID NO: 1267147 - DNA, 15 bp, Homo sapiens
ctccctccagtgatg

SEQ ID NO: 1267148 - DNA, 15 bp, Homo sapiens
actccctccagtgat

SEQ ID NO: 1267149 - DNA, 15 bp, Homo sapiens
tactccctccagtga

SEQ ID NO: 1267150 - DNA, 15 bp, Homo sapiens
atactccctccagtg

SEQ ID NO: 1267151 - DNA, 15 bp, Homo sapiens
aatactccctccagt

SEQ ID NO: 1267152 - DNA, 15 bp, Homo sapiens
taatactccctccag

SEQ ID NO: 1267153 - DNA, 15 bp, Homo sapiens
ttaatactccctcca

SEQ ID NO: 1267154 - DNA, 15 bp, Homo sapiens
tttaatactccctcc

SEQ ID NO: 1267155 - DNA, 15 bp, Homo sapiens
atttaatactccctc

SEQ ID NO: 1267156 - DNA, 15 bp, Homo sapiens
aatttaatactccct

SEQ ID NO: 1267157 - DNA, 15 bp, Homo sapiens
aaatttaatactccc

SEQ ID NO: 1267158 - DNA, 15 bp, Homo sapiens
caaatttaatactcc

SEQ ID NO: 1267159 - DNA, 15 bp, Homo sapiens
acaaatttaatactc

SEQ ID NO: 1267160 - DNA, 15 bp, Homo sapiens
tacaaatttaatact

SEQ ID NO: 1267161 - DNA, 15 bp, Homo sapiens
gtacaaatttaatac

SEQ ID NO: 1267162 - DNA, 15 bp, Homo sapiens
tgtacaaatttaata

SEQ ID NO: 1267163 - DNA, 15 bp, Homo sapiens
ttgtacaaatttaat

SEQ ID NO: 1267164 - DNA, 15 bp, Homo sapiens
gttgtacaaatttaa

SEQ ID NO: 1267165 - DNA, 15 bp, Homo sapiens
ggttgtacaaattta

SEQ ID NO: 1267166 - DNA, 15 bp, Homo sapiens
aggttgtacaaattt

SEQ ID NO: 1267167 - DNA, 15 bp, Homo sapiens
gaggttgtacaaatt

SEQ ID NO: 1267168 - DNA, 15 bp, Homo sapiens
agaggttgtacaaat

SEQ ID NO: 1267169 - DNA, 15 bp, Homo sapiens
tagaggttgtacaaa

SEQ ID NO: 1267170 - DNA, 15 bp, Homo sapiens
gtagaggttgtacaa

SEQ ID NO: 1267171 - DNA, 15 bp, Homo sapiens
ggtagaggttgtaca

SEQ ID NO: 1267172 - DNA, 15 bp, Homo sapiens
aggtagaggttgtac

SEQ ID NO: 1267173 - DNA, 15 bp, Homo sapiens
caggtagaggttgta

SEQ ID NO: 1267174 - DNA, 15 bp, Homo sapiens
acaggtagaggttgt

SEQ ID NO: 1267175 - DNA, 15 bp, Homo sapiens
gacaggtagaggttg

SEQ ID NO: 1267176 - DNA, 15 bp, Homo sapiens
agacaggtagaggtt

SEQ ID NO: 1267177 - DNA, 15 bp, Homo sapiens
gagacaggtagaggt

SEQ ID NO: 1267178 - DNA, 15 bp, Homo sapiens
agagacaggtagagg

SEQ ID NO: 1267179 - DNA, 15 bp, Homo sapiens
cagagacaggtagag

SEQ ID NO: 1267180 - DNA, 15 bp, Homo sapiens
acagagacaggtaga

SEQ ID NO: 1267181 - DNA, 15 bp, Homo sapiens
gacagagacaggtag

SEQ ID NO: 1267182 - DNA, 15 bp, Homo sapiens
agacagagacaggta

SEQ ID NO: 1267183 - DNA, 15 bp, Homo sapiens
gagacagagacaggt

SEQ ID NO: 1267184 - DNA, 15 bp, Homo sapiens
tgagacagagacagg

SEQ ID NO: 1267185 - DNA, 15 bp, Homo sapiens
ttgagacagagacag

SEQ ID NO: 1267186 - DNA, 15 bp, Homo sapiens
tttgagacagagaca

SEQ ID NO: 1267187 - DNA, 15 bp, Homo sapiens
ttttgagacagagac

SEQ ID NO: 1267188 - DNA, 15 bp, Homo sapiens
gttttgagacagaga

SEQ ID NO: 1267189 - DNA, 15 bp, Homo sapiens
agttttgagacagag

SEQ ID NO: 1267190 - DNA, 15 bp, Homo sapiens
cagttttgagacaga

SEQ ID NO: 1267191 - DNA, 15 bp, Homo sapiens
gcagttttgagacag

SEQ ID NO: 1267192 - DNA, 15 bp, Homo sapiens
ggcagttttgagaca

SEQ ID NO: 1267193 - DNA, 15 bp, Homo sapiens
gggcagttttgagac

SEQ ID NO: 1267194 - DNA, 15 bp, Homo sapiens
tgggcagttttgaga

SEQ ID NO: 1267195 - DNA, 15 bp, Homo sapiens
atgggcagttttgag

SEQ ID NO: 1267196 - DNA, 15 bp, Homo sapiens
tatgggcagttttga

SEQ ID NO: 1267197 - DNA, 15 bp, Homo sapiens
atatgggcagttttg

SEQ ID NO: 1267198 - DNA, 15 bp, Homo sapiens
gatatgggcagtttt

SEQ ID NO: 1267199 - DNA, 15 bp, Homo sapiens
ggatatgggcagttt

SEQ ID NO: 1267200 - DNA, 15 bp, Homo sapiens
aggatatgggcagtt

SEQ ID NO: 1267201 - DNA, 15 bp, Homo sapiens
aaggatatgggcagt

SEQ ID NO: 1267202 - DNA, 15 bp, Homo sapiens
aaaggatatgggcag

SEQ ID NO: 1267203 - DNA, 15 bp, Homo sapiens
caaaggatatgggca

SEQ ID NO: 1267204 - DNA, 15 bp, Homo sapiens
tcaaaggatatgggc

SEQ ID NO: 1267205 - DNA, 15 bp, Homo sapiens
ctcaaaggatatggg

SEQ ID NO: 1267206 - DNA, 15 bp, Homo sapiens
actcaaaggatatgg

SEQ ID NO: 1267207 - DNA, 15 bp, Homo sapiens
gactcaaaggatatg

SEQ ID NO: 1267208 - DNA, 15 bp, Homo sapiens
tgactcaaaggatat

SEQ ID NO: 1267209 - DNA, 15 bp, Homo sapiens
ctgactcaaaggata

SEQ ID NO: 1267210 - DNA, 15 bp, Homo sapiens
gctgactcaaaggat

SEQ ID NO: 1267211 - DNA, 15 bp, Homo sapiens
tgctgactcaaagga

SEQ ID NO: 1267212 - DNA, 15 bp, Homo sapiens
ttgctgactcaaagg

SEQ ID NO: 1267213 - DNA, 15 bp, Homo sapiens
attgctgactcaaag

SEQ ID NO: 1267214 - DNA, 15 bp, Homo sapiens
aattgctgactcaaa

SEQ ID NO: 1267215 - DNA, 15 bp, Homo sapiens
gaattgctgactcaa

SEQ ID NO: 1267216 - DNA, 15 bp, Homo sapiens
tgaattgctgactca

SEQ ID NO: 1267217 - DNA, 15 bp, Homo sapiens
ttgaattgctgactc

SEQ ID NO: 1267218 - DNA, 15 bp, Homo sapiens
attgaattgctgact

SEQ ID NO: 1267219 - DNA, 15 bp, Homo sapiens
aattgaattgctgac

SEQ ID NO: 1267220 - DNA, 15 bp, Homo sapiens
aaattgaattgctga

SEQ ID NO: 1267221 - DNA, 15 bp, Homo sapiens
gaaattgaattgctg

SEQ ID NO: 1267222 - DNA, 15 bp, Homo sapiens
agaaattgaattgct

SEQ ID NO: 1267223 - DNA, 15 bp, Homo sapiens
tagaaattgaattgc

SEQ ID NO: 1267224 - DNA, 15 bp, Homo sapiens
ctagaaattgaattg

SEQ ID NO: 1267225 - DNA, 15 bp, Homo sapiens
cctagaaattgaatt

SEQ ID NO: 1267226 - DNA, 15 bp, Homo sapiens
tcctagaaattgaat

SEQ ID NO: 1267227 - DNA, 15 bp, Homo sapiens
ttcctagaaattgaa

SEQ ID NO: 1267228 - DNA, 15 bp, Homo sapiens
tttcctagaaattga

SEQ ID NO: 1267229 - DNA, 15 bp, Homo sapiens
gtttcctagaaattg

SEQ ID NO: 1267230 - DNA, 15 bp, Homo sapiens
agtttcctagaaatt

SEQ ID NO: 1267231 - DNA, 15 bp, Homo sapiens
tagtttcctagaaat

SEQ ID NO: 1267232 - DNA, 15 bp, Homo sapiens
atagtttcctagaaa

SEQ ID NO: 1267233 - DNA, 15 bp, Homo sapiens
gatagtttcctagaa

SEQ ID NO: 1267234 - DNA, 15 bp, Homo sapiens
tgatagtttcctaga

SEQ ID NO: 1267235 - DNA, 15 bp, Homo sapiens
gtgatagtttcctag

SEQ ID NO: 1267236 - DNA, 15 bp, Homo sapiens
tgtgatagtttccta

SEQ ID NO: 1267237 - DNA, 15 bp, Homo sapiens
gtgtgatagtttcct

SEQ ID NO: 1267238 - DNA, 15 bp, Homo sapiens
agtgtgatagtttcc

SEQ ID NO: 1267239 - DNA, 15 bp, Homo sapiens
tagtgtgatagtttc

SEQ ID NO: 1267240 - DNA, 15 bp, Homo sapiens
ttagtgtgatagttt

SEQ ID NO: 1267241 - DNA, 15 bp, Homo sapiens
attagtgtgatagtt

SEQ ID NO: 1267242 - DNA, 15 bp, Homo sapiens
tattagtgtgatagt

SEQ ID NO: 1267243 - DNA, 15 bp, Homo sapiens
gtattagtgtgatag

SEQ ID NO: 1267244 - DNA, 15 bp, Homo sapiens
tgtattagtgtgata

SEQ ID NO: 1267245 - DNA, 15 bp, Homo sapiens
gtgtattagtgtgat

SEQ ID NO: 1267246 - DNA, 15 bp, Homo sapiens
agtgtattagtgtga

SEQ ID NO: 1267247 - DNA, 15 bp, Homo sapiens
gagtgtattagtgtg

SEQ ID NO: 1267248 - DNA, 15 bp, Homo sapiens
tgagtgtattagtgt

SEQ ID NO: 1267249 - DNA, 15 bp, Homo sapiens
gtgagtgtattagtg

SEQ ID NO: 1267250 - DNA, 15 bp, Homo sapiens
tgtgagtgtattagt

SEQ ID NO: 1267251 - DNA, 15 bp, Homo sapiens
atgtgagtgtattag

SEQ ID NO: 1267252 - DNA, 15 bp, Homo sapiens
catgtgagtgtatta

SEQ ID NO: 1267253 - DNA, 15 bp, Homo sapiens
acatgtgagtgtatt

SEQ ID NO: 1267254 - DNA, 15 bp, Homo sapiens
tacatgtgagtgtat

SEQ ID NO: 1267255 - DNA, 15 bp, Homo sapiens
atacatgtgagtgta

SEQ ID NO: 1267256 - DNA, 15 bp, Homo sapiens
catacatgtgagtgt

SEQ ID NO: 1267257 - DNA, 15 bp, Homo sapiens
tcatacatgtgagtg

SEQ ID NO: 1267258 - DNA, 15 bp, Homo sapiens
ttcatacatgtgagt

SEQ ID NO: 1267259 - DNA, 15 bp, Homo sapiens
tttcatacatgtgag

SEQ ID NO: 1267260 - DNA, 15 bp, Homo sapiens
atttcatacatgtga

SEQ ID NO: 1267261 - DNA, 15 bp, Homo sapiens
gatttcatacatgtg

SEQ ID NO: 1267262 - DNA, 15 bp, Homo sapiens
cgatttcatacatgt

SEQ ID NO: 1267263 - DNA, 15 bp, Homo sapiens
gcgatttcatacatg

SEQ ID NO: 1267264 - DNA, 15 bp, Homo sapiens
tgcgatttcatacat

SEQ ID NO: 1267265 - DNA, 15 bp, Homo sapiens
gtgcgatttcataca

SEQ ID NO: 1267266 - DNA, 15 bp, Homo sapiens
tgtgcgatttcatac

SEQ ID NO: 1267267 - DNA, 15 bp, Homo sapiens
atgtgcgatttcata

SEQ ID NO: 1267268 - DNA, 15 bp, Homo sapiens
catgtgcgatttcat

SEQ ID NO: 1267269 - DNA, 15 bp, Homo sapiens
ccatgtgcgatttca

SEQ ID NO: 1267270 - DNA, 15 bp, Homo sapiens
tccatgtgcgatttc

SEQ ID NO: 1267271 - DNA, 15 bp, Homo sapiens
gtccatgtgcgattt

SEQ ID NO: 1267272 - DNA, 15 bp, Homo sapiens
tgtccatgtgcgatt

SEQ ID NO: 1267273 - DNA, 15 bp, Homo sapiens
ttgtccatgtgcgat

SEQ ID NO: 1267274 - DNA, 15 bp, Homo sapiens
cttgtccatgtgcga

SEQ ID NO: 1267275 - DNA, 15 bp, Homo sapiens
tcttgtccatgtgcg

SEQ ID NO: 1267276 - DNA, 15 bp, Homo sapiens
atcttgtccatgtgc

SEQ ID NO: 1267277 - DNA, 15 bp, Homo sapiens
aatcttgtccatgtg

SEQ ID NO: 1267278 - DNA, 15 bp, Homo sapiens
taatcttgtccatgt

SEQ ID NO: 1267279 - DNA, 15 bp, Homo sapiens
ataatcttgtccatg

SEQ ID NO: 1267280 - DNA, 15 bp, Homo sapiens
aataatcttgtccat

SEQ ID NO: 1267281 - DNA, 15 bp, Homo sapiens
gaataatcttgtcca

SEQ ID NO: 1267282 - DNA, 15 bp, Homo sapiens
tgaataatcttgtcc

SEQ ID NO: 1267283 - DNA, 15 bp, Homo sapiens
atgaataatcttgtc

SEQ ID NO: 1267284 - DNA, 15 bp, Homo sapiens
aatgaataatcttgt

SEQ ID NO: 1267285 - DNA, 15 bp, Homo sapiens
caatgaataatcttg

SEQ ID NO: 1267286 - DNA, 15 bp, Homo sapiens
gcaatgaataatctt

SEQ ID NO: 1267287 - DNA, 15 bp, Homo sapiens
ggcaatgaataatct

SEQ ID NO: 1267288 - DNA, 15 bp, Homo sapiens
cggcaatgaataatc

SEQ ID NO: 1267289 - DNA, 15 bp, Homo sapiens
gcggcaatgaataat

SEQ ID NO: 1267290 - DNA, 15 bp, Homo sapiens
agcggcaatgaataa

SEQ ID NO: 1267291 - DNA, 15 bp, Homo sapiens
aagcggcaatgaata

SEQ ID NO: 1267292 - DNA, 15 bp, Homo sapiens
aaagcggcaatgaat

SEQ ID NO: 1267293 - DNA, 15 bp, Homo sapiens
taaagcggcaatgaa

SEQ ID NO: 1267294 - DNA, 15 bp, Homo sapiens
ctaaagcggcaatga

SEQ ID NO: 1267295 - DNA, 15 bp, Homo sapiens
gctaaagcggcaatg

SEQ ID NO: 1267296 - DNA, 15 bp, Homo sapiens
agctaaagcggcaat

SEQ ID NO: 1267297 - DNA, 15 bp, Homo sapiens
cagctaaagcggcaa

SEQ ID NO: 1267298 - DNA, 15 bp, Homo sapiens
acagctaaagcggca

SEQ ID NO: 1267299 - DNA, 15 bp, Homo sapiens
tacagctaaagcggc

SEQ ID NO: 1267300 - DNA, 15 bp, Homo sapiens
ttacagctaaagcgg

SEQ ID NO: 1267301 - DNA, 15 bp, Homo sapiens
attacagctaaagcg

SEQ ID NO: 1267302 - DNA, 15 bp, Homo sapiens
tattacagctaaagc

SEQ ID NO: 1267303 - DNA, 15 bp, Homo sapiens
ttattacagctaaag

SEQ ID NO: 1267304 - DNA, 15 bp, Homo sapiens
gttattacagctaaa

SEQ ID NO: 1267305 - DNA, 15 bp, Homo sapiens
tgttattacagctaa

SEQ ID NO: 1267306 - DNA, 15 bp, Homo sapiens
ttgttattacagcta

SEQ ID NO: 1267307 - DNA, 15 bp, Homo sapiens
tttgttattacagct

SEQ ID NO: 1267308 - DNA, 15 bp, Homo sapiens
ttttgttattacagc

SEQ ID NO: 1267309 - DNA, 15 bp, Homo sapiens
cttttgttattacag

SEQ ID NO: 1267310 - DNA, 15 bp, Homo sapiens
tcttttgttattaca

SEQ ID NO: 1267311 - DNA, 15 bp, Homo sapiens
atcttttgttattac

SEQ ID NO: 1267312 - DNA, 15 bp, Homo sapiens
aatcttttgttatta

SEQ ID NO: 1267313 - DNA, 15 bp, Homo sapiens
caatcttttgttatt

SEQ ID NO: 1267314 - DNA, 15 bp, Homo sapiens
ccaatcttttgttat

SEQ ID NO: 1267315 - DNA, 15 bp, Homo sapiens
tccaatcttttgtta

SEQ ID NO: 1267316 - DNA, 15 bp, Homo sapiens
ttccaatcttttgtt

SEQ ID NO: 1267317 - DNA, 15 bp, Homo sapiens
tttccaatcttttgt

SEQ ID NO: 1267318 - DNA, 15 bp, Homo sapiens
gtttccaatcttttg

SEQ ID NO: 1267319 - DNA, 15 bp, Homo sapiens
tgtttccaatctttt

SEQ ID NO: 1267320 - DNA, 15 bp, Homo sapiens
ttgtttccaatcttt

SEQ ID NO: 1267321 - DNA, 15 bp, Homo sapiens
gttgtttccaatctt

SEQ ID NO: 1267322 - DNA, 15 bp, Homo sapiens
ggttgtttccaatct

SEQ ID NO: 1267323 - DNA, 15 bp, Homo sapiens
aggttgtttccaatc

SEQ ID NO: 1267324 - DNA, 15 bp, Homo sapiens
taggttgtttccaat

SEQ ID NO: 1267325 - DNA, 15 bp, Homo sapiens
ttaggttgtttccaa

SEQ ID NO: 1267326 - DNA, 15 bp, Homo sapiens
ttttaggttgtttcc

SEQ ID NO: 1267327 - DNA, 15 bp, Homo sapiens
attttaggttgtttc

SEQ ID NO: 1267328 - DNA, 15 bp, Homo sapiens
aattttaggttgttt

SEQ ID NO: 1267329 - DNA, 15 bp, Homo sapiens
gaattttaggttgtt

SEQ ID NO: 1267330 - DNA, 15 bp, Homo sapiens
ggaattttaggttgt

SEQ ID NO: 1267331 - DNA, 15 bp, Homo sapiens
gggaattttaggttg

SEQ ID NO: 1267332 - DNA, 15 bp, Homo sapiens
agggaattttaggtt

SEQ ID NO: 1267333 - DNA, 15 bp, Homo sapiens
aagggaattttaggt

SEQ ID NO: 1267334 - DNA, 15 bp, Homo sapiens
taagggaattttagg

SEQ ID NO: 1267335 - DNA, 15 bp, Homo sapiens
ttaagggaattttag

SEQ ID NO: 1267336 - DNA, 15 bp, Homo sapiens
attaagggaatttta

SEQ ID NO: 1267337 - DNA, 15 bp, Homo sapiens
cattaagggaatttt

SEQ ID NO: 1267338 - DNA, 15 bp, Homo sapiens
ccattaagggaattt

SEQ ID NO: 1267339 - DNA, 15 bp, Homo sapiens
cccattaagggaatt

SEQ ID NO: 1267340 - DNA, 15 bp, Homo sapiens
ccccattaagggaat

SEQ ID NO: 1267341 - DNA, 15 bp, Homo sapiens
cccccattaagggaa

SEQ ID NO: 1267342 - DNA, 15 bp, Homo sapiens
tcccccattaaggga

SEQ ID NO: 1267343 - DNA, 15 bp, Homo sapiens
gtcccccattaaggg

SEQ ID NO: 1267344 - DNA, 15 bp, Homo sapiens
agtcccccattaagg

SEQ ID NO: 1267345 - DNA, 15 bp, Homo sapiens
cagtcccccattaag

SEQ ID NO: 1267346 - DNA, 15 bp, Homo sapiens
ccagtcccccattaa

SEQ ID NO: 1267347 - DNA, 15 bp, Homo sapiens
accagtcccccatta

SEQ ID NO: 1267348 - DNA, 15 bp, Homo sapiens
aaccagtcccccatt

SEQ ID NO: 1267349 - DNA, 15 bp, Homo sapiens
taaccagtcccccat

SEQ ID NO: 1267350 - DNA, 15 bp, Homo sapiens
ttaaccagtccccca

SEQ ID NO: 1267351 - DNA, 15 bp, Homo sapiens
tttaaccagtccccc

SEQ ID NO: 1267352 - DNA, 15 bp, Homo sapiens
atttaaccagtcccc

SEQ ID NO: 1267353 - DNA, 15 bp, Homo sapiens
tatttaaccagtccc

SEQ ID NO: 1267354 - DNA, 15 bp, Homo sapiens
gtatttaaccagtcc

SEQ ID NO: 1267355 - DNA, 15 bp, Homo sapiens
tgtatttaaccagtc

SEQ ID NO: 1267356 - DNA, 15 bp, Homo sapiens
atgtatttaaccagt

SEQ ID NO: 1267357 - DNA, 15 bp, Homo sapiens
catgtatttaaccag

SEQ ID NO: 1267358 - DNA, 15 bp, Homo sapiens
ccatgtatttaacca

SEQ ID NO: 1267359 - DNA, 15 bp, Homo sapiens
tccatgtatttaacc

SEQ ID NO: 1267360 - DNA, 15 bp, Homo sapiens
ttccatgtatttaac

SEQ ID NO: 1267361 - DNA, 15 bp, Homo sapiens
attccatgtatttaa

SEQ ID NO: 1267362 - DNA, 15 bp, Homo sapiens
aattccatgtattta

SEQ ID NO: 1267363 - DNA, 15 bp, Homo sapiens
gaattccatgtattt

SEQ ID NO: 1267364 - DNA, 15 bp, Homo sapiens
cgaattccatgtatt

SEQ ID NO: 1267365 - DNA, 15 bp, Homo sapiens
tcgaattccatgtat

SEQ ID NO: 1267366 - DNA, 15 bp, Homo sapiens
ttcgaattccatgta

SEQ ID NO: 1267367 - DNA, 15 bp, Homo sapiens
cttcgaattccatgt

SEQ ID NO: 1267368 - DNA, 15 bp, Homo sapiens
ccttcgaattccatg

SEQ ID NO: 1267369 - DNA, 15 bp, Homo sapiens
gccttcgaattccat

SEQ ID NO: 1267370 - DNA, 15 bp, Homo sapiens
agccttcgaattcca

SEQ ID NO: 1267371 - DNA, 15 bp, Homo sapiens
tagccttcgaattcc

SEQ ID NO: 1267372 - DNA, 15 bp, Homo sapiens
ttagccttcgaattc

SEQ ID NO: 1267373 - DNA, 15 bp, Homo sapiens
tttagccttcgaatt

SEQ ID NO: 1267374 - DNA, 15 bp, Homo sapiens
ttttagccttcgaat

SEQ ID NO: 1267375 - DNA, 15 bp, Homo sapiens
tttttagccttcgaa

SEQ ID NO: 1267376 - DNA, 15 bp, Homo sapiens
ctttttagccttcga

SEQ ID NO: 1267377 - DNA, 15 bp, Homo sapiens
cctttttagccttcg

SEQ ID NO: 1267378 - DNA, 15 bp, Homo sapiens
tcctttttagccttc

SEQ ID NO: 1267379 - DNA, 15 bp, Homo sapiens
ttcctttttagcctt

SEQ ID NO: 1267380 - DNA, 15 bp, Homo sapiens
cttcctttttagcct

SEQ ID NO: 1267381 - DNA, 15 bp, Homo sapiens
tcttcctttttagcc

SEQ ID NO: 1267382 - DNA, 15 bp, Homo sapiens
ttcttcctttttagc

SEQ ID NO: 1267383 - DNA, 15 bp, Homo sapiens
cttcttcctttttag

SEQ ID NO: 1267384 - DNA, 15 bp, Homo sapiens
gcttcttccttttta

SEQ ID NO: 1267385 - DNA, 15 bp, Homo sapiens
tgcttcttccttttt

SEQ ID NO: 1267386 - DNA, 15 bp, Homo sapiens
ttgcttcttcctttt

SEQ ID NO: 1267387 - DNA, 15 bp, Homo sapiens
attgcttcttccttt

SEQ ID NO: 1267388 - DNA, 15 bp, Homo sapiens
aattgcttcttcctt

SEQ ID NO: 1267389 - DNA, 15 bp, Homo sapiens
gaattgcttcttcct

SEQ ID NO: 1267390 - DNA, 15 bp, Homo sapiens
agaattgcttcttcc

SEQ ID NO: 1267391 - DNA, 15 bp, Homo sapiens
cagaattgcttcttc

SEQ ID NO: 1267392 - DNA, 15 bp, Homo sapiens
gcagaattgcttctt

SEQ ID NO: 1267393 - DNA, 15 bp, Homo sapiens
tgcagaattgcttct

SEQ ID NO: 1267394 - DNA, 15 bp, Homo sapiens
atgcagaattgcttc

SEQ ID NO: 1267395 - DNA, 15 bp, Homo sapiens
gatgcagaattgctt

SEQ ID NO: 1267396 - DNA, 15 bp, Homo sapiens
agatgcagaattgct

SEQ ID NO: 1267397 - DNA, 15 bp, Homo sapiens
gagatgcagaattgc

SEQ ID NO: 1267398 - DNA, 15 bp, Homo sapiens
ggagatgcagaattg

SEQ ID NO: 1267399 - DNA, 15 bp, Homo sapiens
aggagatgcagaatt

SEQ ID NO: 1267400 - DNA, 15 bp, Homo sapiens
caggagatgcagaat

SEQ ID NO: 1267401 - DNA, 15 bp, Homo sapiens
tcaggagatgcagaa

SEQ ID NO: 1267402 - DNA, 15 bp, Homo sapiens
atcaggagatgcaga

SEQ ID NO: 1267403 - DNA, 15 bp, Homo sapiens
tatcaggagatgcag

SEQ ID NO: 1267404 - DNA, 15 bp, Homo sapiens
ttatcaggagatgca

SEQ ID NO: 1267405 - DNA, 15 bp, Homo sapiens
cttatcaggagatgc

SEQ ID NO: 1267406 - DNA, 15 bp, Homo sapiens
tcttatcaggagatg

SEQ ID NO: 1267407 - DNA, 15 bp, Homo sapiens
ttcttatcaggagat

SEQ ID NO: 1267408 - DNA, 15 bp, Homo sapiens
tttcttatcaggaga

SEQ ID NO: 1267409 - DNA, 15 bp, Homo sapiens
atttcttatcaggag

SEQ ID NO: 1267410 - DNA, 15 bp, Homo sapiens
catttcttatcagga

SEQ ID NO: 1267411 - DNA, 15 bp, Homo sapiens
tcatttcttatcagg

SEQ ID NO: 1267412 - DNA, 15 bp, Homo sapiens
atcatttcttatcag

SEQ ID NO: 1267413 - DNA, 15 bp, Homo sapiens
aatcatttcttatca

SEQ ID NO: 1267414 - DNA, 15 bp, Homo sapiens
caatcatttcttatc

SEQ ID NO: 1267415 - DNA, 15 bp, Homo sapiens
gcaatcatttcttat

SEQ ID NO: 1267416 - DNA, 15 bp, Homo sapiens
agcaatcatttctta

SEQ ID NO: 1267417 - DNA, 15 bp, Homo sapiens
tagcaatcatttctt

SEQ ID NO: 1267418 - DNA, 15 bp, Homo sapiens
ttagcaatcatttct

SEQ ID NO: 1267419 - DNA, 15 bp, Homo sapiens
tttagcaatcatttc

SEQ ID NO: 1267420 - DNA, 15 bp, Homo sapiens
ttttagcaatcattt

SEQ ID NO: 1267421 - DNA, 15 bp, Homo sapiens
gttttagcaatcatt

SEQ ID NO: 1267422 - DNA, 15 bp, Homo sapiens
ggttttagcaatcat

SEQ ID NO: 1267423 - DNA, 15 bp, Homo sapiens
gggttttagcaatca

SEQ ID NO: 1267424 - DNA, 15 bp, Homo sapiens
tgggttttagcaatc

SEQ ID NO: 1267425 - DNA, 15 bp, Homo sapiens
atgggttttagcaat

SEQ ID NO: 1267426 - DNA, 15 bp, Homo sapiens
aatgggttttagcaa

SEQ ID NO: 1267427 - DNA, 15 bp, Homo sapiens
gaatgggttttagca

SEQ ID NO: 1267428 - DNA, 15 bp, Homo sapiens
tgaatgggttttagc

SEQ ID NO: 1267429 - DNA, 15 bp, Homo sapiens
ttgaatgggttttag

SEQ ID NO: 1267430 - DNA, 15 bp, Homo sapiens
attgaatgggtttta

SEQ ID NO: 1267431 - DNA, 15 bp, Homo sapiens
tattgaatgggtttt

SEQ ID NO: 1267432 - DNA, 15 bp, Homo sapiens
ttattgaatgggttt

SEQ ID NO: 1267433 - DNA, 15 bp, Homo sapiens
tttattgaatgggtt

SEQ ID NO: 1267434 - DNA, 15 bp, Homo sapiens
ctttattgaatgggt

SEQ ID NO: 1267435 - DNA, 15 bp, Homo sapiens
tctttattgaatggg

SEQ ID NO: 1267436 - DNA, 15 bp, Homo sapiens
ttctttattgaatgg

SEQ ID NO: 1267437 - DNA, 15 bp, Homo sapiens
tttctttattgaatg

SEQ ID NO: 1267438 - DNA, 15 bp, Homo sapiens
ctttctttattgaat

SEQ ID NO: 1267439 - DNA, 15 bp, Homo sapiens
gctttctttattgaa

SEQ ID NO: 1267440 - DNA, 15 bp, Homo sapiens
tgctttctttattga

SEQ ID NO: 1267441 - DNA, 15 bp, Homo sapiens
ttgctttctttattg

SEQ ID NO: 1267442 - DNA, 15 bp, Homo sapiens
tttgctttctttatt

SEQ ID NO: 1267443 - DNA, 15 bp, Homo sapiens
ttttgctttctttat

SEQ ID NO: 1267444 - DNA, 15 bp, Homo sapiens
attttgctttcttta

SEQ ID NO: 1267445 - DNA, 15 bp, Homo sapiens
cattttgctttcttt

SEQ ID NO: 1267446 - DNA, 15 bp, Homo sapiens
acattttgctttctt

SEQ ID NO: 1267447 - DNA, 15 bp, Homo sapiens
tacattttgctttct

SEQ ID NO: 1267448 - DNA, 15 bp, Homo sapiens
ctacattttgctttc

SEQ ID NO: 1267449 - DNA, 15 bp, Homo sapiens
tctacattttgcttt

SEQ ID NO: 1267450 - DNA, 15 bp, Homo sapiens
ttctacattttgctt

SEQ ID NO: 1267451 - DNA, 15 bp, Homo sapiens
gttctacattttgct

SEQ ID NO: 1267452 - DNA, 15 bp, Homo sapiens
tgttctacattttgc

SEQ ID NO: 1267453 - DNA, 15 bp, Homo sapiens
ctgttctacattttg

SEQ ID NO: 1267454 - DNA, 15 bp, Homo sapiens
actgttctacatttt

SEQ ID NO: 1267455 - DNA, 15 bp, Homo sapiens
cactgttctacattt

SEQ ID NO: 1267456 - DNA, 15 bp, Homo sapiens
acactgttctacatt

SEQ ID NO: 1267457 - DNA, 15 bp, Homo sapiens
tacactgttctacat

SEQ ID NO: 1267458 - DNA, 15 bp, Homo sapiens
ttacactgttctaca

SEQ ID NO: 1267459 - DNA, 15 bp, Homo sapiens
gttacactgttctac

SEQ ID NO: 1267460 - DNA, 15 bp, Homo sapiens
agttacactgttcta

SEQ ID NO: 1267461 - DNA, 15 bp, Homo sapiens
cagttacactgttct

SEQ ID NO: 1267462 - DNA, 15 bp, Homo sapiens
tcagttacactgttc

SEQ ID NO: 1267463 - DNA, 15 bp, Homo sapiens
atcagttacactgtt

SEQ ID NO: 1267464 - DNA, 15 bp, Homo sapiens
catcagttacactgt

SEQ ID NO: 1267465 - DNA, 15 bp, Homo sapiens
acatcagttacactg

SEQ ID NO: 1267466 - DNA, 15 bp, Homo sapiens
cacatcagttacact

SEQ ID NO: 1267467 - DNA, 15 bp, Homo sapiens
gcacatcagttacac

SEQ ID NO: 1267468 - DNA, 15 bp, Homo sapiens
ggcacatcagttaca

SEQ ID NO: 1267469 - DNA, 15 bp, Homo sapiens
tggcacatcagttac

SEQ ID NO: 1267470 - DNA, 15 bp, Homo sapiens
atggcacatcagtta

SEQ ID NO: 1267471 - DNA, 15 bp, Homo sapiens
gatggcacatcagtt

SEQ ID NO: 1267472 - DNA, 15 bp, Homo sapiens
tgatggcacatcagt

SEQ ID NO: 1267473 - DNA, 15 bp, Homo sapiens
gtgatggcacatcag

SEQ ID NO: 1267474 - DNA, 15 bp, Homo sapiens
agtgatggcacatca

SEQ ID NO: 1267475 - DNA, 15 bp, Homo sapiens
aagtgatggcacatc

SEQ ID NO: 1267476 - DNA, 15 bp, Homo sapiens
taagtgatggcacat

SEQ ID NO: 1267477 - DNA, 15 bp, Homo sapiens
ataagtgatggcaca

SEQ ID NO: 1267478 - DNA, 15 bp, Homo sapiens
cataagtgatggcac

SEQ ID NO: 1267479 - DNA, 15 bp, Homo sapiens
acataagtgatggca

SEQ ID NO: 1267480 - DNA, 15 bp, Homo sapiens
tacataagtgatggc

SEQ ID NO: 1267481 - DNA, 15 bp, Homo sapiens
ctacataagtgatgg

SEQ ID NO: 1267482 - DNA, 15 bp, Homo sapiens
tctacataagtgatg

SEQ ID NO: 1267483 - DNA, 15 bp, Homo sapiens
ttctacataagtgat

SEQ ID NO: 1267484 - DNA, 15 bp, Homo sapiens
cttctacataagtga

SEQ ID NO: 1267485 - DNA, 15 bp, Homo sapiens
tcttctacataagtg

SEQ ID NO: 1267486 - DNA, 15 bp, Homo sapiens
ttcttctacataagt

SEQ ID NO: 1267487 - DNA, 15 bp, Homo sapiens
attcttctacataag

SEQ ID NO: 1267488 - DNA, 15 bp, Homo sapiens
tattcttctacataa

SEQ ID NO: 1267489 - DNA, 15 bp, Homo sapiens
ttattcttctacata

SEQ ID NO: 1267490 - DNA, 15 bp, Homo sapiens
tttattcttctacat

SEQ ID NO: 1267491 - DNA, 15 bp, Homo sapiens
ttttattcttctaca

SEQ ID NO: 1267492 - DNA, 15 bp, Homo sapiens
tttttattcttctac

SEQ ID NO: 1267493 - DNA, 15 bp, Homo sapiens
atttttattcttcta

SEQ ID NO: 1267494 - DNA, 15 bp, Homo sapiens
tatttttattcttct

SEQ ID NO: 1267495 - DNA, 15 bp, Homo sapiens
ttatttttattcttc

SEQ ID NO: 1267496 - DNA, 15 bp, Homo sapiens
tttatttttattctt

SEQ ID NO: 1267497 - DNA, 15 bp, Homo sapiens
atttatttttattct

SEQ ID NO: 1267498 - DNA, 15 bp, Homo sapiens
gatttatttttattc

SEQ ID NO: 1267499 - DNA, 15 bp, Homo sapiens
ggatttatttttatt

SEQ ID NO: 1267500 - DNA, 15 bp, Homo sapiens
aggatttatttttat

SEQ ID NO: 1267501 - DNA, 15 bp, Homo sapiens
taggatttattttta

SEQ ID NO: 1267502 - DNA, 15 bp, Homo sapiens
ctaggatttattttt

SEQ ID NO: 1267503 - DNA, 15 bp, Homo sapiens
cctaggatttatttt

SEQ ID NO: 1267504 - DNA, 15 bp, Homo sapiens
tcctaggatttattt

SEQ ID NO: 1267505 - DNA, 15 bp, Homo sapiens
ttcctaggatttatt

SEQ ID NO: 1267506 - DNA, 15 bp, Homo sapiens
tttcctaggatttat

SEQ ID NO: 1267507 - DNA, 15 bp, Homo sapiens
atttcctaggattta

SEQ ID NO: 1267508 - DNA, 15 bp, Homo sapiens
tatttcctaggattt

SEQ ID NO: 1267509 - DNA, 15 bp, Homo sapiens
atatttcctaggatt

SEQ ID NO: 1267510 - DNA, 15 bp, Homo sapiens
catatttcctaggat

SEQ ID NO: 1267511 - DNA, 15 bp, Homo sapiens
tcatatttcctagga

SEQ ID NO: 1267512 - DNA, 15 bp, Homo sapiens
ttcatatttcctagg

SEQ ID NO: 1267513 - DNA, 15 bp, Homo sapiens
attcatatttcctag

SEQ ID NO: 1267514 - DNA, 15 bp, Homo sapiens
tattcatatttccta

SEQ ID NO: 1267515 - DNA, 15 bp, Homo sapiens
atattcatatttcct

SEQ ID NO: 1267516 - DNA, 15 bp, Homo sapiens
aatattcatatttcc

SEQ ID NO: 1267517 - DNA, 15 bp, Homo sapiens
aaatattcatatttc

SEQ ID NO: 1267518 - DNA, 15 bp, Homo sapiens
aaaatattcatattt

SEQ ID NO: 1267519 - DNA, 15 bp, Homo sapiens
caaaatattcatatt

SEQ ID NO: 1267520 - DNA, 15 bp, Homo sapiens
gcaaaatattcatat

SEQ ID NO: 1267521 - DNA, 15 bp, Homo sapiens
agcaaaatattcata

SEQ ID NO: 1267522 - DNA, 15 bp, Homo sapiens
tagcaaaatattcat

SEQ ID NO: 1267523 - DNA, 15 bp, Homo sapiens
ttagcaaaatattca

SEQ ID NO: 1267524 - DNA, 15 bp, Homo sapiens
attagcaaaatattc

SEQ ID NO: 1267525 - DNA, 15 bp, Homo sapiens
tattagcaaaatatt

SEQ ID NO: 1267526 - DNA, 15 bp, Homo sapiens
gtattagcaaaatat

SEQ ID NO: 1267527 - DNA, 15 bp, Homo sapiens
tgtattagcaaaata

SEQ ID NO: 1267528 - DNA, 15 bp, Homo sapiens
atgtattagcaaaat

SEQ ID NO: 1267529 - DNA, 15 bp, Homo sapiens
catgtattagcaaaa

SEQ ID NO: 1267530 - DNA, 15 bp, Homo sapiens
gcatgtattagcaaa

SEQ ID NO: 1267531 - DNA, 15 bp, Homo sapiens
tgcatgtattagcaa

SEQ ID NO: 1267532 - DNA, 15 bp, Homo sapiens
atgcatgtattagca

SEQ ID NO: 1267533 - DNA, 15 bp, Homo sapiens
catgcatgtattagc

SEQ ID NO: 1267534 - DNA, 15 bp, Homo sapiens
tcatgcatgtattag

SEQ ID NO: 1267535 - DNA, 15 bp, Homo sapiens
ttcatgcatgtatta

SEQ ID NO: 1267536 - DNA, 15 bp, Homo sapiens
cttcatgcatgtatt

SEQ ID NO: 1267537 - DNA, 15 bp, Homo sapiens
acttcatgcatgtat

SEQ ID NO: 1267538 - DNA, 15 bp, Homo sapiens
tacttcatgcatgta

SEQ ID NO: 1267539 - DNA, 15 bp, Homo sapiens
atacttcatgcatgt

SEQ ID NO: 1267540 - DNA, 15 bp, Homo sapiens
aatacttcatgcatg

SEQ ID NO: 1267541 - DNA, 15 bp, Homo sapiens
aaatacttcatgcat

SEQ ID NO: 1267542 - DNA, 15 bp, Homo sapiens
gaaatacttcatgca

SEQ ID NO: 1267543 - DNA, 15 bp, Homo sapiens
agaaatacttcatgc

SEQ ID NO: 1267544 - DNA, 15 bp, Homo sapiens
tagaaatacttcatg

SEQ ID NO: 1267545 - DNA, 15 bp, Homo sapiens
ctagaaatacttcat

SEQ ID NO: 1267546 - DNA, 15 bp, Homo sapiens
tctagaaatacttca

SEQ ID NO: 1267547 - DNA, 15 bp, Homo sapiens
ttctagaaatacttc

SEQ ID NO: 1267548 - DNA, 15 bp, Homo sapiens
cttctagaaatactt

SEQ ID NO: 1267549 - DNA, 15 bp, Homo sapiens
ccttctagaaatact

SEQ ID NO: 1267550 - DNA, 15 bp, Homo sapiens
tccttctagaaatac

SEQ ID NO: 1267551 - DNA, 15 bp, Homo sapiens
ttccttctagaaata

SEQ ID NO: 1267552 - DNA, 15 bp, Homo sapiens
attccttctagaaat

SEQ ID NO: 1267553 - DNA, 15 bp, Homo sapiens
gattccttctagaaa

SEQ ID NO: 1267554 - DNA, 15 bp, Homo sapiens
tgattccttctagaa

SEQ ID NO: 1267555 - DNA, 15 bp, Homo sapiens
gtgattccttctaga

SEQ ID NO: 1267556 - DNA, 15 bp, Homo sapiens
tgtgattccttctag

SEQ ID NO: 1267557 - DNA, 15 bp, Homo sapiens
ttgtgattccttcta

SEQ ID NO: 1267558 - DNA, 15 bp, Homo sapiens
cttgtgattccttct

SEQ ID NO: 1267559 - DNA, 15 bp, Homo sapiens
tcttgtgattccttc

SEQ ID NO: 1267560 - DNA, 15 bp, Homo sapiens
ttcttgtgattcctt

SEQ ID NO: 1267561 - DNA, 15 bp, Homo sapiens
gttcttgtgattcct

SEQ ID NO: 1267562 - DNA, 15 bp, Homo sapiens
ggttcttgtgattcc

SEQ ID NO: 1267563 - DNA, 15 bp, Homo sapiens
gggttcttgtgattc

SEQ ID NO: 1267564 - DNA, 15 bp, Homo sapiens
tgggttcttgtgatt

SEQ ID NO: 1267565 - DNA, 15 bp, Homo sapiens
ctgggttcttgtgat

SEQ ID NO: 1267566 - DNA, 15 bp, Homo sapiens
actgggttcttgtga

SEQ ID NO: 1267567 - DNA, 15 bp, Homo sapiens
tactgggttcttgtg

SEQ ID NO: 1267568 - DNA, 15 bp, Homo sapiens
ctactgggttcttgt

SEQ ID NO: 1267569 - DNA, 15 bp, Homo sapiens
actactgggttcttg

SEQ ID NO: 1267570 - DNA, 15 bp, Homo sapiens
aactactgggttctt

SEQ ID NO: 1267571 - DNA, 15 bp, Homo sapiens
taactactgggttct

SEQ ID NO: 1267572 - DNA, 15 bp, Homo sapiens
gtaactactgggttc

SEQ ID NO: 1267573 - DNA, 15 bp, Homo sapiens
ggtaactactgggtt

SEQ ID NO: 1267574 - DNA, 15 bp, Homo sapiens
gggtaactactgggt

SEQ ID NO: 1267575 - DNA, 15 bp, Homo sapiens
ggggtaactactggg

SEQ ID NO: 1267576 - DNA, 15 bp, Homo sapiens
aggggtaactactgg

SEQ ID NO: 1267577 - DNA, 15 bp, Homo sapiens
taggggtaactactg

SEQ ID NO: 1267578 - DNA, 15 bp, Homo sapiens
ttaggggtaactact

SEQ ID NO: 1267579 - DNA, 15 bp, Homo sapiens
attaggggtaactac

SEQ ID NO: 1267580 - DNA, 15 bp, Homo sapiens
cattaggggtaacta

SEQ ID NO: 1267581 - DNA, 15 bp, Homo sapiens
ccattaggggtaact

SEQ ID NO: 1267582 - DNA, 15 bp, Homo sapiens
gccattaggggtaac

SEQ ID NO: 1267583 - DNA, 15 bp, Homo sapiens
agccattaggggtaa

SEQ ID NO: 1267584 - DNA, 15 bp, Homo sapiens
gagccattaggggta

SEQ ID NO: 1267585 - DNA, 15 bp, Homo sapiens
tgagccattaggggt

SEQ ID NO: 1267586 - DNA, 15 bp, Homo sapiens
gtgagccattagggg

SEQ ID NO: 1267587 - DNA, 15 bp, Homo sapiens
tgtgagccattaggg

SEQ ID NO: 1267588 - DNA, 15 bp, Homo sapiens
gtgtgagccattagg

SEQ ID NO: 1267589 - DNA, 15 bp, Homo sapiens
tgtgtgagccattag

SEQ ID NO: 1267590 - DNA, 15 bp, Homo sapiens
atgtgtgagccatta

SEQ ID NO: 1267591 - DNA, 15 bp, Homo sapiens
catgtgtgagccatt

SEQ ID NO: 1267592 - DNA, 15 bp, Homo sapiens
ccatgtgtgagccat

SEQ ID NO: 1267593 - DNA, 15 bp, Homo sapiens
accatgtgtgagcca

SEQ ID NO: 1267594 - DNA, 15 bp, Homo sapiens
caccatgtgtgagcc

SEQ ID NO: 1267595 - DNA, 15 bp, Homo sapiens
ccaccatgtgtgagc

SEQ ID NO: 1267596 - DNA, 15 bp, Homo sapiens
tccaccatgtgtgag

SEQ ID NO: 1267597 - DNA, 15 bp, Homo sapiens
ttccaccatgtgtga

SEQ ID NO: 1267598 - DNA, 15 bp, Homo sapiens
cttccaccatgtgtg

SEQ ID NO: 1267599 - DNA, 15 bp, Homo sapiens
acttccaccatgtgt

SEQ ID NO: 1267600 - DNA, 15 bp, Homo sapiens
cacttccaccatgtg

SEQ ID NO: 1267601 - DNA, 15 bp, Homo sapiens
acacttccaccatgt

SEQ ID NO: 1267602 - DNA, 15 bp, Homo sapiens
tacacttccaccatg

SEQ ID NO: 1267603 - DNA, 15 bp, Homo sapiens
ttacacttccaccat

SEQ ID NO: 1267604 - DNA, 15 bp, Homo sapiens
tttacacttccacca

SEQ ID NO: 1267605 - DNA, 15 bp, Homo sapiens
atttacacttccacc

SEQ ID NO: 1267606 - DNA, 15 bp, Homo sapiens
aatttacacttccac

SEQ ID NO: 1267607 - DNA, 15 bp, Homo sapiens
aaatttacacttcca

SEQ ID NO: 1267608 - DNA, 15 bp, Homo sapiens
aaaatttacacttcc

SEQ ID NO: 1267609 - DNA, 15 bp, Homo sapiens
aaaaatttacacttc

SEQ ID NO: 1267610 - DNA, 15 bp, Homo sapiens
aaaaaatttacactt

SEQ ID NO: 1267611 - DNA, 15 bp, Homo sapiens
caaaaaaaatttaca

SEQ ID NO: 1267612 - DNA, 15 bp, Homo sapiens
acaaaaaaaatttac

SEQ ID NO: 1267613 - DNA, 15 bp, Homo sapiens
tacaaaaaaaattta

SEQ ID NO: 1267614 - DNA, 15 bp, Homo sapiens
ttacaaaaaaaattt

SEQ ID NO: 1267615 - DNA, 15 bp, Homo sapiens
attacaaaaaaaatt

SEQ ID NO: 1267616 - DNA, 15 bp, Homo sapiens
aattacaaaaaaaat

SEQ ID NO: 1267617 - DNA, 15 bp, Homo sapiens
caaaattacaaaaaa

SEQ ID NO: 1267618 - DNA, 15 bp, Homo sapiens
acaaaattacaaaaa

SEQ ID NO: 1267619 - DNA, 15 bp, Homo sapiens
aacaaaattacaaaa

SEQ ID NO: 1267620 - DNA, 15 bp, Homo sapiens
taacaaaattacaaa

SEQ ID NO: 1267621 - DNA, 15 bp, Homo sapiens
gtaacaaaattacaa

SEQ ID NO: 1267622 - DNA, 15 bp, Homo sapiens
agtaacaaaattaca

SEQ ID NO: 1267623 - DNA, 15 bp, Homo sapiens
tagtaacaaaattac

SEQ ID NO: 1267624 - DNA, 15 bp, Homo sapiens
ttagtaacaaaatta

SEQ ID NO: 1267625 - DNA, 15 bp, Homo sapiens
cttagtaacaaaatt

SEQ ID NO: 1267626 - DNA, 15 bp, Homo sapiens
acttagtaacaaaat

SEQ ID NO: 1267627 - DNA, 15 bp, Homo sapiens
tacttagtaacaaaa

SEQ ID NO: 1267628 - DNA, 15 bp, Homo sapiens
gtacttagtaacaaa

SEQ ID NO: 1267629 - DNA, 15 bp, Homo sapiens
agtacttagtaacaa

SEQ ID NO: 1267630 - DNA, 15 bp, Homo sapiens
gagtacttagtaaca

SEQ ID NO: 1267631 - DNA, 15 bp, Homo sapiens
agagtacttagtaac

SEQ ID NO: 1267632 - DNA, 15 bp, Homo sapiens
aagagtacttagtaa

SEQ ID NO: 1267633 - DNA, 15 bp, Homo sapiens
aaagagtacttagta

SEQ ID NO: 1267634 - DNA, 15 bp, Homo sapiens
caaagagtacttagt

SEQ ID NO: 1267635 - DNA, 15 bp, Homo sapiens
acaaagagtacttag

SEQ ID NO: 1267636 - DNA, 15 bp, Homo sapiens
aacaaagagtactta

SEQ ID NO: 1267637 - DNA, 15 bp, Homo sapiens
taacaaagagtactt

SEQ ID NO: 1267638 - DNA, 15 bp, Homo sapiens
ataacaaagagtact

SEQ ID NO: 1267639 - DNA, 15 bp, Homo sapiens
gataacaaagagtac

SEQ ID NO: 1267640 - DNA, 15 bp, Homo sapiens
agataacaaagagta

SEQ ID NO: 1267641 - DNA, 15 bp, Homo sapiens
aagataacaaagagt

SEQ ID NO: 1267642 - DNA, 15 bp, Homo sapiens
aaagataacaaagag

SEQ ID NO: 1267643 - DNA, 15 bp, Homo sapiens
aaaagataacaaaga

SEQ ID NO: 1267644 - DNA, 15 bp, Homo sapiens
caaaagataacaaag

SEQ ID NO: 1267645 - DNA, 15 bp, Homo sapiens
tcaaaagataacaaa

SEQ ID NO: 1267646 - DNA, 15 bp, Homo sapiens
ttcaaaagataacaa

SEQ ID NO: 1267647 - DNA, 15 bp, Homo sapiens
attcaaaagataaca

SEQ ID NO: 1267648 - DNA, 15 bp, Homo sapiens
aattcaaaagataac

SEQ ID NO: 1267649 - DNA, 15 bp, Homo sapiens
aaattcaaaagataa

SEQ ID NO: 1267650 - DNA, 15 bp, Homo sapiens
aaaattcaaaagata

SEQ ID NO: 1267651 - DNA, 15 bp, Homo sapiens
caaaattcaaaagat

SEQ ID NO: 1267652 - DNA, 15 bp, Homo sapiens
acaaaattcaaaaga

SEQ ID NO: 1267653 - DNA, 15 bp, Homo sapiens
cacaaaattcaaaag

SEQ ID NO: 1267654 - DNA, 15 bp, Homo sapiens
gcacaaaattcaaaa

SEQ ID NO: 1267655 - DNA, 15 bp, Homo sapiens
ggcacaaaattcaaa

SEQ ID NO: 1267656 - DNA, 15 bp, Homo sapiens
tggcacaaaattcaa

SEQ ID NO: 1267657 - DNA, 15 bp, Homo sapiens
atggcacaaaattca

SEQ ID NO: 1267658 - DNA, 15 bp, Homo sapiens
catggcacaaaattc

SEQ ID NO: 1267659 - DNA, 15 bp, Homo sapiens
ccatggcacaaaatt

SEQ ID NO: 1267660 - DNA, 15 bp, Homo sapiens
cccatggcacaaaat

SEQ ID NO: 1267661 - DNA, 15 bp, Homo sapiens
acccatggcacaaaa

SEQ ID NO: 1267662 - DNA, 15 bp, Homo sapiens
tacccatggcacaaa

SEQ ID NO: 1267663 - DNA, 15 bp, Homo sapiens
atacccatggcacaa

SEQ ID NO: 1267664 - DNA, 15 bp, Homo sapiens
catacccatggcaca

SEQ ID NO: 1267665 - DNA, 15 bp, Homo sapiens
acatacccatggcac

SEQ ID NO: 1267666 - DNA, 15 bp, Homo sapiens
cacatacccatggca

SEQ ID NO: 1267667 - DNA, 15 bp, Homo sapiens
acacatacccatggc

SEQ ID NO: 1267668 - DNA, 15 bp, Homo sapiens
aacacatacccatgg

SEQ ID NO: 1267669 - DNA, 15 bp, Homo sapiens
taacacatacccatg

SEQ ID NO: 1267670 - DNA, 15 bp, Homo sapiens
gtaacacatacccat

SEQ ID NO: 1267671 - DNA, 15 bp, Homo sapiens
ggtaacacataccca

SEQ ID NO: 1267672 - DNA, 15 bp, Homo sapiens
aggtaacacataccc

SEQ ID NO: 1267673 - DNA, 15 bp, Homo sapiens
taggtaacacatacc

SEQ ID NO: 1267674 - DNA, 15 bp, Homo sapiens
ataggtaacacatac

SEQ ID NO: 1267675 - DNA, 15 bp, Homo sapiens
cataggtaacacata

SEQ ID NO: 1267676 - DNA, 15 bp, Homo sapiens
acataggtaacacat

SEQ ID NO: 1267677 - DNA, 15 bp, Homo sapiens
tacataggtaacaca

SEQ ID NO: 1267678 - DNA, 15 bp, Homo sapiens
ttacataggtaacac

SEQ ID NO: 1267679 - DNA, 15 bp, Homo sapiens
tttacataggtaaca

SEQ ID NO: 1267680 - DNA, 15 bp, Homo sapiens
ttttacataggtaac

SEQ ID NO: 1267681 - DNA, 15 bp, Homo sapiens
tttttacataggtaa

SEQ ID NO: 1267682 - DNA, 15 bp, Homo sapiens
gtttttacataggta

SEQ ID NO: 1267683 - DNA, 15 bp, Homo sapiens
agtttttacataggt

SEQ ID NO: 1267684 - DNA, 15 bp, Homo sapiens
tagtttttacatagg

SEQ ID NO: 1267685 - DNA, 15 bp, Homo sapiens
ctagtttttacatag

SEQ ID NO: 1267686 - DNA, 15 bp, Homo sapiens
tctagtttttacata

SEQ ID NO: 1267687 - DNA, 15 bp, Homo sapiens
ttctagtttttacat

SEQ ID NO: 1267688 - DNA, 15 bp, Homo sapiens
tttctagtttttaca

SEQ ID NO: 1267689 - DNA, 15 bp, Homo sapiens
gtttctagtttttac

SEQ ID NO: 1267690 - DNA, 15 bp, Homo sapiens
agtttctagttttta

SEQ ID NO: 1267691 - DNA, 15 bp, Homo sapiens
aagtttctagttttt

SEQ ID NO: 1267692 - DNA, 15 bp, Homo sapiens
taagtttctagtttt

SEQ ID NO: 1267693 - DNA, 15 bp, Homo sapiens
ttaagtttctagttt

SEQ ID NO: 1267694 - DNA, 15 bp, Homo sapiens
gttaagtttctagtt

SEQ ID NO: 1267695 - DNA, 15 bp, Homo sapiens
tgttaagtttctagt

SEQ ID NO: 1267696 - DNA, 15 bp, Homo sapiens
atgttaagtttctag

SEQ ID NO: 1267697 - DNA, 15 bp, Homo sapiens
tatgttaagtttcta

SEQ ID NO: 1267698 - DNA, 15 bp, Homo sapiens
atatgttaagtttct

SEQ ID NO: 1267699 - DNA, 15 bp, Homo sapiens
tatatgttaagtttc

SEQ ID NO: 1267700 - DNA, 15 bp, Homo sapiens
ttatatgttaagttt

SEQ ID NO: 1267701 - DNA, 15 bp, Homo sapiens
gttatatgttaagtt

SEQ ID NO: 1267702 - DNA, 15 bp, Homo sapiens
tgttatatgttaagt

SEQ ID NO: 1267703 - DNA, 15 bp, Homo sapiens
atgttatatgttaag

SEQ ID NO: 1267704 - DNA, 15 bp, Homo sapiens
aatgttatatgttaa

SEQ ID NO: 1267705 - DNA, 15 bp, Homo sapiens
aaatgttatatgtta

SEQ ID NO: 1267706 - DNA, 15 bp, Homo sapiens
aaaatgttatatgtt

SEQ ID NO: 1267707 - DNA, 15 bp, Homo sapiens
taaaatgttatatgt

SEQ ID NO: 1267708 - DNA, 15 bp, Homo sapiens
ttaaaatgttatatg

SEQ ID NO: 1267709 - DNA, 15 bp, Homo sapiens
tttaaaatgttatat

SEQ ID NO: 1267710 - DNA, 15 bp, Homo sapiens
ttttaaaatgttata

SEQ ID NO: 1267711 - DNA, 15 bp, Homo sapiens
gttttaaaatgttat

SEQ ID NO: 1267712 - DNA, 15 bp, Homo sapiens
tgttttaaaatgtta

SEQ ID NO: 1267713 - DNA, 15 bp, Homo sapiens
ttgttttaaaatgtt

SEQ ID NO: 1267714 - DNA, 15 bp, Homo sapiens
attgttttaaaatgt

SEQ ID NO: 1267715 - DNA, 15 bp, Homo sapiens
cattgttttaaaatg

SEQ ID NO: 1267716 - DNA, 15 bp, Homo sapiens
ccattgttttaaaat

SEQ ID NO: 1267717 - DNA, 15 bp, Homo sapiens
gccattgttttaaaa

SEQ ID NO: 1267718 - DNA, 15 bp, Homo sapiens
agccattgttttaaa

SEQ ID NO: 1267719 - DNA, 15 bp, Homo sapiens
cagccattgttttaa

SEQ ID NO: 1267720 - DNA, 15 bp, Homo sapiens
gcagccattgtttta

SEQ ID NO: 1267721 - DNA, 15 bp, Homo sapiens
cgcagccattgtttt

SEQ ID NO: 1267722 - DNA, 15 bp, Homo sapiens
acgcagccattgttt

SEQ ID NO: 1267723 - DNA, 15 bp, Homo sapiens
cacgcagccattgtt

SEQ ID NO: 1267724 - DNA, 15 bp, Homo sapiens
acacgcagccattgt

SEQ ID NO: 1267725 - DNA, 15 bp, Homo sapiens
cacacgcagccattg

SEQ ID NO: 1267726 - DNA, 15 bp, Homo sapiens
ccacacgcagccatt

SEQ ID NO: 1267727 - DNA, 15 bp, Homo sapiens
accacacgcagccat

SEQ ID NO: 1267728 - DNA, 15 bp, Homo sapiens
caccacacgcagcca

SEQ ID NO: 1267729 - DNA, 15 bp, Homo sapiens
ccaccacacgcagcc

SEQ ID NO: 1267730 - DNA, 15 bp, Homo sapiens
gccaccacacgcagc

SEQ ID NO: 1267731 - DNA, 15 bp, Homo sapiens
agccaccacacgcag

SEQ ID NO: 1267732 - DNA, 15 bp, Homo sapiens
gagccaccacacgca

SEQ ID NO: 1267733 - DNA, 15 bp, Homo sapiens
tgagccaccacacgc

SEQ ID NO: 1267734 - DNA, 15 bp, Homo sapiens
atgagccaccacacg

SEQ ID NO: 1267735 - DNA, 15 bp, Homo sapiens
ggaattacaggcatg

SEQ ID NO: 1267736 - DNA, 15 bp, Homo sapiens
aggaattacaggcat

SEQ ID NO: 1267737 - DNA, 15 bp, Homo sapiens
caggaattacaggca

SEQ ID NO: 1267738 - DNA, 15 bp, Homo sapiens
acaggaattacaggc

SEQ ID NO: 1267739 - DNA, 15 bp, Homo sapiens
cacaggaattacagg

SEQ ID NO: 1267740 - DNA, 15 bp, Homo sapiens
gcacaggaattacag

SEQ ID NO: 1267741 - DNA, 15 bp, Homo sapiens
agcacaggaattaca

SEQ ID NO: 1267742 - DNA, 15 bp, Homo sapiens
aagcacaggaattac

SEQ ID NO: 1267743 - DNA, 15 bp, Homo sapiens
aaagcacaggaatta

SEQ ID NO: 1267744 - DNA, 15 bp, Homo sapiens
taaagcacaggaatt

SEQ ID NO: 1267745 - DNA, 15 bp, Homo sapiens
ctaaagcacaggaat

SEQ ID NO: 1267746 - DNA, 15 bp, Homo sapiens
cctaaagcacaggaa

SEQ ID NO: 1267747 - DNA, 15 bp, Homo sapiens
tcctaaagcacagga

SEQ ID NO: 1267748 - DNA, 15 bp, Homo sapiens
ctcctaaagcacagg

SEQ ID NO: 1267749 - DNA, 15 bp, Homo sapiens
cctcctaaagcacag

SEQ ID NO: 1267750 - DNA, 15 bp, Homo sapiens
gcctcctaaagcaca

SEQ ID NO: 1267751 - DNA, 15 bp, Homo sapiens
ggcctcctaaagcac

SEQ ID NO: 1267752 - DNA, 15 bp, Homo sapiens
tggcctcctaaagca

SEQ ID NO: 1267753 - DNA, 15 bp, Homo sapiens
ctggcctcctaaagc

SEQ ID NO: 1267754 - DNA, 15 bp, Homo sapiens
cctggcctcctaaag

SEQ ID NO: 1267755 - DNA, 15 bp, Homo sapiens
tcctggcctcctaaa

SEQ ID NO: 1267756 - DNA, 15 bp, Homo sapiens
ctcctggcctcctaa

SEQ ID NO: 1267757 - DNA, 15 bp, Homo sapiens
actcctggcctccta

SEQ ID NO: 1267758 - DNA, 15 bp, Homo sapiens
aactcctggcctcct

SEQ ID NO: 1267759 - DNA, 15 bp, Homo sapiens
gaactcctggcctcc

SEQ ID NO: 1267760 - DNA, 15 bp, Homo sapiens
gtgaactcctggcct

SEQ ID NO: 1267761 - DNA, 15 bp, Homo sapiens
tgtgaactcctggcc

SEQ ID NO: 1267762 - DNA, 15 bp, Homo sapiens
ttgtgaactcctggc

SEQ ID NO: 1267763 - DNA, 15 bp, Homo sapiens
attgtgaactcctgg

SEQ ID NO: 1267764 - DNA, 15 bp, Homo sapiens
gattgtgaactcctg

SEQ ID NO: 1267765 - DNA, 15 bp, Homo sapiens
tgattgtgaactcct

SEQ ID NO: 1267766 - DNA, 15 bp, Homo sapiens
ctgattgtgaactcc

SEQ ID NO: 1267767 - DNA, 15 bp, Homo sapiens
actgattgtgaactc

SEQ ID NO: 1267768 - DNA, 15 bp, Homo sapiens
gactgattgtgaact

SEQ ID NO: 1267769 - DNA, 15 bp, Homo sapiens
agactgattgtgaac

SEQ ID NO: 1267770 - DNA, 15 bp, Homo sapiens
cagactgattgtgaa

SEQ ID NO: 1267771 - DNA, 15 bp, Homo sapiens
ccagactgattgtga

SEQ ID NO: 1267772 - DNA, 15 bp, Homo sapiens
cccagactgattgtg

SEQ ID NO: 1267773 - DNA, 15 bp, Homo sapiens
gcccagactgattgt

SEQ ID NO: 1267774 - DNA, 15 bp, Homo sapiens
tgcccagactgattg

SEQ ID NO: 1267775 - DNA, 15 bp, Homo sapiens
ttgcccagactgatt

SEQ ID NO: 1267776 - DNA, 15 bp, Homo sapiens
attgcccagactgat

SEQ ID NO: 1267777 - DNA, 15 bp, Homo sapiens
tattgcccagactga

SEQ ID NO: 1267778 - DNA, 15 bp, Homo sapiens
atattgcccagactg

SEQ ID NO: 1267779 - DNA, 15 bp, Homo sapiens
tatattgcccagact

SEQ ID NO: 1267780 - DNA, 15 bp, Homo sapiens
ctatattgcccagac

SEQ ID NO: 1267781 - DNA, 15 bp, Homo sapiens
actatattgcccaga

SEQ ID NO: 1267782 - DNA, 15 bp, Homo sapiens
cactatattgcccag

SEQ ID NO: 1267783 - DNA, 15 bp, Homo sapiens
tcactatattgccca

SEQ ID NO: 1267784 - DNA, 15 bp, Homo sapiens
ggtctcactatattg

SEQ ID NO: 1267785 - DNA, 15 bp, Homo sapiens
aggtctcactatatt

SEQ ID NO: 1267786 - DNA, 15 bp, Homo sapiens
aaggtctcactatat

SEQ ID NO: 1267787 - DNA, 15 bp, Homo sapiens
caaggtctcactata

SEQ ID NO: 1267788 - DNA, 15 bp, Homo sapiens
acaaggtctcactat

SEQ ID NO: 1267789 - DNA, 15 bp, Homo sapiens
gacaaggtctcacta

SEQ ID NO: 1267790 - DNA, 15 bp, Homo sapiens
agacaaggtctcact

SEQ ID NO: 1267791 - DNA, 15 bp, Homo sapiens
gagacaaggtctcac

SEQ ID NO: 1267792 - DNA, 15 bp, Homo sapiens
agagacaaggtctca

SEQ ID NO: 1267793 - DNA, 15 bp, Homo sapiens
tagagacaaggtctc

SEQ ID NO: 1267794 - DNA, 15 bp, Homo sapiens
gtagagacaaggtct

SEQ ID NO: 1267795 - DNA, 15 bp, Homo sapiens
tgtagagacaaggtc

SEQ ID NO: 1267796 - DNA, 15 bp, Homo sapiens
tgttttttgtagaga

SEQ ID NO: 1267797 - DNA, 15 bp, Homo sapiens
ttgttttttgtagag

SEQ ID NO: 1267798 - DNA, 15 bp, Homo sapiens
attgttttttgtaga

SEQ ID NO: 1267799 - DNA, 15 bp, Homo sapiens
aattgttttttgtag

SEQ ID NO: 1267800 - DNA, 15 bp, Homo sapiens
gaattgttttttgta

SEQ ID NO: 1267801 - DNA, 15 bp, Homo sapiens
agaattgttttttgt

SEQ ID NO: 1267802 - DNA, 15 bp, Homo sapiens
tagaattgttttttg

SEQ ID NO: 1267803 - DNA, 15 bp, Homo sapiens
ttagaattgtttttt

SEQ ID NO: 1267804 - DNA, 15 bp, Homo sapiens
tttagaattgttttt

SEQ ID NO: 1267805 - DNA, 15 bp, Homo sapiens
ttttagaattgtttt

SEQ ID NO: 1267806 - DNA, 15 bp, Homo sapiens
gttttagaattgttt

SEQ ID NO: 1267807 - DNA, 15 bp, Homo sapiens
tgttttagaattgtt

SEQ ID NO: 1267808 - DNA, 15 bp, Homo sapiens
atgttttagaattgt

SEQ ID NO: 1267809 - DNA, 15 bp, Homo sapiens
aatgttttagaattg

SEQ ID NO: 1267810 - DNA, 15 bp, Homo sapiens
aaatgttttagaatt

SEQ ID NO: 1267811 - DNA, 15 bp, Homo sapiens
gaaatgttttagaat

SEQ ID NO: 1267812 - DNA, 15 bp, Homo sapiens
tgaaatgttttagaa

SEQ ID NO: 1267813 - DNA, 15 bp, Homo sapiens
ttgaaatgttttaga

SEQ ID NO: 1267814 - DNA, 15 bp, Homo sapiens
tttgaaatgttttag

SEQ ID NO: 1267815 - DNA, 15 bp, Homo sapiens
ttttgaaatgtttta

SEQ ID NO: 1267816 - DNA, 15 bp, Homo sapiens
gttttgaaatgtttt

SEQ ID NO: 1267817 - DNA, 15 bp, Homo sapiens
ggttttgaaatgttt

SEQ ID NO: 1267818 - DNA, 15 bp, Homo sapiens
tggttttgaaatgtt

SEQ ID NO: 1267819 - DNA, 15 bp, Homo sapiens
ttggttttgaaatgt

SEQ ID NO: 1267820 - DNA, 15 bp, Homo sapiens
tttggttttgaaatg

SEQ ID NO: 1267821 - DNA, 15 bp, Homo sapiens
atttggttttgaaat

SEQ ID NO: 1267822 - DNA, 15 bp, Homo sapiens
catttggttttgaaa

SEQ ID NO: 1267823 - DNA, 15 bp, Homo sapiens
tcatttggttttgaa

SEQ ID NO: 1267824 - DNA, 15 bp, Homo sapiens
ttcatttggttttga

SEQ ID NO: 1267825 - DNA, 15 bp, Homo sapiens
tttcatttggttttg

SEQ ID NO: 1267826 - DNA, 15 bp, Homo sapiens
atttcatttggtttt

SEQ ID NO: 1267827 - DNA, 15 bp, Homo sapiens
gatttcatttggttt

SEQ ID NO: 1267828 - DNA, 15 bp, Homo sapiens
agatttcatttggtt

SEQ ID NO: 1267829 - DNA, 15 bp, Homo sapiens
tagatttcatttggt

SEQ ID NO: 1267830 - DNA, 15 bp, Homo sapiens
atagatttcatttgg

SEQ ID NO: 1267831 - DNA, 15 bp, Homo sapiens
catagatttcatttg

SEQ ID NO: 1267832 - DNA, 15 bp, Homo sapiens
tcatagatttcattt

SEQ ID NO: 1267833 - DNA, 15 bp, Homo sapiens
ctcatagatttcatt

SEQ ID NO: 1267834 - DNA, 15 bp, Homo sapiens
gctcatagatttcat

SEQ ID NO: 1267835 - DNA, 15 bp, Homo sapiens
ggctcatagatttca

SEQ ID NO: 1267836 - DNA, 15 bp, Homo sapiens
tggctcatagatttc

SEQ ID NO: 1267837 - DNA, 15 bp, Homo sapiens
gtggctcatagattt

SEQ ID NO: 1267838 - DNA, 15 bp, Homo sapiens
agtggctcatagatt

SEQ ID NO: 1267839 - DNA, 15 bp, Homo sapiens
aagtggctcatagat

SEQ ID NO: 1267840 - DNA, 15 bp, Homo sapiens
aaagtggctcataga

SEQ ID NO: 1267841 - DNA, 15 bp, Homo sapiens
taaagtggctcatag

SEQ ID NO: 1267842 - DNA, 15 bp, Homo sapiens
ataaagtggctcata

SEQ ID NO: 1267843 - DNA, 15 bp, Homo sapiens
aataaagtggctcat

SEQ ID NO: 1267844 - DNA, 15 bp, Homo sapiens
aaataaagtggctca

SEQ ID NO: 1267845 - DNA, 15 bp, Homo sapiens
caaataaagtggctc

SEQ ID NO: 1267846 - DNA, 15 bp, Homo sapiens
gcaaataaagtggct

SEQ ID NO: 1267847 - DNA, 15 bp, Homo sapiens
ggcaaataaagtggc

SEQ ID NO: 1267848 - DNA, 15 bp, Homo sapiens
aggcaaataaagtgg

SEQ ID NO: 1267849 - DNA, 15 bp, Homo sapiens
aaggcaaataaagtg

SEQ ID NO: 1267850 - DNA, 15 bp, Homo sapiens
aaaggcaaataaagt

SEQ ID NO: 1267851 - DNA, 15 bp, Homo sapiens
aaaaggcaaataaag

SEQ ID NO: 1267852 - DNA, 15 bp, Homo sapiens
aaaaaggcaaataaa

SEQ ID NO: 1267853 - DNA, 15 bp, Homo sapiens
aaaaaaggcaaataa

SEQ ID NO: 1267854 - DNA, 15 bp, Homo sapiens
aaaaaaaggcaaata

SEQ ID NO: 1267855 - DNA, 15 bp, Homo sapiens
aaaaaaaaggcaaat

SEQ ID NO: 1267856 - DNA, 15 bp, Homo sapiens
aaaaaaaaaggcaaa

SEQ ID NO: 1267857 - DNA, 15 bp, Homo sapiens
caccaaaaaaaaaaa

SEQ ID NO: 1267858 - DNA, 15 bp, Homo sapiens
ccaccaaaaaaaaaa

SEQ ID NO: 1267859 - DNA, 15 bp, Homo sapiens
accaccaaaaaaaaa

SEQ ID NO: 1267860 - DNA, 15 bp, Homo sapiens
gaccaccaaaaaaaa

SEQ ID NO: 1267861 - DNA, 15 bp, Homo sapiens
tgaccaccaaaaaaa

SEQ ID NO: 1267862 - DNA, 15 bp, Homo sapiens
atgaccaccaaaaaa

SEQ ID NO: 1267863 - DNA, 15 bp, Homo sapiens
aatgaccaccaaaaa

SEQ ID NO: 1267864 - DNA, 15 bp, Homo sapiens
aaatgaccaccaaaa

SEQ ID NO: 1267865 - DNA, 15 bp, Homo sapiens
aaaatgaccaccaaa

SEQ ID NO: 1267866 - DNA, 15 bp, Homo sapiens
caaaatgaccaccaa

SEQ ID NO: 1267867 - DNA, 15 bp, Homo sapiens
ccaaaatgaccacca

SEQ ID NO: 1267868 - DNA, 15 bp, Homo sapiens
cccaaaatgaccacc

SEQ ID NO: 1267869 - DNA, 15 bp, Homo sapiens
acccaaaatgaccac

SEQ ID NO: 1267870 - DNA, 15 bp, Homo sapiens
aacccaaaatgacca

SEQ ID NO: 1267871 - DNA, 15 bp, Homo sapiens
aaacccaaaatgacc

SEQ ID NO: 1267872 - DNA, 15 bp, Homo sapiens
aaaacccaaaatgac

SEQ ID NO: 1267873 - DNA, 15 bp, Homo sapiens
caaaacccaaaatga

SEQ ID NO: 1267874 - DNA, 15 bp, Homo sapiens
gcaaaacccaaaatg

SEQ ID NO: 1267875 - DNA, 15 bp, Homo sapiens
agcaaaacccaaaat

SEQ ID NO: 1267876 - DNA, 15 bp, Homo sapiens
aagcaaaacccaaaa

SEQ ID NO: 1267877 - DNA, 15 bp, Homo sapiens
aaagcaaaacccaaa

SEQ ID NO: 1267878 - DNA, 15 bp, Homo sapiens
aaaagcaaaacccaa

SEQ ID NO: 1267879 - DNA, 15 bp, Homo sapiens
aaaaagcaaaaccca

SEQ ID NO: 1267880 - DNA, 15 bp, Homo sapiens
aaaaaagcaaaaccc

SEQ ID NO: 1267881 - DNA, 15 bp, Homo sapiens
aaaaaaagcaaaacc

SEQ ID NO: 1267882 - DNA, 15 bp, Homo sapiens
aaaaaaaagcaaaac

SEQ ID NO: 1267883 - DNA, 15 bp, Homo sapiens
aaaaaaaaagcaaaa

SEQ ID NO: 1267884 - DNA, 15 bp, Homo sapiens
aaaaaaaaaagcaaa

SEQ ID NO: 1267885 - DNA, 15 bp, Homo sapiens
aaaaaaaaaaagcaa

SEQ ID NO: 1267886 - DNA, 15 bp, Homo sapiens
aaaaaaaaaaaagca

SEQ ID NO: 1267887 - DNA, 15 bp, Homo sapiens
gctgaaaaaaaaaaa

SEQ ID NO: 1267888 - DNA, 15 bp, Homo sapiens
agctgaaaaaaaaaa

SEQ ID NO: 1267889 - DNA, 15 bp, Homo sapiens
cagctgaaaaaaaaa

SEQ ID NO: 1267890 - DNA, 15 bp, Homo sapiens
gcagctgaaaaaaaa

SEQ ID NO: 1267891 - DNA, 15 bp, Homo sapiens
ggcagctgaaaaaaa

SEQ ID NO: 1267892 - DNA, 15 bp, Homo sapiens
aggcagctgaaaaaa

SEQ ID NO: 1267893 - DNA, 15 bp, Homo sapiens
aaggcagctgaaaaa

SEQ ID NO: 1267894 - DNA, 15 bp, Homo sapiens
aaaggcagctgaaaa

SEQ ID NO: 1267895 - DNA, 15 bp, Homo sapiens
gaaaggcagctgaaa

SEQ ID NO: 1267896 - DNA, 15 bp, Homo sapiens
ggaaaggcagctgaa

SEQ ID NO: 1267897 - DNA, 15 bp, Homo sapiens
gggaaaggcagctga

SEQ ID NO: 1267898 - DNA, 15 bp, Homo sapiens
ggggaaaggcagctg

SEQ ID NO: 1267899 - DNA, 15 bp, Homo sapiens
aggggaaaggcagct

SEQ ID NO: 1267900 - DNA, 15 bp, Homo sapiens
aaggggaaaggcagc

SEQ ID NO: 1267901 - DNA, 15 bp, Homo sapiens
gaaggggaaaggcag

SEQ ID NO: 1267902 - DNA, 15 bp, Homo sapiens
agaaggggaaaggca

SEQ ID NO: 1267903 - DNA, 15 bp, Homo sapiens
aagaaggggaaaggc

SEQ ID NO: 1267904 - DNA, 15 bp, Homo sapiens
caagaaggggaaagg

SEQ ID NO: 1267905 - DNA, 15 bp, Homo sapiens
gcaagaaggggaaag

SEQ ID NO: 1267906 - DNA, 15 bp, Homo sapiens
agcaagaaggggaaa

SEQ ID NO: 1267907 - DNA, 15 bp, Homo sapiens
aagcaagaaggggaa

SEQ ID NO: 1267908 - DNA, 15 bp, Homo sapiens
aaagcaagaagggga

SEQ ID NO: 1267909 - DNA, 15 bp, Homo sapiens
caaagcaagaagggg

SEQ ID NO: 1267910 - DNA, 15 bp, Homo sapiens
acaaagcaagaaggg

SEQ ID NO: 1267911 - DNA, 15 bp, Homo sapiens
gacaaagcaagaagg

SEQ ID NO: 1267912 - DNA, 15 bp, Homo sapiens
agacaaagcaagaag

SEQ ID NO: 1267913 - DNA, 15 bp, Homo sapiens
tagacaaagcaagaa

SEQ ID NO: 1267914 - DNA, 15 bp, Homo sapiens
atagacaaagcaaga

SEQ ID NO: 1267915 - DNA, 15 bp, Homo sapiens
catagacaaagcaag

SEQ ID NO: 1267916 - DNA, 15 bp, Homo sapiens
acatagacaaagcaa

SEQ ID NO: 1267917 - DNA, 15 bp, Homo sapiens
aacatagacaaagca

SEQ ID NO: 1267918 - DNA, 15 bp, Homo sapiens
caacatagacaaagc

SEQ ID NO: 1267919 - DNA, 15 bp, Homo sapiens
tcaacatagacaaag

SEQ ID NO: 1267920 - DNA, 15 bp, Homo sapiens
atcaacatagacaaa

SEQ ID NO: 1267921 - DNA, 15 bp, Homo sapiens
catcaacatagacaa

SEQ ID NO: 1267922 - DNA, 15 bp, Homo sapiens
gcatcaacatagaca

SEQ ID NO: 1267923 - DNA, 15 bp, Homo sapiens
agcatcaacatagac

SEQ ID NO: 1267924 - DNA, 15 bp, Homo sapiens
aagcatcaacataga

SEQ ID NO: 1267925 - DNA, 15 bp, Homo sapiens
aaagcatcaacatag

SEQ ID NO: 1267926 - DNA, 15 bp, Homo sapiens
aaaagcatcaacata

SEQ ID NO: 1267927 - DNA, 15 bp, Homo sapiens
gaaaagcatcaacat

SEQ ID NO: 1267928 - DNA, 15 bp, Homo sapiens
agaaaagcatcaaca

SEQ ID NO: 1267929 - DNA, 15 bp, Homo sapiens
gagaaaagcatcaac

SEQ ID NO: 1267930 - DNA, 15 bp, Homo sapiens
agagaaaagcatcaa

SEQ ID NO: 1267931 - DNA, 15 bp, Homo sapiens
gagagaaaagcatca

SEQ ID NO: 1267932 - DNA, 15 bp, Homo sapiens
agagagaaaagcatc

SEQ ID NO: 1267933 - DNA, 15 bp, Homo sapiens
aagagagaaaagcat

SEQ ID NO: 1267934 - DNA, 15 bp, Homo sapiens
aaagagagaaaagca

SEQ ID NO: 1267935 - DNA, 15 bp, Homo sapiens
aaaagagagaaaagc

SEQ ID NO: 1267936 - DNA, 15 bp, Homo sapiens
aaaaagagagaaaag

SEQ ID NO: 1267937 - DNA, 15 bp, Homo sapiens
gaaaaagagagaaaa

SEQ ID NO: 1267938 - DNA, 15 bp, Homo sapiens
ggaaaaagagagaaa

SEQ ID NO: 1267939 - DNA, 15 bp, Homo sapiens
gggaaaaagagagaa

SEQ ID NO: 1267940 - DNA, 15 bp, Homo sapiens
agggaaaaagagaga

SEQ ID NO: 1267941 - DNA, 15 bp, Homo sapiens
aagggaaaaagagag

SEQ ID NO: 1267942 - DNA, 15 bp, Homo sapiens
gaagggaaaaagaga

SEQ ID NO: 1267943 - DNA, 15 bp, Homo sapiens
agaagggaaaaagag

SEQ ID NO: 1267944 - DNA, 15 bp, Homo sapiens
gagaagggaaaaaga

SEQ ID NO: 1267945 - DNA, 15 bp, Homo sapiens
ggagaagggaaaaag

SEQ ID NO: 1267946 - DNA, 15 bp, Homo sapiens
aggagaagggaaaaa

SEQ ID NO: 1267947 - DNA, 15 bp, Homo sapiens
gaggagaagggaaaa

SEQ ID NO: 1267948 - DNA, 15 bp, Homo sapiens
agaggagaagggaaa

SEQ ID NO: 1267949 - DNA, 15 bp, Homo sapiens
gagaggagaagggaa

SEQ ID NO: 1267950 - DNA, 15 bp, Homo sapiens
agagaggagaaggga

SEQ ID NO: 1267951 - DNA, 15 bp, Homo sapiens
cagagaggagaaggg

SEQ ID NO: 1267952 - DNA, 15 bp, Homo sapiens
acagagaggagaagg

SEQ ID NO: 1267953 - DNA, 15 bp, Homo sapiens
aacagagaggagaag

SEQ ID NO: 1267954 - DNA, 15 bp, Homo sapiens
aaacagagaggagaa

SEQ ID NO: 1267955 - DNA, 15 bp, Homo sapiens
gaaacagagaggaga

SEQ ID NO: 1267956 - DNA, 15 bp, Homo sapiens
ggaaacagagaggag

SEQ ID NO: 1267957 - DNA, 15 bp, Homo sapiens
gggaaacagagagga

SEQ ID NO: 1267958 - DNA, 15 bp, Homo sapiens
agggaaacagagagg

SEQ ID NO: 1267959 - DNA, 15 bp, Homo sapiens
aagggaaacagagag

SEQ ID NO: 1267960 - DNA, 15 bp, Homo sapiens
gcaagggaaacagag

SEQ ID NO: 1267961 - DNA, 15 bp, Homo sapiens
ggcaagggaaacaga

SEQ ID NO: 1267962 - DNA, 15 bp, Homo sapiens
gggcaagggaaacag

SEQ ID NO: 1267963 - DNA, 15 bp, Homo sapiens
ggggcaagggaaaca

SEQ ID NO: 1267964 - DNA, 15 bp, Homo sapiens
tggggcaagggaaac

SEQ ID NO: 1267965 - DNA, 15 bp, Homo sapiens
gtggggcaagggaaa

SEQ ID NO: 1267966 - DNA, 15 bp, Homo sapiens
ggtggggcaagggaa

SEQ ID NO: 1267967 - DNA, 15 bp, Homo sapiens
aggtggggcaaggga

SEQ ID NO: 1267968 - DNA, 15 bp, Homo sapiens
gaggtggggcaaggg

SEQ ID NO: 1267969 - DNA, 15 bp, Homo sapiens
agaggtggggcaagg

SEQ ID NO: 1267970 - DNA, 15 bp, Homo sapiens
cagaggtggggcaag

SEQ ID NO: 1267971 - DNA, 15 bp, Homo sapiens
acagaggtggggcaa

SEQ ID NO: 1267972 - DNA, 15 bp, Homo sapiens
gacagaggtggggca

SEQ ID NO: 1267973 - DNA, 15 bp, Homo sapiens
agacagaggtggggc

SEQ ID NO: 1267974 - DNA, 15 bp, Homo sapiens
tagacagaggtgggg

SEQ ID NO: 1267975 - DNA, 15 bp, Homo sapiens
ttagacagaggtggg

SEQ ID NO: 1267976 - DNA, 15 bp, Homo sapiens
attagacagaggtgg

SEQ ID NO: 1267977 - DNA, 15 bp, Homo sapiens
tattagacagaggtg

SEQ ID NO: 1267978 - DNA, 15 bp, Homo sapiens
gtattagacagaggt

SEQ ID NO: 1267979 - DNA, 15 bp, Homo sapiens
tgtattagacagagg

SEQ ID NO: 1267980 - DNA, 15 bp, Homo sapiens
atgtattagacagag

SEQ ID NO: 1267981 - DNA, 15 bp, Homo sapiens
gatgtattagacaga

SEQ ID NO: 1267982 - DNA, 15 bp, Homo sapiens
tgatgtattagacag

SEQ ID NO: 1267983 - DNA, 15 bp, Homo sapiens
ttgatgtattagaca

SEQ ID NO: 1267984 - DNA, 15 bp, Homo sapiens
gttgatgtattagac

SEQ ID NO: 1267985 - DNA, 15 bp, Homo sapiens
tgttgatgtattaga

SEQ ID NO: 1267986 - DNA, 15 bp, Homo sapiens
ttgttgatgtattag

SEQ ID NO: 1267987 - DNA, 15 bp, Homo sapiens
gttgttgatgtatta

SEQ ID NO: 1267988 - DNA, 15 bp, Homo sapiens
agttgttgatgtatt

SEQ ID NO: 1267989 - DNA, 15 bp, Homo sapiens
tagttgttgatgtat

SEQ ID NO: 1267990 - DNA, 15 bp, Homo sapiens
ttagttgttgatgta

SEQ ID NO: 1267991 - DNA, 15 bp, Homo sapiens
tttagttgttgatgt

SEQ ID NO: 1267992 - DNA, 15 bp, Homo sapiens
gtttagttgttgatg

SEQ ID NO: 1267993 - DNA, 15 bp, Homo sapiens
tgtttagttgttgat

SEQ ID NO: 1267994 - DNA, 15 bp, Homo sapiens
ttgtttagttgttga

SEQ ID NO: 1267995 - DNA, 15 bp, Homo sapiens
gttgtttagttgttg

SEQ ID NO: 1267996 - DNA, 15 bp, Homo sapiens
tgttgtttagttgtt

SEQ ID NO: 1267997 - DNA, 15 bp, Homo sapiens
ttgttgtttagttgt

SEQ ID NO: 1267998 - DNA, 15 bp, Homo sapiens
gttgttgtttagttg

SEQ ID NO: 1267999 - DNA, 15 bp, Homo sapiens
tgttgttgtttagtt

SEQ ID NO: 1268000 - DNA, 15 bp, Homo sapiens
ttgttgttgtttagt

SEQ ID NO: 1268001 - DNA, 15 bp, Homo sapiens
attgttgttgtttag

SEQ ID NO: 1268002 - DNA, 15 bp, Homo sapiens
aattgttgttgttta

SEQ ID NO: 1268003 - DNA, 15 bp, Homo sapiens
taattgttgttgttt

SEQ ID NO: 1268004 - DNA, 15 bp, Homo sapiens
ataattgttgttgtt

SEQ ID NO: 1268005 - DNA, 15 bp, Homo sapiens
gataattgttgttgt

SEQ ID NO: 1268006 - DNA, 15 bp, Homo sapiens
tgataattgttgttg

SEQ ID NO: 1268007 - DNA, 15 bp, Homo sapiens
atgataattgttgtt

SEQ ID NO: 1268008 - DNA, 15 bp, Homo sapiens
gatgataattgttgt

SEQ ID NO: 1268009 - DNA, 15 bp, Homo sapiens
agatgataattgttg

SEQ ID NO: 1268010 - DNA, 15 bp, Homo sapiens
tagatgataattgtt

SEQ ID NO: 1268011 - DNA, 15 bp, Homo sapiens
gtagatgataattgt

SEQ ID NO: 1268012 - DNA, 15 bp, Homo sapiens
ggtagatgataattg

SEQ ID NO: 1268013 - DNA, 15 bp, Homo sapiens
tggtagatgataatt

SEQ ID NO: 1268014 - DNA, 15 bp, Homo sapiens
ttggtagatgataat

SEQ ID NO: 1268015 - DNA, 15 bp, Homo sapiens
gttggtagatgataa

SEQ ID NO: 1268016 - DNA, 15 bp, Homo sapiens
tgttggtagatgata

SEQ ID NO: 1268017 - DNA, 15 bp, Homo sapiens
ttgttggtagatgat

SEQ ID NO: 1268018 - DNA, 15 bp, Homo sapiens
attgttggtagatga

SEQ ID NO: 1268019 - DNA, 15 bp, Homo sapiens
aattgttggtagatg

SEQ ID NO: 1268020 - DNA, 15 bp, Homo sapiens
aaattgttggtagat

SEQ ID NO: 1268021 - DNA, 15 bp, Homo sapiens
taaattgttggtaga

SEQ ID NO: 1268022 - DNA, 15 bp, Homo sapiens
ctaaattgttggtag

SEQ ID NO: 1268023 - DNA, 15 bp, Homo sapiens
gctaaattgttggta

SEQ ID NO: 1268024 - DNA, 15 bp, Homo sapiens
tgctaaattgttggt

SEQ ID NO: 1268025 - DNA, 15 bp, Homo sapiens
atgctaaattgttgg

SEQ ID NO: 1268026 - DNA, 15 bp, Homo sapiens
tatgctaaattgttg

SEQ ID NO: 1268027 - DNA, 15 bp, Homo sapiens
atatgctaaattgtt

SEQ ID NO: 1268028 - DNA, 15 bp, Homo sapiens
tatatgctaaattgt

SEQ ID NO: 1268029 - DNA, 15 bp, Homo sapiens
gtatatgctaaattg

SEQ ID NO: 1268030 - DNA, 15 bp, Homo sapiens
ggtatatgctaaatt

SEQ ID NO: 1268031 - DNA, 15 bp, Homo sapiens
tggtatatgctaaat

SEQ ID NO: 1268032 - DNA, 15 bp, Homo sapiens
ttggtatatgctaaa

SEQ ID NO: 1268033 - DNA, 15 bp, Homo sapiens
attggtatatgctaa

SEQ ID NO: 1268034 - DNA, 15 bp, Homo sapiens
tattggtatatgcta

SEQ ID NO: 1268035 - DNA, 15 bp, Homo sapiens
ttattggtatatgct

SEQ ID NO: 1268036 - DNA, 15 bp, Homo sapiens
gttattggtatatgc

SEQ ID NO: 1268037 - DNA, 15 bp, Homo sapiens
agttattggtatatg

SEQ ID NO: 1268038 - DNA, 15 bp, Homo sapiens
cagttattggtatat

SEQ ID NO: 1268039 - DNA, 15 bp, Homo sapiens
acagttattggtata

SEQ ID NO: 1268040 - DNA, 15 bp, Homo sapiens
gacagttattggtat

SEQ ID NO: 1268041 - DNA, 15 bp, Homo sapiens
ggacagttattggta

SEQ ID NO: 1268042 - DNA, 15 bp, Homo sapiens
aggacagttattggt

SEQ ID NO: 1268043 - DNA, 15 bp, Homo sapiens
aaggacagttattgg

SEQ ID NO: 1268044 - DNA, 15 bp, Homo sapiens
taaggacagttattg

SEQ ID NO: 1268045 - DNA, 15 bp, Homo sapiens
ttaaggacagttatt

SEQ ID NO: 1268046 - DNA, 15 bp, Homo sapiens
attaaggacagttat

SEQ ID NO: 1268047 - DNA, 15 bp, Homo sapiens
cattaaggacagtta

SEQ ID NO: 1268048 - DNA, 15 bp, Homo sapiens
ccattaaggacagtt

SEQ ID NO: 1268049 - DNA, 15 bp, Homo sapiens
tccattaaggacagt

SEQ ID NO: 1268050 - DNA, 15 bp, Homo sapiens
atccattaaggacag

SEQ ID NO: 1268051 - DNA, 15 bp, Homo sapiens
tatccattaaggaca

SEQ ID NO: 1268052 - DNA, 15 bp, Homo sapiens
ctatccattaaggac

SEQ ID NO: 1268053 - DNA, 15 bp, Homo sapiens
cctatccattaagga

SEQ ID NO: 1268054 - DNA, 15 bp, Homo sapiens
tcctatccattaagg

SEQ ID NO: 1268055 - DNA, 15 bp, Homo sapiens
atcctatccattaag

SEQ ID NO: 1268056 - DNA, 15 bp, Homo sapiens
aatcctatccattaa

SEQ ID NO: 1268057 - DNA, 15 bp, Homo sapiens
aaatcctatccatta

SEQ ID NO: 1268058 - DNA, 15 bp, Homo sapiens
gaaatcctatccatt

SEQ ID NO: 1268059 - DNA, 15 bp, Homo sapiens
tgaaatcctatccat

SEQ ID NO: 1268060 - DNA, 15 bp, Homo sapiens
atgaaatcctatcca

SEQ ID NO: 1268061 - DNA, 15 bp, Homo sapiens
aatgaaatcctatcc

SEQ ID NO: 1268062 - DNA, 15 bp, Homo sapiens
aaatgaaatcctatc

SEQ ID NO: 1268063 - DNA, 15 bp, Homo sapiens
taaatgaaatcctat

SEQ ID NO: 1268064 - DNA, 15 bp, Homo sapiens
ttaaatgaaatccta

SEQ ID NO: 1268065 - DNA, 15 bp, Homo sapiens
attaaatgaaatcct

SEQ ID NO: 1268066 - DNA, 15 bp, Homo sapiens
aattaaatgaaatcc

SEQ ID NO: 1268067 - DNA, 15 bp, Homo sapiens
gaattaaatgaaatc

SEQ ID NO: 1268068 - DNA, 15 bp, Homo sapiens
ggaattaaatgaaat

SEQ ID NO: 1268069 - DNA, 15 bp, Homo sapiens
gggaattaaatgaaa

SEQ ID NO: 1268070 - DNA, 15 bp, Homo sapiens
tgggaattaaatgaa

SEQ ID NO: 1268071 - DNA, 15 bp, Homo sapiens
gtgggaattaaatga

SEQ ID NO: 1268072 - DNA, 15 bp, Homo sapiens
tgtgggaattaaatg

SEQ ID NO: 1268073 - DNA, 15 bp, Homo sapiens
ttgtgggaattaaat

SEQ ID NO: 1268074 - DNA, 15 bp, Homo sapiens
gttgtgggaattaaa

SEQ ID NO: 1268075 - DNA, 15 bp, Homo sapiens
ggttgtgggaattaa

SEQ ID NO: 1268076 - DNA, 15 bp, Homo sapiens
tggttgtgggaatta

SEQ ID NO: 1268077 - DNA, 15 bp, Homo sapiens
gtggttgtgggaatt

SEQ ID NO: 1268078 - DNA, 15 bp, Homo sapiens
ggtggttgtgggaat

SEQ ID NO: 1268079 - DNA, 15 bp, Homo sapiens
gggtggttgtgggaa

SEQ ID NO: 1268080 - DNA, 15 bp, Homo sapiens
ggggtggttgtggga

SEQ ID NO: 1268081 - DNA, 15 bp, Homo sapiens
gggggtggttgtggg

SEQ ID NO: 1268082 - DNA, 15 bp, Homo sapiens
tgggggtggttgtgg

SEQ ID NO: 1268083 - DNA, 15 bp, Homo sapiens
ctgggggtggttgtg

SEQ ID NO: 1268084 - DNA, 15 bp, Homo sapiens
tctgggggtggttgt

SEQ ID NO: 1268085 - DNA, 15 bp, Homo sapiens
atctgggggtggttg

SEQ ID NO: 1268086 - DNA, 15 bp, Homo sapiens
catctgggggtggtt

SEQ ID NO: 1268087 - DNA, 15 bp, Homo sapiens
ccatctgggggtggt

SEQ ID NO: 1268088 - DNA, 15 bp, Homo sapiens
accatctgggggtgg

SEQ ID NO: 1268089 - DNA, 15 bp, Homo sapiens
aaccatctgggggtg

SEQ ID NO: 1268090 - DNA, 15 bp, Homo sapiens
taaccatctgggggt

SEQ ID NO: 1268091 - DNA, 15 bp, Homo sapiens
ttaaccatctggggg

SEQ ID NO: 1268092 - DNA, 15 bp, Homo sapiens
cttaaccatctgggg

SEQ ID NO: 1268093 - DNA, 15 bp, Homo sapiens
acttaaccatctggg

SEQ ID NO: 1268094 - DNA, 15 bp, Homo sapiens
tacttaaccatctgg

SEQ ID NO: 1268095 - DNA, 15 bp, Homo sapiens
atacttaaccatctg

SEQ ID NO: 1268096 - DNA, 15 bp, Homo sapiens
aatacttaaccatct

SEQ ID NO: 1268097 - DNA, 15 bp, Homo sapiens
taatacttaaccatc

SEQ ID NO: 1268098 - DNA, 15 bp, Homo sapiens
ataatacttaaccat

SEQ ID NO: 1268099 - DNA, 15 bp, Homo sapiens
aataatacttaacca

SEQ ID NO: 1268100 - DNA, 15 bp, Homo sapiens
aaataatacttaacc

SEQ ID NO: 1268101 - DNA, 15 bp, Homo sapiens
caaataatacttaac

SEQ ID NO: 1268102 - DNA, 15 bp, Homo sapiens
gcaaataatacttaa

SEQ ID NO: 1268103 - DNA, 15 bp, Homo sapiens
ggcaaataatactta

SEQ ID NO: 1268104 - DNA, 15 bp, Homo sapiens
tggcaaataatactt

SEQ ID NO: 1268105 - DNA, 15 bp, Homo sapiens
gtggcaaataatact

SEQ ID NO: 1268106 - DNA, 15 bp, Homo sapiens
tgtggcaaataatac

SEQ ID NO: 1268107 - DNA, 15 bp, Homo sapiens
ctgtggcaaataata

SEQ ID NO: 1268108 - DNA, 15 bp, Homo sapiens
actgtggcaaataat

SEQ ID NO: 1268109 - DNA, 15 bp, Homo sapiens
aactgtggcaaataa

SEQ ID NO: 1268110 - DNA, 15 bp, Homo sapiens
aaactgtggcaaata

SEQ ID NO: 1268111 - DNA, 15 bp, Homo sapiens
taaactgtggcaaat

SEQ ID NO: 1268112 - DNA, 15 bp, Homo sapiens
gtaaactgtggcaaa

SEQ ID NO: 1268113 - DNA, 15 bp, Homo sapiens
tgtaaactgtggcaa

SEQ ID NO: 1268114 - DNA, 15 bp, Homo sapiens
ttgtaaactgtggca

SEQ ID NO: 1268115 - DNA, 15 bp, Homo sapiens
tttgtaaactgtggc

SEQ ID NO: 1268116 - DNA, 15 bp, Homo sapiens
atttgtaaactgtgg

SEQ ID NO: 1268117 - DNA, 15 bp, Homo sapiens
catttgtaaactgtg

SEQ ID NO: 1268118 - DNA, 15 bp, Homo sapiens
tcatttgtaaactgt

SEQ ID NO: 1268119 - DNA, 15 bp, Homo sapiens
ctcatttgtaaactg

SEQ ID NO: 1268120 - DNA, 15 bp, Homo sapiens
cctcatttgtaaact

SEQ ID NO: 1268121 - DNA, 15 bp, Homo sapiens
tcctcatttgtaaac

SEQ ID NO: 1268122 - DNA, 15 bp, Homo sapiens
ttcctcatttgtaaa

SEQ ID NO: 1268123 - DNA, 15 bp, Homo sapiens
tttcctcatttgtaa

SEQ ID NO: 1268124 - DNA, 15 bp, Homo sapiens
gtttcctcatttgta

SEQ ID NO: 1268125 - DNA, 15 bp, Homo sapiens
cgtttcctcatttgt

SEQ ID NO: 1268126 - DNA, 15 bp, Homo sapiens
gcgtttcctcatttg

SEQ ID NO: 1268127 - DNA, 15 bp, Homo sapiens
tgcgtttcctcattt

SEQ ID NO: 1268128 - DNA, 15 bp, Homo sapiens
ctgcgtttcctcatt

SEQ ID NO: 1268129 - DNA, 15 bp, Homo sapiens
cctgcgtttcctcat

SEQ ID NO: 1268130 - DNA, 15 bp, Homo sapiens
gcctgcgtttcctca

SEQ ID NO: 1268131 - DNA, 15 bp, Homo sapiens
tgcctgcgtttcctc

SEQ ID NO: 1268132 - DNA, 15 bp, Homo sapiens
gtgcctgcgtttcct

SEQ ID NO: 1268133 - DNA, 15 bp, Homo sapiens
tgtgcctgcgtttcc

SEQ ID NO: 1268134 - DNA, 15 bp, Homo sapiens
ctgtgcctgcgtttc

SEQ ID NO: 1268135 - DNA, 15 bp, Homo sapiens
cctgtgcctgcgttt

SEQ ID NO: 1268136 - DNA, 15 bp, Homo sapiens
ccctgtgcctgcgtt

SEQ ID NO: 1268137 - DNA, 15 bp, Homo sapiens
tccctgtgcctgcgt

SEQ ID NO: 1268138 - DNA, 15 bp, Homo sapiens
ttccctgtgcctgcg

SEQ ID NO: 1268139 - DNA, 15 bp, Homo sapiens
attccctgtgcctgc

SEQ ID NO: 1268140 - DNA, 15 bp, Homo sapiens
aattccctgtgcctg

SEQ ID NO: 1268141 - DNA, 15 bp, Homo sapiens
caattccctgtgcct

SEQ ID NO: 1268142 - DNA, 15 bp, Homo sapiens
tcaattccctgtgcc

SEQ ID NO: 1268143 - DNA, 15 bp, Homo sapiens
ttcaattccctgtgc

SEQ ID NO: 1268144 - DNA, 15 bp, Homo sapiens
cttcaattccctgtg

SEQ ID NO: 1268145 - DNA, 15 bp, Homo sapiens
acttcaattccctgt

SEQ ID NO: 1268146 - DNA, 15 bp, Homo sapiens
cacttcaattccctg

SEQ ID NO: 1268147 - DNA, 15 bp, Homo sapiens
gcacttcaattccct

SEQ ID NO: 1268148 - DNA, 15 bp, Homo sapiens
ggcacttcaattccc

SEQ ID NO: 1268149 - DNA, 15 bp, Homo sapiens
aggcacttcaattcc

SEQ ID NO: 1268150 - DNA, 15 bp, Homo sapiens
aaggcacttcaattc

SEQ ID NO: 1268151 - DNA, 15 bp, Homo sapiens
caaggcacttcaatt

SEQ ID NO: 1268152 - DNA, 15 bp, Homo sapiens
gcaaggcacttcaat

SEQ ID NO: 1268153 - DNA, 15 bp, Homo sapiens
ggcaaggcacttcaa

SEQ ID NO: 1268154 - DNA, 15 bp, Homo sapiens
gggcaaggcacttca

SEQ ID NO: 1268155 - DNA, 15 bp, Homo sapiens
tgggcaaggcacttc

SEQ ID NO: 1268156 - DNA, 15 bp, Homo sapiens
ttgggcaaggcactt

SEQ ID NO: 1268157 - DNA, 15 bp, Homo sapiens
tttgggcaaggcact

SEQ ID NO: 1268158 - DNA, 15 bp, Homo sapiens
gtttgggcaaggcac

SEQ ID NO: 1268159 - DNA, 15 bp, Homo sapiens
ggtttgggcaaggca

SEQ ID NO: 1268160 - DNA, 15 bp, Homo sapiens
gggtttgggcaaggc

SEQ ID NO: 1268161 - DNA, 15 bp, Homo sapiens
tgggtttgggcaagg

SEQ ID NO: 1268162 - DNA, 15 bp, Homo sapiens
gtgggtttgggcaag

SEQ ID NO: 1268163 - DNA, 15 bp, Homo sapiens
tgtgggtttgggcaa

SEQ ID NO: 1268164 - DNA, 15 bp, Homo sapiens
gtgtgggtttgggca

SEQ ID NO: 1268165 - DNA, 15 bp, Homo sapiens
tgtgtgggtttgggc

SEQ ID NO: 1268166 - DNA, 15 bp, Homo sapiens
ttgtgtgggtttggg

SEQ ID NO: 1268167 - DNA, 15 bp, Homo sapiens
cttgtgtgggtttgg

SEQ ID NO: 1268168 - DNA, 15 bp, Homo sapiens
gcttgtgtgggtttg

SEQ ID NO: 1268169 - DNA, 15 bp, Homo sapiens
agcttgtgtgggttt

SEQ ID NO: 1268170 - DNA, 15 bp, Homo sapiens
cagcttgtgtgggtt

SEQ ID NO: 1268171 - DNA, 15 bp, Homo sapiens
acagcttgtgtgggt

SEQ ID NO: 1268172 - DNA, 15 bp, Homo sapiens
tacagcttgtgtggg

SEQ ID NO: 1268173 - DNA, 15 bp, Homo sapiens
ttacagcttgtgtgg

SEQ ID NO: 1268174 - DNA, 15 bp, Homo sapiens
tttacagcttgtgtg

SEQ ID NO: 1268175 - DNA, 15 bp, Homo sapiens
atttacagcttgtgt

SEQ ID NO: 1268176 - DNA, 15 bp, Homo sapiens
catttacagcttgtg

SEQ ID NO: 1268177 - DNA, 15 bp, Homo sapiens
tcatttacagcttgt

SEQ ID NO: 1268178 - DNA, 15 bp, Homo sapiens
atcatttacagcttg

SEQ ID NO: 1268179 - DNA, 15 bp, Homo sapiens
catcatttacagctt

SEQ ID NO: 1268180 - DNA, 15 bp, Homo sapiens
ccatcatttacagct

SEQ ID NO: 1268181 - DNA, 15 bp, Homo sapiens
tccatcatttacagc

SEQ ID NO: 1268182 - DNA, 15 bp, Homo sapiens
ctccatcatttacag

SEQ ID NO: 1268183 - DNA, 15 bp, Homo sapiens
gctccatcatttaca

SEQ ID NO: 1268184 - DNA, 15 bp, Homo sapiens
agctccatcatttac

SEQ ID NO: 1268185 - DNA, 15 bp, Homo sapiens
cagctccatcattta

SEQ ID NO: 1268186 - DNA, 15 bp, Homo sapiens
ccagctccatcattt

SEQ ID NO: 1268187 - DNA, 15 bp, Homo sapiens
cccagctccatcatt

SEQ ID NO: 1268188 - DNA, 15 bp, Homo sapiens
tcccagctccatcat

SEQ ID NO: 1268189 - DNA, 15 bp, Homo sapiens
atcccagctccatca

SEQ ID NO: 1268190 - DNA, 15 bp, Homo sapiens
aatcccagctccatc

SEQ ID NO: 1268191 - DNA, 15 bp, Homo sapiens
aaatcccagctccat

SEQ ID NO: 1268192 - DNA, 15 bp, Homo sapiens
taaatcccagctcca

SEQ ID NO: 1268193 - DNA, 15 bp, Homo sapiens
ttaaatcccagctcc

SEQ ID NO: 1268194 - DNA, 15 bp, Homo sapiens
tttaaatcccagctc

SEQ ID NO: 1268195 - DNA, 15 bp, Homo sapiens
gtttaaatcccagct

SEQ ID NO: 1268196 - DNA, 15 bp, Homo sapiens
ggtttaaatcccagc

SEQ ID NO: 1268197 - DNA, 15 bp, Homo sapiens
tggtttaaatcccag

SEQ ID NO: 1268198 - DNA, 15 bp, Homo sapiens
ttggtttaaatccca

SEQ ID NO: 1268199 - DNA, 15 bp, Homo sapiens
cttggtttaaatccc

SEQ ID NO: 1268200 - DNA, 15 bp, Homo sapiens
acttggtttaaatcc

SEQ ID NO: 1268201 - DNA, 15 bp, Homo sapiens
gacttggtttaaatc

SEQ ID NO: 1268202 - DNA, 15 bp, Homo sapiens
cgacttggtttaaat

SEQ ID NO: 1268203 - DNA, 15 bp, Homo sapiens
ccgacttggtttaaa

SEQ ID NO: 1268204 - DNA, 15 bp, Homo sapiens
gccgacttggtttaa

SEQ ID NO: 1268205 - DNA, 15 bp, Homo sapiens
ggccgacttggttta

SEQ ID NO: 1268206 - DNA, 15 bp, Homo sapiens
aggccgacttggttt

SEQ ID NO: 1268207 - DNA, 15 bp, Homo sapiens
gaggccgacttggtt

SEQ ID NO: 1268208 - DNA, 15 bp, Homo sapiens
agaggccgacttggt

SEQ ID NO: 1268209 - DNA, 15 bp, Homo sapiens
cagaggccgacttgg

SEQ ID NO: 1268210 - DNA, 15 bp, Homo sapiens
gcagaggccgacttg

SEQ ID NO: 1268211 - DNA, 15 bp, Homo sapiens
tgcagaggccgactt

SEQ ID NO: 1268212 - DNA, 15 bp, Homo sapiens
ttgcagaggccgact

SEQ ID NO: 1268213 - DNA, 15 bp, Homo sapiens
attgcagaggccgac

SEQ ID NO: 1268214 - DNA, 15 bp, Homo sapiens
gattgcagaggccga

SEQ ID NO: 1268215 - DNA, 15 bp, Homo sapiens
ggattgcagaggccg

SEQ ID NO: 1268216 - DNA, 15 bp, Homo sapiens
tggattgcagaggcc

SEQ ID NO: 1268217 - DNA, 15 bp, Homo sapiens
atggattgcagaggc

SEQ ID NO: 1268218 - DNA, 15 bp, Homo sapiens
catggattgcagagg

SEQ ID NO: 1268219 - DNA, 15 bp, Homo sapiens
acatggattgcagag

SEQ ID NO: 1268220 - DNA, 15 bp, Homo sapiens
aacatggattgcaga

SEQ ID NO: 1268221 - DNA, 15 bp, Homo sapiens
aaacatggattgcag

SEQ ID NO: 1268222 - DNA, 15 bp, Homo sapiens
aaaacatggattgca

SEQ ID NO: 1268223 - DNA, 15 bp, Homo sapiens
gaaaacatggattgc

SEQ ID NO: 1268224 - DNA, 15 bp, Homo sapiens
agaaaacatggattg

SEQ ID NO: 1268225 - DNA, 15 bp, Homo sapiens
gagaaaacatggatt

SEQ ID NO: 1268226 - DNA, 15 bp, Homo sapiens
agagaaaacatggat

SEQ ID NO: 1268227 - DNA, 15 bp, Homo sapiens
tagagaaaacatgga

SEQ ID NO: 1268228 - DNA, 15 bp, Homo sapiens
ctagagaaaacatgg

SEQ ID NO: 1268229 - DNA, 15 bp, Homo sapiens
actagagaaaacatg

SEQ ID NO: 1268230 - DNA, 15 bp, Homo sapiens
tactagagaaaacat

SEQ ID NO: 1268231 - DNA, 15 bp, Homo sapiens
ttactagagaaaaca

SEQ ID NO: 1268232 - DNA, 15 bp, Homo sapiens
tttactagagaaaac

SEQ ID NO: 1268233 - DNA, 15 bp, Homo sapiens
gtttactagagaaaa

SEQ ID NO: 1268234 - DNA, 15 bp, Homo sapiens
ggtttactagagaaa

SEQ ID NO: 1268235 - DNA, 15 bp, Homo sapiens
tggtttactagagaa

SEQ ID NO: 1268236 - DNA, 15 bp, Homo sapiens
atggtttactagaga

SEQ ID NO: 1268237 - DNA, 15 bp, Homo sapiens
tatggtttactagag

SEQ ID NO: 1268238 - DNA, 15 bp, Homo sapiens
gtatggtttactaga

SEQ ID NO: 1268239 - DNA, 15 bp, Homo sapiens
agtatggtttactag

SEQ ID NO: 1268240 - DNA, 15 bp, Homo sapiens
cagtatggtttacta

SEQ ID NO: 1268241 - DNA, 15 bp, Homo sapiens
gcagtatggtttact

SEQ ID NO: 1268242 - DNA, 15 bp, Homo sapiens
ggcagtatggtttac

SEQ ID NO: 1268243 - DNA, 15 bp, Homo sapiens
aggcagtatggttta

SEQ ID NO: 1268244 - DNA, 15 bp, Homo sapiens
caggcagtatggttt

SEQ ID NO: 1268245 - DNA, 15 bp, Homo sapiens
acaggcagtatggtt

SEQ ID NO: 1268246 - DNA, 15 bp, Homo sapiens
cacaggcagtatggt

SEQ ID NO: 1268247 - DNA, 15 bp, Homo sapiens
tcacaggcagtatgg

SEQ ID NO: 1268248 - DNA, 15 bp, Homo sapiens
atcacaggcagtatg

SEQ ID NO: 1268249 - DNA, 15 bp, Homo sapiens
tatcacaggcagtat

SEQ ID NO: 1268250 - DNA, 15 bp, Homo sapiens
atatcacaggcagta

SEQ ID NO: 1268251 - DNA, 15 bp, Homo sapiens
catatcacaggcagt

SEQ ID NO: 1268252 - DNA, 15 bp, Homo sapiens
ccatatcacaggcag

SEQ ID NO: 1268253 - DNA, 15 bp, Homo sapiens
tccatatcacaggca

SEQ ID NO: 1268254 - DNA, 15 bp, Homo sapiens
ttccatatcacaggc

SEQ ID NO: 1268255 - DNA, 15 bp, Homo sapiens
attccatatcacagg

SEQ ID NO: 1268256 - DNA, 15 bp, Homo sapiens
tattccatatcacag

SEQ ID NO: 1268257 - DNA, 15 bp, Homo sapiens
ttattccatatcaca

SEQ ID NO: 1268258 - DNA, 15 bp, Homo sapiens
cttattccatatcac

SEQ ID NO: 1268259 - DNA, 15 bp, Homo sapiens
acttattccatatca

SEQ ID NO: 1268260 - DNA, 15 bp, Homo sapiens
tacttattccatatc

SEQ ID NO: 1268261 - DNA, 15 bp, Homo sapiens
gtacttattccatat

SEQ ID NO: 1268262 - DNA, 15 bp, Homo sapiens
tgtacttattccata

SEQ ID NO: 1268263 - DNA, 15 bp, Homo sapiens
atgtacttattccat

SEQ ID NO: 1268264 - DNA, 15 bp, Homo sapiens
catgtacttattcca

SEQ ID NO: 1268265 - DNA, 15 bp, Homo sapiens
acatgtacttattcc

SEQ ID NO: 1268266 - DNA, 15 bp, Homo sapiens
tacatgtacttattc

SEQ ID NO: 1268267 - DNA, 15 bp, Homo sapiens
atacatgtacttatt

SEQ ID NO: 1268268 - DNA, 15 bp, Homo sapiens
aatacatgtacttat

SEQ ID NO: 1268269 - DNA, 15 bp, Homo sapiens
aaatacatgtactta

SEQ ID NO: 1268270 - DNA, 15 bp, Homo sapiens
aaaatacatgtactt

SEQ ID NO: 1268271 - DNA, 15 bp, Homo sapiens
aaaaatacatgtact

SEQ ID NO: 1268272 - DNA, 15 bp, Homo sapiens
aaaaaatacatgtac

SEQ ID NO: 1268273 - DNA, 15 bp, Homo sapiens
aaaaaaatacatgta

SEQ ID NO: 1268274 - DNA, 15 bp, Homo sapiens
aaaaaaaatacatgt

SEQ ID NO: 1268275 - DNA, 15 bp, Homo sapiens
gaaaaaaaatacatg

SEQ ID NO: 1268276 - DNA, 15 bp, Homo sapiens
agaaaaaaaatacat

SEQ ID NO: 1268277 - DNA, 15 bp, Homo sapiens
aagaaaaaaaataca

SEQ ID NO: 1268278 - DNA, 15 bp, Homo sapiens
taagaaaaaaaatac

SEQ ID NO: 1268279 - DNA, 15 bp, Homo sapiens
ttaagaaaaaaaata

SEQ ID NO: 1268280 - DNA, 15 bp, Homo sapiens
gttaagaaaaaaaat

SEQ ID NO: 1268281 - DNA, 15 bp, Homo sapiens
agttaagaaaaaaaa

SEQ ID NO: 1268282 - DNA, 15 bp, Homo sapiens
aagttaagaaaaaaa

SEQ ID NO: 1268283 - DNA, 15 bp, Homo sapiens
aaagttaagaaaaaa

SEQ ID NO: 1268284 - DNA, 15 bp, Homo sapiens
aaaagttaagaaaaa

SEQ ID NO: 1268285 - DNA, 15 bp, Homo sapiens
caaaagttaagaaaa

SEQ ID NO: 1268286 - DNA, 15 bp, Homo sapiens
gcaaaagttaagaaa

SEQ ID NO: 1268287 - DNA, 15 bp, Homo sapiens
cgcaaaagttaagaa

SEQ ID NO: 1268288 - DNA, 15 bp, Homo sapiens
acgcaaaagttaaga

SEQ ID NO: 1268289 - DNA, 15 bp, Homo sapiens
tacgcaaaagttaag

SEQ ID NO: 1268290 - DNA, 15 bp, Homo sapiens
ttacgcaaaagttaa

SEQ ID NO: 1268291 - DNA, 15 bp, Homo sapiens
tttacgcaaaagtta

SEQ ID NO: 1268292 - DNA, 15 bp, Homo sapiens
ctttacgcaaaagtt

SEQ ID NO: 1268293 - DNA, 15 bp, Homo sapiens
actttacgcaaaagt

SEQ ID NO: 1268294 - DNA, 15 bp, Homo sapiens
tactttacgcaaaag

SEQ ID NO: 1268295 - DNA, 15 bp, Homo sapiens
atactttacgcaaaa

SEQ ID NO: 1268296 - DNA, 15 bp, Homo sapiens
catactttacgcaaa

SEQ ID NO: 1268297 - DNA, 15 bp, Homo sapiens
tcatactttacgcaa

SEQ ID NO: 1268298 - DNA, 15 bp, Homo sapiens
gtcatactttacgca

SEQ ID NO: 1268299 - DNA, 15 bp, Homo sapiens
ggtcatactttacgc

SEQ ID NO: 1268300 - DNA, 15 bp, Homo sapiens
tggtcatactttacg

SEQ ID NO: 1268301 - DNA, 15 bp, Homo sapiens
atggtcatactttac

SEQ ID NO: 1268302 - DNA, 15 bp, Homo sapiens
gatggtcatacttta

SEQ ID NO: 1268303 - DNA, 15 bp, Homo sapiens
agatggtcatacttt

SEQ ID NO: 1268304 - DNA, 15 bp, Homo sapiens
aagatggtcatactt

SEQ ID NO: 1268305 - DNA, 15 bp, Homo sapiens
aaagatggtcatact

SEQ ID NO: 1268306 - DNA, 15 bp, Homo sapiens
caaagatggtcatac

SEQ ID NO: 1268307 - DNA, 15 bp, Homo sapiens
acaaagatggtcata

SEQ ID NO: 1268308 - DNA, 15 bp, Homo sapiens
aacaaagatggtcat

SEQ ID NO: 1268309 - DNA, 15 bp, Homo sapiens
aaacaaagatggtca

SEQ ID NO: 1268310 - DNA, 15 bp, Homo sapiens
gaaacaaagatggtc

SEQ ID NO: 1268311 - DNA, 15 bp, Homo sapiens
agaaacaaagatggt

SEQ ID NO: 1268312 - DNA, 15 bp, Homo sapiens
tagaaacaaagatgg

SEQ ID NO: 1268313 - DNA, 15 bp, Homo sapiens
ttagaaacaaagatg

SEQ ID NO: 1268314 - DNA, 15 bp, Homo sapiens
attagaaacaaagat

SEQ ID NO: 1268315 - DNA, 15 bp, Homo sapiens
aattagaaacaaaga

SEQ ID NO: 1268316 - DNA, 15 bp, Homo sapiens
aaattagaaacaaag

SEQ ID NO: 1268317 - DNA, 15 bp, Homo sapiens
caaattagaaacaaa

SEQ ID NO: 1268318 - DNA, 15 bp, Homo sapiens
acaaattagaaacaa

SEQ ID NO: 1268319 - DNA, 15 bp, Homo sapiens
tacaaattagaaaca

SEQ ID NO: 1268320 - DNA, 15 bp, Homo sapiens
ttacaaattagaaac

SEQ ID NO: 1268321 - DNA, 15 bp, Homo sapiens
tttacaaattagaaa

SEQ ID NO: 1268322 - DNA, 15 bp, Homo sapiens
atttacaaattagaa

SEQ ID NO: 1268323 - DNA, 15 bp, Homo sapiens
gatttacaaattaga

SEQ ID NO: 1268324 - DNA, 15 bp, Homo sapiens
tgatttacaaattag

SEQ ID NO: 1268325 - DNA, 15 bp, Homo sapiens
ttgatttacaaatta

SEQ ID NO: 1268326 - DNA, 15 bp, Homo sapiens
tttgatttacaaatt

SEQ ID NO: 1268327 - DNA, 15 bp, Homo sapiens
atttgatttacaaat

SEQ ID NO: 1268328 - DNA, 15 bp, Homo sapiens
tatttgatttacaaa

SEQ ID NO: 1268329 - DNA, 15 bp, Homo sapiens
ttatttgatttacaa

SEQ ID NO: 1268330 - DNA, 15 bp, Homo sapiens
cttatttgatttaca

SEQ ID NO: 1268331 - DNA, 15 bp, Homo sapiens
gcttatttgatttac

SEQ ID NO: 1268332 - DNA, 15 bp, Homo sapiens
agcttatttgattta

SEQ ID NO: 1268333 - DNA, 15 bp, Homo sapiens
aagcttatttgattt

SEQ ID NO: 1268334 - DNA, 15 bp, Homo sapiens
taagcttatttgatt

SEQ ID NO: 1268335 - DNA, 15 bp, Homo sapiens
ttaagcttatttgat

SEQ ID NO: 1268336 - DNA, 15 bp, Homo sapiens
attaagcttatttga

SEQ ID NO: 1268337 - DNA, 15 bp, Homo sapiens
tattaagcttatttg

SEQ ID NO: 1268338 - DNA, 15 bp, Homo sapiens
atattaagcttattt

SEQ ID NO: 1268339 - DNA, 15 bp, Homo sapiens
aatattaagcttatt

SEQ ID NO: 1268340 - DNA, 15 bp, Homo sapiens
aaatattaagcttat

SEQ ID NO: 1268341 - DNA, 15 bp, Homo sapiens
aaaatattaagctta

SEQ ID NO: 1268342 - DNA, 15 bp, Homo sapiens
taaaatattaagctt

SEQ ID NO: 1268343 - DNA, 15 bp, Homo sapiens
ataaaatattaagct

SEQ ID NO: 1268344 - DNA, 15 bp, Homo sapiens
tataaaatattaagc

SEQ ID NO: 1268345 - DNA, 15 bp, Homo sapiens
atataaaatattaag

SEQ ID NO: 1268346 - DNA, 15 bp, Homo sapiens
catataaaatattaa

SEQ ID NO: 1268347 - DNA, 15 bp, Homo sapiens
ccatataaaatatta

SEQ ID NO: 1268348 - DNA, 15 bp, Homo sapiens
gccatataaaatatt

SEQ ID NO: 1268349 - DNA, 15 bp, Homo sapiens
agccatataaaatat

SEQ ID NO: 1268350 - DNA, 15 bp, Homo sapiens
aagccatataaaata

SEQ ID NO: 1268351 - DNA, 15 bp, Homo sapiens
aaagccatataaaat

SEQ ID NO: 1268352 - DNA, 15 bp, Homo sapiens
aaaagccatataaaa

SEQ ID NO: 1268353 - DNA, 15 bp, Homo sapiens
taaaagccatataaa

SEQ ID NO: 1268354 - DNA, 15 bp, Homo sapiens
ctaaaagccatataa

SEQ ID NO: 1268355 - DNA, 15 bp, Homo sapiens
tctaaaagccatata

SEQ ID NO: 1268356 - DNA, 15 bp, Homo sapiens
ttctaaaagccatat

SEQ ID NO: 1268357 - DNA, 15 bp, Homo sapiens
tttctaaaagccata

SEQ ID NO: 1268358 - DNA, 15 bp, Homo sapiens
ctttctaaaagccat

SEQ ID NO: 1268359 - DNA, 15 bp, Homo sapiens
gctttctaaaagcca

SEQ ID NO: 1268360 - DNA, 15 bp, Homo sapiens
tgctttctaaaagcc

SEQ ID NO: 1268361 - DNA, 15 bp, Homo sapiens
gtgctttctaaaagc

SEQ ID NO: 1268362 - DNA, 15 bp, Homo sapiens
tgtgctttctaaaag

SEQ ID NO: 1268363 - DNA, 15 bp, Homo sapiens
atgtgctttctaaaa

SEQ ID NO: 1268364 - DNA, 15 bp, Homo sapiens
tatgtgctttctaaa

SEQ ID NO: 1268365 - DNA, 15 bp, Homo sapiens
atatgtgctttctaa

SEQ ID NO: 1268366 - DNA, 15 bp, Homo sapiens
tatatgtgctttcta

SEQ ID NO: 1268367 - DNA, 15 bp, Homo sapiens
gtatatgtgctttct

SEQ ID NO: 1268368 - DNA, 15 bp, Homo sapiens
tgtatatgtgctttc

SEQ ID NO: 1268369 - DNA, 15 bp, Homo sapiens
ttgtatatgtgcttt

SEQ ID NO: 1268370 - DNA, 15 bp, Homo sapiens
tttgtatatgtgctt

SEQ ID NO: 1268371 - DNA, 15 bp, Homo sapiens
ctttgtatatgtgct

SEQ ID NO: 1268372 - DNA, 15 bp, Homo sapiens
tctttgtatatgtgc

SEQ ID NO: 1268373 - DNA, 15 bp, Homo sapiens
ttctttgtatatgtg

SEQ ID NO: 1268374 - DNA, 15 bp, Homo sapiens
tttctttgtatatgt

SEQ ID NO: 1268375 - DNA, 15 bp, Homo sapiens
ttttctttgtatatg

SEQ ID NO: 1268376 - DNA, 15 bp, Homo sapiens
attttctttgtatat

SEQ ID NO: 1268377 - DNA, 15 bp, Homo sapiens
aattttctttgtata

SEQ ID NO: 1268378 - DNA, 15 bp, Homo sapiens
aaattttctttgtat

SEQ ID NO: 1268379 - DNA, 15 bp, Homo sapiens
aaaattttctttgta

SEQ ID NO: 1268380 - DNA, 15 bp, Homo sapiens
taaaattttctttgt

SEQ ID NO: 1268381 - DNA, 15 bp, Homo sapiens
ataaaattttctttg

SEQ ID NO: 1268382 - DNA, 15 bp, Homo sapiens
tataaaattttcttt

SEQ ID NO: 1268383 - DNA, 15 bp, Homo sapiens
ttataaaattttctt

SEQ ID NO: 1268384 - DNA, 15 bp, Homo sapiens
tttataaaattttct

SEQ ID NO: 1268385 - DNA, 15 bp, Homo sapiens
atttataaaattttc

SEQ ID NO: 1268386 - DNA, 15 bp, Homo sapiens
aatttataaaatttt

SEQ ID NO: 1268387 - DNA, 15 bp, Homo sapiens
taatttataaaattt

SEQ ID NO: 1268388 - DNA, 15 bp, Homo sapiens
ttaatttataaaatt

SEQ ID NO: 1268389 - DNA, 15 bp, Homo sapiens
tttaatttataaaat

SEQ ID NO: 1268390 - DNA, 15 bp, Homo sapiens
gtttaatttataaaa

SEQ ID NO: 1268391 - DNA, 15 bp, Homo sapiens
agtttaatttataaa

SEQ ID NO: 1268392 - DNA, 15 bp, Homo sapiens
cagtttaatttataa

SEQ ID NO: 1268393 - DNA, 15 bp, Homo sapiens
acagtttaatttata

SEQ ID NO: 1268394 - DNA, 15 bp, Homo sapiens
aacagtttaatttat

SEQ ID NO: 1268395 - DNA, 15 bp, Homo sapiens
gaacagtttaattta

SEQ ID NO: 1268396 - DNA, 15 bp, Homo sapiens
agaacagtttaattt

SEQ ID NO: 1268397 - DNA, 15 bp, Homo sapiens
aagaacagtttaatt

SEQ ID NO: 1268398 - DNA, 15 bp, Homo sapiens
aaagaacagtttaat

SEQ ID NO: 1268399 - DNA, 15 bp, Homo sapiens
taaagaacagtttaa

SEQ ID NO: 1268400 - DNA, 15 bp, Homo sapiens
gtaaagaacagttta

SEQ ID NO: 1268401 - DNA, 15 bp, Homo sapiens
agtaaagaacagttt

SEQ ID NO: 1268402 - DNA, 15 bp, Homo sapiens
aagtaaagaacagtt

SEQ ID NO: 1268403 - DNA, 15 bp, Homo sapiens
gaagtaaagaacagt

SEQ ID NO: 1268404 - DNA, 15 bp, Homo sapiens
agaagtaaagaacag

SEQ ID NO: 1268405 - DNA, 15 bp, Homo sapiens
tagaagtaaagaaca

SEQ ID NO: 1268406 - DNA, 15 bp, Homo sapiens
ttagaagtaaagaac

SEQ ID NO: 1268407 - DNA, 15 bp, Homo sapiens
tttagaagtaaagaa

SEQ ID NO: 1268408 - DNA, 15 bp, Homo sapiens
atttagaagtaaaga

SEQ ID NO: 1268409 - DNA, 15 bp, Homo sapiens
gatttagaagtaaag

SEQ ID NO: 1268410 - DNA, 15 bp, Homo sapiens
agatttagaagtaaa

SEQ ID NO: 1268411 - DNA, 15 bp, Homo sapiens
aagatttagaagtaa

SEQ ID NO: 1268412 - DNA, 15 bp, Homo sapiens
aaagatttagaagta

SEQ ID NO: 1268413 - DNA, 15 bp, Homo sapiens
caaagatttagaagt

SEQ ID NO: 1268414 - DNA, 15 bp, Homo sapiens
tcaaagatttagaag

SEQ ID NO: 1268415 - DNA, 15 bp, Homo sapiens
gtcaaagatttagaa

SEQ ID NO: 1268416 - DNA, 15 bp, Homo sapiens
cgtcaaagatttaga

SEQ ID NO: 1268417 - DNA, 15 bp, Homo sapiens
tcgtcaaagatttag

SEQ ID NO: 1268418 - DNA, 15 bp, Homo sapiens
atcgtcaaagattta

SEQ ID NO: 1268419 - DNA, 15 bp, Homo sapiens
aatcgtcaaagattt

SEQ ID NO: 1268420 - DNA, 15 bp, Homo sapiens
taatcgtcaaagatt

SEQ ID NO: 1268421 - DNA, 15 bp, Homo sapiens
ataatcgtcaaagat

SEQ ID NO: 1268422 - DNA, 15 bp, Homo sapiens
aataatcgtcaaaga

SEQ ID NO: 1268423 - DNA, 15 bp, Homo sapiens
aaataatcgtcaaag

SEQ ID NO: 1268424 - DNA, 15 bp, Homo sapiens
gaaataatcgtcaaa

SEQ ID NO: 1268425 - DNA, 15 bp, Homo sapiens
ggaaataatcgtcaa

SEQ ID NO: 1268426 - DNA, 15 bp, Homo sapiens
tggaaataatcgtca

SEQ ID NO: 1268427 - DNA, 15 bp, Homo sapiens
ttggaaataatcgtc

SEQ ID NO: 1268428 - DNA, 15 bp, Homo sapiens
cttggaaataatcgt

SEQ ID NO: 1268429 - DNA, 15 bp, Homo sapiens
tcttggaaataatcg

SEQ ID NO: 1268430 - DNA, 15 bp, Homo sapiens
gtcttggaaataatc

SEQ ID NO: 1268431 - DNA, 15 bp, Homo sapiens
tgtcttggaaataat

SEQ ID NO: 1268432 - DNA, 15 bp, Homo sapiens
atgtcttggaaataa

SEQ ID NO: 1268433 - DNA, 15 bp, Homo sapiens
tatgtcttggaaata

SEQ ID NO: 1268434 - DNA, 15 bp, Homo sapiens
ttatgtcttggaaat

SEQ ID NO: 1268435 - DNA, 15 bp, Homo sapiens
tttatgtcttggaaa

SEQ ID NO: 1268436 - DNA, 15 bp, Homo sapiens
atttatgtcttggaa

SEQ ID NO: 1268437 - DNA, 15 bp, Homo sapiens
aatttatgtcttgga

SEQ ID NO: 1268438 - DNA, 15 bp, Homo sapiens
gaatttatgtcttgg

SEQ ID NO: 1268439 - DNA, 15 bp, Homo sapiens
ggaatttatgtcttg

SEQ ID NO: 1268440 - DNA, 15 bp, Homo sapiens
tggaatttatgtctt

SEQ ID NO: 1268441 - DNA, 15 bp, Homo sapiens
ttggaatttatgtct

SEQ ID NO: 1268442 - DNA, 15 bp, Homo sapiens
cttggaatttatgtc

SEQ ID NO: 1268443 - DNA, 15 bp, Homo sapiens
ccttggaatttatgt

SEQ ID NO: 1268444 - DNA, 15 bp, Homo sapiens
tccttggaatttatg

SEQ ID NO: 1268445 - DNA, 15 bp, Homo sapiens
ctccttggaatttat

SEQ ID NO: 1268446 - DNA, 15 bp, Homo sapiens
tctccttggaattta

SEQ ID NO: 1268447 - DNA, 15 bp, Homo sapiens
atctccttggaattt

SEQ ID NO: 1268448 - DNA, 15 bp, Homo sapiens
gatctccttggaatt

SEQ ID NO: 1268449 - DNA, 15 bp, Homo sapiens
ggatctccttggaat

SEQ ID NO: 1268450 - DNA, 15 bp, Homo sapiens
gggatctccttggaa

SEQ ID NO: 1268451 - DNA, 15 bp, Homo sapiens
tgggatctccttgga

SEQ ID NO: 1268452 - DNA, 15 bp, Homo sapiens
ctgggatctccttgg

SEQ ID NO: 1268453 - DNA, 15 bp, Homo sapiens
gctgggatctccttg

SEQ ID NO: 1268454 - DNA, 15 bp, Homo sapiens
agctgggatctcctt

SEQ ID NO: 1268455 - DNA, 15 bp, Homo sapiens
aagctgggatctcct

SEQ ID NO: 1268456 - DNA, 15 bp, Homo sapiens
aaagctgggatctcc

SEQ ID NO: 1268457 - DNA, 15 bp, Homo sapiens
gaaagctgggatctc

SEQ ID NO: 1268458 - DNA, 15 bp, Homo sapiens
tgaaagctgggatct

SEQ ID NO: 1268459 - DNA, 15 bp, Homo sapiens
atgaaagctgggatc

SEQ ID NO: 1268460 - DNA, 15 bp, Homo sapiens
aatgaaagctgggat

SEQ ID NO: 1268461 - DNA, 15 bp, Homo sapiens
gaatgaaagctggga

SEQ ID NO: 1268462 - DNA, 15 bp, Homo sapiens
cgaatgaaagctggg

SEQ ID NO: 1268463 - DNA, 15 bp, Homo sapiens
acgaatgaaagctgg

SEQ ID NO: 1268464 - DNA, 15 bp, Homo sapiens
aacgaatgaaagctg

SEQ ID NO: 1268465 - DNA, 15 bp, Homo sapiens
aaacgaatgaaagct

SEQ ID NO: 1268466 - DNA, 15 bp, Homo sapiens
taaacgaatgaaagc

SEQ ID NO: 1268467 - DNA, 15 bp, Homo sapiens
gtaaacgaatgaaag

SEQ ID NO: 1268468 - DNA, 15 bp, Homo sapiens
ggtaaacgaatgaaa

SEQ ID NO: 1268469 - DNA, 15 bp, Homo sapiens
tggtaaacgaatgaa

SEQ ID NO: 1268470 - DNA, 15 bp, Homo sapiens
atggtaaacgaatga

SEQ ID NO: 1268471 - DNA, 15 bp, Homo sapiens
gatggtaaacgaatg

SEQ ID NO: 1268472 - DNA, 15 bp, Homo sapiens
ggatggtaaacgaat

SEQ ID NO: 1268473 - DNA, 15 bp, Homo sapiens
aggatggtaaacgaa

SEQ ID NO: 1268474 - DNA, 15 bp, Homo sapiens
caggatggtaaacga

SEQ ID NO: 1268475 - DNA, 15 bp, Homo sapiens
acaggatggtaaacg

SEQ ID NO: 1268476 - DNA, 15 bp, Homo sapiens
cacaggatggtaaac

SEQ ID NO: 1268477 - DNA, 15 bp, Homo sapiens
gcacaggatggtaaa

SEQ ID NO: 1268478 - DNA, 15 bp, Homo sapiens
tgcacaggatggtaa

SEQ ID NO: 1268479 - DNA, 15 bp, Homo sapiens
gtgcacaggatggta

SEQ ID NO: 1268480 - DNA, 15 bp, Homo sapiens
ggtgcacaggatggt

SEQ ID NO: 1268481 - DNA, 15 bp, Homo sapiens
tggtgcacaggatgg

SEQ ID NO: 1268482 - DNA, 15 bp, Homo sapiens
ttggtgcacaggatg

SEQ ID NO: 1268483 - DNA, 15 bp, Homo sapiens
gttggtgcacaggat

SEQ ID NO: 1268484 - DNA, 15 bp, Homo sapiens
ggttggtgcacagga

SEQ ID NO: 1268485 - DNA, 15 bp, Homo sapiens
tggttggtgcacagg

SEQ ID NO: 1268486 - DNA, 15 bp, Homo sapiens
gtggttggtgcacag

SEQ ID NO: 1268487 - DNA, 15 bp, Homo sapiens
cgtggttggtgcaca

SEQ ID NO: 1268488 - DNA, 15 bp, Homo sapiens
acgtggttggtgcac

SEQ ID NO: 1268489 - DNA, 15 bp, Homo sapiens
tacgtggttggtgca

SEQ ID NO: 1268490 - DNA, 15 bp, Homo sapiens
gtacgtggttggtgc

SEQ ID NO: 1268491 - DNA, 15 bp, Homo sapiens
agtacgtggttggtg

SEQ ID NO: 1268492 - DNA, 15 bp, Homo sapiens
gagtacgtggttggt

SEQ ID NO: 1268493 - DNA, 15 bp, Homo sapiens
tgagtacgtggttgg

SEQ ID NO: 1268494 - DNA, 15 bp, Homo sapiens
ttgagtacgtggttg

SEQ ID NO: 1268495 - DNA, 15 bp, Homo sapiens
tttgagtacgtggtt

SEQ ID NO: 1268496 - DNA, 15 bp, Homo sapiens
atttgagtacgtggt

SEQ ID NO: 1268497 - DNA, 15 bp, Homo sapiens
aatttgagtacgtgg

SEQ ID NO: 1268498 - DNA, 15 bp, Homo sapiens
gaatttgagtacgtg

SEQ ID NO: 1268499 - DNA, 15 bp, Homo sapiens
tgaatttgagtacgt

SEQ ID NO: 1268500 - DNA, 15 bp, Homo sapiens
atgaatttgagtacg

SEQ ID NO: 1268501 - DNA, 15 bp, Homo sapiens
catgaatttgagtac

SEQ ID NO: 1268502 - DNA, 15 bp, Homo sapiens
gcatgaatttgagta

SEQ ID NO: 1268503 - DNA, 15 bp, Homo sapiens
agcatgaatttgagt

SEQ ID NO: 1268504 - DNA, 15 bp, Homo sapiens
tagcatgaatttgag

SEQ ID NO: 1268505 - DNA, 15 bp, Homo sapiens
atagcatgaatttga

SEQ ID NO: 1268506 - DNA, 15 bp, Homo sapiens
aatagcatgaatttg

SEQ ID NO: 1268507 - DNA, 15 bp, Homo sapiens
gaatagcatgaattt

SEQ ID NO: 1268508 - DNA, 15 bp, Homo sapiens
ggaatagcatgaatt

SEQ ID NO: 1268509 - DNA, 15 bp, Homo sapiens
aggaatagcatgaat

SEQ ID NO: 1268510 - DNA, 15 bp, Homo sapiens
aaggaatagcatgaa

SEQ ID NO: 1268511 - DNA, 15 bp, Homo sapiens
gaaggaatagcatga

SEQ ID NO: 1268512 - DNA, 15 bp, Homo sapiens
cgaaggaatagcatg

SEQ ID NO: 1268513 - DNA, 15 bp, Homo sapiens
gcgaaggaatagcat

SEQ ID NO: 1268514 - DNA, 15 bp, Homo sapiens
tgcgaaggaatagca

SEQ ID NO: 1268515 - DNA, 15 bp, Homo sapiens
gtgcgaaggaatagc

SEQ ID NO: 1268516 - DNA, 15 bp, Homo sapiens
tgtgcgaaggaatag

SEQ ID NO: 1268517 - DNA, 15 bp, Homo sapiens
ttgtgcgaaggaata

SEQ ID NO: 1268518 - DNA, 15 bp, Homo sapiens
cttgtgcgaaggaat

SEQ ID NO: 1268519 - DNA, 15 bp, Homo sapiens
tcttgtgcgaaggaa

SEQ ID NO: 1268520 - DNA, 15 bp, Homo sapiens
ttcttgtgcgaagga

SEQ ID NO: 1268521 - DNA, 15 bp, Homo sapiens
tttcttgtgcgaagg

SEQ ID NO: 1268522 - DNA, 15 bp, Homo sapiens
ctttcttgtgcgaag

SEQ ID NO: 1268523 - DNA, 15 bp, Homo sapiens
tctttcttgtgcgaa

SEQ ID NO: 1268524 - DNA, 15 bp, Homo sapiens
atctttcttgtgcga

SEQ ID NO: 1268525 - DNA, 15 bp, Homo sapiens
tatctttcttgtgcg

SEQ ID NO: 1268526 - DNA, 15 bp, Homo sapiens
ctatctttcttgtgc

SEQ ID NO: 1268527 - DNA, 15 bp, Homo sapiens
tctatctttcttgtg

SEQ ID NO: 1268528 - DNA, 15 bp, Homo sapiens
ctctatctttcttgt

SEQ ID NO: 1268529 - DNA, 15 bp, Homo sapiens
gctctatctttcttg

SEQ ID NO: 1268530 - DNA, 15 bp, Homo sapiens
ggctctatctttctt

SEQ ID NO: 1268531 - DNA, 15 bp, Homo sapiens
gggctctatctttct

SEQ ID NO: 1268532 - DNA, 15 bp, Homo sapiens
agggctctatctttc

SEQ ID NO: 1268533 - DNA, 15 bp, Homo sapiens
gagggctctatcttt

SEQ ID NO: 1268534 - DNA, 15 bp, Homo sapiens
tgagggctctatctt

SEQ ID NO: 1268535 - DNA, 15 bp, Homo sapiens
ttgagggctctatct

SEQ ID NO: 1268536 - DNA, 15 bp, Homo sapiens
cttgagggctctatc

SEQ ID NO: 1268537 - DNA, 15 bp, Homo sapiens
tcttgagggctctat

SEQ ID NO: 1268538 - DNA, 15 bp, Homo sapiens
ttcttgagggctcta

SEQ ID NO: 1268539 - DNA, 15 bp, Homo sapiens
tttcttgagggctct

SEQ ID NO: 1268540 - DNA, 15 bp, Homo sapiens
gtttcttgagggctc

SEQ ID NO: 1268541 - DNA, 15 bp, Homo sapiens
agtttcttgagggct

SEQ ID NO: 1268542 - DNA, 15 bp, Homo sapiens
gagtttcttgagggc

SEQ ID NO: 1268543 - DNA, 15 bp, Homo sapiens
agagtttcttgaggg

SEQ ID NO: 1268544 - DNA, 15 bp, Homo sapiens
gagagtttcttgagg

SEQ ID NO: 1268545 - DNA, 15 bp, Homo sapiens
tgagagtttcttgag

SEQ ID NO: 1268546 - DNA, 15 bp, Homo sapiens
ttgagagtttcttga

SEQ ID NO: 1268547 - DNA, 15 bp, Homo sapiens
attgagagtttcttg

SEQ ID NO: 1268548 - DNA, 15 bp, Homo sapiens
gattgagagtttctt

SEQ ID NO: 1268549 - DNA, 15 bp, Homo sapiens
tgattgagagtttct

SEQ ID NO: 1268550 - DNA, 15 bp, Homo sapiens
ttgattgagagtttc

SEQ ID NO: 1268551 - DNA, 15 bp, Homo sapiens
gttgattgagagttt

SEQ ID NO: 1268552 - DNA, 15 bp, Homo sapiens
agttgattgagagtt

SEQ ID NO: 1268553 - DNA, 15 bp, Homo sapiens
cagttgattgagagt

SEQ ID NO: 1268554 - DNA, 15 bp, Homo sapiens
ccagttgattgagag

SEQ ID NO: 1268555 - DNA, 15 bp, Homo sapiens
cccagttgattgaga

SEQ ID NO: 1268556 - DNA, 15 bp, Homo sapiens
ccccagttgattgag

SEQ ID NO: 1268557 - DNA, 15 bp, Homo sapiens
tccccagttgattga

SEQ ID NO: 1268558 - DNA, 15 bp, Homo sapiens
ctccccagttgattg

SEQ ID NO: 1268559 - DNA, 15 bp, Homo sapiens
tctccccagttgatt

SEQ ID NO: 1268560 - DNA, 15 bp, Homo sapiens
ttctccccagttgat

SEQ ID NO: 1268561 - DNA, 15 bp, Homo sapiens
tttctccccagttga

SEQ ID NO: 1268562 - DNA, 15 bp, Homo sapiens
ttttctccccagttg

SEQ ID NO: 1268563 - DNA, 15 bp, Homo sapiens
attttctccccagtt

SEQ ID NO: 1268564 - DNA, 15 bp, Homo sapiens
tattttctccccagt

SEQ ID NO: 1268565 - DNA, 15 bp, Homo sapiens
ttattttctccccag

SEQ ID NO: 1268566 - DNA, 15 bp, Homo sapiens
attattttctcccca

SEQ ID NO: 1268567 - DNA, 15 bp, Homo sapiens
tattattttctcccc

SEQ ID NO: 1268568 - DNA, 15 bp, Homo sapiens
ttattattttctccc

SEQ ID NO: 1268569 - DNA, 15 bp, Homo sapiens
gttattattttctcc

SEQ ID NO: 1268570 - DNA, 15 bp, Homo sapiens
tgttattattttctc

SEQ ID NO: 1268571 - DNA, 15 bp, Homo sapiens
ctgttattattttct

SEQ ID NO: 1268572 - DNA, 15 bp, Homo sapiens
actgttattattttc

SEQ ID NO: 1268573 - DNA, 15 bp, Homo sapiens
tactgttattatttt

SEQ ID NO: 1268574 - DNA, 15 bp, Homo sapiens
atactgttattattt

SEQ ID NO: 1268575 - DNA, 15 bp, Homo sapiens
aatactgttattatt

SEQ ID NO: 1268576 - DNA, 15 bp, Homo sapiens
taatactgttattat

SEQ ID NO: 1268577 - DNA, 15 bp, Homo sapiens
ttaatactgttatta

SEQ ID NO: 1268578 - DNA, 15 bp, Homo sapiens
attaatactgttatt

SEQ ID NO: 1268579 - DNA, 15 bp, Homo sapiens
tattaatactgttat

SEQ ID NO: 1268580 - DNA, 15 bp, Homo sapiens
ctattaatactgtta

SEQ ID NO: 1268581 - DNA, 15 bp, Homo sapiens
gctattaatactgtt

SEQ ID NO: 1268582 - DNA, 15 bp, Homo sapiens
agctattaatactgt

SEQ ID NO: 1268583 - DNA, 15 bp, Homo sapiens
gagctattaatactg

SEQ ID NO: 1268584 - DNA, 15 bp, Homo sapiens
tgagctattaatact

SEQ ID NO: 1268585 - DNA, 15 bp, Homo sapiens
atgagctattaatac

SEQ ID NO: 1268586 - DNA, 15 bp, Homo sapiens
catgagctattaata

SEQ ID NO: 1268587 - DNA, 15 bp, Homo sapiens
acatgagctattaat

SEQ ID NO: 1268588 - DNA, 15 bp, Homo sapiens
aacatgagctattaa

SEQ ID NO: 1268589 - DNA, 15 bp, Homo sapiens
aaacatgagctatta

SEQ ID NO: 1268590 - DNA, 15 bp, Homo sapiens
taaacatgagctatt

SEQ ID NO: 1268591 - DNA, 15 bp, Homo sapiens
gtaaacatgagctat

SEQ ID NO: 1268592 - DNA, 15 bp, Homo sapiens
agtaaacatgagcta

SEQ ID NO: 1268593 - DNA, 15 bp, Homo sapiens
cagtaaacatgagct

SEQ ID NO: 1268594 - DNA, 15 bp, Homo sapiens
ccagtaaacatgagc

SEQ ID NO: 1268595 - DNA, 15 bp, Homo sapiens
cccagtaaacatgag

SEQ ID NO: 1268596 - DNA, 15 bp, Homo sapiens
tcccagtaaacatga

SEQ ID NO: 1268597 - DNA, 15 bp, Homo sapiens
gtcccagtaaacatg

SEQ ID NO: 1268598 - DNA, 15 bp, Homo sapiens
agtcccagtaaacat

SEQ ID NO: 1268599 - DNA, 15 bp, Homo sapiens
gagtcccagtaaaca

SEQ ID NO: 1268600 - DNA, 15 bp, Homo sapiens
agagtcccagtaaac

SEQ ID NO: 1268601 - DNA, 15 bp, Homo sapiens
tagagtcccagtaaa

SEQ ID NO: 1268602 - DNA, 15 bp, Homo sapiens
gtagagtcccagtaa

SEQ ID NO: 1268603 - DNA, 15 bp, Homo sapiens
ggtagagtcccagta

SEQ ID NO: 1268604 - DNA, 15 bp, Homo sapiens
tggtagagtcccagt

SEQ ID NO: 1268605 - DNA, 15 bp, Homo sapiens
atggtagagtcccag

SEQ ID NO: 1268606 - DNA, 15 bp, Homo sapiens
catggtagagtccca

SEQ ID NO: 1268607 - DNA, 15 bp, Homo sapiens
acatggtagagtccc

SEQ ID NO: 1268608 - DNA, 15 bp, Homo sapiens
cacatggtagagtcc

SEQ ID NO: 1268609 - DNA, 15 bp, Homo sapiens
gcacatggtagagtc

SEQ ID NO: 1268610 - DNA, 15 bp, Homo sapiens
ggcacatggtagagt

SEQ ID NO: 1268611 - DNA, 15 bp, Homo sapiens
tggcacatggtagag

SEQ ID NO: 1268612 - DNA, 15 bp, Homo sapiens
ctggcacatggtaga

SEQ ID NO: 1268613 - DNA, 15 bp, Homo sapiens
cctggcacatggtag

SEQ ID NO: 1268614 - DNA, 15 bp, Homo sapiens
gcctggcacatggta

SEQ ID NO: 1268615 - DNA, 15 bp, Homo sapiens
tgcctggcacatggt

SEQ ID NO: 1268616 - DNA, 15 bp, Homo sapiens
ctgcctggcacatgg

SEQ ID NO: 1268617 - DNA, 15 bp, Homo sapiens
tctgcctggcacatg

SEQ ID NO: 1268618 - DNA, 15 bp, Homo sapiens
atctgcctggcacat

SEQ ID NO: 1268619 - DNA, 15 bp, Homo sapiens
catctgcctggcaca

SEQ ID NO: 1268620 - DNA, 15 bp, Homo sapiens
gcatctgcctggcac

SEQ ID NO: 1268621 - DNA, 15 bp, Homo sapiens
agcatctgcctggca

SEQ ID NO: 1268622 - DNA, 15 bp, Homo sapiens
tagcatctgcctggc

SEQ ID NO: 1268623 - DNA, 15 bp, Homo sapiens
ttagcatctgcctgg

SEQ ID NO: 1268624 - DNA, 15 bp, Homo sapiens
cttagcatctgcctg

SEQ ID NO: 1268625 - DNA, 15 bp, Homo sapiens
gcttagcatctgcct

SEQ ID NO: 1268626 - DNA, 15 bp, Homo sapiens
tgcttagcatctgcc

SEQ ID NO: 1268627 - DNA, 15 bp, Homo sapiens
gtgcttagcatctgc

SEQ ID NO: 1268628 - DNA, 15 bp, Homo sapiens
agtgcttagcatctg

SEQ ID NO: 1268629 - DNA, 15 bp, Homo sapiens
aagtgcttagcatct

SEQ ID NO: 1268630 - DNA, 15 bp, Homo sapiens
aaagtgcttagcatc

SEQ ID NO: 1268631 - DNA, 15 bp, Homo sapiens
taaagtgcttagcat

SEQ ID NO: 1268632 - DNA, 15 bp, Homo sapiens
gtaaagtgcttagca

SEQ ID NO: 1268633 - DNA, 15 bp, Homo sapiens
tgtaaagtgcttagc

SEQ ID NO: 1268634 - DNA, 15 bp, Homo sapiens
atgtaaagtgcttag

SEQ ID NO: 1268635 - DNA, 15 bp, Homo sapiens
tatgtaaagtgctta

SEQ ID NO: 1268636 - DNA, 15 bp, Homo sapiens
ctatgtaaagtgctt

SEQ ID NO: 1268637 - DNA, 15 bp, Homo sapiens
cctatgtaaagtgct

SEQ ID NO: 1268638 - DNA, 15 bp, Homo sapiens
acctatgtaaagtgc

SEQ ID NO: 1268639 - DNA, 15 bp, Homo sapiens
aacctatgtaaagtg

SEQ ID NO: 1268640 - DNA, 15 bp, Homo sapiens
gaacctatgtaaagt

SEQ ID NO: 1268641 - DNA, 15 bp, Homo sapiens
agaacctatgtaaag

SEQ ID NO: 1268642 - DNA, 15 bp, Homo sapiens
cagaacctatgtaaa

SEQ ID NO: 1268643 - DNA, 15 bp, Homo sapiens
tcagaacctatgtaa

SEQ ID NO: 1268644 - DNA, 15 bp, Homo sapiens
atcagaacctatgta

SEQ ID NO: 1268645 - DNA, 15 bp, Homo sapiens
tatcagaacctatgt

SEQ ID NO: 1268646 - DNA, 15 bp, Homo sapiens
ttatcagaacctatg

SEQ ID NO: 1268647 - DNA, 15 bp, Homo sapiens
gttatcagaacctat

SEQ ID NO: 1268648 - DNA, 15 bp, Homo sapiens
agttatcagaaccta

SEQ ID NO: 1268649 - DNA, 15 bp, Homo sapiens
gagttatcagaacct

SEQ ID NO: 1268650 - DNA, 15 bp, Homo sapiens
agagttatcagaacc

SEQ ID NO: 1268651 - DNA, 15 bp, Homo sapiens
cagagttatcagaac

SEQ ID NO: 1268652 - DNA, 15 bp, Homo sapiens
acagagttatcagaa

SEQ ID NO: 1268653 - DNA, 15 bp, Homo sapiens
cacagagttatcaga

SEQ ID NO: 1268654 - DNA, 15 bp, Homo sapiens
tcacagagttatcag

SEQ ID NO: 1268655 - DNA, 15 bp, Homo sapiens
gtcacagagttatca

SEQ ID NO: 1268656 - DNA, 15 bp, Homo sapiens
tgtcacagagttatc

SEQ ID NO: 1268657 - DNA, 15 bp, Homo sapiens
atgtcacagagttat

SEQ ID NO: 1268658 - DNA, 15 bp, Homo sapiens
tatgtcacagagtta

SEQ ID NO: 1268659 - DNA, 15 bp, Homo sapiens
ttatgtcacagagtt

SEQ ID NO: 1268660 - DNA, 15 bp, Homo sapiens
cttatgtcacagagt

SEQ ID NO: 1268661 - DNA, 15 bp, Homo sapiens
ccttatgtcacagag

SEQ ID NO: 1268662 - DNA, 15 bp, Homo sapiens
accttatgtcacaga

SEQ ID NO: 1268663 - DNA, 15 bp, Homo sapiens
caccttatgtcacag

SEQ ID NO: 1268664 - DNA, 15 bp, Homo sapiens
gcaccttatgtcaca

SEQ ID NO: 1268665 - DNA, 15 bp, Homo sapiens
tgcaccttatgtcac

SEQ ID NO: 1268666 - DNA, 15 bp, Homo sapiens
ttgcaccttatgtca

SEQ ID NO: 1268667 - DNA, 15 bp, Homo sapiens
gttgcaccttatgtc

SEQ ID NO: 1268668 - DNA, 15 bp, Homo sapiens
agttgcaccttatgt

SEQ ID NO: 1268669 - DNA, 15 bp, Homo sapiens
cagttgcaccttatg

SEQ ID NO: 1268670 - DNA, 15 bp, Homo sapiens
gcagttgcaccttat

SEQ ID NO: 1268671 - DNA, 15 bp, Homo sapiens
agcagttgcacctta

SEQ ID NO: 1268672 - DNA, 15 bp, Homo sapiens
tagcagttgcacctt

SEQ ID NO: 1268673 - DNA, 15 bp, Homo sapiens
gtagcagttgcacct

SEQ ID NO: 1268674 - DNA, 15 bp, Homo sapiens
ggtagcagttgcacc

SEQ ID NO: 1268675 - DNA, 15 bp, Homo sapiens
aggtagcagttgcac

SEQ ID NO: 1268676 - DNA, 15 bp, Homo sapiens
gaggtagcagttgca

SEQ ID NO: 1268677 - DNA, 15 bp, Homo sapiens
ggaggtagcagttgc

SEQ ID NO: 1268678 - DNA, 15 bp, Homo sapiens
tggaggtagcagttg

SEQ ID NO: 1268679 - DNA, 15 bp, Homo sapiens
atggaggtagcagtt

SEQ ID NO: 1268680 - DNA, 15 bp, Homo sapiens
aatggaggtagcagt

SEQ ID NO: 1268681 - DNA, 15 bp, Homo sapiens
aaatggaggtagcag

SEQ ID NO: 1268682 - DNA, 15 bp, Homo sapiens
aaaatggaggtagca

SEQ ID NO: 1268683 - DNA, 15 bp, Homo sapiens
aaaaatggaggtagc

SEQ ID NO: 1268684 - DNA, 15 bp, Homo sapiens
taaaaatggaggtag

SEQ ID NO: 1268685 - DNA, 15 bp, Homo sapiens
ttaaaaatggaggta

SEQ ID NO: 1268686 - DNA, 15 bp, Homo sapiens
tttaaaaatggaggt

SEQ ID NO: 1268687 - DNA, 15 bp, Homo sapiens
ttttaaaaatggagg

SEQ ID NO: 1268688 - DNA, 15 bp, Homo sapiens
attttaaaaatggag

SEQ ID NO: 1268689 - DNA, 15 bp, Homo sapiens
cattttaaaaatgga

SEQ ID NO: 1268690 - DNA, 15 bp, Homo sapiens
tcattttaaaaatgg

SEQ ID NO: 1268691 - DNA, 15 bp, Homo sapiens
ctcattttaaaaatg

SEQ ID NO: 1268692 - DNA, 15 bp, Homo sapiens
tctcattttaaaaat

SEQ ID NO: 1268693 - DNA, 15 bp, Homo sapiens
ttctcattttaaaaa

SEQ ID NO: 1268694 - DNA, 15 bp, Homo sapiens
gttctcattttaaaa

SEQ ID NO: 1268695 - DNA, 15 bp, Homo sapiens
tgttctcattttaaa

SEQ ID NO: 1268696 - DNA, 15 bp, Homo sapiens
ttgttctcattttaa

SEQ ID NO: 1268697 - DNA, 15 bp, Homo sapiens
attgttctcatttta

SEQ ID NO: 1268698 - DNA, 15 bp, Homo sapiens
aattgttctcatttt

SEQ ID NO: 1268699 - DNA, 15 bp, Homo sapiens
taattgttctcattt

SEQ ID NO: 1268700 - DNA, 15 bp, Homo sapiens
ttaattgttctcatt

SEQ ID NO: 1268701 - DNA, 15 bp, Homo sapiens
cttaattgttctcat

SEQ ID NO: 1268702 - DNA, 15 bp, Homo sapiens
gcttaattgttctca

SEQ ID NO: 1268703 - DNA, 15 bp, Homo sapiens
ggcttaattgttctc

SEQ ID NO: 1268704 - DNA, 15 bp, Homo sapiens
gggcttaattgttct

SEQ ID NO: 1268705 - DNA, 15 bp, Homo sapiens
tgggcttaattgttc

SEQ ID NO: 1268706 - DNA, 15 bp, Homo sapiens
ctgggcttaattgtt

SEQ ID NO: 1268707 - DNA, 15 bp, Homo sapiens
tctgggcttaattgt

SEQ ID NO: 1268708 - DNA, 15 bp, Homo sapiens
atctgggcttaattg

SEQ ID NO: 1268709 - DNA, 15 bp, Homo sapiens
catctgggcttaatt

SEQ ID NO: 1268710 - DNA, 15 bp, Homo sapiens
acatctgggcttaat

SEQ ID NO: 1268711 - DNA, 15 bp, Homo sapiens
aacatctgggcttaa

SEQ ID NO: 1268712 - DNA, 15 bp, Homo sapiens
taacatctgggctta

SEQ ID NO: 1268713 - DNA, 15 bp, Homo sapiens
ttaacatctgggctt

SEQ ID NO: 1268714 - DNA, 15 bp, Homo sapiens
gttaacatctgggct

SEQ ID NO: 1268715 - DNA, 15 bp, Homo sapiens
agttaacatctgggc

SEQ ID NO: 1268716 - DNA, 15 bp, Homo sapiens
aagttaacatctggg

SEQ ID NO: 1268717 - DNA, 15 bp, Homo sapiens
gaagttaacatctgg

SEQ ID NO: 1268718 - DNA, 15 bp, Homo sapiens
ggaagttaacatctg

SEQ ID NO: 1268719 - DNA, 15 bp, Homo sapiens
gggaagttaacatct

SEQ ID NO: 1268720 - DNA, 15 bp, Homo sapiens
tgggaagttaacatc

SEQ ID NO: 1268721 - DNA, 15 bp, Homo sapiens
ctgggaagttaacat

SEQ ID NO: 1268722 - DNA, 15 bp, Homo sapiens
gctgggaagttaaca

SEQ ID NO: 1268723 - DNA, 15 bp, Homo sapiens
cgctgggaagttaac

SEQ ID NO: 1268724 - DNA, 15 bp, Homo sapiens
ccgctgggaagttaa

SEQ ID NO: 1268725 - DNA, 15 bp, Homo sapiens
tccgctgggaagtta

SEQ ID NO: 1268726 - DNA, 15 bp, Homo sapiens
gtccgctgggaagtt

SEQ ID NO: 1268727 - DNA, 15 bp, Homo sapiens
ggtccgctgggaagt

SEQ ID NO: 1268728 - DNA, 15 bp, Homo sapiens
aggtccgctgggaag

SEQ ID NO: 1268729 - DNA, 15 bp, Homo sapiens
gaggtccgctgggaa

SEQ ID NO: 1268730 - DNA, 15 bp, Homo sapiens
tgaggtccgctggga

SEQ ID NO: 1268731 - DNA, 15 bp, Homo sapiens
ctgaggtccgctggg

SEQ ID NO: 1268732 - DNA, 15 bp, Homo sapiens
gctgaggtccgctgg

SEQ ID NO: 1268733 - DNA, 15 bp, Homo sapiens
agctgaggtccgctg

SEQ ID NO: 1268734 - DNA, 15 bp, Homo sapiens
aagctgaggtccgct

SEQ ID NO: 1268735 - DNA, 15 bp, Homo sapiens
taagctgaggtccgc

SEQ ID NO: 1268736 - DNA, 15 bp, Homo sapiens
ctaagctgaggtccg

SEQ ID NO: 1268737 - DNA, 15 bp, Homo sapiens
tctaagctgaggtcc

SEQ ID NO: 1268738 - DNA, 15 bp, Homo sapiens
ttctaagctgaggtc

SEQ ID NO: 1268739 - DNA, 15 bp, Homo sapiens
tttctaagctgaggt

SEQ ID NO: 1268740 - DNA, 15 bp, Homo sapiens
ctttctaagctgagg

SEQ ID NO: 1268741 - DNA, 15 bp, Homo sapiens
actttctaagctgag

SEQ ID NO: 1268742 - DNA, 15 bp, Homo sapiens
tactttctaagctga

SEQ ID NO: 1268743 - DNA, 15 bp, Homo sapiens
gtactttctaagctg

SEQ ID NO: 1268744 - DNA, 15 bp, Homo sapiens
tgtactttctaagct

SEQ ID NO: 1268745 - DNA, 15 bp, Homo sapiens
ctgtactttctaagc

SEQ ID NO: 1268746 - DNA, 15 bp, Homo sapiens
tctgtactttctaag

SEQ ID NO: 1268747 - DNA, 15 bp, Homo sapiens
ttctgtactttctaa

SEQ ID NO: 1268748 - DNA, 15 bp, Homo sapiens
gttctgtactttcta

SEQ ID NO: 1268749 - DNA, 15 bp, Homo sapiens
tgttctgtactttct

SEQ ID NO: 1268750 - DNA, 15 bp, Homo sapiens
ttgttctgtactttc

SEQ ID NO: 1268751 - DNA, 15 bp, Homo sapiens
cttgttctgtacttt

SEQ ID NO: 1268752 - DNA, 15 bp, Homo sapiens
ccttgttctgtactt

SEQ ID NO: 1268753 - DNA, 15 bp, Homo sapiens
tccttgttctgtact

SEQ ID NO: 1268754 - DNA, 15 bp, Homo sapiens
atccttgttctgtac

SEQ ID NO: 1268755 - DNA, 15 bp, Homo sapiens
aatccttgttctgta

SEQ ID NO: 1268756 - DNA, 15 bp, Homo sapiens
aaatccttgttctgt

SEQ ID NO: 1268757 - DNA, 15 bp, Homo sapiens
caaatccttgttctg

SEQ ID NO: 1268758 - DNA, 15 bp, Homo sapiens
tcaaatccttgttct

SEQ ID NO: 1268759 - DNA, 15 bp, Homo sapiens
ttcaaatccttgttc

SEQ ID NO: 1268760 - DNA, 15 bp, Homo sapiens
gttcaaatccttgtt

SEQ ID NO: 1268761 - DNA, 15 bp, Homo sapiens
ggttcaaatccttgt

SEQ ID NO: 1268762 - DNA, 15 bp, Homo sapiens
aggttcaaatccttg

SEQ ID NO: 1268763 - DNA, 15 bp, Homo sapiens
taggttcaaatcctt

SEQ ID NO: 1268764 - DNA, 15 bp, Homo sapiens
ctaggttcaaatcct

SEQ ID NO: 1268765 - DNA, 15 bp, Homo sapiens
cctaggttcaaatcc

SEQ ID NO: 1268766 - DNA, 15 bp, Homo sapiens
gcctaggttcaaatc

SEQ ID NO: 1268767 - DNA, 15 bp, Homo sapiens
tgcctaggttcaaat

SEQ ID NO: 1268768 - DNA, 15 bp, Homo sapiens
ctgcctaggttcaaa

SEQ ID NO: 1268769 - DNA, 15 bp, Homo sapiens
actgcctaggttcaa

SEQ ID NO: 1268770 - DNA, 15 bp, Homo sapiens
aactgcctaggttca

SEQ ID NO: 1268771 - DNA, 15 bp, Homo sapiens
aaactgcctaggttc

SEQ ID NO: 1268772 - DNA, 15 bp, Homo sapiens
caaactgcctaggtt

SEQ ID NO: 1268773 - DNA, 15 bp, Homo sapiens
ccaaactgcctaggt

SEQ ID NO: 1268774 - DNA, 15 bp, Homo sapiens
gccaaactgcctagg

SEQ ID NO: 1268775 - DNA, 15 bp, Homo sapiens
agccaaactgcctag

SEQ ID NO: 1268776 - DNA, 15 bp, Homo sapiens
gagccaaactgccta

SEQ ID NO: 1268777 - DNA, 15 bp, Homo sapiens
ggagccaaactgcct

SEQ ID NO: 1268778 - DNA, 15 bp, Homo sapiens
tggagccaaactgcc

SEQ ID NO: 1268779 - DNA, 15 bp, Homo sapiens
ctggagccaaactgc

SEQ ID NO: 1268780 - DNA, 15 bp, Homo sapiens
tctggagccaaactg

SEQ ID NO: 1268781 - DNA, 15 bp, Homo sapiens
ctctggagccaaact

SEQ ID NO: 1268782 - DNA, 15 bp, Homo sapiens
gctctggagccaaac

SEQ ID NO: 1268783 - DNA, 15 bp, Homo sapiens
ggctctggagccaaa

SEQ ID NO: 1268784 - DNA, 15 bp, Homo sapiens
aggctctggagccaa

SEQ ID NO: 1268785 - DNA, 15 bp, Homo sapiens
caggctctggagcca

SEQ ID NO: 1268786 - DNA, 15 bp, Homo sapiens
acaggctctggagcc

SEQ ID NO: 1268787 - DNA, 15 bp, Homo sapiens
cacaggctctggagc

SEQ ID NO: 1268788 - DNA, 15 bp, Homo sapiens
gcacaggctctggag

SEQ ID NO: 1268789 - DNA, 15 bp, Homo sapiens
ggcacaggctctgga

SEQ ID NO: 1268790 - DNA, 15 bp, Homo sapiens
tggcacaggctctgg

SEQ ID NO: 1268791 - DNA, 15 bp, Homo sapiens
atggcacaggctctg

SEQ ID NO: 1268792 - DNA, 15 bp, Homo sapiens
gatggcacaggctct

SEQ ID NO: 1268793 - DNA, 15 bp, Homo sapiens
tgatggcacaggctc

SEQ ID NO: 1268794 - DNA, 15 bp, Homo sapiens
gtgatggcacaggct

SEQ ID NO: 1268795 - DNA, 15 bp, Homo sapiens
tgtgatggcacaggc

SEQ ID NO: 1268796 - DNA, 15 bp, Homo sapiens
ttgtgatggcacagg

SEQ ID NO: 1268797 - DNA, 15 bp, Homo sapiens
gttgtgatggcacag

SEQ ID NO: 1268798 - DNA, 15 bp, Homo sapiens
tgttgtgatggcaca

SEQ ID NO: 1268799 - DNA, 15 bp, Homo sapiens
gtgttgtgatggcac

SEQ ID NO: 1268800 - DNA, 15 bp, Homo sapiens
agtgttgtgatggca

SEQ ID NO: 1268801 - DNA, 15 bp, Homo sapiens
cagtgttgtgatggc

SEQ ID NO: 1268802 - DNA, 15 bp, Homo sapiens
gcagtgttgtgatgg

SEQ ID NO: 1268803 - DNA, 15 bp, Homo sapiens
ggcagtgttgtgatg

SEQ ID NO: 1268804 - DNA, 15 bp, Homo sapiens
gggcagtgttgtgat

SEQ ID NO: 1268805 - DNA, 15 bp, Homo sapiens
cgggcagtgttgtga

SEQ ID NO: 1268806 - DNA, 15 bp, Homo sapiens
ccgggcagtgttgtg

SEQ ID NO: 1268807 - DNA, 15 bp, Homo sapiens
tccgggcagtgttgt

SEQ ID NO: 1268808 - DNA, 15 bp, Homo sapiens
ttccgggcagtgttg

SEQ ID NO: 1268809 - DNA, 15 bp, Homo sapiens
tttccgggcagtgtt

SEQ ID NO: 1268810 - DNA, 15 bp, Homo sapiens
gtttccgggcagtgt

SEQ ID NO: 1268811 - DNA, 15 bp, Homo sapiens
tgtttccgggcagtg

SEQ ID NO: 1268812 - DNA, 15 bp, Homo sapiens
ctgtttccgggcagt

SEQ ID NO: 1268813 - DNA, 15 bp, Homo sapiens
tctgtttccgggcag

SEQ ID NO: 1268814 - DNA, 15 bp, Homo sapiens
atctgtttccgggca

SEQ ID NO: 1268815 - DNA, 15 bp, Homo sapiens
aatctgtttccgggc

SEQ ID NO: 1268816 - DNA, 15 bp, Homo sapiens
taatctgtttccggg

SEQ ID NO: 1268817 - DNA, 15 bp, Homo sapiens
ctaatctgtttccgg

SEQ ID NO: 1268818 - DNA, 15 bp, Homo sapiens
actaatctgtttccg

SEQ ID NO: 1268819 - DNA, 15 bp, Homo sapiens
tactaatctgtttcc

SEQ ID NO: 1268820 - DNA, 15 bp, Homo sapiens
gtactaatctgtttc

SEQ ID NO: 1268821 - DNA, 15 bp, Homo sapiens
tgtactaatctgttt

SEQ ID NO: 1268822 - DNA, 15 bp, Homo sapiens
ctgtactaatctgtt

SEQ ID NO: 1268823 - DNA, 15 bp, Homo sapiens
actgtactaatctgt

SEQ ID NO: 1268824 - DNA, 15 bp, Homo sapiens
tactgtactaatctg

SEQ ID NO: 1268825 - DNA, 15 bp, Homo sapiens
gtactgtactaatct

SEQ ID NO: 1268826 - DNA, 15 bp, Homo sapiens
tgtactgtactaatc

SEQ ID NO: 1268827 - DNA, 15 bp, Homo sapiens
atgtactgtactaat

SEQ ID NO: 1268828 - DNA, 15 bp, Homo sapiens
catgtactgtactaa

SEQ ID NO: 1268829 - DNA, 15 bp, Homo sapiens
gcatgtactgtacta

SEQ ID NO: 1268830 - DNA, 15 bp, Homo sapiens
ggcatgtactgtact

SEQ ID NO: 1268831 - DNA, 15 bp, Homo sapiens
gggcatgtactgtac

SEQ ID NO: 1268832 - DNA, 15 bp, Homo sapiens
ggggcatgtactgta

SEQ ID NO: 1268833 - DNA, 15 bp, Homo sapiens
aggggcatgtactgt

SEQ ID NO: 1268834 - DNA, 15 bp, Homo sapiens
caggggcatgtactg

SEQ ID NO: 1268835 - DNA, 15 bp, Homo sapiens
gcaggggcatgtact

SEQ ID NO: 1268836 - DNA, 15 bp, Homo sapiens
cgcaggggcatgtac

SEQ ID NO: 1268837 - DNA, 15 bp, Homo sapiens
ccgcaggggcatgta

SEQ ID NO: 1268838 - DNA, 15 bp, Homo sapiens
cccgcaggggcatgt

SEQ ID NO: 1268839 - DNA, 15 bp, Homo sapiens
tcccgcaggggcatg

SEQ ID NO: 1268840 - DNA, 15 bp, Homo sapiens
ctcccgcaggggcat

SEQ ID NO: 1268841 - DNA, 15 bp, Homo sapiens
tctcccgcaggggca

SEQ ID NO: 1268842 - DNA, 15 bp, Homo sapiens
ctctcccgcaggggc

SEQ ID NO: 1268843 - DNA, 15 bp, Homo sapiens
gctctcccgcagggg

SEQ ID NO: 1268844 - DNA, 15 bp, Homo sapiens
ggctctcccgcaggg

SEQ ID NO: 1268845 - DNA, 15 bp, Homo sapiens
gggctctcccgcagg

SEQ ID NO: 1268846 - DNA, 15 bp, Homo sapiens
tgggctctcccgcag

SEQ ID NO: 1268847 - DNA, 15 bp, Homo sapiens
ctgggctctcccgca

SEQ ID NO: 1268848 - DNA, 15 bp, Homo sapiens
tctgggctctcccgc

SEQ ID NO: 1268849 - DNA, 15 bp, Homo sapiens
ctctgggctctcccg

SEQ ID NO: 1268850 - DNA, 15 bp, Homo sapiens
cctctgggctctccc

SEQ ID NO: 1268851 - DNA, 15 bp, Homo sapiens
tcctctgggctctcc

SEQ ID NO: 1268852 - DNA, 15 bp, Homo sapiens
ctcctctgggctctc

SEQ ID NO: 1268853 - DNA, 15 bp, Homo sapiens
tctcctctgggctct

SEQ ID NO: 1268854 - DNA, 15 bp, Homo sapiens
ttctcctctgggctc

SEQ ID NO: 1268855 - DNA, 15 bp, Homo sapiens
gttctcctctgggct

SEQ ID NO: 1268856 - DNA, 15 bp, Homo sapiens
ggttctcctctgggc

SEQ ID NO: 1268857 - DNA, 15 bp, Homo sapiens
aggttctcctctggg

SEQ ID NO: 1268858 - DNA, 15 bp, Homo sapiens
caggttctcctctgg

SEQ ID NO: 1268859 - DNA, 15 bp, Homo sapiens
gcaggttctcctctg

SEQ ID NO: 1268860 - DNA, 15 bp, Homo sapiens
tgcaggttctcctct

SEQ ID NO: 1268861 - DNA, 15 bp, Homo sapiens
gtgcaggttctcctc

SEQ ID NO: 1268862 - DNA, 15 bp, Homo sapiens
agtgcaggttctcct

SEQ ID NO: 1268863 - DNA, 15 bp, Homo sapiens
tagtgcaggttctcc

SEQ ID NO: 1268864 - DNA, 15 bp, Homo sapiens
atagtgcaggttctc

SEQ ID NO: 1268865 - DNA, 15 bp, Homo sapiens
aatagtgcaggttct

SEQ ID NO: 1268866 - DNA, 15 bp, Homo sapiens
gaatagtgcaggttc

SEQ ID NO: 1268867 - DNA, 15 bp, Homo sapiens
ggaatagtgcaggtt

SEQ ID NO: 1268868 - DNA, 15 bp, Homo sapiens
aggaatagtgcaggt

SEQ ID NO: 1268869 - DNA, 15 bp, Homo sapiens
caggaatagtgcagg

SEQ ID NO: 1268870 - DNA, 15 bp, Homo sapiens
ccaggaatagtgcag

SEQ ID NO: 1268871 - DNA, 15 bp, Homo sapiens
tccaggaatagtgca

SEQ ID NO: 1268872 - DNA, 15 bp, Homo sapiens
ttccaggaatagtgc

SEQ ID NO: 1268873 - DNA, 15 bp, Homo sapiens
tttccaggaatagtg

SEQ ID NO: 1268874 - DNA, 15 bp, Homo sapiens
atttccaggaatagt

SEQ ID NO: 1268875 - DNA, 15 bp, Homo sapiens
aatttccaggaatag

SEQ ID NO: 1268876 - DNA, 15 bp, Homo sapiens
caatttccaggaata

SEQ ID NO: 1268877 - DNA, 15 bp, Homo sapiens
tcaatttccaggaat

SEQ ID NO: 1268878 - DNA, 15 bp, Homo sapiens
atcaatttccaggaa

SEQ ID NO: 1268879 - DNA, 15 bp, Homo sapiens
gatcaatttccagga

SEQ ID NO: 1268880 - DNA, 15 bp, Homo sapiens
tgatcaatttccagg

SEQ ID NO: 1268881 - DNA, 15 bp, Homo sapiens
ctgatcaatttccag

SEQ ID NO: 1268882 - DNA, 15 bp, Homo sapiens
gctgatcaatttcca

SEQ ID NO: 1268883 - DNA, 15 bp, Homo sapiens
tgctgatcaatttcc

SEQ ID NO: 1268884 - DNA, 15 bp, Homo sapiens
ctgctgatcaatttc

SEQ ID NO: 1268885 - DNA, 15 bp, Homo sapiens
tctgctgatcaattt

SEQ ID NO: 1268886 - DNA, 15 bp, Homo sapiens
ctctgctgatcaatt

SEQ ID NO: 1268887 - DNA, 15 bp, Homo sapiens
cctctgctgatcaat

SEQ ID NO: 1268888 - DNA, 15 bp, Homo sapiens
gcctctgctgatcaa

SEQ ID NO: 1268889 - DNA, 15 bp, Homo sapiens
agcctctgctgatca

SEQ ID NO: 1268890 - DNA, 15 bp, Homo sapiens
aagcctctgctgatc

SEQ ID NO: 1268891 - DNA, 15 bp, Homo sapiens
gaagcctctgctgat

SEQ ID NO: 1268892 - DNA, 15 bp, Homo sapiens
agaagcctctgctga

SEQ ID NO: 1268893 - DNA, 15 bp, Homo sapiens
cagaagcctctgctg

SEQ ID NO: 1268894 - DNA, 15 bp, Homo sapiens
ccagaagcctctgct

SEQ ID NO: 1268895 - DNA, 15 bp, Homo sapiens
cccagaagcctctgc

SEQ ID NO: 1268896 - DNA, 15 bp, Homo sapiens
tcccagaagcctctg

SEQ ID NO: 1268897 - DNA, 15 bp, Homo sapiens
ctcccagaagcctct

SEQ ID NO: 1268898 - DNA, 15 bp, Homo sapiens
cctcccagaagcctc

SEQ ID NO: 1268899 - DNA, 15 bp, Homo sapiens
tcctcccagaagcct

SEQ ID NO: 1268900 - DNA, 15 bp, Homo sapiens
atcctcccagaagcc

SEQ ID NO: 1268901 - DNA, 15 bp, Homo sapiens
gatcctcccagaagc

SEQ ID NO: 1268902 - DNA, 15 bp, Homo sapiens
cgatcctcccagaag

SEQ ID NO: 1268903 - DNA, 15 bp, Homo sapiens
tcgatcctcccagaa

SEQ ID NO: 1268904 - DNA, 15 bp, Homo sapiens
ctcgatcctcccaga

SEQ ID NO: 1268905 - DNA, 15 bp, Homo sapiens
cctcgatcctcccag

SEQ ID NO: 1268906 - DNA, 15 bp, Homo sapiens
gcctcgatcctccca

SEQ ID NO: 1268907 - DNA, 15 bp, Homo sapiens
tgcctcgatcctccc

SEQ ID NO: 1268908 - DNA, 15 bp, Homo sapiens
atgcctcgatcctcc

SEQ ID NO: 1268909 - DNA, 15 bp, Homo sapiens
catgcctcgatcctc

SEQ ID NO: 1268910 - DNA, 15 bp, Homo sapiens
tcatgcctcgatcct

SEQ ID NO: 1268911 - DNA, 15 bp, Homo sapiens
atcatgcctcgatcc

SEQ ID NO: 1268912 - DNA, 15 bp, Homo sapiens
aatcatgcctcgatc

SEQ ID NO: 1268913 - DNA, 15 bp, Homo sapiens
aaatcatgcctcgat

SEQ ID NO: 1268914 - DNA, 15 bp, Homo sapiens
caaatcatgcctcga

SEQ ID NO: 1268915 - DNA, 15 bp, Homo sapiens
tcaaatcatgcctcg

SEQ ID NO: 1268916 - DNA, 15 bp, Homo sapiens
ctcaaatcatgcctc

SEQ ID NO: 1268917 - DNA, 15 bp, Homo sapiens
actcaaatcatgcct

SEQ ID NO: 1268918 - DNA, 15 bp, Homo sapiens
gactcaaatcatgcc

SEQ ID NO: 1268919 - DNA, 15 bp, Homo sapiens
agactcaaatcatgc

SEQ ID NO: 1268920 - DNA, 15 bp, Homo sapiens
aagactcaaatcatg

SEQ ID NO: 1268921 - DNA, 15 bp, Homo sapiens
caagactcaaatcat

SEQ ID NO: 1268922 - DNA, 15 bp, Homo sapiens
tcaagactcaaatca

SEQ ID NO: 1268923 - DNA, 15 bp, Homo sapiens
gtcaagactcaaatc

SEQ ID NO: 1268924 - DNA, 15 bp, Homo sapiens
tgtcaagactcaaat

SEQ ID NO: 1268925 - DNA, 15 bp, Homo sapiens
ctgtcaagactcaaa

SEQ ID NO: 1268926 - DNA, 15 bp, Homo sapiens
tctgtcaagactcaa

SEQ ID NO: 1268927 - DNA, 15 bp, Homo sapiens
ttctgtcaagactca

SEQ ID NO: 1268928 - DNA, 15 bp, Homo sapiens
cttctgtcaagactc

SEQ ID NO: 1268929 - DNA, 15 bp, Homo sapiens
acttctgtcaagact

SEQ ID NO: 1268930 - DNA, 15 bp, Homo sapiens
aacttctgtcaagac

SEQ ID NO: 1268931 - DNA, 15 bp, Homo sapiens
gaacttctgtcaaga

SEQ ID NO: 1268932 - DNA, 15 bp, Homo sapiens
tgaacttctgtcaag

SEQ ID NO: 1268933 - DNA, 15 bp, Homo sapiens
ctgaacttctgtcaa

SEQ ID NO: 1268934 - DNA, 15 bp, Homo sapiens
tctgaacttctgtca

SEQ ID NO: 1268935 - DNA, 15 bp, Homo sapiens
ttctgaacttctgtc

SEQ ID NO: 1268936 - DNA, 15 bp, Homo sapiens
gttctgaacttctgt

SEQ ID NO: 1268937 - DNA, 15 bp, Homo sapiens
tgttctgaacttctg

SEQ ID NO: 1268938 - DNA, 15 bp, Homo sapiens
gtgttctgaacttct

SEQ ID NO: 1268939 - DNA, 15 bp, Homo sapiens
tgtgttctgaacttc

SEQ ID NO: 1268940 - DNA, 15 bp, Homo sapiens
ctgtgttctgaactt

SEQ ID NO: 1268941 - DNA, 15 bp, Homo sapiens
tctgtgttctgaact

SEQ ID NO: 1268942 - DNA, 15 bp, Homo sapiens
ctctgtgttctgaac

SEQ ID NO: 1268943 - DNA, 15 bp, Homo sapiens
tctctgtgttctgaa

SEQ ID NO: 1268944 - DNA, 15 bp, Homo sapiens
gtctctgtgttctga

SEQ ID NO: 1268945 - DNA, 15 bp, Homo sapiens
cgtctctgtgttctg

SEQ ID NO: 1268946 - DNA, 15 bp, Homo sapiens
acgtctctgtgttct

SEQ ID NO: 1268947 - DNA, 15 bp, Homo sapiens
gacgtctctgtgttc

SEQ ID NO: 1268948 - DNA, 15 bp, Homo sapiens
tgacgtctctgtgtt

SEQ ID NO: 1268949 - DNA, 15 bp, Homo sapiens
gtgacgtctctgtgt

SEQ ID NO: 1268950 - DNA, 15 bp, Homo sapiens
cgtgacgtctctgtg

SEQ ID NO: 1268951 - DNA, 15 bp, Homo sapiens
ccgtgacgtctctgt

SEQ ID NO: 1268952 - DNA, 15 bp, Homo sapiens
gccgtgacgtctctg

SEQ ID NO: 1268953 - DNA, 15 bp, Homo sapiens
tgccgtgacgtctct

SEQ ID NO: 1268954 - DNA, 15 bp, Homo sapiens
atgccgtgacgtctc

SEQ ID NO: 1268955 - DNA, 15 bp, Homo sapiens
aatgccgtgacgtct

SEQ ID NO: 1268956 - DNA, 15 bp, Homo sapiens
gaatgccgtgacgtc

SEQ ID NO: 1268957 - DNA, 15 bp, Homo sapiens
agaatgccgtgacgt

SEQ ID NO: 1268958 - DNA, 15 bp, Homo sapiens
tagaatgccgtgacg

SEQ ID NO: 1268959 - DNA, 15 bp, Homo sapiens
gtagaatgccgtgac

SEQ ID NO: 1268960 - DNA, 15 bp, Homo sapiens
ggtagaatgccgtga

SEQ ID NO: 1268961 - DNA, 15 bp, Homo sapiens
gggtagaatgccgtg

SEQ ID NO: 1268962 - DNA, 15 bp, Homo sapiens
agggtagaatgccgt

SEQ ID NO: 1268963 - DNA, 15 bp, Homo sapiens
cagggtagaatgccg

SEQ ID NO: 1268964 - DNA, 15 bp, Homo sapiens
gcagggtagaatgcc

SEQ ID NO: 1268965 - DNA, 15 bp, Homo sapiens
tgcagggtagaatgc

SEQ ID NO: 1268966 - DNA, 15 bp, Homo sapiens
gtgcagggtagaatg

SEQ ID NO: 1268967 - DNA, 15 bp, Homo sapiens
agtgcagggtagaat

SEQ ID NO: 1268968 - DNA, 15 bp, Homo sapiens
cagtgcagggtagaa

SEQ ID NO: 1268969 - DNA, 15 bp, Homo sapiens
tcagtgcagggtaga

SEQ ID NO: 1268970 - DNA, 15 bp, Homo sapiens
ttcagtgcagggtag

SEQ ID NO: 1268971 - DNA, 15 bp, Homo sapiens
tttcagtgcagggta

SEQ ID NO: 1268972 - DNA, 15 bp, Homo sapiens
gtttcagtgcagggt

SEQ ID NO: 1268973 - DNA, 15 bp, Homo sapiens
agtttcagtgcaggg

SEQ ID NO: 1268974 - DNA, 15 bp, Homo sapiens
cagtttcagtgcagg

SEQ ID NO: 1268975 - DNA, 15 bp, Homo sapiens
acagtttcagtgcag

SEQ ID NO: 1268976 - DNA, 15 bp, Homo sapiens
aacagtttcagtgca

SEQ ID NO: 1268977 - DNA, 15 bp, Homo sapiens
gaacagtttcagtgc

SEQ ID NO: 1268978 - DNA, 15 bp, Homo sapiens
agaacagtttcagtg

SEQ ID NO: 1268979 - DNA, 15 bp, Homo sapiens
tagaacagtttcagt

SEQ ID NO: 1268980 - DNA, 15 bp, Homo sapiens
ttagaacagtttcag

SEQ ID NO: 1268981 - DNA, 15 bp, Homo sapiens
tttagaacagtttca

SEQ ID NO: 1268982 - DNA, 15 bp, Homo sapiens
ttttagaacagtttc

SEQ ID NO: 1268983 - DNA, 15 bp, Homo sapiens
tttttagaacagttt

SEQ ID NO: 1268984 - DNA, 15 bp, Homo sapiens
ctttttagaacagtt

SEQ ID NO: 1268985 - DNA, 15 bp, Homo sapiens
tctttttagaacagt

SEQ ID NO: 1268986 - DNA, 15 bp, Homo sapiens
gtctttttagaacag

SEQ ID NO: 1268987 - DNA, 15 bp, Homo sapiens
agtctttttagaaca

SEQ ID NO: 1268988 - DNA, 15 bp, Homo sapiens
cagtctttttagaac

SEQ ID NO: 1268989 - DNA, 15 bp, Homo sapiens
ccagtctttttagaa

SEQ ID NO: 1268990 - DNA, 15 bp, Homo sapiens
gccagtctttttaga

SEQ ID NO: 1268991 - DNA, 15 bp, Homo sapiens
tgccagtctttttag

SEQ ID NO: 1268992 - DNA, 15 bp, Homo sapiens
atgccagtcttttta

SEQ ID NO: 1268993 - DNA, 15 bp, Homo sapiens
catgccagtcttttt

SEQ ID NO: 1268994 - DNA, 15 bp, Homo sapiens
gcatgccagtctttt

SEQ ID NO: 1268995 - DNA, 15 bp, Homo sapiens
agcatgccagtcttt

SEQ ID NO: 1268996 - DNA, 15 bp, Homo sapiens
aagcatgccagtctt

SEQ ID NO: 1268997 - DNA, 15 bp, Homo sapiens
gaagcatgccagtct

SEQ ID NO: 1268998 - DNA, 15 bp, Homo sapiens
cgaagcatgccagtc

SEQ ID NO: 1268999 - DNA, 15 bp, Homo sapiens
ccgaagcatgccagt

SEQ ID NO: 1269000 - DNA, 15 bp, Homo sapiens
tccgaagcatgccag

SEQ ID NO: 1269001 - DNA, 15 bp, Homo sapiens
ctccgaagcatgcca

SEQ ID NO: 1269002 - DNA, 15 bp, Homo sapiens
tctccgaagcatgcc

SEQ ID NO: 1269003 - DNA, 15 bp, Homo sapiens
ctctccgaagcatgc

SEQ ID NO: 1269004 - DNA, 15 bp, Homo sapiens
tctctccgaagcatg

SEQ ID NO: 1269005 - DNA, 15 bp, Homo sapiens
ttctctccgaagcat

SEQ ID NO: 1269006 - DNA, 15 bp, Homo sapiens
tttctctccgaagca

SEQ ID NO: 1269007 - DNA, 15 bp, Homo sapiens
ttttctctccgaagc

SEQ ID NO: 1269008 - DNA, 15 bp, Homo sapiens
tttttctctccgaag

SEQ ID NO: 1269009 - DNA, 15 bp, Homo sapiens
ttttttctctccgaa

SEQ ID NO: 1269010 - DNA, 15 bp, Homo sapiens
tttttttctctccga

SEQ ID NO: 1269011 - DNA, 15 bp, Homo sapiens
ttttttttctctccg

SEQ ID NO: 1269012 - DNA, 15 bp, Homo sapiens
tttttttttctctcc

SEQ ID NO: 1269013 - DNA, 15 bp, Homo sapiens
atttttttttttctc

SEQ ID NO: 1269014 - DNA, 15 bp, Homo sapiens
catttttttttttct

SEQ ID NO: 1269015 - DNA, 15 bp, Homo sapiens
ctacatttttttttt

SEQ ID NO: 1269016 - DNA, 15 bp, Homo sapiens
gctacattttttttt

SEQ ID NO: 1269017 - DNA, 15 bp, Homo sapiens
tgctacatttttttt

SEQ ID NO: 1269018 - DNA, 15 bp, Homo sapiens
atgctacattttttt

SEQ ID NO: 1269019 - DNA, 15 bp, Homo sapiens
tatgctacatttttt

SEQ ID NO: 1269020 - DNA, 15 bp, Homo sapiens
ctatgctacattttt

SEQ ID NO: 1269021 - DNA, 15 bp, Homo sapiens
tctatgctacatttt

SEQ ID NO: 1269022 - DNA, 15 bp, Homo sapiens
ctctatgctacattt

SEQ ID NO: 1269023 - DNA, 15 bp, Homo sapiens
actctatgctacatt

SEQ ID NO: 1269024 - DNA, 15 bp, Homo sapiens
gactctatgctacat

SEQ ID NO: 1269025 - DNA, 15 bp, Homo sapiens
agactctatgctaca

SEQ ID NO: 1269026 - DNA, 15 bp, Homo sapiens
gagactctatgctac

SEQ ID NO: 1269027 - DNA, 15 bp, Homo sapiens
ggagactctatgcta

SEQ ID NO: 1269028 - DNA, 15 bp, Homo sapiens
aggagactctatgct

SEQ ID NO: 1269029 - DNA, 15 bp, Homo sapiens
caggagactctatgc

SEQ ID NO: 1269030 - DNA, 15 bp, Homo sapiens
acaggagactctatg

SEQ ID NO: 1269031 - DNA, 15 bp, Homo sapiens
cacaggagactctat

SEQ ID NO: 1269032 - DNA, 15 bp, Homo sapiens
tcacaggagactcta

SEQ ID NO: 1269033 - DNA, 15 bp, Homo sapiens
gtcacaggagactct

SEQ ID NO: 1269034 - DNA, 15 bp, Homo sapiens
ggtcacaggagactc

SEQ ID NO: 1269035 - DNA, 15 bp, Homo sapiens
aggtcacaggagact

SEQ ID NO: 1269036 - DNA, 15 bp, Homo sapiens
caggtcacaggagac

SEQ ID NO: 1269037 - DNA, 15 bp, Homo sapiens
gcaggtcacaggaga

SEQ ID NO: 1269038 - DNA, 15 bp, Homo sapiens
ggcaggtcacaggag

SEQ ID NO: 1269039 - DNA, 15 bp, Homo sapiens
aggcaggtcacagga

SEQ ID NO: 1269040 - DNA, 15 bp, Homo sapiens
caggcaggtcacagg

SEQ ID NO: 1269041 - DNA, 15 bp, Homo sapiens
ccaggcaggtcacag

SEQ ID NO: 1269042 - DNA, 15 bp, Homo sapiens
cccaggcaggtcaca

SEQ ID NO: 1269043 - DNA, 15 bp, Homo sapiens
tcccaggcaggtcac

SEQ ID NO: 1269044 - DNA, 15 bp, Homo sapiens
ctcccaggcaggtca

SEQ ID NO: 1269045 - DNA, 15 bp, Homo sapiens
gctcccaggcaggtc

SEQ ID NO: 1269046 - DNA, 15 bp, Homo sapiens
agctcccaggcaggt

SEQ ID NO: 1269047 - DNA, 15 bp, Homo sapiens
cagctcccaggcagg

SEQ ID NO: 1269048 - DNA, 15 bp, Homo sapiens
acagctcccaggcag

SEQ ID NO: 1269049 - DNA, 15 bp, Homo sapiens
cacagctcccaggca

SEQ ID NO: 1269050 - DNA, 15 bp, Homo sapiens
gcacagctcccaggc

SEQ ID NO: 1269051 - DNA, 15 bp, Homo sapiens
ggcacagctcccagg

SEQ ID NO: 1269052 - DNA, 15 bp, Homo sapiens
tggcacagctcccag

SEQ ID NO: 1269053 - DNA, 15 bp, Homo sapiens
atggcacagctccca

SEQ ID NO: 1269054 - DNA, 15 bp, Homo sapiens
catggcacagctccc

SEQ ID NO: 1269055 - DNA, 15 bp, Homo sapiens
gcatggcacagctcc

SEQ ID NO: 1269056 - DNA, 15 bp, Homo sapiens
tgcatggcacagctc

SEQ ID NO: 1269057 - DNA, 15 bp, Homo sapiens
ttgcatggcacagct

SEQ ID NO: 1269058 - DNA, 15 bp, Homo sapiens
attgcatggcacagc

SEQ ID NO: 1269059 - DNA, 15 bp, Homo sapiens
cattgcatggcacag

SEQ ID NO: 1269060 - DNA, 15 bp, Homo sapiens
ccattgcatggcaca

SEQ ID NO: 1269061 - DNA, 15 bp, Homo sapiens
tccattgcatggcac

SEQ ID NO: 1269062 - DNA, 15 bp, Homo sapiens
ttccattgcatggca

SEQ ID NO: 1269063 - DNA, 15 bp, Homo sapiens
gttccattgcatggc

SEQ ID NO: 1269064 - DNA, 15 bp, Homo sapiens
ggttccattgcatgg

SEQ ID NO: 1269065 - DNA, 15 bp, Homo sapiens
tggttccattgcatg

SEQ ID NO: 1269066 - DNA, 15 bp, Homo sapiens
ttggttccattgcat

SEQ ID NO: 1269067 - DNA, 15 bp, Homo sapiens
tttggttccattgca

SEQ ID NO: 1269068 - DNA, 15 bp, Homo sapiens
atttggttccattgc

SEQ ID NO: 1269069 - DNA, 15 bp, Homo sapiens
aatttggttccattg

SEQ ID NO: 1269070 - DNA, 15 bp, Homo sapiens
aaatttggttccatt

SEQ ID NO: 1269071 - DNA, 15 bp, Homo sapiens
gaaatttggttccat

SEQ ID NO: 1269072 - DNA, 15 bp, Homo sapiens
ggaaatttggttcca

SEQ ID NO: 1269073 - DNA, 15 bp, Homo sapiens
aggaaatttggttcc

SEQ ID NO: 1269074 - DNA, 15 bp, Homo sapiens
aaggaaatttggttc

SEQ ID NO: 1269075 - DNA, 15 bp, Homo sapiens
gaaggaaatttggtt

SEQ ID NO: 1269076 - DNA, 15 bp, Homo sapiens
tgaaggaaatttggt

SEQ ID NO: 1269077 - DNA, 15 bp, Homo sapiens
ctgaaggaaatttgg

SEQ ID NO: 1269078 - DNA, 15 bp, Homo sapiens
cctgaaggaaatttg

SEQ ID NO: 1269079 - DNA, 15 bp, Homo sapiens
ccctgaaggaaattt

SEQ ID NO: 1269080 - DNA, 15 bp, Homo sapiens
tccctgaaggaaatt

SEQ ID NO: 1269081 - DNA, 15 bp, Homo sapiens
ctccctgaaggaaat

SEQ ID NO: 1269082 - DNA, 15 bp, Homo sapiens
actccctgaaggaaa

SEQ ID NO: 1269083 - DNA, 15 bp, Homo sapiens
aactccctgaaggaa

SEQ ID NO: 1269084 - DNA, 15 bp, Homo sapiens
aaactccctgaagga

SEQ ID NO: 1269085 - DNA, 15 bp, Homo sapiens
aaaactccctgaagg

SEQ ID NO: 1269086 - DNA, 15 bp, Homo sapiens
taaaactccctgaag

SEQ ID NO: 1269087 - DNA, 15 bp, Homo sapiens
gtaaaactccctgaa

SEQ ID NO: 1269088 - DNA, 15 bp, Homo sapiens
tgtaaaactccctga

SEQ ID NO: 1269089 - DNA, 15 bp, Homo sapiens
atgtaaaactccctg

SEQ ID NO: 1269090 - DNA, 15 bp, Homo sapiens
aatgtaaaactccct

SEQ ID NO: 1269091 - DNA, 15 bp, Homo sapiens
aaatgtaaaactccc

SEQ ID NO: 1269092 - DNA, 15 bp, Homo sapiens
aaaatgtaaaactcc

SEQ ID NO: 1269093 - DNA, 15 bp, Homo sapiens
taaaatgtaaaactc

SEQ ID NO: 1269094 - DNA, 15 bp, Homo sapiens
gtaaaatgtaaaact

SEQ ID NO: 1269095 - DNA, 15 bp, Homo sapiens
agtaaaatgtaaaac

SEQ ID NO: 1269096 - DNA, 15 bp, Homo sapiens
gagtaaaatgtaaaa

SEQ ID NO: 1269097 - DNA, 15 bp, Homo sapiens
tgagtaaaatgtaaa

SEQ ID NO: 1269098 - DNA, 15 bp, Homo sapiens
ttgagtaaaatgtaa

SEQ ID NO: 1269099 - DNA, 15 bp, Homo sapiens
attgagtaaaatgta

SEQ ID NO: 1269100 - DNA, 15 bp, Homo sapiens
tattgagtaaaatgt

SEQ ID NO: 1269101 - DNA, 15 bp, Homo sapiens
atattgagtaaaatg

SEQ ID NO: 1269102 - DNA, 15 bp, Homo sapiens
aatattgagtaaaat

SEQ ID NO: 1269103 - DNA, 15 bp, Homo sapiens
gaatattgagtaaaa

SEQ ID NO: 1269104 - DNA, 15 bp, Homo sapiens
agaatattgagtaaa

SEQ ID NO: 1269105 - DNA, 15 bp, Homo sapiens
cagaatattgagtaa

SEQ ID NO: 1269106 - DNA, 15 bp, Homo sapiens
tcagaatattgagta

SEQ ID NO: 1269107 - DNA, 15 bp, Homo sapiens
ttcagaatattgagt

SEQ ID NO: 1269108 - DNA, 15 bp, Homo sapiens
cttcagaatattgag

SEQ ID NO: 1269109 - DNA, 15 bp, Homo sapiens
acttcagaatattga

SEQ ID NO: 1269110 - DNA, 15 bp, Homo sapiens
aacttcagaatattg

SEQ ID NO: 1269111 - DNA, 15 bp, Homo sapiens
aaacttcagaatatt

SEQ ID NO: 1269112 - DNA, 15 bp, Homo sapiens
taaacttcagaatat

SEQ ID NO: 1269113 - DNA, 15 bp, Homo sapiens
ctaaacttcagaata

SEQ ID NO: 1269114 - DNA, 15 bp, Homo sapiens
gctaaacttcagaat

SEQ ID NO: 1269115 - DNA, 15 bp, Homo sapiens
agctaaacttcagaa

SEQ ID NO: 1269116 - DNA, 15 bp, Homo sapiens
tagctaaacttcaga

SEQ ID NO: 1269117 - DNA, 15 bp, Homo sapiens
atagctaaacttcag

SEQ ID NO: 1269118 - DNA, 15 bp, Homo sapiens
tcatgaaaaaagttc

SEQ ID NO: 1269119 - DNA, 15 bp, Homo sapiens
atcatgaaaaaagtt

SEQ ID NO: 1269120 - DNA, 15 bp, Homo sapiens
aatcatgaaaaaagt

SEQ ID NO: 1269121 - DNA, 15 bp, Homo sapiens
gaatcatgaaaaaag

SEQ ID NO: 1269122 - DNA, 15 bp, Homo sapiens
agaatcatgaaaaaa

SEQ ID NO: 1269123 - DNA, 15 bp, Homo sapiens
cagaatcatgaaaaa

SEQ ID NO: 1269124 - DNA, 15 bp, Homo sapiens
ccagaatcatgaaaa

SEQ ID NO: 1269125 - DNA, 15 bp, Homo sapiens
cccagaatcatgaaa

SEQ ID NO: 1269126 - DNA, 15 bp, Homo sapiens
acccagaatcatgaa

SEQ ID NO: 1269127 - DNA, 15 bp, Homo sapiens
aacccagaatcatga

SEQ ID NO: 1269128 - DNA, 15 bp, Homo sapiens
gaacccagaatcatg

SEQ ID NO: 1269129 - DNA, 15 bp, Homo sapiens
ggaacccagaatcat

SEQ ID NO: 1269130 - DNA, 15 bp, Homo sapiens
aggaacccagaatca

SEQ ID NO: 1269131 - DNA, 15 bp, Homo sapiens
caggaacccagaatc

SEQ ID NO: 1269132 - DNA, 15 bp, Homo sapiens
gcaggaacccagaat

SEQ ID NO: 1269133 - DNA, 15 bp, Homo sapiens
tgcaggaacccagaa

SEQ ID NO: 1269134 - DNA, 15 bp, Homo sapiens
atgcaggaacccaga

SEQ ID NO: 1269135 - DNA, 15 bp, Homo sapiens
gatgcaggaacccag

SEQ ID NO: 1269136 - DNA, 15 bp, Homo sapiens
tgatgcaggaaccca

SEQ ID NO: 1269137 - DNA, 15 bp, Homo sapiens
atgatgcaggaaccc

SEQ ID NO: 1269138 - DNA, 15 bp, Homo sapiens
gatgatgcaggaacc

SEQ ID NO: 1269139 - DNA, 15 bp, Homo sapiens
agatgatgcaggaac

SEQ ID NO: 1269140 - DNA, 15 bp, Homo sapiens
gagatgatgcaggaa

SEQ ID NO: 1269141 - DNA, 15 bp, Homo sapiens
tgagatgatgcagga

SEQ ID NO: 1269142 - DNA, 15 bp, Homo sapiens
ctgagatgatgcagg

SEQ ID NO: 1269143 - DNA, 15 bp, Homo sapiens
cctgagatgatgcag

SEQ ID NO: 1269144 - DNA, 15 bp, Homo sapiens
acctgagatgatgca

SEQ ID NO: 1269145 - DNA, 15 bp, Homo sapiens
tacctgagatgatgc

SEQ ID NO: 1269146 - DNA, 15 bp, Homo sapiens
ttacctgagatgatg

SEQ ID NO: 1269147 - DNA, 15 bp, Homo sapiens
tttacctgagatgat

SEQ ID NO: 1269148 - DNA, 15 bp, Homo sapiens
atttacctgagatga

SEQ ID NO: 1269149 - DNA, 15 bp, Homo sapiens
tatttacctgagatg

SEQ ID NO: 1269150 - DNA, 15 bp, Homo sapiens
ttatttacctgagat

SEQ ID NO: 1269151 - DNA, 15 bp, Homo sapiens
tttatttacctgaga

SEQ ID NO: 1269152 - DNA, 15 bp, Homo sapiens
atttatttacctgag

SEQ ID NO: 1269153 - DNA, 15 bp, Homo sapiens
gatttatttacctga

SEQ ID NO: 1269154 - DNA, 15 bp, Homo sapiens
tgatttatttacctg

SEQ ID NO: 1269155 - DNA, 15 bp, Homo sapiens
atgatttatttacct

SEQ ID NO: 1269156 - DNA, 15 bp, Homo sapiens
aatgatttatttacc

SEQ ID NO: 1269157 - DNA, 15 bp, Homo sapiens
aaatgatttatttac

SEQ ID NO: 1269158 - DNA, 15 bp, Homo sapiens
taaatgatttattta

SEQ ID NO: 1269159 - DNA, 15 bp, Homo sapiens
ttaaatgatttattt

SEQ ID NO: 1269160 - DNA, 15 bp, Homo sapiens
gttaaatgatttatt

SEQ ID NO: 1269161 - DNA, 15 bp, Homo sapiens
ggttaaatgatttat

SEQ ID NO: 1269162 - DNA, 15 bp, Homo sapiens
aggttaaatgattta

SEQ ID NO: 1269163 - DNA, 15 bp, Homo sapiens
gaggttaaatgattt

SEQ ID NO: 1269164 - DNA, 15 bp, Homo sapiens
agaggttaaatgatt

SEQ ID NO: 1269165 - DNA, 15 bp, Homo sapiens
gagaggttaaatgat

SEQ ID NO: 1269166 - DNA, 15 bp, Homo sapiens
ggagaggttaaatga

SEQ ID NO: 1269167 - DNA, 15 bp, Homo sapiens
cggagaggttaaatg

SEQ ID NO: 1269168 - DNA, 15 bp, Homo sapiens
tcggagaggttaaat

SEQ ID NO: 1269169 - DNA, 15 bp, Homo sapiens
ttcggagaggttaaa

SEQ ID NO: 1269170 - DNA, 15 bp, Homo sapiens
gttcggagaggttaa

SEQ ID NO: 1269171 - DNA, 15 bp, Homo sapiens
agttcggagaggtta

SEQ ID NO: 1269172 - DNA, 15 bp, Homo sapiens
aagttcggagaggtt

SEQ ID NO: 1269173 - DNA, 15 bp, Homo sapiens
gaagttcggagaggt

SEQ ID NO: 1269174 - DNA, 15 bp, Homo sapiens
tgaagttcggagagg

SEQ ID NO: 1269175 - DNA, 15 bp, Homo sapiens
ctgaagttcggagag

SEQ ID NO: 1269176 - DNA, 15 bp, Homo sapiens
actgaagttcggaga

SEQ ID NO: 1269177 - DNA, 15 bp, Homo sapiens
aactgaagttcggag

SEQ ID NO: 1269178 - DNA, 15 bp, Homo sapiens
aaactgaagttcgga

SEQ ID NO: 1269179 - DNA, 15 bp, Homo sapiens
gaaactgaagttcgg

SEQ ID NO: 1269180 - DNA, 15 bp, Homo sapiens
agaaactgaagttcg

SEQ ID NO: 1269181 - DNA, 15 bp, Homo sapiens
aagaaactgaagttc

SEQ ID NO: 1269182 - DNA, 15 bp, Homo sapiens
taagaaactgaagtt

SEQ ID NO: 1269183 - DNA, 15 bp, Homo sapiens
ataagaaactgaagt

SEQ ID NO: 1269184 - DNA, 15 bp, Homo sapiens
gataagaaactgaag

SEQ ID NO: 1269185 - DNA, 15 bp, Homo sapiens
ggataagaaactgaa

SEQ ID NO: 1269186 - DNA, 15 bp, Homo sapiens
tggataagaaactga

SEQ ID NO: 1269187 - DNA, 15 bp, Homo sapiens
atggataagaaactg

SEQ ID NO: 1269188 - DNA, 15 bp, Homo sapiens
tatggataagaaact

SEQ ID NO: 1269189 - DNA, 15 bp, Homo sapiens
ttatggataagaaac

SEQ ID NO: 1269190 - DNA, 15 bp, Homo sapiens
tttatggataagaaa

SEQ ID NO: 1269191 - DNA, 15 bp, Homo sapiens
ctttatggataagaa

SEQ ID NO: 1269192 - DNA, 15 bp, Homo sapiens
actttatggataaga

SEQ ID NO: 1269193 - DNA, 15 bp, Homo sapiens
cactttatggataag

SEQ ID NO: 1269194 - DNA, 15 bp, Homo sapiens
tcactttatggataa

SEQ ID NO: 1269195 - DNA, 15 bp, Homo sapiens
ctcactttatggata

SEQ ID NO: 1269196 - DNA, 15 bp, Homo sapiens
tctcactttatggat

SEQ ID NO: 1269197 - DNA, 15 bp, Homo sapiens
ttctcactttatgga

SEQ ID NO: 1269198 - DNA, 15 bp, Homo sapiens
attctcactttatgg

SEQ ID NO: 1269199 - DNA, 15 bp, Homo sapiens
ttattctcactttat

SEQ ID NO: 1269200 - DNA, 15 bp, Homo sapiens
tttattctcacttta

SEQ ID NO: 1269201 - DNA, 15 bp, Homo sapiens
ttttattctcacttt

SEQ ID NO: 1269202 - DNA, 15 bp, Homo sapiens
attttattctcactt

SEQ ID NO: 1269203 - DNA, 15 bp, Homo sapiens
tattttattctcact

SEQ ID NO: 1269204 - DNA, 15 bp, Homo sapiens
ctattttattctcac

SEQ ID NO: 1269205 - DNA, 15 bp, Homo sapiens
actattttattctca

SEQ ID NO: 1269206 - DNA, 15 bp, Homo sapiens
gactattttattctc

SEQ ID NO: 1269207 - DNA, 15 bp, Homo sapiens
tgactattttattct

SEQ ID NO: 1269208 - DNA, 15 bp, Homo sapiens
gtgactattttattc

SEQ ID NO: 1269209 - DNA, 15 bp, Homo sapiens
ggtgactattttatt

SEQ ID NO: 1269210 - DNA, 15 bp, Homo sapiens
aggtgactattttat

SEQ ID NO: 1269211 - DNA, 15 bp, Homo sapiens
gaggtgactatttta

SEQ ID NO: 1269212 - DNA, 15 bp, Homo sapiens
ggaggtgactatttt

SEQ ID NO: 1269213 - DNA, 15 bp, Homo sapiens
tggaggtgactattt

SEQ ID NO: 1269214 - DNA, 15 bp, Homo sapiens
atggaggtgactatt

SEQ ID NO: 1269215 - DNA, 15 bp, Homo sapiens
tatggaggtgactat

SEQ ID NO: 1269216 - DNA, 15 bp, Homo sapiens
ctatggaggtgacta

SEQ ID NO: 1269217 - DNA, 15 bp, Homo sapiens
tctatggaggtgact

SEQ ID NO: 1269218 - DNA, 15 bp, Homo sapiens
ctctatggaggtgac

SEQ ID NO: 1269219 - DNA, 15 bp, Homo sapiens
actctatggaggtga

SEQ ID NO: 1269220 - DNA, 15 bp, Homo sapiens
cactctatggaggtg

SEQ ID NO: 1269221 - DNA, 15 bp, Homo sapiens
tcactctatggaggt

SEQ ID NO: 1269222 - DNA, 15 bp, Homo sapiens
ttcactctatggagg

SEQ ID NO: 1269223 - DNA, 15 bp, Homo sapiens
cttcactctatggag

SEQ ID NO: 1269224 - DNA, 15 bp, Homo sapiens
acttcactctatgga

SEQ ID NO: 1269225 - DNA, 15 bp, Homo sapiens
aacttcactctatgg

SEQ ID NO: 1269226 - DNA, 15 bp, Homo sapiens
aaacttcactctatg

SEQ ID NO: 1269227 - DNA, 15 bp, Homo sapiens
taaacttcactctat

SEQ ID NO: 1269228 - DNA, 15 bp, Homo sapiens
ttaaacttcactcta

SEQ ID NO: 1269229 - DNA, 15 bp, Homo sapiens
tttaaacttcactct

SEQ ID NO: 1269230 - DNA, 15 bp, Homo sapiens
atttaaacttcactc

SEQ ID NO: 1269231 - DNA, 15 bp, Homo sapiens
catttaaacttcact

SEQ ID NO: 1269232 - DNA, 15 bp, Homo sapiens
tcatttaaacttcac

SEQ ID NO: 1269233 - DNA, 15 bp, Homo sapiens
ttcatttaaacttca

SEQ ID NO: 1269234 - DNA, 15 bp, Homo sapiens
attcatttaaacttc

SEQ ID NO: 1269235 - DNA, 15 bp, Homo sapiens
aattcatttaaactt

SEQ ID NO: 1269236 - DNA, 15 bp, Homo sapiens
taattcatttaaact

SEQ ID NO: 1269237 - DNA, 15 bp, Homo sapiens
ttaattcatttaaac

SEQ ID NO: 1269238 - DNA, 15 bp, Homo sapiens
attaattcatttaaa

SEQ ID NO: 1269239 - DNA, 15 bp, Homo sapiens
cattaattcatttaa

SEQ ID NO: 1269240 - DNA, 15 bp, Homo sapiens
acattaattcattta

SEQ ID NO: 1269241 - DNA, 15 bp, Homo sapiens
cacattaattcattt

SEQ ID NO: 1269242 - DNA, 15 bp, Homo sapiens
acacattaattcatt

SEQ ID NO: 1269243 - DNA, 15 bp, Homo sapiens
cacacattaattcat

SEQ ID NO: 1269244 - DNA, 15 bp, Homo sapiens
acacacattaattca

SEQ ID NO: 1269245 - DNA, 15 bp, Homo sapiens
tacacacattaattc

SEQ ID NO: 1269246 - DNA, 15 bp, Homo sapiens
ttacacacattaatt

SEQ ID NO: 1269247 - DNA, 15 bp, Homo sapiens
tttacacacattaat

SEQ ID NO: 1269248 - DNA, 15 bp, Homo sapiens
ctttacacacattaa

SEQ ID NO: 1269249 - DNA, 15 bp, Homo sapiens
gctttacacacatta

SEQ ID NO: 1269250 - DNA, 15 bp, Homo sapiens
ggctttacacacatt

SEQ ID NO: 1269251 - DNA, 15 bp, Homo sapiens
aggctttacacacat

SEQ ID NO: 1269252 - DNA, 15 bp, Homo sapiens
gaggctttacacaca

SEQ ID NO: 1269253 - DNA, 15 bp, Homo sapiens
agaggctttacacac

SEQ ID NO: 1269254 - DNA, 15 bp, Homo sapiens
tagaggctttacaca

SEQ ID NO: 1269255 - DNA, 15 bp, Homo sapiens
ctagaggctttacac

SEQ ID NO: 1269256 - DNA, 15 bp, Homo sapiens
actagaggctttaca

SEQ ID NO: 1269257 - DNA, 15 bp, Homo sapiens
gactagaggctttac

SEQ ID NO: 1269258 - DNA, 15 bp, Homo sapiens
ggactagaggcttta

SEQ ID NO: 1269259 - DNA, 15 bp, Homo sapiens
tggactagaggcttt

SEQ ID NO: 1269260 - DNA, 15 bp, Homo sapiens
ctggactagaggctt

SEQ ID NO: 1269261 - DNA, 15 bp, Homo sapiens
gctggactagaggct

SEQ ID NO: 1269262 - DNA, 15 bp, Homo sapiens
tgctggactagaggc

SEQ ID NO: 1269263 - DNA, 15 bp, Homo sapiens
gtgctggactagagg

SEQ ID NO: 1269264 - DNA, 15 bp, Homo sapiens
ggtgctggactagag

SEQ ID NO: 1269265 - DNA, 15 bp, Homo sapiens
aggtgctggactaga

SEQ ID NO: 1269266 - DNA, 15 bp, Homo sapiens
caggtgctggactag

SEQ ID NO: 1269267 - DNA, 15 bp, Homo sapiens
ccaggtgctggacta

SEQ ID NO: 1269268 - DNA, 15 bp, Homo sapiens
gccaggtgctggact

SEQ ID NO: 1269269 - DNA, 15 bp, Homo sapiens
tgccaggtgctggac

SEQ ID NO: 1269270 - DNA, 15 bp, Homo sapiens
atgccaggtgctgga

SEQ ID NO: 1269271 - DNA, 15 bp, Homo sapiens
gatgccaggtgctgg

SEQ ID NO: 1269272 - DNA, 15 bp, Homo sapiens
ggatgccaggtgctg

SEQ ID NO: 1269273 - DNA, 15 bp, Homo sapiens
tggatgccaggtgct

SEQ ID NO: 1269274 - DNA, 15 bp, Homo sapiens
ttggatgccaggtgc

SEQ ID NO: 1269275 - DNA, 15 bp, Homo sapiens
attggatgccaggtg

SEQ ID NO: 1269276 - DNA, 15 bp, Homo sapiens
tattggatgccaggt

SEQ ID NO: 1269277 - DNA, 15 bp, Homo sapiens
ttattggatgccagg

SEQ ID NO: 1269278 - DNA, 15 bp, Homo sapiens
tttattggatgccag

SEQ ID NO: 1269279 - DNA, 15 bp, Homo sapiens
atttattggatgcca

SEQ ID NO: 1269280 - DNA, 15 bp, Homo sapiens
tatttattggatgcc

SEQ ID NO: 1269281 - DNA, 15 bp, Homo sapiens
gtatttattggatgc

SEQ ID NO: 1269282 - DNA, 15 bp, Homo sapiens
ggtatttattggatg

SEQ ID NO: 1269283 - DNA, 15 bp, Homo sapiens
aggtatttattggat

SEQ ID NO: 1269284 - DNA, 15 bp, Homo sapiens
caggtatttattgga

SEQ ID NO: 1269285 - DNA, 15 bp, Homo sapiens
tcaggtatttattgg

SEQ ID NO: 1269286 - DNA, 15 bp, Homo sapiens
atcaggtatttattg

SEQ ID NO: 1269287 - DNA, 15 bp, Homo sapiens
aatcaggtatttatt

SEQ ID NO: 1269288 - DNA, 15 bp, Homo sapiens
taatcaggtatttat

SEQ ID NO: 1269289 - DNA, 15 bp, Homo sapiens
ttaatcaggtattta

SEQ ID NO: 1269290 - DNA, 15 bp, Homo sapiens
attaatcaggtattt

SEQ ID NO: 1269291 - DNA, 15 bp, Homo sapiens
gattaatcaggtatt

SEQ ID NO: 1269292 - DNA, 15 bp, Homo sapiens
ggattaatcaggtat

SEQ ID NO: 1269293 - DNA, 15 bp, Homo sapiens
aggattaatcaggta

SEQ ID NO: 1269294 - DNA, 15 bp, Homo sapiens
taggattaatcaggt

SEQ ID NO: 1269295 - DNA, 15 bp, Homo sapiens
gtaggattaatcagg

SEQ ID NO: 1269296 - DNA, 15 bp, Homo sapiens
tgtaggattaatcag

SEQ ID NO: 1269297 - DNA, 15 bp, Homo sapiens
atgtaggattaatca

SEQ ID NO: 1269298 - DNA, 15 bp, Homo sapiens
catgtaggattaatc

SEQ ID NO: 1269299 - DNA, 15 bp, Homo sapiens
acatgtaggattaat

SEQ ID NO: 1269300 - DNA, 15 bp, Homo sapiens
gacatgtaggattaa

SEQ ID NO: 1269301 - DNA, 15 bp, Homo sapiens
tgacatgtaggatta

SEQ ID NO: 1269302 - DNA, 15 bp, Homo sapiens
ttgacatgtaggatt

SEQ ID NO: 1269303 - DNA, 15 bp, Homo sapiens
attgacatgtaggat

SEQ ID NO: 1269304 - DNA, 15 bp, Homo sapiens
aattgacatgtagga

SEQ ID NO: 1269305 - DNA, 15 bp, Homo sapiens
taattgacatgtagg

SEQ ID NO: 1269306 - DNA, 15 bp, Homo sapiens
gtaattgacatgtag

SEQ ID NO: 1269307 - DNA, 15 bp, Homo sapiens
agtaattgacatgta

SEQ ID NO: 1269308 - DNA, 15 bp, Homo sapiens
gagtaattgacatgt

SEQ ID NO: 1269309 - DNA, 15 bp, Homo sapiens
tgagtaattgacatg

SEQ ID NO: 1269310 - DNA, 15 bp, Homo sapiens
ttgagtaattgacat

SEQ ID NO: 1269311 - DNA, 15 bp, Homo sapiens
tttgagtaattgaca

SEQ ID NO: 1269312 - DNA, 15 bp, Homo sapiens
ctttgagtaattgac

SEQ ID NO: 1269313 - DNA, 15 bp, Homo sapiens
actttgagtaattga

SEQ ID NO: 1269314 - DNA, 15 bp, Homo sapiens
tactttgagtaattg

SEQ ID NO: 1269315 - DNA, 15 bp, Homo sapiens
gtactttgagtaatt

SEQ ID NO: 1269316 - DNA, 15 bp, Homo sapiens
ggtactttgagtaat

SEQ ID NO: 1269317 - DNA, 15 bp, Homo sapiens
aggtactttgagtaa

SEQ ID NO: 1269318 - DNA, 15 bp, Homo sapiens
aaggtactttgagta

SEQ ID NO: 1269319 - DNA, 15 bp, Homo sapiens
taaggtactttgagt

SEQ ID NO: 1269320 - DNA, 15 bp, Homo sapiens
ctaaggtactttgag

SEQ ID NO: 1269321 - DNA, 15 bp, Homo sapiens
tctaaggtactttga

SEQ ID NO: 1269322 - DNA, 15 bp, Homo sapiens
ttctaaggtactttg

SEQ ID NO: 1269323 - DNA, 15 bp, Homo sapiens
cttctaaggtacttt

SEQ ID NO: 1269324 - DNA, 15 bp, Homo sapiens
ccttctaaggtactt

SEQ ID NO: 1269325 - DNA, 15 bp, Homo sapiens
tccttctaaggtact

SEQ ID NO: 1269326 - DNA, 15 bp, Homo sapiens
ttccttctaaggtac

SEQ ID NO: 1269327 - DNA, 15 bp, Homo sapiens
tttccttctaaggta

SEQ ID NO: 1269328 - DNA, 15 bp, Homo sapiens
ttttccttctaaggt

SEQ ID NO: 1269329 - DNA, 15 bp, Homo sapiens
gttttccttctaagg

SEQ ID NO: 1269330 - DNA, 15 bp, Homo sapiens
tgttttccttctaag

SEQ ID NO: 1269331 - DNA, 15 bp, Homo sapiens
ttgttttccttctaa

SEQ ID NO: 1269332 - DNA, 15 bp, Homo sapiens
attgttttccttcta

SEQ ID NO: 1269333 - DNA, 15 bp, Homo sapiens
cattgttttccttct

SEQ ID NO: 1269334 - DNA, 15 bp, Homo sapiens
ccattgttttccttc

SEQ ID NO: 1269335 - DNA, 15 bp, Homo sapiens
accattgttttcctt

SEQ ID NO: 1269336 - DNA, 15 bp, Homo sapiens
caccattgttttcct

SEQ ID NO: 1269337 - DNA, 15 bp, Homo sapiens
acaccattgttttcc

SEQ ID NO: 1269338 - DNA, 15 bp, Homo sapiens
gacaccattgttttc

SEQ ID NO: 1269339 - DNA, 15 bp, Homo sapiens
cgacaccattgtttt

SEQ ID NO: 1269340 - DNA, 15 bp, Homo sapiens
acgacaccattgttt

SEQ ID NO: 1269341 - DNA, 15 bp, Homo sapiens
aacgacaccattgtt

SEQ ID NO: 1269342 - DNA, 15 bp, Homo sapiens
taacgacaccattgt

SEQ ID NO: 1269343 - DNA, 15 bp, Homo sapiens
ataacgacaccattg

SEQ ID NO: 1269344 - DNA, 15 bp, Homo sapiens
tataacgacaccatt

SEQ ID NO: 1269345 - DNA, 15 bp, Homo sapiens
ctataacgacaccat

SEQ ID NO: 1269346 - DNA, 15 bp, Homo sapiens
tctataacgacacca

SEQ ID NO: 1269347 - DNA, 15 bp, Homo sapiens
ttctataacgacacc

SEQ ID NO: 1269348 - DNA, 15 bp, Homo sapiens
attctataacgacac

SEQ ID NO: 1269349 - DNA, 15 bp, Homo sapiens
aattctataacgaca

SEQ ID NO: 1269350 - DNA, 15 bp, Homo sapiens
gaattctataacgac

SEQ ID NO: 1269351 - DNA, 15 bp, Homo sapiens
tgaattctataacga

SEQ ID NO: 1269352 - DNA, 15 bp, Homo sapiens
ttgaattctataacg

SEQ ID NO: 1269353 - DNA, 15 bp, Homo sapiens
tttgaattctataac

SEQ ID NO: 1269354 - DNA, 15 bp, Homo sapiens
ctttgaattctataa

SEQ ID NO: 1269355 - DNA, 15 bp, Homo sapiens
cctttgaattctata

SEQ ID NO: 1269356 - DNA, 15 bp, Homo sapiens
gcctttgaattctat

SEQ ID NO: 1269357 - DNA, 15 bp, Homo sapiens
ggcctttgaattcta

SEQ ID NO: 1269358 - DNA, 15 bp, Homo sapiens
tggcctttgaattct

SEQ ID NO: 1269359 - DNA, 15 bp, Homo sapiens
gtggcctttgaattc

SEQ ID NO: 1269360 - DNA, 15 bp, Homo sapiens
cgtggcctttgaatt

SEQ ID NO: 1269361 - DNA, 15 bp, Homo sapiens
tcgtggcctttgaat

SEQ ID NO: 1269362 - DNA, 15 bp, Homo sapiens
ttcgtggcctttgaa

SEQ ID NO: 1269363 - DNA, 15 bp, Homo sapiens
attcgtggcctttga

SEQ ID NO: 1269364 - DNA, 15 bp, Homo sapiens
gattcgtggcctttg

SEQ ID NO: 1269365 - DNA, 15 bp, Homo sapiens
ggattcgtggccttt

SEQ ID NO: 1269366 - DNA, 15 bp, Homo sapiens
aggattcgtggcctt

SEQ ID NO: 1269367 - DNA, 15 bp, Homo sapiens
gaggattcgtggcct

SEQ ID NO: 1269368 - DNA, 15 bp, Homo sapiens
tgaggattcgtggcc

SEQ ID NO: 1269369 - DNA, 15 bp, Homo sapiens
ttgaggattcgtggc

SEQ ID NO: 1269370 - DNA, 15 bp, Homo sapiens
tttgaggattcgtgg

SEQ ID NO: 1269371 - DNA, 15 bp, Homo sapiens
ctttgaggattcgtg

SEQ ID NO: 1269372 - DNA, 15 bp, Homo sapiens
cctttgaggattcgt

SEQ ID NO: 1269373 - DNA, 15 bp, Homo sapiens
tcctttgaggattcg

SEQ ID NO: 1269374 - DNA, 15 bp, Homo sapiens
gtcctttgaggattc

SEQ ID NO: 1269375 - DNA, 15 bp, Homo sapiens
agtcctttgaggatt

SEQ ID NO: 1269376 - DNA, 15 bp, Homo sapiens
aagtcctttgaggat

SEQ ID NO: 1269377 - DNA, 15 bp, Homo sapiens
gaagtcctttgagga

SEQ ID NO: 1269378 - DNA, 15 bp, Homo sapiens
tgaagtcctttgagg

SEQ ID NO: 1269379 - DNA, 15 bp, Homo sapiens
gtgaagtcctttgag

SEQ ID NO: 1269380 - DNA, 15 bp, Homo sapiens
agtgaagtcctttga

SEQ ID NO: 1269381 - DNA, 15 bp, Homo sapiens
gagtgaagtcctttg

SEQ ID NO: 1269382 - DNA, 15 bp, Homo sapiens
tgagtgaagtccttt

SEQ ID NO: 1269383 - DNA, 15 bp, Homo sapiens
ctgagtgaagtcctt

SEQ ID NO: 1269384 - DNA, 15 bp, Homo sapiens
actgagtgaagtcct

SEQ ID NO: 1269385 - DNA, 15 bp, Homo sapiens
tactgagtgaagtcc

SEQ ID NO: 1269386 - DNA, 15 bp, Homo sapiens
gtactgagtgaagtc

SEQ ID NO: 1269387 - DNA, 15 bp, Homo sapiens
ggtactgagtgaagt

SEQ ID NO: 1269388 - DNA, 15 bp, Homo sapiens
aggtactgagtgaag

SEQ ID NO: 1269389 - DNA, 15 bp, Homo sapiens
gaggtactgagtgaa

SEQ ID NO: 1269390 - DNA, 15 bp, Homo sapiens
tgaggtactgagtga

SEQ ID NO: 1269391 - DNA, 15 bp, Homo sapiens
ttgaggtactgagtg

SEQ ID NO: 1269392 - DNA, 15 bp, Homo sapiens
tttgaggtactgagt

SEQ ID NO: 1269393 - DNA, 15 bp, Homo sapiens
ttttgaggtactgag

SEQ ID NO: 1269394 - DNA, 15 bp, Homo sapiens
gttttgaggtactga

SEQ ID NO: 1269395 - DNA, 15 bp, Homo sapiens
agttttgaggtactg

SEQ ID NO: 1269396 - DNA, 15 bp, Homo sapiens
tagttttgaggtact

SEQ ID NO: 1269397 - DNA, 15 bp, Homo sapiens
atagttttgaggtac

SEQ ID NO: 1269398 - DNA, 15 bp, Homo sapiens
aatagttttgaggta

SEQ ID NO: 1269399 - DNA, 15 bp, Homo sapiens
gaatagttttgaggt

SEQ ID NO: 1269400 - DNA, 15 bp, Homo sapiens
ggaatagttttgagg

SEQ ID NO: 1269401 - DNA, 15 bp, Homo sapiens
tggaatagttttgag

SEQ ID NO: 1269402 - DNA, 15 bp, Homo sapiens
gtggaatagttttga

SEQ ID NO: 1269403 - DNA, 15 bp, Homo sapiens
tgtggaatagttttg

SEQ ID NO: 1269404 - DNA, 15 bp, Homo sapiens
atgtggaatagtttt

SEQ ID NO: 1269405 - DNA, 15 bp, Homo sapiens
aatgtggaatagttt

SEQ ID NO: 1269406 - DNA, 15 bp, Homo sapiens
caatgtggaatagtt

SEQ ID NO: 1269407 - DNA, 15 bp, Homo sapiens
ccaatgtggaatagt

SEQ ID NO: 1269408 - DNA, 15 bp, Homo sapiens
accaatgtggaatag

SEQ ID NO: 1269409 - DNA, 15 bp, Homo sapiens
caccaatgtggaata

SEQ ID NO: 1269410 - DNA, 15 bp, Homo sapiens
gcaccaatgtggaat

SEQ ID NO: 1269411 - DNA, 15 bp, Homo sapiens
agcaccaatgtggaa

SEQ ID NO: 1269412 - DNA, 15 bp, Homo sapiens
aagcaccaatgtgga

SEQ ID NO: 1269413 - DNA, 15 bp, Homo sapiens
taagcaccaatgtgg

SEQ ID NO: 1269414 - DNA, 15 bp, Homo sapiens
gtaagcaccaatgtg

SEQ ID NO: 1269415 - DNA, 15 bp, Homo sapiens
agtaagcaccaatgt

SEQ ID NO: 1269416 - DNA, 15 bp, Homo sapiens
tagtaagcaccaatg

SEQ ID NO: 1269417 - DNA, 15 bp, Homo sapiens
atagtaagcaccaat

SEQ ID NO: 1269418 - DNA, 15 bp, Homo sapiens
aatagtaagcaccaa

SEQ ID NO: 1269419 - DNA, 15 bp, Homo sapiens
taatagtaagcacca

SEQ ID NO: 1269420 - DNA, 15 bp, Homo sapiens
ataatagtaagcacc

SEQ ID NO: 1269421 - DNA, 15 bp, Homo sapiens
tataatagtaagcac

SEQ ID NO: 1269422 - DNA, 15 bp, Homo sapiens
atataatagtaagca

SEQ ID NO: 1269423 - DNA, 15 bp, Homo sapiens
aatataatagtaagc

SEQ ID NO: 1269424 - DNA, 15 bp, Homo sapiens
aaatataatagtaag

SEQ ID NO: 1269425 - DNA, 15 bp, Homo sapiens
aaaatataatagtaa

SEQ ID NO: 1269426 - DNA, 15 bp, Homo sapiens
aaaaatataatagta

SEQ ID NO: 1269427 - DNA, 15 bp, Homo sapiens
caaaaatataatagt

SEQ ID NO: 1269428 - DNA, 15 bp, Homo sapiens
tcaaaaatataatag

SEQ ID NO: 1269429 - DNA, 15 bp, Homo sapiens
atcaaaaatataata

SEQ ID NO: 1269430 - DNA, 15 bp, Homo sapiens
catcaaaaatataat

SEQ ID NO: 1269431 - DNA, 15 bp, Homo sapiens
tcatcaaaaatataa

SEQ ID NO: 1269432 - DNA, 15 bp, Homo sapiens
ctcatcaaaaatata

SEQ ID NO: 1269433 - DNA, 15 bp, Homo sapiens
actcatcaaaaatat

SEQ ID NO: 1269434 - DNA, 15 bp, Homo sapiens
aactcatcaaaaata

SEQ ID NO: 1269435 - DNA, 15 bp, Homo sapiens
gaactcatcaaaaat

SEQ ID NO: 1269436 - DNA, 15 bp, Homo sapiens
agaactcatcaaaaa

SEQ ID NO: 1269437 - DNA, 15 bp, Homo sapiens
tagaactcatcaaaa

SEQ ID NO: 1269438 - DNA, 15 bp, Homo sapiens
ctagaactcatcaaa

SEQ ID NO: 1269439 - DNA, 15 bp, Homo sapiens
tctagaactcatcaa

SEQ ID NO: 1269440 - DNA, 15 bp, Homo sapiens
ctctagaactcatca

SEQ ID NO: 1269441 - DNA, 15 bp, Homo sapiens
tctctagaactcatc

SEQ ID NO: 1269442 - DNA, 15 bp, Homo sapiens
ctctctagaactcat

SEQ ID NO: 1269443 - DNA, 15 bp, Homo sapiens
tctctctagaactca

SEQ ID NO: 1269444 - DNA, 15 bp, Homo sapiens
ctctctctagaactc

SEQ ID NO: 1269445 - DNA, 15 bp, Homo sapiens
tctctctctagaact

SEQ ID NO: 1269446 - DNA, 15 bp, Homo sapiens
ttctctctctagaac

SEQ ID NO: 1269447 - DNA, 15 bp, Homo sapiens
cttctctctctagaa

SEQ ID NO: 1269448 - DNA, 15 bp, Homo sapiens
tcttctctctctaga

SEQ ID NO: 1269449 - DNA, 15 bp, Homo sapiens
ttcttctctctctag

SEQ ID NO: 1269450 - DNA, 15 bp, Homo sapiens
tttcttctctctcta

SEQ ID NO: 1269451 - DNA, 15 bp, Homo sapiens
atttcttctctctct

SEQ ID NO: 1269452 - DNA, 15 bp, Homo sapiens
catttcttctctctc

SEQ ID NO: 1269453 - DNA, 15 bp, Homo sapiens
gcatttcttctctct

SEQ ID NO: 1269454 - DNA, 15 bp, Homo sapiens
agcatttcttctctc

SEQ ID NO: 1269455 - DNA, 15 bp, Homo sapiens
tagcatttcttctct

SEQ ID NO: 1269456 - DNA, 15 bp, Homo sapiens
ttagcatttcttctc

SEQ ID NO: 1269457 - DNA, 15 bp, Homo sapiens
tttagcatttcttct

SEQ ID NO: 1269458 - DNA, 15 bp, Homo sapiens
ttttagcatttcttc

SEQ ID NO: 1269459 - DNA, 15 bp, Homo sapiens
tttttagcatttctt

SEQ ID NO: 1269460 - DNA, 15 bp, Homo sapiens
ttttttagcatttct

SEQ ID NO: 1269461 - DNA, 15 bp, Homo sapiens
gttttttagcatttc

SEQ ID NO: 1269462 - DNA, 15 bp, Homo sapiens
ggttttttagcattt

SEQ ID NO: 1269463 - DNA, 15 bp, Homo sapiens
gggttttttagcatt

SEQ ID NO: 1269464 - DNA, 15 bp, Homo sapiens
tgggttttttagcat

SEQ ID NO: 1269465 - DNA, 15 bp, Homo sapiens
ttgggttttttagca

SEQ ID NO: 1269466 - DNA, 15 bp, Homo sapiens
gttgggttttttagc

SEQ ID NO: 1269467 - DNA, 15 bp, Homo sapiens
tgttgggttttttag

SEQ ID NO: 1269468 - DNA, 15 bp, Homo sapiens
ctgttgggtttttta

SEQ ID NO: 1269469 - DNA, 15 bp, Homo sapiens
actgttgggtttttt

SEQ ID NO: 1269470 - DNA, 15 bp, Homo sapiens
tactgttgggttttt

SEQ ID NO: 1269471 - DNA, 15 bp, Homo sapiens
ctactgttgggtttt

SEQ ID NO: 1269472 - DNA, 15 bp, Homo sapiens
gctactgttgggttt

SEQ ID NO: 1269473 - DNA, 15 bp, Homo sapiens
agctactgttgggtt

SEQ ID NO: 1269474 - DNA, 15 bp, Homo sapiens
gagctactgttgggt

SEQ ID NO: 1269475 - DNA, 15 bp, Homo sapiens
tgagctactgttggg

SEQ ID NO: 1269476 - DNA, 15 bp, Homo sapiens
atgagctactgttgg

SEQ ID NO: 1269477 - DNA, 15 bp, Homo sapiens
aatgagctactgttg

SEQ ID NO: 1269478 - DNA, 15 bp, Homo sapiens
aaatgagctactgtt

SEQ ID NO: 1269479 - DNA, 15 bp, Homo sapiens
aaaatgagctactgt

SEQ ID NO: 1269480 - DNA, 15 bp, Homo sapiens
taaaatgagctactg

SEQ ID NO: 1269481 - DNA, 15 bp, Homo sapiens
ctaaaatgagctact

SEQ ID NO: 1269482 - DNA, 15 bp, Homo sapiens
gctaaaatgagctac

SEQ ID NO: 1269483 - DNA, 15 bp, Homo sapiens
tgctaaaatgagcta

SEQ ID NO: 1269484 - DNA, 15 bp, Homo sapiens
atgctaaaatgagct

SEQ ID NO: 1269485 - DNA, 15 bp, Homo sapiens
gatgctaaaatgagc

SEQ ID NO: 1269486 - DNA, 15 bp, Homo sapiens
agatgctaaaatgag

SEQ ID NO: 1269487 - DNA, 15 bp, Homo sapiens
gagatgctaaaatga

SEQ ID NO: 1269488 - DNA, 15 bp, Homo sapiens
tgagatgctaaaatg

SEQ ID NO: 1269489 - DNA, 15 bp, Homo sapiens
ctgagatgctaaaat

SEQ ID NO: 1269490 - DNA, 15 bp, Homo sapiens
tctgagatgctaaaa

SEQ ID NO: 1269491 - DNA, 15 bp, Homo sapiens
ttctgagatgctaaa

SEQ ID NO: 1269492 - DNA, 15 bp, Homo sapiens
attctgagatgctaa

SEQ ID NO: 1269493 - DNA, 15 bp, Homo sapiens
gattctgagatgcta

SEQ ID NO: 1269494 - DNA, 15 bp, Homo sapiens
ggattctgagatgct

SEQ ID NO: 1269495 - DNA, 15 bp, Homo sapiens
aggattctgagatgc

SEQ ID NO: 1269496 - DNA, 15 bp, Homo sapiens
gaggattctgagatg

SEQ ID NO: 1269497 - DNA, 15 bp, Homo sapiens
tgaggattctgagat

SEQ ID NO: 1269498 - DNA, 15 bp, Homo sapiens
ttgaggattctgaga

SEQ ID NO: 1269499 - DNA, 15 bp, Homo sapiens
cttgaggattctgag

SEQ ID NO: 1269500 - DNA, 15 bp, Homo sapiens
gcttgaggattctga

SEQ ID NO: 1269501 - DNA, 15 bp, Homo sapiens
tgcttgaggattctg

SEQ ID NO: 1269502 - DNA, 15 bp, Homo sapiens
ttgcttgaggattct

SEQ ID NO: 1269503 - DNA, 15 bp, Homo sapiens
cttgcttgaggattc

SEQ ID NO: 1269504 - DNA, 15 bp, Homo sapiens
tcttgcttgaggatt

SEQ ID NO: 1269505 - DNA, 15 bp, Homo sapiens
gtcttgcttgaggat

SEQ ID NO: 1269506 - DNA, 15 bp, Homo sapiens
ggtcttgcttgagga

SEQ ID NO: 1269507 - DNA, 15 bp, Homo sapiens
tggtcttgcttgagg

SEQ ID NO: 1269508 - DNA, 15 bp, Homo sapiens
atggtcttgcttgag

SEQ ID NO: 1269509 - DNA, 15 bp, Homo sapiens
catggtcttgcttga

SEQ ID NO: 1269510 - DNA, 15 bp, Homo sapiens
ccatggtcttgcttg

SEQ ID NO: 1269511 - DNA, 15 bp, Homo sapiens
gccatggtcttgctt

SEQ ID NO: 1269512 - DNA, 15 bp, Homo sapiens
ggccatggtcttgct

SEQ ID NO: 1269513 - DNA, 15 bp, Homo sapiens
tggccatggtcttgc

SEQ ID NO: 1269514 - DNA, 15 bp, Homo sapiens
ttggccatggtcttg

SEQ ID NO: 1269515 - DNA, 15 bp, Homo sapiens
tttggccatggtctt

SEQ ID NO: 1269516 - DNA, 15 bp, Homo sapiens
gtttggccatggtct

SEQ ID NO: 1269517 - DNA, 15 bp, Homo sapiens
tgtttggccatggtc

SEQ ID NO: 1269518 - DNA, 15 bp, Homo sapiens
gtgtttggccatggt

SEQ ID NO: 1269519 - DNA, 15 bp, Homo sapiens
agtgtttggccatgg

SEQ ID NO: 1269520 - DNA, 15 bp, Homo sapiens
gagtgtttggccatg

SEQ ID NO: 1269521 - DNA, 15 bp, Homo sapiens
tgagtgtttggccat

SEQ ID NO: 1269522 - DNA, 15 bp, Homo sapiens
ttgagtgtttggcca

SEQ ID NO: 1269523 - DNA, 15 bp, Homo sapiens
tttgagtgtttggcc

SEQ ID NO: 1269524 - DNA, 15 bp, Homo sapiens
gtttgagtgtttggc

SEQ ID NO: 1269525 - DNA, 15 bp, Homo sapiens
agtttgagtgtttgg

SEQ ID NO: 1269526 - DNA, 15 bp, Homo sapiens
gagtttgagtgtttg

SEQ ID NO: 1269527 - DNA, 15 bp, Homo sapiens
ggagtttgagtgttt

SEQ ID NO: 1269528 - DNA, 15 bp, Homo sapiens
aggagtttgagtgtt

SEQ ID NO: 1269529 - DNA, 15 bp, Homo sapiens
aaggagtttgagtgt

SEQ ID NO: 1269530 - DNA, 15 bp, Homo sapiens
gaaggagtttgagtg

SEQ ID NO: 1269531 - DNA, 15 bp, Homo sapiens
ggaaggagtttgagt

SEQ ID NO: 1269532 - DNA, 15 bp, Homo sapiens
gggaaggagtttgag

SEQ ID NO: 1269533 - DNA, 15 bp, Homo sapiens
agggaaggagtttga

SEQ ID NO: 1269534 - DNA, 15 bp, Homo sapiens
cagggaaggagtttg

SEQ ID NO: 1269535 - DNA, 15 bp, Homo sapiens
tcagggaaggagttt

SEQ ID NO: 1269536 - DNA, 15 bp, Homo sapiens
gtcagggaaggagtt

SEQ ID NO: 1269537 - DNA, 15 bp, Homo sapiens
ggtcagggaaggagt

SEQ ID NO: 1269538 - DNA, 15 bp, Homo sapiens
cggtcagggaaggag

SEQ ID NO: 1269539 - DNA, 15 bp, Homo sapiens
acggtcagggaagga

SEQ ID NO: 1269540 - DNA, 15 bp, Homo sapiens
aacggtcagggaagg

SEQ ID NO: 1269541 - DNA, 15 bp, Homo sapiens
taacggtcagggaag

SEQ ID NO: 1269542 - DNA, 15 bp, Homo sapiens
ataacggtcagggaa

SEQ ID NO: 1269543 - DNA, 15 bp, Homo sapiens
gataacggtcaggga

SEQ ID NO: 1269544 - DNA, 15 bp, Homo sapiens
tgataacggtcaggg

SEQ ID NO: 1269545 - DNA, 15 bp, Homo sapiens
ttgataacggtcagg

SEQ ID NO: 1269546 - DNA, 15 bp, Homo sapiens
cttgataacggtcag

SEQ ID NO: 1269547 - DNA, 15 bp, Homo sapiens
tcttgataacggtca

SEQ ID NO: 1269548 - DNA, 15 bp, Homo sapiens
ctcttgataacggtc

SEQ ID NO: 1269549 - DNA, 15 bp, Homo sapiens
tctcttgataacggt

SEQ ID NO: 1269550 - DNA, 15 bp, Homo sapiens
ttctcttgataacgg

SEQ ID NO: 1269551 - DNA, 15 bp, Homo sapiens
tttctcttgataacg

SEQ ID NO: 1269552 - DNA, 15 bp, Homo sapiens
gtttctcttgataac

SEQ ID NO: 1269553 - DNA, 15 bp, Homo sapiens
agtttctcttgataa

SEQ ID NO: 1269554 - DNA, 15 bp, Homo sapiens
gagtttctcttgata

SEQ ID NO: 1269555 - DNA, 15 bp, Homo sapiens
agagtttctcttgat

SEQ ID NO: 1269556 - DNA, 15 bp, Homo sapiens
gagagtttctcttga

SEQ ID NO: 1269557 - DNA, 15 bp, Homo sapiens
agagagtttctcttg

SEQ ID NO: 1269558 - DNA, 15 bp, Homo sapiens
cagagagtttctctt

SEQ ID NO: 1269559 - DNA, 15 bp, Homo sapiens
gcagagagtttctct

SEQ ID NO: 1269560 - DNA, 15 bp, Homo sapiens
agcagagagtttctc

SEQ ID NO: 1269561 - DNA, 15 bp, Homo sapiens
aagcagagagtttct

SEQ ID NO: 1269562 - DNA, 15 bp, Homo sapiens
aaagcagagagtttc

SEQ ID NO: 1269563 - DNA, 15 bp, Homo sapiens
caaagcagagagttt

SEQ ID NO: 1269564 - DNA, 15 bp, Homo sapiens
acaaagcagagagtt

SEQ ID NO: 1269565 - DNA, 15 bp, Homo sapiens
cacaaagcagagagt

SEQ ID NO: 1269566 - DNA, 15 bp, Homo sapiens
ccacaaagcagagag

SEQ ID NO: 1269567 - DNA, 15 bp, Homo sapiens
accacaaagcagaga

SEQ ID NO: 1269568 - DNA, 15 bp, Homo sapiens
caccacaaagcagag

SEQ ID NO: 1269569 - DNA, 15 bp, Homo sapiens
ccaccacaaagcaga

SEQ ID NO: 1269570 - DNA, 15 bp, Homo sapiens
cccaccacaaagcag

SEQ ID NO: 1269571 - DNA, 15 bp, Homo sapiens
acccaccacaaagca

SEQ ID NO: 1269572 - DNA, 15 bp, Homo sapiens
gacccaccacaaagc

SEQ ID NO: 1269573 - DNA, 15 bp, Homo sapiens
agacccaccacaaag

SEQ ID NO: 1269574 - DNA, 15 bp, Homo sapiens
aagacccaccacaaa

SEQ ID NO: 1269575 - DNA, 15 bp, Homo sapiens
caagacccaccacaa

SEQ ID NO: 1269576 - DNA, 15 bp, Homo sapiens
gcaagacccaccaca

SEQ ID NO: 1269577 - DNA, 15 bp, Homo sapiens
agcaagacccaccac

SEQ ID NO: 1269578 - DNA, 15 bp, Homo sapiens
aagcaagacccacca

SEQ ID NO: 1269579 - DNA, 15 bp, Homo sapiens
gaagcaagacccacc

SEQ ID NO: 1269580 - DNA, 15 bp, Homo sapiens
agaagcaagacccac

SEQ ID NO: 1269581 - DNA, 15 bp, Homo sapiens
cagaagcaagaccca

SEQ ID NO: 1269582 - DNA, 15 bp, Homo sapiens
gcagaagcaagaccc

SEQ ID NO: 1269583 - DNA, 15 bp, Homo sapiens
tgcagaagcaagacc

SEQ ID NO: 1269584 - DNA, 15 bp, Homo sapiens
gtgcagaagcaagac

SEQ ID NO: 1269585 - DNA, 15 bp, Homo sapiens
ggtgcagaagcaaga

SEQ ID NO: 1269586 - DNA, 15 bp, Homo sapiens
gggtgcagaagcaag

SEQ ID NO: 1269587 - DNA, 15 bp, Homo sapiens
tgggtgcagaagcaa

SEQ ID NO: 1269588 - DNA, 15 bp, Homo sapiens
gtgggtgcagaagca

SEQ ID NO: 1269589 - DNA, 15 bp, Homo sapiens
tgtgggtgcagaagc

SEQ ID NO: 1269590 - DNA, 15 bp, Homo sapiens
ctgtgggtgcagaag

SEQ ID NO: 1269591 - DNA, 15 bp, Homo sapiens
cctgtgggtgcagaa

SEQ ID NO: 1269592 - DNA, 15 bp, Homo sapiens
tcctgtgggtgcaga

SEQ ID NO: 1269593 - DNA, 15 bp, Homo sapiens
ttcctgtgggtgcag

SEQ ID NO: 1269594 - DNA, 15 bp, Homo sapiens
tttcctgtgggtgca

SEQ ID NO: 1269595 - DNA, 15 bp, Homo sapiens
atttcctgtgggtgc

SEQ ID NO: 1269596 - DNA, 15 bp, Homo sapiens
catttcctgtgggtg

SEQ ID NO: 1269597 - DNA, 15 bp, Homo sapiens
gcatttcctgtgggt

SEQ ID NO: 1269598 - DNA, 15 bp, Homo sapiens
tgcatttcctgtggg

SEQ ID NO: 1269599 - DNA, 15 bp, Homo sapiens
ctgcatttcctgtgg

SEQ ID NO: 1269600 - DNA, 15 bp, Homo sapiens
actgcatttcctgtg

SEQ ID NO: 1269601 - DNA, 15 bp, Homo sapiens
aactgcatttcctgt

SEQ ID NO: 1269602 - DNA, 15 bp, Homo sapiens
aaactgcatttcctg

SEQ ID NO: 1269603 - DNA, 15 bp, Homo sapiens
gaaactgcatttcct

SEQ ID NO: 1269604 - DNA, 15 bp, Homo sapiens
agaaactgcatttcc

SEQ ID NO: 1269605 - DNA, 15 bp, Homo sapiens
gagaaactgcatttc

SEQ ID NO: 1269606 - DNA, 15 bp, Homo sapiens
agagaaactgcattt

SEQ ID NO: 1269607 - DNA, 15 bp, Homo sapiens
aagagaaactgcatt

SEQ ID NO: 1269608 - DNA, 15 bp, Homo sapiens
caagagaaactgcat

SEQ ID NO: 1269609 - DNA, 15 bp, Homo sapiens
gcaagagaaactgca

SEQ ID NO: 1269610 - DNA, 15 bp, Homo sapiens
tgcaagagaaactgc

SEQ ID NO: 1269611 - DNA, 15 bp, Homo sapiens
gtgcaagagaaactg

SEQ ID NO: 1269612 - DNA, 15 bp, Homo sapiens
tgtgcaagagaaact

SEQ ID NO: 1269613 - DNA, 15 bp, Homo sapiens
ttgtgcaagagaaac

SEQ ID NO: 1269614 - DNA, 15 bp, Homo sapiens
cttgtgcaagagaaa

SEQ ID NO: 1269615 - DNA, 15 bp, Homo sapiens
acttgtgcaagagaa

SEQ ID NO: 1269616 - DNA, 15 bp, Homo sapiens
tacttgtgcaagaga

SEQ ID NO: 1269617 - DNA, 15 bp, Homo sapiens
ttacttgtgcaagag

SEQ ID NO: 1269618 - DNA, 15 bp, Homo sapiens
gttacttgtgcaaga

SEQ ID NO: 1269619 - DNA, 15 bp, Homo sapiens
tgttacttgtgcaag

SEQ ID NO: 1269620 - DNA, 15 bp, Homo sapiens
gtgttacttgtgcaa

SEQ ID NO: 1269621 - DNA, 15 bp, Homo sapiens
tgtgttacttgtgca

SEQ ID NO: 1269622 - DNA, 15 bp, Homo sapiens
ttgtgttacttgtgc

SEQ ID NO: 1269623 - DNA, 15 bp, Homo sapiens
attgtgttacttgtg

SEQ ID NO: 1269624 - DNA, 15 bp, Homo sapiens
gattgtgttacttgt

SEQ ID NO: 1269625 - DNA, 15 bp, Homo sapiens
tgattgtgttacttg

SEQ ID NO: 1269626 - DNA, 15 bp, Homo sapiens
gtgattgtgttactt

SEQ ID NO: 1269627 - DNA, 15 bp, Homo sapiens
tgtgattgtgttact

SEQ ID NO: 1269628 - DNA, 15 bp, Homo sapiens
ttgtgattgtgttac

SEQ ID NO: 1269629 - DNA, 15 bp, Homo sapiens
attgtgattgtgtta

SEQ ID NO: 1269630 - DNA, 15 bp, Homo sapiens
tattgtgattgtgtt

SEQ ID NO: 1269631 - DNA, 15 bp, Homo sapiens
ttattgtgattgtgt

SEQ ID NO: 1269632 - DNA, 15 bp, Homo sapiens
cttattgtgattgtg

SEQ ID NO: 1269633 - DNA, 15 bp, Homo sapiens
acttattgtgattgt

SEQ ID NO: 1269634 - DNA, 15 bp, Homo sapiens
cacttattgtgattg

SEQ ID NO: 1269635 - DNA, 15 bp, Homo sapiens
tcacttattgtgatt

SEQ ID NO: 1269636 - DNA, 15 bp, Homo sapiens
ctcacttattgtgat

SEQ ID NO: 1269637 - DNA, 15 bp, Homo sapiens
tctcacttattgtga

SEQ ID NO: 1269638 - DNA, 15 bp, Homo sapiens
ctctcacttattgtg

SEQ ID NO: 1269639 - DNA, 15 bp, Homo sapiens
cctctcacttattgt

SEQ ID NO: 1269640 - DNA, 15 bp, Homo sapiens
acctctcacttattg

SEQ ID NO: 1269641 - DNA, 15 bp, Homo sapiens
gacctctcacttatt

SEQ ID NO: 1269642 - DNA, 15 bp, Homo sapiens
tgacctctcacttat

SEQ ID NO: 1269643 - DNA, 15 bp, Homo sapiens
gtgacctctcactta

SEQ ID NO: 1269644 - DNA, 15 bp, Homo sapiens
ggtgacctctcactt

SEQ ID NO: 1269645 - DNA, 15 bp, Homo sapiens
aggtgacctctcact

SEQ ID NO: 1269646 - DNA, 15 bp, Homo sapiens
caggtgacctctcac

SEQ ID NO: 1269647 - DNA, 15 bp, Homo sapiens
tcaggtgacctctca

SEQ ID NO: 1269648 - DNA, 15 bp, Homo sapiens
ctcaggtgacctctc

SEQ ID NO: 1269649 - DNA, 15 bp, Homo sapiens
cctcaggtgacctct

SEQ ID NO: 1269650 - DNA, 15 bp, Homo sapiens
ccctcaggtgacctc

SEQ ID NO: 1269651 - DNA, 15 bp, Homo sapiens
tccctcaggtgacct

SEQ ID NO: 1269652 - DNA, 15 bp, Homo sapiens
ctccctcaggtgacc

SEQ ID NO: 1269653 - DNA, 15 bp, Homo sapiens
tctccctcaggtgac

SEQ ID NO: 1269654 - DNA, 15 bp, Homo sapiens
atctccctcaggtga

SEQ ID NO: 1269655 - DNA, 15 bp, Homo sapiens
tatctccctcaggtg

SEQ ID NO: 1269656 - DNA, 15 bp, Homo sapiens
gtatctccctcaggt

SEQ ID NO: 1269657 - DNA, 15 bp, Homo sapiens
tgtatctccctcagg

SEQ ID NO: 1269658 - DNA, 15 bp, Homo sapiens
ttgtatctccctcag

SEQ ID NO: 1269659 - DNA, 15 bp, Homo sapiens
gttgtatctccctca

SEQ ID NO: 1269660 - DNA, 15 bp, Homo sapiens
ggttgtatctccctc

SEQ ID NO: 1269661 - DNA, 15 bp, Homo sapiens
tggttgtatctccct

SEQ ID NO: 1269662 - DNA, 15 bp, Homo sapiens
ctggttgtatctccc

SEQ ID NO: 1269663 - DNA, 15 bp, Homo sapiens
tctggttgtatctcc

SEQ ID NO: 1269664 - DNA, 15 bp, Homo sapiens
gtctggttgtatctc

SEQ ID NO: 1269665 - DNA, 15 bp, Homo sapiens
ggtctggttgtatct

SEQ ID NO: 1269666 - DNA, 15 bp, Homo sapiens
aggtctggttgtatc

SEQ ID NO: 1269667 - DNA, 15 bp, Homo sapiens
caggtctggttgtat

SEQ ID NO: 1269668 - DNA, 15 bp, Homo sapiens
ccaggtctggttgta

SEQ ID NO: 1269669 - DNA, 15 bp, Homo sapiens
tccaggtctggttgt

SEQ ID NO: 1269670 - DNA, 15 bp, Homo sapiens
ctccaggtctggttg

SEQ ID NO: 1269671 - DNA, 15 bp, Homo sapiens
tctccaggtctggtt

SEQ ID NO: 1269672 - DNA, 15 bp, Homo sapiens
atctccaggtctggt

SEQ ID NO: 1269673 - DNA, 15 bp, Homo sapiens
catctccaggtctgg

SEQ ID NO: 1269674 - DNA, 15 bp, Homo sapiens
ccatctccaggtctg

SEQ ID NO: 1269675 - DNA, 15 bp, Homo sapiens
tccatctccaggtct

SEQ ID NO: 1269676 - DNA, 15 bp, Homo sapiens
ttccatctccaggtc

SEQ ID NO: 1269677 - DNA, 15 bp, Homo sapiens
tttccatctccaggt

SEQ ID NO: 1269678 - DNA, 15 bp, Homo sapiens
ctttccatctccagg

SEQ ID NO: 1269679 - DNA, 15 bp, Homo sapiens
cctttccatctccag

SEQ ID NO: 1269680 - DNA, 15 bp, Homo sapiens
tcctttccatctcca

SEQ ID NO: 1269681 - DNA, 15 bp, Homo sapiens
ctcctttccatctcc

SEQ ID NO: 1269682 - DNA, 15 bp, Homo sapiens
tctcctttccatctc

SEQ ID NO: 1269683 - DNA, 15 bp, Homo sapiens
ctctcctttccatct

SEQ ID NO: 1269684 - DNA, 15 bp, Homo sapiens
tctctcctttccatc

SEQ ID NO: 1269685 - DNA, 15 bp, Homo sapiens
ttctctcctttccat

SEQ ID NO: 1269686 - DNA, 15 bp, Homo sapiens
tttctctcctttcca

SEQ ID NO: 1269687 - DNA, 15 bp, Homo sapiens
atttctctcctttcc

SEQ ID NO: 1269688 - DNA, 15 bp, Homo sapiens
catttctctcctttc

SEQ ID NO: 1269689 - DNA, 15 bp, Homo sapiens
ccatttctctccttt

SEQ ID NO: 1269690 - DNA, 15 bp, Homo sapiens
accatttctctcctt

SEQ ID NO: 1269691 - DNA, 15 bp, Homo sapiens
taccatttctctcct

SEQ ID NO: 1269692 - DNA, 15 bp, Homo sapiens
gtaccatttctctcc

SEQ ID NO: 1269693 - DNA, 15 bp, Homo sapiens
tgtaccatttctctc

SEQ ID NO: 1269694 - DNA, 15 bp, Homo sapiens
ttgtaccatttctct

SEQ ID NO: 1269695 - DNA, 15 bp, Homo sapiens
cttgtaccatttctc

SEQ ID NO: 1269696 - DNA, 15 bp, Homo sapiens
tcttgtaccatttct

SEQ ID NO: 1269697 - DNA, 15 bp, Homo sapiens
gtcttgtaccatttc

SEQ ID NO: 1269698 - DNA, 15 bp, Homo sapiens
agtcttgtaccattt

SEQ ID NO: 1269699 - DNA, 15 bp, Homo sapiens
tagtcttgtaccatt

SEQ ID NO: 1269700 - DNA, 15 bp, Homo sapiens
gtagtcttgtaccat

SEQ ID NO: 1269701 - DNA, 15 bp, Homo sapiens
tgtagtcttgtacca

SEQ ID NO: 1269702 - DNA, 15 bp, Homo sapiens
ttgtagtcttgtacc

SEQ ID NO: 1269703 - DNA, 15 bp, Homo sapiens
tttgtagtcttgtac

SEQ ID NO: 1269704 - DNA, 15 bp, Homo sapiens
ctttgtagtcttgta

SEQ ID NO: 1269705 - DNA, 15 bp, Homo sapiens
actttgtagtcttgt

SEQ ID NO: 1269706 - DNA, 15 bp, Homo sapiens
gactttgtagtcttg

SEQ ID NO: 1269707 - DNA, 15 bp, Homo sapiens
ggactttgtagtctt

SEQ ID NO: 1269708 - DNA, 15 bp, Homo sapiens
aggactttgtagtct

SEQ ID NO: 1269709 - DNA, 15 bp, Homo sapiens
aaggactttgtagtc

SEQ ID NO: 1269710 - DNA, 15 bp, Homo sapiens
taaggactttgtagt

SEQ ID NO: 1269711 - DNA, 15 bp, Homo sapiens
ataaggactttgtag

SEQ ID NO: 1269712 - DNA, 15 bp, Homo sapiens
gataaggactttgta

SEQ ID NO: 1269713 - DNA, 15 bp, Homo sapiens
tgataaggactttgt

SEQ ID NO: 1269714 - DNA, 15 bp, Homo sapiens
ttgataaggactttg

SEQ ID NO: 1269715 - DNA, 15 bp, Homo sapiens
cttgataaggacttt

SEQ ID NO: 1269716 - DNA, 15 bp, Homo sapiens
ccttgataaggactt

SEQ ID NO: 1269717 - DNA, 15 bp, Homo sapiens
accttgataaggact

SEQ ID NO: 1269718 - DNA, 15 bp, Homo sapiens
aaccttgataaggac

SEQ ID NO: 1269719 - DNA, 15 bp, Homo sapiens
aaaccttgataagga

SEQ ID NO: 1269720 - DNA, 15 bp, Homo sapiens
taaaccttgataagg

SEQ ID NO: 1269721 - DNA, 15 bp, Homo sapiens
gtaaaccttgataag

SEQ ID NO: 1269722 - DNA, 15 bp, Homo sapiens
tgtaaaccttgataa

SEQ ID NO: 1269723 - DNA, 15 bp, Homo sapiens
atgtaaaccttgata

SEQ ID NO: 1269724 - DNA, 15 bp, Homo sapiens
aatgtaaaccttgat

SEQ ID NO: 1269725 - DNA, 15 bp, Homo sapiens
aaatgtaaaccttga

SEQ ID NO: 1269726 - DNA, 15 bp, Homo sapiens
aaaatgtaaaccttg

SEQ ID NO: 1269727 - DNA, 15 bp, Homo sapiens
aaaaatgtaaacctt

SEQ ID NO: 1269728 - DNA, 15 bp, Homo sapiens
aaaaaatgtaaacct

SEQ ID NO: 1269729 - DNA, 15 bp, Homo sapiens
aaaaaaatgtaaacc

SEQ ID NO: 1269730 - DNA, 15 bp, Homo sapiens
aaaaaaaatgtaaac

SEQ ID NO: 1269731 - DNA, 15 bp, Homo sapiens
caaaaaaaatgtaaa

SEQ ID NO: 1269732 - DNA, 15 bp, Homo sapiens
gcaaaaaaaatgtaa

SEQ ID NO: 1269733 - DNA, 15 bp, Homo sapiens
ggcaaaaaaaatgta

SEQ ID NO: 1269734 - DNA, 15 bp, Homo sapiens
aggcaaaaaaaatgt

SEQ ID NO: 1269735 - DNA, 15 bp, Homo sapiens
aaggcaaaaaaaatg

SEQ ID NO: 1269736 - DNA, 15 bp, Homo sapiens
caaggcaaaaaaaat

SEQ ID NO: 1269737 - DNA, 15 bp, Homo sapiens
gcaaggcaaaaaaaa

SEQ ID NO: 1269738 - DNA, 15 bp, Homo sapiens
tgcaaggcaaaaaaa

SEQ ID NO: 1269739 - DNA, 15 bp, Homo sapiens
ttgcaaggcaaaaaa

SEQ ID NO: 1269740 - DNA, 15 bp, Homo sapiens
tttgcaaggcaaaaa

SEQ ID NO: 1269741 - DNA, 15 bp, Homo sapiens
ttttgcaaggcaaaa

SEQ ID NO: 1269742 - DNA, 15 bp, Homo sapiens
gttttgcaaggcaaa

SEQ ID NO: 1269743 - DNA, 15 bp, Homo sapiens
tgttttgcaaggcaa

SEQ ID NO: 1269744 - DNA, 15 bp, Homo sapiens
ctgttttgcaaggca

SEQ ID NO: 1269745 - DNA, 15 bp, Homo sapiens
tctgttttgcaaggc

SEQ ID NO: 1269746 - DNA, 15 bp, Homo sapiens
gtctgttttgcaagg

SEQ ID NO: 1269747 - DNA, 15 bp, Homo sapiens
ggtctgttttgcaag

SEQ ID NO: 1269748 - DNA, 15 bp, Homo sapiens
aggtctgttttgcaa

SEQ ID NO: 1269749 - DNA, 15 bp, Homo sapiens
aaggtctgttttgca

SEQ ID NO: 1269750 - DNA, 15 bp, Homo sapiens
aaaggtctgttttgc

SEQ ID NO: 1269751 - DNA, 15 bp, Homo sapiens
taaaggtctgttttg

SEQ ID NO: 1269752 - DNA, 15 bp, Homo sapiens
cttataaaggtctgt

SEQ ID NO: 1269753 - DNA, 15 bp, Homo sapiens
tcttataaaggtctg

SEQ ID NO: 1269754 - DNA, 15 bp, Homo sapiens
ttcttataaaggtct

SEQ ID NO: 1269755 - DNA, 15 bp, Homo sapiens
tttcttataaaggtc

SEQ ID NO: 1269756 - DNA, 15 bp, Homo sapiens
atttcttataaaggt

SEQ ID NO: 1269757 - DNA, 15 bp, Homo sapiens
catttcttataaagg

SEQ ID NO: 1269758 - DNA, 15 bp, Homo sapiens
acatttcttataaag

SEQ ID NO: 1269759 - DNA, 15 bp, Homo sapiens
gacatttcttataaa

SEQ ID NO: 1269760 - DNA, 15 bp, Homo sapiens
tgacatttcttataa

SEQ ID NO: 1269761 - DNA, 15 bp, Homo sapiens
ttgacatttcttata

SEQ ID NO: 1269762 - DNA, 15 bp, Homo sapiens
attgacatttcttat

SEQ ID NO: 1269763 - DNA, 15 bp, Homo sapiens
cattgacatttctta

SEQ ID NO: 1269764 - DNA, 15 bp, Homo sapiens
acattgacatttctt

SEQ ID NO: 1269765 - DNA, 15 bp, Homo sapiens
tacattgacatttct

SEQ ID NO: 1269766 - DNA, 15 bp, Homo sapiens
atacattgacatttc

SEQ ID NO: 1269767 - DNA, 15 bp, Homo sapiens
aatacattgacattt

SEQ ID NO: 1269768 - DNA, 15 bp, Homo sapiens
taatacattgacatt

SEQ ID NO: 1269769 - DNA, 15 bp, Homo sapiens
ctaatacattgacat

SEQ ID NO: 1269770 - DNA, 15 bp, Homo sapiens
tctaatacattgaca

SEQ ID NO: 1269771 - DNA, 15 bp, Homo sapiens
ctctaatacattgac

SEQ ID NO: 1269772 - DNA, 15 bp, Homo sapiens
cctctaatacattga

SEQ ID NO: 1269773 - DNA, 15 bp, Homo sapiens
acctctaatacattg

SEQ ID NO: 1269774 - DNA, 15 bp, Homo sapiens
tacctctaatacatt

SEQ ID NO: 1269775 - DNA, 15 bp, Homo sapiens
ttacctctaatacat

SEQ ID NO: 1269776 - DNA, 15 bp, Homo sapiens
gttacctctaataca

SEQ ID NO: 1269777 - DNA, 15 bp, Homo sapiens
cgttacctctaatac

SEQ ID NO: 1269778 - DNA, 15 bp, Homo sapiens
ccgttacctctaata

SEQ ID NO: 1269779 - DNA, 15 bp, Homo sapiens
cccgttacctctaat

SEQ ID NO: 1269780 - DNA, 15 bp, Homo sapiens
gcccgttacctctaa

SEQ ID NO: 1269781 - DNA, 15 bp, Homo sapiens
ggcccgttacctcta

SEQ ID NO: 1269782 - DNA, 15 bp, Homo sapiens
tggcccgttacctct

SEQ ID NO: 1269783 - DNA, 15 bp, Homo sapiens
gtggcccgttacctc

SEQ ID NO: 1269784 - DNA, 15 bp, Homo sapiens
tgtggcccgttacct

SEQ ID NO: 1269785 - DNA, 15 bp, Homo sapiens
gtgtggcccgttacc

SEQ ID NO: 1269786 - DNA, 15 bp, Homo sapiens
tgtgtggcccgttac

SEQ ID NO: 1269787 - DNA, 15 bp, Homo sapiens
ttgtgtggcccgtta

SEQ ID NO: 1269788 - DNA, 15 bp, Homo sapiens
cttgtgtggcccgtt

SEQ ID NO: 1269789 - DNA, 15 bp, Homo sapiens
tcttgtgtggcccgt

SEQ ID NO: 1269790 - DNA, 15 bp, Homo sapiens
atcttgtgtggcccg

SEQ ID NO: 1269791 - DNA, 15 bp, Homo sapiens
catcttgtgtggccc

SEQ ID NO: 1269792 - DNA, 15 bp, Homo sapiens
tcatcttgtgtggcc

SEQ ID NO: 1269793 - DNA, 15 bp, Homo sapiens
ctcatcttgtgtggc

SEQ ID NO: 1269794 - DNA, 15 bp, Homo sapiens
tctcatcttgtgtgg

SEQ ID NO: 1269795 - DNA, 15 bp, Homo sapiens
ttctcatcttgtgtg

SEQ ID NO: 1269796 - DNA, 15 bp, Homo sapiens
tttctcatcttgtgt

SEQ ID NO: 1269797 - DNA, 15 bp, Homo sapiens
ttttctcatcttgtg

SEQ ID NO: 1269798 - DNA, 15 bp, Homo sapiens
cttttctcatcttgt

SEQ ID NO: 1269799 - DNA, 15 bp, Homo sapiens
tcttttctcatcttg

SEQ ID NO: 1269800 - DNA, 15 bp, Homo sapiens
atcttttctcatctt

SEQ ID NO: 1269801 - DNA, 15 bp, Homo sapiens
catcttttctcatct

SEQ ID NO: 1269802 - DNA, 15 bp, Homo sapiens
tcatcttttctcatc

SEQ ID NO: 1269803 - DNA, 15 bp, Homo sapiens
atcatcttttctcat

SEQ ID NO: 1269804 - DNA, 15 bp, Homo sapiens
catcatcttttctca

SEQ ID NO: 1269805 - DNA, 15 bp, Homo sapiens
tcatcatcttttctc

SEQ ID NO: 1269806 - DNA, 15 bp, Homo sapiens
atcatcatcttttct

SEQ ID NO: 1269807 - DNA, 15 bp, Homo sapiens
catcatcatcttttc

SEQ ID NO: 1269808 - DNA, 15 bp, Homo sapiens
gcatcatcatctttt

SEQ ID NO: 1269809 - DNA, 15 bp, Homo sapiens
ggcatcatcatcttt

SEQ ID NO: 1269810 - DNA, 15 bp, Homo sapiens
tggcatcatcatctt

SEQ ID NO: 1269811 - DNA, 15 bp, Homo sapiens
atggcatcatcatct

SEQ ID NO: 1269812 - DNA, 15 bp, Homo sapiens
gatggcatcatcatc

SEQ ID NO: 1269813 - DNA, 15 bp, Homo sapiens
tgatggcatcatcat

SEQ ID NO: 1269814 - DNA, 15 bp, Homo sapiens
atgatggcatcatca

SEQ ID NO: 1269815 - DNA, 15 bp, Homo sapiens
aatgatggcatcatc

SEQ ID NO: 1269816 - DNA, 15 bp, Homo sapiens
gaatgatggcatcat

SEQ ID NO: 1269817 - DNA, 15 bp, Homo sapiens
tgaatgatggcatca

SEQ ID NO: 1269818 - DNA, 15 bp, Homo sapiens
atgaatgatggcatc

SEQ ID NO: 1269819 - DNA, 15 bp, Homo sapiens
catgaatgatggcat

SEQ ID NO: 1269820 - DNA, 15 bp, Homo sapiens
tcatgaatgatggca

SEQ ID NO: 1269821 - DNA, 15 bp, Homo sapiens
gtcatgaatgatggc

SEQ ID NO: 1269822 - DNA, 15 bp, Homo sapiens
tgtcatgaatgatgg

SEQ ID NO: 1269823 - DNA, 15 bp, Homo sapiens
ttgtcatgaatgatg

SEQ ID NO: 1269824 - DNA, 15 bp, Homo sapiens
attgtcatgaatgat

SEQ ID NO: 1269825 - DNA, 15 bp, Homo sapiens
aattgtcatgaatga

SEQ ID NO: 1269826 - DNA, 15 bp, Homo sapiens
gaattgtcatgaatg

SEQ ID NO: 1269827 - DNA, 15 bp, Homo sapiens
agaattgtcatgaat

SEQ ID NO: 1269828 - DNA, 15 bp, Homo sapiens
gagaattgtcatgaa

SEQ ID NO: 1269829 - DNA, 15 bp, Homo sapiens
ggagaattgtcatga

SEQ ID NO: 1269830 - DNA, 15 bp, Homo sapiens
cggagaattgtcatg

SEQ ID NO: 1269831 - DNA, 15 bp, Homo sapiens
acggagaattgtcat

SEQ ID NO: 1269832 - DNA, 15 bp, Homo sapiens
tacggagaattgtca

SEQ ID NO: 1269833 - DNA, 15 bp, Homo sapiens
ctacggagaattgtc

SEQ ID NO: 1269834 - DNA, 15 bp, Homo sapiens
cctacggagaattgt

SEQ ID NO: 1269835 - DNA, 15 bp, Homo sapiens
acctacggagaattg

SEQ ID NO: 1269836 - DNA, 15 bp, Homo sapiens
gacctacggagaatt

SEQ ID NO: 1269837 - DNA, 15 bp, Homo sapiens
ggacctacggagaat

SEQ ID NO: 1269838 - DNA, 15 bp, Homo sapiens
aggacctacggagaa

SEQ ID NO: 1269839 - DNA, 15 bp, Homo sapiens
caggacctacggaga

SEQ ID NO: 1269840 - DNA, 15 bp, Homo sapiens
gcaggacctacggag

SEQ ID NO: 1269841 - DNA, 15 bp, Homo sapiens
ggcaggacctacgga

SEQ ID NO: 1269842 - DNA, 15 bp, Homo sapiens
tggcaggacctacgg

SEQ ID NO: 1269843 - DNA, 15 bp, Homo sapiens
gtggcaggacctacg

SEQ ID NO: 1269844 - DNA, 15 bp, Homo sapiens
ggtggcaggacctac

SEQ ID NO: 1269845 - DNA, 15 bp, Homo sapiens
tggtggcaggaccta

SEQ ID NO: 1269846 - DNA, 15 bp, Homo sapiens
ttggtggcaggacct

SEQ ID NO: 1269847 - DNA, 15 bp, Homo sapiens
cttggtggcaggacc

SEQ ID NO: 1269848 - DNA, 15 bp, Homo sapiens
ccttggtggcaggac

SEQ ID NO: 1269849 - DNA, 15 bp, Homo sapiens
tccttggtggcagga

SEQ ID NO: 1269850 - DNA, 15 bp, Homo sapiens
ttccttggtggcagg

SEQ ID NO: 1269851 - DNA, 15 bp, Homo sapiens
cttccttggtggcag

SEQ ID NO: 1269852 - DNA, 15 bp, Homo sapiens
tcttccttggtggca

SEQ ID NO: 1269853 - DNA, 15 bp, Homo sapiens
ctcttccttggtggc

SEQ ID NO: 1269854 - DNA, 15 bp, Homo sapiens
gctcttccttggtgg

SEQ ID NO: 1269855 - DNA, 15 bp, Homo sapiens
tgctcttccttggtg

SEQ ID NO: 1269856 - DNA, 15 bp, Homo sapiens
ttgctcttccttggt

SEQ ID NO: 1269857 - DNA, 15 bp, Homo sapiens
attgctcttccttgg

SEQ ID NO: 1269858 - DNA, 15 bp, Homo sapiens
cattgctcttccttg

SEQ ID NO: 1269859 - DNA, 15 bp, Homo sapiens
tcattgctcttcctt

SEQ ID NO: 1269860 - DNA, 15 bp, Homo sapiens
ctcattgctcttcct

SEQ ID NO: 1269861 - DNA, 15 bp, Homo sapiens
gctcattgctcttcc

SEQ ID NO: 1269862 - DNA, 15 bp, Homo sapiens
agctcattgctcttc

SEQ ID NO: 1269863 - DNA, 15 bp, Homo sapiens
tagctcattgctctt

SEQ ID NO: 1269864 - DNA, 15 bp, Homo sapiens
gtagctcattgctct

SEQ ID NO: 1269865 - DNA, 15 bp, Homo sapiens
agtagctcattgctc

SEQ ID NO: 1269866 - DNA, 15 bp, Homo sapiens
cagtagctcattgct

SEQ ID NO: 1269867 - DNA, 15 bp, Homo sapiens
tcagtagctcattgc

SEQ ID NO: 1269868 - DNA, 15 bp, Homo sapiens
atcagtagctcattg

SEQ ID NO: 1269869 - DNA, 15 bp, Homo sapiens
catcagtagctcatt

SEQ ID NO: 1269870 - DNA, 15 bp, Homo sapiens
gcatcagtagctcat

SEQ ID NO: 1269871 - DNA, 15 bp, Homo sapiens
ggcatcagtagctca

SEQ ID NO: 1269872 - DNA, 15 bp, Homo sapiens
gggcatcagtagctc

SEQ ID NO: 1269873 - DNA, 15 bp, Homo sapiens
tgggcatcagtagct

SEQ ID NO: 1269874 - DNA, 15 bp, Homo sapiens
atgggcatcagtagc

SEQ ID NO: 1269875 - DNA, 15 bp, Homo sapiens
aatgggcatcagtag

SEQ ID NO: 1269876 - DNA, 15 bp, Homo sapiens
caatgggcatcagta

SEQ ID NO: 1269877 - DNA, 15 bp, Homo sapiens
acaatgggcatcagt

SEQ ID NO: 1269878 - DNA, 15 bp, Homo sapiens
cacaatgggcatcag

SEQ ID NO: 1269879 - DNA, 15 bp, Homo sapiens
ccacaatgggcatca

SEQ ID NO: 1269880 - DNA, 15 bp, Homo sapiens
cccacaatgggcatc

SEQ ID NO: 1269881 - DNA, 15 bp, Homo sapiens
ccccacaatgggcat

SEQ ID NO: 1269882 - DNA, 15 bp, Homo sapiens
accccacaatgggca

SEQ ID NO: 1269883 - DNA, 15 bp, Homo sapiens
gaccccacaatgggc

SEQ ID NO: 1269884 - DNA, 15 bp, Homo sapiens
ggaccccacaatggg

SEQ ID NO: 1269885 - DNA, 15 bp, Homo sapiens
tggaccccacaatgg

SEQ ID NO: 1269886 - DNA, 15 bp, Homo sapiens
ttggaccccacaatg

SEQ ID NO: 1269887 - DNA, 15 bp, Homo sapiens
gttggaccccacaat

SEQ ID NO: 1269888 - DNA, 15 bp, Homo sapiens
tgttggaccccacaa

SEQ ID NO: 1269889 - DNA, 15 bp, Homo sapiens
ttgttggaccccaca

SEQ ID NO: 1269890 - DNA, 15 bp, Homo sapiens
tttgttggaccccac

SEQ ID NO: 1269891 - DNA, 15 bp, Homo sapiens
ttttgttggacccca

SEQ ID NO: 1269892 - DNA, 15 bp, Homo sapiens
cttttgttggacccc

SEQ ID NO: 1269893 - DNA, 15 bp, Homo sapiens
gcttttgttggaccc

SEQ ID NO: 1269894 - DNA, 15 bp, Homo sapiens
tgcttttgttggacc

SEQ ID NO: 1269895 - DNA, 15 bp, Homo sapiens
atgcttttgttggac

SEQ ID NO: 1269896 - DNA, 15 bp, Homo sapiens
catgcttttgttgga

SEQ ID NO: 1269897 - DNA, 15 bp, Homo sapiens
ccatgcttttgttgg

SEQ ID NO: 1269898 - DNA, 15 bp, Homo sapiens
accatgcttttgttg

SEQ ID NO: 1269899 - DNA, 15 bp, Homo sapiens
aaccatgcttttgtt

SEQ ID NO: 1269900 - DNA, 15 bp, Homo sapiens
taaccatgcttttgt

SEQ ID NO: 1269901 - DNA, 15 bp, Homo sapiens
ataaccatgcttttg

SEQ ID NO: 1269902 - DNA, 15 bp, Homo sapiens
cataaccatgctttt

SEQ ID NO: 1269903 - DNA, 15 bp, Homo sapiens
acataaccatgcttt

SEQ ID NO: 1269904 - DNA, 15 bp, Homo sapiens
gacataaccatgctt

SEQ ID NO: 1269905 - DNA, 15 bp, Homo sapiens
ggacataaccatgct

SEQ ID NO: 1269906 - DNA, 15 bp, Homo sapiens
gggacataaccatgc

SEQ ID NO: 1269907 - DNA, 15 bp, Homo sapiens
tgggacataaccatg

SEQ ID NO: 1269908 - DNA, 15 bp, Homo sapiens
ctgggacataaccat

SEQ ID NO: 1269909 - DNA, 15 bp, Homo sapiens
tctgggacataacca

SEQ ID NO: 1269910 - DNA, 15 bp, Homo sapiens
ttctgggacataacc

SEQ ID NO: 1269911 - DNA, 15 bp, Homo sapiens
gttctgggacataac

SEQ ID NO: 1269912 - DNA, 15 bp, Homo sapiens
ggttctgggacataa

SEQ ID NO: 1269913 - DNA, 15 bp, Homo sapiens
tggttctgggacata

SEQ ID NO: 1269914 - DNA, 15 bp, Homo sapiens
ctggttctgggacat

SEQ ID NO: 1269915 - DNA, 15 bp, Homo sapiens
gctggttctgggaca

SEQ ID NO: 1269916 - DNA, 15 bp, Homo sapiens
agctggttctgggac

SEQ ID NO: 1269917 - DNA, 15 bp, Homo sapiens
cagctggttctggga

SEQ ID NO: 1269918 - DNA, 15 bp, Homo sapiens
tcagctggttctggg

SEQ ID NO: 1269919 - DNA, 15 bp, Homo sapiens
ttcagctggttctgg

SEQ ID NO: 1269920 - DNA, 15 bp, Homo sapiens
tttcagctggttctg

SEQ ID NO: 1269921 - DNA, 15 bp, Homo sapiens
ttttcagctggttct

SEQ ID NO: 1269922 - DNA, 15 bp, Homo sapiens
cttttcagctggttc

SEQ ID NO: 1269923 - DNA, 15 bp, Homo sapiens
gcttttcagctggtt

SEQ ID NO: 1269924 - DNA, 15 bp, Homo sapiens
tgcttttcagctggt

SEQ ID NO: 1269925 - DNA, 15 bp, Homo sapiens
ttgcttttcagctgg

SEQ ID NO: 1269926 - DNA, 15 bp, Homo sapiens
tttgcttttcagctg

SEQ ID NO: 1269927 - DNA, 15 bp, Homo sapiens
ctttgcttttcagct

SEQ ID NO: 1269928 - DNA, 15 bp, Homo sapiens
actttgcttttcagc

SEQ ID NO: 1269929 - DNA, 15 bp, Homo sapiens
aactttgcttttcag

SEQ ID NO: 1269930 - DNA, 15 bp, Homo sapiens
gaactttgcttttca

SEQ ID NO: 1269931 - DNA, 15 bp, Homo sapiens
tgaactttgcttttc

SEQ ID NO: 1269932 - DNA, 15 bp, Homo sapiens
ctgaactttgctttt

SEQ ID NO: 1269933 - DNA, 15 bp, Homo sapiens
gctgaactttgcttt

SEQ ID NO: 1269934 - DNA, 15 bp, Homo sapiens
agctgaactttgctt

SEQ ID NO: 1269935 - DNA, 15 bp, Homo sapiens
cagctgaactttgct

SEQ ID NO: 1269936 - DNA, 15 bp, Homo sapiens
tcagctgaactttgc

SEQ ID NO: 1269937 - DNA, 15 bp, Homo sapiens
ttcagctgaactttg

SEQ ID NO: 1269938 - DNA, 15 bp, Homo sapiens
gttcagctgaacttt

SEQ ID NO: 1269939 - DNA, 15 bp, Homo sapiens
agttcagctgaactt

SEQ ID NO: 1269940 - DNA, 15 bp, Homo sapiens
cagttcagctgaact

SEQ ID NO: 1269941 - DNA, 15 bp, Homo sapiens
gcagttcagctgaac

SEQ ID NO: 1269942 - DNA, 15 bp, Homo sapiens
tgcagttcagctgaa

SEQ ID NO: 1269943 - DNA, 15 bp, Homo sapiens
ttgcagttcagctga

SEQ ID NO: 1269944 - DNA, 15 bp, Homo sapiens
tttgcagttcagctg

SEQ ID NO: 1269945 - DNA, 15 bp, Homo sapiens
gtttgcagttcagct

SEQ ID NO: 1269946 - DNA, 15 bp, Homo sapiens
agtttgcagttcagc

SEQ ID NO: 1269947 - DNA, 15 bp, Homo sapiens
gagtttgcagttcag

SEQ ID NO: 1269948 - DNA, 15 bp, Homo sapiens
tgagtttgcagttca

SEQ ID NO: 1269949 - DNA, 15 bp, Homo sapiens
atgagtttgcagttc

SEQ ID NO: 1269950 - DNA, 15 bp, Homo sapiens
aatgagtttgcagtt

SEQ ID NO: 1269951 - DNA, 15 bp, Homo sapiens
aaatgagtttgcagt

SEQ ID NO: 1269952 - DNA, 15 bp, Homo sapiens
aaaatgagtttgcag

SEQ ID NO: 1269953 - DNA, 15 bp, Homo sapiens
gaaaatgagtttgca

SEQ ID NO: 1269954 - DNA, 15 bp, Homo sapiens
tgaaaatgagtttgc

SEQ ID NO: 1269955 - DNA, 15 bp, Homo sapiens
atgaaaatgagtttg

SEQ ID NO: 1269956 - DNA, 15 bp, Homo sapiens
catgaaaatgagttt

SEQ ID NO: 1269957 - DNA, 15 bp, Homo sapiens
tcatgaaaatgagtt

SEQ ID NO: 1269958 - DNA, 15 bp, Homo sapiens
atcatgaaaatgagt

SEQ ID NO: 1269959 - DNA, 15 bp, Homo sapiens
catcatgaaaatgag

SEQ ID NO: 1269960 - DNA, 15 bp, Homo sapiens
gcatcatgaaaatga

SEQ ID NO: 1269961 - DNA, 15 bp, Homo sapiens
ggcatcatgaaaatg

SEQ ID NO: 1269962 - DNA, 15 bp, Homo sapiens
tggcatcatgaaaat

SEQ ID NO: 1269963 - DNA, 15 bp, Homo sapiens
ttggcatcatgaaaa

SEQ ID NO: 1269964 - DNA, 15 bp, Homo sapiens
tttggcatcatgaaa

SEQ ID NO: 1269965 - DNA, 15 bp, Homo sapiens
gtttggcatcatgaa

SEQ ID NO: 1269966 - DNA, 15 bp, Homo sapiens
tgtttggcatcatga

SEQ ID NO: 1269967 - DNA, 15 bp, Homo sapiens
ttgtttggcatcatg

SEQ ID NO: 1269968 - DNA, 15 bp, Homo sapiens
attgtttggcatcat

SEQ ID NO: 1269969 - DNA, 15 bp, Homo sapiens
aattgtttggcatca

SEQ ID NO: 1269970 - DNA, 15 bp, Homo sapiens
aaattgtttggcatc

SEQ ID NO: 1269971 - DNA, 15 bp, Homo sapiens
caaattgtttggcat

SEQ ID NO: 1269972 - DNA, 15 bp, Homo sapiens
gcaaattgtttggca

SEQ ID NO: 1269973 - DNA, 15 bp, Homo sapiens
tgcaaattgtttggc

SEQ ID NO: 1269974 - DNA, 15 bp, Homo sapiens
gtgcaaattgtttgg

SEQ ID NO: 1269975 - DNA, 15 bp, Homo sapiens
tgtgcaaattgtttg

SEQ ID NO: 1269976 - DNA, 15 bp, Homo sapiens
ctgtgcaaattgttt

SEQ ID NO: 1269977 - DNA, 15 bp, Homo sapiens
gctgtgcaaattgtt

SEQ ID NO: 1269978 - DNA, 15 bp, Homo sapiens
agctgtgcaaattgt

SEQ ID NO: 1269979 - DNA, 15 bp, Homo sapiens
aagctgtgcaaattg

SEQ ID NO: 1269980 - DNA, 15 bp, Homo sapiens
caagctgtgcaaatt

SEQ ID NO: 1269981 - DNA, 15 bp, Homo sapiens
tcaagctgtgcaaat

SEQ ID NO: 1269982 - DNA, 15 bp, Homo sapiens
atcaagctgtgcaaa

SEQ ID NO: 1269983 - DNA, 15 bp, Homo sapiens
aatcaagctgtgcaa

SEQ ID NO: 1269984 - DNA, 15 bp, Homo sapiens
aaatcaagctgtgca

SEQ ID NO: 1269985 - DNA, 15 bp, Homo sapiens
taaatcaagctgtgc

SEQ ID NO: 1269986 - DNA, 15 bp, Homo sapiens
ctaaatcaagctgtg

SEQ ID NO: 1269987 - DNA, 15 bp, Homo sapiens
cctaaatcaagctgt

SEQ ID NO: 1269988 - DNA, 15 bp, Homo sapiens
ccctaaatcaagctg

SEQ ID NO: 1269989 - DNA, 15 bp, Homo sapiens
tccctaaatcaagct

SEQ ID NO: 1269990 - DNA, 15 bp, Homo sapiens
atccctaaatcaagc

SEQ ID NO: 1269991 - DNA, 15 bp, Homo sapiens
aatccctaaatcaag

SEQ ID NO: 1269992 - DNA, 15 bp, Homo sapiens
taatccctaaatcaa

SEQ ID NO: 1269993 - DNA, 15 bp, Homo sapiens
gtaatccctaaatca

SEQ ID NO: 1269994 - DNA, 15 bp, Homo sapiens
tgtaatccctaaatc

SEQ ID NO: 1269995 - DNA, 15 bp, Homo sapiens
gtgtaatccctaaat

SEQ ID NO: 1269996 - DNA, 15 bp, Homo sapiens
agtgtaatccctaaa

SEQ ID NO: 1269997 - DNA, 15 bp, Homo sapiens
cagtgtaatccctaa

SEQ ID NO: 1269998 - DNA, 15 bp, Homo sapiens
gcagtgtaatcccta

SEQ ID NO: 1269999 - DNA, 15 bp, Homo sapiens
agcagtgtaatccct

SEQ ID NO: 1270000 - DNA, 15 bp, Homo sapiens
gagcagtgtaatccc

SEQ ID NO: 1270001 - DNA, 15 bp, Homo sapiens
ggagcagtgtaatcc

SEQ ID NO: 1270002 - DNA, 15 bp, Homo sapiens
tggagcagtgtaatc

SEQ ID NO: 1270003 - DNA, 15 bp, Homo sapiens
atggagcagtgtaat

SEQ ID NO: 1270004 - DNA, 15 bp, Homo sapiens
catggagcagtgtaa

SEQ ID NO: 1270005 - DNA, 15 bp, Homo sapiens
tcatggagcagtgta

SEQ ID NO: 1270006 - DNA, 15 bp, Homo sapiens
ttcatggagcagtgt

SEQ ID NO: 1270007 - DNA, 15 bp, Homo sapiens
gttcatggagcagtg

SEQ ID NO: 1270008 - DNA, 15 bp, Homo sapiens
tgttcatggagcagt

SEQ ID NO: 1270009 - DNA, 15 bp, Homo sapiens
ttgttcatggagcag

SEQ ID NO: 1270010 - DNA, 15 bp, Homo sapiens
gttgttcatggagca

SEQ ID NO: 1270011 - DNA, 15 bp, Homo sapiens
agttgttcatggagc

SEQ ID NO: 1270012 - DNA, 15 bp, Homo sapiens
cagttgttcatggag

SEQ ID NO: 1270013 - DNA, 15 bp, Homo sapiens
ccagttgttcatgga

SEQ ID NO: 1270014 - DNA, 15 bp, Homo sapiens
accagttgttcatgg

SEQ ID NO: 1270015 - DNA, 15 bp, Homo sapiens
taccagttgttcatg

SEQ ID NO: 1270016 - DNA, 15 bp, Homo sapiens
ttaccagttgttcat

SEQ ID NO: 1270017 - DNA, 15 bp, Homo sapiens
cttaccagttgttca

SEQ ID NO: 1270018 - DNA, 15 bp, Homo sapiens
acttaccagttgttc

SEQ ID NO: 1270019 - DNA, 15 bp, Homo sapiens
aacttaccagttgtt

SEQ ID NO: 1270020 - DNA, 15 bp, Homo sapiens
taacttaccagttgt

SEQ ID NO: 1270021 - DNA, 15 bp, Homo sapiens
ttaacttaccagttg

SEQ ID NO: 1270022 - DNA, 15 bp, Homo sapiens
gttaacttaccagtt

SEQ ID NO: 1270023 - DNA, 15 bp, Homo sapiens
ggttaacttaccagt

SEQ ID NO: 1270024 - DNA, 15 bp, Homo sapiens
gggttaacttaccag

SEQ ID NO: 1270025 - DNA, 15 bp, Homo sapiens
agggttaacttacca

SEQ ID NO: 1270026 - DNA, 15 bp, Homo sapiens
gagggttaacttacc

SEQ ID NO: 1270027 - DNA, 15 bp, Homo sapiens
ggagggttaacttac

SEQ ID NO: 1270028 - DNA, 15 bp, Homo sapiens
tggagggttaactta

SEQ ID NO: 1270029 - DNA, 15 bp, Homo sapiens
ctggagggttaactt

SEQ ID NO: 1270030 - DNA, 15 bp, Homo sapiens
cctggagggttaact

SEQ ID NO: 1270031 - DNA, 15 bp, Homo sapiens
tcctggagggttaac

SEQ ID NO: 1270032 - DNA, 15 bp, Homo sapiens
ttcctggagggttaa

SEQ ID NO: 1270033 - DNA, 15 bp, Homo sapiens
tttcctggagggtta

SEQ ID NO: 1270034 - DNA, 15 bp, Homo sapiens
gtttcctggagggtt

SEQ ID NO: 1270035 - DNA, 15 bp, Homo sapiens
agtttcctggagggt

SEQ ID NO: 1270036 - DNA, 15 bp, Homo sapiens
gagtttcctggaggg

SEQ ID NO: 1270037 - DNA, 15 bp, Homo sapiens
tgagtttcctggagg

SEQ ID NO: 1270038 - DNA, 15 bp, Homo sapiens
ctgagtttcctggag

SEQ ID NO: 1270039 - DNA, 15 bp, Homo sapiens
actgagtttcctgga

SEQ ID NO: 1270040 - DNA, 15 bp, Homo sapiens
cactgagtttcctgg

SEQ ID NO: 1270041 - DNA, 15 bp, Homo sapiens
tcactgagtttcctg

SEQ ID NO: 1270042 - DNA, 15 bp, Homo sapiens
atcactgagtttcct

SEQ ID NO: 1270043 - DNA, 15 bp, Homo sapiens
aatcactgagtttcc

SEQ ID NO: 1270044 - DNA, 15 bp, Homo sapiens
caatcactgagtttc

SEQ ID NO: 1270045 - DNA, 15 bp, Homo sapiens
acaatcactgagttt

SEQ ID NO: 1270046 - DNA, 15 bp, Homo sapiens
aacaatcactgagtt

SEQ ID NO: 1270047 - DNA, 15 bp, Homo sapiens
aaacaatcactgagt

SEQ ID NO: 1270048 - DNA, 15 bp, Homo sapiens
aaaacaatcactgag

SEQ ID NO: 1270049 - DNA, 15 bp, Homo sapiens
taaaacaatcactga

SEQ ID NO: 1270050 - DNA, 15 bp, Homo sapiens
ttaaaacaatcactg

SEQ ID NO: 1270051 - DNA, 15 bp, Homo sapiens
tttaaaacaatcact

SEQ ID NO: 1270052 - DNA, 15 bp, Homo sapiens
atttaaaacaatcac

SEQ ID NO: 1270053 - DNA, 15 bp, Homo sapiens
catttaaaacaatca

SEQ ID NO: 1270054 - DNA, 15 bp, Homo sapiens
gcatttaaaacaatc

SEQ ID NO: 1270055 - DNA, 15 bp, Homo sapiens
tgcatttaaaacaat

SEQ ID NO: 1270056 - DNA, 15 bp, Homo sapiens
atgcatttaaaacaa

SEQ ID NO: 1270057 - DNA, 15 bp, Homo sapiens
gatgcatttaaaaca

SEQ ID NO: 1270058 - DNA, 15 bp, Homo sapiens
agatgcatttaaaac

SEQ ID NO: 1270059 - DNA, 15 bp, Homo sapiens
gagatgcatttaaaa

SEQ ID NO: 1270060 - DNA, 15 bp, Homo sapiens
tgagatgcatttaaa

SEQ ID NO: 1270061 - DNA, 15 bp, Homo sapiens
atgagatgcatttaa

SEQ ID NO: 1270062 - DNA, 15 bp, Homo sapiens
gatgagatgcattta

SEQ ID NO: 1270063 - DNA, 15 bp, Homo sapiens
ggatgagatgcattt

SEQ ID NO: 1270064 - DNA, 15 bp, Homo sapiens
gggatgagatgcatt

SEQ ID NO: 1270065 - DNA, 15 bp, Homo sapiens
ggggatgagatgcat

SEQ ID NO: 1270066 - DNA, 15 bp, Homo sapiens
tggggatgagatgca

SEQ ID NO: 1270067 - DNA, 15 bp, Homo sapiens
atggggatgagatgc

SEQ ID NO: 1270068 - DNA, 15 bp, Homo sapiens
aatggggatgagatg

SEQ ID NO: 1270069 - DNA, 15 bp, Homo sapiens
taatggggatgagat

SEQ ID NO: 1270070 - DNA, 15 bp, Homo sapiens
ttaatggggatgaga

SEQ ID NO: 1270071 - DNA, 15 bp, Homo sapiens
cttaatggggatgag

SEQ ID NO: 1270072 - DNA, 15 bp, Homo sapiens
tcttaatggggatga

SEQ ID NO: 1270073 - DNA, 15 bp, Homo sapiens
atcttaatggggatg

SEQ ID NO: 1270074 - DNA, 15 bp, Homo sapiens
tatcttaatggggat

SEQ ID NO: 1270075 - DNA, 15 bp, Homo sapiens
atatcttaatgggga

SEQ ID NO: 1270076 - DNA, 15 bp, Homo sapiens
catatcttaatgggg

SEQ ID NO: 1270077 - DNA, 15 bp, Homo sapiens
tcatatcttaatggg

SEQ ID NO: 1270078 - DNA, 15 bp, Homo sapiens
ttcatatcttaatgg

SEQ ID NO: 1270079 - DNA, 15 bp, Homo sapiens
gttcatatcttaatg

SEQ ID NO: 1270080 - DNA, 15 bp, Homo sapiens
agttcatatcttaat

SEQ ID NO: 1270081 - DNA, 15 bp, Homo sapiens
gagttcatatcttaa

SEQ ID NO: 1270082 - DNA, 15 bp, Homo sapiens
agagttcatatctta

SEQ ID NO: 1270083 - DNA, 15 bp, Homo sapiens
aagagttcatatctt

SEQ ID NO: 1270084 - DNA, 15 bp, Homo sapiens
aaagagttcatatct

SEQ ID NO: 1270085 - DNA, 15 bp, Homo sapiens
gaaagagttcatatc

SEQ ID NO: 1270086 - DNA, 15 bp, Homo sapiens
ggaaagagttcatat

SEQ ID NO: 1270087 - DNA, 15 bp, Homo sapiens
gggaaagagttcata

SEQ ID NO: 1270088 - DNA, 15 bp, Homo sapiens
ggggaaagagttcat

SEQ ID NO: 1270089 - DNA, 15 bp, Homo sapiens
cggggaaagagttca

SEQ ID NO: 1270090 - DNA, 15 bp, Homo sapiens
gcggggaaagagttc

SEQ ID NO: 1270091 - DNA, 15 bp, Homo sapiens
cgcggggaaagagtt

SEQ ID NO: 1270092 - DNA, 15 bp, Homo sapiens
gcgcggggaaagagt

SEQ ID NO: 1270093 - DNA, 15 bp, Homo sapiens
ggcgcggggaaagag

SEQ ID NO: 1270094 - DNA, 15 bp, Homo sapiens
aggcgcggggaaaga

SEQ ID NO: 1270095 - DNA, 15 bp, Homo sapiens
aaggcgcggggaaag

SEQ ID NO: 1270096 - DNA, 15 bp, Homo sapiens
taaggcgcggggaaa

SEQ ID NO: 1270097 - DNA, 15 bp, Homo sapiens
ttaaggcgcggggaa

SEQ ID NO: 1270098 - DNA, 15 bp, Homo sapiens
gttaaggcgcgggga

SEQ ID NO: 1270099 - DNA, 15 bp, Homo sapiens
tgttaaggcgcgggg

SEQ ID NO: 1270100 - DNA, 15 bp, Homo sapiens
ttgttaaggcgcggg

SEQ ID NO: 1270101 - DNA, 15 bp, Homo sapiens
cttgttaaggcgcgg

SEQ ID NO: 1270102 - DNA, 15 bp, Homo sapiens
acttgttaaggcgcg

SEQ ID NO: 1270103 - DNA, 15 bp, Homo sapiens
cacttgttaaggcgc

SEQ ID NO: 1270104 - DNA, 15 bp, Homo sapiens
tcacttgttaaggcg

SEQ ID NO: 1270105 - DNA, 15 bp, Homo sapiens
ttcacttgttaaggc

SEQ ID NO: 1270106 - DNA, 15 bp, Homo sapiens
attcacttgttaagg

SEQ ID NO: 1270107 - DNA, 15 bp, Homo sapiens
aattcacttgttaag

SEQ ID NO: 1270108 - DNA, 15 bp, Homo sapiens
caattcacttgttaa

SEQ ID NO: 1270109 - DNA, 15 bp, Homo sapiens
acaattcacttgtta

SEQ ID NO: 1270110 - DNA, 15 bp, Homo sapiens
cacaattcacttgtt

SEQ ID NO: 1270111 - DNA, 15 bp, Homo sapiens
acacaattcacttgt

SEQ ID NO: 1270112 - DNA, 15 bp, Homo sapiens
cacacaattcacttg

SEQ ID NO: 1270113 - DNA, 15 bp, Homo sapiens
gcacacaattcactt

SEQ ID NO: 1270114 - DNA, 15 bp, Homo sapiens
tgcacacaattcact

SEQ ID NO: 1270115 - DNA, 15 bp, Homo sapiens
atgcacacaattcac

SEQ ID NO: 1270116 - DNA, 15 bp, Homo sapiens
tatgcacacaattca

SEQ ID NO: 1270117 - DNA, 15 bp, Homo sapiens
atatgcacacaattc

SEQ ID NO: 1270118 - DNA, 15 bp, Homo sapiens
catatgcacacaatt

SEQ ID NO: 1270119 - DNA, 15 bp, Homo sapiens
gcatatgcacacaat

SEQ ID NO: 1270120 - DNA, 15 bp, Homo sapiens
tgcatatgcacacaa

SEQ ID NO: 1270121 - DNA, 15 bp, Homo sapiens
ctgcatatgcacaca

SEQ ID NO: 1270122 - DNA, 15 bp, Homo sapiens
cctgcatatgcacac

SEQ ID NO: 1270123 - DNA, 15 bp, Homo sapiens
tcctgcatatgcaca

SEQ ID NO: 1270124 - DNA, 15 bp, Homo sapiens
ctcctgcatatgcac

SEQ ID NO: 1270125 - DNA, 15 bp, Homo sapiens
actcctgcatatgca

SEQ ID NO: 1270126 - DNA, 15 bp, Homo sapiens
gactcctgcatatgc

SEQ ID NO: 1270127 - DNA, 15 bp, Homo sapiens
tgactcctgcatatg

SEQ ID NO: 1270128 - DNA, 15 bp, Homo sapiens
atgactcctgcatat

SEQ ID NO: 1270129 - DNA, 15 bp, Homo sapiens
gatgactcctgcata

SEQ ID NO: 1270130 - DNA, 15 bp, Homo sapiens
agatgactcctgcat

SEQ ID NO: 1270131 - DNA, 15 bp, Homo sapiens
cagatgactcctgca

SEQ ID NO: 1270132 - DNA, 15 bp, Homo sapiens
acagatgactcctgc

SEQ ID NO: 1270133 - DNA, 15 bp, Homo sapiens
tacagatgactcctg

SEQ ID NO: 1270134 - DNA, 15 bp, Homo sapiens
ttacagatgactcct

SEQ ID NO: 1270135 - DNA, 15 bp, Homo sapiens
tttacagatgactcc

SEQ ID NO: 1270136 - DNA, 15 bp, Homo sapiens
gtttacagatgactc

SEQ ID NO: 1270137 - DNA, 15 bp, Homo sapiens
ggtttacagatgact

SEQ ID NO: 1270138 - DNA, 15 bp, Homo sapiens
aggtttacagatgac

SEQ ID NO: 1270139 - DNA, 15 bp, Homo sapiens
gaggtttacagatga

SEQ ID NO: 1270140 - DNA, 15 bp, Homo sapiens
tgaggtttacagatg

SEQ ID NO: 1270141 - DNA, 15 bp, Homo sapiens
gtgaggtttacagat

SEQ ID NO: 1270142 - DNA, 15 bp, Homo sapiens
agtgaggtttacaga

SEQ ID NO: 1270143 - DNA, 15 bp, Homo sapiens
aagtgaggtttacag

SEQ ID NO: 1270144 - DNA, 15 bp, Homo sapiens
caagtgaggtttaca

SEQ ID NO: 1270145 - DNA, 15 bp, Homo sapiens
tcaagtgaggtttac

SEQ ID NO: 1270146 - DNA, 15 bp, Homo sapiens
atcaagtgaggttta

SEQ ID NO: 1270147 - DNA, 15 bp, Homo sapiens
catcaagtgaggttt

SEQ ID NO: 1270148 - DNA, 15 bp, Homo sapiens
acatcaagtgaggtt

SEQ ID NO: 1270149 - DNA, 15 bp, Homo sapiens
aacatcaagtgaggt

SEQ ID NO: 1270150 - DNA, 15 bp, Homo sapiens
aaacatcaagtgagg

SEQ ID NO: 1270151 - DNA, 15 bp, Homo sapiens
gaaacatcaagtgag

SEQ ID NO: 1270152 - DNA, 15 bp, Homo sapiens
ggaaacatcaagtga

SEQ ID NO: 1270153 - DNA, 15 bp, Homo sapiens
gggaaacatcaagtg

SEQ ID NO: 1270154 - DNA, 15 bp, Homo sapiens
ggggaaacatcaagt

SEQ ID NO: 1270155 - DNA, 15 bp, Homo sapiens
aggggaaacatcaag

SEQ ID NO: 1270156 - DNA, 15 bp, Homo sapiens
gaggggaaacatcaa

SEQ ID NO: 1270157 - DNA, 15 bp, Homo sapiens
agaggggaaacatca

SEQ ID NO: 1270158 - DNA, 15 bp, Homo sapiens
cagaggggaaacatc

SEQ ID NO: 1270159 - DNA, 15 bp, Homo sapiens
tcagaggggaaacat

SEQ ID NO: 1270160 - DNA, 15 bp, Homo sapiens
ttcagaggggaaaca

SEQ ID NO: 1270161 - DNA, 15 bp, Homo sapiens
gttcagaggggaaac

SEQ ID NO: 1270162 - DNA, 15 bp, Homo sapiens
agttcagaggggaaa

SEQ ID NO: 1270163 - DNA, 15 bp, Homo sapiens
gagttcagaggggaa

SEQ ID NO: 1270164 - DNA, 15 bp, Homo sapiens
agagttcagagggga

SEQ ID NO: 1270165 - DNA, 15 bp, Homo sapiens
cagagttcagagggg

SEQ ID NO: 1270166 - DNA, 15 bp, Homo sapiens
tcagagttcagaggg

SEQ ID NO: 1270167 - DNA, 15 bp, Homo sapiens
atcagagttcagagg

SEQ ID NO: 1270168 - DNA, 15 bp, Homo sapiens
aatcagagttcagag

SEQ ID NO: 1270169 - DNA, 15 bp, Homo sapiens
caatcagagttcaga

SEQ ID NO: 1270170 - DNA, 15 bp, Homo sapiens
ccaatcagagttcag

SEQ ID NO: 1270171 - DNA, 15 bp, Homo sapiens
accaatcagagttca

SEQ ID NO: 1270172 - DNA, 15 bp, Homo sapiens
taccaatcagagttc

SEQ ID NO: 1270173 - DNA, 15 bp, Homo sapiens
ataccaatcagagtt

SEQ ID NO: 1270174 - DNA, 15 bp, Homo sapiens
tataccaatcagagt

SEQ ID NO: 1270175 - DNA, 15 bp, Homo sapiens
gtataccaatcagag

SEQ ID NO: 1270176 - DNA, 15 bp, Homo sapiens
ggtataccaatcaga

SEQ ID NO: 1270177 - DNA, 15 bp, Homo sapiens
aggtataccaatcag

SEQ ID NO: 1270178 - DNA, 15 bp, Homo sapiens
taggtataccaatca

SEQ ID NO: 1270179 - DNA, 15 bp, Homo sapiens
gtaggtataccaatc

SEQ ID NO: 1270180 - DNA, 15 bp, Homo sapiens
tgtaggtataccaat

SEQ ID NO: 1270181 - DNA, 15 bp, Homo sapiens
ctgtaggtataccaa

SEQ ID NO: 1270182 - DNA, 15 bp, Homo sapiens
gctgtaggtatacca

SEQ ID NO: 1270183 - DNA, 15 bp, Homo sapiens
agctgtaggtatacc

SEQ ID NO: 1270184 - DNA, 15 bp, Homo sapiens
tagctgtaggtatac

SEQ ID NO: 1270185 - DNA, 15 bp, Homo sapiens
atagctgtaggtata

SEQ ID NO: 1270186 - DNA, 15 bp, Homo sapiens
aatagctgtaggtat

SEQ ID NO: 1270187 - DNA, 15 bp, Homo sapiens
taatagctgtaggta

SEQ ID NO: 1270188 - DNA, 15 bp, Homo sapiens
ataatagctgtaggt

SEQ ID NO: 1270189 - DNA, 15 bp, Homo sapiens
aataatagctgtagg

SEQ ID NO: 1270190 - DNA, 15 bp, Homo sapiens
aaataatagctgtag

SEQ ID NO: 1270191 - DNA, 15 bp, Homo sapiens
taaataatagctgta

SEQ ID NO: 1270192 - DNA, 15 bp, Homo sapiens
gtaaataatagctgt

SEQ ID NO: 1270193 - DNA, 15 bp, Homo sapiens
agtaaataatagctg

SEQ ID NO: 1270194 - DNA, 15 bp, Homo sapiens
aagtaaataatagct

SEQ ID NO: 1270195 - DNA, 15 bp, Homo sapiens
gaagtaaataatagc

SEQ ID NO: 1270196 - DNA, 15 bp, Homo sapiens
tgaagtaaataatag

SEQ ID NO: 1270197 - DNA, 15 bp, Homo sapiens
gtgaagtaaataata

SEQ ID NO: 1270198 - DNA, 15 bp, Homo sapiens
ggtgaagtaaataat

SEQ ID NO: 1270199 - DNA, 15 bp, Homo sapiens
aggtgaagtaaataa

SEQ ID NO: 1270200 - DNA, 15 bp, Homo sapiens
gaggtgaagtaaata

SEQ ID NO: 1270201 - DNA, 15 bp, Homo sapiens
agaggtgaagtaaat

SEQ ID NO: 1270202 - DNA, 15 bp, Homo sapiens
tagaggtgaagtaaa

SEQ ID NO: 1270203 - DNA, 15 bp, Homo sapiens
gtagaggtgaagtaa

SEQ ID NO: 1270204 - DNA, 15 bp, Homo sapiens
agtagaggtgaagta

SEQ ID NO: 1270205 - DNA, 15 bp, Homo sapiens
gagtagaggtgaagt

SEQ ID NO: 1270206 - DNA, 15 bp, Homo sapiens
tgagtagaggtgaag

SEQ ID NO: 1270207 - DNA, 15 bp, Homo sapiens
ctgagtagaggtgaa

SEQ ID NO: 1270208 - DNA, 15 bp, Homo sapiens
tctgagtagaggtga

SEQ ID NO: 1270209 - DNA, 15 bp, Homo sapiens
ctctgagtagaggtg

SEQ ID NO: 1270210 - DNA, 15 bp, Homo sapiens
actctgagtagaggt

SEQ ID NO: 1270211 - DNA, 15 bp, Homo sapiens
aactctgagtagagg

SEQ ID NO: 1270212 - DNA, 15 bp, Homo sapiens
taactctgagtagag

SEQ ID NO: 1270213 - DNA, 15 bp, Homo sapiens
ataactctgagtaga

SEQ ID NO: 1270214 - DNA, 15 bp, Homo sapiens
gataactctgagtag

SEQ ID NO: 1270215 - DNA, 15 bp, Homo sapiens
ggataactctgagta

SEQ ID NO: 1270216 - DNA, 15 bp, Homo sapiens
tggataactctgagt

SEQ ID NO: 1270217 - DNA, 15 bp, Homo sapiens
ctggataactctgag

SEQ ID NO: 1270218 - DNA, 15 bp, Homo sapiens
tctggataactctga

SEQ ID NO: 1270219 - DNA, 15 bp, Homo sapiens
ttctggataactctg

SEQ ID NO: 1270220 - DNA, 15 bp, Homo sapiens
attctggataactct

SEQ ID NO: 1270221 - DNA, 15 bp, Homo sapiens
cattctggataactc

SEQ ID NO: 1270222 - DNA, 15 bp, Homo sapiens
acattctggataact

SEQ ID NO: 1270223 - DNA, 15 bp, Homo sapiens
aacattctggataac

SEQ ID NO: 1270224 - DNA, 15 bp, Homo sapiens
taacattctggataa

SEQ ID NO: 1270225 - DNA, 15 bp, Homo sapiens
gtaacattctggata

SEQ ID NO: 1270226 - DNA, 15 bp, Homo sapiens
cgtaacattctggat

SEQ ID NO: 1270227 - DNA, 15 bp, Homo sapiens
gcgtaacattctgga

SEQ ID NO: 1270228 - DNA, 15 bp, Homo sapiens
tgcgtaacattctgg

SEQ ID NO: 1270229 - DNA, 15 bp, Homo sapiens
atgcgtaacattctg

SEQ ID NO: 1270230 - DNA, 15 bp, Homo sapiens
tatgcgtaacattct

SEQ ID NO: 1270231 - DNA, 15 bp, Homo sapiens
gtatgcgtaacattc

SEQ ID NO: 1270232 - DNA, 15 bp, Homo sapiens
tgtatgcgtaacatt

SEQ ID NO: 1270233 - DNA, 15 bp, Homo sapiens
ttgtatgcgtaacat

SEQ ID NO: 1270234 - DNA, 15 bp, Homo sapiens
tttgtatgcgtaaca

SEQ ID NO: 1270235 - DNA, 15 bp, Homo sapiens
ctttgtatgcgtaac

SEQ ID NO: 1270236 - DNA, 15 bp, Homo sapiens
cctttgtatgcgtaa

SEQ ID NO: 1270237 - DNA, 15 bp, Homo sapiens
tcctttgtatgcgta

SEQ ID NO: 1270238 - DNA, 15 bp, Homo sapiens
ctcctttgtatgcgt

SEQ ID NO: 1270239 - DNA, 15 bp, Homo sapiens
actcctttgtatgcg

SEQ ID NO: 1270240 - DNA, 15 bp, Homo sapiens
tactcctttgtatgc

SEQ ID NO: 1270241 - DNA, 15 bp, Homo sapiens
atactcctttgtatg

SEQ ID NO: 1270242 - DNA, 15 bp, Homo sapiens
tatactcctttgtat

SEQ ID NO: 1270243 - DNA, 15 bp, Homo sapiens
ttatactcctttgta

SEQ ID NO: 1270244 - DNA, 15 bp, Homo sapiens
tttatactcctttgt

SEQ ID NO: 1270245 - DNA, 15 bp, Homo sapiens
atttatactcctttg

SEQ ID NO: 1270246 - DNA, 15 bp, Homo sapiens
tatttatactccttt

SEQ ID NO: 1270247 - DNA, 15 bp, Homo sapiens
ctatttatactcctt

SEQ ID NO: 1270248 - DNA, 15 bp, Homo sapiens
cctatttatactcct

SEQ ID NO: 1270249 - DNA, 15 bp, Homo sapiens
ccctatttatactcc

SEQ ID NO: 1270250 - DNA, 15 bp, Homo sapiens
tccctatttatactc

SEQ ID NO: 1270251 - DNA, 15 bp, Homo sapiens
ttccctatttatact

SEQ ID NO: 1270252 - DNA, 15 bp, Homo sapiens
tttccctatttatac

SEQ ID NO: 1270253 - DNA, 15 bp, Homo sapiens
ctttccctatttata

SEQ ID NO: 1270254 - DNA, 15 bp, Homo sapiens
gctttccctatttat

SEQ ID NO: 1270255 - DNA, 15 bp, Homo sapiens
tgctttccctattta

SEQ ID NO: 1270256 - DNA, 15 bp, Homo sapiens
ctgctttccctattt

SEQ ID NO: 1270257 - DNA, 15 bp, Homo sapiens
cctgctttccctatt

SEQ ID NO: 1270258 - DNA, 15 bp, Homo sapiens
acctgctttccctat

SEQ ID NO: 1270259 - DNA, 15 bp, Homo sapiens
aacctgctttcccta

SEQ ID NO: 1270260 - DNA, 15 bp, Homo sapiens
taacctgctttccct

SEQ ID NO: 1270261 - DNA, 15 bp, Homo sapiens
ataacctgctttccc

SEQ ID NO: 1270262 - DNA, 15 bp, Homo sapiens
gataacctgctttcc

SEQ ID NO: 1270263 - DNA, 15 bp, Homo sapiens
tgataacctgctttc

SEQ ID NO: 1270264 - DNA, 15 bp, Homo sapiens
ttgataacctgcttt

SEQ ID NO: 1270265 - DNA, 15 bp, Homo sapiens
tttgataacctgctt

SEQ ID NO: 1270266 - DNA, 15 bp, Homo sapiens
gtttgataacctgct

SEQ ID NO: 1270267 - DNA, 15 bp, Homo sapiens
cgtttgataacctgc

SEQ ID NO: 1270268 - DNA, 15 bp, Homo sapiens
gcgtttgataacctg

SEQ ID NO: 1270269 - DNA, 15 bp, Homo sapiens
ggcgtttgataacct

SEQ ID NO: 1270270 - DNA, 15 bp, Homo sapiens
cggcgtttgataacc

SEQ ID NO: 1270271 - DNA, 15 bp, Homo sapiens
acggcgtttgataac

SEQ ID NO: 1270272 - DNA, 15 bp, Homo sapiens
cacggcgtttgataa

SEQ ID NO: 1270273 - DNA, 15 bp, Homo sapiens
ccacggcgtttgata

SEQ ID NO: 1270274 - DNA, 15 bp, Homo sapiens
tccacggcgtttgat

SEQ ID NO: 1270275 - DNA, 15 bp, Homo sapiens
atccacggcgtttga

SEQ ID NO: 1270276 - DNA, 15 bp, Homo sapiens
catccacggcgtttg

SEQ ID NO: 1270277 - DNA, 15 bp, Homo sapiens
ccatccacggcgttt

SEQ ID NO: 1270278 - DNA, 15 bp, Homo sapiens
gccatccacggcgtt

SEQ ID NO: 1270279 - DNA, 15 bp, Homo sapiens
tgccatccacggcgt

SEQ ID NO: 1270280 - DNA, 15 bp, Homo sapiens
atgccatccacggcg

SEQ ID NO: 1270281 - DNA, 15 bp, Homo sapiens
aatgccatccacggc

SEQ ID NO: 1270282 - DNA, 15 bp, Homo sapiens
aaatgccatccacgg

SEQ ID NO: 1270283 - DNA, 15 bp, Homo sapiens
aaaatgccatccacg

SEQ ID NO: 1270284 - DNA, 15 bp, Homo sapiens
gaaaatgccatccac

SEQ ID NO: 1270285 - DNA, 15 bp, Homo sapiens
ggaaaatgccatcca

SEQ ID NO: 1270286 - DNA, 15 bp, Homo sapiens
gggaaaatgccatcc

SEQ ID NO: 1270287 - DNA, 15 bp, Homo sapiens
tgggaaaatgccatc

SEQ ID NO: 1270288 - DNA, 15 bp, Homo sapiens
atgggaaaatgccat

SEQ ID NO: 1270289 - DNA, 15 bp, Homo sapiens
aatgggaaaatgcca

SEQ ID NO: 1270290 - DNA, 15 bp, Homo sapiens
taatgggaaaatgcc

SEQ ID NO: 1270291 - DNA, 15 bp, Homo sapiens
gtaatgggaaaatgc

SEQ ID NO: 1270292 - DNA, 15 bp, Homo sapiens
tgtaatgggaaaatg

SEQ ID NO: 1270293 - DNA, 15 bp, Homo sapiens
gtgtaatgggaaaat

SEQ ID NO: 1270294 - DNA, 15 bp, Homo sapiens
ggtgtaatgggaaaa

SEQ ID NO: 1270295 - DNA, 15 bp, Homo sapiens
aggtgtaatgggaaa

SEQ ID NO: 1270296 - DNA, 15 bp, Homo sapiens
taggtgtaatgggaa

SEQ ID NO: 1270297 - DNA, 15 bp, Homo sapiens
ctaggtgtaatggga

SEQ ID NO: 1270298 - DNA, 15 bp, Homo sapiens
tctaggtgtaatggg

SEQ ID NO: 1270299 - DNA, 15 bp, Homo sapiens
atctaggtgtaatgg

SEQ ID NO: 1270300 - DNA, 15 bp, Homo sapiens
tatctaggtgtaatg

SEQ ID NO: 1270301 - DNA, 15 bp, Homo sapiens
gtatctaggtgtaat

SEQ ID NO: 1270302 - DNA, 15 bp, Homo sapiens
tgtatctaggtgtaa

SEQ ID NO: 1270303 - DNA, 15 bp, Homo sapiens
atgtatctaggtgta

SEQ ID NO: 1270304 - DNA, 15 bp, Homo sapiens
tatgtatctaggtgt

SEQ ID NO: 1270305 - DNA, 15 bp, Homo sapiens
atatgtatctaggtg

SEQ ID NO: 1270306 - DNA, 15 bp, Homo sapiens
catatgtatctaggt

SEQ ID NO: 1270307 - DNA, 15 bp, Homo sapiens
tcatatgtatctagg

SEQ ID NO: 1270308 - DNA, 15 bp, Homo sapiens
ttcatatgtatctag

SEQ ID NO: 1270309 - DNA, 15 bp, Homo sapiens
tttcatatgtatcta

SEQ ID NO: 1270310 - DNA, 15 bp, Homo sapiens
ttttcatatgtatct

SEQ ID NO: 1270311 - DNA, 15 bp, Homo sapiens
tttttcatatgtatc

SEQ ID NO: 1270312 - DNA, 15 bp, Homo sapiens
ttttttcatatgtat

SEQ ID NO: 1270313 - DNA, 15 bp, Homo sapiens
attttttcatatgta

SEQ ID NO: 1270314 - DNA, 15 bp, Homo sapiens
cattttttcatatgt

SEQ ID NO: 1270315 - DNA, 15 bp, Homo sapiens
acattttttcatatg

SEQ ID NO: 1270316 - DNA, 15 bp, Homo sapiens
tacattttttcatat

SEQ ID NO: 1270317 - DNA, 15 bp, Homo sapiens
gtacattttttcata

SEQ ID NO: 1270318 - DNA, 15 bp, Homo sapiens
tgtacattttttcat

SEQ ID NO: 1270319 - DNA, 15 bp, Homo sapiens
ttgtacattttttca

SEQ ID NO: 1270320 - DNA, 15 bp, Homo sapiens
tttgtacattttttc

SEQ ID NO: 1270321 - DNA, 15 bp, Homo sapiens
gtttgtacatttttt

SEQ ID NO: 1270322 - DNA, 15 bp, Homo sapiens
cgtttgtacattttt

SEQ ID NO: 1270323 - DNA, 15 bp, Homo sapiens
tcgtttgtacatttt

SEQ ID NO: 1270324 - DNA, 15 bp, Homo sapiens
gtcgtttgtacattt

SEQ ID NO: 1270325 - DNA, 15 bp, Homo sapiens
agtcgtttgtacatt

SEQ ID NO: 1270326 - DNA, 15 bp, Homo sapiens
tagtcgtttgtacat

SEQ ID NO: 1270327 - DNA, 15 bp, Homo sapiens
ctagtcgtttgtaca

SEQ ID NO: 1270328 - DNA, 15 bp, Homo sapiens
tctagtcgtttgtac

SEQ ID NO: 1270329 - DNA, 15 bp, Homo sapiens
ttctagtcgtttgta

SEQ ID NO: 1270330 - DNA, 15 bp, Homo sapiens
attctagtcgtttgt

SEQ ID NO: 1270331 - DNA, 15 bp, Homo sapiens
cattctagtcgtttg

SEQ ID NO: 1270332 - DNA, 15 bp, Homo sapiens
tcattctagtcgttt

SEQ ID NO: 1270333 - DNA, 15 bp, Homo sapiens
atcattctagtcgtt

SEQ ID NO: 1270334 - DNA, 15 bp, Homo sapiens
aatcattctagtcgt

SEQ ID NO: 1270335 - DNA, 15 bp, Homo sapiens
taatcattctagtcg

SEQ ID NO: 1270336 - DNA, 15 bp, Homo sapiens
gtaatcattctagtc

SEQ ID NO: 1270337 - DNA, 15 bp, Homo sapiens
tgtaatcattctagt

SEQ ID NO: 1270338 - DNA, 15 bp, Homo sapiens
gtgtaatcattctag

SEQ ID NO: 1270339 - DNA, 15 bp, Homo sapiens
ggtgtaatcattcta

SEQ ID NO: 1270340 - DNA, 15 bp, Homo sapiens
tggtgtaatcattct

SEQ ID NO: 1270341 - DNA, 15 bp, Homo sapiens
atggtgtaatcattc

SEQ ID NO: 1270342 - DNA, 15 bp, Homo sapiens
tatggtgtaatcatt

SEQ ID NO: 1270343 - DNA, 15 bp, Homo sapiens
ctatggtgtaatcat

SEQ ID NO: 1270344 - DNA, 15 bp, Homo sapiens
actatggtgtaatca

SEQ ID NO: 1270345 - DNA, 15 bp, Homo sapiens
cactatggtgtaatc

SEQ ID NO: 1270346 - DNA, 15 bp, Homo sapiens
tcactatggtgtaat

SEQ ID NO: 1270347 - DNA, 15 bp, Homo sapiens
atcactatggtgtaa

SEQ ID NO: 1270348 - DNA, 15 bp, Homo sapiens
tatcactatggtgta

SEQ ID NO: 1270349 - DNA, 15 bp, Homo sapiens
ttatcactatggtgt

SEQ ID NO: 1270350 - DNA, 15 bp, Homo sapiens
gttatcactatggtg

SEQ ID NO: 1270351 - DNA, 15 bp, Homo sapiens
tgttatcactatggt

SEQ ID NO: 1270352 - DNA, 15 bp, Homo sapiens
ttgttatcactatgg

SEQ ID NO: 1270353 - DNA, 15 bp, Homo sapiens
attgttatcactatg

SEQ ID NO: 1270354 - DNA, 15 bp, Homo sapiens
cattgttatcactat

SEQ ID NO: 1270355 - DNA, 15 bp, Homo sapiens
tcattgttatcacta

SEQ ID NO: 1270356 - DNA, 15 bp, Homo sapiens
atcattgttatcact

SEQ ID NO: 1270357 - DNA, 15 bp, Homo sapiens
aatcattgttatcac

SEQ ID NO: 1270358 - DNA, 15 bp, Homo sapiens
taatcattgttatca

SEQ ID NO: 1270359 - DNA, 15 bp, Homo sapiens
gtaatcattgttatc

SEQ ID NO: 1270360 - DNA, 15 bp, Homo sapiens
agtaatcattgttat

SEQ ID NO: 1270361 - DNA, 15 bp, Homo sapiens
tagtaatcattgtta

SEQ ID NO: 1270362 - DNA, 15 bp, Homo sapiens
gtagtaatcattgtt

SEQ ID NO: 1270363 - DNA, 15 bp, Homo sapiens
agtagtaatcattgt

SEQ ID NO: 1270364 - DNA, 15 bp, Homo sapiens
cagtagtaatcattg

SEQ ID NO: 1270365 - DNA, 15 bp, Homo sapiens
ccagtagtaatcatt

SEQ ID NO: 1270366 - DNA, 15 bp, Homo sapiens
cccagtagtaatcat

SEQ ID NO: 1270367 - DNA, 15 bp, Homo sapiens
acccagtagtaatca

SEQ ID NO: 1270368 - DNA, 15 bp, Homo sapiens
tacccagtagtaatc

SEQ ID NO: 1270369 - DNA, 15 bp, Homo sapiens
gtacccagtagtaat

SEQ ID NO: 1270370 - DNA, 15 bp, Homo sapiens
agtacccagtagtaa

SEQ ID NO: 1270371 - DNA, 15 bp, Homo sapiens
tagtacccagtagta

SEQ ID NO: 1270372 - DNA, 15 bp, Homo sapiens
ttagtacccagtagt

SEQ ID NO: 1270373 - DNA, 15 bp, Homo sapiens
cttagtacccagtag

SEQ ID NO: 1270374 - DNA, 15 bp, Homo sapiens
tcttagtacccagta

SEQ ID NO: 1270375 - DNA, 15 bp, Homo sapiens
atcttagtacccagt

SEQ ID NO: 1270376 - DNA, 15 bp, Homo sapiens
tatcttagtacccag

SEQ ID NO: 1270377 - DNA, 15 bp, Homo sapiens
ttatcttagtaccca

SEQ ID NO: 1270378 - DNA, 15 bp, Homo sapiens
attatcttagtaccc

SEQ ID NO: 1270379 - DNA, 15 bp, Homo sapiens
cattatcttagtacc

SEQ ID NO: 1270380 - DNA, 15 bp, Homo sapiens
acattatcttagtac

SEQ ID NO: 1270381 - DNA, 15 bp, Homo sapiens
tacattatcttagta

SEQ ID NO: 1270382 - DNA, 15 bp, Homo sapiens
atacattatcttagt

SEQ ID NO: 1270383 - DNA, 15 bp, Homo sapiens
aatacattatcttag

SEQ ID NO: 1270384 - DNA, 15 bp, Homo sapiens
aaatacattatctta

SEQ ID NO: 1270385 - DNA, 15 bp, Homo sapiens
aaaatacattatctt

SEQ ID NO: 1270386 - DNA, 15 bp, Homo sapiens
taaaatacattatct

SEQ ID NO: 1270387 - DNA, 15 bp, Homo sapiens
ataaaatacattatc

SEQ ID NO: 1270388 - DNA, 15 bp, Homo sapiens
tataaaatacattat

SEQ ID NO: 1270389 - DNA, 15 bp, Homo sapiens
ttataaaatacatta

SEQ ID NO: 1270390 - DNA, 15 bp, Homo sapiens
attataaaatacatt

SEQ ID NO: 1270391 - DNA, 15 bp, Homo sapiens
aattataaaatacat

SEQ ID NO: 1270392 - DNA, 15 bp, Homo sapiens
aaattataaaataca

SEQ ID NO: 1270393 - DNA, 15 bp, Homo sapiens
aaaattataaaatac

SEQ ID NO: 1270394 - DNA, 15 bp, Homo sapiens
aaaaattataaaata

SEQ ID NO: 1270395 - DNA, 15 bp, Homo sapiens
aaaaaattataaaat

SEQ ID NO: 1270396 - DNA, 15 bp, Homo sapiens
ggaaaaaattataaa

SEQ ID NO: 1270397 - DNA, 15 bp, Homo sapiens
aggaaaaaattataa

SEQ ID NO: 1270398 - DNA, 15 bp, Homo sapiens
aaggaaaaaattata

SEQ ID NO: 1270399 - DNA, 15 bp, Homo sapiens
aaaggaaaaaattat

SEQ ID NO: 1270400 - DNA, 15 bp, Homo sapiens
aaaaggaaaaaatta

SEQ ID NO: 1270401 - DNA, 15 bp, Homo sapiens
caaaaggaaaaaatt

SEQ ID NO: 1270402 - DNA, 15 bp, Homo sapiens
acaaaaggaaaaaat

SEQ ID NO: 1270403 - DNA, 15 bp, Homo sapiens
aacaaaaggaaaaaa

SEQ ID NO: 1270404 - DNA, 15 bp, Homo sapiens
aaacaaaaggaaaaa

SEQ ID NO: 1270405 - DNA, 15 bp, Homo sapiens
taaacaaaaggaaaa

SEQ ID NO: 1270406 - DNA, 15 bp, Homo sapiens
ataaacaaaaggaaa

SEQ ID NO: 1270407 - DNA, 15 bp, Homo sapiens
gataaacaaaaggaa

SEQ ID NO: 1270408 - DNA, 15 bp, Homo sapiens
agataaacaaaagga

SEQ ID NO: 1270409 - DNA, 15 bp, Homo sapiens
gagataaacaaaagg

SEQ ID NO: 1270410 - DNA, 15 bp, Homo sapiens
agagataaacaaaag

SEQ ID NO: 1270411 - DNA, 15 bp, Homo sapiens
gagagataaacaaaa

SEQ ID NO: 1270412 - DNA, 15 bp, Homo sapiens
agagagataaacaaa

SEQ ID NO: 1270413 - DNA, 15 bp, Homo sapiens
aagagagataaacaa

SEQ ID NO: 1270414 - DNA, 15 bp, Homo sapiens
aaagagagataaaca

SEQ ID NO: 1270415 - DNA, 15 bp, Homo sapiens
aaaagagagataaac

SEQ ID NO: 1270416 - DNA, 15 bp, Homo sapiens
gaaaagagagataaa

SEQ ID NO: 1270417 - DNA, 15 bp, Homo sapiens
agaaaagagagataa

SEQ ID NO: 1270418 - DNA, 15 bp, Homo sapiens
cagaaaagagagata

SEQ ID NO: 1270419 - DNA, 15 bp, Homo sapiens
acagaaaagagagat

SEQ ID NO: 1270420 - DNA, 15 bp, Homo sapiens
aacagaaaagagaga

SEQ ID NO: 1270421 - DNA, 15 bp, Homo sapiens
aaaacagaaaagaga

SEQ ID NO: 1270422 - DNA, 15 bp, Homo sapiens
gaaaacagaaaagag

SEQ ID NO: 1270423 - DNA, 15 bp, Homo sapiens
agaaaacagaaaaga

SEQ ID NO: 1270424 - DNA, 15 bp, Homo sapiens
tagaaaacagaaaag

SEQ ID NO: 1270425 - DNA, 15 bp, Homo sapiens
gtagaaaacagaaaa

SEQ ID NO: 1270426 - DNA, 15 bp, Homo sapiens
tgtagaaaacagaaa

SEQ ID NO: 1270427 - DNA, 15 bp, Homo sapiens
atgtagaaaacagaa

SEQ ID NO: 1270428 - DNA, 15 bp, Homo sapiens
aatgtagaaaacaga

SEQ ID NO: 1270429 - DNA, 15 bp, Homo sapiens
caatgtagaaaacag

SEQ ID NO: 1270430 - DNA, 15 bp, Homo sapiens
tcaatgtagaaaaca

SEQ ID NO: 1270431 - DNA, 15 bp, Homo sapiens
ttcaatgtagaaaac

SEQ ID NO: 1270432 - DNA, 15 bp, Homo sapiens
tttcaatgtagaaaa

SEQ ID NO: 1270433 - DNA, 15 bp, Homo sapiens
ttttcaatgtagaaa

SEQ ID NO: 1270434 - DNA, 15 bp, Homo sapiens
attttcaatgtagaa

SEQ ID NO: 1270435 - DNA, 15 bp, Homo sapiens
cattttcaatgtaga

SEQ ID NO: 1270436 - DNA, 15 bp, Homo sapiens
acattttcaatgtag

SEQ ID NO: 1270437 - DNA, 15 bp, Homo sapiens
tacattttcaatgta

SEQ ID NO: 1270438 - DNA, 15 bp, Homo sapiens
atacattttcaatgt

SEQ ID NO: 1270439 - DNA, 15 bp, Homo sapiens
aatacattttcaatg

SEQ ID NO: 1270440 - DNA, 15 bp, Homo sapiens
taatacattttcaat

SEQ ID NO: 1270441 - DNA, 15 bp, Homo sapiens
gtaatacattttcaa

SEQ ID NO: 1270442 - DNA, 15 bp, Homo sapiens
agtaatacattttca

SEQ ID NO: 1270443 - DNA, 15 bp, Homo sapiens
aagtaatacattttc

SEQ ID NO: 1270444 - DNA, 15 bp, Homo sapiens
caagtaatacatttt

SEQ ID NO: 1270445 - DNA, 15 bp, Homo sapiens
acaagtaatacattt

SEQ ID NO: 1270446 - DNA, 15 bp, Homo sapiens
aacaagtaatacatt

SEQ ID NO: 1270447 - DNA, 15 bp, Homo sapiens
aaacaagtaatacat

SEQ ID NO: 1270448 - DNA, 15 bp, Homo sapiens
aaaacaagtaataca

SEQ ID NO: 1270449 - DNA, 15 bp, Homo sapiens
aaaaacaagtaatac

SEQ ID NO: 1270450 - DNA, 15 bp, Homo sapiens
taaaaacaagtaata

SEQ ID NO: 1270451 - DNA, 15 bp, Homo sapiens
ttaaaaacaagtaat

SEQ ID NO: 1270452 - DNA, 15 bp, Homo sapiens
tttaaaaacaagtaa

SEQ ID NO: 1270453 - DNA, 15 bp, Homo sapiens
atttaaaaacaagta

SEQ ID NO: 1270454 - DNA, 15 bp, Homo sapiens
aatttaaaaacaagt

SEQ ID NO: 1270455 - DNA, 15 bp, Homo sapiens
taatttaaaaacaag

SEQ ID NO: 1270456 - DNA, 15 bp, Homo sapiens
ttaatttaaaaacaa

SEQ ID NO: 1270457 - DNA, 15 bp, Homo sapiens
tttaatttaaaaaca

SEQ ID NO: 1270458 - DNA, 15 bp, Homo sapiens
ttttaatttaaaaac

SEQ ID NO: 1270459 - DNA, 15 bp, Homo sapiens
tttttaatttaaaaa

SEQ ID NO: 1270460 - DNA, 15 bp, Homo sapiens
gtttttaatttaaaa

SEQ ID NO: 1270461 - DNA, 15 bp, Homo sapiens
tgtttttaatttaaa

SEQ ID NO: 1270462 - DNA, 15 bp, Homo sapiens
atgtttttaatttaa

SEQ ID NO: 1270463 - DNA, 15 bp, Homo sapiens
aatgtttttaattta

SEQ ID NO: 1270464 - DNA, 15 bp, Homo sapiens
taaatgtttttaatt

SEQ ID NO: 1270465 - DNA, 15 bp, Homo sapiens
ttaaatgtttttaat

SEQ ID NO: 1270466 - DNA, 15 bp, Homo sapiens
attaaatgtttttaa

SEQ ID NO: 1270467 - DNA, 15 bp, Homo sapiens
aattaaatgttttta

SEQ ID NO: 1270468 - DNA, 15 bp, Homo sapiens
aaattaaatgttttt

SEQ ID NO: 1270469 - DNA, 15 bp, Homo sapiens
caaattaaatgtttt

SEQ ID NO: 1270470 - DNA, 15 bp, Homo sapiens
tcaaattaaatgttt

SEQ ID NO: 1270471 - DNA, 15 bp, Homo sapiens
ttcaaattaaatgtt

SEQ ID NO: 1270472 - DNA, 15 bp, Homo sapiens
attcaaattaaatgt

SEQ ID NO: 1270473 - DNA, 15 bp, Homo sapiens
tattcaaattaaatg

SEQ ID NO: 1270474 - DNA, 15 bp, Homo sapiens
gtattcaaattaaat

SEQ ID NO: 1270475 - DNA, 15 bp, Homo sapiens
ggtattcaaattaaa

SEQ ID NO: 1270476 - DNA, 15 bp, Homo sapiens
aggtattcaaattaa

SEQ ID NO: 1270477 - DNA, 15 bp, Homo sapiens
gaggtattcaaatta

SEQ ID NO: 1270478 - DNA, 15 bp, Homo sapiens
tgaggtattcaaatt

SEQ ID NO: 1270479 - DNA, 15 bp, Homo sapiens
atgaggtattcaaat

SEQ ID NO: 1270480 - DNA, 15 bp, Homo sapiens
tatgaggtattcaaa

SEQ ID NO: 1270481 - DNA, 15 bp, Homo sapiens
atatgaggtattcaa

SEQ ID NO: 1270482 - DNA, 15 bp, Homo sapiens
catatgaggtattca

SEQ ID NO: 1270483 - DNA, 15 bp, Homo sapiens
tcatatgaggtattc

SEQ ID NO: 1270484 - DNA, 15 bp, Homo sapiens
ctcatatgaggtatt

SEQ ID NO: 1270485 - DNA, 15 bp, Homo sapiens
actcatatgaggtat

SEQ ID NO: 1270486 - DNA, 15 bp, Homo sapiens
cactcatatgaggta

SEQ ID NO: 1270487 - DNA, 15 bp, Homo sapiens
acactcatatgaggt

SEQ ID NO: 1270488 - DNA, 15 bp, Homo sapiens
cacactcatatgagg

SEQ ID NO: 1270489 - DNA, 15 bp, Homo sapiens
ccacactcatatgag

SEQ ID NO: 1270490 - DNA, 15 bp, Homo sapiens
gccacactcatatga

SEQ ID NO: 1270491 - DNA, 15 bp, Homo sapiens
ggccacactcatatg

SEQ ID NO: 1270492 - DNA, 15 bp, Homo sapiens
aggccacactcatat

SEQ ID NO: 1270493 - DNA, 15 bp, Homo sapiens
aaggccacactcata

SEQ ID NO: 1270494 - DNA, 15 bp, Homo sapiens
taaggccacactcat

SEQ ID NO: 1270495 - DNA, 15 bp, Homo sapiens
gtaaggccacactca

SEQ ID NO: 1270496 - DNA, 15 bp, Homo sapiens
tgtaaggccacactc

SEQ ID NO: 1270497 - DNA, 15 bp, Homo sapiens
ctgtaaggccacact

SEQ ID NO: 1270498 - DNA, 15 bp, Homo sapiens
cctgtaaggccacac

SEQ ID NO: 1270499 - DNA, 15 bp, Homo sapiens
gcctgtaaggccaca

SEQ ID NO: 1270500 - DNA, 15 bp, Homo sapiens
ggcctgtaaggccac

SEQ ID NO: 1270501 - DNA, 15 bp, Homo sapiens
aggcctgtaaggcca

SEQ ID NO: 1270502 - DNA, 15 bp, Homo sapiens
caggcctgtaaggcc

SEQ ID NO: 1270503 - DNA, 15 bp, Homo sapiens
ccaggcctgtaaggc

SEQ ID NO: 1270504 - DNA, 15 bp, Homo sapiens
cccaggcctgtaagg

SEQ ID NO: 1270505 - DNA, 15 bp, Homo sapiens
acccaggcctgtaag

SEQ ID NO: 1270506 - DNA, 15 bp, Homo sapiens
tacccaggcctgtaa

SEQ ID NO: 1270507 - DNA, 15 bp, Homo sapiens
gtacccaggcctgta

SEQ ID NO: 1270508 - DNA, 15 bp, Homo sapiens
ggtacccaggcctgt

SEQ ID NO: 1270509 - DNA, 15 bp, Homo sapiens
gggtacccaggcctg

SEQ ID NO: 1270510 - DNA, 15 bp, Homo sapiens
tgggtacccaggcct

SEQ ID NO: 1270511 - DNA, 15 bp, Homo sapiens
ctgggtacccaggcc

SEQ ID NO: 1270512 - DNA, 15 bp, Homo sapiens
cctgggtacccaggc

SEQ ID NO: 1270513 - DNA, 15 bp, Homo sapiens
tcctgggtacccagg

SEQ ID NO: 1270514 - DNA, 15 bp, Homo sapiens
ttcctgggtacccag

SEQ ID NO: 1270515 - DNA, 15 bp, Homo sapiens
cttcctgggtaccca

SEQ ID NO: 1270516 - DNA, 15 bp, Homo sapiens
gcttcctgggtaccc

SEQ ID NO: 1270517 - DNA, 15 bp, Homo sapiens
ggcttcctgggtacc

SEQ ID NO: 1270518 - DNA, 15 bp, Homo sapiens
aggcttcctgggtac

SEQ ID NO: 1270519 - DNA, 15 bp, Homo sapiens
caggcttcctgggta

SEQ ID NO: 1270520 - DNA, 15 bp, Homo sapiens
ccaggcttcctgggt

SEQ ID NO: 1270521 - DNA, 15 bp, Homo sapiens
accaggcttcctggg

SEQ ID NO: 1270522 - DNA, 15 bp, Homo sapiens
gaccaggcttcctgg

SEQ ID NO: 1270523 - DNA, 15 bp, Homo sapiens
agaccaggcttcctg

SEQ ID NO: 1270524 - DNA, 15 bp, Homo sapiens
cagaccaggcttcct

SEQ ID NO: 1270525 - DNA, 15 bp, Homo sapiens
ccagaccaggcttcc

SEQ ID NO: 1270526 - DNA, 15 bp, Homo sapiens
gccagaccaggcttc

SEQ ID NO: 1270527 - DNA, 15 bp, Homo sapiens
ggccagaccaggctt

SEQ ID NO: 1270528 - DNA, 15 bp, Homo sapiens
aggccagaccaggct

SEQ ID NO: 1270529 - DNA, 15 bp, Homo sapiens
caggccagaccaggc

SEQ ID NO: 1270530 - DNA, 15 bp, Homo sapiens
acaggccagaccagg

SEQ ID NO: 1270531 - DNA, 15 bp, Homo sapiens
tacaggccagaccag

SEQ ID NO: 1270532 - DNA, 15 bp, Homo sapiens
atacaggccagacca

SEQ ID NO: 1270533 - DNA, 15 bp, Homo sapiens
tatacaggccagacc

SEQ ID NO: 1270534 - DNA, 15 bp, Homo sapiens
ttatacaggccagac

SEQ ID NO: 1270535 - DNA, 15 bp, Homo sapiens
attatacaggccaga

SEQ ID NO: 1270536 - DNA, 15 bp, Homo sapiens
tattatacaggccag

SEQ ID NO: 1270537 - DNA, 15 bp, Homo sapiens
ttattatacaggcca

SEQ ID NO: 1270538 - DNA, 15 bp, Homo sapiens
attattatacaggcc

SEQ ID NO: 1270539 - DNA, 15 bp, Homo sapiens
aattattatacaggc

SEQ ID NO: 1270540 - DNA, 15 bp, Homo sapiens
taattattatacagg

SEQ ID NO: 1270541 - DNA, 15 bp, Homo sapiens
ttaattattatacag

SEQ ID NO: 1270542 - DNA, 15 bp, Homo sapiens
cttaattattataca

SEQ ID NO: 1270543 - DNA, 15 bp, Homo sapiens
tcttaattattatac

SEQ ID NO: 1270544 - DNA, 15 bp, Homo sapiens
ttcttaattattata

SEQ ID NO: 1270545 - DNA, 15 bp, Homo sapiens
tatttcttaattatt

SEQ ID NO: 1270546 - DNA, 15 bp, Homo sapiens
ttatttcttaattat

SEQ ID NO: 1270547 - DNA, 15 bp, Homo sapiens
attatttcttaatta

SEQ ID NO: 1270548 - DNA, 15 bp, Homo sapiens
aattatttcttaatt

SEQ ID NO: 1270549 - DNA, 15 bp, Homo sapiens
taattatttcttaat

SEQ ID NO: 1270550 - DNA, 15 bp, Homo sapiens
ttaattatttcttaa

SEQ ID NO: 1270551 - DNA, 15 bp, Homo sapiens
attaattatttctta

SEQ ID NO: 1270552 - DNA, 15 bp, Homo sapiens
aattaattatttctt

SEQ ID NO: 1270553 - DNA, 15 bp, Homo sapiens
caattaattatttct

SEQ ID NO: 1270554 - DNA, 15 bp, Homo sapiens
acaattaattatttc

SEQ ID NO: 1270555 - DNA, 15 bp, Homo sapiens
tacaattaattattt

SEQ ID NO: 1270556 - DNA, 15 bp, Homo sapiens
atacaattaattatt

SEQ ID NO: 1270557 - DNA, 15 bp, Homo sapiens
tatacaattaattat

SEQ ID NO: 1270558 - DNA, 15 bp, Homo sapiens
ttatacaattaatta

SEQ ID NO: 1270559 - DNA, 15 bp, Homo sapiens
attatacaattaatt

SEQ ID NO: 1270560 - DNA, 15 bp, Homo sapiens
tattatacaattaat

SEQ ID NO: 1270561 - DNA, 15 bp, Homo sapiens
ttattatacaattaa

SEQ ID NO: 1270562 - DNA, 15 bp, Homo sapiens
attattatacaatta

SEQ ID NO: 1270563 - DNA, 15 bp, Homo sapiens
aattattatacaatt

SEQ ID NO: 1270564 - DNA, 15 bp, Homo sapiens
caattattatacaat

SEQ ID NO: 1270565 - DNA, 15 bp, Homo sapiens
acaattattatacaa

SEQ ID NO: 1270566 - DNA, 15 bp, Homo sapiens
cacaattattataca

SEQ ID NO: 1270567 - DNA, 15 bp, Homo sapiens
gcacaattattatac

SEQ ID NO: 1270568 - DNA, 15 bp, Homo sapiens
agcacaattattata

SEQ ID NO: 1270569 - DNA, 15 bp, Homo sapiens
aagcacaattattat

SEQ ID NO: 1270570 - DNA, 15 bp, Homo sapiens
caagcacaattatta

SEQ ID NO: 1270571 - DNA, 15 bp, Homo sapiens
acaagcacaattatt

SEQ ID NO: 1270572 - DNA, 15 bp, Homo sapiens
tacaagcacaattat

SEQ ID NO: 1270573 - DNA, 15 bp, Homo sapiens
atacaagcacaatta

SEQ ID NO: 1270574 - DNA, 15 bp, Homo sapiens
tatacaagcacaatt

SEQ ID NO: 1270575 - DNA, 15 bp, Homo sapiens
ttatacaagcacaat

SEQ ID NO: 1270576 - DNA, 15 bp, Homo sapiens
attatacaagcacaa

SEQ ID NO: 1270577 - DNA, 15 bp, Homo sapiens
tattatacaagcaca

SEQ ID NO: 1270578 - DNA, 15 bp, Homo sapiens
ttattatacaagcac

SEQ ID NO: 1270579 - DNA, 15 bp, Homo sapiens
attattatacaagca

SEQ ID NO: 1270580 - DNA, 15 bp, Homo sapiens
aattattatacaagc

SEQ ID NO: 1270581 - DNA, 15 bp, Homo sapiens
taattattatacaag

SEQ ID NO: 1270582 - DNA, 15 bp, Homo sapiens
ttaattattatacaa

SEQ ID NO: 1270583 - DNA, 15 bp, Homo sapiens
gatttcttaattatt

SEQ ID NO: 1270584 - DNA, 15 bp, Homo sapiens
agatttcttaattat

SEQ ID NO: 1270585 - DNA, 15 bp, Homo sapiens
cagatttcttaatta

SEQ ID NO: 1270586 - DNA, 15 bp, Homo sapiens
gcagatttcttaatt

SEQ ID NO: 1270587 - DNA, 15 bp, Homo sapiens
agcagatttcttaat

SEQ ID NO: 1270588 - DNA, 15 bp, Homo sapiens
tagcagatttcttaa

SEQ ID NO: 1270589 - DNA, 15 bp, Homo sapiens
gtagcagatttctta

SEQ ID NO: 1270590 - DNA, 15 bp, Homo sapiens
ggtagcagatttctt

SEQ ID NO: 1270591 - DNA, 15 bp, Homo sapiens
aggtagcagatttct

SEQ ID NO: 1270592 - DNA, 15 bp, Homo sapiens
gaggtagcagatttc

SEQ ID NO: 1270593 - DNA, 15 bp, Homo sapiens
ggaggtagcagattt

SEQ ID NO: 1270594 - DNA, 15 bp, Homo sapiens
aggaggtagcagatt

SEQ ID NO: 1270595 - DNA, 15 bp, Homo sapiens
aaggaggtagcagat

SEQ ID NO: 1270596 - DNA, 15 bp, Homo sapiens
aaaggaggtagcaga

SEQ ID NO: 1270597 - DNA, 15 bp, Homo sapiens
gaaaggaggtagcag

SEQ ID NO: 1270598 - DNA, 15 bp, Homo sapiens
tgaaaggaggtagca

SEQ ID NO: 1270599 - DNA, 15 bp, Homo sapiens
ctgaaaggaggtagc

SEQ ID NO: 1270600 - DNA, 15 bp, Homo sapiens
cctgaaaggaggtag

SEQ ID NO: 1270601 - DNA, 15 bp, Homo sapiens
acctgaaaggaggta

SEQ ID NO: 1270602 - DNA, 15 bp, Homo sapiens
tacctgaaaggaggt

SEQ ID NO: 1270603 - DNA, 15 bp, Homo sapiens
ctacctgaaaggagg

SEQ ID NO: 1270604 - DNA, 15 bp, Homo sapiens
gctacctgaaaggag

SEQ ID NO: 1270605 - DNA, 15 bp, Homo sapiens
tgctacctgaaagga

SEQ ID NO: 1270606 - DNA, 15 bp, Homo sapiens
ctgctacctgaaagg

SEQ ID NO: 1270607 - DNA, 15 bp, Homo sapiens
gctgctacctgaaag

SEQ ID NO: 1270608 - DNA, 15 bp, Homo sapiens
ggctgctacctgaaa

SEQ ID NO: 1270609 - DNA, 15 bp, Homo sapiens
gggctgctacctgaa

SEQ ID NO: 1270610 - DNA, 15 bp, Homo sapiens
agggctgctacctga

SEQ ID NO: 1270611 - DNA, 15 bp, Homo sapiens
aagggctgctacctg

SEQ ID NO: 1270612 - DNA, 15 bp, Homo sapiens
taagggctgctacct

SEQ ID NO: 1270613 - DNA, 15 bp, Homo sapiens
gtaagggctgctacc

SEQ ID NO: 1270614 - DNA, 15 bp, Homo sapiens
ggtaagggctgctac

SEQ ID NO: 1270615 - DNA, 15 bp, Homo sapiens
tggtaagggctgcta

SEQ ID NO: 1270616 - DNA, 15 bp, Homo sapiens
ctggtaagggctgct

SEQ ID NO: 1270617 - DNA, 15 bp, Homo sapiens
cctggtaagggctgc

SEQ ID NO: 1270618 - DNA, 15 bp, Homo sapiens
ccctggtaagggctg

SEQ ID NO: 1270619 - DNA, 15 bp, Homo sapiens
gccctggtaagggct

SEQ ID NO: 1270620 - DNA, 15 bp, Homo sapiens
agccctggtaagggc

SEQ ID NO: 1270621 - DNA, 15 bp, Homo sapiens
gagccctggtaaggg

SEQ ID NO: 1270622 - DNA, 15 bp, Homo sapiens
agagccctggtaagg

SEQ ID NO: 1270623 - DNA, 15 bp, Homo sapiens
tagagccctggtaag

SEQ ID NO: 1270624 - DNA, 15 bp, Homo sapiens
ctagagccctggtaa

SEQ ID NO: 1270625 - DNA, 15 bp, Homo sapiens
tctagagccctggta

SEQ ID NO: 1270626 - DNA, 15 bp, Homo sapiens
ttctagagccctggt

SEQ ID NO: 1270627 - DNA, 15 bp, Homo sapiens
attctagagccctgg

SEQ ID NO: 1270628 - DNA, 15 bp, Homo sapiens
gattctagagccctg

SEQ ID NO: 1270629 - DNA, 15 bp, Homo sapiens
agattctagagccct

SEQ ID NO: 1270630 - DNA, 15 bp, Homo sapiens
gagattctagagccc

SEQ ID NO: 1270631 - DNA, 15 bp, Homo sapiens
ggagattctagagcc

SEQ ID NO: 1270632 - DNA, 15 bp, Homo sapiens
aggagattctagagc

SEQ ID NO: 1270633 - DNA, 15 bp, Homo sapiens
caggagattctagag

SEQ ID NO: 1270634 - DNA, 15 bp, Homo sapiens
tcaggagattctaga

SEQ ID NO: 1270635 - DNA, 15 bp, Homo sapiens
ttcaggagattctag

SEQ ID NO: 1270636 - DNA, 15 bp, Homo sapiens
attcaggagattcta

SEQ ID NO: 1270637 - DNA, 15 bp, Homo sapiens
gattcaggagattct

SEQ ID NO: 1270638 - DNA, 15 bp, Homo sapiens
tgattcaggagattc

SEQ ID NO: 1270639 - DNA, 15 bp, Homo sapiens
ctgattcaggagatt

SEQ ID NO: 1270640 - DNA, 15 bp, Homo sapiens
actgattcaggagat

SEQ ID NO: 1270641 - DNA, 15 bp, Homo sapiens
aactgattcaggaga

SEQ ID NO: 1270642 - DNA, 15 bp, Homo sapiens
aaactgattcaggag

SEQ ID NO: 1270643 - DNA, 15 bp, Homo sapiens
taaactgattcagga

SEQ ID NO: 1270644 - DNA, 15 bp, Homo sapiens
ctaaactgattcagg

SEQ ID NO: 1270645 - DNA, 15 bp, Homo sapiens
actaaactgattcag

SEQ ID NO: 1270646 - DNA, 15 bp, Homo sapiens
gactaaactgattca

SEQ ID NO: 1270647 - DNA, 15 bp, Homo sapiens
agactaaactgattc

SEQ ID NO: 1270648 - DNA, 15 bp, Homo sapiens
gagactaaactgatt

SEQ ID NO: 1270649 - DNA, 15 bp, Homo sapiens
ggagactaaactgat

SEQ ID NO: 1270650 - DNA, 15 bp, Homo sapiens
gggagactaaactga

SEQ ID NO: 1270651 - DNA, 15 bp, Homo sapiens
agggagactaaactg

SEQ ID NO: 1270652 - DNA, 15 bp, Homo sapiens
cagggagactaaact

SEQ ID NO: 1270653 - DNA, 15 bp, Homo sapiens
tcagggagactaaac

SEQ ID NO: 1270654 - DNA, 15 bp, Homo sapiens
ttcagggagactaaa

SEQ ID NO: 1270655 - DNA, 15 bp, Homo sapiens
cttcagggagactaa

SEQ ID NO: 1270656 - DNA, 15 bp, Homo sapiens
gcttcagggagacta

SEQ ID NO: 1270657 - DNA, 15 bp, Homo sapiens
ggcttcagggagact

SEQ ID NO: 1270658 - DNA, 15 bp, Homo sapiens
tggcttcagggagac

SEQ ID NO: 1270659 - DNA, 15 bp, Homo sapiens
gtggcttcagggaga

SEQ ID NO: 1270660 - DNA, 15 bp, Homo sapiens
agtggcttcagggag

SEQ ID NO: 1270661 - DNA, 15 bp, Homo sapiens
tagtggcttcaggga

SEQ ID NO: 1270662 - DNA, 15 bp, Homo sapiens
ttagtggcttcaggg

SEQ ID NO: 1270663 - DNA, 15 bp, Homo sapiens
cttagtggcttcagg

SEQ ID NO: 1270664 - DNA, 15 bp, Homo sapiens
tcttagtggcttcag

SEQ ID NO: 1270665 - DNA, 15 bp, Homo sapiens
atcttagtggcttca

SEQ ID NO: 1270666 - DNA, 15 bp, Homo sapiens
gatcttagtggcttc

SEQ ID NO: 1270667 - DNA, 15 bp, Homo sapiens
agatcttagtggctt

SEQ ID NO: 1270668 - DNA, 15 bp, Homo sapiens
cagatcttagtggct

SEQ ID NO: 1270669 - DNA, 15 bp, Homo sapiens
ccagatcttagtggc

SEQ ID NO: 1270670 - DNA, 15 bp, Homo sapiens
cccagatcttagtgg

SEQ ID NO: 1270671 - DNA, 15 bp, Homo sapiens
gcccagatcttagtg

SEQ ID NO: 1270672 - DNA, 15 bp, Homo sapiens
tgcccagatcttagt

SEQ ID NO: 1270673 - DNA, 15 bp, Homo sapiens
atgcccagatcttag

SEQ ID NO: 1270674 - DNA, 15 bp, Homo sapiens
catgcccagatctta

SEQ ID NO: 1270675 - DNA, 15 bp, Homo sapiens
acatgcccagatctt

SEQ ID NO: 1270676 - DNA, 15 bp, Homo sapiens
gacatgcccagatct

SEQ ID NO: 1270677 - DNA, 15 bp, Homo sapiens
tgacatgcccagatc

SEQ ID NO: 1270678 - DNA, 15 bp, Homo sapiens
ttgacatgcccagat

SEQ ID NO: 1270679 - DNA, 15 bp, Homo sapiens
tttgacatgcccaga

SEQ ID NO: 1270680 - DNA, 15 bp, Homo sapiens
ttttgacatgcccag

SEQ ID NO: 1270681 - DNA, 15 bp, Homo sapiens
attttgacatgccca

SEQ ID NO: 1270682 - DNA, 15 bp, Homo sapiens
cattttgacatgccc

SEQ ID NO: 1270683 - DNA, 15 bp, Homo sapiens
ccattttgacatgcc

SEQ ID NO: 1270684 - DNA, 15 bp, Homo sapiens
cccattttgacatgc

SEQ ID NO: 1270685 - DNA, 15 bp, Homo sapiens
acccattttgacatg

SEQ ID NO: 1270686 - DNA, 15 bp, Homo sapiens
cacccattttgacat

SEQ ID NO: 1270687 - DNA, 15 bp, Homo sapiens
ccacccattttgaca

SEQ ID NO: 1270688 - DNA, 15 bp, Homo sapiens
gccacccattttgac

SEQ ID NO: 1270689 - DNA, 15 bp, Homo sapiens
tgccacccattttga

SEQ ID NO: 1270690 - DNA, 15 bp, Homo sapiens
gtgccacccattttg

SEQ ID NO: 1270691 - DNA, 15 bp, Homo sapiens
ggtgccacccatttt

SEQ ID NO: 1270692 - DNA, 15 bp, Homo sapiens
gggtgccacccattt

SEQ ID NO: 1270693 - DNA, 15 bp, Homo sapiens
agggtgccacccatt

SEQ ID NO: 1270694 - DNA, 15 bp, Homo sapiens
cagggtgccacccat

SEQ ID NO: 1270695 - DNA, 15 bp, Homo sapiens
gcagggtgccaccca

SEQ ID NO: 1270696 - DNA, 15 bp, Homo sapiens
ggcagggtgccaccc

SEQ ID NO: 1270697 - DNA, 15 bp, Homo sapiens
gggcagggtgccacc

SEQ ID NO: 1270698 - DNA, 15 bp, Homo sapiens
tgggcagggtgccac

SEQ ID NO: 1270699 - DNA, 15 bp, Homo sapiens
ctgggcagggtgcca

SEQ ID NO: 1270700 - DNA, 15 bp, Homo sapiens
actgggcagggtgcc

SEQ ID NO: 1270701 - DNA, 15 bp, Homo sapiens
gactgggcagggtgc

SEQ ID NO: 1270702 - DNA, 15 bp, Homo sapiens
tgactgggcagggtg

SEQ ID NO: 1270703 - DNA, 15 bp, Homo sapiens
ttgactgggcagggt

SEQ ID NO: 1270704 - DNA, 15 bp, Homo sapiens
tttgactgggcaggg

SEQ ID NO: 1270705 - DNA, 15 bp, Homo sapiens
ctttgactgggcagg

SEQ ID NO: 1270706 - DNA, 15 bp, Homo sapiens
gctttgactgggcag

SEQ ID NO: 1270707 - DNA, 15 bp, Homo sapiens
tgctttgactgggca

SEQ ID NO: 1270708 - DNA, 15 bp, Homo sapiens
gtgctttgactgggc

SEQ ID NO: 1270709 - DNA, 15 bp, Homo sapiens
agtgctttgactggg

SEQ ID NO: 1270710 - DNA, 15 bp, Homo sapiens
aagtgctttgactgg

SEQ ID NO: 1270711 - DNA, 15 bp, Homo sapiens
gaagtgctttgactg

SEQ ID NO: 1270712 - DNA, 15 bp, Homo sapiens
ggaagtgctttgact

SEQ ID NO: 1270713 - DNA, 15 bp, Homo sapiens
tggaagtgctttgac

SEQ ID NO: 1270714 - DNA, 15 bp, Homo sapiens
gtggaagtgctttga

SEQ ID NO: 1270715 - DNA, 15 bp, Homo sapiens
agtggaagtgctttg

SEQ ID NO: 1270716 - DNA, 15 bp, Homo sapiens
tagtggaagtgcttt

SEQ ID NO: 1270717 - DNA, 15 bp, Homo sapiens
ttagtggaagtgctt

SEQ ID NO: 1270718 - DNA, 15 bp, Homo sapiens
gttagtggaagtgct

SEQ ID NO: 1270719 - DNA, 15 bp, Homo sapiens
tgttagtggaagtgc

SEQ ID NO: 1270720 - DNA, 15 bp, Homo sapiens
ctgttagtggaagtg

SEQ ID NO: 1270721 - DNA, 15 bp, Homo sapiens
cctgttagtggaagt

SEQ ID NO: 1270722 - DNA, 15 bp, Homo sapiens
acctgttagtggaag

SEQ ID NO: 1270723 - DNA, 15 bp, Homo sapiens
gacctgttagtggaa

SEQ ID NO: 1270724 - DNA, 15 bp, Homo sapiens
ggacctgttagtgga

SEQ ID NO: 1270725 - DNA, 15 bp, Homo sapiens
aggacctgttagtgg

SEQ ID NO: 1270726 - DNA, 15 bp, Homo sapiens
aaggacctgttagtg

SEQ ID NO: 1270727 - DNA, 15 bp, Homo sapiens
caaggacctgttagt

SEQ ID NO: 1270728 - DNA, 15 bp, Homo sapiens
ccaaggacctgttag

SEQ ID NO: 1270729 - DNA, 15 bp, Homo sapiens
cccaaggacctgtta

SEQ ID NO: 1270730 - DNA, 15 bp, Homo sapiens
acccaaggacctgtt

SEQ ID NO: 1270731 - DNA, 15 bp, Homo sapiens
cacccaaggacctgt

SEQ ID NO: 1270732 - DNA, 15 bp, Homo sapiens
ccacccaaggacctg

SEQ ID NO: 1270733 - DNA, 15 bp, Homo sapiens
cccacccaaggacct

SEQ ID NO: 1270734 - DNA, 15 bp, Homo sapiens
tcccacccaaggacc

SEQ ID NO: 1270735 - DNA, 15 bp, Homo sapiens
ttcccacccaaggac

SEQ ID NO: 1270736 - DNA, 15 bp, Homo sapiens
gttcccacccaagga

SEQ ID NO: 1270737 - DNA, 15 bp, Homo sapiens
agttcccacccaagg

SEQ ID NO: 1270738 - DNA, 15 bp, Homo sapiens
tagttcccacccaag

SEQ ID NO: 1270739 - DNA, 15 bp, Homo sapiens
ctagttcccacccaa

SEQ ID NO: 1270740 - DNA, 15 bp, Homo sapiens
tctagttcccaccca

SEQ ID NO: 1270741 - DNA, 15 bp, Homo sapiens
ttctagttcccaccc

SEQ ID NO: 1270742 - DNA, 15 bp, Homo sapiens
cttctagttcccacc

SEQ ID NO: 1270743 - DNA, 15 bp, Homo sapiens
tcttctagttcccac

SEQ ID NO: 1270744 - DNA, 15 bp, Homo sapiens
gtcttctagttccca

SEQ ID NO: 1270745 - DNA, 15 bp, Homo sapiens
tgtcttctagttccc

SEQ ID NO: 1270746 - DNA, 15 bp, Homo sapiens
ctgtcttctagttcc

SEQ ID NO: 1270747 - DNA, 15 bp, Homo sapiens
gctgtcttctagttc

SEQ ID NO: 1270748 - DNA, 15 bp, Homo sapiens
tgctgtcttctagtt

SEQ ID NO: 1270749 - DNA, 15 bp, Homo sapiens
atgctgtcttctagt

SEQ ID NO: 1270750 - DNA, 15 bp, Homo sapiens
gatgctgtcttctag

SEQ ID NO: 1270751 - DNA, 15 bp, Homo sapiens
tgatgctgtcttcta

SEQ ID NO: 1270752 - DNA, 15 bp, Homo sapiens
ctgatgctgtcttct

SEQ ID NO: 1270753 - DNA, 15 bp, Homo sapiens
cctgatgctgtcttc

SEQ ID NO: 1270754 - DNA, 15 bp, Homo sapiens
gcctgatgctgtctt

SEQ ID NO: 1270755 - DNA, 15 bp, Homo sapiens
agcctgatgctgtct

SEQ ID NO: 1270756 - DNA, 15 bp, Homo sapiens
aagcctgatgctgtc

SEQ ID NO: 1270757 - DNA, 15 bp, Homo sapiens
aaagcctgatgctgt

SEQ ID NO: 1270758 - DNA, 15 bp, Homo sapiens
aaaagcctgatgctg

SEQ ID NO: 1270759 - DNA, 15 bp, Homo sapiens
caaaagcctgatgct

SEQ ID NO: 1270760 - DNA, 15 bp, Homo sapiens
ccaaaagcctgatgc

SEQ ID NO: 1270761 - DNA, 15 bp, Homo sapiens
cccaaaagcctgatg

SEQ ID NO: 1270762 - DNA, 15 bp, Homo sapiens
gcccaaaagcctgat

SEQ ID NO: 1270763 - DNA, 15 bp, Homo sapiens
agcccaaaagcctga

SEQ ID NO: 1270764 - DNA, 15 bp, Homo sapiens
aagcccaaaagcctg

SEQ ID NO: 1270765 - DNA, 15 bp, Homo sapiens
aaagcccaaaagcct

SEQ ID NO: 1270766 - DNA, 15 bp, Homo sapiens
gaaagcccaaaagcc

SEQ ID NO: 1270767 - DNA, 15 bp, Homo sapiens
tgaaagcccaaaagc

SEQ ID NO: 1270768 - DNA, 15 bp, Homo sapiens
ttgaaagcccaaaag

SEQ ID NO: 1270769 - DNA, 15 bp, Homo sapiens
tttgaaagcccaaaa

SEQ ID NO: 1270770 - DNA, 15 bp, Homo sapiens
ttttgaaagcccaaa

SEQ ID NO: 1270771 - DNA, 15 bp, Homo sapiens
tttttgaaagcccaa

SEQ ID NO: 1270772 - DNA, 15 bp, Homo sapiens
ctttttgaaagccca

SEQ ID NO: 1270773 - DNA, 15 bp, Homo sapiens
actttttgaaagccc

SEQ ID NO: 1270774 - DNA, 15 bp, Homo sapiens
tactttttgaaagcc

SEQ ID NO: 1270775 - DNA, 15 bp, Homo sapiens
atactttttgaaagc

SEQ ID NO: 1270776 - DNA, 15 bp, Homo sapiens
aatactttttgaaag

SEQ ID NO: 1270777 - DNA, 15 bp, Homo sapiens
aaatactttttgaaa

SEQ ID NO: 1270778 - DNA, 15 bp, Homo sapiens
gaaatactttttgaa

SEQ ID NO: 1270779 - DNA, 15 bp, Homo sapiens
agaaatactttttga

SEQ ID NO: 1270780 - DNA, 15 bp, Homo sapiens
aagaaatactttttg

SEQ ID NO: 1270781 - DNA, 15 bp, Homo sapiens
taagaaatacttttt

SEQ ID NO: 1270782 - DNA, 15 bp, Homo sapiens
ttaagaaatactttt

SEQ ID NO: 1270783 - DNA, 15 bp, Homo sapiens
attaagaaatacttt

SEQ ID NO: 1270784 - DNA, 15 bp, Homo sapiens
cattaagaaatactt

SEQ ID NO: 1270785 - DNA, 15 bp, Homo sapiens
acattaagaaatact

SEQ ID NO: 1270786 - DNA, 15 bp, Homo sapiens
tacattaagaaatac

SEQ ID NO: 1270787 - DNA, 15 bp, Homo sapiens
ctacattaagaaata

SEQ ID NO: 1270788 - DNA, 15 bp, Homo sapiens
tctacattaagaaat

SEQ ID NO: 1270789 - DNA, 15 bp, Homo sapiens
ctctacattaagaaa

SEQ ID NO: 1270790 - DNA, 15 bp, Homo sapiens
tctctacattaagaa

SEQ ID NO: 1270791 - DNA, 15 bp, Homo sapiens
gtctctacattaaga

SEQ ID NO: 1270792 - DNA, 15 bp, Homo sapiens
agtctctacattaag

SEQ ID NO: 1270793 - DNA, 15 bp, Homo sapiens
gagtctctacattaa

SEQ ID NO: 1270794 - DNA, 15 bp, Homo sapiens
ggagtctctacatta

SEQ ID NO: 1270795 - DNA, 15 bp, Homo sapiens
aggagtctctacatt

SEQ ID NO: 1270796 - DNA, 15 bp, Homo sapiens
taggagtctctacat

SEQ ID NO: 1270797 - DNA, 15 bp, Homo sapiens
ataggagtctctaca

SEQ ID NO: 1270798 - DNA, 15 bp, Homo sapiens
aataggagtctctac

SEQ ID NO: 1270799 - DNA, 15 bp, Homo sapiens
gaataggagtctcta

SEQ ID NO: 1270800 - DNA, 15 bp, Homo sapiens
ggaataggagtctct

SEQ ID NO: 1270801 - DNA, 15 bp, Homo sapiens
aggaataggagtctc

SEQ ID NO: 1270802 - DNA, 15 bp, Homo sapiens
caggaataggagtct

SEQ ID NO: 1270803 - DNA, 15 bp, Homo sapiens
acaggaataggagtc

SEQ ID NO: 1270804 - DNA, 15 bp, Homo sapiens
tacaggaataggagt

SEQ ID NO: 1270805 - DNA, 15 bp, Homo sapiens
ctacaggaataggag

SEQ ID NO: 1270806 - DNA, 15 bp, Homo sapiens
actacaggaatagga

SEQ ID NO: 1270807 - DNA, 15 bp, Homo sapiens
gactacaggaatagg

SEQ ID NO: 1270808 - DNA, 15 bp, Homo sapiens
ggactacaggaatag

SEQ ID NO: 1270809 - DNA, 15 bp, Homo sapiens
gggactacaggaata

SEQ ID NO: 1270810 - DNA, 15 bp, Homo sapiens
tgggactacaggaat

SEQ ID NO: 1270811 - DNA, 15 bp, Homo sapiens
atgggactacaggaa

SEQ ID NO: 1270812 - DNA, 15 bp, Homo sapiens
aatgggactacagga

SEQ ID NO: 1270813 - DNA, 15 bp, Homo sapiens
taatgggactacagg

SEQ ID NO: 1270814 - DNA, 15 bp, Homo sapiens
ttaatgggactacag

SEQ ID NO: 1270815 - DNA, 15 bp, Homo sapiens
gttaatgggactaca

SEQ ID NO: 1270816 - DNA, 15 bp, Homo sapiens
tgttaatgggactac

SEQ ID NO: 1270817 - DNA, 15 bp, Homo sapiens
ctgttaatgggacta

SEQ ID NO: 1270818 - DNA, 15 bp, Homo sapiens
actgttaatgggact

SEQ ID NO: 1270819 - DNA, 15 bp, Homo sapiens
tactgttaatgggac

SEQ ID NO: 1270820 - DNA, 15 bp, Homo sapiens
ctactgttaatggga

SEQ ID NO: 1270821 - DNA, 15 bp, Homo sapiens
tctactgttaatggg

SEQ ID NO: 1270822 - DNA, 15 bp, Homo sapiens
gtctactgttaatgg

SEQ ID NO: 1270823 - DNA, 15 bp, Homo sapiens
agtctactgttaatg

SEQ ID NO: 1270824 - DNA, 15 bp, Homo sapiens
gagtctactgttaat

SEQ ID NO: 1270825 - DNA, 15 bp, Homo sapiens
agagtctactgttaa

SEQ ID NO: 1270826 - DNA, 15 bp, Homo sapiens
aagagtctactgtta

SEQ ID NO: 1270827 - DNA, 15 bp, Homo sapiens
caagagtctactgtt

SEQ ID NO: 1270828 - DNA, 15 bp, Homo sapiens
tcaagagtctactgt

SEQ ID NO: 1270829 - DNA, 15 bp, Homo sapiens
atcaagagtctactg

SEQ ID NO: 1270830 - DNA, 15 bp, Homo sapiens
aatcaagagtctact

SEQ ID NO: 1270831 - DNA, 15 bp, Homo sapiens
taatcaagagtctac

SEQ ID NO: 1270832 - DNA, 15 bp, Homo sapiens
ttaatcaagagtcta

SEQ ID NO: 1270833 - DNA, 15 bp, Homo sapiens
attaatcaagagtct

SEQ ID NO: 1270834 - DNA, 15 bp, Homo sapiens
tattaatcaagagtc

SEQ ID NO: 1270835 - DNA, 15 bp, Homo sapiens
ttattaatcaagagt

SEQ ID NO: 1270836 - DNA, 15 bp, Homo sapiens
cttattaatcaagag

SEQ ID NO: 1270837 - DNA, 15 bp, Homo sapiens
gcttattaatcaaga

SEQ ID NO: 1270838 - DNA, 15 bp, Homo sapiens
tgcttattaatcaag

SEQ ID NO: 1270839 - DNA, 15 bp, Homo sapiens
atgcttattaatcaa

SEQ ID NO: 1270840 - DNA, 15 bp, Homo sapiens
catgcttattaatca

SEQ ID NO: 1270841 - DNA, 15 bp, Homo sapiens
ccatgcttattaatc

SEQ ID NO: 1270842 - DNA, 15 bp, Homo sapiens
gccatgcttattaat

SEQ ID NO: 1270843 - DNA, 15 bp, Homo sapiens
agccatgcttattaa

SEQ ID NO: 1270844 - DNA, 15 bp, Homo sapiens
tagccatgcttatta

SEQ ID NO: 1270845 - DNA, 15 bp, Homo sapiens
ttagccatgcttatt

SEQ ID NO: 1270846 - DNA, 15 bp, Homo sapiens
attagccatgcttat

SEQ ID NO: 1270847 - DNA, 15 bp, Homo sapiens
cattagccatgctta

SEQ ID NO: 1270848 - DNA, 15 bp, Homo sapiens
tcattagccatgctt

SEQ ID NO: 1270849 - DNA, 15 bp, Homo sapiens
ttcattagccatgct

SEQ ID NO: 1270850 - DNA, 15 bp, Homo sapiens
tttcattagccatgc

SEQ ID NO: 1270851 - DNA, 15 bp, Homo sapiens
ttttcattagccatg

SEQ ID NO: 1270852 - DNA, 15 bp, Homo sapiens
attttcattagccat

SEQ ID NO: 1270853 - DNA, 15 bp, Homo sapiens
gattttcattagcca

SEQ ID NO: 1270854 - DNA, 15 bp, Homo sapiens
ggattttcattagcc

SEQ ID NO: 1270855 - DNA, 15 bp, Homo sapiens
tggattttcattagc

SEQ ID NO: 1270856 - DNA, 15 bp, Homo sapiens
gtggattttcattag

SEQ ID NO: 1270857 - DNA, 15 bp, Homo sapiens
tgtggattttcatta

SEQ ID NO: 1270858 - DNA, 15 bp, Homo sapiens
ctgtggattttcatt

SEQ ID NO: 1270859 - DNA, 15 bp, Homo sapiens
tctgtggattttcat

SEQ ID NO: 1270860 - DNA, 15 bp, Homo sapiens
ttctgtggattttca

SEQ ID NO: 1270861 - DNA, 15 bp, Homo sapiens
attctgtggattttc

SEQ ID NO: 1270862 - DNA, 15 bp, Homo sapiens
gattctgtggatttt

SEQ ID NO: 1270863 - DNA, 15 bp, Homo sapiens
tgattctgtggattt

SEQ ID NO: 1270864 - DNA, 15 bp, Homo sapiens
gtgattctgtggatt

SEQ ID NO: 1270865 - DNA, 15 bp, Homo sapiens
tgtgattctgtggat

SEQ ID NO: 1270866 - DNA, 15 bp, Homo sapiens
ctgtgattctgtgga

SEQ ID NO: 1270867 - DNA, 15 bp, Homo sapiens
tctgtgattctgtgg

SEQ ID NO: 1270868 - DNA, 15 bp, Homo sapiens
ttctgtgattctgtg

SEQ ID NO: 1270869 - DNA, 15 bp, Homo sapiens
gttctgtgattctgt

SEQ ID NO: 1270870 - DNA, 15 bp, Homo sapiens
ggttctgtgattctg

SEQ ID NO: 1270871 - DNA, 15 bp, Homo sapiens
tggttctgtgattct

SEQ ID NO: 1270872 - DNA, 15 bp, Homo sapiens
gtggttctgtgattc

SEQ ID NO: 1270873 - DNA, 15 bp, Homo sapiens
tgtggttctgtgatt

SEQ ID NO: 1270874 - DNA, 15 bp, Homo sapiens
ctgtggttctgtgat

SEQ ID NO: 1270875 - DNA, 15 bp, Homo sapiens
tctgtggttctgtga

SEQ ID NO: 1270876 - DNA, 15 bp, Homo sapiens
ttctgtggttctgtg

SEQ ID NO: 1270877 - DNA, 15 bp, Homo sapiens
attctgtggttctgt

SEQ ID NO: 1270878 - DNA, 15 bp, Homo sapiens
gattctgtggttctg

SEQ ID NO: 1270879 - DNA, 15 bp, Homo sapiens
ggattctgtggttct

SEQ ID NO: 1270880 - DNA, 15 bp, Homo sapiens
aggattctgtggttc

SEQ ID NO: 1270881 - DNA, 15 bp, Homo sapiens
caggattctgtggtt

SEQ ID NO: 1270882 - DNA, 15 bp, Homo sapiens
ccaggattctgtggt

SEQ ID NO: 1270883 - DNA, 15 bp, Homo sapiens
tccaggattctgtgg

SEQ ID NO: 1270884 - DNA, 15 bp, Homo sapiens
ctccaggattctgtg

SEQ ID NO: 1270885 - DNA, 15 bp, Homo sapiens
gctccaggattctgt

SEQ ID NO: 1270886 - DNA, 15 bp, Homo sapiens
agctccaggattctg

SEQ ID NO: 1270887 - DNA, 15 bp, Homo sapiens
tagctccaggattct

SEQ ID NO: 1270888 - DNA, 15 bp, Homo sapiens
ctagctccaggattc

SEQ ID NO: 1270889 - DNA, 15 bp, Homo sapiens
cctagctccaggatt

SEQ ID NO: 1270890 - DNA, 15 bp, Homo sapiens
tcctagctccaggat

SEQ ID NO: 1270891 - DNA, 15 bp, Homo sapiens
cctcctagctccagg

SEQ ID NO: 1270892 - DNA, 15 bp, Homo sapiens
ccctcctagctccag

SEQ ID NO: 1270893 - DNA, 15 bp, Homo sapiens
tccctcctagctcca

SEQ ID NO: 1270894 - DNA, 15 bp, Homo sapiens
ttccctcctagctcc

SEQ ID NO: 1270895 - DNA, 15 bp, Homo sapiens
attccctcctagctc

SEQ ID NO: 1270896 - DNA, 15 bp, Homo sapiens
aattccctcctagct

SEQ ID NO: 1270897 - DNA, 15 bp, Homo sapiens
gaattccctcctagc

SEQ ID NO: 1270898 - DNA, 15 bp, Homo sapiens
tgaattccctcctag

SEQ ID NO: 1270899 - DNA, 15 bp, Homo sapiens
ctgaattccctccta

SEQ ID NO: 1270900 - DNA, 15 bp, Homo sapiens
gctgaattccctcct

SEQ ID NO: 1270901 - DNA, 15 bp, Homo sapiens
tgctgaattccctcc

SEQ ID NO: 1270902 - DNA, 15 bp, Homo sapiens
ttgctgaattccctc

SEQ ID NO: 1270903 - DNA, 15 bp, Homo sapiens
tttgctgaattccct

SEQ ID NO: 1270904 - DNA, 15 bp, Homo sapiens
gtttgctgaattccc

SEQ ID NO: 1270905 - DNA, 15 bp, Homo sapiens
ggtttgctgaattcc

SEQ ID NO: 1270906 - DNA, 15 bp, Homo sapiens
gggtttgctgaattc

SEQ ID NO: 1270907 - DNA, 15 bp, Homo sapiens
ggggtttgctgaatt

SEQ ID NO: 1270908 - DNA, 15 bp, Homo sapiens
aggggtttgctgaat

SEQ ID NO: 1270909 - DNA, 15 bp, Homo sapiens
taggggtttgctgaa

SEQ ID NO: 1270910 - DNA, 15 bp, Homo sapiens
ttaggggtttgctga

SEQ ID NO: 1270911 - DNA, 15 bp, Homo sapiens
cttaggggtttgctg

SEQ ID NO: 1270912 - DNA, 15 bp, Homo sapiens
ccttaggggtttgct

SEQ ID NO: 1270913 - DNA, 15 bp, Homo sapiens
accttaggggtttgc

SEQ ID NO: 1270914 - DNA, 15 bp, Homo sapiens
caccttaggggtttg

SEQ ID NO: 1270915 - DNA, 15 bp, Homo sapiens
ccaccttaggggttt

SEQ ID NO: 1270916 - DNA, 15 bp, Homo sapiens
cccaccttaggggtt

SEQ ID NO: 1270917 - DNA, 15 bp, Homo sapiens
tcccaccttaggggt

SEQ ID NO: 1270918 - DNA, 15 bp, Homo sapiens
ctcccaccttagggg

SEQ ID NO: 1270919 - DNA, 15 bp, Homo sapiens
tctcccaccttaggg

SEQ ID NO: 1270920 - DNA, 15 bp, Homo sapiens
ctctcccaccttagg

SEQ ID NO: 1270921 - DNA, 15 bp, Homo sapiens
actctcccaccttag

SEQ ID NO: 1270922 - DNA, 15 bp, Homo sapiens
tactctcccacctta

SEQ ID NO: 1270923 - DNA, 15 bp, Homo sapiens
gtactctcccacctt

SEQ ID NO: 1270924 - DNA, 15 bp, Homo sapiens
agtactctcccacct

SEQ ID NO: 1270925 - DNA, 15 bp, Homo sapiens
aagtactctcccacc

SEQ ID NO: 1270926 - DNA, 15 bp, Homo sapiens
aaagtactctcccac

SEQ ID NO: 1270927 - DNA, 15 bp, Homo sapiens
caaagtactctccca

SEQ ID NO: 1270928 - DNA, 15 bp, Homo sapiens
gcaaagtactctccc

SEQ ID NO: 1270929 - DNA, 15 bp, Homo sapiens
ggcaaagtactctcc

SEQ ID NO: 1270930 - DNA, 15 bp, Homo sapiens
gggcaaagtactctc

SEQ ID NO: 1270931 - DNA, 15 bp, Homo sapiens
ggggcaaagtactct

SEQ ID NO: 1270932 - DNA, 15 bp, Homo sapiens
tggggcaaagtactc

SEQ ID NO: 1270933 - DNA, 15 bp, Homo sapiens
ttggggcaaagtact

SEQ ID NO: 1270934 - DNA, 15 bp, Homo sapiens
tttggggcaaagtac

SEQ ID NO: 1270935 - DNA, 15 bp, Homo sapiens
atttggggcaaagta

SEQ ID NO: 1270936 - DNA, 15 bp, Homo sapiens
gatttggggcaaagt

SEQ ID NO: 1270937 - DNA, 15 bp, Homo sapiens
ggatttggggcaaag

SEQ ID NO: 1270938 - DNA, 15 bp, Homo sapiens
aggatttggggcaaa

SEQ ID NO: 1270939 - DNA, 15 bp, Homo sapiens
gaggatttggggcaa

SEQ ID NO: 1270940 - DNA, 15 bp, Homo sapiens
tgaggatttggggca

SEQ ID NO: 1270941 - DNA, 15 bp, Homo sapiens
ctgaggatttggggc

SEQ ID NO: 1270942 - DNA, 15 bp, Homo sapiens
actgaggatttgggg

SEQ ID NO: 1270943 - DNA, 15 bp, Homo sapiens
aactgaggatttggg

SEQ ID NO: 1270944 - DNA, 15 bp, Homo sapiens
gaactgaggatttgg

SEQ ID NO: 1270945 - DNA, 15 bp, Homo sapiens
tgaactgaggatttg

SEQ ID NO: 1270946 - DNA, 15 bp, Homo sapiens
atgaactgaggattt

SEQ ID NO: 1270947 - DNA, 15 bp, Homo sapiens
gatgaactgaggatt

SEQ ID NO: 1270948 - DNA, 15 bp, Homo sapiens
cgatgaactgaggat

SEQ ID NO: 1270949 - DNA, 15 bp, Homo sapiens
acgatgaactgagga

SEQ ID NO: 1270950 - DNA, 15 bp, Homo sapiens
gacgatgaactgagg

SEQ ID NO: 1270951 - DNA, 15 bp, Homo sapiens
tgacgatgaactgag

SEQ ID NO: 1270952 - DNA, 15 bp, Homo sapiens
atgacgatgaactga

SEQ ID NO: 1270953 - DNA, 15 bp, Homo sapiens
gatgacgatgaactg

SEQ ID NO: 1270954 - DNA, 15 bp, Homo sapiens
agatgacgatgaact

SEQ ID NO: 1270955 - DNA, 15 bp, Homo sapiens
cagatgacgatgaac

SEQ ID NO: 1270956 - DNA, 15 bp, Homo sapiens
tcagatgacgatgaa

SEQ ID NO: 1270957 - DNA, 15 bp, Homo sapiens
ttcagatgacgatga

SEQ ID NO: 1270958 - DNA, 15 bp, Homo sapiens
gttcagatgacgatg

SEQ ID NO: 1270959 - DNA, 15 bp, Homo sapiens
tgttcagatgacgat

SEQ ID NO: 1270960 - DNA, 15 bp, Homo sapiens
gtgttcagatgacga

SEQ ID NO: 1270961 - DNA, 15 bp, Homo sapiens
agtgttcagatgacg

SEQ ID NO: 1270962 - DNA, 15 bp, Homo sapiens
aagtgttcagatgac

SEQ ID NO: 1270963 - DNA, 15 bp, Homo sapiens
aaagtgttcagatga

SEQ ID NO: 1270964 - DNA, 15 bp, Homo sapiens
gaaagtgttcagatg

SEQ ID NO: 1270965 - DNA, 15 bp, Homo sapiens
tgaaagtgttcagat

SEQ ID NO: 1270966 - DNA, 15 bp, Homo sapiens
atgaaagtgttcaga

SEQ ID NO: 1270967 - DNA, 15 bp, Homo sapiens
gatgaaagtgttcag

SEQ ID NO: 1270968 - DNA, 15 bp, Homo sapiens
agatgaaagtgttca

SEQ ID NO: 1270969 - DNA, 15 bp, Homo sapiens
cagatgaaagtgttc

SEQ ID NO: 1270970 - DNA, 15 bp, Homo sapiens
gcagatgaaagtgtt

SEQ ID NO: 1270971 - DNA, 15 bp, Homo sapiens
ggcagatgaaagtgt

SEQ ID NO: 1270972 - DNA, 15 bp, Homo sapiens
tggcagatgaaagtg

SEQ ID NO: 1270973 - DNA, 15 bp, Homo sapiens
ttggcagatgaaagt

SEQ ID NO: 1270974 - DNA, 15 bp, Homo sapiens
gttggcagatgaaag

SEQ ID NO: 1270975 - DNA, 15 bp, Homo sapiens
tgttggcagatgaaa

SEQ ID NO: 1270976 - DNA, 15 bp, Homo sapiens
ctgttggcagatgaa

SEQ ID NO: 1270977 - DNA, 15 bp, Homo sapiens
gctgttggcagatga

SEQ ID NO: 1270978 - DNA, 15 bp, Homo sapiens
agctgttggcagatg

SEQ ID NO: 1270979 - DNA, 15 bp, Homo sapiens
tagctgttggcagat

SEQ ID NO: 1270980 - DNA, 15 bp, Homo sapiens
gtagctgttggcaga

SEQ ID NO: 1270981 - DNA, 15 bp, Homo sapiens
tgtagctgttggcag

SEQ ID NO: 1270982 - DNA, 15 bp, Homo sapiens
gtgtagctgttggca

SEQ ID NO: 1270983 - DNA, 15 bp, Homo sapiens
agtgtagctgttggc

SEQ ID NO: 1270984 - DNA, 15 bp, Homo sapiens
gagtgtagctgttgg

SEQ ID NO: 1270985 - DNA, 15 bp, Homo sapiens
ggagtgtagctgttg

SEQ ID NO: 1270986 - DNA, 15 bp, Homo sapiens
gggagtgtagctgtt

SEQ ID NO: 1270987 - DNA, 15 bp, Homo sapiens
tgggagtgtagctgt

SEQ ID NO: 1270988 - DNA, 15 bp, Homo sapiens
ttgggagtgtagctg

SEQ ID NO: 1270989 - DNA, 15 bp, Homo sapiens
cttgggagtgtagct

SEQ ID NO: 1270990 - DNA, 15 bp, Homo sapiens
tcttgggagtgtagc

SEQ ID NO: 1270991 - DNA, 15 bp, Homo sapiens
gtcttgggagtgtag

SEQ ID NO: 1270992 - DNA, 15 bp, Homo sapiens
tgtcttgggagtgta

SEQ ID NO: 1270993 - DNA, 15 bp, Homo sapiens
gtgtcttgggagtgt

SEQ ID NO: 1270994 - DNA, 15 bp, Homo sapiens
tgtgtcttgggagtg

SEQ ID NO: 1270995 - DNA, 15 bp, Homo sapiens
ttgtgtcttgggagt

SEQ ID NO: 1270996 - DNA, 15 bp, Homo sapiens
cttgtgtcttgggag

SEQ ID NO: 1270997 - DNA, 15 bp, Homo sapiens
tcttgtgtcttggga

SEQ ID NO: 1270998 - DNA, 15 bp, Homo sapiens
ttcttgtgtcttggg

SEQ ID NO: 1270999 - DNA, 15 bp, Homo sapiens
cttcttgtgtcttgg

SEQ ID NO: 1271000 - DNA, 15 bp, Homo sapiens
gcttcttgtgtcttg

SEQ ID NO: 1271001 - DNA, 15 bp, Homo sapiens
ggcttcttgtgtctt

SEQ ID NO: 1271002 - DNA, 15 bp, Homo sapiens
cggcttcttgtgtct

SEQ ID NO: 1271003 - DNA, 15 bp, Homo sapiens
tcggcttcttgtgtc

SEQ ID NO: 1271004 - DNA, 15 bp, Homo sapiens
ctcggcttcttgtgt

SEQ ID NO: 1271005 - DNA, 15 bp, Homo sapiens
cctcggcttcttgtg

SEQ ID NO: 1271006 - DNA, 15 bp, Homo sapiens
tcctcggcttcttgt

SEQ ID NO: 1271007 - DNA, 15 bp, Homo sapiens
atcctcggcttcttg

SEQ ID NO: 1271008 - DNA, 15 bp, Homo sapiens
aatcctcggcttctt

SEQ ID NO: 1271009 - DNA, 15 bp, Homo sapiens
aaatcctcggcttct

SEQ ID NO: 1271010 - DNA, 15 bp, Homo sapiens
caaatcctcggcttc

SEQ ID NO: 1271011 - DNA, 15 bp, Homo sapiens
ccaaatcctcggctt

SEQ ID NO: 1271012 - DNA, 15 bp, Homo sapiens
gccaaatcctcggct

SEQ ID NO: 1271013 - DNA, 15 bp, Homo sapiens
tgccaaatcctcggc

SEQ ID NO: 1271014 - DNA, 15 bp, Homo sapiens
ttgccaaatcctcgg

SEQ ID NO: 1271015 - DNA, 15 bp, Homo sapiens
attgccaaatcctcg

SEQ ID NO: 1271016 - DNA, 15 bp, Homo sapiens
cattgccaaatcctc

SEQ ID NO: 1271017 - DNA, 15 bp, Homo sapiens
gcattgccaaatcct

SEQ ID NO: 1271018 - DNA, 15 bp, Homo sapiens
tgcattgccaaatcc

SEQ ID NO: 1271019 - DNA, 15 bp, Homo sapiens
ctgcattgccaaatc

SEQ ID NO: 1271020 - DNA, 15 bp, Homo sapiens
actgcattgccaaat

SEQ ID NO: 1271021 - DNA, 15 bp, Homo sapiens
tactgcattgccaaa

SEQ ID NO: 1271022 - DNA, 15 bp, Homo sapiens
ttactgcattgccaa

SEQ ID NO: 1271023 - DNA, 15 bp, Homo sapiens
tttactgcattgcca

SEQ ID NO: 1271024 - DNA, 15 bp, Homo sapiens
ttttactgcattgcc

SEQ ID NO: 1271025 - DNA, 15 bp, Homo sapiens
tttttactgcattgc

SEQ ID NO: 1271026 - DNA, 15 bp, Homo sapiens
ctttttactgcattg

SEQ ID NO: 1271027 - DNA, 15 bp, Homo sapiens
tctttttactgcatt

SEQ ID NO: 1271028 - DNA, 15 bp, Homo sapiens
gtctttttactgcat

SEQ ID NO: 1271029 - DNA, 15 bp, Homo sapiens
tgtctttttactgca

SEQ ID NO: 1271030 - DNA, 15 bp, Homo sapiens
ttgtctttttactgc

SEQ ID NO: 1271031 - DNA, 15 bp, Homo sapiens
cttgtctttttactg

SEQ ID NO: 1271032 - DNA, 15 bp, Homo sapiens
gcttgtctttttact

SEQ ID NO: 1271033 - DNA, 15 bp, Homo sapiens
ggcttgtctttttac

SEQ ID NO: 1271034 - DNA, 15 bp, Homo sapiens
aggcttgtcttttta

SEQ ID NO: 1271035 - DNA, 15 bp, Homo sapiens
taggcttgtcttttt

SEQ ID NO: 1271036 - DNA, 15 bp, Homo sapiens
ttaggcttgtctttt

SEQ ID NO: 1271037 - DNA, 15 bp, Homo sapiens
attaggcttgtcttt

SEQ ID NO: 1271038 - DNA, 15 bp, Homo sapiens
aattaggcttgtctt

SEQ ID NO: 1271039 - DNA, 15 bp, Homo sapiens
gaattaggcttgtct

SEQ ID NO: 1271040 - DNA, 15 bp, Homo sapiens
tgaattaggcttgtc

SEQ ID NO: 1271041 - DNA, 15 bp, Homo sapiens
ctgaattaggcttgt

SEQ ID NO: 1271042 - DNA, 15 bp, Homo sapiens
cctgaattaggcttg

SEQ ID NO: 1271043 - DNA, 15 bp, Homo sapiens
ccctgaattaggctt

SEQ ID NO: 1271044 - DNA, 15 bp, Homo sapiens
tccctgaattaggct

SEQ ID NO: 1271045 - DNA, 15 bp, Homo sapiens
ttccctgaattaggc

SEQ ID NO: 1271046 - DNA, 15 bp, Homo sapiens
tttccctgaattagg

SEQ ID NO: 1271047 - DNA, 15 bp, Homo sapiens
gtttccctgaattag

SEQ ID NO: 1271048 - DNA, 15 bp, Homo sapiens
ggtttccctgaatta

SEQ ID NO: 1271049 - DNA, 15 bp, Homo sapiens
gggtttccctgaatt

SEQ ID NO: 1271050 - DNA, 15 bp, Homo sapiens
agggtttccctgaat

SEQ ID NO: 1271051 - DNA, 15 bp, Homo sapiens
tagggtttccctgaa

SEQ ID NO: 1271052 - DNA, 15 bp, Homo sapiens
gtagggtttccctga

SEQ ID NO: 1271053 - DNA, 15 bp, Homo sapiens
tgtagggtttccctg

SEQ ID NO: 1271054 - DNA, 15 bp, Homo sapiens
atgtagggtttccct

SEQ ID NO: 1271055 - DNA, 15 bp, Homo sapiens
aatgtagggtttccc

SEQ ID NO: 1271056 - DNA, 15 bp, Homo sapiens
gaatgtagggtttcc

SEQ ID NO: 1271057 - DNA, 15 bp, Homo sapiens
tgaatgtagggtttc

SEQ ID NO: 1271058 - DNA, 15 bp, Homo sapiens
ctgaatgtagggttt

SEQ ID NO: 1271059 - DNA, 15 bp, Homo sapiens
gctgaatgtagggtt

SEQ ID NO: 1271060 - DNA, 15 bp, Homo sapiens
ggctgaatgtagggt

SEQ ID NO: 1271061 - DNA, 15 bp, Homo sapiens
tggctgaatgtaggg

SEQ ID NO: 1271062 - DNA, 15 bp, Homo sapiens
ttggctgaatgtagg

SEQ ID NO: 1271063 - DNA, 15 bp, Homo sapiens
tttggctgaatgtag

SEQ ID NO: 1271064 - DNA, 15 bp, Homo sapiens
ttttggctgaatgta

SEQ ID NO: 1271065 - DNA, 15 bp, Homo sapiens
attttggctgaatgt

SEQ ID NO: 1271066 - DNA, 15 bp, Homo sapiens
aattttggctgaatg

SEQ ID NO: 1271067 - DNA, 15 bp, Homo sapiens
aaattttggctgaat

SEQ ID NO: 1271068 - DNA, 15 bp, Homo sapiens
aaaattttggctgaa

SEQ ID NO: 1271069 - DNA, 15 bp, Homo sapiens
aaaaattttggctga

SEQ ID NO: 1271070 - DNA, 15 bp, Homo sapiens
aaaaaattttggctg

SEQ ID NO: 1271071 - DNA, 15 bp, Homo sapiens
caaaaaattttggct

SEQ ID NO: 1271072 - DNA, 15 bp, Homo sapiens
gcaaaaaattttggc

SEQ ID NO: 1271073 - DNA, 15 bp, Homo sapiens
agcaaaaaattttgg

SEQ ID NO: 1271074 - DNA, 15 bp, Homo sapiens
cagcaaaaaattttg

SEQ ID NO: 1271075 - DNA, 15 bp, Homo sapiens
ccagcaaaaaatttt

SEQ ID NO: 1271076 - DNA, 15 bp, Homo sapiens
gccagcaaaaaattt

SEQ ID NO: 1271077 - DNA, 15 bp, Homo sapiens
tgccagcaaaaaatt

SEQ ID NO: 1271078 - DNA, 15 bp, Homo sapiens
ctgccagcaaaaaat

SEQ ID NO: 1271079 - DNA, 15 bp, Homo sapiens
actgccagcaaaaaa

SEQ ID NO: 1271080 - DNA, 15 bp, Homo sapiens
tactgccagcaaaaa

SEQ ID NO: 1271081 - DNA, 15 bp, Homo sapiens
atactgccagcaaaa

SEQ ID NO: 1271082 - DNA, 15 bp, Homo sapiens
tatactgccagcaaa

SEQ ID NO: 1271083 - DNA, 15 bp, Homo sapiens
ttatactgccagcaa

SEQ ID NO: 1271084 - DNA, 15 bp, Homo sapiens
tttatactgccagca

SEQ ID NO: 1271085 - DNA, 15 bp, Homo sapiens
ttttatactgccagc

SEQ ID NO: 1271086 - DNA, 15 bp, Homo sapiens
gttttatactgccag

SEQ ID NO: 1271087 - DNA, 15 bp, Homo sapiens
ggttttatactgcca

SEQ ID NO: 1271088 - DNA, 15 bp, Homo sapiens
gggttttatactgcc

SEQ ID NO: 1271089 - DNA, 15 bp, Homo sapiens
ggggttttatactgc

SEQ ID NO: 1271090 - DNA, 15 bp, Homo sapiens
gggggttttatactg

SEQ ID NO: 1271091 - DNA, 15 bp, Homo sapiens
tgggggttttatact

SEQ ID NO: 1271092 - DNA, 15 bp, Homo sapiens
gtgggggttttatac

SEQ ID NO: 1271093 - DNA, 15 bp, Homo sapiens
agtgggggttttata

SEQ ID NO: 1271094 - DNA, 15 bp, Homo sapiens
aagtgggggttttat

SEQ ID NO: 1271095 - DNA, 15 bp, Homo sapiens
gaagtgggggtttta

SEQ ID NO: 1271096 - DNA, 15 bp, Homo sapiens
ggaagtgggggtttt

SEQ ID NO: 1271097 - DNA, 15 bp, Homo sapiens
aggaagtgggggttt

SEQ ID NO: 1271098 - DNA, 15 bp, Homo sapiens
aaggaagtgggggtt

SEQ ID NO: 1271099 - DNA, 15 bp, Homo sapiens
gaaggaagtgggggt

SEQ ID NO: 1271100 - DNA, 15 bp, Homo sapiens
agaaggaagtggggg

SEQ ID NO: 1271101 - DNA, 15 bp, Homo sapiens
cagaaggaagtgggg

SEQ ID NO: 1271102 - DNA, 15 bp, Homo sapiens
tcagaaggaagtggg

SEQ ID NO: 1271103 - DNA, 15 bp, Homo sapiens
ttcagaaggaagtgg

SEQ ID NO: 1271104 - DNA, 15 bp, Homo sapiens
attcagaaggaagtg

SEQ ID NO: 1271105 - DNA, 15 bp, Homo sapiens
gattcagaaggaagt

SEQ ID NO: 1271106 - DNA, 15 bp, Homo sapiens
ggattcagaaggaag

SEQ ID NO: 1271107 - DNA, 15 bp, Homo sapiens
aggattcagaaggaa

SEQ ID NO: 1271108 - DNA, 15 bp, Homo sapiens
caggattcagaagga

SEQ ID NO: 1271109 - DNA, 15 bp, Homo sapiens
gcaggattcagaagg

SEQ ID NO: 1271110 - DNA, 15 bp, Homo sapiens
tgcaggattcagaag

SEQ ID NO: 1271111 - DNA, 15 bp, Homo sapiens
ctgcaggattcagaa

SEQ ID NO: 1271112 - DNA, 15 bp, Homo sapiens
actgcaggattcaga

SEQ ID NO: 1271113 - DNA, 15 bp, Homo sapiens
gactgcaggattcag

SEQ ID NO: 1271114 - DNA, 15 bp, Homo sapiens
agactgcaggattca

SEQ ID NO: 1271115 - DNA, 15 bp, Homo sapiens
tagactgcaggattc

SEQ ID NO: 1271116 - DNA, 15 bp, Homo sapiens
ttagactgcaggatt

SEQ ID NO: 1271117 - DNA, 15 bp, Homo sapiens
tttagactgcaggat

SEQ ID NO: 1271118 - DNA, 15 bp, Homo sapiens
atttagactgcagga

SEQ ID NO: 1271119 - DNA, 15 bp, Homo sapiens
gatttagactgcagg

SEQ ID NO: 1271120 - DNA, 15 bp, Homo sapiens
tgatttagactgcag

SEQ ID NO: 1271121 - DNA, 15 bp, Homo sapiens
ttgatttagactgca

SEQ ID NO: 1271122 - DNA, 15 bp, Homo sapiens
cttgatttagactgc

SEQ ID NO: 1271123 - DNA, 15 bp, Homo sapiens
gcttgatttagactg

SEQ ID NO: 1271124 - DNA, 15 bp, Homo sapiens
ggcttgatttagact

SEQ ID NO: 1271125 - DNA, 15 bp, Homo sapiens
tggcttgatttagac

SEQ ID NO: 1271126 - DNA, 15 bp, Homo sapiens
ttggcttgatttaga

SEQ ID NO: 1271127 - DNA, 15 bp, Homo sapiens
cttggcttgatttag

SEQ ID NO: 1271128 - DNA, 15 bp, Homo sapiens
tcttggcttgattta

SEQ ID NO: 1271129 - DNA, 15 bp, Homo sapiens
ttcttggcttgattt

SEQ ID NO: 1271130 - DNA, 15 bp, Homo sapiens
cttcttggcttgatt

SEQ ID NO: 1271131 - DNA, 15 bp, Homo sapiens
ccttcttggcttgat

SEQ ID NO: 1271132 - DNA, 15 bp, Homo sapiens
cccttcttggcttga

SEQ ID NO: 1271133 - DNA, 15 bp, Homo sapiens
gcccttcttggcttg

SEQ ID NO: 1271134 - DNA, 15 bp, Homo sapiens
tgcccttcttggctt

SEQ ID NO: 1271135 - DNA, 15 bp, Homo sapiens
ttgcccttcttggct

SEQ ID NO: 1271136 - DNA, 15 bp, Homo sapiens
gttgcccttcttggc

SEQ ID NO: 1271137 - DNA, 15 bp, Homo sapiens
tgttgcccttcttgg

SEQ ID NO: 1271138 - DNA, 15 bp, Homo sapiens
ctgttgcccttcttg

SEQ ID NO: 1271139 - DNA, 15 bp, Homo sapiens
cctgttgcccttctt

SEQ ID NO: 1271140 - DNA, 15 bp, Homo sapiens
ccctgttgcccttct

SEQ ID NO: 1271141 - DNA, 15 bp, Homo sapiens
gccctgttgcccttc

SEQ ID NO: 1271142 - DNA, 15 bp, Homo sapiens
agccctgttgccctt

SEQ ID NO: 1271143 - DNA, 15 bp, Homo sapiens
aagccctgttgccct

SEQ ID NO: 1271144 - DNA, 15 bp, Homo sapiens
aaagccctgttgccc

SEQ ID NO: 1271145 - DNA, 15 bp, Homo sapiens
aaaagccctgttgcc

SEQ ID NO: 1271146 - DNA, 15 bp, Homo sapiens
taaaagccctgttgc

SEQ ID NO: 1271147 - DNA, 15 bp, Homo sapiens
gtaaaagccctgttg

SEQ ID NO: 1271148 - DNA, 15 bp, Homo sapiens
tgtaaaagccctgtt

SEQ ID NO: 1271149 - DNA, 15 bp, Homo sapiens
ttgtaaaagccctgt

SEQ ID NO: 1271150 - DNA, 15 bp, Homo sapiens
cttgtaaaagccctg

SEQ ID NO: 1271151 - DNA, 15 bp, Homo sapiens
gcttgtaaaagccct

SEQ ID NO: 1271152 - DNA, 15 bp, Homo sapiens
ggcttgtaaaagccc

SEQ ID NO: 1271153 - DNA, 15 bp, Homo sapiens
aggcttgtaaaagcc

SEQ ID NO: 1271154 - DNA, 15 bp, Homo sapiens
caggcttgtaaaagc

SEQ ID NO: 1271155 - DNA, 15 bp, Homo sapiens
ccaggcttgtaaaag

SEQ ID NO: 1271156 - DNA, 15 bp, Homo sapiens
gccaggcttgtaaaa

SEQ ID NO: 1271157 - DNA, 15 bp, Homo sapiens
ggccaggcttgtaaa

SEQ ID NO: 1271158 - DNA, 15 bp, Homo sapiens
tggccaggcttgtaa

SEQ ID NO: 1271159 - DNA, 15 bp, Homo sapiens
ttggccaggcttgta

SEQ ID NO: 1271160 - DNA, 15 bp, Homo sapiens
gttggccaggcttgt

SEQ ID NO: 1271161 - DNA, 15 bp, Homo sapiens
ggttggccaggcttg

SEQ ID NO: 1271162 - DNA, 15 bp, Homo sapiens
cggttggccaggctt

SEQ ID NO: 1271163 - DNA, 15 bp, Homo sapiens
tcggttggccaggct

SEQ ID NO: 1271164 - DNA, 15 bp, Homo sapiens
atcggttggccaggc

SEQ ID NO: 1271165 - DNA, 15 bp, Homo sapiens
aatcggttggccagg

SEQ ID NO: 1271166 - DNA, 15 bp, Homo sapiens
taatcggttggccag

SEQ ID NO: 1271167 - DNA, 15 bp, Homo sapiens
gtaatcggttggcca

SEQ ID NO: 1271168 - DNA, 15 bp, Homo sapiens
ggtaatcggttggcc

SEQ ID NO: 1271169 - DNA, 15 bp, Homo sapiens
gggtaatcggttggc

SEQ ID NO: 1271170 - DNA, 15 bp, Homo sapiens
tgggtaatcggttgg

SEQ ID NO: 1271171 - DNA, 15 bp, Homo sapiens
gtgggtaatcggttg

SEQ ID NO: 1271172 - DNA, 15 bp, Homo sapiens
tgtgggtaatcggtt

SEQ ID NO: 1271173 - DNA, 15 bp, Homo sapiens
gtgtgggtaatcggt

SEQ ID NO: 1271174 - DNA, 15 bp, Homo sapiens
tgtgtgggtaatcgg

SEQ ID NO: 1271175 - DNA, 15 bp, Homo sapiens
ttgtgtgggtaatcg

SEQ ID NO: 1271176 - DNA, 15 bp, Homo sapiens
attgtgtgggtaatc

SEQ ID NO: 1271177 - DNA, 15 bp, Homo sapiens
cattgtgtgggtaat

SEQ ID NO: 1271178 - DNA, 15 bp, Homo sapiens
acattgtgtgggtaa

SEQ ID NO: 1271179 - DNA, 15 bp, Homo sapiens
gacattgtgtgggta

SEQ ID NO: 1271180 - DNA, 15 bp, Homo sapiens
tgacattgtgtgggt

SEQ ID NO: 1271181 - DNA, 15 bp, Homo sapiens
ctgacattgtgtggg

SEQ ID NO: 1271182 - DNA, 15 bp, Homo sapiens
tctgacattgtgtgg

SEQ ID NO: 1271183 - DNA, 15 bp, Homo sapiens
gtctgacattgtgtg

SEQ ID NO: 1271184 - DNA, 15 bp, Homo sapiens
tgtctgacattgtgt

SEQ ID NO: 1271185 - DNA, 15 bp, Homo sapiens
ctgtctgacattgtg

SEQ ID NO: 1271186 - DNA, 15 bp, Homo sapiens
tctgtctgacattgt

SEQ ID NO: 1271187 - DNA, 15 bp, Homo sapiens
ttctgtctgacattg

SEQ ID NO: 1271188 - DNA, 15 bp, Homo sapiens
tttctgtctgacatt

SEQ ID NO: 1271189 - DNA, 15 bp, Homo sapiens
gtttctgtctgacat

SEQ ID NO: 1271190 - DNA, 15 bp, Homo sapiens
tgtttctgtctgaca

SEQ ID NO: 1271191 - DNA, 15 bp, Homo sapiens
ctgtttctgtctgac

SEQ ID NO: 1271192 - DNA, 15 bp, Homo sapiens
gctgtttctgtctga

SEQ ID NO: 1271193 - DNA, 15 bp, Homo sapiens
ggctgtttctgtctg

SEQ ID NO: 1271194 - DNA, 15 bp, Homo sapiens
gggctgtttctgtct

SEQ ID NO: 1271195 - DNA, 15 bp, Homo sapiens
tgggctgtttctgtc

SEQ ID NO: 1271196 - DNA, 15 bp, Homo sapiens
ctgggctgtttctgt

SEQ ID NO: 1271197 - DNA, 15 bp, Homo sapiens
cctgggctgtttctg

SEQ ID NO: 1271198 - DNA, 15 bp, Homo sapiens
tcctgggctgtttct

SEQ ID NO: 1271199 - DNA, 15 bp, Homo sapiens
gtcctgggctgtttc

SEQ ID NO: 1271200 - DNA, 15 bp, Homo sapiens
agtcctgggctgttt

SEQ ID NO: 1271201 - DNA, 15 bp, Homo sapiens
gagtcctgggctgtt

SEQ ID NO: 1271202 - DNA, 15 bp, Homo sapiens
tgagtcctgggctgt

SEQ ID NO: 1271203 - DNA, 15 bp, Homo sapiens
ttgagtcctgggctg

SEQ ID NO: 1271204 - DNA, 15 bp, Homo sapiens
tttgagtcctgggct

SEQ ID NO: 1271205 - DNA, 15 bp, Homo sapiens
atttgagtcctgggc

SEQ ID NO: 1271206 - DNA, 15 bp, Homo sapiens
aatttgagtcctggg

SEQ ID NO: 1271207 - DNA, 15 bp, Homo sapiens
aaatttgagtcctgg

SEQ ID NO: 1271208 - DNA, 15 bp, Homo sapiens
gaaatttgagtcctg

SEQ ID NO: 1271209 - DNA, 15 bp, Homo sapiens
ggaaatttgagtcct

SEQ ID NO: 1271210 - DNA, 15 bp, Homo sapiens
gggaaatttgagtcc

SEQ ID NO: 1271211 - DNA, 15 bp, Homo sapiens
agggaaatttgagtc

SEQ ID NO: 1271212 - DNA, 15 bp, Homo sapiens
gagggaaatttgagt

SEQ ID NO: 1271213 - DNA, 15 bp, Homo sapiens
agagggaaatttgag

SEQ ID NO: 1271214 - DNA, 15 bp, Homo sapiens
cagagggaaatttga

SEQ ID NO: 1271215 - DNA, 15 bp, Homo sapiens
tcagagggaaatttg

SEQ ID NO: 1271216 - DNA, 15 bp, Homo sapiens
gtcagagggaaattt

SEQ ID NO: 1271217 - DNA, 15 bp, Homo sapiens
tgtcagagggaaatt

SEQ ID NO: 1271218 - DNA, 15 bp, Homo sapiens
gtgtcagagggaaat

SEQ ID NO: 1271219 - DNA, 15 bp, Homo sapiens
ggtgtcagagggaaa

SEQ ID NO: 1271220 - DNA, 15 bp, Homo sapiens
aggtgtcagagggaa

SEQ ID NO: 1271221 - DNA, 15 bp, Homo sapiens
caggtgtcagaggga

SEQ ID NO: 1271222 - DNA, 15 bp, Homo sapiens
tcaggtgtcagaggg

SEQ ID NO: 1271223 - DNA, 15 bp, Homo sapiens
gtcaggtgtcagagg

SEQ ID NO: 1271224 - DNA, 15 bp, Homo sapiens
ggtcaggtgtcagag

SEQ ID NO: 1271225 - DNA, 15 bp, Homo sapiens
aggtcaggtgtcaga

SEQ ID NO: 1271226 - DNA, 15 bp, Homo sapiens
caggtcaggtgtcag

SEQ ID NO: 1271227 - DNA, 15 bp, Homo sapiens
gcaggtcaggtgtca

SEQ ID NO: 1271228 - DNA, 15 bp, Homo sapiens
ggcaggtcaggtgtc

SEQ ID NO: 1271229 - DNA, 15 bp, Homo sapiens
gggcaggtcaggtgt

SEQ ID NO: 1271230 - DNA, 15 bp, Homo sapiens
ggggcaggtcaggtg

SEQ ID NO: 1271231 - DNA, 15 bp, Homo sapiens
aggggcaggtcaggt

SEQ ID NO: 1271232 - DNA, 15 bp, Homo sapiens
caggggcaggtcagg

SEQ ID NO: 1271233 - DNA, 15 bp, Homo sapiens
tcaggggcaggtcag

SEQ ID NO: 1271234 - DNA, 15 bp, Homo sapiens
gtcaggggcaggtca

SEQ ID NO: 1271235 - DNA, 15 bp, Homo sapiens
agtcaggggcaggtc

SEQ ID NO: 1271236 - DNA, 15 bp, Homo sapiens
tagtcaggggcaggt

SEQ ID NO: 1271237 - DNA, 15 bp, Homo sapiens
gtagtcaggggcagg

SEQ ID NO: 1271238 - DNA, 15 bp, Homo sapiens
tgtagtcaggggcag

SEQ ID NO: 1271239 - DNA, 15 bp, Homo sapiens
atgtagtcaggggca

SEQ ID NO: 1271240 - DNA, 15 bp, Homo sapiens
tatgtagtcaggggc

SEQ ID NO: 1271241 - DNA, 15 bp, Homo sapiens
gtatgtagtcagggg

SEQ ID NO: 1271242 - DNA, 15 bp, Homo sapiens
ggtatgtagtcaggg

SEQ ID NO: 1271243 - DNA, 15 bp, Homo sapiens
aggtatgtagtcagg

SEQ ID NO: 1271244 - DNA, 15 bp, Homo sapiens
caggtatgtagtcag

SEQ ID NO: 1271245 - DNA, 15 bp, Homo sapiens
ccaggtatgtagtca

SEQ ID NO: 1271246 - DNA, 15 bp, Homo sapiens
accaggtatgtagtc

SEQ ID NO: 1271247 - DNA, 15 bp, Homo sapiens
caccaggtatgtagt

SEQ ID NO: 1271248 - DNA, 15 bp, Homo sapiens
acaccaggtatgtag

SEQ ID NO: 1271249 - DNA, 15 bp, Homo sapiens
gacaccaggtatgta

SEQ ID NO: 1271250 - DNA, 15 bp, Homo sapiens
agacaccaggtatgt

SEQ ID NO: 1271251 - DNA, 15 bp, Homo sapiens
aagacaccaggtatg

SEQ ID NO: 1271252 - DNA, 15 bp, Homo sapiens
gaagacaccaggtat

SEQ ID NO: 1271253 - DNA, 15 bp, Homo sapiens
tgaagacaccaggta

SEQ ID NO: 1271254 - DNA, 15 bp, Homo sapiens
ctgaagacaccaggt

SEQ ID NO: 1271255 - DNA, 15 bp, Homo sapiens
actgaagacaccagg

SEQ ID NO: 1271256 - DNA, 15 bp, Homo sapiens
tactgaagacaccag

SEQ ID NO: 1271257 - DNA, 15 bp, Homo sapiens
ctactgaagacacca

SEQ ID NO: 1271258 - DNA, 15 bp, Homo sapiens
actactgaagacacc

SEQ ID NO: 1271259 - DNA, 15 bp, Homo sapiens
aactactgaagacac

SEQ ID NO: 1271260 - DNA, 15 bp, Homo sapiens
aaactactgaagaca

SEQ ID NO: 1271261 - DNA, 15 bp, Homo sapiens
gaaactactgaagac

SEQ ID NO: 1271262 - DNA, 15 bp, Homo sapiens
tgaaactactgaaga

SEQ ID NO: 1271263 - DNA, 15 bp, Homo sapiens
gtgaaactactgaag

SEQ ID NO: 1271264 - DNA, 15 bp, Homo sapiens
agtgaaactactgaa

SEQ ID NO: 1271265 - DNA, 15 bp, Homo sapiens
cagtgaaactactga

SEQ ID NO: 1271266 - DNA, 15 bp, Homo sapiens
ccagtgaaactactg

SEQ ID NO: 1271267 - DNA, 15 bp, Homo sapiens
cccagtgaaactact

SEQ ID NO: 1271268 - DNA, 15 bp, Homo sapiens
gcccagtgaaactac

SEQ ID NO: 1271269 - DNA, 15 bp, Homo sapiens
ggcccagtgaaacta

SEQ ID NO: 1271270 - DNA, 15 bp, Homo sapiens
gggcccagtgaaact

SEQ ID NO: 1271271 - DNA, 15 bp, Homo sapiens
tgggcccagtgaaac

SEQ ID NO: 1271272 - DNA, 15 bp, Homo sapiens
atgggcccagtgaaa

SEQ ID NO: 1271273 - DNA, 15 bp, Homo sapiens
catgggcccagtgaa

SEQ ID NO: 1271274 - DNA, 15 bp, Homo sapiens
ccatgggcccagtga

SEQ ID NO: 1271275 - DNA, 15 bp, Homo sapiens
accatgggcccagtg

SEQ ID NO: 1271276 - DNA, 15 bp, Homo sapiens
caccatgggcccagt

SEQ ID NO: 1271277 - DNA, 15 bp, Homo sapiens
ccaccatgggcccag

SEQ ID NO: 1271278 - DNA, 15 bp, Homo sapiens
tccaccatgggccca

SEQ ID NO: 1271279 - DNA, 15 bp, Homo sapiens
gtccaccatgggccc

SEQ ID NO: 1271280 - DNA, 15 bp, Homo sapiens
tgtccaccatgggcc

SEQ ID NO: 1271281 - DNA, 15 bp, Homo sapiens
ttgtccaccatgggc

SEQ ID NO: 1271282 - DNA, 15 bp, Homo sapiens
tttgtccaccatggg

SEQ ID NO: 1271283 - DNA, 15 bp, Homo sapiens
gtttgtccaccatgg

SEQ ID NO: 1271284 - DNA, 15 bp, Homo sapiens
agtttgtccaccatg

SEQ ID NO: 1271285 - DNA, 15 bp, Homo sapiens
aagtttgtccaccat

SEQ ID NO: 1271286 - DNA, 15 bp, Homo sapiens
taagtttgtccacca

SEQ ID NO: 1271287 - DNA, 15 bp, Homo sapiens
ttaagtttgtccacc

SEQ ID NO: 1271288 - DNA, 15 bp, Homo sapiens
gttaagtttgtccac

SEQ ID NO: 1271289 - DNA, 15 bp, Homo sapiens
tgttaagtttgtcca

SEQ ID NO: 1271290 - DNA, 15 bp, Homo sapiens
gtgttaagtttgtcc

SEQ ID NO: 1271291 - DNA, 15 bp, Homo sapiens
tgtgttaagtttgtc

SEQ ID NO: 1271292 - DNA, 15 bp, Homo sapiens
ctgtgttaagtttgt

SEQ ID NO: 1271293 - DNA, 15 bp, Homo sapiens
tctgtgttaagtttg

SEQ ID NO: 1271294 - DNA, 15 bp, Homo sapiens
ctctgtgttaagttt

SEQ ID NO: 1271295 - DNA, 15 bp, Homo sapiens
tctctgtgttaagtt

SEQ ID NO: 1271296 - DNA, 15 bp, Homo sapiens
ttctctgtgttaagt

SEQ ID NO: 1271297 - DNA, 15 bp, Homo sapiens
tttctctgtgttaag

SEQ ID NO: 1271298 - DNA, 15 bp, Homo sapiens
ctttctctgtgttaa

SEQ ID NO: 1271299 - DNA, 15 bp, Homo sapiens
tctttctctgtgtta

SEQ ID NO: 1271300 - DNA, 15 bp, Homo sapiens
ttctttctctgtgtt

SEQ ID NO: 1271301 - DNA, 15 bp, Homo sapiens
attctttctctgtgt

SEQ ID NO: 1271302 - DNA, 15 bp, Homo sapiens
cattctttctctgtg

SEQ ID NO: 1271303 - DNA, 15 bp, Homo sapiens
acattctttctctgt

SEQ ID NO: 1271304 - DNA, 15 bp, Homo sapiens
cacattctttctctg

SEQ ID NO: 1271305 - DNA, 15 bp, Homo sapiens
gcacattctttctct

SEQ ID NO: 1271306 - DNA, 15 bp, Homo sapiens
tgcacattctttctc

SEQ ID NO: 1271307 - DNA, 15 bp, Homo sapiens
atgcacattctttct

SEQ ID NO: 1271308 - DNA, 15 bp, Homo sapiens
catgcacattctttc

SEQ ID NO: 1271309 - DNA, 15 bp, Homo sapiens
tcatgcacattcttt

SEQ ID NO: 1271310 - DNA, 15 bp, Homo sapiens
gtcatgcacattctt

SEQ ID NO: 1271311 - DNA, 15 bp, Homo sapiens
tgtcatgcacattct

SEQ ID NO: 1271312 - DNA, 15 bp, Homo sapiens
ctgtcatgcacattc

SEQ ID NO: 1271313 - DNA, 15 bp, Homo sapiens
gctgtcatgcacatt

SEQ ID NO: 1271314 - DNA, 15 bp, Homo sapiens
ggctgtcatgcacat

SEQ ID NO: 1271315 - DNA, 15 bp, Homo sapiens
aggctgtcatgcaca

SEQ ID NO: 1271316 - DNA, 15 bp, Homo sapiens
gaggctgtcatgcac

SEQ ID NO: 1271317 - DNA, 15 bp, Homo sapiens
agaggctgtcatgca

SEQ ID NO: 1271318 - DNA, 15 bp, Homo sapiens
gagaggctgtcatgc

SEQ ID NO: 1271319 - DNA, 15 bp, Homo sapiens
agagaggctgtcatg

SEQ ID NO: 1271320 - DNA, 15 bp, Homo sapiens
tagagaggctgtcat

SEQ ID NO: 1271321 - DNA, 15 bp, Homo sapiens
atagagaggctgtca

SEQ ID NO: 1271322 - DNA, 15 bp, Homo sapiens
aatagagaggctgtc

SEQ ID NO: 1271323 - DNA, 15 bp, Homo sapiens
caatagagaggctgt

SEQ ID NO: 1271324 - DNA, 15 bp, Homo sapiens
ccaatagagaggctg

SEQ ID NO: 1271325 - DNA, 15 bp, Homo sapiens
accaatagagaggct

SEQ ID NO: 1271326 - DNA, 15 bp, Homo sapiens
aaccaatagagaggc

SEQ ID NO: 1271327 - DNA, 15 bp, Homo sapiens
caaccaatagagagg

SEQ ID NO: 1271328 - DNA, 15 bp, Homo sapiens
acaaccaatagagag

SEQ ID NO: 1271329 - DNA, 15 bp, Homo sapiens
gacaaccaatagaga

SEQ ID NO: 1271330 - DNA, 15 bp, Homo sapiens
ggacaaccaatagag

SEQ ID NO: 1271331 - DNA, 15 bp, Homo sapiens
aggacaaccaataga

SEQ ID NO: 1271332 - DNA, 15 bp, Homo sapiens
taggacaaccaatag

SEQ ID NO: 1271333 - DNA, 15 bp, Homo sapiens
ctaggacaaccaata

SEQ ID NO: 1271334 - DNA, 15 bp, Homo sapiens
tctaggacaaccaat

SEQ ID NO: 1271335 - DNA, 15 bp, Homo sapiens
ctctaggacaaccaa

SEQ ID NO: 1271336 - DNA, 15 bp, Homo sapiens
tctctaggacaacca

SEQ ID NO: 1271337 - DNA, 15 bp, Homo sapiens
ctctctaggacaacc

SEQ ID NO: 1271338 - DNA, 15 bp, Homo sapiens
tctctctaggacaac

SEQ ID NO: 1271339 - DNA, 15 bp, Homo sapiens
atctctctaggacaa

SEQ ID NO: 1271340 - DNA, 15 bp, Homo sapiens
tatctctctaggaca

SEQ ID NO: 1271341 - DNA, 15 bp, Homo sapiens
ctatctctctaggac

SEQ ID NO: 1271342 - DNA, 15 bp, Homo sapiens
cctatctctctagga

SEQ ID NO: 1271343 - DNA, 15 bp, Homo sapiens
tcctatctctctagg

SEQ ID NO: 1271344 - DNA, 15 bp, Homo sapiens
ctcctatctctctag

SEQ ID NO: 1271345 - DNA, 15 bp, Homo sapiens
cctcctatctctcta

SEQ ID NO: 1271346 - DNA, 15 bp, Homo sapiens
tcctcctatctctct

SEQ ID NO: 1271347 - DNA, 15 bp, Homo sapiens
atcctcctatctctc

SEQ ID NO: 1271348 - DNA, 15 bp, Homo sapiens
gatcctcctatctct

SEQ ID NO: 1271349 - DNA, 15 bp, Homo sapiens
agatcctcctatctc

SEQ ID NO: 1271350 - DNA, 15 bp, Homo sapiens
cagatcctcctatct

SEQ ID NO: 1271351 - DNA, 15 bp, Homo sapiens
tcagatcctcctatc

SEQ ID NO: 1271352 - DNA, 15 bp, Homo sapiens
ctcagatcctcctat

SEQ ID NO: 1271353 - DNA, 15 bp, Homo sapiens
cctcagatcctccta

SEQ ID NO: 1271354 - DNA, 15 bp, Homo sapiens
gcctcagatcctcct

SEQ ID NO: 1271355 - DNA, 15 bp, Homo sapiens
tgcctcagatcctcc

SEQ ID NO: 1271356 - DNA, 15 bp, Homo sapiens
gtgcctcagatcctc

SEQ ID NO: 1271357 - DNA, 15 bp, Homo sapiens
agtgcctcagatcct

SEQ ID NO: 1271358 - DNA, 15 bp, Homo sapiens
aagtgcctcagatcc

SEQ ID NO: 1271359 - DNA, 15 bp, Homo sapiens
caagtgcctcagatc

SEQ ID NO: 1271360 - DNA, 15 bp, Homo sapiens
ccaagtgcctcagat

SEQ ID NO: 1271361 - DNA, 15 bp, Homo sapiens
accaagtgcctcaga

SEQ ID NO: 1271362 - DNA, 15 bp, Homo sapiens
caccaagtgcctcag

SEQ ID NO: 1271363 - DNA, 15 bp, Homo sapiens
ccaccaagtgcctca

SEQ ID NO: 1271364 - DNA, 15 bp, Homo sapiens
gccaccaagtgcctc

SEQ ID NO: 1271365 - DNA, 15 bp, Homo sapiens
tgccaccaagtgcct

SEQ ID NO: 1271366 - DNA, 15 bp, Homo sapiens
ttgccaccaagtgcc

SEQ ID NO: 1271367 - DNA, 15 bp, Homo sapiens
gttgccaccaagtgc

SEQ ID NO: 1271368 - DNA, 15 bp, Homo sapiens
agttgccaccaagtg

SEQ ID NO: 1271369 - DNA, 15 bp, Homo sapiens
cagttgccaccaagt

SEQ ID NO: 1271370 - DNA, 15 bp, Homo sapiens
gcagttgccaccaag

SEQ ID NO: 1271371 - DNA, 15 bp, Homo sapiens
agcagttgccaccaa

SEQ ID NO: 1271372 - DNA, 15 bp, Homo sapiens
aagcagttgccacca

SEQ ID NO: 1271373 - DNA, 15 bp, Homo sapiens
taagcagttgccacc

SEQ ID NO: 1271374 - DNA, 15 bp, Homo sapiens
ctaagcagttgccac

SEQ ID NO: 1271375 - DNA, 15 bp, Homo sapiens
cctaagcagttgcca

SEQ ID NO: 1271376 - DNA, 15 bp, Homo sapiens
gcctaagcagttgcc

SEQ ID NO: 1271377 - DNA, 15 bp, Homo sapiens
tgcctaagcagttgc

SEQ ID NO: 1271378 - DNA, 15 bp, Homo sapiens
ctgcctaagcagttg

SEQ ID NO: 1271379 - DNA, 15 bp, Homo sapiens
gctgcctaagcagtt

SEQ ID NO: 1271380 - DNA, 15 bp, Homo sapiens
tgctgcctaagcagt

SEQ ID NO: 1271381 - DNA, 15 bp, Homo sapiens
ttgctgcctaagcag

SEQ ID NO: 1271382 - DNA, 15 bp, Homo sapiens
cttgctgcctaagca

SEQ ID NO: 1271383 - DNA, 15 bp, Homo sapiens
gcttgctgcctaagc

SEQ ID NO: 1271384 - DNA, 15 bp, Homo sapiens
ggcttgctgcctaag

SEQ ID NO: 1271385 - DNA, 15 bp, Homo sapiens
aggcttgctgcctaa

SEQ ID NO: 1271386 - DNA, 15 bp, Homo sapiens
gaggcttgctgccta

SEQ ID NO: 1271387 - DNA, 15 bp, Homo sapiens
ggaggcttgctgcct

SEQ ID NO: 1271388 - DNA, 15 bp, Homo sapiens
tggaggcttgctgcc

SEQ ID NO: 1271389 - DNA, 15 bp, Homo sapiens
ttggaggcttgctgc

SEQ ID NO: 1271390 - DNA, 15 bp, Homo sapiens
tttggaggcttgctg

SEQ ID NO: 1271391 - DNA, 15 bp, Homo sapiens
gtttggaggcttgct

SEQ ID NO: 1271392 - DNA, 15 bp, Homo sapiens
tgtttggaggcttgc

SEQ ID NO: 1271393 - DNA, 15 bp, Homo sapiens
ttgtttggaggcttg

SEQ ID NO: 1271394 - DNA, 15 bp, Homo sapiens
cttgtttggaggctt

SEQ ID NO: 1271395 - DNA, 15 bp, Homo sapiens
gcttgtttggaggct

SEQ ID NO: 1271396 - DNA, 15 bp, Homo sapiens
ggcttgtttggaggc

SEQ ID NO: 1271397 - DNA, 15 bp, Homo sapiens
aggcttgtttggagg

SEQ ID NO: 1271398 - DNA, 15 bp, Homo sapiens
aaggcttgtttggag

SEQ ID NO: 1271399 - DNA, 15 bp, Homo sapiens
aaaggcttgtttgga

SEQ ID NO: 1271400 - DNA, 15 bp, Homo sapiens
taaaggcttgtttgg

SEQ ID NO: 1271401 - DNA, 15 bp, Homo sapiens
ctaaaggcttgtttg

SEQ ID NO: 1271402 - DNA, 15 bp, Homo sapiens
gctaaaggcttgttt

SEQ ID NO: 1271403 - DNA, 15 bp, Homo sapiens
tgctaaaggcttgtt

SEQ ID NO: 1271404 - DNA, 15 bp, Homo sapiens
ttgctaaaggcttgt

SEQ ID NO: 1271405 - DNA, 15 bp, Homo sapiens
attgctaaaggcttg

SEQ ID NO: 1271406 - DNA, 15 bp, Homo sapiens
tattgctaaaggctt

SEQ ID NO: 1271407 - DNA, 15 bp, Homo sapiens
ctattgctaaaggct

SEQ ID NO: 1271408 - DNA, 15 bp, Homo sapiens
cctattgctaaaggc

SEQ ID NO: 1271409 - DNA, 15 bp, Homo sapiens
tcctattgctaaagg

SEQ ID NO: 1271410 - DNA, 15 bp, Homo sapiens
ttcctattgctaaag

SEQ ID NO: 1271411 - DNA, 15 bp, Homo sapiens
cttcctattgctaaa

SEQ ID NO: 1271412 - DNA, 15 bp, Homo sapiens
gcttcctattgctaa

SEQ ID NO: 1271413 - DNA, 15 bp, Homo sapiens
ggcttcctattgcta

SEQ ID NO: 1271414 - DNA, 15 bp, Homo sapiens
tggcttcctattgct

SEQ ID NO: 1271415 - DNA, 15 bp, Homo sapiens
atggcttcctattgc

SEQ ID NO: 1271416 - DNA, 15 bp, Homo sapiens
aatggcttcctattg

SEQ ID NO: 1271417 - DNA, 15 bp, Homo sapiens
aaatggcttcctatt

SEQ ID NO: 1271418 - DNA, 15 bp, Homo sapiens
gaaatggcttcctat

SEQ ID NO: 1271419 - DNA, 15 bp, Homo sapiens
ggaaatggcttccta

SEQ ID NO: 1271420 - DNA, 15 bp, Homo sapiens
tggaaatggcttcct

SEQ ID NO: 1271421 - DNA, 15 bp, Homo sapiens
gtggaaatggcttcc

SEQ ID NO: 1271422 - DNA, 15 bp, Homo sapiens
tgtggaaatggcttc

SEQ ID NO: 1271423 - DNA, 15 bp, Homo sapiens
gtgtggaaatggctt

SEQ ID NO: 1271424 - DNA, 15 bp, Homo sapiens
tgtgtggaaatggct

SEQ ID NO: 1271425 - DNA, 15 bp, Homo sapiens
atgtgtggaaatggc

SEQ ID NO: 1271426 - DNA, 15 bp, Homo sapiens
gatgtgtggaaatgg

SEQ ID NO: 1271427 - DNA, 15 bp, Homo sapiens
ggatgtgtggaaatg

SEQ ID NO: 1271428 - DNA, 15 bp, Homo sapiens
tggatgtgtggaaat

SEQ ID NO: 1271429 - DNA, 15 bp, Homo sapiens
ctggatgtgtggaaa

SEQ ID NO: 1271430 - DNA, 15 bp, Homo sapiens
tctggatgtgtggaa

SEQ ID NO: 1271431 - DNA, 15 bp, Homo sapiens
atctggatgtgtgga

SEQ ID NO: 1271432 - DNA, 15 bp, Homo sapiens
gatctggatgtgtgg

SEQ ID NO: 1271433 - DNA, 15 bp, Homo sapiens
tgatctggatgtgtg

SEQ ID NO: 1271434 - DNA, 15 bp, Homo sapiens
gtgatctggatgtgt

SEQ ID NO: 1271435 - DNA, 15 bp, Homo sapiens
agtgatctggatgtg

SEQ ID NO: 1271436 - DNA, 15 bp, Homo sapiens
aagtgatctggatgt

SEQ ID NO: 1271437 - DNA, 15 bp, Homo sapiens
caagtgatctggatg

SEQ ID NO: 1271438 - DNA, 15 bp, Homo sapiens
gcaagtgatctggat

SEQ ID NO: 1271439 - DNA, 15 bp, Homo sapiens
ggcaagtgatctgga

SEQ ID NO: 1271440 - DNA, 15 bp, Homo sapiens
tggcaagtgatctgg

SEQ ID NO: 1271441 - DNA, 15 bp, Homo sapiens
ttggcaagtgatctg

SEQ ID NO: 1271442 - DNA, 15 bp, Homo sapiens
cttggcaagtgatct

SEQ ID NO: 1271443 - DNA, 15 bp, Homo sapiens
gcttggcaagtgatc

SEQ ID NO: 1271444 - DNA, 15 bp, Homo sapiens
agcttggcaagtgat

SEQ ID NO: 1271445 - DNA, 15 bp, Homo sapiens
cagcttggcaagtga

SEQ ID NO: 1271446 - DNA, 15 bp, Homo sapiens
tcagcttggcaagtg

SEQ ID NO: 1271447 - DNA, 15 bp, Homo sapiens
atcagcttggcaagt

SEQ ID NO: 1271448 - DNA, 15 bp, Homo sapiens
catcagcttggcaag

SEQ ID NO: 1271449 - DNA, 15 bp, Homo sapiens
ccatcagcttggcaa

SEQ ID NO: 1271450 - DNA, 15 bp, Homo sapiens
cccatcagcttggca

SEQ ID NO: 1271451 - DNA, 15 bp, Homo sapiens
acccatcagcttggc

SEQ ID NO: 1271452 - DNA, 15 bp, Homo sapiens
cacccatcagcttgg

SEQ ID NO: 1271453 - DNA, 15 bp, Homo sapiens
gcacccatcagcttg

SEQ ID NO: 1271454 - DNA, 15 bp, Homo sapiens
ggcacccatcagctt

SEQ ID NO: 1271455 - DNA, 15 bp, Homo sapiens
aggcacccatcagct

SEQ ID NO: 1271456 - DNA, 15 bp, Homo sapiens
aaggcacccatcagc

SEQ ID NO: 1271457 - DNA, 15 bp, Homo sapiens
gaaggcacccatcag

SEQ ID NO: 1271458 - DNA, 15 bp, Homo sapiens
ggaaggcacccatca

SEQ ID NO: 1271459 - DNA, 15 bp, Homo sapiens
gggaaggcacccatc

SEQ ID NO: 1271460 - DNA, 15 bp, Homo sapiens
agggaaggcacccat

SEQ ID NO: 1271461 - DNA, 15 bp, Homo sapiens
gagggaaggcaccca

SEQ ID NO: 1271462 - DNA, 15 bp, Homo sapiens
ggagggaaggcaccc

SEQ ID NO: 1271463 - DNA, 15 bp, Homo sapiens
aggagggaaggcacc

SEQ ID NO: 1271464 - DNA, 15 bp, Homo sapiens
caggagggaaggcac

SEQ ID NO: 1271465 - DNA, 15 bp, Homo sapiens
acaggagggaaggca

SEQ ID NO: 1271466 - DNA, 15 bp, Homo sapiens
gacaggagggaaggc

SEQ ID NO: 1271467 - DNA, 15 bp, Homo sapiens
ggacaggagggaagg

SEQ ID NO: 1271468 - DNA, 15 bp, Homo sapiens
gggacaggagggaag

SEQ ID NO: 1271469 - DNA, 15 bp, Homo sapiens
ggggacaggagggaa

SEQ ID NO: 1271470 - DNA, 15 bp, Homo sapiens
tggggacaggaggga

SEQ ID NO: 1271471 - DNA, 15 bp, Homo sapiens
gtggggacaggaggg

SEQ ID NO: 1271472 - DNA, 15 bp, Homo sapiens
ggtggggacaggagg

SEQ ID NO: 1271473 - DNA, 15 bp, Homo sapiens
aggtggggacaggag

SEQ ID NO: 1271474 - DNA, 15 bp, Homo sapiens
gaggtggggacagga

SEQ ID NO: 1271475 - DNA, 15 bp, Homo sapiens
agaggtggggacagg

SEQ ID NO: 1271476 - DNA, 15 bp, Homo sapiens
gagaggtggggacag

SEQ ID NO: 1271477 - DNA, 15 bp, Homo sapiens
ggagaggtggggaca

SEQ ID NO: 1271478 - DNA, 15 bp, Homo sapiens
gggagaggtggggac

SEQ ID NO: 1271479 - DNA, 15 bp, Homo sapiens
ggggagaggtgggga

SEQ ID NO: 1271480 - DNA, 15 bp, Homo sapiens
cggggagaggtgggg

SEQ ID NO: 1271481 - DNA, 15 bp, Homo sapiens
tcggggagaggtggg

SEQ ID NO: 1271482 - DNA, 15 bp, Homo sapiens
gtcggggagaggtgg

SEQ ID NO: 1271483 - DNA, 15 bp, Homo sapiens
ggtcggggagaggtg

SEQ ID NO: 1271484 - DNA, 15 bp, Homo sapiens
gggtcggggagaggt

SEQ ID NO: 1271485 - DNA, 15 bp, Homo sapiens
ggggtcggggagagg

SEQ ID NO: 1271486 - DNA, 15 bp, Homo sapiens
gggggtcggggagag

SEQ ID NO: 1271487 - DNA, 15 bp, Homo sapiens
cgggggtcggggaga

SEQ ID NO: 1271488 - DNA, 15 bp, Homo sapiens
acgggggtcggggag

SEQ ID NO: 1271489 - DNA, 15 bp, Homo sapiens
gacgggggtcgggga

SEQ ID NO: 1271490 - DNA, 15 bp, Homo sapiens
agacgggggtcgggg

SEQ ID NO: 1271491 - DNA, 15 bp, Homo sapiens
gagacgggggtcggg

SEQ ID NO: 1271492 - DNA, 15 bp, Homo sapiens
tgagacgggggtcgg

SEQ ID NO: 1271493 - DNA, 15 bp, Homo sapiens
gtgagacgggggtcg

SEQ ID NO: 1271494 - DNA, 15 bp, Homo sapiens
ggtgagacgggggtc

SEQ ID NO: 1271495 - DNA, 15 bp, Homo sapiens
gggtgagacgggggt

SEQ ID NO: 1271496 - DNA, 15 bp, Homo sapiens
tgggtgagacggggg

SEQ ID NO: 1271497 - DNA, 15 bp, Homo sapiens
gtgggtgagacgggg

SEQ ID NO: 1271498 - DNA, 15 bp, Homo sapiens
tgtgggtgagacggg

SEQ ID NO: 1271499 - DNA, 15 bp, Homo sapiens
ctgtgggtgagacgg

SEQ ID NO: 1271500 - DNA, 15 bp, Homo sapiens
tctgtgggtgagacg

SEQ ID NO: 1271501 - DNA, 15 bp, Homo sapiens
ttctgtgggtgagac

SEQ ID NO: 1271502 - DNA, 15 bp, Homo sapiens
tttctgtgggtgaga

SEQ ID NO: 1271503 - DNA, 15 bp, Homo sapiens
ttttctgtgggtgag

SEQ ID NO: 1271504 - DNA, 15 bp, Homo sapiens
cttttctgtgggtga

SEQ ID NO: 1271505 - DNA, 15 bp, Homo sapiens
acttttctgtgggtg

SEQ ID NO: 1271506 - DNA, 15 bp, Homo sapiens
tacttttctgtgggt

SEQ ID NO: 1271507 - DNA, 15 bp, Homo sapiens
ctacttttctgtggg

SEQ ID NO: 1271508 - DNA, 15 bp, Homo sapiens
gctacttttctgtgg

SEQ ID NO: 1271509 - DNA, 15 bp, Homo sapiens
tgctacttttctgtg

SEQ ID NO: 1271510 - DNA, 15 bp, Homo sapiens
gtgctacttttctgt

SEQ ID NO: 1271511 - DNA, 15 bp, Homo sapiens
tgtgctacttttctg

SEQ ID NO: 1271512 - DNA, 15 bp, Homo sapiens
atgtgctacttttct

SEQ ID NO: 1271513 - DNA, 15 bp, Homo sapiens
tatgtgctacttttc

SEQ ID NO: 1271514 - DNA, 15 bp, Homo sapiens
ctatgtgctactttt

SEQ ID NO: 1271515 - DNA, 15 bp, Homo sapiens
tctatgtgctacttt

SEQ ID NO: 1271516 - DNA, 15 bp, Homo sapiens
ttctatgtgctactt

SEQ ID NO: 1271517 - DNA, 15 bp, Homo sapiens
tttctatgtgctact

SEQ ID NO: 1271518 - DNA, 15 bp, Homo sapiens
ttttctatgtgctac

SEQ ID NO: 1271519 - DNA, 15 bp, Homo sapiens
attttctatgtgcta

SEQ ID NO: 1271520 - DNA, 15 bp, Homo sapiens
tattttctatgtgct

SEQ ID NO: 1271521 - DNA, 15 bp, Homo sapiens
atattttctatgtgc

SEQ ID NO: 1271522 - DNA, 15 bp, Homo sapiens
catattttctatgtg

SEQ ID NO: 1271523 - DNA, 15 bp, Homo sapiens
ccatattttctatgt

SEQ ID NO: 1271524 - DNA, 15 bp, Homo sapiens
gccatattttctatg

SEQ ID NO: 1271525 - DNA, 15 bp, Homo sapiens
agccatattttctat

SEQ ID NO: 1271526 - DNA, 15 bp, Homo sapiens
aagccatattttcta

SEQ ID NO: 1271527 - DNA, 15 bp, Homo sapiens
gaagccatattttct

SEQ ID NO: 1271528 - DNA, 15 bp, Homo sapiens
ggaagccatattttc

SEQ ID NO: 1271529 - DNA, 15 bp, Homo sapiens
tggaagccatatttt

SEQ ID NO: 1271530 - DNA, 15 bp, Homo sapiens
ctggaagccatattt

SEQ ID NO: 1271531 - DNA, 15 bp, Homo sapiens
gccgcctcccaggtt

SEQ ID NO: 1271532 - DNA, 15 bp, Homo sapiens
cgccgcctcccaggt

SEQ ID NO: 1271533 - DNA, 15 bp, Homo sapiens
ccgccgcctcccagg

SEQ ID NO: 1271534 - DNA, 15 bp, Homo sapiens
accgccgcctcccag

SEQ ID NO: 1271535 - DNA, 15 bp, Homo sapiens
aaccgccgcctccca

SEQ ID NO: 1271536 - DNA, 15 bp, Homo sapiens
caaccgccgcctccc

SEQ ID NO: 1271537 - DNA, 15 bp, Homo sapiens
tcaaccgccgcctcc

SEQ ID NO: 1271538 - DNA, 15 bp, Homo sapiens
ttcaaccgccgcctc

SEQ ID NO: 1271539 - DNA, 15 bp, Homo sapiens
cttcaaccgccgcct

SEQ ID NO: 1271540 - DNA, 15 bp, Homo sapiens
acttcaaccgccgcc

SEQ ID NO: 1271541 - DNA, 15 bp, Homo sapiens
cacttcaaccgccgc

SEQ ID NO: 1271542 - DNA, 15 bp, Homo sapiens
tcacttcaaccgccg

SEQ ID NO: 1271543 - DNA, 15 bp, Homo sapiens
ctcacttcaaccgcc

SEQ ID NO: 1271544 - DNA, 15 bp, Homo sapiens
gctcacttcaaccgc

SEQ ID NO: 1271545 - DNA, 15 bp, Homo sapiens
ggctcacttcaaccg

SEQ ID NO: 1271546 - DNA, 15 bp, Homo sapiens
ggcaatggcatgatc

SEQ ID NO: 1271547 - DNA, 15 bp, Homo sapiens
gggcaatggcatgat

SEQ ID NO: 1271548 - DNA, 15 bp, Homo sapiens
agggcaatggcatga

SEQ ID NO: 1271549 - DNA, 15 bp, Homo sapiens
gagggcaatggcatg

SEQ ID NO: 1271550 - DNA, 15 bp, Homo sapiens
ggagggcaatggcat

SEQ ID NO: 1271551 - DNA, 15 bp, Homo sapiens
tggagggcaatggca

SEQ ID NO: 1271552 - DNA, 15 bp, Homo sapiens
ctggagggcaatggc

SEQ ID NO: 1271553 - DNA, 15 bp, Homo sapiens
gctggagggcaatgg

SEQ ID NO: 1271554 - DNA, 15 bp, Homo sapiens
ggctggagggcaatg

SEQ ID NO: 1271555 - DNA, 15 bp, Homo sapiens
aggctggagggcaat

SEQ ID NO: 1271556 - DNA, 15 bp, Homo sapiens
caggctggagggcaa

SEQ ID NO: 1271557 - DNA, 15 bp, Homo sapiens
gcccaggctggaggg

SEQ ID NO: 1271558 - DNA, 15 bp, Homo sapiens
tgcccaggctggagg

SEQ ID NO: 1271559 - DNA, 15 bp, Homo sapiens
aggagtcttgctctg

SEQ ID NO: 1271560 - DNA, 15 bp, Homo sapiens
aaggagtcttgctct

SEQ ID NO: 1271561 - DNA, 15 bp, Homo sapiens
gaaggagtcttgctc

SEQ ID NO: 1271562 - DNA, 15 bp, Homo sapiens
agaaggagtcttgct

SEQ ID NO: 1271563 - DNA, 15 bp, Homo sapiens
gagaaggagtcttgc

SEQ ID NO: 1271564 - DNA, 15 bp, Homo sapiens
tgagaaggagtcttg

SEQ ID NO: 1271565 - DNA, 15 bp, Homo sapiens
ttgagaaggagtctt

SEQ ID NO: 1271566 - DNA, 15 bp, Homo sapiens
cttgagaaggagtct

SEQ ID NO: 1271567 - DNA, 15 bp, Homo sapiens
tcttgagaaggagtc

SEQ ID NO: 1271568 - DNA, 15 bp, Homo sapiens
ctcttgagaaggagt

SEQ ID NO: 1271569 - DNA, 15 bp, Homo sapiens
tctcttgagaaggag

SEQ ID NO: 1271570 - DNA, 15 bp, Homo sapiens
ttctcttgagaagga

SEQ ID NO: 1271571 - DNA, 15 bp, Homo sapiens
tttctcttgagaagg

SEQ ID NO: 1271572 - DNA, 15 bp, Homo sapiens
ttttctcttgagaag

SEQ ID NO: 1271573 - DNA, 15 bp, Homo sapiens
tttttctcttgagaa

SEQ ID NO: 1271574 - DNA, 15 bp, Homo sapiens
gttttttctcttgag

SEQ ID NO: 1271575 - DNA, 15 bp, Homo sapiens
tgttttttctcttga

SEQ ID NO: 1271576 - DNA, 15 bp, Homo sapiens
ttgttttttctcttg

SEQ ID NO: 1271577 - DNA, 15 bp, Homo sapiens
tttgttttttctctt

SEQ ID NO: 1271578 - DNA, 15 bp, Homo sapiens
ttttgttttttctct

SEQ ID NO: 1271579 - DNA, 15 bp, Homo sapiens
gttttgttttttctc

SEQ ID NO: 1271580 - DNA, 15 bp, Homo sapiens
cttgttttgttttgt

SEQ ID NO: 1271581 - DNA, 15 bp, Homo sapiens
tcttgttttgttttg

SEQ ID NO: 1271582 - DNA, 15 bp, Homo sapiens
ttcttgttttgtttt

SEQ ID NO: 1271583 - DNA, 15 bp, Homo sapiens
tttcttgttttgttt

SEQ ID NO: 1271584 - DNA, 15 bp, Homo sapiens
ttttcttgttttgtt

SEQ ID NO: 1271585 - DNA, 15 bp, Homo sapiens
tttttcttgttttgt

SEQ ID NO: 1271586 - DNA, 15 bp, Homo sapiens
ttttttcttgttttg

SEQ ID NO: 1271587 - DNA, 15 bp, Homo sapiens
gttttttcttgtttt

SEQ ID NO: 1271588 - DNA, 15 bp, Homo sapiens
tgttttttcttgttt

SEQ ID NO: 1271589 - DNA, 15 bp, Homo sapiens
ttgttttttcttgtt

SEQ ID NO: 1271590 - DNA, 15 bp, Homo sapiens
tttgttttttcttgt

SEQ ID NO: 1271591 - DNA, 15 bp, Homo sapiens
ctttgttttttcttg

SEQ ID NO: 1271592 - DNA, 15 bp, Homo sapiens
tctttgttttttctt

SEQ ID NO: 1271593 - DNA, 15 bp, Homo sapiens
ttctttgttttttct

SEQ ID NO: 1271594 - DNA, 15 bp, Homo sapiens
attctttgttttttc

SEQ ID NO: 1271595 - DNA, 15 bp, Homo sapiens
cattctttgtttttt

SEQ ID NO: 1271596 - DNA, 15 bp, Homo sapiens
tcattctttgttttt

SEQ ID NO: 1271597 - DNA, 15 bp, Homo sapiens
ctcattctttgtttt

SEQ ID NO: 1271598 - DNA, 15 bp, Homo sapiens
gctcattctttgttt

SEQ ID NO: 1271599 - DNA, 15 bp, Homo sapiens
agctcattctttgtt

SEQ ID NO: 1271600 - DNA, 15 bp, Homo sapiens
gagctcattctttgt

SEQ ID NO: 1271601 - DNA, 15 bp, Homo sapiens
agagctcattctttg

SEQ ID NO: 1271602 - DNA, 15 bp, Homo sapiens
gagagctcattcttt

SEQ ID NO: 1271603 - DNA, 15 bp, Homo sapiens
ggagagctcattctt

SEQ ID NO: 1271604 - DNA, 15 bp, Homo sapiens
tggagagctcattct

SEQ ID NO: 1271605 - DNA, 15 bp, Homo sapiens
gtggagagctcattc

SEQ ID NO: 1271606 - DNA, 15 bp, Homo sapiens
cgtggagagctcatt

SEQ ID NO: 1271607 - DNA, 15 bp, Homo sapiens
gcgtggagagctcat

SEQ ID NO: 1271608 - DNA, 15 bp, Homo sapiens
cgcgtggagagctca

SEQ ID NO: 1271609 - DNA, 15 bp, Homo sapiens
tcgcgtggagagctc

SEQ ID NO: 1271610 - DNA, 15 bp, Homo sapiens
ttcgcgtggagagct

SEQ ID NO: 1271611 - DNA, 15 bp, Homo sapiens
tttcgcgtggagagc

SEQ ID NO: 1271612 - DNA, 15 bp, Homo sapiens
ttttcgcgtggagag

SEQ ID NO: 1271613 - DNA, 15 bp, Homo sapiens
tttttcgcgtggaga

SEQ ID NO: 1271614 - DNA, 15 bp, Homo sapiens
atttttcgcgtggag

SEQ ID NO: 1271615 - DNA, 15 bp, Homo sapiens
gatttttcgcgtgga

SEQ ID NO: 1271616 - DNA, 15 bp, Homo sapiens
ggatttttcgcgtgg

SEQ ID NO: 1271617 - DNA, 15 bp, Homo sapiens
tggatttttcgcgtg

SEQ ID NO: 1271618 - DNA, 15 bp, Homo sapiens
atggatttttcgcgt

SEQ ID NO: 1271619 - DNA, 15 bp, Homo sapiens
aatggatttttcgcg

SEQ ID NO: 1271620 - DNA, 15 bp, Homo sapiens
caatggatttttcgc

SEQ ID NO: 1271621 - DNA, 15 bp, Homo sapiens
tcaatggatttttcg

SEQ ID NO: 1271622 - DNA, 15 bp, Homo sapiens
ctcaatggatttttc

SEQ ID NO: 1271623 - DNA, 15 bp, Homo sapiens
tctcaatggattttt

SEQ ID NO: 1271624 - DNA, 15 bp, Homo sapiens
atctcaatggatttt

SEQ ID NO: 1271625 - DNA, 15 bp, Homo sapiens
catctcaatggattt

SEQ ID NO: 1271626 - DNA, 15 bp, Homo sapiens
gcatctcaatggatt

SEQ ID NO: 1271627 - DNA, 15 bp, Homo sapiens
tgcatctcaatggat

SEQ ID NO: 1271628 - DNA, 15 bp, Homo sapiens
ttgcatctcaatgga

SEQ ID NO: 1271629 - DNA, 15 bp, Homo sapiens
tttgcatctcaatgg

SEQ ID NO: 1271630 - DNA, 15 bp, Homo sapiens
ctttgcatctcaatg

SEQ ID NO: 1271631 - DNA, 15 bp, Homo sapiens
cctttgcatctcaat

SEQ ID NO: 1271632 - DNA, 15 bp, Homo sapiens
tcctttgcatctcaa

SEQ ID NO: 1271633 - DNA, 15 bp, Homo sapiens
ttcctttgcatctca

SEQ ID NO: 1271634 - DNA, 15 bp, Homo sapiens
cttcctttgcatctc

SEQ ID NO: 1271635 - DNA, 15 bp, Homo sapiens
ccttcctttgcatct

SEQ ID NO: 1271636 - DNA, 15 bp, Homo sapiens
tccttcctttgcatc

SEQ ID NO: 1271637 - DNA, 15 bp, Homo sapiens
ttccttcctttgcat

SEQ ID NO: 1271638 - DNA, 15 bp, Homo sapiens
cttccttcctttgca

SEQ ID NO: 1271639 - DNA, 15 bp, Homo sapiens
gcttccttcctttgc

SEQ ID NO: 1271640 - DNA, 15 bp, Homo sapiens
agcttccttcctttg

SEQ ID NO: 1271641 - DNA, 15 bp, Homo sapiens
tagcttccttccttt

SEQ ID NO: 1271642 - DNA, 15 bp, Homo sapiens
atagcttccttcctt

SEQ ID NO: 1271643 - DNA, 15 bp, Homo sapiens
gatagcttccttcct

SEQ ID NO: 1271644 - DNA, 15 bp, Homo sapiens
tgatagcttccttcc

SEQ ID NO: 1271645 - DNA, 15 bp, Homo sapiens
atgatagcttccttc

SEQ ID NO: 1271646 - DNA, 15 bp, Homo sapiens
aatgatagcttcctt

SEQ ID NO: 1271647 - DNA, 15 bp, Homo sapiens
caatgatagcttcct

SEQ ID NO: 1271648 - DNA, 15 bp, Homo sapiens
acaatgatagcttcc

SEQ ID NO: 1271649 - DNA, 15 bp, Homo sapiens
cacaatgatagcttc

SEQ ID NO: 1271650 - DNA, 15 bp, Homo sapiens
ccacaatgatagctt

SEQ ID NO: 1271651 - DNA, 15 bp, Homo sapiens
tccacaatgatagct

SEQ ID NO: 1271652 - DNA, 15 bp, Homo sapiens
ttccacaatgatagc

SEQ ID NO: 1271653 - DNA, 15 bp, Homo sapiens
attccacaatgatag

SEQ ID NO: 1271654 - DNA, 15 bp, Homo sapiens
aattccacaatgata

SEQ ID NO: 1271655 - DNA, 15 bp, Homo sapiens
caattccacaatgat

SEQ ID NO: 1271656 - DNA, 15 bp, Homo sapiens
gcaattccacaatga

SEQ ID NO: 1271657 - DNA, 15 bp, Homo sapiens
tgcaattccacaatg

SEQ ID NO: 1271658 - DNA, 15 bp, Homo sapiens
gtgcaattccacaat

SEQ ID NO: 1271659 - DNA, 15 bp, Homo sapiens
tgtgcaattccacaa

SEQ ID NO: 1271660 - DNA, 15 bp, Homo sapiens
atgtgcaattccaca

SEQ ID NO: 1271661 - DNA, 15 bp, Homo sapiens
catgtgcaattccac

SEQ ID NO: 1271662 - DNA, 15 bp, Homo sapiens
acatgtgcaattcca

SEQ ID NO: 1271663 - DNA, 15 bp, Homo sapiens
gacatgtgcaattcc

SEQ ID NO: 1271664 - DNA, 15 bp, Homo sapiens
tgacatgtgcaattc

SEQ ID NO: 1271665 - DNA, 15 bp, Homo sapiens
ctgacatgtgcaatt

SEQ ID NO: 1271666 - DNA, 15 bp, Homo sapiens
actgacatgtgcaat

SEQ ID NO: 1271667 - DNA, 15 bp, Homo sapiens
aactgacatgtgcaa

SEQ ID NO: 1271668 - DNA, 15 bp, Homo sapiens
taactgacatgtgca

SEQ ID NO: 1271669 - DNA, 15 bp, Homo sapiens
gtaactgacatgtgc

SEQ ID NO: 1271670 - DNA, 15 bp, Homo sapiens
tgtaactgacatgtg

SEQ ID NO: 1271671 - DNA, 15 bp, Homo sapiens
atgtaactgacatgt

SEQ ID NO: 1271672 - DNA, 15 bp, Homo sapiens
aatgtaactgacatg

SEQ ID NO: 1271673 - DNA, 15 bp, Homo sapiens
taatgtaactgacat

SEQ ID NO: 1271674 - DNA, 15 bp, Homo sapiens
ttaatgtaactgaca

SEQ ID NO: 1271675 - DNA, 15 bp, Homo sapiens
gttaatgtaactgac

SEQ ID NO: 1271676 - DNA, 15 bp, Homo sapiens
cgttaatgtaactga

SEQ ID NO: 1271677 - DNA, 15 bp, Homo sapiens
acgttaatgtaactg

SEQ ID NO: 1271678 - DNA, 15 bp, Homo sapiens
aacgttaatgtaact

SEQ ID NO: 1271679 - DNA, 15 bp, Homo sapiens
aaacgttaatgtaac

SEQ ID NO: 1271680 - DNA, 15 bp, Homo sapiens
aaaacgttaatgtaa

SEQ ID NO: 1271681 - DNA, 15 bp, Homo sapiens
aaaaacgttaatgta

SEQ ID NO: 1271682 - DNA, 15 bp, Homo sapiens
caaaaacgttaatgt

SEQ ID NO: 1271683 - DNA, 15 bp, Homo sapiens
ccaaaaacgttaatg

SEQ ID NO: 1271684 - DNA, 15 bp, Homo sapiens
tccaaaaacgttaat

SEQ ID NO: 1271685 - DNA, 15 bp, Homo sapiens
ctccaaaaacgttaa

SEQ ID NO: 1271686 - DNA, 15 bp, Homo sapiens
gctccaaaaacgtta

SEQ ID NO: 1271687 - DNA, 15 bp, Homo sapiens
tgctccaaaaacgtt

SEQ ID NO: 1271688 - DNA, 15 bp, Homo sapiens
ttgctccaaaaacgt

SEQ ID NO: 1271689 - DNA, 15 bp, Homo sapiens
cttgctccaaaaacg

SEQ ID NO: 1271690 - DNA, 15 bp, Homo sapiens
ccttgctccaaaaac

SEQ ID NO: 1271691 - DNA, 15 bp, Homo sapiens
accttgctccaaaaa

SEQ ID NO: 1271692 - DNA, 15 bp, Homo sapiens
taccttgctccaaaa

SEQ ID NO: 1271693 - DNA, 15 bp, Homo sapiens
ctaccttgctccaaa

SEQ ID NO: 1271694 - DNA, 15 bp, Homo sapiens
tctaccttgctccaa

SEQ ID NO: 1271695 - DNA, 15 bp, Homo sapiens
ctctaccttgctcca

SEQ ID NO: 1271696 - DNA, 15 bp, Homo sapiens
gctctaccttgctcc

SEQ ID NO: 1271697 - DNA, 15 bp, Homo sapiens
agctctaccttgctc

SEQ ID NO: 1271698 - DNA, 15 bp, Homo sapiens
gagctctaccttgct

SEQ ID NO: 1271699 - DNA, 15 bp, Homo sapiens
tgagctctaccttgc

SEQ ID NO: 1271700 - DNA, 15 bp, Homo sapiens
atgagctctaccttg

SEQ ID NO: 1271701 - DNA, 15 bp, Homo sapiens
gatgagctctacctt

SEQ ID NO: 1271702 - DNA, 15 bp, Homo sapiens
agatgagctctacct

SEQ ID NO: 1271703 - DNA, 15 bp, Homo sapiens
gagatgagctctacc

SEQ ID NO: 1271704 - DNA, 15 bp, Homo sapiens
agagatgagctctac

SEQ ID NO: 1271705 - DNA, 15 bp, Homo sapiens
gagagatgagctcta

SEQ ID NO: 1271706 - DNA, 15 bp, Homo sapiens
ggagagatgagctct

SEQ ID NO: 1271707 - DNA, 15 bp, Homo sapiens
gggagagatgagctc

SEQ ID NO: 1271708 - DNA, 15 bp, Homo sapiens
tgggagagatgagct

SEQ ID NO: 1271709 - DNA, 15 bp, Homo sapiens
gtgggagagatgagc

SEQ ID NO: 1271710 - DNA, 15 bp, Homo sapiens
tgtgggagagatgag

SEQ ID NO: 1271711 - DNA, 15 bp, Homo sapiens
ttgtgggagagatga

SEQ ID NO: 1271712 - DNA, 15 bp, Homo sapiens
cttgtgggagagatg

SEQ ID NO: 1271713 - DNA, 15 bp, Homo sapiens
gcttgtgggagagat

SEQ ID NO: 1271714 - DNA, 15 bp, Homo sapiens
tgcttgtgggagaga

SEQ ID NO: 1271715 - DNA, 15 bp, Homo sapiens
ttgcttgtgggagag

SEQ ID NO: 1271716 - DNA, 15 bp, Homo sapiens
tttgcttgtgggaga

SEQ ID NO: 1271717 - DNA, 15 bp, Homo sapiens
atttgcttgtgggag

SEQ ID NO: 1271718 - DNA, 15 bp, Homo sapiens
aatttgcttgtggga

SEQ ID NO: 1271719 - DNA, 15 bp, Homo sapiens
gaatttgcttgtggg

SEQ ID NO: 1271720 - DNA, 15 bp, Homo sapiens
ggaatttgcttgtgg

SEQ ID NO: 1271721 - DNA, 15 bp, Homo sapiens
tggaatttgcttgtg

SEQ ID NO: 1271722 - DNA, 15 bp, Homo sapiens
ctggaatttgcttgt

SEQ ID NO: 1271723 - DNA, 15 bp, Homo sapiens
gctggaatttgcttg

SEQ ID NO: 1271724 - DNA, 15 bp, Homo sapiens
ggctggaatttgctt

SEQ ID NO: 1271725 - DNA, 15 bp, Homo sapiens
gggctggaatttgct

SEQ ID NO: 1271726 - DNA, 15 bp, Homo sapiens
tgggctggaatttgc

SEQ ID NO: 1271727 - DNA, 15 bp, Homo sapiens
ttgggctggaatttg

SEQ ID NO: 1271728 - DNA, 15 bp, Homo sapiens
tttgggctggaattt

SEQ ID NO: 1271729 - DNA, 15 bp, Homo sapiens
ctttgggctggaatt

SEQ ID NO: 1271730 - DNA, 15 bp, Homo sapiens
gctttgggctggaat

SEQ ID NO: 1271731 - DNA, 15 bp, Homo sapiens
tgctttgggctggaa

SEQ ID NO: 1271732 - DNA, 15 bp, Homo sapiens
atgctttgggctgga

SEQ ID NO: 1271733 - DNA, 15 bp, Homo sapiens
aatgctttgggctgg

SEQ ID NO: 1271734 - DNA, 15 bp, Homo sapiens
caatgctttgggctg

SEQ ID NO: 1271735 - DNA, 15 bp, Homo sapiens
tcaatgctttgggct

SEQ ID NO: 1271736 - DNA, 15 bp, Homo sapiens
atcaatgctttgggc

SEQ ID NO: 1271737 - DNA, 15 bp, Homo sapiens
tatcaatgctttggg

SEQ ID NO: 1271738 - DNA, 15 bp, Homo sapiens
gtatcaatgctttgg

SEQ ID NO: 1271739 - DNA, 15 bp, Homo sapiens
agtatcaatgctttg

SEQ ID NO: 1271740 - DNA, 15 bp, Homo sapiens
tagtatcaatgcttt

SEQ ID NO: 1271741 - DNA, 15 bp, Homo sapiens
ttagtatcaatgctt

SEQ ID NO: 1271742 - DNA, 15 bp, Homo sapiens
attagtatcaatgct

SEQ ID NO: 1271743 - DNA, 15 bp, Homo sapiens
tattagtatcaatgc

SEQ ID NO: 1271744 - DNA, 15 bp, Homo sapiens
ttattagtatcaatg

SEQ ID NO: 1271745 - DNA, 15 bp, Homo sapiens
tttattagtatcaat

SEQ ID NO: 1271746 - DNA, 15 bp, Homo sapiens
ctttattagtatcaa

SEQ ID NO: 1271747 - DNA, 15 bp, Homo sapiens
actttattagtatca

SEQ ID NO: 1271748 - DNA, 15 bp, Homo sapiens
cactttattagtatc

SEQ ID NO: 1271749 - DNA, 15 bp, Homo sapiens
gcactttattagtat

SEQ ID NO: 1271750 - DNA, 15 bp, Homo sapiens
ggcactttattagta

SEQ ID NO: 1271751 - DNA, 15 bp, Homo sapiens
tggcactttattagt

SEQ ID NO: 1271752 - DNA, 15 bp, Homo sapiens
atggcactttattag

SEQ ID NO: 1271753 - DNA, 15 bp, Homo sapiens
catggcactttatta

SEQ ID NO: 1271754 - DNA, 15 bp, Homo sapiens
gcatggcactttatt

SEQ ID NO: 1271755 - DNA, 15 bp, Homo sapiens
agcatggcactttat

SEQ ID NO: 1271756 - DNA, 15 bp, Homo sapiens
cagcatggcacttta

SEQ ID NO: 1271757 - DNA, 15 bp, Homo sapiens
gcagcatggcacttt

SEQ ID NO: 1271758 - DNA, 15 bp, Homo sapiens
cgcagcatggcactt

SEQ ID NO: 1271759 - DNA, 15 bp, Homo sapiens
tcgcagcatggcact

SEQ ID NO: 1271760 - DNA, 15 bp, Homo sapiens
atcgcagcatggcac

SEQ ID NO: 1271761 - DNA, 15 bp, Homo sapiens
catcgcagcatggca

SEQ ID NO: 1271762 - DNA, 15 bp, Homo sapiens
acatcgcagcatggc

SEQ ID NO: 1271763 - DNA, 15 bp, Homo sapiens
cacatcgcagcatgg

SEQ ID NO: 1271764 - DNA, 15 bp, Homo sapiens
gcacatcgcagcatg

SEQ ID NO: 1271765 - DNA, 15 bp, Homo sapiens
tgcacatcgcagcat

SEQ ID NO: 1271766 - DNA, 15 bp, Homo sapiens
ctgcacatcgcagca

SEQ ID NO: 1271767 - DNA, 15 bp, Homo sapiens
cctgcacatcgcagc

SEQ ID NO: 1271768 - DNA, 15 bp, Homo sapiens
ccctgcacatcgcag

SEQ ID NO: 1271769 - DNA, 15 bp, Homo sapiens
cccctgcacatcgca

SEQ ID NO: 1271770 - DNA, 15 bp, Homo sapiens
ccccctgcacatcgc

SEQ ID NO: 1271771 - DNA, 15 bp, Homo sapiens
gccccctgcacatcg

SEQ ID NO: 1271772 - DNA, 15 bp, Homo sapiens
tgccccctgcacatc

SEQ ID NO: 1271773 - DNA, 15 bp, Homo sapiens
ctgccccctgcacat

SEQ ID NO: 1271774 - DNA, 15 bp, Homo sapiens
tctgccccctgcaca

SEQ ID NO: 1271775 - DNA, 15 bp, Homo sapiens
gtctgccccctgcac

SEQ ID NO: 1271776 - DNA, 15 bp, Homo sapiens
tgtctgccccctgca

SEQ ID NO: 1271777 - DNA, 15 bp, Homo sapiens
ctgtctgccccctgc

SEQ ID NO: 1271778 - DNA, 15 bp, Homo sapiens
actgtctgccccctg

SEQ ID NO: 1271779 - DNA, 15 bp, Homo sapiens
cactgtctgccccct

SEQ ID NO: 1271780 - DNA, 15 bp, Homo sapiens
acactgtctgccccc

SEQ ID NO: 1271781 - DNA, 15 bp, Homo sapiens
gacactgtctgcccc

SEQ ID NO: 1271782 - DNA, 15 bp, Homo sapiens
agacactgtctgccc

SEQ ID NO: 1271783 - DNA, 15 bp, Homo sapiens
gagacactgtctgcc

SEQ ID NO: 1271784 - DNA, 15 bp, Homo sapiens
ggagacactgtctgc

SEQ ID NO: 1271785 - DNA, 15 bp, Homo sapiens
tggagacactgtctg

SEQ ID NO: 1271786 - DNA, 15 bp, Homo sapiens
ttggagacactgtct

SEQ ID NO: 1271787 - DNA, 15 bp, Homo sapiens
cttggagacactgtc

SEQ ID NO: 1271788 - DNA, 15 bp, Homo sapiens
gcttggagacactgt

SEQ ID NO: 1271789 - DNA, 15 bp, Homo sapiens
agcttggagacactg

SEQ ID NO: 1271790 - DNA, 15 bp, Homo sapiens
gagcttggagacact

SEQ ID NO: 1271791 - DNA, 15 bp, Homo sapiens
ggagcttggagacac

SEQ ID NO: 1271792 - DNA, 15 bp, Homo sapiens
gggagcttggagaca

SEQ ID NO: 1271793 - DNA, 15 bp, Homo sapiens
agggagcttggagac

SEQ ID NO: 1271794 - DNA, 15 bp, Homo sapiens
tagggagcttggaga

SEQ ID NO: 1271795 - DNA, 15 bp, Homo sapiens
gtagggagcttggag

SEQ ID NO: 1271796 - DNA, 15 bp, Homo sapiens
tgtagggagcttgga

SEQ ID NO: 1271797 - DNA, 15 bp, Homo sapiens
gtgtagggagcttgg

SEQ ID NO: 1271798 - DNA, 15 bp, Homo sapiens
tgtgtagggagcttg

SEQ ID NO: 1271799 - DNA, 15 bp, Homo sapiens
gtgtgtagggagctt

SEQ ID NO: 1271800 - DNA, 15 bp, Homo sapiens
tgtgtgtagggagct

SEQ ID NO: 1271801 - DNA, 15 bp, Homo sapiens
atgtgtgtagggagc

SEQ ID NO: 1271802 - DNA, 15 bp, Homo sapiens
catgtgtgtagggag

SEQ ID NO: 1271803 - DNA, 15 bp, Homo sapiens
gcatgtgtgtaggga

SEQ ID NO: 1271804 - DNA, 15 bp, Homo sapiens
ggcatgtgtgtaggg

SEQ ID NO: 1271805 - DNA, 15 bp, Homo sapiens
aggcatgtgtgtagg

SEQ ID NO: 1271806 - DNA, 15 bp, Homo sapiens
aaggcatgtgtgtag

SEQ ID NO: 1271807 - DNA, 15 bp, Homo sapiens
gaaggcatgtgtgta

SEQ ID NO: 1271808 - DNA, 15 bp, Homo sapiens
ggaaggcatgtgtgt

SEQ ID NO: 1271809 - DNA, 15 bp, Homo sapiens
gggaaggcatgtgtg

SEQ ID NO: 1271810 - DNA, 15 bp, Homo sapiens
tgggaaggcatgtgt

SEQ ID NO: 1271811 - DNA, 15 bp, Homo sapiens
gtgggaaggcatgtg

SEQ ID NO: 1271812 - DNA, 15 bp, Homo sapiens
tgtgggaaggcatgt

SEQ ID NO: 1271813 - DNA, 15 bp, Homo sapiens
ctgtgggaaggcatg

SEQ ID NO: 1271814 - DNA, 15 bp, Homo sapiens
actgtgggaaggcat

SEQ ID NO: 1271815 - DNA, 15 bp, Homo sapiens
aactgtgggaaggca

SEQ ID NO: 1271816 - DNA, 15 bp, Homo sapiens
aaactgtgggaaggc

SEQ ID NO: 1271817 - DNA, 15 bp, Homo sapiens
caaactgtgggaagg

SEQ ID NO: 1271818 - DNA, 15 bp, Homo sapiens
gcaaactgtgggaag

SEQ ID NO: 1271819 - DNA, 15 bp, Homo sapiens
ggcaaactgtgggaa

SEQ ID NO: 1271820 - DNA, 15 bp, Homo sapiens
gggcaaactgtggga

SEQ ID NO: 1271821 - DNA, 15 bp, Homo sapiens
agggcaaactgtggg

SEQ ID NO: 1271822 - DNA, 15 bp, Homo sapiens
aagggcaaactgtgg

SEQ ID NO: 1271823 - DNA, 15 bp, Homo sapiens
aaagggcaaactgtg

SEQ ID NO: 1271824 - DNA, 15 bp, Homo sapiens
gaaagggcaaactgt

SEQ ID NO: 1271825 - DNA, 15 bp, Homo sapiens
agaaagggcaaactg

SEQ ID NO: 1271826 - DNA, 15 bp, Homo sapiens
aagaaagggcaaact

SEQ ID NO: 1271827 - DNA, 15 bp, Homo sapiens
caagaaagggcaaac

SEQ ID NO: 1271828 - DNA, 15 bp, Homo sapiens
tcaagaaagggcaaa

SEQ ID NO: 1271829 - DNA, 15 bp, Homo sapiens
gtcaagaaagggcaa

SEQ ID NO: 1271830 - DNA, 15 bp, Homo sapiens
ggtcaagaaagggca

SEQ ID NO: 1271831 - DNA, 15 bp, Homo sapiens
gggtcaagaaagggc

SEQ ID NO: 1271832 - DNA, 15 bp, Homo sapiens
ggggtcaagaaaggg

SEQ ID NO: 1271833 - DNA, 15 bp, Homo sapiens
tggggtcaagaaagg

SEQ ID NO: 1271834 - DNA, 15 bp, Homo sapiens
ctggggtcaagaaag

SEQ ID NO: 1271835 - DNA, 15 bp, Homo sapiens
tctggggtcaagaaa

SEQ ID NO: 1271836 - DNA, 15 bp, Homo sapiens
ttctggggtcaagaa

SEQ ID NO: 1271837 - DNA, 15 bp, Homo sapiens
cttctggggtcaaga

SEQ ID NO: 1271838 - DNA, 15 bp, Homo sapiens
gcttctggggtcaag

SEQ ID NO: 1271839 - DNA, 15 bp, Homo sapiens
tgcttctggggtcaa

SEQ ID NO: 1271840 - DNA, 15 bp, Homo sapiens
atgcttctggggtca

SEQ ID NO: 1271841 - DNA, 15 bp, Homo sapiens
gatgcttctggggtc

SEQ ID NO: 1271842 - DNA, 15 bp, Homo sapiens
tgatgcttctggggt

SEQ ID NO: 1271843 - DNA, 15 bp, Homo sapiens
ctgatgcttctgggg

SEQ ID NO: 1271844 - DNA, 15 bp, Homo sapiens
cctgatgcttctggg

SEQ ID NO: 1271845 - DNA, 15 bp, Homo sapiens
gcctgatgcttctgg

SEQ ID NO: 1271846 - DNA, 15 bp, Homo sapiens
ggcctgatgcttctg

SEQ ID NO: 1271847 - DNA, 15 bp, Homo sapiens
gggcctgatgcttct

SEQ ID NO: 1271848 - DNA, 15 bp, Homo sapiens
ggggcctgatgcttc

SEQ ID NO: 1271849 - DNA, 15 bp, Homo sapiens
aggggcctgatgctt

SEQ ID NO: 1271850 - DNA, 15 bp, Homo sapiens
aaggggcctgatgct

SEQ ID NO: 1271851 - DNA, 15 bp, Homo sapiens
gaaggggcctgatgc

SEQ ID NO: 1271852 - DNA, 15 bp, Homo sapiens
tgaaggggcctgatg

SEQ ID NO: 1271853 - DNA, 15 bp, Homo sapiens
gtgaaggggcctgat

SEQ ID NO: 1271854 - DNA, 15 bp, Homo sapiens
ggtgaaggggcctga

SEQ ID NO: 1271855 - DNA, 15 bp, Homo sapiens
gggtgaaggggcctg

SEQ ID NO: 1271856 - DNA, 15 bp, Homo sapiens
agggtgaaggggcct

SEQ ID NO: 1271857 - DNA, 15 bp, Homo sapiens
gagggtgaaggggcc

SEQ ID NO: 1271858 - DNA, 15 bp, Homo sapiens
cgagggtgaaggggc

SEQ ID NO: 1271859 - DNA, 15 bp, Homo sapiens
tcgagggtgaagggg

SEQ ID NO: 1271860 - DNA, 15 bp, Homo sapiens
ctcgagggtgaaggg

SEQ ID NO: 1271861 - DNA, 15 bp, Homo sapiens
cctcgagggtgaagg

SEQ ID NO: 1271862 - DNA, 15 bp, Homo sapiens
ccctcgagggtgaag

SEQ ID NO: 1271863 - DNA, 15 bp, Homo sapiens
gccctcgagggtgaa

SEQ ID NO: 1271864 - DNA, 15 bp, Homo sapiens
ggccctcgagggtga

SEQ ID NO: 1271865 - DNA, 15 bp, Homo sapiens
tggccctcgagggtg

SEQ ID NO: 1271866 - DNA, 15 bp, Homo sapiens
gtggccctcgagggt

SEQ ID NO: 1271867 - DNA, 15 bp, Homo sapiens
agtggccctcgaggg

SEQ ID NO: 1271868 - DNA, 15 bp, Homo sapiens
tagtggccctcgagg

SEQ ID NO: 1271869 - DNA, 15 bp, Homo sapiens
atagtggccctcgag

SEQ ID NO: 1271870 - DNA, 15 bp, Homo sapiens
gatagtggccctcga

SEQ ID NO: 1271871 - DNA, 15 bp, Homo sapiens
tgatagtggccctcg

SEQ ID NO: 1271872 - DNA, 15 bp, Homo sapiens
ctgatagtggccctc

SEQ ID NO: 1271873 - DNA, 15 bp, Homo sapiens
cctgatagtggccct

SEQ ID NO: 1271874 - DNA, 15 bp, Homo sapiens
tcctgatagtggccc

SEQ ID NO: 1271875 - DNA, 15 bp, Homo sapiens
ctcctgatagtggcc

SEQ ID NO: 1271876 - DNA, 15 bp, Homo sapiens
actcctgatagtggc

SEQ ID NO: 1271877 - DNA, 15 bp, Homo sapiens
aactcctgatagtgg

SEQ ID NO: 1271878 - DNA, 15 bp, Homo sapiens
aaactcctgatagtg

SEQ ID NO: 1271879 - DNA, 15 bp, Homo sapiens
caaactcctgatagt

SEQ ID NO: 1271880 - DNA, 15 bp, Homo sapiens
tcaaactcctgatag

SEQ ID NO: 1271881 - DNA, 15 bp, Homo sapiens
ttcaaactcctgata

SEQ ID NO: 1271882 - DNA, 15 bp, Homo sapiens
attcaaactcctgat

SEQ ID NO: 1271883 - DNA, 15 bp, Homo sapiens
aattcaaactcctga

SEQ ID NO: 1271884 - DNA, 15 bp, Homo sapiens
taattcaaactcctg

SEQ ID NO: 1271885 - DNA, 15 bp, Homo sapiens
ttaattcaaactcct

SEQ ID NO: 1271886 - DNA, 15 bp, Homo sapiens
attaattcaaactcc

SEQ ID NO: 1271887 - DNA, 15 bp, Homo sapiens
cattaattcaaactc

SEQ ID NO: 1271888 - DNA, 15 bp, Homo sapiens
ccattaattcaaact

SEQ ID NO: 1271889 - DNA, 15 bp, Homo sapiens
gccattaattcaaac

SEQ ID NO: 1271890 - DNA, 15 bp, Homo sapiens
tgccattaattcaaa

SEQ ID NO: 1271891 - DNA, 15 bp, Homo sapiens
ttgccattaattcaa

SEQ ID NO: 1271892 - DNA, 15 bp, Homo sapiens
attgccattaattca

SEQ ID NO: 1271893 - DNA, 15 bp, Homo sapiens
gattgccattaattc

SEQ ID NO: 1271894 - DNA, 15 bp, Homo sapiens
tgattgccattaatt

SEQ ID NO: 1271895 - DNA, 15 bp, Homo sapiens
gtgattgccattaat

SEQ ID NO: 1271896 - DNA, 15 bp, Homo sapiens
ggtgattgccattaa

SEQ ID NO: 1271897 - DNA, 15 bp, Homo sapiens
tggtgattgccatta

SEQ ID NO: 1271898 - DNA, 15 bp, Homo sapiens
atggtgattgccatt

SEQ ID NO: 1271899 - DNA, 15 bp, Homo sapiens
catggtgattgccat

SEQ ID NO: 1271900 - DNA, 15 bp, Homo sapiens
gcatggtgattgcca

SEQ ID NO: 1271901 - DNA, 15 bp, Homo sapiens
tgcatggtgattgcc

SEQ ID NO: 1271902 - DNA, 15 bp, Homo sapiens
gtgcatggtgattgc

SEQ ID NO: 1271903 - DNA, 15 bp, Homo sapiens
tgtgcatggtgattg

SEQ ID NO: 1271904 - DNA, 15 bp, Homo sapiens
ctgtgcatggtgatt

SEQ ID NO: 1271905 - DNA, 15 bp, Homo sapiens
cctgtgcatggtgat

SEQ ID NO: 1271906 - DNA, 15 bp, Homo sapiens
ccctgtgcatggtga

SEQ ID NO: 1271907 - DNA, 15 bp, Homo sapiens
tccctgtgcatggtg

SEQ ID NO: 1271908 - DNA, 15 bp, Homo sapiens
ttccctgtgcatggt

SEQ ID NO: 1271909 - DNA, 15 bp, Homo sapiens
cttccctgtgcatgg

SEQ ID NO: 1271910 - DNA, 15 bp, Homo sapiens
ccttccctgtgcatg

SEQ ID NO: 1271911 - DNA, 15 bp, Homo sapiens
gccttccctgtgcat

SEQ ID NO: 1271912 - DNA, 15 bp, Homo sapiens
agccttccctgtgca

SEQ ID NO: 1271913 - DNA, 15 bp, Homo sapiens
cagccttccctgtgc

SEQ ID NO: 1271914 - DNA, 15 bp, Homo sapiens
acagccttccctgtg

SEQ ID NO: 1271915 - DNA, 15 bp, Homo sapiens
cacagccttccctgt

SEQ ID NO: 1271916 - DNA, 15 bp, Homo sapiens
ccacagccttccctg

SEQ ID NO: 1271917 - DNA, 15 bp, Homo sapiens
tccacagccttccct

SEQ ID NO: 1271918 - DNA, 15 bp, Homo sapiens
ttccacagccttccc

SEQ ID NO: 1271919 - DNA, 15 bp, Homo sapiens
attccacagccttcc

SEQ ID NO: 1271920 - DNA, 15 bp, Homo sapiens
aattccacagccttc

SEQ ID NO: 1271921 - DNA, 15 bp, Homo sapiens
gaattccacagcctt

SEQ ID NO: 1271922 - DNA, 15 bp, Homo sapiens
agaattccacagcct

SEQ ID NO: 1271923 - DNA, 15 bp, Homo sapiens
cagaattccacagcc

SEQ ID NO: 1271924 - DNA, 15 bp, Homo sapiens
tcagaattccacagc

SEQ ID NO: 1271925 - DNA, 15 bp, Homo sapiens
gtcagaattccacag

SEQ ID NO: 1271926 - DNA, 15 bp, Homo sapiens
tgtcagaattccaca

SEQ ID NO: 1271927 - DNA, 15 bp, Homo sapiens
atgtcagaattccac

SEQ ID NO: 1271928 - DNA, 15 bp, Homo sapiens
tatgtcagaattcca

SEQ ID NO: 1271929 - DNA, 15 bp, Homo sapiens
ttatgtcagaattcc

SEQ ID NO: 1271930 - DNA, 15 bp, Homo sapiens
tttatgtcagaattc

SEQ ID NO: 1271931 - DNA, 15 bp, Homo sapiens
ttttatgtcagaatt

SEQ ID NO: 1271932 - DNA, 15 bp, Homo sapiens
tttttatgtcagaat

SEQ ID NO: 1271933 - DNA, 15 bp, Homo sapiens
gtttttatgtcagaa

SEQ ID NO: 1271934 - DNA, 15 bp, Homo sapiens
tgtttttatgtcaga

SEQ ID NO: 1271935 - DNA, 15 bp, Homo sapiens
gtgtttttatgtcag

SEQ ID NO: 1271936 - DNA, 15 bp, Homo sapiens
agtgtttttatgtca

SEQ ID NO: 1271937 - DNA, 15 bp, Homo sapiens
aagtgtttttatgtc

SEQ ID NO: 1271938 - DNA, 15 bp, Homo sapiens
taagtgtttttatgt

SEQ ID NO: 1271939 - DNA, 15 bp, Homo sapiens
ctaagtgtttttatg

SEQ ID NO: 1271940 - DNA, 15 bp, Homo sapiens
actaagtgtttttat

SEQ ID NO: 1271941 - DNA, 15 bp, Homo sapiens
cactaagtgttttta

SEQ ID NO: 1271942 - DNA, 15 bp, Homo sapiens
ccactaagtgttttt

SEQ ID NO: 1271943 - DNA, 15 bp, Homo sapiens
tccactaagtgtttt

SEQ ID NO: 1271944 - DNA, 15 bp, Homo sapiens
ctccactaagtgttt

SEQ ID NO: 1271945 - DNA, 15 bp, Homo sapiens
cctccactaagtgtt

SEQ ID NO: 1271946 - DNA, 15 bp, Homo sapiens
ccctccactaagtgt

SEQ ID NO: 1271947 - DNA, 15 bp, Homo sapiens
gccctccactaagtg

SEQ ID NO: 1271948 - DNA, 15 bp, Homo sapiens
agccctccactaagt

SEQ ID NO: 1271949 - DNA, 15 bp, Homo sapiens
aagccctccactaag

SEQ ID NO: 1271950 - DNA, 15 bp, Homo sapiens
caagccctccactaa

SEQ ID NO: 1271951 - DNA, 15 bp, Homo sapiens
ccaagccctccacta

SEQ ID NO: 1271952 - DNA, 15 bp, Homo sapiens
tccaagccctccact

SEQ ID NO: 1271953 - DNA, 15 bp, Homo sapiens
ttccaagccctccac

SEQ ID NO: 1271954 - DNA, 15 bp, Homo sapiens
tttccaagccctcca

SEQ ID NO: 1271955 - DNA, 15 bp, Homo sapiens
ttttccaagccctcc

SEQ ID NO: 1271956 - DNA, 15 bp, Homo sapiens
tttttccaagccctc

SEQ ID NO: 1271957 - DNA, 15 bp, Homo sapiens
ctttttccaagccct

SEQ ID NO: 1271958 - DNA, 15 bp, Homo sapiens
actttttccaagccc

SEQ ID NO: 1271959 - DNA, 15 bp, Homo sapiens
gactttttccaagcc

SEQ ID NO: 1271960 - DNA, 15 bp, Homo sapiens
agactttttccaagc

SEQ ID NO: 1271961 - DNA, 15 bp, Homo sapiens
tagactttttccaag

SEQ ID NO: 1271962 - DNA, 15 bp, Homo sapiens
ctagactttttccaa

SEQ ID NO: 1271963 - DNA, 15 bp, Homo sapiens
actagactttttcca

SEQ ID NO: 1271964 - DNA, 15 bp, Homo sapiens
tactagactttttcc

SEQ ID NO: 1271965 - DNA, 15 bp, Homo sapiens
ctactagactttttc

SEQ ID NO: 1271966 - DNA, 15 bp, Homo sapiens
cctactagacttttt

SEQ ID NO: 1271967 - DNA, 15 bp, Homo sapiens
tcctactagactttt

SEQ ID NO: 1271968 - DNA, 15 bp, Homo sapiens
ctcctactagacttt

SEQ ID NO: 1271969 - DNA, 15 bp, Homo sapiens
gctcctactagactt

SEQ ID NO: 1271970 - DNA, 15 bp, Homo sapiens
tgctcctactagact

SEQ ID NO: 1271971 - DNA, 15 bp, Homo sapiens
ttgctcctactagac

SEQ ID NO: 1271972 - DNA, 15 bp, Homo sapiens
cttgctcctactaga

SEQ ID NO: 1271973 - DNA, 15 bp, Homo sapiens
tcttgctcctactag

SEQ ID NO: 1271974 - DNA, 15 bp, Homo sapiens
gtcttgctcctacta

SEQ ID NO: 1271975 - DNA, 15 bp, Homo sapiens
cgtcttgctcctact

SEQ ID NO: 1271976 - DNA, 15 bp, Homo sapiens
gcgtcttgctcctac

SEQ ID NO: 1271977 - DNA, 15 bp, Homo sapiens
tgcgtcttgctccta

SEQ ID NO: 1271978 - DNA, 15 bp, Homo sapiens
ttgcgtcttgctcct

SEQ ID NO: 1271979 - DNA, 15 bp, Homo sapiens
cttgcgtcttgctcc

SEQ ID NO: 1271980 - DNA, 15 bp, Homo sapiens
gcttgcgtcttgctc

SEQ ID NO: 1271981 - DNA, 15 bp, Homo sapiens
agcttgcgtcttgct

SEQ ID NO: 1271982 - DNA, 15 bp, Homo sapiens
cagcttgcgtcttgc

SEQ ID NO: 1271983 - DNA, 15 bp, Homo sapiens
ccagcttgcgtcttg

SEQ ID NO: 1271984 - DNA, 15 bp, Homo sapiens
tccagcttgcgtctt

SEQ ID NO: 1271985 - DNA, 15 bp, Homo sapiens
gtccagcttgcgtct

SEQ ID NO: 1271986 - DNA, 15 bp, Homo sapiens
agtccagcttgcgtc

SEQ ID NO: 1271987 - DNA, 15 bp, Homo sapiens
tagtccagcttgcgt

SEQ ID NO: 1271988 - DNA, 15 bp, Homo sapiens
ttagtccagcttgcg

SEQ ID NO: 1271989 - DNA, 15 bp, Homo sapiens
attagtccagcttgc

SEQ ID NO: 1271990 - DNA, 15 bp, Homo sapiens
aattagtccagcttg

SEQ ID NO: 1271991 - DNA, 15 bp, Homo sapiens
taattagtccagctt

SEQ ID NO: 1271992 - DNA, 15 bp, Homo sapiens
ataattagtccagct

SEQ ID NO: 1271993 - DNA, 15 bp, Homo sapiens
gataattagtccagc

SEQ ID NO: 1271994 - DNA, 15 bp, Homo sapiens
agataattagtccag

SEQ ID NO: 1271995 - DNA, 15 bp, Homo sapiens
tagataattagtcca

SEQ ID NO: 1271996 - DNA, 15 bp, Homo sapiens
ttagataattagtcc

SEQ ID NO: 1271997 - DNA, 15 bp, Homo sapiens
tttagataattagtc

SEQ ID NO: 1271998 - DNA, 15 bp, Homo sapiens
ttttagataattagt

SEQ ID NO: 1271999 - DNA, 15 bp, Homo sapiens
gttttagataattag

SEQ ID NO: 1272000 - DNA, 15 bp, Homo sapiens
tgttttagataatta

SEQ ID NO: 1272001 - DNA, 15 bp, Homo sapiens
ttgttttagataatt

SEQ ID NO: 1272002 - DNA, 15 bp, Homo sapiens
cttgttttagataat

SEQ ID NO: 1272003 - DNA, 15 bp, Homo sapiens
tcttgttttagataa

SEQ ID NO: 1272004 - DNA, 15 bp, Homo sapiens
ctcttgttttagata

SEQ ID NO: 1272005 - DNA, 15 bp, Homo sapiens
tctcttgttttagat

SEQ ID NO: 1272006 - DNA, 15 bp, Homo sapiens
gtctcttgttttaga

SEQ ID NO: 1272007 - DNA, 15 bp, Homo sapiens
ggtctcttgttttag

SEQ ID NO: 1272008 - DNA, 15 bp, Homo sapiens
aggtctcttgtttta

SEQ ID NO: 1272009 - DNA, 15 bp, Homo sapiens
caggtctcttgtttt

SEQ ID NO: 1272010 - DNA, 15 bp, Homo sapiens
ccaggtctcttgttt

SEQ ID NO: 1272011 - DNA, 15 bp, Homo sapiens
accaggtctcttgtt

SEQ ID NO: 1272012 - DNA, 15 bp, Homo sapiens
aaccaggtctcttgt

SEQ ID NO: 1272013 - DNA, 15 bp, Homo sapiens
aaaccaggtctcttg

SEQ ID NO: 1272014 - DNA, 15 bp, Homo sapiens
caaaccaggtctctt

SEQ ID NO: 1272015 - DNA, 15 bp, Homo sapiens
ccaaaccaggtctct

SEQ ID NO: 1272016 - DNA, 15 bp, Homo sapiens
cccaaaccaggtctc

SEQ ID NO: 1272017 - DNA, 15 bp, Homo sapiens
ccccaaaccaggtct

SEQ ID NO: 1272018 - DNA, 15 bp, Homo sapiens
tccccaaaccaggtc

SEQ ID NO: 1272019 - DNA, 15 bp, Homo sapiens
atccccaaaccaggt

SEQ ID NO: 1272020 - DNA, 15 bp, Homo sapiens
gatccccaaaccagg

SEQ ID NO: 1272021 - DNA, 15 bp, Homo sapiens
agatccccaaaccag

SEQ ID NO: 1272022 - DNA, 15 bp, Homo sapiens
aagatccccaaacca

SEQ ID NO: 1272023 - DNA, 15 bp, Homo sapiens
taagatccccaaacc

SEQ ID NO: 1272024 - DNA, 15 bp, Homo sapiens
ttaagatccccaaac

SEQ ID NO: 1272025 - DNA, 15 bp, Homo sapiens
attaagatccccaaa

SEQ ID NO: 1272026 - DNA, 15 bp, Homo sapiens
cattaagatccccaa

SEQ ID NO: 1272027 - DNA, 15 bp, Homo sapiens
acattaagatcccca

SEQ ID NO: 1272028 - DNA, 15 bp, Homo sapiens
aacattaagatcccc

SEQ ID NO: 1272029 - DNA, 15 bp, Homo sapiens
gaacattaagatccc

SEQ ID NO: 1272030 - DNA, 15 bp, Homo sapiens
agaacattaagatcc

SEQ ID NO: 1272031 - DNA, 15 bp, Homo sapiens
gagaacattaagatc

SEQ ID NO: 1272032 - DNA, 15 bp, Homo sapiens
tgagaacattaagat

SEQ ID NO: 1272033 - DNA, 15 bp, Homo sapiens
ttgagaacattaaga

SEQ ID NO: 1272034 - DNA, 15 bp, Homo sapiens
tttgagaacattaag

SEQ ID NO: 1272035 - DNA, 15 bp, Homo sapiens
ttttgagaacattaa

SEQ ID NO: 1272036 - DNA, 15 bp, Homo sapiens
tttttgagaacatta

SEQ ID NO: 1272037 - DNA, 15 bp, Homo sapiens
ttttttgagaacatt

SEQ ID NO: 1272038 - DNA, 15 bp, Homo sapiens
cttttttgagaacat

SEQ ID NO: 1272039 - DNA, 15 bp, Homo sapiens
tcttttttgagaaca

SEQ ID NO: 1272040 - DNA, 15 bp, Homo sapiens
ttcttttttgagaac

SEQ ID NO: 1272041 - DNA, 15 bp, Homo sapiens
tttcttttttgagaa

SEQ ID NO: 1272042 - DNA, 15 bp, Homo sapiens
attttcttttttgag

SEQ ID NO: 1272043 - DNA, 15 bp, Homo sapiens
aattttcttttttga

SEQ ID NO: 1272044 - DNA, 15 bp, Homo sapiens
taattttcttttttg

SEQ ID NO: 1272045 - DNA, 15 bp, Homo sapiens
ataattttctttttt

SEQ ID NO: 1272046 - DNA, 15 bp, Homo sapiens
aataattttcttttt

SEQ ID NO: 1272047 - DNA, 15 bp, Homo sapiens
taataattttctttt

SEQ ID NO: 1272048 - DNA, 15 bp, Homo sapiens
ataataattttcttt

SEQ ID NO: 1272049 - DNA, 15 bp, Homo sapiens
aataataattttctt

SEQ ID NO: 1272050 - DNA, 15 bp, Homo sapiens
taataataattttct

SEQ ID NO: 1272051 - DNA, 15 bp, Homo sapiens
ataataataattttc

SEQ ID NO: 1272052 - DNA, 15 bp, Homo sapiens
aataataataatttt

SEQ ID NO: 1272053 - DNA, 15 bp, Homo sapiens
aaataataataattt

SEQ ID NO: 1272054 - DNA, 15 bp, Homo sapiens
aaaataataataatt

SEQ ID NO: 1272055 - DNA, 15 bp, Homo sapiens
aaaaataataataat

SEQ ID NO: 1272056 - DNA, 15 bp, Homo sapiens
gaaaaataataataa

SEQ ID NO: 1272057 - DNA, 15 bp, Homo sapiens
tgaaaaataataata

SEQ ID NO: 1272058 - DNA, 15 bp, Homo sapiens
atgaaaaataataat

SEQ ID NO: 1272059 - DNA, 15 bp, Homo sapiens
aatgaaaaataataa

SEQ ID NO: 1272060 - DNA, 15 bp, Homo sapiens
aaatgaaaaataata

SEQ ID NO: 1272061 - DNA, 15 bp, Homo sapiens
aaaatgaaaaataat

SEQ ID NO: 1272062 - DNA, 15 bp, Homo sapiens
caaaatgaaaaataa

SEQ ID NO: 1272063 - DNA, 15 bp, Homo sapiens
gcaaaatgaaaaata

SEQ ID NO: 1272064 - DNA, 15 bp, Homo sapiens
tgcaaaatgaaaaat

SEQ ID NO: 1272065 - DNA, 15 bp, Homo sapiens
gtgcaaaatgaaaaa

SEQ ID NO: 1272066 - DNA, 15 bp, Homo sapiens
agtgcaaaatgaaaa

SEQ ID NO: 1272067 - DNA, 15 bp, Homo sapiens
aagtgcaaaatgaaa

SEQ ID NO: 1272068 - DNA, 15 bp, Homo sapiens
aaagtgcaaaatgaa

SEQ ID NO: 1272069 - DNA, 15 bp, Homo sapiens
caaagtgcaaaatga

SEQ ID NO: 1272070 - DNA, 15 bp, Homo sapiens
acaaagtgcaaaatg

SEQ ID NO: 1272071 - DNA, 15 bp, Homo sapiens
cacaaagtgcaaaat

SEQ ID NO: 1272072 - DNA, 15 bp, Homo sapiens
gcacaaagtgcaaaa

SEQ ID NO: 1272073 - DNA, 15 bp, Homo sapiens
ggcacaaagtgcaaa

SEQ ID NO: 1272074 - DNA, 15 bp, Homo sapiens
tggcacaaagtgcaa

SEQ ID NO: 1272075 - DNA, 15 bp, Homo sapiens
atggcacaaagtgca

SEQ ID NO: 1272076 - DNA, 15 bp, Homo sapiens
tatggcacaaagtgc

SEQ ID NO: 1272077 - DNA, 15 bp, Homo sapiens
ttatggcacaaagtg

SEQ ID NO: 1272078 - DNA, 15 bp, Homo sapiens
tttatggcacaaagt

SEQ ID NO: 1272079 - DNA, 15 bp, Homo sapiens
ttttatggcacaaag

SEQ ID NO: 1272080 - DNA, 15 bp, Homo sapiens
gttttatggcacaaa

SEQ ID NO: 1272081 - DNA, 15 bp, Homo sapiens
tgttttatggcacaa

SEQ ID NO: 1272082 - DNA, 15 bp, Homo sapiens
atgttttatggcaca

SEQ ID NO: 1272083 - DNA, 15 bp, Homo sapiens
aatgttttatggcac

SEQ ID NO: 1272084 - DNA, 15 bp, Homo sapiens
aaatgttttatggca

SEQ ID NO: 1272085 - DNA, 15 bp, Homo sapiens
aaaatgttttatggc

SEQ ID NO: 1272086 - DNA, 15 bp, Homo sapiens
gaaaatgttttatgg

SEQ ID NO: 1272087 - DNA, 15 bp, Homo sapiens
tgaaaatgttttatg

SEQ ID NO: 1272088 - DNA, 15 bp, Homo sapiens
ttgaaaatgttttat

SEQ ID NO: 1272089 - DNA, 15 bp, Homo sapiens
gttgaaaatgtttta

SEQ ID NO: 1272090 - DNA, 15 bp, Homo sapiens
tgttgaaaatgtttt

SEQ ID NO: 1272091 - DNA, 15 bp, Homo sapiens
ttgttgaaaatgttt

SEQ ID NO: 1272092 - DNA, 15 bp, Homo sapiens
tttgttgaaaatgtt

SEQ ID NO: 1272093 - DNA, 15 bp, Homo sapiens
ttttgttgaaaatgt

SEQ ID NO: 1272094 - DNA, 15 bp, Homo sapiens
gttttgttgaaaatg

SEQ ID NO: 1272095 - DNA, 15 bp, Homo sapiens
tgttttgttgaaaat

SEQ ID NO: 1272096 - DNA, 15 bp, Homo sapiens
atgttttgttgaaaa

SEQ ID NO: 1272097 - DNA, 15 bp, Homo sapiens
tatgttttgttgaaa

SEQ ID NO: 1272098 - DNA, 15 bp, Homo sapiens
ctatgttttgttgaa

SEQ ID NO: 1272099 - DNA, 15 bp, Homo sapiens
tctatgttttgttga

SEQ ID NO: 1272100 - DNA, 15 bp, Homo sapiens
ttctatgttttgttg

SEQ ID NO: 1272101 - DNA, 15 bp, Homo sapiens
attctatgttttgtt

SEQ ID NO: 1272102 - DNA, 15 bp, Homo sapiens
gattctatgttttgt

SEQ ID NO: 1272103 - DNA, 15 bp, Homo sapiens
agattctatgttttg

SEQ ID NO: 1272104 - DNA, 15 bp, Homo sapiens
gagattctatgtttt

SEQ ID NO: 1272105 - DNA, 15 bp, Homo sapiens
tgagattctatgttt

SEQ ID NO: 1272106 - DNA, 15 bp, Homo sapiens
atgagattctatgtt

SEQ ID NO: 1272107 - DNA, 15 bp, Homo sapiens
aatgagattctatgt

SEQ ID NO: 1272108 - DNA, 15 bp, Homo sapiens
aaatgagattctatg

SEQ ID NO: 1272109 - DNA, 15 bp, Homo sapiens
gaaatgagattctat

SEQ ID NO: 1272110 - DNA, 15 bp, Homo sapiens
agaaatgagattcta

SEQ ID NO: 1272111 - DNA, 15 bp, Homo sapiens
aagaaatgagattct

SEQ ID NO: 1272112 - DNA, 15 bp, Homo sapiens
aaagaaatgagattc

SEQ ID NO: 1272113 - DNA, 15 bp, Homo sapiens
aaaagaaatgagatt

SEQ ID NO: 1272114 - DNA, 15 bp, Homo sapiens
caaaagaaatgagat

SEQ ID NO: 1272115 - DNA, 15 bp, Homo sapiens
tcaaaagaaatgaga

SEQ ID NO: 1272116 - DNA, 15 bp, Homo sapiens
ctcaaaagaaatgag

SEQ ID NO: 1272117 - DNA, 15 bp, Homo sapiens
cctcaaaagaaatga

SEQ ID NO: 1272118 - DNA, 15 bp, Homo sapiens
ccctcaaaagaaatg

SEQ ID NO: 1272119 - DNA, 15 bp, Homo sapiens
tccctcaaaagaaat

SEQ ID NO: 1272120 - DNA, 15 bp, Homo sapiens
ttccctcaaaagaaa

SEQ ID NO: 1272121 - DNA, 15 bp, Homo sapiens
tttccctcaaaagaa

SEQ ID NO: 1272122 - DNA, 15 bp, Homo sapiens
ttttccctcaaaaga

SEQ ID NO: 1272123 - DNA, 15 bp, Homo sapiens
attttccctcaaaag

SEQ ID NO: 1272124 - DNA, 15 bp, Homo sapiens
cattttccctcaaaa

SEQ ID NO: 1272125 - DNA, 15 bp, Homo sapiens
tcattttccctcaaa

SEQ ID NO: 1272126 - DNA, 15 bp, Homo sapiens
atcattttccctcaa

SEQ ID NO: 1272127 - DNA, 15 bp, Homo sapiens
aatcattttccctca

SEQ ID NO: 1272128 - DNA, 15 bp, Homo sapiens
caatcattttccctc

SEQ ID NO: 1272129 - DNA, 15 bp, Homo sapiens
ccaatcattttccct

SEQ ID NO: 1272130 - DNA, 15 bp, Homo sapiens
cccaatcattttccc

SEQ ID NO: 1272131 - DNA, 15 bp, Homo sapiens
tcccaatcattttcc

SEQ ID NO: 1272132 - DNA, 15 bp, Homo sapiens
ctcccaatcattttc

SEQ ID NO: 1272133 - DNA, 15 bp, Homo sapiens
tctcccaatcatttt

SEQ ID NO: 1272134 - DNA, 15 bp, Homo sapiens
gtctcccaatcattt

SEQ ID NO: 1272135 - DNA, 15 bp, Homo sapiens
ggtctcccaatcatt

SEQ ID NO: 1272136 - DNA, 15 bp, Homo sapiens
tggtctcccaatcat

SEQ ID NO: 1272137 - DNA, 15 bp, Homo sapiens
ctggtctcccaatca

SEQ ID NO: 1272138 - DNA, 15 bp, Homo sapiens
gctggtctcccaatc

SEQ ID NO: 1272139 - DNA, 15 bp, Homo sapiens
agctggtctcccaat

SEQ ID NO: 1272140 - DNA, 15 bp, Homo sapiens
gagctggtctcccaa

SEQ ID NO: 1272141 - DNA, 15 bp, Homo sapiens
tgagctggtctccca

SEQ ID NO: 1272142 - DNA, 15 bp, Homo sapiens
atgagctggtctccc

SEQ ID NO: 1272143 - DNA, 15 bp, Homo sapiens
aatgagctggtctcc

SEQ ID NO: 1272144 - DNA, 15 bp, Homo sapiens
caatgagctggtctc

SEQ ID NO: 1272145 - DNA, 15 bp, Homo sapiens
gcaatgagctggtct

SEQ ID NO: 1272146 - DNA, 15 bp, Homo sapiens
agcaatgagctggtc

SEQ ID NO: 1272147 - DNA, 15 bp, Homo sapiens
cagcaatgagctggt

SEQ ID NO: 1272148 - DNA, 15 bp, Homo sapiens
ccagcaatgagctgg

SEQ ID NO: 1272149 - DNA, 15 bp, Homo sapiens
gccagcaatgagctg

SEQ ID NO: 1272150 - DNA, 15 bp, Homo sapiens
tgccagcaatgagct

SEQ ID NO: 1272151 - DNA, 15 bp, Homo sapiens
gtgccagcaatgagc

SEQ ID NO: 1272152 - DNA, 15 bp, Homo sapiens
tgtgccagcaatgag

SEQ ID NO: 1272153 - DNA, 15 bp, Homo sapiens
ctgtgccagcaatga

SEQ ID NO: 1272154 - DNA, 15 bp, Homo sapiens
tctgtgccagcaatg

SEQ ID NO: 1272155 - DNA, 15 bp, Homo sapiens
ctctgtgccagcaat

SEQ ID NO: 1272156 - DNA, 15 bp, Homo sapiens
cctctgtgccagcaa

SEQ ID NO: 1272157 - DNA, 15 bp, Homo sapiens
gcctctgtgccagca

SEQ ID NO: 1272158 - DNA, 15 bp, Homo sapiens
ggcctctgtgccagc

SEQ ID NO: 1272159 - DNA, 15 bp, Homo sapiens
aggcctctgtgccag

SEQ ID NO: 1272160 - DNA, 15 bp, Homo sapiens
caggcctctgtgcca

SEQ ID NO: 1272161 - DNA, 15 bp, Homo sapiens
accaggcctctgtgc

SEQ ID NO: 1272162 - DNA, 15 bp, Homo sapiens
aaccaggcctctgtg

SEQ ID NO: 1272163 - DNA, 15 bp, Homo sapiens
gaaccaggcctctgt

SEQ ID NO: 1272164 - DNA, 15 bp, Homo sapiens
tgaaccaggcctctg

SEQ ID NO: 1272165 - DNA, 15 bp, Homo sapiens
atgaaccaggcctct

SEQ ID NO: 1272166 - DNA, 15 bp, Homo sapiens
aatgaaccaggcctc

SEQ ID NO: 1272167 - DNA, 15 bp, Homo sapiens
gaatgaaccaggcct

SEQ ID NO: 1272168 - DNA, 15 bp, Homo sapiens
tgaatgaaccaggcc

SEQ ID NO: 1272169 - DNA, 15 bp, Homo sapiens
atgaatgaaccaggc

SEQ ID NO: 1272170 - DNA, 15 bp, Homo sapiens
tatgaatgaaccagg

SEQ ID NO: 1272171 - DNA, 15 bp, Homo sapiens
ttatgaatgaaccag

SEQ ID NO: 1272172 - DNA, 15 bp, Homo sapiens
attatgaatgaacca

SEQ ID NO: 1272173 - DNA, 15 bp, Homo sapiens
aattatgaatgaacc

SEQ ID NO: 1272174 - DNA, 15 bp, Homo sapiens
gaattatgaatgaac

SEQ ID NO: 1272175 - DNA, 15 bp, Homo sapiens
ggaattatgaatgaa

SEQ ID NO: 1272176 - DNA, 15 bp, Homo sapiens
aggaattatgaatga

SEQ ID NO: 1272177 - DNA, 15 bp, Homo sapiens
aaggaattatgaatg

SEQ ID NO: 1272178 - DNA, 15 bp, Homo sapiens
gaaggaattatgaat

SEQ ID NO: 1272179 - DNA, 15 bp, Homo sapiens
tgaaggaattatgaa

SEQ ID NO: 1272180 - DNA, 15 bp, Homo sapiens
atgaaggaattatga

SEQ ID NO: 1272181 - DNA, 15 bp, Homo sapiens
tatgaaggaattatg

SEQ ID NO: 1272182 - DNA, 15 bp, Homo sapiens
ctatgaaggaattat

SEQ ID NO: 1272183 - DNA, 15 bp, Homo sapiens
cctatgaaggaatta

SEQ ID NO: 1272184 - DNA, 15 bp, Homo sapiens
gcctatgaaggaatt

SEQ ID NO: 1272185 - DNA, 15 bp, Homo sapiens
tgcctatgaaggaat

SEQ ID NO: 1272186 - DNA, 15 bp, Homo sapiens
ttgcctatgaaggaa

SEQ ID NO: 1272187 - DNA, 15 bp, Homo sapiens
cttgcctatgaagga

SEQ ID NO: 1272188 - DNA, 15 bp, Homo sapiens
tcttgcctatgaagg

SEQ ID NO: 1272189 - DNA, 15 bp, Homo sapiens
gtcttgcctatgaag

SEQ ID NO: 1272190 - DNA, 15 bp, Homo sapiens
tgtcttgcctatgaa

SEQ ID NO: 1272191 - DNA, 15 bp, Homo sapiens
gtgtcttgcctatga

SEQ ID NO: 1272192 - DNA, 15 bp, Homo sapiens
ggtgtcttgcctatg

SEQ ID NO: 1272193 - DNA, 15 bp, Homo sapiens
tggtgtcttgcctat

SEQ ID NO: 1272194 - DNA, 15 bp, Homo sapiens
ctggtgtcttgccta

SEQ ID NO: 1272195 - DNA, 15 bp, Homo sapiens
cctggtgtcttgcct

SEQ ID NO: 1272196 - DNA, 15 bp, Homo sapiens
acctggtgtcttgcc

SEQ ID NO: 1272197 - DNA, 15 bp, Homo sapiens
cacctggtgtcttgc

SEQ ID NO: 1272198 - DNA, 15 bp, Homo sapiens
tcacctggtgtcttg

SEQ ID NO: 1272199 - DNA, 15 bp, Homo sapiens
ttcacctggtgtctt

SEQ ID NO: 1272200 - DNA, 15 bp, Homo sapiens
gttcacctggtgtct

SEQ ID NO: 1272201 - DNA, 15 bp, Homo sapiens
ggttcacctggtgtc

SEQ ID NO: 1272202 - DNA, 15 bp, Homo sapiens
cggttcacctggtgt

SEQ ID NO: 1272203 - DNA, 15 bp, Homo sapiens
tcggttcacctggtg

SEQ ID NO: 1272204 - DNA, 15 bp, Homo sapiens
atcggttcacctggt

SEQ ID NO: 1272205 - DNA, 15 bp, Homo sapiens
tatcggttcacctgg

SEQ ID NO: 1272206 - DNA, 15 bp, Homo sapiens
atatcggttcacctg

SEQ ID NO: 1272207 - DNA, 15 bp, Homo sapiens
tatatcggttcacct

SEQ ID NO: 1272208 - DNA, 15 bp, Homo sapiens
ctatatcggttcacc

SEQ ID NO: 1272209 - DNA, 15 bp, Homo sapiens
gctatatcggttcac

SEQ ID NO: 1272210 - DNA, 15 bp, Homo sapiens
ggctatatcggttca

SEQ ID NO: 1272211 - DNA, 15 bp, Homo sapiens
cggctatatcggttc

SEQ ID NO: 1272212 - DNA, 15 bp, Homo sapiens
tcggctatatcggtt

SEQ ID NO: 1272213 - DNA, 15 bp, Homo sapiens
ctcggctatatcggt

SEQ ID NO: 1272214 - DNA, 15 bp, Homo sapiens
gctcggctatatcgg

SEQ ID NO: 1272215 - DNA, 15 bp, Homo sapiens
agctcggctatatcg

SEQ ID NO: 1272216 - DNA, 15 bp, Homo sapiens
cagctcggctatatc

SEQ ID NO: 1272217 - DNA, 15 bp, Homo sapiens
ccagctcggctatat

SEQ ID NO: 1272218 - DNA, 15 bp, Homo sapiens
tccagctcggctata

SEQ ID NO: 1272219 - DNA, 15 bp, Homo sapiens
ttccagctcggctat

SEQ ID NO: 1272220 - DNA, 15 bp, Homo sapiens
cttccagctcggcta

SEQ ID NO: 1272221 - DNA, 15 bp, Homo sapiens
tcttccagctcggct

SEQ ID NO: 1272222 - DNA, 15 bp, Homo sapiens
ctcttccagctcggc

SEQ ID NO: 1272223 - DNA, 15 bp, Homo sapiens
gctcttccagctcgg

SEQ ID NO: 1272224 - DNA, 15 bp, Homo sapiens
agctcttccagctcg

SEQ ID NO: 1272225 - DNA, 15 bp, Homo sapiens
gagctcttccagctc

SEQ ID NO: 1272226 - DNA, 15 bp, Homo sapiens
agagctcttccagct

SEQ ID NO: 1272227 - DNA, 15 bp, Homo sapiens
gagagctcttccagc

SEQ ID NO: 1272228 - DNA, 15 bp, Homo sapiens
ggagagctcttccag

SEQ ID NO: 1272229 - DNA, 15 bp, Homo sapiens
tggagagctcttcca

SEQ ID NO: 1272230 - DNA, 15 bp, Homo sapiens
ttggagagctcttcc

SEQ ID NO: 1272231 - DNA, 15 bp, Homo sapiens
cttggagagctcttc

SEQ ID NO: 1272232 - DNA, 15 bp, Homo sapiens
ccttggagagctctt

SEQ ID NO: 1272233 - DNA, 15 bp, Homo sapiens
gccttggagagctct

SEQ ID NO: 1272234 - DNA, 15 bp, Homo sapiens
tgccttggagagctc

SEQ ID NO: 1272235 - DNA, 15 bp, Homo sapiens
ctgccttggagagct

SEQ ID NO: 1272236 - DNA, 15 bp, Homo sapiens
tctgccttggagagc

SEQ ID NO: 1272237 - DNA, 15 bp, Homo sapiens
ctctgccttggagag

SEQ ID NO: 1272238 - DNA, 15 bp, Homo sapiens
tctctgccttggaga

SEQ ID NO: 1272239 - DNA, 15 bp, Homo sapiens
gtctctgccttggag

SEQ ID NO: 1272240 - DNA, 15 bp, Homo sapiens
agtctctgccttgga

SEQ ID NO: 1272241 - DNA, 15 bp, Homo sapiens
gagtctctgccttgg

SEQ ID NO: 1272242 - DNA, 15 bp, Homo sapiens
agagtctctgccttg

SEQ ID NO: 1272243 - DNA, 15 bp, Homo sapiens
cagagtctctgcctt

SEQ ID NO: 1272244 - DNA, 15 bp, Homo sapiens
tcagagtctctgcct

SEQ ID NO: 1272245 - DNA, 15 bp, Homo sapiens
ctcagagtctctgcc

SEQ ID NO: 1272246 - DNA, 15 bp, Homo sapiens
gctcagagtctctgc

SEQ ID NO: 1272247 - DNA, 15 bp, Homo sapiens
ggctcagagtctctg

SEQ ID NO: 1272248 - DNA, 15 bp, Homo sapiens
tggctcagagtctct

SEQ ID NO: 1272249 - DNA, 15 bp, Homo sapiens
ttggctcagagtctc

SEQ ID NO: 1272250 - DNA, 15 bp, Homo sapiens
cttggctcagagtct

SEQ ID NO: 1272251 - DNA, 15 bp, Homo sapiens
ccttggctcagagtc

SEQ ID NO: 1272252 - DNA, 15 bp, Homo sapiens
tccttggctcagagt

SEQ ID NO: 1272253 - DNA, 15 bp, Homo sapiens
ttccttggctcagag

SEQ ID NO: 1272254 - DNA, 15 bp, Homo sapiens
attccttggctcaga

SEQ ID NO: 1272255 - DNA, 15 bp, Homo sapiens
cattccttggctcag

SEQ ID NO: 1272256 - DNA, 15 bp, Homo sapiens
acattccttggctca

SEQ ID NO: 1272257 - DNA, 15 bp, Homo sapiens
aacattccttggctc

SEQ ID NO: 1272258 - DNA, 15 bp, Homo sapiens
gaacattccttggct

SEQ ID NO: 1272259 - DNA, 15 bp, Homo sapiens
tgaacattccttggc

SEQ ID NO: 1272260 - DNA, 15 bp, Homo sapiens
ttgaacattccttgg

SEQ ID NO: 1272261 - DNA, 15 bp, Homo sapiens
tttgaacattccttg

SEQ ID NO: 1272262 - DNA, 15 bp, Homo sapiens
ctttgaacattcctt

SEQ ID NO: 1272263 - DNA, 15 bp, Homo sapiens
ctctttgaacattcc

SEQ ID NO: 1272264 - DNA, 15 bp, Homo sapiens
gctctttgaacattc

SEQ ID NO: 1272265 - DNA, 15 bp, Homo sapiens
agctctttgaacatt

SEQ ID NO: 1272266 - DNA, 15 bp, Homo sapiens
tagctctttgaacat

SEQ ID NO: 1272267 - DNA, 15 bp, Homo sapiens
ctagctctttgaaca

SEQ ID NO: 1272268 - DNA, 15 bp, Homo sapiens
gctagctctttgaac

SEQ ID NO: 1272269 - DNA, 15 bp, Homo sapiens
tgctagctctttgaa

SEQ ID NO: 1272270 - DNA, 15 bp, Homo sapiens
atgctagctctttga

SEQ ID NO: 1272271 - DNA, 15 bp, Homo sapiens
catgctagctctttg

SEQ ID NO: 1272272 - DNA, 15 bp, Homo sapiens
acatgctagctcttt

SEQ ID NO: 1272273 - DNA, 15 bp, Homo sapiens
tacatgctagctctt

SEQ ID NO: 1272274 - DNA, 15 bp, Homo sapiens
atacatgctagctct

SEQ ID NO: 1272275 - DNA, 15 bp, Homo sapiens
aatacatgctagctc

SEQ ID NO: 1272276 - DNA, 15 bp, Homo sapiens
caatacatgctagct

SEQ ID NO: 1272277 - DNA, 15 bp, Homo sapiens
acaatacatgctagc

SEQ ID NO: 1272278 - DNA, 15 bp, Homo sapiens
cacaatacatgctag

SEQ ID NO: 1272279 - DNA, 15 bp, Homo sapiens
ccacaatacatgcta

SEQ ID NO: 1272280 - DNA, 15 bp, Homo sapiens
cccacaatacatgct

SEQ ID NO: 1272281 - DNA, 15 bp, Homo sapiens
tcccacaatacatgc

SEQ ID NO: 1272282 - DNA, 15 bp, Homo sapiens
atcccacaatacatg

SEQ ID NO: 1272283 - DNA, 15 bp, Homo sapiens
aatcccacaatacat

SEQ ID NO: 1272284 - DNA, 15 bp, Homo sapiens
taatcccacaataca

SEQ ID NO: 1272285 - DNA, 15 bp, Homo sapiens
gtaatcccacaatac

SEQ ID NO: 1272286 - DNA, 15 bp, Homo sapiens
agtaatcccacaata

SEQ ID NO: 1272287 - DNA, 15 bp, Homo sapiens
tagtaatcccacaat

SEQ ID NO: 1272288 - DNA, 15 bp, Homo sapiens
atagtaatcccacaa

SEQ ID NO: 1272289 - DNA, 15 bp, Homo sapiens
catagtaatcccaca

SEQ ID NO: 1272290 - DNA, 15 bp, Homo sapiens
gcatagtaatcccac

SEQ ID NO: 1272291 - DNA, 15 bp, Homo sapiens
cgcatagtaatccca

SEQ ID NO: 1272292 - DNA, 15 bp, Homo sapiens
gcgcatagtaatccc

SEQ ID NO: 1272293 - DNA, 15 bp, Homo sapiens
ggcgcatagtaatcc

SEQ ID NO: 1272294 - DNA, 15 bp, Homo sapiens
tggcgcatagtaatc

SEQ ID NO: 1272295 - DNA, 15 bp, Homo sapiens
ctggcgcatagtaat

SEQ ID NO: 1272296 - DNA, 15 bp, Homo sapiens
cctggcgcatagtaa

SEQ ID NO: 1272297 - DNA, 15 bp, Homo sapiens
tcctggcgcatagta

SEQ ID NO: 1272298 - DNA, 15 bp, Homo sapiens
ttcctggcgcatagt

SEQ ID NO: 1272299 - DNA, 15 bp, Homo sapiens
attcctggcgcatag

SEQ ID NO: 1272300 - DNA, 15 bp, Homo sapiens
aattcctggcgcata

SEQ ID NO: 1272301 - DNA, 15 bp, Homo sapiens
aaattcctggcgcat

SEQ ID NO: 1272302 - DNA, 15 bp, Homo sapiens
aaaattcctggcgca

SEQ ID NO: 1272303 - DNA, 15 bp, Homo sapiens
aaaaattcctggcgc

SEQ ID NO: 1272304 - DNA, 15 bp, Homo sapiens
aaaaaattcctggcg

SEQ ID NO: 1272305 - DNA, 15 bp, Homo sapiens
taaaaaattcctggc

SEQ ID NO: 1272306 - DNA, 15 bp, Homo sapiens
gtaaaaaattcctgg

SEQ ID NO: 1272307 - DNA, 15 bp, Homo sapiens
tgtaaaaaattcctg

SEQ ID NO: 1272308 - DNA, 15 bp, Homo sapiens
gtgtaaaaaattcct

SEQ ID NO: 1272309 - DNA, 15 bp, Homo sapiens
agtgtaaaaaattcc

SEQ ID NO: 1272310 - DNA, 15 bp, Homo sapiens
cagtgtaaaaaattc

SEQ ID NO: 1272311 - DNA, 15 bp, Homo sapiens
gcagtgtaaaaaatt

SEQ ID NO: 1272312 - DNA, 15 bp, Homo sapiens
tgcagtgtaaaaaat

SEQ ID NO: 1272313 - DNA, 15 bp, Homo sapiens
atgcagtgtaaaaaa

SEQ ID NO: 1272314 - DNA, 15 bp, Homo sapiens
gatgcagtgtaaaaa

SEQ ID NO: 1272315 - DNA, 15 bp, Homo sapiens
tgatgcagtgtaaaa

SEQ ID NO: 1272316 - DNA, 15 bp, Homo sapiens
gtgatgcagtgtaaa

SEQ ID NO: 1272317 - DNA, 15 bp, Homo sapiens
cgtgatgcagtgtaa

SEQ ID NO: 1272318 - DNA, 15 bp, Homo sapiens
acgtgatgcagtgta

SEQ ID NO: 1272319 - DNA, 15 bp, Homo sapiens
aacgtgatgcagtgt

SEQ ID NO: 1272320 - DNA, 15 bp, Homo sapiens
gaacgtgatgcagtg

SEQ ID NO: 1272321 - DNA, 15 bp, Homo sapiens
ggaacgtgatgcagt

SEQ ID NO: 1272322 - DNA, 15 bp, Homo sapiens
tggaacgtgatgcag

SEQ ID NO: 1272323 - DNA, 15 bp, Homo sapiens
atggaacgtgatgca

SEQ ID NO: 1272324 - DNA, 15 bp, Homo sapiens
gatggaacgtgatgc

SEQ ID NO: 1272325 - DNA, 15 bp, Homo sapiens
agatggaacgtgatg

SEQ ID NO: 1272326 - DNA, 15 bp, Homo sapiens
aagatggaacgtgat

SEQ ID NO: 1272327 - DNA, 15 bp, Homo sapiens
gaagatggaacgtga

SEQ ID NO: 1272328 - DNA, 15 bp, Homo sapiens
tgaagatggaacgtg

SEQ ID NO: 1272329 - DNA, 15 bp, Homo sapiens
gtgaagatggaacgt

SEQ ID NO: 1272330 - DNA, 15 bp, Homo sapiens
tgtgaagatggaacg

SEQ ID NO: 1272331 - DNA, 15 bp, Homo sapiens
ttgtgaagatggaac

SEQ ID NO: 1272332 - DNA, 15 bp, Homo sapiens
gttgtgaagatggaa

SEQ ID NO: 1272333 - DNA, 15 bp, Homo sapiens
tgttgtgaagatgga

SEQ ID NO: 1272334 - DNA, 15 bp, Homo sapiens
ctgttgtgaagatgg

SEQ ID NO: 1272335 - DNA, 15 bp, Homo sapiens
gctgttgtgaagatg

SEQ ID NO: 1272336 - DNA, 15 bp, Homo sapiens
ggctgttgtgaagat

SEQ ID NO: 1272337 - DNA, 15 bp, Homo sapiens
gggctgttgtgaaga

SEQ ID NO: 1272338 - DNA, 15 bp, Homo sapiens
agggctgttgtgaag

SEQ ID NO: 1272339 - DNA, 15 bp, Homo sapiens
tagggctgttgtgaa

SEQ ID NO: 1272340 - DNA, 15 bp, Homo sapiens
ctagggctgttgtga

SEQ ID NO: 1272341 - DNA, 15 bp, Homo sapiens
tctagggctgttgtg

SEQ ID NO: 1272342 - DNA, 15 bp, Homo sapiens
ttctagggctgttgt

SEQ ID NO: 1272343 - DNA, 15 bp, Homo sapiens
tttctagggctgttg

SEQ ID NO: 1272344 - DNA, 15 bp, Homo sapiens
ctttctagggctgtt

SEQ ID NO: 1272345 - DNA, 15 bp, Homo sapiens
cctttctagggctgt

SEQ ID NO: 1272346 - DNA, 15 bp, Homo sapiens
tcctttctagggctg

SEQ ID NO: 1272347 - DNA, 15 bp, Homo sapiens
ttcctttctagggct

SEQ ID NO: 1272348 - DNA, 15 bp, Homo sapiens
cttcctttctagggc

SEQ ID NO: 1272349 - DNA, 15 bp, Homo sapiens
tcttcctttctaggg

SEQ ID NO: 1272350 - DNA, 15 bp, Homo sapiens
ttcttcctttctagg

SEQ ID NO: 1272351 - DNA, 15 bp, Homo sapiens
gttcttcctttctag

SEQ ID NO: 1272352 - DNA, 15 bp, Homo sapiens
agttcttcctttcta

SEQ ID NO: 1272353 - DNA, 15 bp, Homo sapiens
tagttcttcctttct

SEQ ID NO: 1272354 - DNA, 15 bp, Homo sapiens
atagttcttcctttc

SEQ ID NO: 1272355 - DNA, 15 bp, Homo sapiens
aatagttcttccttt

SEQ ID NO: 1272356 - DNA, 15 bp, Homo sapiens
taatagttcttcctt

SEQ ID NO: 1272357 - DNA, 15 bp, Homo sapiens
ataatagttcttcct

SEQ ID NO: 1272358 - DNA, 15 bp, Homo sapiens
aataatagttcttcc

SEQ ID NO: 1272359 - DNA, 15 bp, Homo sapiens
taataatagttcttc

SEQ ID NO: 1272360 - DNA, 15 bp, Homo sapiens
gtaataatagttctt

SEQ ID NO: 1272361 - DNA, 15 bp, Homo sapiens
ggtaataatagttct

SEQ ID NO: 1272362 - DNA, 15 bp, Homo sapiens
gggtaataatagttc

SEQ ID NO: 1272363 - DNA, 15 bp, Homo sapiens
ggggtaataatagtt

SEQ ID NO: 1272364 - DNA, 15 bp, Homo sapiens
gggggtaataatagt

SEQ ID NO: 1272365 - DNA, 15 bp, Homo sapiens
cgggggtaataatag

SEQ ID NO: 1272366 - DNA, 15 bp, Homo sapiens
acgggggtaataata

SEQ ID NO: 1272367 - DNA, 15 bp, Homo sapiens
aacgggggtaataat

SEQ ID NO: 1272368 - DNA, 15 bp, Homo sapiens
aaacgggggtaataa

SEQ ID NO: 1272369 - DNA, 15 bp, Homo sapiens
aaaacgggggtaata

SEQ ID NO: 1272370 - DNA, 15 bp, Homo sapiens
taaaacgggggtaat

SEQ ID NO: 1272371 - DNA, 15 bp, Homo sapiens
ataaaacgggggtaa

SEQ ID NO: 1272372 - DNA, 15 bp, Homo sapiens
tataaaacgggggta

SEQ ID NO: 1272373 - DNA, 15 bp, Homo sapiens
ctataaaacgggggt

SEQ ID NO: 1272374 - DNA, 15 bp, Homo sapiens
cctataaaacggggg

SEQ ID NO: 1272375 - DNA, 15 bp, Homo sapiens
acctataaaacgggg

SEQ ID NO: 1272376 - DNA, 15 bp, Homo sapiens
cacctataaaacggg

SEQ ID NO: 1272377 - DNA, 15 bp, Homo sapiens
tcacctataaaacgg

SEQ ID NO: 1272378 - DNA, 15 bp, Homo sapiens
ttcacctataaaacg

SEQ ID NO: 1272379 - DNA, 15 bp, Homo sapiens
attcacctataaaac

SEQ ID NO: 1272380 - DNA, 15 bp, Homo sapiens
tattcacctataaaa

SEQ ID NO: 1272381 - DNA, 15 bp, Homo sapiens
ttattcacctataaa

SEQ ID NO: 1272382 - DNA, 15 bp, Homo sapiens
tttattcacctataa

SEQ ID NO: 1272383 - DNA, 15 bp, Homo sapiens
gtttattcacctata

SEQ ID NO: 1272384 - DNA, 15 bp, Homo sapiens
tgtttattcacctat

SEQ ID NO: 1272385 - DNA, 15 bp, Homo sapiens
ttgtttattcaccta

SEQ ID NO: 1272386 - DNA, 15 bp, Homo sapiens
cttgtttattcacct

SEQ ID NO: 1272387 - DNA, 15 bp, Homo sapiens
ccttgtttattcacc

SEQ ID NO: 1272388 - DNA, 15 bp, Homo sapiens
cccttgtttattcac

SEQ ID NO: 1272389 - DNA, 15 bp, Homo sapiens
gcccttgtttattca

SEQ ID NO: 1272390 - DNA, 15 bp, Homo sapiens
tgcccttgtttattc

SEQ ID NO: 1272391 - DNA, 15 bp, Homo sapiens
gtgcccttgtttatt

SEQ ID NO: 1272392 - DNA, 15 bp, Homo sapiens
tgtgcccttgtttat

SEQ ID NO: 1272393 - DNA, 15 bp, Homo sapiens
ctgtgcccttgttta

SEQ ID NO: 1272394 - DNA, 15 bp, Homo sapiens
cctgtgcccttgttt

SEQ ID NO: 1272395 - DNA, 15 bp, Homo sapiens
acctgtgcccttgtt

SEQ ID NO: 1272396 - DNA, 15 bp, Homo sapiens
gacctgtgcccttgt

SEQ ID NO: 1272397 - DNA, 15 bp, Homo sapiens
ggacctgtgcccttg

SEQ ID NO: 1272398 - DNA, 15 bp, Homo sapiens
aggacctgtgccctt

SEQ ID NO: 1272399 - DNA, 15 bp, Homo sapiens
aaggacctgtgccct

SEQ ID NO: 1272400 - DNA, 15 bp, Homo sapiens
caaggacctgtgccc

SEQ ID NO: 1272401 - DNA, 15 bp, Homo sapiens
tcaaggacctgtgcc

SEQ ID NO: 1272402 - DNA, 15 bp, Homo sapiens
atcaaggacctgtgc

SEQ ID NO: 1272403 - DNA, 15 bp, Homo sapiens
catcaaggacctgtg

SEQ ID NO: 1272404 - DNA, 15 bp, Homo sapiens
acatcaaggacctgt

SEQ ID NO: 1272405 - DNA, 15 bp, Homo sapiens
tacatcaaggacctg

SEQ ID NO: 1272406 - DNA, 15 bp, Homo sapiens
ttacatcaaggacct

SEQ ID NO: 1272407 - DNA, 15 bp, Homo sapiens
gttacatcaaggacc

SEQ ID NO: 1272408 - DNA, 15 bp, Homo sapiens
tgttacatcaaggac

SEQ ID NO: 1272409 - DNA, 15 bp, Homo sapiens
ctgttacatcaagga

SEQ ID NO: 1272410 - DNA, 15 bp, Homo sapiens
gctgttacatcaagg

SEQ ID NO: 1272411 - DNA, 15 bp, Homo sapiens
ggctgttacatcaag

SEQ ID NO: 1272412 - DNA, 15 bp, Homo sapiens
tggctgttacatcaa

SEQ ID NO: 1272413 - DNA, 15 bp, Homo sapiens
ctggctgttacatca

SEQ ID NO: 1272414 - DNA, 15 bp, Homo sapiens
cctggctgttacatc

SEQ ID NO: 1272415 - DNA, 15 bp, Homo sapiens
tcctggctgttacat

SEQ ID NO: 1272416 - DNA, 15 bp, Homo sapiens
atcctggctgttaca

SEQ ID NO: 1272417 - DNA, 15 bp, Homo sapiens
gatcctggctgttac

SEQ ID NO: 1272418 - DNA, 15 bp, Homo sapiens
tgatcctggctgtta

SEQ ID NO: 1272419 - DNA, 15 bp, Homo sapiens
ttgatcctggctgtt

SEQ ID NO: 1272420 - DNA, 15 bp, Homo sapiens
tttgatcctggctgt

SEQ ID NO: 1272421 - DNA, 15 bp, Homo sapiens
gtttgatcctggctg

SEQ ID NO: 1272422 - DNA, 15 bp, Homo sapiens
tgtttgatcctggct

SEQ ID NO: 1272423 - DNA, 15 bp, Homo sapiens
ctgtttgatcctggc

SEQ ID NO: 1272424 - DNA, 15 bp, Homo sapiens
gctgtttgatcctgg

SEQ ID NO: 1272425 - DNA, 15 bp, Homo sapiens
agctgtttgatcctg

SEQ ID NO: 1272426 - DNA, 15 bp, Homo sapiens
cagctgtttgatcct

SEQ ID NO: 1272427 - DNA, 15 bp, Homo sapiens
ccagctgtttgatcc

SEQ ID NO: 1272428 - DNA, 15 bp, Homo sapiens
cccagctgtttgatc

SEQ ID NO: 1272429 - DNA, 15 bp, Homo sapiens
tcccagctgtttgat

SEQ ID NO: 1272430 - DNA, 15 bp, Homo sapiens
ttcccagctgtttga

SEQ ID NO: 1272431 - DNA, 15 bp, Homo sapiens
cttcccagctgtttg

SEQ ID NO: 1272432 - DNA, 15 bp, Homo sapiens
tcttcccagctgttt

SEQ ID NO: 1272433 - DNA, 15 bp, Homo sapiens
gtcttcccagctgtt

SEQ ID NO: 1272434 - DNA, 15 bp, Homo sapiens
cgtcttcccagctgt

SEQ ID NO: 1272435 - DNA, 15 bp, Homo sapiens
tcgtcttcccagctg

SEQ ID NO: 1272436 - DNA, 15 bp, Homo sapiens
ctcgtcttcccagct

SEQ ID NO: 1272437 - DNA, 15 bp, Homo sapiens
tctcgtcttcccagc

SEQ ID NO: 1272438 - DNA, 15 bp, Homo sapiens
ttctcgtcttcccag

SEQ ID NO: 1272439 - DNA, 15 bp, Homo sapiens
tttctcgtcttccca

SEQ ID NO: 1272440 - DNA, 15 bp, Homo sapiens
ttttctcgtcttccc

SEQ ID NO: 1272441 - DNA, 15 bp, Homo sapiens
gttttctcgtcttcc

SEQ ID NO: 1272442 - DNA, 15 bp, Homo sapiens
ggttttctcgtcttc

SEQ ID NO: 1272443 - DNA, 15 bp, Homo sapiens
aggttttctcgtctt

SEQ ID NO: 1272444 - DNA, 15 bp, Homo sapiens
aaggttttctcgtct

SEQ ID NO: 1272445 - DNA, 15 bp, Homo sapiens
aaaggttttctcgtc

SEQ ID NO: 1272446 - DNA, 15 bp, Homo sapiens
gaaaggttttctcgt

SEQ ID NO: 1272447 - DNA, 15 bp, Homo sapiens
ggaaaggttttctcg

SEQ ID NO: 1272448 - DNA, 15 bp, Homo sapiens
gggaaaggttttctc

SEQ ID NO: 1272449 - DNA, 15 bp, Homo sapiens
tgggaaaggttttct

SEQ ID NO: 1272450 - DNA, 15 bp, Homo sapiens
ctgggaaaggttttc

SEQ ID NO: 1272451 - DNA, 15 bp, Homo sapiens
cctgggaaaggtttt

SEQ ID NO: 1272452 - DNA, 15 bp, Homo sapiens
gcctgggaaaggttt

SEQ ID NO: 1272453 - DNA, 15 bp, Homo sapiens
agcctgggaaaggtt

SEQ ID NO: 1272454 - DNA, 15 bp, Homo sapiens
tagcctgggaaaggt

SEQ ID NO: 1272455 - DNA, 15 bp, Homo sapiens
ctagcctgggaaagg

SEQ ID NO: 1272456 - DNA, 15 bp, Homo sapiens
cctagcctgggaaag

SEQ ID NO: 1272457 - DNA, 15 bp, Homo sapiens
tcctagcctgggaaa

SEQ ID NO: 1272458 - DNA, 15 bp, Homo sapiens
atcctagcctgggaa

SEQ ID NO: 1272459 - DNA, 15 bp, Homo sapiens
tatcctagcctggga

SEQ ID NO: 1272460 - DNA, 15 bp, Homo sapiens
ttatcctagcctggg

SEQ ID NO: 1272461 - DNA, 15 bp, Homo sapiens
gttatcctagcctgg

SEQ ID NO: 1272462 - DNA, 15 bp, Homo sapiens
tgttatcctagcctg

SEQ ID NO: 1272463 - DNA, 15 bp, Homo sapiens
ctgttatcctagcct

SEQ ID NO: 1272464 - DNA, 15 bp, Homo sapiens
tctgttatcctagcc

SEQ ID NO: 1272465 - DNA, 15 bp, Homo sapiens
ctctgttatcctagc

SEQ ID NO: 1272466 - DNA, 15 bp, Homo sapiens
cctctgttatcctag

SEQ ID NO: 1272467 - DNA, 15 bp, Homo sapiens
tcctctgttatccta

SEQ ID NO: 1272468 - DNA, 15 bp, Homo sapiens
atcctctgttatcct

SEQ ID NO: 1272469 - DNA, 15 bp, Homo sapiens
aatcctctgttatcc

SEQ ID NO: 1272470 - DNA, 15 bp, Homo sapiens
aaatcctctgttatc

SEQ ID NO: 1272471 - DNA, 15 bp, Homo sapiens
caaatcctctgttat

SEQ ID NO: 1272472 - DNA, 15 bp, Homo sapiens
ccaaatcctctgtta

SEQ ID NO: 1272473 - DNA, 15 bp, Homo sapiens
accaaatcctctgtt

SEQ ID NO: 1272474 - DNA, 15 bp, Homo sapiens
aaccaaatcctctgt

SEQ ID NO: 1272475 - DNA, 15 bp, Homo sapiens
caaccaaatcctctg

SEQ ID NO: 1272476 - DNA, 15 bp, Homo sapiens
tcaaccaaatcctct

SEQ ID NO: 1272477 - DNA, 15 bp, Homo sapiens
ttcaaccaaatcctc

SEQ ID NO: 1272478 - DNA, 15 bp, Homo sapiens
tttcaaccaaatcct

SEQ ID NO: 1272479 - DNA, 15 bp, Homo sapiens
ttttcaaccaaatcc

SEQ ID NO: 1272480 - DNA, 15 bp, Homo sapiens
attttcaaccaaatc

SEQ ID NO: 1272481 - DNA, 15 bp, Homo sapiens
tattttcaaccaaat

SEQ ID NO: 1272482 - DNA, 15 bp, Homo sapiens
gtattttcaaccaaa

SEQ ID NO: 1272483 - DNA, 15 bp, Homo sapiens
tgtattttcaaccaa

SEQ ID NO: 1272484 - DNA, 15 bp, Homo sapiens
ctgtattttcaacca

SEQ ID NO: 1272485 - DNA, 15 bp, Homo sapiens
cctgtattttcaacc

SEQ ID NO: 1272486 - DNA, 15 bp, Homo sapiens
gcctgtattttcaac

SEQ ID NO: 1272487 - DNA, 15 bp, Homo sapiens
tgcctgtattttcaa

SEQ ID NO: 1272488 - DNA, 15 bp, Homo sapiens
ttgcctgtattttca

SEQ ID NO: 1272489 - DNA, 15 bp, Homo sapiens
attgcctgtattttc

SEQ ID NO: 1272490 - DNA, 15 bp, Homo sapiens
aattgcctgtatttt

SEQ ID NO: 1272491 - DNA, 15 bp, Homo sapiens
taattgcctgtattt

SEQ ID NO: 1272492 - DNA, 15 bp, Homo sapiens
ctaattgcctgtatt

SEQ ID NO: 1272493 - DNA, 15 bp, Homo sapiens
cctaattgcctgtat

SEQ ID NO: 1272494 - DNA, 15 bp, Homo sapiens
acctaattgcctgta

SEQ ID NO: 1272495 - DNA, 15 bp, Homo sapiens
cacctaattgcctgt

SEQ ID NO: 1272496 - DNA, 15 bp, Homo sapiens
gcacctaattgcctg

SEQ ID NO: 1272497 - DNA, 15 bp, Homo sapiens
agcacctaattgcct

SEQ ID NO: 1272498 - DNA, 15 bp, Homo sapiens
tagcacctaattgcc

SEQ ID NO: 1272499 - DNA, 15 bp, Homo sapiens
gtagcacctaattgc

SEQ ID NO: 1272500 - DNA, 15 bp, Homo sapiens
ggtagcacctaattg

SEQ ID NO: 1272501 - DNA, 15 bp, Homo sapiens
aggtagcacctaatt

SEQ ID NO: 1272502 - DNA, 15 bp, Homo sapiens
gaggtagcacctaat

SEQ ID NO: 1272503 - DNA, 15 bp, Homo sapiens
agaggtagcacctaa

SEQ ID NO: 1272504 - DNA, 15 bp, Homo sapiens
cagaggtagcaccta

SEQ ID NO: 1272505 - DNA, 15 bp, Homo sapiens
ccagaggtagcacct

SEQ ID NO: 1272506 - DNA, 15 bp, Homo sapiens
cccagaggtagcacc

SEQ ID NO: 1272507 - DNA, 15 bp, Homo sapiens
tcccagaggtagcac

SEQ ID NO: 1272508 - DNA, 15 bp, Homo sapiens
ttcccagaggtagca

SEQ ID NO: 1272509 - DNA, 15 bp, Homo sapiens
tttcccagaggtagc

SEQ ID NO: 1272510 - DNA, 15 bp, Homo sapiens
ttttcccagaggtag

SEQ ID NO: 1272511 - DNA, 15 bp, Homo sapiens
cttttcccagaggta

SEQ ID NO: 1272512 - DNA, 15 bp, Homo sapiens
ccttttcccagaggt

SEQ ID NO: 1272513 - DNA, 15 bp, Homo sapiens
cccttttcccagagg

SEQ ID NO: 1272514 - DNA, 15 bp, Homo sapiens
ccccttttcccagag

SEQ ID NO: 1272515 - DNA, 15 bp, Homo sapiens
gccccttttcccaga

SEQ ID NO: 1272516 - DNA, 15 bp, Homo sapiens
ggccccttttcccag

SEQ ID NO: 1272517 - DNA, 15 bp, Homo sapiens
tggccccttttccca

SEQ ID NO: 1272518 - DNA, 15 bp, Homo sapiens
ctggccccttttccc

SEQ ID NO: 1272519 - DNA, 15 bp, Homo sapiens
cctggccccttttcc

SEQ ID NO: 1272520 - DNA, 15 bp, Homo sapiens
tcctggccccttttc

SEQ ID NO: 1272521 - DNA, 15 bp, Homo sapiens
ctcctggcccctttt

SEQ ID NO: 1272522 - DNA, 15 bp, Homo sapiens
ctctcctggcccctt

SEQ ID NO: 1272523 - DNA, 15 bp, Homo sapiens
cctctcctggcccct

SEQ ID NO: 1272524 - DNA, 15 bp, Homo sapiens
tcctctcctggcccc

SEQ ID NO: 1272525 - DNA, 15 bp, Homo sapiens
ttcctctcctggccc

SEQ ID NO: 1272526 - DNA, 15 bp, Homo sapiens
cttcctctcctggcc

SEQ ID NO: 1272527 - DNA, 15 bp, Homo sapiens
ccttcctctcctggc

SEQ ID NO: 1272528 - DNA, 15 bp, Homo sapiens
tccttcctctcctgg

SEQ ID NO: 1272529 - DNA, 15 bp, Homo sapiens
ctccttcctctcctg

SEQ ID NO: 1272530 - DNA, 15 bp, Homo sapiens
tctccttcctctcct

SEQ ID NO: 1272531 - DNA, 15 bp, Homo sapiens
agtgtctccttcctc

SEQ ID NO: 1272532 - DNA, 15 bp, Homo sapiens
aagtgtctccttcct

SEQ ID NO: 1272533 - DNA, 15 bp, Homo sapiens
aaagtgtctccttcc

SEQ ID NO: 1272534 - DNA, 15 bp, Homo sapiens
aaaagtgtctccttc

SEQ ID NO: 1272535 - DNA, 15 bp, Homo sapiens
gaaaagtgtctcctt

SEQ ID NO: 1272536 - DNA, 15 bp, Homo sapiens
ggaaaagtgtctcct

SEQ ID NO: 1272537 - DNA, 15 bp, Homo sapiens
gggaaaagtgtctcc

SEQ ID NO: 1272538 - DNA, 15 bp, Homo sapiens
agggaaaagtgtctc

SEQ ID NO: 1272539 - DNA, 15 bp, Homo sapiens
cagggaaaagtgtct

SEQ ID NO: 1272540 - DNA, 15 bp, Homo sapiens
gcagggaaaagtgtc

SEQ ID NO: 1272541 - DNA, 15 bp, Homo sapiens
tgcagggaaaagtgt

SEQ ID NO: 1272542 - DNA, 15 bp, Homo sapiens
atgcagggaaaagtg

SEQ ID NO: 1272543 - DNA, 15 bp, Homo sapiens
gcatgcagggaaaag

SEQ ID NO: 1272544 - DNA, 15 bp, Homo sapiens
ggcatgcagggaaaa

SEQ ID NO: 1272545 - DNA, 15 bp, Homo sapiens
gggcatgcagggaaa

SEQ ID NO: 1272546 - DNA, 15 bp, Homo sapiens
agggcatgcagggaa

SEQ ID NO: 1272547 - DNA, 15 bp, Homo sapiens
cagggcatgcaggga

SEQ ID NO: 1272548 - DNA, 15 bp, Homo sapiens
tcagggcatgcaggg

SEQ ID NO: 1272549 - DNA, 15 bp, Homo sapiens
atcagggcatgcagg

SEQ ID NO: 1272550 - DNA, 15 bp, Homo sapiens
catcagggcatgcag

SEQ ID NO: 1272551 - DNA, 15 bp, Homo sapiens
acatcagggcatgca

SEQ ID NO: 1272552 - DNA, 15 bp, Homo sapiens
gacatcagggcatgc

SEQ ID NO: 1272553 - DNA, 15 bp, Homo sapiens
ggacatcagggcatg

SEQ ID NO: 1272554 - DNA, 15 bp, Homo sapiens
aggacatcagggcat

SEQ ID NO: 1272555 - DNA, 15 bp, Homo sapiens
taggacatcagggca

SEQ ID NO: 1272556 - DNA, 15 bp, Homo sapiens
ataggacatcagggc

SEQ ID NO: 1272557 - DNA, 15 bp, Homo sapiens
aataggacatcaggg

SEQ ID NO: 1272558 - DNA, 15 bp, Homo sapiens
aaataggacatcagg

SEQ ID NO: 1272559 - DNA, 15 bp, Homo sapiens
caaataggacatcag

SEQ ID NO: 1272560 - DNA, 15 bp, Homo sapiens
tcaaataggacatca

SEQ ID NO: 1272561 - DNA, 15 bp, Homo sapiens
ttcaaataggacatc

SEQ ID NO: 1272562 - DNA, 15 bp, Homo sapiens
gttcaaataggacat

SEQ ID NO: 1272563 - DNA, 15 bp, Homo sapiens
tgttcaaataggaca

SEQ ID NO: 1272564 - DNA, 15 bp, Homo sapiens
atgttcaaataggac

SEQ ID NO: 1272565 - DNA, 15 bp, Homo sapiens
aatgttcaaatagga

SEQ ID NO: 1272566 - DNA, 15 bp, Homo sapiens
aaatgttcaaatagg

SEQ ID NO: 1272567 - DNA, 15 bp, Homo sapiens
aaaatgttcaaatag

SEQ ID NO: 1272568 - DNA, 15 bp, Homo sapiens
taaaatgttcaaata

SEQ ID NO: 1272569 - DNA, 15 bp, Homo sapiens
ataaaatgttcaaat

SEQ ID NO: 1272570 - DNA, 15 bp, Homo sapiens
gataaaatgttcaaa

SEQ ID NO: 1272571 - DNA, 15 bp, Homo sapiens
tgataaaatgttcaa

SEQ ID NO: 1272572 - DNA, 15 bp, Homo sapiens
atgataaaatgttca

SEQ ID NO: 1272573 - DNA, 15 bp, Homo sapiens
catgataaaatgttc

SEQ ID NO: 1272574 - DNA, 15 bp, Homo sapiens
tcatgataaaatgtt

SEQ ID NO: 1272575 - DNA, 15 bp, Homo sapiens
ttcatgataaaatgt

SEQ ID NO: 1272576 - DNA, 15 bp, Homo sapiens
gttcatgataaaatg

SEQ ID NO: 1272577 - DNA, 15 bp, Homo sapiens
tgttcatgataaaat

SEQ ID NO: 1272578 - DNA, 15 bp, Homo sapiens
gtgttcatgataaaa

SEQ ID NO: 1272579 - DNA, 15 bp, Homo sapiens
cgtgttcatgataaa

SEQ ID NO: 1272580 - DNA, 15 bp, Homo sapiens
tcgtgttcatgataa

SEQ ID NO: 1272581 - DNA, 15 bp, Homo sapiens
ttcgtgttcatgata

SEQ ID NO: 1272582 - DNA, 15 bp, Homo sapiens
gttcgtgttcatgat

SEQ ID NO: 1272583 - DNA, 15 bp, Homo sapiens
agttcgtgttcatga

SEQ ID NO: 1272584 - DNA, 15 bp, Homo sapiens
aagttcgtgttcatg

SEQ ID NO: 1272585 - DNA, 15 bp, Homo sapiens
gaagttcgtgttcat

SEQ ID NO: 1272586 - DNA, 15 bp, Homo sapiens
ggaagttcgtgttca

SEQ ID NO: 1272587 - DNA, 15 bp, Homo sapiens
aggaagttcgtgttc

SEQ ID NO: 1272588 - DNA, 15 bp, Homo sapiens
taggaagttcgtgtt

SEQ ID NO: 1272589 - DNA, 15 bp, Homo sapiens
ataggaagttcgtgt

SEQ ID NO: 1272590 - DNA, 15 bp, Homo sapiens
aataggaagttcgtg

SEQ ID NO: 1272591 - DNA, 15 bp, Homo sapiens
aaataggaagttcgt

SEQ ID NO: 1272592 - DNA, 15 bp, Homo sapiens
taaataggaagttcg

SEQ ID NO: 1272593 - DNA, 15 bp, Homo sapiens
ttaaataggaagttc

SEQ ID NO: 1272594 - DNA, 15 bp, Homo sapiens
tttaaataggaagtt

SEQ ID NO: 1272595 - DNA, 15 bp, Homo sapiens
ttttaaataggaagt

SEQ ID NO: 1272596 - DNA, 15 bp, Homo sapiens
tttttaaataggaag

SEQ ID NO: 1272597 - DNA, 15 bp, Homo sapiens
ttttttaaataggaa

SEQ ID NO: 1272598 - DNA, 15 bp, Homo sapiens
gttttttaaatagga

SEQ ID NO: 1272599 - DNA, 15 bp, Homo sapiens
tgttttttaaatagg

SEQ ID NO: 1272600 - DNA, 15 bp, Homo sapiens
gtgttttttaaatag

SEQ ID NO: 1272601 - DNA, 15 bp, Homo sapiens
agtgttttttaaata

SEQ ID NO: 1272602 - DNA, 15 bp, Homo sapiens
aagtgttttttaaat

SEQ ID NO: 1272603 - DNA, 15 bp, Homo sapiens
aaagtgttttttaaa

SEQ ID NO: 1272604 - DNA, 15 bp, Homo sapiens
aaaagtgttttttaa

SEQ ID NO: 1272605 - DNA, 15 bp, Homo sapiens
aaaaagtgtttttta

SEQ ID NO: 1272606 - DNA, 15 bp, Homo sapiens
taaaaagtgtttttt

SEQ ID NO: 1272607 - DNA, 15 bp, Homo sapiens
ataaaaagtgttttt

SEQ ID NO: 1272608 - DNA, 15 bp, Homo sapiens
aataaaaagtgtttt

SEQ ID NO: 1272609 - DNA, 15 bp, Homo sapiens
caataaaaagtgttt

SEQ ID NO: 1272610 - DNA, 15 bp, Homo sapiens
tcaataaaaagtgtt

SEQ ID NO: 1272611 - DNA, 15 bp, Homo sapiens
ttcaataaaaagtgt

SEQ ID NO: 1272612 - DNA, 15 bp, Homo sapiens
tttcaataaaaagtg

SEQ ID NO: 1272613 - DNA, 15 bp, Homo sapiens
ttttcaataaaaagt

SEQ ID NO: 1272614 - DNA, 15 bp, Homo sapiens
cttttcaataaaaag

SEQ ID NO: 1272615 - DNA, 15 bp, Homo sapiens
tcttttcaataaaaa

SEQ ID NO: 1272616 - DNA, 15 bp, Homo sapiens
atcttttcaataaaa

SEQ ID NO: 1272617 - DNA, 15 bp, Homo sapiens
tatcttttcaataaa

SEQ ID NO: 1272618 - DNA, 15 bp, Homo sapiens
ttatcttttcaataa

SEQ ID NO: 1272619 - DNA, 15 bp, Homo sapiens
tttatcttttcaata

SEQ ID NO: 1272620 - DNA, 15 bp, Homo sapiens
atttatcttttcaat

SEQ ID NO: 1272621 - DNA, 15 bp, Homo sapiens
gatttatcttttcaa

SEQ ID NO: 1272622 - DNA, 15 bp, Homo sapiens
agatttatcttttca

SEQ ID NO: 1272623 - DNA, 15 bp, Homo sapiens
cagatttatcttttc

SEQ ID NO: 1272624 - DNA, 15 bp, Homo sapiens
acagatttatctttt

SEQ ID NO: 1272625 - DNA, 15 bp, Homo sapiens
cacagatttatcttt

SEQ ID NO: 1272626 - DNA, 15 bp, Homo sapiens
acacagatttatctt

SEQ ID NO: 1272627 - DNA, 15 bp, Homo sapiens
cacacagatttatct

SEQ ID NO: 1272628 - DNA, 15 bp, Homo sapiens
acacacagatttatc

SEQ ID NO: 1272629 - DNA, 15 bp, Homo sapiens
aacacacagatttat

SEQ ID NO: 1272630 - DNA, 15 bp, Homo sapiens
caacacacagattta

SEQ ID NO: 1272631 - DNA, 15 bp, Homo sapiens
acaacacacagattt

SEQ ID NO: 1272632 - DNA, 15 bp, Homo sapiens
tacaacacacagatt

SEQ ID NO: 1272633 - DNA, 15 bp, Homo sapiens
atacaacacacagat

SEQ ID NO: 1272634 - DNA, 15 bp, Homo sapiens
aatacaacacacaga

SEQ ID NO: 1272635 - DNA, 15 bp, Homo sapiens
caatacaacacacag

SEQ ID NO: 1272636 - DNA, 15 bp, Homo sapiens
acaatacaacacaca

SEQ ID NO: 1272637 - DNA, 15 bp, Homo sapiens
cacaatacaacacac

SEQ ID NO: 1272638 - DNA, 15 bp, Homo sapiens
acacaatacaacaca

SEQ ID NO: 1272639 - DNA, 15 bp, Homo sapiens
gacacaatacaacac

SEQ ID NO: 1272640 - DNA, 15 bp, Homo sapiens
tgacacaatacaaca

SEQ ID NO: 1272641 - DNA, 15 bp, Homo sapiens
gtgacacaatacaac

SEQ ID NO: 1272642 - DNA, 15 bp, Homo sapiens
agtgacacaatacaa

SEQ ID NO: 1272643 - DNA, 15 bp, Homo sapiens
gagtgacacaataca

SEQ ID NO: 1272644 - DNA, 15 bp, Homo sapiens
tgagtgacacaatac

SEQ ID NO: 1272645 - DNA, 15 bp, Homo sapiens
ctgagtgacacaata

SEQ ID NO: 1272646 - DNA, 15 bp, Homo sapiens
actgagtgacacaat

SEQ ID NO: 1272647 - DNA, 15 bp, Homo sapiens
aactgagtgacacaa

SEQ ID NO: 1272648 - DNA, 15 bp, Homo sapiens
gaactgagtgacaca

SEQ ID NO: 1272649 - DNA, 15 bp, Homo sapiens
tgaactgagtgacac

SEQ ID NO: 1272650 - DNA, 15 bp, Homo sapiens
ttgaactgagtgaca

SEQ ID NO: 1272651 - DNA, 15 bp, Homo sapiens
cttgaactgagtgac

SEQ ID NO: 1272652 - DNA, 15 bp, Homo sapiens
acttgaactgagtga

SEQ ID NO: 1272653 - DNA, 15 bp, Homo sapiens
tacttgaactgagtg

SEQ ID NO: 1272654 - DNA, 15 bp, Homo sapiens
gtacttgaactgagt

SEQ ID NO: 1272655 - DNA, 15 bp, Homo sapiens
agtacttgaactgag

SEQ ID NO: 1272656 - DNA, 15 bp, Homo sapiens
aagtacttgaactga

SEQ ID NO: 1272657 - DNA, 15 bp, Homo sapiens
caagtacttgaactg

SEQ ID NO: 1272658 - DNA, 15 bp, Homo sapiens
tcaagtacttgaact

SEQ ID NO: 1272659 - DNA, 15 bp, Homo sapiens
ttcaagtacttgaac

SEQ ID NO: 1272660 - DNA, 15 bp, Homo sapiens
tttcaagtacttgaa

SEQ ID NO: 1272661 - DNA, 15 bp, Homo sapiens
atttcaagtacttga

SEQ ID NO: 1272662 - DNA, 15 bp, Homo sapiens
aatttcaagtacttg

SEQ ID NO: 1272663 - DNA, 15 bp, Homo sapiens
aaatttcaagtactt

SEQ ID NO: 1272664 - DNA, 15 bp, Homo sapiens
taaatttcaagtact

SEQ ID NO: 1272665 - DNA, 15 bp, Homo sapiens
ataaatttcaagtac

SEQ ID NO: 1272666 - DNA, 15 bp, Homo sapiens
aataaatttcaagta

SEQ ID NO: 1272667 - DNA, 15 bp, Homo sapiens
caataaatttcaagt

SEQ ID NO: 1272668 - DNA, 15 bp, Homo sapiens
tcaataaatttcaag

SEQ ID NO: 1272669 - DNA, 15 bp, Homo sapiens
ttcaataaatttcaa

SEQ ID NO: 1272670 - DNA, 15 bp, Homo sapiens
attcaataaatttca

SEQ ID NO: 1272671 - DNA, 15 bp, Homo sapiens
aattcaataaatttc

SEQ ID NO: 1272672 - DNA, 15 bp, Homo sapiens
caattcaataaattt

SEQ ID NO: 1272673 - DNA, 15 bp, Homo sapiens
acaattcaataaatt

SEQ ID NO: 1272674 - DNA, 15 bp, Homo sapiens
tacaattcaataaat

SEQ ID NO: 1272675 - DNA, 15 bp, Homo sapiens
atacaattcaataaa

SEQ ID NO: 1272676 - DNA, 15 bp, Homo sapiens
aatacaattcaataa

SEQ ID NO: 1272677 - DNA, 15 bp, Homo sapiens
aaatacaattcaata

SEQ ID NO: 1272678 - DNA, 15 bp, Homo sapiens
aaaatacaattcaat

SEQ ID NO: 1272679 - DNA, 15 bp, Homo sapiens
gaaaatacaattcaa

SEQ ID NO: 1272680 - DNA, 15 bp, Homo sapiens
agaaaatacaattca

SEQ ID NO: 1272681 - DNA, 15 bp, Homo sapiens
tagaaaatacaattc

SEQ ID NO: 1272682 - DNA, 15 bp, Homo sapiens
ttagaaaatacaatt

SEQ ID NO: 1272683 - DNA, 15 bp, Homo sapiens
tttagaaaatacaat

SEQ ID NO: 1272684 - DNA, 15 bp, Homo sapiens
ttttagaaaatacaa

SEQ ID NO: 1272685 - DNA, 15 bp, Homo sapiens
tttttagaaaataca

SEQ ID NO: 1272686 - DNA, 15 bp, Homo sapiens
ttttttagaaaatac

SEQ ID NO: 1272687 - DNA, 15 bp, Homo sapiens
attttttagaaaata

SEQ ID NO: 1272688 - DNA, 15 bp, Homo sapiens
tattttttagaaaat

SEQ ID NO: 1272689 - DNA, 15 bp, Homo sapiens
ctattttttagaaaa

SEQ ID NO: 1272690 - DNA, 15 bp, Homo sapiens
tctattttttagaaa

SEQ ID NO: 1272691 - DNA, 15 bp, Homo sapiens
atctattttttagaa

SEQ ID NO: 1272692 - DNA, 15 bp, Homo sapiens
tatctattttttaga

SEQ ID NO: 1272693 - DNA, 15 bp, Homo sapiens
ctatctattttttag

SEQ ID NO: 1272694 - DNA, 15 bp, Homo sapiens
actatctatttttta

SEQ ID NO: 1272695 - DNA, 15 bp, Homo sapiens
aactatctatttttt

SEQ ID NO: 1272696 - DNA, 15 bp, Homo sapiens
caactatctattttt

SEQ ID NO: 1272697 - DNA, 15 bp, Homo sapiens
tcaactatctatttt

SEQ ID NO: 1272698 - DNA, 15 bp, Homo sapiens
ctcaactatctattt

SEQ ID NO: 1272699 - DNA, 15 bp, Homo sapiens
actcaactatctatt

SEQ ID NO: 1272700 - DNA, 15 bp, Homo sapiens
tactcaactatctat

SEQ ID NO: 1272701 - DNA, 15 bp, Homo sapiens
ttactcaactatcta

SEQ ID NO: 1272702 - DNA, 15 bp, Homo sapiens
tttactcaactatct

SEQ ID NO: 1272703 - DNA, 15 bp, Homo sapiens
ttttactcaactatc

SEQ ID NO: 1272704 - DNA, 15 bp, Homo sapiens
cttttactcaactat

SEQ ID NO: 1272705 - DNA, 15 bp, Homo sapiens
gcttttactcaacta

SEQ ID NO: 1272706 - DNA, 15 bp, Homo sapiens
tgcttttactcaact

SEQ ID NO: 1272707 - DNA, 15 bp, Homo sapiens
ttgcttttactcaac

SEQ ID NO: 1272708 - DNA, 15 bp, Homo sapiens
cttgcttttactcaa

SEQ ID NO: 1272709 - DNA, 15 bp, Homo sapiens
gcttgcttttactca

SEQ ID NO: 1272710 - DNA, 15 bp, Homo sapiens
agcttgcttttactc

SEQ ID NO: 1272711 - DNA, 15 bp, Homo sapiens
gagcttgcttttact

SEQ ID NO: 1272712 - DNA, 15 bp, Homo sapiens
tgagcttgcttttac

SEQ ID NO: 1272713 - DNA, 15 bp, Homo sapiens
gtgagcttgctttta

SEQ ID NO: 1272714 - DNA, 15 bp, Homo sapiens
tgtgagcttgctttt

SEQ ID NO: 1272715 - DNA, 15 bp, Homo sapiens
atgtgagcttgcttt

SEQ ID NO: 1272716 - DNA, 15 bp, Homo sapiens
aatgtgagcttgctt

SEQ ID NO: 1272717 - DNA, 15 bp, Homo sapiens
taatgtgagcttgct

SEQ ID NO: 1272718 - DNA, 15 bp, Homo sapiens
gtaatgtgagcttgc

SEQ ID NO: 1272719 - DNA, 15 bp, Homo sapiens
tgtaatgtgagcttg

SEQ ID NO: 1272720 - DNA, 15 bp, Homo sapiens
atgtaatgtgagctt

SEQ ID NO: 1272721 - DNA, 15 bp, Homo sapiens
tatgtaatgtgagct

SEQ ID NO: 1272722 - DNA, 15 bp, Homo sapiens
ctatgtaatgtgagc

SEQ ID NO: 1272723 - DNA, 15 bp, Homo sapiens
tctatgtaatgtgag

SEQ ID NO: 1272724 - DNA, 15 bp, Homo sapiens
gtctatgtaatgtga

SEQ ID NO: 1272725 - DNA, 15 bp, Homo sapiens
cgtctatgtaatgtg

SEQ ID NO: 1272726 - DNA, 15 bp, Homo sapiens
ccgtctatgtaatgt

SEQ ID NO: 1272727 - DNA, 15 bp, Homo sapiens
tccgtctatgtaatg

SEQ ID NO: 1272728 - DNA, 15 bp, Homo sapiens
atccgtctatgtaat

SEQ ID NO: 1272729 - DNA, 15 bp, Homo sapiens
gatccgtctatgtaa

SEQ ID NO: 1272730 - DNA, 15 bp, Homo sapiens
tgatccgtctatgta

SEQ ID NO: 1272731 - DNA, 15 bp, Homo sapiens
gtgatccgtctatgt

SEQ ID NO: 1272732 - DNA, 15 bp, Homo sapiens
tgtgatccgtctatg

SEQ ID NO: 1272733 - DNA, 15 bp, Homo sapiens
ctgtgatccgtctat

SEQ ID NO: 1272734 - DNA, 15 bp, Homo sapiens
actgtgatccgtcta

SEQ ID NO: 1272735 - DNA, 15 bp, Homo sapiens
cactgtgatccgtct

SEQ ID NO: 1272736 - DNA, 15 bp, Homo sapiens
gcactgtgatccgtc

SEQ ID NO: 1272737 - DNA, 15 bp, Homo sapiens
tgcactgtgatccgt

SEQ ID NO: 1272738 - DNA, 15 bp, Homo sapiens
gtgcactgtgatccg

SEQ ID NO: 1272739 - DNA, 15 bp, Homo sapiens
cgtgcactgtgatcc

SEQ ID NO: 1272740 - DNA, 15 bp, Homo sapiens
ccgtgcactgtgatc

SEQ ID NO: 1272741 - DNA, 15 bp, Homo sapiens
gccgtgcactgtgat

SEQ ID NO: 1272742 - DNA, 15 bp, Homo sapiens
agccgtgcactgtga

SEQ ID NO: 1272743 - DNA, 15 bp, Homo sapiens
cagccgtgcactgtg

SEQ ID NO: 1272744 - DNA, 15 bp, Homo sapiens
gcagccgtgcactgt

SEQ ID NO: 1272745 - DNA, 15 bp, Homo sapiens
cgcagccgtgcactg

SEQ ID NO: 1272746 - DNA, 15 bp, Homo sapiens
ccgcagccgtgcact

SEQ ID NO: 1272747 - DNA, 15 bp, Homo sapiens
tccgcagccgtgcac

SEQ ID NO: 1272748 - DNA, 15 bp, Homo sapiens
ctccgcagccgtgca

SEQ ID NO: 1272749 - DNA, 15 bp, Homo sapiens
gctccgcagccgtgc

SEQ ID NO: 1272750 - DNA, 15 bp, Homo sapiens
agctccgcagccgtg

SEQ ID NO: 1272751 - DNA, 15 bp, Homo sapiens
cagctccgcagccgt

SEQ ID NO: 1272752 - DNA, 15 bp, Homo sapiens
ccagctccgcagccg

SEQ ID NO: 1272753 - DNA, 15 bp, Homo sapiens
cccagctccgcagcc

SEQ ID NO: 1272754 - DNA, 15 bp, Homo sapiens
tcccagctccgcagc

SEQ ID NO: 1272755 - DNA, 15 bp, Homo sapiens
ctcccagctccgcag

SEQ ID NO: 1272756 - DNA, 15 bp, Homo sapiens
gctcccagctccgca

SEQ ID NO: 1272757 - DNA, 15 bp, Homo sapiens
tgctcccagctccgc

SEQ ID NO: 1272758 - DNA, 15 bp, Homo sapiens
ctgctcccagctccg

SEQ ID NO: 1272759 - DNA, 15 bp, Homo sapiens
actgctcccagctcc

SEQ ID NO: 1272760 - DNA, 15 bp, Homo sapiens
cactgctcccagctc

SEQ ID NO: 1272761 - DNA, 15 bp, Homo sapiens
ccactgctcccagct

SEQ ID NO: 1272762 - DNA, 15 bp, Homo sapiens
gccactgctcccagc

SEQ ID NO: 1272763 - DNA, 15 bp, Homo sapiens
agccactgctcccag

SEQ ID NO: 1272764 - DNA, 15 bp, Homo sapiens
aagccactgctccca

SEQ ID NO: 1272765 - DNA, 15 bp, Homo sapiens
gaagccactgctccc

SEQ ID NO: 1272766 - DNA, 15 bp, Homo sapiens
cgaagccactgctcc

SEQ ID NO: 1272767 - DNA, 15 bp, Homo sapiens
acgaagccactgctc

SEQ ID NO: 1272768 - DNA, 15 bp, Homo sapiens
aacgaagccactgct

SEQ ID NO: 1272769 - DNA, 15 bp, Homo sapiens
aaacgaagccactgc

SEQ ID NO: 1272770 - DNA, 15 bp, Homo sapiens
gaaacgaagccactg

SEQ ID NO: 1272771 - DNA, 15 bp, Homo sapiens
tgaaacgaagccact

SEQ ID NO: 1272772 - DNA, 15 bp, Homo sapiens
atgaaacgaagccac

SEQ ID NO: 1272773 - DNA, 15 bp, Homo sapiens
catgaaacgaagcca

SEQ ID NO: 1272774 - DNA, 15 bp, Homo sapiens
gcatgaaacgaagcc

SEQ ID NO: 1272775 - DNA, 15 bp, Homo sapiens
tgcatgaaacgaagc

SEQ ID NO: 1272776 - DNA, 15 bp, Homo sapiens
ctgcatgaaacgaag

SEQ ID NO: 1272777 - DNA, 15 bp, Homo sapiens
cctgcatgaaacgaa

SEQ ID NO: 1272778 - DNA, 15 bp, Homo sapiens
tcctgcatgaaacga

SEQ ID NO: 1272779 - DNA, 15 bp, Homo sapiens
ttcctgcatgaaacg

SEQ ID NO: 1272780 - DNA, 15 bp, Homo sapiens
tttcctgcatgaaac

SEQ ID NO: 1272781 - DNA, 15 bp, Homo sapiens
ctttcctgcatgaaa

SEQ ID NO: 1272782 - DNA, 15 bp, Homo sapiens
tctttcctgcatgaa

SEQ ID NO: 1272783 - DNA, 15 bp, Homo sapiens
ctctttcctgcatga

SEQ ID NO: 1272784 - DNA, 15 bp, Homo sapiens
tctctttcctgcatg

SEQ ID NO: 1272785 - DNA, 15 bp, Homo sapiens
ttctctttcctgcat

SEQ ID NO: 1272786 - DNA, 15 bp, Homo sapiens
gttctctttcctgca

SEQ ID NO: 1272787 - DNA, 15 bp, Homo sapiens
agttctctttcctgc

SEQ ID NO: 1272788 - DNA, 15 bp, Homo sapiens
aagttctctttcctg

SEQ ID NO: 1272789 - DNA, 15 bp, Homo sapiens
caagttctctttcct

SEQ ID NO: 1272790 - DNA, 15 bp, Homo sapiens
ccaagttctctttcc

SEQ ID NO: 1272791 - DNA, 15 bp, Homo sapiens
accaagttctctttc

SEQ ID NO: 1272792 - DNA, 15 bp, Homo sapiens
aaccaagttctcttt

SEQ ID NO: 1272793 - DNA, 15 bp, Homo sapiens
gaaccaagttctctt

SEQ ID NO: 1272794 - DNA, 15 bp, Homo sapiens
tgaaccaagttctct

SEQ ID NO: 1272795 - DNA, 15 bp, Homo sapiens
ctgaaccaagttctc

SEQ ID NO: 1272796 - DNA, 15 bp, Homo sapiens
cctgaaccaagttct

SEQ ID NO: 1272797 - DNA, 15 bp, Homo sapiens
tcctgaaccaagttc

SEQ ID NO: 1272798 - DNA, 15 bp, Homo sapiens
ctcctgaaccaagtt

SEQ ID NO: 1272799 - DNA, 15 bp, Homo sapiens
actcctgaaccaagt

SEQ ID NO: 1272800 - DNA, 15 bp, Homo sapiens
cactcctgaaccaag

SEQ ID NO: 1272801 - DNA, 15 bp, Homo sapiens
acactcctgaaccaa

SEQ ID NO: 1272802 - DNA, 15 bp, Homo sapiens
gacactcctgaacca

SEQ ID NO: 1272803 - DNA, 15 bp, Homo sapiens
agacactcctgaacc

SEQ ID NO: 1272804 - DNA, 15 bp, Homo sapiens
tagacactcctgaac

SEQ ID NO: 1272805 - DNA, 15 bp, Homo sapiens
gtagacactcctgaa

SEQ ID NO: 1272806 - DNA, 15 bp, Homo sapiens
cgtagacactcctga

SEQ ID NO: 1272807 - DNA, 15 bp, Homo sapiens
acgtagacactcctg

SEQ ID NO: 1272808 - DNA, 15 bp, Homo sapiens
aacgtagacactcct

SEQ ID NO: 1272809 - DNA, 15 bp, Homo sapiens
caacgtagacactcc

SEQ ID NO: 1272810 - DNA, 15 bp, Homo sapiens
gcaacgtagacactc

SEQ ID NO: 1272811 - DNA, 15 bp, Homo sapiens
agcaacgtagacact

SEQ ID NO: 1272812 - DNA, 15 bp, Homo sapiens
aagcaacgtagacac

SEQ ID NO: 1272813 - DNA, 15 bp, Homo sapiens
taagcaacgtagaca

SEQ ID NO: 1272814 - DNA, 15 bp, Homo sapiens
ttaagcaacgtagac

SEQ ID NO: 1272815 - DNA, 15 bp, Homo sapiens
cttaagcaacgtaga

SEQ ID NO: 1272816 - DNA, 15 bp, Homo sapiens
tcttaagcaacgtag

SEQ ID NO: 1272817 - DNA, 15 bp, Homo sapiens
gtcttaagcaacgta

SEQ ID NO: 1272818 - DNA, 15 bp, Homo sapiens
tgtcttaagcaacgt

SEQ ID NO: 1272819 - DNA, 15 bp, Homo sapiens
ctgtcttaagcaacg

SEQ ID NO: 1272820 - DNA, 15 bp, Homo sapiens
cctgtcttaagcaac

SEQ ID NO: 1272821 - DNA, 15 bp, Homo sapiens
tcctgtcttaagcaa

SEQ ID NO: 1272822 - DNA, 15 bp, Homo sapiens
ctcctgtcttaagca

SEQ ID NO: 1272823 - DNA, 15 bp, Homo sapiens
tctcctgtcttaagc

SEQ ID NO: 1272824 - DNA, 15 bp, Homo sapiens
ctctcctgtcttaag

SEQ ID NO: 1272825 - DNA, 15 bp, Homo sapiens
gctctcctgtcttaa

SEQ ID NO: 1272826 - DNA, 15 bp, Homo sapiens
tgctctcctgtctta

SEQ ID NO: 1272827 - DNA, 15 bp, Homo sapiens
gtgctctcctgtctt

SEQ ID NO: 1272828 - DNA, 15 bp, Homo sapiens
agtgctctcctgtct

SEQ ID NO: 1272829 - DNA, 15 bp, Homo sapiens
tagtgctctcctgtc

SEQ ID NO: 1272830 - DNA, 15 bp, Homo sapiens
ttagtgctctcctgt

SEQ ID NO: 1272831 - DNA, 15 bp, Homo sapiens
tttagtgctctcctg

SEQ ID NO: 1272832 - DNA, 15 bp, Homo sapiens
ttttagtgctctcct

SEQ ID NO: 1272833 - DNA, 15 bp, Homo sapiens
tttttagtgctctcc

SEQ ID NO: 1272834 - DNA, 15 bp, Homo sapiens
atttttagtgctctc

SEQ ID NO: 1272835 - DNA, 15 bp, Homo sapiens
catttttagtgctct

SEQ ID NO: 1272836 - DNA, 15 bp, Homo sapiens
tcatttttagtgctc

SEQ ID NO: 1272837 - DNA, 15 bp, Homo sapiens
ttcatttttagtgct

SEQ ID NO: 1272838 - DNA, 15 bp, Homo sapiens
tttcatttttagtgc

SEQ ID NO: 1272839 - DNA, 15 bp, Homo sapiens
gtttcatttttagtg

SEQ ID NO: 1272840 - DNA, 15 bp, Homo sapiens
ggtttcatttttagt

SEQ ID NO: 1272841 - DNA, 15 bp, Homo sapiens
tggtttcatttttag

SEQ ID NO: 1272842 - DNA, 15 bp, Homo sapiens
atggtttcattttta

SEQ ID NO: 1272843 - DNA, 15 bp, Homo sapiens
gatggtttcattttt

SEQ ID NO: 1272844 - DNA, 15 bp, Homo sapiens
ggatggtttcatttt

SEQ ID NO: 1272845 - DNA, 15 bp, Homo sapiens
tggatggtttcattt

SEQ ID NO: 1272846 - DNA, 15 bp, Homo sapiens
ctggatggtttcatt

SEQ ID NO: 1272847 - DNA, 15 bp, Homo sapiens
gctggatggtttcat

SEQ ID NO: 1272848 - DNA, 15 bp, Homo sapiens
ggctggatggtttca

SEQ ID NO: 1272849 - DNA, 15 bp, Homo sapiens
tggctggatggtttc

SEQ ID NO: 1272850 - DNA, 15 bp, Homo sapiens
atggctggatggttt

SEQ ID NO: 1272851 - DNA, 15 bp, Homo sapiens
gatggctggatggtt

SEQ ID NO: 1272852 - DNA, 15 bp, Homo sapiens
ggatggctggatggt

SEQ ID NO: 1272853 - DNA, 15 bp, Homo sapiens
aggatggctggatgg

SEQ ID NO: 1272854 - DNA, 15 bp, Homo sapiens
gaggatggctggatg

SEQ ID NO: 1272855 - DNA, 15 bp, Homo sapiens
ggaggatggctggat

SEQ ID NO: 1272856 - DNA, 15 bp, Homo sapiens
gggaggatggctgga

SEQ ID NO: 1272857 - DNA, 15 bp, Homo sapiens
ggggaggatggctgg

SEQ ID NO: 1272858 - DNA, 15 bp, Homo sapiens
gggggaggatggctg

SEQ ID NO: 1272859 - DNA, 15 bp, Homo sapiens
tgggggaggatggct

SEQ ID NO: 1272860 - DNA, 15 bp, Homo sapiens
atgggggaggatggc

SEQ ID NO: 1272861 - DNA, 15 bp, Homo sapiens
aatgggggaggatgg

SEQ ID NO: 1272862 - DNA, 15 bp, Homo sapiens
aaatgggggaggatg

SEQ ID NO: 1272863 - DNA, 15 bp, Homo sapiens
aaaatgggggaggat

SEQ ID NO: 1272864 - DNA, 15 bp, Homo sapiens
gaaaatgggggagga

SEQ ID NO: 1272865 - DNA, 15 bp, Homo sapiens
tgaaaatgggggagg

SEQ ID NO: 1272866 - DNA, 15 bp, Homo sapiens
atgaaaatgggggag

SEQ ID NO: 1272867 - DNA, 15 bp, Homo sapiens
aatgaaaatggggga

SEQ ID NO: 1272868 - DNA, 15 bp, Homo sapiens
aaatgaaaatggggg

SEQ ID NO: 1272869 - DNA, 15 bp, Homo sapiens
aaaatgaaaatgggg

SEQ ID NO: 1272870 - DNA, 15 bp, Homo sapiens
gaaaatgaaaatggg

SEQ ID NO: 1272871 - DNA, 15 bp, Homo sapiens
tgaaaatgaaaatgg

SEQ ID NO: 1272872 - DNA, 15 bp, Homo sapiens
gtgaaaatgaaaatg

SEQ ID NO: 1272873 - DNA, 15 bp, Homo sapiens
tgtgaaaatgaaaat

SEQ ID NO: 1272874 - DNA, 15 bp, Homo sapiens
gtgtgaaaatgaaaa

SEQ ID NO: 1272875 - DNA, 15 bp, Homo sapiens
ggtgtgaaaatgaaa

SEQ ID NO: 1272876 - DNA, 15 bp, Homo sapiens
tggtgtgaaaatgaa

SEQ ID NO: 1272877 - DNA, 15 bp, Homo sapiens
ttggtgtgaaaatga

SEQ ID NO: 1272878 - DNA, 15 bp, Homo sapiens
tttggtgtgaaaatg

SEQ ID NO: 1272879 - DNA, 15 bp, Homo sapiens
ctttggtgtgaaaat

SEQ ID NO: 1272880 - DNA, 15 bp, Homo sapiens
tctttggtgtgaaaa

SEQ ID NO: 1272881 - DNA, 15 bp, Homo sapiens
ttctttggtgtgaaa

SEQ ID NO: 1272882 - DNA, 15 bp, Homo sapiens
attctttggtgtgaa

SEQ ID NO: 1272883 - DNA, 15 bp, Homo sapiens
gattctttggtgtga

SEQ ID NO: 1272884 - DNA, 15 bp, Homo sapiens
ggattctttggtgtg

SEQ ID NO: 1272885 - DNA, 15 bp, Homo sapiens
gggattctttggtgt

SEQ ID NO: 1272886 - DNA, 15 bp, Homo sapiens
tgggattctttggtg

SEQ ID NO: 1272887 - DNA, 15 bp, Homo sapiens
gtgggattctttggt

SEQ ID NO: 1272888 - DNA, 15 bp, Homo sapiens
ggtgggattctttgg

SEQ ID NO: 1272889 - DNA, 15 bp, Homo sapiens
cggtgggattctttg

SEQ ID NO: 1272890 - DNA, 15 bp, Homo sapiens
gcggtgggattcttt

SEQ ID NO: 1272891 - DNA, 15 bp, Homo sapiens
cgcggtgggattctt

SEQ ID NO: 1272892 - DNA, 15 bp, Homo sapiens
ccgcggtgggattct

SEQ ID NO: 1272893 - DNA, 15 bp, Homo sapiens
gccgcggtgggattc

SEQ ID NO: 1272894 - DNA, 15 bp, Homo sapiens
tgccgcggtgggatt

SEQ ID NO: 1272895 - DNA, 15 bp, Homo sapiens
ctgccgcggtgggat

SEQ ID NO: 1272896 - DNA, 15 bp, Homo sapiens
tctgccgcggtggga

SEQ ID NO: 1272897 - DNA, 15 bp, Homo sapiens
ctctgccgcggtggg

SEQ ID NO: 1272898 - DNA, 15 bp, Homo sapiens
cctctgccgcggtgg

SEQ ID NO: 1272899 - DNA, 15 bp, Homo sapiens
tcctctgccgcggtg

SEQ ID NO: 1272900 - DNA, 15 bp, Homo sapiens
gtcctctgccgcggt

SEQ ID NO: 1272901 - DNA, 15 bp, Homo sapiens
ggtcctctgccgcgg

SEQ ID NO: 1272902 - DNA, 15 bp, Homo sapiens
tggtcctctgccgcg

SEQ ID NO: 1272903 - DNA, 15 bp, Homo sapiens
gtggtcctctgccgc

SEQ ID NO: 1272904 - DNA, 15 bp, Homo sapiens
ggtggtcctctgccg

SEQ ID NO: 1272905 - DNA, 15 bp, Homo sapiens
cggtggtcctctgcc

SEQ ID NO: 1272906 - DNA, 15 bp, Homo sapiens
acggtggtcctctgc

SEQ ID NO: 1272907 - DNA, 15 bp, Homo sapiens
gacggtggtcctctg

SEQ ID NO: 1272908 - DNA, 15 bp, Homo sapiens
agacggtggtcctct

SEQ ID NO: 1272909 - DNA, 15 bp, Homo sapiens
gagacggtggtcctc

SEQ ID NO: 1272910 - DNA, 15 bp, Homo sapiens
agagacggtggtcct

SEQ ID NO: 1272911 - DNA, 15 bp, Homo sapiens
cagagacggtggtcc

SEQ ID NO: 1272912 - DNA, 15 bp, Homo sapiens
acagagacggtggtc

SEQ ID NO: 1272913 - DNA, 15 bp, Homo sapiens
aacagagacggtggt

SEQ ID NO: 1272914 - DNA, 15 bp, Homo sapiens
aaacagagacggtgg

SEQ ID NO: 1272915 - DNA, 15 bp, Homo sapiens
taaacagagacggtg

SEQ ID NO: 1272916 - DNA, 15 bp, Homo sapiens
ctaaacagagacggt

SEQ ID NO: 1272917 - DNA, 15 bp, Homo sapiens
tctaaacagagacgg

SEQ ID NO: 1272918 - DNA, 15 bp, Homo sapiens
gtctaaacagagacg

SEQ ID NO: 1272919 - DNA, 15 bp, Homo sapiens
tgtctaaacagagac

SEQ ID NO: 1272920 - DNA, 15 bp, Homo sapiens
ttgtctaaacagaga

SEQ ID NO: 1272921 - DNA, 15 bp, Homo sapiens
attgtctaaacagag

SEQ ID NO: 1272922 - DNA, 15 bp, Homo sapiens
gattgtctaaacaga

SEQ ID NO: 1272923 - DNA, 15 bp, Homo sapiens
cgattgtctaaacag

SEQ ID NO: 1272924 - DNA, 15 bp, Homo sapiens
ccgattgtctaaaca

SEQ ID NO: 1272925 - DNA, 15 bp, Homo sapiens
accgattgtctaaac

SEQ ID NO: 1272926 - DNA, 15 bp, Homo sapiens
caccgattgtctaaa

SEQ ID NO: 1272927 - DNA, 15 bp, Homo sapiens
tcaccgattgtctaa

SEQ ID NO: 1272928 - DNA, 15 bp, Homo sapiens
ttcaccgattgtcta

SEQ ID NO: 1272929 - DNA, 15 bp, Homo sapiens
cttcaccgattgtct

SEQ ID NO: 1272930 - DNA, 15 bp, Homo sapiens
tcttcaccgattgtc

SEQ ID NO: 1272931 - DNA, 15 bp, Homo sapiens
ttcttcaccgattgt

SEQ ID NO: 1272932 - DNA, 15 bp, Homo sapiens
attcttcaccgattg

SEQ ID NO: 1272933 - DNA, 15 bp, Homo sapiens
cattcttcaccgatt

SEQ ID NO: 1272934 - DNA, 15 bp, Homo sapiens
ccattcttcaccgat

SEQ ID NO: 1272935 - DNA, 15 bp, Homo sapiens
tccattcttcaccga

SEQ ID NO: 1272936 - DNA, 15 bp, Homo sapiens
atccattcttcaccg

SEQ ID NO: 1272937 - DNA, 15 bp, Homo sapiens
catccattcttcacc

SEQ ID NO: 1272938 - DNA, 15 bp, Homo sapiens
tcatccattcttcac

SEQ ID NO: 1272939 - DNA, 15 bp, Homo sapiens
gtcatccattcttca

SEQ ID NO: 1272940 - DNA, 15 bp, Homo sapiens
ggtcatccattcttc

SEQ ID NO: 1272941 - DNA, 15 bp, Homo sapiens
aggtcatccattctt

SEQ ID NO: 1272942 - DNA, 15 bp, Homo sapiens
gaggtcatccattct

SEQ ID NO: 1272943 - DNA, 15 bp, Homo sapiens
tgaggtcatccattc

SEQ ID NO: 1272944 - DNA, 15 bp, Homo sapiens
gtgaggtcatccatt

SEQ ID NO: 1272945 - DNA, 15 bp, Homo sapiens
agtgaggtcatccat

SEQ ID NO: 1272946 - DNA, 15 bp, Homo sapiens
aagtgaggtcatcca

SEQ ID NO: 1272947 - DNA, 15 bp, Homo sapiens
aaagtgaggtcatcc

SEQ ID NO: 1272948 - DNA, 15 bp, Homo sapiens
gaaagtgaggtcatc

SEQ ID NO: 1272949 - DNA, 15 bp, Homo sapiens
ggaaagtgaggtcat

SEQ ID NO: 1272950 - DNA, 15 bp, Homo sapiens
gggaaagtgaggtca

SEQ ID NO: 1272951 - DNA, 15 bp, Homo sapiens
ggggaaagtgaggtc

SEQ ID NO: 1272952 - DNA, 15 bp, Homo sapiens
tggggaaagtgaggt

SEQ ID NO: 1272953 - DNA, 15 bp, Homo sapiens
ttggggaaagtgagg

SEQ ID NO: 1272954 - DNA, 15 bp, Homo sapiens
gttggggaaagtgag

SEQ ID NO: 1272955 - DNA, 15 bp, Homo sapiens
tgttggggaaagtga

SEQ ID NO: 1272956 - DNA, 15 bp, Homo sapiens
ctgttggggaaagtg

SEQ ID NO: 1272957 - DNA, 15 bp, Homo sapiens
cctgttggggaaagt

SEQ ID NO: 1272958 - DNA, 15 bp, Homo sapiens
gcctgttggggaaag

SEQ ID NO: 1272959 - DNA, 15 bp, Homo sapiens
cgcctgttggggaaa

SEQ ID NO: 1272960 - DNA, 15 bp, Homo sapiens
ccgcctgttggggaa

SEQ ID NO: 1272961 - DNA, 15 bp, Homo sapiens
cccgcctgttgggga

SEQ ID NO: 1272962 - DNA, 15 bp, Homo sapiens
acccgcctgttgggg

SEQ ID NO: 1272963 - DNA, 15 bp, Homo sapiens
gacccgcctgttggg

SEQ ID NO: 1272964 - DNA, 15 bp, Homo sapiens
ggacccgcctgttgg

SEQ ID NO: 1272965 - DNA, 15 bp, Homo sapiens
aggacccgcctgttg

SEQ ID NO: 1272966 - DNA, 15 bp, Homo sapiens
caggacccgcctgtt

SEQ ID NO: 1272967 - DNA, 15 bp, Homo sapiens
tcaggacccgcctgt

SEQ ID NO: 1272968 - DNA, 15 bp, Homo sapiens
ttcaggacccgcctg

SEQ ID NO: 1272969 - DNA, 15 bp, Homo sapiens
tttcaggacccgcct

SEQ ID NO: 1272970 - DNA, 15 bp, Homo sapiens
atttcaggacccgcc

SEQ ID NO: 1272971 - DNA, 15 bp, Homo sapiens
catttcaggacccgc

SEQ ID NO: 1272972 - DNA, 15 bp, Homo sapiens
acatttcaggacccg

SEQ ID NO: 1272973 - DNA, 15 bp, Homo sapiens
aacatttcaggaccc

SEQ ID NO: 1272974 - DNA, 15 bp, Homo sapiens
taacatttcaggacc

SEQ ID NO: 1272975 - DNA, 15 bp, Homo sapiens
ataacatttcaggac

SEQ ID NO: 1272976 - DNA, 15 bp, Homo sapiens
cataacatttcagga

SEQ ID NO: 1272977 - DNA, 15 bp, Homo sapiens
gcataacatttcagg

SEQ ID NO: 1272978 - DNA, 15 bp, Homo sapiens
tgcataacatttcag

SEQ ID NO: 1272979 - DNA, 15 bp, Homo sapiens
gtgcataacatttca

SEQ ID NO: 1272980 - DNA, 15 bp, Homo sapiens
cgtgcataacatttc

SEQ ID NO: 1272981 - DNA, 15 bp, Homo sapiens
tcgtgcataacattt

SEQ ID NO: 1272982 - DNA, 15 bp, Homo sapiens
ttcgtgcataacatt

SEQ ID NO: 1272983 - DNA, 15 bp, Homo sapiens
tttcgtgcataacat

SEQ ID NO: 1272984 - DNA, 15 bp, Homo sapiens
gtttcgtgcataaca

SEQ ID NO: 1272985 - DNA, 15 bp, Homo sapiens
tgtttcgtgcataac

SEQ ID NO: 1272986 - DNA, 15 bp, Homo sapiens
ttgtttcgtgcataa

SEQ ID NO: 1272987 - DNA, 15 bp, Homo sapiens
tttgtttcgtgcata

SEQ ID NO: 1272988 - DNA, 15 bp, Homo sapiens
ttttgtttcgtgcat

SEQ ID NO: 1272989 - DNA, 15 bp, Homo sapiens
gttttgtttcgtgca

SEQ ID NO: 1272990 - DNA, 15 bp, Homo sapiens
agttttgtttcgtgc

SEQ ID NO: 1272991 - DNA, 15 bp, Homo sapiens
aagttttgtttcgtg

SEQ ID NO: 1272992 - DNA, 15 bp, Homo sapiens
caagttttgtttcgt

SEQ ID NO: 1272993 - DNA, 15 bp, Homo sapiens
tcaagttttgtttcg

SEQ ID NO: 1272994 - DNA, 15 bp, Homo sapiens
ctcaagttttgtttc

SEQ ID NO: 1272995 - DNA, 15 bp, Homo sapiens
actcaagttttgttt

SEQ ID NO: 1272996 - DNA, 15 bp, Homo sapiens
tactcaagttttgtt

SEQ ID NO: 1272997 - DNA, 15 bp, Homo sapiens
ttactcaagttttgt

SEQ ID NO: 1272998 - DNA, 15 bp, Homo sapiens
tttactcaagttttg

SEQ ID NO: 1272999 - DNA, 15 bp, Homo sapiens
atttactcaagtttt

SEQ ID NO: 1273000 - DNA, 15 bp, Homo sapiens
catttactcaagttt

SEQ ID NO: 1273001 - DNA, 15 bp, Homo sapiens
gcatttactcaagtt

SEQ ID NO: 1273002 - DNA, 15 bp, Homo sapiens
ggcatttactcaagt

SEQ ID NO: 1273003 - DNA, 15 bp, Homo sapiens
gggcatttactcaag

SEQ ID NO: 1273004 - DNA, 15 bp, Homo sapiens
tgggcatttactcaa

SEQ ID NO: 1273005 - DNA, 15 bp, Homo sapiens
ttgggcatttactca

SEQ ID NO: 1273006 - DNA, 15 bp, Homo sapiens
gttgggcatttactc

SEQ ID NO: 1273007 - DNA, 15 bp, Homo sapiens
tgttgggcatttact

SEQ ID NO: 1273008 - DNA, 15 bp, Homo sapiens
ctgttgggcatttac

SEQ ID NO: 1273009 - DNA, 15 bp, Homo sapiens
tctgttgggcattta

SEQ ID NO: 1273010 - DNA, 15 bp, Homo sapiens
ctctgttgggcattt

SEQ ID NO: 1273011 - DNA, 15 bp, Homo sapiens
cctctgttgggcatt

SEQ ID NO: 1273012 - DNA, 15 bp, Homo sapiens
acctctgttgggcat

SEQ ID NO: 1273013 - DNA, 15 bp, Homo sapiens
gacctctgttgggca

SEQ ID NO: 1273014 - DNA, 15 bp, Homo sapiens
tgacctctgttgggc

SEQ ID NO: 1273015 - DNA, 15 bp, Homo sapiens
gtgacctctgttggg

SEQ ID NO: 1273016 - DNA, 15 bp, Homo sapiens
agtgacctctgttgg

SEQ ID NO: 1273017 - DNA, 15 bp, Homo sapiens
cagtgacctctgttg

SEQ ID NO: 1273018 - DNA, 15 bp, Homo sapiens
acagtgacctctgtt

SEQ ID NO: 1273019 - DNA, 15 bp, Homo sapiens
aacagtgacctctgt

SEQ ID NO: 1273020 - DNA, 15 bp, Homo sapiens
aaacagtgacctctg

SEQ ID NO: 1273021 - DNA, 15 bp, Homo sapiens
aaaacagtgacctct

SEQ ID NO: 1273022 - DNA, 15 bp, Homo sapiens
taaaacagtgacctc

SEQ ID NO: 1273023 - DNA, 15 bp, Homo sapiens
ataaaacagtgacct

SEQ ID NO: 1273024 - DNA, 15 bp, Homo sapiens
gataaaacagtgacc

SEQ ID NO: 1273025 - DNA, 15 bp, Homo sapiens
cgataaaacagtgac

SEQ ID NO: 1273026 - DNA, 15 bp, Homo sapiens
tcgataaaacagtga

SEQ ID NO: 1273027 - DNA, 15 bp, Homo sapiens
atcgataaaacagtg

SEQ ID NO: 1273028 - DNA, 15 bp, Homo sapiens
gatcgataaaacagt

SEQ ID NO: 1273029 - DNA, 15 bp, Homo sapiens
agatcgataaaacag

SEQ ID NO: 1273030 - DNA, 15 bp, Homo sapiens
aagatcgataaaaca

SEQ ID NO: 1273031 - DNA, 15 bp, Homo sapiens
caagatcgataaaac

SEQ ID NO: 1273032 - DNA, 15 bp, Homo sapiens
tcaagatcgataaaa

SEQ ID NO: 1273033 - DNA, 15 bp, Homo sapiens
ttcaagatcgataaa

SEQ ID NO: 1273034 - DNA, 15 bp, Homo sapiens
cttcaagatcgataa

SEQ ID NO: 1273035 - DNA, 15 bp, Homo sapiens
tcttcaagatcgata

SEQ ID NO: 1273036 - DNA, 15 bp, Homo sapiens
ctcttcaagatcgat

SEQ ID NO: 1273037 - DNA, 15 bp, Homo sapiens
tctcttcaagatcga

SEQ ID NO: 1273038 - DNA, 15 bp, Homo sapiens
atctcttcaagatcg

SEQ ID NO: 1273039 - DNA, 15 bp, Homo sapiens
gatctcttcaagatc

SEQ ID NO: 1273040 - DNA, 15 bp, Homo sapiens
agatctcttcaagat

SEQ ID NO: 1273041 - DNA, 15 bp, Homo sapiens
gagatctcttcaaga

SEQ ID NO: 1273042 - DNA, 15 bp, Homo sapiens
agagatctcttcaag

SEQ ID NO: 1273043 - DNA, 15 bp, Homo sapiens
aagagatctcttcaa

SEQ ID NO: 1273044 - DNA, 15 bp, Homo sapiens
gaagagatctcttca

SEQ ID NO: 1273045 - DNA, 15 bp, Homo sapiens
agaagagatctcttc

SEQ ID NO: 1273046 - DNA, 15 bp, Homo sapiens
aagaagagatctctt

SEQ ID NO: 1273047 - DNA, 15 bp, Homo sapiens
taagaagagatctct

SEQ ID NO: 1273048 - DNA, 15 bp, Homo sapiens
ctaagaagagatctc

SEQ ID NO: 1273049 - DNA, 15 bp, Homo sapiens
gctaagaagagatct

SEQ ID NO: 1273050 - DNA, 15 bp, Homo sapiens
tgctaagaagagatc

SEQ ID NO: 1273051 - DNA, 15 bp, Homo sapiens
ttgctaagaagagat

SEQ ID NO: 1273052 - DNA, 15 bp, Homo sapiens
tttgctaagaagaga

SEQ ID NO: 1273053 - DNA, 15 bp, Homo sapiens
ctttgctaagaagag

SEQ ID NO: 1273054 - DNA, 15 bp, Homo sapiens
gctttgctaagaaga

SEQ ID NO: 1273055 - DNA, 15 bp, Homo sapiens
tgctttgctaagaag

SEQ ID NO: 1273056 - DNA, 15 bp, Homo sapiens
ttgctttgctaagaa

SEQ ID NO: 1273057 - DNA, 15 bp, Homo sapiens
tttgctttgctaaga

SEQ ID NO: 1273058 - DNA, 15 bp, Homo sapiens
ctttgctttgctaag

SEQ ID NO: 1273059 - DNA, 15 bp, Homo sapiens
tctttgctttgctaa

SEQ ID NO: 1273060 - DNA, 15 bp, Homo sapiens
ttctttgctttgcta

SEQ ID NO: 1273061 - DNA, 15 bp, Homo sapiens
tttctttgctttgct

SEQ ID NO: 1273062 - DNA, 15 bp, Homo sapiens
gtttctttgctttgc

SEQ ID NO: 1273063 - DNA, 15 bp, Homo sapiens
ggtttctttgctttg

SEQ ID NO: 1273064 - DNA, 15 bp, Homo sapiens
cggtttctttgcttt

SEQ ID NO: 1273065 - DNA, 15 bp, Homo sapiens
tcggtttctttgctt

SEQ ID NO: 1273066 - DNA, 15 bp, Homo sapiens
atcggtttctttgct

SEQ ID NO: 1273067 - DNA, 15 bp, Homo sapiens
aatcggtttctttgc

SEQ ID NO: 1273068 - DNA, 15 bp, Homo sapiens
caatcggtttctttg

SEQ ID NO: 1273069 - DNA, 15 bp, Homo sapiens
acaatcggtttcttt

SEQ ID NO: 1273070 - DNA, 15 bp, Homo sapiens
cacaatcggtttctt

SEQ ID NO: 1273071 - DNA, 15 bp, Homo sapiens
tcacaatcggtttct

SEQ ID NO: 1273072 - DNA, 15 bp, Homo sapiens
ttcacaatcggtttc

SEQ ID NO: 1273073 - DNA, 15 bp, Homo sapiens
cttcacaatcggttt

SEQ ID NO: 1273074 - DNA, 15 bp, Homo sapiens
ccttcacaatcggtt

SEQ ID NO: 1273075 - DNA, 15 bp, Homo sapiens
accttcacaatcggt

SEQ ID NO: 1273076 - DNA, 15 bp, Homo sapiens
taccttcacaatcgg

SEQ ID NO: 1273077 - DNA, 15 bp, Homo sapiens
ttaccttcacaatcg

SEQ ID NO: 1273078 - DNA, 15 bp, Homo sapiens
gttaccttcacaatc

SEQ ID NO: 1273079 - DNA, 15 bp, Homo sapiens
tgttaccttcacaat

SEQ ID NO: 1273080 - DNA, 15 bp, Homo sapiens
gtgttaccttcacaa

SEQ ID NO: 1273081 - DNA, 15 bp, Homo sapiens
ggtgttaccttcaca

SEQ ID NO: 1273082 - DNA, 15 bp, Homo sapiens
tggtgttaccttcac

SEQ ID NO: 1273083 - DNA, 15 bp, Homo sapiens
atggtgttaccttca

SEQ ID NO: 1273084 - DNA, 15 bp, Homo sapiens
catggtgttaccttc

SEQ ID NO: 1273085 - DNA, 15 bp, Homo sapiens
acatggtgttacctt

SEQ ID NO: 1273086 - DNA, 15 bp, Homo sapiens
aacatggtgttacct

SEQ ID NO: 1273087 - DNA, 15 bp, Homo sapiens
aaacatggtgttacc

SEQ ID NO: 1273088 - DNA, 15 bp, Homo sapiens
caaacatggtgttac

SEQ ID NO: 1273089 - DNA, 15 bp, Homo sapiens
ccaaacatggtgtta

SEQ ID NO: 1273090 - DNA, 15 bp, Homo sapiens
accaaacatggtgtt

SEQ ID NO: 1273091 - DNA, 15 bp, Homo sapiens
taccaaacatggtgt

SEQ ID NO: 1273092 - DNA, 15 bp, Homo sapiens
ttaccaaacatggtg

SEQ ID NO: 1273093 - DNA, 15 bp, Homo sapiens
tttaccaaacatggt

SEQ ID NO: 1273094 - DNA, 15 bp, Homo sapiens
atttaccaaacatgg

SEQ ID NO: 1273095 - DNA, 15 bp, Homo sapiens
tatttaccaaacatg

SEQ ID NO: 1273096 - DNA, 15 bp, Homo sapiens
ttatttaccaaacat

SEQ ID NO: 1273097 - DNA, 15 bp, Homo sapiens
cttatttaccaaaca

SEQ ID NO: 1273098 - DNA, 15 bp, Homo sapiens
acttatttaccaaac

SEQ ID NO: 1273099 - DNA, 15 bp, Homo sapiens
cacttatttaccaaa

SEQ ID NO: 1273100 - DNA, 15 bp, Homo sapiens
acacttatttaccaa

SEQ ID NO: 1273101 - DNA, 15 bp, Homo sapiens
aacacttatttacca

SEQ ID NO: 1273102 - DNA, 15 bp, Homo sapiens
aaacacttatttacc

SEQ ID NO: 1273103 - DNA, 15 bp, Homo sapiens
aaaacacttatttac

SEQ ID NO: 1273104 - DNA, 15 bp, Homo sapiens
caaaacacttattta

SEQ ID NO: 1273105 - DNA, 15 bp, Homo sapiens
ccaaaacacttattt

SEQ ID NO: 1273106 - DNA, 15 bp, Homo sapiens
accaaaacacttatt

SEQ ID NO: 1273107 - DNA, 15 bp, Homo sapiens
caccaaaacacttat

SEQ ID NO: 1273108 - DNA, 15 bp, Homo sapiens
acaccaaaacactta

SEQ ID NO: 1273109 - DNA, 15 bp, Homo sapiens
aacaccaaaacactt

SEQ ID NO: 1273110 - DNA, 15 bp, Homo sapiens
caacaccaaaacact

SEQ ID NO: 1273111 - DNA, 15 bp, Homo sapiens
acaacaccaaaacac

SEQ ID NO: 1273112 - DNA, 15 bp, Homo sapiens
cacaacaccaaaaca

SEQ ID NO: 1273113 - DNA, 15 bp, Homo sapiens
gcacaacaccaaaac

SEQ ID NO: 1273114 - DNA, 15 bp, Homo sapiens
tgcacaacaccaaaa

SEQ ID NO: 1273115 - DNA, 15 bp, Homo sapiens
ttgcacaacaccaaa

SEQ ID NO: 1273116 - DNA, 15 bp, Homo sapiens
cttgcacaacaccaa

SEQ ID NO: 1273117 - DNA, 15 bp, Homo sapiens
ccttgcacaacacca

SEQ ID NO: 1273118 - DNA, 15 bp, Homo sapiens
cccttgcacaacacc

SEQ ID NO: 1273119 - DNA, 15 bp, Homo sapiens
acccttgcacaacac

SEQ ID NO: 1273120 - DNA, 15 bp, Homo sapiens
gacccttgcacaaca

SEQ ID NO: 1273121 - DNA, 15 bp, Homo sapiens
agacccttgcacaac

SEQ ID NO: 1273122 - DNA, 15 bp, Homo sapiens
cagacccttgcacaa

SEQ ID NO: 1273123 - DNA, 15 bp, Homo sapiens
ccagacccttgcaca

SEQ ID NO: 1273124 - DNA, 15 bp, Homo sapiens
accagacccttgcac

SEQ ID NO: 1273125 - DNA, 15 bp, Homo sapiens
aaccagacccttgca

SEQ ID NO: 1273126 - DNA, 15 bp, Homo sapiens
aaaccagacccttgc

SEQ ID NO: 1273127 - DNA, 15 bp, Homo sapiens
gaaaccagacccttg

SEQ ID NO: 1273128 - DNA, 15 bp, Homo sapiens
tgaaaccagaccctt

SEQ ID NO: 1273129 - DNA, 15 bp, Homo sapiens
ctgaaaccagaccct

SEQ ID NO: 1273130 - DNA, 15 bp, Homo sapiens
gctgaaaccagaccc

SEQ ID NO: 1273131 - DNA, 15 bp, Homo sapiens
ggctgaaaccagacc

SEQ ID NO: 1273132 - DNA, 15 bp, Homo sapiens
aggctgaaaccagac

SEQ ID NO: 1273133 - DNA, 15 bp, Homo sapiens
caggctgaaaccaga

SEQ ID NO: 1273134 - DNA, 15 bp, Homo sapiens
tcaggctgaaaccag

SEQ ID NO: 1273135 - DNA, 15 bp, Homo sapiens
ttcaggctgaaacca

SEQ ID NO: 1273136 - DNA, 15 bp, Homo sapiens
cttcaggctgaaacc

SEQ ID NO: 1273137 - DNA, 15 bp, Homo sapiens
gcttcaggctgaaac

SEQ ID NO: 1273138 - DNA, 15 bp, Homo sapiens
ggcttcaggctgaaa

SEQ ID NO: 1273139 - DNA, 15 bp, Homo sapiens
tggcttcaggctgaa

SEQ ID NO: 1273140 - DNA, 15 bp, Homo sapiens
atggcttcaggctga

SEQ ID NO: 1273141 - DNA, 15 bp, Homo sapiens
gatggcttcaggctg

SEQ ID NO: 1273142 - DNA, 15 bp, Homo sapiens
agatggcttcaggct

SEQ ID NO: 1273143 - DNA, 15 bp, Homo sapiens
gagatggcttcaggc

SEQ ID NO: 1273144 - DNA, 15 bp, Homo sapiens
tgagatggcttcagg

SEQ ID NO: 1273145 - DNA, 15 bp, Homo sapiens
ctgagatggcttcag

SEQ ID NO: 1273146 - DNA, 15 bp, Homo sapiens
tctgagatggcttca

SEQ ID NO: 1273147 - DNA, 15 bp, Homo sapiens
ctctgagatggcttc

SEQ ID NO: 1273148 - DNA, 15 bp, Homo sapiens
gctctgagatggctt

SEQ ID NO: 1273149 - DNA, 15 bp, Homo sapiens
agctctgagatggct

SEQ ID NO: 1273150 - DNA, 15 bp, Homo sapiens
cagctctgagatggc

SEQ ID NO: 1273151 - DNA, 15 bp, Homo sapiens
acagctctgagatgg

SEQ ID NO: 1273152 - DNA, 15 bp, Homo sapiens
gacagctctgagatg

SEQ ID NO: 1273153 - DNA, 15 bp, Homo sapiens
agacagctctgagat

SEQ ID NO: 1273154 - DNA, 15 bp, Homo sapiens
cagacagctctgaga

SEQ ID NO: 1273155 - DNA, 15 bp, Homo sapiens
ccagacagctctgag

SEQ ID NO: 1273156 - DNA, 15 bp, Homo sapiens
cccagacagctctga

SEQ ID NO: 1273157 - DNA, 15 bp, Homo sapiens
acccagacagctctg

SEQ ID NO: 1273158 - DNA, 15 bp, Homo sapiens
gacccagacagctct

SEQ ID NO: 1273159 - DNA, 15 bp, Homo sapiens
agacccagacagctc

SEQ ID NO: 1273160 - DNA, 15 bp, Homo sapiens
gagacccagacagct

SEQ ID NO: 1273161 - DNA, 15 bp, Homo sapiens
agagacccagacagc

SEQ ID NO: 1273162 - DNA, 15 bp, Homo sapiens
cagagacccagacag

SEQ ID NO: 1273163 - DNA, 15 bp, Homo sapiens
ccagagacccagaca

SEQ ID NO: 1273164 - DNA, 15 bp, Homo sapiens
tccagagacccagac

SEQ ID NO: 1273165 - DNA, 15 bp, Homo sapiens
ctccagagacccaga

SEQ ID NO: 1273166 - DNA, 15 bp, Homo sapiens
tctccagagacccag

SEQ ID NO: 1273167 - DNA, 15 bp, Homo sapiens
gtctccagagaccca

SEQ ID NO: 1273168 - DNA, 15 bp, Homo sapiens
agtctccagagaccc

SEQ ID NO: 1273169 - DNA, 15 bp, Homo sapiens
cagtctccagagacc

SEQ ID NO: 1273170 - DNA, 15 bp, Homo sapiens
ccagtctccagagac

SEQ ID NO: 1273171 - DNA, 15 bp, Homo sapiens
tccagtctccagaga

SEQ ID NO: 1273172 - DNA, 15 bp, Homo sapiens
ctccagtctccagag

SEQ ID NO: 1273173 - DNA, 15 bp, Homo sapiens
cctccagtctccaga

SEQ ID NO: 1273174 - DNA, 15 bp, Homo sapiens
ccctccagtctccag

SEQ ID NO: 1273175 - DNA, 15 bp, Homo sapiens
tccctccagtctcca

SEQ ID NO: 1273176 - DNA, 15 bp, Homo sapiens
gtccctccagtctcc

SEQ ID NO: 1273177 - DNA, 15 bp, Homo sapiens
tgtccctccagtctc

SEQ ID NO: 1273178 - DNA, 15 bp, Homo sapiens
ttgtccctccagtct

SEQ ID NO: 1273179 - DNA, 15 bp, Homo sapiens
gttgtccctccagtc

SEQ ID NO: 1273180 - DNA, 15 bp, Homo sapiens
ggttgtccctccagt

SEQ ID NO: 1273181 - DNA, 15 bp, Homo sapiens
aggttgtccctccag

SEQ ID NO: 1273182 - DNA, 15 bp, Homo sapiens
taggttgtccctcca

SEQ ID NO: 1273183 - DNA, 15 bp, Homo sapiens
ctaggttgtccctcc

SEQ ID NO: 1273184 - DNA, 15 bp, Homo sapiens
actaggttgtccctc

SEQ ID NO: 1273185 - DNA, 15 bp, Homo sapiens
gactaggttgtccct

SEQ ID NO: 1273186 - DNA, 15 bp, Homo sapiens
agactaggttgtccc

SEQ ID NO: 1273187 - DNA, 15 bp, Homo sapiens
tagactaggttgtcc

SEQ ID NO: 1273188 - DNA, 15 bp, Homo sapiens
ctagactaggttgtc

SEQ ID NO: 1273189 - DNA, 15 bp, Homo sapiens
tctagactaggttgt

SEQ ID NO: 1273190 - DNA, 15 bp, Homo sapiens
ctctagactaggttg

SEQ ID NO: 1273191 - DNA, 15 bp, Homo sapiens
gctctagactaggtt

SEQ ID NO: 1273192 - DNA, 15 bp, Homo sapiens
ggctctagactaggt

SEQ ID NO: 1273193 - DNA, 15 bp, Homo sapiens
gggctctagactagg

SEQ ID NO: 1273194 - DNA, 15 bp, Homo sapiens
tgggctctagactag

SEQ ID NO: 1273195 - DNA, 15 bp, Homo sapiens
atgggctctagacta

SEQ ID NO: 1273196 - DNA, 15 bp, Homo sapiens
aatgggctctagact

SEQ ID NO: 1273197 - DNA, 15 bp, Homo sapiens
aaatgggctctagac

SEQ ID NO: 1273198 - DNA, 15 bp, Homo sapiens
caaatgggctctaga

SEQ ID NO: 1273199 - DNA, 15 bp, Homo sapiens
gcaaatgggctctag

SEQ ID NO: 1273200 - DNA, 15 bp, Homo sapiens
tgcaaatgggctcta

SEQ ID NO: 1273201 - DNA, 15 bp, Homo sapiens
atgcaaatgggctct

SEQ ID NO: 1273202 - DNA, 15 bp, Homo sapiens
catgcaaatgggctc

SEQ ID NO: 1273203 - DNA, 15 bp, Homo sapiens
tcatgcaaatgggct

SEQ ID NO: 1273204 - DNA, 15 bp, Homo sapiens
ctcatgcaaatgggc

SEQ ID NO: 1273205 - DNA, 15 bp, Homo sapiens
tctcatgcaaatggg

SEQ ID NO: 1273206 - DNA, 15 bp, Homo sapiens
gtctcatgcaaatgg

SEQ ID NO: 1273207 - DNA, 15 bp, Homo sapiens
ggtctcatgcaaatg

SEQ ID NO: 1273208 - DNA, 15 bp, Homo sapiens
tggtctcatgcaaat

SEQ ID NO: 1273209 - DNA, 15 bp, Homo sapiens
ttggtctcatgcaaa

SEQ ID NO: 1273210 - DNA, 15 bp, Homo sapiens
cttggtctcatgcaa

SEQ ID NO: 1273211 - DNA, 15 bp, Homo sapiens
ccttggtctcatgca

SEQ ID NO: 1273212 - DNA, 15 bp, Homo sapiens
tccttggtctcatgc

SEQ ID NO: 1273213 - DNA, 15 bp, Homo sapiens
atccttggtctcatg

SEQ ID NO: 1273214 - DNA, 15 bp, Homo sapiens
gatccttggtctcat

SEQ ID NO: 1273215 - DNA, 15 bp, Homo sapiens
ggatccttggtctca

SEQ ID NO: 1273216 - DNA, 15 bp, Homo sapiens
aggatccttggtctc

SEQ ID NO: 1273217 - DNA, 15 bp, Homo sapiens
gaggatccttggtct

SEQ ID NO: 1273218 - DNA, 15 bp, Homo sapiens
ggaggatccttggtc

SEQ ID NO: 1273219 - DNA, 15 bp, Homo sapiens
aggaggatccttggt

SEQ ID NO: 1273220 - DNA, 15 bp, Homo sapiens
caggaggatccttgg

SEQ ID NO: 1273221 - DNA, 15 bp, Homo sapiens
gcaggaggatccttg

SEQ ID NO: 1273222 - DNA, 15 bp, Homo sapiens
tgcaggaggatcctt

SEQ ID NO: 1273223 - DNA, 15 bp, Homo sapiens
ttgcaggaggatcct

SEQ ID NO: 1273224 - DNA, 15 bp, Homo sapiens
cttgcaggaggatcc

SEQ ID NO: 1273225 - DNA, 15 bp, Homo sapiens
tcttgcaggaggatc

SEQ ID NO: 1273226 - DNA, 15 bp, Homo sapiens
ctcttgcaggaggat

SEQ ID NO: 1273227 - DNA, 15 bp, Homo sapiens
tctcttgcaggagga

SEQ ID NO: 1273228 - DNA, 15 bp, Homo sapiens
gtctcttgcaggagg

SEQ ID NO: 1273229 - DNA, 15 bp, Homo sapiens
tgtctcttgcaggag

SEQ ID NO: 1273230 - DNA, 15 bp, Homo sapiens
gtgtctcttgcagga

SEQ ID NO: 1273231 - DNA, 15 bp, Homo sapiens
ggtgtctcttgcagg

SEQ ID NO: 1273232 - DNA, 15 bp, Homo sapiens
tggtgtctcttgcag

SEQ ID NO: 1273233 - DNA, 15 bp, Homo sapiens
atggtgtctcttgca

SEQ ID NO: 1273234 - DNA, 15 bp, Homo sapiens
gatggtgtctcttgc

SEQ ID NO: 1273235 - DNA, 15 bp, Homo sapiens
ggatggtgtctcttg

SEQ ID NO: 1273236 - DNA, 15 bp, Homo sapiens
aggatggtgtctctt

SEQ ID NO: 1273237 - DNA, 15 bp, Homo sapiens
caggatggtgtctct

SEQ ID NO: 1273238 - DNA, 15 bp, Homo sapiens
tcaggatggtgtctc

SEQ ID NO: 1273239 - DNA, 15 bp, Homo sapiens
ctcaggatggtgtct

SEQ ID NO: 1273240 - DNA, 15 bp, Homo sapiens
cctcaggatggtgtc

SEQ ID NO: 1273241 - DNA, 15 bp, Homo sapiens
ccctcaggatggtgt

SEQ ID NO: 1273242 - DNA, 15 bp, Homo sapiens
tccctcaggatggtg

SEQ ID NO: 1273243 - DNA, 15 bp, Homo sapiens
ttccctcaggatggt

SEQ ID NO: 1273244 - DNA, 15 bp, Homo sapiens
cttccctcaggatgg

SEQ ID NO: 1273245 - DNA, 15 bp, Homo sapiens
tcttccctcaggatg

SEQ ID NO: 1273246 - DNA, 15 bp, Homo sapiens
ctcttccctcaggat

SEQ ID NO: 1273247 - DNA, 15 bp, Homo sapiens
cctcttccctcagga

SEQ ID NO: 1273248 - DNA, 15 bp, Homo sapiens
ccctcttccctcagg

SEQ ID NO: 1273249 - DNA, 15 bp, Homo sapiens
gccctcttccctcag

SEQ ID NO: 1273250 - DNA, 15 bp, Homo sapiens
agccctcttccctca

SEQ ID NO: 1273251 - DNA, 15 bp, Homo sapiens
gaagccctcttccct

SEQ ID NO: 1273252 - DNA, 15 bp, Homo sapiens
agaagccctcttccc

SEQ ID NO: 1273253 - DNA, 15 bp, Homo sapiens
cagaagccctcttcc

SEQ ID NO: 1273254 - DNA, 15 bp, Homo sapiens
tcagaagccctcttc

SEQ ID NO: 1273255 - DNA, 15 bp, Homo sapiens
ttcagaagccctctt

SEQ ID NO: 1273256 - DNA, 15 bp, Homo sapiens
gttcagaagccctct

SEQ ID NO: 1273257 - DNA, 15 bp, Homo sapiens
ggttcagaagccctc

SEQ ID NO: 1273258 - DNA, 15 bp, Homo sapiens
tggttcagaagccct

SEQ ID NO: 1273259 - DNA, 15 bp, Homo sapiens
ctggttcagaagccc

SEQ ID NO: 1273260 - DNA, 15 bp, Homo sapiens
gctggttcagaagcc

SEQ ID NO: 1273261 - DNA, 15 bp, Homo sapiens
agctggttcagaagc

SEQ ID NO: 1273262 - DNA, 15 bp, Homo sapiens
aagctggttcagaag

SEQ ID NO: 1273263 - DNA, 15 bp, Homo sapiens
caagctggttcagaa

SEQ ID NO: 1273264 - DNA, 15 bp, Homo sapiens
tcaagctggttcaga

SEQ ID NO: 1273265 - DNA, 15 bp, Homo sapiens
gtcaagctggttcag

SEQ ID NO: 1273266 - DNA, 15 bp, Homo sapiens
ggtcaagctggttca

SEQ ID NO: 1273267 - DNA, 15 bp, Homo sapiens
gggtcaagctggttc

SEQ ID NO: 1273268 - DNA, 15 bp, Homo sapiens
tgggtcaagctggtt

SEQ ID NO: 1273269 - DNA, 15 bp, Homo sapiens
ttgggtcaagctggt

SEQ ID NO: 1273270 - DNA, 15 bp, Homo sapiens
attgggtcaagctgg

SEQ ID NO: 1273271 - DNA, 15 bp, Homo sapiens
tattgggtcaagctg

SEQ ID NO: 1273272 - DNA, 15 bp, Homo sapiens
ttattgggtcaagct

SEQ ID NO: 1273273 - DNA, 15 bp, Homo sapiens
cttattgggtcaagc

SEQ ID NO: 1273274 - DNA, 15 bp, Homo sapiens
tcttattgggtcaag

SEQ ID NO: 1273275 - DNA, 15 bp, Homo sapiens
ttcttattgggtcaa

SEQ ID NO: 1273276 - DNA, 15 bp, Homo sapiens
tttcttattgggtca

SEQ ID NO: 1273277 - DNA, 15 bp, Homo sapiens
atttcttattgggtc

SEQ ID NO: 1273278 - DNA, 15 bp, Homo sapiens
aatttcttattgggt

SEQ ID NO: 1273279 - DNA, 15 bp, Homo sapiens
gaatttcttattggg

SEQ ID NO: 1273280 - DNA, 15 bp, Homo sapiens
agaatttcttattgg

SEQ ID NO: 1273281 - DNA, 15 bp, Homo sapiens
aagaatttcttattg

SEQ ID NO: 1273282 - DNA, 15 bp, Homo sapiens
caagaatttcttatt

SEQ ID NO: 1273283 - DNA, 15 bp, Homo sapiens
ccaagaatttcttat

SEQ ID NO: 1273284 - DNA, 15 bp, Homo sapiens
cccaagaatttctta

SEQ ID NO: 1273285 - DNA, 15 bp, Homo sapiens
acccaagaatttctt

SEQ ID NO: 1273286 - DNA, 15 bp, Homo sapiens
cacccaagaatttct

SEQ ID NO: 1273287 - DNA, 15 bp, Homo sapiens
gcacccaagaatttc

SEQ ID NO: 1273288 - DNA, 15 bp, Homo sapiens
ggcacccaagaattt

SEQ ID NO: 1273289 - DNA, 15 bp, Homo sapiens
cggcacccaagaatt

SEQ ID NO: 1273290 - DNA, 15 bp, Homo sapiens
tcggcacccaagaat

SEQ ID NO: 1273291 - DNA, 15 bp, Homo sapiens
gtcggcacccaagaa

SEQ ID NO: 1273292 - DNA, 15 bp, Homo sapiens
cgtcggcacccaaga

SEQ ID NO: 1273293 - DNA, 15 bp, Homo sapiens
gcgtcggcacccaag

SEQ ID NO: 1273294 - DNA, 15 bp, Homo sapiens
cgcgtcggcacccaa

SEQ ID NO: 1273295 - DNA, 15 bp, Homo sapiens
ccgcgtcggcaccca

SEQ ID NO: 1273296 - DNA, 15 bp, Homo sapiens
tccgcgtcggcaccc

SEQ ID NO: 1273297 - DNA, 15 bp, Homo sapiens
ttccgcgtcggcacc

SEQ ID NO: 1273298 - DNA, 15 bp, Homo sapiens
cttccgcgtcggcac

SEQ ID NO: 1273299 - DNA, 15 bp, Homo sapiens
gcttccgcgtcggca

SEQ ID NO: 1273300 - DNA, 15 bp, Homo sapiens
tgcttccgcgtcggc

SEQ ID NO: 1273301 - DNA, 15 bp, Homo sapiens
ctgcttccgcgtcgg

SEQ ID NO: 1273302 - DNA, 15 bp, Homo sapiens
tctgcttccgcgtcg

SEQ ID NO: 1273303 - DNA, 15 bp, Homo sapiens
atctgcttccgcgtc

SEQ ID NO: 1273304 - DNA, 15 bp, Homo sapiens
aatctgcttccgcgt

SEQ ID NO: 1273305 - DNA, 15 bp, Homo sapiens
gaatctgcttccgcg

SEQ ID NO: 1273306 - DNA, 15 bp, Homo sapiens
tgaatctgcttccgc

SEQ ID NO: 1273307 - DNA, 15 bp, Homo sapiens
ctgaatctgcttccg

SEQ ID NO: 1273308 - DNA, 15 bp, Homo sapiens
tctgaatctgcttcc

SEQ ID NO: 1273309 - DNA, 15 bp, Homo sapiens
ctctgaatctgcttc

SEQ ID NO: 1273310 - DNA, 15 bp, Homo sapiens
gctctgaatctgctt

SEQ ID NO: 1273311 - DNA, 15 bp, Homo sapiens
ggctctgaatctgct

SEQ ID NO: 1273312 - DNA, 15 bp, Homo sapiens
aggctctgaatctgc

SEQ ID NO: 1273313 - DNA, 15 bp, Homo sapiens
taggctctgaatctg

SEQ ID NO: 1273314 - DNA, 15 bp, Homo sapiens
ctaggctctgaatct

SEQ ID NO: 1273315 - DNA, 15 bp, Homo sapiens
tctaggctctgaatc

SEQ ID NO: 1273316 - DNA, 15 bp, Homo sapiens
ctctaggctctgaat

SEQ ID NO: 1273317 - DNA, 15 bp, Homo sapiens
gctctaggctctgaa

SEQ ID NO: 1273318 - DNA, 15 bp, Homo sapiens
ggctctaggctctga

SEQ ID NO: 1273319 - DNA, 15 bp, Homo sapiens
cggctctaggctctg

SEQ ID NO: 1273320 - DNA, 15 bp, Homo sapiens
acggctctaggctct

SEQ ID NO: 1273321 - DNA, 15 bp, Homo sapiens
cacggctctaggctc

SEQ ID NO: 1273322 - DNA, 15 bp, Homo sapiens
gcacggctctaggct

SEQ ID NO: 1273323 - DNA, 15 bp, Homo sapiens
ggcacggctctaggc

SEQ ID NO: 1273324 - DNA, 15 bp, Homo sapiens
aggcacggctctagg

SEQ ID NO: 1273325 - DNA, 15 bp, Homo sapiens
caggcacggctctag

SEQ ID NO: 1273326 - DNA, 15 bp, Homo sapiens
gcaggcacggctcta

SEQ ID NO: 1273327 - DNA, 15 bp, Homo sapiens
cgcaggcacggctct

SEQ ID NO: 1273328 - DNA, 15 bp, Homo sapiens
acgcaggcacggctc

SEQ ID NO: 1273329 - DNA, 15 bp, Homo sapiens
gacgcaggcacggct

SEQ ID NO: 1273330 - DNA, 15 bp, Homo sapiens
ggacgcaggcacggc

SEQ ID NO: 1273331 - DNA, 15 bp, Homo sapiens
cggacgcaggcacgg

SEQ ID NO: 1273332 - DNA, 15 bp, Homo sapiens
acggacgcaggcacg

SEQ ID NO: 1273333 - DNA, 15 bp, Homo sapiens
tacggacgcaggcac

SEQ ID NO: 1273334 - DNA, 15 bp, Homo sapiens
ctacggacgcaggca

SEQ ID NO: 1273335 - DNA, 15 bp, Homo sapiens
actacggacgcaggc

SEQ ID NO: 1273336 - DNA, 15 bp, Homo sapiens
aactacggacgcagg

SEQ ID NO: 1273337 - DNA, 15 bp, Homo sapiens
aaactacggacgcag

SEQ ID NO: 1273338 - DNA, 15 bp, Homo sapiens
gaaactacggacgca

SEQ ID NO: 1273339 - DNA, 15 bp, Homo sapiens
ggaaactacggacgc

SEQ ID NO: 1273340 - DNA, 15 bp, Homo sapiens
aggaaactacggacg

SEQ ID NO: 1273341 - DNA, 15 bp, Homo sapiens
aaggaaactacggac

SEQ ID NO: 1273342 - DNA, 15 bp, Homo sapiens
gaaggaaactacgga

SEQ ID NO: 1273343 - DNA, 15 bp, Homo sapiens
agaaggaaactacgg

SEQ ID NO: 1273344 - DNA, 15 bp, Homo sapiens
tagaaggaaactacg

SEQ ID NO: 1273345 - DNA, 15 bp, Homo sapiens
ctagaaggaaactac

SEQ ID NO: 1273346 - DNA, 15 bp, Homo sapiens
gctagaaggaaacta

SEQ ID NO: 1273347 - DNA, 15 bp, Homo sapiens
agctagaaggaaact

SEQ ID NO: 1273348 - DNA, 15 bp, Homo sapiens
aagctagaaggaaac

SEQ ID NO: 1273349 - DNA, 15 bp, Homo sapiens
gaagctagaaggaaa

SEQ ID NO: 1273350 - DNA, 15 bp, Homo sapiens
agaagctagaaggaa

SEQ ID NO: 1273351 - DNA, 15 bp, Homo sapiens
aagaagctagaagga

SEQ ID NO: 1273352 - DNA, 15 bp, Homo sapiens
aaagaagctagaagg

SEQ ID NO: 1273353 - DNA, 15 bp, Homo sapiens
aaaagaagctagaag

SEQ ID NO: 1273354 - DNA, 15 bp, Homo sapiens
caaaagaagctagaa

SEQ ID NO: 1273355 - DNA, 15 bp, Homo sapiens
tcaaaagaagctaga

SEQ ID NO: 1273356 - DNA, 15 bp, Homo sapiens
atcaaaagaagctag

SEQ ID NO: 1273357 - DNA, 15 bp, Homo sapiens
aatcaaaagaagcta

SEQ ID NO: 1273358 - DNA, 15 bp, Homo sapiens
aaatcaaaagaagct

SEQ ID NO: 1273359 - DNA, 15 bp, Homo sapiens
gaaatcaaaagaagc

SEQ ID NO: 1273360 - DNA, 15 bp, Homo sapiens
tgaaatcaaaagaag

SEQ ID NO: 1273361 - DNA, 15 bp, Homo sapiens
ttgaaatcaaaagaa

SEQ ID NO: 1273362 - DNA, 15 bp, Homo sapiens
tttgaaatcaaaaga

SEQ ID NO: 1273363 - DNA, 15 bp, Homo sapiens
atttgaaatcaaaag

SEQ ID NO: 1273364 - DNA, 15 bp, Homo sapiens
gatttgaaatcaaaa

SEQ ID NO: 1273365 - DNA, 15 bp, Homo sapiens
tgatttgaaatcaaa

SEQ ID NO: 1273366 - DNA, 15 bp, Homo sapiens
ttgatttgaaatcaa

SEQ ID NO: 1273367 - DNA, 15 bp, Homo sapiens
cttgatttgaaatca

SEQ ID NO: 1273368 - DNA, 15 bp, Homo sapiens
tcttgatttgaaatc

SEQ ID NO: 1273369 - DNA, 15 bp, Homo sapiens
gtcttgatttgaaat

SEQ ID NO: 1273370 - DNA, 15 bp, Homo sapiens
agtcttgatttgaaa

SEQ ID NO: 1273371 - DNA, 15 bp, Homo sapiens
aagtcttgatttgaa

SEQ ID NO: 1273372 - DNA, 15 bp, Homo sapiens
taagtcttgatttga

SEQ ID NO: 1273373 - DNA, 15 bp, Homo sapiens
gtaagtcttgatttg

SEQ ID NO: 1273374 - DNA, 15 bp, Homo sapiens
tgtaagtcttgattt

SEQ ID NO: 1273375 - DNA, 15 bp, Homo sapiens
ctgtaagtcttgatt

SEQ ID NO: 1273376 - DNA, 15 bp, Homo sapiens
cctgtaagtcttgat

SEQ ID NO: 1273377 - DNA, 15 bp, Homo sapiens
ccctgtaagtcttga

SEQ ID NO: 1273378 - DNA, 15 bp, Homo sapiens
tccctgtaagtcttg

SEQ ID NO: 1273379 - DNA, 15 bp, Homo sapiens
ctccctgtaagtctt

SEQ ID NO: 1273380 - DNA, 15 bp, Homo sapiens
tctccctgtaagtct

SEQ ID NO: 1273381 - DNA, 15 bp, Homo sapiens
ctctccctgtaagtc

SEQ ID NO: 1273382 - DNA, 15 bp, Homo sapiens
cctctccctgtaagt

SEQ ID NO: 1273383 - DNA, 15 bp, Homo sapiens
ccctctccctgtaag

SEQ ID NO: 1273384 - DNA, 15 bp, Homo sapiens
tccctctccctgtaa

SEQ ID NO: 1273385 - DNA, 15 bp, Homo sapiens
ctccctctccctgta

SEQ ID NO: 1273386 - DNA, 15 bp, Homo sapiens
gctccctctccctgt

SEQ ID NO: 1273387 - DNA, 15 bp, Homo sapiens
cgctccctctccctg

SEQ ID NO: 1273388 - DNA, 15 bp, Homo sapiens
tcgctccctctccct

SEQ ID NO: 1273389 - DNA, 15 bp, Homo sapiens
atcgctccctctccc

SEQ ID NO: 1273390 - DNA, 15 bp, Homo sapiens
tatcgctccctctcc

SEQ ID NO: 1273391 - DNA, 15 bp, Homo sapiens
ttatcgctccctctc

SEQ ID NO: 1273392 - DNA, 15 bp, Homo sapiens
tttatcgctccctct

SEQ ID NO: 1273393 - DNA, 15 bp, Homo sapiens
gtttatcgctccctc

SEQ ID NO: 1273394 - DNA, 15 bp, Homo sapiens
tgtttatcgctccct

SEQ ID NO: 1273395 - DNA, 15 bp, Homo sapiens
gtgtttatcgctccc

SEQ ID NO: 1273396 - DNA, 15 bp, Homo sapiens
tgtgtttatcgctcc

SEQ ID NO: 1273397 - DNA, 15 bp, Homo sapiens
ttgtgtttatcgctc

SEQ ID NO: 1273398 - DNA, 15 bp, Homo sapiens
tttgtgtttatcgct

SEQ ID NO: 1273399 - DNA, 15 bp, Homo sapiens
gtttgtgtttatcgc

SEQ ID NO: 1273400 - DNA, 15 bp, Homo sapiens
agtttgtgtttatcg

SEQ ID NO: 1273401 - DNA, 15 bp, Homo sapiens
gagtttgtgtttatc

SEQ ID NO: 1273402 - DNA, 15 bp, Homo sapiens
agagtttgtgtttat

SEQ ID NO: 1273403 - DNA, 15 bp, Homo sapiens
cagagtttgtgttta

SEQ ID NO: 1273404 - DNA, 15 bp, Homo sapiens
gcagagtttgtgttt

SEQ ID NO: 1273405 - DNA, 15 bp, Homo sapiens
tgcagagtttgtgtt

SEQ ID NO: 1273406 - DNA, 15 bp, Homo sapiens
ttgcagagtttgtgt

SEQ ID NO: 1273407 - DNA, 15 bp, Homo sapiens
cttgcagagtttgtg

SEQ ID NO: 1273408 - DNA, 15 bp, Homo sapiens
tcttgcagagtttgt

SEQ ID NO: 1273409 - DNA, 15 bp, Homo sapiens
atcttgcagagtttg

SEQ ID NO: 1273410 - DNA, 15 bp, Homo sapiens
catcttgcagagttt

SEQ ID NO: 1273411 - DNA, 15 bp, Homo sapiens
gcatcttgcagagtt

SEQ ID NO: 1273412 - DNA, 15 bp, Homo sapiens
ggcatcttgcagagt

SEQ ID NO: 1273413 - DNA, 15 bp, Homo sapiens
tggcatcttgcagag

SEQ ID NO: 1273414 - DNA, 15 bp, Homo sapiens
gtggcatcttgcaga

SEQ ID NO: 1273415 - DNA, 15 bp, Homo sapiens
tgtggcatcttgcag

SEQ ID NO: 1273416 - DNA, 15 bp, Homo sapiens
ttgtggcatcttgca

SEQ ID NO: 1273417 - DNA, 15 bp, Homo sapiens
cttgtggcatcttgc

SEQ ID NO: 1273418 - DNA, 15 bp, Homo sapiens
ccttgtggcatcttg

SEQ ID NO: 1273419 - DNA, 15 bp, Homo sapiens
accttgtggcatctt

SEQ ID NO: 1273420 - DNA, 15 bp, Homo sapiens
gaccttgtggcatct

SEQ ID NO: 1273421 - DNA, 15 bp, Homo sapiens
ggaccttgtggcatc

SEQ ID NO: 1273422 - DNA, 15 bp, Homo sapiens
aggaccttgtggcat

SEQ ID NO: 1273423 - DNA, 15 bp, Homo sapiens
gaggaccttgtggca

SEQ ID NO: 1273424 - DNA, 15 bp, Homo sapiens
ggaggaccttgtggc

SEQ ID NO: 1273425 - DNA, 15 bp, Homo sapiens
aggaggaccttgtgg

SEQ ID NO: 1273426 - DNA, 15 bp, Homo sapiens
aaggaggaccttgtg

SEQ ID NO: 1273427 - DNA, 15 bp, Homo sapiens
aaaggaggaccttgt

SEQ ID NO: 1273428 - DNA, 15 bp, Homo sapiens
caaaggaggaccttg

SEQ ID NO: 1273429 - DNA, 15 bp, Homo sapiens
tcaaaggaggacctt

SEQ ID NO: 1273430 - DNA, 15 bp, Homo sapiens
gtcaaaggaggacct

SEQ ID NO: 1273431 - DNA, 15 bp, Homo sapiens
tgtcaaaggaggacc

SEQ ID NO: 1273432 - DNA, 15 bp, Homo sapiens
atgtcaaaggaggac

SEQ ID NO: 1273433 - DNA, 15 bp, Homo sapiens
gatgtcaaaggagga

SEQ ID NO: 1273434 - DNA, 15 bp, Homo sapiens
ggatgtcaaaggagg

SEQ ID NO: 1273435 - DNA, 15 bp, Homo sapiens
gggatgtcaaaggag

SEQ ID NO: 1273436 - DNA, 15 bp, Homo sapiens
ggggatgtcaaagga

SEQ ID NO: 1273437 - DNA, 15 bp, Homo sapiens
tggggatgtcaaagg

SEQ ID NO: 1273438 - DNA, 15 bp, Homo sapiens
ttggggatgtcaaag

SEQ ID NO: 1273439 - DNA, 15 bp, Homo sapiens
gttggggatgtcaaa

SEQ ID NO: 1273440 - DNA, 15 bp, Homo sapiens
tgttggggatgtcaa

SEQ ID NO: 1273441 - DNA, 15 bp, Homo sapiens
ttgttggggatgtca

SEQ ID NO: 1273442 - DNA, 15 bp, Homo sapiens
tttgttggggatgtc

SEQ ID NO: 1273443 - DNA, 15 bp, Homo sapiens
ctttgttggggatgt

SEQ ID NO: 1273444 - DNA, 15 bp, Homo sapiens
tctttgttggggatg

SEQ ID NO: 1273445 - DNA, 15 bp, Homo sapiens
ctctttgttggggat

SEQ ID NO: 1273446 - DNA, 15 bp, Homo sapiens
cctctttgttgggga

SEQ ID NO: 1273447 - DNA, 15 bp, Homo sapiens
acctctttgttgggg

SEQ ID NO: 1273448 - DNA, 15 bp, Homo sapiens
cacctctttgttggg

SEQ ID NO: 1273449 - DNA, 15 bp, Homo sapiens
tcacctctttgttgg

SEQ ID NO: 1273450 - DNA, 15 bp, Homo sapiens
ctcacctctttgttg

SEQ ID NO: 1273451 - DNA, 15 bp, Homo sapiens
actcacctctttgtt

SEQ ID NO: 1273452 - DNA, 15 bp, Homo sapiens
tactcacctctttgt

SEQ ID NO: 1273453 - DNA, 15 bp, Homo sapiens
ctactcacctctttg

SEQ ID NO: 1273454 - DNA, 15 bp, Homo sapiens
actactcacctcttt

SEQ ID NO: 1273455 - DNA, 15 bp, Homo sapiens
tactactcacctctt

SEQ ID NO: 1273456 - DNA, 15 bp, Homo sapiens
atactactcacctct

SEQ ID NO: 1273457 - DNA, 15 bp, Homo sapiens
aatactactcacctc

SEQ ID NO: 1273458 - DNA, 15 bp, Homo sapiens
gaatactactcacct

SEQ ID NO: 1273459 - DNA, 15 bp, Homo sapiens
agaatactactcacc

SEQ ID NO: 1273460 - DNA, 15 bp, Homo sapiens
gagaatactactcac

SEQ ID NO: 1273461 - DNA, 15 bp, Homo sapiens
ggagaatactactca

SEQ ID NO: 1273462 - DNA, 15 bp, Homo sapiens
gggagaatactactc

SEQ ID NO: 1273463 - DNA, 15 bp, Homo sapiens
ggggagaatactact

SEQ ID NO: 1273464 - DNA, 15 bp, Homo sapiens
gggggagaatactac

SEQ ID NO: 1273465 - DNA, 15 bp, Homo sapiens
agggggagaatacta

SEQ ID NO: 1273466 - DNA, 15 bp, Homo sapiens
aagggggagaatact

SEQ ID NO: 1273467 - DNA, 15 bp, Homo sapiens
aaagggggagaatac

SEQ ID NO: 1273468 - DNA, 15 bp, Homo sapiens
gaaagggggagaata

SEQ ID NO: 1273469 - DNA, 15 bp, Homo sapiens
agaaagggggagaat

SEQ ID NO: 1273470 - DNA, 15 bp, Homo sapiens
cagaaagggggagaa

SEQ ID NO: 1273471 - DNA, 15 bp, Homo sapiens
gcagaaagggggaga

SEQ ID NO: 1273472 - DNA, 15 bp, Homo sapiens
ggcagaaagggggag

SEQ ID NO: 1273473 - DNA, 15 bp, Homo sapiens
gggcagaaaggggga

SEQ ID NO: 1273474 - DNA, 15 bp, Homo sapiens
agggcagaaaggggg

SEQ ID NO: 1273475 - DNA, 15 bp, Homo sapiens
cagggcagaaagggg

SEQ ID NO: 1273476 - DNA, 15 bp, Homo sapiens
tcagggcagaaaggg

SEQ ID NO: 1273477 - DNA, 15 bp, Homo sapiens
ttcagggcagaaagg

SEQ ID NO: 1273478 - DNA, 15 bp, Homo sapiens
gttcagggcagaaag

SEQ ID NO: 1273479 - DNA, 15 bp, Homo sapiens
ggttcagggcagaaa

SEQ ID NO: 1273480 - DNA, 15 bp, Homo sapiens
tggttcagggcagaa

SEQ ID NO: 1273481 - DNA, 15 bp, Homo sapiens
ttggttcagggcaga

SEQ ID NO: 1273482 - DNA, 15 bp, Homo sapiens
cttggttcagggcag

SEQ ID NO: 1273483 - DNA, 15 bp, Homo sapiens
acttggttcagggca

SEQ ID NO: 1273484 - DNA, 15 bp, Homo sapiens
cacttggttcagggc

SEQ ID NO: 1273485 - DNA, 15 bp, Homo sapiens
ccacttggttcaggg

SEQ ID NO: 1273486 - DNA, 15 bp, Homo sapiens
cccacttggttcagg

SEQ ID NO: 1273487 - DNA, 15 bp, Homo sapiens
gcccacttggttcag

SEQ ID NO: 1273488 - DNA, 15 bp, Homo sapiens
agcccacttggttca

SEQ ID NO: 1273489 - DNA, 15 bp, Homo sapiens
aagcccacttggttc

SEQ ID NO: 1273490 - DNA, 15 bp, Homo sapiens
gaagcccacttggtt

SEQ ID NO: 1273491 - DNA, 15 bp, Homo sapiens
tgaagcccacttggt

SEQ ID NO: 1273492 - DNA, 15 bp, Homo sapiens
ctgaagcccacttgg

SEQ ID NO: 1273493 - DNA, 15 bp, Homo sapiens
actgaagcccacttg

SEQ ID NO: 1273494 - DNA, 15 bp, Homo sapiens
tactgaagcccactt

SEQ ID NO: 1273495 - DNA, 15 bp, Homo sapiens
ttactgaagcccact

SEQ ID NO: 1273496 - DNA, 15 bp, Homo sapiens
attactgaagcccac

SEQ ID NO: 1273497 - DNA, 15 bp, Homo sapiens
aattactgaagccca

SEQ ID NO: 1273498 - DNA, 15 bp, Homo sapiens
aaattactgaagccc

SEQ ID NO: 1273499 - DNA, 15 bp, Homo sapiens
gaaattactgaagcc

SEQ ID NO: 1273500 - DNA, 15 bp, Homo sapiens
tgaaattactgaagc

SEQ ID NO: 1273501 - DNA, 15 bp, Homo sapiens
ctgaaattactgaag

SEQ ID NO: 1273502 - DNA, 15 bp, Homo sapiens
cctgaaattactgaa

SEQ ID NO: 1273503 - DNA, 15 bp, Homo sapiens
ccctgaaattactga

SEQ ID NO: 1273504 - DNA, 15 bp, Homo sapiens
gccctgaaattactg

SEQ ID NO: 1273505 - DNA, 15 bp, Homo sapiens
agccctgaaattact

SEQ ID NO: 1273506 - DNA, 15 bp, Homo sapiens
gagccctgaaattac

SEQ ID NO: 1273507 - DNA, 15 bp, Homo sapiens
ggagccctgaaatta

SEQ ID NO: 1273508 - DNA, 15 bp, Homo sapiens
tggagccctgaaatt

SEQ ID NO: 1273509 - DNA, 15 bp, Homo sapiens
ctggagccctgaaat

SEQ ID NO: 1273510 - DNA, 15 bp, Homo sapiens
cctggagccctgaaa

SEQ ID NO: 1273511 - DNA, 15 bp, Homo sapiens
tcctggagccctgaa

SEQ ID NO: 1273512 - DNA, 15 bp, Homo sapiens
ctcctggagccctga

SEQ ID NO: 1273513 - DNA, 15 bp, Homo sapiens
tctcctggagccctg

SEQ ID NO: 1273514 - DNA, 15 bp, Homo sapiens
gtctcctggagccct

SEQ ID NO: 1273515 - DNA, 15 bp, Homo sapiens
ggtctcctggagccc

SEQ ID NO: 1273516 - DNA, 15 bp, Homo sapiens
aggtctcctggagcc

SEQ ID NO: 1273517 - DNA, 15 bp, Homo sapiens
caggtctcctggagc

SEQ ID NO: 1273518 - DNA, 15 bp, Homo sapiens
ccaggtctcctggag

SEQ ID NO: 1273519 - DNA, 15 bp, Homo sapiens
cccaggtctcctgga

SEQ ID NO: 1273520 - DNA, 15 bp, Homo sapiens
ccccaggtctcctgg

SEQ ID NO: 1273521 - DNA, 15 bp, Homo sapiens
gccccaggtctcctg

SEQ ID NO: 1273522 - DNA, 15 bp, Homo sapiens
ggccccaggtctcct

SEQ ID NO: 1273523 - DNA, 15 bp, Homo sapiens
gggccccaggtctcc

SEQ ID NO: 1273524 - DNA, 15 bp, Homo sapiens
tgggccccaggtctc

SEQ ID NO: 1273525 - DNA, 15 bp, Homo sapiens
atgggccccaggtct

SEQ ID NO: 1273526 - DNA, 15 bp, Homo sapiens
catgggccccaggtc

SEQ ID NO: 1273527 - DNA, 15 bp, Homo sapiens
gcatgggccccaggt

SEQ ID NO: 1273528 - DNA, 15 bp, Homo sapiens
tgcatgggccccagg

SEQ ID NO: 1273529 - DNA, 15 bp, Homo sapiens
ctgcatgggccccag

SEQ ID NO: 1273530 - DNA, 15 bp, Homo sapiens
cctgcatgggcccca

SEQ ID NO: 1273531 - DNA, 15 bp, Homo sapiens
acctgcatgggcccc

SEQ ID NO: 1273532 - DNA, 15 bp, Homo sapiens
cacctgcatgggccc

SEQ ID NO: 1273533 - DNA, 15 bp, Homo sapiens
gcacctgcatgggcc

SEQ ID NO: 1273534 - DNA, 15 bp, Homo sapiens
gggcacctgcatggg

SEQ ID NO: 1273535 - DNA, 15 bp, Homo sapiens
ggggcacctgcatgg

SEQ ID NO: 1273536 - DNA, 15 bp, Homo sapiens
tggggcacctgcatg

SEQ ID NO: 1273537 - DNA, 15 bp, Homo sapiens
ctggggcacctgcat

SEQ ID NO: 1273538 - DNA, 15 bp, Homo sapiens
actggggcacctgca

SEQ ID NO: 1273539 - DNA, 15 bp, Homo sapiens
cactggggcacctgc

SEQ ID NO: 1273540 - DNA, 15 bp, Homo sapiens
tcactggggcacctg

SEQ ID NO: 1273541 - DNA, 15 bp, Homo sapiens
ttcactggggcacct

SEQ ID NO: 1273542 - DNA, 15 bp, Homo sapiens
tttcactggggcacc

SEQ ID NO: 1273543 - DNA, 15 bp, Homo sapiens
gtttcactggggcac

SEQ ID NO: 1273544 - DNA, 15 bp, Homo sapiens
tgtttcactggggca

SEQ ID NO: 1273545 - DNA, 15 bp, Homo sapiens
ctgtttcactggggc

SEQ ID NO: 1273546 - DNA, 15 bp, Homo sapiens
actgtttcactgggg

SEQ ID NO: 1273547 - DNA, 15 bp, Homo sapiens
cactgtttcactggg

SEQ ID NO: 1273548 - DNA, 15 bp, Homo sapiens
ccactgtttcactgg

SEQ ID NO: 1273549 - DNA, 15 bp, Homo sapiens
accactgtttcactg

SEQ ID NO: 1273550 - DNA, 15 bp, Homo sapiens
caccactgtttcact

SEQ ID NO: 1273551 - DNA, 15 bp, Homo sapiens
tcaccactgtttcac

SEQ ID NO: 1273552 - DNA, 15 bp, Homo sapiens
ttcaccactgtttca

SEQ ID NO: 1273553 - DNA, 15 bp, Homo sapiens
cttcaccactgtttc

SEQ ID NO: 1273554 - DNA, 15 bp, Homo sapiens
tcttcaccactgttt

SEQ ID NO: 1273555 - DNA, 15 bp, Homo sapiens
ctcttcaccactgtt

SEQ ID NO: 1273556 - DNA, 15 bp, Homo sapiens
tctcttcaccactgt

SEQ ID NO: 1273557 - DNA, 15 bp, Homo sapiens
gtctcttcaccactg

SEQ ID NO: 1273558 - DNA, 15 bp, Homo sapiens
agtctcttcaccact

SEQ ID NO: 1273559 - DNA, 15 bp, Homo sapiens
gagtctcttcaccac

SEQ ID NO: 1273560 - DNA, 15 bp, Homo sapiens
tgagtctcttcacca

SEQ ID NO: 1273561 - DNA, 15 bp, Homo sapiens
ctgagtctcttcacc

SEQ ID NO: 1273562 - DNA, 15 bp, Homo sapiens
actgagtctcttcac

SEQ ID NO: 1273563 - DNA, 15 bp, Homo sapiens
cactgagtctcttca

SEQ ID NO: 1273564 - DNA, 15 bp, Homo sapiens
ccactgagtctcttc

SEQ ID NO: 1273565 - DNA, 15 bp, Homo sapiens
gccactgagtctctt

SEQ ID NO: 1273566 - DNA, 15 bp, Homo sapiens
tgccactgagtctct

SEQ ID NO: 1273567 - DNA, 15 bp, Homo sapiens
ttgccactgagtctc

SEQ ID NO: 1273568 - DNA, 15 bp, Homo sapiens
attgccactgagtct

SEQ ID NO: 1273569 - DNA, 15 bp, Homo sapiens
cattgccactgagtc

SEQ ID NO: 1273570 - DNA, 15 bp, Homo sapiens
ccattgccactgagt

SEQ ID NO: 1273571 - DNA, 15 bp, Homo sapiens
cccattgccactgag

SEQ ID NO: 1273572 - DNA, 15 bp, Homo sapiens
ccccattgccactga

SEQ ID NO: 1273573 - DNA, 15 bp, Homo sapiens
tccccattgccactg

SEQ ID NO: 1273574 - DNA, 15 bp, Homo sapiens
ctccccattgccact

SEQ ID NO: 1273575 - DNA, 15 bp, Homo sapiens
tctccccattgccac

SEQ ID NO: 1273576 - DNA, 15 bp, Homo sapiens
ctctccccattgcca

SEQ ID NO: 1273577 - DNA, 15 bp, Homo sapiens
gctctccccattgcc

SEQ ID NO: 1273578 - DNA, 15 bp, Homo sapiens
gtgctctccccattg

SEQ ID NO: 1273579 - DNA, 15 bp, Homo sapiens
agtgctctccccatt

SEQ ID NO: 1273580 - DNA, 15 bp, Homo sapiens
cagtgctctccccat

SEQ ID NO: 1273581 - DNA, 15 bp, Homo sapiens
ccagtgctctcccca

SEQ ID NO: 1273582 - DNA, 15 bp, Homo sapiens
gccagtgctctcccc

SEQ ID NO: 1273583 - DNA, 15 bp, Homo sapiens
tgccagtgctctccc

SEQ ID NO: 1273584 - DNA, 15 bp, Homo sapiens
ctgccagtgctctcc

SEQ ID NO: 1273585 - DNA, 15 bp, Homo sapiens
gctgccagtgctctc

SEQ ID NO: 1273586 - DNA, 15 bp, Homo sapiens
tgctgccagtgctct

SEQ ID NO: 1273587 - DNA, 15 bp, Homo sapiens
gtgctgccagtgctc

SEQ ID NO: 1273588 - DNA, 15 bp, Homo sapiens
tgtgctgccagtgct

SEQ ID NO: 1273589 - DNA, 15 bp, Homo sapiens
ttgtgctgccagtgc

SEQ ID NO: 1273590 - DNA, 15 bp, Homo sapiens
cttgtgctgccagtg

SEQ ID NO: 1273591 - DNA, 15 bp, Homo sapiens
ccttgtgctgccagt

SEQ ID NO: 1273592 - DNA, 15 bp, Homo sapiens
gccttgtgctgccag

SEQ ID NO: 1273593 - DNA, 15 bp, Homo sapiens
tgccttgtgctgcca

SEQ ID NO: 1273594 - DNA, 15 bp, Homo sapiens
ttgccttgtgctgcc

SEQ ID NO: 1273595 - DNA, 15 bp, Homo sapiens
tttgccttgtgctgc

SEQ ID NO: 1273596 - DNA, 15 bp, Homo sapiens
gtttgccttgtgctg

SEQ ID NO: 1273597 - DNA, 15 bp, Homo sapiens
ggtttgccttgtgct

SEQ ID NO: 1273598 - DNA, 15 bp, Homo sapiens
aggtttgccttgtgc

SEQ ID NO: 1273599 - DNA, 15 bp, Homo sapiens
gaggtttgccttgtg

SEQ ID NO: 1273600 - DNA, 15 bp, Homo sapiens
agaggtttgccttgt

SEQ ID NO: 1273601 - DNA, 15 bp, Homo sapiens
cagaggtttgccttg

SEQ ID NO: 1273602 - DNA, 15 bp, Homo sapiens
ccagaggtttgcctt

SEQ ID NO: 1273603 - DNA, 15 bp, Homo sapiens
gccagaggtttgcct

SEQ ID NO: 1273604 - DNA, 15 bp, Homo sapiens
tgccagaggtttgcc

SEQ ID NO: 1273605 - DNA, 15 bp, Homo sapiens
gtgccagaggtttgc

SEQ ID NO: 1273606 - DNA, 15 bp, Homo sapiens
tgtgccagaggtttg

SEQ ID NO: 1273607 - DNA, 15 bp, Homo sapiens
ctgtgccagaggttt

SEQ ID NO: 1273608 - DNA, 15 bp, Homo sapiens
tctgtgccagaggtt

SEQ ID NO: 1273609 - DNA, 15 bp, Homo sapiens
ctctgtgccagaggt

SEQ ID NO: 1273610 - DNA, 15 bp, Homo sapiens
tctctgtgccagagg

SEQ ID NO: 1273611 - DNA, 15 bp, Homo sapiens
ctctctgtgccagag

SEQ ID NO: 1273612 - DNA, 15 bp, Homo sapiens
gctctctgtgccaga

SEQ ID NO: 1273613 - DNA, 15 bp, Homo sapiens
tgctctctgtgccag

SEQ ID NO: 1273614 - DNA, 15 bp, Homo sapiens
ttgctctctgtgcca

SEQ ID NO: 1273615 - DNA, 15 bp, Homo sapiens
tttgctctctgtgcc

SEQ ID NO: 1273616 - DNA, 15 bp, Homo sapiens
ctttgctctctgtgc

SEQ ID NO: 1273617 - DNA, 15 bp, Homo sapiens
actttgctctctgtg

SEQ ID NO: 1273618 - DNA, 15 bp, Homo sapiens
gactttgctctctgt

SEQ ID NO: 1273619 - DNA, 15 bp, Homo sapiens
ggactttgctctctg

SEQ ID NO: 1273620 - DNA, 15 bp, Homo sapiens
aggactttgctctct

SEQ ID NO: 1273621 - DNA, 15 bp, Homo sapiens
gaggactttgctctc

SEQ ID NO: 1273622 - DNA, 15 bp, Homo sapiens
tgaggactttgctct

SEQ ID NO: 1273623 - DNA, 15 bp, Homo sapiens
gtgaggactttgctc

SEQ ID NO: 1273624 - DNA, 15 bp, Homo sapiens
agtgaggactttgct

SEQ ID NO: 1273625 - DNA, 15 bp, Homo sapiens
cagtgaggactttgc

SEQ ID NO: 1273626 - DNA, 15 bp, Homo sapiens
ccagtgaggactttg

SEQ ID NO: 1273627 - DNA, 15 bp, Homo sapiens
cccagtgaggacttt

SEQ ID NO: 1273628 - DNA, 15 bp, Homo sapiens
tcccagtgaggactt

SEQ ID NO: 1273629 - DNA, 15 bp, Homo sapiens
ctcccagtgaggact

SEQ ID NO: 1273630 - DNA, 15 bp, Homo sapiens
cctcccagtgaggac

SEQ ID NO: 1273631 - DNA, 15 bp, Homo sapiens
tcctcccagtgagga

SEQ ID NO: 1273632 - DNA, 15 bp, Homo sapiens
atcctcccagtgagg

SEQ ID NO: 1273633 - DNA, 15 bp, Homo sapiens
aatcctcccagtgag

SEQ ID NO: 1273634 - DNA, 15 bp, Homo sapiens
gaatcctcccagtga

SEQ ID NO: 1273635 - DNA, 15 bp, Homo sapiens
ggaatcctcccagtg

SEQ ID NO: 1273636 - DNA, 15 bp, Homo sapiens
gggaatcctcccagt

SEQ ID NO: 1273637 - DNA, 15 bp, Homo sapiens
tgggaatcctcccag

SEQ ID NO: 1273638 - DNA, 15 bp, Homo sapiens
ttgggaatcctccca

SEQ ID NO: 1273639 - DNA, 15 bp, Homo sapiens
cttgggaatcctccc

SEQ ID NO: 1273640 - DNA, 15 bp, Homo sapiens
ccttgggaatcctcc

SEQ ID NO: 1273641 - DNA, 15 bp, Homo sapiens
cccttgggaatcctc

SEQ ID NO: 1273642 - DNA, 15 bp, Homo sapiens
ccccttgggaatcct

SEQ ID NO: 1273643 - DNA, 15 bp, Homo sapiens
accccttgggaatcc

SEQ ID NO: 1273644 - DNA, 15 bp, Homo sapiens
gaccccttgggaatc

SEQ ID NO: 1273645 - DNA, 15 bp, Homo sapiens
tgaccccttgggaat

SEQ ID NO: 1273646 - DNA, 15 bp, Homo sapiens
gtgaccccttgggaa

SEQ ID NO: 1273647 - DNA, 15 bp, Homo sapiens
agtgaccccttggga

SEQ ID NO: 1273648 - DNA, 15 bp, Homo sapiens
aagtgaccccttggg

SEQ ID NO: 1273649 - DNA, 15 bp, Homo sapiens
caagtgaccccttgg

SEQ ID NO: 1273650 - DNA, 15 bp, Homo sapiens
ccaagtgaccccttg

SEQ ID NO: 1273651 - DNA, 15 bp, Homo sapiens
cccaagtgacccctt

SEQ ID NO: 1273652 - DNA, 15 bp, Homo sapiens
tcccaagtgacccct

SEQ ID NO: 1273653 - DNA, 15 bp, Homo sapiens
ctcccaagtgacccc

SEQ ID NO: 1273654 - DNA, 15 bp, Homo sapiens
tctcccaagtgaccc

SEQ ID NO: 1273655 - DNA, 15 bp, Homo sapiens
ctctcccaagtgacc

SEQ ID NO: 1273656 - DNA, 15 bp, Homo sapiens
cctctcccaagtgac

SEQ ID NO: 1273657 - DNA, 15 bp, Homo sapiens
ccctctcccaagtga

SEQ ID NO: 1273658 - DNA, 15 bp, Homo sapiens
gccctctcccaagtg

SEQ ID NO: 1273659 - DNA, 15 bp, Homo sapiens
tgccctctcccaagt

SEQ ID NO: 1273660 - DNA, 15 bp, Homo sapiens
ctgccctctcccaag

SEQ ID NO: 1273661 - DNA, 15 bp, Homo sapiens
cctgccctctcccaa

SEQ ID NO: 1273662 - DNA, 15 bp, Homo sapiens
ccctgccctctccca

SEQ ID NO: 1273663 - DNA, 15 bp, Homo sapiens
gccctgccctctccc

SEQ ID NO: 1273664 - DNA, 15 bp, Homo sapiens
tgccctgccctctcc

SEQ ID NO: 1273665 - DNA, 15 bp, Homo sapiens
ctgccctgccctctc

SEQ ID NO: 1273666 - DNA, 15 bp, Homo sapiens
gctgccctgccctct

SEQ ID NO: 1273667 - DNA, 15 bp, Homo sapiens
tgctgccctgccctc

SEQ ID NO: 1273668 - DNA, 15 bp, Homo sapiens
ctgctgccctgccct

SEQ ID NO: 1273669 - DNA, 15 bp, Homo sapiens
gctgctgccctgccc

SEQ ID NO: 1273670 - DNA, 15 bp, Homo sapiens
ggctgctgccctgcc

SEQ ID NO: 1273671 - DNA, 15 bp, Homo sapiens
tggctgctgccctgc

SEQ ID NO: 1273672 - DNA, 15 bp, Homo sapiens
ttggctgctgccctg

SEQ ID NO: 1273673 - DNA, 15 bp, Homo sapiens
gttggctgctgccct

SEQ ID NO: 1273674 - DNA, 15 bp, Homo sapiens
ggttggctgctgccc

SEQ ID NO: 1273675 - DNA, 15 bp, Homo sapiens
aggttggctgctgcc

SEQ ID NO: 1273676 - DNA, 15 bp, Homo sapiens
gaggttggctgctgc

SEQ ID NO: 1273677 - DNA, 15 bp, Homo sapiens
ggaggttggctgctg

SEQ ID NO: 1273678 - DNA, 15 bp, Homo sapiens
aggaggttggctgct

SEQ ID NO: 1273679 - DNA, 15 bp, Homo sapiens
gaggaggttggctgc

SEQ ID NO: 1273680 - DNA, 15 bp, Homo sapiens
agaggaggttggctg

SEQ ID NO: 1273681 - DNA, 15 bp, Homo sapiens
tagaggaggttggct

SEQ ID NO: 1273682 - DNA, 15 bp, Homo sapiens
ttagaggaggttggc

SEQ ID NO: 1273683 - DNA, 15 bp, Homo sapiens
cttagaggaggttgg

SEQ ID NO: 1273684 - DNA, 15 bp, Homo sapiens
acttagaggaggttg

SEQ ID NO: 1273685 - DNA, 15 bp, Homo sapiens
cacttagaggaggtt

SEQ ID NO: 1273686 - DNA, 15 bp, Homo sapiens
ccacttagaggaggt

SEQ ID NO: 1273687 - DNA, 15 bp, Homo sapiens
cccacttagaggagg

SEQ ID NO: 1273688 - DNA, 15 bp, Homo sapiens
gcccacttagaggag

SEQ ID NO: 1273689 - DNA, 15 bp, Homo sapiens
agcccacttagagga

SEQ ID NO: 1273690 - DNA, 15 bp, Homo sapiens
cagcccacttagagg

SEQ ID NO: 1273691 - DNA, 15 bp, Homo sapiens
tcagcccacttagag

SEQ ID NO: 1273692 - DNA, 15 bp, Homo sapiens
ttcagcccacttaga

SEQ ID NO: 1273693 - DNA, 15 bp, Homo sapiens
cttcagcccacttag

SEQ ID NO: 1273694 - DNA, 15 bp, Homo sapiens
gcttcagcccactta

SEQ ID NO: 1273695 - DNA, 15 bp, Homo sapiens
tgcttcagcccactt

SEQ ID NO: 1273696 - DNA, 15 bp, Homo sapiens
ctgcttcagcccact

SEQ ID NO: 1273697 - DNA, 15 bp, Homo sapiens
cctgcttcagcccac

SEQ ID NO: 1273698 - DNA, 15 bp, Homo sapiens
acctgcttcagccca

SEQ ID NO: 1273699 - DNA, 15 bp, Homo sapiens
cacctgcttcagccc

SEQ ID NO: 1273700 - DNA, 15 bp, Homo sapiens
tcacctgcttcagcc

SEQ ID NO: 1273701 - DNA, 15 bp, Homo sapiens
ttcacctgcttcagc

SEQ ID NO: 1273702 - DNA, 15 bp, Homo sapiens
cttcacctgcttcag

SEQ ID NO: 1273703 - DNA, 15 bp, Homo sapiens
tcttcacctgcttca

SEQ ID NO: 1273704 - DNA, 15 bp, Homo sapiens
ttcttcacctgcttc

SEQ ID NO: 1273705 - DNA, 15 bp, Homo sapiens
tttcttcacctgctt

SEQ ID NO: 1273706 - DNA, 15 bp, Homo sapiens
ctttcttcacctgct

SEQ ID NO: 1273707 - DNA, 15 bp, Homo sapiens
actttcttcacctgc

SEQ ID NO: 1273708 - DNA, 15 bp, Homo sapiens
cactttcttcacctg

SEQ ID NO: 1273709 - DNA, 15 bp, Homo sapiens
ccactttcttcacct

SEQ ID NO: 1273710 - DNA, 15 bp, Homo sapiens
gccactttcttcacc

SEQ ID NO: 1273711 - DNA, 15 bp, Homo sapiens
tgccactttcttcac

SEQ ID NO: 1273712 - DNA, 15 bp, Homo sapiens
ctgccactttcttca

SEQ ID NO: 1273713 - DNA, 15 bp, Homo sapiens
tctgccactttcttc

SEQ ID NO: 1273714 - DNA, 15 bp, Homo sapiens
ttctgccactttctt

SEQ ID NO: 1273715 - DNA, 15 bp, Homo sapiens
cttctgccactttct

SEQ ID NO: 1273716 - DNA, 15 bp, Homo sapiens
gcttctgccactttc

SEQ ID NO: 1273717 - DNA, 15 bp, Homo sapiens
ggcttctgccacttt

SEQ ID NO: 1273718 - DNA, 15 bp, Homo sapiens
tggcttctgccactt

SEQ ID NO: 1273719 - DNA, 15 bp, Homo sapiens
gtggcttctgccact

SEQ ID NO: 1273720 - DNA, 15 bp, Homo sapiens
cgtggcttctgccac

SEQ ID NO: 1273721 - DNA, 15 bp, Homo sapiens
gcgtggcttctgcca

SEQ ID NO: 1273722 - DNA, 15 bp, Homo sapiens
cgcgtggcttctgcc

SEQ ID NO: 1273723 - DNA, 15 bp, Homo sapiens
ccgcgtggcttctgc

SEQ ID NO: 1273724 - DNA, 15 bp, Homo sapiens
accgcgtggcttctg

SEQ ID NO: 1273725 - DNA, 15 bp, Homo sapiens
caccgcgtggcttct

SEQ ID NO: 1273726 - DNA, 15 bp, Homo sapiens
ccaccgcgtggcttc

SEQ ID NO: 1273727 - DNA, 15 bp, Homo sapiens
gccaccgcgtggctt

SEQ ID NO: 1273728 - DNA, 15 bp, Homo sapiens
tgccaccgcgtggct

SEQ ID NO: 1273729 - DNA, 15 bp, Homo sapiens
ttgccaccgcgtggc

SEQ ID NO: 1273730 - DNA, 15 bp, Homo sapiens
tttgccaccgcgtgg

SEQ ID NO: 1273731 - DNA, 15 bp, Homo sapiens
ttttgccaccgcgtg

SEQ ID NO: 1273732 - DNA, 15 bp, Homo sapiens
tttttgccaccgcgt

SEQ ID NO: 1273733 - DNA, 15 bp, Homo sapiens
ctttttgccaccgcg

SEQ ID NO: 1273734 - DNA, 15 bp, Homo sapiens
cctttttgccaccgc

SEQ ID NO: 1273735 - DNA, 15 bp, Homo sapiens
tcctttttgccaccg

SEQ ID NO: 1273736 - DNA, 15 bp, Homo sapiens
ctcctttttgccacc

SEQ ID NO: 1273737 - DNA, 15 bp, Homo sapiens
actcctttttgccac

SEQ ID NO: 1273738 - DNA, 15 bp, Homo sapiens
gactcctttttgcca

SEQ ID NO: 1273739 - DNA, 15 bp, Homo sapiens
tgactcctttttgcc

SEQ ID NO: 1273740 - DNA, 15 bp, Homo sapiens
gtgactcctttttgc

SEQ ID NO: 1273741 - DNA, 15 bp, Homo sapiens
tgtgactcctttttg

SEQ ID NO: 1273742 - DNA, 15 bp, Homo sapiens
gtgtgactccttttt

SEQ ID NO: 1273743 - DNA, 15 bp, Homo sapiens
tgtgtgactcctttt

SEQ ID NO: 1273744 - DNA, 15 bp, Homo sapiens
gtgtgtgactccttt

SEQ ID NO: 1273745 - DNA, 15 bp, Homo sapiens
agtgtgtgactcctt

SEQ ID NO: 1273746 - DNA, 15 bp, Homo sapiens
gagtgtgtgactcct

SEQ ID NO: 1273747 - DNA, 15 bp, Homo sapiens
ggagtgtgtgactcc

SEQ ID NO: 1273748 - DNA, 15 bp, Homo sapiens
tggagtgtgtgactc

SEQ ID NO: 1273749 - DNA, 15 bp, Homo sapiens
gtggagtgtgtgact

SEQ ID NO: 1273750 - DNA, 15 bp, Homo sapiens
ggtggagtgtgtgac

SEQ ID NO: 1273751 - DNA, 15 bp, Homo sapiens
aggtggagtgtgtga

SEQ ID NO: 1273752 - DNA, 15 bp, Homo sapiens
caggtggagtgtgtg

SEQ ID NO: 1273753 - DNA, 15 bp, Homo sapiens
ccaggtggagtgtgt

SEQ ID NO: 1273754 - DNA, 15 bp, Homo sapiens
tccaggtggagtgtg

SEQ ID NO: 1273755 - DNA, 15 bp, Homo sapiens
ctccaggtggagtgt

SEQ ID NO: 1273756 - DNA, 15 bp, Homo sapiens
tctccaggtggagtg

SEQ ID NO: 1273757 - DNA, 15 bp, Homo sapiens
gtctccaggtggagt

SEQ ID NO: 1273758 - DNA, 15 bp, Homo sapiens
cgtctccaggtggag

SEQ ID NO: 1273759 - DNA, 15 bp, Homo sapiens
gcgtctccaggtgga

SEQ ID NO: 1273760 - DNA, 15 bp, Homo sapiens
ggcgtctccaggtgg

SEQ ID NO: 1273761 - DNA, 15 bp, Homo sapiens
aggcgtctccaggtg

SEQ ID NO: 1273762 - DNA, 15 bp, Homo sapiens
aaggcgtctccaggt

SEQ ID NO: 1273763 - DNA, 15 bp, Homo sapiens
caaggcgtctccagg

SEQ ID NO: 1273764 - DNA, 15 bp, Homo sapiens
tcaaggcgtctccag

SEQ ID NO: 1273765 - DNA, 15 bp, Homo sapiens
ttcaaggcgtctcca

SEQ ID NO: 1273766 - DNA, 15 bp, Homo sapiens
cttcaaggcgtctcc

SEQ ID NO: 1273767 - DNA, 15 bp, Homo sapiens
acttcaaggcgtctc

SEQ ID NO: 1273768 - DNA, 15 bp, Homo sapiens
tacttcaaggcgtct

SEQ ID NO: 1273769 - DNA, 15 bp, Homo sapiens
ttacttcaaggcgtc

SEQ ID NO: 1273770 - DNA, 15 bp, Homo sapiens
gttacttcaaggcgt

SEQ ID NO: 1273771 - DNA, 15 bp, Homo sapiens
agttacttcaaggcg

SEQ ID NO: 1273772 - DNA, 15 bp, Homo sapiens
cagttacttcaaggc

SEQ ID NO: 1273773 - DNA, 15 bp, Homo sapiens
gcagttacttcaagg

SEQ ID NO: 1273774 - DNA, 15 bp, Homo sapiens
tgcagttacttcaag

SEQ ID NO: 1273775 - DNA, 15 bp, Homo sapiens
gtgcagttacttcaa

SEQ ID NO: 1273776 - DNA, 15 bp, Homo sapiens
cgtgcagttacttca

SEQ ID NO: 1273777 - DNA, 15 bp, Homo sapiens
tcgtgcagttacttc

SEQ ID NO: 1273778 - DNA, 15 bp, Homo sapiens
ttcgtgcagttactt

SEQ ID NO: 1273779 - DNA, 15 bp, Homo sapiens
tttcgtgcagttact

SEQ ID NO: 1273780 - DNA, 15 bp, Homo sapiens
atttcgtgcagttac

SEQ ID NO: 1273781 - DNA, 15 bp, Homo sapiens
aatttcgtgcagtta

SEQ ID NO: 1273782 - DNA, 15 bp, Homo sapiens
aaatttcgtgcagtt

SEQ ID NO: 1273783 - DNA, 15 bp, Homo sapiens
caaatttcgtgcagt

SEQ ID NO: 1273784 - DNA, 15 bp, Homo sapiens
tcaaatttcgtgcag

SEQ ID NO: 1273785 - DNA, 15 bp, Homo sapiens
ctcaaatttcgtgca

SEQ ID NO: 1273786 - DNA, 15 bp, Homo sapiens
cctcaaatttcgtgc

SEQ ID NO: 1273787 - DNA, 15 bp, Homo sapiens
tcctcaaatttcgtg

SEQ ID NO: 1273788 - DNA, 15 bp, Homo sapiens
atcctcaaatttcgt

SEQ ID NO: 1273789 - DNA, 15 bp, Homo sapiens
catcctcaaatttcg

SEQ ID NO: 1273790 - DNA, 15 bp, Homo sapiens
ccatcctcaaatttc

SEQ ID NO: 1273791 - DNA, 15 bp, Homo sapiens
gccatcctcaaattt

SEQ ID NO: 1273792 - DNA, 15 bp, Homo sapiens
ggccatcctcaaatt

SEQ ID NO: 1273793 - DNA, 15 bp, Homo sapiens
tggccatcctcaaat

SEQ ID NO: 1273794 - DNA, 15 bp, Homo sapiens
ctggccatcctcaaa

SEQ ID NO: 1273795 - DNA, 15 bp, Homo sapiens
cctggccatcctcaa

SEQ ID NO: 1273796 - DNA, 15 bp, Homo sapiens
gcctggccatcctca

SEQ ID NO: 1273797 - DNA, 15 bp, Homo sapiens
tgcctggccatcctc

SEQ ID NO: 1273798 - DNA, 15 bp, Homo sapiens
ctgcctggccatcct

SEQ ID NO: 1273799 - DNA, 15 bp, Homo sapiens
actgcctggccatcc

SEQ ID NO: 1273800 - DNA, 15 bp, Homo sapiens
aactgcctggccatc

SEQ ID NO: 1273801 - DNA, 15 bp, Homo sapiens
gaactgcctggccat

SEQ ID NO: 1273802 - DNA, 15 bp, Homo sapiens
agaactgcctggcca

SEQ ID NO: 1273803 - DNA, 15 bp, Homo sapiens
tagaactgcctggcc

SEQ ID NO: 1273804 - DNA, 15 bp, Homo sapiens
gtagaactgcctggc

SEQ ID NO: 1273805 - DNA, 15 bp, Homo sapiens
tgtagaactgcctgg

SEQ ID NO: 1273806 - DNA, 15 bp, Homo sapiens
ttgtagaactgcctg

SEQ ID NO: 1273807 - DNA, 15 bp, Homo sapiens
gttgtagaactgcct

SEQ ID NO: 1273808 - DNA, 15 bp, Homo sapiens
tgttgtagaactgcc

SEQ ID NO: 1273809 - DNA, 15 bp, Homo sapiens
ctgttgtagaactgc

SEQ ID NO: 1273810 - DNA, 15 bp, Homo sapiens
gctgttgtagaactg

SEQ ID NO: 1273811 - DNA, 15 bp, Homo sapiens
ggctgttgtagaact

SEQ ID NO: 1273812 - DNA, 15 bp, Homo sapiens
cggctgttgtagaac

SEQ ID NO: 1273813 - DNA, 15 bp, Homo sapiens
gcggctgttgtagaa

SEQ ID NO: 1273814 - DNA, 15 bp, Homo sapiens
agcggctgttgtaga

SEQ ID NO: 1273815 - DNA, 15 bp, Homo sapiens
gagcggctgttgtag

SEQ ID NO: 1273816 - DNA, 15 bp, Homo sapiens
tgagcggctgttgta

SEQ ID NO: 1273817 - DNA, 15 bp, Homo sapiens
gtgagcggctgttgt

SEQ ID NO: 1273818 - DNA, 15 bp, Homo sapiens
tgtgagcggctgttg

SEQ ID NO: 1273819 - DNA, 15 bp, Homo sapiens
ctgtgagcggctgtt

SEQ ID NO: 1273820 - DNA, 15 bp, Homo sapiens
cctgtgagcggctgt

SEQ ID NO: 1273821 - DNA, 15 bp, Homo sapiens
ccctgtgagcggctg

SEQ ID NO: 1273822 - DNA, 15 bp, Homo sapiens
tccctgtgagcggct

SEQ ID NO: 1273823 - DNA, 15 bp, Homo sapiens
ctccctgtgagcggc

SEQ ID NO: 1273824 - DNA, 15 bp, Homo sapiens
tctccctgtgagcgg

SEQ ID NO: 1273825 - DNA, 15 bp, Homo sapiens
ctctccctgtgagcg

SEQ ID NO: 1273826 - DNA, 15 bp, Homo sapiens
gctctccctgtgagc

SEQ ID NO: 1273827 - DNA, 15 bp, Homo sapiens
ggctctccctgtgag

SEQ ID NO: 1273828 - DNA, 15 bp, Homo sapiens
tggctctccctgtga

SEQ ID NO: 1273829 - DNA, 15 bp, Homo sapiens
ctggctctccctgtg

SEQ ID NO: 1273830 - DNA, 15 bp, Homo sapiens
tctggctctccctgt

SEQ ID NO: 1273831 - DNA, 15 bp, Homo sapiens
ttctggctctccctg

SEQ ID NO: 1273832 - DNA, 15 bp, Homo sapiens
gttctggctctccct

SEQ ID NO: 1273833 - DNA, 15 bp, Homo sapiens
tgttctggctctccc

SEQ ID NO: 1273834 - DNA, 15 bp, Homo sapiens
gtgttctggctctcc

SEQ ID NO: 1273835 - DNA, 15 bp, Homo sapiens
tgtgttctggctctc

SEQ ID NO: 1273836 - DNA, 15 bp, Homo sapiens
ctgtgttctggctct

SEQ ID NO: 1273837 - DNA, 15 bp, Homo sapiens
tctgtgttctggctc

SEQ ID NO: 1273838 - DNA, 15 bp, Homo sapiens
ttctgtgttctggct

SEQ ID NO: 1273839 - DNA, 15 bp, Homo sapiens
cttctgtgttctggc

SEQ ID NO: 1273840 - DNA, 15 bp, Homo sapiens
tcttctgtgttctgg

SEQ ID NO: 1273841 - DNA, 15 bp, Homo sapiens
ttcttctgtgttctg

SEQ ID NO: 1273842 - DNA, 15 bp, Homo sapiens
gttcttctgtgttct

SEQ ID NO: 1273843 - DNA, 15 bp, Homo sapiens
agttcttctgtgttc

SEQ ID NO: 1273844 - DNA, 15 bp, Homo sapiens
gagttcttctgtgtt

SEQ ID NO: 1273845 - DNA, 15 bp, Homo sapiens
tgagttcttctgtgt

SEQ ID NO: 1273846 - DNA, 15 bp, Homo sapiens
ctgagttcttctgtg

SEQ ID NO: 1273847 - DNA, 15 bp, Homo sapiens
tctgagttcttctgt

SEQ ID NO: 1273848 - DNA, 15 bp, Homo sapiens
atctgagttcttctg

SEQ ID NO: 1273849 - DNA, 15 bp, Homo sapiens
catctgagttcttct

SEQ ID NO: 1273850 - DNA, 15 bp, Homo sapiens
tcatctgagttcttc

SEQ ID NO: 1273851 - DNA, 15 bp, Homo sapiens
gtcatctgagttctt

SEQ ID NO: 1273852 - DNA, 15 bp, Homo sapiens
agtcatctgagttct

SEQ ID NO: 1273853 - DNA, 15 bp, Homo sapiens
cagtcatctgagttc

SEQ ID NO: 1273854 - DNA, 15 bp, Homo sapiens
ccagtcatctgagtt

SEQ ID NO: 1273855 - DNA, 15 bp, Homo sapiens
accagtcatctgagt

SEQ ID NO: 1273856 - DNA, 15 bp, Homo sapiens
taccagtcatctgag

SEQ ID NO: 1273857 - DNA, 15 bp, Homo sapiens
ctaccagtcatctga

SEQ ID NO: 1273858 - DNA, 15 bp, Homo sapiens
actaccagtcatctg

SEQ ID NO: 1273859 - DNA, 15 bp, Homo sapiens
tactaccagtcatct

SEQ ID NO: 1273860 - DNA, 15 bp, Homo sapiens
atactaccagtcatc

SEQ ID NO: 1273861 - DNA, 15 bp, Homo sapiens
aatactaccagtcat

SEQ ID NO: 1273862 - DNA, 15 bp, Homo sapiens
taatactaccagtca

SEQ ID NO: 1273863 - DNA, 15 bp, Homo sapiens
gtaatactaccagtc

SEQ ID NO: 1273864 - DNA, 15 bp, Homo sapiens
ggtaatactaccagt

SEQ ID NO: 1273865 - DNA, 15 bp, Homo sapiens
aggtaatactaccag

SEQ ID NO: 1273866 - DNA, 15 bp, Homo sapiens
aaggtaatactacca

SEQ ID NO: 1273867 - DNA, 15 bp, Homo sapiens
gaaggtaatactacc

SEQ ID NO: 1273868 - DNA, 15 bp, Homo sapiens
agaaggtaatactac

SEQ ID NO: 1273869 - DNA, 15 bp, Homo sapiens
aagaaggtaatacta

SEQ ID NO: 1273870 - DNA, 15 bp, Homo sapiens
gaagaaggtaatact

SEQ ID NO: 1273871 - DNA, 15 bp, Homo sapiens
tgaagaaggtaatac

SEQ ID NO: 1273872 - DNA, 15 bp, Homo sapiens
atgaagaaggtaata

SEQ ID NO: 1273873 - DNA, 15 bp, Homo sapiens
tatgaagaaggtaat

SEQ ID NO: 1273874 - DNA, 15 bp, Homo sapiens
ttatgaagaaggtaa

SEQ ID NO: 1273875 - DNA, 15 bp, Homo sapiens
attatgaagaaggta

SEQ ID NO: 1273876 - DNA, 15 bp, Homo sapiens
gattatgaagaaggt

SEQ ID NO: 1273877 - DNA, 15 bp, Homo sapiens
ggattatgaagaagg

SEQ ID NO: 1273878 - DNA, 15 bp, Homo sapiens
gggattatgaagaag

SEQ ID NO: 1273879 - DNA, 15 bp, Homo sapiens
tgggattatgaagaa

SEQ ID NO: 1273880 - DNA, 15 bp, Homo sapiens
ctgggattatgaaga

SEQ ID NO: 1273881 - DNA, 15 bp, Homo sapiens
cctgggattatgaag

SEQ ID NO: 1273882 - DNA, 15 bp, Homo sapiens
gcctgggattatgaa

SEQ ID NO: 1273883 - DNA, 15 bp, Homo sapiens
agcctgggattatga

SEQ ID NO: 1273884 - DNA, 15 bp, Homo sapiens
aagcctgggattatg

SEQ ID NO: 1273885 - DNA, 15 bp, Homo sapiens
caagcctgggattat

SEQ ID NO: 1273886 - DNA, 15 bp, Homo sapiens
ccaagcctgggatta

SEQ ID NO: 1273887 - DNA, 15 bp, Homo sapiens
cccaagcctgggatt

SEQ ID NO: 1273888 - DNA, 15 bp, Homo sapiens
ccccaagcctgggat

SEQ ID NO: 1273889 - DNA, 15 bp, Homo sapiens
cccccaagcctggga

SEQ ID NO: 1273890 - DNA, 15 bp, Homo sapiens
ccccccaagcctggg

SEQ ID NO: 1273891 - DNA, 15 bp, Homo sapiens
gccccccaagcctgg

SEQ ID NO: 1273892 - DNA, 15 bp, Homo sapiens
agccccccaagcctg

SEQ ID NO: 1273893 - DNA, 15 bp, Homo sapiens
cagccccccaagcct

SEQ ID NO: 1273894 - DNA, 15 bp, Homo sapiens
gcagccccccaagcc

SEQ ID NO: 1273895 - DNA, 15 bp, Homo sapiens
cgcagccccccaagc

SEQ ID NO: 1273896 - DNA, 15 bp, Homo sapiens
tcgcagccccccaag

SEQ ID NO: 1273897 - DNA, 15 bp, Homo sapiens
atcgcagccccccaa

SEQ ID NO: 1273898 - DNA, 15 bp, Homo sapiens
catcgcagcccccca

SEQ ID NO: 1273899 - DNA, 15 bp, Homo sapiens
ccatcgcagcccccc

SEQ ID NO: 1273900 - DNA, 15 bp, Homo sapiens
tccatcgcagccccc

SEQ ID NO: 1273901 - DNA, 15 bp, Homo sapiens
ctccatcgcagcccc

SEQ ID NO: 1273902 - DNA, 15 bp, Homo sapiens
actccatcgcagccc

SEQ ID NO: 1273903 - DNA, 15 bp, Homo sapiens
gactccatcgcagcc

SEQ ID NO: 1273904 - DNA, 15 bp, Homo sapiens
tgactccatcgcagc

SEQ ID NO: 1273905 - DNA, 15 bp, Homo sapiens
ctgactccatcgcag

SEQ ID NO: 1273906 - DNA, 15 bp, Homo sapiens
tctgactccatcgca

SEQ ID NO: 1273907 - DNA, 15 bp, Homo sapiens
ctctgactccatcgc

SEQ ID NO: 1273908 - DNA, 15 bp, Homo sapiens
cctctgactccatcg

SEQ ID NO: 1273909 - DNA, 15 bp, Homo sapiens
tcctctgactccatc

SEQ ID NO: 1273910 - DNA, 15 bp, Homo sapiens
ttcctctgactccat

SEQ ID NO: 1273911 - DNA, 15 bp, Homo sapiens
tttcctctgactcca

SEQ ID NO: 1273912 - DNA, 15 bp, Homo sapiens
gtttcctctgactcc

SEQ ID NO: 1273913 - DNA, 15 bp, Homo sapiens
agtttcctctgactc

SEQ ID NO: 1273914 - DNA, 15 bp, Homo sapiens
gagtttcctctgact

SEQ ID NO: 1273915 - DNA, 15 bp, Homo sapiens
tgagtttcctctgac

SEQ ID NO: 1273916 - DNA, 15 bp, Homo sapiens
ctgagtttcctctga

SEQ ID NO: 1273917 - DNA, 15 bp, Homo sapiens
actgagtttcctctg

SEQ ID NO: 1273918 - DNA, 15 bp, Homo sapiens
aactgagtttcctct

SEQ ID NO: 1273919 - DNA, 15 bp, Homo sapiens
gaactgagtttcctc

SEQ ID NO: 1273920 - DNA, 15 bp, Homo sapiens
tgaactgagtttcct

SEQ ID NO: 1273921 - DNA, 15 bp, Homo sapiens
ctgaactgagtttcc

SEQ ID NO: 1273922 - DNA, 15 bp, Homo sapiens
tctgaactgagtttc

SEQ ID NO: 1273923 - DNA, 15 bp, Homo sapiens
ttctgaactgagttt

SEQ ID NO: 1273924 - DNA, 15 bp, Homo sapiens
gttctgaactgagtt

SEQ ID NO: 1273925 - DNA, 15 bp, Homo sapiens
tgttctgaactgagt

SEQ ID NO: 1273926 - DNA, 15 bp, Homo sapiens
atgttctgaactgag

SEQ ID NO: 1273927 - DNA, 15 bp, Homo sapiens
gatgttctgaactga

SEQ ID NO: 1273928 - DNA, 15 bp, Homo sapiens
agatgttctgaactg

SEQ ID NO: 1273929 - DNA, 15 bp, Homo sapiens
aagatgttctgaact

SEQ ID NO: 1273930 - DNA, 15 bp, Homo sapiens
aaagatgttctgaac

SEQ ID NO: 1273931 - DNA, 15 bp, Homo sapiens
caaagatgttctgaa

SEQ ID NO: 1273932 - DNA, 15 bp, Homo sapiens
ccaaagatgttctga

SEQ ID NO: 1273933 - DNA, 15 bp, Homo sapiens
accaaagatgttctg

SEQ ID NO: 1273934 - DNA, 15 bp, Homo sapiens
aaccaaagatgttct

SEQ ID NO: 1273935 - DNA, 15 bp, Homo sapiens
aaaccaaagatgttc

SEQ ID NO: 1273936 - DNA, 15 bp, Homo sapiens
aaaaccaaagatgtt

SEQ ID NO: 1273937 - DNA, 15 bp, Homo sapiens
aaaaaccaaagatgt

SEQ ID NO: 1273938 - DNA, 15 bp, Homo sapiens
taaaaaccaaagatg

SEQ ID NO: 1273939 - DNA, 15 bp, Homo sapiens
gtaaaaaccaaagat

SEQ ID NO: 1273940 - DNA, 15 bp, Homo sapiens
tgtaaaaaccaaaga

SEQ ID NO: 1273941 - DNA, 15 bp, Homo sapiens
ttgtaaaaaccaaag

SEQ ID NO: 1273942 - DNA, 15 bp, Homo sapiens
tttgtaaaaaccaaa

SEQ ID NO: 1273943 - DNA, 15 bp, Homo sapiens
atttgtaaaaaccaa

SEQ ID NO: 1273944 - DNA, 15 bp, Homo sapiens
tatttgtaaaaacca

SEQ ID NO: 1273945 - DNA, 15 bp, Homo sapiens
gtatttgtaaaaacc

SEQ ID NO: 1273946 - DNA, 15 bp, Homo sapiens
tgtatttgtaaaaac

SEQ ID NO: 1273947 - DNA, 15 bp, Homo sapiens
ttgtatttgtaaaaa

SEQ ID NO: 1273948 - DNA, 15 bp, Homo sapiens
tttgtatttgtaaaa

SEQ ID NO: 1273949 - DNA, 15 bp, Homo sapiens
atttgtatttgtaaa

SEQ ID NO: 1273950 - DNA, 15 bp, Homo sapiens
aatttgtatttgtaa

SEQ ID NO: 1273951 - DNA, 15 bp, Homo sapiens
taatttgtatttgta

SEQ ID NO: 1273952 - DNA, 15 bp, Homo sapiens
ttaatttgtatttgt

SEQ ID NO: 1273953 - DNA, 15 bp, Homo sapiens
gttaatttgtatttg

SEQ ID NO: 1273954 - DNA, 15 bp, Homo sapiens
agttaatttgtattt

SEQ ID NO: 1273955 - DNA, 15 bp, Homo sapiens
cagttaatttgtatt

SEQ ID NO: 1273956 - DNA, 15 bp, Homo sapiens
ccagttaatttgtat

SEQ ID NO: 1273957 - DNA, 15 bp, Homo sapiens
tccagttaatttgta

SEQ ID NO: 1273958 - DNA, 15 bp, Homo sapiens
ttccagttaatttgt

SEQ ID NO: 1273959 - DNA, 15 bp, Homo sapiens
gttccagttaatttg

SEQ ID NO: 1273960 - DNA, 15 bp, Homo sapiens
cgttccagttaattt

SEQ ID NO: 1273961 - DNA, 15 bp, Homo sapiens
gcgttccagttaatt

SEQ ID NO: 1273962 - DNA, 15 bp, Homo sapiens
agcgttccagttaat

SEQ ID NO: 1273963 - DNA, 15 bp, Homo sapiens
tagcgttccagttaa

SEQ ID NO: 1273964 - DNA, 15 bp, Homo sapiens
ttagcgttccagtta

SEQ ID NO: 1273965 - DNA, 15 bp, Homo sapiens
tttagcgttccagtt

SEQ ID NO: 1273966 - DNA, 15 bp, Homo sapiens
atttagcgttccagt

SEQ ID NO: 1273967 - DNA, 15 bp, Homo sapiens
aatttagcgttccag

SEQ ID NO: 1273968 - DNA, 15 bp, Homo sapiens
gaatttagcgttcca

SEQ ID NO: 1273969 - DNA, 15 bp, Homo sapiens
agaatttagcgttcc

SEQ ID NO: 1273970 - DNA, 15 bp, Homo sapiens
tagaatttagcgttc

SEQ ID NO: 1273971 - DNA, 15 bp, Homo sapiens
ctagaatttagcgtt

SEQ ID NO: 1273972 - DNA, 15 bp, Homo sapiens
gctagaatttagcgt

SEQ ID NO: 1273973 - DNA, 15 bp, Homo sapiens
ggctagaatttagcg

SEQ ID NO: 1273974 - DNA, 15 bp, Homo sapiens
aggctagaatttagc

SEQ ID NO: 1273975 - DNA, 15 bp, Homo sapiens
caggctagaatttag

SEQ ID NO: 1273976 - DNA, 15 bp, Homo sapiens
acaggctagaattta

SEQ ID NO: 1273977 - DNA, 15 bp, Homo sapiens
aacaggctagaattt

SEQ ID NO: 1273978 - DNA, 15 bp, Homo sapiens
taacaggctagaatt

SEQ ID NO: 1273979 - DNA, 15 bp, Homo sapiens
ttaacaggctagaat

SEQ ID NO: 1273980 - DNA, 15 bp, Homo sapiens
attaacaggctagaa

SEQ ID NO: 1273981 - DNA, 15 bp, Homo sapiens
gattaacaggctaga

SEQ ID NO: 1273982 - DNA, 15 bp, Homo sapiens
agattaacaggctag

SEQ ID NO: 1273983 - DNA, 15 bp, Homo sapiens
cagattaacaggcta

SEQ ID NO: 1273984 - DNA, 15 bp, Homo sapiens
ccagattaacaggct

SEQ ID NO: 1273985 - DNA, 15 bp, Homo sapiens
accagattaacaggc

SEQ ID NO: 1273986 - DNA, 15 bp, Homo sapiens
gaccagattaacagg

SEQ ID NO: 1273987 - DNA, 15 bp, Homo sapiens
tgaccagattaacag

SEQ ID NO: 1273988 - DNA, 15 bp, Homo sapiens
gtgaccagattaaca

SEQ ID NO: 1273989 - DNA, 15 bp, Homo sapiens
agtgaccagattaac

SEQ ID NO: 1273990 - DNA, 15 bp, Homo sapiens
cagtgaccagattaa

SEQ ID NO: 1273991 - DNA, 15 bp, Homo sapiens
tcagtgaccagatta

SEQ ID NO: 1273992 - DNA, 15 bp, Homo sapiens
ttcagtgaccagatt

SEQ ID NO: 1273993 - DNA, 15 bp, Homo sapiens
tttcagtgaccagat

SEQ ID NO: 1273994 - DNA, 15 bp, Homo sapiens
ttttcagtgaccaga

SEQ ID NO: 1273995 - DNA, 15 bp, Homo sapiens
tttttcagtgaccag

SEQ ID NO: 1273996 - DNA, 15 bp, Homo sapiens
ttttttcagtgacca

SEQ ID NO: 1273997 - DNA, 15 bp, Homo sapiens
tttttttcagtgacc

SEQ ID NO: 1273998 - DNA, 15 bp, Homo sapiens
ttttttttcagtgac

SEQ ID NO: 1273999 - DNA, 15 bp, Homo sapiens
attttttttcagtga

SEQ ID NO: 1274000 - DNA, 15 bp, Homo sapiens
aattttttttcagtg

SEQ ID NO: 1274001 - DNA, 15 bp, Homo sapiens
aaattttttttcagt

SEQ ID NO: 1274002 - DNA, 15 bp, Homo sapiens
aaaattttttttcag

SEQ ID NO: 1274003 - DNA, 15 bp, Homo sapiens
aaaaattttttttca

SEQ ID NO: 1274004 - DNA, 15 bp, Homo sapiens
aaaaaattttttttc

SEQ ID NO: 1274005 - DNA, 15 bp, Homo sapiens
aaaaaaaaatttttt

SEQ ID NO: 1274006 - DNA, 15 bp, Homo sapiens
aaaaaaaaaattttt

SEQ ID NO: 1274007 - DNA, 15 bp, Homo sapiens
aaaaaaaaaaatttt

SEQ ID NO: 1274008 - DNA, 15 bp, Homo sapiens
tgaaaaaaaaaaaat

SEQ ID NO: 1274009 - DNA, 15 bp, Homo sapiens
ttttgaaaaaaaaaa

SEQ ID NO: 1274010 - DNA, 15 bp, Homo sapiens
tttttgaaaaaaaaa

SEQ ID NO: 1274011 - DNA, 15 bp, Homo sapiens
gttttttgaaaaaaa

SEQ ID NO: 1274012 - DNA, 15 bp, Homo sapiens
tgttttttgaaaaaa

SEQ ID NO: 1274013 - DNA, 15 bp, Homo sapiens
atgttttttgaaaaa

SEQ ID NO: 1274014 - DNA, 15 bp, Homo sapiens
tatgttttttgaaaa

SEQ ID NO: 1274015 - DNA, 15 bp, Homo sapiens
ctatgttttttgaaa

SEQ ID NO: 1274016 - DNA, 15 bp, Homo sapiens
gctatgttttttgaa

SEQ ID NO: 1274017 - DNA, 15 bp, Homo sapiens
agctatgttttttga

SEQ ID NO: 1274018 - DNA, 15 bp, Homo sapiens
aagctatgttttttg

SEQ ID NO: 1274019 - DNA, 15 bp, Homo sapiens
aaagctatgtttttt

SEQ ID NO: 1274020 - DNA, 15 bp, Homo sapiens
taaagctatgttttt

SEQ ID NO: 1274021 - DNA, 15 bp, Homo sapiens
ctaaagctatgtttt

SEQ ID NO: 1274022 - DNA, 15 bp, Homo sapiens
gctaaagctatgttt

SEQ ID NO: 1274023 - DNA, 15 bp, Homo sapiens
agctaaagctatgtt

SEQ ID NO: 1274024 - DNA, 15 bp, Homo sapiens
aagctaaagctatgt

SEQ ID NO: 1274025 - DNA, 15 bp, Homo sapiens
taagctaaagctatg

SEQ ID NO: 1274026 - DNA, 15 bp, Homo sapiens
ataagctaaagctat

SEQ ID NO: 1274027 - DNA, 15 bp, Homo sapiens
aataagctaaagcta

SEQ ID NO: 1274028 - DNA, 15 bp, Homo sapiens
aaataagctaaagct

SEQ ID NO: 1274029 - DNA, 15 bp, Homo sapiens
aaaataagctaaagc

SEQ ID NO: 1274030 - DNA, 15 bp, Homo sapiens
aaaaataagctaaag

SEQ ID NO: 1274031 - DNA, 15 bp, Homo sapiens
aaaaaataagctaaa

SEQ ID NO: 1274032 - DNA, 15 bp, Homo sapiens
aaaaaaataagctaa

SEQ ID NO: 1274033 - DNA, 15 bp, Homo sapiens
aaaaaaaataagcta

SEQ ID NO: 1274034 - DNA, 15 bp, Homo sapiens
gaaaaaaaataagct

SEQ ID NO: 1274035 - DNA, 15 bp, Homo sapiens
agaaaaaaaataagc

SEQ ID NO: 1274036 - DNA, 15 bp, Homo sapiens
gagaaaaaaaataag

SEQ ID NO: 1274037 - DNA, 15 bp, Homo sapiens
aagagaaaaaaaata

SEQ ID NO: 1274038 - DNA, 15 bp, Homo sapiens
aaagagaaaaaaaat

SEQ ID NO: 1274039 - DNA, 15 bp, Homo sapiens
acaaagagaaaaaaa

SEQ ID NO: 1274040 - DNA, 15 bp, Homo sapiens
tacaaagagaaaaaa

SEQ ID NO: 1274041 - DNA, 15 bp, Homo sapiens
ttacaaagagaaaaa

SEQ ID NO: 1274042 - DNA, 15 bp, Homo sapiens
tttacaaagagaaaa

SEQ ID NO: 1274043 - DNA, 15 bp, Homo sapiens
ttttacaaagagaaa

SEQ ID NO: 1274044 - DNA, 15 bp, Homo sapiens
gttttacaaagagaa

SEQ ID NO: 1274045 - DNA, 15 bp, Homo sapiens
agttttacaaagaga

SEQ ID NO: 1274046 - DNA, 15 bp, Homo sapiens
aagttttacaaagag

SEQ ID NO: 1274047 - DNA, 15 bp, Homo sapiens
gaagttttacaaaga

SEQ ID NO: 1274048 - DNA, 15 bp, Homo sapiens
cgaagttttacaaag

SEQ ID NO: 1274049 - DNA, 15 bp, Homo sapiens
acgaagttttacaaa

SEQ ID NO: 1274050 - DNA, 15 bp, Homo sapiens
cacgaagttttacaa

SEQ ID NO: 1274051 - DNA, 15 bp, Homo sapiens
gcacgaagttttaca

SEQ ID NO: 1274052 - DNA, 15 bp, Homo sapiens
tgcacgaagttttac

SEQ ID NO: 1274053 - DNA, 15 bp, Homo sapiens
atgcacgaagtttta

SEQ ID NO: 1274054 - DNA, 15 bp, Homo sapiens
catgcacgaagtttt

SEQ ID NO: 1274055 - DNA, 15 bp, Homo sapiens
tcatgcacgaagttt

SEQ ID NO: 1274056 - DNA, 15 bp, Homo sapiens
gtcatgcacgaagtt

SEQ ID NO: 1274057 - DNA, 15 bp, Homo sapiens
agtcatgcacgaagt

SEQ ID NO: 1274058 - DNA, 15 bp, Homo sapiens
aagtcatgcacgaag

SEQ ID NO: 1274059 - DNA, 15 bp, Homo sapiens
gaagtcatgcacgaa

SEQ ID NO: 1274060 - DNA, 15 bp, Homo sapiens
tgaagtcatgcacga

SEQ ID NO: 1274061 - DNA, 15 bp, Homo sapiens
ctgaagtcatgcacg

SEQ ID NO: 1274062 - DNA, 15 bp, Homo sapiens
gctgaagtcatgcac

SEQ ID NO: 1274063 - DNA, 15 bp, Homo sapiens
agctgaagtcatgca

SEQ ID NO: 1274064 - DNA, 15 bp, Homo sapiens
aagctgaagtcatgc

SEQ ID NO: 1274065 - DNA, 15 bp, Homo sapiens
aaagctgaagtcatg

SEQ ID NO: 1274066 - DNA, 15 bp, Homo sapiens
taaagctgaagtcat

SEQ ID NO: 1274067 - DNA, 15 bp, Homo sapiens
gtaaagctgaagtca

SEQ ID NO: 1274068 - DNA, 15 bp, Homo sapiens
agtaaagctgaagtc

SEQ ID NO: 1274069 - DNA, 15 bp, Homo sapiens
gagtaaagctgaagt

SEQ ID NO: 1274070 - DNA, 15 bp, Homo sapiens
agagtaaagctgaag

SEQ ID NO: 1274071 - DNA, 15 bp, Homo sapiens
aagagtaaagctgaa

SEQ ID NO: 1274072 - DNA, 15 bp, Homo sapiens
aaagagtaaagctga

SEQ ID NO: 1274073 - DNA, 15 bp, Homo sapiens
caaagagtaaagctg

SEQ ID NO: 1274074 - DNA, 15 bp, Homo sapiens
acaaagagtaaagct

SEQ ID NO: 1274075 - DNA, 15 bp, Homo sapiens
gacaaagagtaaagc

SEQ ID NO: 1274076 - DNA, 15 bp, Homo sapiens
tgacaaagagtaaag

SEQ ID NO: 1274077 - DNA, 15 bp, Homo sapiens
ttgacaaagagtaaa

SEQ ID NO: 1274078 - DNA, 15 bp, Homo sapiens
cttgacaaagagtaa

SEQ ID NO: 1274079 - DNA, 15 bp, Homo sapiens
tcttgacaaagagta

SEQ ID NO: 1274080 - DNA, 15 bp, Homo sapiens
ctcagcttcctgagt

SEQ ID NO: 1274081 - DNA, 15 bp, Homo sapiens
tctcagcttcctgag

SEQ ID NO: 1274082 - DNA, 15 bp, Homo sapiens
gtctcagcttcctga

SEQ ID NO: 1274083 - DNA, 15 bp, Homo sapiens
tgtctcagcttcctg

SEQ ID NO: 1274084 - DNA, 15 bp, Homo sapiens
atgtctcagcttcct

SEQ ID NO: 1274085 - DNA, 15 bp, Homo sapiens
catgtctcagcttcc

SEQ ID NO: 1274086 - DNA, 15 bp, Homo sapiens
tcatgtctcagcttc

SEQ ID NO: 1274087 - DNA, 15 bp, Homo sapiens
atcatgtctcagctt

SEQ ID NO: 1274088 - DNA, 15 bp, Homo sapiens
tatcatgtctcagct

SEQ ID NO: 1274089 - DNA, 15 bp, Homo sapiens
ttatcatgtctcagc

SEQ ID NO: 1274090 - DNA, 15 bp, Homo sapiens
attatcatgtctcag

SEQ ID NO: 1274091 - DNA, 15 bp, Homo sapiens
gattatcatgtctca

SEQ ID NO: 1274092 - DNA, 15 bp, Homo sapiens
cgattatcatgtctc

SEQ ID NO: 1274093 - DNA, 15 bp, Homo sapiens
gcgattatcatgtct

SEQ ID NO: 1274094 - DNA, 15 bp, Homo sapiens
agcgattatcatgtc

SEQ ID NO: 1274095 - DNA, 15 bp, Homo sapiens
aagcgattatcatgt

SEQ ID NO: 1274096 - DNA, 15 bp, Homo sapiens
caagcgattatcatg

SEQ ID NO: 1274097 - DNA, 15 bp, Homo sapiens
tcaagcgattatcat

SEQ ID NO: 1274098 - DNA, 15 bp, Homo sapiens
ctcaagcgattatca

SEQ ID NO: 1274099 - DNA, 15 bp, Homo sapiens
gctcaagcgattatc

SEQ ID NO: 1274100 - DNA, 15 bp, Homo sapiens
ggctcaagcgattat

SEQ ID NO: 1274101 - DNA, 15 bp, Homo sapiens
aggctcaagcgatta

SEQ ID NO: 1274102 - DNA, 15 bp, Homo sapiens
tacctcccaggctca

SEQ ID NO: 1274103 - DNA, 15 bp, Homo sapiens
ctacctcccaggctc

SEQ ID NO: 1274104 - DNA, 15 bp, Homo sapiens
tctacctcccaggct

SEQ ID NO: 1274105 - DNA, 15 bp, Homo sapiens
ctctacctcccaggc

SEQ ID NO: 1274106 - DNA, 15 bp, Homo sapiens
gctctacctcccagg

SEQ ID NO: 1274107 - DNA, 15 bp, Homo sapiens
ggctctacctcccag

SEQ ID NO: 1274108 - DNA, 15 bp, Homo sapiens
aggctctacctccca

SEQ ID NO: 1274109 - DNA, 15 bp, Homo sapiens
caggctctacctccc

SEQ ID NO: 1274110 - DNA, 15 bp, Homo sapiens
ccaggctctacctcc

SEQ ID NO: 1274111 - DNA, 15 bp, Homo sapiens
cccaggctctacctc

SEQ ID NO: 1274112 - DNA, 15 bp, Homo sapiens
ccccaggctctacct

SEQ ID NO: 1274113 - DNA, 15 bp, Homo sapiens
gccccaggctctacc

SEQ ID NO: 1274114 - DNA, 15 bp, Homo sapiens
agccccaggctctac

SEQ ID NO: 1274115 - DNA, 15 bp, Homo sapiens
cagccccaggctcta

SEQ ID NO: 1274116 - DNA, 15 bp, Homo sapiens
gcagccccaggctct

SEQ ID NO: 1274117 - DNA, 15 bp, Homo sapiens
tgcagccccaggctc

SEQ ID NO: 1274118 - DNA, 15 bp, Homo sapiens
gtgcagccccaggct

SEQ ID NO: 1274119 - DNA, 15 bp, Homo sapiens
agtgcagccccaggc

SEQ ID NO: 1274120 - DNA, 15 bp, Homo sapiens
gagtgcagccccagg

SEQ ID NO: 1274121 - DNA, 15 bp, Homo sapiens
ggagtgcagccccag

SEQ ID NO: 1274122 - DNA, 15 bp, Homo sapiens
tggagtgcagcccca

SEQ ID NO: 1274123 - DNA, 15 bp, Homo sapiens
atggagtgcagcccc

SEQ ID NO: 1274124 - DNA, 15 bp, Homo sapiens
gatggagtgcagccc

SEQ ID NO: 1274125 - DNA, 15 bp, Homo sapiens
ggatggagtgcagcc

SEQ ID NO: 1274126 - DNA, 15 bp, Homo sapiens
aggatggagtgcagc

SEQ ID NO: 1274127 - DNA, 15 bp, Homo sapiens
tgcccaggatggagt

SEQ ID NO: 1274128 - DNA, 15 bp, Homo sapiens
ttgcccaggatggag

SEQ ID NO: 1274129 - DNA, 15 bp, Homo sapiens
gttgcccaggatgga

SEQ ID NO: 1274130 - DNA, 15 bp, Homo sapiens
tgttgcccaggatgg

SEQ ID NO: 1274131 - DNA, 15 bp, Homo sapiens
ctgttgcccaggatg

SEQ ID NO: 1274132 - DNA, 15 bp, Homo sapiens
tctgttgcccaggat

SEQ ID NO: 1274133 - DNA, 15 bp, Homo sapiens
ctctgttgcccagga

SEQ ID NO: 1274134 - DNA, 15 bp, Homo sapiens
ccctctgttgcccag

SEQ ID NO: 1274135 - DNA, 15 bp, Homo sapiens
tccctctgttgccca

SEQ ID NO: 1274136 - DNA, 15 bp, Homo sapiens
ctccctctgttgccc

SEQ ID NO: 1274137 - DNA, 15 bp, Homo sapiens
tctccctctgttgcc

SEQ ID NO: 1274138 - DNA, 15 bp, Homo sapiens
atctccctctgttgc

SEQ ID NO: 1274139 - DNA, 15 bp, Homo sapiens
aatctccctctgttg

SEQ ID NO: 1274140 - DNA, 15 bp, Homo sapiens
gaatctccctctgtt

SEQ ID NO: 1274141 - DNA, 15 bp, Homo sapiens
agaatctccctctgt

SEQ ID NO: 1274142 - DNA, 15 bp, Homo sapiens
cagaatctccctctg

SEQ ID NO: 1274143 - DNA, 15 bp, Homo sapiens
acagaatctccctct

SEQ ID NO: 1274144 - DNA, 15 bp, Homo sapiens
gacagaatctccctc

SEQ ID NO: 1274145 - DNA, 15 bp, Homo sapiens
agacagaatctccct

SEQ ID NO: 1274146 - DNA, 15 bp, Homo sapiens
gagacagaatctccc

SEQ ID NO: 1274147 - DNA, 15 bp, Homo sapiens
tgagacagaatctcc

SEQ ID NO: 1274148 - DNA, 15 bp, Homo sapiens
attattttttgagac

SEQ ID NO: 1274149 - DNA, 15 bp, Homo sapiens
tattattttttgaga

SEQ ID NO: 1274150 - DNA, 15 bp, Homo sapiens
ttattattttttgag

SEQ ID NO: 1274151 - DNA, 15 bp, Homo sapiens
attattattttttga

SEQ ID NO: 1274152 - DNA, 15 bp, Homo sapiens
tttatattattatta

SEQ ID NO: 1274153 - DNA, 15 bp, Homo sapiens
atttatattattatt

SEQ ID NO: 1274154 - DNA, 15 bp, Homo sapiens
tatttatattattat

SEQ ID NO: 1274155 - DNA, 15 bp, Homo sapiens
ttatttatattatta

SEQ ID NO: 1274156 - DNA, 15 bp, Homo sapiens
tttatttatattatt

SEQ ID NO: 1274157 - DNA, 15 bp, Homo sapiens
atttatttatattat

SEQ ID NO: 1274158 - DNA, 15 bp, Homo sapiens
tatttatttatatta

SEQ ID NO: 1274159 - DNA, 15 bp, Homo sapiens
ttatttatttatatt

SEQ ID NO: 1274160 - DNA, 15 bp, Homo sapiens
tttatttatttatat

SEQ ID NO: 1274161 - DNA, 15 bp, Homo sapiens
atttatttatttata

SEQ ID NO: 1274162 - DNA, 15 bp, Homo sapiens
aattatttatttatt

SEQ ID NO: 1274163 - DNA, 15 bp, Homo sapiens
aaattatttatttat

SEQ ID NO: 1274164 - DNA, 15 bp, Homo sapiens
aaaattatttattta

SEQ ID NO: 1274165 - DNA, 15 bp, Homo sapiens
aaaaattatttattt

SEQ ID NO: 1274166 - DNA, 15 bp, Homo sapiens
aaaaaattatttatt

SEQ ID NO: 1274167 - DNA, 15 bp, Homo sapiens
aaaaaaattatttat

SEQ ID NO: 1274168 - DNA, 15 bp, Homo sapiens
taaaaaaattattta

SEQ ID NO: 1274169 - DNA, 15 bp, Homo sapiens
ttaaaaaaattattt

SEQ ID NO: 1274170 - DNA, 15 bp, Homo sapiens
tttaaaaaaattatt

SEQ ID NO: 1274171 - DNA, 15 bp, Homo sapiens
ttttaaaaaaattat

SEQ ID NO: 1274172 - DNA, 15 bp, Homo sapiens
tttttaaaaaaatta

SEQ ID NO: 1274173 - DNA, 15 bp, Homo sapiens
agtctttttttaaaa

SEQ ID NO: 1274174 - DNA, 15 bp, Homo sapiens
gagtctttttttaaa

SEQ ID NO: 1274175 - DNA, 15 bp, Homo sapiens
agagtctttttttaa

SEQ ID NO: 1274176 - DNA, 15 bp, Homo sapiens
aagagtcttttttta

SEQ ID NO: 1274177 - DNA, 15 bp, Homo sapiens
aaagagtcttttttt

SEQ ID NO: 1274178 - DNA, 15 bp, Homo sapiens
gaaagagtctttttt

SEQ ID NO: 1274179 - DNA, 15 bp, Homo sapiens
ggaaagagtcttttt

SEQ ID NO: 1274180 - DNA, 15 bp, Homo sapiens
aggaaagagtctttt

SEQ ID NO: 1274181 - DNA, 15 bp, Homo sapiens
taggaaagagtcttt

SEQ ID NO: 1274182 - DNA, 15 bp, Homo sapiens
ataggaaagagtctt

SEQ ID NO: 1274183 - DNA, 15 bp, Homo sapiens
tataggaaagagtct

SEQ ID NO: 1274184 - DNA, 15 bp, Homo sapiens
atataggaaagagtc

SEQ ID NO: 1274185 - DNA, 15 bp, Homo sapiens
aatataggaaagagt

SEQ ID NO: 1274186 - DNA, 15 bp, Homo sapiens
taatataggaaagag

SEQ ID NO: 1274187 - DNA, 15 bp, Homo sapiens
ttaatataggaaaga

SEQ ID NO: 1274188 - DNA, 15 bp, Homo sapiens
attaatataggaaag

SEQ ID NO: 1274189 - DNA, 15 bp, Homo sapiens
gattaatataggaaa

SEQ ID NO: 1274190 - DNA, 15 bp, Homo sapiens
agattaatataggaa

SEQ ID NO: 1274191 - DNA, 15 bp, Homo sapiens
aagattaatatagga

SEQ ID NO: 1274192 - DNA, 15 bp, Homo sapiens
aaagattaatatagg

SEQ ID NO: 1274193 - DNA, 15 bp, Homo sapiens
caaagattaatatag

SEQ ID NO: 1274194 - DNA, 15 bp, Homo sapiens
gcaaagattaatata

SEQ ID NO: 1274195 - DNA, 15 bp, Homo sapiens
tgcaaagattaatat

SEQ ID NO: 1274196 - DNA, 15 bp, Homo sapiens
atgcaaagattaata

SEQ ID NO: 1274197 - DNA, 15 bp, Homo sapiens
gatgcaaagattaat

SEQ ID NO: 1274198 - DNA, 15 bp, Homo sapiens
ggatgcaaagattaa

SEQ ID NO: 1274199 - DNA, 15 bp, Homo sapiens
aggatgcaaagatta

SEQ ID NO: 1274200 - DNA, 15 bp, Homo sapiens
caggatgcaaagatt

SEQ ID NO: 1274201 - DNA, 15 bp, Homo sapiens
acaggatgcaaagat

SEQ ID NO: 1274202 - DNA, 15 bp, Homo sapiens
cacaggatgcaaaga

SEQ ID NO: 1274203 - DNA, 15 bp, Homo sapiens
gcacaggatgcaaag

SEQ ID NO: 1274204 - DNA, 15 bp, Homo sapiens
ggcacaggatgcaaa

SEQ ID NO: 1274205 - DNA, 15 bp, Homo sapiens
gggcacaggatgcaa

SEQ ID NO: 1274206 - DNA, 15 bp, Homo sapiens
tgggcacaggatgca

SEQ ID NO: 1274207 - DNA, 15 bp, Homo sapiens
atgggcacaggatgc

SEQ ID NO: 1274208 - DNA, 15 bp, Homo sapiens
catgggcacaggatg

SEQ ID NO: 1274209 - DNA, 15 bp, Homo sapiens
ccatgggcacaggat

SEQ ID NO: 1274210 - DNA, 15 bp, Homo sapiens
gccatgggcacagga

SEQ ID NO: 1274211 - DNA, 15 bp, Homo sapiens
ggccatgggcacagg

SEQ ID NO: 1274212 - DNA, 15 bp, Homo sapiens
gggccatgggcacag

SEQ ID NO: 1274213 - DNA, 15 bp, Homo sapiens
ggggccatgggcaca

SEQ ID NO: 1274214 - DNA, 15 bp, Homo sapiens
tggggccatgggcac

SEQ ID NO: 1274215 - DNA, 15 bp, Homo sapiens
ttggggccatgggca

SEQ ID NO: 1274216 - DNA, 15 bp, Homo sapiens
tttggggccatgggc

SEQ ID NO: 1274217 - DNA, 15 bp, Homo sapiens
gtttggggccatggg

SEQ ID NO: 1274218 - DNA, 15 bp, Homo sapiens
ggtttggggccatgg

SEQ ID NO: 1274219 - DNA, 15 bp, Homo sapiens
aggtttggggccatg

SEQ ID NO: 1274220 - DNA, 15 bp, Homo sapiens
caggtttggggccat

SEQ ID NO: 1274221 - DNA, 15 bp, Homo sapiens
tcaggtttggggcca

SEQ ID NO: 1274222 - DNA, 15 bp, Homo sapiens
gtcaggtttggggcc

SEQ ID NO: 1274223 - DNA, 15 bp, Homo sapiens
ggtcaggtttggggc

SEQ ID NO: 1274224 - DNA, 15 bp, Homo sapiens
tggtcaggtttgggg

SEQ ID NO: 1274225 - DNA, 15 bp, Homo sapiens
ttggtcaggtttggg

SEQ ID NO: 1274226 - DNA, 15 bp, Homo sapiens
attggtcaggtttgg

SEQ ID NO: 1274227 - DNA, 15 bp, Homo sapiens
cattggtcaggtttg

SEQ ID NO: 1274228 - DNA, 15 bp, Homo sapiens
tcattggtcaggttt

SEQ ID NO: 1274229 - DNA, 15 bp, Homo sapiens
ttcattggtcaggtt

SEQ ID NO: 1274230 - DNA, 15 bp, Homo sapiens
cttcattggtcaggt

SEQ ID NO: 1274231 - DNA, 15 bp, Homo sapiens
ccttcattggtcagg

SEQ ID NO: 1274232 - DNA, 15 bp, Homo sapiens
gccttcattggtcag

SEQ ID NO: 1274233 - DNA, 15 bp, Homo sapiens
ggccttcattggtca

SEQ ID NO: 1274234 - DNA, 15 bp, Homo sapiens
gggccttcattggtc

SEQ ID NO: 1274235 - DNA, 15 bp, Homo sapiens
ggggccttcattggt

SEQ ID NO: 1274236 - DNA, 15 bp, Homo sapiens
tggggccttcattgg

SEQ ID NO: 1274237 - DNA, 15 bp, Homo sapiens
ctggggccttcattg

SEQ ID NO: 1274238 - DNA, 15 bp, Homo sapiens
actggggccttcatt

SEQ ID NO: 1274239 - DNA, 15 bp, Homo sapiens
tactggggccttcat

SEQ ID NO: 1274240 - DNA, 15 bp, Homo sapiens
ttactggggccttca

SEQ ID NO: 1274241 - DNA, 15 bp, Homo sapiens
tttactggggccttc

SEQ ID NO: 1274242 - DNA, 15 bp, Homo sapiens
atttactggggcctt

SEQ ID NO: 1274243 - DNA, 15 bp, Homo sapiens
tatttactggggcct

SEQ ID NO: 1274244 - DNA, 15 bp, Homo sapiens
atatttactggggcc

SEQ ID NO: 1274245 - DNA, 15 bp, Homo sapiens
aatatttactggggc

SEQ ID NO: 1274246 - DNA, 15 bp, Homo sapiens
aaatatttactgggg

SEQ ID NO: 1274247 - DNA, 15 bp, Homo sapiens
aaaatatttactggg

SEQ ID NO: 1274248 - DNA, 15 bp, Homo sapiens
aaaaatatttactgg

SEQ ID NO: 1274249 - DNA, 15 bp, Homo sapiens
aaaaaatatttactg

SEQ ID NO: 1274250 - DNA, 15 bp, Homo sapiens
caaaaaatatttact

SEQ ID NO: 1274251 - DNA, 15 bp, Homo sapiens
tcaaaaaatatttac

SEQ ID NO: 1274252 - DNA, 15 bp, Homo sapiens
ttcaaaaaatattta

SEQ ID NO: 1274253 - DNA, 15 bp, Homo sapiens
gttcaaaaaatattt

SEQ ID NO: 1274254 - DNA, 15 bp, Homo sapiens
tgttcaaaaaatatt

SEQ ID NO: 1274255 - DNA, 15 bp, Homo sapiens
ttgttcaaaaaatat

SEQ ID NO: 1274256 - DNA, 15 bp, Homo sapiens
tttgttcaaaaaata

SEQ ID NO: 1274257 - DNA, 15 bp, Homo sapiens
ttttgttcaaaaaat

SEQ ID NO: 1274258 - DNA, 15 bp, Homo sapiens
cttttgttcaaaaaa

SEQ ID NO: 1274259 - DNA, 15 bp, Homo sapiens
tcttttgttcaaaaa

SEQ ID NO: 1274260 - DNA, 15 bp, Homo sapiens
ttcttttgttcaaaa

SEQ ID NO: 1274261 - DNA, 15 bp, Homo sapiens
tttcttttgttcaaa

SEQ ID NO: 1274262 - DNA, 15 bp, Homo sapiens
ttttcttttgttcaa

SEQ ID NO: 1274263 - DNA, 15 bp, Homo sapiens
attttcttttgttca

SEQ ID NO: 1274264 - DNA, 15 bp, Homo sapiens
tattttcttttgttc

SEQ ID NO: 1274265 - DNA, 15 bp, Homo sapiens
atattttcttttgtt

SEQ ID NO: 1274266 - DNA, 15 bp, Homo sapiens
tatattttcttttgt

SEQ ID NO: 1274267 - DNA, 15 bp, Homo sapiens
ctatattttcttttg

SEQ ID NO: 1274268 - DNA, 15 bp, Homo sapiens
tctatattttctttt

SEQ ID NO: 1274269 - DNA, 15 bp, Homo sapiens
atctatattttcttt

SEQ ID NO: 1274270 - DNA, 15 bp, Homo sapiens
catctatattttctt

SEQ ID NO: 1274271 - DNA, 15 bp, Homo sapiens
tcatctatattttct

SEQ ID NO: 1274272 - DNA, 15 bp, Homo sapiens
atcatctatattttc

SEQ ID NO: 1274273 - DNA, 15 bp, Homo sapiens
gatcatctatatttt

SEQ ID NO: 1274274 - DNA, 15 bp, Homo sapiens
tgatcatctatattt

SEQ ID NO: 1274275 - DNA, 15 bp, Homo sapiens
ttgatcatctatatt

SEQ ID NO: 1274276 - DNA, 15 bp, Homo sapiens
tttgatcatctatat

SEQ ID NO: 1274277 - DNA, 15 bp, Homo sapiens
ctttgatcatctata

SEQ ID NO: 1274278 - DNA, 15 bp, Homo sapiens
tctttgatcatctat

SEQ ID NO: 1274279 - DNA, 15 bp, Homo sapiens
atctttgatcatcta

SEQ ID NO: 1274280 - DNA, 15 bp, Homo sapiens
tatctttgatcatct

SEQ ID NO: 1274281 - DNA, 15 bp, Homo sapiens
ttatctttgatcatc

SEQ ID NO: 1274282 - DNA, 15 bp, Homo sapiens
cttatctttgatcat

SEQ ID NO: 1274283 - DNA, 15 bp, Homo sapiens
tcttatctttgatca

SEQ ID NO: 1274284 - DNA, 15 bp, Homo sapiens
ttcttatctttgatc

SEQ ID NO: 1274285 - DNA, 15 bp, Homo sapiens
tttcttatctttgat

SEQ ID NO: 1274286 - DNA, 15 bp, Homo sapiens
ctttcttatctttga

SEQ ID NO: 1274287 - DNA, 15 bp, Homo sapiens
tctttcttatctttg

SEQ ID NO: 1274288 - DNA, 15 bp, Homo sapiens
atctttcttatcttt

SEQ ID NO: 1274289 - DNA, 15 bp, Homo sapiens
tatctttcttatctt

SEQ ID NO: 1274290 - DNA, 15 bp, Homo sapiens
ttatctttcttatct

SEQ ID NO: 1274291 - DNA, 15 bp, Homo sapiens
cttatctttcttatc

SEQ ID NO: 1274292 - DNA, 15 bp, Homo sapiens
tcttatctttcttat

SEQ ID NO: 1274293 - DNA, 15 bp, Homo sapiens
ttcttatctttctta

SEQ ID NO: 1274294 - DNA, 15 bp, Homo sapiens
cttcttatctttctt

SEQ ID NO: 1274295 - DNA, 15 bp, Homo sapiens
tcttcttatctttct

SEQ ID NO: 1274296 - DNA, 15 bp, Homo sapiens
gtcttcttatctttc

SEQ ID NO: 1274297 - DNA, 15 bp, Homo sapiens
tgtcttcttatcttt

SEQ ID NO: 1274298 - DNA, 15 bp, Homo sapiens
gtgtcttcttatctt

SEQ ID NO: 1274299 - DNA, 15 bp, Homo sapiens
ggtgtcttcttatct

SEQ ID NO: 1274300 - DNA, 15 bp, Homo sapiens
aggtgtcttcttatc

SEQ ID NO: 1274301 - DNA, 15 bp, Homo sapiens
gaggtgtcttcttat

SEQ ID NO: 1274302 - DNA, 15 bp, Homo sapiens
tgaggtgtcttctta

SEQ ID NO: 1274303 - DNA, 15 bp, Homo sapiens
ttgaggtgtcttctt

SEQ ID NO: 1274304 - DNA, 15 bp, Homo sapiens
attgaggtgtcttct

SEQ ID NO: 1274305 - DNA, 15 bp, Homo sapiens
aattgaggtgtcttc

SEQ ID NO: 1274306 - DNA, 15 bp, Homo sapiens
gaattgaggtgtctt

SEQ ID NO: 1274307 - DNA, 15 bp, Homo sapiens
agaattgaggtgtct

SEQ ID NO: 1274308 - DNA, 15 bp, Homo sapiens
aagaattgaggtgtc

SEQ ID NO: 1274309 - DNA, 15 bp, Homo sapiens
caagaattgaggtgt

SEQ ID NO: 1274310 - DNA, 15 bp, Homo sapiens
acaagaattgaggtg

SEQ ID NO: 1274311 - DNA, 15 bp, Homo sapiens
tacaagaattgaggt

SEQ ID NO: 1274312 - DNA, 15 bp, Homo sapiens
ctacaagaattgagg

SEQ ID NO: 1274313 - DNA, 15 bp, Homo sapiens
cctacaagaattgag

SEQ ID NO: 1274314 - DNA, 15 bp, Homo sapiens
gcctacaagaattga

SEQ ID NO: 1274315 - DNA, 15 bp, Homo sapiens
tgcctacaagaattg

SEQ ID NO: 1274316 - DNA, 15 bp, Homo sapiens
atgcctacaagaatt

SEQ ID NO: 1274317 - DNA, 15 bp, Homo sapiens
tatgcctacaagaat

SEQ ID NO: 1274318 - DNA, 15 bp, Homo sapiens
atatgcctacaagaa

SEQ ID NO: 1274319 - DNA, 15 bp, Homo sapiens
tatatgcctacaaga

SEQ ID NO: 1274320 - DNA, 15 bp, Homo sapiens
ctatatgcctacaag

SEQ ID NO: 1274321 - DNA, 15 bp, Homo sapiens
actatatgcctacaa

SEQ ID NO: 1274322 - DNA, 15 bp, Homo sapiens
cactatatgcctaca

SEQ ID NO: 1274323 - DNA, 15 bp, Homo sapiens
ccactatatgcctac

SEQ ID NO: 1274324 - DNA, 15 bp, Homo sapiens
accactatatgccta

SEQ ID NO: 1274325 - DNA, 15 bp, Homo sapiens
taccactatatgcct

SEQ ID NO: 1274326 - DNA, 15 bp, Homo sapiens
ctaccactatatgcc

SEQ ID NO: 1274327 - DNA, 15 bp, Homo sapiens
cctaccactatatgc

SEQ ID NO: 1274328 - DNA, 15 bp, Homo sapiens
ccctaccactatatg

SEQ ID NO: 1274329 - DNA, 15 bp, Homo sapiens
cccctaccactatat

SEQ ID NO: 1274330 - DNA, 15 bp, Homo sapiens
tcccctaccactata

SEQ ID NO: 1274331 - DNA, 15 bp, Homo sapiens
ttcccctaccactat

SEQ ID NO: 1274332 - DNA, 15 bp, Homo sapiens
tttcccctaccacta

SEQ ID NO: 1274333 - DNA, 15 bp, Homo sapiens
atttcccctaccact

SEQ ID NO: 1274334 - DNA, 15 bp, Homo sapiens
gatttcccctaccac

SEQ ID NO: 1274335 - DNA, 15 bp, Homo sapiens
tgatttcccctacca

SEQ ID NO: 1274336 - DNA, 15 bp, Homo sapiens
gtgatttcccctacc

SEQ ID NO: 1274337 - DNA, 15 bp, Homo sapiens
agtgatttcccctac

SEQ ID NO: 1274338 - DNA, 15 bp, Homo sapiens
tagtgatttccccta

SEQ ID NO: 1274339 - DNA, 15 bp, Homo sapiens
ttagtgatttcccct

SEQ ID NO: 1274340 - DNA, 15 bp, Homo sapiens
attagtgatttcccc

SEQ ID NO: 1274341 - DNA, 15 bp, Homo sapiens
aattagtgatttccc

SEQ ID NO: 1274342 - DNA, 15 bp, Homo sapiens
gaattagtgatttcc

SEQ ID NO: 1274343 - DNA, 15 bp, Homo sapiens
agaattagtgatttc

SEQ ID NO: 1274344 - DNA, 15 bp, Homo sapiens
cagaattagtgattt

SEQ ID NO: 1274345 - DNA, 15 bp, Homo sapiens
acagaattagtgatt

SEQ ID NO: 1274346 - DNA, 15 bp, Homo sapiens
cacagaattagtgat

SEQ ID NO: 1274347 - DNA, 15 bp, Homo sapiens
acacagaattagtga

SEQ ID NO: 1274348 - DNA, 15 bp, Homo sapiens
cacacagaattagtg

SEQ ID NO: 1274349 - DNA, 15 bp, Homo sapiens
acacacagaattagt

SEQ ID NO: 1274350 - DNA, 15 bp, Homo sapiens
aacacacagaattag

SEQ ID NO: 1274351 - DNA, 15 bp, Homo sapiens
aaacacacagaatta

SEQ ID NO: 1274352 - DNA, 15 bp, Homo sapiens
taaacacacagaatt

SEQ ID NO: 1274353 - DNA, 15 bp, Homo sapiens
ataaacacacagaat

SEQ ID NO: 1274354 - DNA, 15 bp, Homo sapiens
cataaacacacagaa

SEQ ID NO: 1274355 - DNA, 15 bp, Homo sapiens
acataaacacacaga

SEQ ID NO: 1274356 - DNA, 15 bp, Homo sapiens
tacataaacacacag

SEQ ID NO: 1274357 - DNA, 15 bp, Homo sapiens
atacataaacacaca

SEQ ID NO: 1274358 - DNA, 15 bp, Homo sapiens
gatacataaacacac

SEQ ID NO: 1274359 - DNA, 15 bp, Homo sapiens
agatacataaacaca

SEQ ID NO: 1274360 - DNA, 15 bp, Homo sapiens
aagatacataaacac

SEQ ID NO: 1274361 - DNA, 15 bp, Homo sapiens
gaagatacataaaca

SEQ ID NO: 1274362 - DNA, 15 bp, Homo sapiens
tgaagatacataaac

SEQ ID NO: 1274363 - DNA, 15 bp, Homo sapiens
atgaagatacataaa

SEQ ID NO: 1274364 - DNA, 15 bp, Homo sapiens
gatgaagatacataa

SEQ ID NO: 1274365 - DNA, 15 bp, Homo sapiens
agatgaagatacata

SEQ ID NO: 1274366 - DNA, 15 bp, Homo sapiens
aagatgaagatacat

SEQ ID NO: 1274367 - DNA, 15 bp, Homo sapiens
gaagatgaagataca

SEQ ID NO: 1274368 - DNA, 15 bp, Homo sapiens
tgaagatgaagatac

SEQ ID NO: 1274369 - DNA, 15 bp, Homo sapiens
ctgaagatgaagata

SEQ ID NO: 1274370 - DNA, 15 bp, Homo sapiens
cctgaagatgaagat

SEQ ID NO: 1274371 - DNA, 15 bp, Homo sapiens
tcctgaagatgaaga

SEQ ID NO: 1274372 - DNA, 15 bp, Homo sapiens
ttcctgaagatgaag

SEQ ID NO: 1274373 - DNA, 15 bp, Homo sapiens
tttcctgaagatgaa

SEQ ID NO: 1274374 - DNA, 15 bp, Homo sapiens
ttttcctgaagatga

SEQ ID NO: 1274375 - DNA, 15 bp, Homo sapiens
tttttcctgaagatg

SEQ ID NO: 1274376 - DNA, 15 bp, Homo sapiens
atttttcctgaagat

SEQ ID NO: 1274377 - DNA, 15 bp, Homo sapiens
tatttttcctgaaga

SEQ ID NO: 1274378 - DNA, 15 bp, Homo sapiens
ctatttttcctgaag

SEQ ID NO: 1274379 - DNA, 15 bp, Homo sapiens
gctatttttcctgaa

SEQ ID NO: 1274380 - DNA, 15 bp, Homo sapiens
tgctatttttcctga

SEQ ID NO: 1274381 - DNA, 15 bp, Homo sapiens
ttgctatttttcctg

SEQ ID NO: 1274382 - DNA, 15 bp, Homo sapiens
cttgctatttttcct

SEQ ID NO: 1274383 - DNA, 15 bp, Homo sapiens
tcttgctatttttcc

SEQ ID NO: 1274384 - DNA, 15 bp, Homo sapiens
ttcttgctatttttc

SEQ ID NO: 1274385 - DNA, 15 bp, Homo sapiens
attcttgctattttt

SEQ ID NO: 1274386 - DNA, 15 bp, Homo sapiens
aattcttgctatttt

SEQ ID NO: 1274387 - DNA, 15 bp, Homo sapiens
taattcttgctattt

SEQ ID NO: 1274388 - DNA, 15 bp, Homo sapiens
ctaattcttgctatt

SEQ ID NO: 1274389 - DNA, 15 bp, Homo sapiens
tctaattcttgctat

SEQ ID NO: 1274390 - DNA, 15 bp, Homo sapiens
ttctaattcttgcta

SEQ ID NO: 1274391 - DNA, 15 bp, Homo sapiens
tttctaattcttgct

SEQ ID NO: 1274392 - DNA, 15 bp, Homo sapiens
ctttctaattcttgc

SEQ ID NO: 1274393 - DNA, 15 bp, Homo sapiens
tctttctaattcttg

SEQ ID NO: 1274394 - DNA, 15 bp, Homo sapiens
ttctttctaattctt

SEQ ID NO: 1274395 - DNA, 15 bp, Homo sapiens
tttctttctaattct

SEQ ID NO: 1274396 - DNA, 15 bp, Homo sapiens
gtttctttctaattc

SEQ ID NO: 1274397 - DNA, 15 bp, Homo sapiens
tgtttctttctaatt

SEQ ID NO: 1274398 - DNA, 15 bp, Homo sapiens
gtgtttctttctaat

SEQ ID NO: 1274399 - DNA, 15 bp, Homo sapiens
agtgtttctttctaa

SEQ ID NO: 1274400 - DNA, 15 bp, Homo sapiens
gagtgtttctttcta

SEQ ID NO: 1274401 - DNA, 15 bp, Homo sapiens
tgagtgtttctttct

SEQ ID NO: 1274402 - DNA, 15 bp, Homo sapiens
ttgagtgtttctttc

SEQ ID NO: 1274403 - DNA, 15 bp, Homo sapiens
tttgagtgtttcttt

SEQ ID NO: 1274404 - DNA, 15 bp, Homo sapiens
ctttgagtgtttctt

SEQ ID NO: 1274405 - DNA, 15 bp, Homo sapiens
cctttgagtgtttct

SEQ ID NO: 1274406 - DNA, 15 bp, Homo sapiens
tcctttgagtgtttc

SEQ ID NO: 1274407 - DNA, 15 bp, Homo sapiens
gtcctttgagtgttt

SEQ ID NO: 1274408 - DNA, 15 bp, Homo sapiens
agtcctttgagtgtt

SEQ ID NO: 1274409 - DNA, 15 bp, Homo sapiens
aagtcctttgagtgt

SEQ ID NO: 1274410 - DNA, 15 bp, Homo sapiens
gaagtcctttgagtg

SEQ ID NO: 1274411 - DNA, 15 bp, Homo sapiens
ggaagtcctttgagt

SEQ ID NO: 1274412 - DNA, 15 bp, Homo sapiens
tggaagtcctttgag

SEQ ID NO: 1274413 - DNA, 15 bp, Homo sapiens
ctggaagtcctttga

SEQ ID NO: 1274414 - DNA, 15 bp, Homo sapiens
tctggaagtcctttg

SEQ ID NO: 1274415 - DNA, 15 bp, Homo sapiens
ctctggaagtccttt

SEQ ID NO: 1274416 - DNA, 15 bp, Homo sapiens
tctctggaagtcctt

SEQ ID NO: 1274417 - DNA, 15 bp, Homo sapiens
ttctctggaagtcct

SEQ ID NO: 1274418 - DNA, 15 bp, Homo sapiens
cttctctggaagtcc

SEQ ID NO: 1274419 - DNA, 15 bp, Homo sapiens
tgccttctctggaag

SEQ ID NO: 1274420 - DNA, 15 bp, Homo sapiens
ttgccttctctggaa

SEQ ID NO: 1274421 - DNA, 15 bp, Homo sapiens
attgccttctctgga

SEQ ID NO: 1274422 - DNA, 15 bp, Homo sapiens
cattgccttctctgg

SEQ ID NO: 1274423 - DNA, 15 bp, Homo sapiens
tcattgccttctctg

SEQ ID NO: 1274424 - DNA, 15 bp, Homo sapiens
ttcattgccttctct

SEQ ID NO: 1274425 - DNA, 15 bp, Homo sapiens
attcattgccttctc

SEQ ID NO: 1274426 - DNA, 15 bp, Homo sapiens
tattcattgccttct

SEQ ID NO: 1274427 - DNA, 15 bp, Homo sapiens
ctattcattgccttc

SEQ ID NO: 1274428 - DNA, 15 bp, Homo sapiens
gctattcattgcctt

SEQ ID NO: 1274429 - DNA, 15 bp, Homo sapiens
ggctattcattgcct

SEQ ID NO: 1274430 - DNA, 15 bp, Homo sapiens
tggctattcattgcc

SEQ ID NO: 1274431 - DNA, 15 bp, Homo sapiens
ctggctattcattgc

SEQ ID NO: 1274432 - DNA, 15 bp, Homo sapiens
actggctattcattg

SEQ ID NO: 1274433 - DNA, 15 bp, Homo sapiens
cactggctattcatt

SEQ ID NO: 1274434 - DNA, 15 bp, Homo sapiens
gcactggctattcat

SEQ ID NO: 1274435 - DNA, 15 bp, Homo sapiens
tgcactggctattca

SEQ ID NO: 1274436 - DNA, 15 bp, Homo sapiens
atgcactggctattc

SEQ ID NO: 1274437 - DNA, 15 bp, Homo sapiens
catgcactggctatt

SEQ ID NO: 1274438 - DNA, 15 bp, Homo sapiens
acatgcactggctat

SEQ ID NO: 1274439 - DNA, 15 bp, Homo sapiens
tacatgcactggcta

SEQ ID NO: 1274440 - DNA, 15 bp, Homo sapiens
gtacatgcactggct

SEQ ID NO: 1274441 - DNA, 15 bp, Homo sapiens
tgtacatgcactggc

SEQ ID NO: 1274442 - DNA, 15 bp, Homo sapiens
gtgtacatgcactgg

SEQ ID NO: 1274443 - DNA, 15 bp, Homo sapiens
ggtgtacatgcactg

SEQ ID NO: 1274444 - DNA, 15 bp, Homo sapiens
aggtgtacatgcact

SEQ ID NO: 1274445 - DNA, 15 bp, Homo sapiens
taggtgtacatgcac

SEQ ID NO: 1274446 - DNA, 15 bp, Homo sapiens
gtaggtgtacatgca

SEQ ID NO: 1274447 - DNA, 15 bp, Homo sapiens
ggtaggtgtacatgc

SEQ ID NO: 1274448 - DNA, 15 bp, Homo sapiens
aggtaggtgtacatg

SEQ ID NO: 1274449 - DNA, 15 bp, Homo sapiens
gaggtaggtgtacat

SEQ ID NO: 1274450 - DNA, 15 bp, Homo sapiens
ggaggtaggtgtaca

SEQ ID NO: 1274451 - DNA, 15 bp, Homo sapiens
tggaggtaggtgtac

SEQ ID NO: 1274452 - DNA, 15 bp, Homo sapiens
atggaggtaggtgta

SEQ ID NO: 1274453 - DNA, 15 bp, Homo sapiens
aatggaggtaggtgt

SEQ ID NO: 1274454 - DNA, 15 bp, Homo sapiens
aaatggaggtaggtg

SEQ ID NO: 1274455 - DNA, 15 bp, Homo sapiens
gaaatggaggtaggt

SEQ ID NO: 1274456 - DNA, 15 bp, Homo sapiens
ggaaatggaggtagg

SEQ ID NO: 1274457 - DNA, 15 bp, Homo sapiens
aggaaatggaggtag

SEQ ID NO: 1274458 - DNA, 15 bp, Homo sapiens
aaggaaatggaggta

SEQ ID NO: 1274459 - DNA, 15 bp, Homo sapiens
aaaggaaatggaggt

SEQ ID NO: 1274460 - DNA, 15 bp, Homo sapiens
caaaggaaatggagg

SEQ ID NO: 1274461 - DNA, 15 bp, Homo sapiens
gcaaaggaaatggag

SEQ ID NO: 1274462 - DNA, 15 bp, Homo sapiens
ggcaaaggaaatgga

SEQ ID NO: 1274463 - DNA, 15 bp, Homo sapiens
tggcaaaggaaatgg

SEQ ID NO: 1274464 - DNA, 15 bp, Homo sapiens
gtggcaaaggaaatg

SEQ ID NO: 1274465 - DNA, 15 bp, Homo sapiens
agtggcaaaggaaat

SEQ ID NO: 1274466 - DNA, 15 bp, Homo sapiens
cagtggcaaaggaaa

SEQ ID NO: 1274467 - DNA, 15 bp, Homo sapiens
ccagtggcaaaggaa

SEQ ID NO: 1274468 - DNA, 15 bp, Homo sapiens
gccagtggcaaagga

SEQ ID NO: 1274469 - DNA, 15 bp, Homo sapiens
tgccagtggcaaagg

SEQ ID NO: 1274470 - DNA, 15 bp, Homo sapiens
ttgccagtggcaaag

SEQ ID NO: 1274471 - DNA, 15 bp, Homo sapiens
attgccagtggcaaa

SEQ ID NO: 1274472 - DNA, 15 bp, Homo sapiens
tattgccagtggcaa

SEQ ID NO: 1274473 - DNA, 15 bp, Homo sapiens
ttattgccagtggca

SEQ ID NO: 1274474 - DNA, 15 bp, Homo sapiens
attattgccagtggc

SEQ ID NO: 1274475 - DNA, 15 bp, Homo sapiens
gattattgccagtgg

SEQ ID NO: 1274476 - DNA, 15 bp, Homo sapiens
agattattgccagtg

SEQ ID NO: 1274477 - DNA, 15 bp, Homo sapiens
aagattattgccagt

SEQ ID NO: 1274478 - DNA, 15 bp, Homo sapiens
gaagattattgccag

SEQ ID NO: 1274479 - DNA, 15 bp, Homo sapiens
tgaagattattgcca

SEQ ID NO: 1274480 - DNA, 15 bp, Homo sapiens
atgaagattattgcc

SEQ ID NO: 1274481 - DNA, 15 bp, Homo sapiens
gatgaagattattgc

SEQ ID NO: 1274482 - DNA, 15 bp, Homo sapiens
agatgaagattattg

SEQ ID NO: 1274483 - DNA, 15 bp, Homo sapiens
cagatgaagattatt

SEQ ID NO: 1274484 - DNA, 15 bp, Homo sapiens
gcagatgaagattat

SEQ ID NO: 1274485 - DNA, 15 bp, Homo sapiens
ggcagatgaagatta

SEQ ID NO: 1274486 - DNA, 15 bp, Homo sapiens
gggcagatgaagatt

SEQ ID NO: 1274487 - DNA, 15 bp, Homo sapiens
agggcagatgaagat

SEQ ID NO: 1274488 - DNA, 15 bp, Homo sapiens
gagggcagatgaaga

SEQ ID NO: 1274489 - DNA, 15 bp, Homo sapiens
agagggcagatgaag

SEQ ID NO: 1274490 - DNA, 15 bp, Homo sapiens
gagagggcagatgaa

SEQ ID NO: 1274491 - DNA, 15 bp, Homo sapiens
ggagagggcagatga

SEQ ID NO: 1274492 - DNA, 15 bp, Homo sapiens
gggagagggcagatg

SEQ ID NO: 1274493 - DNA, 15 bp, Homo sapiens
ggggagagggcagat

SEQ ID NO: 1274494 - DNA, 15 bp, Homo sapiens
aggggagagggcaga

SEQ ID NO: 1274495 - DNA, 15 bp, Homo sapiens
gaggggagagggcag

SEQ ID NO: 1274496 - DNA, 15 bp, Homo sapiens
ggaggggagagggca

SEQ ID NO: 1274497 - DNA, 15 bp, Homo sapiens
gggaggggagagggc

SEQ ID NO: 1274498 - DNA, 15 bp, Homo sapiens
ggggaggggagaggg

SEQ ID NO: 1274499 - DNA, 15 bp, Homo sapiens
cggggaggggagagg

SEQ ID NO: 1274500 - DNA, 15 bp, Homo sapiens
tcggggaggggagag

SEQ ID NO: 1274501 - DNA, 15 bp, Homo sapiens
gtcggggaggggaga

SEQ ID NO: 1274502 - DNA, 15 bp, Homo sapiens
ggtcggggaggggag

SEQ ID NO: 1274503 - DNA, 15 bp, Homo sapiens
aggtcggggagggga

SEQ ID NO: 1274504 - DNA, 15 bp, Homo sapiens
taggtcggggagggg

SEQ ID NO: 1274505 - DNA, 15 bp, Homo sapiens
ttaggtcggggaggg

SEQ ID NO: 1274506 - DNA, 15 bp, Homo sapiens
tttaggtcggggagg

SEQ ID NO: 1274507 - DNA, 15 bp, Homo sapiens
ctttaggtcggggag

SEQ ID NO: 1274508 - DNA, 15 bp, Homo sapiens
actttaggtcgggga

SEQ ID NO: 1274509 - DNA, 15 bp, Homo sapiens
cactttaggtcgggg

SEQ ID NO: 1274510 - DNA, 15 bp, Homo sapiens
ccactttaggtcggg

SEQ ID NO: 1274511 - DNA, 15 bp, Homo sapiens
accactttaggtcgg

SEQ ID NO: 1274512 - DNA, 15 bp, Homo sapiens
taccactttaggtcg

SEQ ID NO: 1274513 - DNA, 15 bp, Homo sapiens
ctaccactttaggtc

SEQ ID NO: 1274514 - DNA, 15 bp, Homo sapiens
actaccactttaggt

SEQ ID NO: 1274515 - DNA, 15 bp, Homo sapiens
cactaccactttagg

SEQ ID NO: 1274516 - DNA, 15 bp, Homo sapiens
tcactaccactttag

SEQ ID NO: 1274517 - DNA, 15 bp, Homo sapiens
ctcactaccacttta

SEQ ID NO: 1274518 - DNA, 15 bp, Homo sapiens
tctcactaccacttt

SEQ ID NO: 1274519 - DNA, 15 bp, Homo sapiens
ctctcactaccactt

SEQ ID NO: 1274520 - DNA, 15 bp, Homo sapiens
tctctcactaccact

SEQ ID NO: 1274521 - DNA, 15 bp, Homo sapiens
ctctctcactaccac

SEQ ID NO: 1274522 - DNA, 15 bp, Homo sapiens
cctctctcactacca

SEQ ID NO: 1274523 - DNA, 15 bp, Homo sapiens
gcctctctcactacc

SEQ ID NO: 1274524 - DNA, 15 bp, Homo sapiens
tgcctctctcactac

SEQ ID NO: 1274525 - DNA, 15 bp, Homo sapiens
ttgcctctctcacta

SEQ ID NO: 1274526 - DNA, 15 bp, Homo sapiens
attgcctctctcact

SEQ ID NO: 1274527 - DNA, 15 bp, Homo sapiens
gattgcctctctcac

SEQ ID NO: 1274528 - DNA, 15 bp, Homo sapiens
agattgcctctctca

SEQ ID NO: 1274529 - DNA, 15 bp, Homo sapiens
cagattgcctctctc

SEQ ID NO: 1274530 - DNA, 15 bp, Homo sapiens
ccagattgcctctct

SEQ ID NO: 1274531 - DNA, 15 bp, Homo sapiens
tccagattgcctctc

SEQ ID NO: 1274532 - DNA, 15 bp, Homo sapiens
gtccagattgcctct

SEQ ID NO: 1274533 - DNA, 15 bp, Homo sapiens
tgtccagattgcctc

SEQ ID NO: 1274534 - DNA, 15 bp, Homo sapiens
ttgtccagattgcct

SEQ ID NO: 1274535 - DNA, 15 bp, Homo sapiens
gttgtccagattgcc

SEQ ID NO: 1274536 - DNA, 15 bp, Homo sapiens
agttgtccagattgc

SEQ ID NO: 1274537 - DNA, 15 bp, Homo sapiens
aagttgtccagattg

SEQ ID NO: 1274538 - DNA, 15 bp, Homo sapiens
taagttgtccagatt

SEQ ID NO: 1274539 - DNA, 15 bp, Homo sapiens
ttaagttgtccagat

SEQ ID NO: 1274540 - DNA, 15 bp, Homo sapiens
gttaagttgtccaga

SEQ ID NO: 1274541 - DNA, 15 bp, Homo sapiens
tgttaagttgtccag

SEQ ID NO: 1274542 - DNA, 15 bp, Homo sapiens
atgttaagttgtcca

SEQ ID NO: 1274543 - DNA, 15 bp, Homo sapiens
catgttaagttgtcc

SEQ ID NO: 1274544 - DNA, 15 bp, Homo sapiens
ccatgttaagttgtc

SEQ ID NO: 1274545 - DNA, 15 bp, Homo sapiens
gccatgttaagttgt

SEQ ID NO: 1274546 - DNA, 15 bp, Homo sapiens
ggccatgttaagttg

SEQ ID NO: 1274547 - DNA, 15 bp, Homo sapiens
aggccatgttaagtt

SEQ ID NO: 1274548 - DNA, 15 bp, Homo sapiens
gaggccatgttaagt

SEQ ID NO: 1274549 - DNA, 15 bp, Homo sapiens
cgaggccatgttaag

SEQ ID NO: 1274550 - DNA, 15 bp, Homo sapiens
acgaggccatgttaa

SEQ ID NO: 1274551 - DNA, 15 bp, Homo sapiens
aacgaggccatgtta

SEQ ID NO: 1274552 - DNA, 15 bp, Homo sapiens
aaacgaggccatgtt

SEQ ID NO: 1274553 - DNA, 15 bp, Homo sapiens
taaacgaggccatgt

SEQ ID NO: 1274554 - DNA, 15 bp, Homo sapiens
ataaacgaggccatg

SEQ ID NO: 1274555 - DNA, 15 bp, Homo sapiens
gataaacgaggccat

SEQ ID NO: 1274556 - DNA, 15 bp, Homo sapiens
ggataaacgaggcca

SEQ ID NO: 1274557 - DNA, 15 bp, Homo sapiens
tggataaacgaggcc

SEQ ID NO: 1274558 - DNA, 15 bp, Homo sapiens
atggataaacgaggc

SEQ ID NO: 1274559 - DNA, 15 bp, Homo sapiens
gatggataaacgagg

SEQ ID NO: 1274560 - DNA, 15 bp, Homo sapiens
agatggataaacgag

SEQ ID NO: 1274561 - DNA, 15 bp, Homo sapiens
gagatggataaacga

SEQ ID NO: 1274562 - DNA, 15 bp, Homo sapiens
tgagatggataaacg

SEQ ID NO: 1274563 - DNA, 15 bp, Homo sapiens
ttgagatggataaac

SEQ ID NO: 1274564 - DNA, 15 bp, Homo sapiens
gttgagatggataaa

SEQ ID NO: 1274565 - DNA, 15 bp, Homo sapiens
tgttgagatggataa

SEQ ID NO: 1274566 - DNA, 15 bp, Homo sapiens
gtgttgagatggata

SEQ ID NO: 1274567 - DNA, 15 bp, Homo sapiens
cgtgttgagatggat

SEQ ID NO: 1274568 - DNA, 15 bp, Homo sapiens
tcgtgttgagatgga

SEQ ID NO: 1274569 - DNA, 15 bp, Homo sapiens
gtcgtgttgagatgg

SEQ ID NO: 1274570 - DNA, 15 bp, Homo sapiens
tgtcgtgttgagatg

SEQ ID NO: 1274571 - DNA, 15 bp, Homo sapiens
gtgtcgtgttgagat

SEQ ID NO: 1274572 - DNA, 15 bp, Homo sapiens
agtgtcgtgttgaga

SEQ ID NO: 1274573 - DNA, 15 bp, Homo sapiens
cagtgtcgtgttgag

SEQ ID NO: 1274574 - DNA, 15 bp, Homo sapiens
ccagtgtcgtgttga

SEQ ID NO: 1274575 - DNA, 15 bp, Homo sapiens
cccagtgtcgtgttg

SEQ ID NO: 1274576 - DNA, 15 bp, Homo sapiens
tcccagtgtcgtgtt

SEQ ID NO: 1274577 - DNA, 15 bp, Homo sapiens
ttcccagtgtcgtgt

SEQ ID NO: 1274578 - DNA, 15 bp, Homo sapiens
attcccagtgtcgtg

SEQ ID NO: 1274579 - DNA, 15 bp, Homo sapiens
aattcccagtgtcgt

SEQ ID NO: 1274580 - DNA, 15 bp, Homo sapiens
aaattcccagtgtcg

SEQ ID NO: 1274581 - DNA, 15 bp, Homo sapiens
caaattcccagtgtc

SEQ ID NO: 1274582 - DNA, 15 bp, Homo sapiens
ccaaattcccagtgt

SEQ ID NO: 1274583 - DNA, 15 bp, Homo sapiens
accaaattcccagtg

SEQ ID NO: 1274584 - DNA, 15 bp, Homo sapiens
caccaaattcccagt

SEQ ID NO: 1274585 - DNA, 15 bp, Homo sapiens
gcaccaaattcccag

SEQ ID NO: 1274586 - DNA, 15 bp, Homo sapiens
tgcaccaaattccca

SEQ ID NO: 1274587 - DNA, 15 bp, Homo sapiens
ctgcaccaaattccc

SEQ ID NO: 1274588 - DNA, 15 bp, Homo sapiens
tctgcaccaaattcc

SEQ ID NO: 1274589 - DNA, 15 bp, Homo sapiens
atctgcaccaaattc

SEQ ID NO: 1274590 - DNA, 15 bp, Homo sapiens
aatctgcaccaaatt

SEQ ID NO: 1274591 - DNA, 15 bp, Homo sapiens
aaatctgcaccaaat

SEQ ID NO: 1274592 - DNA, 15 bp, Homo sapiens
gaaatctgcaccaaa

SEQ ID NO: 1274593 - DNA, 15 bp, Homo sapiens
ggaaatctgcaccaa

SEQ ID NO: 1274594 - DNA, 15 bp, Homo sapiens
gggaaatctgcacca

SEQ ID NO: 1274595 - DNA, 15 bp, Homo sapiens
ggggaaatctgcacc

SEQ ID NO: 1274596 - DNA, 15 bp, Homo sapiens
aggggaaatctgcac

SEQ ID NO: 1274597 - DNA, 15 bp, Homo sapiens
aaggggaaatctgca

SEQ ID NO: 1274598 - DNA, 15 bp, Homo sapiens
aaaggggaaatctgc

SEQ ID NO: 1274599 - DNA, 15 bp, Homo sapiens
gaaaggggaaatctg

SEQ ID NO: 1274600 - DNA, 15 bp, Homo sapiens
agaaaggggaaatct

SEQ ID NO: 1274601 - DNA, 15 bp, Homo sapiens
tagaaaggggaaatc

SEQ ID NO: 1274602 - DNA, 15 bp, Homo sapiens
ttagaaaggggaaat

SEQ ID NO: 1274603 - DNA, 15 bp, Homo sapiens
gttagaaaggggaaa

SEQ ID NO: 1274604 - DNA, 15 bp, Homo sapiens
ggttagaaaggggaa

SEQ ID NO: 1274605 - DNA, 15 bp, Homo sapiens
gggttagaaagggga

SEQ ID NO: 1274606 - DNA, 15 bp, Homo sapiens
ggggttagaaagggg

SEQ ID NO: 1274607 - DNA, 15 bp, Homo sapiens
aggggttagaaaggg

SEQ ID NO: 1274608 - DNA, 15 bp, Homo sapiens
caggggttagaaagg

SEQ ID NO: 1274609 - DNA, 15 bp, Homo sapiens
gcaggggttagaaag

SEQ ID NO: 1274610 - DNA, 15 bp, Homo sapiens
tgcaggggttagaaa

SEQ ID NO: 1274611 - DNA, 15 bp, Homo sapiens
ttgcaggggttagaa

SEQ ID NO: 1274612 - DNA, 15 bp, Homo sapiens
attgcaggggttaga

SEQ ID NO: 1274613 - DNA, 15 bp, Homo sapiens
tattgcaggggttag

SEQ ID NO: 1274614 - DNA, 15 bp, Homo sapiens
atattgcaggggtta

SEQ ID NO: 1274615 - DNA, 15 bp, Homo sapiens
tatattgcaggggtt

SEQ ID NO: 1274616 - DNA, 15 bp, Homo sapiens
ttatattgcaggggt

SEQ ID NO: 1274617 - DNA, 15 bp, Homo sapiens
tttatattgcagggg

SEQ ID NO: 1274618 - DNA, 15 bp, Homo sapiens
ttttatattgcaggg

SEQ ID NO: 1274619 - DNA, 15 bp, Homo sapiens
cttttatattgcagg

SEQ ID NO: 1274620 - DNA, 15 bp, Homo sapiens
acttttatattgcag

SEQ ID NO: 1274621 - DNA, 15 bp, Homo sapiens
aacttttatattgca

SEQ ID NO: 1274622 - DNA, 15 bp, Homo sapiens
gaacttttatattgc

SEQ ID NO: 1274623 - DNA, 15 bp, Homo sapiens
agaacttttatattg

SEQ ID NO: 1274624 - DNA, 15 bp, Homo sapiens
cagaacttttatatt

SEQ ID NO: 1274625 - DNA, 15 bp, Homo sapiens
acagaacttttatat

SEQ ID NO: 1274626 - DNA, 15 bp, Homo sapiens
gacagaacttttata

SEQ ID NO: 1274627 - DNA, 15 bp, Homo sapiens
agacagaacttttat

SEQ ID NO: 1274628 - DNA, 15 bp, Homo sapiens
gagacagaactttta

SEQ ID NO: 1274629 - DNA, 15 bp, Homo sapiens
ggagacagaactttt

SEQ ID NO: 1274630 - DNA, 15 bp, Homo sapiens
aggagacagaacttt

SEQ ID NO: 1274631 - DNA, 15 bp, Homo sapiens
aaggagacagaactt

SEQ ID NO: 1274632 - DNA, 15 bp, Homo sapiens
taaggagacagaact

SEQ ID NO: 1274633 - DNA, 15 bp, Homo sapiens
ataaggagacagaac

SEQ ID NO: 1274634 - DNA, 15 bp, Homo sapiens
tataaggagacagaa

SEQ ID NO: 1274635 - DNA, 15 bp, Homo sapiens
ttataaggagacaga

SEQ ID NO: 1274636 - DNA, 15 bp, Homo sapiens
tttataaggagacag

SEQ ID NO: 1274637 - DNA, 15 bp, Homo sapiens
ctttataaggagaca

SEQ ID NO: 1274638 - DNA, 15 bp, Homo sapiens
gctttataaggagac

SEQ ID NO: 1274639 - DNA, 15 bp, Homo sapiens
agctttataaggaga

SEQ ID NO: 1274640 - DNA, 15 bp, Homo sapiens
aagctttataaggag

SEQ ID NO: 1274641 - DNA, 15 bp, Homo sapiens
aaagctttataagga

SEQ ID NO: 1274642 - DNA, 15 bp, Homo sapiens
aaaagctttataagg

SEQ ID NO: 1274643 - DNA, 15 bp, Homo sapiens
gaaaagctttataag

SEQ ID NO: 1274644 - DNA, 15 bp, Homo sapiens
ggaaaagctttataa

SEQ ID NO: 1274645 - DNA, 15 bp, Homo sapiens
gggaaaagctttata

SEQ ID NO: 1274646 - DNA, 15 bp, Homo sapiens
ggggaaaagctttat

SEQ ID NO: 1274647 - DNA, 15 bp, Homo sapiens
aatggggaaaagctt

SEQ ID NO: 1274648 - DNA, 15 bp, Homo sapiens
agaatggggaaaagc

SEQ ID NO: 1274649 - DNA, 15 bp, Homo sapiens
tagaatggggaaaag

SEQ ID NO: 1274650 - DNA, 15 bp, Homo sapiens
gtagaatggggaaaa

SEQ ID NO: 1274651 - DNA, 15 bp, Homo sapiens
ggtagaatggggaaa

SEQ ID NO: 1274652 - DNA, 15 bp, Homo sapiens
gggtagaatggggaa

SEQ ID NO: 1274653 - DNA, 15 bp, Homo sapiens
cgggtagaatgggga

SEQ ID NO: 1274654 - DNA, 15 bp, Homo sapiens
gcgggtagaatgggg

SEQ ID NO: 1274655 - DNA, 15 bp, Homo sapiens
agcgggtagaatggg

SEQ ID NO: 1274656 - DNA, 15 bp, Homo sapiens
tagcgggtagaatgg

SEQ ID NO: 1274657 - DNA, 15 bp, Homo sapiens
gtagcgggtagaatg

SEQ ID NO: 1274658 - DNA, 15 bp, Homo sapiens
tgtagcgggtagaat

SEQ ID NO: 1274659 - DNA, 15 bp, Homo sapiens
ctgtagcgggtagaa

SEQ ID NO: 1274660 - DNA, 15 bp, Homo sapiens
tctgtagcgggtaga

SEQ ID NO: 1274661 - DNA, 15 bp, Homo sapiens
gtctgtagcgggtag

SEQ ID NO: 1274662 - DNA, 15 bp, Homo sapiens
agtctgtagcgggta

SEQ ID NO: 1274663 - DNA, 15 bp, Homo sapiens
aagtctgtagcgggt

SEQ ID NO: 1274664 - DNA, 15 bp, Homo sapiens
gaagtctgtagcggg

SEQ ID NO: 1274665 - DNA, 15 bp, Homo sapiens
agaagtctgtagcgg

SEQ ID NO: 1274666 - DNA, 15 bp, Homo sapiens
aagaagtctgtagcg

SEQ ID NO: 1274667 - DNA, 15 bp, Homo sapiens
gaagaagtctgtagc

SEQ ID NO: 1274668 - DNA, 15 bp, Homo sapiens
ggaagaagtctgtag

SEQ ID NO: 1274669 - DNA, 15 bp, Homo sapiens
aggaagaagtctgta

SEQ ID NO: 1274670 - DNA, 15 bp, Homo sapiens
gaggaagaagtctgt

SEQ ID NO: 1274671 - DNA, 15 bp, Homo sapiens
ggaggaagaagtctg

SEQ ID NO: 1274672 - DNA, 15 bp, Homo sapiens
tggaggaagaagtct

SEQ ID NO: 1274673 - DNA, 15 bp, Homo sapiens
ctggaggaagaagtc

SEQ ID NO: 1274674 - DNA, 15 bp, Homo sapiens
cctggaggaagaagt

SEQ ID NO: 1274675 - DNA, 15 bp, Homo sapiens
ccctggaggaagaag

SEQ ID NO: 1274676 - DNA, 15 bp, Homo sapiens
cccctggaggaagaa

SEQ ID NO: 1274677 - DNA, 15 bp, Homo sapiens
tcccctggaggaaga

SEQ ID NO: 1274678 - DNA, 15 bp, Homo sapiens
ctcccctggaggaag

SEQ ID NO: 1274679 - DNA, 15 bp, Homo sapiens
cctcccctggaggaa

SEQ ID NO: 1274680 - DNA, 15 bp, Homo sapiens
tcctcccctggagga

SEQ ID NO: 1274681 - DNA, 15 bp, Homo sapiens
ctcctcccctggagg

SEQ ID NO: 1274682 - DNA, 15 bp, Homo sapiens
actcctcccctggag

SEQ ID NO: 1274683 - DNA, 15 bp, Homo sapiens
aactcctcccctgga

SEQ ID NO: 1274684 - DNA, 15 bp, Homo sapiens
gaactcctcccctgg

SEQ ID NO: 1274685 - DNA, 15 bp, Homo sapiens
agaactcctcccctg

SEQ ID NO: 1274686 - DNA, 15 bp, Homo sapiens
aagaactcctcccct

SEQ ID NO: 1274687 - DNA, 15 bp, Homo sapiens
gaagaactcctcccc

SEQ ID NO: 1274688 - DNA, 15 bp, Homo sapiens
agaagaactcctccc

SEQ ID NO: 1274689 - DNA, 15 bp, Homo sapiens
cagaagaactcctcc

SEQ ID NO: 1274690 - DNA, 15 bp, Homo sapiens
ccagaagaactcctc

SEQ ID NO: 1274691 - DNA, 15 bp, Homo sapiens
cccagaagaactcct

SEQ ID NO: 1274692 - DNA, 15 bp, Homo sapiens
acccagaagaactcc

SEQ ID NO: 1274693 - DNA, 15 bp, Homo sapiens
tacccagaagaactc

SEQ ID NO: 1274694 - DNA, 15 bp, Homo sapiens
ttacccagaagaact

SEQ ID NO: 1274695 - DNA, 15 bp, Homo sapiens
cttacccagaagaac

SEQ ID NO: 1274696 - DNA, 15 bp, Homo sapiens
ccttacccagaagaa

SEQ ID NO: 1274697 - DNA, 15 bp, Homo sapiens
cccttacccagaaga

SEQ ID NO: 1274698 - DNA, 15 bp, Homo sapiens
tcccttacccagaag

SEQ ID NO: 1274699 - DNA, 15 bp, Homo sapiens
ttcccttacccagaa

SEQ ID NO: 1274700 - DNA, 15 bp, Homo sapiens
tttcccttacccaga

SEQ ID NO: 1274701 - DNA, 15 bp, Homo sapiens
ctttcccttacccag

SEQ ID NO: 1274702 - DNA, 15 bp, Homo sapiens
actttcccttaccca

SEQ ID NO: 1274703 - DNA, 15 bp, Homo sapiens
gactttcccttaccc

SEQ ID NO: 1274704 - DNA, 15 bp, Homo sapiens
ggactttcccttacc

SEQ ID NO: 1274705 - DNA, 15 bp, Homo sapiens
tggactttcccttac

SEQ ID NO: 1274706 - DNA, 15 bp, Homo sapiens
gtggactttccctta

SEQ ID NO: 1274707 - DNA, 15 bp, Homo sapiens
tgtggactttccctt

SEQ ID NO: 1274708 - DNA, 15 bp, Homo sapiens
ctgtggactttccct

SEQ ID NO: 1274709 - DNA, 15 bp, Homo sapiens
tctgtggactttccc

SEQ ID NO: 1274710 - DNA, 15 bp, Homo sapiens
ctctgtggactttcc

SEQ ID NO: 1274711 - DNA, 15 bp, Homo sapiens
cctctgtggactttc

SEQ ID NO: 1274712 - DNA, 15 bp, Homo sapiens
acctctgtggacttt

SEQ ID NO: 1274713 - DNA, 15 bp, Homo sapiens
gacctctgtggactt

SEQ ID NO: 1274714 - DNA, 15 bp, Homo sapiens
tgacctctgtggact

SEQ ID NO: 1274715 - DNA, 15 bp, Homo sapiens
ttgacctctgtggac

SEQ ID NO: 1274716 - DNA, 15 bp, Homo sapiens
tttgacctctgtgga

SEQ ID NO: 1274717 - DNA, 15 bp, Homo sapiens
ttttgacctctgtgg

SEQ ID NO: 1274718 - DNA, 15 bp, Homo sapiens
tttttgacctctgtg

SEQ ID NO: 1274719 - DNA, 15 bp, Homo sapiens
gtttttgacctctgt

SEQ ID NO: 1274720 - DNA, 15 bp, Homo sapiens
ggtttttgacctctg

SEQ ID NO: 1274721 - DNA, 15 bp, Homo sapiens
cggtttttgacctct

SEQ ID NO: 1274722 - DNA, 15 bp, Homo sapiens
tcggtttttgacctc

SEQ ID NO: 1274723 - DNA, 15 bp, Homo sapiens
ctcggtttttgacct

SEQ ID NO: 1274724 - DNA, 15 bp, Homo sapiens
tctcggtttttgacc

SEQ ID NO: 1274725 - DNA, 15 bp, Homo sapiens
ctctcggtttttgac

SEQ ID NO: 1274726 - DNA, 15 bp, Homo sapiens
cctctcggtttttga

SEQ ID NO: 1274727 - DNA, 15 bp, Homo sapiens
tcctctcggtttttg

SEQ ID NO: 1274728 - DNA, 15 bp, Homo sapiens
ctcctctcggttttt

SEQ ID NO: 1274729 - DNA, 15 bp, Homo sapiens
gctcctctcggtttt

SEQ ID NO: 1274730 - DNA, 15 bp, Homo sapiens
agctcctctcggttt

SEQ ID NO: 1274731 - DNA, 15 bp, Homo sapiens
cagctcctctcggtt

SEQ ID NO: 1274732 - DNA, 15 bp, Homo sapiens
tcagctcctctcggt

SEQ ID NO: 1274733 - DNA, 15 bp, Homo sapiens
ctcagctcctctcgg

SEQ ID NO: 1274734 - DNA, 15 bp, Homo sapiens
gctcagctcctctcg

SEQ ID NO: 1274735 - DNA, 15 bp, Homo sapiens
ggctcagctcctctc

SEQ ID NO: 1274736 - DNA, 15 bp, Homo sapiens
tggctcagctcctct

SEQ ID NO: 1274737 - DNA, 15 bp, Homo sapiens
ctggctcagctcctc

SEQ ID NO: 1274738 - DNA, 15 bp, Homo sapiens
tctggctcagctcct

SEQ ID NO: 1274739 - DNA, 15 bp, Homo sapiens
ttctggctcagctcc

SEQ ID NO: 1274740 - DNA, 15 bp, Homo sapiens
tttctggctcagctc

SEQ ID NO: 1274741 - DNA, 15 bp, Homo sapiens
ttttctggctcagct

SEQ ID NO: 1274742 - DNA, 15 bp, Homo sapiens
cttttctggctcagc

SEQ ID NO: 1274743 - DNA, 15 bp, Homo sapiens
tcttttctggctcag

SEQ ID NO: 1274744 - DNA, 15 bp, Homo sapiens
ctcttttctggctca

SEQ ID NO: 1274745 - DNA, 15 bp, Homo sapiens
gctcttttctggctc

SEQ ID NO: 1274746 - DNA, 15 bp, Homo sapiens
ggctcttttctggct

SEQ ID NO: 1274747 - DNA, 15 bp, Homo sapiens
tggctcttttctggc

SEQ ID NO: 1274748 - DNA, 15 bp, Homo sapiens
gtggctcttttctgg

SEQ ID NO: 1274749 - DNA, 15 bp, Homo sapiens
tgtggctcttttctg

SEQ ID NO: 1274750 - DNA, 15 bp, Homo sapiens
atgtggctcttttct

SEQ ID NO: 1274751 - DNA, 15 bp, Homo sapiens
tatgtggctcttttc

SEQ ID NO: 1274752 - DNA, 15 bp, Homo sapiens
gtatgtggctctttt

SEQ ID NO: 1274753 - DNA, 15 bp, Homo sapiens
agtatgtggctcttt

SEQ ID NO: 1274754 - DNA, 15 bp, Homo sapiens
gagtatgtggctctt

SEQ ID NO: 1274755 - DNA, 15 bp, Homo sapiens
agagtatgtggctct

SEQ ID NO: 1274756 - DNA, 15 bp, Homo sapiens
cagagtatgtggctc

SEQ ID NO: 1274757 - DNA, 15 bp, Homo sapiens
tcagagtatgtggct

SEQ ID NO: 1274758 - DNA, 15 bp, Homo sapiens
atcagagtatgtggc

SEQ ID NO: 1274759 - DNA, 15 bp, Homo sapiens
aatcagagtatgtgg

SEQ ID NO: 1274760 - DNA, 15 bp, Homo sapiens
aaatcagagtatgtg

SEQ ID NO: 1274761 - DNA, 15 bp, Homo sapiens
gaaatcagagtatgt

SEQ ID NO: 1274762 - DNA, 15 bp, Homo sapiens
agaaatcagagtatg

SEQ ID NO: 1274763 - DNA, 15 bp, Homo sapiens
tagaaatcagagtat

SEQ ID NO: 1274764 - DNA, 15 bp, Homo sapiens
ctagaaatcagagta

SEQ ID NO: 1274765 - DNA, 15 bp, Homo sapiens
tctagaaatcagagt

SEQ ID NO: 1274766 - DNA, 15 bp, Homo sapiens
ttctagaaatcagag

SEQ ID NO: 1274767 - DNA, 15 bp, Homo sapiens
tttctagaaatcaga

SEQ ID NO: 1274768 - DNA, 15 bp, Homo sapiens
gtttctagaaatcag

SEQ ID NO: 1274769 - DNA, 15 bp, Homo sapiens
ggtttctagaaatca

SEQ ID NO: 1274770 - DNA, 15 bp, Homo sapiens
tggtttctagaaatc

SEQ ID NO: 1274771 - DNA, 15 bp, Homo sapiens
gtggtttctagaaat

SEQ ID NO: 1274772 - DNA, 15 bp, Homo sapiens
cgtggtttctagaaa

SEQ ID NO: 1274773 - DNA, 15 bp, Homo sapiens
gcgtggtttctagaa

SEQ ID NO: 1274774 - DNA, 15 bp, Homo sapiens
tgcgtggtttctaga

SEQ ID NO: 1274775 - DNA, 15 bp, Homo sapiens
atgcgtggtttctag

SEQ ID NO: 1274776 - DNA, 15 bp, Homo sapiens
gatgcgtggtttcta

SEQ ID NO: 1274777 - DNA, 15 bp, Homo sapiens
tgatgcgtggtttct

SEQ ID NO: 1274778 - DNA, 15 bp, Homo sapiens
gtgatgcgtggtttc

SEQ ID NO: 1274779 - DNA, 15 bp, Homo sapiens
tgtgatgcgtggttt

SEQ ID NO: 1274780 - DNA, 15 bp, Homo sapiens
ttgtgatgcgtggtt

SEQ ID NO: 1274781 - DNA, 15 bp, Homo sapiens
cttgtgatgcgtggt

SEQ ID NO: 1274782 - DNA, 15 bp, Homo sapiens
acttgtgatgcgtgg

SEQ ID NO: 1274783 - DNA, 15 bp, Homo sapiens
cacttgtgatgcgtg

SEQ ID NO: 1274784 - DNA, 15 bp, Homo sapiens
ccacttgtgatgcgt

SEQ ID NO: 1274785 - DNA, 15 bp, Homo sapiens
cccacttgtgatgcg

SEQ ID NO: 1274786 - DNA, 15 bp, Homo sapiens
gcccacttgtgatgc

SEQ ID NO: 1274787 - DNA, 15 bp, Homo sapiens
agcccacttgtgatg

SEQ ID NO: 1274788 - DNA, 15 bp, Homo sapiens
aagcccacttgtgat

SEQ ID NO: 1274789 - DNA, 15 bp, Homo sapiens
gaagcccacttgtga

SEQ ID NO: 1274790 - DNA, 15 bp, Homo sapiens
ggaagcccacttgtg

SEQ ID NO: 1274791 - DNA, 15 bp, Homo sapiens
gggaagcccacttgt

SEQ ID NO: 1274792 - DNA, 15 bp, Homo sapiens
tgggaagcccacttg

SEQ ID NO: 1274793 - DNA, 15 bp, Homo sapiens
ttgggaagcccactt

SEQ ID NO: 1274794 - DNA, 15 bp, Homo sapiens
tttgggaagcccact

SEQ ID NO: 1274795 - DNA, 15 bp, Homo sapiens
ttttgggaagcccac

SEQ ID NO: 1274796 - DNA, 15 bp, Homo sapiens
gttttgggaagccca

SEQ ID NO: 1274797 - DNA, 15 bp, Homo sapiens
agttttgggaagccc

SEQ ID NO: 1274798 - DNA, 15 bp, Homo sapiens
tagttttgggaagcc

SEQ ID NO: 1274799 - DNA, 15 bp, Homo sapiens
ctagttttgggaagc

SEQ ID NO: 1274800 - DNA, 15 bp, Homo sapiens
cctagttttgggaag

SEQ ID NO: 1274801 - DNA, 15 bp, Homo sapiens
ccctagttttgggaa

SEQ ID NO: 1274802 - DNA, 15 bp, Homo sapiens
accctagttttggga

SEQ ID NO: 1274803 - DNA, 15 bp, Homo sapiens
gaccctagttttggg

SEQ ID NO: 1274804 - DNA, 15 bp, Homo sapiens
tgaccctagttttgg

SEQ ID NO: 1274805 - DNA, 15 bp, Homo sapiens
ttgaccctagttttg

SEQ ID NO: 1274806 - DNA, 15 bp, Homo sapiens
cttgaccctagtttt

SEQ ID NO: 1274807 - DNA, 15 bp, Homo sapiens
acttgaccctagttt

SEQ ID NO: 1274808 - DNA, 15 bp, Homo sapiens
gacttgaccctagtt

SEQ ID NO: 1274809 - DNA, 15 bp, Homo sapiens
tgacttgaccctagt

SEQ ID NO: 1274810 - DNA, 15 bp, Homo sapiens
ttgacttgaccctag

SEQ ID NO: 1274811 - DNA, 15 bp, Homo sapiens
tttgacttgacccta

SEQ ID NO: 1274812 - DNA, 15 bp, Homo sapiens
ctttgacttgaccct

SEQ ID NO: 1274813 - DNA, 15 bp, Homo sapiens
tctttgacttgaccc

SEQ ID NO: 1274814 - DNA, 15 bp, Homo sapiens
ttctttgacttgacc

SEQ ID NO: 1274815 - DNA, 15 bp, Homo sapiens
gttctttgacttgac

SEQ ID NO: 1274816 - DNA, 15 bp, Homo sapiens
tgttctttgacttga

SEQ ID NO: 1274817 - DNA, 15 bp, Homo sapiens
ttgttctttgacttg

SEQ ID NO: 1274818 - DNA, 15 bp, Homo sapiens
tttgttctttgactt

SEQ ID NO: 1274819 - DNA, 15 bp, Homo sapiens
ctttgttctttgact

SEQ ID NO: 1274820 - DNA, 15 bp, Homo sapiens
tctttgttctttgac

SEQ ID NO: 1274821 - DNA, 15 bp, Homo sapiens
ctctttgttctttga

SEQ ID NO: 1274822 - DNA, 15 bp, Homo sapiens
tctctttgttctttg

SEQ ID NO: 1274823 - DNA, 15 bp, Homo sapiens
ttctctttgttcttt

SEQ ID NO: 1274824 - DNA, 15 bp, Homo sapiens
atttctctttgttct

SEQ ID NO: 1274825 - DNA, 15 bp, Homo sapiens
aatttctctttgttc

SEQ ID NO: 1274826 - DNA, 15 bp, Homo sapiens
caatttctctttgtt

SEQ ID NO: 1274827 - DNA, 15 bp, Homo sapiens
gcaatttctctttgt

SEQ ID NO: 1274828 - DNA, 15 bp, Homo sapiens
cgcaatttctctttg

SEQ ID NO: 1274829 - DNA, 15 bp, Homo sapiens
tcgcaatttctcttt

SEQ ID NO: 1274830 - DNA, 15 bp, Homo sapiens
atcgcaatttctctt

SEQ ID NO: 1274831 - DNA, 15 bp, Homo sapiens
gatcgcaatttctct

SEQ ID NO: 1274832 - DNA, 15 bp, Homo sapiens
tgatcgcaatttctc

SEQ ID NO: 1274833 - DNA, 15 bp, Homo sapiens
ttgatcgcaatttct

SEQ ID NO: 1274834 - DNA, 15 bp, Homo sapiens
gttgatcgcaatttc

SEQ ID NO: 1274835 - DNA, 15 bp, Homo sapiens
agttgatcgcaattt

SEQ ID NO: 1274836 - DNA, 15 bp, Homo sapiens
cagttgatcgcaatt

SEQ ID NO: 1274837 - DNA, 15 bp, Homo sapiens
tcagttgatcgcaat

SEQ ID NO: 1274838 - DNA, 15 bp, Homo sapiens
atcagttgatcgcaa

SEQ ID NO: 1274839 - DNA, 15 bp, Homo sapiens
catcagttgatcgca

SEQ ID NO: 1274840 - DNA, 15 bp, Homo sapiens
gcatcagttgatcgc

SEQ ID NO: 1274841 - DNA, 15 bp, Homo sapiens
agcatcagttgatcg

SEQ ID NO: 1274842 - DNA, 15 bp, Homo sapiens
aagcatcagttgatc

SEQ ID NO: 1274843 - DNA, 15 bp, Homo sapiens
aaagcatcagttgat

SEQ ID NO: 1274844 - DNA, 15 bp, Homo sapiens
gaaagcatcagttga

SEQ ID NO: 1274845 - DNA, 15 bp, Homo sapiens
tgaaagcatcagttg

SEQ ID NO: 1274846 - DNA, 15 bp, Homo sapiens
atgaaagcatcagtt

SEQ ID NO: 1274847 - DNA, 15 bp, Homo sapiens
aatgaaagcatcagt

SEQ ID NO: 1274848 - DNA, 15 bp, Homo sapiens
gaatgaaagcatcag

SEQ ID NO: 1274849 - DNA, 15 bp, Homo sapiens
agaatgaaagcatca

SEQ ID NO: 1274850 - DNA, 15 bp, Homo sapiens
aagaatgaaagcatc

SEQ ID NO: 1274851 - DNA, 15 bp, Homo sapiens
gaagaatgaaagcat

SEQ ID NO: 1274852 - DNA, 15 bp, Homo sapiens
tgaagaatgaaagca

SEQ ID NO: 1274853 - DNA, 15 bp, Homo sapiens
ttgaagaatgaaagc

SEQ ID NO: 1274854 - DNA, 15 bp, Homo sapiens
tttgaagaatgaaag

SEQ ID NO: 1274855 - DNA, 15 bp, Homo sapiens
gtttgaagaatgaaa

SEQ ID NO: 1274856 - DNA, 15 bp, Homo sapiens
tgtttgaagaatgaa

SEQ ID NO: 1274857 - DNA, 15 bp, Homo sapiens
ttgtttgaagaatga

SEQ ID NO: 1274858 - DNA, 15 bp, Homo sapiens
tttgtttgaagaatg

SEQ ID NO: 1274859 - DNA, 15 bp, Homo sapiens
ttttgtttgaagaat

SEQ ID NO: 1274860 - DNA, 15 bp, Homo sapiens
tttttgtttgaagaa

SEQ ID NO: 1274861 - DNA, 15 bp, Homo sapiens
atttttgtttgaaga

SEQ ID NO: 1274862 - DNA, 15 bp, Homo sapiens
catttttgtttgaag

SEQ ID NO: 1274863 - DNA, 15 bp, Homo sapiens
ccatttttgtttgaa

SEQ ID NO: 1274864 - DNA, 15 bp, Homo sapiens
cccatttttgtttga

SEQ ID NO: 1274865 - DNA, 15 bp, Homo sapiens
acccatttttgtttg

SEQ ID NO: 1274866 - DNA, 15 bp, Homo sapiens
aacccatttttgttt

SEQ ID NO: 1274867 - DNA, 15 bp, Homo sapiens
caacccatttttgtt

SEQ ID NO: 1274868 - DNA, 15 bp, Homo sapiens
tcaacccatttttgt

SEQ ID NO: 1274869 - DNA, 15 bp, Homo sapiens
ctcaacccatttttg

SEQ ID NO: 1274870 - DNA, 15 bp, Homo sapiens
actcaacccattttt

SEQ ID NO: 1274871 - DNA, 15 bp, Homo sapiens
aactcaacccatttt

SEQ ID NO: 1274872 - DNA, 15 bp, Homo sapiens
aaactcaacccattt

SEQ ID NO: 1274873 - DNA, 15 bp, Homo sapiens
gaaactcaacccatt

SEQ ID NO: 1274874 - DNA, 15 bp, Homo sapiens
tgaaactcaacccat

SEQ ID NO: 1274875 - DNA, 15 bp, Homo sapiens
atgaaactcaaccca

SEQ ID NO: 1274876 - DNA, 15 bp, Homo sapiens
tatgaaactcaaccc

SEQ ID NO: 1274877 - DNA, 15 bp, Homo sapiens
ctatgaaactcaacc

SEQ ID NO: 1274878 - DNA, 15 bp, Homo sapiens
tctatgaaactcaac

SEQ ID NO: 1274879 - DNA, 15 bp, Homo sapiens
atctatgaaactcaa

SEQ ID NO: 1274880 - DNA, 15 bp, Homo sapiens
tatctatgaaactca

SEQ ID NO: 1274881 - DNA, 15 bp, Homo sapiens
ttatctatgaaactc

SEQ ID NO: 1274882 - DNA, 15 bp, Homo sapiens
cttatctatgaaact

SEQ ID NO: 1274883 - DNA, 15 bp, Homo sapiens
acttatctatgaaac

SEQ ID NO: 1274884 - DNA, 15 bp, Homo sapiens
gacttatctatgaaa

SEQ ID NO: 1274885 - DNA, 15 bp, Homo sapiens
tgacttatctatgaa

SEQ ID NO: 1274886 - DNA, 15 bp, Homo sapiens
ctgacttatctatga

SEQ ID NO: 1274887 - DNA, 15 bp, Homo sapiens
cctgacttatctatg

SEQ ID NO: 1274888 - DNA, 15 bp, Homo sapiens
ccctgacttatctat

SEQ ID NO: 1274889 - DNA, 15 bp, Homo sapiens
tccctgacttatcta

SEQ ID NO: 1274890 - DNA, 15 bp, Homo sapiens
ttccctgacttatct

SEQ ID NO: 1274891 - DNA, 15 bp, Homo sapiens
tttccctgacttatc

SEQ ID NO: 1274892 - DNA, 15 bp, Homo sapiens
ctttccctgacttat

SEQ ID NO: 1274893 - DNA, 15 bp, Homo sapiens
gctttccctgactta

SEQ ID NO: 1274894 - DNA, 15 bp, Homo sapiens
agctttccctgactt

SEQ ID NO: 1274895 - DNA, 15 bp, Homo sapiens
gagctttccctgact

SEQ ID NO: 1274896 - DNA, 15 bp, Homo sapiens
ggagctttccctgac

SEQ ID NO: 1274897 - DNA, 15 bp, Homo sapiens
aggagctttccctga

SEQ ID NO: 1274898 - DNA, 15 bp, Homo sapiens
caggagctttccctg

SEQ ID NO: 1274899 - DNA, 15 bp, Homo sapiens
tcaggagctttccct

SEQ ID NO: 1274900 - DNA, 15 bp, Homo sapiens
ctcaggagctttccc

SEQ ID NO: 1274901 - DNA, 15 bp, Homo sapiens
tctcaggagctttcc

SEQ ID NO: 1274902 - DNA, 15 bp, Homo sapiens
ttctcaggagctttc

SEQ ID NO: 1274903 - DNA, 15 bp, Homo sapiens
tttctcaggagcttt

SEQ ID NO: 1274904 - DNA, 15 bp, Homo sapiens
ctttctcaggagctt

SEQ ID NO: 1274905 - DNA, 15 bp, Homo sapiens
tctttctcaggagct

SEQ ID NO: 1274906 - DNA, 15 bp, Homo sapiens
ctctttctcaggagc

SEQ ID NO: 1274907 - DNA, 15 bp, Homo sapiens
cctctttctcaggag

SEQ ID NO: 1274908 - DNA, 15 bp, Homo sapiens
acctctttctcagga

SEQ ID NO: 1274909 - DNA, 15 bp, Homo sapiens
cacctctttctcagg

SEQ ID NO: 1274910 - DNA, 15 bp, Homo sapiens
tcacctctttctcag

SEQ ID NO: 1274911 - DNA, 15 bp, Homo sapiens
ttcacctctttctca

SEQ ID NO: 1274912 - DNA, 15 bp, Homo sapiens
tttcacctctttctc

SEQ ID NO: 1274913 - DNA, 15 bp, Homo sapiens
ctttcacctctttct

SEQ ID NO: 1274914 - DNA, 15 bp, Homo sapiens
cctttcacctctttc

SEQ ID NO: 1274915 - DNA, 15 bp, Homo sapiens
ccctttcacctcttt

SEQ ID NO: 1274916 - DNA, 15 bp, Homo sapiens
accctttcacctctt

SEQ ID NO: 1274917 - DNA, 15 bp, Homo sapiens
taccctttcacctct

SEQ ID NO: 1274918 - DNA, 15 bp, Homo sapiens
ctaccctttcacctc

SEQ ID NO: 1274919 - DNA, 15 bp, Homo sapiens
tctaccctttcacct

SEQ ID NO: 1274920 - DNA, 15 bp, Homo sapiens
gtctaccctttcacc

SEQ ID NO: 1274921 - DNA, 15 bp, Homo sapiens
tgtctaccctttcac

SEQ ID NO: 1274922 - DNA, 15 bp, Homo sapiens
atgtctaccctttca

SEQ ID NO: 1274923 - DNA, 15 bp, Homo sapiens
catgtctaccctttc

SEQ ID NO: 1274924 - DNA, 15 bp, Homo sapiens
tcatgtctacccttt

SEQ ID NO: 1274925 - DNA, 15 bp, Homo sapiens
atcatgtctaccctt

SEQ ID NO: 1274926 - DNA, 15 bp, Homo sapiens
gatcatgtctaccct

SEQ ID NO: 1274927 - DNA, 15 bp, Homo sapiens
ggatcatgtctaccc

SEQ ID NO: 1274928 - DNA, 15 bp, Homo sapiens
gggatcatgtctacc

SEQ ID NO: 1274929 - DNA, 15 bp, Homo sapiens
agggatcatgtctac

SEQ ID NO: 1274930 - DNA, 15 bp, Homo sapiens
cagggatcatgtcta

SEQ ID NO: 1274931 - DNA, 15 bp, Homo sapiens
gcagggatcatgtct

SEQ ID NO: 1274932 - DNA, 15 bp, Homo sapiens
ggcagggatcatgtc

SEQ ID NO: 1274933 - DNA, 15 bp, Homo sapiens
gggcagggatcatgt

SEQ ID NO: 1274934 - DNA, 15 bp, Homo sapiens
agggcagggatcatg

SEQ ID NO: 1274935 - DNA, 15 bp, Homo sapiens
gagggcagggatcat

SEQ ID NO: 1274936 - DNA, 15 bp, Homo sapiens
agagggcagggatca

SEQ ID NO: 1274937 - DNA, 15 bp, Homo sapiens
aagagggcagggatc

SEQ ID NO: 1274938 - DNA, 15 bp, Homo sapiens
caagagggcagggat

SEQ ID NO: 1274939 - DNA, 15 bp, Homo sapiens
acaagagggcaggga

SEQ ID NO: 1274940 - DNA, 15 bp, Homo sapiens
cacaagagggcaggg

SEQ ID NO: 1274941 - DNA, 15 bp, Homo sapiens
acacaagagggcagg

SEQ ID NO: 1274942 - DNA, 15 bp, Homo sapiens
tacacaagagggcag

SEQ ID NO: 1274943 - DNA, 15 bp, Homo sapiens
ctacacaagagggca

SEQ ID NO: 1274944 - DNA, 15 bp, Homo sapiens
gctacacaagagggc

SEQ ID NO: 1274945 - DNA, 15 bp, Homo sapiens
tgctacacaagaggg

SEQ ID NO: 1274946 - DNA, 15 bp, Homo sapiens
gtgctacacaagagg

SEQ ID NO: 1274947 - DNA, 15 bp, Homo sapiens
tgtgctacacaagag

SEQ ID NO: 1274948 - DNA, 15 bp, Homo sapiens
gtgtgctacacaaga

SEQ ID NO: 1274949 - DNA, 15 bp, Homo sapiens
agtgtgctacacaag

SEQ ID NO: 1274950 - DNA, 15 bp, Homo sapiens
tagtgtgctacacaa

SEQ ID NO: 1274951 - DNA, 15 bp, Homo sapiens
atagtgtgctacaca

SEQ ID NO: 1274952 - DNA, 15 bp, Homo sapiens
catagtgtgctacac

SEQ ID NO: 1274953 - DNA, 15 bp, Homo sapiens
ccatagtgtgctaca

SEQ ID NO: 1274954 - DNA, 15 bp, Homo sapiens
tccatagtgtgctac

SEQ ID NO: 1274955 - DNA, 15 bp, Homo sapiens
ttccatagtgtgcta

SEQ ID NO: 1274956 - DNA, 15 bp, Homo sapiens
cttccatagtgtgct

SEQ ID NO: 1274957 - DNA, 15 bp, Homo sapiens
ccttccatagtgtgc

SEQ ID NO: 1274958 - DNA, 15 bp, Homo sapiens
cccttccatagtgtg

SEQ ID NO: 1274959 - DNA, 15 bp, Homo sapiens
tcccttccatagtgt

SEQ ID NO: 1274960 - DNA, 15 bp, Homo sapiens
ttcccttccatagtg

SEQ ID NO: 1274961 - DNA, 15 bp, Homo sapiens
tttcccttccatagt

SEQ ID NO: 1274962 - DNA, 15 bp, Homo sapiens
ttttcccttccatag

SEQ ID NO: 1274963 - DNA, 15 bp, Homo sapiens
attttcccttccata

SEQ ID NO: 1274964 - DNA, 15 bp, Homo sapiens
tattttcccttccat

SEQ ID NO: 1274965 - DNA, 15 bp, Homo sapiens
ctattttcccttcca

SEQ ID NO: 1274966 - DNA, 15 bp, Homo sapiens
tctattttcccttcc

SEQ ID NO: 1274967 - DNA, 15 bp, Homo sapiens
gtctattttcccttc

SEQ ID NO: 1274968 - DNA, 15 bp, Homo sapiens
tgtctattttccctt

SEQ ID NO: 1274969 - DNA, 15 bp, Homo sapiens
atgtctattttccct

SEQ ID NO: 1274970 - DNA, 15 bp, Homo sapiens
aatgtctattttccc

SEQ ID NO: 1274971 - DNA, 15 bp, Homo sapiens
taatgtctattttcc

SEQ ID NO: 1274972 - DNA, 15 bp, Homo sapiens
ttaatgtctattttc

SEQ ID NO: 1274973 - DNA, 15 bp, Homo sapiens
tttaatgtctatttt

SEQ ID NO: 1274974 - DNA, 15 bp, Homo sapiens
atttaatgtctattt

SEQ ID NO: 1274975 - DNA, 15 bp, Homo sapiens
tatttaatgtctatt

SEQ ID NO: 1274976 - DNA, 15 bp, Homo sapiens
ttatttaatgtctat

SEQ ID NO: 1274977 - DNA, 15 bp, Homo sapiens
tttatttaatgtcta

SEQ ID NO: 1274978 - DNA, 15 bp, Homo sapiens
ctttatttaatgtct

SEQ ID NO: 1274979 - DNA, 15 bp, Homo sapiens
tctttatttaatgtc

SEQ ID NO: 1274980 - DNA, 15 bp, Homo sapiens
gtctttatttaatgt

SEQ ID NO: 1274981 - DNA, 15 bp, Homo sapiens
agtctttatttaatg

SEQ ID NO: 1274982 - DNA, 15 bp, Homo sapiens
tagtctttatttaat

SEQ ID NO: 1274983 - DNA, 15 bp, Homo sapiens
atagtctttatttaa

SEQ ID NO: 1274984 - DNA, 15 bp, Homo sapiens
tatagtctttattta

SEQ ID NO: 1274985 - DNA, 15 bp, Homo sapiens
ttatagtctttattt

SEQ ID NO: 1274986 - DNA, 15 bp, Homo sapiens
tttatagtctttatt

SEQ ID NO: 1274987 - DNA, 15 bp, Homo sapiens
atttatagtctttat

SEQ ID NO: 1274988 - DNA, 15 bp, Homo sapiens
catttatagtcttta

SEQ ID NO: 1274989 - DNA, 15 bp, Homo sapiens
acatttatagtcttt

SEQ ID NO: 1274990 - DNA, 15 bp, Homo sapiens
cacatttatagtctt

SEQ ID NO: 1274991 - DNA, 15 bp, Homo sapiens
tcacatttatagtct

SEQ ID NO: 1274992 - DNA, 15 bp, Homo sapiens
atcacatttatagtc

SEQ ID NO: 1274993 - DNA, 15 bp, Homo sapiens
tatcacatttatagt

SEQ ID NO: 1274994 - DNA, 15 bp, Homo sapiens
ttatcacatttatag

SEQ ID NO: 1274995 - DNA, 15 bp, Homo sapiens
cttatcacatttata

SEQ ID NO: 1274996 - DNA, 15 bp, Homo sapiens
ccttatcacatttat

SEQ ID NO: 1274997 - DNA, 15 bp, Homo sapiens
accttatcacattta

SEQ ID NO: 1274998 - DNA, 15 bp, Homo sapiens
aaccttatcacattt

SEQ ID NO: 1274999 - DNA, 15 bp, Homo sapiens
aaaccttatcacatt

SEQ ID NO: 1275000 - DNA, 15 bp, Homo sapiens
gaaaccttatcacat

SEQ ID NO: 1275001 - DNA, 15 bp, Homo sapiens
ggaaaccttatcaca

SEQ ID NO: 1275002 - DNA, 15 bp, Homo sapiens
tggaaaccttatcac

SEQ ID NO: 1275003 - DNA, 15 bp, Homo sapiens
ttggaaaccttatca

SEQ ID NO: 1275004 - DNA, 15 bp, Homo sapiens
tttggaaaccttatc

SEQ ID NO: 1275005 - DNA, 15 bp, Homo sapiens
ttttggaaaccttat

SEQ ID NO: 1275006 - DNA, 15 bp, Homo sapiens
tttttggaaacctta

SEQ ID NO: 1275007 - DNA, 15 bp, Homo sapiens
ctttttggaaacctt

SEQ ID NO: 1275008 - DNA, 15 bp, Homo sapiens
tctttttggaaacct

SEQ ID NO: 1275009 - DNA, 15 bp, Homo sapiens
ttctttttggaaacc

SEQ ID NO: 1275010 - DNA, 15 bp, Homo sapiens
tttctttttggaaac

SEQ ID NO: 1275011 - DNA, 15 bp, Homo sapiens
atttctttttggaaa

SEQ ID NO: 1275012 - DNA, 15 bp, Homo sapiens
catttctttttggaa

SEQ ID NO: 1275013 - DNA, 15 bp, Homo sapiens
acatttctttttgga

SEQ ID NO: 1275014 - DNA, 15 bp, Homo sapiens
cacatttctttttgg

SEQ ID NO: 1275015 - DNA, 15 bp, Homo sapiens
ccacatttctttttg

SEQ ID NO: 1275016 - DNA, 15 bp, Homo sapiens
cccacatttcttttt

SEQ ID NO: 1275017 - DNA, 15 bp, Homo sapiens
gcccacatttctttt

SEQ ID NO: 1275018 - DNA, 15 bp, Homo sapiens
agcccacatttcttt

SEQ ID NO: 1275019 - DNA, 15 bp, Homo sapiens
cagcccacatttctt

SEQ ID NO: 1275020 - DNA, 15 bp, Homo sapiens
acagcccacatttct

SEQ ID NO: 1275021 - DNA, 15 bp, Homo sapiens
cacagcccacatttc

SEQ ID NO: 1275022 - DNA, 15 bp, Homo sapiens
gcacagcccacattt

SEQ ID NO: 1275023 - DNA, 15 bp, Homo sapiens
agcacagcccacatt

SEQ ID NO: 1275024 - DNA, 15 bp, Homo sapiens
cagcacagcccacat

SEQ ID NO: 1275025 - DNA, 15 bp, Homo sapiens
tcagcacagcccaca

SEQ ID NO: 1275026 - DNA, 15 bp, Homo sapiens
ctcagcacagcccac

SEQ ID NO: 1275027 - DNA, 15 bp, Homo sapiens
tctcagcacagccca

SEQ ID NO: 1275028 - DNA, 15 bp, Homo sapiens
ttctcagcacagccc

SEQ ID NO: 1275029 - DNA, 15 bp, Homo sapiens
gttctcagcacagcc

SEQ ID NO: 1275030 - DNA, 15 bp, Homo sapiens
ggttctcagcacagc

SEQ ID NO: 1275031 - DNA, 15 bp, Homo sapiens
gggttctcagcacag

SEQ ID NO: 1275032 - DNA, 15 bp, Homo sapiens
tgggttctcagcaca

SEQ ID NO: 1275033 - DNA, 15 bp, Homo sapiens
atgggttctcagcac

SEQ ID NO: 1275034 - DNA, 15 bp, Homo sapiens
tatgggttctcagca

SEQ ID NO: 1275035 - DNA, 15 bp, Homo sapiens
gtatgggttctcagc

SEQ ID NO: 1275036 - DNA, 15 bp, Homo sapiens
agtatgggttctcag

SEQ ID NO: 1275037 - DNA, 15 bp, Homo sapiens
tagtatgggttctca

SEQ ID NO: 1275038 - DNA, 15 bp, Homo sapiens
ctagtatgggttctc

SEQ ID NO: 1275039 - DNA, 15 bp, Homo sapiens
tctagtatgggttct

SEQ ID NO: 1275040 - DNA, 15 bp, Homo sapiens
ctctagtatgggttc

SEQ ID NO: 1275041 - DNA, 15 bp, Homo sapiens
cctctagtatgggtt

SEQ ID NO: 1275042 - DNA, 15 bp, Homo sapiens
gcctctagtatgggt

SEQ ID NO: 1275043 - DNA, 15 bp, Homo sapiens
tgcctctagtatggg

SEQ ID NO: 1275044 - DNA, 15 bp, Homo sapiens
gtgcctctagtatgg

SEQ ID NO: 1275045 - DNA, 15 bp, Homo sapiens
cgtgcctctagtatg

SEQ ID NO: 1275046 - DNA, 15 bp, Homo sapiens
ccgtgcctctagtat

SEQ ID NO: 1275047 - DNA, 15 bp, Homo sapiens
tccgtgcctctagta

SEQ ID NO: 1275048 - DNA, 15 bp, Homo sapiens
atccgtgcctctagt

SEQ ID NO: 1275049 - DNA, 15 bp, Homo sapiens
tatccgtgcctctag

SEQ ID NO: 1275050 - DNA, 15 bp, Homo sapiens
ttatccgtgcctcta

SEQ ID NO: 1275051 - DNA, 15 bp, Homo sapiens
attatccgtgcctct

SEQ ID NO: 1275052 - DNA, 15 bp, Homo sapiens
gattatccgtgcctc

SEQ ID NO: 1275053 - DNA, 15 bp, Homo sapiens
agattatccgtgcct

SEQ ID NO: 1275054 - DNA, 15 bp, Homo sapiens
tagattatccgtgcc

SEQ ID NO: 1275055 - DNA, 15 bp, Homo sapiens
ttagattatccgtgc

SEQ ID NO: 1275056 - DNA, 15 bp, Homo sapiens
cttagattatccgtg

SEQ ID NO: 1275057 - DNA, 15 bp, Homo sapiens
acttagattatccgt

SEQ ID NO: 1275058 - DNA, 15 bp, Homo sapiens
cacttagattatccg

SEQ ID NO: 1275059 - DNA, 15 bp, Homo sapiens
tcacttagattatcc

SEQ ID NO: 1275060 - DNA, 15 bp, Homo sapiens
ttcacttagattatc

SEQ ID NO: 1275061 - DNA, 15 bp, Homo sapiens
gttcacttagattat

SEQ ID NO: 1275062 - DNA, 15 bp, Homo sapiens
ggttcacttagatta

SEQ ID NO: 1275063 - DNA, 15 bp, Homo sapiens
gggttcacttagatt

SEQ ID NO: 1275064 - DNA, 15 bp, Homo sapiens
agggttcacttagat

SEQ ID NO: 1275065 - DNA, 15 bp, Homo sapiens
cagggttcacttaga

SEQ ID NO: 1275066 - DNA, 15 bp, Homo sapiens
ccagggttcacttag

SEQ ID NO: 1275067 - DNA, 15 bp, Homo sapiens
accagggttcactta

SEQ ID NO: 1275068 - DNA, 15 bp, Homo sapiens
aaccagggttcactt

SEQ ID NO: 1275069 - DNA, 15 bp, Homo sapiens
aaaccagggttcact

SEQ ID NO: 1275070 - DNA, 15 bp, Homo sapiens
caaaccagggttcac

SEQ ID NO: 1275071 - DNA, 15 bp, Homo sapiens
ccaaaccagggttca

SEQ ID NO: 1275072 - DNA, 15 bp, Homo sapiens
gccaaaccagggttc

SEQ ID NO: 1275073 - DNA, 15 bp, Homo sapiens
agccaaaccagggtt

SEQ ID NO: 1275074 - DNA, 15 bp, Homo sapiens
cagccaaaccagggt

SEQ ID NO: 1275075 - DNA, 15 bp, Homo sapiens
gcagccaaaccaggg

SEQ ID NO: 1275076 - DNA, 15 bp, Homo sapiens
agcagccaaaccagg

SEQ ID NO: 1275077 - DNA, 15 bp, Homo sapiens
gagcagccaaaccag

SEQ ID NO: 1275078 - DNA, 15 bp, Homo sapiens
tgagcagccaaacca

SEQ ID NO: 1275079 - DNA, 15 bp, Homo sapiens
gtgagcagccaaacc

SEQ ID NO: 1275080 - DNA, 15 bp, Homo sapiens
ggtgagcagccaaac

SEQ ID NO: 1275081 - DNA, 15 bp, Homo sapiens
tggtgagcagccaaa

SEQ ID NO: 1275082 - DNA, 15 bp, Homo sapiens
gtggtgagcagccaa

SEQ ID NO: 1275083 - DNA, 15 bp, Homo sapiens
agtggtgagcagcca

SEQ ID NO: 1275084 - DNA, 15 bp, Homo sapiens
gagtggtgagcagcc

SEQ ID NO: 1275085 - DNA, 15 bp, Homo sapiens
cgagtggtgagcagc

SEQ ID NO: 1275086 - DNA, 15 bp, Homo sapiens
tcgagtggtgagcag

SEQ ID NO: 1275087 - DNA, 15 bp, Homo sapiens
ttcgagtggtgagca

SEQ ID NO: 1275088 - DNA, 15 bp, Homo sapiens
tttcgagtggtgagc

SEQ ID NO: 1275089 - DNA, 15 bp, Homo sapiens
ctttcgagtggtgag

SEQ ID NO: 1275090 - DNA, 15 bp, Homo sapiens
gctttcgagtggtga

SEQ ID NO: 1275091 - DNA, 15 bp, Homo sapiens
ggctttcgagtggtg

SEQ ID NO: 1275092 - DNA, 15 bp, Homo sapiens
tggctttcgagtggt

SEQ ID NO: 1275093 - DNA, 15 bp, Homo sapiens
ctggctttcgagtgg

SEQ ID NO: 1275094 - DNA, 15 bp, Homo sapiens
tctggctttcgagtg

SEQ ID NO: 1275095 - DNA, 15 bp, Homo sapiens
gtctggctttcgagt

SEQ ID NO: 1275096 - DNA, 15 bp, Homo sapiens
tgtctggctttcgag

SEQ ID NO: 1275097 - DNA, 15 bp, Homo sapiens
atgtctggctttcga

SEQ ID NO: 1275098 - DNA, 15 bp, Homo sapiens
catgtctggctttcg

SEQ ID NO: 1275099 - DNA, 15 bp, Homo sapiens
tcatgtctggctttc

SEQ ID NO: 1275100 - DNA, 15 bp, Homo sapiens
ctcatgtctggcttt

SEQ ID NO: 1275101 - DNA, 15 bp, Homo sapiens
tctcatgtctggctt

SEQ ID NO: 1275102 - DNA, 15 bp, Homo sapiens
ctctcatgtctggct

SEQ ID NO: 1275103 - DNA, 15 bp, Homo sapiens
tctctcatgtctggc

SEQ ID NO: 1275104 - DNA, 15 bp, Homo sapiens
gtctctcatgtctgg

SEQ ID NO: 1275105 - DNA, 15 bp, Homo sapiens
tgtctctcatgtctg

SEQ ID NO: 1275106 - DNA, 15 bp, Homo sapiens
ttgtctctcatgtct

SEQ ID NO: 1275107 - DNA, 15 bp, Homo sapiens
cttgtctctcatgtc

SEQ ID NO: 1275108 - DNA, 15 bp, Homo sapiens
ccttgtctctcatgt

SEQ ID NO: 1275109 - DNA, 15 bp, Homo sapiens
accttgtctctcatg

SEQ ID NO: 1275110 - DNA, 15 bp, Homo sapiens
aaccttgtctctcat

SEQ ID NO: 1275111 - DNA, 15 bp, Homo sapiens
caaccttgtctctca

SEQ ID NO: 1275112 - DNA, 15 bp, Homo sapiens
ccaaccttgtctctc

SEQ ID NO: 1275113 - DNA, 15 bp, Homo sapiens
accaaccttgtctct

SEQ ID NO: 1275114 - DNA, 15 bp, Homo sapiens
caccaaccttgtctc

SEQ ID NO: 1275115 - DNA, 15 bp, Homo sapiens
ccaccaaccttgtct

SEQ ID NO: 1275116 - DNA, 15 bp, Homo sapiens
cccaccaaccttgtc

SEQ ID NO: 1275117 - DNA, 15 bp, Homo sapiens
tcccaccaaccttgt

SEQ ID NO: 1275118 - DNA, 15 bp, Homo sapiens
ctcccaccaaccttg

SEQ ID NO: 1275119 - DNA, 15 bp, Homo sapiens
cctcccaccaacctt

SEQ ID NO: 1275120 - DNA, 15 bp, Homo sapiens
tcctcccaccaacct

SEQ ID NO: 1275121 - DNA, 15 bp, Homo sapiens
ttcctcccaccaacc

SEQ ID NO: 1275122 - DNA, 15 bp, Homo sapiens
tttcctcccaccaac

SEQ ID NO: 1275123 - DNA, 15 bp, Homo sapiens
ttttcctcccaccaa

SEQ ID NO: 1275124 - DNA, 15 bp, Homo sapiens
cttttcctcccacca

SEQ ID NO: 1275125 - DNA, 15 bp, Homo sapiens
gcttttcctcccacc

SEQ ID NO: 1275126 - DNA, 15 bp, Homo sapiens
ggcttttcctcccac

SEQ ID NO: 1275127 - DNA, 15 bp, Homo sapiens
tggcttttcctccca

SEQ ID NO: 1275128 - DNA, 15 bp, Homo sapiens
ctggcttttcctccc

SEQ ID NO: 1275129 - DNA, 15 bp, Homo sapiens
actggcttttcctcc

SEQ ID NO: 1275130 - DNA, 15 bp, Homo sapiens
aactggcttttcctc

SEQ ID NO: 1275131 - DNA, 15 bp, Homo sapiens
gaactggcttttcct

SEQ ID NO: 1275132 - DNA, 15 bp, Homo sapiens
tgaactggcttttcc

SEQ ID NO: 1275133 - DNA, 15 bp, Homo sapiens
atgaactggcttttc

SEQ ID NO: 1275134 - DNA, 15 bp, Homo sapiens
gatgaactggctttt

SEQ ID NO: 1275135 - DNA, 15 bp, Homo sapiens
tgatgaactggcttt

SEQ ID NO: 1275136 - DNA, 15 bp, Homo sapiens
ctgatgaactggctt

SEQ ID NO: 1275137 - DNA, 15 bp, Homo sapiens
tctgatgaactggct

SEQ ID NO: 1275138 - DNA, 15 bp, Homo sapiens
ttctgatgaactggc

SEQ ID NO: 1275139 - DNA, 15 bp, Homo sapiens
tttctgatgaactgg

SEQ ID NO: 1275140 - DNA, 15 bp, Homo sapiens
ctttctgatgaactg

SEQ ID NO: 1275141 - DNA, 15 bp, Homo sapiens
gctttctgatgaact

SEQ ID NO: 1275142 - DNA, 15 bp, Homo sapiens
ggctttctgatgaac

SEQ ID NO: 1275143 - DNA, 15 bp, Homo sapiens
tggctttctgatgaa

SEQ ID NO: 1275144 - DNA, 15 bp, Homo sapiens
ctggctttctgatga

SEQ ID NO: 1275145 - DNA, 15 bp, Homo sapiens
actggctttctgatg

SEQ ID NO: 1275146 - DNA, 15 bp, Homo sapiens
tactggctttctgat

SEQ ID NO: 1275147 - DNA, 15 bp, Homo sapiens
ttactggctttctga

SEQ ID NO: 1275148 - DNA, 15 bp, Homo sapiens
tttactggctttctg

SEQ ID NO: 1275149 - DNA, 15 bp, Homo sapiens
gtttactggctttct

SEQ ID NO: 1275150 - DNA, 15 bp, Homo sapiens
ggtttactggctttc

SEQ ID NO: 1275151 - DNA, 15 bp, Homo sapiens
tggtttactggcttt

SEQ ID NO: 1275152 - DNA, 15 bp, Homo sapiens
ttggtttactggctt

SEQ ID NO: 1275153 - DNA, 15 bp, Homo sapiens
cttggtttactggct

SEQ ID NO: 1275154 - DNA, 15 bp, Homo sapiens
tcttggtttactggc

SEQ ID NO: 1275155 - DNA, 15 bp, Homo sapiens
ttcttggtttactgg

SEQ ID NO: 1275156 - DNA, 15 bp, Homo sapiens
cttcttggtttactg

SEQ ID NO: 1275157 - DNA, 15 bp, Homo sapiens
tcttcttggtttact

SEQ ID NO: 1275158 - DNA, 15 bp, Homo sapiens
atcttcttggtttac

SEQ ID NO: 1275159 - DNA, 15 bp, Homo sapiens
catcttcttggttta

SEQ ID NO: 1275160 - DNA, 15 bp, Homo sapiens
ccatcttcttggttt

SEQ ID NO: 1275161 - DNA, 15 bp, Homo sapiens
accatcttcttggtt

SEQ ID NO: 1275162 - DNA, 15 bp, Homo sapiens
caccatcttcttggt

SEQ ID NO: 1275163 - DNA, 15 bp, Homo sapiens
tcaccatcttcttgg

SEQ ID NO: 1275164 - DNA, 15 bp, Homo sapiens
ctcaccatcttcttg

SEQ ID NO: 1275165 - DNA, 15 bp, Homo sapiens
gctcaccatcttctt

SEQ ID NO: 1275166 - DNA, 15 bp, Homo sapiens
agctcaccatcttct

SEQ ID NO: 1275167 - DNA, 15 bp, Homo sapiens
tagctcaccatcttc

SEQ ID NO: 1275168 - DNA, 15 bp, Homo sapiens
ctagctcaccatctt

SEQ ID NO: 1275169 - DNA, 15 bp, Homo sapiens
actagctcaccatct

SEQ ID NO: 1275170 - DNA, 15 bp, Homo sapiens
tactagctcaccatc

SEQ ID NO: 1275171 - DNA, 15 bp, Homo sapiens
atactagctcaccat

SEQ ID NO: 1275172 - DNA, 15 bp, Homo sapiens
aatactagctcacca

SEQ ID NO: 1275173 - DNA, 15 bp, Homo sapiens
aaatactagctcacc

SEQ ID NO: 1275174 - DNA, 15 bp, Homo sapiens
aaaatactagctcac

SEQ ID NO: 1275175 - DNA, 15 bp, Homo sapiens
taaaatactagctca

SEQ ID NO: 1275176 - DNA, 15 bp, Homo sapiens
ttaaaatactagctc

SEQ ID NO: 1275177 - DNA, 15 bp, Homo sapiens
tttaaaatactagct

SEQ ID NO: 1275178 - DNA, 15 bp, Homo sapiens
ctttaaaatactagc

SEQ ID NO: 1275179 - DNA, 15 bp, Homo sapiens
actttaaaatactag

SEQ ID NO: 1275180 - DNA, 15 bp, Homo sapiens
tactttaaaatacta

SEQ ID NO: 1275181 - DNA, 15 bp, Homo sapiens
gtactttaaaatact

SEQ ID NO: 1275182 - DNA, 15 bp, Homo sapiens
ggtactttaaaatac

SEQ ID NO: 1275183 - DNA, 15 bp, Homo sapiens
tggtactttaaaata

SEQ ID NO: 1275184 - DNA, 15 bp, Homo sapiens
atggtactttaaaat

SEQ ID NO: 1275185 - DNA, 15 bp, Homo sapiens
gatggtactttaaaa

SEQ ID NO: 1275186 - DNA, 15 bp, Homo sapiens
agatggtactttaaa

SEQ ID NO: 1275187 - DNA, 15 bp, Homo sapiens
aagatggtactttaa

SEQ ID NO: 1275188 - DNA, 15 bp, Homo sapiens
caagatggtacttta

SEQ ID NO: 1275189 - DNA, 15 bp, Homo sapiens
tcaagatggtacttt

SEQ ID NO: 1275190 - DNA, 15 bp, Homo sapiens
ttcaagatggtactt

SEQ ID NO: 1275191 - DNA, 15 bp, Homo sapiens
attcaagatggtact

SEQ ID NO: 1275192 - DNA, 15 bp, Homo sapiens
aattcaagatggtac

SEQ ID NO: 1275193 - DNA, 15 bp, Homo sapiens
aaattcaagatggta

SEQ ID NO: 1275194 - DNA, 15 bp, Homo sapiens
aaaattcaagatggt

SEQ ID NO: 1275195 - DNA, 15 bp, Homo sapiens
taaaattcaagatgg

SEQ ID NO: 1275196 - DNA, 15 bp, Homo sapiens
ttaaaattcaagatg

SEQ ID NO: 1275197 - DNA, 15 bp, Homo sapiens
tttaaaattcaagat

SEQ ID NO: 1275198 - DNA, 15 bp, Homo sapiens
ttttaaaattcaaga

SEQ ID NO: 1275199 - DNA, 15 bp, Homo sapiens
attttaaaattcaag

SEQ ID NO: 1275200 - DNA, 15 bp, Homo sapiens
aattttaaaattcaa

SEQ ID NO: 1275201 - DNA, 15 bp, Homo sapiens
aaattttaaaattca

SEQ ID NO: 1275202 - DNA, 15 bp, Homo sapiens
taaattttaaaattc

SEQ ID NO: 1275203 - DNA, 15 bp, Homo sapiens
ataaattttaaaatt

SEQ ID NO: 1275204 - DNA, 15 bp, Homo sapiens
gataaattttaaaat

SEQ ID NO: 1275205 - DNA, 15 bp, Homo sapiens
tgataaattttaaaa

SEQ ID NO: 1275206 - DNA, 15 bp, Homo sapiens
gtgataaattttaaa

SEQ ID NO: 1275207 - DNA, 15 bp, Homo sapiens
tgtgataaattttaa

SEQ ID NO: 1275208 - DNA, 15 bp, Homo sapiens
ctgtgataaatttta

SEQ ID NO: 1275209 - DNA, 15 bp, Homo sapiens
actgtgataaatttt

SEQ ID NO: 1275210 - DNA, 15 bp, Homo sapiens
tactgtgataaattt

SEQ ID NO: 1275211 - DNA, 15 bp, Homo sapiens
ctactgtgataaatt

SEQ ID NO: 1275212 - DNA, 15 bp, Homo sapiens
actactgtgataaat

SEQ ID NO: 1275213 - DNA, 15 bp, Homo sapiens
aactactgtgataaa

SEQ ID NO: 1275214 - DNA, 15 bp, Homo sapiens
aaactactgtgataa

SEQ ID NO: 1275215 - DNA, 15 bp, Homo sapiens
aaaactactgtgata

SEQ ID NO: 1275216 - DNA, 15 bp, Homo sapiens
aaaaactactgtgat

SEQ ID NO: 1275217 - DNA, 15 bp, Homo sapiens
taaaaactactgtga

SEQ ID NO: 1275218 - DNA, 15 bp, Homo sapiens
ttaaaaactactgtg

SEQ ID NO: 1275219 - DNA, 15 bp, Homo sapiens
tttaaaaactactgt

SEQ ID NO: 1275220 - DNA, 15 bp, Homo sapiens
ctttaaaaactactg

SEQ ID NO: 1275221 - DNA, 15 bp, Homo sapiens
tctttaaaaactact

SEQ ID NO: 1275222 - DNA, 15 bp, Homo sapiens
ctctttaaaaactac

SEQ ID NO: 1275223 - DNA, 15 bp, Homo sapiens
tctctttaaaaacta

SEQ ID NO: 1275224 - DNA, 15 bp, Homo sapiens
ttctctttaaaaact

SEQ ID NO: 1275225 - DNA, 15 bp, Homo sapiens
tttctctttaaaaac

SEQ ID NO: 1275226 - DNA, 15 bp, Homo sapiens
caagtttctctttaa

SEQ ID NO: 1275227 - DNA, 15 bp, Homo sapiens
ccaagtttctcttta

SEQ ID NO: 1275228 - DNA, 15 bp, Homo sapiens
accaagtttctcttt

SEQ ID NO: 1275229 - DNA, 15 bp, Homo sapiens
taccaagtttctctt

SEQ ID NO: 1275230 - DNA, 15 bp, Homo sapiens
ataccaagtttctct

SEQ ID NO: 1275231 - DNA, 15 bp, Homo sapiens
cataccaagtttctc

SEQ ID NO: 1275232 - DNA, 15 bp, Homo sapiens
ccataccaagtttct

SEQ ID NO: 1275233 - DNA, 15 bp, Homo sapiens
cccataccaagtttc

SEQ ID NO: 1275234 - DNA, 15 bp, Homo sapiens
tcccataccaagttt

SEQ ID NO: 1275235 - DNA, 15 bp, Homo sapiens
ctcccataccaagtt

SEQ ID NO: 1275236 - DNA, 15 bp, Homo sapiens
tctcccataccaagt

SEQ ID NO: 1275237 - DNA, 15 bp, Homo sapiens
atctcccataccaag
